United States Patent Application Publication US 2007/0150978 A1 - sequence listing, part 2

SEQ ID NO: 6480 - DNA, 389 bp, Oryza sativa
  unsure (1)..(389): unsure at all n locations
agctcggacgcagagaagctcgcctcgtctgtcgcatgtcctcanaacgggaaaagcaaaacccccctttccactgcctcgtcctccctttttccttcccgagctcgaccgctctccctctgtcctcgtctctatgcacgtggaggcagagagccgctgacgccggtgcgccagctcgcggcccccactatgaccgcgccggcccgcgctccgcgttcaaattcgaccgctcgatccaccgaccccgccgcccaacgcatcctcgccgtcgccattttcgggtcgcctacgaaaccgtcgccccaccgccagccgagcgccagctcgtgtgcgatctcccccttgcctataaatcctacccaccgagccccaaatcctccctcaacctc

SEQ ID NO: 6481 - DNA, 385 bp, Oryza sativa
  unsure (1)..(385): unsure at all n locations
gatgtgttgtggtattttattttttttnttatattatgcagctgaactgatcctgatacaccatatatcncctattccctcgccgcgggcagttggtctttgagtgcagcagaacaataaaaaactgcttaaattacctcacgccaaaaaatcccgggggaaccctggaaagtccaccagaagcacctagactgagggtacggcgcagatgatacacctaccactaatggccaccgagggagtaagaaccccgggaacgccttagtgggtctaaatgcgggaaaaagaaatcagggggagacacaacggcaaaccccgggcaacaaggggacaccaactggcgaataccacaactgggaggaaaacggaagaaacataggggggg

SEQ ID NO: 6482 - DNA, 402 bp, Oryza sativa
  unsure (1)..(402): unsure at all n locations
agcttcatgtgctggnactgggctntaacaatttttctgggccaattcctgatgagatatcaaatatgtcgagcttggaagtactggatttagctcacaatgatctcagtgggagcataccatcatctctaacgaagctgaactttctgtccaagtttgatgtttcgtacaacaatttgtctggagatgtcccggcaggaggccaattctccacgttcacagaagaggagttcgcgggcaatcctgcgctgtgtcgtagtcagagccagtcatgctacaagcgggcggtcacgactgaaatgagttctgagacacgttttacttttgggctttttttgaccgtggaagctggatttgcctttggactgttaaccgtctggaacgtactgttctttgcaagtt

SEQ ID NO: 6483 - DNA, 377 bp, Oryza sativa
  unsure (1)..(377): unsure at all n locations
caacttcaccaagaacacaactgctggcgatttgacgactcccatcggccgattctaagactctgaagccgatactgactctatgccgatgatgaatttgggcttaccaaattttggcgttaactgatagattatacttaaacaaatatgcatgcaagcgttgctacttcttatttctggatatattgacggtcgaaattggtctataacgaccgtcaacagtcaactatcgatgttctagatcggcaataagaaaaggattaattggatccatgccattgtaaatatgctgattcagagaaangncnctacaattcnnttattcntaaccgtgccattgaaattttcaaaattatgaccgtgccactatcatcaca

SEQ ID NO: 6484 - DNA, 402 bp, Oryza sativa
agccaatagttggtggcgcagggccatctggactcgctgctgctgcatgcccgaaggagaagggaatcgacagccttgttcttgagcgctcgagctgcttaactcctctatggcagctcaagatgtatgaccgcctcagccttcatctacctcgtcagttctgtgaacttcctctctttcctttccctgccagctaccctgattaccccacaaagcagcagtttgtggcttacctggagagctatgctgcaaagtttggtatcaatcctatgtacaaccatacagtggtgtgcgcagaatttgacgagcgactgatgctatggcgggtgaggactacacaggccactggcatgatggaagatgatgttgagtatgtgtcgcagtggctggttgttgcaaccg

SEQ ID NO: 6485 - DNA, 400 bp, Oryza sativa
agctttgagcagaatgcattggacactgctagtgaagaaaaagcatttttatcagaacaattgctcagaggagacaaagtttggttgtaagtgcttagcttttacactttgattcttttgacgtgcctatttaaattcttattattctggtagtcatgccgcatgagttgctggggggctcttcataattctagtgattctaccatgccataaaatgtatatgcatacgtgatatactgtaactactgtactatacactttattctggatcaatggaagaagcctaataatttttcaaacatataatctgctctattgcttgtctgcatattgtttctgatatgcatatgctaatatgcaacacttcaatatttttttcttgtatatgcagactaaatgc

SEQ ID NO: 6486 - DNA, 396 bp, Oryza sativa
tagcttgagccaactactgtcctttttggcttttgcagcgtggccgatcgcgcggaaaggggagcggtttgtactggtcggacgataaatcgacagggcacccccgcccgcccgactgatgagatttcacacggaaagcgttgcgcgcgagcgctagagctgtaccccacccaacacgtattgggtgcgttcggatcataacggtgaacgttcatgggcaaacctggaaacacagtattaggcgcttcccaatgcgccgactacaagatgtgtatagtagtaaattagctgccacctataataaaaaatgatatgacaactgaataaatgaggaaagagaagaaaactatgtctcaagacatggtttctatccgatatcaaaacatcatgtgagag

SEQ ID NO: 6487 - DNA, 317 bp, Oryza sativa
  unsure (1)..(317): unsure at all n locations
tgcagtctcgcagatgtgttgttgtactctgtgtgtgtgcgcgtgtgccantgtgtcatcatcatcactagcttgcagtgcagatatgtgtgagtgaacttctacggctagttgttactactactacatccagatgtaatacttggtgtttacatgatagaacaatgcatatgcaatatgtggtgaaaaatcacctgccctgctcatgtcctacaacgaatctacaaaaactgtagcttgtgtgatctgttggttgggagtgtgttatggagagattggcagtacaacgagagatgggcaatcttgctgctcatcta

SEQ ID NO: 6488 - DNA, 381 bp, Oryza sativa
gcttgcattaaacacctaagttttttgttttgctgagtacgaaagtactcacccttgctctataaatatatatatagttcctccgccctgaagagaaaataaagtgaagtgaagattacggtttcgtcctgtttcccagccgtcgcctgtggtgttgggtgttagtccgttggttccgctgctgctgctgttgatggagtttcctcgtccgcgtcgtcagatgtattctcgggctgtctgagctgcaacctaagttaaggtaaataagtcctctatttatattaaggattgctatgattcatatttgtcaccgtgggtaccaacactatgtcctgggactggtaccgagatcgcgtgttcttacgaagcggttcacgccgt

SEQ ID NO: 6489 - DNA, 418 bp, Oryza sativa
  unsure (1)..(418): unsure at all n locations
cttactatttatctcatcaatcactctctattcatatttattcctattatataccctacctactctctcaccttcactcatcacatatttatcgagggcactaaagtcttttcctctcaacacaagggtggatcaagatatatgccaaggtctgggccattccatcatagctttggcccataccactgactatntatctcatcaatcacctcaatttaaaatttattcccatgttatgcccctacctaccctcccacctgcacccatcatatatgtattganggcactaaagtactttcctccatcacaatattggacccatatatgggccaatgtatggttgcccattaaagccttggaccaattcacttactatttatctcatcaatcacatgctattcatatttattcctatttt

SEQ ID NO: 6490 - DNA, 394 bp, Oryza sativa
agcttcacacacacttcgctggctgctgctgttgtgtttggctttgcactgatcactgtattcagaggccattaatgcaatccactcgtatccatgggtggaatccatggttacaatccattttggaccataaagaattgtaaccacatccaaaccaacccacaccgtttttcaatgaatccaaaccgctccagtccattctgagtattgccccatttgaatccaaccaaagccagtccatttagaaatccaacccattccacccatttacatccagtccattagcaggcttatttagatggattagtggaatagatggatcagtcttgcatttcacccatactatgtggggcaaaaagtactgagctactggtaacagtgcacctaactccca

SEQ ID NO: 6491 - DNA, 394 bp, Oryza sativa
agcttgttggctattccgattcatattatgccggttgcaaagtggatagaaagagcacatccggtagttgccaaatgcttggtagatcccttgtgtcatggtcatccaagaaacaaaactccgtagccctctctaccgccgaggcggaatatgtttcggcgggtagttgttgtgcccaattgctttggatgaaacaaaccttgttggactatggcatatccttcaccaaaaccccactcctatgtgacaatgatagtgccataaaaatagccaataacccggtccaacattctagaaccaagcatattgacattcgccatcacttcctaagagaccatgttgccaagtgtgacatagtcattagccacataagaaccgaggaccaactagccga

SEQ ID NO: 6492 - DNA, 276 bp, Oryza sativa
  unsure (1)..(276): unsure at all n locations
agattngcttattacaggaataacacaatgacagcacattatgatcatgacctgtaccagataatgtgtagaaggaaaccatttcttatgagtcgtgatcagagctattgaaacatcactttaagatagagaggtccaagcatcaaaaatgtccagctgcatgtgtgtttaattgcatgctgcgtatagcttttctggttcgaaagataatcatgtatacgctttcagtacataagtgtattttctgtgtacattactacattatacatactcggc

SEQ ID NO: 6493 - DNA, 333 bp, Oryza sativa
aaaaaagcgaccggtggaggaaaaaagagaaaaaagagagcccctccggcgcgcggaaaagaagaagaccgctgatccaacctaatctaaggggggacaatacaaggcacctataaaaaggtacttaaaaaccaggccagggattagcctacagaccggtcgaaaggctagaacgggaataccgcctatagcatcatattagatcggcataagaagaccagttggccctcataaatctgtcgtacgggatcatggagcagatccgcagggagaaaggccccggaggcccggaagattatgaagatcccgccatcgactacagggaacaaacac

SEQ ID NO: 6494 - DNA, 382 bp, Oryza sativa
ctcgtagtttcttttgaccgtttgcatgggagatattttttgttagatcatgatacaaaaaaattgtgtcctcgctgattttgcaacgattaattccaaataatttgaattgccggaccggtgccagctgtcatcatcactgaactcagtaagaagtatggcaacgccggaaggacatatcaacatatgtggcgttatcctcaacgctgatgagtggctaccatgactattatgtaacaccactacattttgacaaagattacagtcttgcgtcaatgttggactacggatactatatggcaaatattctattaaagtgtggactaatgggtattatttataccttgatacattgcgatctatagatatataacttgtttta

SEQ ID NO: 6495 - DNA, 388 bp, Oryza sativa
  unsure (1)..(388): unsure at all n locations
agcttgcgcttatttacgtacgtgcaaggtgaaatatattcattatagaattcatacagtaaactgaaactgttcagagtttccgcattaataagaacaaaaaaatcacatccatcgagttgatttgagtggtatcctattaatttgaacggtgtatactgatgtccccaattagtatgttgagttccattcaacttttatatacatatttctatccaaagtccaagatatgattaaccaagaaaattagtgcactccgagttggtctcacaaaatcttgaagaaacctgaaaacatatatatacgttatattacctgngaatgcatggttagaaatctactcccnttgtcccacaattaatatagctaattctaacattcaaatttt

SEQ ID NO: 6496 - DNA, 289 bp, Oryza sativa
gggatggtcgttttgatgagacggcgacatgggccggggcggatcctgaggatgcggcgactgaaaaaaaaaagttcacggtggatttctttgtgagccctgtggcgccctctgttgctgatgcgggcgagcagacaggaacgccggtgcaggcaggcgtgtctccggtgtcgacgggcgttctgtcctcaccaccgcgagcgccaaatggggagttttgcacaccaccaacttcagtgacgccagaaacagatggaggccctgttaggtatcgccgagtgcaagacat

SEQ ID NO: 6497 - DNA, 369 bp, Oryza sativa
  unsure (1)..(369): unsure at all n locations
acccttgacacaaaagatactngttctttatgttaaatatgtttatttattcctcttgnntattttctttgagacaagtactgaacccctgtcgctttttctgttntccagaggtataacataataaatggagtttgtgaagttgatggtggaaatgacgaaccacccagtgaaaatgctgctgagggtaaagatgcagatggtaccaaatcaagtttaattttatctgtaggtgaatgtttcacattctgatttatgattaaaccatattttntcagctaaaagaagtccagatttttggctactgctattaaaacacatgaagtgctttctgaagacggatactatggcgtacttttgtgttgtttt

SEQ ID NO: 6498 - DNA, 302 bp, Oryza sativa
tgatccacctcgataaataactatactacaaaataagttttatgaagtgcccaacttttatggtataaccttatcatcataacttcttttcacggattttttaaaagcattggcacaaagataaccttttgaatatatctaccacgtcatcttaatatctaccatgtattctttcaaaatattatttgaacaattgtccaaataaatggcatgccccatgaattataacttatctaaccttcattaaggagttgtttgcaaaggccaaataatacttacctcgacgacttttaatatgtata

SEQ ID NO: 6499 - DNA, 395 bp, Oryza sativa
  unsure (1)..(395): unsure at all n locations
gagtgtgtgcatgaaactgttggttgatgatcatctgccaatgtgttggcgacatgcatggcgtgatgttctgcgctttcatatattcagacattcagtcggcaagttcccctgatcactactgaatgattaccacaagttcctttagcgaaatcattatgaccaggcttgtcacattctgaacagtagcagttccacaaaagagaacattgttgctagtatatgagcctggctgatcacggcagtgtattcttcctttctgatgcgatggagaaagatagaaggggaaaggactagactatgataacaagcccaaagccctcgacagagagtaatttantgcctcttctaaacagctgcagtcccgctctttctaagtgcacacctctacactt

SEQ ID NO: 6500 - DNA, 353 bp, Oryza sativa
  unsure (1)..(353): unsure at all n locations
gcttgtaatgatgttgcttcacactttatatattgagttggtgatntagatatttgatcctacaccacatgcctctcccttgccacatcttctcatataaaaagatcagctcgaaaatatgtgagcccatcaacctatctttggacccttactttctcaagtgcatatgtagatttctattccaaatagatgaaatgggctacttgttggaaacgttttaacacaaaaaaaagacatggcagatttctgtttcaaaaaatcagagctacaggtgaggttgccagtgcaaatttcgccaacaaattcaacccctgttatgagaaaagaacatgacgaattagagatggtatgat

SEQ ID NO: 6501 - DNA, 274 bp, Oryza sativa
attctggagagccttttcagcagctagtacttgggcttcatctcttggttttccaatgccgatcccgattttttcatttcttaatagaacctggaacaatatatgtatatgtaacatgaggatcacatgattaagtagagatatcacagcattgctatacaaatctggtaatgcacccgcaagccaacagcttcaggcaaaagcactggactgatgctgaaattgagagttgagacgccaaaagaaatgtgtctcaacattctaaatatatatt

SEQ ID NO: 6502 - DNA, 486 bp, Oryza sativa
  unsure (1)..(486): unsure at all n locations
ctaagcttcgagccttctgtagcaatcggattagagaagtagaagaagtgcattggcttggtaagacttgcacaagctattttccgaagtgaaatgagccgtcaaattggaatttggaaggtacacacatgacacaatgcatagctttaagtgtatttgtcttttgtgaaacatggagagcaaagcttcagcaaggctgtctacaagatgtacaactgagtcttcatgaaatactaataaagatcagtctatagtacagttaccgtgccaaaagcggaagagagtcgactcgcatgctaatggatggatcctaatgcttagtacacaccttcaatcccaccatcatattacaacttctctactatctcaattcgnctattagtctaatcacgcaaaataacccgccttacgaagcaacatcttacactgagccactaatacaacacaatcctccaccggaatagagtagcataacgtctagcacct

SEQ ID NO: 6503 - DNA, 399 bp, Oryza sativa
  unsure (1)..(399): unsure at all n locations
acatatctaaaacaagctctcatatagatgctcttatttaatcttaccttcttattcagtatttgttatgtagggacaagagcattggttaactctctaatcaactctgtatgcactggtgtntcatgtaggtttgctatggattatccaaacatccatctctgtgaaattcttgcatttccaaatactatgttttgtacatgcattcctatcctatccctatgtgtgacaattctgagtttgtcaaccctgcaatccaacaccgcgagtatgcattgcaaacaaaattattacctcagcatcagaatgtgacatataaacacccaacccatgaagaacacattcctaaaaatcatgtgatacatatgacacgttgacaggatgaatgactcaatgcat

SEQ ID NO: 6504 - DNA, 281 bp, Oryza sativa
ctgcacttgaactcgacctgttgtttatgtcgagttgcaagttataaatctacaagtttcattcatggaaaggcttggaaatgtgattaatcaatattgatctgtgatgtttctcattcttataagtggttaaatttacttagacaaaccaaaactttactttaaatgaggatgaagcgcacatttattctctcctcgcacagatatttagcatcatctttgggatgtattcagattaatgtgtattgaacaagatatttgaacttattactgatgttgta

SEQ ID NO: 6505 - DNA, 93 bp, Oryza sativa
  unsure (1)..(93): unsure at all n locations
agcttccanatccattcttccctagtggtggcgaaggcatggatctaggcaagccagcaacatggaggcggagtgtcaggggctcggaatttg

SEQ ID NO: 6506 - DNA, 465 bp, Oryza sativa
  unsure (1)..(465): unsure at all n locations
gctagctggagatgaagctgcagagattcgtttcagtatatcattgtatataaactggattgtatcatgcaatatatgattgatctgtagtatcatggtatagatcaatctatatatggagatttgatcgccttgcttaatttggcatctggagtgatatggtactctaccaacaaaatcattggctgatctgttcttggggtgtgttgatattgtgctaattaactaattaagcccataagaacatatacaattactggtgtattcctggatgagacgcaattgaccgatcgaccatcactctgtgaattagtcatattataggtatctaatctaccccagctatagcattcagtcaacaatcttaggtcaatatatcaatatctattgcatgatgaacactcaactcgangtttcagttaataattatcatatcgatcgctgacctactcgatcatgcatatt

SEQ ID NO: 6507 - DNA, 181 bp, Oryza sativa
cttcatcctccaatgttctttttgtcatactacatttgcacctatgttttgcacactttttttgtctccacaatttagttgtaaggtgatgagagagaaaatgtgtgtggggaagaaagaatatatagaaatttagttcatttgctcaacaagggtttataaaatagttgagaaggaaaac

SEQ ID NO: 6508 - DNA, 103 bp, Oryza sativa
  unsure (1)..(103): unsure at all n locations
agctnctccatatccatgtcttccctattgtgttgcgaaagccatggatctatagcaagccagcgaacaatgagtgctgagtgtcacgcggctcggagttcgg

SEQ ID NO: 6509 - DNA, 437 bp, Oryza sativa
  unsure (1)..(437): unsure at all n locations
ctggagatgaagctgcagagaatcgttncagtatatcattgtatattaactggattggatcatgcaatatatgaatgatctgtagtatcatggtatagatcaatctatatatggagatttgatcgccttgcttaatttggcatctggagagatatggtactctaccaacaaaatcattggctgatctgctcttggggtgtgttgatattgtgctaattaactaattaagcccataagaacatatacaattactggtgtattcctggatgagacgcaattgaccgatcgaccatcactctgtgaatagtcatatatagggatctaatctaccccactatagcatcagtaacaatcttatgtcatatataatatctattgatgataacactcactcgagtttcagtaattaattatattatcgatcgctgacctacctc

SEQ ID NO: 6510 - DNA, 368 bp, Oryza sativa
cctccccttcccgctaggtatggtcctgcttttatattctaaggggataccacatatgctgcgagtgctacttatggagaagggaaaatgttctctatattagttacatgtgttgtgccttagcccagaagctatttgcatatcggctgctgcgtggggcccatcaaatcatgcggggcggtcttgtcattcgccgtttaatggttgaggacttccgaattcccgttcacaccgggaaataggaacacgggtcagttcacagtggttggaccatctttgaccgggataagaagctggaagcacgtcatcattatgatgggacgggatggagcacgccgcacgcttgctgacacactgacaaggtgggg

SEQ ID NO: 6511 - DNA, 287 bp, Oryza sativa
  unsure (1)..(287): unsure at all n locations
taattctccaaacacaacttccatatggttggtggcaccacagagtgactggttttgtgcatcgcacatatggctgtggcatagtgttgacaaanaagaatcgaacacactggcctgtgagatctgcttagctcctgtacaggtctaaaaattgatgagatgtgggcgtgccagtcagtttgatcctgcaactgacaagatatgcaaatagtagatcaaaacagccgatcaactgacaagccgatggagtagttccagccgatagccgataacagccgatgccgata

SEQ ID NO: 6512 - DNA, 355 bp, Oryza sativa
  unsure (1)..(355): unsure at all n locations
agcttcatccaacccttgcctgtatcaagttataaacgcccagggtgatcatcgaagcatcaccactnttaattatttaatattacgttattctctaatatttgtgtcttatctgggtcaagtccccgatccttaatcgaggtgaataagaggcatcatggccatctgctttatgcctgattatatactcatatgtctattacgccttcttggctacataattagctataagatgctacctcctggtatttatatgtaacgcaacttatattttacattataacttactataatatacaacctccggtttataatatataatgtcgtggaattttcatttattggtgtctaatcg

SEQ ID NO: 6513 - DNA, 399 bp, Oryza sativa
  unsure (1)..(399): unsure at all n locations
cgctgcagcttgacagntaacaaaccctgaacgcttatcagtcttacttgataggtaagtcaacacgtccattttaagctaaaggtactactgaatataattgttttaagataatgaaaatgttttacatctccataaatataaaattctacctgtgatatttcctcatttattaaggtagtgacagtaacatggtaaactatcctgacaatgacatcgttgcaacgaccctatcactagctggtaatccatttattaagtttgctacggacctgggtgatcactaaaggctgggattggcttgctcaaccctcttacctganagcctgaaatgacatcctcgttggagagagggtcgcggttgttggaatgtcaccanaaagaaagttctgaaatgga

SEQ ID NO: 6514 - DNA, 220 bp, Oryza sativa
gtacatctgtagttcatgtgaactatttgtcaagcttacgttcaaattacaactaatatcctcaatgatgaacaaaacatattatccacactaatgttctttaatcaaggattaaaattctgggatgttaaagtcccttaaaaacattgtatgtgcataaaaagcaacatccagttgtggatacatgaaatagaataaaggtatccccccttacacctat

SEQ ID NO: 6515 - DNA, 393 bp, Oryza sativa
  unsure (1)..(393): unsure at all n locations
gcgagtgcattaccacaaggtgtcaatgctcactttcagccccagacacagaatgtcgtcgatggaagaaagtgtgtctctccccgacctacttcaggccaagcaaagggcaatcgaccttcggagggcgataccaagcagaagaccgtcatccgcttcaaccagcaatcagaaagaagcttctcctgtgaatgatagcattatgcagtcctatcacatcaccacagaaccaatcaaggatgcagtcactagaacaatgccagctatatctctccagaatcaaaatgagcagccatgtttgtggtttcagttcgctactatcatggtgnattcgaagtttgcccactatgtatacagaatatatcatgtctataacagcgacttgtatgctat

SEQ ID NO: 6516 - DNA, 247 bp, Oryza sativa
tgctatatatactcttctttgcgagcacggcccgagtacattgataataatatctcagcgggcttgaaaccacgatttataatcatatccccaaatttgtgtaatgcatatatcaaagttgggtttccaaagcgtctatatttaacccccctttgaataaacggactgtgtaaaatcttggacgaaaatttttctatttggtcctttgaaacaagtggtgaagcattttatatcctatgaaaatcct

SEQ ID NO: 6517 - DNA, 160 bp, Oryza sativa
tgtggaaagagtattttctgcaatgaagtcagtgaagactaaagagagaaatattttgagtgacaaggtattgaataattgtgcggtcaccttcattgagcgttgatatgtcctgagaataacataaatcactctttcatgactatgaagaagcgtgaag

SEQ ID NO: 6518 - DNA, 282 bp, Oryza sativa
  unsure (1)..(282): unsure at all n locations
cggacaagccgaatctactaaaggaaagggagtgatcattggtgaacctaggccaaagatgatagtgccaaagaaactggaagttggtgtatggaaagagaataagagtgaggcttcaacttctaaagcacctaagaagactaaagtgactttggacatgcttttggagaagtatgagaagcaaggtggtgagagaactcgcaacataggaaatagaccaagatcacctcctangtgagcgattggtcattcaccanaacggtcgcaatcaccttcatatca

SEQ ID NO: 6519 - DNA, 255 bp, Oryza sativa
ttgtatgctccaaaaccctattatcactaacttgtgtgcaacctctgatgtggaattgctaccggcgatgccttcactatgaacaccacaaaaccgattcaaggtggcatacaaccattcaaggaaatacttggtttcactctctgtgctcgcattgatggtttccctttctccaaccatatgaagaatcagcatcccatagctatatacatcatacttggtgggtactgctccacggtgcccgccaaacacctt

SEQ ID NO: 6520 - DNA, 369 bp, Oryza sativa
cattgctagacttgataaacccttcagccatccacagcttaaccaatgcattgcgtttgaaccggtagttccctggaaacatactacagtaagcacagcatcgccggacctggtcgttaagattctggtagctccgccactgatcttggatgatgtcaagtcacggcactctattatctctaattgtttgcaagagctggcatctaaattttgcataggctggtgctactcggcttgctgcaaccggaatcttcttagcttatttgcgaccccttgccaatcgatgtagttttgaggcttggctttaagtactccacacctcagtgctaatgctgatagatcaggaatcttatcatcatctataaattc

SEQ ID NO: 6521 - DNA, 379 bp, Oryza sativa
  unsure (1)..(379): unsure at all n locations
gttgcactcatgaccctctatctgtttagcggactgttcttcccctgagattagttttacatcctcgtcaagaggaaatatatacaggtatctcctccattnggctgcaaaaatagggtgaaattcacgtgagacctgcaaattatgccatcagttaataacaagcgtagcatcacccatggtggatgtcttgacattctaagaacttttcatgaaaaatggacaattctaccactagcagcaatgcagcatacatattaagtgcagtcatatattctgaaaaagcaaaagaataatacctgtgacacatgccaaggtcttagtttatcaagtgcagccttgtttattgcatcctttatatcactagactttacatccc

SEQ ID NO: 6522 - DNA, 342 bp, Oryza sativa
  unsure (1)..(342): unsure at all n locations
tcagcttgcacgtgananaagaataagttaaaacaaagagagaaatgaactcactcctttctttctttattgcaatcntaatgctaaagacagtctacattggctatgcgctgatagtatctctaacagaatatacaaattagactatccaaacacctatacagatatatctncaattgatttgggtagccaaaatcggtgctcacgccaacagcttattcatctaccgtctccactccaacccatatgacactgcaacccatatgtaacctctaacatctcttcttcttcctcctaattctccattcttcctttgcttccgctggagccaccctgagctac

SEQ ID NO: 6523 - DNA, 341 bp, Oryza sativa
gcttctgcctggactagaagctcatgagtttagagtagcactcggcgagggagacaacctccgacttgccgacgagagaggagacgaccggctcgtagtcgtcgtcgaggccagccaggacgtaggaaatgagttcttcgtcatcaagcggcttgccggcgaatgccatctcgtcggcgaagactttcatcttactgatgtaatcagagacgctgagatcgcccttgagggtcgtcgcgagcgccagccgcgtgttcaaagcacgcgcacgtgattgggaagacaacatctccgtgatggccttccatacttgtgcggcagaatccatactgatgacttgg

SEQ ID NO: 6524 - DNA, 266 bp, Oryza sativa
gcgcgtcttcaccaccaagtcatcaacatacgcctcaacattacgttctatttggttaccccaagaaattcgagtagtacgttgaaaagtaggacctgcattctttaaccccaaaggcattgtcgtataacaataagttcctatgggggtaatgaatgcacgtttttcctcatcctccctagccatgtgaatctgatgataaccagagtatgcatctagaaaacacaaaaagtcgcaccctgcagaggagtcgacaatctgatcta

SEQ ID NO: 6525 - DNA, 515 bp, Oryza sativa
  unsure (1)..(515): unsure at all n locations
cctatagatactcaagcttcaccagacatccttcactntgcctggctgtagatacttcagagtatctttatctcatccaatcaattcagaatcctgaataccatcatcatcataaatcttcactgtcacagtctgagtatctgcatcttcaacaataaactcaaagtgttcattccagatagggttcaagtcgttgttctgtaaatttgaagcacataaacagctgtcagtatgcattaaaaaatatacatatctattggagcacataaacagggaatagagtagctgatacttacanatggtttacttctcttcattttatctgggcagggtcgtacatacacaaatgcaaaagggtcagaatttcctatcagatctttgntcgtcaaatccctcgcttgtactagcttgacttccaatgtaccaacaggctttagttccaaatcactggtgcacacanataattatgggaattatccatttttgtattcatatgtngatatagtaagtaatga

SEQ ID NO: 6526 - DNA, 266 bp, Oryza sativa
  unsure (1)..(266): unsure at all n locations
gcagcttatgcgacacagctgatatttcttttgtnatagagaggtaccatggaggtggtgtnaaagaccacattcttaggatgagcaacatggcttccaagttggagcaaaaagaattgggcatcttggatgacattcctggtcatctgtgtctggcctcattgtcaaagagctttgacaacttttttggcaactacaaaataagttcacaaaaatggaattttgtagagccatctcttattggtggcacgagaggaaagactcat

SEQ ID NO: 6527 - DNA, 440 bp, Oryza sativa
  unsure (1)..(440): unsure at all n locations
catgagttcattggatttataatgcaacatcttatctagcacatangttaaagaataaacactcaacacatatacctattgcatgtatcactctttctcaaataagcattctgcacaaaactaacaaagagaaatatttttaactttntcttttcttgagcctttgttctcatatatttctctatcttattccgggtacgtccctgtcgtcaagactgtttccagggattcggcacccattattgtgctcacatcgaatacgtccttgtcgtcaagactgttttcaaggatgcggtattcattcttttcatattttttattctcttntcacaatgagcaattaaaactatttgaggaataacaagtcaatcaagcatatatatatatatatatatatatatatatatatatatatatatgtatatgtagcacttataaat

SEQ ID NO: 6528 - DNA, 343 bp, Oryza sativa
  unsure (1)..(343): unsure at all n locations
aaactgtcgcgccttcaatatttcctttaatcgatggagactgcgaaagataactattatgtcaaccttgttgctaccagcagctactctaatgtggccaaattactatcgcatcattagcctacatgntcctgcatttgcgtttctgctctggatgaatgctgtattgnatctgttgaatttattgtgttgaggtatcgtcctgatcagcatgtttctggctataatgttcgggtaggatcggcatcacctgccagtggcctggccccattggtatctagtcagctggcgttgattctgttaacgcgattgcgtagttccaatggtttctggacctacaaaa

SEQ ID NO: 6529 - DNA, 357 bp, Oryza sativa
ccatcaaacgcatgcacggatacacgcatgcatgcgctttctttcttttgctctcgcttcgcttgcatggctgcacgcgcggcatgccatgcaagcatccactgatgcaaacacggcgccaccgacgtacgtctaaatcatggtacaatacacagtacgctggccggccaccacgccagcccagccgcatgtaacatgcattgggtaacggatcagcgggcgagagcggttgcgctgcatatattcgcatgcatgcattgcatgacagcatgcgtattactcgtactgctttctccttctcaaaataagaataggtttagtattaattatatacaacggttgaccatttcgcttatt

SEQ ID NO: 6530 - DNA, 451 bp, Oryza sativa
  unsure (1)..(451): unsure at all n locations
ttatggctgtagcctgtaagttactaaggttcatctcttttggtatgtataatttccgtaagaatctctttctttcgtatacaatttggtcaaatttattgttcccaaacaggcctggatcattgctatcaagtttcaaagaaattaatggtagttctttacaaatggtagttcctaaaatatagcatttttagaccctaacacggtctctaatatgctactttgactaacaatatctataaaagtaagatgttntaaataaaaagagttacatattatgatattatgatagtttgtttaatgataaatctagtaacatcaattntacactgataatcttttttattgttcggctattaatgagaaaagtaaaaatgtttgacttgcactatactaaaaatgcttatattttgagacgganggagtaaatgataattgtaatttttaataa

SEQ ID NO: 6531 - DNA, 260 bp, Oryza sativa
tctcgggttcttggtctctgctcgagagcatcaggccgagctgcgagaagatatgagtctatctatcgctatgcgccccgcccatcaagcttacgtgatgtgcactgctgtccctgctgcatggccgcactaagtcttgttatatcgaggctgggagagaatgcactacccctatataagctcctcaaacgctccgggccgtttacctggaccgaagaagctgagcgggccctcactcaggtgaaagcgctcctcagttc

SEQ ID NO: 6532 - DNA, 262 bp, Oryza sativa
ttcccatggacatttattctcttacgaactagcaaactaaaaattctcggtgcagctacaacgattatgatgagccaaagtaacaaactcaaaatctatagcaataacgattatacgaagaaagtaattagcgaagattaatttttaccggtagatgtcgtagttgggttcccggacgaacaccgccggcagggtcgtccgcagcgtgcgcaccggcgtcccaaggttgagggtattatccgacctccgcgggttcttcccg

SEQ ID NO: 6533 - DNA, 346 bp, Oryza sativa
  unsure (1)..(346): unsure at all n locations
aaaaacttaaacctactaccacttatgatgttatctgaaaaaaaaagggtgcttgtgtatgaatatgacgaactaaccataaaatatgtgacatcagaaaatgagtattttatgatggtatatccaatttactcattctactaaatgtcatggaatggtgccatactatggtgtcttgtgaggaaaanatggctgcacttaaactaaaatcagtatgcgttattctgacatttataaatcaagtcactgatgatgcatcctgctgcacaaactatttggaggtggttatatgcttaacaagaaataggatgaagttaacaaaaccaaaaggcatgttcagcataca

SEQ ID NO: 6534 - DNA, 501 bp, Oryza sativa
  unsure (1)..(501): unsure at all n locations
cagcttaaaactctgccaattnctntaagctgntagacatactcactttcaatactcatgtttacatagaanaataagtgtcaacatatnttgcaacaaattaagctttaacccttggaagaatntacaaatcaccacctagtattcttaaatttgtatattttatgatccctgccccagattagacataagattcatactgttcaccaaatatgcatcagctccaacaagctagtgattagtgaacagaagctcgaggtagatatgaaacatggtcagtccatttcaagagtatggaccatccttgcagaccaactaccaccgatataagcatataactactcgatgacaatgggataagccgaagaaacataagataacataaaagataccaaatgtatgccaccttttactctctttacccatttcaattgatcanaatatntctagatatttgataactgacatgctgcatgcagtgccacatagttggacacatca

SEQ ID NO: 6535 - DNA, 361 bp, Oryza sativa
atagatactcaagcttcactagacagaaagatgtatcttctagaatacattgtacagaacttttgtttctacactctgtgatcagactgtcaataccaatatactcactccattccatatggatgaatatatgacgttttcatcgagataaaggtagacttaactaccatatattacatttaatacgagtatgtgggggttgattttttatttaatgtgagtattgtggtggtgaaaaataaagaaacatgcatactttaactttccacatgcacaagaaacgaacctttactatccctaaatgctgcttgcatgaatgcagactcaatttacatgcatacatgcaataatgcttcatatc

SEQ ID NO: 6536 - DNA, 282 bp, Oryza sativa
  unsure (1)..(282): unsure at all n locations
tgagatcgaagatgaccaagtccttcacaatgaaagcaactatgtggtcattctctnnttctgtacctaacattacttatagctcgagaaaatctgttagcaaccaaaaccaagtcctcgtcactgatttcttccagntgatcgttggacaaggcattaaaaataacaagtacattcttatgagaagtatcccaagaagatccagatgaagacaccacagcagtagatttcgaatctgttctttttgaaagaatattcatctgataggttttcaatttacta

SEQ ID NO: 6537 - DNA, 239 bp, Oryza sativa
  unsure (1)..(239): unsure at all n locations
taagcttgtacgaagggagaacanntgactacttccttcttatttgtactgacactcttggtcatacacacaanaactagaaattataaacgtccgtactttgctacaaataaaacatatattagtagtatactattatctaaaatactttctttatgaaaaagaggtactctagagtgttgctattccgaatattcaccttgatattacttcatatttgggtacccatttatatgaaa

SEQ ID NO: 6538 - DNA, 299 bp, Oryza sativa
caagagatgcttcctcctcaatttgatactgcttccatctgtgatgagagagagagagagagagagagagtcttctgcaaccacgtaagctactatgattgcattgttgggcctcaccctctactccatctggtctaaattagatgaatgtttagaaggcgtgctgcagtcaaaccctgaaatcttaactcgcctataaatccaagaatattaagatttgatatgtgactcatatgagtagatttttcatgaaaataaattcatgtggttatgatttccatatcttttatgaatatttg

SEQ ID NO: 6539 - DNA, 381 bp, Oryza sativa
  unsure (1)..(381): unsure at all n locations
cacacttaagacacatattgaaacatatcactattatgtatgaaacactttgttttaacggcttcacacatatgttgttctcttgacataatataatcatgtgatatcttgttgtaaagatttaattgcaacgcatacaacggcgtgatctggtcgtatatcggattaagtacttaggagaacacatatttccagagaggatgaaagaatgagnagaaactactagacatgtgcatgtatgttacactacgacaatggttcgtccaatccaccacacagctgattagcagtattttcctgacgccaacacagagaaaggataaattaacaagtgtggactgagctgaccttatgcgtccgatatctctcatctgatcggat

SEQ ID NO: 6540 - DNA, 361 bp, Oryza sativa
gcaagctgatataggtgtacctacctttctttatcatcatcaacaagctctggtggtgcttggtgaaccctaagatcggagctgcaccgttttacatgttcgattatttcatgtgtttagtattgtattatgctcctgagcttttacttagctagtctcccaagtacttcaatatttttggtattggtttgaaaacgcatttggttacctagtatctccaatcgcttatcaattcccagtctattttgcttcaaatgcagatccgataacaaaacctacctcactgatccgccattgccgtcgctcttgattggcaaacgacacatttctgaagcagcatggaagcacatcaactttccct

SEQ ID NO: 6541 - DNA, 329 bp, Oryza sativa
  unsure (1)..(329): unsure at all n locations
agcttctctatggttgagattttntcacatctgaagagaatattgtaagacaatgacttgtccccattctccaatacagttagctgtcatgtggaatattggattgaatagctcgtatatctgaggtactttgatcaaaattatattgcaaatctatcaacacaatgcactgaaatataaatacctggtgtgggtttcgatcaattatagactgctctttgaatttaagcttgcaagagtagtccccactttctttgagcgcattgtaccataatgggcacaataaattttgcctattatgatattgcatatggaagtaagtactttac

SEQ ID NO: 6542 - DNA, 123 bp, Oryza sativa
agcttagcggtcaccatcgtatcacgcgctcttgtggttatcaaccgaaataacggccagtcttctgtgactatgacgtgattggccatagatcagcttgcttgccaggattatttcagacac

SEQ ID NO: 6543 - DNA, 492 bp, Oryza sativa
  unsure (1)..(492): unsure at all n locations
cttagatactcagctntcccagccccctttcatcaatggactcctgacgtctacgaaagagtgtggttcgttcgacaaattcctacctctatatctatctctgaagagttgggttttgcaaaactccatagatatgcagaagagaaatgctatccccactccgaccaagacagaacttttaccaaaagtttattgtgatctttgtgttcaaataacaattaaggtgaagcagggtcaggaacaacgaatctctttatgataaacagatccattttgcaagctcgttattacgggtagttcctacaaagaatcggactaatgacgtatacaatgctcgaattatcgacgtagatgctacatagtgggttctcatccttagagactacgagtgtaatatgagcatccgtngacanaaagatcaccctaagatgatcatctcatggctattgggaacgaatcanatcagatgggtctatttctcaacctttctga

SEQ ID NO: 6544 - DNA, 158 bp, Oryza sativa
catatatcacgcatcaacttcaaatttagtatattttatctctaaaacaacaaaaaacctacagttataagagtatatatgtgtcaggattttgttctttaaaaataaaattgtatgaatcattaaatgatatgcatgtctgtgtaatactattaaaa

SEQ ID NO: 6545 - DNA, 397 bp, Oryza sativa
gcttactgatatcatcggatgctagaaattccatctgctaaagaatggtgggtgctgtatttgatgatcatgtagaattgtccgcttataggtctatgatggaggaaaagttcatacatcccatagtaaaggaaaaaggtgttgcgttgcaccctcctgtttatattctatgtgtttgcctctcatcctttcatcttctttcaccgttaacattttagaacataatgttaataaacaccttgggtttcattatcatgttaaatacctacaactatttcatgcaatgcaactgcatgcattctatgattgcttatttctcccaaacactcatctgggttcattatgaaaaaatcccgcctggattgtgcaacacacatttcctgaagaaacaatattt

SEQ ID NO: 6546 - DNA, 227 bp, Oryza sativa
gatgcaggttaattcaaaattgagcgcgaaacctattgtgaattattaaaaagaaaaaagatttaatggaatgggccaagtttgcactgttcacgaggcccaataatgcccacaatgggaggaaaatatctttggaagcctctgcttcgtttctctggcgaatcctaccggttttcccctctctcgcgtagttgcgctcacgaccaaaggggcgactgcgtgcgccc

SEQ ID NO: 6547 - DNA, 285 bp, Oryza sativa
tattcgtagtttgatacctaagaatttggttcaatgaaagtgtacagaattgtagtgcaccataatgtgagccagacttattttgcttaattggaaccattgctaatcagtcattgtggagaattccattagtatacgcaattttgggtgtgtgccacgtgaatattctaactgttagaggtaagttcacaaatctacacattctatgacctaattttcacaatgctacagatttaacttgttgtgtaatcaaactttagatttacacccaacgtttcattaaac

SEQ ID NO: 6548 - DNA, 440 bp, Oryza sativa
  unsure (1)..(440): unsure at all n locations
cgggcagacgtttcggttcggcagcctcgacttcatcaccaacaacttctgcaagatttctctcctcgactcggaatcagaccagtcgggagagaaccggatttcggtcctgtttggattcccgaacgcggctgaaagctacctcaagaccatcttaaccgagtcggcttcaaaccactcggccgagatcgcatcttcttcaacgacaccagatcaagatgatggggcttacccaccagtccttgatgaagctcccgacgatttagcggccgtttcaccacgacagcgtcttcatcccgtaggcctaagcggaagtcggcttaacaccgatttcgcctagcttcanggaagtcggcgtcatccttcaaccactcggcacagtttcgacggatcagcttgatgactacaacagctcttctaccgtcgactcacgtcctact

SEQ ID NO: 6549 - DNA, 367 bp, Oryza sativa
  unsure (1)..(367): unsure at all n locations
tcacatnctctataatatgtgaagcaatcatcaatcatcctcgggcaataatatcccgctctcctaagcaaccaattcatcttgtgggccgattgatgagttccacaaattccttcatgtacctctcccatagccactttagattgaacttcatctaagcacttcaacaagtcaccatctatatttcggcgatataaatcttcatcaagcaatgtggtattgaatgcttgccgccgaattttccgatcaaccttaagtgtgggatctttcatatatcgaatcacaggaatcctccaatcttcttctatttcctgagcacaaatgtccgaatcacaattaattcggtctctaaattgattgaaacatg

SEQ ID NO: 6550 - DNA, 304 bp, Oryza sativa
  unsure (1)..(304): unsure at all n locations
agctnggtgagggtgaattctaactaagctactaagttatgttttgtaaacctagggtgattgtggctcaaatatatctctaggaaagtaaatcacgctcctatgtcgatgttttgcaatcctagggtgatatgatctcaagtgtgtctctagaaatgtgaattgcacaaatgttaatgcgacaattaaatgagacaatgagacaagagattattcaccgatgttcggaaaactcgcggttttctactccccgttgaggcgagctcaacttcaccggttaaccactaagccacctgacgccccc

SEQ ID NO: 6551 - DNA, 438 bp, Oryza sativa
  unsure (1)..(438): unsure at all n locations
catagatactcagctatcgggacaaaacacattgcttacttagttagcgaggcttagttctttttgcatagngtgctgccttgctcatggatacccctgctatggcctgcctaagattaagaatctgcataatgtgaagatcaccatgatgcaagtcacgaatcgtgaaacagtgagaggaactagagaacctgtgaagccgcctcggtatgtggatgtgtgcactaactcttttgtgctacgaagatggatgctcgctatgtttctgctgtatgaacagtttggatgtgatcattgttgatcagggatggatgcatacacactcagaatgttcttgtacatgagccgttgagtctgttggtgtttgaagaagtagtagcactcctagttgttgggggcttaactctcggtgcatctttctatgaacaatatgttata

SEQ ID NO: 6552 - DNA, 403 bp, Oryza sativa
  unsure (1)..(403): unsure at all n locations
agctnngggtagatcttggccgagttcggtataccgaacggngctgagacctggtctctccctgactggttcgaatctgagtcaaggagagagatcttgccgaatacgttggtgatgaagtccatgttgccgaaccgaaacgcctgcccgggagggaagacgaagtcctcgatgccggagactgaacccattgcactgatcggcgaaaaacttgacgcaacccctacctggcgcgccaactgtcgaaacaagatttcggcaatactaaaagggtgtggctatcaaactaaaaaagtggatgggtttgaagacaaggaattctatacaggttcaagccttcttagtaatgaattatactctacttcctgctggggatgattcctgccagtgtttattgatcgta

SEQ ID NO: 6553 - DNA, 341 bp, Oryza sativa
  unsure (1)..(341): unsure at all n locations
tgttcatcacttcaggcatgttcacattntagctganaagaatcttaccaaattttatcaatgacaaaattttgataatttggcaatattgccaacttttgataagatttcttatatatttactacaagttggtaaaataaaaataaatagatgcacatatttgataactttgctataaattgataatgtttattttggctacaatctgaatagacccttcatcttgaatgagtatatttttgcttaactcgagttagctagaagacgtagtcgcctgagcatgtcgaaaagaatcanagaaacattggacaagctcccggctgntctattcgacatgtac

SEQ ID NO: 6554 - DNA, 297 bp, Oryza sativa
agctaggaggttttgttgacggtcattatctatcagtttcgaccgctaatattaccaaaatagaggagaactagtgatgcttgcaacacatatatttgttagaataataacattccactagtattaggtatactaacttttttgcagagaatgacaataaaatggaggagaatcatcatcaactcagacgataaatcaatcggacgatgtcgaaaaccagacttatttatgaataggccaagaactcagaattaacacaatgatatgggccaaaattcacaagtctgcggagtggag

SEQ ID NO: 6555 - DNA, 456 bp, Oryza sativa
  unsure (1)..(456): unsure at all n locations
agcttgtccaaggcataatagtggccccaacaatcttttagccaactaggaaggtagcccgcgcatcatatttaactgtgttagaaatttgattaggaatatttatgattattctattgtaaatatctttaatttttcaataatttgtgtggtgtttctctgaatgctagtaaccatcgccgacttataaattataaactaaaattacttaaaacaatgcagttttggttttataagaaaaaaatatatgaaactatatatcatttgtacgtaatgcgtttctttntttaatatttagcataacttaattttgtactttctaaactctgagtaacaatattcttttgtataatgtctttatgnaatttaggatatattaattgaagatattttctattaaaaatatgcctaatatgactacatataattatgagctgaatatgctgaaatactgat

SEQ ID NO: 6556 - DNA, 231 bp, Oryza sativa
  unsure (1)..(231): unsure at all n locations
tgaatgacatcgctcagcagctcattcaagctggtaatcaacagtcatgctataaaatttacaggtgggtttggattatgattntttacatctagtctgtgttcctgttagtttcactccacaactatcctgagttcttttaacactacagttgtgcaaacatcaagctcagttgttcatcttttttcagagatacccgtggatctgcactataatcgagccttcggaaat

SEQ ID NO: 6557 - DNA, 410 bp, Oryza sativa
  unsure (1)..(410): unsure at all n locations
agctngctcttgtctgatggtcatttaaatcaaacatctcttgacatgattttataattgaatagtatcggataagtttgaatgtacacgctgactgaaatttcaaaaagtatgagaacactttttgtttcttctgacagatgtaagtacgtttggagaacgggacattacgcgctgcctcctacatcgatgctgtgctgttccactgcctcaagcgtcaccgccacagtatgccccatcttggtctgctctgccaaaaggtacacaaattcttcgcccccacccctctctcatactctttattcccaatccctgctatgtctgctctatccctattagtacccgtgattgtgacttgagaccttttcatatagcaagaaccattttcccatcctattactttttgtgca

SEQ ID NO: 6558 - DNA, 205 bp, Oryza sativa
ggaaaggggaatttaaaaaaaaaataaataagaaaaaaggagaaaagaagtgaaaaataggtaaatgaggagggaggagttagaaaattaagagaataaataggagtaggaagtagaaaaaattggggaaaaattggttgggagaggttgagagtggaaaagagaagtagaagagtgatggggagaagtgggaaaaggggaaaaa

SEQ ID NO: 6559 - DNA, 393 bp, Oryza sativa
agcttataagccatgtgacatttcttcatattatgtttcctcagaattccagataaatcatatcgttcattgaccaatcttttaataagagtggtggcgtaaaccttagaagagcctgtaaattgttcttcaactttagcaagatattctctggctgtctgagtatctgggactgcttctttcattgcgtcaataatggagctattgataatcataaggcatttacgggttgaaatataccatcttgcctttacttcatcatatctcccttttaaggccttatatattctattttccagtctcggctcaaccggaggatcattattgagggcataatcaatatccaacagaactagagtgatttccagcttcttctttcatgaagcataaata

SEQ ID NO: 6560 - DNA, 275 bp, Oryza sativa
  unsure (1)..(275): unsure at all n locations
agtagtggcatacgagaaacaagagtggaattgcgagtggcaaaagcgaaatgggcaaaatgcttatggcagaaacagtaatgcgcacaattgttggcgtaagaagaataggacatggtatgtcatcaatgctaaattgctaacaacgaacatgactctaaggatctctggctcatgataatatggatctatcccatatacggcctgagttttggaagatctgtcattggctaactaataacatgaanggccacatgtctgtagacaacagggat

SEQ ID NO: 6561 - DNA, 264 bp, Oryza sativa
  unsure (1)..(264): unsure at all n locations
cttgatgacaatctgttgcagaaatcgtagccgttctcntaactggtgatcaaaccgaatattcgcgaggcggaacgatgaagtcgaagcagagtctactcctatgtctgagatgcctggatgtccactaggcggtgaagtcactccaacttgtgcaccacagaaaggacccaagtcatcaagtagcaatcctttgaccggtccattcactagcttttcctgtccccaattctattcatccacacacgcgtagacagatatgaa

SEQ ID NO: 6562 - DNA, 386 bp, Oryza sativa
  unsure (1)..(386): unsure at all n locations
gcttattattntcatatgattcttagctcgaggtgagacctcttgaaaaaattcctaagaaataaagtgcacatcctatttctttattatgttttccttttcctttaatttggaaattccacgaaccgaataaaccctaaaaggcatggtcagctggcctggccggtcctctagtaacaaaagtcgtctagattcaagtggttaattaactgaatatgtcttcacaattgtcaccacattagcactataaacgttgaaacagacaaaagccattgctccaccagataggaataagttgactttatgtcatccattttggcgccgagtctaaaattcacctctaaactgaaataccaaggttagaccattccctaactcacaatact

SEQ ID NO: 6563 - DNA, 267 bp, Oryza sativa
atcggcccgccacttgaagtaactctgactgtgtcaatccattgtacgaaatgacatttccttacatccttctatgtacatccatattgggatagttaagttaatgatagtactgaagagtgatgaaaagaatagttgtgattaccacgaaatcatcgtcgacaatgtttggacacacgaaacacctttgtcctcgagttggtgccttacggaccttatgacctgacaacagtcaccacaacgacacttcggacgctcacgccacgt

SEQ ID NO: 6564 - DNA, 237 bp, Oryza sativa
tttacaacaccaaccgctaaaacttctgaagaacaggattgagtgcgcgccggatctgtcactctgcactttaagaagtttcggtcaagtggcgaattgattggaagtggaaaaaacaaaaaaatttctttcaaccgccctctgttgcttattggataccagatttgtatcacatggaagagagatagagagagttatctgatggacaatcatgcaccttcatggattccgagaaaa

SEQ ID NO: 6565 - DNA, 372 bp, Oryza sativa
ttctgtagatcccaggctgctgccgctaccgctgctgcttcttcttgggagcacgtcttcatcggaggtggctaaataacgcagtgaggatgatgaggaagacgacgatgatcggcttgctgctgaagcgaggttggtcggtccccggaagagcgccacctacgccattgcttttcttccacctttctttctcttgtcttggctctaatcctccgctaatgatgcgctataattcggtggagatttctcgcacttcttcttcggattggggagtgcgcaagaaagatggattctctcctggaggtggagtctaggggcgaatagtccaattaagacgattttatcgattctccttgattctgcttccgatgg

SEQ ID NO: 6566 - DNA, 507 bp, Oryza sativa
  unsure (1)..(507): unsure at all n locations
ctcagcttagctaggtcctcgntcgcanacattctcttcatgcgctccgcaattgtttatattcacaccacctttgctgggcctgccctctttgacttacttccttcaccttcactctttgctcagttgtatcttgatgccccacagatagggcagacattcaagtcagcgtattccttgtaatacaaaatgcagtcgttcggacatgcatgaattcttctgacctccatgcccaacggacataatacttgcttcgcttcatatgtcgtctgaggtagaatgttcccctctggcaacagatcctttaacagctcaaggagttctggtaaactcttgtccgaccagccattactagccttaagcttcatgagttccaacacgcatgacaacttgctgtgcttcgacttgcatccatcatacaacggcatctggcaatcttccaccaacttactaaacttctcataatctatgtcgttgtcctctgcgtcttcaatgtcatgcaacatt

SEQ ID NO: 6567 - DNA, 405 bp, Oryza sativa
  unsure (1)..(405): unsure at all n locations
atcttaaacgactgcagcagcaacttgctttatatgcaaatgttgtgactgggagactcgctgtttagtgcgttcttttaccatgatggcgggggattcttcattctgaacttggctttatttttcttacacttggcctgtgccaactgagtgctatatgttccgtagggccctgctgctaaaggctacatgatctattgcactggaactcgtgggtatggacgcgaattctntattatggaacaatgtctttccatgaaaaacctccaatatatgaaagaatggaaacgtggtttctctcctttcttgtggaaaaagaaacctcatcccttatggaatgaaaataagatttttttttcattatagattgaccaatagatcggctggtccatatagccatcacta

SEQ ID NO: 6568 - DNA, 386 bp, Oryza sativa
  unsure (1)..(386): unsure at all n locations
gccgacgccgacgcagagcgtcgctggttatatcttcatcgactgcaccggcggagccggngccacctccggccgccgctacgtacactccgacgcgcccctcctgccgtactcgtcgtcgttgccgacgaaagatggcaggaaacagagcatggcgaggagaaaggcgcgctcttcgccgtcgacatccaggcggcatttgccgtcgtcctcctgaggccgcgcgcggctcccgaggggggcaccggtgcagtacagctcctcgtcgtccacggagaccgacgacgagctcgcgccgttcatcaccgacgaggaaggcggcgaggatgccgacactaggacgctcttctcgtccttagcttctctccgactcacctcggagtcta

SEQ ID NO: 6569 - DNA, 171 bp, Oryza sativa
ttttaattgtctggcgtgcctttttatgaaatatgcattaacaagagtaactaagcttggtataagaccacacaaaaatttttctaattgatagagaaaacaagaaaaaactaagcgacaatcggaaaatagtttgaacactatggtaggactctcaataaggccgtagtc

SEQ ID NO: 6570 - DNA, 327 bp, Oryza sativa
  unsure (1)..(327): unsure at all n locations
gcttcaaagcatgagagcatatggatcctatgtttacntgatgcacggggaaacaatacgtattatcccttagatatgggaaagagaaatcactccctcaaggggatatctccacgtttcgtacatgtcacctaaataatcataaaaatttttgaaaaaaaacagtcagatagattaatatgaaatatattacttcacaaacatgcgagtcataaatcaacttctacaaattgttacaaaaattacaaatatatacgcgaatgcacgataactattttcagtttaatttggtattttgttgccacttgtacaaatcgaatttgatct

SEQ ID NO: 6571 - DNA, 330 bp, Oryza sativa
  unsure (1)..(330): unsure at all n locations
atataacaaggacttacaataagtctctggagaccaaacaacccctaacaactaattaggccatggcatcgatcatatacgcagcacttgtcagctaggactgaatagcgaacttgtcagaagaggggctctttgctatagctgcaggaacatcacctagagatgggatgaagtagagcacatttatgcgtcgtcgagccagaactgaagatgtaaggcctatttagatctctggncaaattnttcacccggtcatatggaatgtttaacacatacgtgagacttttaatattaacaccacaattattaactacatagattatgaatctt

SEQ ID NO: 6572 - DNA, 402 bp, Oryza sativa
  unsure (1)..(402): unsure at all n locations
cacctgcggcatgcatgcttgcaagctgtgacgaaatagtggccatataatgcagccctctatggcacatcttcctcagcggtatggctcgaggtctcaagtacgcccacccggacctaggcctcatgctcgatcttcagaaaatgcaggtcagtagctatacctagtagcccccttacgtcgaggtaaaatgaggttaattcattgtaacttggggtaaaatgtgcacttatcttcttgggaaagcgaagctgggtagcctcccgactccatgccgggatgactgggtcatcacgaggtagagttgacttgacaaactcaaagcgtagccaggtagcctcctgactccatactgggatgactggngtcgttgcggggtggagttgagttcaaattctcaca

SEQ ID NO: 6573 - DNA, 356 bp, Oryza sativa
atatttgccatctaccacatattatctaatctatttccgaaagatgtttctacttgtgacttatatttttaaaattctctcacaaaatgtttaaataagatggacggtccaagttgaacgcagaagagtgagaggtgaccgtgtgacacgtggtctaatcaatacttgccatcacggccagcattagatatattgtttgattgattgatacggatgcatgctgtatgtaaaacgctggaatctgaactctcgacttcctctaataattactccctccgtttcacaaagtaagtcattttagcatttcccacattcatattgatgttaatgaatctagatagatacaatgacttaca

SEQ ID NO: 6574 - DNA, 277 bp, Oryza sativa
agcttgcattaaggtgcagatatgtgaatactaattacgattctacatttgcatttatcttgttacccatggtcatatactccactaatgtcattccctgtatttctattacttatgtaaaacaggcatcatcttgtccttatgacggatgcaatgtaaggattcacctgtactgtttgaagaaaaaattctctcagaaaaaggtagttaccctattttaatttcactttacacatatgaacaggagaggctttctaaattgtttgtgtatgtaagc

SEQ ID NO: 6575 - DNA, 392 bp, Oryza sativa
tccacaatctctagtttggaagagcaatgcgccacaccattgcaagtactttacctggctcatcacccaccgcgcttgctggacagccgaccacttgtacaaatgaaggctgccacgccctgccaaatgtgttctttgcgaccaatgcgaggagacaatggaccacattcttgtgtcctgtcctaaatctcgccaactctagtggatagttctcaatgccatcggatggcccgaaattcttccgaccatacaaaacttcttcgttagctagtggtaccacaaccggaaaagggtcagcaaataactatgcaatggctttgatataattggcaccttgatggcttggccatctagaaaaagcacaaccgcgagttttaaccaagaaacgtgtt

SEQ ID NO: 6576 - DNA, 77 bp, Oryza sativa
tcgcacgagatacttgtcgggtcgcgttattatctgcaatggcaaaactggagcataatattgcccttttggcacct

SEQ ID NO: 6577 - DNA, 317 bp, Oryza sativa
gcaactagctgctgaatcggctgtacgacctgttgtctttatggtgtctgctgaatcggctgccaagcccgtcgactctgtggcgtctgactaactgttcgcacgacctgatgtattggtgatgtctgtcgaatatgcctcacaacctgttgtctatgccgtgcttgctgatatccgttgctgctataccgaactcatatcactctgaggagggtaaaacatataatccacctgttctcagtttaccgagtcacattttatccacgatgctatgattcgtcttttacccatattttaggattgatttattgaactga

SEQ ID NO: 6578 - DNA, 179 bp, Oryza sativa
  unsure (1)..(179): unsure at all n locations
cccccccccccgagggtttgtctctcgccccaaacnantgcagatagtggattggaagaatgagcctgttctttctgaagccctaaaaaccaccctctgcaaaataaattcgagctcctgtatcgaacacatagcatgtagtactatacatcatccaaaacaccatctatatctgggaa

SEQ ID NO: 6579 - DNA, 415 bp, Oryza sativa
  unsure (1)..(415): unsure at all n locations
atctggcattgatatgagtgtcacgttcttacaacagggtangtaacatgtgccttgccatctttacatgtgtgctggtttacttgaaatcatgttctgtttacacaacacttgtctaaacctaatactgatagataggcttcttactccatgacatgtagctggaatatgggcaatggattatataactttataataggcgtttgctgagcatgttaacatgcaacttgatattttctatcataaatgtgcatatctgattaaatatgtcgcattgcagctattggccaacatatacaccaatggatgtgaaactcacccatgaactttatgtctatcaagtcaagccatgttctcaaaactattgttgtcggcagtataatttatattaactgcctggaaattaaattaaata

SEQ ID NO: 6580 - DNA, 306 bp, Oryza sativa
  unsure (1)..(306): unsure at all n locations
taagctggcaggagaacatgctccccccactgagataactcagatcacatagcatattttnttttttctattgcatattcgctntccaaatgcgttctatgaaacttgaaaacaacataaaaatttgccaaatagaaaataccacaaaaacatgatacgcttgagtcatgctatgtaagacaagctacttctctttgttgaaatgaagaatagttgcactatcttatatctcttatatatacagtactaggtaaatacacctctcaaggctaaatatgagtactcaacaattatccaggaacctga

SEQ ID NO: 6581 - DNA, 373 bp, Oryza sativa
gcttctgctgctgctgctgcatcatcatcgtcatgtctgaagaacttaaacggcaagtctactgaactgaacccaggaagaaaggccccccaacccttttctccccgcgacaaactctttgcatttctagaagataaggcggttatttgcgaaattaccaggaaacaaattgattaacccatctgtagctgtcgaatggtaagttgttttattttcctgtctcgactataacgcattggacattggaagaaatcgaggcatatggtactatattttcgatgaaagctcatctcttgagttgagtggttgacaaatttgatagagtcataaggtctggtttgagatataagctgacatcacaaggggtaatttt

SEQ ID NO: 6582 - DNA, 314 bp, Oryza sativa
  unsure (1)..(314): unsure at all n locations
tcgctacgacgccggctggaacaagtagaagccaccaccgcaccgtcatcatgcgccggtggatcgccgacgaccagccatgtccgtccatcgctgtctccacgcgcggatntaccataataccctgcaaccattggtagctggcccactgtcatcgcggggccaccaccaatcactcactgactggctcaacgtatggtaagaggaggaggagtacgggcgtactccgcgaaactattaactgctgataataactggcttattacacacccacatttattntgcgatcatactactacagtaagaatattatt

SEQ ID NO: 6583 - DNA, 426 bp, Oryza sativa
gcttatgcgggtgcatgtagcgtctgatgaagcccacaatgttcaagttcaagagcagagctgctgcttcatatctcccagggaccggcatattgctgcagcaaacacctgaaatggttgcgaagtcagttaactgaatccctttatttgcatccgaggcaagctttttgcaaaaactaattccagtttggagccggactaaagcattaaagtagcactgcaatattctcttgcactgatcgagtaggaagcatggaactactcaaatgttttacaaggatcatctacttaccattatctgatcctcttgaacccacagctggaatctgcatcacttgaaccccaaatgaacctgggccagcaacagcaaggcacagctaccagcagcgaacacatctagtatgaatcttgcattaaacagcttct

SEQ ID NO: 6584 - DNA, 271 bp, Oryza sativa
ttctaatatttattctcttcatctcttgctctctctcgaataatagtcataaactcaattgtcattttttcttgactgagaaaggtagagaggcccacacgcagcatgaaaaagaagaggtactccataatttataacagcataccatttcattaaacaatatatattatgggagctgtgtatctgtttacatttgggacaaagatgataccttcatacagattgtacatgattattttctctgatacaagttatacaggacttttctctg

SEQ ID NO: 6585 - DNA, 424 bp, Oryza sativa
  unsure (1)..(424): unsure at all n locations
gtgactgggctgcagcttaaagnagcatcttacttagccgtccattcagcaaccgcttggcctgccccacagaagtccgcgagctcatcgataccctcgtccaagcagaccgtgctgtcaacatcgaagcacaccgcgtcagcattgcaccatgcccaaataacctctggtgaatagagaagaagcatgcacggtgttaggagactcatgcctgcatatgcaccatagcatgaccacacaaaactaaagggtttcagcgatacctttcaaaggcagggagctctctgaattatgggaggacatacttcttggtacatccagtgctgctgctatataactcggacgatttgagcgtttaacaccgcaaaacgactgggtggcgagccaattgctaacgtgacttatcgtatgccagctgatgaaa

SEQ ID NO: 6586 - DNA, 316 bp, Oryza sativa
  unsure (1)..(316): unsure at all n locations
tcatgcatatcaatatacattattactatctgaatgattgaaacgacttttctgtctatagtggcataatattgctgtgcacatcaatctatctactcttttgtaaatattgacctttcataatntacaaatgagataggtgactttacaaaacaaataaagtataggagcgaacgcgttacctatataaagagatggacacccttactagtcctcagcaaggttgacaaatgcaaaggtaatcacacggttatcagactttccatgtttttcttttctcaaacacatcttgtgaagtcgagaaaaagaactgaaa

SEQ ID NO: 6587 - DNA, 383 bp, Oryza sativa
gcttatggctcaacaacaagaaaaaaatttatatgctctaacttagatgacttataaaaatacaaggactttacacttgtgggtggtcaatcctaacatacattattattttaagcactataataatgatcatagaaatagtaggatctaccttaatgatatccatgaccataaacaccgtaatgatctttatattctcggtgccgaggtatggtttaaaatagaaggttgataaaaaaaaaatgggcctaactgatttcagccaactagatatgcatgatcacgtggctaactgatttcagttacaggagtacaataactctgtgtccttttcagctctgaccaagagtcaactaaatatatctagcttcgtgctaagcact

SEQ ID NO: 6588 - DNA, 398 bp, Oryza sativa
  unsure (1)..(398): unsure at all n locations
ttagatatcaatgtgatagtgttagatgaacatattgttcgtaatggatntatttatctataatgtgccgtttattcgctttggattgaatgcctcgtaagttcgatgcagtccaatcaaccacgagcaacccgagtcctggtgtcccgaggtgagggctcaacgaaagctgctgccaacccttctgtggcacaaaatccggaaggcaaagttatgcancataagagaggcctgctggtggctttcacgttgcgaaatgcagctcctgatcagaacanaagctgtgtctcaagtcaagacgaaattgtngttgactatcgccttgacattgngaactatcactgatacccatgatcagaatggtggtcagaaccaccagccgaaaagtgacactgatc

SEQ ID NO: 6589 - DNA, 386 bp, Oryza sativa
  unsure (1)..(386): unsure at all n locations
ctgcaagcctggagaccaaaactggagctggtgtatcatgtctcaagccggcccctacccaactttttgtcatcaaccaacatttttccttcctcacaatcaatgaatcaaagccacctgcaatttccctggtaattactccctccattgctcctttatgctcgcccggcgagccgggggatgcttctttngctaccttgtctgcatgctgttcctggatatcacggcagcaatatatgcacagatgttcttctttcccaacactggcataccgtccgttcagctaattggtcctcacaaaatgtcttctctgtgtggcttgcatcctctgaagattctgattaaacaaggcgttctcgtcatggcaatcttctgacacatgccta

SEQ ID NO: 6590 - DNA, 463 bp, Oryza sativa
  unsure (1)..(463): unsure at all n locations
ctcagcttacaaaacgctgactggtataagttgaaaatcttcagacccgattttttttctcttatactgcatcntcgccncctcctgaagaagtatgtttccagtaaatctattcctcctttatatgtgctctatccataatccatccaatccgtccttttcaatctacagccgcctagcctagattatactagattatagtacttggaaacaacttctttgcaatttaagaacagaagatagaaagttgccgttagactgcatgcatgctncattgatattacacctacttcagccaagaaagaacacatccatgcgaatttcattttccagatcagagccagaatctattggcattgatatcttctacaatcctggatactagtagtatatcaattggctacagtcaagtatattggtctgtatatctagnaatctttaattggacaacattccctctcta

SEQ ID NO: 6591 - DNA, 278 bp, Oryza sativa
cttagaacgacctgcagcatgcaagctagtggctaacatatgcaactgtaactatttatggactcaacatgaaaggtcacttggactttaaccatctaacaatctcgactcgagaactaggtcgaaatgagacctacttatatgaatgaactcccggctgcggcgagaaaatcaaactgactctgaataggaggcggtgaagcaagagtggacctcacaagctattatattgaggaatgaaagcatgaaataatagtaactgacgagggcgatagtaa

SEQ ID NO: 6592 - DNA, 414 bp, Oryza sativa
  unsure (1)..(414): unsure at all n locations
tacctgtcactcgccgggatgtacattggtggctagctctgttgctattcggctctccatatgctcggaacccgagggtttgcaagcaactagctagagagcaagggtactagtataacccactattaattttaaataatctatagctgattaagttgacaattcgcacaatagttctatataaacatatactacactattaatacatggtcccacctatcatatatacactatgtgttaaatgcgagctggtactgagtataaatctggatcctactgcgctcttctctcttctcatttatctcatcgacatatggttataagtgaggtatagactggtattgagccctnctaaactaatataaacacatatgttcgaagcctagnatatatattcctctatttatattataa

SEQ ID NO: 6593 - DNA, 353 bp, Oryza sativa
  unsure (1)..(353): unsure at all n locations
cgcatgcaagctntcattatcgtgctgatcctagttgttgtgttaaatgacgcatggcgagaaggaggcttggaatggtcttgactgaatattcacacacaaaactaaaggagggaaaagattccattcaaacagctatgagtttgactgaggttgccatacttgaccaaaccagctccaactccgttatttcaactacactaaaagatctttcgaattgaggaagactctctatttatggccccttatatatggaccagttgtcgtttatcgaatttgcttcataataggctcacgattcgactatgatcgctctggatcggtaccaaaatcaagatctaggcgagcggacc

SEQ ID NO: 6594 - DNA, 399 bp, Oryza sativa
tccaactactgatctctgaagagggtggttgtccttcggaagggaatccatcctgcaatgggcgatggatggatggcaaaaccgggcattgcatcaagatccgagggcgacttttgccgattggctccacgttggtgctaacttggtcgatcgacaactactttactaatcgatggctgcttttgtgttggatctgcaacattggatgaacagtgggaatggcagatattgaactgtacttgagctttcggtgcaaggggctcctccctcacacagatattaactccttccctgtgctagaatataattattttaaaattattacataggcctatatatactcattttagtgataatatctattaagtaagatgtctatataaaagaggtactatctct

SEQ ID NO: 6595 - DNA, 260 bp, Oryza sativa
aatatgctccagaacaaaagttagaggctagggaaaaataaatggaggggtttttataaagttcgaaagaaataaaaagagaataaaagaagggatttataaaattaaaagagagcatttaactttgcaaataaaatttaagttcaagataaaagaaaagaataaaagcaagaatgctccaatggaaaagtcgagaagacacaactaaaacttttcgcaaattttttcttcaaaattcagtatgtacactggatacccat

SEQ ID NO: 6596 - DNA, 233 bp, Oryza sativa
tatgaagtctattaccagtagtaagatatatatggcccattattattattatattagaaaagatgaaagggctagattgatttactaccagtagagaccacttgtaagcgaattgcaatcaacaaagttgaacatttaactgactgcccatcatctatcactatgtttatggtgggtgaggcatcacaattgacatatattgcttgatatgagacggaaaacatttgaacatc

SEQ ID NO: 6597 - DNA, 322 bp, Oryza sativa
  unsure (1)..(322): unsure at all n locations
tattgaagtggaagacaagccatccacctncactcanaaagagccatctactttcgcttcaccaagtcaagcctcaagtgaagtggaggaggagaangcacaagatccacctatgcctccaaagatacacaccgctctttccaaggatcacccaattgaccaagtgttgggtgacattattaaaggtgttcaaactcgatctcgtgtcgcttcgatttgtgaacattactcatttgtttcttgtcttgagccaaaacatgtagatgaagctctttgtgatccggattggatgaatgctatgcatgaagagctcaacaacttt

SEQ ID NO: 6598 - DNA, 313 bp, Oryza sativa
cttctcgggtcttggctcttgccaggcattattcccaccccgagaaaaaccagctatagagcggatgcgcccccccagcaagtatagaacggttcatatcgaggctgggggagaaggcgctacccttatttaagctcctcaaacgctccgggccggttacttggacggaagaagctgagcgtgccctcactcagttgaaggcctatctcaactctcccccggttctggtcgcccccgagccaaatgaacccttactactctacttagcggcgaccccgcaagtggttaatgcggcgttggtcgtggagcgcga

SEQ ID NO: 6599 - DNA, 295 bp, Oryza sativa
  unsure (1)..(295): unsure at all n locations
tattcacaatctctatatgatcattcattccatatagaatttgatgtgaatgatatgattcagtcacgtgtttaaatacatttatatattttaaatacactggaangtttgaatacatttatagtttttaaatacattggaatcaaatactccgacccttatggtagatattaactaaaccaaaccaaagatcgacgatttcatcaccctaggaaatgtttttcttctgtcttggagtaattcttggtacagtttctgccaaatttttgtccgtgcatcgcttggatatgcagtc

SEQ ID NO: 6600 - DNA, 342 bp, Oryza sativa
  unsure (1)..(342): unsure at all n locations
cattgtagtagcatactagcatggatgcgtcgagaattttatatgcggtntatataaagtacctctgtacggaagaacatcaaatcagatgatggcgtcttgattctccacgcaacttttcagtgtgttcaccagaattaacagagaaaaatgataatcggttttgaagatcatatgattgagggaccagacaatcctgtgtatttttgttgtgaagagcaaggcattgtagacaaccatattgctcatatgttagatgtgcgttaatcttcgaagataaccaacccaacaacacaaattaaagactattcatgcaaaacttatctttcttggtatattgat

SEQ ID NO: 6601 - DNA, 403 bp, Oryza sativa
tgcaagcttcagatctgctgtatggagcttagtatattagcgcgatgcgaaaaaaaaatggatggcagccgaagctacatactgacatacagcagcactatacacgagcacccaaagattggagctgataaaatggaagccgggggttagggacttatggcaacaacgatttatcaaatgaaaaaataaagttcaactgataagcttcaaacctggctaacaagaagatccacttgttctctgtacatctcttttaggtcaacaatgtcatttcttagctcttccaactgcaagcacagtacagaaattcagagcaaatccacacgaaataacaggtgaaggtttataagcatgtgcttattaattggctttatctctattcagataatttttgtgccttaaa

SEQ ID NO: 6602 - DNA, 420 bp, Oryza sativa
  unsure (1)..(420): unsure at all n locations
tccacacccatctccacactcctcttctctcctccctctccagactcttctctctcccctcttttcttcccccctctctctccccccagcatcgtaccanaccacacaaccgcagcgacggcaacacgaagctctcctctccggcgagaatagccaagaacgcgacgcgaccacacccaagaggccgaacagatcgagctcaagaaggttttagcccatggggatggattactacaagatcctgtgcgtcgacaaagccgccagcgacgacgacctcaagaaggcgtaccgcaagctcgccatgaagtggcaccctgacaagaaccccaacaacaagaaggaggcggagaacaagttcaagcagatctccgaggcgtacgaagtaagcagccagacagagaatctgttctgagtggattc

SEQ ID NO: 6603 - DNA, 334 bp, Oryza sativa
  unsure (1)..(334): unsure at all n locations
aaagtccagctttctcaagctaccttgagatcaccatgcattctggctgccaatgccttagcaaaatctgcaatatcatgattcatgtcaagaactagtggagtgttgtatcctctttgcttggttgaccatcgtctcaacaacatccggatggcagtgcccgctacaaacagttgctatgccacctaaagcatccacgtgacggaggccatcctcatctaacatgtactgcattctcccatcgactatgttcaactgtaatgttagntacatcctaatggtcagcttttggaacttaaaatctccaaaaaccatatctctatcacatattgat

SEQ ID NO: 6604 - DNA, 257 bp, Oryza sativa
atccaactgaacacagaatcataccactgatggttggccaaaatgtaagtggctgaaaggagggacatgccacaaaagaaaatacgacggcaaaactccaaagagatgtcaaaacaatggggccataatctaagccttctgtgctacccagaagggccataaaaacatgagggaaaaatggttttttgcaagggaacaaatcgaatggcttagtacaaagaaattagattgaaacccttggttgccaacaaatacga

SEQ ID NO: 6605 - DNA, 226 bp, Oryza sativa
ctacctagcacaacataatttatgctaccaccaattccatgtgcttattgagtcacagcccctacccacatgatactgatctaatcaccaaaaagaacacgtcgaagcatgttcatgatgaaacgagaaaataattctgagaacaatgaggaacaagaccatggaccgagaacacaactaagagtgaacaacatgttctgcgactaaataagttaagtgcctaatt

SEQ ID NO: 6606 - DNA, 222 bp, Oryza sativa
ctgcagcatgcaagctgttactctggaggggtccttcttacggtaggtgtccccgagttgttcttcaatgttgtggaggaccccgcaacttttgatggtgttattcaccttcgaaaggaaactgattcacgggagtgaattcagctgagtttagagggcgtttggtgagcaagctacttgggtgtcttggcgttaaatgggatctattgtacttgagaccaa

SEQ ID NO: 6607 - DNA, 408 bp, Oryza sativa
  unsure (1)..(408): unsure at all n locations
ctagaactagatctgagccaaagaagaagatttggtcgagcatgctgctatctacccttctcctcgaccaccaagggcaaccgcactagctaccttgtcaaccgctacaaaggtaccgatccatgctcaccaccgatgaccaggaataccatatttggctataatgggagtagtggcaccgtctacagtgctagatctgaaggtagaggcgatggatcagaaatcgatggcgctagttaagaagctagccatcaagatgcgatgctcgattggagaaacgatatgcgtgtggggtgctcgcagtgattcattgaacatagatcgaatcgtgaagtgggatatgaagcacaanatagatgagacctactggtgggcctcgactanttcgtgtgtgaaatatgtcatcta

SEQ ID NO: 6608 - DNA, 354 bp, Oryza sativa
  unsure (1)..(354): unsure at all n locations
aaatttacatttaagtcccttaacgccttctggaaaaggagattttagaaaacgatctcccacagggcgtgaggcatctatatttgttaatttctaaacgaaaatctgctttgtgaatattttaataaaaaaatgtgtaaataggaaaaagaagtttaaagatctagcctgtgtgatctgtaagggcattttccacccaaaaagccattgaggtgaggggctcccccacttatatcttangtcctttacccttctacaaccaatacctttgatttacacagcctaccacaataccataataaacgcttcctccgttacatacatatgagaagatattttaagtgtgttctatgt

SEQ ID NO: 6609 - DNA, 315 bp, Oryza sativa
  unsure (1)..(315): unsure at all n locations
ctncattaatcaaatgaacacattaaaaaacttaaatggataacaaaaacaaaataatagagatctagatataaattatagctggtgatggtaccgcatattggctgtcaacttccaaagcttcacaatatttatgaatcccctcctctgtattacctgcaaacttcaagctagtttcaagatcggtcaacacaatatcaagaaactcttcagcaagtttgtaagaaagatctgcatttcgagctttttgataaacctgttacaatttctctccatcagaacacttattggataatatatcacattataaataca

SEQ ID NO: 6610 - DNA, 339 bp, Oryza sativa
  unsure (1)..(339): unsure at all n locations
gttcttttcagttcgagggctgcatgttcaccgcagaaatgacatgcanatctatagtatatttaaagccagtactgagtagtagtactatgtcaatatcaaatgttgctaataatgctaccactataaatcagaatcaaactccagctgcactgacactgtgtatgccatgccanggttgtaccgagcatggaagagtgagtcatactggacagcattgtgcacatagatttgatgagtagtatgagtatgcaagaggaatcttgagacctactcctacatgcagctcagctctctggatgtactcctacacagtgagaagcaagctgatcaatgtgt

SEQ ID NO: 6611 - DNA, 470 bp, Oryza sativa
  unsure (1)..(470): unsure at all n locations
tctcaagctctttgtcatgaagaatcaagaagctgcattctcagctcagaagatctcatcttccatcattaatgcagcttctcatcaatgttgccaacactgtactctctgtattcctgtctttttcttgtgcgtgagtgtgtgtgtgtgtgaaatggaagacgaggcttctcgntctgtgtggagagtatacataaagataagtaatgttgttcggatgatcacgcaaacattgttcaagttctcctgcttaatctgtccactgatgttgtgacttaactaccactaagtcggaggaaagatcatgctgatagctcatgtactcgatcgcgtatgaatatgggcaagtggtgtgacctcaatggactctgttctgaagagatttcttcggatgtgtccagaagaagcggacacagagtgagccctactgcgcgttgacagcgagctcttaccgtgttaccttgtactct

SEQ ID NO: 6612 - DNA, 229 bp, Oryza sativa
  unsure (1)..(229): unsure at all n locations
atgctgtcggaggcgcttctgaatattttgtaagcttctgaatatgatgcacaactttttnttaagttgtgatgaaattggctattgattcgattggacgtttggtgaaaccatgaattggcttcccaaagcttaatgaggtgtcatcgaacctactcactattattgtccatttcagctcgttcattttcagttcttatctcttctccacagggacaacagatcattg

SEQ ID NO: 6613 - DNA, 222 bp, Oryza sativa
tcgtctccgatatgatatgatgtgcccctgtcctggcgacagcggcgccatcttcaccgagctcggccgtctgccccgctcatctcgtagcctccgaaccgccttgcgattttcttcccctgcagattctcgcactgcccaactgcggtcatgctatgatcagcagccacgcggcgacgacacaaaccggcggcaaggggtcgcgctcgcgcggttgccgtc

SEQ ID NO: 6614 - DNA, 270 bp, Oryza sativa
  unsure (1)..(270): unsure at all n locations
tcccaccatgagtttgtgcttaatcacctccctggggacccccggcatgtcagacggctgccaagcgaatacgtctgcattgtcgtgttggaaggtgatgagcgcgagttcctatttctcatccagtgacgccccgatcttgacagtcttgtcaaggatggcgctggagagtggaacgatcttggttgcaccatctggctttcgcggcntgtttgtttgctcacttcttgagtcctcaacttggcggtgggttggggggtgctaaacatg

SEQ ID NO: 6615 - DNA, 456 bp, Oryza sativa
  unsure (1)..(456): unsure at all n locations
cctgcatgcatgcaagctggagaggtgtgggcgctcgttctttacgtacgccaggcagacgaatgtgcgcagatgttccattggcggcttcttgccgaaccaagcttcatagggaatccggttctccaagtttttctcttcttctctcttgaattggagcaaagcaaatctagttgaaagccaacacacaagcagatcgagtagaaataccgtctctgcgagctcagctttggatcgatatcagcgcattcaccatcaacaactactagcttcgtaagacgtaagttatcctagccctgatcctaattcggntcccgctctctgcggtgcttcgtctgcggtgcgcatatgacagcatatctggtgtgtggtcaccattcgagtttgttctccaatctccatgtatcatatcgttcagaccaaaacatgtgtattcctaaactctttaagttcttt

SEQ ID NO: 6616 - DNA, 272 bp, Oryza sativa
  unsure (1)..(272): unsure at all n locations
nttccgtcacatcgttctaatttcagccaaacttctaattgtagtgtgaactatacccaccattagtcacacactctccacttcccaatttgatctaacactgtcaaattacccagaccaaaaactttgactccaaacacgctctcttcatctaactcgagtgcaacaaaccctgcccgaaatacgcccccaaagtccaaccgtgtagcccactttttcctccatttctcacacatacgagccgtcgaataccccacctcctccacaccgga

SEQ ID NO: 6617 - DNA, 438 bp, Oryza sativa
agcttccagagatgtcggcggacgagctgtctgctggacctgtaggagctgcggcggctggagggcctcgccaagcggccccgcgtcctctccgccctcgccaacgagatccgcgccgtcgatgccaagggtgtttcatttccttttttctttcttttttttttcactctcgcgatcttcttcgccgattcgtttcggggcttgggtggtgcgtatggattcggaattcctgacgtttgtctttgtgtgcggatagctggcgaaagcgaccgagccgcatgcaccgcaggccgtcgcggcgggatcgccacctgtagtggcggcggcggcggcaccggcacctgctgctgctgctggggtgagctacgtgacgttggggtcgttcagctgggatcaagatgctgagaagataaaggtatgttgctttggagaatgaaa

SEQ ID NO: 6618 - DNA, 287 bp, Oryza sativa
  unsure (1)..(287): unsure at all n locations
tactaagctatactgaccatgcgctaattaatcatatcgagacttgtactacatacgtagtatacacaaccacatctagcaactagcaagctacgtaccagtcaggggggttggctgctatcctaactngtggccggcttctatacttatgttaaccgtatattcaattctgcaaccaaaggtatcatcagtggcattaaattctgaaatcctgtcattccttctgtaggtgtatagctccaatgtatgtctaggtcgcctgataattaatcgatccggatgatgaa

SEQ ID NO: 6619 - DNA, 440 bp, Oryza sativa
agctggtccagattcgttttactaggaaatttctcatccagtactaggttggttttttgtgggacaaagggagtaattgatgaggtagtagacatacacgagattcacctctataagaatatccagtagaaaatagcctaaggaaactacgaatcatctatacttctattctaatcttgtctagaataaacttaacatatacatgcttacaacctaggcacctaggtattatcaagagaccactccctgctagcatggttatggtatttacgcactcttacgtcatacccgaacgtgaaggaatacaaaggacggatagggctgtcaccacctgctgcctacctcatttttcactagagcacacccacatccaatgacatttatctagcctaagcaccatgcttatgcaataaataatatcactgactccctcgggactc

SEQ ID NO: 6620 - DNA, 238 bp, Oryza sativa
  unsure (1)..(238): unsure at all n locations
attcttcttcttcctgggcatctcatgagattgttcgtgcaatattcatcaccttccattatgtctctgccgggtaaataggccgtctgtgaatgtctaatgatctnttgagctactagagctactctatttgctagtaccttcgtgaatattntgaagcttacattcaataagcagataggccggtattgtggaatttgtatggcctccttatgtttgggtggaagagttatgatac

SEQ ID NO: 6621 - DNA, 428 bp, Oryza sativa
  unsure (1)..(428): unsure at all n locations
agcttcttccanagcatacggctntctagatgtatatgacgatctctagacagatggatcttatatgaatcgtatgatgaagtaccacatgagtggatatataggaaaggaatccaaatctgccgaatcgctcatgttatgatcttctacatcctaggtctccgcgttccgtcatctggcttatgttcttcatgtagcattcagatcgaatgactctatgaaattacgtcgatacttctacatattatgggtaacgtaggagacatccctattttcccccgggggtcttaattaccactgcttagctttcaattcgcctctgaccatcaaattaaatgtgaataacccgtcctcctctctttgaaacaaggggcgcttccggttctgtgcgtgcttcaaacaattntgtcttctccatattaccatat

SEQ ID NO: 6622 - DNA, 325 bp, Oryza sativa
agcttgtcgagaaatacgatgctctctgcgtatatgttctcaagctctttgctactcatacgaatgtatgcaacaggagtatggcgattgtatatgagtctgacccgactggacatgtgaaactcaggagtgactatcattgtagatcgatcgggagatagtatgatcgctctgtccgagtcccacgtaaattatatgactgatttaacgaaaggcacttttacatggggtctattctcttgctagaggcgctacgatacatggctggtgacaggagctatcggtgacagcgccttctctaatataatgagatgtggggagtgac

SEQ ID NO: 6623 - DNA, 205 bp, Oryza sativa
  unsure (1)..(205): unsure at all n locations
taggacgagtgtanagtctaagaagcctgaagaataccggagctggccggaagatactcccatgactattattatgtgcacactcagaatacaatctaagcacactatacgagataatgagaatcatcttgtgagaatgatctattgtcagatactcaccagtattcagtaatattgtgcactatcgactgctcacacataatga

SEQ ID NO: 6624 - DNA, 447 bp, Oryza sativa
  unsure (1)..(447): unsure at all n locations
cacctgaggcatgcaagcttaaagcataagggagatanagttcctcgtttttcatgcgcacgctgcctaaattgtaaaaggtatgttttttaatatatatatatatacatacatatataatgttttttaaaatcgtattaatctaccttttaagtttgaaataattaatactcaattaatcatgcgctaatcactcacttaaatttatgtatctttttaatcttcctattttccctcctctcaaacacacccttagtagttaaggcatactctgtagcaaatcatcacaagaacattgctcgacgtaggaggacaacagtaatgtgacataataatataactaaaatataatatattcatttgttgcgtagagatgttattgttattgacccatatacgtgtaacccgccctcttgccctacctgaacctgccaactactcatccac

SEQ ID NO: 6625 - DNA, 202 bp, Oryza sativa
  unsure (1)..(202): unsure at all n locations
tggatgggtcttattaatcatggtagcaaagttatnttagttaaattctctctcgagctctaaaggaaataatattttaatagccttacagtcatatggtaaattacnccatatctaaatgtcctcaagcgaatttatagttgtacagtatttaccagcaaataccacactnttaagtatcttgnagtaaattttgtcatat

SEQ ID NO: 6626 - DNA, 434 bp, Oryza sativa
agcttatgtgaggcatgagatatccagagtttcagatggtcatgcatggcaatgttgtccaaagccatgtaattgtgacagttttccaaccatcaaccactatatctacgttgctcttgcctctcaagctgcaataaaccacacaaccagctcactactggcagttcgccaaccctgtggactgtggagtttttattgactatgagggattcaagaaaaaaagttacccaatccagttccagtccaaaaaagtaaacaggaccaacttaatcaatttttaccttacattcaaatgcaaactcagaagatcaacaatgctgaagtacatgttgacagccactaggaaaaaaaagacttcaatgacaaaccatagaagcagagtctcaacgtcaatggggactggttgtaagcaaaaatacccgagacatccacta

SEQ ID NO: 6627 - DNA, 266 bp, Oryza sativa
  unsure (1)..(266): unsure at all n locations
cgacagttntcataaggtgactgtgggccattataagcatgaattagtccaagcatggtcccacattgttttttcaatggaggatcaaagccactaagatcgttatctgagcagcaaagtgacagaagtcatgaacaacaagtaaccaagacaacgatacccgaggcaagtactaaattttaacatctaaaaaaatacttgctgcaaagggcaaagacagcagatagagtcattctctatgtacaattacaccaatcctgcaatct

SEQ ID NO: 6628 - DNA, 402 bp, Oryza sativa
agcttataaggagtgcccactgcttcattatctccttttccggctaagtcctccacaagtgctcctacttcaaggatcccctctgtctctggcgacatggctcttggcggtgaatccctccgctctcaagcggttctgcgcaaaatgcaatggcgaccacttccgatgttcctgaggtaaattcttcattctttatcatcctttgttttccaattgcttcattccgtcacttagggtttgccctttcaaatctcttgattcaacatcttagagggcaaattgtgattcctgttctgcatgacccaacacactatttccttggtccaatgggtgactcacacccaacttacttcattaacgttgagaccaataggatcccttttagagaaacacagccagaac

SEQ ID NO: 6629 - DNA, 64 bp, Oryza sativa
actcgatcgagaagtattattgtgaaatatgtgggtgtgtaagtgtagaatgaacgagttctgc

SEQ ID NO: 6630 - DNA, 423 bp, Oryza sativa
  unsure (1)..(423): unsure at all n locations
agctntgtcttgttgagatacanataatgtaataagtttgctcaagataagattgagttgaagcaggagcatcaagtggttggtatcaatagttcgaagtgctgttatttatagacactgagtcactgtatcttgcttaagcaagaataaatttaagtcgtcttcaactggaccttggagccaattaagggtgtctgccttactgtcggtctccataccccatacccaactccattcattacaatttagattagtgtaatttgatttcaatacaattattcagttgaaggtgtttttatagaaagcatggttgtcatcatccataatttcaaacagactgaaagaacacaattctttgcaacttctgtttcattcagatcacaattcaggtaatagtgctgcatttcatttacttctatcttt

SEQ ID NO: 6631 - DNA, 269 bp, Oryza sativa
  unsure (1)..(269): unsure at all n locations
tcagctattatcattgaccatttttatatgagtgatttcatgtccttattatctgcgaatgtngcaanatccatctatatttccggcgaactacttatatataaacacgatcattctagtggtgatcatgacttcatgtgttcctatatttcatgcgcgattggattcaaacgaattggattcgattttactggttcctttaactaatcatggcatcaagcctatcacatgggtccgaaatttgatactcgtactattaatttcaatac

SEQ ID NO: 6632 - DNA, 426 bp, Oryza sativa
agcttcctttagtagattgatttccttattcgaatatagcaggaatccgactattggcgacttgataactcccatcggctgattccgagatgctgcagtcgataatgattctaagccgataacgtctttgccgattaccaaatttcactgttaacatatttctatatggcctctaagcttttcaatataagatgtacattagctagcaagttgcccttgccgcgaagaaattagacaacaaactaaagcatacttagtaggagtaatactctatatatagtcagttttatctcttctgtacctagcttgcttggaataattatatataagtgattaacaaactcagtataaagtacacaatgaacagatggatatgcattgatccgatctttttcgcgaacgctgcattgatccgatctatgcatg

SEQ ID NO: 6633 - DNA, 443 bp, Oryza sativa
  unsure (1)..(443): unsure at all n locations
tactcagcttgggattcatanatatagatgtgtatatgctntatgagtttgatatgtattattagtggcgaatgattatgtggtatanttgcatgatgagttctaagattccgtgggttgatattgatcaatgaaatactccctccgttaaataaaatgaaaaatcggatgtaacacattatagtataatgaatctggacagaggtatgtccatatacgtagtcctaggatatgttacatccagtattagtttgattgatatgtcacatccagtataagtttcgatttttattggacnggaggaagtattacataactgcagttcgatcgcagcaattgtactgatgtggtacaaggaggttccatgcatatgagtagggatggcaacggtgctgcacccgtcnggttcactaccacgtccctgccccgaggtgatgaaattc

SEQ ID NO: 6634 - DNA, 409 bp, Oryza sativa
agcttgcatctttgaaataaccatgaaactcatgctccatttgtgaccatgtaaaaattgaattacgagcaagtaacctataccatgtagatgcgaagtttgacaaagaaaaaggaaacaactttaacttaagcaaatcattactaccgaccttaccacattgttcaataaattggccgatatctccattgttgttctagcatcctcacctgtgaatttcgtgaagttgggcacttcaaatccttgcgggtatgggaccgaatctacgtgttcaggatacgacctttgatatgtatgcatatccactttggattctatctcaatactatcccgcaagacattatcattatcttttccaacatccacatgaccgatttgtgattcggtcttaggtgccaatgctatttca

SEQ ID NO: 6635 - DNA, 232 bp, Oryza sativa
ctcaactgacacatagagtaaaccttagcactaatcccctacctggcgcgctcttgttgacggggatacctgtagactggatatagagggtatcgcggtacgctgatacgaagatctacgtagtacgacatcaagccaacagaatacagggattatactggttcatgccccttgataggtaacaagcctaatccagttggtatgggattatatgatcaaaaccacaaactac

SEQ ID NO: 6636 - DNA, 412 bp, Oryza sativa
  unsure (1)..(412): unsure at all n locations
agctntagacaatttaataacttggttgggaaaatcaggattttcaaaacctggtgggtgtttgacataaacttcctcctgtataaaatcatgtagaaaagcaattttcacatccattcgacacaatttaaagccttttgaagcagcaaaagccaacaaaagtctaattgcctcaattctagcaacatgagcaaaagtttcatcaaaatccaaaccctccacctgtgtaaaaccttgagcaaaaagtccagctttatttctcacaatcaaaccatcctcattttgtttatttttgaaaacccacttggttgattcacgttctgtatcagtactagtcgaagttgtaatctctggaggtccatctcgatcagcatcgacagtaccgggacctgacgagcctggccggtctgac

SEQ ID NO: 6637 - DNA, 368 bp, Oryza sativa
  unsure (1)..(368): unsure at all n locations
atatgtactattgttccgatccaatgatatgtattntattgtgtatacatgaggaagatattatgtgtatataatatatctaatctaatgatctggccaccaatgttaaaagaaaattgaggatatgtatatatgtaatctaatggtgtgaaataacgggtcaaccaatttaagcgagaaattggcggngagattagatagtgtcaagtgacaattgagagtggtctgtagaaaacgccacgtgacgacttataaacgttagctgcaagtattagcaagtttaatagaatttcagtatataatacaaaattctccaaacaaatactccgtgacccaacagaaggaccatgggtcataaatcataatac

SEQ ID NO: 6638 - DNA, 425 bp, Oryza sativa
agcttcgccacctcagcaccagtttatttggcgctgaccttgaaacaccttctgcgcgagagcctaagtccacgatcttagcgccaaatcacctagcgcttaggccgagcatgtcagtgccagtacggtcattatcgaaccttgccacgcgtgccgatggttggagacgactgtcaaggcctcggcggtcggcgctaaggtgttcaatcttagcgccatcgggtgtggcactgagcacaggtccattttataagatagtttttagtaagaaactaatttgaaataagttttgaaaaaggacaaaaaaaaatgtgaaattttcgccgatatcgatggcccctcctagaaacatgtgtcaaatgtcaatatatccactgtacaacttccgttatatacccgtcaatccccgaccacaggcacacccg

SEQ ID NO: 6639 - DNA, 282 bp, Oryza sativa
  unsure (1)..(282): unsure at all n locations
tagtcaacttagatactaagctaagacaccttttatttgctgcaacataagtagacagtaaaaataagttagttctttgcatgtgcattaggcttgtgcaaacattgaacataatgaatatgtgcagtccaatgtgcattactactaaaatgctggcagtaaatgtgcacattggtaccaagttatcaaatataatcaggagtacatgttacaatgggccacacatctgacagaatgaaagaaagatagttngaacattgtaaacataagataaactgcata

SEQ ID NO: 6640 - DNA, 438 bp, Oryza sativa
  unsure (1)..(438): unsure at all n locations
agcttgaggcttgactnggcttgacttcctaacagacatgaagctggcggtttatcctccagggtttaacaactataagaattggagggacagggagaagaattttgaaaaaccgttttgcaaagaaatgccgaaggttttgaaaaaccgtttcgcaaagaaatgcccgagaattttgaaaaaccgtttcgcaaagaattttgagagccttatggcaatttaggaccggtttacgggaaaccctggaagacatacagtgcttgccacaagcgggagtgggtaactgcttgatctaaagtatagctcgaccctttcctaggcaccggtggcgagggtgggcgtgatggagttgggtcggccggtgtgtccggttgtccagctgccggattcaccgcggcgaacgaggggactgcccgctgccttgcgaggagtgggggt

SEQ ID NO: 6641 - DNA, 238 bp, Oryza sativa
  unsure (1)..(238): unsure at all n locations
tcgtctctttcatcaacccacacgaaattgcatggctttcgtcttgcagcttgtcatgtatgtacactgcatgacatganttattttcttttttttttccttcgaagagagatcgaacaggaccaatntaatcacaacaattctgctgagaccgaaagatcgagcatcanatgagtaattaatcagcatgcacgcgttcctctgtgtcatctgccggctgcatttcgatcgcatcgaa

SEQ ID NO: 6642 - DNA, 407 bp, Oryza sativa
  unsure (1)..(407): unsure at all n locations
catcccagcttgacggttctttaggagcacagaatttatgaggttctgtcagcgacgcacacgcagatgcttttggtctttgcatgataatttagtgagagagaagaaatttaccgntagcctccgtgttccttttcttttcatatgttaaagaggcgcacatgcgtatgtaagtcgatttcatattttttttagctaaacctatttaagtttgatcaagcttatagaaaatatatagtgacattttcgatacaaaacaaatcaagatattaaattttagttttaaagaaactaattttggtgttgtagatgttgtcaaatctctttatagatttatttaaatttaaaaagctttgacttgagaaaactcaaaactgattattatatgatgaaacgggagttatata

SEQ ID NO: 6643 - DNA, 195 bp, Oryza sativa
  unsure (1)..(195): unsure at all n locations
ctcaacaataggctgacatgtgaagggatcatctaacttaattattatgctgctaactcactgccatgtgagccgttaaacagtgacacccacatgnttattatcgtgggagtatctgccgatcaaaggaagctatacttcgaacggctggatcgctcctgagaaccatccttcccgggagatgagcgtgagtca

SEQ ID NO: 6644 - DNA, 354 bp, Oryza sativa
  unsure (1)..(354): unsure at all n locations
agctnttgcagagtgtgcagagaatgtcacaaatcacattgacgcanatcctaaacagtgtaaacaactatcagaaatctgtaatttacaatcatcagaatgcgcataccattgccacacaaatcacaatgacactaaacggtaagcactacttcagtaaacaacaactacagtgctacccaagattacttacgaatctacatcatcagacaggtatttttttccggttcaggaggaataaaattaaaagaacagctagtactatctccacaaggaaagggattaggattaggattaggggtgctcacgtaggtgttgagctgccggacgaagctggagaagttgttgtgcttg

SEQ ID NO: 6645 - DNA, 436 bp, Oryza sativa
catgcaagcttaaagccatgaatccctgttatgcatatctggatctggatcctgcagaacaaacatatacgatgagtagtatctgatataaatataatactcgagaaaaaatcaagtattttaaaatattgattaatatgtatttctcctcttgtcaattttgatttccccgagcagatgattcatatacgtttaaacgctctgtccgactagtcatagcccccaagcaccgggagtcggcctatgcacttcccagacatgcatatgagtgacatgagttcgccattaatggaacaaagtttcacgaatcagaatttactactcgggtacttttgcaattattaagggcagaatataaatttatctcatctctatgcttctgattgattccgaataatacttagcaccttgcgttacttggtccattcaacgagcc

SEQ ID NO: 6646 - DNA, 265 bp, Oryza sativa
  unsure (1)..(265): unsure at all n locations
ctaagcttcgtgacattgcaatataatgtttctcaatttcagctcgaatccaaccaatttctatactaactctagaaggctgtagcgaacactgggttgtctcgtggtgatccttcctgtccggctgctaatatgctgaccaattatattcatgatagctgtagctgatgattgagccgttgttgatttgtgcttgagtggcggcgaatcacagctggaatctttcttagatattattactcgctatatatatgtntgcaattat

SEQ ID NO: 6647 - DNA, 371 bp, Oryza sativa
gagatgaatgctgctgggagcgcatgtgagcctgtgtgagcagatgcaccatgggcaaaaatggacggcctctcctcttctcgcagtcgaaacgcaccgctgcgtgtatccatgtggtacgcgttggcgtttgccgtagcaactactcatttgcctttaccgttgccgttgccatatcctcatggctaactggtcacgcttaagcgccgaaaattgaacggatcgagaagcttcatttccttaaagaaatacatgaatattcatattctaaacattggcgatccacactctacacactagtgagtatcttagcttttaatatagccctacactctcaactgtaacattgttatgaaaaaatcattataatg

SEQ ID NO: 6648 - DNA, 433 bp, Oryza sativa
agcttgcctccgtcgatcatcgatagagtctcgtgtcgacgcctgcagcagcgtcggcggcggtcgacaccctgcctctgccgctaaacccgaacgttagctgcctgaatgctcccctccccttcggcaaccgcacagaggccaacggaaccggactcatggaccttgccgggacgccgttcgccttctccgggaggaacacgctgatggccgtcggctgcagcaagcataaccacctgcgccaccgcgtgccagggcagctcagacgccatcgctagccactcctgcagctcacgacctgagcttagactaggcaatcggtaacaacagcagcgaggaagcaacaagaggcagcagcaagcttgctccaccggataaatgcaaggcgaatgcttcgactcgctcggggagagggctgtctctgcaattgccg

SEQ ID NO: 6649 - DNA, 422 bp, Oryza sativa
agcttattccccacagtatgccaccaaaatgatgcataaccggtacacttattactagcagccttaatcatttgagcattagaaaaatcatactcatcaaattgtttttctactgctagctcccaattaatgtatgcagcggaatcatactttccatcatagaatggtaacttagatgcaacttgtgcaaaattatagtcatgtacctcatatgcatcacatgaagaagtcgtcatatctcgtcgaaggtgtagaagtcgatgttctcgtattcccttgcgcaatcctgccatggttagtagcaaacaagaaacacacacaagaatatgcacgctcctatcaactactaggtagtggtagctaaaatttcacacacactcaagcttttcaccaagctcttacaagttcttaccaaagcaagc

SEQ ID NO: 6650 - DNA, 510 bp, Oryza sativa
  unsure (1)..(510): unsure at all n locations
gatggatggcgcaaggcaaaagtataatgtagctaagaatggtttcttagtcttttcccggccttggtggttggtgtagaccggatttgctagataggcggcgtactatcaagaggggtctatgaagcgagcttgcggatgatcttgtgccatattagctcatatgcatgtaggtgcatttggtgggcttgtctagccaagtgtgatgagttttctcaagtcctaaaccaagaaagaagtgggcatgtccaatatgagtgagtgacatcttatgggtatgtccggtggatatcctntggagtgtgagccctttatccttgacttaagttgtgtttcttggatgggcttttcatgggttggatggtcctttgaataagctcttcatagagtccaagaacgccatattccgagacccgagtcaagagatattcgccgtttactaacggtcggtcgagctgataagtgacctgcggtctgaccgtgggcttatgccggctgaccggacctgta

SEQ ID NO: 6651 - DNA, 423 bp, Oryza sativa
  unsure (1)..(423): unsure at all n locations
agcttatactaaataaactttnttcactgttccaacttctatgatatataggaggttgatgtagtatgttgatgtcgtaactgttattttgtgtctagctgcttagcccgatctatggtgctcttgatggattattctgattttgtggtaattaatcgagggtacaaataaataaattaataagtattataaagtttaaaattttatttaaaaaagtctaattcgaagcttcatcaaggagtgtgctcatggcaatcgataatccataattaatctggttcgaactgggccaggacagttccacttaatgatatactccctccgtctcactgtaagtgcagccataagttttcgtacccaacgtttgaccgtccatcttatttaaagaatttatngaaaataaatanaagttaagtcacgcat

SEQ ID NO: 6652 - DNA, 221 bp, Oryza sativa
  unsure (1)..(221): unsure at all n locations
cagctgagacggcncctatgtcagctggatggagctctgagatccttttatgtcaagttgtgggatactgagacgaatgccgtgcaatcgaattgatgcccgatcttgtcgtacacatattatgctagagttgttttaccgagaccttcaaattccacgacggacaccactttgagttgctgtgatcgtatcacaatctacgacaccgctggattagtttt

SEQ ID NO: 6653 - DNA, 263 bp, Oryza sativa
tccataaacaacttttagtcttgaacattgattaataatgattggaattctaattgtgttaaagctggtttccattgagtggtgggagccctccttcaagacgcacaatggagaggtcgattagtgcatgcttgattgcgtattacctaaaccaccttataaaattgatgagtgtgactttcaagaaactttcctatacaagcttttttttttgctaaaacacacccgctggtatattcgctgaaagtataaccggaaaacca

SEQ ID NO: 6654 - DNA, 409 bp, Oryza sativa
  unsure (1)..(409): unsure at all n locations
agcttgtcagtttgngaaggggttnttttagagaaaagaagaatctacttcaaccgatatgcccttaggcacggccatacataacataaaaatcacacgtggaaagggtgggcaattagctagagcagcaggtgctgtagcgaaactgattgcaaaagaaagtaaatcggccactttaagattaccatctggggaggtccgtttggtatcccaaaactgcttaacaacagtcggacaagtgggtaatgttggggtgaaccaaaaaagattgggtagagccgggtctaagtgttggctaggtaaacgccccgtagtaagaggggtagttatgaaccctgtggaccacacccatggtggcggtgaaaggaaagaccccattggtagaaaaaaacccacaacccttggggta

SEQ ID NO: 6655 - DNA, 444 bp, Oryza sativa
  unsure (1)..(444): unsure at all n locations
catgcaagctntgacattnggccgttctcattctctcatcacatataaagcattatattgaacttctacgtatcgagcccaaatgaattatatataacacgtacatgcaattaagacagacaactgctagtttaattatatggttgaccagagcgcattatgttatataaaaatatgaatacatcacaatacgaaagaacatttgacgagaaaaaaaaaactaacagattaagtttttcacatgatcggagtaagttagtaagaaatactgtatatggaattaaataaataaagtacactatgcggacagtcaaatcgactttttcgtgcgcgtgatcgtgtgtttcctggaagggaaaagtaacacacatcggaattcaaattccatatgcgtttacagaacatagtgtgtgtcgtcgatcgtcttcgaaagcgaaacattgt

SEQ ID NO: 6656 - DNA, 242 bp, Oryza sativa
  unsure (1)..(242): unsure at all n locations
cacctaagttcccgtgacttgctgagtacgaaagtactcacccttgctctatataaatatatatagttccgccgccctgaagttgaagatgaagtgaagtgaagattanggtttcgtcctggttcccagccgtcgcctgtggtgttgggtgttagttcgttggttccgctgcttctgctgttagtggtgtttcctcgtccgtgtcgtcgggtgcattctcgggttgttctgagctgcaacct

SEQ ID NO: 6657 - DNA, 416 bp, Oryza sativa
agcttacactgttatctgctttaagaacttatatttttaagtcccactgctgttacttcgtgtatttattgacggtggccatttactgatgacagacacagactacaactacataaatataacaggaagctcgctcttcatcatgggaaaggaatgctatggagagtgaagagactaagaggagattattgtaagtttatttccttggggatatatctatctatctttatctatctatctattatatactaaaagtccattaaacttcgtacaaacactcctatatcgtcacgtggcactctacaaacgctcctaaactgccacgtggcaaagaaacatctaacccttgattttcatttaaattggtgggtcctatatcctgaaccgttagattagattgatattggagctaacag

SEQ ID NO: 6658 - DNA, 177 bp, Oryza sativa
  unsure (1)..(177): unsure at all n locations
ctcagctgtctaaatcccaaaatagcctttttgttatatgggaataattctgttaatggggattattcagagcacgctcaatggacaatggtgatggaatatctgttggatggttatgacatcctatctntatagataaagaaaggcgccaactatatgtacgccgtatgcctactt

SEQ ID NO: 6659 - DNA, 436 bp, Oryza sativa
tcacctgcggcatgcaagcttgtggggatcgtcctgcgtggtggttacagtgctgtgcaccttatactttctccgtcccaaaaaaacttaatttctgggttttcatgtctaacgtttgaccattcgtcttatttgaaaaaattatgaaaaaatttaaaaagataagtcatgcataaagtattgtttatgttttatcatctaacaataatgaaaatactaatctaaaaaaattccatataagacggacggttaaacgttgtacacgaaaatctaagaattgagttcttttggaaaggggagtatgccgcaaggcggtggtgacatggcaaaatgacctgagacagcaggggtcagtgatgcaagaaaacagcagcatggctcacggccttgctgtgccttcagcaatcgacgtgtggggagatggtgggagtttggg

SEQ ID NO: 6660 - DNA, 532 bp, Oryza sativa
  unsure (1)..(532): unsure at all n locations
tactaagcttctgatnctagagaatttgcgcatgattgaacttcggtaatttgtttatctccactgtgccaaanatgcagcacctaccttggttcatcttcatttctctcaccaatgttgcagttcagcatgcatagacacaatgcangtccctattcagctcaaattgacattctggacattggacctccttgcctcgcgctgcaacatcaccaccgttatcgctacgtacagactgctgcattctcctttctggtggattggagctggagggggaacattgatttgttctttcaaaattcagtaaataggcatttgtacgtgtggcatctgatggttatatgctatggtcatttttcattaaacgttgactcaactttgtggtatggtntcagtttcatttagccattatactctggagggtgctctagcgacaagtgaacgaatcaagaatctttgggagtggacactgctatgcataatggactagatggttatttgagtcacaatataaaatatatataatatattt

SEQ ID NO: 6661 - DNA, 321 bp, Oryza sativa
agcttacattgcccattgcaagtagcctcttgtcaaagatgaaaatgatccccagaaatgagaagaatactccaaagcctgtcagccctatcccaatctctgcaagatgagattcacaaattaccaattgaagtgggtatgggtataacgatgatgtggcatagcaagaaagcataaaagaaaatccaaccaatggaatattaccttgtggggatggaaaaggtaaccccttccagaataacacagggttttatgccttgagaaccatagttccagcctggaaaggaaaaaattggaaaaatgtgtccagggcgcatatgt

SEQ ID NO: 6662 - DNA, 501 bp, Oryza sativa
  unsure (1)..(501): unsure at all n locations
tcttcgcttacacctcgtgcccgcgtgccctcttctgtccaacggaaggttgactaccactagcctcctcctcctggttcccctncacatccctttccacgtgcccctgctggttcccctccgcatccctctccacgttcccttcctcgttcaagtactcgtttggatcctcgttcccctcttcttcattccagtactggctgcttccctccgcgatggtatcgtacaatatctgttcctcatcgcggtcagccatctggtgatacaagaaacatctgctaagtcacgagacatttatgttntaacaatctaagtcatgtatgctaagtgtaaatgtcgacattagaaccctacacaaccttacgtgctaagtctaattaccaatcgtgatataagctaagtctaggtgacgtatattatacaaccctagctagtanataaatatatactaagtctaattacaaatcacataatcgtatattaaaactcagatatattaca

SEQ ID NO: 6663 - DNA, 411 bp, Oryza sativa
  unsure (1)..(411): unsure at all n locations
agcttgatcaattatctgaaggcccaatcaagtctaacattgatcggcttgaggctcgcaagattgaactcttagcacaacttgaagaatgtaacgctgagctagatatggaacacaagaaactagccgatctccccaaattcattgaagaacagaaagtaagactcaaatcggctatcaagcatgttgttgagctgactaagtccctaaaagttatccctggaaccgatgctcaagatgcccaagccatagaagaagtagagtagattaggcaaaaggctatatcggctatccagcgatacttatctcaataatctttgtgtaataggacttagaattgaaatttgctaaaaaattttgcactgtatnntaccgcatttgatatatatatgccccccctagttttacaat

SEQ ID NO: 6664 - DNA, 234 bp, Oryza sativa
  unsure (1)..(234): unsure at all n locations
tctagattatacatcccactcaagtaagagcccctttgtcatgttaccttgaacatagtgatttacattnnggttgtatgcatggtcacaagtgacaaataaataaaaacggaggtagtaaaatgtaagcctggaccaactcatgtactactagcaaagcgtagcaacaaacaattttgcacacacgggtaagtaaaaatatgccattcatattctatgttagcaatccatctg

SEQ ID NO: 6665 - DNA, 425 bp, Oryza sativa
  unsure (1)..(425): unsure at all n locations
agcttcatgaaatcaatggatcctaatatgtgaatattaattntccatattaagcaaattgtaacggggcacaaactatactaaaaacaagtagaataaggaatatttcattacctgcctggcaagctctggaatcctagtatcagcattgatggtagcactcccaactttatcctcgaagagcttgaacgcatcttgttgatctaggcaccccattctgatggtaactccttggcgtgccatgctgacacatacggcctcgcttcgtgatgtcaatacaaccttacgttgattcccccgtccaaggggcaacgggatgccgacagcctccaaatcaatgtagttccacaggtcatccagcagcagcaagaatttcttgttgcgaagatggttgcacaggacggtagcacggttggtgacactga

SEQ ID NO: 6666 - DNA, 156 bp, Oryza sativa
  unsure (1)..(156): unsure at all n locations
tgaaccgcgcgtgggccgtcngagactgtggagccctgcgcaaccggtcgtggagccaacagagccagtggagcatcacggtgccactaatgggagccgcgtggatgccgctagcccgcggaatggcggcctccgaccctgtaacgacagcggtgt

SEQ ID NO: 6667 - DNA, 417 bp, Oryza sativa
  unsure (1)..(417): unsure at all n locations
agcttcatcatgttcggtccggttcagtctgatattaattattcctccctaaacatgcgcatatgtgtgtatctatatattgatcgattactaattttattatttactcatcgatctcatttcaatctgctcctgttgttaatttcactattcatctttgtatgtaattattcctataggtgcaactcctaagctcgttcttcagttgatgaatgttagagggcttatcataggccatgtcaagagccatctccaggtatattatacctaacaaacttgtttcgtttcttatgctcttattaattaatttaggtcagtagtagtatttcctcttaatttcctaaaattaatccatgttgccttttcttccatatngttcgatttcagatgtatagaagcaagaagatcgatgagtct

SEQ ID NO: 6668 - DNA, 242 bp, Oryza sativa
  unsure (1)..(242): unsure at all n locations
ttatagtgaggacanaactccacgcctgggtcagcctgacatcatatgcgctagaatgtgtaaagataatggcgaggttgaaaggcaatatattcacgatatgacaagaaagctgaatattctttgagtgatggcagtggaactgataattatacgaacatgagagaaccattaggaataagaaaggggaccccgcggcggagatgccactggtgatctggaatgctttgtgctcctcgtcg

SEQ ID NO: 6669 - DNA, 342 bp, Oryza sativa
agcttgcccgcaggcacgctctacaactcttatggggttcagctttatgccggcggagcggagacattcgaaagtttccgctatatcccagagtaaaggctcttggttgggcgtcttttcaaccaagttatcaacataggcctcaacatttgcttctaactgggtacccaaagaaattccagttgtacgttgaaaagtaagacccgcattctttaacccgaaagggattgtccgataacaaaaaatccctatggggggaaagaatgcaagtttttcttatcctcctaccatgcgaattgatgaaaccaagtttgcgttttaaaaccaaaagctgcccccggg

SEQ ID NO: 6670 - DNA, 409 bp, Oryza sativa
agcttgacacagatattgtgcagagggtgttgggatttgtgttcgactcgcttaatcctgcaatgaagggagaccaagattataaggttagattggaaagtgtttaacttagtgcagttatgatgacccacttaatcctttttactaagattgaggtcttactatggtgttattatttctttgaaaacgaacaactgaaatatttgctcatgcagatgcttttgttgcacactttgtgcaccttttatcgtgttgtctgattgctcctaacctatgtagtttttttacttaacaactcaaagctatatcattgtgacaattgctttatgatcaggctggcgcgctgatgattattggagtactggcaacacgagaaacactagccccaaaacttgttcagaatttgatc

SEQ ID NO: 6671 - DNA, 438 bp, Oryza sativa
  unsure (1)..(438): unsure at all n locations
tactcagcttaggtgaatcatctggtagaaactatcttgtcagtagtgcgaacatttttggttggtgaaatctacactgcagatatttatggagggtgttaaagcaaaacagacacaagatgctttgcatttggaaacatattctttgcgcagaaacttgcagcaggaaagctctttgatggatctgtacaaccagaaaattgtttccttagaagatcaggtaggttgaacgcaaatattggataatccaatacaatccttccaggaggtgctgatnatatatttcccctgattccagcttaaaatgtggtctgatcgggttgggaaacttcaagaggatggatggcaacaatctggttcattgagtaattaccanagaaagctgggtgatgtgcacagagatgctcanaagcttatgcaatcattggatggaataca

SEQ ID NO: 6672 - DNA, 374 bp, Oryza sativa
agcttgacttagtgtttctgaatccatctcatgcaacacaagtaattttcatgatttgccttaatgaatcaaccaatctcctgcaaggctgcaacacgattagagaggggaaatgatctgccaagggagaaccgaccgtcccctcagccctccgatcagcatccagcgattcacatcatccggctattgtgcatcgtcttcctcactcgtggttgccggaccaagccgcgccgagctagctccgccgcactcggtggcgccgtttcgtcctcccgcttcgccggcggcgaaatcacgggcagaaacgcacaatagccgtacatgcagcaatggagcacggcccacgtcgctgttcgtacgtacgagctgagtgt

SEQ ID NO: 6673 - DNA, 329 bp, Oryza sativa
  unsure (1)..(329): unsure at all n locations
gatggatggcgcaaggcacaggtataatgtggctaanaatgttttcttattcttttcccggtcttggtgtgtggtgtagaccggatttgctagatagacgtcgtactatcaagaggggtctatgaagcgagcttgtggatgatcttgtgccatattagttcatatgcatgtaggtgcattttgtgggcttgtctaaccaagtttgatgaagtttctcaagtcctaaaccaagagagaagtgggcatgtccaatatgagtgagtgacatcttgtggggtttgtccgttggatattctttggagtgtgagcctttatccttgacttaagtt

SEQ ID NO: 6674 - DNA, 418 bp, Oryza sativa
agcttatggtgaagaatatatcatgcagtacatcaagaaaaataagtgggtaacagaatatacataccgctactaaactctcagtatcacgatcgccgtagtatgattcatgatcatggtgaccctggttttccctgcacaaatgtcaatttgtttgtttctggaacatgagcaaaaaaataataataatacaagtcttgcgccacaggttaactctcagtagagtatccggaagactgtaagatttacttgaacttacttaagatcactccctttacggaaaatgcgaatggatggataaccttgtatatggtgcctgcatttaataaattaaaacaatgaactgtagtccttaatttaatgacgaacaagcataacaagagcacatataattaggtaaaactagtgggagaacaat

SEQ ID NO: 6675 - DNA, 501 bp, Oryza sativa
  unsure (1)..(501): unsure at all n locations
tctngggcctctacctcatcatgggcgtttcatgtgaccttgctctcttaattttcttcttgcgaatatgctgtcaatacagtaagtacaataaccaggttggacttgactcttctgaaccagagattgtaactcgatcggcaaggttaactactatcaagtcaataatctcatttgtggataaaaaggaggaggaggtgaagaatgctctcaagaaaaagcctaatgacagtctgcagccaatgacaggaagcacatgagaacaatctacattaaccaccatgaccctattatcactgcctgactgacatatncaacanaatgcataattttgcactgggcttgctggcagcttcagaaacccggtgatgattntgtctggttctgaaggtcaaacctgtaggagctcctcagagtattgtctctgaactctgaagcatgacaggaacattctgaatngtgcccaacagtaacatgtctgaatctccttccacagctact

SEQ ID NO: 6676 - DNA, 415 bp, Oryza sativa
  unsure (1)..(415): unsure at all n locations
agctntgcattaaatgctaagtgacgcatatctacacggtgtgtgatgggagttacgtggtagcggttgtgcggctatcatgcgcaccatcatcacccctacgaatagagcaaggctttcagatggcatggttgactgtcttgccgcttagacggtctcagtgcatgtccacactttcttccaccttaggctgacagtcggatccagaaagcgtcaatagtgctctaggtaggacatgcggcaaagcgagaagttgtctttccaacgagcaccgagagggccacacaaggtcccgacgacctggtccacttgtcaacaagcgaccatatttcatatacctaatccctgtgcgctgccaggacctagccgttagagtttagccattgtggtattcctcgactaactgtatggcaag

SEQ ID NO: 6677 - DNA, 466 bp, Oryza sativa
  unsure (1)..(466): unsure at all n locations
ctcagcttcttagcattagaacgtgttatctacctggagaaaaagggatatatcctctctggtaactgctacctaccagatggatgagtaggggtgggactgcctgcacatgcatgcagatgcagccatgcatgtagtcgggtctggtagaagctggatgcataaatcgcgcanagaaacctggcaatttatagcctaccaatcaatccagcatggactgctgtcgctttgacctctattngagaagccatgataaagtgaggttgcataaatcagtaccagcactgtagagaaatatncttttcagcagttggcttaatcagtaacagtactaatcgaattgcttgcatgatcactaccatacttcattaataccggtatcaggattcagaagtattatttccttagactcgtctagactcggacgaacactaaggcctcatttgtnggtcttcatcttgatatc

SEQ ID NO: 6678 - DNA, 438 bp, Oryza sativa
agcttaaagccatgaatcccttttatgcatatttggatttggatcctgcagaacaaacatataggatgagtagtatctgatgtaaatacaatactcgagaaaaatgctagtattttaaaatatttataaatatgtatttctcctcttgtcaattttgatttccccgagcagatgactccatacgtttaaacactctgcccgactagtcatagtccccaagcatcgggagtcggcctattcatttcccaaacatgcatatgagtgacatgagttcgtcattaatggaacaaagtttcacggctcagaatttactacttaggtacttttgcaattattaagagcagaaaataaatttatctcatctctatgcttttgatttattccgaataatacttagcaccttgcgttactcggtccatccaacgagcccccgggtgg

SEQ ID NO: 6679 - DNA, 508 bp, Oryza sativa
  unsure (1)..(508): unsure at all n locations
ngaactctctcttatgccctctacttctcatgaatggctcactgaatcaaacttccaccattatgttgctttganatcgatcaagtttcctcttttctcatggaagaagcaattgaggcttgccatcaaactatgtcaaatagtccagcgatggaagcacataggtgtgtaatacaactacaaggccatgaatgttctctaagaatatgtgtgccaatatgtaatcaatgtttacagcatggttntggcgaatttcttgtagcatatctatgcacttatttcatacctagtactggtttttcttttcaatacagaaataacttgatgcctattntgtacctcaagttggcatggaattacaaatcagatgtggcttggcattttggctactactgtgacagaaggtttgaggtcggaaaggatacaacaatggcgcacatggattgtacatatgtacattgttggcaacgaagcatcgatgaaacgaagaatattacaatgcctgact

SEQ ID NO: 6680 - DNA, 433 bp, Oryza sativa
agcttggaggtctcccgacgtggctgatctccacgggctgtgtgatccgggttagtaatgtcgtgtgggtaaagtgtaccccctctgcagaggttaacaaactgttcgaacagccgtgcccacggtcatgggcggatgtgaggtgattcctagcgtagttttgtttgactactgcttgtgaaattgctattgtgaaaagaggttcgatgtttgaaaaatctgcagctgacgggatcagctgggcccgggtggccgtttgaaagttgttggcccgggtggccgtttgaaaagctgttggccgggtgccaaccttgattcatttctaaagactgatacattgcacatactccgaccggacgagacgcactgtctcatccgtgtcgttggagaagcactcccttagttgtgtctagagaagagttcaaataaaatc

SEQ ID NO: 6681 - DNA, 457 bp, Oryza sativa
  unsure (1)..(457): unsure at all n locations
atggaatgtcgatgtgtatctagatatactagcatacatactttgttattcagacttcagagcatcagagcaggtgacaatatatgcatgctttgtttctgcacatgcaagctatctaaacgttactattggctggattcgatgttcaatgaaggccatctggtgacccgtcgcgtgttaaagtgacaatgtgacagtggacacctcttttggccacagacataaaaaccgctacagcatatatcttgtcgcgttttggtagatctgctggtacaaacgccaatttctcgtggcgcattgcagaatcaaacggccaaatgctggctataccgccctacgtacacattactatatatcacgttacaagactntctaacnattgccatattcatatagactgtaataaatctagacacacatatatgtntagattcattaacatatatataaatgtgag

SEQ ID NO: 6682 - DNA, 422 bp, Oryza sativa
  unsure (1)..(422): unsure at all n locations
catcccagctntgttaagtcaacatgcaaatcttatagtttgatggttaattccagttcttatatattttttaagttaaaaattttcttatctctcctttttcctcactacatacgaatagagtttgatctggctgttataaattttcttcagttttgtgggcatccttatatctactaatcagactccccatatgatcagtgattatcagcttatactctattctaattctatgaatgaacgactaattaacttaattaactcctcgctgatttaatccaataagggtagtgtgttgggcatccccataatgctagcaaccacatctctagataagagtcattagtatcacatattttgaaatccttctcactctaaccattgatcagtgagttaagacataggagtagagcttcacgtga

SEQ ID NO: 6683 - DNA, 342 bp, Oryza sativa
  unsure (1)..(342): unsure at all n locations
ctcagcttactactatnttatgctatccaattatgtaagaattacagagcactagctgattattatattaataaaggataacacccaagcaaagacacctgaagctaacaaaaaaggaagtatagtatatctacatcgttgcatttagacttggagctagaagtgaagtgaactgaagctgcactgaccatgaccctgntaggatgtgtgctgcggtgcggggtgacctcggcgccgaccgagaagcactcgacgcagaggtcgaagtctgtgcacttggagcacttgatccggatcttcccggaaatatccttattgagtagttgcagtggtacagcgcct

SEQ ID NO: 6684 - DNA, 420 bp, Oryza sativa
  unsure (1)..(420): unsure at all n locations
catccaagcttgcangctatatctccatggcttcttatttaccataccggggaggagagtaacccaacctagccaacaaagactctgaatttggtttttggatttgtactgcctgagacaaaatacccaaattatgcgtgcctaagcagcatctaaaattgggggtgtcaagcaaggctccggattcagctcacggccatcgaatacgccaagaaaagcaaaaaagcaagatagaaagcaccccaaagctagcaagaaccctccaatctctctcaatctctctctcctattactgtgcgagcttgtttcctttctgtcttggcctgttcttgttcagaaagcaggacaactccaaggaatctggctttgttctctaaccaagatagagctctctactcgtgcagcttgcgctgctgcttt

SEQ ID NO: 6685 - DNA, 352 bp, Oryza sativa
  unsure (1)..(352): unsure at all n locations
gacaaggacactatgataggaatgatgaagcttgatctcgcatttatactgagtnggcggctcaagtttgtatgggaggtggttctttaagaaatcggcctctataatatattataggtatcaggtttaattaacccggacctataatatgttataggtgacggggttttttataaaaaaggtacatangngnntggtttatattttatttctcattacacggatgtgggaagaggttcatatgtgtcgaattacctatgaaccatatctatgaggggttctgacaattctaccctctgcttctctctgcttctttctacacttcttttcttaacactcctttcctcttcat

SEQ ID NO: 6686 - DNA, 370 bp, Oryza sativa
ttggggaactcaattatgaaaaaagaaaaaagaacatgttgaaaaaatgttggcctttatcacatgtatttgtgtacttaagagaaaaaaggtggttcaccaaataacacacaacatacaaattctcagaagttttttggaccacttgcctctcaacggtgctgaaaataaatctgctgctatgaaacttcagtgaatccaaatgaaatatggtgggccctgattggtcttcctttgcaggcatacatataatgaccaagctccagtgtgcgctgaccaatacaatacaatatactgtaaggaatagccgaataggtagcgttgcatatataggttaagatatgcatgtgatcagctcaggtcccaactc

SEQ ID NO: 6687 - DNA, 211 bp, Oryza sativa
  unsure (1)..(211): unsure at all n locations
atttgtgatcaacgagatgtattaattaattggtgtatgccttgaaattcttctctaagttctctctctagcanaagtggaattgattggtgtggcatttgcttaattagaatatcatcttataatcctacaaaatgctttgattangagacagtatgtcttcacatcattaacctttcattgttgntctgactactctagttaactattt

SEQ ID NO: 6688 - DNA, 432 bp, Oryza sativa
  unsure (1)..(432): unsure at all n locations
agcttattgatgtgagtntttacaacatatagtaaagacagaggcggagctagcaccaaaacaactaaggtggtagtgcacaactattgaaaacctaaaaaacttcaatataaacgctgtacgttccagtgtttttaaagtgagaaatcttggctttaggggggttcctgtgcaccatctaaactgaacgtggctccgccacttactaaatatgtaaaccatttctattaattattaaaaaccacacaagcaggcagcaaaggagtacctactctactagaaacgagtgccatcacaaaaagagttttcaccataatattgtacttgcattaagtctagcaagttaagtttcaccataatatatttaaggattcctattcttcgcacaaagataatattgatatatttgtctcaagagttttcagaatattg

SEQ ID NO: 6689 - DNA, 455 bp, Oryza sativa
  unsure (1)..(455): unsure at all n locations
tgacgccgctacgggcgtcgtcgccgccgccgctgacgtcgtcgtcgatctctactcggcggcggacgcatcgcggggcgggagcgatgctacgaggatgtgcggtgcacacacgatgatgatgatgatgaggaggagcgacgacgctagtccaatcccgcgcaccgccgccatcgatcaccggccggcgcggcgtcgtacgttcccgaaatcacacgacacaattccggcgttagtctttgttattgctggatgaccgcgtaaggcctcctatttgtagggaagancttacttcctccgtgaaaaaaaacaaacttgagtttcgtgttcaacgtgactgctggcttattgaaatttttatattagtattttattgttgtagatgataacatgataatactgtggcggacttgcttttaatgtttcatatnttttaatagacgcggtataatgga

SEQ ID NO: 6690 - DNA, 426 bp, Oryza sativa
agcttgcttaagcctagttgatacttgataggatatgtgtccggcactccggcctctcaaacaaagtagttacaagaaaagttgagattgtgagatcatgaaactccatagttaagcagtatcgaccactgttctataataattctccaactctctactactgccttccgtcagaaaacaaaagagaaaacagtaatgtttcgtaaattccacccaagtatccggccaatggttgcctcacttcccatacgaccaaagtaaaatcacgaagaagtgaacaagtaaaattgtgaaagcttgaaccgtgaaagaaaatctcgtcttctcatcgtcccctttgctgggcgccggctgcaagtgcgcataggaagtgcgacctgacgttgccggttctgattcctaggatgttgggggagtttcggattc

SEQ ID NO: 6691 - DNA, 376 bp, Oryza sativa
catcaaccttcatgtgtgtcgggagagccatagatccggaccgggcttttgtaatcttccctccatggcttgtcaattcacggcgataaagtgttgcctgttgacatctgtccatctctagttctattgtgcgaagcggatagcaatgtcagagagataggatgttcaccgtgtttttttttttccagagtattatttgtcaactccctagctaattcttttttcttgggaagatgttctggcttgtcccgagtcctgacctcactctttagtctaggtgtttttagagagatgtggatttgacggtgattttcgggaaggctctcgttgacccatctttttttttttaatttgcatgacctattcaacgggatta

SEQ ID NO: 6692 - DNA, 423 bp, Oryza sativa
agcttcacggtaggggatatgaccgggatgctgagattatgaggaggcggatgctgatggtgagggaaccggccaccggcccatcaatttggtggagagaccctctatctcgatctccttgtaccgcaacacccaaagcatgaccaacaacgagactagtgacacgaggcatgggatctaggagcgtcggcacatcgtcgcctcacaatacgtgaccgcggagtggaagaggacgaggatgggtgcgcatggaaggctaataagatgcattagaggaacacaatctccttgcaagcgccatcgaggcgggcctcccgtagcacgaaacgacggtcgagcaggtcctcctctttgggtaactgctcaagaagcaaccggtgcgtcccgttggattgggttgctgggatgccgctggttcgctgc

SEQ ID NO: 6693 - DNA, 468 bp, Oryza sativa
  unsure (1)..(468): unsure at all n locations
atgaaccatcttggtacagaattagtcaaaagcttactgaagtcataagntcatcttgaccaaatctgtcaagaatccagaaacaattggattgtcctaacatattgcatggtgatggtgattcattaatcaaggaatgaatctctactatactgataattgacatagatggtgcatcatcttaaatattctgtcattgccagtgaaaatcgaatttaaggtttgacttctgaaatgtgtaaaatcttatataaccagatactatngttctttggagatgttagacatgtgcagacagtatgcgttgttatagaatagatctttagtatcattatctaaaacatgaatttttagatccaaacgatgctttcngntttttntcttttgattgttctggatatattaagaatcgtatatcaaatcagcggcgactgatggngggagaggaaatatatatagtactggatt

SEQ ID NO: 6694 - DNA, 390 bp, Oryza sativa
agctttaagttccaccataactgatcatatcagcaatattaagaagaacgttacagacagtcataggatagtgcaaaaattatagtttttgtcaaacagaaacaaacaatgaacaatgaactacagaattacctgaagcagttattctaagagtagcatgcctctgatcagattctttcatgccatttgagaaaagctaacacgaagagcacgatgatgttgttagctagctagctagcaatacaagtagagtaaataattaatgcatttcaggacaaaattagaattaccttataaaagaaagggctttccgcagctagaattgcagaactgatgtaaatagactttactctcaagacttgggtacactccatactccaggatgaatcg

SEQ ID NO: 6695 - DNA, 211 bp, Oryza sativa
  unsure (1)..(211): unsure at all n locations
acactatgatactcagcttaacngtgcggccgatctaggttgaanaacatctctggatcatgcgttgattatttgctcctgcattctttaatccgacaggcatggtgatgtatcagtacgccccgaatggcgtgatgaatgaagtctttatgcagtcggaatcctttaggcagatctcatgatatcctgagtagcaatccaaaaagttgag

SEQ ID NO: 6696 - DNA, 421 bp, Oryza sativa
  unsure (1)..(421): unsure at all n locations
agcttctctcgggcttggtccctgcccatcttacgaggggtggaaaaaataatgtagacaaactctaaaatatagaagtgataagatatagataagttacttacattttacagatgaaagaagcttaaaaaaatttgtaaagattaaaaatgtatatacaaaagagaagaggagatgaaagttaaagaagtaaaaagagagagaaaaacaaggaatattatgatttttagccttttcaaatacaatggattttgctaggatggttcttcatccaaatacaaaatgtaataggtttcatcaaaaattgaggcatgtagtttacctgtgtctattatgtcctatatattgcttgaaaataaaaaaaatgtattaacaaaaataacgaanaataagttgttgaaattaaaatcaagtataattt

SEQ ID NO: 6697 - DNA, 239 bp, Oryza sativa
ctcagctaacatgcgacgactggtgaaaacaccttgattttcgttgtatgtcgctcctgcattcttcaatccaaagggcatggtgatgtagcagtaagccccatagggcgtaataaacgaggtcttcaagcagtcggattcttttagtcggatctgatgataacccgagtaacagtccaagaagctgagtaactcgcagccggccgttgagtcaaccacctggtcaatgcgaggtaacc

SEQ ID NO: 6698 - DNA, 417 bp, Oryza sativa
agcttctgcctataaatagcagcagcactcttacattcaagaatcacctctcaacacacaactaagaaacatagctaggtaaccagggaaggtagcatcagcagcaggaggcaatggagggaaagaggactaccacttcgatggtgatcatgtgcctggtcatcttgagcctcactgtcgactccgccaccgcggcacagtgcggctgctgcatatcctctcgggcaaaagcatgttgttttggttgtattgctgctggtggctccgactcaatctgcaagaacacttgttgtttcccatgtattctggccgattctggtaaattcactgaagtcactcttttaaatgcacttcttatatgtagatacagactttgtagcatatcgtggactaatacatatgtgtggccttccatgc

SEQ ID NO: 6699 - DNA, 444 bp, Oryza sativa
actctcctaagcaaccacacggtgtgtgcgggcatattgatgaattgcacacgacccttcatgtgctactcttctagcaactctagagtgatcattatataagtaatactatatctatttttcggcgatgtaatatttgagcacttgtcgccgaatcttccgatcaaccttaagtgtaggatctttctaatatttaatcaaaggaattctcaagctatttctaactcatgagcacgaatggtccgaattcataattaatttggccttttaatcaattgtaacgtgcccccagctctctgtccgagatcggtcagaccggccacgcaatgccggtcagaccaccctgtctgtcctgtcagaccagccatgcagagccgagcagaccgctggctaccaccggtcagacctggcgtgcgatgctagacagaccgcccctgggctatg

SEQ ID NO: 6700 - DNA, 423 bp, Oryza sativa
agcttcgggatgggagttgtgactgcggctgaggagaggggaggaggaaggggtggtgatgcgtggtgatgatcgatgcaactactaagccagtgacggcgaggctggtagcgctcgatgtgctttgtcatctctgcctaagctcggccttgtcgctgccctccactgtgataggagagagaggcgcagtggtgcaacccccccccccctctctctctctgcgtccactgccgcgatgagctcaggaagtcaaagcagctaaaaccggctaccataccgctgaggattcagttaacacggtattgtgagttgaggaatgagctgtatgtatttcggtttacggatgaatttcatactcaccgataaattaagggacccactagtgaacttgttagaactaaataatgggccataagcccatag

SEQ ID NO: 6701 - DNA, 244 bp, Oryza sativa
catactaagctcaccgtgtccgccggagttccctttgctgcttaaaaaattgtcatatatattgtccgaagaaattatcttaattaacctagagctaattccttaattaataaatgcaattaataaatggaattggcattgcgggatctttcttggagttacacatgtcacaatatattaacaggattcttagtggacatttcagagccttggaaatatatttaaccacattaaaatcaccaaa

SEQ ID NO: 6702 - DNA, 344 bp, Oryza sativa
  unsure (1)..(344): unsure at all n locations
agctcgaccgcggcaaaacgcggaggcgtttctcttgtgtgtggaagagggaaacggcgactaggtctctaggggccgattcccggcggtgagagcatctacgcggccacgggaatccgatgctagacgctgattgtgcggagctactaccagccaggttggtgacgagcggctgcttctgagatcgggcggcgactgcggcgatcacacggtgagcgacngcaaaggtctgggcggcgccggttatcttcacgggaggctacttcctgctaccacagataactaacggggggatggagcgctgaggaagaaccgatggaggtcttccgtgctgccggatgccg

SEQ ID NO: 6703 - DNA, 466 bp, Oryza sativa
  unsure (1)..(466): unsure at all n locations
ntgagcttaatgatgatcattggccgttttaccggctgcttttggcgatgctcctctctnttttgtccacctccttttgattcagtggtctcgaacccagctttggaccgggcggccgggtggtgactggtgagtgcaccgggcggaaatgcgcgtgcaatgttgctgtcactgatggagctagcgaaagggatggtccacgacgcagtcctcggcgtggtggtggtgatgaattggcttcacacataacgctctcatcacgcagaaaagaccaatcttgttgtagatttaattgggtaataattcatttaaatcaataantcaaatataattcaaggctcattatgctaagaattcatgtgaattcattcttctatgggatatcaatgggatgaagaagtttgagaattaatccatttgattcaggaattgataacttatatcaattantccctaatgatggatg

SEQ ID NO: 6704 - DNA, 405 bp, Oryza sativa
  unsure (1)..(405): unsure at all n locations
agcttcggtcagaccggctaatctactctggtcagaccgatctccatctatttcgagggtaacttttatttccgctaaaagttttcggtttttgggtataccaaccattcacccccctctgattggcttagttcttgtgtttcgatcctacaactggtatcagagccaggctagattaacatctctggcccgatggacacgtgtgaaggcctgatggaccgtgggagcctgtggggcccgtatacctgatggaccgtgggccggtgggggcccggatacggtgaaggggcggtgaagggctgagggacaccaatgtgtgaagggggagattgttgaagagattggttgtggaagggtaaatgacctaagatataagtggnggagcccctcacctcaatggctagc

SEQ ID NO: 6705 - DNA, 504 bp, Oryza sativa
  unsure (1)..(504): unsure at all n locations
ctaagcttnttatcacatctgatagacagtggtacagccaataaagcgtatttaggggttaatattctttgatatatccagaccatagccgatatagtctaactacatcagctgagaccaccaacgatacgctatcagcctatcggccgatcggctgactattatgtcttgcttgctgattgcangattaaattagctggcacgtcctttatacactcaaggctagccttggacctgcactggagttaagcagatnctccatgctacccgtgttttacatgaacactgggaaagcacatactctgactggagtcatgatctaactaccagtgttggtgatatanggtagcactaactggttagccaatcaggacaatctctcgctagtgcagttggtgcatttctgaagttaatgatgtgaaaagtgccactctattagactgatcaaaattcagcatcttcaaaccaaaaatactcactaagattgacatgatacactgtcta

SEQ ID NO: 6706 - DNA, 414 bp, Oryza sativa
agcttatcattgtcacgcttcacgaaatccatggcagtctggatttccttcacttccccccttaaggtctcctgattgcttctggattttgccttttttgcctcgaccaacacatctaattccattttaagcctctcgacccctgcttcaaacatgctatttttctgctctgcagtcaaaacctccaactgaatcttatcattttcaccctttctcaaatccttgctgctatgattttcctccaccttcatcttatggtcttccaattctttcatgatttctgcctcgtcagaatcaaatgcatttgtagatgtctcttttgcctccaccaattccatccgtgaccaaagcctatcattttcaattagaaccttactataataagcctccaattcctgattcttcgctagagct

SEQ ID NO: 6707 - DNA, 392 bp, Oryza sativa
  unsure (1)..(392): unsure at all n locations
cagcactgtctttattcccagagtcattaaaggaagtaagcaaacgggcctgactgaaccgatatattggagaatgctgcaatatcaagccatagatgagaagagaagtagtagacagaataaataataagtcatttcatgaactacagaaacaacacttactccttctatatgaacatttgaagtaggtctagcaaacagaacatacagaggaaagatattctgtgcttgcaattncttattgggtacttcaggtaatgatataagtatctgtatcctacattcatgaacacagatgcaaatcagaagttgcaacaaataaagttcaaaattcaatcacgctttatcaaaaagattactctcgaaaataaattgagtcngggttatgtata

SEQ ID NO: 6708 - DNA, 435 bp, Oryza sativa
  unsure (1)..(435): unsure at all n locations
agctcgtttccagctcgttctttggctattccactnttacttttcgaacctagagctgttgctagcctctcccaagtgtttcttgccttctccactcaatctagagcctaattcttgtgagaaagagagattgagagggagagaggaagatttggagatgtgtaaagactaggatcttgggtgagcacttggaatatctcgtgggctgtcatctcggtgcttattactcttggagatgatctcctagacggttaggtgtcatccacgagaatccgttgcatattgtggatgtcccgggtaagtttgtgaaggatctcctctccttcaaaagggaacgaggtaaattaatgaagttcttgtgctgagattttagaggctntccaagtagagcaacctacactcgtggcggatttctagaagtaggttgaattggat

SEQ ID NO: 6709 - DNA, 460 bp, Oryza sativa
  unsure (1)..(460): unsure at all n locations
tactcagctatgcctttgattgtttagttntcttatatttaatataatcagccttgttaggattaaataaatgttgtagaaacatanaactattgtttttactactatctcaattntaaattaattattggtttagttctgtcttaattccaaatatgtttatctttgaacatcaactgatttctgtaaaatcgtaataatttaccacacatgtgaattatatattatgaaagtattattcaagttaaatctggaaacataaaccttattgtgttaactatattagaatttagaattttagaaatattgatagtcaaagaaccacagttgacttaggactacaaaactagaatgaacaaataacttagaatggacggagtatagataacataattntataatttttaataaggtacccttgagagctatcatattntttacatgtagtaccaaaaattta

SEQ ID NO: 6710 - DNA, 420 bp, Oryza sativa
  unsure (1)..(420): unsure at all n locations
agctttcaaaatttgaataatcatgtatcaattatattggtcaattntatagtaaatgcaagcatcttacaagtgtgcaactactaaatagatgacaaaaaatctattaatagtagaaatgattgcactgcaatgaggtgcaaatttctccagaaaaattttcacatggtactacaagaatagatttagtttcttctgaacttgctttgttagatattacaaatgtgatgattcagcaaggttagatcaaatatacatcataatcatcaatggattcaggagagaaggacgttctgtacaagtcaatataaaaaataaaataaaatataagatttattaattgttagtatgccatatattttgaaagagaattaagaagcacanacacaattgattgaaccaaatctaccgcagatcttg

SEQ ID NO: 6711 - DNA, 435 bp, Oryza sativa
  unsure (1)..(435): unsure at all n locations
acatgggcaaccacaattgagagccggtctctagtgcctgacagtaccaacgatcattccagcattccatgttgccttccactacatctgtcaacgccatgacattactgaaattaatggatctgcactgcttgattaagtattagatggtntgtctgagtcacaaccgaaatgctaaaagttagcatcctaacttgtgtagaactgaggtatcaatgtgaaatatctgtgtaccagatataatcgctgactgtgcatatttttgcaccaactcccgggtttgctctaccaatttctgtctcaaacatggatatttgcagaaatcgtgctaattgaatttgaaaacgttatactatgccgaagatgagtctatgactactcctctgggagacgtctgagacagcgagtgatctgacatatactgatacatgctat

SEQ ID NO: 6712 - DNA, 426 bp, Oryza sativa
agctttgcaactataaaacatgtgtaagctctagcctggataagacaggaaggctgtgccgttgacatgcgcactccacatgtcaacctaagggaccacagtagaccgagtacacagagacggtccacgggtcgacggaagtggaccccgtgtgtcaaccgaggcgagtggccgacaaccggactcccctagacaccacgcaagctgcacacgtggaaaccacgcggctaccgagcgggcacactaacacggtcaccacacgcacaagcgaatgactaccgacaccggtacacgggtaccggggtcgacaaccgcacaacgggtacggggcgacaccgaaagaacgaggacggtgcagcgagaggagagatccttaccaccacgcgacgaggcgtgtgaacgacaacgacgaacgggcgaggcgga

SEQ ID NO: 6713 - DNA, 172 bp, Oryza sativa
gcaggagctggaggaaagcaagtccgatttacctttaacacccctacctgaagtctgtctatcctaacctgtgtacaagtcaccaccttggagtcggtgcccatagtctgtgaatatgccgacgtattttcacaagaattaacgagtatgccaccagaccgagagattgagt

SEQ ID NO: 6714 - DNA, 427 bp, Oryza sativa
agcttgaaagactcgttcatattgtcgcattgtttgcaacaattacatatccctgagcttcaaagctcaaactatatagctgatgccaaagtaggtttagcttgcgtgatcaagatattttagtatgcaacatggataagcaccaacgaccttggaataaaccacttgcaatatatgttttttttcaatacagataactaaactgacttcaagaaattggctatcaccatcttgtgtcaagttttatatgtgccatgatcgacgatgacgcgacgtgtactatatagtactacgtgctaactgtaataagcaatgttcgacattgcatgcactctagttgctggtttatttattaatgtcagcatgatcgagatgcagatttggaggggttgaattgtttttatgagggtgggtgattgatatcaag

SEQ ID NO: 6715 - DNA, 413 bp, Oryza sativa
  unsure (1)..(413): unsure at all n locations
agcttgagacgacaattatgcaactttttgtcaattatagttggagattcacaaatagacttcaataatgtgttctccttattttagtttcgttacttattttgttcatggggtgttctcaatgatttgttgaactacactcttgtttgagtgctaatatgcaataattggctgtagttctcttgagcaaagaccgggatgttatattccattatctaaagaaaaattcgtatatcattcctacaattataaggctataatctacaatttctctatatgtatattgttagttgtggggtgtttggttgcatccacgaagcctgactcacattaggccatataaaatagtcatgcactagcccgcgagctatgacgagacgatgcanaagtgtcctcccagctacgctgagcat

SEQ ID NO: 6716 - DNA, 389 bp, Oryza sativa
  unsure (1)..(389): unsure at all n locations
aaagtaggaaggtgtaaaccaaaagagttctgaaacgctccccaaacacaatttgcaaaatgaccatctattaaaagatattgaataatctcatttgtcatacattaaccacatcttaagctgccattccaattccgttntgccaaattgtctttgntaacataacccctttaagcaagtaccacataaaaatcttaattttaagcggcatcttaagtttcttaataagcctatttctctcaattgaaccattattaattaaggcttagagctagatacattgaccttacagaanataaaccattctgatgataagttcatctaaaatagtcagtagaatgattcaactgaatatgtacaatagaagcacgcaattcatgccaatatac

SEQ ID NO: 6717 - DNA, 394 bp, Oryza sativa
  unsure (1)..(394): unsure at all n locations
agcttcgttgctgtgtaacacctttntccgatcccttcttgcctgaaattagctgtgctagtggagcgcactggttgaatacttgcacgtgactttggtagctaggtatcagacgttatacattcaatataatttcttcattttttgtttgattggattgtccgccttcgtgcctggtttacaagccagtttcggcctagggtttgaacaggttcgcttgaatttaaggcgaaatataaattggttactttgtcgtgaattgtcatagaagttggaacctggtattagttactntgtcgtgaactgttgaaattggagggagattcaccttttctttggaatgatagctacgcttactgcaggattaactgcgatcgtatanttttggtcttta

SEQ ID NO: 6718 - DNA, 546 bp, Oryza sativa
  unsure (1)..(546): unsure at all n locations
tcctaagagaagatcanaagcagtagtacaagagaatgttagaaacttagaaatccaacanaaagtgtaaagtttgaacgaaaggacggaacacgaagtgtcaagagacaaacctaanaacgttcggtataaagatattgcaattttcgtaaaagttntaaggtgcaccaaaatgcatggaaccagttcataacaaagtgttaatatgcggaatttgcatcagattcngagaagaagaagaaagatcgaagcggatttggtgttaaccaaggtaaaaattgaagtcggactgcgcatttgccagcgtcgtatcggctganaacaggatatangcttaacttagccgatatggcaagtagccgatacgatataacttgggctcggttggggcctanattnntgtggatntggacatagaccaccgtatatggtcttggttgtatttatttttagaaagggttgagtcgtgtccataatagacgaagtctgtacttggggtatatatatgaaccacatagcattataatctgagagaacattcaatac

SEQ ID NO: 6719 - DNA, 415 bp, Oryza sativa
  unsure (1)..(415): unsure at all n locations
agctnggtcgcgtagtactctcctatgttatatgtcccctagattatctaagaggcgatcgtgcatgtcgggcgcctggtacgtgtggtctggtggatgtcgtgtttatggtcatgatgaataaaatgcagtgttccttcgataaatctagtggttgtactgtttttttttttaacgataagggcatgagttccgcatatgtgaagaaaggaagaaaggagcaaacagaagcagaggaaaaaactggtggaaaaaaaaaactctagccttttattttactaaagtatttggtcttgtagggtagttgccgagggctctcgtcttgaactgtcttgagaagtttgtctactccacgccttccaatgttctatgattcaactttgcacgattgtgaaatttatagcagtaacaagtc

SEQ ID NO: 6720 - DNA, 416 bp, Oryza sativa
  unsure (1)..(416): unsure at all n locations
agctttatctgaagcatgactgcntttattgagaatattagctttttacttgagtgatcgtagagatctgatcatttttgaatttagctataaatgatattgtaaagaagggttatttaatcatcgtgttgtgcttaatattctcacttttgtgtacttaattaataatgttaaaaaaatatctgatggtccagataaaaatattggtggggatcattaataggattaactatgtgagagaaccaaggttttaggtcacattttagtatgcatttaataaacaagtgttgatttgtaactcagtttttccaatttgttttgtgacatgctcactttctcagatttaccccgttactcattaataccttgcagataatcttgaaactttcacctgttctgtatagcaagcttaatac

SEQ ID NO: 6721 - DNA, 448 bp, Oryza sativa
  unsure (1)..(448): unsure at all n locations
ctatgtcaagatgaagcaattaattgatcagcgcacgagccatctctgtgagtcattagcttcgncttcgcttgagagcaggagatctacttcagcaactccgattatttcaccgaccattatgtgcttctccacgtgctacaagctactccaaatttctcaagcatcaacggtgagatttaatctacatattcgggagtttagagctatcgaccgagcaactcagtttcgatgaggtcggcaacagcattactttcctcctagtgaagcatctgcaacagctattacaacaagttctatggtcatgtntatacatcaaggagcgctgatcgatcttcgcatacacatgctcacatcaagggaactactcgagtgttgatgtcatctcaacaatttgatggatattggtactgacatcatcaccagcacctcttcttatcggtcctga

SEQ ID NO: 6722 - DNA, 433 bp, Oryza sativa
  unsure (1)..(433): unsure at all n locations
agctnggatgtctgctggattccgcacataacgttccagaaagaaaaatgacacgtcactcggtcactcgtattcccggagggagtgaagatgtcaacatggaagtgaagttgggggttccaattcttttggggttaggactgttcctttccaaatatcctagtgctgttaggtgccaaaaatcctagtactattaggtgcggtcttaataatcatcattattgccttcacctggctcgtggccattcttcttgttgcgtggactttgttgacgagtagtctatggcagaaatcgaaccacctatctganaccattttctccgaaaagactatggttagcgatcatatcaagtgtgactgccaacagttttacttttgcaccaccgtaagtccgtaactaacctacctacacacgtggattattagccaaacc

SEQ ID NO: 6723 - DNA, 487 bp, Oryza sativa
  unsure (1)..(487): unsure at all n locations
ngatgagatcatgccaactaggatgaacactngcatatgcactcagccncagtatcacacatgtttgccacaagttgagcaatanaactagtgttntatggcaagtgtcctagaatcattngcagctaaaccatatataaataaattggtatccagttgctgatggccctgtacactcggaatccaagtgcttattangtgcattgcatctctaccaatcgatcgggccatctgattggggaatgcgccatgaacaccatgagaatctgtctcgagcgaaggggccccatatttgttggacagttgatttgtctatgtattntaagtcgattttgcctcaacaagatgggttactggttcagagcatatatacttttactttccccgaaataattgngtgtctgtttctgaaattttggatgttngcgtcctagctgatgagacatcgtacgttcatagcatatataattaagtacatatattagta

SEQ ID NO: 6724 - DNA, 419 bp, Oryza sativa
  unsure (1)..(419): unsure at all n locations
agcttcttctttntgtatagtagagacattctgggttccagcataacactgaaagaatggtacaagcatatggtctggtcagttccataaacaacaccgataagaagattcgatccttggtcaagttccaaataacagcacaaaaagacttactcttccagcacttaagagggaacagctaggaggagacggatgcccagcatttgcatcttgacctgcagcattttaatcagtatggcacattggcacggcgggctatctatttccagaaatacatacaaaataactaatgaaatttcaattgcaggtgaacaaaatcaacaattggtttatatagaaggcctcctgaaacagaagaacacttgacacaaagccacaagcatagcaacgccctcaaaatatacaatacattacaatta

SEQ ID NO: 6725 - DNA, 238 bp, Oryza sativa
  unsure (1)..(238): unsure at all n locations
cacctaaattcccgtgacttgctgagtatgagagtactcacccttgctctatataaatatatatagntcctccatcctgaagttgaagatgaagtaaagtgaagattaagggtttcgtcctggttcccagccgtcgcctgtggtgttgggtgttagaccgttggttccgctgctgctgctgttgttggtgtttgcctcatccatgtcgtcngntgcattctcaggctgttctgagctg

SEQ ID NO: 6726 - DNA, 417 bp, Oryza sativa
  unsure (1)..(417): unsure at all n locations
agcttcttctttttgtatagtagagacattctgggttccagcataacactgaaagaatggtacaagcatatggtctggtcagttccataaacaacaccgataagaagattcgatccttggtcaagttccaaataacagcacaaaaagacttactcttccagcacttaagagggaacagctaggaggagacggatgcccagcatttgcatcttgacctgcagcattttaatcagtatggcacattggcacggcgggctatctatttccagaaatacatacaaaataactaatgaaatttcaattgcaggtgaacaaaatcaacaattgtgttatatagaaggcctcctgaaacagaagaacactcgacacaaagccacaagcatagcaacgcctcaanaatatacaatacattaccat

SEQ ID NO: 6727 - DNA, 351 bp, Oryza sativa
  unsure (1)..(351): unsure at all n locations
ctcagcttgcttaaacacctaaattcccgngacttgctgagtatgaaagtactcacccttgctctatataaatatatatagntcctccatcctgaaggtgaagatgaagtaaagtgaagattaagggtttcgtccttgttcccatccgtcgcctgtggagttgggtgttagaccagtggttccgctgctgctgctgttgttggtgtttgcctcatccatgtcgtccgttgcattctcangctgttctgagctgcaacctattgtaaagtnataagtcctctatttattttacgattgcaattattatatttgtcaccgtgggaccagcactatgtcctgggacttgtactg

SEQ ID NO: 6728 - DNA, 425 bp, Oryza sativa
gcttgatatttcaggcttatgactattgaggctgttttacctcattgatctcctccagcgaaaagggtttccccctcgatggaccaattggatctcaaacatccttgtctcctcaacgactagagtcctgctgaacggatgcccaggtgcaccaataaagcacgtccgaagcttgcgacagggagaccccttgcccctctgctgttcatccttgctattgaccctcttcaccacctccttgagaaagcaacagatctgggacttctcacccctcttagaggacgagcaccaagatttagaacctccctatatgctgacgatgcagccatcttcatcaatccaagtgtctaggatatgacaagcctgactgaaatcctataaaagtttgggaaagtgactggtcttcaaaccaatattgacaaaaa

SEQ ID NO: 6729 - DNA, 159 bp, Oryza sativa
tggcagatctcttcaaaagtcggaatatactacttctgtcacggtttaatgattgattgacgctagtgacttttggatatacctttgactattgattgtttttaataagaaagtttattggaaaaaagtcacgcttaagatatctttaatgattaaaca

SEQ ID NO: 6730 - DNA, 422 bp, Oryza sativa
  unsure (1)..(422): unsure at all n locations
agcatgaggggggtgtggctataggttattaaccacgctggacaaacagcatgtgggtgtttgcaaacgccggcaaacgctgtagcgatgtattttctttaaaatttctagtactttctgaactgcctgtactgtatctactgtaagactcattggaggggcgcccaacggaccgaccatacacattccgtcaaagccgacagaccgagcgtgtattacataattgcatcttacaagagcattgcctcttcaatctggataaatgaaataaatgcttgtgctattgggactttgaactgtgaagagtgactcatcaccatantttggtagagaaatttgcctcgtcacatactttggtggacaaatacagcgacctgagaaaacaggtcatagcaccaaaaccataacttttcttttgaacg

SEQ ID NO: 6731 - DNA, 220 bp, Oryza sativa
  unsure (1)..(220): unsure at all n locations
actcatgtggactaacgactntgtatgtgtacgaactcaaatcttcttttttttacaacttgtacaaactgaatctaattccgatatttgcaaccaccactgatgtcgtcgccgaaagttttctttatataattttataaagctcgacgtggtcatatgataattgtagcagtcaacttttaaccgaacaataatgcgcagnntgttactattatgaatc

SEQ ID NO: 6732 - DNA, 272 bp, Oryza sativa
gcacgagctcactatgactcgttggatttgggctacccgttgccccgtgtttgcagatcaactgccctaggacacgggattataggatggacaataaggaccttggagccctgccgctttgactgtatgtgagtactagagaccgttccttcttgggcgtggcaggtattctttcttggaaacctatcatgtgaacggtgcggcttagttttttttgagctattaagttgtcgatatatgggatcctatccaacaacgactgtgctggatac

SEQ ID NO: 6733 - DNA, 384 bp, Oryza sativa
  unsure (1)..(384): unsure at all n locations
gcgttatggcggagcctcacgaagagttacattatgatttcaggctgattatgggggggatagtctggtacacatgaagcacatcagtgatttgactacagatgatcccttngattgatcattgtgtagatgccgtgatgaggaaatatattagctcatcggaagctgtgtatgaggcatatactatggtcagtatcaaatgcatgttcaatttacatgcctgagaattcttattttggcatatttggtgcaagatggaatatgtttctgcacagaactgcattgattgatctattctagcattttactctatttgttgcatgacatgtgtcttctcattattgacacaaacatactatgtgagctgatctgagtatcattcac

SEQ ID NO: 6734 - DNA, 425 bp, Oryza sativa
  unsure (1)..(425): unsure at all n locations
agctngatatatttctaaaggatggngatcttgagataaggggcggatttaaacattctagaaccagaaaaggaagtaaaatggctaaaacaggtaagatcggctgaaaccccaatactatctctattagcagccaaagaggagattagatgaaacgcctcaggatggtacttaatagatcgaacctaaccgatgcagcattaagcatgaagagaagcataagatctaatcaaactgatggaagctcattcgagatggtggatataccgcataatctagctcaatatcgaggcctaagcctatcggctgttttcgatgatagaggctagccgatgaagcttagataacgagatcaatctagattatgcgatatatatgataactcggcaacttgtgtggacaggattagagtgtcataaagatgt

SEQ ID NO: 6735 - DNA, 354 bp, Oryza sativa
  unsure (1)..(354): unsure at all n locations
agcttaccatacggcagacttgggtggattaacngagaggcgcactactacaaacacggattctcggtacaagggggtggagctgtgacattgcgcatatatggtgcaatctcctgtctaaatctatctaccaccgcccaggtgagttgattaacgaccctgatgagatgatttcttgataaatcctagactatttacctttgaacactaatagtggacatcagtgcatcactttgttgacccctcactgaaaaacacggacatcaccaatggatcaacatttaacagcagatcaattctatgacccagtatcgatgacacagcctccacgacaggatcaaaattggtacacac

SEQ ID NO: 6736 - DNA, 427 bp, Oryza sativa
  unsure (1)..(427): unsure at all n locations
agctntacatgcttctgctcttcctcattctctgcgggacgccgcacgcggccaccaccactgccggcgatggcttgggctcgggatcattctcgcgcatgttcagcttcggcgactccgccaccgacaccggtaacggcgcgaccgtcaatcccaactcttcttccaacatgctcccctacggcgagaccttctttggccaccccaccggccacttcagcgatggcaggatcaccgtcgacttcctaggtaaacacacatcttaactcttaatatatataacgggatggctatttggcagtcgcatgtnttttcttgggtctatcattcgctttttaagccgtcggatttctttgtgattcgtactggcttggagttcattttgtagtatcggtgtgtgggcttattgagcttttatttgtgtctg

SEQ ID NO: 6737 - DNA, 299 bp, Oryza sativa
  unsure (1)..(299): unsure at all n locations
tcttcctcctgcggacanacgacagaccagacagagcgtgaatgcatcgatcgcccaagcttccgccgccacattttctgctgctcccgctcccgtcttcgctaagaacaacagaccacagagctctaccggcctactacccccgcgacgagcgaaagcggtgatgaaaaagaaaattccccccctccgagacctagctcttcttcgccttctactcggtgggagacttcttcttcttcgcggtgggcggggggagagcctctgagtcgcatacggctgcgccatggctcggatctcac

SEQ ID NO: 6738 - DNA, 423 bp, Oryza sativa
agcttcacaaccggtgaatggaataaaatcctctgattttatgctttgacaaacaatatttcaggatttaggactattgatctatgagatcagacattcatgtttcaatttttttttcaatccaatctaaaactggcaacataatatcatatttggttatgatgaatcgatatcatgagaaccagtagattatttcactatgaaacatcatggttgacagcagcgcatcacttcattgacccagcaccgaaatacaccgccaccaccacgggatcaacatttagcagcacatcacttcattgacccagcaccgaaatacaccgccaccacgacaggatcaacattggtacaaacagagagcatcaattcaattcaacaatgcaaaggatggaacagcaatagagcgctcttcttaccaatctc

SEQ ID NO: 6739 - DNA, 256 bp, Oryza sativa
  unsure (1)..(256): unsure at all n locations
ctcagcttgaggccaatgggccgccgacggaggaagaaacctgaagagattgggcgccggcgttctcctgcaaggagacatcaggtggcgccagcgtgcggtgaagcctttccaaccaccgatacacacgaggtcgtggnattctctcatttcttttatggcggagttgctcttccaacctcanagatcttccgtgggatactgaatatctatggaatcagcttacatcatttgaatccgaacttcataagccata

SEQ ID NO: 6740 - DNA, 419 bp, Oryza sativa
agcttaacgtatttagatgcaacaagatcttgatataaagggcagacttaacatgtcaattaagcatataaaacaaatatagttaaatcagataagatcggctgaaactccgatactaccctaatcagcaaccaaaaagcaggctagagattatacttttaagcacgacttaatagatcaaactcaactgatgcagcattaagtatgaaaaaaagaacaatatctagacaatcaaaccgctggatgtttcataaggtgttagacaccttatataatctaaatcaacattggcgtctaacctaatcggctgccttccttaatagatgttggccgattataggttagatgacgatattgccagagattatgtatgatatatgataactcgacaaatcacattaacaagattagagtatcgt

SEQ ID NO: 6741 - DNA, 528 bp, Oryza sativa
  unsure (1)..(528): unsure at all n locations
ctcagcttctatgtgaagacatctggaactggatgcttcttcagactcttttanagtgccgtggcatcagtattcacatacaagacatggtgtgatgcaagttatccaccatcttagatctcaatagccatgcgcatgaacaaatcacaacaggaaacatgccgggaaactgaaagtgccacataccagctcaactgaaacgcggaaagccgaaatcctcattcctcaatactaaacaaaacctagtcgcgcaatgatataaattacatcttatagcgcataagcatcagatatctataccatttaggtgtaagcatacattatggtaccacgttttttctcataacaataatcacctttccnccatactaatgggcgcaggtttagcaccataacctagataattctgaagggtgcgagaatcgggccttacctctccttaagcttcagatcatggatcttcatgcacggacctagcatcactcaaaccgaacaacanatcaagcgaccaatacacaacacaacaca

SEQ ID NO: 6742 - DNA, 411 bp, Oryza sativa
tgcaagcttgagatagagggatcgtcggtttgtgttgatgtatgtggctccacttgtgttgaggaagaggctccttgttgtggctccctaggacgtacgtccccaagagccaatcttttgattgcttcgctcggatcctcctcttcacctaacacatgtgagtcaacttgctctacttgagaaccattagtttcgtcaaatgtcacatcacgcgcgatctcaacaataccggaggatttgttgaaaacgcggtatgcgcattcatttgacccatacccaagcaagaatccctcatccactttaggagcgaacttagaggatctagccttcctattaagaatgtaacacttactaccgaaaacatgaaagtaagagacatttggtttgtaccagtaaaagctcataggaatc

SEQ ID NO: 6743 - DNA, 409 bp, Oryza sativa
  unsure (1)..(409): unsure at all n locations
agcttcanaatttattcaaaaaagaggggaggtcatgccaaaatttctagtgaatttattttggtgattatatacaaatcggaggtgcctaaaagattagcaacttcatcctccaatgttttttttgtcatattacatttggagctatgttttgcatacttttttgtctccaaaattttgttgtaagttgatgagagagaaaatttgtgtggggaagaaagaatatatagaaatttagtttatttgctaaagaaggttttataaaatagttgagaaggaaaatatagtgaaagttaatcttaaataatagaaaacaaactaaaatgaaaactaaaagaagtataacacattaatattagtttaaaactttagaaatagtaaataagaattatttggcggtaatatttat

SEQ ID NO: 6744 - DNA, 496 bp, Oryza sativa
  unsure (1)..(496): unsure at all n locations
atctatgctnggcacnnctttgagaatggaagaagagaagacagatgtgattactataatcctttntaaagntntgtggtatatagtagacacaactttgttatagtgtaaatcaatattactcaaatttcaataatacatatacaatattcttatntgaaagtgagtgagggtatcatgttagtagagtgtatgacatacatccatcaactatgcccgacacatcggaattcctgaagtataagaaaatatattatggggtgtactggattgtttatttgtgccaaactattgacaaacaaaaacctacattataccatagtctatgatggataaggggtgtagataccatatactcgctaaagattttaaaaagttatatgctatgatcattgtgctttactttcaaaaccatcaatagtttgaaaattcaaaaaatattgagatcgtatatctcacatataaatagatagatctactgaaaatatactaatct

SEQ ID NO: 6745 - DNA, 362 bp, Oryza sativa
  unsure (1)..(362): unsure at all n locations
gctctgtcataattattaaagctgatgcaaaggagatctgattcttaatatcgctgacggancnntgcgatatatattctgttcctagtaggctaagaacgcacataccttatctntttagtttatagaggacgaggctataattgtattttaccttattacagttatgggtcactgctgtaatacctagagtgctagaactattgngccttcgtgctgatattgtgtatacaccctatcatggttggtgcctatcatttaatactggcagaactgttcaatcaaattggctctgagctttgaaacaaaacatatttctgagtcagaatatgattctgaacatagaaaagtcttttgtgaca

SEQ ID NO: 6746 - DNA, 434 bp, Oryza sativa
agcttgagatggagatggccatggtgaggttgagcggcggcggcggtttggcgaggaggacgtgcggcggggaggtagacgcggcggcgaggaggatgtgccgtggggcggcaaggatgtgtggcggcgacggggaggcagacgcgcggcggcatgtgtgttggcagacgcatggcgcagcgggcaggtgttgacggtcgttatcgatcagttttgaccgtcaatattaccaaaataggagagaactagtgatgcttgcaatgcatatgtttgttagaataataatattctactagtattaggtttactaaccttttgcagagaatgatcataaagtagaggagaatcgacatcaactcagacgataaatcaattggacgatgtcgagaaccagacttgtgtgtgaataggccaataactcagaattgacacga

SEQ ID NO: 6747 - DNA, 440 bp, Oryza sativa
  unsure (1)..(440): unsure at all n locations
tactcagcttgatacaatgaaatattgacaagtcagggtatgcctcttctcatattattactactatccaagaagatcaccaatttccatgtagtttgttaaggatcaactcactcagcccatgttgacattatgaatcatagctgacttaaactgtcgaatgcaacctanacgtacaaatatttctcatcatcttggagaagcaaattaataacaggataagggttcaccatctntggctcaaaactgaaaggcaaattcagaaaatggtcgagttnttctacatctgctttgcgtatggctaattcatatccaccttgatagtgggtatgtataaantgtagcaggacagaacacataagcctaacttttcagctgagaggatctgatagtgcacccacacatgaatgaaatgaanggattaatatgctcattactta

SEQ ID NO: 6748 - DNA, 427 bp, Oryza sativa
agcttaaggcatatgctccccttttgaccaacaaaaggtgcgaatctgctcccctttgtttactttgttgttctaaagtagtacttcacagtaaaatataacgtcatacatgattttgattttccactttcctgttccagtgttgcatctgccagtcagaactctctgtttatcaccattcaaatgctatgtgtgtgttagtattatccggtgttgttaatatcttacagaaagatagagttcatgcctgctatgaagaatgggcttcgcaagtgaatctgataaaagtactaggcttaatgtttacatttttccagcatagttctttgcaggaattatatgtttttcagagcaatcaaaagaactgcatctatatcttttgtgaaaaggataagaatatatataaataaaattaatgcccatgcgg

SEQ ID NO: 6749 - DNA, 221 bp, Oryza sativa
tagctagcagttataatcccgatcgggaagccggccgagacgatcgatcgaccttgttgatgagatgaacggatcacgtgatggatggatggatggaacgaggcggctggccgggaaggaagtgtccgagttatatattggcgtgcctggtggtggcgcggcagtatctgagttgggatccgaatcggaatcggaatcggaagccaggaaggaattaattc

SEQ ID NO: 6750 - DNA, 417 bp, Oryza sativa
  unsure (1)..(417): unsure at all n locations
agcttcagcccaattatgatcctganaacaaattagcaatgcagctaatgtacattggttaagaccatcgaaaagattgtcacaaagcacaggtacctttgtcaaatgcagcaatgacaaccggtttgctgcggcataacatatgcatcctaacaatttcttttccagggaatctttgcttgcaatgcgaactttcccccccttaaaaagattttttaaaaaagggaaagcaagctagacaacattagccatttcgagtaagatctgcctttcatttccatgatcatgatcgctaacattgtgtaagtagcagtagattctacctagtgggcggcgggatcggtaaagatctctccgagggagggaaaagaaaagggtgaggttggcatgagcacaagaactgngaatccaaatgat

SEQ ID NO: 6751 - DNA, 127 bp, Oryza sativa
cactggcgtcgccgacgccgcctcttcctcttcccctgtcgagaggaatacaaacatcagcttctaaatcatcacacgggaaccacattgcattacatgagaacatctacaactatgatccatacca

SEQ ID NO: 6752 - DNA, 419 bp, Oryza sativa
  unsure (1)..(419): unsure at all n locations
agcttgctgcggttgacccggaccgcgccttgctgccatccctccctcttcatcgtcgtcttcctccttggttcttggggttgggggccttgggttggggatggtttggttgtgggttgcttggttggttggttaagaagattgcggaagtggttggttggattggggcttgngatacatacaacgcgcacacacacagacgactgggcgcatgtgtggttgggcaaatgtgtgggattcaccaatgagacgagacggtggttgctgggttgggtgcggttgggatgtgcctgggtcaagggggtagaagtggttggcaagcaagcaagctacgcatttctctcgtatactaaatacatccaataataaataaataattactaatcatctaagaaaataaatggataaacgggcaaatg

SEQ ID NO: 6753 - DNA, 306 bp, Oryza sativa
atcataacgtggaacattgtttatgttttgataaattaaattttttagaaaattcaatgtaggtttgacaaccatgtagggttattaattgaaagtattttttctttatgggtggaaactaatctgaatattacatagcttcatacaaaattaataagctaaaagtatatacacatgtggggtttacgtatatagtaaattttgagaacgtagggggctaccatcatccgaaacagaccctaatccaacaaatagtgattacatctttcatctgaataggctcaaagaaacagctgaccgagttga

SEQ ID NO: 6754 - DNA, 426 bp, Oryza sativa
agcttcagcaatatggcattctatccgttctatggccatatttacataggacacggaactctctctgtttttgcgccacaattccctctggaacctgtggcttattggaactatgacaaaactctgtccaagtaacttctgccccatgtggactggtcaacatgtagttgtcccaccaaatataaacgggaccttgcaactggtgtgtaacaaaaacaaccttctcttgctcgatgcattgcgaaagattcaacttcttctcaatggcatgaagccagtcgtgggcctcgattgggttggtggtgcttgacaaagatggccgcttgacacaaagaaattctaacagtttggaacgaggaggcggaggaaccaactgcatgacctgcttgttgtgctgagcttgctgctgcacctagctgaacacct

SEQ ID NO: 6755 - DNA, 458 bp, Oryza sativa
  unsure (1)..(458): unsure at all n locations
ggctngatacatacagatgtctagaggcccttggatggtgaagtgctctgtcttattatctgnctgtcagcgagcagcagtggtctgatgttggactttggaccttttgacctgatccgtattgtatccttattgcattggacaacgaagatttggatgtttaacttgattgtcgtggatgtcaaacgtaatagntgggagatgtcatgtcagcaaggattgagctcacatganagcatgagtgacatggaagtgagaatgtattgtgcagttttttctagggctgaaaaagtggtgtccaagagtcttattggagntgtattctgattactttaggattctttcaacggctcttaaacatcttctatgtcttntacacaagaatgttatcaaaacatggagttccaaaaaaaagaagatgatcaataagtttttggacttgactgtaaccaaatatg

SEQ ID NO: 6756 - DNA, 408 bp, Oryza sativa
  unsure (1)..(408): unsure at all n locations
agcttgatgatatgacataatancatatgtattcatgcaaaagaggcacagaaaccacagagtagaagcaacgttgggaattaatgttttgagcaaggtcagtaagagagccggctgccggctctaaaaaaattaaattgccgtgtcatctatagtaaatgcagctaatatctacaataacaatactataacaaaatattttactatccttgtgaggtccactattttgtcctcgttctccttcttcctcctacccctcccatcttgtttcttctcttcccatcttttctttaccattccgtcgatgactcctgtgaagatgatgtgggcttgagcaggtggatgacgactgccatcctgtgcacgcaggtgatggcggtagtccagcagatacatgtgagtgtggtg

SEQ ID NO: 6757 - DNA, 368 bp, Oryza sativa
  unsure (1)..(368): unsure at all n locations
tagtatcccgcggcaaaatntgaggtcggaagagcgaagccgccatataagatatgggaaaagactacaacctcgtgtgtatgcggggacgganaagcctcaccgcacgctggccgccacccgatgatctctttggcagggagaacgccgtgcgccaccatctccttcagggtctcctccatcatgtcggatgtcgcccattggccttcaaagctttccttctcttctgccattgatattactcgaatgcgctgatttgattctatggatggctacggaaaagtgaagggattgaggcggtggatcactggaaggattttgatgaactctntgaaggtggatttgagtggaatggtgaaccctatgtt

SEQ ID NO: 6758 - DNA, 400 bp, Oryza sativa
  unsure (1)..(400): unsure at all n locations
agcttatgttgatgatgtagtcgtcaagaccaagcagaaggatgacctgatcgtggatttagaagaaacttttgcaagcattcgtgctttcaggatgaaactaaaccctgaaaagtgcatcttcggagtaccgtcagggaagttgcttggatttatggtatctcaaagaggcatacaggccaacccggagaaaatcaacgccatcctcaacatgaaaccgccaagcacccaaaaagacgtccaaaagctgactggttgcatggcggcgcttagccggttcgtctcacgactcggcgagcgngggaatgccctttttaagttgctgaagaagaactgacatttccagtggggacccgaagcacanaaagcctttgaagacttcaagaaacttattaccact

SEQ ID NO: 6759 - DNA, 388 bp, Oryza sativa
  unsure (1)..(388): unsure at all n locations
agcttacctgcccaaaccttgttctagttctcataaaccctnctcttgtcaccggatcaccagccttggagctgcaattccagtaagcccccacggttcccaggatgggcatgtcgtcagggctcgggctcggagacctcgacctcctcggagacgagttggcagaggatatcttgatgtcctccacggtcagggccccaaggatcggccggtcttctcggctgatcggcgagaaggaccggacggagttgctctccggcgtccccgaagagcccagccatgtcgagaggctcgcgtccaccgagacttcttgcttgcttggcgtgctggggctgtagtcggagcagaccacctgccactctctcttcttggctgggatcgccggctc

SEQ ID NO: 6760 - DNA, 427 bp, Oryza sativa
agcttcctcctttgctgtaccaaaagtcattttgcagtatggctagttctcttgaagagcacgaaaaatttgaatattttttcctgaatactgagacgctcttttgatgggactaaaacttttaattacttatcacatcggatgtttggacactaattataaatattaaacgtagaccattaataaacccatccataatcttagaataattcacgagacgaatctattgaacctaattaattcatgattagcctatgtgatgctacagtaaacattatttaattatggattaattaggcttaaaaatttgtctcgcaaattagctttcatttatataattagttttataagcagtttatatttaatactctatattagtgtacagagactaaagttagtctctgattcaaacaccacctgtatatct

SEQ ID NO: 6761 - DNA, 430 bp, Oryza sativa
  unsure (1)..(430): unsure at all n locations
tctagctgtagnttcttccatgatattcagctattcaaactctgtagattctgattatatgtaaccatagaatctagaacataaactatatagcagagtttatcatagaatctggaaaactgtcttctggcttctagtttattntctggattctacaactataacttcttataatatgggcggaaagcagagattatcttataatctggctaccaaccagctactatagaacctgganaactgtcttctggcttctagtnntatttctggattctacaactattacttcttataatatgggcgaaaagcagagattatcttataatctgggtaccaaccagctactatagaacttgaaaactatcttctggcttctagttattntcagattcacaactataacttctataatatgggcggacagtaaact

SEQ ID NO: 6762 - DNA, 437 bp, Oryza sativa
  unsure (1)..(437): unsure at all n locations
agctntaaactntcagaaggctggacctgatatgcagaaggctccactttggaattatttgcctaaaatcatagcataacaacgtagtcttaatgtcctggcaattaaaatttcacaccctatcaccatcacctcgtttcactggtatgttccaggttgatacttcctccgtctcaaaatatgtatgagtaagagtgataatacaggcctataaaaacatgttctgtccttcagtgatgtcaatgatgaaataaatagcaagaaattatccatgtttcatatttcagaggtcatcagtaattgcaaatctttttttgccgggtcggcgaaagggtgctgaccaaatttcattaagatcaaggaaattgcaaatccttnttttgagacaaaggcaaaagctctgccttattacattgatacccaaggaagagtacaca

SEQ ID NO: 6763 - DNA, 107 bp, Oryza sativa
ttataccaatcaatatatgttatggtgcggaatatatatgatctcagatattgagagagagtataaggccatgcaagttatcttggagagaagagagagggaggggg

SEQ ID NO: 6764 - DNA, 434 bp, Oryza sativa
agcttcctacaagattcacccaaaatctttatatactgcgaccaacagtcaagctcacggaggtgagttctttcaataatgctctggatgacaacatcttcgctaattaaagccaacaaaactcattaaggcatagacaacctgccttgtaactcacgagagtatatgcatcttcacttggaaaaggaatatatattggaactctcctctagattattaatggatcgttcttcccaggatctaattcacgggatctccgatcacatagactgggctaccaccatattataattcacatgggtctcagacccatctccttctatgcattgtctatcacatttcgagataagcccttcgtgaagggatctgccagatttctcgctgctcggatgtaatccaacgttataactccggagtttctaatttcctgacag

SEQ ID NO: 6765 - DNA, 406 bp, Oryza sativa
  unsure (1)..(406): unsure at all n locations
agcttctcttatctgaatgtgggaganatatatatcaagaatgagtacaaccacagtactcaccaagccacaccggcggatgcaccattaatgcaagggggtacaaggggtaatgatataggggttaagctttgcagaaaacagcattttaaagtcacttagttgccctaagccattttaaaaagacgatcctagagctacacagtattattaatcaaggtcgtgaacccgcacgaacctgccttaacccaaggcctacgatgattcataccgaactggcaacccgaccctatgtcccagcttgttctaagccaacccagtccaaccattccacattttagttgttgagcaaatcttaagaatataaacactaacttgtgtacattggtccgcttgcccataaccg

SEQ ID NO: 6766 - DNA, 409 bp, Oryza sativa
  unsure (1)..(409): unsure at all n locations
actcaagcttcgcaacatgctgtnntacaaaatttgacatgtgattctaatgaatgtataattagaatacctcgttggactcaaatggatctatttatctttntatatatgccaaatactttgccttgcttgacaagcttatcatggatatggatcatactatatccatgttgtttgaacacatttaaacttatttccatagatatgccatggagaattaccatagttggccaggcaagaaacttgcaactactatgtgcacctcagttatacacctaccaatattgcaccagacacgctcgaatgactgcagcgcctgcatcactgatttcccnccttatatcagaatcgatacggtacttgggcttcgatcctaatttctttctagctagctgaaccacagatattt

SEQ ID NO: 6767 - DNA, 398 bp, Oryza sativa
  unsure (1)..(398): unsure at all n locations
agcttatgtgtctcatgatgtgtgtctttttagtcactatcccaactntgatttctcggtattcgtgcataagctttccaaaatggtgaacggtattttttttaataaaagtttctatagaaaaatgtttttaaaaaatcatattaattactttaagttttttagctaatatttaattaaccacgtgctaatggatctttcttttttcgtgtgtgagagatttgttcccaaccacagtccacggagtaacggacaagagtttcttcgagataatgattaatgaatacatcaagtaatgaaacgatgaacacacacttcctgtacttctacatatctataaaaaattctatatatgaaattcttatatttgtcgattgtactcttaaatagatactcca

SEQ ID NO: 6768 - DNA, 160 bp, Oryza sativa
tgatagctccaaagattctcacaaactttctgtaatatgctgccaaacctacgaagcccctcaactgtttgactgactgacgaactttccaatgcagcacatctggcatcttagaaagatcagtggttactccattcttgcccatgatatggcctatgta

SEQ ID NO: 6769 - DNA, 380 bp, Oryza sativa
  unsure (1)..(380): unsure at all n locations
agcttgagangcataaattatcaccgtctactgactcattcaatcgtgcgtgcaatggacatttggaaagcactcttatatatggtgttcatcatatacgatgagctgaatatcagctaaattgattgtatgtataaatgattgtagtcgtacgatatatattgaactcgctgggacataaatgtgttttgctgaacatattgcacattagtgtttttaaatgattaatatattatgcacattatctctctcttatttttctcatacagacacataagcttagtttcacatttgaatcatcattgtatatactatttaatcatcatcggaagacacagttacttatataggcttatattctttaacgatcttacgtaata

SEQ ID NO: 6770 - DNA, 284 bp, Oryza sativa
ttgtagtgagctgcccaagagcttgtggcgtactttcgcatgtgcttgagcgctttgacttttactcctttcaaaagttcgagcgatactttgagtacttattcgcccccggaaaacatcacccttggtggagtagcccctatctctggtggggtcattgccgtatacgcctacaaaagccataacgggctaaacttgggtggtccttggggggtcgcctaacagcccctagcaccgatagcagttcctctggccatttgctttcgccgcccataaagtctttt

SEQ ID NO: 6771 - DNA, 421 bp, Oryza sativa
  unsure (1)..(421): unsure at all n locations
agcttcattatctccttgtttgttggattactgttgccaccaaattttatttttttctcaaatttaattctaaaggttgaatttgaggttctttcattgattctcaatcgatgtattttaaatcgcgaataataaaaatgtaaaccttttactcataaattatttttaagctattccattcatattctacggtttatcatccgtagctcaatcaattcatattcaaaaattgtgaggttaacctcctaaatttcacctactacttgagctttttttccctctttctttctgttaagactcaactgtcaaantaattcgttcagaaaaaacccgacgaataaaaagtgttctacaatatttcttcagtgcagacataatctagatcattatattttctatttaatgaatatatctattatac

SEQ ID NO: 6772 - DNA, 409 bp, Oryza sativa
agcttgatagccaacatttgaatataaacttctcccgatgatttgcgatcttgaacgagattcaaatatattgactggcaactgagattcgaaacatataggtgtataagaagttagttctctcaaataggctcaatacgccaaaagtgatgggcttatatagtccatgaagtcttttcctttctaaaaggcaaaattttcatagatggagatctcaaactacatataataagttaaactcttttttttgaaaatttactatactacttagtactacaaatgccatggtatttataggaatttaattcaattcttattttctattcaaatttgaattttcatgaaaccattctattcccatcttgagctgtctcgaaacaccacactttgcggaattcactcgatcgat

SEQ ID NO: 6773 - DNA, 410 bp, Oryza sativa
agcttgatctgagaccatgtagtgcgatacttggatagttggattacttcttacttggatcaattagatgcataaactcatcgaaaattgtatgattggattagatacatgctgttcgttgtacatgattgtgcaatttttttttttgtgcagtggagctgggctgcatgttgggcatccccttgggtacacggcaactgacatcctgtcgaggttcaagcgcatgcaaagcttcaatgtgttgcatccgatgggatgggatgcatttggtctttctgcggagcagtatgctatcgaggtttttactctttcttgtgggacttggtcatttagcctattctttcttatagcgtgctgatgcgttgctatgatctgaccgatttacaatttgcacagaccggaacccaccc

SEQ ID NO: 6774 - DNA, 381 bp, Oryza sativa
  unsure (1)..(381): unsure at all n locations
tctctctttntcangaatcacatgatggccanagcatgatggaatntcgtcgcagtcttcctgcttataaagaaaggcaaacattattggaagctatagctcagaatcangtcctgctcttgttntagatttgtgtttgtagttgactattagatacttcctttgttctcaaatgcttaactcttttgaagaacaagtgtctatttagtaagtacttgtcattttcttcccttctactcccaaaataagaagaaaagactatccctatggccctattgactctgctattgacccgctttacntacttattatgtcttctntaaattaaatggactttggcacattctgctgaatgattgcttggtgtgaaactgctacatt

SEQ ID NO: 6775 - DNA, 307 bp, Oryza sativa
tctaagacacctgcatgctgcaagcttctgcattagaatactgaataatcttttatatatgccatctcaccttacctatattgcccttttttacctgtagcaattctttaacctattgtggaataaaattgtgaattgtatgtcctactattagaatgtaaataattcgcctcgcctattataagacagattcttggtgaatgtattcttattatacactaagcctcaattaaccatgtaggttgatatttctaagtgcattgacgccatatttgcattcatgaaagttgtcacatatgcacatgaa

SEQ ID NO: 6776 - DNA, 411 bp, Oryza sativa
  unsure (1)..(411): unsure at all n locations
gacgtccaagcccagaactcctacagtcaaggtgattcatcttacttattntgttgtagcctatttaataaacattgtgtgacacaatttatggatggtaattacaggagatggagaatcaagaaccggcttcacaacttctaaaaaaaaaagaaccggcttcaaaaatataacataggttcatcctgataagtctaatgtataatagagatctttataaaatatatgtcaactgcatcagagttgtcattggagttccaacttcggaactggaattacatntattcacacagtagaattgaaatactaatttagcttattgattgtaacatnttgtgcgctaanaaatggctgatgtgatcggtcagtgattactatggatgcctatgtcagcacaaagtatctaaattc

SEQ ID NO: 6777 - DNA, 463 bp, Oryza sativa
  unsure (1)..(463): unsure at all n locations
agcttctatttgcaatatatatacatatgatataattcagagagttcctttntaaagtacttgtagcaccaaagataactcggtacctcgagatacttattattacatggagatactcaagttaacattagaaaatatggaatctcatggtatacctttttcttaaagatgataaaattattgtatacataaatcgtcattctcaatctttttcgctattgtaaagatgatgaatatataatgaatgtgtttatggatagacaatggattcacctgcggataatactagatccacctttattatctagtgttatattcttctccgcctaaaatataacaacttttagccattaggatttatcttagaatataacaacttctccatcaacattttctttcaaccaatcacaaccctctatcatgcagttttaccacctacctncactactcatncaatcgtaac

SEQ ID NO: 6778 - DNA, 460 bp, Oryza sativa
  unsure (1)..(460): unsure at all n locations
agcttctaggttntcagtttatgacagattatgttcacaagggtntaaaattattcaactaaaaatcccttcagaaactattgaaaccagccagctcctacttcctggtaatgccatattggaccaagtgcttgtgcatcttgtacaagactttctataacttgccacaattaggataatgttttaatggtaaacagatgctagtgattacgagagaaggaacataacacaacctaatgataataataataataagttagccagtaaacaactcaatactcaccagtttggtcacaccagatcaagctgggattggaacaaaaaaaaggacgtgggaagtatcttctcttggccatcacattatataattggcagcttatatgaaccacaatattntctttacattggatgtgcctatgtctcttcgatnttatgataatatgcatacagagcaccacta

SEQ ID NO: 6779 - DNA, 373 bp, Oryza sativa
  unsure (1)..(373): unsure at all n locations
tccccatactctngtggtacagaacacaagatgaatattgctatataagtttggttcaccaaaacgagagcacaaatggagctggtcaagaacctgaacaaaatggaaaaaatcattgaggaacatgctttgcgttgactgggactgatggctgcaagcaatgacctccagcaagtgctttatggctacatcaaatatcccaaggactccataccacctagtttacagtcaccatagttaataatatgttatagaccagaaagatatatggattggagcttaaacacacaactacccttcaacattaacatgtacatgatcattgatataactccaaggatgctgtttgtaaacaaacagaacatttctgtat

SEQ ID NO: 6780 - DNA, 419 bp, Oryza sativa
agcttgtctacccaatccacaagcacaccgactatgggtctaccccattaagttcaagtcctagaagaagcagtcgatcacccgcatcactcaaaggctaagtctaaaacctgcaagcacaaggttaattccacagccagagtcagtacattattagaaataatgttctggcaagcaccaagacaagcctaagaccctacttgcaaggcatataatcaaggaaggcataatatggttctttttagcataaagcaagttttatttgcataacacatttctaaatcaggtttactttcagataaatatcagcaagctagtatttgacatattgggcatcaacgtatgcattaatcatgtataaatatgcacctcattgccttccatggcagcaaggagatcattctcaaatctcatcacaa

SEQ ID NO: 6781 - DNA, 191 bp, Oryza sativa
tatctcatacgctgcaagaacggatgaatcggaacatcaacaccggctcggctctgtcttcgtcgactggtgcttccgcctgcacggctggcctattatgcctgccgtgatatgcgtctacgccttcaccgagcggctagaccttatcaccgacgactggtgttctctgctgcacggatggcctattatgc

SEQ ID NO: 6782 - DNA, 398 bp, Oryza sativa
  unsure (1)..(398): unsure at all n locations
agcttctgcattntctttgaagttttccggcaaattgaaaccagtcatgcactaccatgttttcacaacagaagtgaaaacaaccaaggttagcctgcaaagggcagtgattatacaaaggtaaatataaagtataagttcagctaatctttattatgaatcttccctggcaatggcgccagaaatgcttgttggtatttcttaacgacattactagaaatataattcccaacaatggcgtagaaataattctggtatattatggttataaagtttatccgcaagcgcacagatataccatttgagcatttcacccgagagtattccaagggtatcgtatttattttatgccgtgggaagaacattggaaaagaacctgactaaaaattatatattac

SEQ ID NO: 6783 - DNA, 204 bp, Oryza sativa
atctttgagcccgtcataatgaatttcaacatgaacaacctaaacaggaccttggcagaattgcatgggatgctaaagactgccgaggaaagcattaagaaaaacttcaaccatgtgatggttatgcataagcgaaagcccaacaacaagaaaagtggtcaaaagagaaagctaaactctgattgagatacgagtactagcaac

SEQ ID NO: 6784 - DNA, 472 bp, Oryza sativa
  unsure (1)..(472): unsure at all n locations
tgacgctacgcctacctggcgcgccaactgtggaaacgtagattctgttatattataatggggnggctatcaaactcggaaagtgtatgggtttggagacaaaggatctatacaggttcaggccttcttatataagaagtaataccctactcctgtccggtgatgaattcgccgagtgtattattgattgtatgattcgggaaaaatcatcatatatccctagaggcgcccggacccccttatatactggaaggagtgcggattacaaaagataatctataattctaccggaatatgaagatagagggtaaaatacagcgtaaccgactaagtctcaggtgtgttccttgaacacaagttagagacaacccgagaacagatagatatttatctcattaagatccggacccattcaataccatgcgtgtaattgggatccctatctcacataataatagaaacatttttttac

SEQ ID NO: 6785 - DNA, 449 bp, Oryza sativa
gcttcaaccaactcctgctaaagtccatctctcagccgggttattcatttgcctgctggtgtatgagcatgcagaactgatgttatcgctttgcttccatccaacgctctaaactgcttactcggtcgtcgaagctacaaggacgtactaacagagagagaggcacttgtgttacagctaaactagataggttctactgcatctagagtgtttgcgacctcgctgctcctacacccttagctatggatggttggtgaagacgtcatgtgcacctttaattcaccatgcctcccaatcatatgtgtgtgaagctgtgtgcgacattattcgtgcgaaagcagtagtagcgatcgactctctcagatctcgcgaagttgttcccggttgcttttgtcactcgcgctacccttcgtttatctacgggtgaagagcacgtagtacgtgctaca

SEQ ID NO: 6786 - DNA, 460 bp, Oryza sativa
  unsure (1)..(460): unsure at all n locations
tactaagctgctctgaagtggcaggcaagagctgaggagatcagaagtgatatcatttaactgtgagattgaattcctagcaaaagaatatattctatgataaaccaagtccctgactttattgttccacagatcttcccaaaacaaacaagattttccatcttgcacagtacatgccgagatgcctggcagtgactttatcactaccgtattatacaaacacgtgccaataattaattgaaggtatgcacgatgttgctttgaaaaatgagtaaccacatgcttaaacagtattcccagatttaggggcggagcttgaacgaaaatggaagaggtgccactcgcgtgcttgtntactctgtttgggctgagttangttgatataatgcctaactggatgaatatgggaaataataacataatataaaggttcttgccggttctggcaccccttcttatg

SEQ ID NO: 6787 - DNA, 442 bp, Oryza sativa
agcttaagatgtatgttcgctacctatttatgtattcaccctcttgagatgagttctaaaatctgttggtatatattttccttcgatgttacacatgatgccaatatagtatatatatgtaatcaataaaattatacatgatccaattttttatcttcctaggcatataaaatgattaaggctacatcttgaagatatggcagctttaatgtatatacttctccaaaacaagttttcagccttatgtacttagaatgaagtagcaccattaattttgatgttttgcaaagtaaattatgccttttggtaagcattttttatatggtcaagcaatctttgaaatgtaaagtgcacgtaatgctgcatacctaggacttgaaataaattcagattcaaagtattcacttttaggaccaagattagaattatccacattcaaata

SEQ ID NO: 6788 - DNA, 469 bp, Oryza sativa
acttgagatccatgttctctttcttaattgcctgagacttctcttgctgatcatgatctatagacatgttggaggcttctagtttcgtggtttccagctgcttcttcagttcagtgatgcggttttggagctttgagttctcagactccaactcctgtgacttggtaactacatcatggactttctccgcttgatcttcctgtgctaggtgcagctgcctgacacattccttcagagcctcatctaagcggctgacttgaacctcgagagaagcatttttttcagctaagtggctgacttgaacctcgagggaaccattcttctgggctgaagctttcagtagcttctttagggcagcaacttcagattcagcttgttcccaacctataaaatgtatatcaatgacaagattagtaatatgcaacacagacaaataaaattacctaaaatcaattgatctcttacaaca

SEQ ID NO: 6789 - DNA, 499 bp, Oryza sativa
  unsure (1)..(499): unsure at all n locations
gggaatggacgatatgaggagatgacgacagtaccagccaagctcaggcttattgcaagcttgccggngcttgggggtcgacgtgatgaggacgttatggcggtgacggatggagctcaaatgcggagaagcgagctcgctgacactcgaggtcgatgtgacgacggcgacagcgacggtcgtcgcttggggtggaggaagcggcctctggcgctcggggcccgagaggacatggnggccactcatggggtgctcagcttgtgagggagagctactggtgattggttgctgagataaaaagacgggagagagatgtgtggataacgacttagtggtgtcttcgatttctttcgatgggagagagagaaagagctatgatgggtaaaagaatatacccatatacgaagagtgtcctcacttgtgacggtttatatttttttgtaccttcacagcgtaaagggtcatctatgatgggtctatatgtgagcatgtcaaacgt

SEQ ID NO: 6790 - DNA, 91 bp, Oryza sativa
tcattgtagaaacactcgaattggtggatagaagaaaatgctgaatgcttctatcacctttagtcttgcatatactcatatatcgttatgg

SEQ ID NO: 6791 - DNA, 380 bp, Oryza sativa
tatctgaacacaactatcctatctaatttacaacttagtgaaggttgggttgtattaattagctgatcaagcgttgctaattgctatggccttgtccttaagtgacatcagatcaaactgagataagatggttagtgatcaaagttttgggagggggtcagctaagacctggcctgaagaaagagtgttgcacttgcacccctgcaccatatatagactgtactgtgtggggccgtcattatattttaattattcggtgtgtgtgacaactaagagtaagaatgtatattggtgtagatgatgagatcctgtgggtcttcctaatctacccatattagaatttaatcatggtaggtaattttaccatttgcctctattga

SEQ ID NO: 6792 - DNA, 442 bp, Oryza sativa
  unsure (1)..(442): unsure at all n locations
agagatcatcatacattattaaagtatgccggtacataaaatactcaaccagggccgtataatgagcgaggtattgtaatgtagcangggaatccgccatttcagctactacaatagtgtattccatggccccctctctttcttcttgttcccaactcactactaagcaagttcgaacgaatngcatatatattatctctcatatcagatgtgagtcaccgcctaaactacactgacttatcgaggttcaaactgtctcgcgggtaaagcaatatactctctcttcgagctcagtcaccaatcattcaatctgtggcagtagtcgtagatagcgtagcccgggatgttagccatctacctatagtgtgagagtactnttcttcgaaactctataagtgtaagaaagagtgcatgtacttttagtggacttgactctttctat

SEQ ID NO: 6793 - DNA, 406 bp, Oryza sativa
agcttcaagtgctgactctagcatataataatcttactggaactattccttccttctttgccaatatcacaggacttagaaaacttgatttcacagctaacaatatcaagggaaacatcccaaatgagttttcaaacttcctcatgatggagattcttcttttgggtggaaatatgttgacaggtaggtttccacaagccatcttgaatctttctactctcactaatcttcaccttaggtttaatcatctaagtggggagctatcatccaaattcctttactctttacccaatctacaagtacttgcattggactacaatctttttcaaggccataatcccagctcattgtgagacgactccaacatccgtgtactggacataacaagtaataatttcactggagt

SEQ ID NO: 6794 - DNA, 411 bp, Oryza sativa
  unsure (1)..(411): unsure at all n locations
tagataataataagctagtacatgagtataagagatggcaatatagtcattttgatgaatagtcaagagttagcccatgaacaattagcagaatgtgtataaaggagatcaaaataaaactcagaagcacataggggattagataaactgactatccatcgggtgatttctagcaagaaatcacccatattttttctaccattaaatttacatccaacggactacaaaagaggataacacatatatatttacttacaccggagttttattanaatacagtgtacttacatgttatatcaactgaatttacaaatgtaattttagctatataggactgtaattntagtatttatagaanataacacatacatataacatttttatcanaattacagtgcacttacatgtcat

SEQ ID NO: 6795 - DNA, 381 bp, Oryza sativa
  unsure (1)..(381): unsure at all n locations
agcttactgcctgcaggatatanaaaacatttgcttggtgaatgatgataagccacatatgatagtctaaaatatttgtgtccatgactataccatcagagaggtcatcagaggggttagtgactggaatttttagtatgctgaattggtgatgtgacaacaaagcctttacctgcagcagatggtaatgtgagaatgaanaaaaaaagcctgatttagtaaattacattggtcanagcatcanagaacacctaagtatacttcaaattgtacaccatctaaccttattngtagctgccatcaatggattattattaacttncgtccagacccatgtacatgtctgatccttcaatgacacttgatggccatacttaattt

SEQ ID NO: 6796 - DNA, 377 bp, Oryza sativa
ggtgatggactctgactcttacgtgttgctcgcactgttgcgtatttcttatctgctcgtactcttggcgaagcatctgtgagatcgtacggtgtgtgaggtggagaaaaatcaagccaattccgtgtgctatgagaaatgcgtagtctgtgagattcaaacctcatttgaaacacatgaatcccataaagaaattctgcgatgagttttcattatgttaactattacatttgaatctctcgtcatctccgcggctaccacatgaccttttaaaccgattggtatcggaccagctatatgcgactgctcaagttttcagtcgtcagaccatcaaacttcacggaaatgagatgtgcatatatttactcccatttcca

SEQ ID NO: 6797 - DNA, 463 bp, Oryza sativa
  unsure (1)..(463): unsure at all n locations
gctttcttacgacgagaacgatctttcactttatcttcatccataagggtcttgatcctgcgtgactggcgacgacccttantatcaactaataaaattgagtcaggaacccaattggcttgtcctggaggaggacgagtgaaatcacacacggnacgccaaccacgcaattcaccacgccaagttgcctcccacgattcctttctaaagaaggagaaacaaaaatgtttccatcaacaccctcttttgcggaagcagcaagaacatgggaacatggccgatgtaacaggtaaggcttgttgcaattgcatttgcagcgtgatactctggccacaacgtgcattccaatgtgatgtcagtagtcccaatgccgacaccactcttgtcacgaagtcgtatctcaaataacaactctctattctcagcangccacactcttgtgggtcctcccttcttacttttc

SEQ ID NO: 6798 - DNA, 396 bp, Oryza sativa
  unsure (1)..(396): unsure at all n locations
agctntcttgttaaccaagggccgatgaccccaactctgctcgacatcactatgattactggattagatgtgacttcatcggctaatcctatgagcctgaacaccaaaaaccaatttgacttcaggaccaagagcataggtggctggtctggctatgtagcagcatacatgggcaaaggatctgtcaccccccgagagcacactgcctttctcttgatgtggctcgagaagttnttgttctgtggatcaagctgcggccttaccaccaactggcagttcttagctgaagcccttgaaaccaagagacaattcccattgngcaaaatccttctcgactatctatatcagatgttgagcaacgcatcggctaagatagttacaggctcagtattaagt

SEQ ID NO: 6799 - DNA, 412 bp, Oryza sativa
  unsure (1)..(412): unsure at all n locations
agcttnctgcttnctatatcgacatgtggtatattatgccagatgatcgatgactaaatttatcgagaaggttagtcgtcgtttcgctatatcgattaacttttgtaacagctagagcgcacggagcaaagtcaggctgtcccaatagcagctgctgcgctagggacctctatatctcgctgctatcgntgagatcgagctaagctagatattgtcatcgtaacagcacatggcgtcatggccatcaacgatactgacgagtgacgacatagacatctatctccgaatgttcatatcccaagattgtgagacacaaagaacataattaagcttcatatacttttgtactaactttaggagaatacttatcacgaatttgtacgtacacactagtacatcattagtttaagtt

SEQ ID NO: 6800 - DNA, 234 bp, Oryza sativa
acctatgatactaagcttaatagccgatgcttcaccactttgtgcaagaaatcggctgatatgctcatatgtagtaacattatcttgtcctgagaactctgagaaatctggggtcttgtatcggcttggcgatggaactctatcaaaatattctggataccgatgccgatacatgatcccattgtctttacgcttgattccaaactgttccctcaccacatctgcaattatatc

SEQ ID NO: 6801 - DNA, 223 bp, Oryza sativa
aattgccaaacaaggtgggatagaccgaaaacaaaaatcatcgatgttgtcaaacttggcttaattctatcaatgaaaacctctgagcacgggtggcttccgaatcctcctgttccataaagcaagcttggaggctctttacttgtgggaaaacctggctacacatttctagaacatgtaaatctctgtcccacagggtggaatcccaattcgagaccttttc

SEQ ID NO: 6802 - DNA, 486 bp, Oryza sativa
  unsure (1)..(486): unsure at all n locations
taatcanggattntaagtgccaaagtctgataaaatcataacctagtccatctttattgatttactcttataattgtaccaagtaggggataataagatatgtgccaatgaaggggctaaagatgaaacacacagttcaactagcatcgatgagactagagaaaacatcaacaacatttagcacacggcattctgactatttctttgattaccttttctttttggttcttaccaaattaaaaacaatttctcctaaattgctacagcagtaagtagtagaagcanaacgaaagtactagtatttgtttgttaccacagagttaacagatggaaccaacctatatatctgggaatcttgaatatgtcagaatggacagcatacacattctaacctctgaatcanacagcactaatctatgcaatgcagagaanaagcactactgaatcgcagaaaattaatccaccgaggacacatnccatcgatcg

SEQ ID NO: 6803 - DNA, 471 bp, Oryza sativa
  unsure (1)..(471): unsure at all n locations
gggatgcttncaatcagatgagagtagtcgcacgatctgtttttacatgtagcgagatttgagacaaagttcatgaatctggccgtctatttctattatctcctatagcgcgtcacacaatgcacattccactatccataaggtggtcttgctgctagctgcacaaggtgttagactagacgacataggttcgaaacctcacccccttataatcatttgatattagtcattccctaatattcgcgttcttcacattccgctatccatggatttataggatcgtgccttccatacatctcaactcactgctcatacaagtacgtactctgctttatgtaattaccgcgacttcctattcttctctgaagaatcaccatattttcgtgatgcatgagaagctaagatatactctctccatttcanaatgtttgacaccgttgacttctatagcgagtttgaccgttcgtctta

SEQ ID NO: 6804 - DNA, 422 bp, Oryza sativa
  unsure (1)..(422): unsure at all n locations
agctntaacaactaagagcacccgcaatggtaaagtagggtgctctctataaaacatgtacatctcagcaatagactagattaatagtaaaccacctcaatagtatgtctacataggtatctatagctctctcatgcattgcctcgtttttctctatagactatctctaagctagtagatagctctgctctctctcttcatttaatatcttccaagtaggaaaatatgctgacatggatctcttgtagatagcttatagataaccattgtgggtgccctaattaaggggagtacttaattacgagtactactcanaagctggcanaggtagtacgtaccacgtattagctaattctttctttccctaaaccagcgaatagtcttacactccctctgtacatcatacattctctttcctgaac

SEQ ID NO: 6805 - DNA, 454 bp, Oryza sativa
agcttcttgtcgttcaacgtctctgatgctcggtgaagatcctggtgcatcttgtcaagcgctctcatcacagtcctcatgcgaccaaaagtagtatcattctcacttgaagctgaactgaaagtactagcaatgcctcctgctgaacagcttggatgataacggtaagcaattccatcgaagatgaaaacaaacttctctcaaatcctggtcatcaccaaatatacggcttcctggcaagcatgctctattgttcctctagaagtctcaaccaccatattaaccagaggggtgcccaaactaccatgaacttccaagcgaactctatgcagcaactctccactgaggggctcaataactgtgtactctgaagcttcaatgtagccggcaaccaatgtcataattgcgagctcagcacggtgaatatgggggagatcagccatctaaagagaag

SEQ ID NO: 6806 - DNA, 367 bp, Oryza sativa
  unsure (1)..(367): unsure at all n locations
ngaataagcactggcatctttcggtgtatctagagctgataaagtaccaaacacatcatatcggcgcagcagatcaaaagagaggatggccactcatcggctgttgttacttgttgccctgctggtgatcgatgctgggtaactacacccaacccctactgatatcatatactgcgttctttcttcttctcaacagtgattacggaaaacggagcgatccattagcacatgattaattaagtatctgctattctttttaaaaaaaatggactaatatgatgttttaagtaacttcgtatagaaacttttacagaanaatgcccgttagtagttgaaagcgtgtacggaaacaggacactacctgaaa

SEQ ID NO: 6807 - DNA, 483 bp, Oryza sativa
  unsure (1)..(483): unsure at all n locations
atgattccctttatttttagacatctgcagaagtttaatatcgtataatgggctgcttcctaagcaacacaggacaaaagatattcaacgtgagcaacgaagcacaggaaattgcccctaaagntcttggttgaaattgtaaagttctgtcaaanaattattcccaatttctatatgggtttcaagacctgaaatgttcatcttaaggttgaaaacaagacagaaatgttggcacattggaattttatctttccgaatatgtaaattattgaggaactggtccaactaggcagctagcagacagtctccgaagttaacaatccaactttgtgatttggtattcttaaggtataacatttnccagctagatgaaggacgagaatcanggtaggaaccacagatatacaccaatgtcacatggattaacagtacanggaatgacgangagacaaggaggccacatgagtaacatgaagcaatact

SEQ ID NO: 6808 - DNA, 360 bp, Oryza sativa
  unsure (1)..(360): unsure at all n locations
cgaagatgttcaatattccaagagttgtcgacgagagttctcgtttctcgcttgagtcgataggaacctggccgggtgacttcagagatgataaacggcctctcccataaaggagataacttgtgccgatcccgtgtagtttgaattatcctcaaaaccaggtcgccgactaanaaggcacgggaccgaacattgcgattatgataacgtcgcagcccttgtaagtatcgagccgaccgaatcaaagctgcttcgcggacttcttcagtcggtgcaagtcatccactcggtcctcttcgtagcgttcttcacggaaatttcgaaagcgcaaagacttcgaatcaacttcactcgggaaca

SEQ ID NO: 6809 - DNA, 469 bp, Oryza sativa
  unsure (1)..(469): unsure at all n locations
atccttaagcaccgcggctgcagctttggaatgcaagacgtcggacattttcaggggttgtttacactctcagttggaatcttggaagataattaattcacaatntattaagtacagcatattactattcctaagcaagaaacaaagctgcttatcctacgtccccccccccccctctctcacggagaaaaaaaaacctgtggaaccaaaaatccattttgttcttctttatttttgcattaataatatttgctcacacatgtacttactattttttataacatggtcaagccggtttggaaatttgttgaaatccagtttgacaagagtgggaagatatctggtgctgccattagaacatacttacttgaaagatcacgtgtttgtcaaatcaatagtccagagagaaactactcattgctttacttcctatgtgcagcaccatcggaggtatatttcctaactcaat

SEQ ID NO: 6810 - DNA, 333 bp, Oryza sativa
taagcttcgaatttaagcaaaccaaatgagaaaattccctatatacccctgaggagttatctcaattctttcaataaccctgaagttgacattatcccttatatacccctgagtgttcattttgatctcctctatacccatctccgttagttgaccattagttgaccgttgaatattttaaaatgactatattacccatcctatacatatgtgtgggacctacccaataaattttcatatgaaacataaacttattcaaaatacaagccatattatcatttaatgcccaaccttaaaaattaaactcattatattttatttttttaaaaatat

SEQ ID NO: 6811 - DNA, 321 bp, Oryza sativa
gagatgatggttggaactgtttttctatatccaccaccgaaggatccgatctctataagctcacaacgaggcggtcggcgcaatctctgccctgagtacccgagtcttcgtgagctcctaacatagtcatcgactacaaagctaccagatctgccatcgctctcccttcttagctagaatcgctaccagcaaatccaaggcttgggcataactcctaggctctgagtaaccggtgtcgtcgtcttcccattcccaagccaccaccattggtcctgcaaatcaagcactccaacttcatcgatctccttccctaaatctctt

SEQ ID NO: 6812 - DNA, 221 bp, Oryza sativa
ctaaactctgccgaacacaaccagcccaactggaataaacacaggcacgacgtgacgctttcttctctgctttatcacaggaagcaaccggctcgaatgtaagtacagcactaaatgctcttcatggatgctgcgcttcccatcttcatcctgaagcgttctggtaataggggcgcgagcggcaactatttctttgcagccatcagaccgatgggcatgca

SEQ ID NO: 6813 - DNA, 432 bp, Oryza sativa
agctttaaaggatgggtttgtgttaaatctactcaaaggagttcctatcatcatccattagccacaatgcctgttaaatacaaaaatatgatgcactgttgtacattcctgaaatggaataaacatattgcatacatccagggaaaggaccaggtctgtccagctcatactatgtgaagattaatggtgaaagaaattgacgtgatcctgaaatgatattttgaaatatcaatgttacgacgagaagagttatctgatgaattcataccacatgactgagtgtagatgggttggaagtaaactcatcctgtgaaagaattgcataatcggtgtatgtccctcttatggcttgtggatgcaaagcaccaaacacttcttgcccaatagtaaaagacgacacagaagtccctgagctgcaacttaccacttata

SEQ ID NO: 6814 - DNA, 176 bp, Oryza sativa
tcatctctatatttatgtgtttagagcgctcgatctagtgtacttctatatttaatggacattcaacttgttggctaacattcacctccacgagagatagagtttgagctctaattgtgtgccaccaacccctagaaattgaaattagaggagtgatgaatgatctattcttatac

SEQ ID NO: 6815 - DNA, 217 bp, Oryza sativa
atcctctgagtcacctgccgcatgcaagcttgtgtataccttgattccgtatactgttttatttcaatggcagactgcatgctcccacacttcgcatacatgttgatcaccgcagtgatgaccttctcacgcgaatcaagcctcatcttactgatatagacgtggatacgcctaccgagcttctgagctccgagcactgcgcacgccgagagcacac

SEQ ID NO: 6816 - DNA, 222 bp, Oryza sativa
ctctttattacacgtgaaatcaaatgaacacaatgggacctttacccgcaatatatgataacttgcgaattcgcataacattaattattcattctcctgacaccaaattatcacaatcactagaactagatatttggtcaaacaaatcagggaaagtcaatggatccctcgtccacgcgtgcatccgtctgcacatcgtccagacatgatcagcctacgaca

SEQ ID NO: 6817 - DNA, 496 bp, Oryza sativa
  unsure (1)..(496): unsure at all n locations
ctcgacccgcgacctctaagtcacctgcggcatgcaagcttcattacaaaatattgggtttggtgaatcaatcctaccggcacaggtaaacagaggaatcgatcaagtgcttataatattcaatccctttagacaatcttccaccaagtagtctttttaaagcagttctaagacaaatgataattataaaagaaggaagacgaacaagtcttgttaatgactcctgatgtaaactagtgctacttacctccgtttcatattatataagactttctagcattgtccacattcatatactccaatttacggatatgtctatatttattaacatctatatgaatgtggataatgctagaaagtcttataacctgaaacggaggtagtaatagttaccatgataatgacatcatggagcggaaatcatatactcctactaccatnntggattttcaggggaatatggcatagtaaatataagcagtcctgtcagtgacct

SEQ ID NO: 6818 - DNA, 356 bp, Oryza sativa
  unsure (1)..(356): unsure at all n locations
aagcttcacggtatcggtcacctgagcatccaaagtanacggccttgtgcaaactatgctctgaacatctggntggctggcaactggatgacagtcgctcgcgtgtgttcgatggtcagacatggatatcctgatgaactgaacaaggcacactgaatttggtcagcagttcgctattggacaaagtagacctgcggaacaaaacataaaaaaagaaagaaagaatgtgattagcgccagttctgcagtgaagtagtagcaaaatgcttatatgatatatgctcaacaagacgaataccattaccagctagagattgcggagaagaagtgatgagagatcgcagcgcgaaacaacg

SEQ ID NO: 6819 - DNA, 480 bp, Oryza sativa
  unsure (1)..(480): unsure at all n locations
atcctctgagtcacctgcggcatgaagcttgcgcagacataggaagctagttatgctgaaaccatcgatatcaacatcctcatggaacatccggacaaacatttcaagggtcctctgttgaaggcccatctgatttaaccctctagcaaggcttgtgtatgtgaacctgtcccttatgaaggccattgtggtcgccactgcccatgcatcatccatccttgcaaacctaacataaacatcaaccaaggagttcccaacagctgcatccaaagattcaaagctggtcttgagaatgtagccatggattttcctggcatgcaggaaagctagcgaggagctactgcctttgagaagagtggagacggtgaacgagttgggaagcaccccgctaagccgcatctgagaaaatgccaaaaacgcctcctcatctctgccatggcatgcaagttcagcgatcaangcagtccaggacacgacatt

SEQ ID NO: 6820 - DNA, 459 bp, Oryza sativa
  unsure (1)..(459): unsure at all n locations
tcgccagctacatcctccgcaattatgaggagtggtgctcttagttgagttgtttgttccaccaaaggaattatttcttttattgaagaaatcttctggtcagtgacaagaattctagcattttcaaactcaacaagtgacttctcaggatttgtaacaaactgaggagagatatatcctctgtcaatctgcacatacgggataaatgtagaaccactttagcatgaatgaagagaatatatcgccaaaatgcagaaccacttcagcagcaagaagaactggtgaccagacacganaaggaatcagaaagatagcaatcctagcaaggctgcctacctccattccttcttcaacttcaacggtggtctcaaaagatgatgatgactcgatcgaaagaacaccatcatggccaaccttgtcaatagcctcagcgatcatggtaccgacgaagtcatcatt

SEQ ID NO: 6821 - DNA, 359 bp, Oryza sativa
agcttttccaatacatgcattgctatctttccagaaccacttatcacacatctgcagaagccatgcacattatgaagtcccaaatggttacaaaactatatacaaataaactaaatagatctatgttaaaaccttaatcctttgagttccttgttcatatcagcaagcactacacgtgcaaagaatacctgcaacaggttataaaattactcttttcaacaggaacaattgtctagttgacatatgcagcaaaaagggtaagttgtgaaagaatgatagtagcaagcaacatgatatacaatagtttctgctcacaggaaatgttaaggcaccactttaccagtccgtatccagtagct

SEQ ID NO: 6822 - DNA, 200 bp, Oryza sativa
  unsure (1)..(200): unsure at all n locations
ctttgctcggcctggagtatgtccgggagagacacaacttcttccatcgacaacaattctttgctgaagctgtcngtgcatagaatgggtggtgctgaacgtattattgctatgatttattgcagagtcaggtggagcatgaggagcattggtgttgtggatgatattgtcgatgntgctatcggagctgactaactgat

SEQ ID NO: 6823 - DNA, 391 bp, Oryza sativa
  unsure (1)..(391): unsure at all n locations
agcttatggatgtgcagtgcgtcacctgttgtatggccgccctaagtcggttcatatcgaggctaggagagaaggcactacccctatttaagctcctcaaacgctccgggccagttacctggacggaggaggctgagcgggccttcactcagatgaaggcgtacctcagttctcctccagtcctggtcgccccggagccagatgagccgttgctactctacctggcggcaaccccgcatgtggtcagcgcggcgttggtcgtggagcgcgacgaggacaaccctcactccgcgcatccccaccctgtgtcgactcgacccgggagagagcanggaggagaggcctccgagccgaacggcggcccgaggtccccgactgccggagctggccc

SEQ ID NO: 6824 - DNA, 216 bp, Oryza sativa
tagactggaggcaactggcgaagatcgagaagggaaccgtgtggtctaaagtctcatgacaaagaccatggctcggacactcagacttctccgaacaagaactttgtcagaaggcggtgtgggtgaaggcgataaggtgaaagccttggcatgagggcccgggtttctccagatgccgaacctcaccgaaaagtggctcaacgggccactgtgccc

SEQ ID NO: 6825 - DNA, 463 bp, Oryza sativa
  unsure (1)..(463): unsure at all n locations
agctntntggtgagatgtgcctgatggaaagagaattcactgcagaggttgaagcactttctatggcacagcatgacaatcttgtaccactgtggggttactgcatacagggaaattcaaggctccttatatattcttatatggagaatgggagcctagacgactggcttcacaacagggacgatgatgcgagtacatttcttgactggccgaagcggctcanaattgcccaaagagcaggccggggactttcttatatccatgatgcctgcaagccacatatcatccaccgtgatatcaagtccagcaatatcctacttgacaaagaatttaaagcttatgttgctgatttcgggctagcaagattaatccttgccaacaaaacacatgtcactacggagctagttggtactctgggctacatcccacctgaatatggacaaggatgggtngctactttgaa

SEQ ID NO: 6826 - DNA, 367 bp, Oryza sativa
  unsure (1)..(367): unsure at all n locations
taagctttcctcatgtcaaagaactacattagttcanaaatatgatgtgatcaagatcttattttgttatcaatcaatgattcagcanaagagaaaactggctaatgatatatctttaccatatccacgcaatntatgatgccatcattgactgcacaaatcttgaaactttcatcaatgcctgagtaagagtaatcccattatattgccattcatcatgaacaagagcaatcagataaatggtcgtaaccaccaccattcaaaattcagaactaacaactgaggtcagccataccagagataaagcacactgaataagttagcttttagatgctgcaccgtcaggctgcacacacagttataacat

SEQ ID NO: 6827 - DNA, 389 bp, Oryza sativa
atcaatatcagctttcctgagctgagcatgtatggattgtcctagtaatctggagactctgtttttcttatatatggccatcaactatttgtgaaaatgtattattagattgctatatagttgattaaaggacaaaaaaaaagactcgtatgattgtctataaaccaagtgcaacccataccatgcgatgccctttcacaagaacaagtgtttgcagaatgtagcagcttgcacacagtatcccatagtaattttggacctttcctaatataatatccaaaagattacttgacaaaccttttggttgttatgagatacatgatctgaatagtcagcaaaatgagtgaccttgtttgtctgatataaacagctatacagaaacacactgt

SEQ ID NO: 6828 - DNA, 450 bp, Oryza sativa
agcttgcgcgcggaatacgatggagatgggttgggaaccctggattccaaacacagcccaagtctatccaaaatgtttagacaagaaaatacgtaacaagttggtttacagaaatacgaattagatcaatcctgcactacaagtagagtaaagtggtgatttctcttaaatctctcgaatggtgatttaagaattcagtgcaaaccaaatccttgctataatcaaatgttcggtaccgcatcaacggaacaataaaaagcgcctggcgtaccataattttgtcattcttgttgaaatttgtaatttaagatgcatgaggccacacgaccttaatgttcaacgtgtcatgcattagtgaaataatagctcacaaaacgcaacaaatatagctagataacggttgcaatccttaccaaactaacgtataaagtgagcgatgagtcatatcat

SEQ ID NO: 6829 - DNA, 488 bp, Oryza sativa
  unsure (1)..(488): unsure at all n locations
taagctttactctaataaactccatatgacaagcaggaacaaagcacagaaatggggtcttgacttcttaaagagaaattagagactcgaacggtccaattcccagctccatggtgtccagaatcttcaccggcttctctacatatgtcaagtcttcgcgaactttaatttgctctgaatcggcctgctcggatggcattcgaagacatttcttgagttgcgacacatggaacacatcatgcacgttgcccaatgaggtgggcagctcccactggtaagctacttcttcgcgtcgagcaatgatgcgggaaggacccacatacctangtgcgagcttccctttcgtctggaacctgtgtacacacccgcatggcgtgacccgaagtacacanaatcggcactgcgaatccaggtacggcgcggttatctgcatactctctgctggactggcccctttaatatcccatggactgctttacttcactctt

SEQ ID NO: 6830 - DNA, 296 bp, Oryza sativa
atctctaagtcacctgcagctgcagcttgtattcgtacttgggcctttgattggctccaggccattgagaaagcttatacatttgtaccaaatgtagcacgagtgggggaaacacctaaccacagaactcatacacaaaaagagaggatgcctcagctgaatcgctgaatccattgatggataaataagcctacttcaatatttcacttgtgaatcgacttcttgtttttttttccctctaaaccttttaattcaataatcattgattgaccactcaccaccgcctttgtgctttc

SEQ ID NO: 6831 - DNA, 432 bp, Oryza sativa
cgacctcgcagtggaggaggccactctgctgtggaggttcaaggatgatgtgttttacatgaaggagaagatgagagatctggttgctgtgatgcaagatgctgacgattaggtgcgccaagtaggaaaagaatgagcagtggcacggcggtggctctccatagttaatgtcgtcgcctacgacgttgaagacgtgctggatgaattcgatgctgctcagctcatcaggaaccatcaatccaaggtacgttcacatatagtcgtgtttgaataaatgtatatgcttcaacttacggatcacctgctgacatgtgtgattttcttgtggacttttttgatcataccacccgattattctaaaataaaaggaaattatttttcactacatgcctttcccgaccatattgactatagagactgtctgagtaatga

SEQ ID NO: 6832 - DNA, 459 bp, Oryza sativa
  unsure (1)..(459): unsure at all n locations
agcttggtggtgatgcactatatggcttgttagctagatntttccttggtgtgagtttcttggttggctgtactgctgcttgcacctgcacgggtacaagtgctacttcaacggagctttgacctacctctaatgccagcctcctgttgtttttgatgggtgtaagcaagacaggaaccaaagttaagtgaaaggaaatgaaaaaacaacacaattatgccttaactcctattgattggtccaagactgcttgtttgtgttgcatgcacttgtgattctgcagctgcttcttttgctgcagctgctcttgttcttcgtgtattcgcttgaacatcaactgcagtagcttgggcatcaatggcacactttgctctcttccttcctacatttgnttatgtcttcttgtttctcttcctgcaaaacattggttagggtaagcaatacattgtacaatagcta

SEQ ID NO: 6833 - DNA, 440 bp, Oryza sativa
  unsure (1)..(440): unsure at all n locations
agtcaccctttgaccaattgcttctattatttgaaaancattactattntgtttgcaacttgcattattagaatcactcacgtttaacttgcttggcctcagtttgcgtgccaaaccgacggacctacctattagtcgcactaattcctgtatgccgtactatcctgattcttgtcgctccacctttgtggtacctcggtatccgtgctctctgagcgcgtataccaaatatcctacatatanccgtgtttgtcgaaaacatgggaaatgggtttgagaagccttgaaaaccgacatgtgggtcggcgtgttgnaataaaaaaattgtaaaactccgatgcgggggtggcctatgggactgtccgtgtccatataggacaattctgtgganatcatcgacatatacaaggcgacacgcggtgaatgggagtcctgatgat

SEQ ID NO: 6834 - DNA, 461 bp, Oryza sativa
  unsure (1)..(461): unsure at all n locations
agcttgaagctttcttaagagaggttgtatataagaagcagctagcagctagcagctagctagcagcaagaacacacagcgggtaagtaccatatggcgtgcagatcttgggatccgctagtaattttctcaccagcagcatcattaacccatcgactcgaggttaattaatcgcgcgtgacaaattagcactcgaatttatacaggttaattaatcaaatcgtcacgcgcgatgctccctagcttattcccccgaggctggctggctgtagtagtgtcgtcgtcctcccccagatctctgggaaaccaagacaaaaacctgcaaaagcagagaagagcaaaaggagtatactactactatggcaaagcccatgtatagtagctcatgccanaataagagtctccaaagccgtctcctccctccttctccttgtcctcggncagagagctcatggcacgta

SEQ ID NO: 6835 - DNA, 215 bp, Oryza sativa
  unsure (1)..(215): unsure at all n locations
tacacacgtgagtctttcaagaatgctctgcangacagtatctttttaattttaccaacagaactcattaaagcacagccaacctgccttgcagcttacgagagtacatgcatcttcacttagagagggtatatnattggattatcctctagtttactaatggnttgntcttcccagagtctaattcacgggatctccgatcacatagactgggt

SEQ ID NO: 6836 - DNA, 457 bp, Oryza sativa
  unsure (1)..(457): unsure at all n locations
gagagtggctctgattgattctcagtcgctttcttccactttgaccgtcataatgaattcaacatgaataacctgacaggaccttgccagaattcatgggatgtaaagactgccgaaaaagcattaaaaaaactccacctgtgatggtatgcataagcgcaagcccacacaagaaaagtggtcaaaagagaaagctaactctgatgagatcacgagtactagcaactctaagccaaggttcanaagacagggcccgctaatgatgcagagtgcttcttttgcaaggagacgggtcattggaagagaaactgtaagaaatacctagagcagctcaagcagaagcagcaagatggaaagaagtccacctcaggtattaatgttatagaaaataatcttgctacttctctactgattcttgggtattngataccgggtcagttgctcacatatgcaaatc

SEQ ID NO: 6837 - DNA, 405 bp, Oryza sativa
gcatgcaagctctgacacgactaaggaggaatggctttgtgtatgttgtatttggtgatttattgaaaaaaatacgtccctttgtttcagcaacttacagctatgcttcttattgatggaacaggttaaattacctttctcttcactgaatcctgtattccgtgcccgcactatgcctgatgctgcaccctttgatgcaagcaatgttacttccttacaggtacaatgtgttcatgtgttggtataatcttttaggaataactgaacctgaaattgctgtgataattctgtagctcatgtttagcaagtttgagtatgacggacagctgaacccaacatttacagaagggtcaattgagcctcccttttcaagcattagagcatacataaacgagccaatcactc

SEQ ID NO: 6838 - DNA, 218 bp, Oryza sativa
ccccgatgttgcagaaggcttttttttcctaccccaggataacattccagcgccggggcctagtgcacctcttagtattagggggccctaattttaaatcagcgacgtttgccgcaatcatgcaggcaaaaaggcgacagctgtagtccttccgatcagttacaaatggtccacgcatcaattgttcatctcttacggattccatccagctccggcgc

SEQ ID NO: 6839 - DNA, 450 bp, Oryza sativa
  unsure (1)..(450): unsure at all n locations
agcttggtttttcctggccctttcaataaccgcanagccgaggagtctcctcttaaggcctaagcgcaatctgtattctgcctgcgttagatctcggtgctcctgtgccacatcaagacgatggattacgtttagtgccataagatacttgagttttgcctctgagcagatgcctcttgcccaaaactttagagcctttgcggtgcgactcaatttatctactagccggtgaagaggctcatggtgtgtagagtcctggcaccacaaattntgcacctcgtccttgaatccaggtagcgaagtccagaagttttcanacttgaaagatctcagtcgtcgtggaccttgtgggttggtgagcaggagtgggcaatggtcggacgttccagaggagagcgcatgtaggatgtggtgcccatagccgaggtccaattctattacagaaaatct

SEQ ID NO: 6840 - DNA, 404 bp, Oryza sativa
  unsure (1)..(404): unsure at all n locations
tggaagattcaatgtaagggttatgacctaatgagttcgtgtcctgtattatgtanggtattttcaaactttaatccaaccataaattaaactctgagtatatattgcagctcccagttgacttgaacttggttactcttttgtctgataacaaacatgtaaatgcatgtcaagttgtcaactgtcagttgcccttccgtttgggtggtgtcttgatactgctgttgtctgatttttttttcgttgatccttttctgctaatatcaacttattcctcttcaatttcatgacctagaatggggaatctgtagaagcagtgatcatgcggtatgacacgcgaatgtggaagtatgacgggaagcctcggcctggtggcgtgcgctcaaccctctgtgtctcctcac

SEQ ID NO: 6841 - DNA, 352 bp, Oryza sativa
cgcgaagatgacatactcctaaggcgctcggaacctacaaacatcctggtcgaactcacggaagtgggcacgatgtgccccggaaatattgactccctctgtacagctaccagtacacgaaaccgaaagtctccaagaagatatggacgctcgtttgaacgccgaacttaccggtgaggtcatacaagaactagaaggcttgcatgacatgctaacggtggaaggacatggttaacaaggtgctcagcgacatgaatataccccgagtcacaacacctgctgagcaaccaactactcgagtacaacacgacgcgagttcgtcacaatataggaatagatgtgcactcacaga

SEQ ID NO: 6842 - DNA, 382 bp, Oryza sativa
cagatgcatgattaatgcaaggcgggtacaaagggataataatatgggttatggtttgcagtcaacagcatttaaaagtcacttatttgcccaaagccatcttgttaagacgatcctatagctacacagtattattaaacaagggcgtgaaccctcacgaacctgtcttaacccaatgcctacgatgatttggaccgaactggcacccgacctgtgttccagttgttccaagcaacccagccaaccattcatatttagttgtgacacatttaagaataaaacactgactggtacatgtcggttgccatatccaggctcgctttcaataattacttgacaagggtcattttacacaaaacacttattcgattcaggcttgaac

SEQ ID NO: 6843 - DNA, 344 bp, Oryza sativa
  unsure (1)..(344): unsure at all n locations
tgtctgagggaaacatgcacatacatatcaaaaagtaggcttatatatcaaggagaaaggctacagagaaggttctgggcaataaagaaaagcaatacaagaggattagagactatntgcaaacattaattgacaccaacccaggcactacagcagtggtgacaaccatcaatagagatgtttatgattagcaccaagatttagtggactattcatatgtttcagtgctcagaaagaaagccttataatgggtgcatgcctttcataagtgagttaataatatttgtaaagaatggatgacctacccttgtatgaatgctttctggactaatatatatatgact

SEQ ID NO: 6844 - DNA, 462 bp, Oryza sativa
  unsure (1)..(462): unsure at all n locations
aagcacctgagctgcagcttaaagaaaactactgctgctttgattctgtttgctgagctgtaacacttgaaaacgcaactctngaagacgcaactggcactgcattggctcctgtgacaacaatgttgttgacctgaccttgcgactgctcactagtagactgtgataacttaacagtggttgggttcgatcctgtcatgacaggcagcctcagtgaattggtgatttataataagccagatatagacgataataatcatcgctgctccgtagcaacacatttgttctcagcggtgtcaacgacgaaggcaatacctcgtggctcattccaacagcttaagaagcttgaggtggacagcatcttagcggtgttggttgcccccatttgcagcctcctcgcttccaccctctacaggttgagggtcacttatgatttgtggatgaaaaatttcacaaaagagc

SEQ ID NO: 6845 - DNA, 295 bp, Oryza sativa
  unsure (1)..(295): unsure at all n locations
atactatgaacaaccattatataaagatacatggtctgtcttttgacagaggcccacaatcggtatttaatataacgactactggtacataccaacggtgcaagatgatgagttgtgtaaaccatacagtacgctttatagatagcnagcacaccaagctcaaaagattacatcagctctgttgacagcaatttgaaatagttatactaaagggctgcacaattaacccgaatatagtgatagggtttataaatgccagcccacaagctcaaaggatacatcagttctgtgacac

SEQ ID NO: 6846 - DNA, 449 bp, Oryza sativa
agcttaggaaggcacagattcctgaatgtattttggctcaacagaagagagaagttcgtgcgctctagcaaggaaccatgtgagttacagagtacctgcacgagttcaaccgccttgcgcgctacgcttctgacgacgtgcgcaccgatgctgagaagcatgagaagtgtttgtctgggctcgacgatgaattgaccaaccagctaaactccggagtctatgaggactttgagaagcttgtggacaaggcttttcgccatgaagagcaacgcatcacaatagactcgaaaagaaagacagttcagatcagctatcctcaggagaacaatcacaagcctcgtttcatgacgggacagctaggtgggccttcaccctgatcgtctggagcaccatccctatcacccgagaacttcgacaacactacaacggtggcagtcacacaacagtag

SEQ ID NO: 6847 - DNA, 260 bp, Oryza sativa
acagcttacctccagagaggcaggaatctataatcctccactatacggccatcagtttactaaacctattccattctcagcactgcaaccttcacatgaactgaatcaatggcacgctgggcctcttctacatgccgactcaaactcacatgacttgtctatgatctaagaatcatgaaaaggtacataaccatagtctaactctataaccgtactgacagctgctacaacaattttacacaaataaccatcgccaaaaa

SEQ ID NO: 6848 - DNA, 401 bp, Oryza sativa
  unsure (1)..(401): unsure at all n locations
agctntgcaccctggtgaacattgngctatcgttctatggccctagctgcaaccagagatgggggatacagacttgcttctgtttatccaatgtaaaactgatgatgatgagttctctaactgtatagtatatcgcaataacgccggtgcttacagaaggcactgtgtgcataacattgttttgttgctcaatcggaatattttgaagtattgcttgagtccggtcgtccggagactccggatatgttcacctgtttgaggattcaccgttttggttggttcgtctcagctcttcttcagactactgtaagttctcgacaaatgttcactgatataaaaaccaaatacacaaccctcctangccaagcggntcatgccttcatggtttctgtgaatcatat

SEQ ID NO: 6849 - DNA, 307 bp, Oryza sativa
catgtgtaagcgctagcctggaatagacaggaaggctgctccgtttacatgcggaccccacatgtcaacctaaaggaccgcggtagaccgggtacacagagactgtccacgggtcgacggaagcggaccccgtgtgtcaaccgaagcgagtggccaacaaacggactccactagacaccacacgggatgcacacgtataaaccacgcggctaccgagcgggcacacttacacggacaccacacgcacaagcgaacgactaccgacaccggcacactggtaccggtgtcgacaaccgcacaacgggta

SEQ ID NO: 6850 - DNA, 377 bp, Oryza sativa
  unsure (1)..(377): unsure at all n locations
agctntacttgncatgattctctagaagaaatgcatcaaaggagataggtcagaagaatcggttcggtacgcctctttaatcaggctcacgtacggttgatctcattcagatcattcaagaagccaagggggtcctacttgatcgcactaagcacataaataaggcctaatgcaaccaaaaggttgtgcccccaacaaccaaatcagaagatactgcagcagtctgcagctaggattagtataaccatcctagcatttgacattactagtcgtaatattttgttctccattacgtggctgatgatatcccctactattgttactctcttcaaaagcgaactgaatatgattgtttttccagccaacttgagaatgat

SEQ ID NO: 6851 - DNA, 135 bp, Oryza sativa
cggatctatgagaagagagagataggaggggagccgataagatatcagatctggaccgagccacctcttcctgcactacaccatcggccacgccaagaaccttcactatttccttcgccgccgtcttcgtcgagc

SEQ ID NO: 6852 - DNA, 430 bp, Oryza sativa
gcaccagagcttagcttattttttggagattcaaccaactaacaagctggagcagctcattcagcccaccaacgagcaggagcagtagcagcagctcttgcagccaacaccatacgtccttgtcagagagcctgagacggtcggtccagaaacaccacatccacctccatcgctctggccaagcaatgaaccgaggccagctgcaccagagccaccaccgcaagcccttgtcgccatggaaaggacgccaaacgccccagatccgtccatcttcagcgacgcagccgggattgcgtcggacaccgcgcatacccttgatgtggagagcaagccagctgtggtccacactaaaagcgacactgggacagccacggtcactaacaccaccgtcaccatcgtcttttccgatcgccatgaggcaacaccggcg

SEQ ID NO: 6853 - DNA, 490 bp, Oryza sativa
  unsure (1)..(490): unsure at all n locations
cggctatagctntatagaaagtgttatagaaccagtcctcatattaacatcggtagctaaacgtggaagaagcgccatatgagatccaaacacaatgacgacaccgaggcacgatatttggtaatggagttcaaccaatgcctacatctctggtgcacttggtacgagcgctcctccccgatcagcatatacaacgtatcagagttacaatgactcacggctggacgctgccagcagccgctccctctcgctatactaagtcgccatgcggttacaataagcacccctctctatttaagagagaccctaggagagagtccgactcttactctagtcctaatacctattacaactccaagtcctaaactgtagctgactttgtacacatattcgacacaaactctaacaaactccaccttggcgaatatgccatgccaacctgaatttgtccttgcccaacctncgtgtacccgacttgagtcgatctttt

SEQ ID NO: 6854 - DNA, 393 bp, Oryza sativa
  unsure (1)..(393): unsure at all n locations
ctctaagtcacctgcggcatgcaagctgctgggacaaagggtatcttgtttatgntaaaanntnataaatgtatcagntgactttatctcttcttgtattnttttgataacattttgacaagtatttgagctaacagcttacgcattcatctcattagtattttctgataataggtattatagtcaacctcgcaaagatgcatcttagattgtacaaaatagaatagaattccttctatacaaatntattgaaacaaggtcttaatattgatgtggcagagctagcatatacaacaagggtgacggagaagtgcgatcgttacagcttnggagtgctcgtctatgagctgatcatggggtggcatcctccccttccgaccgttgccgccgccg

SEQ ID NO: 6855 - DNA, 472 bp, Oryza sativa
  unsure (1)..(472): unsure at all n locations
gctggctaggtggtacagagatgttcagacattgactgcagaaacaatcaacatcttatcaaatggtggtagtgaaggctttcacaaaaaaatagaggaactaataatgatagaaaccttccacgttgatttgaatctcatgaaaatacatcgtgctgtataatctagcatgtacaccatcaagagaacacacggaatttgccaaccatgcccacaaacattgcgctatctaacactgctgcaattagatgaaataaaaatagtcagtaccaatatgttaaaaagaaggtatttatacaaagcaggaacaactaaaaactcttacctgacaggcctataagttacatgaaatttaactcttgctgggnntgttttctttattttgtggtttggcttgacagcgtcttttagactctttggcgatatagcttcctgcgtctcatctgaccctccagcagtcaaccttgattca

SEQ ID NO: 6856 - DNA, 421 bp, Oryza sativa
ctgcagcttaggtgtcactgaactatttttctttctgactgcactatttccaatctgacatcaccaacagccactcaaaattcaatcccctaaatcatcttttttagatctctaagaaggatttaaggtatgaatatagctgtatctccaagagattccaaaaatttaatccccacaacaaaaaaagtgggccacatcgacaactaccaacagaatggtcattcctctcctccactcacgctcgcacacattgcatcttcctcccggctcctttcaggacattcagtgatcaatctctttgacatcattactgacagttgaagcattgaacaatgtttctattggcctcagctaccatctgagtatttgtcccacaatgatatttcacttgattattaccacgatctcctgtattttacat

SEQ ID NO: 6857 - DNA, 485 bp, Oryza sativa
  unsure (1)..(485): unsure at all n locations
ataaacacaaatcggatctgccttacaatctctacccncaaatgaagtatttattcacagttgatcataataatagcactagacaacaaaatcagaccagatataatagtacaagcagcagcaataataacatattgtactgcatcaaatccatcatcaatccacagcatgataaagttagcacgacaacaatcattgggccacgccaagtaaagttaattggcaagaaaagaacaaatattnttttcaccttgtgntcctcagcctggctctctttcacagccggcgcctctggtgacacaaccatgctctcctgcacagcagccgacaaatcgaccgcagaccccatcttcggcatcttcggttgcgctgtgtagtagtctgaagccatgatcttgtccaacttcgccctaaccgctgcatctgtaaccaaataaagcatcacggatatatataaatcatccaatcagcagctaaaatcaaac

SEQ ID NO: 6858 - DNA, 402 bp, Oryza sativa
  unsure (1)..(402): unsure at all n locations
attggtaaagctcaatatagaagtgggctttataatattcgtaaaacattacttgattctatagtgtctagatttttctacgatntatttgagccaagaaagtatttttaataaatggaattgcatttcatgaataatttaaattgaaaaacggttttaaaaatctctttttgcttttggccgaaagccggtccaaaacctctctctttctctctcccttccttgcctagacagccaatccgcgagccgcgtctcctttctctctcctgacagtgggtccgtttgcgggtcgtcattttctccggcgcggcgccgaaccctacgccggccgcgtgtntcttcaattcggcgcgtttccttctcgtgaatcatagaggaaatgatctcgatctctccactttc

SEQ ID NO: 6859 - DNA, 342 bp, Oryza sativa
  unsure (1)..(342): unsure at all n locations
agctntaccatcttcaggagctctctgtctatcctaacactcgcttgcattgtccatcccagctgaagatcgccaacctgatcaacctgaggtacatgctgacatggtatggcctgaacattcctgatgttgggaagctgacatctctccgagctctgtatcacttctacgtgaggaaggagaaaggatacgagatacagcagctggagcacctgaacaaccttcgtggcaagctgttcatcgactgcatcgagaatgttcagagcaaggaggaagctgttcgagccaggctatctgacaaggtatatctcactgagctgacgctacggtggggtggcactg

SEQ ID NO: 6860 - DNA, 154 bp, Oryza sativa
ctagttagtactacaaggtaatccaatggatcgagtagtcttacctcatcggaggatatactccctccgtcccatgatacaagagattttaacgctttgcttatacctgcttgttcacttgtcttattcaaaaattttgtgcgaatattaaaaa

SEQ ID NO: 6861 - DNA, 438 bp, Oryza sativa
agctataacttccggtaatggttggcttgtattagccactagccactcaaagaagcattcccgacgtattggtctaggagaccgtgcgcgatcctgtctctcacctgttcggcggcgggggagcgcactgtattgccgccaccggcgaccactccgtcgtcgacgagctcgtcgtccaggagatcgaggaggtcggcatcgagcccatggccgctgcgctcgcagaggttgtgcagcacgcagcaggcgcccagcatgttggctagctccggcagcttcacctcggcgcgccgcaggcactgccaccgcgccctgagccgccggaacgcacccaccgccgtcgcgcgcgcgttggtcacccgcgcgttgagcctgtcctgcgcccacgtcatggtctgctgcgtgaccgcaccagcatccagctcgtcagtcggtagc

SEQ ID NO: 6862 - DNA, 260 bp, Oryza sativa
tcgatgcactatatactatggtttacaaaagcaaaatctctctgttagtctatctatccgcgtcagtgggattcctttcatcatgttccatagaagaacaccatgcgccgatgatgtcggcgctgctcttattggttttgcaggggtgtcatggatcccagctaatgcactctataccatatacgccttgctgccatcatgtggcacggatgcctgcggctgtgggtttgcggctgttcttgttctgccgactactttgc

SEQ ID NO: 6863 - DNA, 424 bp, Oryza sativa
  unsure (1)..(424): unsure at all n locations
agcttgaagaaagttgagacattgattctaggttcaagtttgcacttttgaaaacaggtttcataagagatataagatagttatataatcaacttgctaaatntatcttattgcagcaagattaaatgaaacaacattgtaaagcttttgctggaaaatgagccattagtacagtaatagatgtacagtactaataacaggagctaatcaaagtattaccaattccaaaccaggagctaatcaaattattaccaattatagcatcatttactacggcgatgtcacgcgcggaatttctattcaagattccatacgcttacatgtgtgtgaaccctcgtccaggaatcagccgaggcacacattaacaaattgataatagagtacaattattactctaattattgagcgtactaaatgtcattac

SEQ ID NO: 6864 - DNA, 446 bp, Oryza sativa
gtctgatccggcagagacagtgcagaattaccctgtgtatgacaaaccatagctgaagcattcataactaacacacatgaaatgcattctcatcataacctcttaaaactgagcctaattcagagataatactggtatattatttcccaacccattcttctaactcgctcgctacaacctggatctatcgattggacaaacagagctctgaatggaatccaagaatatggtcttttaatttaaagagagcataagcatgaaactgcactcacttggtccgcttcatatcgtccgtagggaagtattaactgcagaacatacagctcttgttacagaaaagtcgaaacaaataccaacaatactccagtgttataaatatattgtattaaacaaaacaatgtggagaaatgtataccattaactacaagtacctaattaggacaaac

SEQ ID NO: 6865 - DNA, 446 bp, Oryza sativa
agctattggtgattcggaattggtggtgcaactagttctccggagactacaaatgcttggactgatcactaaataggtacctcgattcatatttggatattattgccaatctagataattctgctattaaacatattgctacgcgtgataatgctatagcacatgacttgtgactacaagcatctggctataatgtgaagaagggattattcctgatattagaggagccggtgcttgcttttaaatctttgtgcgaaattgcccaagctggggaccaccggcggtctgaccggcattgtgaggccggactgaccggagaccaagggcggtctgactcgctacatgccggcggtctgaccggcgacccagagcgtgctgaccggtcctgtgtggtctgtctgaccggttctgggcaaagcgctggtggcacgttacaatcaatttat

SEQ ID NO: 6866 - DNA, 415 bp, Oryza sativa
  unsure (1)..(415): unsure at all n locations
aagcttataatttcttttaatgtaaactctctatcatatagngngctgngacaaccatgtagcctatattttgaattgaagtccacatatcggatgttagacatatgtgcaaatcaagattatgtaattcagcatgcaagtcttccctcattcgctcatacaagttaaaggcatcatcacgaagtggttgacgccccacaactntgaaagttggctgcatggactccacccactccaaaaaataaggatcctcaattttcttgaatggcacctctgcatgaatgaagaatctgaccattagctcccggcttctcttgggaacaaacacgaaatctntcccagtctgtttcttaattgtttgcaggaagttgattctagcatcaccatcaataactggacatgaatcngctatgtg

SEQ ID NO: 6867 - DNA, 351 bp, Oryza sativa
  unsure (1)..(351): unsure at all n locations
ctactcattaccaaaaattaagcgcttttgtcctgatatcggtgnattaagatgtgtcacatccaacaataaaaaacttatatntgggaacggaaggagtaggagacaacgggtgcggatgcccagacaaattttcgatggattatgaaacgtccgagcgaattaagctgatcataggacccccacggagaaataaattaagtgccaaatttaccccacatataatttaggaatttactaatctattctcaagaaaaaaatgttagaataggtactgattagtataatactacagtagagagcagcggagcgtctctaaataaatagttccctttcacttgaagtcaagtc

SEQ ID NO: 6868 - DNA, 439 bp, Oryza sativa
agcttcctggtggacgtttgaagcctggttatcttggtgtgttatgtaaagctctttattaaaccctgtcagtttcttcataaatagtaatataatgtatttagctggtggttctgctactggaatttgcagaaattgacggtctgaaaagaaagttatgcactaagcttgcagagaactcaccttcctttccacctaactggcaggtaatgagctcaagagacatttatatgccacttcttcgaatttaagctatatctggtgacattatgcatgtgattcatagttaatccggtattaatgaatgttatccacattgcgtcctaaattcatagctatttctgatttgtatcgcgtgccttaatattgaactataaaaaagagaaaactcatctgtgtttccgcaatctttacctattgattagcactatctgaatat

SEQ ID NO: 6869 - DNA, 371 bp, Oryza sativa
  unsure (1)..(371): unsure at all n locations
acgtcaatacatttttctttcannttcaccctcaagagggttgagtctgttcacctataccctccgttcccaaatcacggtaagagacagacagtttttttctctgttaacctctgagagttaactacgccaccgcctaaatcaggctagggaaacacccccaaataacttaaacgcactcccggcaaaagaaaaatttacatgccaatccataagtactatcatccccttatttaaatcatcctcttatcatggggtgctcaagtcacatgtaacgagagagaaaaatatttctaacaaaacctttatatgagtgctacgccttgcataagagtggtcaaaaacataagaaagtctctaaaaccgagaac

SEQ ID NO: 6870 - DNA, 322 bp, Oryza sativa
agcttattgtcttgcaagaaaagtaaagttataatgacatacccgaatctccgagaggactaaaaaaccaaagaactattctaagcctaaacaccactaaactagagagtatacaaatgttgactagagatatggcttcttaagtgtgtgttgggaagatcttctcttctctatttatagccttgtaatgacgattggaaggtccgtaactcccacaacaagcgtcgttgcctaggctgcacccttgcacgcggcaactccgtcgacgcttccacgctgcttcatcacctcggccgtcgcgcgaccccagcttctccacacc

SEQ ID NO: 6871 - DNA, 268 bp, Oryza sativa
  unsure (1)..(268): unsure at all n locations
tgggcttcttgtactggcacgcatattggggaaacccacacttccatggaacattggatcctatgccccttgntcgtccacagaggtcttcgttttccaatgctttcgtgaggatgtcatcctcgcgtttttgtgagcaaacctcttgggaggcctgtctctcatcattcagttcgacctagaatacagttaagatgcgttagacgaacaacaagatacaacataatgaaacttattctatgtgttcaacataccaatttctggtaca

SEQ ID NO: 6872 - DNA, 334 bp, Oryza sativa
  unsure (1)..(334): unsure at all n locations
agcttgctntgtagctcgccaactgattcttcttgtttgcattgagcgtcgatggttctaagtagttgtcccaaaacagaggctggggagtagtcctgagaaacacagatccatgcatgtttgtcgaagctttgttttaatttctcatcattgaatactttctgagcaagtgttgtctttccgattccccctgttccaataatagcaagcttgtaagtcttcttttccttgtgtgtaagaacctggctcaccacatttctagaagcatgtaatatctctttccccacaaggttggattcagcaattngagaactttttctcaattctgatgttg

SEQ ID NO: 6873 - DNA, 455 bp, Oryza sativa
  unsure (1)..(455): unsure at all n locations
agctngaatatagctcataaggtgtatcattgtatgatcgacagtttgagacttgatacaccatgctcgacaatgacacacaatgggaggacggagagacatgtgaagccgaatcaataaagacgagtagttgatttgcattgtctctttcttattgattaattctctatatcatgtttattgataatggactaattaatatgctaatacactagttaatacagtacggagggggcttantgtatgccctttacaagatttgccaccaataaatgctttctcagcagattgtcgtgtcgtgtatgtcacacaagctgagcaactcatagaagggtttatggaagcatcatggttgtacgcttcagtgtcttccagaacaacagatgaaagctcctcaattgacatgaagtgatctttcaagacagattcctgttaacaatgtagtatttgacatc

SEQ ID NO: 6874 - DNA, 424 bp, Oryza sativa
  unsure (1)..(424): unsure at all n locations
agcttcagttgtcaactcaagatattgtatttcacaaggttaccatagcagatggggggcagttatgttgcacaaaggtggttccaaatgttgagtggtggtgacaggggcaaagttttgctagtgtactcaaggtgttgggacttggcatgatatgatacttgggatggactggttggaacgaatcagtccaatgtggattgattggaagagaaaaaggatgagattccaacatcacggaaacaatgttactttgacaggggtgaaggatcagactgatcattgtagacttatctcagggagacagttggcagggatggcaaagaggggggccatatctcagatgattcagctctgtataatcacggaggagatngagcagcaagagaagatgctctctgatgttcaacagttatttgaagag

SEQ ID NO: 6875 - DNA, 255 bp, Oryza sativa
agcccttaatatcaccttccccttacttttatggcaaaaacaaaatctttgtatttccaagtgggtggaatgaaaaaacctttataactctatagggacaggtgggaagacaactgccttaccggatggaagaatagacatcgtgaaattggtcacgctcaatggtcctgaccgacactcctcgtcggttctgggcctatttgagcttacccatgctggggtgggcattgggggtaatgggtttggtcaaactct

SEQ ID NO: 6876 - DNA, 457 bp, Oryza sativa
  unsure (1)..(457): unsure at all n locations
agcttcgtcatggccgcgtcactatggtatttttgatgagagatacttcaactactttggaccaaggagatccaacccggcaagagtacgtgtcccgacgagatcggaaccatcgtcatcaacaattcgagatcaaccaagattcaagtcatcgccgtcgcaggggacgtcggtttgccaaccgactagaaatcattgaggtatcctagtcgggtttagactccagtcttcaggaggaggattaattcaagtcaacattaatggcaaatcacgacgtcaactcaagccggccacgttcacacgtgtggaaccaaatcctagacatgcatggcagcatagatggacatgcaccaagataagctacacgctcacaccatgtgattagcatggctaantaacggtattagtaggggttaataattaattgatctactaatttcgtagatacatncagcat

SEQ ID NO: 6877 - DNA, 193 bp, Oryza sativa
  unsure (1)..(193): unsure at all n locations
ggagtctctggtatgcttcactctgggaatctatgctttatatcagcatgtgctgggtcgtgatcctattgaaacatgggatgaaatgaagcgtgttatgagaagatgttntgtgccttcacgttatatgtgtgaccttcacaatcggctacaagtgttgagtcaagggactcgtacagtggatgagtattac

SEQ ID NO: 6878 - DNA, 259 bp, Oryza sativa
tctgcttgatcttctccaaatcattctcagccattgctgctcttatatcagatacagcagactgaatctcattggtgacttcaacaggaaccttgtgcttgtactcactgacactcttctcaatgctgtagatcgtggtgtctgcagagatcttcagatcaatcaatgatttcctttcctgatccttctgagaatgtagctcagccttcctcaccatcttctcgatatcactttcagacaaaccgcctgaagactttat

SEQ ID NO: 6879 - DNA, 459 bp, Oryza sativa
  unsure (1)..(459): unsure at all n locations
agcttctcctcgtgcttcacatcgtcaagtggttatgcgaataatgaggtatctgaatcatacacttgagtttggaatttggtattctacttcatcttctatatgcttaagtggatattctgatgctgattttggaggttgtagaattgatagaaaaagtactagtggaacatgtcattctcttggtacatcattgattgcatggtcttctaggaaacaatctagtgttgctcaatcaactgctgaatctgaatatgttgctgctgctagttgttgttcacagattctttggcttttatctactttgaaagaatatggtcttacttttgagaaagtacctctcttttgnataatactagtgctattaacattgctaagaatcctgttcaacactcacgcacaaagcacattgatattcgtttcattttttaaggatcatngtgagaaagagatgttgat

SEQ ID NO: 6880 - DNA, 365 bp, Oryza sativa
  unsure (1)..(365): unsure at all n locations
gctaacctcttgctaccgtactactttttttctatatctttcaggcatcntctcaatgttgtacttgggtgactcatgcattgacaaaataaattcagcgtgtgccttatcatcattatgaaccctctcactagtatgtaaaggcaaaatatctattgaagcacaagggttgaaaccatacactacctgaaaaggacttaccttggtagcagaatgtattgtccgattgtatgcaaactccacatgaggcaaacatttttcccacatcttcaaatttttctttaaaataacccttcacatggtacccaaagtgcagttgactacctccgtttggtcatctgtttgtggttgacatgttgagaaac

SEQ ID NO: 6881 - DNA, 445 bp, Oryza sativa
  unsure (1)..(445): unsure at all n locations
agctngtgatgctgttcagagtaatgattcttcttggccttctgcgagaaaatgacagtaaaaatccaatcaccacgcgcaaggtcatcttgtgtctcctgaaatcatcagtcgccttcatcaaatgcgtcgtctacaatttgtgcaggtaaagcaccactgctgctgagtttgagcaaatagtagattatgtgcttcacaatactatcgaattcacctcagaaagttgcgccggtgaaatactattgcagcttcaagctaaccgatttagtgacgcatataatgcttctcactcatttcccgatggcctctcattcttgcccaaatacctctaattctaatggcgctctaacttactcaaggtaattctagcatatgccccaattntaatttgtggacagtctaatgcatgtacaacttcagaattcaccaataatcttcattc

SEQ ID NO: 6882 - DNA, 475 bp, Oryza sativa
  unsure (1)..(475): unsure at all n locations
taagcttataatatggcccgccgcaagatgaaaataccaccaaaaccaaattggcaggttatttgctagttntgagaattgagtattgagggttgggagtcgtgggtgaaaaaaaagactctggatgacttgatgtgaacgaaattatcgaacttcaactatagtgccaaatgcagttacttgggattaaaaggacatatatgccaaatttacccaaattaaggtcaagaacacgatataatctatccaagtctcacatttcaatggtcgttgaaatgccatcggtttagctttacactcttcctcctatcagtagcaacaccaactggctttaacaagaccttntttattgtacagcaaagagtggtcatgtataatgcattttaaactaccaagtataagagcanaaaagcttctgtgcngatgggcacttgtttgtcactctcactgacatataattgcatgtcctgatata

SEQ ID NO: 6883 - DNA, 414 bp, Oryza sativa
agcttcatccctcagtgaaaatcgtaaatgcatttccaattaacctgacattccaaaccttcttttaaaatatatattttagcaggatactagatgccaaaattaaagagaaaaggaaaaatctatatctatgcctaataattaaaagataagtaaggtttccgggttttttcgtacgttgtttagttttccatgtcctacgtgcgtgtaaaaataagtaaggattgcgtttttcttttcatctgtcgtatgcacgtgtattatgtccgccgactcttctctagaatcagtttctaatttgcacagctaggtccagttgcccaacatcagacacaaataaacacaataatcagttttggcccaatgtgtgaaatgtgtcgcctgtgtgctacaatttgcattgaacactgtatg

SEQ ID NO: 6884 - DNA, 460 bp, Oryza sativa
  unsure (1)..(460): unsure at all n locations
agcttatntgcaccatctgctatctcggtttctccctcaaactgattaggatcaaaatccattagtgcagacgtaagatattccccagcacgtgtagttattgataactcattgctngatttcacaatagctccactgtttccagctttgtcctgtgacactggtaaggggaatacatctgatgactgacttttggtgctgtcactcctgtagagtatagatggtcacttcatgttcataacagccatgttttcaaatcgattaattgtatgtgtatgttgcaaatagcagcattttaccttcctatatctcttccctgagcattagtttgtttgtttgaaggacttggagcctatatacaaacagttattgcatgagaatctcataacagaacaatgaaaatgcagttaatgacaggtcacatcaccacatatcacaatcactgcttaataaaagcttc

SEQ ID NO: 6885 - DNA, 442 bp, Oryza sativa
  unsure (1)..(442): unsure at all n locations
agcttagttgaagcaacaagtggcacactctatcaatctgctgaacaccaatctggtgaaccacattgtgatgaaattgaatacctttgtaaccaatgtatgagcatgtgggtgttgatgatgaaggtttgtacattgatatgggtccaaaccagccccctcctcctactaatcctcagaaccaaggtgggactgaagaaagggaaggtgaaagttctggtgatgatgattgcaatgagactgactgattatgaatcatctgatgaggaagtagaagacatagatgatgaaattaaagacaaggagccagaaaatatgcctgatgctttntatgataagaatgaccctcctatgacagtaggaactgtttattctgatatggatgcttntaagatgctttagctagccatgctgtcanacatgagttcaactatgacattga

SEQ ID NO: 6886 - DNA, 438 bp, Oryza sativa
  unsure (1)..(438): unsure at all n locations
agcttcattctccaactgagaaattttttttataattctccttttcagagaaatgttttcttttgtgcagggttggaatcaagcttccgactattgaagtgcggtatgagaacttaaatgtggaagcagagtcatatgttggcagcagaggttttcccaccattttcaatacctatgctaacatattcgaggtatctgcatctactttgagaaaataactatgttaataattaaaacacctgtccatctatatgtcggaggtccaaattataacaatttatttagattaaaacaagctccacgccgaatacaacatgatagtctttaattcctaattaacaattaataatttcgagcatatagaaagcaaatgcatgcatctgttngttggagtcgaatataatggtttgcatgaaaacgaagacttcattagcaaat

SEQ ID NO: 6887 - DNA, 410 bp, Oryza sativa
  unsure (1)..(410): unsure at all n locations
agctntattgatcaataatcacagatctcaaccgcctggcactnttgacagagccaagcagtgaagcagctggagttagtatactctagtctagtcctgacgagctcgttttccacgaccaccaacttgcctgtataatctgcttatgtagatcgaggaggattaagaaagtggcgagatggtaaattaatgttccaaagggagaacataataaggaacgtaatgctttgaatggtaatgaatagatatatactttatcttgttacgaaaacattntattttaggcataacaggcattttttttttcaaaacattgtacttttatcgctaatttatanngtaatatattgtagaacatctgtacagttatcatattatgatgaacaatatcttatatagttgacttattc

SEQ ID NO: 6888 - DNA, 409 bp, Oryza sativa
  unsure (1)..(409): unsure at all n locations
agcttatgaagattactttcatatggtttctatcccacgtcaaaatttctcctaagcagttgggaatctgcaaaacaagtcacataccttattcatttcgagtctaatttaggtcttgggcttttataattatgtcgtgggctaagcgccagagatgggctaaccttaggatgttcttaatcatatttatttagtagctgtcatagtttagagtcagggtttcgcttatattattctatcgntgtagtttcgccggttaattccggcctgaggaaccttaacttgtgagcttcattgtatatntgcaatatattcagattgattcttctattctcttgcttgtcttctcgattcgcttgcaggagatagccttatcggcgaggtcaaccatgtntcgattcatgtgata

SEQ ID NO: 6889 - DNA, 403 bp, Oryza sativa
  unsure (1)..(403): unsure at all n locations
tgcgagctggctcactggctgggttgctttgcgctctgnacaccagcccagtatatgtgagagaattcgatcaagagagcccctctttctcagataatttggtcatcccggagcgcgagcagccgccgtatggttgtcgcgtcttgtacgaacgggaaaatgtgcaatanatcatggttggtcatccatggcagagagccaaacatgaacaactcttctgcttatacagtggatttgatttgatttgattcactcagatgttggcatgttcgcctgttcatatatcctttatatatcacatgtgctctcttcgttgggcccgatcatatcatgtctgtccatctgcacccgtgtgtgcgacgagcccaccacgccacaacggttgggccactagcctggatct

SEQ ID NO: 6890 - DNA, 271 bp, Oryza sativa
  unsure (1)..(271): unsure at all n locations
agcttcatcgactagggtgccttctgccctatccgaggcgagagggcatntacatgccatctattacacgcagacgctcacatagtgtgcttaggctcaatgagagggaaaggatcgatgtgagattaggggcattctccttgcggtctagtaacggctaagctaacgcagagtgctcctgtcactgccctctcgaagaaacactgacctgagtagaggtcttgtcatgatggcaacctgccgtggatcactgtacgagggggatgagctc

SEQ ID NO: 6891 - DNA, 448 bp, Oryza sativa
  unsure (1)..(448): unsure at all n locations
agcttcaacgtagcctctaggtcacttcagtttctgcatggtccgggggatcttcgacacgatccaacatacacatacgattaaacgaccaaataatcctataataaaaactagcatggtggcccgcgcagattgcgcagctagcatcaatatacttttctcatataatagcatatatagtttcttattatattattgaaacatattaaaatgaccacataattttaattcttgcaataactttacaaaactactaatgcggtatattcctattataatttatatacgtggtaattattaattagttttaatatcaagttttaggtatttgaaatgatatatattcgtatctggactatagactcaacttttaatatttcttnttttaattccgaattctctgtanaatgtatttctatatagactctatggctctcttctaatatta

SEQ ID NO: 6892 - DNA, 199 bp, Oryza sativa
  unsure (1)..(199): unsure at all n locations
attctattcaattgatatacaagagcatatactgttgcatgcacgcatatttgntcctggtttctaatcaaactgatttgcttgttcgcatgtattcacatatccaacgaggacacaactaaagctgggctctaattgaccgatgtgcagcgccggctgcttgccatcttcctttgccgaagatgatcttctactttca

SEQ ID NO: 6893 - DNA, 464 bp, Oryza sativa
  unsure (1)..(464): unsure at all n locations
agctnggggaagaatccggntctcccgtttaacggtcacgggaggccggcgctgntgactagaagtagtatttcttccgagccgcatcggctcctcatcatgaggcgagtggcggtcagtgcctgcttggtcatgggaaatgatgctgctggccacatttcgctaccaggagtgggactaccgtggtcaaggtttatgttttgttttggaacaaggtttatgtgaaaaattggtaaggatagtgtcgatccacttcggccgtagttgaaaatggatcaagcacgcgtactcctacgttttgagccactcggtgacatcttcttgtcccgttccaacaggattcggtgtttctgttggccatgtagcttcaagatttcttgatttctgggtattcattcatgttggttgaatagtccanacttttcttaacacgcgagtgcgtaagattcaagttgcacaaagat

SEQ ID NO: 6894 - DNA, 398 bp, Oryza sativa
  unsure (1)..(398): unsure at all n locations
agcttgctgcaaaaatgtcaatgtttcagatcactctcttccaagctggagatggacaaacgtccaagctgttgtgcatagcagactgacctgaatgaaggttgcttctctctggctcttgcttgggatgctgctgctgctgcagcggcaaaacattgcaggtcaaaaggagatcgagacaactagtacatgctcatcattgatagaagagntgcaataattctcatgattgctccctccgttccaaaatttccaaaatataagggattntccctgtccagattaatagtattctaatcttntttatattttggaacggagggagtacaatttaagcctccctacacgctgaagaacctgttgcatctgtgcagctctgttcttgcgcttcctcatct

SEQ ID NO: 6895 - DNA, 229 bp, Oryza sativa
gctctgtcttcttccaagtcccgttagcgataatggaattcatttcactacggacaggctccttccaggagtctgcatcaggagatgcatatgcttctgaaattgacttatgaagtgtatccacgaggggcacagtgaaatcatcacccaaagacttagccgtcctttgtctcttacttcttcgaggagctttactggacatcttcttagagacaaattcatggggatg

SEQ ID NO: 6896 - DNA, 416 bp, Oryza sativa
  unsure (1)..(416): unsure at all n locations
agctatctaggacttgctgggttctaccgtcgttttgtgaagggatttagcaccattgcagccccattacatgagcttaccaagagaaatgtcacattcacttgggctgcaacacacaggaatgcattcgacactttgaaagataagttaacacacgctcctttactccaacttcctgatttcaacaaaacttttgagcttgaatgtgatgctagtgggataggattgggtggtgtgttgttacaagaaggcaaacctgtagcatatttcagcgagaaattgagtgggcctagtttgaattattctacttatgataaggaattgtntgctctagtgcgaacattggaaacatgcgagcattatttatggcccaaagaatattgtatacactctgatcatgaatctttaaacacatt

SEQ ID NO: 6897 - DNA, 441 bp, Oryza sativa
agcttcttgcttgagatgtgtggaatatgtgatgaggagaaggccttatatagctctccaatgacggttgtgactgttggaatggtcggaaataccctccaactatcattcggagctaatccacaccgtccaaaccaacccctgcatccaacggagctcaagggggttcggccgaaccatgggctgggccaaaattagtccaatttcggctggcggcctcctcttctgttggtttctgcagacttgcgagttttgtcccattgggtgtgttctttctgaattcttggcccatcttcctctaagtctgatcctcgacagcgtccgattgattgatcgtccattttactgtcgaatcgcctccattttatgtttattctctgcaagaggtataaagcctaatgctagtggaatatatctattttacatatatgctttgaagca

SEQ ID NO: 6898 - DNA, 216 bp, Oryza sativa
cacttatctgcataaaacaaggtgctctggtgaagctaaccagcgggtgaaacttttgttatgttaacccccgccgagatagtccattcttgtttcctttgtgcacaatgaggaggcgactgtctcgtctatttaagaagggaccccgctcttccgtaagcatcatgacgagtctagcactcattcatctgcagacatctcgatggaggaagctga

SEQ ID NO: 6899 - DNA, 455 bp, Oryza sativa
  unsure (1)..(455): unsure at all n locations
agcttggcaatctgatagntgttgcttgatcatatcttccttctgcaacgtgtttgtgcatgtaactactttcggtccatcatactccttaagatttatgattgcatttttatatttacaatgaatcacctctgctggagaacaaagaatattttgtggtaacatcataaagaaatgagttaaatatgttattagaagcacacgatgatgtatgaaaaacaacaaataggaagagattgaaaactaaaagcaaaaggaagagggctaaacgtacagaggtaagtaaaaacagcaatcgatgatgatatgccatagagagaaacctgttatttagttgctcatgatccatgcatgtcttagaagataccgtatatctcaacagaaaatataagagatggagtagtttaatttgtgtgaagcgagagaacaacgtaatatgcatatatatatagcta

SEQ ID NO: 6900 - DNA, 324 bp, Oryza sativa
  unsure (1)..(324): unsure at all n locations
actacatactcgtacagtgaattacttcttnnnngcgnnagcgaacaaatcaatggtgagcattgcaacgtactgacaaccgccaacaaaatcaatggtnancagcgagctaccgaatcgactatgcattacatggcctgnannccggacaactgaacaagatctgcaatgactacccataaacagcatttgcataacttcacgcagatgtaaattctcatgggtcagaaatccacctcgactgcctctgaataccagaataataacagcgtaattgtaaactgactagtagcacatagaaatgaacgggagcatttaaacatt

SEQ ID NO: 6901 - DNA, 449 bp, Oryza sativa
  unsure (1)..(449): unsure at all n locations
agcttcaaaaaccatattagggatttcctggtgcaatcaaaggagttctcggctcaagtaatttgctcctaccccttgacactggcatggacctgattnttcacaattcaaaggaattagaagaaccaatacttcactataccagaaatagtaagaacatagtttatcagaaaccaacagttgctaattaccagagagtggatgttgccacgtggtagtatggtgccaacttgagaaaacgatagatatggaatcatgtgccaagtatagcgttaatgttagggcctttacaatgcataagtgcccatnttttatttgttttcatgttacttgctattgaactcatctgatgagttgtttcatgttcatttgcttaggataataanggattgcgattatttanggccttacaatgcacaagtgcccatntttaaattgtttcatgttac

SEQ ID NO: 6902 - DNA, 486 bp, Oryza sativa
  unsure (1)..(486): unsure at all n locations
agatgtgtggtaatcatatcatgcgtgctcatccatcgatcaaacaatccctccatatatcactggccgggtgccgggtaaatantccatgccacttcaattaggtagaaaggatctatcatactttctgtttgtactgaactgggtccctactttgaataaacaaaaaacctcgatcgtgtactttgatgtaataaagatattgatgggccgggttgctatgggagtatctatatatctttcacaagatttttatgatcgtatcatacagaattttaatctttagagtaaaagacaacaatgtactataaaacatcataatggacattaatattaccatatctttaaagaanaagaccaaatccattatataattcaaaacttacatgtaaagaatcanaaattacactgtaacatacaaaagttacaatataagttntataaattacactgtaacttacaagaaaatacactgtaaatntaagt

SEQ ID NO: 6903 - DNA, 431 bp, Oryza sativa
  unsure (1)..(431): unsure at all n locations
agcttgagctatgagagagtcaagcaagctttctatatgcgtattactaaattatttttccccatctgatctggttcaacagtttatcctggttcaatcgggagaatactccaccccagggcccacgcgactggcggcttgagaaaaatcggtactcttttatctctgacgcggccatataacaacctttaaatactttntctcaaaaactattcatccgatcaaggatctgattatttcgttatatttgttacaattaaatctttacaacaagatctcacatgatcatattttgagaaaaatattcttctttttttttcaatagatctgtctgtaatgttgcatacaatattatntcgatgtctcgataagtatttcttaancgtttactatggcacttacaaatgttgcatgcaatattctttttggat

SEQ ID NO: 6904 - DNA, 348 bp, Oryza sativa
  unsure (1)..(348): unsure at all n locations
ctgaacttatgttcatcctttgcttcaacttgtaaagtgtatgtacggcacctacttgtacatgtgttgtttcaaatgattcgaaactgaaaactttntctagtgtaattctgacttataattaattatattttcccctgttctgtttgagcattatatgctatctgtagctttgatgcaaaattccatatggaggctgtcaatctgctctgttcgctaggtttgtacgatccttggtgcctatgaccacattnttttttcgagacggttcatttgaacatattactgaatggtgccatataagaatcttttttttctttttcatggaaaacactgatcacgatcaag

SEQ ID NO: 6905 - DNA, 360 bp, Oryza sativa
  unsure (1)..(360): unsure at all n locations
tcaagctttatcgatcgtacactcattctattcaatccatggtacatcactgatatatgtttttctctcttggaactaatgttcggcttatttctgcttttgatggcgaaatatatggttgatctaatcttacagcacgcaggaacatattattggtagaaatgattttgctttctcaattcatattcanggtatcacataactctggcttcttgacatatacaagtcttcagtggtgtgtgttctcgacatatcagcacagctagtctctccttctctttggagaaaactcattgctttattgttcgaattgatattcatgcttccacataactgtctacaaacccgtctatagaaatc

SEQ ID NO: 6906 - DNA, 416 bp, Oryza sativa
  unsure (1)..(416): unsure at all n locations
agcttcacattattggcacctttggtcatggcgtatcactacaggagcatgaaaggatgaaaagacaaagataacggaattatgtgtaaaggttgcatggatatttattttgcaaaaggaattcaattagttagtgtggtggtctcaatattttgctgtccaaataataatattttcacaacccggtatcagattctaacacccaccttagataatactcccttcgctccataatggatgttctagttttgttctaagtcaaacttatctaattntaattaactttataataaaacataacaacattttcagtactaaattagttttattaaatcaacattttaatatatanttttaaaagacatatgtttcgtgctggaaaatgtngctatttttttctataannacttgcatac

SEQ ID NO: 6907 - DNA, 294 bp, Oryza sativa
  unsure (1)..(294): unsure at all n locations
taccatctcctgcggagnntgggtccgtgttttattgtatgcatggacgatgttaaatccccttgatgtatgaaaggaggatccatgccattgagaattnttttttctaattccggttcacatcagttgattcattctgattaagttagattctagccacattatagtgaagaagggttgatactctcccacttataacaacaccaataactcatttgtaactccatcatatagtcctagaaccatatgagtagagtattatgcttcccagcgattcgaacctgttaaatcatg

SEQ ID NO: 6908 - DNA, 405 bp, Oryza sativa
  unsure (1)..(405): unsure at all n locations
tcgaagatatgccgacgggcaaagctttgttntggacatttctgctgacactgacaattctcatattttcatataattntcttattaactcatcaccgagctgaaaatccctaattattttactgactaggcaacacaattttgagaacacattatgcaccacaatttaaaatactgaatattcatcttcttctctaagactctaagcagcacatgatcacactgatgctgaccttaaactnntctactctnttttccatctagagaagaacaagactctgngcgatgaggttctgagttctgactaagacatcaatcaatcaagatctctcttgaccatctagatacatntatatatccctgatagctgattagttggcacatcagcatcagctaacgatcaca

SEQ ID NO: 6909 - DNA, 375 bp, Oryza sativa
agctcgacaagacaactatggcatcagctttgtttctgtatgaaacaaacagccccggtccttgtgggttctcggtggcgccaccttaatttgtttttatcgcgtttgattttcttcctgttctgtgccaagcgatccgttatttttccacgtgctttttcatactacagactgaaagagctctgctatggagctgtaattaaactacccttgagtatccaaagatgtttctttttttatatattacgtggaaaagtgcccgtgcattgtaacaggtaaatgctatttaatcttattattgttatacggtatagcttgggtaaaattcaccgttggaattcgcttggatatatcttgttcagagaatcatgagct

SEQ ID NO: 6910 - DNA, 303 bp, Oryza sativa
  unsure (1)..(303): unsure at all n locations
tttcccactatttttttttattnnnnnnnnnnccggaggttgtctcttgcactaatcagctacttttttctttttcaagcgcttcctctttattctttgcagacttagaaaaacttctagtgggttattgaggatttggaactattcggaaactactgtaattggaagaaggaagacctgtagaaaaaaattttacatcaccatacaactaatatgaacgctactgaagtatatgtactcatgctgcgttaaaatcaaggagactaactttattaaaatcctactaacgccaaatcttttact

SEQ ID NO: 6911 - DNA, 318 bp, Oryza sativa
  unsure (1)..(318): unsure at all n locations
ctaagcttgtttttggcttgaagatctatatatacaattctaccttgtgtgattttgtctcatatatgtgaagggattgggtccctgacccttcacttccgtcttagtgccaaggagaaagcattttttcttcttntagatgctacagcaatacccctcaaggaagttgatgatgctaatttcacatgctgaacagatgccttgacctccaatagattcatttgttttatatcaaagaacagcaattcacacacaaaaggggggcttcaccaaacgtacattgcattgcactctgtatttcaagtgaatgatatgtgt

SEQ ID NO: 6912 - DNA, 432 bp, Oryza sativa
agcttgtcaactggaaaacaggtgataactatttttatcaatcctaaaaaactgtcgttgttcttgttttagacctatagcaatctcaatatctttagtcatgacgctctttttgagcaccattcaagcaaagacatgaatttcaaagaacggaccccattcaacttccacataaatttctgaggaaacaaagcaccctacctctttaaaagctgcaaatcatagtgcaatgggcatcggagctttggaagacaaggccaacctatactactcctcctaaagtgccagtatatcattgcattcatgctgtagttcttcctacaatcacaacatatggtccatactgccatcctgaatgcatcctccattcacaacttcaggaaccttaatgttttttcttgaagggaatattaagcgctgcacttatgatat

SEQ ID NO: 6913 - DNA, 306 bp, Oryza sativa
  unsure (1)..(306): unsure at all n locations
tgtggaaagtcgtggcatgcagtgatgcagatgcaatcatgcaatggtggtgctgttgtatggttagttcttaactgaattggttcatgtgccacattgttcctccgcattgtgtcaatgctaactgtagtttaatgtgaatgtgcccctgtattctatcttctcttcttttngtaagcttaatgtattctcttctcggatgcaggatggatcttcacatgccatatcatctccaaatttaactgtggcagggatcggtgactgaaatgagtgaattgactgaagactcaatgtcaatctacaaca

SEQ ID NO: 6914 - DNA, 267 bp, Oryza sativa
tggctctccctgcaaccgggcaaggggcgctcgcgcccaagcgctcaaccaccggtcgatacacgcggcgtggaacacaagtgttggcacaccaggagtcgccagaccgtctgaccctgctccacctcgccggaagcacaccgggcactcaacgtcgatcgtttccgtacggtgcgctgtactctggatagccgcaccagcggtaagtgcgccccgtatatcttcgccgcccccggcgccaacacagcacatagcttgtgcgcgggc

SEQ ID NO: 6915 - DNA, 304 bp, Oryza sativa
  unsure (1)..(304): unsure at all n locations
tactggtaacagttngatggtctcgtattaaccgtacgcattgtaatatttcttgcacattcattgcgtctttccagaatggttctcatgcaatctcagattcattttcccaaaantttgatttttggtgctgttgtttttgtcctgaatagtgaacctagtatcgagtcctgatcgaatagaccatgccggtgataatacctcaaatttcttgcatcgccacttcaccagtccttttgtgtttccatttccttgcaggagtacttccggactaatgcattatgttactggtataatgtattat

SEQ ID NO: 6916 - DNA, 383 bp, Oryza sativa
cgtcgcatgcatggtatcatctggtaaaataaagatcgagaaccatttttctatcaatatttctccgtccgtgcatgtacgcaggtgttgaggatggtgctcgccggtgccgtggcctccgccggcgccatatcggacatcgcgaagaacggcaactcgcacgccgggtggctgccggtgtgcgggcagatacacgcctacttgaaccacgtcatggcggcgctcatcgtcagctttgtcgcgctggccgtcacttcgtcgacgtcatgtactccctccacactgtcaccgatgtcaattgcccctgccattagcagagtctatctatatatatatgtcatagtagcagtatatatataggccgtgatatatcccttcatcac

SEQ ID NO: 6917 - DNA, 408 bp, Oryza sativa
acttcaccctttcaattcgtcttctcgtcttatgataattccatgttcgaggaggcagcttgcaagtttgagggagagataggctatctatctcaatagccagcgaccagctctccatcggccagctgctagctgagtcttccaagtccaagtgttcaacggcgcgccgacgcaagaacctaacgggcgaatttgatgcgcgccacggtgtgggctcccgcccgcaaccgccgcgcgagcagttgctagctttgtcttaaaactttcttccaaaaatctagcatgtaaggccctgtttagttctaaagttttttgtttaaactatcaacttctcatcacaacaaaccatttcatacacacacaatttgtctatcacattcgacccatttcaatcaaacttgtcaactt

SEQ ID NO: 6918 - DNA, 434 bp, Oryza sativa
  unsure (1)..(434): unsure at all n locations
agcttcttttgagaatcttggttatgacttgttacaggaacttgagaggatntctattatgcgtctgaataatgaagacttggagttggtgaattccaatttacaaaatgatcttgcaacagtacaaggacaaaagaatgaagctgttgcttctactcttgagctcggtaataagttagaagagaaaaaccaacatatttcaaatctgcatgaagccgtggaaaaccttgaagcggcaaagaccaatatgtataatgaggttacagtacaccaagagaaatgcaccttcttgtcatcccaactcgagaaggcccagctagctgagaaagaagtgcagaccttgttatcagagattgagaagatgaagaatgagatattgatgctctcaagggagaatgataacctgaaagcatgtgagcagaatttacgtactg

SEQ ID NO: 6919 - DNA, 458 bp, Oryza sativa
  unsure (1)..(458): unsure at all n locations
tcgtacgtgcagtggatgccggtgtaactctcttctgggctgtctattgtgcctacaattatgatcacagttntttctgggtaatagttntgntatttctgtttggattattttgggaattagtgtgcatttctgtgtcaacataacgaattgtgtgattttcagtttgccaacgttacatctgcggtcttgtcctgggggagcgcttacgtctacatatcctgngcgctaaggcctgtggcanggcaccaggcgcaagagggggatgcagagcagtagactccaaggtctcctctttcgccacttgatgcagagtttagttggaaccaagttctatagcattaaaaccttgtagcggcacaccagccccgcaccatttggagtagaacgatgcttgtgaagcaactggatagaatactggtggtctggtgtacgaaagtatcgtagtttgaaacact

SEQ ID NO: 6920 - DNA, 420 bp, Oryza sativa
  unsure (1)..(420): unsure at all n locations
agtcacctgcagctgcaacttggagctagaaatgcaattttttgtttggagatagtattaaaaggagttgcaggagcatttacaaagaggacaagcgatttaattattgtntganggttgtctaattaattaaagctaaaatttgtcaacgctacttattaataaccgtgtatgttctagctgtacgtctgatacaaggcacgatcgtacaccactataaatactaggtcaccacacaaactagctcttaacttcaacacgtcctaaggccagtcacaatggctagtgtcattgcacggctacccaaaatattataccatcttctctcaaatgaaatcttttatgaaacaattcccacagtggaggggtttcactttgacgtttccaagactaatcaaagcacttaattgatacatgttg

SEQ ID NO: 6921 - DNA, 445 bp, Oryza sativa
caactcacactgtgttctttatcttgccattcatgcaggggaacccggctgccctaacacgctcggtgaccttccaagagggatcttgacttgaacaacgcctctggaaattttatgctgccttctgctgctataaagacatagcgtgatacagctgaaattttgtacattaaaagattgtaaagctggtatgggagatggagtgcacggtgttaacttacataactaccaacaactccagagctgtatatataactgtacatacttatgtgggttgagaaagataaggagagcacgtccccttatatatgagataataaataatgattgatattagacaaaggattctttgcagatatctgatatcgcctgctgttcatgtataaccatccctgaccctgaaggacctttcgcaatctctgttcattgctttctttgatcagat

SEQ ID NO: 6922 - DNA, 435 bp, Oryza sativa
agcttaacccctatattattaccctttgttcccccttgcattaatcatgcatctgccggtgtggcttgctgagtactgcggttgtactcattcttgctcaatcttttcccccttcagtaagagaagatttggagaagaagtcttacgtggagtcctggcttataccccatgtgagcgcctgtgaagatggagccgtatgcccgctagtccgctgctgtttatttttgattgtcaggccttaagtgcctttgtaataatgtaaatattatcgatataataaagatgtgtcttttatatcatgtttgtgtggggtaccccggcttttcctgggacggggattaatacactagcgttctggaaaaggtaatttatccggtcgcgacagaacttgtgattctctatcactagaatgacatattctctgtattgtgcacc

SEQ ID NO: 6923 - DNA, 411 bp, Oryza sativa
  unsure (1)..(411): unsure at all n locations
agcttaagaggaaagagtttcttttatttattcttggnttntgctacacctcggttgatatgttctttttggatggaataaaataatctaaacaaatcatagatttaaactccaaatcatacttcgaaacaaaacttatagacaaaagtgaacaatgcacttgtgcatcccatttgaattaaccactgagtaatagttagttgggataatacagatataatgtatcatgagtaaattgcaaaatagtcaaatgagggaacatggtaactttgtaaatgtgagcaaataacaagcaatgtgaaattatgcaaataatttgagttctcaaagctaaaatgagtctcaatcatgcatataaactgaacaagataaataccaatgatgatcggccaaacaaataacactgtaatt

SEQ ID NO: 6924 - DNA, 194 bp, Oryza sativa
atagcgttaatcatataatgtgcgcgttcatgtatctctttctgagaacctactcattttctgttcaagcatgtatcggcctaaataaaagaactaaacattctgtcgtaggagctctctacattttctttttttcccagagcaattaatttttgggtaattattaacaacatatcttagtttttttttaaaaa

SEQ ID NO: 6925 - DNA, 436 bp, Oryza sativa
  unsure (1)..(436): unsure at all n locations
actccgaccggacttaagcacctgagagcgctggtggggaaatatctggttaaagggatcttggggggggggtcctcgagctattgaacactccccatcanagnttacgaagccggagtgcacggaaccaagtcgccgggagatctcgttgaatctttcgattacgatcttgtcggtaccatctgtttcgactactctctttgtaatctggtctcatcgtcatcaatctcatataaactggactagggctattacctgataagggccctaaaccagtataatccttgtcttttgtttgcttgatgtgcgactacgtagactctcgttccaacgtatcccaatacttaactcattcggtccgcaagtattcctcgtcgacaggtacggtcttantaaacaactntgaccattattttctattataatatgtaaaaca

SEQ ID NO: 6926 - DNA, 244 bp, Oryza sativa
  unsure (1)..(244): unsure at all n locations
tgtgcctttcaagatctatcggngacatggatgtcggngagttcattgtgccgattccacatgtgaagcaagtgaaggtgggtagctattataaagtggatgcaatttctagcttctttttctatggngtattgtagtataatttctttttcagggtgtcactttcttactcggtaattgcagctctcanacattggaggaaagttgatcatcgcatcagatggtatatgggatgcactaccct

SEQ ID NO: 6927 - DNA, 262 bp, Oryza sativa
  unsure (1)..(262): unsure at all n locations
tcctgctcaactcatcagagtagtgcagcacatcatgcagtgttccatntcctatgtactcataaacaagaagcctttgcccatgctcaacacaataccctgntagtggcacaatggttggatgccttagccgtgacatgctcgatacagcctcaagaaaattgtcttcttcctgcaaggaaagggctgaactatctatcttcttaactgcaagaacctgcaatcacagcacgcaactcagtcgcagtgcatagcatgacac

SEQ ID NO: 6928 - DNA, 372 bp, Oryza sativa
  unsure (1)..(372): unsure at all n locations
gctgcactcctccccgggacggggtgctttttctgtcaccgatcggtcaccgggccgaggggcgttctcagacaccaaaactttccttgtgcctnnctcactgccccttcgtacccccatgacggtggcggcacatatctcccanatctgcctatcggaaggcccatggccgcggatccacccattatggcaccgtcgtcgctggcgccatcgttgttgctgagcccggtaacgcccagtcctgtgcggctccgcttgagcccgtcgactgccactccacatgagggcacctcttgacatactcaaccctgctcgcgctcacacaaggtcctcgcttctacccgctggccacttctcgggaatagaagtcta

SEQ ID NO: 6929 - DNA, 408 bp, Oryza sativa
  unsure (1)..(408): unsure at all n locations
tggctattttgtcccaaatgcatgctggccttgagtttaatataaccatcacttatatgccacttcatgtaacacatggttgatttctttatccacactatgagaattgctacagtccaacaaaaagtaccttcaggtcccgatacatcacgctgatccaacgatcggaaacggacaattnggtaccatgaagtaccggtaccttgagatactttttattagattggagcaaatcttccacactattactcttaacctcatgtntgcataggaatatagtcttctagcctttgcttagttaagaggatgccattatcacaattgtgtgggctggcctatctcttctctctctagacagcgttctggccaattcatgatgtgatatgacatgagctaatcggagtgcct

SEQ ID NO: 6930 - DNA, 408 bp, Oryza sativa
  unsure (1)..(408): unsure at all n locations
agctngcccattgcgtatggagaagatagtttcttatgcatgactaccttgaacaaggggtgttgtctttatctggaaggtngaatgcaactctccttttatattgggctatggtctttacaggccataaacctaacacatattttacccgttagtgatggtgatgctacaacttcataggatgtaaaattgataagattttaacatctgatcaagaatgaatatttctttggtaatttaacaacctgncaacagctgcgcataattagagcatgcaagtatgctactggctttttaaaggagaatactcatttcttcacgggtgtattaatgaagcacacatatactctgctggtactggctacctttcaaatctaatcagacctgttctgattgcgtaagtacatt

SEQ ID NO: 6931 - DNA, 313 bp, Oryza sativa
  unsure (1)..(313): unsure at all n locations
ccctgtgatgctggaatatctggaaagagctcaatgcgcgagatttcgaggtcactagttagacaaacaacgaggtagccgacaccattatgtacgaatggtggattggtgggcttggcgcaccgatcatatagacatctgtgttcgattctccaacatgagttggaagaaatttaagatgctcgtgatgcgctntttacactgctaaacgtacgctatctttgaatgtctaagatataaacaaaacatatatgctttgattttcacttagattggtggggccaatattatacaaccgtagatgaaactgatc

SEQ ID NO: 6932 - DNA, 430 bp, Oryza sativa
agcttgtacgtggatagtggtagacacatttattattgcttctaaagatgaatcttataattaatgtttcctattgcattttgatgaataatcgactacgtactatatacctggccttttattttggctagacatggaaaggtgcttctctggcggcctgcttgctgatcaatatgttcacgtgctacatatagtataccatgcagatatgcagtacgttaactatcattgtattattaccaacacctatatatttagtggatcatgctacctacgcctcgatttaagtacagttttgtattggtcttaaagcttaaagattgaccatccgtcttatttaaaaagaattgtataattaatattttatcgctattattagacgataaaacataaaatactaatagtattttatgtatgactttttaaaaaa

SEQ ID NO: 6933 - DNA, 215 bp, Oryza sativa
tcgtacgtgcagcggatgcgggtgagctctcttctgtgctgtcctcagagcctacaattctgatcacagtgctctctgggtaaaggttagtatttctgtgtggattctcttgggaagtagtgtgcatttctgtgcaacataacgaattgtgtgattgtcaggttgccgacgttacatctgcggtcttgtcctgagggagcgcgtacgtctacata

SEQ ID NO: 6934 - DNA, 432 bp, Oryza sativa
  unsure (1)..(432): unsure at all n locations
acctgaggcatgcaagcntgatagctacagcgacttcttatttcttttacaccgtcagatccctctctcgaacacggggctttggctgatctcttaaatcttcattacccaggatgaaacggtttctcccttctttgcatcttcagttaactgaaactctgaactttctgaaatatcctccattctttctacgaggctgacattactccccccttaaaccccaccttgtcctcaagggtgaaaattgggaaacactttctgaatataagaagcatcctcccaggttgcttcagccggagttaaattgctccacagaattagccattgagtgacagcaacattggtccttggaatcattcttctttgcaacactgctactggctctgttttgatttgaccatctggtccactgcccgtaaatttgcattggac

SEQ ID NO: 6935 - DNA, 159 bp, Oryza sativa
  unsure (1)..(159): unsure at all n locations
actatctagtactccatacgntacttaatatatgacaccgtgactgttctttaacggtgactattcgttgatgcaagtcctttagagccaatatgagaaantgtatggtctgcctacacaacatgtgatgacgaatcaagccacaatataatcaatgat

SEQ ID NO: 6936 - DNA, 314 bp, Oryza sativa
  unsure (1)..(314): unsure at all n locations
ttattacgttgtgggttaaatgaatgcgaagaagcgtaagaattgttgttttttattgggcttnaacaaaaaattcatgacatgcttgattgtcanagatatacatctctttctcatttgttacagcttgcttgcaatggctgaaagtaaatagaggaggacatgaagaagcaacatgctatggttttgtcttctattactaaccatttgcaggaagtgcataatcatgaaaaggaggagagagacatgaaagagccgctagtcccattgatcacactcatagtcgaggcacctccattatctgaagagggcat

SEQ ID NO: 6937 - DNA, 415 bp, Oryza sativa
agcttgttatggcggctgacgttctctggtttagtgcttacatctctatgacgctctagaggtgtttatgtaaatcggcgagttatcatatatgctatataatctagatcgatatcactatctaacctcatcggatagcctctatcatcgaaaacagtcgggatagatattgacgtcgagatagattatacagtatatttactatcttgaaaaagggatcattaactgggttagatcttatgtttctcttcatgcttaatgctgcatcgtttaagtttgatctgttaagtaatgctctgaactataatatctagcttgtcttatgattgctaatagagatagcatcggagtttccgccgatcttacctgcgttaagtatctcggtctttatatggcgacttgatatactagatct

SEQ ID NO: 6938 - DNA, 402 bp, Oryza sativa
agcttagaaacaactacacccctctctatttctgcgtctttatggccgataacgagacggaggagcaacgccaagcccgggaaaccgaagcacgacgcgaggccgagcggcgccgactggaggaggaacgtgaagcacaagaacaagaacggctacggcgtgagcaacaggagcgtgagcgggccgcaaaggaggctgaagaccggcggctacgagccttggaagcagggcaccgagcgcgagatcttatcggccaacaagacgttgaggggacaccggttttccgcaccccacaacagaatgctgttgccgcgatcaccctcctcgacaccctcctcaaggagaacgagctcaatcagtctgaccacgtcgtcaacatcttgaaccagaccaagaccatga

SEQ ID NO: 6939 - DNA, 229 bp, Oryza sativa
  unsure (1)..(229): unsure at all n locations
ngactgggatatcaatcaggtgcgtagttgatcagtgattatactgggaggtgtaacggatattcattcagttntatatatcctggatcagttgttgtccttgatctcttaacatgtaatttgcgttaatcttttgtccttgtggactaacatgtacccattcactatatcacggtcggcgatgcctggatggatgataggcttgcagctcttctggaatgcgtggatg

SEQ ID NO: 6940 - DNA, 269 bp, Oryza sativa
ttaagcactgggcagcactccaaggttttttttttgaaccttacagaaatgtggggaatttcaccagggacgtccgatgcttacgtagtaactaagggagcgttcccatatctactggaatcttattaatggaacaactggcgcaatcattatgcgaattttctgctatatggggttcgtttcaaataatacgggtcatccagcttacaaaaatgcatgaggtttatacgagcccctgataacctttgaaagagcttctttacctaaat

SEQ ID NO: 6941 - DNA, 428 bp, Oryza sativa
  unsure (1)..(428): unsure at all n locations
agcttaattataacaatccttaatattctcttattacagcattaaacttcggatgatcatatcttggncatacaaactccgaattgacccgttcaagtctcttaatgtttggtataacctatagaaccctgtgctctgctattatgtattgttatggcttctttataggcttgtagctttgcttgtgtgcttcgcgtagctatcgtcgttccggaggttcccaaagcgtggttcgtggtcgtcgccgaaggttcggaaggccgttctctctgagcaaggcaagtcacatcatccttgaacatgttgaatcccagtttataaaattattgtgattctaattattgcattatcgccttatttaaattcccgcgtgatcactgttttatttagccatgcctatttaccttngttattaccttaatattatt

SEQ ID NO: 6942 - DNA, 229 bp, Oryza sativa
  unsure (1)..(229): unsure at all n locations
ataagttctaaactttcaaatgcggcttataagctaactaccaatttggcagtaaatgtcatgcgatatcctaaatttaatggattttgcacacactccattactaaatactccctccatttcanattgatctacatattntataggtacaccaagaccaagaaaagctaataactctctcatactatatatactctagcaacaaactcaatgcatgcaccatcttcac

SEQ ID NO: 6943 - DNA, 422 bp, Oryza sativa
  unsure (1)..(422): unsure at all n locations
tgaggcatgcaagctnggcttncagcgtatcccagaattttcttctactatgcttaaggtcagggcttccatctgttgattaagttcgggtggaatgccacggacgttaagagtgttgtaatggctctttcgaattagagcgtcggcgaccaccgtggccttaccaagatgatagtgaattcccacatcataatccttgatgagttctaaccatctcctctgccgaaaattcagatccgactgagtgaagatgtattttaaactcttatgatcagtatatatttcacagcgactcccaatgagatagtgctgccagatctttagagcatgaaccacagcggcttacttcaaatcatgggtagggtaattgcctttatggggccgtagttggcgtgaggcataagctaccacctgacctttct

SEQ ID NO: 6944 - DNA, 353 bp, Oryza sativa
agcttccccttatcaaatggaacgcaattatgttttctaattaaatctggggtctcagcttcatccagccagctttgagctttctgcttatggagttatgtttgtccacaacctttcaatacatttttcacaaagcagagaatcctctaccatgctgtctcctcatatattatagaattgattaatcctcgaattgattacctttgaaccattcacatcgtaggaccacatcacaacttaaactgtaaacatatgtttggtgtccatgtcatatgcaagaagctacaaactgattgcaggttaccaggtgctaacttaccatgcaagaccgtacttgtgttgaccgaaagata

SEQ ID NO: 6945 - DNA, 524 bp, Oryza sativa
  unsure (1)..(524): unsure at all n locations
tcgtagcacgttccttattattcaattagcttaaggagaggtactctaccatattattatgacgtacgtatcacaattatttatgaatgacgtcgtcacccttccgcagccatgcgaataagattagtcaaggtcaatgtgtagaggtagtatatatttttaacggtttcatcactcatgacagatcgccaattaataaaaaagtaaaattcacaggccttttgtggcaccatactttntaatataaaacaatcacgaatttcactacgtatattanattgtaattcccatatcttacattgtaaattctatatatttacactgtaagttttaaaatctacatattggacattatcaaatttcactggaattgtacacaatacatagaatcgaagtcaagtagtgatattttccttttcagaatatgcgaatcacgaatgataataaatgattgactaaagactctttaattatggcttaatatctacatctaggtttcactatacatgatatggtggatatat

SEQ ID NO: 6946 - DNA, 312 bp, Oryza sativa
tgaattggcagggtgagctatcagaagcaataatatttacttgttctgggcggcattatgatgtgatcttgcaccttatatcttgctaccggcgatccagatgtatcaggttaacaatggatgcagccactctctgacacttacatctgcagtctggctgctactaactccgttgcatagagttagactttccagtacattgcccattcatatagatgctaacgaatacaataaatactagaaagtctcacatgatcaactggtggcagtatctattagttaatcagcttgcattaacaatccgtttgggtg

SEQ ID NO: 6947 - DNA, 386 bp, Oryza sativa
tagagattagctactgttgtgctttcattaatgagagcaatagctgagtggctctctgccatggaaaatcctatggctatataccatgtgctctcgtgttgtcatcagatcaaataaaattcaataaagcacggcctttgtttgtcattaatacacctcaacaaaactttcttttttgaaagtaacctcagcaaaatatgcatttgtacacatagcccttgcttaattggcaaagcagaacaactacatcattctcactagtacatggctcctacccaaatatgtcggtctgagcatctacttatcaaccataatctgacttaatttcctcagtctataaatatatcgtcttttaacgaaccggtacttagaccacaccaatttca

SEQ ID NO: 6948 - DNA, 311 bp, Oryza sativa
agctcaagctgagaaaaccgaatgcaactattatctttctaaaccaacgtcaaatggggatgagaggcaattagggagagaacaacattactgtgatttgggggccactgtctaacaaatatcacaaaaaatgtctataaataatcggacctttacttctaatagtgttacacatatccacaaagcctcatattaaactcactatttctaccggacaaaaaagtaagaaatctgataatcgtaaggataaaaatctgccataatcttatcttttttttacagcgtaaacataactgaaattggaacataag

SEQ ID NO: 6949 - DNA, 181 bp, Oryza sativa
  unsure (1)..(181): unsure at all n locations
agtctctcatgagaagtctttagcttctcatacaagaccttcaaagaagcatgatccttctttatggccttgaacttgacaatcttcttctcattataagcatggagctcctcaaacatactcacaagctcatcatangaaacattatcacaatcatcatcactctcactatcattaaaag

SEQ ID NO: 6950 - DNA, 430 bp, Oryza sativa
  unsure (1)..(430): unsure at all n locations
agcttccttttgtagatcaatttccttattcgaatatatcaagaatccgcaactgcgacttgacaactctcatggtaataaaggacttcgaagccgatgctgactctaagccgatgactactctaggcttaccaaatttcactgttaatagctggttattgccgatacatgatggccgatgtatttacattcccttgagatggccaatattgctatatcgcccttagctgttttcttattgttatcggatgtgatttgccgatgtacaatggccgatacaagttgtatcgcccttagacgtnttgttatcataatcggctgtgttctgccgatatatgacggttgatatggttatatcgccctttgtacaattcataattttatcgatatcttcgtcattgcaaaattaggggggcacatatatgcaaaa

SEQ ID NO: 6951 - DNA, 206 bp, Oryza sativa
ctaagctgtatgcaatgctcgaattaggagatcggttttacatttaaatctcccaagcttcagcaaaaagatcaatttaatcgaatgaaaatatctccgtgaagtacgcacggctttggatgtcatgccacggaaacactctctcctcaaagggctgtagtccactctttgtggctggtgtgacgcccaacactacctgcaaaaca

SEQ ID NO: 6952 - DNA, 367 bp, Oryza sativa
  unsure (1)..(367): unsure at all n locations
caccatatatattgtagacctagcacaaataagtccgctgtattctaaatataaatatacacaccgatagcacggcacaacttttaagacaccgctcctacaatgggtcgtgcctcactcgcccaccgctgagacctatgcatggactaaaagaccatgaccatgccagcttagacccacaaatggcacgctgccgaagcaaatccattacttaatttgtttcatattataagagctgttacgatgatccacactcatatatatcgatatatatacttctatatatatgtgtatacatacacatatatctatatgtctttggggcnnnnttatatatgtgcctatattcataacatatatatgaatc

SEQ ID NO: 6953 - DNA, 418 bp, Oryza sativa
  unsure (1)..(418): unsure at all n locations
agctttgctctgaatggtgtcttctttgttgtgttttgtatgtccttattctctggtgatgccttaatatcgcaattattttttaggttctctaattctacttctagnttatttagtctattttctaacactcgtactctactagataaaggcttttcatctgattctaattctatttattttctccatttttggttatttgttcttatacattcagcacaagcttgttttaaacatatactacaagtcactctattttcttgactagggtaatatatgcaaaaagcacatttgatattatagtcaccctttcctctaatccaatcatgttcacaatttaattgatccatcatttcaacctttagacctgctaatttcgtcattaaatctaactcttcatggatgattcatattcttc

SEQ ID NO: 6954 - DNA, 316 bp, Oryza sativa
  unsure (1)..(316): unsure at all n locations
tcattgagtaacctcgacgtcgggcccagccacactcaacaccgactgatgatgtgaccatggctactatagatacaaccgtcgtccacatcaagatcaagccgtccaagttctgcaatctagttcggccacctgctacagtgtcgacttcaaacgggcaccaaatatgcatgcgagctccattntaggtccatgagtacttgatggaaagctctcagagtcatctttccaatggatccagcttcattcgccaaattcatcccagtcggccgaaatcacaaaaagaaagtgctgcgtcacctataatgggcctatg

SEQ ID NO: 6955 - DNA, 432 bp, Oryza sativa
  unsure (1)..(432): unsure at all n locations
nagctnttggaagactcacgccacatctatctatctagcacgaagcaaatagagtcgtcactgagctcgccagcaagaagagtgatcgatcgatctatcaatggcggcgagccttgctgggttggcatttctcgccgtcacgtctggcgcgctgctgtcgacgctcgccgtgggtggccatctgaggacggactactactccaccatctgccccaacctggagaccatcgtccggagctccgtcaagcagtccatggccgcgtcaccgatctccgcgccggcgacgctcaggctcttattccacaactgctccgtcagggtacatctatagattgcaacagataatgatcgatcgaccgccatatatcgatgcaagcaatgtggtgatcagaatatcagatcagtagaaataagcagtgatcactgcagtgt

SEQ ID NO: 6956 - DNA, 358 bp, Oryza sativa
  unsure (1)..(358): unsure at all n locations
gcatgtcgatcttgccgaagaggtactcgctcttggactggaacccagagccggagctcctgtcaagcgtgaggtcgagcccacggccaccatcgacgatcttgccgcggncctgcccccacgacacctncgcgtcctggaagaagatgcctccatgcgcaatggccaccaggcaggccatcgccacaatgccaagcgccaccgtcctcatcgcgcgatcacaacacacaagaacccatagatctagcaagcgagtcgaagcgtgaggacaatgagagctactgggatcagtgtggattggtcactggaatgggatggcgaagcactngcctatgagccggtatttatacttgggcgt

SEQ ID NO: 6957 - DNA, 312 bp, Oryza sativa
  unsure (1)..(312): unsure at all n locations
agctctgcaaatctgtgcgcgagcctgtgttcttttttcgactgctcagggggggcgtggaggggttacataaagagacanaagaattttcttctttnccagggggtcccatgggccgtttgccgccatgggatggcccagggtttctgagggcgtccagcgttccgcgcctctgggcgtggccccatcatcgttcgtgcgtcatgtcttgacctatcccgcaccgggttggcatttgcagtctcgcctagtggtggtcacgtcccggtgcccaggaccggatccctggtgttcccgtagagtggattactc

SEQ ID NO: 6958 - DNA, 208 bp, Oryza sativa
cggaaaaatagttccctgctgctctccgaggagatagtggcaactagggatactccgcacgatacgtgtatccatgtcccatacaatgcaccaaagagtaagaggaaaccattacattttgacaccaagtcgatttacgtcacctgggacatttgcgctaaacttataaacgcattcacttcacttaaatctatgtacatctgacatc

SEQ ID NO: 6959 - DNA, 405 bp, Oryza sativa
agctcggagtgctttccccttgattttggttttagaaagctttgatgtttgaacgaaacttcagttccatgaaagcagtcagtgacatgtttgatcaacatattatcggctacaaaatacagaactgccaactggtacggattatatattgtgtttctttatccaatctcctttgatcatcacatatactgactagtgaaccaatttatatcgaaaatacaactcatttccccgggtcaattagctagtgatacatgggcatgctacatttgggacatgggagaagaggaaatgcacattttggaccctgtcttgcaacaccgggaggtcttctatgtgagtgcgtaatcccgtccgacagctaccatgatccacacaggcttgctaacatgtataaacaaattc

SEQ ID NO: 6960 - DNA, 364 bp, Oryza sativa
  unsure (1)..(364): unsure at all n locations
atgtttcagtggttgtgatctctttgcatggctgtgtatgcagatatttgaagatggtgatgtacagacactggatgggtcacgtgatgttggtgcttctaataatcgtcgactcgcaactctgtactgtaataagcagtctgggtttgaggtaagacatgacaatttgtccgagtatgatgttaaagaacttctatccagcccttgtctaatcatgatgaactatccaggaaaatatgggtntggtagatagaatcgtgaatgttgtgagagctcccacatcnacattggcagaattactatgttcctacaatgtaagcattaagtctgttgcattcagtaatcatctgctttgtgcttgaca

SEQ ID NO: 6961 - DNA, 416 bp, Oryza sativa
  unsure (1)..(416): unsure at all n locations
agcttatcctcctcgacaacagccttgcttaccgggcactcangtgaatgcgagaggatgtgcagccacaagaagatgcatattctcttattaggtggccacagagcgtgacaataggctcctgcggaagctcaaagcatatgttgcactcgaagcttcccccagaatcggcaccgccgctgctgctgccacttgtggattccccaacattggctgccataacgggatgagatgagctgcaatggaggaaattggtacgctcgtcagcaacacagagttggcatgatggaacgtacaattgtagttccaactcttttggagtgcaaaattattataatctagggcaggggcaccacttttgtgtgctaaaacagggaaagaaaatggaaacaattagagcaaaatataaaaaaacc

SEQ ID NO: 6962 - DNA, 318 bp, Oryza sativa
  unsure (1)..(318): unsure at all n locations
tgctagagcctttatatcattaaccatacatagtggccacgtatgctggactgtggngctataagaagaatccactaattcagtaagtggcacaagtgcatgcagtgttaaatagcaatagctcactagtagaatttgcaaatttggtggccatacttggtgtagcctcaccatgttcatgttgagtaagatgccattcaccaacagaacatgcatgccatttgacttggtgagttatcaacagttagacaagaaaaggtcaagaaacatanctcatggatttcaagttttcaacccatagtcagactacatatcgac

SEQ ID NO: 6963 - DNA, 435 bp, Oryza sativa
ccgcagctgcaactttccattataaaacttaatatttaccttatatcgtctttgtagactgaaattcttgcaccctctattgtaaccattctaaattaaccttcttactcattatacaaaattatatggcttaatcgggctatactagccggctttacagagatagatacatatttgccatcggagatactaataaaatcgtagctagaaagatccctccccgataagcattggatattcccatggcgccactcaaaagtagcatcggccattgcaacctcggccgaagtatccgcttgaataagtttaacatcatcggcgtcccattgaattaaacattgatgcaaggtagaaggcacacaacaattggcatgaatccaacaacgacccacaataaccattgaagttaccttgcacatcgacgatgaagaaagc

SEQ ID NO: 6964 - DNA, 300 bp, Oryza sativa
  unsure (1)..(300): unsure at all n locations
gcttctcaacgctccggaccgtntacctggactgaggaagccgaanatgcctctttctatttgaaggcgtatctaagctctccggcagttctggtcgccccggagccagacgagcccttgttactctacttagcggcgaccccgcaagtagttagtgcggcattggttgtggagcgcgatgagaacaattctncatttacgcttccccacactgtgccgacttgcgccgggggagagcaaggaggagaggctctctaccgaacgggggtcaatgccccccacaccggagttggcctttgt

SEQ ID NO: 6965 - DNA, 378 bp, Oryza sativa
  unsure (1)..(378): unsure at all n locations
agaaactaagctaattatataatccgcanatctccatataacagcattaaacctcggatgattatatcttggtcatacgaactctgaatcgacccgttcaagtctcctaatggttgttataacctaaagaaccctgcgctctcttcttatgtattgctattgcttctttataggcttgtagctttgcttgtgtgcttcgcgtagctttcgtcgttcccgagggttcagaagcgtggttcgcggtcgtcgccgaaagttcggaatgcctgtctctctgagcaaggcaagtcacatcatccttgacatgttgatcccatttataaacaatttgattaaatattgattatgcttatttaattccgcgtgacactgttatta

SEQ ID NO: 6966 - DNA, 429 bp, Oryza sativa
  unsure (1)..(429): unsure at all n locations
agcttatcataaagggcttcgacaaggtgttttattcgttctttgagcaanaagataaagatcggatagattcgaaccgcaattgcaaaggtaatcactactatgccagcccaaatcatgatcttcaccaacttggatttggttctctcgcgaaaatcgcgagttgcagagatgaaaaccatgaaaagcaagatcccgaataagaaaacagaaaccgaggaaaccacaagagtgaagactagtagagtctcgtcttttgtcattctttgctcctttttcactcaatgattcattcgaatttcccgaccaaaaattctatatgtctattcatagggcctcgttgctaagtgctacaagatctagtgcactggaactcgtggtatggacccgaatcctttagtatggaacattgtcttttccaagtaaaaa

SEQ ID NO: 6967 - DNA, 454 bp, Oryza sativa
  unsure (1)..(454): unsure at all n locations
ctatggacttgtcgatattgtangggatgaaatgcttgacgagcactgcgatactgatccagtgtggtttccagaaatgtttaaggattggtagtggccagatttcttgtaaaattatttcaaccctaaattcgggttttatgcaatttaatggaaatacttcataatgatcaatcattcaggttaagatcgatctaaaccaatccattntttctatatacatacgacatgccaacggttaaacaacttattagaaacgcaagacagccaatacgaaatgctagaaaatcggccgcgcttaagggatgtcctcagcgtcgaggaacatgtgctacggtgtatgtgcgaactcgtcggatcatgggttcaaacaaataagacaanttttgaagtatccatgatcggtaccaatgaatangatagagcttctctatcctagnattctacgggatat

SEQ ID NO: 6968 - DNA, 448 bp, Oryza sativa
  unsure (1)..(448): unsure at all n locations
agctttattagtccggaatttttgcaaattattataattaagtttagtttgaaacggcgataaacttttcaaccacacgagaacaaaagagctgatctgatcaggtggcaggccagctgcaccgctgtattttcagagacagttcatgtaggagtatatccagcactgaaaatagtttttataacaggaaaaagccacacacacaaacacttggaaagaatagaaaccatgcttcaatcgaaaactaaaaaaaaaaaataacctcacagagttctcaaaagcagcagtacatttcagagaaataaaaaactaatcttgcattgcctccacgcctacagaagaatctctctctctctcgagagagagacagctttacactggtcaaagctgccacttacccccaaaaaacctttcagttntggacagctcatccctgtttaaacctaag

SEQ ID NO: 6969 - DNA, 303 bp, Oryza sativa
  unsure (1)..(303): unsure at all n locations
ctcagctttgcgtttagttnttcttctcttcataaagtggagtaattcgattccatggcatgctttcatattcggatgctctagtgacaattaataattccgtgtctctgaaccattatttatgcatgtcggcaaattgaaaatagactgtcatatacttcattcttatgcaagcatgtcccatgggtcattcttatagtaatggctcgcgagcactgtctctatattatgacggaggaatacttgtatcacatctgaaaattctttcacgcttaaatcctgttaattaatccgatgaaaatt

SEQ ID NO: 6970 - DNA, 387 bp, Oryza sativa
ctaagctttacatccagactattgatcctgatcatgaggacagatgtgacttttattctcttgtgtcaccaagacatggccagaggatgttattcttctgcagccagctggacggatggtcctgaacagaaacattgataacttattgtgcaaaaaagaacagctcgctttctgcccagcgataattgtccctggaatacattactctgatgataagctgctccagacaagaattttcttctatgctgatacccaacagcaccgtcttggaccaaactattgatgcttcctgtgaatgcaccacaatgtgcataccacaacaaccaccacgatggctccatgaatctcatgcacagggatgaagaggtactgtgtgtatatactttc

SEQ ID NO: 6971 - DNA, 419 bp, Oryza sativa
agctttacattcgtgcactattttatatacgtcttggagggcagttagtcagaacaaaccttgtctgaaagctttttcgactagagtacgcgcgccggcgtgtgatccgcaaatgcctttgtggatgtggaggagaaaagtttttctgtcgtccgatgatacacacttgaggaggattccgttcggggccttcttgtataaatcattggcgatcatacaatatatcttggcctgacaggatagtttttcggcctctgtgtcgtcgtccggcagctcatctgactccaataatttgattagcggagtgcgccagtcgtccgttgtctctatgttcgcaacgacgtttgtgacctttgcagccccttgcgggatgctggtattggctgtggtgctttcgtcgttcatgttcttgacggatg

SEQ ID NO: 6972 - DNA, 381 bp, Oryza sativa
  unsure (1)..(381): unsure at all n locations
tgcncgccggcacatcgaacacacactnttcggggttcagnttcatgcgcgtgtacctaangctatcgaaagtctcagctaagtccgtcaacaatgtttcttggtggtggcgcgtctctaccaccaagtcatcgacataagcctcaacattacaccctagttgattactcanagtaatgcgagtcatgcgttgaaaagtanggcctgcatcctttaaaccaaaaggcataattgtataacanaaggtgtctacaggagtaatgaaagcaatnttttcctcatcttcccctaagccatgcaatatgatggcatnctgaataagcatctangaaacacanaaagtcgtaccccgcagcggagttaactatctgatctatgcgt

SEQ ID NO: 6973 - DNA, 400 bp, Oryza sativa
  unsure (1)..(400): unsure at all n locations
agcttcgctgtgctgagaagataaattttatttctttagtttttccgctgcgcgtgaggtgtattttggtatagagataaaacaatgtatctgtttcaaattggcatctatgtactctggttgatgcctggacagaggttaaatgcacangtagccggtgattcgggttgtcgaatccccgagcgcgacaagttggtatcagagccgaccttgaccgtaggacaagccaaacggaaaacccatagagccctctgaaattcttttcttcctcccgaaaatctcttctttccccattttcaagtggtctaatgagtccagataaatgagtttgctctcaagtttctgagtttcgtcaaaaaaaatatttttttctttgtgcctctttgactttcaaaaaaaa

SEQ ID NO: 6974 - DNA, 464 bp, Oryza sativa
  unsure (1)..(464): unsure at all n locations
ctcagcttgcacgtacatgcccgaacaggggaatcacagaggacattggtatgcttgtctgcaatggcaccggatgctgctccatcgatgttccaattcgtgctcagaccttacagcnttatgttgtccgccatggcaaaggggcggtcgaacttgatgcacaatccaaccaaagctccctgtggagcacaatccaaccaaaatgtacaagttgccagaaaatatacaaatcaatcacagtgaccaatgcagtcccatccacataatttcacatcccagactatacatggatntcgataatgcacgccacccatgtaataatctaaagctggctcttcttatagctnttgattgatccactnggtgcctcttactttgaagaaaatcagaaattatactagaataaaacacctaacaatcatatgtgatgaaanatctagagaaaaatatcacatatggattct

SEQ ID NO: 6975 - DNA, 55 bp, Oryza sativa
ttttttgaattcgccactttttatacaaacttatgtatcctataaataacataag

SEQ ID NO: 6976 - DNA, 343 bp, Oryza sativa
  unsure (1)..(343): unsure at all n locations
ctatagctcgtatcttctcggagttggcttctatgtcctgggcagagacccaaaacccgagaagcttgcccgcaagtacaccgaacacgcacttatncgggttcaagtttatgcgggcggagcggagactatcaaaagttttcgctagatccgagagtaaggtttcttgcgtgcgcgtctttacaaccaagtcatcgacataagcctcaacattacgtcctatttggctacccaaagaaattcgagtagtacgttgaaaagtaggacctgcatttnttaacccgcagggcattgttgtataacaataagatcctatggtggtaatgaacgcagctttttctca

SEQ ID NO: 6977 - DNA, 434 bp, Oryza sativa
agcttccttgatgcttactccggctaccttctaatcagcatggcgaaagaggacgaggagaagacatcattcatcacaccattcggtgtattctgttacgttaaaatgccgtttggactcataaccgcagggaacactttccagcatacggtccaaggggcacttagcgatcagctgggtaacaatgttgaggcctacgtcgaccacatcgttgtcaaaaccaagacaggcgacttgttgattgacgatctactggaaactttctacaacctcagacgatatcgcctcatgctcaaccctgagaagtgcacgttcggggtaccgtcgggctaactgctcggattcctcgtttctggcagaggaatagaagcaaatccccagaagatcaaggcaatcgagaacatgaagtcgcccacaagactcaatgaagtaca

SEQ ID NO: 6978 - DNA, 142 bp, Oryza sativa
cgcgcctcagccgccgaaatacgagcgtcttttcttggagaccgagtgcctaactctttctgtgtacgggtatgagggtccgtgacgcaccgctgagagagaacgtctgcgaccagagaataaagcgcggaatcgcgacacc

SEQ ID NO: 6979 - DNA, 363 bp, Oryza sativa
agcttaccacagctgacttatcttatttgtctgttgttcattctaattctggatcctggaaccagacgactgtttgacatatgggtccccatggattgcttacgacttattataagccgtaatgtcttattagcaattaaaaaaataatatgtgagtaaaactattgtatttatgttcttagagacttaaaggccaaagctgaaaaataatacgttgaataaacatcaaaatcaaattcaaaattaagttttaaaatttaaattctagctttggcttataacaagcaaaggaaacaatgaagcccatatcccgctatgagtactatgcttttctttctcccccgcgcgagagaagggaaaagc

SEQ ID NO: 6980 - DNA, 293 bp, Oryza sativa
  unsure (1)..(293): unsure at all n locations
aatattctcttttgtctattatattgtatgtatgtgagctgcgatatctcatctncaggttttgaagacgcttctgaaagatgatatcatttgcagagcacggatatctcctgaggttattcatctgttttgtgcacttgaatagaattcttatggcaatatactagtagcaaagtcgtgccttcctacccattatcttatgcgagctctagtctgtctgggggtactacatngtctgcgtgaaaccatcgtgtaacttctatcaatgcangctcgattctatgttgttatct

SEQ ID NO: 6981 - DNA, 310 bp, Oryza sativa
acgaaatttgcattgtaggaaagttttctccagatttgctacgcaaggacccctcattccgaatggatgaacaggaccatttcctatgggaactggaatcctatgaatgactttttttataaagctgcatgttgatctaaataaatttcttaattattaatcacaaggaacttatattccccattcatatctacaagtcttgcatttctttgtcttcaattatatacagggttcagctacaagcagaagtaagaacatctggcctgttgtacctattatcttttacattcatttcggttattagtcatat

SEQ ID NO: 6982 - DNA, 193 bp, Oryza sativa
  unsure (1)..(193): unsure at all n locations
tgattctgatcgtgaggcgaagccaggaaagaactcaagaacgttcagctgattatgcgaagttcttctgttgaacactgccactactacagagttgaatttttcgtacgatcaagatagatnttctcatacggagatcccactcgcttatattcacatgtttgcgaaaatcaacactttgcccctcggaggg

SEQ ID NO: 6983 - DNA, 469 bp, Oryza sativa
  unsure (1)..(469): unsure at all n locations
cactcagcttggccttgttactangggatgctcccagataagatcgtgcttcctgagaatgaaatgtgttgtgaagaacgatgctctgaacattttccagccatatagatatatgatgaagatgtgaacatgaagcttcttatttgtggagcaccatgcatcatggtatgcgttagtggacatgcctaacattgtaatatcttcttatatattattgcatgtttcatattccaaccaatacttccatctcttttacaggatgctagtttgntgtgctcactggaagatggtttgatgctctgctcaatattgaagtatggtgtcatcttatgacttaccatgtgttgcttgatatctgcatataagtgctgagctctaatatttaccccaacatctattcatggaatcttttgatggagaatgactatgattgtatctactatataatctgcatattgcgcacaagttg

SEQ ID NO: 6984 - DNA, 350 bp, Oryza sativa
  unsure (1)..(350): unsure at all n locations
acatgataaatcttcattgagcactatactgaaagatcaacagcctatatttgttccgaatgaatccttcaacagtgaaactcgcagagtaagtagtaagaaaattaataatgtagatacgcgtctgcagcagcaaagtcctctttaatcaaataagaagaaaaagggtagacaacgttctgtcttcatccaagcttcttcagactagatttatatagatcaacgattgatcttattaaaatgttgaggtctaccggagcctgangaggctgaagttccgcttagggtcgatccttctacaatatcagatgacattccacatcatctgagaactccaaccagtcaatttc

SEQ ID NO: 6985 - DNA, 409 bp, Oryza sativa
  unsure (1)..(409): unsure at all n locations
gtcacctgacgcatgcaagctntatntaagataaaataatgaatagtatcttctaagcaaccttgtattcctccaattattgctggtacaatcatgaacactacatatgtatcttgcgcaacgcttagctcacagtgctttgttcttcatggccaagcatccaaaacctgaaatatttatctctgatacaagttctgataacactattcgttctctgtgtgctgctttgagcacgatgtgccgagcctataaacagacaccaagcacttgtgaatatatattgtttttatgcttgtgtgatcaacatctgaatcattttcttcttcttgcagccagattgttggatcagctattctaaggtgaattgatatcaatcccaccctttatttattgtccaatggtccaattg

SEQ ID NO: 6986 - DNA, 97 bp, Oryza sativa
  unsure (1)..(97): unsure at all n locations
cgctgttggagttgttgctctgcangatatgccatgtgtgaagatgatgactcatactcttgtggactctanaatcttataatgttatcctttggtt

SEQ ID NO: 6987 - DNA, 319 bp, Oryza sativa
  unsure (1)..(319): unsure at all n locations
gcacgatcacatccttggactaacaaatattcaattngagattgatatggtgtgtagcacatgtcaagccggcatacatattggagcacatcaccccgtcaagaatgtgatgaccactacaagactatnggagcttctccacatggacctaattagaccaattgcttatctaagcattggaggtaacaaatatggtctagttattagtgatgaactttcacgcttcacgtgggtgttctttttgcatgacaagagtgagacacaagctatcttcatgaagtttgcagaagacacaatacgagttcgacctcaagatcaa

SEQ ID NO: 6988 - DNA, 440 bp, Oryza sativa
acctgccgcatgcaagctttaggcttttttcatgactttggtcccataattttaacccaatggtggaagatctggctatgctgcccatgaataaatctattcaacaaaagtagactgccaaagctaagcatattttgggtcctgtgtgcatccaccaccatgttgtggacacctccacagcaaccaaagtgaaaggagggagcgtcaagcttatcaattccatttcaatattagccagagtagttggtatctatcattccactaacaaaaatagtatgcaacaagtgatgcgtctttccattctaaatattggtcaaatatcaattgggtattgaccattgacataccactaggttttggtaccattccgagcaaaagtgatccttccattgaattccgcttactcgattccttcaaattacatttatctataaactcat

SEQ ID NO: 6989 - DNA, 148 bp, Oryza sativa
  unsure (1)..(148): unsure at all n locations
aagtgactgtaagcctctgtaaacgccatggatntgatgaacagtaatccgcttcaagggagcccatggagcttgttgaacttgctggtattgatcattgtcgccgccatgatctgctgcgagctatgtcgtcgtcgtcgtcttcctc

SEQ ID NO: 6990 - DNA, 402 bp, Oryza sativa
  unsure (1)..(402): unsure at all n locations
ngacgcaacccctacctggcgcgccaactgtcgaaactagatttcggcaataataaaagggggtggctatcaagctgganaagtgtatgggtttggagacaaaggatttatacaggttcaggccttcttatcgaagaagtaataccctactcctgtccggngatgaatccgccgagtgtcttattgattatatgaattggagaaaatcaacaactgcccctagaggcacccggaccccncttatatatgggaaggagtccgtgttacaaaagataatctatatccctaacggaatatgcagatacagataaaatacagtcgtagccgactaagtctcaaggtatttccttcgatgtacaagtgagaaacacacccgagacacacataagatattctatctat

SEQ ID NO: 6991 - DNA, 402 bp, Oryza sativa
aagtgactgacgctgcaacttccctagacttgtgatttgtctttctactagcgacctgcctttccttgctcactgtagacgtggtccatcgatagtgcacaggagtgcaatcggtgagccgatacttctcacaatacgcgacacatacgctgctagctttaaagtgatgatgtcagcttcttgtaggacctcgatcccaagataaaaactccaaggaccaagatcactcatcttaaattcaaccttcatctgctctttgaatcccttgaatcatgccactgtcaccccctacaattatcagatcattcacatacacaccgactagcagtcgcccactgccatcgccacgcgcgtacaggccatgctccaaccgtctctgcttgaaggcaagtttctttatgt

SEQ ID NO: 6992 - DNA, 372 bp, Oryza sativa
  unsure (1)..(372): unsure at all n locations
actcagcttctactctgtcgttgagataagatttctatggttgggtctagtgtgctctggttgtganaaaaatatcaaaaaacataataaacaaaaagttgtgcctctctcctcagcactagagagagcaagccataaanaanaagaggattcagcgagcacacacccaccattcccctttgtcaacaccttccaccaccggttcttggtttcgttgctgtatcgtttgtgttttgggcagtcttgtggtaagctcgcgttttacttnactagccatgaccgcactgtcactatccctcgagcgatattcatttgcttggctacgggttctagtttctttgacattgtttaagccaccacagctcaccacaa

SEQ ID NO: 6993 - DNA, 431 bp, Oryza sativa
  unsure (1)..(431): unsure at all n locations
agcttatccagaagtcaccgagttcaagttgatgcggcatancaagctatctattaattaggaatagttttttagtttcctttatctttcagaaagtgtgtttagtgtctcataaatactctaagttttccttgtatcttttaggaaagcttctttattttcctacaagtactagtatctccccatggatataaatatgtacacctggggtcattgtaaactatctcgacgatcagtacaatttaagcgcatcgccaccctttttacttttctactttttatcatccgacagaacttggacctaacgcggggctacattggctttcgatctccggcgaaggggtaagtcctacgttccgcaggctcaggcaattatatcatttacattggtgtcattcatggctgcatcagtacatctgacctcttggatt

SEQ ID NO: 6994 - DNA, 457 bp, Oryza sativa
  unsure (1)..(457): unsure at all n locations
nggcaccatttcaagcaagngtattaccttatatggctgcttcaatatcactgttacctaccagataccctggttacatgtagtattcacatatatacctgacactacatagaaacctcatacttgcccaacctagctactgcattgtgttaagtattgcatgagaaagaattgctggttcctcagtaacatactttgacaaggattctaattattggtttttttgggaaaataatgaataagagaacactgacttctgctatttatagcccaagctggatacntttgttatcctctcatctaccagccaatttatttttgatgtagttagcactcaccaagaacctacactcatctactttccagttactctaatacaaaattgatatggagctctattaaaatcttccatctatttaagtcagatcaaatgtctattatatgtcacatactcata

SEQ ID NO: 6995 - DNA, 306 bp, Oryza sativa
agcttgcaccattgagggcgctgccgtctctcgccattgccagcgtcgtatctgccgccgatggcgccggcgctgccgccactatcaactatggttatggattggggaggaatagggaaatcggcagggggaaatggacaccatcactaaacccatccgggttacaaatctctggcctcatggtgaagcaggtgttttatacatttcgctgaccaccgttgtatcgaagctataaaacaattgtctccggcggctacatgcaagtacacatctctcgtaacggccaagaacatcctcaccactttg

SEQ ID NO: 6996 - DNA, 313 bp, Oryza sativa
  unsure (1)..(313): unsure at all n locations
taccgcagttttggctaactggtcagcgacaatgtcgactgcaagtgcattttgccaacactattgcccccagagtgaaacatccgtgtctgccattgcggctagggcttgaatgagcagccatttaaagggcagtcggtggttacacgcatctctatgtggctatcgacaaattctccatgaggattgaggctaaatcggtcatcacgatcacagcagataaagttagagattctttcatcaacattgtgcatcaggttggngacctaatcggatcatcactgataatggcactcaattcactggcggagca

SEQ ID NO: 6997 - DNA, 417 bp, Oryza sativa
  unsure (1)..(417): unsure at all n locations
agcttgaggaggtacggagtatgccaatgnattgtctcngtgtcggactctagctcgaggaggctaggagcaagccaaggtgagccgccaatgtttgacccgatcttaaccacgtctcggctatggaaagatggggaggggagaaggaacattgacaaatgccctcccatattttttttctcacttacttgtaggcccacgcctattattatattcctttgatgattgggttgctacgtggatgtcacgtcagtgaaatcatcctcaaaacagttgaggttgttgtttacacggtcttaataattggagtgggtatgatacccggtgttacgttggacaatcataagaatcatattggactaccagttgatggagcccaattggacttatttgttagtagaagaactatgtaacgtg

SEQ ID NO: 6998 - DNA, 270 bp, Oryza sativa
  unsure (1)..(270): unsure at all n locations
acctcactgattcaatctaatctttgcagctcggttgtttgctcttgtcatgctatnggannaattgatttcctccatctttggctcttgtgatagctattcttaatgatggtaagaacattgctgtctgcactcatcatagaaggtaattgtatgaccacaaacaggacagactccctatggcctatcatcatagatgatatggctcaatgaatttcgtttctttgtttccaatgtatctgctactcaggaaccataatgactatatcc

SEQ ID NO: 6999 - DNA, 435 bp, Oryza sativa
ccaagcttacaaagaatgaggaatatagcgtatcttttcatctaacatcacctgttgtccaattcacaagtcaatgatgcatgacctcttaagtcgcagagcttgtctcaacgcgaccacatctcctcgccctcatatccaacaactgcgagttcaaccttgacgtgttgtaaaggaatgggccgcgataactactccggatcgatttgtgggattcaatggtgttgaccctccatgaacgcttcgtcctacatggtttggaagatctagaatcgtcctcatcgaacacttcatgtgaagtgaatgtaatcgactgggagggcaccagtgatgcaacctgctcgggcaaccgtggaccttacacgtactccctgccagctcctagacactatcaattcaattttatagaaagtcatttgacccatcttgcccctg

SEQ ID NO: 7000 - DNA, 228 bp, Oryza sativa
  unsure (1)..(228): unsure at all n locations
gagtacctcgctccgataccaattgaacgtgcagagatgtagcctatatgggggtgaatcggctctcctgcaantntctcaacaattgcagcggttaaattacagggcccggaacctcctggtgatgaacaccagaacttccgggcatgatgagtagccaggaacttccggagttcttgagccacgaacttcctggcagctgagattaattaaaactgagatgataaa

SEQ ID NO: 7001 - DNA, 271 bp, Oryza sativa
  unsure (1)..(271): unsure at all n locations
agtatgatgcacatctgtggcgagtggagcatattgacttttattattcancaatgcaattacttggtgtatcggcattcagatcgaagaccttcacaggctcaatgcttgtctgaagatagggtcacgggtnaaaccataacagaatacctttcgttttctggtgacactagctaaaatgcctgtgcatttactatgggagtgaataatctatgtgtttcttacacaaccatgtgtgtttgcattaaacatgtccatccccatttttgtt

SEQ ID NO: 7002 - DNA, 444 bp, Oryza sativa
  unsure (1)..(444): unsure at all n locations
tgacgcatgcaagcttgaaggctgagaataaagaaattntctatgtattgggcgtacgccatgcgcacactntagcaaaaggaatcagatttcggccaggcacactggaactatttatttcttcggctgctcgatctctcatcgatcgatggaaggttcgttcgctagcttttccttcaagacaccgcactaggaccagcccatccgatgctgaatacaacctgttttgagtcttttatcaagtgaaatcaattccctccgtttcataaagactgcatttttaaattaattatatgtcctacggacactcgttcagtatagttgaaactctgatcacctagttgatcacatttgaaaagctaatcatgatctttttttatctaactacgataaaaatactaatcataaaaaaatcttaaataagacgaatagccatacattaca

SEQ ID NO: 7003 - DNA, 196 bp, Oryza sativa
tgctcaaaggctggcaatatctacactgcgttaatataatccgcatgcgttccattcttttctcactagtcctccaggccagagcctgagcatatctactgataatgagacatgactgctgattcattcattgactcctgacaaatatatatatagcataccccttgatctctacttgaggctgctatttactgag

SEQ ID NO: 7004 - DNA, 362 bp, Oryza sativa
agcttctgcgacgagccggagacttgtgttttcacaaacgtgacagccttctctggcaggcacccgatcattgccggggacctgccgttgccgtcgctcagtctacacaattctgcctagacgcccgcctagaggaggcccttggtggtgaagtcgaacgtcatcgtcggcccgccgacggcgttcacccaattcaccagctcctgccggccctggtcctgattggccgccggcttgccgttctctggtgtagcttaacgagttccatatctcggcgactaccaaacccggcttgctgctctcgacgtacatcttaaccatggccgcggagtatccctctgggaagtcgatgcgccagccgt

SEQ ID NO: 7005 - DNA, 402 bp, Oryza sativa
  unsure (1)..(402): unsure at all n locations
ctaagctgaaccaaggaaaacacatgccacttgtgcttctacttgtatcaatgtctccggcgaggacgctgtcgctgtaaccaatcagccgctgctcctctttctcccttttgtaatgaagtccgnactccatcgtgccagcgacatatcgtataatgcgcttcacggccaccatgtgctcctccattggccgctccatgaagcgactcacgaacccaacagcacatgctatgtctggccgtgtgtgcacaagatagcgaacgctaccaaccagcccgccatattttgttgcatcaacgggaggtgccgtgctatcacggctcaactagagcctttcttccattggagtggcgcacgggtngcngtccttgaggccagcctactccacaatgcgctgagcat

SEQ ID NO: 7006 - DNA, 415 bp, Oryza sativa
agcttatctgggaaatgctgtggtacggttattatgtttgcttatgcaattacactatgtcatgacgatgatattagagtaatatatggtagtttagacgtggtgtctagattacgggatatcattatttggggttatatgctgcggatgagaggtgggccgctgatggtgacagctcagtacgggtattcctcccggcctgtatatagtcctaaggtaattccctagggagggtattcctccgtatttagccccggttgtatggtcatgactggctcgtcgaaggaacttaacagttagaggtggtttctcgagtaccacgagggcattggtagagggtttatctagcgatcatttacttaatgtattatattatgttctagagtatagaaagatatcttctctttctttcact

SEQ ID NO: 7007 - DNA, 410 bp, Oryza sativa
agcttcaaaataattgatatatttgttttattgcacatcgcgtgcattttatgaaacgtgtgagactaaataattagtgctatataaatttgacctacattttgaacataaaataaatgccaaaaattaagaattatatttgaaattttaataggacaatggatttttttatcaggagcattcataaaaaaaatgttgggaacattggtatacctatctttatatgaatgctcctcatttgtatgaccttatttttaaaaaataaatacgtatttttttcatttcattatctaaaaatatctttttgggataaataatgcgtcgcgcaacaaactcataaccattatagtcccatgcgagaagctcttatatttttaataatgtaattcatgaaattcctttgttcatcc

SEQ ID NO: 7008 - DNA, 325 bp, Oryza sativa
acacgtgagatagatctaatacaaatctaacagatatacgcgctaagccgctgaagggagggagacgtacgccacaattgaataaaggagaaaaggaatacgcgcgcacggctctattactagcgcgtatgcgcgaattaacacaccctactactactcggttatgccctggacgaagggctataaactgatatggtctgtagtttattcatggtgattagctcgacaagtcgatcgatctcttcctgtgtttggtgtacttctctggtctcttaattgggtacgtcgactactcgtcgagactgaacagaaatgtttcaagctg

SEQ ID NO: 7009 - DNA, 422 bp, Oryza sativa
agcttatcacaatatgcagtgactgagatatcttctgtaagaaaccctgtgcgacacaagatccgcatcgcccaattggcgtactgccaaattacctgcacaggccatctaggatgctggaattttccatccacggatgattggatgagaccaaaacaagagttatagtgctcctgtcctaacacactattgctggttcagaattgcgtacgtagccggtcccctgatgccgtgaatgacaaaattttaggcgcctcataaacaccagcgagagcaatggctggatgagtgtttaaaagtgttattcttagttaagcaaggacagtgtgtaacgtgacagcacggcgctgttcagccacacggtcacatgtcgtacactcgcataactcacctttaccggtcttgaatgggctatgggtcac

SEQ ID NO: 7010 - DNA, 144 bp, Oryza sativa
  unsure (1)..(144): unsure at all n locations
tatctcttacgctctaagaatggatcagtcagaacatcaccacctgtctctcctctaccgccgccgactggtgtattcgactgcacagatggcctattatgccgncgttgttgggcatctacgtcttcaccgaccggcttgcct

SEQ ID NO: 7011 - DNA, 432 bp, Oryza sativa
  unsure (1)..(432): unsure at all n locations
agctngctagctgcatcctcctctaattctagtgctagtccagccttcttcttcctcctcctacttttcctttctcacccactcttcctctccccttctgagcgacacatccatctacaggtgaggaccgtctcacacccagcggaaagcttcgccgccacctcctccatgagccctccaacttcactcgcggcgtatggaaagtacaggggtgagcagcatggcacgcgtcggcgaaggtggtggcatgctccagtgtaagcggcaatgcgggcagcatgctccaacgaaggcagcgaagccagcgacatgggaaagaagcagctatgaagggagtcgagctcgagggcggcctgccgacctgccttctccactctcggcaaggggttgctggatccgatgaggtccaccgagtttcccccaccgaagcca

SEQ ID NO: 7012 - DNA, 325 bp, Oryza sativa
  unsure (1)..(325): unsure at all n locations
ctcattgatactatgagtgttagtagccgtgatatatgaaactcggcaaacatgaacaatgtgacatactggatcgatgatttgctagcttatatctcaactccgagtaacttggccattggtgataaaagaacggagataagaagcaatggctaacaaacgtggcccacaagttattatgatagaagtaacagagcggcgtttatgtaacatagtaccttaaaatcttatgtttattganacanaccccataatccaacgttttgtacatgcataactcacacctatactttggaaattactctaagttatatgtacacgttgt

SEQ ID NO: 7013 - DNA, 154 bp, Oryza sativa
ggcatgggcaaaacatcacattcaacaacataatggtaattgccaattgcacaattaatgtgctccaaatatgataccttcgccttaccactgctgttcagccattggatgtagcatggatgtgggtgcggataggtgctaaccgcaagcttct

SEQ ID NO: 7014 - DNA, 427 bp, Oryza sativa
  unsure (1)..(427): unsure at all n locations
agcttactttgaggggccttgatatttcttattattattcgtcaccatattacgttcgattcgtattcgctccgtatctggattcaatatatattcgattcccgtttcgtatctgggtttccgatttcgaatccgagaaaaaaatatgaaaacgaatatgatagagctagtttccgaccatattcgatccgttttcattcctaactgcaactagtaagcgtgcacgtggattccacgtgactaaaaatttaataaatagatcaggggttgaggttagaagatatcgatattntgggatagaaaagttaaggtttgcttcgaggtttcaatcctagttcgtgagttgagagagaagtgctttagatgcactttgtacacacatattgatcaaacaaaatngatctactttcagagtttcgcaatacat

SEQ ID NO: 7015 - DNA, 259 bp, Oryza sativa
  unsure (1)..(259): unsure at all n locations
tatcgaaccggccaccgctaaatggccggatcgatcgaagttctggtactatgctcacggnggaacgctcaacccagttgatggctccctggtcttcagcgatcagatacgcgaggctgcgcgtcgactaatggacacagtggaagcctcttctcanggcacgttccgacccgacagagagaaggacgagctgtcactcgccctgcagactctagagcatccaggacgaacacgagggaaaggggtgattccttggaag

SEQ ID NO: 7016 - DNA, 406 bp, Oryza sativa
  unsure (1)..(406): unsure at all n locations
acgccgaacactcggacaccatctctgtgaaggctctgatggtcgactggggggacgcgggggctncagaagagatatagatttccttatttatcccgcggcggcctttggattgggtaccggatacttaatgtagatagaacatcttatctggatctcgggactgtttcttaaccagcggatcaaggaaacaccccgacacttaatcggttacgactgtatgttacctgtatcttcatattccgctaggaaaatagaatcatctttgcaatccagactccctcccatatataagggggggttcggcgcctctaagggcatatgctgtattgttcccgaacacacaatcaataatacacctcggccgattcatccccggcaagagtaggggactactcctttataa

SEQ ID NO: 7017 - DNA, 328 bp, Oryza sativa
acagctcttgtccgttgtgatggttttgccatgtaatctgctcctcttccatgtgccagcatctgcatctgcattaaacatactgtgtttgatgtgagcttaacacgcaacagaaatatctgtcctgcgtgtgacctttcttacctgtggttgggtcggcaggaggaaccaataagaggcaacggccggcgccggcagcatatattacagaggcttgcaagcatgtgttattgatggattgctgtgcgtctttctcgactatgttaccgacataaggttaacgttgggaacttcacctttccgttcacaaaagaagcgatccagtaac

SEQ ID NO: 7018 - DNA, 259 bp, Oryza sativa
  unsure (1)..(259): unsure at all n locations
gcgcattatttacaaccaanttcttgtaccggccggatccctgtcgagcactccagcactacacacgcttgcctgacgagtgcatgccctaccacagaatagattttcccgcgtggtccaatccgacttccgcgggcggagcctcngcccgtctggaacaaatcatctgtaaaaaatgctatttttacgtacgggcggcgcacccacatgtgaaaatttggatcttcgcgtgcgggtgcgtatgtcatccaaaaataaa

SEQ ID NO: 7019 - DNA, 336 bp, Oryza sativa
  unsure (1)..(336): unsure at all n locations
gtagcatttgcttcgatggcattggtgttgtaattnntttacagtttgccagtacatatatgaccagaggatgccgatcatatgtagccatgcattgttatgattcttctcaagttctcagctcttatgtatcatgttatgtttcatggacagatgaaaaggtatattgcatactgtgggaactatggagacataaactgctgatgcttatgtaaattattgtggaacatgttntgctctgagataatactcgtatcaagtatgttgagaatatggttgctggctgtcatggaatgtatntgtcattagttgcttactgatatctatattaccttt

SEQ ID NO: 7020 - DNA, 410 bp, Oryza sativa
gcatcaagctggtcttaactgaaaagtttatttttactggccacacacgccatactgtagtacacaattctgaatcgaatgacccgcttcgaacttccatgttgctaaaaatatgcctgttgctaaacttgctatctggtctacatcgacaggaaacaagaattggatacatattggtagatgcgtcgatctagtcaggcgtgttgtgcatcttgaaggctcagctcattcgttcttgtctgaaaacaaggctcatatatgtctggttgacctcttgatttatgtataaaaactttcagctcatttgggtttctgaaaacaaggctacttgtatgtacatgtacgcttatgtcgaaacgggctggtctattacaaatttttattttctatgtcaacaagtggttgatgta

SEQ ID NO: 7021 - DNA, 410 bp, Oryza sativa
  unsure (1)..(410): unsure at all n locations
agcttgcccgcaggtacacctaacacactcttatcggngnttagtattatgcgggcggagcggagactctcaatagttaacgctatatctgagagtaacatttcctggttgcgcgtctttacaaccaagtcatcgacataagcctcaacattacgtcctaattggttacccaaagaaattcgagtagtacgttgaaaagtaagacctgcattctttaacccgaagggcattgtcgtataacaataggttcctatgggggtaatgaactgcagtttttcctcatcctccctagccatgcgaatctgatggtaaccagagtatgcatctataaaacacaaaaggtcgtaccccgcagtggagtcgacaatctgatctatgcgaggcatggggtaaggatccttaagacatgc

SEQ ID NO: 7022 - DNA, 423 bp, Oryza sativa
tagcttatacactgaccactatatgctattatttatcaaagaatattaattctagggcagcgtctacttattattacactgcgccaattatatacatactgattcattataattggataatgaccaaaaacctcatgcacttttgcagaggcagcttataaatgcttataaaatcaggcgttctaaagtgtacagacacgtctgtggaagcaaatattacctataacacttttaatctagagatattttagaggtcctttttagcataatttgttaaattatcttgagtcatttaatctctatatatagaggcacttatagataatgtaatctatactaagtaactagataatagtatcactgggcacaaatgtacatgtagttgcagatggtataaccaatcaagttgaaaatgatatattc

SEQ ID NO: 7023 - DNA, 434 bp, Oryza sativa
  unsure (1)..(434): unsure at all n locations
agcttaanatattttaatatccgaaccgttcttatatttttatttgatctatgcaacggctatggaggtannncaagagagaaaaaaatatttctatttctcncccagcttttccaatattgactatacctatgaattacaaaatactccatttgaaaacataaaaattgtatgcatatttctagctcaaaaggtactctcataatctgatcatagcatagaaactgtatgcatatttctaacctcaaaggtacgtccataatctgatcataaatatattatactttataaattcattataataaacaaatatggttaagtgggacatccaaaatcattaaaaatcaaacatattatatattgatcattcttatttgctcctgtcaatctcaaactaatcttaatttgtccatgttgtctcaatgacacacata

SEQ ID NO: 7024 - DNA, 178 bp, Oryza sativa
  unsure (1)..(178): unsure at all n locations
cccccccccccggaccccccacccgaccntcccccacccccgccgcccccccccaaccttccccccccaagccccacccccccccccctccgcccgccgcccccccctgcggccctgaccccccccccccgcccggcgccccccccgtccctccccacgccctcccccccccgcgcgg

SEQ ID NO: 7025 - DNA, 384 bp, Oryza sativa
ctgaggctgcagctggttacagttggagagacaattggtccctccacgcgtaagtactaaagcaaaccatggccgtcacgggaatcgctacggattaattgtaaaatatatccttagaagaaaaggggcaaaagatcgtgcgtaatggacggattacttgacctagtgggccaaatcccgatcgctttaaataatatgactcgataccgaggaaactgactctattttgaatcttcttattcactatacttgggattccacaaacaataacttacggaccaaggagcttcttttatgtcaatagaagtgaatatgtttaccgaatccttacggaattaaatagtgatttcctgttctattacgctaagggctatgtacagaccg

SEQ ID NO: 7026 - DNA, 417 bp, Oryza sativa
  unsure (1)..(417): unsure at all n locations
naagctttgctttcccgtaattacaattacagtctctattggagtttagctgataatagtacatagttgtcatggaaaaggccgcggccaatcatgcgggcaaagtcttgaagaaaggttagaagaaacaagccaaggatgaattatatcgccagaagcacgctgaaaagaagagaccgcggctggagaaagcgcttgcaaactccgctgccattatatctgagctggaaaagaagaagcagaagaagagggaagaacagcaaaggctggatgaggaaggtgctgcgatagctgaagcagttgctcttcatgtcctcattggtgaggactccgatgaaccctgccatttgatgctaaacaagcacagaagatgcaaccattgggatcactcagctggttttgatttncgcgtggatg

SEQ ID NO: 7027 - DNA, 275 bp, Oryza sativa
  unsure (1)..(275): unsure at all n locations
ccactgcgctagttgattattatntatagtcacanaatatatatgcaatcgaacattgtcctaaactcctagtgaattattatttatggtcattgttcaaaggctggcaatatcttcattgcgttcttattatccgtatgcattccattcttttctcactagtcctccaggccagagcctgagcatatctactgataatgagacatgactggngattctttcatggtactcctgatgaaaatatatagtataatcatacaccctangatctctca

SEQ ID NO: 7028 - DNA, 413 bp, Oryza sativa
  unsure (1)..(413): unsure at all n locations
agcttgtggacaacaagaacanttttcctgtttatggtctgtaatctgttctaaagacctggtttttggggctaaaaataacactgaatggattcatggatcgatctttggtctagaaaaaggagagctatatatggaaggagatctccaatgttccaagttcggaaccgaggacgctgctaatgtggccaattctcatcagatcgatgcctcttcctattattgatgatgctgctgctgctgctttgtattgatgtaccttgagtttacttgggtttcttgatgaatgtgtgacaagccaatggtgcaacttagtggatttctaaaaaaccatgttatcgaaatgtgactcgtctgcaagtcgatggcaagcaaacttctgagattgtctcatagcctttgataaaaatgcc

SEQ ID NO: 7029 - DNA, 345 bp, Oryza sativa
  unsure (1)..(345): unsure at all n locations
tagacactgaaactaaagagataaatctgaagctaacttatccaaactaatcctgcgccatcttagatcctggggagttgcctgtattttctttcccggcgacggcgctgatactgaaggccccacatgatgagacacagcatatatagcatgatatacgctgtaaaccttntgcatggcacctactgcagggctccagaacaggtaacttaactgtagttgtgactatctcttcaatgtacctcctaatagctgagagcgctctacgggctttcatgagaatattcgtctctatgtgattacacaatggagaagttttaggtaacacctacaatcaccatgaat

SEQ ID NO: 7030 - DNA, 314 bp, Oryza sativa
cacactaacatttattctattataagagtaagaatcacaaaactatttatacttggatcacactatcatgaaaatacatatctaagagggattataaaaaactgtatgagtagaaccgaatgcatcctagtactacaaatttaagatggaaactcaccagacttcggatttaataatataattatcataaaactacatgttgtgcatcaacttaactacaaaattacagctcttatgactattaacataataggtgtggttgggaattaaactgcacaaaatagatgtctgcaataactctatagtaaagctat

SEQ ID NO: 7031 - DNA, 344 bp, Oryza sativa
accttaaaatcctgacctttcgtttatatcttttcttccaacgatacgctacattctgattttctctgtgccaataagacaaactaataatctatctttcctccacattcattgttttggagcgcgaatgctatcctagccctactggtactgtaccattcataaacagatcgctactgacagatttcatttatgtgataatcagatatgtaaaacccccgtatacgatcattatagggttgatcctatatgtgaagtttctttcggagacacctacaaaatggtgctatagtaactgtgctgcatatgaacatcgcctgtactctttagcattagaaatatgc

SEQ ID NO: 7032 - DNA, 420 bp, Oryza sativa
  unsure (1)..(420): unsure at all n locations
agcttgcacgtggcagcttacaaaccacttggatatanaggatagagagacgcaatgagtttcttagcaagggataacaatattgtcaatagcccacagaatctcaaattcgcacgcctttcagtacatgccttacttgaaatgctcacaccctttcgaaatgcatgatgattgagatgccagatgaaatggaccataccaataattatcatatccggctatgggcactactgaaaacgaacaataaatttgaagaggtcaccgacaaataccaaaatcaagaggagtctttagtttttctttccccctttatacaatgtacagtgtcagtgctttctctatatgtctataatcaccagcgaaacgaaactggcttcgtttcacaacacactaagtggactattttatcaattgtaacac

SEQ ID NO: 7033 - DNA, 444 bp, Oryza sativa
tagcttaacaacaaacaggagaccaacatttttatatcaacctgtcaacgcccccagcagagggaacagagaattcatgaggtacaataccatgtagatgcagagccaaatttttatgcttttggattttggctcacatttgaatgaccttctatttctgcacattttcttagaataacatatccgtagaacataaggctattttctttcttgatgagataatgaagataatatcatatatttgtattgacttccatttcatcttctatcagatggttctccacaacaagtatacagatgataggtttgctcaagagtttggcatcaaggtctgcaatgacctagtctctgttccagcccgtgtgctgcctccacccatggtactatataggttttattccatttcttttggtcgcattgtttaaacttctgggaatttctaac

SEQ ID NO: 7034 - DNA, 298 bp, Oryza sativa
  unsure (1)..(298): unsure at all n locations
ctgcaacaactgtaaagaatcacaatgaaggagaacagctgacaatttaacatacgcgagattctgctccgtatgtatccagtttgcacgtattctaacactaggtacagctgagtgacagtacaatcatcaaaatcatactcgaagcagagcccgtaaacgctttcctcagtcttgggtcttgatcctataaattgttttaatgtgtaactgaagcttaaggagactgattcctcttaccttcatgctctgatggcactagtgngcctatgctattctccccctgtcatctgacaac

SEQ ID NO: 7035 - DNA, 448 bp, Oryza sativa
  unsure (1)..(448): unsure at all n locations
agtcacctgcgggcatgcaagcttgtgctggatagatgtataaacttctaatcttatcattntactttctacagtagcagtggagatcagctccatctagtttgactgtttgactgactgataatcagtgaagctgccgaacgaactgatgagtgaaaagaaaatctgaattacctccttaaaccgaatgatattgggatgccggagcgacctatgattgatgatctccctctgcacattttcatcaatctgcacacagagcaaaccaaccatccatgcatcatcaatcaatcaaactaaaagctaagactcgtcatgcatctggaacaacgagttgctgaaaacatcaactcgcacacaccatcaaattatcaatcagtccgacgcaagaaactgcgaaataaatcacaaaaggagagaagagaagacagagacagaggcagcatca

SEQ ID NO: 7036 - DNA, 388 bp, Oryza sativa
  unsure (1)..(388): unsure at all n locations
ntatcctctcatttctgaanttaaccaaaaaaatgtgatgaacacatgatggtgatggcagcatagcatgaccaatcctggagttcagagcagcctaacctctcacgctctagctccattnttagctcagctatntttttctgatttatctcatattctttctcagcagatccagtagcggaccgaagccacttgagctccttctctgcatctgatacctccagcatagtcctttcaaggctaattgtcagatgcctattctntgaagaagattcatagcttgtgctacataggtcttcatctgtaacagttaatagtataagatgcagagtatccgatacatctttcaattatttcttgtaaatcaacacttggtttaacaatatct

SEQ ID NO: 7037 - DNA, 441 bp, Oryza sativa
  unsure (1)..(441): unsure at all n locations
gcttaaataaaatacaagaatttgtgttttgctccacaccgacgnagaaaaaagcaaaataagatatattaagagtgtcgatgttattattttacagcacttactgttcagtacataccaatagagatttctttccagtaagttcaccttctccgatgttggtttattctcctatgtttaaaccttggtgggatccccatgtgttgtcgagaatgcaaagtgagatgttctgcaatacactgttactttataaactacttgtgccgcatggaaaaatagttgtcaccttctgcacaggcattgcccttcttatttttctgacaataccatatgcctgttttttatcttgctaattaagtggtccaaaagcatcaaaagcttgcgaccgccctgtttcatgcttggaaaagataattatagagtatcggttgcattatattg

SEQ ID NO: 7038 - DNA, 92 bp, Oryza sativa
cctctaccctcccccccccccagggttgatctgaaccccaaacccactcggtgagcccagaaattagaaggctattattatttatcataacc

SEQ ID NO: 7039 - DNA, 440 bp, Oryza sativa
agctttgctagcttgctaattcatgctctcaattcgtctatggtgcctagtctctacttaaatagatgttggatttggtcattacgtgcttatccaaactgaagtattctttcttcgccataagtcggttgctttcctaaataaattactattaaaaataaagtagttatagtgggttgatgctgcccataggtgaattaattgaagccatcaagctaaagtcataataaattgagaactccccttgatacgaatacataaagcttatcctattttcggctttatccttcaccttttttacaagaagttactcacgaagtcgaactcaattttctttcaaatttatatccgctaggaacgttttgtttgacactccgtcttacatgtgacatgtggtaccctataaagtatgaacggtcatgatatcagagctggtatct

SEQ ID NO: 7040 - DNA, 469 bp, Oryza sativa
  unsure (1)..(469): unsure at all n locations
taagaatgtgtgtngactaccgagctntanatgaagtaactattaagaacaaatatcacttgccaaggatcaacgagtctattgatcaattaataggagctagtgtattctctaaaatagatcttcgatcggngtatcatcaattgaaaatcagacaagaagatatatcaaagactgcctttgtgacaaggtatggattatatgagtttacaattatatgcattggactaacanatgctcccgcttattctatgaatctattgacagaaaactaatnttcttccaacgctgatgtaccaaattgattgtaacagaatctatgaacaatatattatggagatttggaccagttgtgtcggttattgcaacattctattacaccaaatgaaaagacataatatatctcgagggactggaaattaagcacgccacttatgcaattctgagatgattggtgacaagtgatctg

SEQ ID NO: 7041 - DNA, 439 bp, Oryza sativa
agcttatctgtgatgaatatgattactatgaaggggctgattacagtcacactgacaacattctccagatggatgctcataataccatgactgaaacaggtattattttccaacggcgctttaatgaatttcagatctaaacaatctgcatatgttcatgatcttctcctacttttttttgggccatgttttttattacatgataatgttttgcaatgtatgttaataaattaagcccatttcagtgcttgttttcttttgtaaaagtaagttttcttatattctgtgaagtaaggtatgcacgccacaaacgtcttctttgatatattctctagagtccagataatagaaaacctcatcactagttcaccagattcttctgttttttgtcgctaagtttaatccactggctacattctcattgagtacataatatgaa

SEQ ID NO: 7042 - DNA, 180 bp, Oryza sativa
agccgatacaggtttaccatatgcctcgatatgtgcccaaaccacaacacgtacgtccgaccatctgggcagaacccaaggtactaccacaccacccggcaattcaatgtctctcgtataaggctccctataactagtactcaccagggtgcccatccaccatgtgcgtactgctatgtc

SEQ ID NO: 7043 - DNA, 437 bp, Oryza sativa
  unsure (1)..(437): unsure at all n locations
tagcttgtaattaattatatgacttttatttcacantaacagcggtacacagccaaaccaaaaatacataatatgttgttccataagcatggtctgcatgacatgcattatcttattcaagataaaccatatgctaaaatgaagcacactattctttatctactatatactgcaccagctccctgtctccatcgcaggttgttgtgggttcattcttggtcacatcttcaggcaatctggaagttaaaatgtgcaaaaaatgtataaatgtagtatgtcggcagatgaaatggatcataagaacaattttgccgggtcggcggaaggagatcataagaacaattgtaaatatatcttaccccaagacgcttctttgtgtgttcaagcaaaaactgtgggtcctgtttggtttctgtataagcatgaatcttgttcac

SEQ ID NO: 7044 - DNA, 436 bp, Oryza sativa
gctttcttaaaaatgatgagtctcgtctttataattacaagaaccgtccgatgaaattggtagacaaatgtataccgttggattatttacgaggtgatacgttggaccaatcatgggagactcacatcaaccgggaagtttctggacaaaaggcccttagcagcagcaaactcacgttgatagtcaaatagtctagggaaagacaatacgaaaattttcataaacacaatacttcacagtacacaaatatagaagattatctcagtagctcgcagtggcagagtatcaattttttcacttgctccatctatctttaatatttgttataaaatatatatagctaccacattacatattccttcatttcaactaattacaacaatcttatatgtatttatttttcctctacttgattatctcaaccaaatataaactt

SEQ ID NO: 7045 - DNA, 336 bp, Oryza sativa
  unsure (1)..(336): unsure at all n locations
gagaagtattcaagtgaatatgaactgatcaccccccagataaagacattgaagacgaacctgcaacaaaatcttgatcacccttgcataaaccaactgaagttaccataatcaaagccatccgtaaaagcaccttctccatccttcgagttctatactgtcctctagctggagtatgtctcccttctacctgagctgtgttgataaaacacagatgacattgctgaactccgtgaacaaccccaagggcaattnatatgcgttccatccatagaaccatcgatcgtggatattcttctggactgattattagataatgagatctcagcttcttat

SEQ ID NO: 7046 - DNA, 437 bp, Oryza sativa
agcttcaacacaaagaagacgcttctcatatcttaaaagttaagactatgtcacctctgtacataagatcaagttgtttctattactgattgaaatacactttctcctactcttgtttaccagatttattagtggagcaaagtgtttaaagaactaaagaacaagcagaattagaggtataggatatgtaacatatttacatgtcctgtatggatactgcctatttacacgtttgcaacacctatgaaacaatagacgattccagcaaggtttgaggatgctcacagcaagaacaacgcgccctgatgcattgaactgttcaccagcaatgtcaatttccacagttgtttcagctccaactgcaggttgggagcaacaagcaaggaaatggcgaacaacaagctcatacaatttctggacacaagaagacaaatatg

SEQ ID NO: 7047 - DNA, 438 bp, Oryza sativa
  unsure (1)..(438): unsure at all n locations
agctntagcatgcatgcactctaacatttgtctcaaaagcgtcgtccatggggacgtcaagtccggcaatattcttcttggcaacaatctagagcccaaggtctctgactttggatcgtccaagctcatgtctgtcgccaagtctgataactggtccgtgatggctgacaagagctacatcgatcctgcctacatcaagacaggccgtttcacggagaagagcgacgtgtacagttttggagtcgtgctgctggaactcatcacccggaagaaagccttgtacgacgacagaaaaagcctcccgttaagctttgccaagtattacaaggacgactacgcgagaaggaacatgtacgaccaggacatgttgtcatcagccgatgatgctctgcggcctcgctacatggaatgcctcgacaggatggccaacattgcgat

SEQ ID NO: 7048 - DNA, 416 bp, Oryza sativa
  unsure (1)..(416): unsure at all n locations
acctatgaaactaagctgttagcaccaacccaactatataaataagagtcgtttatacattcttctacttcatacgaacgggaattagttaggctaagtagtggactcaccagttcctgatagacgacggcatcacttttgttctgaaatgtgacagagccgcccgggttgaccttaccccttgcccgcgcccagttgcgagctctntgtttatggatgtccgaaaacggggcagggacattcgctgctgcagcggcaacatcctctggggcctatattgggtccttgccgatgtaccctgcggtgcccagccgatgcgggtgctcattccgctagtgcagatggcgatgtttctcgcttgagtccctaatctcttggttgttcttcagagagcagaactcctcccacactgcttc

SEQ ID NO: 7049 - DNA, 429 bp, Oryza sativa
  unsure (1)..(429): unsure at all n locations
agcttatagatcatatttgtctaatctctatgcagttttactactgtnttgttaaaacaaatgtaatttttgtgaaatttattttttattaaaaatactattactgttgacccatttatcaaaataacttgagcttaaaagatcagatttgtgcaatcaccacttaaacacaccctctgctttggttgcaatgaattgcttaagagattgttttgggggtacaaatgagcacccatcaagcaattattttcagttgaattatcaagcatgatagcagccacactagataccgttgccgctgtcctagctaatataattaacctttttctggagcaaattgcaatcgagctagctggcacgtatggtctgcagcgcagaggtggtcattgccaatgtcaatttttctctctggaaaattgtgcaataatc

SEQ ID NO: 7050 - DNA, 315 bp, Oryza sativa
  unsure (1)..(315): unsure at all n locations
gcttatctctgctgatngaactttgcattctggatcgatcacccatggattcttgagaattgcacaccagcgcggaataaatcccctccaatcccntcctcacagggattaaccgaacaagccctgaggccttgttcgtttaatccccaagagagagggaatggaggggattgagggggaataattacacaccaggtgtggaacaaatccgctccaaatctctcccaatcccctcctggaagggattaaccgtatatccaacctataaggaagggagccaaggtcgacttttccaaggcaaagtatgcagaaacg

SEQ ID NO: 7051 - DNA, 438 bp, Oryza sativa
  unsure (1)..(438): unsure at all n locations
agctttccaaactgtaatctacaagaagtctcttcaattggaaggtgaaaacaaaatgcaagcttttactatctcatagaacataaaagtcagacctgagttcttcaaatgaattgaatgccagattgcaaggccgggagcagaaattgcccattaaaacaaagagggaaggaactgcttctacactatcataaccatcaagaacaacacctaatttctccatggtcttctctacgagataacacatttgaacatcccgagagaagagctcaataataacagttaatttgtattagggactagtacaaatgtaaatacctcagaactgtcaagccaaacatctgaaagtatcacaaacatatcattcatggccttcttctctaaggttgataatcttacctgtntgacatatccattcataaatgatatcataaagat

SEQ ID NO: 7052 - DNA, 300 bp, Oryza sativa
  unsure (1)..(300): unsure at all n locations
ggaatggagggagaaagtcgcattcacttgatcagacacaacatatggatatggctagcagnctaattgggtaacaaggtgggaagcaattccttaaatggactctgcacttgtaccagtttntagaacaagggatagaactgtgaaggtcagtcttatagctccatgctaccaaatgaaaatactggtaccagcctagaacatcaatcacatgcttccatagatataacccgctgcctgaaatgctgcanaatcacagcaacctccanatgctaaatcanggatgacatggtcagaaag

SEQ ID NO: 7053 - DNA, 443 bp, Oryza sativa
ccggatccttgagtcacctgcggcatcaagctggcctaacccattatgcatctttcaagaactgaaagccttcaaagtgttcataaaaacagaatagcgaacaatgcagaatggatcttacctgcgagtacttgggtaattgagatgcatcatcaactgattgggaggccccttcgcttccagtggcaggttcctcagcctttgaggttccttctgtgtcatctgcggtagcctctactgtatgttcacttccgttttcgcagctttctttttgttggttagggctgcagttgccgcatttgcactttccaacacaataaagcaaaaaggaaattaatttactccacaagtcatgttaaaaaacgatgataaccttgagtagaaattaaacgtgggataaattcagaaaccttcactgtggtgcgcctgaggttgtaacgttt

SEQ ID NO: 7054 - DNA, 162 bp, Oryza sativa
  unsure (1)..(162): unsure at all n locations
actcagctcttctggntgtctcttaatgagtaaggcctaaatctgaatttagaatgcccactataaatacctttctgactaccatacacattcaaattaagcagtattttggaatatgaaaacctgccttgcgccgaggagagtctgtatacctagatgggc

SEQ ID NO: 7055 - DNA, 363 bp, Oryza sativa
  unsure (1)..(363): unsure at all n locations
agcttacacacgcaccattgctacaacttttttattntggtnagactttgaagntagaatgtgatgctagtggagttggcatttgtcgcgaccgagaaaaatacattttcccgaacgctggtatattaatccccgtcccaagaaaagcccgggtacaccacacaaacatgatataaaagacacatctttattatatcgataatatttacattattacaaaggcacttaaggcctgacaatcaaaaataaacagcagcggactagcgggcctacggcttcatctttacaggcgctcaactggggtattaaccaggacttcaactaagaattcttctccaaagcttctcttacttgagggggggg

SEQ ID NO: 7056 - DNA, 394 bp, Oryza sativa
  unsure (1)..(394): unsure at all n locations
tgcgaagaagctaaagaattgttgtttttatgtgggcttaacaaagaaattcaggacatgcttgattgtcaaagatatacatctctttctcatttgttacaacttgcttgcaatgctgaaagtaaaatagaggaggatatgaaaaagaaacacgctatgtctttgcctccaattactaactatttgcaggaagtgcgtaatcacgaacctgaggagagagacatgacagaaccaccaattccattgttnagacccaagttcgagacacctccatcatctaaagaggacatccaaggtaaagtaaatgatactgaaattaatcaaggtgagtgcattggtaacgaagtaaatttgccactttcatgcaaagtagacaaccgttagtggaaccaat

SEQ ID NO: 7057 - DNA, 359 bp, Oryza sativa
  unsure (1)..(359): unsure at all n locations
ccttgtattcggttactaccttaagactttatttcctnttgtgatttgagatgatcgaaaagttctatgacttgatgcttcatttttaccatggggctctatctctatcatgggccatggatgagtacaagcgtgtttctcaccctaatgaaattcgcgaacattttacaccttatgacgtgtgaaaaagaaattagttaaatggttatacatgcttcagtagaatgtccagtcgccgactctatcagtagtgtcttggactagtagttcgtgacatttttaatggttggtcttgtactcatgcataatataatgtttattgttgtgcttaattaattgatactgtgattcaaaataac

SEQ ID NO: 7058 - DNA, 396 bp, Oryza sativa
tatgttgatgatgtagtcgtcaagaccaagcagaaggatgacctgattgcttttttattaagaaactttacaagcattcgggctttcatgatgaaactaaacccggaaaagtgcatcttcggagtaccgtcagggaagttgctcggatgtatggtatctcaaagaggcatacaggccaacccggagagaatcaacgccattcttaacatgaaaccgcccagcttccaaaaagaccttccaaagctgactggttgcatggggcgctcagacagttcgtctacgactcgggagcgggtgatgcccttcttaagctgctgaaaaaatgacattccagtgggacccgaacacaaaagccttgagattcagaactttcacactctacagattgcctcccca

SEQ ID NO: 7059 - DNA, 445 bp, Oryza sativa
catgcaagcttgaacattttataggctcggctcgatcttgtttgagctcgagcctatgcagacgagctcgctcgagctcaactcgtcgacagccctaatgacacgtgaggtcacatgggtccaccattttttattatttcgtgtgtaaaactgacatgtgaacctcacaggttttattattttttcggatcgaattactacgtaagcgccacgtgggacgaagacctattcaaaggagccacgtaggcgccacatcagccaaaaactgggttaaatactgccaagggattttgtttgcatggttttgcaagttaagggatgtgttgtatctggtttttgcggtgaagggatgaatttcgaactcggtgacaaatgagggacctaaagtgaactttctccgtcctcaggctccagaggccgagtcggcccacataggcccattaag

SEQ ID NO: 7060 - DNA, 439 bp, Oryza sativa
  unsure (1)..(439): unsure at all n locations
gctaacactttgacatggntgtgtcttacacagtataatcgaaaggatgcatgatcaagctgaaaagcatcccaagtatggctcaccgaactacatatacaagaaaattattagttgttattgccatatgatgatgatggtagagagggaataggatgctggtacctttgaaccactgacattaatgcatggcgaanatgggatgctgcatatgatgaaaatgaatttctccagtatattacctatggaatcccctgagatgaaacatcaccactgctaaattccatatagtgtcatgtgtaaaatagtactgcatacttggctgttcaacatttcagtgcttggttatagataacagaatctatagagcaaacatttcgtcctacagagtctagacattttgtgaagaactactagcactgtactactactagtgtcg

SEQ ID NO: 7061 - DNA, 441 bp, Oryza sativa
  unsure (1)..(441): unsure at all n locations
agcttgccacagttgtggcaggcgtcgtctcgtttctgcttgtggntgccggtggcaacgccctgtgcgcctctgcgggcgccaccctcggcacgtcttcgcgcccaccgtagctggacacctccccgcgccttgcgcggcttacggccgcctgtcggggaagatgactcccccttcctcccgtcaccctgagaggcctcccactgctccctagtgagatggagcttcccgccgatggtgatgggccccgagagaggctgtggctcatcaccatcgacgaccttgaggcgacctaacgcctcctcgatcgacatcgtggagaggtccagcagagattcgatcgagcgagcgatctgtctgtacttctcagggacgcagcggaagagcttctcgacagctctctcctcgtcgtaggtgtcgtcgccgtactgcaccattttc

SEQ ID NO: 7062 - DNA, 340 bp, Oryza sativa
aactgcaatggttctgatctgtaattaaacacttatacagcaagcaaaatccttattaagacagccatatcatacgcacatgatatcgaccgtcgactgaccccaagcaagcaacttaaacacacaaactaacaagcagaagctagacagtcgataagctaatggaaaacgagcctaatgctcggaacggctcctacggtctggggagtcgaaggcgtcctcctgctcgtcaccaggtccctctgagcgactcctagagccatggagataagtctcgccgctgcccggctctgagccactggagctgctgctgctgaagtcgcgactgccactgggagta

SEQ ID NO: 7063 - DNA, 394 bp, Oryza sativa
  unsure (1)..(394): unsure at all n locations
agctntagagcanatgacatcactcttattatataaggatctaacgcctcaaatggtttaataggcagcactactctcttctgtattctaaatgagaatccaaaaacattcttaattggtattcccttgttggaatctttcctgcccactaattgccccagcagaacatagtcagacaagatactttgataaaaataaaaaaatttatttgccagtactaagaaatatccatgatgacaaaatacctctgtgggtttcatgtgactctgatccttgcaaagatctgaaatttcatgagtcctcctggccgaccattgtcgcgtactccccattgcaagagtaccaaggacactttgagcttaccctttggcactccatggtgagaattctctta

SEQ ID NO: 7064 - DNA, 386 bp, Oryza sativa
  unsure (1)..(386): unsure at all n locations
accactgggtctagtaccagagggtaccgccccgggtggaccactcggtcaggatgatccgagcggtcagacttgattgcaatctctgaccatcgaagatactgaggtgtgtctggctgaacagcattgatctcccgttcggtcagcttgtgcttacttttagactcataagccatggggccgccgaaaatatgattgagctccttacggnggtcttgaaatccacccgngtgtccccgcgtccttcatccttgacgngctatgatcctcgtccgagttcttccgagtagacttggtgtactgctccgcgaactgctcgtagatgaagcattctttggccacgttggttggagtttggatgatgcgggcattgggagctcatgatc

SEQ ID NO: 7065 - DNA, 404 bp, Oryza sativa
  unsure (1)..(404): unsure at all n locations
agcttacaaaagagaaaatgatttctactatagccatacccgaactcttccgaaggctttcggactccgatttctactctattcctattccactagcttgataacactaaactaaacttgagagaatatgagaaagctttgcttgaggtgtgtgaagagagtgaagaggtgaagtccttttatagctgctaatgacggttgtggcagttggaaatgtcctaactaccctgcaactgtcattggggatgaatcctggacgtccacgcaaaaccccaggatggacggcgctgatgacggttcggccgaaccccgaaccaggggctgggccaaaccagtccatcctcggctggcggcctcctccactgcttctctctgtagacttngtgaatttggcccaattcatc

SEQ ID NO: 7066 - DNA, 485 bp, Oryza sativa
  unsure (1)..(485): unsure at all n locations
ttcacagctctgctactcactctcgtgtttgtgtgagctccgatcttggtcatttncaacacagaccacaattatattttttgtctgtgaccatctggaagcacanaccatatgtaatcgtttgacagttcgtgcaggagaaataaatagatattgtagagtgcatatacatagccatagatatggtagaaataaatatatggtactattcaagcttctgaaatttgaaacaccaccttgcatagatgttacaggggaattaaaattctcatttttaatgcattagtcaatggttgacaccgatggggctcaataagctggctaaagtaatgaaactggcccgctaactcagccatgaatggtctaacctgattgaaaacactttgatactgttttgatctcatatgcaccactgatatgtgaaaaaatcgtgaattactatgaatatattgggtgctttactcatctactcatctgataattgc

SEQ ID NO: 7067 - DNA, 439 bp, Oryza sativa
agcttcaaatgtgccatacctcatctcaataatcttttgtttggctctccaggcttttgcatagcttatggtgtacttgaatttgttctcgatgtggctaataattgattttggttcaaagccaatgttaccaacaacactactgtacatctcacttgccacaaaagctgaagtgatgtttcggtgatacttctccaccccttgtaagtagcactggtgcttggtcacaatgctaactttccaataatcattccatttacccttatatgcatggacacgccacggacaatcttccttcatgcacctcacttcatacacataatttgttgacttgaccaccctaaactctctctacaaggaaactgcccaatgcttcactgcctccttcatctcatccttatgagcatacctagcaccctcaattacctcgttctcctta

SEQ ID NO: 7068 - DNA, 253 bp, Oryza sativa
ttttagctttccggctggtgttgggtaatcgattgctaatagcccgactataagaggtctataacagctgtggagatctggcctatagtcatatgcatgtaggcattttggcttgctaacaggtattagttttaagcctaacacaagagtgaatgccatagaggaggaatctggggatgtcgggaatcttggatggaccctatctgattagtggttctgaggattttatggtgatgccttgatacttctaagc

SEQ ID NO: 7069 - DNA, 438 bp, Oryza sativa
agctttgggtcaccctggctggtctatctgtgcttaccggccaccatagaggcaagtctcagagtacggttcacgagctctgtgatgcagatctcataatccaggagagtcgttgggctagcctccctcctgagctcctccgcgatgtgatccggaggctggaggctagtgagagcacctggccgtcacgcaaggatgtcgtgtcctgtgctgccgtctgtaaggcatggagggagatgtgtaaagagattgtgctgagcccggagttttgcgggaagcttaccttcccgctctctctaaagcaggtaaaatttcacatcctgtaatgaaagcagaacttaaactgactgttgttaagaattatattttcgtaccttagtgatagcaacctgcaagtgtgggtggtgcttattcatttgttcctctcaaattcataat

SEQ ID NO: 7070 - DNA, 368 bp, Oryza sativa
  unsure (1)..(368): unsure at all n locations
tgtaagagaggcaagggtgttctgcaaatcctctatttgatacactttcgtaaatactaagcgatctatttcttgttaagtttgggtcgaacagagactagcgtctcaaatcgactgaagagatgctttacgcaactagatggaaggtgccgacctctccggtcagatcattacttatcggctcccagaggcatttcactatattatgcggctcccagagccctttttattctctctgactcccagagaacagatgcctcgcagcagaacaattcgctttcactcgggaagcctagtctttgatgcccgtagacattcagaatcacacagcattgtttctgaccactcangtcatacatctgccacat

SEQ ID NO: 7071 - DNA, 436 bp, Oryza sativa
agcttgtcacctaagagacaattatggctttgcttatgttccacctgagaagaaaacacttctgcctgagcaatgtacacaaaggttcaccgcttatgtacatgatacacttgataactccaagcctaacttatttgctaaacaggccgactatcttagactatggatgctagatttgtgtttcatgctcacagaatacaagagttatgacagatgcgctctcttccgcagttagagatgttatctcctatggcatgcaacaatttccggactaatgccttaagtctcctgcccaacctctaaccaacctatagtacttcacatgtggaggaggctcatgactaatctattgtgatgcttaaagaagaaagcacctaacatgcaattcaactctgtctccgttgaaacatgaaatataatattgttctttaggccc

SEQ ID NO: 7072 - DNA, 232 bp, Oryza sativa
  unsure (1)..(232): unsure at all n locations
acctattaaactcagctctactatcttangcttntgtatcacccagaactggtgtacattgtggttcaaatgcggacccggcaagatatctgttgcctggnacaagagtggagtgatgaatggatacaagttccttctgcccgccaagtgtgtgatattggagattgtatcggatatcttgagaccacccgcatggttgctaccgctactatagctgagggacttatctgaa

SEQ ID NO: 7073 - DNA, 428 bp, Oryza sativa
  unsure (1)..(428): unsure at all n locations
agctttctgttcctgctntattgacaatgatgtgtatatatgttttctagttccatattgtacttgctgagtatttttatactcactcttatgttttatttagttttaggtacgcattgagaccaacatgcatgggtggaaagtaccacccttatatacacagttatctgcacactatcaaactatattgcgtagatccataatgacacttaaactatatcatggtttggtcttgtaataatcttttagatatcttttagtttgtttccatggattattgatggatcacattgtgggaatgatattattattattattttaatttataattgtctgttgtggatgtccatatttataggggagaccctgtcgaaattcttaatgaattttggacttggtagtttatgtaccgtagtatataacattct

SEQ ID NO: 7074 - DNA, 306 bp, Oryza sativa
tataaaaagagcaccattacggcatttacctaagcctgattcttggttctcatatgtaagattcacccctttacgggcgtctagagacataaatttaaacaaaacatgagaggaatatgttaacagtcaattttgcagcccttatcattaagaaaataatggttaattttgccgtacatacatgattagaagatctaacttgtatgaatcattcttggcgtgatacgaataactcgctcgccctcctcttctttccagaatgaatgaaccggtcggaccttccatctctatcatcacatgacatgt

SEQ ID NO: 7075 - DNA, 405 bp, Oryza sativa
gcttcactagacagatataatgtatcttctagaatacattgcacagaacaagcgagcccacacgctgtgatcagactgtcaataccaatatactcactccattccatagtggtgagtatatgagtacttcatcgagataaaggtacacttaactaccatatatttcatttaataccagtatgtgggggttgattttttatttaatgtgagtatgcggtggtgaaaaataaagaaacatgcatactttaactctgcacatgcacaagacacgaacctttaactatccctaaatgcctgcatgcatgaatgcacactcaatttacatgcatagatgcaataatgctacatatcaaatgaaggggtcatggctatgatcaatatggaagattttattttggctatatg

SEQ ID NO: 7076 - DNA, 397 bp, Oryza sativa
  unsure (1)..(397): unsure at all n locations
cattttggtgatatctttctcgtgcttggaacaaaactttatgattgctccgcgtcaaagatgtgaattccgagcaaggatgaagtttttaccattttttatgtatatacttgaagatggccttcaactcttcatgtgtagacttgtaggatgaaccgtttctcgtgatgtagaaatgttcttcaatcctaagataaacggttgcctctaccgtcagcaactctcgttaccgagtatgcaaacctatgtcctcttctacccaagaatccgggatgccactatttgatcgagcccagcaagtaagtatttgatgtgtgctcagcgncaacaattagctcacaacacctcattcgggcattcctcagctattgccacacgagggaactttgggtcctat

SEQ ID NO: 7077 - DNA, 355 bp, Oryza sativa
cactcagcttctgcggacggcacgtggattaatcaaccacataatgagaattctagatatgtactgtattgcttaatggacagccggatcaatgcgttcgatcacactgttgagtgttgagatgtcctcaaatcctgtgatcgccgaatgtatgagtgcgtgatggagaccgactgactcatgcatctatgagtggagacactataactgcatcagtcctccgtaccaactacctattccgcgtgaatcacagtgacgaactatattgaaacaaaaattagcgaaactgccatagcaatagtctggtcgttcgaggcgctatcgcagctatggtttgaccggtgtggaaggacta

SEQ ID NO: 7078 - DNA, 441 bp, Oryza sativa
  unsure (1)..(441): unsure at all n locations
agcttgcataccatactttggtgataaactgcatcttatgaggctcaaaggggtaaccacctgccaatcagagcacaatcaaatagatgacaccaacaatctttccaatgcatcgcaactcttgcttggctnttcagttaaaaccatatggtgatgcgaacaaggccacggaattccaagtaaacaaagattcgacatggaaactccgttctcatcgtcaccgtaagaaattgaaacacaattgagaacctataagcaaatgctcttgcaagatcttaagtttgaaattatcaacgacggaaatgaaataatacaccttgagctatatatttaacaggctggaaatctcaacaaaaatccgcatgctcaaatgcaaccttctcatggccacaaatattatcactatgacgaacacgcattgaaccaaattctgaaatccta

SEQ ID NO: 7079 - DNA, 461 bp, Oryza sativa
  unsure (1)..(461): unsure at all n locations
taacanaacatcaagcaggtacccaagatagaagccttactcccatgtttcgtctncaacaagcatcatatcaccctcattatcagtatacacaatatgccagntnttgtttgaagacaccaattcaccatcgaattcaaacatcttgtctagctcagctntgagttcatcataggtactgaactntgagagatccacagatctgccaagtgcaacgcctagcttatggacctgcctgaagaatcaatgacatgatgnntatacatagtgcagagcaatagtcaaacttgacacactcatgctgcactgaataatattgctcatgattntttttgggacaagaaatagcataattggggtaccataccacacaggggataatactgagattttgcaagatnattacacaacgagaacttcagctatgtcactacgagaagaataaacttcatgtgctgaat

SEQ ID NO: 7080 - DNA, 213 bp, Oryza sativa
  unsure (1)..(213): unsure at all n locations
tctgacangatgatccgagcggtcacacttgattgcatctctctgaccatggaagaaacatgcggagagtcaggctgaacatcgattatctcccgatcggtcagatgttgcttccttatacactcataggccatggtgtcgacgcacaactaangagctccttacagagagattgaaatccccccgctgtgcgccgcctgcttatacttgacg

SEQ ID NO: 7081 - DNA, 405 bp, Oryza sativa
  unsure (1)..(405): unsure at all n locations
agctttcatgacaaggcatttccaaagcctacacttgtttaccatatgccgacgagaggggtcccagaccaacaacaggttaggtcccagaccatactgtgccaggaagcccaggggtccttcccgacaccaccccggcgaatccacatgtctctcggcatcaaggctcccctgataagctagttactcagccaggggtgtcccattcgacccatgtggtcgtacttgtcttatgttnggatgagattccaggaattggtccttaagtgcgagagcgggaaaccgtacacccggtacgttcctcggtccgcggttttggaaattcatttagtttgcaagcaccgacccaggtgtcgggtattccaagtcttttggtaaactccagttttacccaagttggtactc

SEQ ID NO: 7082 - DNA, 372 bp, Oryza sativa
  unsure (1)..(372): unsure at all n locations
ttcttctgccggtggaagtggtgcaccagttttcttgacananacaaaattctcgtgaatgcagcggcccttaatgaaggcagtttgcgagcaagggattagtgcttctagcttcngcgccagtcgttgtgccataatctntgcagccaacttagagaaactgtgcaccanactaatcggcctgtaatccttgagcaggataggcgattctgaacatgagattcacatcgttccctggcttaaaggcagccatagnnggtgctgtgtgccggcggtggtaccgccattggagccggtggtgtccgcggagacagcgctgggtacacccacgaacggccttccggacgcggtggactcngttcacggatgtgc

SEQ ID NO: 7083 - DNA, 444 bp, Oryza sativa
caagctttgcttcagaggaacaatcattgataatttcctcgtaatttgagtctttctgttctgataaggagatgaaactatcaatttcattcttttttaaggcaagtgcttgagcctctgagtccattttagtttgtgcttcctgaagggttttgagctttagatcaatatctgtctgggatccataaaatctggagacaacggcagtgatcctttcttgaacctcctggatctgagcattgttttcagctatctctgcttctttcaaccttaccaatttcaggagctcagttaactcctctgcaagggtatcccctttcttactcagcatgtccttttctcttttgcatcttcaaccagatgttctatcgaatcttccaatcctgaacgtgctgccaaaaccaattcactttctacttccgtctctaggttctttgcttctac

SEQ ID NO: 7084 - DNA, 275 bp, Oryza sativa
  unsure (1)..(275): unsure at all n locations
agctatatagggcaatcggaaangccattaatgtgcggagaaaacatgttacctgccactcattatagttgagctatacacatctaatttacacctcttgaattgacactctcgacatcccaaattgatgggaaacgagtccggaggcctcctgggacctgtcggacaccactgcgtttagaaggngatagcacatcaaattgtgagtctctcttggcccaaaagcctgatgttcactatagttatgtctgtataaaggttagccatctactttc

SEQ ID NO: 7085 - DNA, 440 bp, Oryza sativa
caagcttacatattatagacttgctgtgatatgatggcggaaaaccggtatatatctttgcagcggtaattggacgttccaacacgcaaatcctcttgagaaccaatgttttgggctccagtgagaaatataatgtatctggcctgccctccttcaaagagcattcgaaccagtccagtagcctcccttccaagagcaagtatccgtcagctgcatctatgatgcgaaacatatactccatgggcaagggcaaggggattattttgtcaaaattcaatggtggcccattggcagcatcagcttcgacttgcctaattgtataacagagctgagttcttgtagtgaagcctaagtctgtcctgagagagaaaactccaaccatatcttcctctgcctcctccagaatggcaatgtttgacatgtgttcatccctctcgagg

SEQ ID NO: 7086 - DNA, 446 bp, Oryza sativa
  unsure (1)..(446): unsure at all n locations
atgaatgaatgttatacatggaagaaatgttgttgcttctacgctccagaattagtngggtgaacgaaggtgatcgtaatactcgattctttcacagccgggcagtatggagggctaagaaaaatagttcaaattggtctcctgaaggcaccgggccctgacggctttcctgctcggttttatcagaggaattggggtgctgctaaacaggatattgtacatgctgttagcatgntcttttagacnagcactatgcctgatggggaaacgacacacgatagttttatcccgaagatgataacccatggagctaaggatttaacctaaagttatcaatgtatgacaagtggatcaaatgttggcaaccgtgagactatctgtgactagttctggagcaaggatctgccagcgctatacaatatgcttgtgctttgatgctccacatc

SEQ ID NO: 7087 - DNA, 436 bp, Oryza sativa
agcttgtagagaatatccggtgaacgattctggcgcagaggtatctcacccatcgaaattcctcgtcagatgccgatccttttgctatttcgtagccaactttgctaatttgatcgattattaattagtaattgattaattctctttgcttagctgctaaagatatatgaagtggctcgcttgaagggaagggcgtactaaacacacgttatctcgtcttcttttcttgcacatatggacacgccaatgagtattgaatagtgcacttgcttttgtgtgaaatggtccaataaacctaagttgctcgtggcaccaatcgcctctctccttttccaattcaaagagataggctcgcactgttgcaattggaatgacgttggtccaagttgctctacaaaacatcggcgacattctacagtaacctgaatgtgacttt

SEQ ID NO: 7088 - DNA, 170 bp, Oryza sativa
  unsure (1)..(170): unsure at all n locations
actggcctggcgtatggtcgcaccatgagtgtgtgctcaagcaccaccctgagactcacggcatgttngacagctgtcgagcgaacacgttagcattgtcgcagaggaacgtgatgagcgcgaattcctatatctcgcctagtgatgccccaagtttgacagtcttgtcc

SEQ ID NO: 7089 - DNA, 435 bp, Oryza sativa
  unsure (1)..(435): unsure at all n locations
agcttgaggtctatactggagactattttttactgtttaactggttttcttcagagtcccttctcatttcttccgcttgatacttgtcttggtcaattgacacgcttcaacatttgcaacttgtcttgtactttttaaaatgtgcttgttgtcatgttacgatttatctttgtgatttctgaaggccttacccgagtcataactcataaatacaacgaaaaaaaacagatgatttgggccatttggcccatagctatgtcatgtggtgattcctttttggaataagttcatctangtcccttatcaacgaatcccaatttcgtccttcaatcgagaagataccctggtcctcaactattaaaaccggtgtagatgaggtccctccgtggtttatatggtggttattgctgacgtgacgcctgcgtggctaatttg

SEQ ID NO: 7090 - DNA, 430 bp, Oryza sativa
  unsure (1)..(430): unsure at all n locations
actcagctggcatggggtttggagcagatacatgatataactttgttctgtngcgaatgaaatactatgagagactgctgatatgatctgacatatacttatgtatgtagggtttatgctgatggacgtaaatactgtaaaagcttgacagacataggacacgccttgtcagctgagaatgagttgtatttgtgcaaactcggcacacaatttgcaagctttaagtgttcatcaggggaggaaagctgtcattacagacctgcaatcgagcctgacccttcttttggaacacatatccgacttacactgatccacttgacactagtatatcttgtacaaatacatatcaacagtgcaactgagatgatggtatgatatactgacatagttatgatataatttgattgcgatcaagagcgagacattactg

SEQ ID NO: 7091 - DNA, 442 bp, Oryza sativa
agctttatatattacttgctaaaataattttatgacatcatcttttcacttatgcttatacttatcagccaaaatttaaattttcaactttaaatataaagctgatttaaagattttttttcatcgaagtgtatttttcagcttttgcttttaaacaaccttgaaaatataaaaattttattcacaaattactttttttttgcaaatatgtcggtaacgatggaaccgctaattgtttgttaatcttaaaacatgtatatatgtgaaagcatcctatcaatccacaggtcagattaaaaagggacaatgaggatatacattatgttaacagaagcaaaaaatatcaccaagtttgatttggagttctagaaatatcatattaacaaaagaaaacaataactatttacactattagattatgacagatctagattataatggg

SEQ ID NO: 7092 - DNA, 435 bp, Oryza sativa
agcttgtactgaatggtgcctggtgctatctggtgcaggtggatgaactaagattgccagcagtccctcgagcatcaatccgcagttagaacagtaattcatgtacctttgcttgtgattggcattgacgtgagaacccattgctatgcaattgcagttgaacaattaatctgtgtatgtgtttctcttcatgagtcgccttgatttgttaaaccgagcttgcagtcttatatcttccactctgccttttagaaaaggggatttcgagttgtgatgggttgaggttgattagatgcatcatatgatgctttgtcggtggtggtggttctttcaatttggaatactgtcctagtgtcattggaagcgtgcttggttgcaagtacaacatcaataggttgcctgcttctgcttgcttgccacctaaaaattgtacaa

SEQ ID NO: 7093 - DNA, 369 bp, Oryza sativa
  unsure (1)..(369): unsure at all n locations
nttctaggcattaggcctcatttcgacttggtccgccgcatcttatttctcaagccccagccaaataagagcaaaccatgcgtcagttggggtgctggtttccaactcaggggaacactgagccaaaaatacttctccatgcccttcaagacctcagataaaggctggcacgcaaactgtgtgtatgttcaaaaccccgagcctgtccttcccgagtactcctgtcttcctccagtttatcgtgatanctagaactcactgccaatgggagatgaagctgcacaagcagtagaactgatggataggatgataaagctgaaagaacagggccttcaaagagaataaatcacccggcactttatcaagtgt

SEQ ID NO: 7094 - DNA, 427 bp, Oryza sativa
  unsure (1)..(427): unsure at all n locations
gcttaaatggccaacctcattcaattatctttgntggctctccacgcctttgcatagcttatggggtacttgaatttgntctcgatgtgcctaataattgattttggttcaaagccaatgttaccaacaacactgctgtacatctcacttgccacaaaagctgaagtgatgtttcggtgatacttctccaccccttgtaagtagcacttgtgctcggtcacaatgctaactttccaataatcattccatttacccttatatgcatggacacgccacggacaatcttccttcatgcacctcacttcatacacataatttgttgacttgaccaccctaaactctctctgcaaggaaactgcccaatgcttcaccgccttcttcatcttatccttatgagcataccttgcaccctcaattacctcgttct

SEQ ID NO: 7095 - DNA, 449 bp, Oryza sativa
  unsure (1)..(449): unsure at all n locations
atgcaagcttagcagagacaagaaaaaaaaggaacaaataaaagttttacctttctgccatctagcagatggaaagaaccggtaagccataaatcctactattcagtaccctttttctgatccgaattcccaattgctgtttgttaatcgagacggacaagcagcgttgacagacggctacagtcgtacagagattaaggtcgcacctttgcaattctgcagagcgaggacgcgcagattgcggaagcccccggcgacgacgtccaggtcgtcgtcgatgacgccggggtagaacgagcgggacggcgactgggagaggtccagctcgaggatcccggngaagcgcgcagcgaggcggcgcagcatggccgggccggcgcgcgcgcgcatgcgccgtcgatcggagctctggatccggagccagcggcggcacacgagcccgaacgcgt

SEQ ID NO: 7096 - DNA, 453 bp, Oryza sativa
  unsure (1)..(453): unsure at all n locations
tccacttcctctaggcatncatattaacccgggttaccatcaaggtcatggattggcagacaatattatcaaactcaattcgtattttccatttacctagcagaaatggggattcaactacaaattgcatcaatcaaacggtccacacaagatgcaagattttggctgctcacacaagatctttctttttaccaaatattgtggatgtggcatctgctacgctaaaatacacncagaatttngattggctcattgagggcataaaccaaacatgtcgtgaattgcgcacatggatacaatgatagagcacctataatgaaattaactgacactaccataaaacttgtagtagcaatgctgtatatctgggtgaaaagatattcatatgtcctggaaacacactacctataatacgcctattatcacattattgatgccaaagcttaacaatac

SEQ ID NO: 7097 - DNA, 435 bp, Oryza sativa
agcttgccgacgtacggtgccggatacatgctctctccgcctctttgaggccatgtaatgaggtactacctcccctctgcttacatctcctccatttcctgcatctcaatctgaggtcgcatccacctgctgcaacgaaacggagagcgcttcgatggtattatcatatcatgtttatggcgggtttgtattatctggggaggtcaaaattgagatgctgggtttcattttctcattagacaggatatacttttgacagggcgcgcctgattttctagtctaatctacagaactctctcccatttccttcttcctcctctcagcgccggacacaagcacggcaaaagccaacacacgggtaggatcagcaaacactagatgcaactcaacaacttcaaaactaaccgacataaacttctgaaaagtacaaaaata

SEQ ID NO: 7098 - DNA, 380 bp, Oryza sativa
  unsure (1)..(380): unsure at all n locations
cgatgattcctcatgggcacttggaaactattcttttacatctatgcctaagaccagaattnttagtgatcctttccctaatagncctattgatgttgacaaanagaaagggaaaaatgttattattgaggatcctcggcccaagactaggatcaataatgcgaaggccaaagatcataaagttgcaaaggatgagtcatctagttcctaanagaccacaaagccgaagctcacttttgagatgcttatggctaaatacaagaaaggattagccagtcaacgaattaataatcaaactagtgattcaaaagaccaagatcatgtcgcagganaagaatttgtcaacaccaaagcaatctgagtcatcaactatacaaact

SEQ ID NO: 7099 - DNA, 439 bp, Oryza sativa
  unsure (1)..(439): unsure at all n locations
ctgcagctggaagaaggaagggaggccgttatcttnttttgaagacatgttgaaatcactaagggatttatttctctctaagtttgggccgaaaagaaacttgcgtctcgattcgactttaagagatagttttcaacagctcatttggtaatgtaccgaccttccgggtcaaaacattacttattggctcccaaagccattccacttgattaaatcggctcccaagcctttttcattttctcggactcccagagtccagctgtttatcaacacaacaattccgttccactcgggaagcctagtctatgatgcccgctgacatccccgaatcacacagattcgtttctgaccactcaggtcattcatctgccacataagctgattctgggttacgattccacaccacaacaaactttcacacagcacaggcatacaaatt

SEQ ID NO: 7100 - DNA, 432 bp, Oryza sativa
  unsure (1)..(432): unsure at all n locations
tctatccctagctagctactgaagtgctgtttatctggcaccttgcgaacatccaacaacggcatgaattctntcatcgctgctagcagcctagcaggtttaccagccatgtaatcaggccccaggaacatctgggactgcgactganactggcccatatggcccaaatcacaaggccaccgacggcctacctagattctgattgcaatcaccattcacttcagaattgcagcactgctagtttcggcatgcagcttgncaagttgcaggcagggagcgtcgaacgctgtaaaatgttctggagattctgaatttctgttatctgatgaactctgaacttcgactcanggaggcacagggcatcgcttctttctctgaccaaaggcaagtgattngattttctttagaaaatcagttaacatcacacgactc

SEQ ID NO: 7101 - DNA, 339 bp, Oryza sativa
  unsure (1)..(339): unsure at all n locations
cctgtcggggaacctgttatgatagcttggctatagtcatgggcggagctgctttgctcattcacttcttgagatgcttttgatctgaaatgacttctttcttctctttccacggtgtccagcatcatcaatcacgaagaaagatccagcagagataggaaggtcctgatcatcagaagaccactttcttgccaactcaattgtatatagagaagatgacaatggcaaagtcagattgctcatangtgtcacactcatccaagccatgggagccatcctgtcctacccaagcacaccagatctngctaatctttttacttcctttgctagcttcccata

SEQ ID NO: 7102 - DNA, 375 bp, Oryza sativa
  unsure (1)..(375): unsure at all n locations
gcttcttataatatgtaagagatcctgaatctagctgcgtttacataacttgtgactccttctgatgacatcatattaagtttcttttgatatggngctgcaggggccaagcagataaagagatcatggttgaaggtgaggctattgtccacgtcaggcataataatcttgtccgccttctangatattgcgttgagggaatccacacgtaaagctatatatcaatcagcctttgctgacggatggctagctcttgnttctactggcacaatnattactatgatagggatgtaggattgctctcggtctatgtccacctactcaccagaatatctcaagggataggatattcctgactgcactccttatgctatc

SEQ ID NO: 7103 - DNA, 438 bp, Oryza sativa
  unsure (1)..(438): unsure at all n locations
agctntaggacaatgattaggcttcgtatctaatttgtcatgccaaacatatcgtgtcacatatagcacgttatcaacaaatacacttttgcaagcaacctcatcatacgtgtctatccgattatttgttgctaccttcttatttaccggtaagaagtgggcttggaattagcaaaattcttatttaccgttaacacactcgctaaagtactggagtagatattatgttacatgcagaaactttatatataaaatctttctaagaaatataatcaaatcgatccagatattcgtatgctaataatccgtcccgttttcttttgctaaagaaaggctctgtctcatcatctttttcaaacgcagccgatatctgtctcctctggatcctagccaaaacagtgaacacagagtgagctccatgcctccactggtcattct

SEQ ID NO: 7104 - DNA, 164 bp, Oryza sativa
ttcgcctatgtataggggtttttgtttcacaaccagaccttatctgctgctattcatttctgaaactaggttgttctccaaatttgtctagttagccgattgactgagatacctggtttatcggaaacgaagcccataccttttatgactgcgaacgacgaggc

SEQ ID NO: 7105 - DNA, 433 bp, Oryza sativa
  unsure (1)..(433): unsure at all n locations
agcttcggtgcctgatgccattctgtttctactttctactttatgcctgtacctgtgtataaatgcattgcaatgggagtatttctcgttgctttctgcggacaaagcttgtgatactggcaatgcgtaaacttcggagatttggtgccttgtgaattttcgatgagtattgtgatgggtggaccctggacagttgttctgccgggcggtgaggcttaccgcgcgttgcttgctccaggagaagagcgtcaggccaagccggataactcgctccggcacggtcatggtcgcgccggtgaccgccttctggttctgggcaggcaggcgcgctgccaggcaaggtttacctttttcgttttttaagtaaaaactgaaagtcggtaaaaactgacaactntcaatcaacgttgtacgaaaaccatctaataccgat

SEQ ID NO: 7106 - DNA, 230 bp, Oryza sativa
  unsure (1)..(230): unsure at all n locations
ctcagcttctgtnnactgctattctgggagctagatgtgctcatgactttattgtatgatgctgactaacgagcatgtaagagagtttctctgtcgcctggtgattatcaagaagatagaagtattacaacgtcttgccgggtgtattacaacttctcatctctctagcacctgtgagtgacctatgtatcttagatctattcggctacatacgagcaatcttgaattcc

SEQ ID NO: 7107 - DNA, 439 bp, Oryza sativa
agcttcgagcttgtttgatcatattctttcatatgatattccgagggaagaggcctggaggaaggttgtactctcgcaggagatcagagagtgacttgtttggtttgcctggataagagaaaatggaagtcaagtctcttagttcccactcttatgtaaaattcaacttctctgcagatctaacatactgataggcaaattcagaaggcattctgagctattcagggaaattcaactgtggtgaattctgagtgaaatacaaaggtaaaatctgcattacataaaacttgaatatcatttctatgaacaaaattgcaaccaaagtgcacaaattcatacgagtctcaattctcaactctcaactgtaggaacaaacaacaaccttggcagaacttgaggagcagcacacaatattgcatacatctgttctctaaaaaaa

SEQ ID NO: 7108 - DNA, 315 bp, Oryza sativa
  unsure (1)..(315): unsure at all n locations
gaacgccanattccgagacccgagtcttgagatatcgtcgttntactaacggtcggttgagttgaatagtgacctgcggtctgaccgtgggccttatgccggtcggaccgggcctgttagccggtctgaccggcgtggtaaggccggtctgaccggccccattggtctgttgcactggtttggtttttggtggcgatacagagccagcagagccgcttccagtcagaccgagccgacggcggtttgaccgagctgtggacgggctgaccggccactacactgctgtcagactcgccagattgagtgggctatatg

SEQ ID NO: 7109 - DNA, 438 bp, Oryza sativa
gcaagcttgttattgatccgatcctatttattatataatcggagggagatttttttttttctgaaacaacaacgcatccagtaatgaactgcatgggacaagttgacgtttcacatgaactgtaccataaaaatagttttgcaaccaaaaaagctaaaatttgctcaacaattaacccaccttacaacaaaatcacgatcagttccttcaagtaaacaagctcacagccattgcgtacaaggatgaagcatcatgctcaccggaggtcatggactcctaccagggccgatgcagccacctggcctcgtcctccttgtccaatcacgaaaaaagaccgtgtgattaatgaagcaaatatgggcgtcgttatatggaggcagtgaaacgcaagagatcagttcgaatttagaaagaggagacgaagagatcgagtctgag

SEQ ID NO: 7110 - DNA, 500 bp, Oryza sativa
  unsure (1)..(500): unsure at all n locations
gcaagcacacgcgacaacagaatgatccaatctaattacttagaatcaactcaactcaatagtgcagtagtagcaaatcagaaaacaacttcaactcggactggcagctgctgacgcangacgaggcgcgcggccacgtccgcgagtacgccgacaaacgccgcctctgggaccacgacttcgccgcctcgctgctcaagctcagcaagctgcccatgctcgtggggagcaaggtggagatcangaacangtgcggcgccatcaaccacagcaagagctaattcggccacttatgcanggggttacgtacatgcatgcagacgatgtggtcgtagccatatggtttcttggtatatctcatcgttctanaatacacgaaaccttgtactcgaaaaaaacatcatatagtactatcaaatcagtctagaattatactactagatagctagtcgctaatcgagtactaggagtatatnnttaaacagaagtagttgtattac

SEQ ID NO: 7111 - DNA, 429 bp, Oryza sativa
  unsure (1)..(429): unsure at all n locations
agctntgcttcaaggaattgacctccttctctatctgctgaaccatcggctcctccatttgcgccgcgagctcatgatcggcaattgccttctgatgctgtacacaggacagaatcaaaacaaaagaggaaagttaaattgtatattcccagctagcaattctgtgcgccatgccagaagcatcaaacctcggcaagcttggccttgagctccatgcaccgttcatccaagttggggaactcgtggatgatgggctgcaggagggcgagcttgtcgtccctgtagtaaaggaagttgatgagggcgctgaggacttgcacgaggcggcgcgggtcggggcggaggaggtcgcggagcgtgaacccggggaactggatggactcgaggaaagcgctggccctcttgtggaggcggagtacccggatgccc

SEQ ID NO: 7112 - DNA, 445 bp, Oryza sativa
  unsure (1)..(445): unsure at all n locations
tatcacggtcctctgcagntccagtgaaggagtgtgtaacttcaccagtgaatctgagatagagaaatatggttctcacgcttgaaaatatgcaaacaattcatgttttattattctttnaaacatcattgngtattgttatgatatacggaagctattttcttgcacaatctggatatcgtcataattagggtagtttgaacctctatgcttntatctcaagcttgtctcaacaatangtttgggttaatgatgcctaattattctaatgtattcaattgttataacaaaaacaaactcacatgttatacaataatttagttgattagataaggagaaagtttcatatcttgaggattggagggaaaacatagatatgtgagaatgatacaatgcacgttgatatgactaaaggaatgacgatagtatcatgataattaatgat

SEQ ID NO: 7113 - DNA, 469 bp, Oryza sativa
  unsure (1)..(469): unsure at all n locations
atctctgagtcacctgcngcatgcaagcttcaattgatgattcatctctaaaattgggttattaatctatagctgcaggacatgtaaacaatgataaacttatggagttattcggtttggagtaaaaacaaaggagttggattttgaaggattaacctctatgagtttttttgattgtaagagcctaagcctggactaaagattccctcttacatcttataattaagaatcataaaattaagttattatatatactacatgacttactatgaataaatctgcaaagtgctatataatttattagaacacatataaccccgaataataaatttttataatatttagcaaaagttgaacaagctcatgctagtcgcttggtgggaaactgtgctcgctgaaaacaacatgaagaattagaggttgttgtaacttggaatataattacgagtgccagattctatacttatgt

SEQ ID NO: 7114 - DNA, 213 bp, Oryza sativa
  unsure (1)..(213): unsure at all n locations
ctaagctcggatcgagggacaggaggagacggcaagacaacagtggctcagttnatatataatgaggaagaaataacagggagcatcgatccacatgcatgggtttgagttccgacagacagcgcacaaagttgtctattggaagacgctcttatgatcatgagtactcggtatgggaaagctgaatcagttgaagagctccaacacaggctc

SEQ ID NO: 7115 - DNA, 439 bp, Oryza sativa
agcttttcgccgatcagtgcaatgggtttcttcttcggcatcgacgacctcgtcttcccgcccgggcagacgtttcgggtcggcagcctcgacttcgtcaccaacaacttcggcaagatttctctcctcgactcggaatcagaccagtcgggagaagaaccgatttcggtcccgtttggattcccgaacgcggctgatagctacttcaagaccatctcaaccgagtcggcttcaaaccactcggccgagatcgcatcttctccaacgacaccagatcaagatgatggggcttacccaccagtcctgatgaagctccccgacgatttagcggccgtctccaccacgacagcgtcttcatcccgtatgcctaggcggaagtcggcttcaacaccgatttcgcctagcttcagggaagtcggcgtcatcctccaaccactcg

SEQ ID NO: 7116 - DNA, 444 bp, Oryza sativa
  unsure (1)..(444): unsure at all n locations
agcttcaagccactaaaacatcacanatatgcaagaaaaatcgaaggttgatatgaaacaccatcaaatggagtatccattgcaattcttcaacgcaacccaaagaaacatccgaaatatattagctgaaacataaaaagatcacaaaaatgtaccggtctcttactccttgcgaccatcttcattggcgctgccacccctccaccgtcgttcgccacctcgccagctctctatctccgctgtgagcatttgcatgtaagagagatgagagataaagaaggacacgggataggtggaatgaggtgttaggaggagcccgatattttttttccatcgggcgctcggataggtaacgttttcgacattttccttcacgagccaaataggtgtatatatagatggccataagacccgctcggcacggcctgacccaggcacgggcta

SEQ ID NO: 7117 - DNA, 421 bp, Oryza sativa
  unsure (1)..(421): unsure at all n locations
tatcactgcctggtcataataatacccagcatgaccagtatgctatttgcccggcactgatgtccttttccgctaacagtagagtcaactcgctccaaacgggataacccgacactgatgtgttactcatcgatatcggntagtgacaagacccgacactgatatgtcaccgaacaatcacagccagatggttgtaagacccggtatcgatgtcttcttatcagtgttgtgtgaagcctgtgcataatgcgaactcgntctttgggctgaanagcatggtcagggctggattttgtccatcccgcactgatgagaggcgcattgattggtacaccctangtatcctttacctacaatgctatacactatggaataaaaaccacctaatcctaaatccattatgaattgtgacagagctctc

SEQ ID NO: 7118 - DNA, 442 bp, Oryza sativa
agcttaggcctgacgatactattgaaaagtacaatgctcggcttgttgctaagggctatactcagaaagaaggcgaagatttctttgacacttactcacctgttgctagattgaccacaattcgtgtgctactttccctagcagcctcacatggtcttctcgttcatcaaatggacgttaagacagcttttcttaatggagagctggatgaggagatctatatggatcaacctgatgggtttgtagttgaaggtcaagaaggcaaagtgtgcaaattgttgaagtctttgtatggtctgaaacaagctcctaagcaatggcatgagaaaattgacaaaacattgacatctgcaggctttgcagtcaatgaggcagataaatgtgtgtactatcgccatggtgggggtgagggagttattttgtgcttgtatgttgacgacat

SEQ ID NO: 7119 - DNA, 422 bp, Oryza sativa
  unsure (1)..(422): unsure at all n locations
agctngatcaaacaccccccatctcaaccaacaacaaaacaagttcttattccacaagccctttcatcactacaaagcctacaaaactcgagtattatcttcatccatccctaatccaaccaggcacaggctcagttctcctgttggtagcagatgccttccctgttcctagcttcacatcgtcgtcgtcaagctgcaggtttctgaacaagaaatcgtcacccatgcggccatggtggggcaacctactctgatcagcttggctctggttctattctagcctacagcgcgttgatcaatcgccgatgctctggcggccggagttcttgcgccatggcaaccgttcttgagatgctcgtgcagctcgccgtcgttgtcacggtgctatgcgccgccgtgcgagcgtacacccctgcggacag

SEQ ID NO: 7120 - DNA, 404 bp, Oryza sativa
  unsure (1)..(404): unsure at all n locations
tcagtgttgagtanactacatcacacanatcttgtcaagcttattggctgttgtcatgatggtgatcagaggctcttagtttatgaatacatgcctttgggttccctgagaagtcatctccatggtatgttagtatgttacaaactattaacatatatagntccctccttcattacactgcttctaaataattagaagttngtctaatcagaactgggtcttaattnttccagatctttcccctgataggaagcctcttgactggaacacaaggatgaagatacttgtcggggcagctaaaggcctgcagcacttgcatgtcaatgttgaccctcccgtcataaaccgcgacgtgaaatctgaaaacattttgctttgagatggatatcatccaaagctttctg

SEQ ID NO: 7121 - DNA, 348 bp, Oryza sativa
  unsure (1)..(348): unsure at all n locations
agcttncggattctacctgtgttgatttggacagagagagaacaacagtctgagttcgttcaaaaaagtaaagcacagaatgtcataagtcctgatatatgtacttcaatgtgtgttcttaccgctgacgctgttaagtgaaagttccaaatacataagcttagacaaaatcccaatccatgatggtattggcccatagaagctgcaattaaagagcactatagattccaaacttgtacaggttctgatccaagggggtattggactggagaaattatagccttcgagcatcaagtctctcagtttaattgttccaatccaagataacagtggcttctctatgcctga

SEQ ID NO: 7122 - DNA, 318 bp, Oryza sativa
  unsure (1)..(318): unsure at all n locations
ataatgagtactgcgtcctgcgctgatatgtataaaagtgcaagacacagtgagtgactgaattcaccttgatttgtatgctgttccctatcactacggctnagttctggctcagcatggtgacgatctccatgatactgctgtctccaccctactatacaatcatatcattattgatatcccgaagtaattctgcaatatgtggcgctttggtttctaacaataagtagctggtgcaacatactatactattattatggagagctcgagatgacgtcctgtgattattctttattctttaccagcttgataacatat

SEQ ID NO: 7123 - DNA, 363 bp, Oryza sativa
atgcgggcggagcggaggttctcaaaacataacgctagatctgatagtggaggttgttggttgcgcgttatgacaaccgaggggtacacgcttacctcaacattgcgacctatttggctacccttagaaataccatgtctatctaggcatgatcgacccgcattctataccccgcatggcatcgtcatataacagtaagtggacaccggggtaatgaacgctaatttattctcatgctgcctagccatgcgaagctgaaggttaccacagattgcatctagaatacaccacaggtcgcacccggcagtggagtcctagatctgaactatgcgaggcaggtggtgaggatacataagacatggc

SEQ ID NO: 7124 - DNA, 324 bp, Oryza sativa
  unsure (1)..(324): unsure at all n locations
tactatgtgcaggagaacgtgtgtggatatatctgcttgtgtatctatattaacgntngagcaatcatctttttcaactgcagctatattatttgtatagtgtggagttacatccagagacaaccattgcaagaccaatgctgcaatatcttgtccaagttgttggctgctttccattcgaactgttctactgaaactgatgctgcgcttggcaagcagnttacgtggcctcataaatagttttcataattatcatagatgctgctccttatcctataatggctttgtcagctttagttcaaattggcacttgtgcttcgtatg

SEQ ID NO: 7125 - DNA, 382 bp, Oryza sativa
cttaagtcacctgcagctgaagcttggagagactttaatcttttacctcatctttcccaccgggtgttggaggggagtgtttaacgaggcatacacatggcataaattcggacaagggggagtgatgtgaattatagtccaagtcagtttaaaactccagagaacagtatatatatggaggactgtgaatggtggccatattaatgaaaagaggaggaaatttctaatagttcaaacactgtgctcttgtatccatctgagtcacctcctattataaatagagggtccctttattatgctgttacaagtgaaagtgaaagaaaatgatagagcacttctccttctccctatatactgtgatcttggtcctgtgtgtctaaat

SEQ ID NO: 7126 - DNA, 435 bp, Oryza sativa
  unsure (1)..(435): unsure at all n locations
agctttattctgccttgcagactatagctattattgcttcctcgagagctctggtgatgatccctgtgtgaacggtgaccatgagccctttccctgtagcgctcatccctccgccgatgctctccattgcgttctggactaattgccaatgaagactcatttattcttctcctacggagccgatgacgtatatccgatccatccatctcgacacggtctctatctctttgcagaaaccttctttctgagtggaaaggccgttccatgctcctctcaaatgatctacgccgttttctctcgtagccatcatacatatgtcccatctggtcttgctcatccataccattgaaccgctctctttcatgatgtgcacgaacatcanaatcagctggagcatattcataatcttccactggatacatattctctccaaaa

SEQ ID NO: 7127 - DNA, 389 bp, Oryza sativa
  unsure (1)..(389): unsure at all n locations
tgaaccctcctctccggccggccggacagctagcggggagtccgttgagtgatggtgatggaacgagtggggatcggnggagctcaagagcaatgtacatcttcttggcgctatcggcggctntggtgatggagaccatgagacgcatacggtctcatcatggacatcggcacctcttgaaaccaattgccgtcgtcaccctatgggaggccgccgggtccgccctcccgtcgtcgctggcggcagatccgtgcgagaggngggcggagagacaacgagaatcgtgtgagacgggaagagatcgccggatccgcacctctcatcaccacccacgaaggatccgcgcgacagtggggaggagagacgacaggatccaagcgaggaggagt

SEQ ID NO: 7128 - DNA, 434 bp, Oryza sativa
agcttactaaagacctatgagtatgacttatacgctccacccgaggggtagtctacagacggtctagtaccagataagactttgagtgaaacttgcttgcacaagacttgcaattcaaggcgtagtccattgttcaagttgtgagtaagtgtagcttggaattctacgtggatgttcaaccttaattggtctccatcgaaccgctggtatataaacagtacattggaaaaggcaaatctcagtgggattttgagatttggtggaagattgttggaattaatgaatgggccttagcccactcgaagattaattctttggaaaatcacaaaagcccacctcatatgatggcatgcatgtggagtatagtaccaccttgcttattctatgagagggggaccttatgaaaagggaggatgcccttctattcacttgaa

SEQ ID NO: 7129 - DNA, 398 bp, Oryza sativa
  unsure (1)..(398): unsure at all n locations
gctaatcggtacatggctggagtgtgcggattatacgctgccagataatgtgtatgcagaataggaatataatatcttgngaaaagtattcttagcaacagcactgtgtttcgcatatttatacgaacttaatttactatcttgtagctcggatcaaagatattacgaatacgaagtgacatgaatgtactagatttacctaataatagttctttcttagcgaagcatttgcgtaactgaactgactcgtgattgatatantattagcacacaacatgtactccttacttttcatcagaatctcagcacaaagcatatagaaatatactactagtttcttctgttataccctcaagataatgaatggaatttcatctcacaccagcacagcactatat

SEQ ID NO: 7130 - DNA, 431 bp, Oryza sativa
  unsure (1)..(431): unsure at all n locations
agctttgggaaaagctcttcattgtatgatatttacgctattgtaataaagatcttaattgcactttttactcattgatgattaatcttgcattatgtaataattataagtagcactaatttcttcttatcaggaatgcatgttattgatttttgttcacgttttattttctggaagagcttcatgccaatctcatgaaagttataagatatgctcacttgctgaggtgcacgtggatggtactgaatccagatacttgggtgtactttcaggggcatgaagacagatataccatatatgtacatgcatcaagagaaaggcctgttcacgctaatccgatatttaatggcagagatattcgaagtgaaaagggaattcgctagaatntgattagaggtgacctcatttttgcaacaataacgtttctcact

SEQ ID NO: 7131 - DNA, 425 bp, Oryza sativa
  unsure (1)..(425): unsure at all n locations
tctgctntgntatntcagcagacacaggacttggtaatagtattattactcgcatagntgcttatagatctgccctctcttgagacagtagtnctacgaatttgtagggctggacatatggactggatggagtcctcctataagccacacaaatatcaggaatcaagaacttcaacaaaaatgtaaggcccaactnntttgaggatcttctatacttcctgattcccctgccagaactcatgcacgctatgctctttctggagacacgaatttgatctcatcctattatagtggctacatgggggtcttatgtattgcgcaaatttgatagtggttctctcaagaaatgctgatacacagttggaatgaatgctgggtatgttcgatctgctagataaatggcctgaacctcgtgcctatattgc

SEQ ID NO: 7132 - DNA, 444 bp, Oryza sativa
  unsure (1)..(444): unsure at all n locations
agcttgcagatgtcaatggtttgtcaaatttcttatgccatttcttatgagctgggttcagaccatacaaagacttcaacaatttacacacnttgccttcttgaccttcaactacaaacccatcacgttgatccatatagatctcctcatccagctctccattaagaaaagctgtcttaatgtccatttgatgaacgagaagaccatgtgaggctgctagggaaagtagcacacgaattgtggtcaatctagcaacaagtgagtaagtgtcaaagaaatcttcgccttctttctgagtataacccttagcaataagccgagccttgtacttttcaatagtaccatcaagcctgagcttcttcttgaacacccacttgcaccccacaggtttacacccatagggtcgctctgtcacctcccaagtcccgttagtgataatggaat

SEQ ID NO: 7133 - DNA, 421 bp, Oryza sativa
  unsure (1)..(421): unsure at all n locations
ctatgataccactaatgatgatatgatgtatctacctatgtatattttcntatataaagngatagnccgctaaatttacaactcaacgcgcaacagtcacacatcatcactcactatcaataattacatatttaacataatgcaagcatacttcatctacaatttatttaattctataaaacaacatgttaccatatccaattatcaaccattacatcatttacacaatatttcaccaaacctatctatcactcttataataattaaaatatacctatcaatatgttcacattanagtgcgggtatcatttgtctgtttcatgataagtactgataaaccagaaattcatattntttcattataactcctatattcattgtctcaaatatatattgagaattgttagtaatattgcaacaa

SEQ ID NO: 7134 - DNA, 435 bp, Oryza sativa
  unsure (1)..(435): unsure at all n locations
ttgttcgtagctctttanctatgtttcacccnacataagacaagggtgggtcacatcggtccctaccaccattattgcaccttcacttctatgccccatggctaggcatacaaatttccctatctcatgtggaaaagagccaatgaatccacaagagcaattactctagttggctctttctgcctttcttctgaggccgaatggatgattacggatcaaagcaggacccatgatcagttacaaaacaatgtaaaaccagaatctgcagtggctctgagaacggatacacacatactgaaccaaattcanggaagagccctggtcttggaattcattgaaagatgaagaatgtactccaactagtattcttaagaactcggtatatctggtcttggtgttttcggatgaccaactgacacattttctttcactgaa

SEQ ID NO: 7135 - DNA, 441 bp, Oryza sativa
agctattctccctcagatagtgcagttcttgtgcgctcccgttcttcatacgagtcagtatgatcttcttgtcgttgcgatctttgccggtggaccaagaccagttaggctcaacctttggagggggcaccgtctagacagatgggccgccacaatacccatgccggctcaaagcattgaggtccacaccaccaggtttcttcttcttcgacatagcatgtgttcagagagctaaaaccaatgttaaaatgatcactaacaatgagaggtaatactcagagacatgcgtcatctggaatccataatgctttgataggatataccaaaagccaactgtgcatgcttactgattacagcgcttaaaaagactacaaaacagacgacccaagccaaggtcttctactacgatataattttttttttctcaaaacgctctactgc

SEQ ID NO: 7136 - DNA, 436 bp, Oryza sativa
  unsure (1)..(436): unsure at all n locations
agcttaagagccatgatagatcctgtagatgttatataactcctggtcaccctttttatattaagagaaattaataatagttcagaaattacacaagcctggccggagctagtctccacagtgttccgtcaacatgatgcgcttggccacgcatgctgcactctgaatgtccatatcaaaaggtaaagatcatcgccttatatatttatgtctactatacaaaggcactcttaaaagcccccacatcaatcagaaaaagaactgaacgatgggcaccgtacaaacctagttaattaatttttgaagctaaattattatntttggaaagtacctcatcactgatgagtcataaacaaacaacgtctcagatgacctcagctatgatggcattggtatattagaccgtcataggtgagtcacctgtgataggtgtcga

SEQ ID NO: 7137 - DNA, 408 bp, Oryza sativa
  unsure (1)..(408): unsure at all n locations
tcttgtaacctganacggaactgagggagtaacaaaatttgccacgtaaaagtcatggatgatcacacgttctcacggtctcatcttttcgtttatacttatgtttatcagccaaaatttatatattcaatcttaaatttaaagntgattttgaggttgttttcgtcgaggtttatcttttagatcgctaagaacacgtatatcccagtgttattcacaccactatttgagtagagtgcattgngtggccttaaacttgtaaggttgtgtcatatacgttcttanactctcanaatgcatatccaagcctcataacttatcatagtgtatcatctaggtcccagattgacacatcctctctaggatcctacgtggcgctgatgtgacatcctctctaggatcctacgt

SEQ ID NO: 7138 - DNA, 411 bp, Oryza sativa
  unsure (1)..(411): unsure at all n locations
agctntggaagtttgaacatgggggaaattctttatggcgcgtgtaaaaagagagggggattatgggaaaatacggaagaaggaaaagaacgcgtgggaagcaagggggattttttcgcgcacgctgttgctcgcggtgtggatggatggatggacgaacgtctactccgttgtgccgcgggaacgcgcggctatttccgtacgattcccttcgcgtcaatctcacctcctcctccgtctcgctactggttcaagtgttctgaaattttctttggcgtttttttaagtcactgggaatttacttgtcacagtcctgggtcgttcgttcgaatacaggtttattttttggtgaaatgcaattggtgatttgggatgggaagcggagacctacgggtattaacgaattttgat

SEQ ID NO: 7139 - DNA, 121 bp, Oryza sativa
  unsure (1)..(121): unsure at all n locations
gtagggataatcttcatccgcgctatcgaaaatgtgtcaattcaaataaatgatattacaattcacttattcataancatgccatccaagtttatagaacttataattataaccatgccat

SEQ ID NO: 7140 - DNA, 393 bp, Oryza sativa
  unsure (1)..(393): unsure at all n locations
cctgcngcntgcaagcttggagatacaatgatctttttaatgtagtcacccacatcgatcaatacaccacagttgccttgatacccactggcgagcatgcctgcattaagcatgccaagtgcgtgacgctgatcatggtatgtcaagggaggctgcttgggaactgtgctcacgtctgaaatcctgggcgagcttctgaccaagctcatcgagagcatggatatatgctgacctagttaggtgctccgggagggatcagaatccagaactggggtggctgtcatggctggaggacgactgctctataagagcatcgtgctagacatggggttacgctggccgaaatgaatcctgacattccaagtgaaaggctactgcataatggattacagt

SEQ ID NO: 7141 - DNA, 432 bp, Oryza sativa
  unsure (1)..(432): unsure at all n locations
agcttgttagtagtttatggctttatgctctgaaactntttaactcgcttgctggtgctatttgcagctagccaacaatatcttatatttcaaatgaaaaaatgttcatgcatgcctattgcctatatcattagacatggtagcatcacattcttcatgtcaaatagactcataaaattgaactgcaaggatttgcagtatgcctctaattatctgtttgtaacttcatgttacaactgatgattatagctgataggcacttaggcagtatgttgacatatagaatgtcaactgacaacagaatgcctatgtcaggttaacatcagcagctttgcaaaactcacccaaatttgatcccgacaaatataggacattgttccgtccatttattggaaaaatgtnagttttatcacttatcctagtttgcgaaac

SEQ ID NO: 7142 - DNA, 426 bp, Oryza sativa
  unsure (1)..(426): unsure at all n locations
tctcattgacggaacagagggtacacctcatggcgctagaattagttatggactcctgactagcggcactagggttgctcctaatgtggatacactactacagaatcgattttccggatgagaccgcctccaaactgcaggcgggacatatataactaatcccgcatgcaaattctctccctcagaagcggntcaagggccggatgtgataatctattatcgcaagtggcctcttaagaggaccgcatgcgaaagtatatntttgatgcagacaacgtggagagcaagaggccctcatccgtcagtgtactattttttcccacaccctatattctcctcctctccacctcatcactcattttcttctcttggcctccaacacagcatctctttccccttcacttccactcttctccatcactcctt

SEQ ID NO: 7143 - DNA, 340 bp, Oryza sativa
  unsure (1)..(340): unsure at all n locations
taagcgaccagcagcatgcaagcatcgaggacgaggcaaccatgaattcgttcgccncaaccgaaccggcccggggtccacaattgagatgcgaagttgccctgaaccgactagacacatatccagtgtggcccatatcaccttggggttgcactctgattatgaacgaggagacagtcacacgaatcgggccttatatgcgaatacggcacattaccacataggcacaacctccgcattgcgagatttttacaaaacatgttattttcaaacacaccgacaccacatagtgaggtttgaaggcttctcaaaccacattcccatggttatgaaaacaacg

SEQ ID NO: 7144 - DNA, 370 bp, Oryza sativa
gcatgcaagcttcgcgatattggcttaccatgaacttcgtttggctgcaacccacctcgtcccggaggatccaactattgtgatgcgatgttcacctgaaccgactatctacttaaccaagagtgtccattccacactgagggtgcgctctcacaatgtccaatgagattctcacaagaaaaaggccttatataccgaatacacgtaattaccactatatgctcaaaccccgctttacaagttcttcacaaatcattatatttataaacacaccggcaccacatgtcaggttttgaatgatttcacaaaccattttcctagttctcgacaaacaacggagtatgttggatatttaagatacaccctcata

SEQ ID NO: 7145 - DNA, 399 bp, Oryza sativa
  unsure (1)..(399): unsure at all n locations
agcttcttatacgccaacgccaacgcccactctgtcgtctttctcgtnctacgttaatccccatggctctagctagctaattacagggttaagtagcttcgaagcttgcaatgcatgcttaattagcggtaattgatccataattaattaattagttgaaccaaacgagggttaataagttaattaacttccaaatcgttgcctatatcgtgccggaagatacgctaaattaatagcgccatgtgagtattttatgcacacaccgtattacgttatccctgacgatcgaagggggagtccgaattagtcacggattaattagcaagttgcagtattattattattattatgggattaattagtgcgaattaaattagcttaatgtgttttggtgggtgc

SEQ ID NO: 7146 - DNA, 286 bp, Oryza sativa
  unsure (1)..(286): unsure at all n locations
gtgacaatgagcatgtacgctatcaacttgaaatggtgaaagcattattggctgctacatagacaggccggttactctagtatcacaaatagccctggaccttggcanatgagcgatgattgaagataccaaactgatgattttgntctcggggctttctggagtggattacacgtgaattacgaccgcccagcccactgatacacttgagaatcgatcaggaggcacctgactcattctttttctttccactgacatcttgtgtctgacaaatcaaagctggtct

SEQ ID NO: 7147 - DNA, 432 bp, Oryza sativa
  unsure (1)..(432): unsure at all n locations
agctntatcaagtttgcatagataatgtttatgatatttatcttcatacccaggaggttgccgcatgtatacctcttcctccaaaactccataaaggaatgcgttctgtacgtccagctggcgtaagctccatcctcttgtaactgcaactgacaacacaagacgaatagtggcagctttgactacaggactgaaggtgtcctcatagtcaatttcatatctctgtttaaaacctttagcaacaagacgagccttgtatctatctatagttccatcagccttctgtttaattttatagacccacttacaatctattatattcttcccttttgtaggagggactaaatgccatgttttgtttttctgcaatgctagaaattcattgtccatggctagcttccaattnttactattcaaagcatcattcaaagt

SEQ ID NO: 7148 - DNA, 406 bp, Oryza sativa
  unsure (1)..(406): unsure at all n locations
actcagcttggcatgtctcagtttttttatcagacgcacatgcattantgcaccttttgtgcanaagcatgacgaacaatttacgaacccggactggcaatcagaagcccaaaatcaggaaggttgggagcgaagaaatcgtccgttcccgtttacagttatccaatgaaacatgcagcggaaaaagaaatagtcccgacgcctactaccaggttcgaatcgtgtgtgtacgcatgtataggcaaagctagcagcctatctagcaccgatcgagtggatttacggtagagaccgagagctagctcactgactcaccgtgggtcgcgacggtcggagcgccagatcgcggcgtacaccatccctcgcgcggagagcgctccagaccagcgactcgccatgcataagc

SEQ ID NO: 7149 - DNA, 408 bp, Oryza sativa
agcatagggggctgcacctcatcatcctctaccaacactatatttgaaggcaacggggctcgggaggctctgttgaggctgccgaggcgcttaactaaagtggcgaatatgttgaggtggcatcatggctgaagggctgaaaggggtataatccgagctccgtcaaaggatgtaggtggaggcggaatggacgatgtgatggtccgtggtgtggcagaggagcacaggtcaccgctgctaaagactactcgccgagcttcgtcaaggtccacggatttgatgggatcttgctctcctccctgaccttctcgcttcttactcttctccccaagctcatatgctcacactatcatcctccccaagatcggcagttgccatgcaactcctccttgacctttgatgcgagga

SEQ ID NO: 7150 - DNA, 365 bp, Oryza sativa
  unsure (1)..(365): unsure at all n locations
gcttataagatgagaaacgtgcttcaagattttgttaggcatcctatgtgttaagctccaactatcctcgggcttagagagcacatcctcactggaaggtctgtattatttgcaacatgtttattcaacttgattctgtcattataattatagagtattgtgtctatgtgcgggcagcgtgtcttcacttgcttgagtcatgtcatatcaagaaaccagctttgttcaactcgcacaagatttcctgctgacccacttaggtgaaagcagcccattgttcttgatctacatactcttgcagtgatggcacacactacctnttatatttgagtttctgatttgtataaagttcatgttacatgtgg

SEQ ID NO: 7151 - DNA, 436 bp, Oryza sativa
gcttgccatagcttcctgtgaaattttattctcatctctcccctcataatatatgaatctgaactccatcaggctctggaattgttggctgctgatacagagcctttcgtcaggcacaaaatgcagtttcaaccggaggtagagcagagtagatatgcttccaaggacactgagatcttcctgcttaatcctctggaaatagatgtctaggtgagcgagattaacaagagatagcatctgctgagaaggcctatttatgcaattgccagatattacaagcttctgaatgtttggaacagtgcagcacaacaaatccagtaatttatctctcaagtaatcacaacatgaaatttcgagtgactgtaatttgtgtttgcccaacacagtaagagaagactccaaagcttcctcataccttcccatctcatgagcacca

SEQ ID NO: 7152 - DNA, 393 bp, Oryza sativa
  unsure (1)..(393): unsure at all n locations
actctataaacactcaagcttgcgccagcatcanatatgtgaagtacctatataaatatgtgtataattgccatgagttttatatttggctcgatgtctatatatcacgaatccgaggcatatgtngtataaatcttaatttcacaaaccaatatatcgcgtataatataaatatacccaaacacattggtccagcctacctgtgtcggtcattctatatagggcataacatgtattcactgaaatccatattgctacatgccttaggctccttatataatgatttgctataggcatctgaaacacatgaccgattctgattatgtgctcaattataaaacactttataaagcggntgtgctcactntacaaaatccgcatggatgtgatgca

SEQ ID NO: 7153 - DNA, 457 bp, Oryza sativa
  unsure (1)..(457): unsure at all n locations
acctgcggcatgcaagctttggtgcgcgtagcaattntgcctctgtatattcatcctaacagaagctctcggtggattggtttttcgcctcgggaaccgtgcgctgcagatggattggcttcggctgattttcttctcccgcactgctgtactgctgcttttctgacacgcgcggcaggaaggacggcgtcgactcggagttgacggcgactatgctttggattggatttcgccgaacagaatttggacggaatgacgaacacgacgacgcgtactgccgattagatcgatttcttcgatccgaaaaatcacgccggtggtcgggactgcagtagatcttcaatgttctgatactacttgttatgaaaatagatgcacaacggagacacgaattttacgtggaaaacccttgcgggaaaaaaccacgggcgccgaccggcaatgatctctatggagg

SEQ ID NO: 7154 - DNA, 456 bp, Oryza sativa
  unsure (1)..(456): unsure at all n locations
caccggcacgatccctncttngntcatgagtaccatgttggaagaattgtatatattatatgncatttcttcacatatgataagactcacagctgctattgaggacatagcattagtatgtaagatgaagtgactagaccacaacatgcaacacatgatttttaccacagactataggcattgacatattaactcttaccgcagcataccttttggattacataataaccaaacaccttcattctttcctgatgcagcattgatggagaactttgtgtaaacanagaatgccttctcttcagcagtgcagttctctaactcctggtggatgaatcggctgcaatgatggcagcgctgatgtaaaaatacatcatgagtaatgacctaagcttcttgatagacggtctaaacagacacttaaaggacacttggaatacctgttttactatatgcctg

SEQ ID NO: 7155 - DNA, 438 bp, Oryza sativa
agcttggctagatgcctgctggaacgctctctattgcatattgagatggattatattcgctctgctcaattaagtggggattaaggagccaaatccaatgatagccagatccgtctgcaccatttgcctgacaatactaatactgagttgtaaactttgagcttgctgggtttgaagtcaattcttaccataccaatatgagttttgggactaccaaatttaccgcgggtaaaaaattgatagaaaactaaacatgcatgagacactattgaaattgtcaagatattgttaaaacaaatattggcatcaatccaatcaagcccttctaactccaaactataaattagttgttgtccatcagcgcttcccgaacagttaattaatacgttttcgctttgtgcacaaatttactatatatatacaagtattttacaaaat

SEQ ID NO: 7156 - DNA, 445 bp, Oryza sativa
  unsure (1)..(445): unsure at all n locations
agcttgcgctngatatggggaacaatccctgcttatatgggctgcatatcaaaaggtgaaagaaagctgattggtgaaaggacagtgaggggggactataagactatcataaacctcaaggtctataaggcccacgaacccacagttgcaaagataaaatgattatagtttcacattcaataggatatggatttctaaataatttaattttaataatctgcagatttcactatccttcttaagataacagatggaaaagataagaccaaaagagggaccaaaaggtagcttttatctataatagaatagttgaaatacttgagctgcatttgacaggtaaatatatggtggaaaccgcaacttatgtgaaaactcatgtgaaccctgaccaaacagttgtctaaattcaccccaaaaaaatcatacatgtagatgagattatttt

SEQ ID NO: 7157 - DNA, 328 bp, Oryza sativa
  unsure (1)..(328): unsure at all n locations
agctttgganatatttattagcacgcgttttctttctgatgcagagttctctggcctcttgattcgtgatcgtaatgagcatgcacacgagcagatcttttatctcgtatctatagagcatcaccatatgttcttgaacttagtgtctgtcgactatggcttaacctttagttgcatcataactgtgccattcattaggtctatataagttacgcccattatgagccaatcgctctctggagtttaaaaaatctttttcttgaatccttttaataccctgtcacaaataacgagagaacgatcactttcggttcaccgcctatctttc

SEQ ID NO: 7158 - DNA, 374 bp, Oryza sativa
cgaccttaagtcaccgcagcatgcagctgagatacccaaaattttcttttatctctcatccctgaacttcccagagagggagagctcatagaaaaagggcgaggcatggcatccagctccaaactgtctgctctcttcttgacggcaattctgctctgcctcatctgcacgaggagccaaacagcaaggcctgaaccgggatccagaggccccaaatcacaggtaccatcaccatgtaatgcataacctggtcgaactctacacagtatctgcattttgcttccaatctgagcagaatggcttatcagtgctggctatctaaccgcgctcttcttggtgtttctagggtgttgttgcctccagtattgcccatc

SEQ ID NO: 7159 - DNA, 430 bp, Oryza sativa
agcttgtgaccataaacaaagcactatttatagatagtccgaattactacgggaagtttcttttctaatgaaaataagaaccagtttttaggatagtatgcaccttccggtattcttggtcgctaactatttcaggttgatattaagaacgagggtcatgcaatgcctaagaacacggtaactatatcaactatacactttggtgatccttggtgttagaacacactttataagagactccaacattagacacttgagttttgatgtcttgcgacacaaaagtccaactgtggggtgttggtatttcttaacgacattacaagaaatataattcccagtaatggcgcagaaatactcctggtatattatggttacagagttcatctgcaagcgcacggatataccattgtagcatttcacccgagagtat

SEQ ID NO: 7160 - DNA, 165 bp, Oryza sativa
aactaactctaccactatgtaggtgagggggatttattagaggcccaaagagaacgccgtgtcgaatagatgtggtaaattttatagtcgctggggagagtgaatggtggttgtcataaggtgcccggttttggtaaagtcaaagcctccctcctcgttctagga

SEQ ID NO: 7161 - DNA, 430 bp, Oryza sativa
agcttggatatattcatcagagtttttgtctcaatataatactgagccacaatcctagtctcttttacgaacatgttaaaactttacacgttaatatattactagaaaatatattatatctacaacagggtctaaatgactgaggggatacatggagaacaaaggcaagaaagagttgctacaacaacagaaactcttatagaaccagaaaagctagcagcaaacagtacgagacatttaacgggactcctaacatgctagttttttcgcgaacgcgcaaacgattgattgcacatcagtatactagaaattagaaaaagacagagttttgattatatgacgcaatgggaaaaaggcagagttttaattatatgacgcaatggctatgtggccatatattgctgcgggcaggaaaaaataaacaggaacc

SEQ ID NO: 7162 - DNA, 439 bp, Oryza sativa
agcttaatggatgtgtagcatattatatatatattctaagaaactgaaatggcagaatcctaaaaataaagaaggtgattttcctaactattcgatattctcgccagctgaattcttaccggctgcatttagaatcttgaagcaaacctgatgagagactgtaattccaccaactaatattcagtcaaagtcaaaaagtgccttgtgagatgcagtacgacttcatttaacttaattaatcctagattgcactttaagcctcctagctatagtagctgcacatggcaccgtggatcatcacttattactacaagggtttcttttgtgggaataagagcaagtttaatagtatagctaaatattagctccgaattatcaatagctaatctaatagccattcatataatagcccatttatataatagctatctataaaaat

SEQ ID NO: 7163 - DNA, 433 bp, Oryza sativa
  unsure (1)..(433): unsure at all n locations
agcttctgcctggtgcactttggaagatcntgtgcatatcatctgccactctgcagagattacttgtaggtaactccagattattctaattaataattaaatataataaattagcgatttgattttttttctgtaatatcaagggatccaactacgacgaaatgagaagaagctccttaatgagataaatgctgacaaagagggaaggctttggttccatgttgttggtgcaaatgggaaaaggaagaagcgtattcaaacaagagaagaaaaaatatttattctggcaaatgattgtttaactggggaccctctagtccatgatctatctctcaaccaggtaatttgtttgtccagttcanaataccatttgattttgtcacctattcttttgacgatatttaatttttgcgattngatgcaggaaatgaat

SEQ ID NO: 7164 - DNA, 223 bp, Oryza sativa
agaaatgggaataaaaatctgacttgcttccaacgattgaagattgcgttaccttaaaacctggtaccaacagccagcagattctcccctcatggaccaattggcccgtaaggtctgtctagtatgcattgcgcccattcctctaagacttggttgtttaaaattggctgacccttatatgtttatacgcaagtgttttcagagttattgccgcacctgagtc

SEQ ID NO: 7165 - DNA, 426 bp, Oryza sativa
  unsure (1)..(426): unsure at all n locations
gcttgactacatagtggacttggtcttcgtggctctgacatggagattaatgtgggttttaagtagcttctataaaatatcatgacccacatgtcgttctaagaactagtcttgggtgtaccttaacgggattgttagcattagtttctaaatagaaagatagcccgcgcatatacgtgggcaccttcttatatattataagtgaagatttattatgaatatttatgagtaggtgaaaacgacgtactataacgggctaagacatttaggagtagctttctcaaacagctatagcgaaagctatatcgagctaaatggacctatagcggttaattgtatacgagagacaatagctaataactctttttanacttcattagccgaagatagcggcaactatatatatgtggagattaaaaccactac

SEQ ID NO: 7166 - DNA, 393 bp, Oryza sativa
  unsure (1)..(393): unsure at all n locations
ttgtacgtgcaagtttgtctgattataacaccagatccaatcaatgtgctatctctgtcagaagaacaaacaaactgaacggagaacctgctacaacaagcaatgcttccggttaagctggccaattatgcgagaagctacttctccaagagctaaaccaaactgaaagagaaacaaaaacaacagcgttgatgcgctgaaagctgcagaatggccatcttccttctccagttaccgactcgttctaaggatattgcagattatctactgctaactgatattcagaacttatgtgctccacttctatctctcattgagcaacacaattcttgaataaagtgatatctggtattagtctttttactcctatcaggaagcatcgnggtcttgtat

SEQ ID NO: 7167 - DNA, 440 bp, Oryza sativa
  unsure (1)..(440): unsure at all n locations
agcttcttatatttcatctatgctggnattcttggtataatgcagtatcggggtattagcctatacaggttgggttcactccatccgctatgctgtgagcgcgcataatcccttctttggagcatgtttagatatgaagcaatttatactgtctcagtgccaccaccgatctattccagtcgctcgatctaagcatgccccatctaatggattacgcgtcgctgatatctacagccgatcaagtacattgaacaatctccaagtttttacttgcctccaccgatctgacttgaattgcatcggcgtggcccccaatgatatgtcatcagcaatccttgccgatcggctatcgttgacggatttaactctctgatgttccctgtcatgttggttgcaggatcaaaccatctggcacgctcagaacccgaagcaaattttct

SEQ ID NO: 7168 - DNA, 443 bp, Oryza sativa
  unsure (1)..(443): unsure at all n locations
agctngtccaaaataagataattattaatctcttatttacccacccatcatgttttcttatgaataaagggcactttggtcttttaccctcaacaccagtttcattgggttctaagaatccatttaaggctcattcggttttgttgattctcaaaacatagaaatagaataagaaagttaaaattatatgggaataaatgtgcaaatcggagaattgtaaaacacatgaaactttcgtatggttgctcaacaagcccgccaaaaggattgaaaacgttagattggactggtttttttttccctgtattttccccctaaaattgaaataataggatttttttttctttggtaaattccttgtgagacgaatggcaatttaatatccatttcaaatattatatttaccgcatttttcctttataattccttttaaacagatgagt

SEQ ID NO: 7169 - DNA, 398 bp, Oryza sativa
cacaaatacacaatgacaatcctgccactttgcgagcacgagtggaactgtggaagtactaaaaacaatctgttaacttttgctttagaaaagctttctatggttctgccaaaccagctctgtcagtataccactgagcggtgagcaccatctaaaccgcaaaattaatatgcaagccagagccaaggatatatacatcacaacttcacaagcccactggttctaatagaagaagcaaaagcttcagtcttcaactaatactggtataaagccctgagacatgcataacaaacctgcacttgcatttcctgcactgatacttcctctcgccttcgatcatcttcacgccaccggacctgatcacgggcctccttcaagtgagcagagatcccctgtgc

SEQ ID NO: 7170 - DNA, 323 bp, Oryza sativa
aactgccaccttgctggtggtcagaaccttgcgatctaattatgaataaccagatggcggatgtctatgagtattccatattctattgtgatgtatacagtggacatcaataagcctaaatgctgttgcacaatttcttatcctgatactcatctataacagatagtgaacctttctgacgccggtacgtggtcatgcgattagcaagcattgctgtatccaaagatttgattggttactacactttctagcatgttcaattcaaagaatgatcatgcgtttatgattgcctttattagtaaatataatgactctgtatactg

SEQ ID NO: 7171 - DNA, 453 bp, Oryza sativa
  unsure (1)..(453): unsure at all n locations
taagtcacctgcggcatgaagcttaaactntacttcgcaccatctgttcatctttattattccctaaatttaacatttaaactgaaattcaactatgcatgccatccgtcttacggttcgtcgaaaccgacttcggctaacgtgacaaaacttgaagatattcagaatgattaaggatttgtcgcttttgaaatgcgcaatcaagggcaactaatatttacacgtgtaaagtagatcaaaagcttgaaaactacgggttcttttttaaagatcagcatccgaattttatggccagggcagtcctcttccatgtctgagacatcgttctccttcagagaaaatgaccctgtacgtaatggccattcatgatgcttttccgcgttacacttggtcagtcactcaagctaagcagttgtgaatgaacacagaaaactttgaagtccagtaacaagt

SEQ ID NO: 7172 - DNA, 366 bp, Oryza sativa
  unsure (1)..(366): unsure at all n locations
caccaccccaacanagttattctgagaaatatcattatcaacaagattcgaagcatttgccaaggaagaaaggagattcccttggaagaagttgccgccaatgaagagccgccatagattaggcagcgaggtaccaatgccggatggcatcttgccgctgaagcggttggtttctaggctgagccgaatgagcatccgacatgtcatgatcggctctggaaactcacctgactaccggttgccgtcgatggtcagtataatcatattgcgcagcgccgcgagctcgcctgngatgccaccctcgatgccgttgaacgcgaagcgaagcatcctcagcgtcgtgacgttgcgagcgagggagggata

SEQ ID NO: 7173 - DNA, 435 bp, Oryza sativa
agcttcggcgatttcttcctacatcttggtgagcctcctggacctcttaggaaacacatgcatggatgcatctagcaaaataaaagcccctatgcaacatgcagtaacagctcatatataccttccgctcaccctcaccatcggcgctactccgatgtcttctagccaagaaaactagaggaatggaatcgtgagagcattctattcattttatcttttgacctcattcccaatcgagccaccaatcgtcgccgacgagctcgccaaagccatggccaagctcccagtccatcgggctgctggaggttgaagatgaagactttgtcctgtaaataatcaaaaatatagggttcaaactataaaacttcagtcgtttacatgtggacccatggagctaaatgcagttcatattaagcccagggaccttcttgtata

SEQ ID NO: 7174 - DNA, 325 bp, Oryza sativa
ttcctccccctcccccagggttgagcttgatcctctacgcctaaaccctggtaatgagacgccttcaaacaatggatggtaggcccctcgaggagtcaaagatagaaacacacaatatcagatcctaccttgtataatctaaaagaggctgttaaccacactcaccgatatcaccgatagcggacccccacgaattctaagaacaagcgaaaccacaaaaaactgaaacacggccttacgacaacaaacatcggaaaggacttttttagggatcttaacctattaaacacttctttttttttccaatcagaccccaggacctgac

SEQ ID NO: 7175 - DNA, 436 bp, Oryza sativa
agcttatcgaggtcggagagaggtgcccgcttcatctccagaggagacagtaagtaacctacccctttggcctttgctcgagtgctagattctctcacaaattgctgtgatttcgctagtttggacactcgtagatctaattgggtcaatctagcatatgttaatttatccattgaattgtttgcaatatgtcaatttctgaaggaaataatgggaatacttcagaagcgattggaccccggggcttgaatttccggatagatccatagaaaattaaataagttgagattgaagttcttcgtttcaaacatactttgatggaatttggagcatattttcttattccttttggagtcttagtatgtaagagtaagactgactgcaatttaagatattcataaccttgtctttctaaaataataaggaaaccagagta

SEQ ID NO: 7176 - DNA, 126 bp, Oryza sativa
  unsure (1)..(126): unsure at all n locations
actcgcgcttggtgctgccatatgcgngggagatcatgtgcctatgatgtgttctattaaatggaccgacagcgacaacaagccactgatggcactccccatgagaaacccatggacacctggttg

SEQ ID NO: 7177 - DNA, 354 bp, Oryza sativa
agcttcataaatatcttgtcgctgttcatctgataaatattttcttctcctaatatttttcatgtgcatcttggtggtgtgccatgtcaacggttcataatatgcaaaatttaaattaaaacgtgttgtttggatttatgtcatttcgtaaagtatagttgctctcataggaatacctgtttcatcggttcatacatgtacctcattctgaacgaagagaatgtccacatggtcagcatatacatcattatcctcatctgcatggagggataaaggttagagataacgtatatagaaacattaagcataactaaatttgtacttcctccgtttcatattataagactttctagc

SEQ ID NO: 7178 - DNA, 444 bp, Oryza sativa
  unsure (1)..(444): unsure at all n locations
ctcnagcttcaacacgccacagacgggcggtcatggaggtgcacggacgattattttgcgcatggctacttggtccgagacacccactgtggtctgcgtctatataaacagtggccccaaatatnctcagattatgaagctactaggcaggggtaccttccactgtgaggacggttctccagagccactccatggatgccctcacttagtgaggactctctacgagaggctcacattgcacatgctctaccagagtaatctcaacataaagctacctagcaaacgaatacagcacaactgcgtaagtgccttttagggaataaaatccccaaattgctccgaactgaacatacttgcatcaaagatacgatacctgtacatcaacacacgccctatctatccaatgactgaactgacagttacgcgtttcaagaatagaccaac

SEQ ID NO: 7179 - DNA, 430 bp, Oryza sativa
agcttaaagagcacctttgctatcttattcacttaatttagcactctcctcaaatacttttcaaaacaccgttttcatcgcactgtccaaacttgatgaagatgatctggtttattcagatctatgaagtcccttttcagtttaatatcgataaatttatcatgttagtgattagtggttcctgaaaaatctgtacagatattatcttagataatgcattattaatttaatagttcactttgccactttggaaattgcatggttttttttaggtcacattaatttctcaatggacactaagtatgcatgatcattaatttatgtctcacacatgccatttcaattagggtaaaataatctcaccattccctatatattattatgatattagaaattctgttgtggtcttatctgcactgtaatctttgat

SEQ ID NO: 7180 - DNA, 422 bp, Oryza sativa
  unsure (1)..(422): unsure at all n locations
agcttggtcgtggtgggcaactattctatgtttnaaacccgccagcccggcgaagaataattctatacatttaaatacgaaatattgaagagacatcggaagcactacaagagtttgaagctccagcgccttccactgttttaagatgttgatgctgcaaagtatagcacctcttgtgttgcatagttttgtgactgcacagagcctccatccagtagatcccattttgtgagttcgagttcttgagacatcatgtaatgcaggggtcaattgatggatgcagatatctcttgcaaagtttttgaattgatcacttcactgtttggtattgacatgcatgcttgttcctgcagtcctgcaacatgcagagtgcaatcaaaggctaaatataaccactgttccaagtggagatgtgattatcg

SEQ ID NO: 7181 - DNA, 436 bp, Oryza sativa
  unsure (1)..(436): unsure at all n locations
agcttggggctntaaaacaatgtatggtataatatcattgatgcttatgtcttttcgattaaacaacataagaatattatttatacttcagtaatcagtatcattgaacttctctagctcatatttttagcttgcctaaaaaacctgatgactcgaagctcactgactggaaaacacctgatccggatgtattcacgacaaacaagagtaagccaggatggtgcaacgtgaatcctgaggatgcttattcttccaaggtgaagtttaaagaaaaatgtgattgcaaatatgacggactctnggggcgattctgtgagacacgtgttgaatgcagctgtattaaccagcgctcagggcatggacattgtcgtggtggattctgtcaggtatctctcanacaagttgatcggataaaagtcatgacaatgtgttgacc

SEQ ID NO: 7182 - DNA, 430 bp, Oryza sativa
  unsure (1)..(430): unsure at all n locations
agcttgagtattngaacatgacaagttgttccaaggttcaagcgttgcccgagtctctatgcaagctcacgatgttaaggcatctaaatttgtcatattgtctaaggctagaaaatctgccctcatgtattggtgatttacagcttcaaagtttagacattcaaggctcctttctccttagagacctgccgaatagcatttttaacatgtccacacttaaaactgttgatggaacattcacatatttagtatcttctaaagtagaaaaactgagggagaatctgaaattggaaggctgttgtaagctggatggaggaagcactgacctatgcagtcggattacggaactaaaaaagacacactgccatgaattagagatacaaagtcttgaggattttaagcatttggaagggatagagcatgctatact

SEQ ID NO: 7183 - DNA, 368 bp, Oryza sativa
gacaccgaatttactcttgccattggaaggattagatggattaacgctacaatatgtagcatctggatgaaatgttctagaaagttacgaagagtcgttgggttccggatgcggtcgggcccattgtgattcacgtaaaaaatgccagtatattttctaaagttgaaaagaaatattattataaaacagattattcgtataagcttgagtgcattacatcatccattgtgattcaagtaaattggcttttggtgaacagttcagttcaattgcattctaaacggcttaaaggcttgctgcttgtatggcccaacacaagtaatgaaaaagctaatctactgggtttgctgggaagtcattatatcatc

SEQ ID NO: 7184 - DNA, 389 bp, Oryza sativa
agcttgggtagagaagatttcgccctcttgctccttttggcaggagggggaggtgcggcctgctgtcgacctccataccgatctacacaaaatctgtatcatactgtaattggagatcttcatctctttgttcaacggcaggagggagagatacaacagttggatggggacgcgtcggcagcggacgaaaacttggcgctggccttggagttatattgatctcaatgttgtgcttgggccattgaataaaggtcccacgtgtagccccaagagtcagaatctcgtcattaggtgggtgtgggatagtgtagccaacccaattgggcttcactaagtccacctgaactttggcattgctggctagcagatgcaccccatgcactccggtc

SEQ ID NO: 7185 - DNA, 368 bp, Oryza sativa
  unsure (1)..(368): unsure at all n locations
atctgtaaggcccagaaacagctcttatattgaaagtaatatatcatgagtgcaacaaattacaggtgccaattgccaacataagcataggacaaactgcaatgcttgattacattggccaaatgcctaaacaaattgttcatagggcattgtgtggacatacaacactatgcacggtatagaaggtgcatgtcgcaactaagtatcagttagtgtttgagaggggaatggngtagacaaacaaatcctcagtcctaatgtngttttaaaaaatcnnggtgcaaaacaagggggcacaataaactgtactggttgataacagaacagacaatatataaacatatgctgaccttgaaattcttgaacac

SEQ ID NO: 7186 - DNA, 411 bp, Oryza sativa
agcttgaagatattgtgccctcctcgcatctctgttatgtaagcataaattcttaaccatgttacaactactgtttgcttggataaagacttgtggattatttgtattccttcttctgtgcaagtcccccacgtgaacggaactgattatcagctgaatgacatttctgaagatggacttgtatgtttctttaataccttcagctatcttttgattaattctcctttcagctatctcttgattatatctgaacatggaattggatgtatcgttgagccttttaaaaaggagttgaatgtttctttagttctttatagactgaattcgtatgcttctttaaccctcttaaccactcctctgatatcactgcagatggatttgaatgtatctttagtcctcttaactatcatc

SEQ ID NO: 7187 - DNA, 443 bp, Oryza sativa
  unsure (1)..(443): unsure at all n locations
agcttccnctgagaattattcaaaggatattgtttatagctcgagatttttctatgaccattcgtagaaaggtttattcttgaaatggtgttaccatgcatggtattgagtttcatcgagaaccgagctagctcgagcttgacacaatgacatacctgctcatgacaactgaactgaattgtctgaactcatcggcatgtggcaagtttccctgtggacaaagccttccatgacacatgcatgtacaaagtcaggacaaccgacgccactttcgccgtgaacaagtttgcatttgtagcaagtactcggtacacagctaacgccatatacttatgggacagaacatgatcatcttaattagctcttgggagtgatcctgaacaaacattcatgagcagtacattggattgttctctgatataagcctnctactcctagaccta

SEQ ID NO: 7188 - DNA, 414 bp, Oryza sativa
  unsure (1)..(414): unsure at all n locations
aatcacattttccacatcgtcggagttagcctttgtcatcatcctatcatcatcaccaatatcctgttgcagttggtctatcatgtcatcagcttcccatcggaacttgctggtatgatactaatcactaaaggatcaaagaatagtttgcgaaagtatttcagcatcatcgtaaccgtttccggatcagtaaagagaggaaggacaacttgtgaaggcttgtagtactaagagccatacaaaagtttgtcaacgcttgccacttcactaagaaaggaatggaacactattacgaaatccatntttcatggcggctattntgggatntcgttggcttgaattagagccgccacanagcaaaggccagtgaaaatcaagatctagccgtcttaagctagccatcagcaaaaaatc

SEQ ID NO: 7189 - DNA, 441 bp, Oryza sativa
gcttgacttgactatgagtagtatggagtatatcactagatctaattacgcacaaaccggagggttattttctgaaatttcaccccttgcactatagctatctgacgtggcattggctatcgttcgcgccatcggccacccttaatattcttctaatgtattttaatgatacttttagataaaaataactattttctagtaaatcacactaacaatagaggagataacacatgttaattcattgtgtagatacgtactaatatatattttatttattaggttaattataaaaaataaataaacaataaaatccatatacagtcaagctcgttaaagagttgagcttgacttaacaaagctcgagagctttagattgggataaggctagcttggcttgtttcttgaaccaaggtcgaattaagtcttagataaatcgtgctc

SEQ ID NO: 7190 - DNA, 484 bp, Oryza sativa
  unsure (1)..(484): unsure at all n locations
tcccgctctggacctgtctggtggcgtacatgctntacccgctttcgctcgttgtcgtctacatcctcgacttcgtctttggctggtcataagcaaatgcttctgaacttctgcttcataagctaatgcatctgaactcctgcttttgacggttactttttcttcggtttgatcttgtaaatntatctccctgtaatttatctgtctgcacttcacgctgtgcattgtaacttgtgcctatcctaaggttcccatttgttctagtttatcctgatcttgaacagagatgagcataatatataaattgagaagtgcctgaaagtaaccaagcaagcttatttctggaagtggcgtccttgacagttttagaattctgctaagacttaccctctatgtgaacaanaatcaacttgcaatgcaaccgtagatacatcttaatctacacanaccnttttgaattctaatggcacacacatcatctatg

SEQ ID NO: 7191 - DNA, 442 bp, Oryza sativa
agcttttaaaagatgctctgattttgctacagggatttgtgtttatgctttaacaaagtagaattcatccagggctaccacaagacaatgatctttcaatgtccaatgcagaaagtgaaaatgttcccatccaaggtcattcaattaccatatggtcattgatttctgtacatgaattatttactgcactccttaagttctgccctttcttgcttcttgatattatttgttcacatcattgtctcgctctattgatttctttttgcaaatgtttttggaaaaattattgccgtctccagtgcagcaatcatatctacaagttcatcagaattcgggatgagatgaatagcgccaggtaattaactacacctttatttaatagcttgatgtttcaagtgtgagaaaaacttggattttctgaaaacaaagagctattacttac

SEQ ID NO: 7192 - DNA, 285 bp, Oryza sativa
  unsure (1)..(285): unsure at all n locations
agctggctactaaacagctgcttctcagaatctaaagctctcncaaacagacccttagatgttgtgaatctagtctcttttagcttatacctggagtctttagggtccccttgatccgttagttntcaacgccacgagtccttaggcccccctctagatatcttaggtctagatatcatgataaaataaaataaaataaagttggctccttggtcttccaaccaagtgagcccttattgcttcactcttggctttcttattcttttgtgtgtccaataaagccct

SEQ ID NO: 7193 - DNA, 425 bp, Oryza sativa
ctctaagcaacctgcagcatgcaagctttggcacctgccttgctcttatgttcttgctacagacgaggattgtgggatacctcccgatgtgtacgagctacaataattctggataaaaacaatctttcataccttaagtgaagagatatatgggtctcggatcttaagatcctacacaactttaagtccccatgttaatcgcaattcaagacccaacttagataaaggttaaaaaggctggcgtaagacaagatgcactatatataacattgatactcgccaaaaccggagatatgagtctatgactaactacaaatgagcaaaggatacgctaggtcctatcggccctgaagttgaccatttgaacacaacggatggaagtcaccacatgaggagggaaaaccaggcgacactttctagcaacc

SEQ ID NO: 7194 - DNA, 248 bp, Oryza sativa
ggaacaggcgcgggtcagaaaaggacaaaaagggtaaagatggaacaccacagcaaggagcagtgcaaataaccaataaatacgagctctcccacagaaagtagaaacctacgccaaaaatggaagaaaggcaatgagcaaaagataataagtaaatcggagcagcaaaaacctcgcaataagatcagatgcacacaaagacgacaacaaggccaacatacaaacagggcagcaagtaaccgacggaa

SEQ ID NO: 7195 - DNA, 461 bp, Oryza sativa
  unsure (1)..(461): unsure at all n locations
gtcacctgcggcatgcaagctntccatttaaatggctttatatattctgttggatgtagaggccgcgtaaaaaaaatacccttctctaataataataataataaaatattagaaaaatcagtctttttgagctcatcattatatcatttgtttgtgaaaaataattcatatatcacattcttgtcctgctaattgacattagggcaattttcgcgtaaagtgtggtgaacgatgacaactttttcagacgatggcaacgtttctagaatctagatgtacgactggtggacacaaaatgataagtccagcaggggtcaaaaatgtcaaattaatagtaaataatattaccggatacttactacctaaactgatagtagaccatcatcagttctgatcaatcctggccgctatacaatacagctctaggctgtacgtgtactatcgttgcacttgtgtgaaag

SEQ ID NO: 7196 - DNA, 439 bp, Oryza sativa
  unsure (1)..(439): unsure at all n locations
gggagatgtgcagatatcacacaggatgaagtanacagcttgtctcgtatagtagtttgatgccctccatgcgcacactgtntgtgtttgtttccatgcatcatagatagctgctgctctttgctggtagcaagattctgcacattcttgatcaactctcacgattaaagaaaaaagagagatttcgaggaattgtgagcgtgttgggattgaacacgggacctcanagttgaaaccacatacccattaccactgcactatcaagtgcctcttagctctcacaattcatatgntaangatctgttgcctgtagccttgagtttatatggtgattagcattgaatggagatgttatcctacaaanaagtataaaatggatgtggtattcggaagagaatcngtatatgaatggtttgacgaattcttgttgtgtacatat

SEQ ID NO: 7197 - DNA, 433 bp, Oryza sativa
agcttgaaagtggctgctgccatcccagctgatgtttcttggaaatcgagatagctagtctgtaaacagagtattcagacacagagcttgtaaagtggctgctgccatcccagttgctatttcttgtaaattgagatagctagtctgtaattatatcaaaggaccattgacagttcacaccattgatcttagataagcttagctaatgtgttcatgtgaaataaaaatactaataaaaaaatcaaaggacatattcaggtccatatatcctcctgctttctcaaaaatcaaaggacatgttctgcacagaatgactgcacacatgggctactttctagaaaaagagagaaaaataagaaagcctccaattcattctgttcagatcaacaacagcaccaacaatttcagatatcagcaacaggcagtacaccaa

SEQ ID NO: 7198 - DNA, 395 bp, Oryza sativa
  unsure (1)..(395): unsure at all n locations
gagtacgctaatactcatctctctctctatatgaataaaaataccttccccttcttaagaggaggagatctatctagccgacaaggagttcttctatgagcaggcgagcttcgactagttttaggggtatggcttaatcccaagtcacgctagttgttctgggctagtcctcgctctcgtttcttttgcaatgtgtcattgaactcggtgtatgcccacagttccaacatgtctaagattattcatattaatataatccatatgcgctatgatatgctatcttcctatggnatcagttctattattcttggatagagtaaattgtaacgtcttaagtcggtctgctgtcggaggctattctcgggagtgacaactatcaagtctaattattatcc

SEQ ID NO: 7199 - DNA, 412 bp, Oryza sativa
agcttgcagaaattgatgtttgttttatatgctaatcgatcttagctactccctccgtcccataatataagggattttaagttcttacttgcactgtttgaccactcgtcttattcaaaaaattttggaattattttttgtttttttgacttactttattatccaaaatactttaagcataacttttcgttttctatatttgtacaaattttttgaataatactaatggtctaacagtggaagcaaaaactcaaaatcttttatattatgagacggatggagtacatacggagtattgaaactaaaaagaggcaaatcttggatgatggtaaattaagatctagttgcatgcccacagcctcacatggatggcctcttaagttaatcatcatatcaagtggacctccgtact

SEQ ID NO: 7200 - DNA, 307 bp, Oryza sativa
  unsure (1)..(307): unsure at all n locations
ggaaactgatgattaggcgaaaattcttgttatacgctgtgtcatgtcacctcttataaacgacccgctaaaatctattaggatggaggaatgaaaaactactgcccccgagttaattatgaccaccacactgactcaactcacacctgtcatgcaattttgtgcttataatttctaagaaacgtcggtaatttcattaaatgttactggagtaccatgtttcaaccaaaatacacgtataagaataagaaatcaccatgctactaatatattcatgctgcttctacanttttgcacgtgacgttca

SEQ ID NO: 7201 - DNA, 442 bp, Oryza sativa
  unsure (1)..(442): unsure at all n locations
caagcttatggtcatcgctagaatatttaagcatgaacttggattttaaaacaaaaaaaactaaaacttctagtgcttcagaaccaattttgcctaatttctacccttgatagcaaatgtcaggcttccctttttactcttttgataagattatgttgctcattgctgttcttccatcaattttgggacttcttgtcagatctttgttatgatccaactattttttatgtcttttgcaggtgttcagtagggcctagccatcaatttgtatgtaattttgttgtggtgactacttttaaatctttcaggggctatatatgagcaagtgttatcttgagaattaatgtcaaaagaccaagatgctttcgagaggaacttctatcaactcacagccttntacatggatacacggtntggttcttcttgaatactttctggtact

SEQ ID NO: 7202 - DNA, 332 bp, Oryza sativa
  unsure (1)..(332): unsure at all n locations
tattaccgttacttaactccgatgtgagcagaacaattccataataggaaaatgcatttccaaagaaagtcattcacaggagcagagntgcacgtatcaattntggcgacagcagcttcgcgacggacaaaccttcaaaactggaaactttgtcttcaatgatggtgtcatcttcttcagcatcagcaagaagtgtngtagactcaaatgttgaaagttcatctagctcaatgtttttgtcagatacaagcctttcagaggggangctgtacattgtcaatctagccattttcttcagtacatccatggcttctggtactctgcctttcatg

SEQ ID NO: 7203 - DNA, 417 bp, Oryza sativa
  unsure (1)..(417): unsure at all n locations
agctttgcagtgtacgtgatgagtatgctctcccagatttccggcgcttcaccccgagttgcatggctggtcacacctgtcaaaacaaagcaccgtgatnttttcccaagtcgaactgatccaccggcacagtctcagtttccgaatagaaatttattatctcgttgctgctgattttttttccatatgcgaccaaagcaacgcgtgttaagtcaacttgaagaaaattgacagcgcaggctaatgttatttcctttttgcgcgaacggatcgttcagtcgtacggagaagggatcaattttgaccaccagggtttaattatgtgatgtgtgaacggtctattttctatcgtggtgatatcacaaacggccagttacaaggatctaacggattgtgtatggaatactactccagtcg

SEQ ID NO: 7204 - DNA, 360 bp, Oryza sativa
  unsure (1)..(360): unsure at all n locations
actgcattaagtttactagagtgttgaacctccaagtctcagtattaaagtatttctgtgcccaagatatctacagatatgggagcactttgattgatgtttnttaaaaccaccagcggcagtgtatggacagtgtcagcttatcaattggtttgcttaaactttgagcttatatgcagagatccataccaagatcaaaactagatattangaaagtgatnagtttatttttcttgagaagctttcttttatctcaacagatcacttagctttctttgttgttgcttataaacaccatcgccactcttagatttgactataaactagtagcatagcgtattgctgggctgattacataat

SEQ ID NO: 7205 - DNA, 433 bp, Oryza sativa
  unsure (1)..(433): unsure at all n locations
agcttgtctctcatggtgagagactgtatcgggntcaagcaaagatggatctctcgatgacgtcattatggcaagttcaacaagagcatagtcaagtcgcgcgcgtgttgaaggcggcggcggcggcttcgagttcggcggcgccatcaactccgcacgggcaaccaccgttgttggagactccgcggggggcttcgtcggcgaccactttgctgacaccaccaccatcaccaccaccaccaccaccaccaccgtttgggcgtctgccaccgcaggtatccagttccccttcgctgtctgctttcgagggtggggattctgcgcctagacgccagtggacacctataatggatattccccgtttctatggcaccgatgtgagggtttgtgtggattattgtgagacatattttggggttatcaaatcactgag

SEQ ID NO: 7206 - DNA, 358 bp, Oryza sativa
  unsure (1)..(358): unsure at all n locations
ggcacattaataaagtggctatgtattattttttcagcatttcagntgatattagtgtattaatggattatgcatagacgggcagactcagacaagccgtggatacaccagcacgaganacttctcngtctctctctcctattctcgagttctactttctccgtttcacgtaagtcattctagcatttntcacatttataataatactaatgaatctagatagatatatatgtctagattccttagaatcaatataaatataataaatactataatgacttacattgtgaaacgtgaaacgagagtagtcatcaagcgaccttcacgcctctgcagcagcagaagcaagcgcttgaac

SEQ ID NO: 7207 - DNA, 446 bp, Oryza sativa
gcttcaacgtccgaataggcggaatatctgcttaataatgcaatatttctaccttagtgttaaaatgcaaaaagttcgttgttgctaaaagaaaacgagcatgcagttcgtacttacccccttttttttttgactggagcaaacaaattaattgatgaaataatcgcgttgagtttataccctcattatgggtatttattttattacatgacgttgtaaacattttgacacatgtttgatcattcattttattaaaaaacattatcattatttattttattgcgacgtggtttatcatattataggtactttgcacacaagttttaaataacctacatagtgaaacatgtgttaaaagtcaatagcttcatctattaaaaacccgaaggattatcatttaaacatgatcttctccttgacaactttgactattattttcaaacaat

SEQ ID NO: 7208 - DNA, 434 bp, Oryza sativa
  unsure (1)..(434): unsure at all n locations
tttcatccgtcatcgatctcttgcgtantcaaattcgctaattggctctcaatatagccttcgcccgccgcttgtgccatcatgcacagcataaggcagtccaaatcgatcatgtatttcataatgtaacacagcctaatctctgtccccacggaatgccccagtctttcctcagaccaactttgtcacgtattaatccatccacagccagcataagccgccgcctacgataactgatcttcataggtggctggttaagatgggactggataaaactcgtggcttgtagctcgctcggctcgtgtctatctcgactcgacttggctcgccgaaccagaagtttagcttcgtagctataacgagccaactcgagatggctcgcgagccgctcacgagccatgaaaacatcagaccgagcagcccggatgacccta

SEQ ID NO: 7209 - DNA, 244 bp, Oryza sativa
agcttgtccatagagagcgagaccgtatagatttcttcctggacaggtatctattgatgatgacatgtgtgctaggtatcatatagcatatacgaaagcctgctctaatgtcatagtaaggagctttatgcttctactttcatcgttacgaaagacttctttcttattcgacaaggacttggataaccccatgagggttaatatggacaccccgtggctgatgaaaccatcttcatgatcaata

SEQ ID NO: 7210 - DNA, 426 bp, Oryza sativa
  unsure (1)..(426): unsure at all n locations
gatacagganataatgtcacatgctctgtgctaagcaatgttcttgcattatccttgataaatgcagcagcctcttcaagctataaccgttggattgataagcanaatagcaatcacgaaaaatgtacataggatatgcaatattctgcacggattttgaactacagaatgatatcagaacctcgtactgttccgatacaggtcaatttgttagtacaatacaactttctcttccactgctgacatactganaaatacgcctataagtcagacgttttatctcactgtnaggacaataataacgaccacgacaaactgcatcttgaagataaataagatatagaatttaataaatattgtatgaatgaactatacgataaatctatcctatgcattatagttaaaaggtcgtacagatgcacatat

SEQ ID NO: 7211 - DNA, 439 bp, Oryza sativa
agcttccaaggtaaaagttggcacgcatgagaattaactaactgtcctgtagctaaggaattagctagaaaatagctactacaagtattatatatatatatacccttgaaagatcatccggaagagtggaatgcattttgctctggactgaggacagaaattcatatttcttcttcttcttttggcgtatgctacatgcatgttcaaacatagtggtgacataaaaagtttttctgatatatgacatggaaaacttcagataagagacaggaataaatggcttcggcctgttcactcaaattattcctcgttataccagcataagctagccgttcttttctacactgaggtagcggtcaattcctgaagttgattggtaaattcttctgaagttatgaacaggcagtattgatacatatacatcacctggtagtgtact

SEQ ID NO: 7212 - DNA, 450 bp, Oryza sativa
  unsure (1)..(450): unsure at all n locations
ctaagctnggtacgacaccctatattgagtttcgtcagtggtttcagttggtagtggttttgtttctatgttatgtagatgtntagttagttggtgggttttcctttttaacctgtctaggctntctttttactcctgcttattgaaaatataattaacagtactcttgcttggttaattagtttaaaaaaaaagcacccagaaggtcacacatcaggttacattngcaactcgcatctgcccttcatatccataccgcacatcacatatncatgcatatgtgcgggatgctcagctgcgctcaagtgctcgagcatatcaccgcaatctctgggaagatccgatcccaanaaagctcgtcattcaccccggtcggcaggcagtcacccctgggcacgcactgctcgtacggtggtggccacagtgtgacatgatcgaccatgatccaaa

SEQ ID NO: 7213 - DNA, 126 bp, Oryza sativa
  unsure (1)..(126): unsure at all n locations
agtacaagggagtcgggatgagtttttttcgggtgaagcctgatggtgttctttcagtatcacttacttcggctntggcttgatcgacatcttccccaatctcctctgcatactcagctgatgatg

SEQ ID NO: 7214 - DNA, 303 bp, Oryza sativa
ctcagcttatggctttttgtattcggattctgataatctgagtgagaatctgtgtttctttataagctgaatatattgaatgaagagctctcttaaggagtgccttaattctggtgcgcttaactaatctcttggttaggcgtattaacttcttaactttttatactggcttcacactttgaccagtgatatcttccataatatatatgattaatagctataaaagtaacatcatataaaaatgttttaatatgcaagtataatgatactatatggataccatttagcacatatatattggta

SEQ ID NO: 7215 - DNA, 442 bp, Oryza sativa
agcttgccctcctgtgccatcttctgttctgtctgcttcattacgtacctcggcttctccaaataatccggcttctccagggatctcgcccaaattcgtcacactccgagctcagctaacctggggaaggcaagttgccttttcgcggggtctgatccgaagaacagccccaatccctcccccggaatttcacagccaagccaagagaattgggggcgaaattttaggctctgataccaattttgttagctactcctaacaaagacacaagaacagttggacacgagtggatacgagaacacgatagataggtttcctctcgatccgacaggatcaagccgccgccgtcttcgcctccgccgtgttctcagttcatacctttcgccatcgttctcctctggttatacaatcttccacaacccgtgacagctgtcacagcaca

SEQ ID NO: 7216 - DNA, 446 bp, Oryza sativa
  unsure (1)..(446): unsure at all n locations
tctgttgtggtactgtgaaccaaattatttttttcaattaactttaagggtgaacttgaggttctttcattgantttcaatcgctggattctaaatcgcgaataataaaaatgtnaaccttttactcataaattatttttaagctattccattcatattctacggtttatcatccgtagctcaatcaattcatattcaaaaattgtgaggttaacctcctaaagttcacctactacttgagtttttttccctctttcttgtgttaagactcaactgtcaaataattcgtcagaaaaacccgacaaatanaaggtgtctacaatatttcttcagagcagacatatctagatcattatatttctaattaatgaatatatctattatactaccatcatatactagggtatgttaggatctctattgataatctctactcttatatcttt

SEQ ID NO: 7217 - DNA, 430 bp, Oryza sativa
  unsure (1)..(430): unsure at all n locations
agcttattagaagagtatctttgtctttcttggtaatatgtctgatgcacaccaacaggacttccctgaaccccatcatgaagggcaaaagaaggatcccatgtgtatgcatggactagctcaggtccataatcaactggttgagcaaaaatgccaggtgtgctagggtcctgcatagaaattgtagaataatatggctctttgctgatatattgaccatccacaccagcaataactccaggaacaatcgggctataagtatatccattntcataccccggaagataacacaaataagacccattatcaccttgaaccacctgaaatagattgtagagcagatataagcacagttctctagtaatatgtcaactttcacagctgcacctttcaggaatagttcacctggatgacatcaagcaatcaatta

SEQ ID NO: 7218 - DNA, 436 bp, Oryza sativa
  unsure (1)..(436): unsure at all n locations
atggtgtgggattgttctctatgtttcgacatgntccatgataataggtagncagaagtatggagtgttggatgactgactaaacacaatcatcatcccaagacctatcggtgttgccttcatcccttaaatggaggcaacactaatacacctgattggcagcatgaatgggatggagggtatacgccagaggcggttgctggttttaatatattcatttcttcttcttcttcttcaaaattcatgtgccttcccgctatttntatttntngcgggacttaaagttccaatttaatctgccctttgctttactcgatcggctcttttggtaacttttttctatgacctacattgtgccattatttaagatatactctccacactanatatagtagctagtactggatagatacatgagactcatgttcaatcatag

SEQ ID NO: 7219 - DNA, 442 bp, Oryza sativa
agcttcagtcttcgtcgggaagttgttgtgtctccgtttataaacttgagaggagtttcttctaaattaagcaatagttttatcattttgcctataactaattataaaccataacacttaattagtagcgattaaaatataatttataaataacaatttatatatctccttaatgatttaaaagaaaattctagaaaaattaactctaaatttaagttttaaaatataaattctgacatcagcttataagctgaaaaataaagtacggtcgtcacatttttccgatccattgaatcggtagaaggtccttgtacaatctgtaccggttgttcattgcgtgatcgggactttgctgatgaaatctccgcatagaaatggataacagacagatgatccataatttcctcatgacacaagcaggttaacacatgtgtcacaacgg

SEQ ID NO: 7220 - DNA, 437 bp, Oryza sativa
  unsure (1)..(437): unsure at all n locations
tcttcgcggcgctcgacgaccctgaggcgttcgactacaacaccctgacgcgcgactactccgcgtnacccgccgctggcgcccccgccgtcgctctgtccctcgcctgccaccgccgccttcgcgtnacccgccgaggccgacgctgctctgtcccctgcctgccgcccatgagagagaggaagagtgagagagaagagagaggaagagtgggaggaaaacangtgggtcccataacttttttaaaaatagaattgctgactggactgtcacgtaggctaaaaccaccgcagaatgggtcgagggggggaattcgtccggttacatagtgggggtgaagaatgtttggttntgtggtcatgggataattcaaacgaccgtgatagttctggggagtaattcgtgctttttctttagaanacgtatcggacactaat

SEQ ID NO: 7221 - DNA, 421 bp, Oryza sativa
  unsure (1)..(421): unsure at all n locations
agcttctccgcttaaactaaatactttttatctaatataagcttgcaccgcgtatataatagtactgcttagtggcacacatgatttatgcaattgatatatgaatctagtaaccattaaaatacccactactcagttaaaaacatggcgaaagggccataactcaagttattccacaagtgccttgccggatctgaaatttgttggagtttgattgagtttttagtcttggcgtacacaagattacatctgcttaattgatctcaactctgacctacttatgaagccattgttattctacttgtggntcttcctcccttatttcttcccattctttttttttgtgttctcttgttacagcatagggaagcatgagcgtcagttagattctacttgaaatcgtcagattctcttgtgatgt

SEQ ID NO: 7222 - DNA, 160 bp, Oryza sativa
  unsure (1)..(160): unsure at all n locations
atcattatattttctctcatataaatggatatatgttntctcactatattattcacatatattaaaatgaccgatataatttaanatttgtaataactctacacaactactaatgtgtaatattcatagtatattntatatacgcggtaattataattat

SEQ ID NO: 7223 - DNA, 439 bp, Oryza sativa
  unsure (1)..(439): unsure at all n locations
agcttaattaatccatcattatcaaatgtttactgtagcatcacattgtcaaatcatagcgtaattaggctcaaaagattcgtcttgtaatctacatgtaaactgtgcaattgtttttttttccacatttaatgtcccatatatgtgtccaaacatttgatgtaatgtttttgaccaaaattttttgggatctaaacaaggccttaggttttcttttaggggggacaatgaagtaattctgttagactgttaccgagcggttcagttaggtcacgaacaattcttctacttagttagcggctatactcgccacgtagaagccatgttactgtggatgagagaggggtgggagagaagttggtttcaacgggttttccatgctntgaagaaggcactgtatccttggcagataaatgtggcacacagaaccacctgcaat

SEQ ID NO: 7224 - DNA, 475 bp, Oryza sativa
  unsure (1)..(475): unsure at all n locations
atagaagtcctgctgtttaatggtaagatgttggtaggaagcttataatntggttttcatgctatggcaaataacacctaatggtcattgtagtggtcttatcctctgctttgatctgcagctggccttgacaaggcaaagcaagcactcatggaaatggtcattttacctaccaagcgaanggatttgtttactggtcttctgaggcctgctagaggtaaacatcttcgctctgataatttctggtatatacaatngttttgtaataatagccatcttatgtacatcataatataccttaaggcttcttctcttttggtccccggngaatggaaagacgatgctctgcanaagctgtgcatcagaatctgaagcaacattttctaatgtntcagcttcttcactgacatcaaagtgggtatgtgcgcatccctncatancgtacatgcttacacatatttcccactctgaaatc

SEQ ID NO: 7225 - DNA, 439 bp, Oryza sativa
  unsure (1)..(439): unsure at all n locations
agcttntaaagaatatagttaatatgtttagcaccaaaatgttaactgttaaatgatggctgaagtttcatacttcatacaatgacttgaagcatagctgatgcttgaaattatttgttcaaaaaaatttctgaagcctgaaattttatatgatatacatatccatgttaagattaggagatatagtcatgtaaacttgaaagacatgaacacaacaatccatatggaaagcgatgatgcagtagatgcccatctacagattcagtaacagaaagctcctagaaaaaacaatctcaagtgcaaattcaaagagttagatgggtgaagcacacaatcagtacacattcaagtaagctgagcagagggacaagagttgtacaagcagagcagtcatggttgtttgcttcaaccaaatcccatcaaaccagaaacaagcaca

SEQ ID NO: 7226 - DNA, 394 bp, Oryza sativa
  unsure (1)..(394): unsure at all n locations
ttattatttattttggcgcacagagctaatagcttcttacttgtcgacgatgaacatatgtctgtactgcgattcgttgtaagatccgccagtcactcatttttctgagttcgccaattattcttgtcttatcaaccgcaactaggactcatattntatagattacgttaagggctgatattgaggttttctcctaagtttattctttagcagtggtttttaaaacgctaaggacanataatttaaaatttcattaatatcattttctacggttgagtttgttatttacggcttatcagtagagatcaaacaatcaaacaatcaggtctcagtggagcgtgtttctaatgttgagagaagcaatttatcccacgtttccctccaatagcaccga

SEQ ID NO: 7227 - DNA, 448 bp, Oryza sativa
  unsure (1)..(448): unsure at all n locations
agcttgaagctagttggtgatcgtagctatggcacaagagatcgagcaggagatcgatcgatcaacggcgaggaggaggaaggcgaaggcgaaatgatgtttgtggggggaagaagagaatggcggaggaggcgaataaataaccaatgcgagatgagagagagagagagagaaagagaatgtgagatgagagaaaaagtgggagtgtggctgggtggtggggcccacgtgttgactcgtcatcgagaggagagagagagaacgagtcctctgtggtangggaagtgtgtgtgagagggagagtgggggtcgtccgatgcggngcggatggacggctgggatagtgccgacctgctgcacggtcgccatcggaggagatagtgtggtggcggtggctggatcgagctctgcttgactctcagtgaaatctcttttgggaatgtttgct

SEQ ID NO: 7228 - DNA, 432 bp, Oryza sativa
  unsure (1)..(432): unsure at all n locations
agcttnctctacagntatctcattatcacttgtacctgaanaaccaggatacgggttaagaacaaagggaaattgaagcatgtttaataaagtactccctattttaatacaaattctggttctatactggtcatgttgtaatgtagggtcgaagtactatatccaatgttcagtttccaatagtgcgtgtttgttgattagaaggaaagggacaacgtgagctacattattcgctgtctagtatccactatcatgtagcacgccgaaccatttaagctcctcttaggactccagcctccaggcatgcaggggttttcttttcagatttctgttggaagtgaattgttttaaagcaggccagagaaaaaaaggacaatagacataatccatantggtactgattggtcctgtagacctatacagaaatcaact

SEQ ID NO: 7229 - DNA, 383 bp, Oryza sativa
  unsure (1)..(383): unsure at all n locations
gtacacaactgggtcaactaatatacactcaagttcttcttatcacaactggttcaactaatgggcagaaccccacatgtttgaactagccggnggcgaattccgacgagttccaccaaacgcgggtaaaattgactgaaaatggngataaattcgaaccagccctctcacatgccacacatcgatcagcaggaaatagcccanaacagatatcaaatgtggggaggcgaataatcccgaaataatggccacgatacgaggctaatntacgttcagaacacacganattgagggagaaatactagaagcaaccgaacacgcacagcacanaacaaccagacccctaaaaaaatggaacacaaataggtagaatcattacttac

SEQ ID NO: 7230 - DNA, 431 bp, Oryza sativa
  unsure (1)..(431): unsure at all n locations
agcttggatatgcttatttgatattatttcccacttcagtnggggctggatacatggctcttagaaaacaccaaccttctggtaatgcggcctccattagtatggtgcccctggattttccaagtcaggaacttgagaaggttaattctgtcaatccacgggtagcaacagatgttccacctgaggctgatgttgatgttgatatgaagggaagttactttctcatcatgcattctttatcacatggtccatttaagcggactgttggagaactctgcaatgagctccttgaacatcagctgctacctagaagatatcatgcttggtattcacgaggtggttttcatagcggtgaagaaaatgatgatggcatatcactccctttgggatacctaaagttagttgagaggtaactatttatccgttcattc

SEQ ID NO: 7231 - DNA, 439 bp, Oryza sativa
  unsure (1)..(439): unsure at all n locations
agctnggagtttgtatagagatgtttgtttccttgnttggaggggttttttttcaatgagattagaattccttgttctagttggaatcgtggctatgggcaaccatatttttagatataaatatatgagggggtcaaaatagcaagtaagagacttttaagagaaaaaagttggtgtttactttgaagcttcaattatagtttgcgagttgagagaatatttctttagatgcactttgtaaatgcatcttgatataataaagatgatttacttctaagagttttgttaagacgttttttctaggttccgactgtcaaactagccttattggtacgggccaaccgacatgtatagtgaccggtggacggtgcaactgacggcgatagagaaaatttgtccagccggcagctcgagtggtgatacagaggcgatctgatca

SEQ ID NO: 7232 - DNA, 448 bp, Oryza sativa
  unsure (1)..(448): unsure at all n locations
tgacctttattagaagattcttctttatatatntatgggatcgaaatactttcctagtatatgaatgccaacttttcattatgttcatgttatactgaatatagtgctagggtatctgggagatgctttggtgcgggtataatgtttgcgtatgcaattatactctatgtcatgacgatgatattagagtagtatctggtagtttagacgtggtgtctagattatgggatatcatttacttggggtatatgctgcggatgagacgtgggcccactactacaaaaaggcaaataggtgtcgccactatatgtgccggcacacttaaaaccggcacctataatgtctttgccacccatacgcccacccncatgctccacatattcaaaaaccggcacctttatatccaaataggtgcnncggttcatttaaaccggacctatacctgtgt

SEQ ID NO: 7233 - DNA, 429 bp, Oryza sativa
  unsure (1)..(429): unsure at all n locations
ngcttattagcaaactaactaccctctgtgacaggtatctgtagatgccgctagaaaggtggcatcccatggaaagggaggcgaggtgttcaccctggtggagctggcggcggcgaccaacaacttctccgctgacagagagattggttatggcaacttcggcactgtgtacaatggaacctttcccgactggagaaaggtggccatcaagcactaaggcgcggactcagtgcaggggcaccgggacgcgttcctatcagaggtcgacatccttcccacccttcgccacaggcaacatatacgcctcttgggctggtgcgtggccgataaggagaactcgctcgtctacgagtacatgaagaacggctcgcttcacgaccatctgcacggaggtgctccatcgtcttcatcacccttctcggtgacaac

SEQ ID NO: 7234 - DNA, 254 bp, Oryza sativa
  unsure (1)..(254): unsure at all n locations
aagcttncccttgcgagtcgtctcggtggcgagccggtggcagtggcgacatggattgtcttctgttgagcagcacacggtgcggcgccagctggagccctggaaagacgagaatatccctctgcaaagaatattttatggagcaaaatatccctctacaattctactaccattgagtgtgacgggagtagaaatagatctgaaccctatgatccaatgagatcaaccgctcagattatcttctactaccagtt

SEQ ID NO: 7235 - DNA, 412 bp, Oryza sativa
  unsure (1)..(412): unsure at all n locations
agcttggttggcatagattgatagatatgcntgtgttgggctgtttttgcctgggatccagtctattctctatgtaaactatgggcaggatttccatctaaatttcggcccaagtactatttttcacagttntagcggagggcattctctatagtctatacatacccatccagaatttaatcatataaaagcctagtagtttgagaaatgattcgattgagcaaaaggctagtcgagcctagcaacaaatggaatggacaaaaggcttgagcatttaacatgtagccattatataccatctcgtgctgcttgccacgtcggatcatgatggcttgcactgganaggccagtctagcctttatgccatttgagtgccaagcagcacacacacatggcactttgatgagtcttt

SEQ ID NO: 7236 - DNA, 209 bp, Oryza sativa
tcatcttgatgcataccctaatgtattgcacaatcattgcaccggacttcatgagctcattcacagagacatagaacaggtcgcccatagccctgcagactacgatgagtaaccatataacacaagactgcataatgcatatactagtcctcctttcataaactaacaggactctaacatatcgtacaacattgattagtctcttcttg

SEQ ID NO: 7237 - DNA, 405 bp, Oryza sativa
  unsure (1)..(405): unsure at all n locations
agcttgntcaaagccttaaggatcgacttctatcatatgntgaaggaatgcacgatgaatattgtgaatgggcacgtgctgaaactcaccgtctttctcaagcgggtattgccctccatcttcatactcatttgcactgttggtatttttgataagcatggacatttcattcaacttttgctgcttgatgtacagtatatacactcataccactgaattttctattatgccttatactgaatcgctgattgcattcgtcttaattccttgcgggctgatatgaattgatttttcaactttctgtgaggctatgctccacactattggctacatttatgctcgtcaagcagcaaaagagccttgaaaaagcaaaatgtatttgggtgtgccgtacattcctgaatg

SEQ ID NO: 7238 - DNA, 492 bp, Oryza sativa
  unsure (1)..(492): unsure at all n locations
actataanactcagcttcgtttaaatctgatataaagtggtaagacctganagcgttatcccttctctatttagcgacttgganaatggcanatgagcacacaaaatgatnggtgcttagaaaccacatttggagatcaacatattntgttgccagggtttacaggataaacttcagataactgttcatcagccaaaaagacaatgaaaggaagaggtcaatggtgtaaatcatagaaatcaatcacacatcacaccttgcattaatttccagatggaacacattacacatcagtatcactatatgcacagcacaatatagtagattcatttcacagatctcgcactgaaattcatttcagatacacaatttagacgatgtagtagcaaacaaatgccacttataatatactcatgagaaacaaacaaatacacacacgaacgcacacaaaagaatggtgggcacattncaatatagcatctgcatcgatct

SEQ ID NO: 7239 - DNA, 427 bp, Oryza sativa
agcctgtcaatttcataaaaactcactttgtaccagcgcaagcgttcctaactattcctctcacttggccgatcttatgctgggggctcgacatacttggaccattcccaccaggacaagggaagcgacctccacgggggaaatcaaggccgacagtgccatcaaattcattaaagagatattctacagatatggattgcctcaccgcatcataacggacaacggctcccaggtcatcagtgccaacttccaagattactgcattaagctgggagtcaagatctgcttctcttctgtttctcaccctcagagcaatggacaggtcaagagggcaaatggcatagtactacaaggaaataagacccctgtctacgacagactgatgtctcatgacaagaagtgggttgaaaaactttcctctgtacta

SEQ ID NO: 7240 - DNA, 421 bp, Oryza sativa
  unsure (1)..(421): unsure at all n locations
catcataacggaagtggaagaagttggacgtcctattgcctcggtcgaagccgccaagaactatgtacgtcacagcggttgggttgtgcgggataacgtgcctgtcagtacggtgtactggcgaagaacaagggcacgcggagatcatgagagctttgttccagattcngagaaagagatgctgtggaccacaatgctcgagacattcacccttcctgcgggtacagaggacaaagtgaaaaggtggactctgaagaaaatggcagaacagtttcagagcttcatggagatctgtaccagaagtatatactgaaggggcagacaccgaacttcgacacattcctcaagctaagggatcactgggacgaagttcgtgcatataatacaggtgaacaagggcaggcgatgatgggaagaaaca

SEQ ID NO: 7241 - DNA, 443 bp, Oryza sativa
  unsure (1)..(443): unsure at all n locations
agcttctaaaccagtccagacaaaacaatctaattatatttcttaagaaaagatcgtaggaacccctcaagttataaaaaaaaccccctgttttatggataattctagatatatggctgctttcagtatatttgttattatgtttccattatattttgataaaaaaagatgggtctcaacttttgtagccagctcatgaatttacatgggtaggaagaccacataacactaaatacattttggcacgttttcgagaccaaaaaggtgctgcaggtactacaatgatgtataatttaatctgttaaatacgctatatccatgtgctaaatcaatcccagataaataaagtaccaaattttcttgtttacatgttgatacttgcacattccaagcaaagttgggggctcttgaatcattaaataaatntcagtatgcattgcctg

SEQ ID NO: 7242 - DNA, 131 bp, Oryza sativa
cacctcattgaaacagagaaaactggaaggtctctgtgtatctgccaacctatgccatgttaggttgagacacaagggatacacacatggctcactcacctctcatgagcacacaatcaaaatctcaagta

SEQ ID NO: 7243 - DNA, 410 bp, Oryza sativa
  unsure (1)..(410): unsure at all n locations
agctttctctanntttttttttgagaatttcttgtaaaacattagatcttggctggatcacagcgacatgggatcccaacaagcgagagaggaggacgctgatccgccgccgccgccgacgacgacgacgaggctgccctttctattcaacctgtcgcgcggggagctagtacggcggcagcgtttgatcgacgaggcggtggaacggctgcgccgctgcggctgcgacattcgtcgctgcaggggaggcggngtcccatgccctgaacggcggtacgtcttcgatctcaattctcatgccatgtttgcgcctccattgatcatcgtctacagctagctcgtcacgatcgatctgcaagttttccctatgttgattgattggttagatctcaagccggttggctcgggcc

SEQ ID NO: 7244 - DNA, 368 bp, Oryza sativa
tcagcttcacacccttaagcctctctgtcaagcattcttctgcttgggtattttctgtatcatgcaaaaacataaagtttgatgggaaaacattgatgtagttgatgtcactaaaactttcagtagtaacatgttaggtaatgataacacaaaaaaaaaaagccaaaatggcttgctccatatgattttcatatcccaaaaacatgcacttgcaatttatcatgcatgaataatcctgcacgtggtgtagtggtatcgggtgctcctcaggcatgcttgaatacattctatgatctatgtgctagttaaactttacataaatggtggtgctgagtggcatgaaaaattgtaaaaatcaatgatggatc

SEQ ID NO: 7245 - DNA, 427 bp, Oryza sativa
  unsure (1)..(427): unsure at all n locations
agcttggctccaataaagaccacaagataggccgatagctccccaccacttgtcaaaggcaagaagcgtgaacgcggcaaggggaaggtcggggagttggcgccggagccaaaaaggggcaaggctgcaacgtcgatgccgctgagcaaagcggagaaggccgtgagggcgccagcccaatttgagctaggcatgccattggtggaggacaatgtgttagccatgatgggtattgcttgccgagagctacataagcaatacatggagctaagcaatggcaagcggaaaatgagggagtcatccatagttggacatcacgaccaccagccgttcctatcgtcgcctgcctatataactataggctttgatgacctctntgaccttttcaggatccgaaagttggacactggtcttctaaaatgctaca

SEQ ID NO: 7246 - DNA, 428 bp, Oryza sativa
acttttgaaaattgctaaatttttaataactttcctacttcgtattatattatttttagctaatggaattaatggaaaattaattatataattttatctttttgaccaaaggtcactgcaattttatttcattaatattattattatgattatgaatcctttatatttttttcccaccaatatacatgattaaaattacctttacccgttacaacgcacgggcatcattgctagttaattaaataaaacattcctctttgcgatggatgactccatcccaaggaaatctgggtgctctttctaagaagcacagatgacataactcgaactcttctgagaattttgccctggcatcaatgaataccttgacttcttctttttctagaaaaattatccaaaacctataataatattgcacaaataaatgg

SEQ ID NO: 7247 - DNA, 382 bp, Oryza sativa
  unsure (1)..(382): unsure at all n locations
acatgacataccactgaacgcgcacgcgtgtggtgtctctaaccatntgngacttaacctagaggccatatgggaaaaatcccccggtccgatgcagataggtagcgtgccaacgtggccattgccaagcgctgcccctgagccaagagttcatttgcttattctcctattntattcccctacgtttatttcaccgcgtcgagcttttactcgtagtttattacccacgtctattttttgcatcgtaatcgtactanattagacgtaacgtaccgcgtctcgaggacccataacgaacctaaataacttcatccttttacacaccagaaccacattagacttaggattgtttggctagtagctaacactggccaaccacaat

SEQ ID NO: 7248 - DNA, 448 bp, Oryza sativa
  unsure (1)..(448): unsure at all n locations
agcttaagtatataatagagtaaattgtatctgtggtacacgaactcggtaggggaatgtaatctagtacatgaacatgtaaaatgctcgnttcggtacacgaacttatattgcacgtgcgaacgatcagtcttggaaaagtactaaagattgtgagctacagcataatcagtacagatatgaacaaaaaaaaagaactattttgatgatcaaacaagttgatcagcatgacaacatgtcataattctaatggatactacaagtttatgtgctgaaacaattggtttcaaatcacatactcatacggtatgttctaaggtgtggttacagaagctatactgtcaaaaaatgatgatcctaaataaactcctaacgtgatccacaactcagactatttttattaaggctcagtagcgtccccgttaatccaatgcattgtgctcataaa

SEQ ID NO: 7249 - DNA, 70 bp, Oryza sativa
agcgcttcaaggaggaaagtatatacacagtttgaggatcgaccccggaacagagaggagcataataccg

SEQ ID NO: 7250 - DNA, 456 bp, Oryza sativa
  unsure (1)..(456): unsure at all n locations
ggatccttaagtcacctgcngcatgcaagctttgagctactccaattataggctatcactctgtcaaatttatcaccaaagaaaatcattgccctgtctagttcgcgaaaagaaaatatttaactgtcacatcagacgtttaaccagatattataaggggttttcggacacaaatgaaaaaaaataatttcataactcgcttagaaaccgcgagacgaatttattaagcctaattaatccatcattagcacatatgggttactgtagcacttatggctaatcatggactaattaggcttaaaagattcgtctcgcaattttcatgtaaactgtgcaattaatttttctttttatctatggttaatgctctatgcatatgtccaaatattcgatgtgatgtttttggggaanaaattgagaactaaacaaggcccatatctttgtaacgatgaaatg

SEQ ID NO: 7251 - DNA, 327 bp, Oryza sativa
  unsure (1)..(327): unsure at all n locations
gatcaactcatcattgcggtgcgtgggcacttccacttccacgtgggcctcggcccaacacggtccaccggccgaccatgaatgganagttntcccgcctccgaagcgagcgttcttgccgagtccaaattcaaaatcataaaatccaaccgaaggacaactgtataaagtacttccgcaccagtatccccaatcaaatgttcagtactacagcattcatacgccctggagcgaaagaatttctcgaaagaattcacaactcgaatcgctgattattcttgcacatgagacattcgcgacccatcagtactactagtactgtagaat

SEQ ID NO: 7252 - DNA, 443 bp, Oryza sativa
agcttaactcgccacaatgcagagtgtacattactactggtgtcccagtgttggagctgaacatcataagcacacagttctcctgacatgtgtggactctgtatacttttcattctgcatgtcagcaatgctgtttagatataatgtcgagctagatgtaaatgaatgtaccaccctgaaaatacaacttgcgttggaagttcgaatgagcggaaggctcacctagagagagaatatgggtacatgtatagaacaaacagcaaaacctggtatttaacctgttataatgtcagatgcccagccataattgtgtattaacgttgctggaaagaagaataaagcaacatcgttctgttctgatctcaagcatttgtttttgtttgggtgattcacatgatatttgtctttttgttatttctgaacgaagttgagtttgaacttga

SEQ ID NO: 7253 - DNA, 164 bp, Oryza sativa
tcctcacaccttatcaatccttggaaatacttatatgactcgttctcttccaatggcagcgtaacctcaagtgacctctttaccttgaggttcgttcaccatcaaggttcattgtctcgacgtagcaaatgccatcctcataactcgaagacagcagtagtaaa

SEQ ID NO: 7254 - DNA, 444 bp, Oryza sativa
  unsure (1)..(444): unsure at all n locations
agcttgaacctttgctcgtcccaagtatatgactaaagggaaacaaaacttgtgtgttgattaagagttgctaccatgctatatatctagaatgtacaagtgcattgtttgggtactctctctcattgtaaaggaaatatgcatggtggcttacccttacacctaaaatttgtggaacacacacttctcaccaccttagaagattgagagacagaacatatcatagagtaccattttctttttccttgctagttttcattctggaaggttttcaaaaattttgcaaataaaaccaagttcctcaagtgattctcctgatcactcaaaagtgtttagaaatttattcctcaccaaagatattgccattttagtcctatactaagattgaatatgtggagcttggntaggatcaaatgaggcatacttggattcacatatatcact

SEQ ID NO: 7255 - DNA, 523 bp, Oryza sativa
tactcagcttttcgtcactacatcaggggtatctggtccatgaactctagtacccatgctctctgatcgtaacgttatcagcagcgagaggagttctggtgttctcgacggttttcagagagaactggattatagacctcatgtcatctcaaccaggtttccataatatcacacacacatcgcgcgataatcaagatatttacctgcgcctcggtaaatatcacatttgcccttctcgtcataagtgtgcctccttcgcgaggacgtacataagaaccacctttgctagataactttaatcagttaggtgtatgcccatatgagaattgcgggtgtgcccatacgagaattgcggtcgacacgtatgttcttcacatgtacttggcaatcttatgttggttgaacatactagccacttgaaataaccattctaccgaatgttccatctagttcatatatttatgcattactaggctggtaacaaactacattattagttgctttgtcaagttgcttcaatatg

SEQ ID NO: 7256 - DNA, 311 bp, Oryza sativa
agcttgggctgttggtcggaacgaacattgttcacgagcgaatagaggaataagttcacttcatgaccctcaaaagtgatcgaaatctaatccatgaccctaaaccacaaaaccagatatctcgaccaccaaactcttaaaaccggtgcggtttgactccctttgccggtttagaggggcggttcttatgacggggcgtctacttgacagaattgaatcaggcatcattccgcagggcgttgatgtggcctttctgtgtattagaactataaaatttctggggacacctccgtcatttcactcacaaaaat

SEQ ID NO: 7257 - DNA, 129 bp, Oryza sativa
ccacaccagtgggagccattgtgtgcttgatagtggatgcactcaacacatgatcggtgatagggctatgttcaccacatttgaaatatgagtgaatgaacacgagaaagtgacattggagacaatagc

SEQ ID NO: 7258 - DNA, 445 bp, Oryza sativa
tgcagcatgcagctttgcgagaaagttattctgtttgaaacgaagtcacaaatcttgtaattttgaataactgtgttcttcagaatgaaagaaattataaaactacatgctaaattatttattgcatcgtgattaaataaaacacgtttataaaactttagctggtaaatgagccattattacagtaatagatgtatagtactaataacactggaataaatttttaatgagaaccattaaaagagattatgaagcgcatgtgccattagtttggtttaattaaaagagaaagggaggataacagctctactcttccaatattattagagggcttctatggataaccatttggcataacctaaggtcaaagatgctctgataccatcttgtcactcctcggatttctatcctaaattccacacgcttacatgtgtgtgaaccctcg

SEQ ID NO: 7259 - DNA, 435 bp, Oryza sativa
agcttctaagttcgaatcgaacttaaaacatctaatattctccgcctcggagtcgtgtctctcctctggcggcgatagagtaaggggagagaaataataagggaaataaaagggaaattgttaaaaacaaaaaacgtggcttatgtttctagtggattttgctcctaacctacatgtaagttcgatttcgcaggtaaatgggcaaagcaggcatgggtagtgattacccatacccatgcccatttacccatcgggcatagcttttgacccaataagatactcatgggtataaaatggagaacaaacccaaccctaatggggtttttacccacgggtaaacggtcaaacaggcacaaatgtcatcactattcactcacaagcccaattgcagtgtccagtctgatgtcaattgtgacgtgaaagtgcgtcagcaac

SEQ ID NO: 7260 - DNA, 470 bp, Oryza sativa
  unsure (1)..(470): unsure at all n locations
ctcagctctgacattcaatgacctattctgtaataaaaggtatcctatttcaagatttcactaacttgcagngaattatntatttgttcttccatatatgcagatgtactgtcctagtgcaccgatctacacaaagcgtggtcagttagataaattaagttcagtgtgtgtgcacaagcatctcatgactgtacgcatgacaggattcgatagtacacgtggacagcttgaactggcgttccaaattcttatgagtgcacccaatcttgaccgtctgatcgttgatccgatggtcagggttgcatggagcctgcgccttgattggtcggagcaagctgatctgatgctcgttcgaaggatgatggccgagaaccgccttctcagaagcgagtaccgtcacatgaatacncttctatngaaaaggcactcnttttgtagtttcaaatttggtgcatatataaatatcaata

SEQ ID NO: 7261 - DNA, 472 bp, Oryza sativa
  unsure (1)..(472): unsure at all n locations
ctcgacccgggatcttaagtcacctgcggcatgcaactggtttgacaagctgcttattattgaaacaagctatagcgcttactccgggaaattatattgaagcacagaactggttgaagattacgaagcgctntgaatttgaataagaccactctcctttttcagaaaatgggggtttggttgttgatccattaatcaaataaattaggtcggaagatcgaatcaagaatttcattatatctctttcctctgccttctattttatattatatttcataaggataaacgatagggtctagaatagaagtaataaagcgaataaaaaggggcaatataaatattgctaatatatcaggaccatcttattaataattctaatgagttatcttggaatttggaatcgaataaaacaatctatattatgctcaaggaaagttgatatagatagggacttatactcttaacaaaaata

SEQ ID NO: 7262 - DNA, 536 bp, Oryza sativa
  unsure (1)..(536): unsure at all n locations
tctgtgcatgccacgttcgagagatgtagcactatggagtaataggatgtattcatgtatgagcaagtangtcctttatgaataggcagagactaanatgtcaaaaagttgcatagtttggttctatcccaatacgtcaacaatatttacaactggagggaggacatattaactattatattaactataagctcatgggtgtctctgctactcccattattccaaaatataagacacacctatttttcttagatgtgcatgcatatattctactgggtgcatgcattgtattattangatgattcanataatgaggtgataataattgtttcttggtttttggattaacaggtggtatatcttatatttntgaaatacngagtataaaactttcttagagcacgtttaatagtatagccaaatgttagctttcaaatattcatagctaatctaatagtccattcatataatatgtacatacagaaatatactacaccattaatatccggtcccacctctcatacacacgccacgtc

SEQ ID NO: 7263 - DNA, 147 bp, Oryza sativa
agcttgcaccgtgtacacctactgggttactcttatacatcttcagcctgcctactgttagtaaaaatggttgtgccaacacagtttgggatgtcctttcctgctatccgagtgttggtgaatgaacagttggaatgctaccgtttt

SEQ ID NO: 7264 - DNA, 180 bp, Oryza sativa
ggaccgatacaatggaaccgtataaaggttctttttgaaaatgcatgatggaaggaatcctggccattggatctatcaccaacggctagatcttcagtacaatgccattcctccccgacgtcgtgttccctatcggagccggcgagccagtcactgctcaaccatatctgcaccaccacc

SEQ ID NO: 7265 - DNA, 444 bp, Oryza sativa
  unsure (1)..(444): unsure at all n locations
agcttgcaccttctacacctactggatacgcttctgcatcttcagccgcactcctttcagcaaagaaggatgtgccaacacagtttgggatgcccattcctgcagtctgtggttggttgaagcagcattggaatggtaacttataagatgttagcaagccaatgatgcctcctgcacgattaatatccactgggcaacgaagtgagtgttcttctgttggtcgtcttaactacatcaagaccatggagcgagagggtggtgatgggatgtcatcatcacaaataccacctangctgacacagcatcatggatcatgcagttcagcttctgcgaagatttcatgcggtgaaaatgattcttgtgactcgcactctattcatgaacaacaagatctgacctcacaaatgcatgaatctaagattgagcaatctgctttacttatgg

SEQ ID NO: 7266 - DNA, 217 bp, Oryza sativa
  unsure (1)..(217): unsure at all n locations
acaaaatgcacgggtatttgtaaaaaaaatatggaccgttagcaatggtagcggtaataagggttcctttttgaaaaatgcacgagggaaggaatcctggccattggatctatcaccaacggttagatctccagtacaagccattttccccgccgcggcgncttccccaccggagccggtgaagccgtcgcttcccattgtacacgcaccaccacca

SEQ ID NO: 7267 - DNA, 284 bp, Oryza sativa
  unsure (1)..(284): unsure at all n locations
actatgatactcagcttcttacttggtgcggnggtacgagtgtcttctcacttcgcgacttctatcagtcacttgagttatacactctccctagcccgcagccttgtcgtcggagaattcttctcggaagataaggctcttagaccttagacttgccttagttgaataagcactgatccaagcccccagccgtgaagttggaaaaatccatttccgattacacagcttggttaatacgcacggcgagaactcttacacgaccagatcttacatggtctttcatc

SEQ ID NO: 7268 - DNA, 416 bp, Oryza sativa
agcttgccctactgatcttttttattgtacttttaaagtaagggtcaagctatcgacaatatcgttaaatagctgatcttactgtgatgaaccaaatatttgcgccaaaaaatagacaagagtaattaccacaaaattctatgttttggggcacatgtaattcaaaatcccaaaacgctagttgtcagttttctattaaaggaaacccctgtttctatagtaaatttatgcaatatacccggtccggtcaaaatattggttatgtaggataataatgaaagaagcccgcgctgatgcgcgggcattttgcttattgatgattaagagaatgctagcatatataacgtaaaacgttgttgttgtgtgataatttcccacgctattgatgcagcaaactgaaacatgtcgctaatgtt

SEQ ID NO: 7269 - DNA, 413 bp, Oryza sativa
  unsure (1)..(413): unsure at all n locations
catggaaacggagcgatccattagcgtgagattaattaagtattatctcattttgtcacaaatggaacaatatgagttttctatacaactttagtatagaaactctntacaaaaacacaccgaaatagcagcttgaaaagcgtgcgcgtgataatcgagacatgagagttcccaacctagactctcgaacgcagggcgttgttaaactgtgtttggaaggaggtgttggttagggaaccctcctctccgccacatataactacacttcttagcatataagtaattaagtattagttaatagttgagaaattgattcatatgatctntatagcaactgttctatagagacttttgttaaatacacaccgtagaataagttggaaaatgtacatacgagaataacgagagataag

SEQ ID NO: 7270 - DNA, 442 bp, Oryza sativa
agcttgcatgatgagctaaggtgcagtacaaattataagtatgcatcaaattaaaagctgaaagtatcaggactctaccagtgaaggactttcataggtttcgcccaatccaattttccttaatccgccagcagccgttaatgcaacttcaccagatgcgcctgagaagacattgcactggacctgtatgagcaaaggtgttcaatcagttagtttggtcattcatgtgaagttttgagtcaaactaaaacatactctctccattcacgtttacttgtcacttttaaccatggcacataaatttgtgtaatcatttgttttcatgttaaatgaccatattaccctccacaactaactagataattaatatggataaaaatggaaaatgtgcattacgaaacgtgaagcgacaagtatttgtaactagctatatcatgaatat

SEQ ID NO: 7271 - DNA, 475 bp, Oryza sativa
  unsure (1)..(475): unsure at all n locations
ctatgactatatgaataaacgcaacttcacaagttattctcattttangcgataccaaaggatcaccagttcatcaggcagagaccctcgttaaacaactctctcttcgatacctgtttatcacctcacagtcctacatcaaaacaaatggctttacaagaagatcgattgtctcatgcgggcttttctttggaagggagacgaccctgaaaaagtgagcangcagcagccttgttaactggcagaatgtntgcaaaccaaaatccttangaaggcttagtattcttaactcggaaaagttctcgcgtgcattgcgtctgcgttggctctggtttggctggaaagatgaacacaggccttggcaaggaatgggacttccttgtaatgatctggatagagtgctgttcagagctggaacagtgattactcctggggatggaagaaaatagctcctttggtctgataactggctact

SEQ ID NO: 7272 - DNA, 446 bp, Oryza sativa
ttaagtcacctgcggcatgcagcttattgccttccttgcacttgcctgtcatttaagagggtgcaacaaaaacgccttgaatgtgaattccctactgctaaatcttaaagttgagttccaaattcgctcgacaagtcctcttctacgttcccgctctcatgaaaatcagagcaactgcctggcatcatctactcctagtaagggtagaagctcatcacaacatttacgcgatgtggacaactccgcttttcatgatccacctgttccaaatcggtggcagcacgactaggaatgaattcaccacatgttggcctggagattgaattcacaaacgcctttgattcatttattactggtaggcatcacaatacaaacatttcaactgtccatgaaggacttacagatctacaaagaccttttatgcttcatatgtttgccattgagct

SEQ ID NO: 7273 - DNA, 534 bp, Oryza sativa
  unsure (1)..(534): unsure at all n locations
ctcagctgctgcctagcccgcctanctagctaagcgcgagccacacaaacacaatatattatattgtcccgcacggcacggtcgagcctgcagccagcaaagcangctcgaggagaagaatatcgccagtgcgtcacctctcactaccgatcgagaactacatgattgactgactggctggatgtaattgacgtgagaaagatctctccctgtctgtctctcatcacgtactagctaggcctttattccagctcggctttccggcnaatggtcccggatttcgcgacttttatcagggaggagcagcttaatctcgcgatggttttggacggttcgtatgggtggcacctgcaggggacattccgttccgatccacttccggggcgggccgctcctacattcggattccgattctgattccttcgatcgccctgcttctctctgcactctgctgaatggcgttgctttggagntggacattcactgaactgaanaccgtgtgctggaaacacattgggtgttccttgttaattc

SEQ ID NO: 7274 - DNA, 408 bp, Oryza sativa
ttaatgtgtgcttttttatttccgtcggataatcctacatgaacagagtcttagggatattcttattatcttgacaagaaaaagtttaccatctcatacacactgatgttggatgaaaagcagcttatcaacgaactacaggaattcctccagaacaagaggtacacatgctagtcatcaaactgccgtggctagcaactctaggcattaacccatgcattttgcatgggctatttatgtcatcattatctgcataattatataaatagtaaattacaaatctggtgcaaacagtttgttgtgaacgtggtgcagcacacattagatcatagatagtcatgttcaaagaaaaaaaaaagcgtctttggcaactctttattagagatggccctctaaaatggagacagt

SEQ ID NO: 7275 - DNA, 468 bp, Oryza sativa
  unsure (1)..(468): unsure at all n locations
ctcagctatatatactcgtaatatnactgaantggaaggagctggtaaagagagtttttactctcatatagcctcgggaagctcttgagagcaatgaatcgcagtctgaataaaggaacagtggcataagtaagcaagttgttggtttagctcttatcgcatgcaatgcggagattaatggttgtaaatctgatagtgaaaaaaaacttagctatgattaattataaatgttgtttctcaatttgctaagaaacttataacatgttgtaatttacttaataagagtgatcacactattgaaattctataagctgaaattgatagattaaaatctatggaccctaatgatgatgattgtanatcttgtggaagtttattttctacaaatactgttttgtaagacgtcaatcttgctaattgcttgacattggaatatgtgagtgaaacaaccaacaatgttgagtcttc

SEQ ID NO: 7276 - DNA, 415 bp, Oryza sativa
  unsure (1)..(415): unsure at all n locations
atgttgctcttatattatttctgaattgncgtttagccctttatttatttcttacagtaagtaacttaatggacaggcaaaaagcagagagctgagtacttgaagcagcgggtaagtccccgtagttctgcccatgctgattacatcaagcatgcagaatttctttcaacaaagctggcaaggtatggtgtcacacagttgatttttggaatattattttcttgcatttgcacatgtgaaagttttaactaattggcaatgttttttccattttgttgtacttcagatgctggaaaagatttttgaaatctaacaagacaacatatgcactggttcaagcttatgacgccttgtgaattaatgagatgtctgtcaaatctatgcccattgaaaatttagctatgttgatggaatc

SEQ ID NO: 7277 - DNA, 479 bp, Oryza sativa
  unsure (1)..(479): unsure at all n locations
ctattctcataaatgagtcctgatagatcctatgagttcttgagctatcangctggatgaaatcaaactatggtttacttactagagaggaaacacgaagggatatggtangggatctcaccagatatatggccttcgcggcgaagtgcagcggcagaggttcgtagacgtcgccggctcgccggaggggaagcacaagcgcccncctttctcactgtcacagtggcacagtcccacttctccgagggtaaagaggaggacaatttgtgccgaaaccgtaccgggctcaattctatggcccaactgataattgcacccttatattttattttcatttttgtggaatacaggattagagatgagtgtgaccttgaccccgggtacacttncacagtgaactactccctccattccaaanntttttacatataggttnttttagttattcctaaatgatctatatnattgtngtcatttat

SEQ ID NO: 7278 - DNA, 448 bp, Oryza sativa
  unsure (1)..(448): unsure at all n locations
agcttatttatctattgagtagagggcctattatataatttgccaaatcaccattgcgggtgatgtagcttcacacctccatccctgaattcctcaaccggccacatatatatttgaactcctgattcgcaagcgcgttcagtgtgaatggttctcacgctttccattttaggcgtctcccagtgagtgatatccgttttctgttccgcataaaacaatctgtttacgcgaacgtatgtgtggtcattccactgacagagcgctgggctttataggtagagggctacatgagctttcttctttataggttttatcaattttggttcaaaaagaaatctttgagtagataaaattttcaagaaaaggaagtttttcccatggatcattggattcttttctctctattgacagntttaccatattaaagtttgtatccataataactatg

SEQ ID NO: 7279 - DNA, 244 bp, Oryza sativa
  unsure (1)..(244): unsure at all n locations
tactaactggtaatcctgcatgtagtacttcgacaacacaaaggatgactccttttatcagtctcggcaccacctgagccggcggtgagaacctcagacgacaccggcgccgccccacgccttcttctgtgcttcaaagacacaagacacgcctgcttactcgctatttcagagaagaggaaatntcaccaaacgacatgttgtattgttcaaggagtagacaaccacacacatttggacactt

SEQ ID NO: 7280 - DNA, 442 bp, Oryza sativa
caagctttcacatggggagatcatccgctaccttgtcaaccaaagcatgcaagtcggtcttagacagtttcttaacatttaaaggaagacccaaataggaacaaggaaaatccttgatctcacacggtaacacattcacgatcacttccaactcttcttcattgcacctaattggagttattgagctcttttgcatgttggtcattaggcccaatgcatggacaaaaatatccaaaacattcttgataatggagagatcattcaccgttggtcttgaaaacataataacatcatcggcataaaaagaacacctttgctacatttgccgaacatcaagagtctgaatccaaccctcccgagctgcccggtccataagagagttgagaacgtccataacaagaataaactttcattgcaaaactttttgtatagaaacttttat

SEQ ID NO: 7281 - DNA, 337 bp, Oryza sativa
tcgcccttaaactcgctatggtcagacttttaggaagacatacgtaaatatttttggccgtttaaatttacagctaaaaaaaaaaaaaaacttaatctaaataagcataaatcaaataaatctctttagaaggctgatggattttaatccgaacacatgcacaattgcagtgcctaaaaacatatgtcagacttatatcaagttccgaaagttttccatgctgttacagagatgaaccctaattgacgtaatacttggtgatagggacacccacctccctaagactaactgtcctaatggctctccacgccaaaaatcgggccgatcatgaaaaagt

SEQ ID NO: 7282 - DNA, 438 bp, Oryza sativa
  unsure (1)..(438): unsure at all n locations
agcttgggacgctcttgctgaatcacattgatgcttntgctcgaattcgcggattcctgttcttaaggtaaggttgcatttttggcaacagagcaaaaggggcgatccagcttgtcatcgatatgagggctgcctcatcagcttcacagacaaaacgcttatcttgtgaagatttcagaaatagctgcactaactgagaacaaaattggcagaaaagatgttttgagaaatagcgtatttagtacacgaaaaagaactagtgtaattgtgaatggaagtttgagaactgagaaacacacaccagtggatcaattgagtcaaccattaagtcaccgtatgccttgaaaatatcagcgcaggtcatgagtgcgtgtttacagacagcactccttggattcttgacagattcacaataagaggaactagaggctctctgta

SEQ ID NO: 7283 - DNA, 312 bp, Oryza sativa
  unsure (1)..(312): unsure at all n locations
tcttggattaaaatgggacctgcttgatcagcatcaccagtgtaaatattntctccattagttgcctggttggtttctctcctaattaatcggcagctagaaaattaagcagcaccaactatgagaacccaaatgcaacaactacatctttcctaaaatatagctatttctaacatagtaacttatcctatgataaaattatttcttcgtctaccattcacataacccatcataaccattcgctatatctaatttggtttcttcaccaaatataacccttattcaatcatttgtatctatttttttaatatc

SEQ ID NO: 7284 - DNA, 435 bp, Oryza sativa
  unsure (1)..(435): unsure at all n locations
agcttcaccactgctcaacgttctaaatttgctcattntagtttagaaaaaaaaggttaaaaatgagaaaatgaaaatacagaccaaaatgttttttattttatattcggctttacttttgcgcagatatgtttgagcagcatgtagaaacatagaactacattgtattttggactactctgcttatgaaagttgcatactttttcactttggacccgtcttttctttttcttcaccttgaactctttctgaacttctcattgaattcaaacacacttacgttgccaacactggttgtggataatgctgcaaaacaaaagagaagaggatgatttcatcatggtatgattaagatgcagattccatatcggtttttgttagcatgtttntaaaccgttaaacggtgtgttttgtacaaaactttctatataaaag

SEQ ID NO: 7285 - DNA, 149 bp, Oryza sativa
ctcagctttatattttaataatctaattcataaaattatatgttcatccgaagggttaaatggtgtattttatagaaattatacggtcaactaacggtcaactgacgggaggggtatggaagggatcaaaatcgaattttggatgtata

SEQ ID NO: 7286 - DNA, 435 bp, Oryza sativa
  unsure (1)..(435): unsure at all n locations
agcttaatatcttagtcctcactctgcataatagattggaaatggaaccagctgatatacaagaataagacatgaaattgattatgttntttctattctataaaaagaatcattttggcaaatccaaattgaccaaattaaggcatatatatgcacccaatagaataagatttctgtagtttataatttgggttaattagatccatgctactacaaattntaaggtttgaaatatgtcatcactattcacctatctgaaaccatgtcattataatttcatatatatttgagatatgccactatttacccttttcattcattttctaatttttgttgaccaaattgtccctctctccttccttcccttcctttttctctaatgttcatccccatcaagtagcagacgacggcgcacaacaccggcagttcgatgac

SEQ ID NO: 7287 - DNA, 375 bp, Oryza sativa
  unsure (1)..(375): unsure at all n locations
ttcgtggacanacagagtcacaatggctgatgaaacgaanattaacgcgatcaaccatcaccacctgatcgacatctcaccggagttgggtggcgcgaccgccatcgatggcccanaggagatgaaggagttgggcatcgtcgatggcgcagtggagatgaaggaattgggcgtcgctgccgccgtccatggcgcangggagatgaaggagttgggcggcacggcctccatcgatggcgccgcggacaagaaggagctgggcggcgcggtcgccggcgccggcggcgcancggagacaaagtggctgcgcaagctgacgtcgtcgagcgtcaacaccgccgtgctgagagacctcatcgcgcggacgcccatgct

SEQ ID NO: 7288 - DNA, 470 bp, Oryza sativa
  unsure (1)..(470): unsure at all n locations
ctcagctagttacacaaccattgtgagtagtatgaaattacacattntagcatgtttttatttctttgtgcgtatnntttttttgccgcttatttgttaacatttnttgctcatataagttataagagaacatatctggtgaaaacacactctgaatatttggaaactgctatcttcatcattgcatcttgtacatacggctatgattgctcctcacttctttgactcgggctatactttntgcaaaatgatcccttcanatatcctctatcgagattatgccatctgcanatcctaaatgaggttctctttcacctcttnccaacattggtttgattcacccgatactctctcaagttataacaatgtatgagatatttttcttattacaggtgttgagtttgagctacttcaacggtcagaatggtacaagcaacttcaaaatctctctttttcttctctccacatca

SEQ ID NO: 7289 - DNA, 442 bp, Oryza sativa
  unsure (1)..(442): unsure at all n locations
agcttccctctcgttctgaaacagaaacaatatattcagatttgtcaggcaactgcaaaaggtttcagattcggagatcttcatagaaggaaaaggatgctgaaggcacgtactggtccaaggtacatgatcagctgtgaataaagcttgcttctcgggcacttttggtgatgcatgtctctcccagctcctacatccagcctgaaaaacccaaagaaaacaacattaacctctgactacaaccaatgtgaacctttgtcagatgaactgaacattagtttcagatgtctactactcctaactacttaccagtaaaagaatggctcagtgctcgagctcgcagaccagatgtcgtagtacagatgcaagtngtggccgtagcggtggcgcgggtcgatctgaagtagccgcaaaaagatttgagcagatagtgatgagttct

SEQ ID NO: 7290 - DNA, 466 bp, Oryza sativa
  unsure (1)..(466): unsure at all n locations
tatcangggagctcccctcttggtctgggtataccagcccacccaaacgcatctcttatgcatcaccacatgaacttcgaaattgggcaattaaacataaagtgattgacatcctncaactctccacatagtntacaataaagactgcccttccatttcatctattatagttgggaagccgcttgaattctccctctcaacatgagccaaaagaagattttattttaagggtatgggagttctcacaaatcttgataatgacatctctaacacccncaaaggctagctctctgtatagagaatntgtttatagataccatatttggtcaacttccaacacatagtatcattatctgagttcagctgaatctcatccaataaagtatgtaaatcattccattctgtcatctctctntcccctaaattcctccttatagtaattgtccactctcaattangacacatc

SEQ ID NO: 7291 - DNA, 441 bp, Oryza sativa
  unsure (1)..(441): unsure at all n locations
agctttgctccggcaagcccacttgtaatccttggatatgggagctagctactgactggctggtcaaaggagcctccgctcaaaactccagccccctccaacacacaacattaatttgcttctttttgggacaatgaatatctcatcagtctaactatcataagagcccgaatctgattattaaaaaggaaatagagggtgcatgcatgcatgcatacatggtgntatgttgttgtatgttccctttaattccattatttctaacacataaacttatgttattacaatttgcaaagcacatcacatcatttagatgtacttgcctgggccaccataatatacatgcataccatcgtcattaagtccataaccatcatagctatatagttntagattattagaaaaaggattggcattacggatgtttggagtaacaagctt

SEQ ID NO: 7292 - DNA, 324 bp, Oryza sativa
gtgcctgcgcttcgcgtgtacctgaacaacacataccatacttctatatctcagcggatatgcctaagccgaatcgaactcgggaggagcaaagactgagcgcgaagaataaatcacctgatggtgttgtcggtccgcatgcggatacagtatgggatggggcggttctggcgcatcttcttcgtcagcttcttcttgatgcggaacgtcttgtgggactgctgcggcgaaactaaacaagcaagctatctcatcaacgaaacgtcggtcggtcgtgcggaatggattcgactagagaagagcgcgagatctaggagcgtacca

SEQ ID NO: 7293 - DNA, 425 bp, Oryza sativa
taagcttgccgtcgactccgagagacgtcttgaccttctcgtatccactgtacgcattgcaacagtgaggagaaacccgggagccaccttcgcgaagacgcaagctcatcggagcaccggtggcatcgggaagccgatctgttccattttcagtcgcgccgttcgtcggtgtccgtcgtctccctctgttgccgttgactccattgggtttgcaggagcaaggagaaacccggccattggcttttcttcgcggaaatcgctgaaacgtagtcgtcatcgctgacccgaccctgtcgtcgcctttacctcgctgccggccggctgacgtcatctttcattgtcgtgccaaccctcagtgatgctttctctctccgatgtcgctcaccggtgtagtttatctctagggtcttgatccaatctaatct

SEQ ID NO: 7294 - DNA, 413 bp, Oryza sativa
  unsure (1)..(413): unsure at all n locations
cactcagcttcccttctcgaggtaagaatntctcagacttatatatacgtgtttctggttcaacgcggaggaggagggccccgcgaggaggaaggcgtggcgtgtctctctagcggcacgtggaccctgagaaggcattattagagcaacgttaatataataaccaactaatagcttcaattcatctatagtcaatctaatagctaatttatacaatatttacatactacattattaatacctagtcccacctgtcatacacacactgtgtcttggagatcgtgctactgttggctataaatctgtaacccactgcacttctctcttctcatgttgacttcttataatatgtgtggagttggcttatagcctgctattgtacctgctcttactagtaaggccatcaccaatgc

SEQ ID NO: 7295 - DNA, 449 bp, Oryza sativa
agcttacgaccagtgcatcgtttaacatcacattggccaaaggcctatacaaaaacacaagagttcacccacaatggaagtgactactccataagatcaatatgcaaaaagaatgcagtggttgcacctacccacatagcaagccgagattttggaccttttggttcttcttcagtgtctaatggatagaaaatcaaaatgacagtattagtaagctttcagttggagcaacaatgtaactaattcaagcatatgccagctgcgaaataactataggccttgactgtcctctttaacagcaaagtttcacattaaatatgcaaaattgaaatacttgaaatgcgatgcatattctcatgcaaatgcatcacaatagcatacgggtattaaccatctcaatcaattcatcatatgtcgaaagcacacactatttcataatagccaaaaaa

SEQ ID NO: 7296 - DNA, 404 bp, Oryza sativa
  unsure (1)..(404): unsure at all n locations
actcacatncaccaccccgcgtctccctgccgactgactaccgccagtgatcacccttctacccgtcgcccaccttacgctctgaaagaagaagagtaagccgttgataccatgggatccacatatggccaactcaccacgtcagctaaaaccgtgcaatatatgatttgggaccttggatacattggttctacaatttgaaagacgcgttatatttgctattgtgggtcaatggcgtgactcatagtttaacgtcacgaggagggacctaaaatatacttattcctttgagntaatacctgcagaaatgagccgagtgccccagatcaagtaaaaagcggcccataattgtgagagccctcggcccaaaatctgccacgcctttgctttcctgtgatcccctc

SEQ ID NO: 7297 - DNA, 443 bp, Oryza sativa
  unsure (1)..(443): unsure at all n locations
agcttggttatggacatgaggcagntttaccattggaaatcagaatcggctcaaggagaacagagttgctaaatgagttgaccgccaatgagtattatattctcatggccgatgaaagggaagatttggttcaatctaagttgagaacttttgcaaaagttaccaacgattatgaacacattgctcgacattacaacaaaaaaatggtgcccaagtctttttctgaatgtgaacttgtttggaaattgattctgccgatagggactcgggataacaaatctggcaagtggtcaccgaagtgggaaggacccgttcaaatccataatggtgtgtctaaaggagcttatatgttgcaaggacttgatggagaagtttatggacgagcgctcaatggcagtacttgaagaatattacctaagtgtttgggtaatgcatgatcggct

SEQ ID NO: 7298 - DNA, 450 bp, Oryza sativa
  unsure (1)..(450): unsure at all n locations
acattcttcagacttcataaagaactgcttattttcacccagcatggagtctattttacccgagttctctcaattgtggatacttatattattgagcacggaatatgtaccaggaccataccttctttgctgagagctttcttatcctatgttgcagattaccttgatagatgatatgtatgaatagcattggagcatgggaactattatgttggttcgatgctagttcggtttaatgaagaagtacagtcagcanagcttctgatctatcaacctggtcagacggnaggtgctattggaatgaatttgagaaaactaangganaataatcgaagacgggaatggctngaaatctgtaaatatcatctcagcctttacatttcgttngagcataactgtcatgacacacganngattgtagtatcatatctactgctggtcgatgcttac

SEQ ID NO: 7299 - DNA, 400 bp, Oryza sativa
agcttgctgactcaatgtgctattactgttcccacttcacctgatctgctcgctgcagattcagttatccctgtactgcttaagacagcgtgtatcattctcactttgtgtgcgagcacctacccaacgaaagccaactgggagcacatcctgtggaatgtctgtctttgggcacacgggagaccggaccaacggtctgccaacatgggagcgctcccagctccaaagctgcaagagaagcaatgaaccaccaatgttcttgatattgtgggaggaagcaacagaacaaagagaacggtttaggaaggccagcactgcatatccccatctgtatgttccaacaagagatagatcagcaatcagtggaagatatatcagactcattcgtcctgatccatct

SEQ ID NO: 7300 - DNA, 434 bp, Oryza sativa
  unsure (1)..(434): unsure at all n locations
agcttcagcgagtctcagcaaaaacagctaaaccgcaaggctgataagcacaccacgaagttacagctcaagcagagttgatatgtggcctatggaattttctgaagccactataaagaatgtgcagaaacttgtgagctcgaacagacaattttgcaagccaatttttttctgagtctgagtccgtatgcaaaagttatggctgtttgaagttggggcttccgtgtaggttttccagagggtatataaactagtctgtttagcggtggtatgggatatggtggcaacggagtatgtaggatgttctagtgaggtgtggtgatctggataggtgtttatgatggcagaaacggatctcaaaagatgaaccctaacacacggatgaaaggtggcggctatggttacaagganaacacacgacttgactaaacatg

SEQ ID NO: 7301 - DNA, 293 bp, Oryza sativa
  unsure (1)..(293): unsure at all n locations
ctcagctttgctgtctctaatnntgttattggccggtcggcctatgtaattattaatattgtgtaagtcttatgtntttttcatcttagntgtgtttgctatgtataatcatgcttaagatgaaagtgtgaatctatggcacatcctgngtactatattcacatgagtatgagttatggatatttgagaggttgtagatctttatccacttttgtcaagtctcctgaatgtgtaacacatctggtcgctgccttcgagtggtttgacgggcacatctcangctgaagttgact

SEQ ID NO: 7302 - DNA, 431 bp, Oryza sativa
agcttgcataacctccgccagaggtatttttgtatgttctccagcattggataccttcaatagcagatgatcaaactcctatcactctccagcattagtgaagccaaccagtggatttaagatacttacatctcctacaggtgcaactgaagagactcgggtaggggctgaagtggcacccatccaagcctcacacatattctaccaacatttgtattcacctacatcatcaacagatacagataaaatctccacttctccagaaataaagaaacgaagattcttgaatattatttgtgaaaggaaacatacaggaaaagccatgtgatggagtgtcaaaagacgcacacactcaacacttttaagtccaagtcctctaatgcttaagagatagtccctgcaagaaacacaaaaggtacaatgtatctata

SEQ ID NO: 7303 - DNA, 458 bp, Oryza sativa
  unsure (1)..(458): unsure at all n locations
ctccttttttatacaactaagcgtgtgcttatcaaacgacatggatgagacagtgtgtctcttccggtcggagtatgtgcaatgtatcagtctttgaattgattcaaggttggtacccggtcaacagctttcaaccggccacccgggcctggctgatcccatcagtcgcatattntccaaacatcgaacccattccacaacagtaatttcacaagcagtagcctaacaaaactacgctaggaatcacctcacatccgcccatgaccatgtgcactgctgttcgaacaagttaataacctctgcagagggggtacactntacccacacgacattactaaccttggtcacctagcccgtgtggatcagacacgtctggtgacttgtggctttcacgacaaggcatttctaaagccgacacaggttcaccatatgccaacgagaggggtcccataccgaca

SEQ ID NO: 7304 - DNA, 397 bp, Oryza sativa
agcttatcccctacgcttcagaaatggatcattcagaacatcaccgaccggcttgccttcgtcgccgccgactggtgtctccgcctacacggctggcctattatgccgccgttattaggcgtctacgtcttcaccgaccggctgccttcatctgccaccgactggtgtctcctcatgcacggctggcctattatgccgccgttgttgggcgtctatgtcttcactgaccggctgccttcgtcgtcgccaactggtgtttccacctgcacggttggcctattatgccgccgttgttgggcgtctatctttaccgaccggcttgtcttcgtcgctgcaactggtgtctctgtctgcacagccggcctattatgccgacgttgttgggcgtctacgtctt

SEQ ID NO: 7305 - DNA, 403 bp, Oryza sativa
  unsure (1)..(403): unsure at all n locations
attacttaccgttttactctgatgttctaactttatttatattaatccanaaacttgtgctattaattggataaatgtcttaactcccttctttcattagtccttagatgccgtgctacaagcctgagtacttatttggagatgaaggatatgtccaggagttgcgtacgatgtcctttgtcataggatatgggactgcccctctctatgcccagatttctcatgatcgtcatgaagaaaagtgccgagtcacagtcaccctgaacaagaatagtgaagatatnccctcagtgatgttcgaagctggaggaagaaactacatncacgcatgtcaggaggtagcaaggatcgccatatgagagctccgcgatcgctacagtgatcaagtggccgacactgagtg

SEQ ID NO: 7306 - DNA, 441 bp, Oryza sativa
agcttaagctaggcgcgtgcatgcccaactctggccagcgaccatcaaacgcatgcacggatacacgcatgcatgcgctatatttctttagctctagcttcgcttgcatggctgcacgcgcggcaggccatgcaagcatccacggatgcaaacacggcgccacggacgtacgtctaaatcatggtacagaacacagtacgctggccggccaccacgccagcccagccgcatgtaacatgcaacgggtagcggatcaacgggcgagagcggttgcgttgcatatattcgcatgcatgcattgcatgacagcatgcgtattactcgtactgctctctccttctcaaaataagtatagttttagtattatttatattcaacgtttgaccattcgtcttatttaataaaaattacgactaatatttttaatgtattagatgataa

SEQ ID NO: 7307 - DNA, 182 bp, Oryza sativa
  unsure (1)..(182): unsure at all n locations
gaagctattaanaactttcagtcctctcaaactaagtataaaaaccaaacaaggcaatgataaaccaagtaagcaaactgaattgataaaaaatcacactccattattgngataatagcccccgactgacaacggctagaagaaaactcgatgttgacagtctaaatatggagatacaatga

SEQ ID NO: 7308 - DNA, 434 bp, Oryza sativa
agcttccattatatacaaaacctaatggtggatgtggctaacccacaaatccacttataagttaaatatgggttagccatttacacgtaaaaaatcttaatgtgtgggacattgcacctgatgtatataatagacagaaatatattttttgctactcgttccatcctaaaatatagcaccttctgaccggattatacacatattctagttttacaaattagacagaggctgcatcttatattttttcagatgaaagtagcaatagaattttaaacatatggcgcatgctctatcatgtacattttagaagggagaagataaaggaggtgccccttatctaagagagaacctactcaaacttcaagggataaagaaagataaccatcgatcccgagcgaaagaatactagtagtgtgttgttactggtactccta

SEQ ID NO: 7309 - DNA, 192 bp, Oryza sativa
  unsure (1)..(192): unsure at all n locations
tatctctaatgtgaccaagttaaagaggatgcggcatggcagtttatctattaattaggaatagtntgttagtctccttttatctctaggaaagtgtgtttagtggccgataaggactttacatttccctttatcttaggttagttctttttgttgaaagactgttcaaccatggtataaatgacaccgggc

SEQ ID NO: 7310 - DNA, 438 bp, Oryza sativa
  unsure (1)..(438): unsure at all n locations
agcttcggcttcatacaactgcaagttcatccaccatccgtcttcaagacacattcctgctcggcttgcttgcgatagataccacgcctgctcctatcaacacacattatttcataccgatgcacttgtgtgccttgagcaacaactctatgtctccgtgcctttttgattttatcttccatgtactttgtcactacgttgccaaacactatgttgttatcggccatggacggaccaattttcttgtatcgatccctaaagtacgcttgcgtgccgtgaaggatgaattcatcaataacaaccaatggaagtacccgaacttctcgcattacccagttggacacctctgccaaaatggntgtcattatgccataccgagatccatcggtgtcgaacaatagagaccacttcttcttaagctcattctcaatccactga

SEQ ID NO: 7311 - DNA, 484 bp, Oryza sativa
  unsure (1)..(484): unsure at all n locations
tatcgttaaaagtaaagtngtacttacaagcggtgaataatagataatanatatatcatacacatctaatagaaatcgcatgtgtaatttactctgactcccaatgtaactactacaaattacactctanaagtactatatttacactgtaattatttttcctcaacctatctcctctctttatcccctatacactcttgggcgaggtgaagttgacaggaaacaatgcactacacaactaacaacaacttatactatntaattagtgagtgacagaataatcaaccatatgaatggagtactgtaccaggtagtcaagcacttccgagttaagtgtttcgtgggcgcgctgacacaataatggcacggatctcaaggttagaataacagctgagaatcnacaaatttattgacagattttatcatagtcnggcctaaatgggccacatatgcagacataagacatgtntaaatgggcctaaat

SEQ ID NO: 7312 - DNA, 426 bp, Oryza sativa
catcattactatggttcttttgacgagggatactttaactactttggatctgggaagtcaaacccaaccagagtacatgccccgacaagaacggaaccatcattgtcatcgacaacttggtctatcgagatcacccaagccttaagatacgcggcgtaccaaaagatgtcagatcatatgatgtcgaacgagtacgcaataagggtattggtagattggtttttcaaaatgatctagtaatttcgtagatacatccggcatgtatctacaaaggtacacaatgttttatacacaatttatcgtacctattcagatcacacaagcattgctagatcaataatttattatgcttacctagagcatgtgttttatacaatatctattgtgcgagtgcttccgacgataagccaactacagtctaacgct

SEQ ID NO: 7313 - DNA, 487 bp, Oryza sativa
  unsure (1)..(487): unsure at all n locations
taaagccatgaatccctcttatcatattcnggattggatgctgcagaatatacttgtttatgagtagcatctgatgtaaatacagcacttggataaaattcaaggatttcataatatttataaatatgtatcttccgctcttgtcaatntngagttaccacgagcagatgactcattacgtntaaacactctgcccgactagtcatagcccccacgcaccggtagtcggcctaggcacttcctaaatatgatatgagtgacatgagttgcggtaaggaacacagttcacggatcggagttactactccgtacttttgaattataagagagacaacaatatcttattctaggtttgactcttcgaggagactagcacctgcgtactcgccatccactgccccggggcttgaatcgccaagactatcttgcaaccaacgtagcaagaaaaaactctacacaagccttatgactcgaattacacatagaa

SEQ ID NO: 7314 - DNA, 445 bp, Oryza sativa
  unsure (1)..(445): unsure at all n locations
agcttcacatggagatggatcacccagtctatatgcaccatacagtatatggatatgctatgaacatgtagtctccctcttctttcacacacacacccagatacgtacacacaaaaatggagctattctcatcacagcaatggctagcacttctacctccgatcatactctgtatccttctggtctcctatgtgtatatcattctatggctaagaccagagcggttgaggcataaactgaggagccaaggagtgaggggtcccaagccttcttttctctttggaaacataccagagatgaggagaatccagcaattggccaagtcagcacatgaacaagaagcagggagtaccgacatgttntcatcaaattatgtggcaactcttttcccttacttcctccactggagcagggtttatggtacgttaagaaaccttgagtgcat

SEQ ID NO: 7315 - DNA, 156 bp, Oryza sativa
  unsure (1)..(156): unsure at all n locations
aacgtgtcacccttgtgtttgtcgtcagtgctgagcgcgacgtatcctgtgagagcgccgacgangaatggcgggagcgtgcatccaatggctaagcccaagctactgatgccggctctggtgatggcggagacctcgatctcgacgccgacgatg

SEQ ID NO: 7316 - DNA, 356 bp, Oryza sativa
atattaattgccgtgcccttcctggcatttaagcataaagaaaaggtaactttcttttttgacataaggtccatcactgcaatttacgggaatcgtcccaccctattgacgacattactatatgcctacctatatgcttgtttatatacgattagtggtgacttataccacccgtgttctttaaattcttatggttacatataatatataaatcatgctgaaaatacctcttatgctataaaccaataaacaatattcttaagggttaaatctagggaaatcataacctccgaccgaagccattattggagattaacgaaattcgcgatccgtcgctcctaagggaaagccattag

SEQ ID NO: 7317 - DNA, 398 bp, Oryza sativa
  unsure (1)..(398): unsure at all n locations
tcccaaccatcatcaggaaccattgcctcaccatatgttatctcagacaccacagacatgatagtgatgtctggagttagcatacgcttatatatactcaatttcttataaagagtacgggatctttcacttcaaaatactactagagaatnctgacagtaaaccgactcccacatggcgccacatctaacaaagataagttctcctcatcgtgatgatcaacctccattttggagatggagaaggattaaaaccacgtatatcatgctgcaattatctctgaacaagtcctagatatgagttgaaaacacaaaccatcgtgtggtcaagatctgaaacgataataagacgtgcagaaccactgagcttatccattctacaacctgcatatgattatg

SEQ ID NO: 7318 - DNA, 407 bp, Oryza sativa
  unsure (1)..(407): unsure at all n locations
agcttgtgcctggttggagagatcatcataaattattatttatgccggtcgcgggacataaaatactcagccagggctgctcccgtataaagagcgaggtattgtaatgtatcaagggaatccgccatttcaactactacaatagtgtattccatggcccnctcttcatggaaagtagttactacttgagctacggaggatgctctttgaccgatagctacataaacacatattacatcttgccctttttgattgagaattgtatctgtagctactgcttgtttgccgggttgtctgtccccaataattaactctcgctgaccgcgcccaataggaatcatcgaatcgatagcaataagccccgttngaaggggttcatatacagaacgcctggaaattatacccga

SEQ ID NO: 7319 - DNA, 424 bp, Oryza sativa
  unsure (1)..(424): unsure at all n locations
agcttatatatttgagaggtctttgtattcagcatcgctatctctgaacataactattgagtctagtatctgaatgctatcattcttagcattgcgccaaacctgcggtttttgtttcaatatactgggatgaaaacctacaatagatatcgatactatctttgcagataacgggatgaaaaccagtatgagaagatgataaattaaacaattatttatttaccatatcttgtattgagagcaagataatagtggactacatgtcaactataagcttatgtgaaagagagaacaataataagtgctggctcttatgtcagaggtagctatatacatgtattaagatatttacattaaattactagtacgaaaaagagagagtaaagataaaaacgactaactncatagatcacctattatattc

SEQ ID NO: 7320 - DNA, 441 bp, Oryza sativa
  unsure (1)..(441): unsure at all n locations
tactgcagtgtccgacgccgacnaatattgtcgcacgtgcgaaggttgccagttttttgccagacaaattcatctaccagctcaagagttgcagaccatcccactgtcttggccgtttgcggtttggtggctcgacatggttggcccgtctaacaaggcagttggcggttacacgcacctctttgtggccattgacacattctccaagtggattgaagctaaaccggttgtcacaattacagcagataacgctccagactttttcatcaacattgtgcatataattggagtgcccaatcggatcatcactgataatggcagacaattcactggcggagttttaaagactgttgtgaagactctggaattaaaattgctatgcctcagtaacacatcccatgaacaatggacaggtggagcgagccaatggcatgatacttc

SEQ ID NO: 7321 - DNA, 438 bp, Oryza sativa
gcttacaaaggagagtgaaatcacctaccttccggatgaatatcatatggaagaagaatagctccccaagtggcactgaagccagcaatgaaagagctgtacccagggtcttgagacagaaatgattttagttaatcctttacattcctaatcaatgtggtacactttgttcaaaagatatatattgtgcacaaaaggtaattcccaatagagatagttctaactatgaacaggtgcaaatgaattgtcacattcttcaatgatgatattcttgctctattcttaacgcatgtgtgcagggttgagaaggcactcttattcttgtataatagccagacttgaacacttactagtttattataaatagttgtctgggagctaaatcttccactatgatatgtagcagctgcagcttgcatattggtggaaatgtatact

SEQ ID NO: 7322 - DNA, 207 bp, Oryza sativa
ggtaccgcccacggtggatctctcggtcacgatgatccgagcggacaaacttgattgcaatctctgaccatcgaagatattgtggcgtgtccggctgaacagcaatgatctcccgttcggtcaacttttgctttcttttatactcataagccaaggggccgccggagatatgggcgagctccttgcggcggtcttgaaatcctaccg

SEQ ID NO: 7323 - DNA, 447 bp, Oryza sativa
gcatgcgagcctacatgtcttatagattatgctctttatctgtctgtggttatatcgctcgaagatttgtctggatcaataattcagcttatccgactgagatttatggacctactgggccacaagcttcttaagctcatgcatttacttttttagttagagatcacacgtcttgaagctaatgtgggatctgcccaaggacccacaggtttacgcaaatatctaatgcgttccccaacgggagaggttatatttggaggggaaactatgcatttttgggaccttcgagctccatggttaaaacctctaatgggccccaacggtgcgcacttgactaggatgaaataagacatacaaccttggcaagaacgacgtttggtaaaatatatgacccatgctcctttaagctctataaattatgtgggtggcgtagctaccgagatcaat

SEQ ID NO: 7324 - DNA, 433 bp, Oryza sativa
agcttgagctcttccacaacggactcctaatcatgtaacttctttccgagatccagttcacttgctattgactgatttaacagctgcagagtatttctttgttcctcggcaggcatggctgagcgagatgaaccatgaccattttcgtatccaccatcttcactagttcctgtacaaatgcaattgtcaggaaaaaaaaacatacagcaaacagctagcactagtagcaccagactaacatgagcataccagagttgtcctgagaagggtctatgacattcacaaagtttgccgattgtcttctaatagcagaaataaagtcctgcatctggttcaaagacacggctgcatctcggagcttgctgttcacctcactcaccggatcttcatcagaagccatcatctttccaccattcccgatatccacttcaat

SEQ ID NO: 7325 - DNA, 436 bp, Oryza sativa
  unsure (1)..(436): unsure at all n locations
agcttcttaaaataaacgganaagcagtggtcaatcgacattatttcttacccaaaatccatatcctgctaaaaaaattcagtagacgattagctctatcaatnggcacgctcataaacaaataatggtcatatcttccaatggaactagaaccagaaccaaaatcaaacaggaacagagtggaccaaaaatcaattggtgttgacagtgaatcatagagcgtggggcggggtggagctaaaatgatgtacaggaacaggttgaagtgcaactcaatgtactataatatttgtcattgtttttttttattttggaaaataaaaagtgtgcatagatgccctcacttatctttagaaacaaaaagggtggacagtcgcccttaataatgaaaacgtaaaatgatcaaatacatgaatatgcatctcgtctattgttt

SEQ ID NO: 7326 - DNA, 390 bp, Oryza sativa
  unsure (1)..(390): unsure at all n locations
cctaacantttaattgtgtattgcttgattataatggggtacatcactacatgtgtcccttatatagtgagggtcctcgtgcaatcatgctatagtaccacggatactatccacatgaacaacttngcccgaaagaatacaatctctacttcctagcaaacctgatctctaatccctaactatcgataactttctaaccactactacctctgtgctaaaaggacttcatttctagctatgcgcttggataagtatttgtccaagttcatagcttgaaattaagcctgtgggatggaggtattaggtatgatatcaaataacttatctctattttaggacactaaataatattaagcaatacatattatttacgtaggaaaggaaactctc

SEQ ID NO: 7327 - DNA, 437 bp, Oryza sativa
  unsure (1)..(437): unsure at all n locations
agcattatgttttntttttaaagtgtgctcgcaatttaaggcagcatttttcaactgttcatctactttcctcctattttacaggtaactggagatggaacaaagccatacactctttctgggaaattcttttttaatgcttcgaattcacccttcccatttggttcagggaaaaaagcttctgaattttctcaatgggtagggcagcaaaagaataccatggatgatggagtttgtttgtatccagatctacaatgtggggaaattgtccagctcttttctcttggtttgtctggagagtncgtcatttcaccctcattgccaagtgaaagagttggtgaagctgatgagcctaatagctctagtttggttgtcgatgataacagtgaattggatgagagtagtcacaaacgcaaggctgatatggttaacttaaa

SEQ ID NO: 7328 - DNA, 496 bp, Oryza sativa
  unsure (1)..(496): unsure at all n locations
cttcttttccccgtctgctcgttgctncagatggtctacaccaggactggtagccgcgcaacaggcgatggcagcaacggcgaagaacgcgctgatggtgtgcaccccaacggtgattctggcaatggtccgtcaccacttaccgagaatccgacgcttgcccaaggtatggcacatcagactcagatgatggcagccatgatgcagcagatgcatcatatgatgatgcatcacgccgaacagcagcaccagcagttggtccccctccctcccagccaaggtggctgagtttctacgtgtcaggccacccaccttcttcagcaccaccaaccctatggaggcaaatgactggctccatgcgatagagaagaagctgaatctcctgcagtgtcatgaccaggaagaaggtcgcttcgccacacaccaacttcatggtcctgcgtcagctaggtgggacaaccacatggtcactcgcccaccgggtactcgagtcaca

SEQ ID NO: 7329 - DNA, 427 bp, Oryza sativa
agcttgtgcgctggcatgccgaagaacggaaagtttatagtatgctgaggcacccagcagattcagtacagtggaggacaatcgataggatttaccaagaattctcaaatgaccgaagaaacatgcgtttcgcaatgtgtacgaacggcattaatccttttggtgatttgagcagtcgtcacagtacatggccagttctgcttgttaagtataaccttcctccctggttgtgtttcaaaagaaagtacattatgcttgccatgctcattcaaggaccgagacaacctggcaacgatatcgatgtgttccttgaaccgataatcgatgacttcgaaaggctatggaatgagggcacacgaacatgggacgcatatgcacaagagtatttcaacctccatgcaattctgttttggaccatcaacgatta

SEQ ID NO: 7330 - DNA, 431 bp, Oryza sativa
  unsure (1)..(431): unsure at all n locations
actcagctctcaatctttcatctaaccatgcattggctttnccttctttatcgctgagtcgcatccttcagctgtagtcaccacccatagtataaaatccggcgagacaaggagaggccttcacttcaatgacttatgtgttcttgtactggctacttagttggcttttgcagccgaggggaggagaggagagctaggagcactcgcttctgcaatattgcgcgtaccanatggttctctgtcggtagtgtcagcctctcacgtgtgtacttcacctgcccaatggtagtagtggcacatgaatatagagatggactgagcatctgagccactaacgaacgggatggactcagctgaatgagatgtgaacaatgcaactagggttactatttgtttaacacatctanggttagtaggagtgttatatactc

SEQ ID NO: 7331 - DNA, 395 bp, Oryza sativa
  unsure (1)..(395): unsure at all n locations
ttatgcctagccacgntatagtgacaaggataggggtctcttaaacacgcattccccaaccatttatcttcccaaagccgtacttgagagccatctttgatgttgaaggagccaaacccgagaaaatcaggcttggccttaattagactaacccaaaagtgtgagtcttctgctttccactgagcttgagacaaaggctgtgaccccaaatatttgttccttagcatttgttgccacacaccatctgtagggagtagtttatgccaccacttgctaaggagagacttgttcttaatttcaagatcttgaattcccaacccctccttggtcgttatgacgacatatgatgtcccaccttgctagtctatatttacttttgtggccatccccttgcc

SEQ ID NO: 7332 - DNA, 484 bp, Oryza sativa
  unsure (1)..(484): unsure at all n locations
agagaagagaaaagctactagagccatactcgaactcttncgaagactttctaagtccttgattctactctattcctattccaccagctagatagtactaaactaaactcgagagaaatgagagagctattgctcgaggtgtgtgagtgaagtgagaacgtgaagtccttatatagaggtagttatgacggttgtggaacgtgaattgtccacagtgccctccaaccatcattgggatgcaatcctggacgtccacgccgaaccctgcatccaacagtgccaggatgggtttggccgaccatggctgggccttcccggccatcttcggctggggcgctcttattgcttactttgtaactgtgaatttgcccaattatcgtgcaattctgagtctggccattatacatagtctggtctcacatcatacaatgattatcattgagtaatgcgatctcctcatctctgcaaagtagatcctatctat

SEQ ID NO: 7333 - DNA, 406 bp, Oryza sativa
agcttgaacataccatattgacatatgccagaacattagtacctggaagttgagaattacaattgcaagttatgcgttaaataatcattaagcaatgagtcaacgatgttatggtaaacgcatggatcagttgtcaaatataacagcttcataggatatggccagtcaggccagacaatcttttatgtaaggatatcagtaacctgtaaggctgtaaatacccaaacagatgagaacttctttgaggggaagatgagaacttactaattcgtctaaggtatgaatcattgtatctgtcaaaaatagagtttgttggatttccacccttctcaacatcctgaggaagctttcaaaagaaatcaacagttaaatagctgcactccatatcaaccaacttcagagtact

SEQ ID NO: 7334 - DNA, 465 bp, Oryza sativa
  unsure (1)..(465): unsure at all n locations
gctgtgcctttcactagttaatagcagattcagaactggaatataagtagccactagaacatagacagtctcgaattcacatgtgtgatcgttaccttttctactcagttctacaaaaatattanaaatctaactgcatgaaagcatttttcacgacaaatctactaatgtcattntcagatattaaatcttaatggtgcatgtactaatgttntaaaataagggttggttgtgcatattccaatatgtcatactattagatattccagaaataccaacatgtaacancatataatgtattcaatgctctgtggctgtcataaccagaactggctgttctgcatggttgataaaacgatgtaatactaaattatgaatggcgatggcacttatattcggtagcttaaaggagttctcactcaaactgctatgtactcaagtgaacctcacatttgttatacataa

SEQ ID NO: 7335 - DNA, 437 bp, Oryza sativa
  unsure (1)..(437): unsure at all n locations
agctttgttaggctgctaaagctgtttgggttgatatgagatgactggtttattaatagtcattcttttagcatgatatatgcttattttggttatggtaagggtcacagcctatgctattggactcattaattaccatgattttctatcctgtttggtgggtcattntatgagattcttactcggattcctatcaaacatgtttatttctggaccttcgagtgtttatcactcggcccttcttgtattttttgtccttgatatattcaagttgagaagcagtcggctgggtatcttactaagtaccattcgtgcttcgctataaaaccactcggttcttgactatatgtttagttnttcaactaatcacatactcgggggctacacctaattaggtgcatctactcgatgcaccatgttttattttcgcccttcac

SEQ ID NO: 7336 - DNA, 432 bp, Oryza sativa
agcttgatcaagcagctaattgctgaaacatggcctaatactgtagtatagatgagctgattcaatcggtgataacaagttccaatctttgtgatggagaccatgccagttgcatctggaaaaccgctgagcagtagcacttgaaaattacttgagatcggtataaaacgcatttgcagcatcggttggtttcttctggacggctacactcaattttttttttagcaaacactactgaggtgtatatttgacagaaaacgtctcgatcatggtgacaatatgcagccaatttcaccaacgtatgtacataccttttgtgaaaatgacatgtttagacctggattacccgaaaactaatcacagccagtacattgtgtattgtcgcaaaatctgtcagattgaagcgttcgatatataattcagcagtcagca

SEQ ID NO: 7337 - DNA, 437 bp, Oryza sativa
  unsure (1)..(437): unsure at all n locations
tctcttgtgctcatgccagattcactacagttgtgctagtggccgtgatttatgtgtgtgggtgnatctgtacacggcccatgcacgcgaaaggcgcgtgaattattccttctgaagaccgtagaatcggaggttagcccgtgccgagcttttttcagtttatctcaccgacgagtcacgcacgttatagcggagccaacacggagttcccaccaagcangggggctatatatatgcatgcaaatcgaccaactcgacatcgtttcgtgcaggtagttataaatagaagacatcatcttgtgcatgcacagagctcgcacagatcagacactgaacttccgcttgtgagatgtgagtcgtgacttgcccggcacagtgagctgctagagagcatacacactgcacgtacacgagacgagagaagctcttagcgagag

SEQ ID NO: 7338 - DNA, 423 bp, Oryza sativa
  unsure (1)..(423): unsure at all n locations
agctngtgatatgaaagaatgggaagctcctgaatcaaacagaactattgcgggtacggagttgacagagaacatacccatcacaacgtctggaacattctgagcggtctcagcttgaatgtggttcatccggcctcgaccaaagtttgtggaggcacgagaaccttgtcctcttgcctgagagttatgacgagacagagctgctgctggagtatgagttctggcagagctgccattatcatgccctgagttggtgttggtaggattctgatggcactatctatcatagtgacccatctggttacaccggaaacactgaactgctgacagtcctagcggtgacttgaaagaggtaaccctgttgggcgcagtattgtcacttgtggcatgctgatgtggctgatgtgccgagcggttcatttg

SEQ ID NO: 7339 - DNA, 377 bp, Oryza sativa
  unsure (1)..(377): unsure at all n locations
tgtatgctgtgaatanagaaaattccaagtattggcaacactatgcgcctctgcttaacaatggcttagtcctaaagacacatgttatacaccgaaatatggaatggggtaaatcactaataactcattaggattaccaaccgcctggaaaatgaccaaaatatataattcagctaagcccataatatatgtcaataaaaatgcacacttatgtggctaaaagcaacgatattgtattctatcgactactctgttaacccaaacaacgccttatataaataaaaacacgtcagtggggtaactatataaagcttcactattcgacacctttctaaatgcattgtaccaccttctacaaagttaagtgacagcgatat

SEQ ID NO: 7340 - DNA, 430 bp, Oryza sativa
agcttaggtagagggcacatcgttgataacttttatttatgaatagagcatagtgatatttctaccatcttaccttagcgcctcagcttttgtaatcgcctatagatgagcataagccaactcaaatggcggctgaagacatatgatagccaaaacaatgatagcattattccttaatctaaggagaacaccaaaccactcatttctttgtactatacttctctccttgggagcaccaaatatactctgccgaacaatgacatcagccatagaaaagcttaaagggtccagttcatagcccatagatctgtattcccaaaatgaataatttataccgcatctgtcgaaaacatcacataaaaaacaggcatgtttgtgagcacggccttgaatatgtttcacaggaacgtaatggacttagatatataca

SEQ ID NO: 7341 - DNA, 434 bp, Oryza sativa
  unsure (1)..(434): unsure at all n locations
tagacagacaaattcatatggacatacttttatatcatatatctcggacaaatgcatgaactgtgcatgcactatatatgtcaactgataatatcttcagatttagttgccatcttattagtttttaacccaaatatacaaagatcatggacatcactgatcatttntgaccagtcgtatgttttgttagcaattcaattgtaagttattgaccttgaacacagctctcgccactcttatattacatctaagctccaaagacgccccaatcgttctattatatttagattctggatatggctagcttgctgacaaatgaactattctgtatgtttgtttccaggtagaacaaatatgctctgcttcctcgaaaatctctttctaaaacggcatccaaatactgaaatgacttatcgtaaatacaacccaaactc

SEQ ID NO: 7342 - DNA, 393 bp, Oryza sativa
agcttaagtgttatggagaagcctttttaacatgtaacccctattttcatcgtggggctctgctaaatcaaacctgatatggacatgctaaattactattccttgttgggtgatgtgtcgtaatatttcacattaattcttccagctttccagcttattttattctctgttcagatactctatgattcttcataactcaaatcagtttggcactttctggggagcaaacacatttatgtatcacatactgatgcatccattgtttttctttctacagctaataatgctggaggggtaggtactatcagcaacaagaattctggtactgatcttgagaactgcgagcgaagagttggacttactcactacgcgcttcataattctttaatattt

SEQ ID NO: 7343 - DNA, 410 bp, Oryza sativa
  unsure (1)..(410): unsure at all n locations
ctccatttatcctanattacggaactgcatgagactatttgtttactataccatctaacaagttacaatgcatgtatcttcggaggaatatatcataaataagctaggcattataccttcacatgaacagcatttccaatagacattgagaagaagtctctcttcaacttagtccatgatccaaccccatgcgtagaaacacccttgactaattcagatatttctatgaatggtcaatagccattgttcttctaagatgatgtcctctaattgaacggctccaaagcgaaatggttctgtgaagataataatatcgtatcagaatctcactaatatattcagatttacagattgaaatctatatctaactgaagaagctaatggaaacataaactatgcaataaactcgt

SEQ ID NO: 7344 - DNA, 438 bp, Oryza sativa
agcttataaggaggaacttgaattgatccatggcaagccatccgataaaaccacaatgcttcggccaaccgggtatgccattaccgaggataatcagaaatcttccgcttaattaatttgatcaagctcttgttagatgcctcggcctgcccattagcttgtgcataatatggtgaagaattcaacaatttgatacccacgctatcggcaaactgaacaaactcatcggacacgaagattgaaccttgatcagatgtaatagtttgaggaataccaaatcggtagattatatgttcttgaacaaattgaattgcatccctagaatcaactttcttcaaaggaatggcctccgcccacttggtgaaataatcagtcgccaccaatataaacttatgccttttacttgatggtgggtttatcataccgatcatatcaatt

SEQ ID NO: 7345 - DNA, 394 bp, Oryza sativa
ataccagacccttttctttcattttcctatgagaagcagtgggatgaaccatttcaccttatgggagacttgcatggatattccgcatagatttaggcctataagatgggataaattcaagagctctactggtgggtgatgttaccgcaagaacaataatcccttctgatcatcaagtcaaatttatctcgcgagtcgtgagtgcccggtacgaggatgttggatcaagtctgtttggacgcgtacaagtatgaaaacttctgtacgccagatcacagatgtgactatgtaagagactgcaagagattgtctgttagggacaactaattcgaggaaacaacacgatatctgagaaggccttctctcgtgtaaatataacttccgataggatatc

SEQ ID NO: 7346 - DNA, 55 bp, Oryza sativa
aagtagacatatggtgacattgacactcgaaaaaaaagaaatgaaaagatcgaca

SEQ ID NO: 7347 - DNA, 434 bp, Oryza sativa
gggaaccttagagttacctgcagcaagaagcttgggcacacgataaaatgctatagcttacaaaaacacacgcagaggcccttatctggcgcgcccgaagaaggagcgtggggcatcttaccgggagaacgcgcaggcccccctctgccggatggaccggagaccctgtgtgagaatgtaagctcctactctgaggaagggtcgccagaattggaaaaagaccatacacgggcgatgtatacaggttctggccgctgagaagcgactaccctaccctgaggcatggggatctgagatgaataagctctcaagctgagagtataaagctttactctgaaaccccgttttaggattcaatcagctcctacgtctggatccttttatagggggctagacgtcttttttcctgaagggttacacatgcccattttctt

SEQ ID NO: 7348 - DNA, 417 bp, Oryza sativa
  unsure (1)..(417): unsure at all n locations
ggtgtcttcatcagatcactgtgtagctttggatttggaaggagtgaccggtagagcagctgcagaatgcagcgcacgtcctggcagcggattgggcgtgttgatgtgcacattccagctggcaggtacttgttgaacatgttcctcgcgcatgccgtcaggtcaacagctttgtcatgctccgtcttcagaatgtcaaacaggatcctgacagcgacgaaaggtatttgggtctctagcangagcatgtcgatggcgaccangctccattctcagggctctccactggagtgtctcgtactcatgatcgagaagcccagcatccagctntgtccagtattcatgctccgcaccttttgttcggtcatgcctcagcaagaaatgcagaatgaagcagccgtcaaacagcagcatcat

SEQ ID NO: 7349 - DNA, 416 bp, Oryza sativa
  unsure (1)..(416): unsure at all n locations
agcttatatagctgagctctctctntaacttgtgtatgcannagctgcaagagcagacagctgactatgagggtcccaagcacataagcaggcccacaagctcagtgtacaagtcactgaaaaataaatgaatctttgcaattaggaccctagatggaggaggagaagcctatagttgtgggtgttaggtgtgtggatagcttggcccaataaattggtatgtctctttatttattttttttttgaagagcaataaaactttctttgtaggtcagattccttgtttgttgtagtagtagtaggattctggcgatagcaaagggagagctagctagctttttcttatactaggccataatggaattttcttgtataggcaatgctggagggaaaggcgctcttatattacgaatcgc

SEQ ID NO: 7350 - DNA, 422 bp, Oryza sativa
  unsure (1)..(422): unsure at all n locations
cactgtatagagtgagaatagtagataaaaatcgattcatgttaatatgtangtctaagagaaatctgtgccaacctgacatgtatcangataatgctnctatgtaaaatcatccttcttaccaccatgatcatcctcaacttattntgccaggaaagcgaactatcatttctntttttaccaaatgttaccaacgactgaggatccagtcatgaaaacatctgctcattaccatgatcacgtatcccaagcaaatgtgtgctaaattatgtaagttaaataacaagttgatcacttgtataaatctacagatatactcgcaacccacattttgcagcaacaagtataatgggctaaatatcttcaggctaaataacatgcagtgctactaaacataagtgacacttgtggttcatcagtca

SEQ ID NO: 7351 - DNA, 155 bp, Oryza sativa
tactcccagcaatgggaatggttccaacaacaacaacaacaacaacaacaacaacaatggagagaatcccacgcttgcccaagtcctggctcaacaggcacagcgcatgaatatgatgatgcaccaactacagaaccagcagaaccagggaaaca

SEQ ID NO: 7352 - DNA, 196 bp, Oryza sativa
  unsure (1)..(196): unsure at all n locations
tgacgagccgatgaatctagccagaattattgttntatggaaccttacaggtgtcggttgttaaaccggcacctatntcttttcatatcagtgtcgcctccgtggtgtcgcttgggagaactgacacctaaggcggttttccaaccggcgattatttgtgtttctgtaaaagtggtgggagggtggctattttctt

SEQ ID NO: 7353 - DNA, 456 bp, Oryza sativa
  unsure (1)..(456): unsure at all n locations
ggagaagatgtcttagggggagttcttgtcttattctcccagtgagcgcctgtgaagatggagccgtangccgcttgtccgctggtgctcatctttgcttgtcaggcctgaagagcctttgtaataatgcaaatattatcgatataataaagatgtgtcctttatatcatgggtgtatggtgtaccccggcttttcctgggacggagattaatacactaccgttcgggaaaaggcaattctcccggtcgcgacaagctggtatcagagccatctccactgtaggataagccaagtggataaaacctaaggacatattgtatgagaaaaactatatgcgaaaagttctgtttctcctttccctaaagctatatgcacaaggtgtacctcgcccttccttctatggatatccactcaaactacatcggcccgcaatgaagaagacgacatctcgagac

SEQ ID NO: 7354 - DNA, 394 bp, Oryza sativa
  unsure (1)..(394): unsure at all n locations
ccatgtgtgtcgacgaataccaatttggtgatgcaaatcatgagaattagatgatagaaatcttcttccaagcaatatgccttgaatatttttatgaaatctcagaaaatgatccaaagattcagtaaaccgatcccaaactttatggcttagtattcatgtggtattggttttcaaaactcactattttgcattatttggatcgttctctcttctgaatgcaaacaagaaaccaaaagttgcattttgtgtggttaacataaaatccctgccgacctgcgaggaaaactatccaaacaaanacccaagagatatattaaaggtagcagatatatcccctgatgagacatattgaagggtcttcaatcacccttcttttctctctgacaatctt

SEQ ID NO: 7355 - DNA, 112 bp, Oryza sativa
tcgcagctttctgtagccaatggccaacaacaaaggcgccaacctctcttcttctttatttttacgatggggagccaaacccacgccgtctagctcgtactccaccgccccc

SEQ ID NO: 7356 - DNA, 394 bp, Oryza sativa
  unsure (1)..(394): unsure at all n locations
ttcgctcgcgcgcgacgactggctngaactttattttttcttcngcggagacaaccagtgtgtcgtatataacactttactcacaagaatttctcgcactattcactctcgatgtagtgcctcgttactggtcaatctgcacccgccgtataagcttttttggtccattgtaatcggttgtcacccatctgttcagctgactctgtggttgtattgtgggtgggaggagtttgctgacactgtactgtactgacatatcacataacgcatggggttactccattttagatatgtcattcacgtatacttctatgataattggatatgtccagactatttgtaggataattggatatgcgcttattgtaagcctattgtgtgtaaagttaactat

SEQ ID NO: 7357 - DNA, 413 bp, Oryza sativa
  unsure (1)..(413): unsure at all n locations
tccttagagtcacctgccgcatgcaagctntnctcattggagaagacccttgnggtcgttatcacttctcttgcaaggatcttggatacgttggagagaatgggccaacatggtcatgatggatcggctaggcgcaaccacaatggccatgatgctaatagcagccttgcagcgagggaagaactggagtacgctgctgacactgatcatgatgaagaggtacttggtcggtcacaaagacaacagcgccggcagcgccatggcatgggcgctccaccacggcgggaggtacgtgaaaatgatgattctttacgcaagatcaagtttaccattccttgctttgatggaaaatatgaccctgatgcatatcttacttgggagttagccattgatcagaaattcgcttgccatga

SEQ ID NO: 7358 - DNA, 443 bp, Oryza sativa
  unsure (1)..(443): unsure at all n locations
gtgtcatatcctatatacttatacatttgatcccactaactagagattcctgccctctcatgtcaaaaaaaaanaatatcctgccctcttagtgatccatgtcacctgttttagtggcagccatcggatagcagatcactggctcctcaacgcacctcttagagcacccgcaatggtaaagtaggtgctatctataaacatgtcattttancatagactaaataattgaaaacacttcnggggttgtctcatgggatctatactctctaatcatcgctcgttttttcatagatatctcagatagagatacttgcttcttcttattatctcttcagangaaaatgtgcatgatctttgagaagctataataccatacggtgcctagattctatctatgactgcctggtgataatcaaagcactactcgacatcgtgtccgtatg

SEQ ID NO: 7359 - DNA, 369 bp, Oryza sativa
agcttaaaggcagaatcaaaagctattttttttttacagcaacacagcaattcacatgcaaaacaatacaaattactcacccagccaggacgggcacaagtgcgcaagttcactgtggtttgtggggggacgttttgatagcgtaccgtctgatttaagccgctcatacaccatcggatggctgagactgagactggtcatctgactcacctatcacgattcaatctcaaaaaatgataaagagacaaagagtttcacgcattcatcctcttctgacaactactttcactattttaaaatataaacaaatctaatagaaacgtgatacatgccaatactataaatttcgatagtatcacgtctcatatt

SEQ ID NO: 7360 - DNA, 319 bp, Oryza sativa
  unsure (1)..(319): unsure at all n locations
acctcatccctataagtagcagatgtgtttatcttttngttctgtacaacagacaataccgagtaattatattatgcattattgngtactcacactacagaacacanacttcacagcttgttagtacaaatcatctatgtaagacaatatggcattatttgccttctaaatgcaaaatcttcaactggtaacacagccacattatttaacacgccattacaattggtaatcataatagatatgttctggcaaacaatgttaactttactttcaatgcaacaaaatcatacttcctccgttcacatataagacttttagc

SEQ ID NO: 7361 - DNA, 393 bp, Oryza sativa
  unsure (1)..(393): unsure at all n locations
tcacgacatgtgtacttgatagtatatgttgactgtgtctaatttgatcttgtgtcataccaagacatgaataaatggatgttgctcatatgtacatgtgagtcatgcatgtgtgtaattaatacatggacacacaangaatggtgaggaatccttggtgtttgcgatgggtatacttgcaagcataggaagacatgtatttagtggtcttgttacgtgaaatattagacaatgttgtacgatgatgtggagctgattatggtgaatagtgtctaacggcacacaaacaactatagcaaagtgaagaacactggctacgatgttaactatatatgtagtatgtctaaaagtgctatactatcacgagcctaccgtcatatcctcatgtgatgc

SEQ ID NO: 7362 - DNA, 202 bp, Oryza sativa
  unsure (1)..(202): unsure at all n locations
ttatctggctgaaaatgtttgattacaagtagcancataatgtttcattgcttcattgttcttagtggttaggtcgttntattgttcactttgaacacatgtggtagtagcttaaaatactaccgcggaatcttaattgtatgaaatatgtacgcttatttcgttcacaaacttggctaggtgtttggaatgtcaggtacct

SEQ ID NO: 7363 - DNA, 134 bp, Oryza sativa
  unsure (1)..(134): unsure at all n locations
gcttctcatacgcttcggaccgtntacctgtacggaggaagctgatattgncttctcattgaagcgtattaagctcttctcagtctggcgaccggaccagacaagcccttgctactttacttatcgggaccccc

SEQ ID NO: 7364 - DNA, 306 bp, Oryza sativa
actcactcatataaataggtgggatataaattaaagagcgccaaccggcatggttattatctagtttatttttgagttccagacttgaagtcgcatgagtttcttcaccactcgatttggtgggccaataagttggttcattgtgctgaaagggatgggatatggctccactaaaaggagaataaagactggctaaaacctactcataggagatggtccacaggacatatgggtcccactaagtctaagccctttcggctgacttaccacaggaggtggtccatacaacacatggatgcgataaaa

SEQ ID NO: 7365 - DNA, 320 bp, Oryza sativa
agacaactaaatcagatgagattggctgaaactccgatactatctctattagcaatcatagaacaagctagatctcatgattctgaatattatttaatagatcaaacttaactgatgcagcattaaacaaagaaagaatcgcaagatctaaagccaaccgatgaaagccttttcgagatggtagatacactatataatctgaacaacattgatatataaccctcatcgctattttctgaggacagatgctagccgatgaggttatatagcaatactgatctagattatatagcatatatgataactcgacgaattacata

SEQ ID NO: 7366 - DNA, 388 bp, Oryza sativa
  unsure (1)..(388): unsure at all n locations
catgcaagcttgngataatcacactgctnctaatctccttttantgtgtngnagcggccactactatcctggttgagcagagttcacatgcctacattgaccttattttcatnntctccttcttcttctttgatggcacagggcattcttcaaagaaatcccacaatggagacttctttttcctggtggctnntagtgggtttccctcttggccctcttctccccttacttcacctagtactagctgctgattcggctgtgcttctgttgctgctatgccatccctattgctcggngactcgatctatatagatagctgtctttgcacgtttacagacatctacaaaaattaaaaataccaactgctatcaatatatattctgcacaa

SEQ ID NO: 7367 - DNA, 106 bp, Oryza sativa
caccctcgtggcatttcttcactcgcgccgacccgcattcccgcctttttcccctcatgggctccgatacgggggcacgtgattcctcacctcccgcgatctcaac

SEQ ID NO: 7368 - DNA, 414 bp, Oryza sativa
  unsure (1)..(414): unsure at all n locations
gagcatncagatggcatcattcattcttacattgcaggtatacacatccatgctaccgaaaggactgttgttgccaaacaaattaccaagctatttccggtcagactatttgcagaagctaaggctgtaaccattgcagaaagcatataacagttcacaactggagcaaagaaaccaatatgcgatacgcagccaaactcagttcacaacctgtctccacgacttctntgtgcaagctagcattggtttcccaacaaatgcttcaccaagtgctttgctcagttaagaaaagagaaaaattcagttgctgatgttagtgttagcggcagaacatatttgactgctgatgttatcatgttattggtaactgcacaagcagcagtgagtagtactagttttcattcgagacggaaa

SEQ ID NO: 7369 - DNA, 450 bp, Oryza sativa
atctaatatctagctgaaccaatatatatatagcccatttagtctatctgtaataacccaacgtatcaaggaatatagtaatcaagaacacaaaggcctataacaaacaataggttaattccacccaataacattcgagaataaatgcaatagttgaatagaaacagtagctcttaacgggatcaacatgctcaaagggttgattgggatctatgtgactatgcttgctggccatggaactcttcaaaacttcctctgcgataacgactctcctgaacgttgaatttaactcgaaggacaaatcacaaacagccataaacagcatgacagacatgcgatatttaacatgtgatctaatttagaaaattaagactgaccaactaatcggctagataatagtataattttaagataatcgataaacactattgattaatgatataccatatg

SEQ ID NO: 7370 - DNA, 367 bp, Oryza sativa
  unsure (1)..(367): unsure at all n locations
tttgatcattctctctaacggaataaactgagtattcaaatgaaaatattgtgaatcggccttgctacctgatatgattcatagcanattaaaagaattaaagtgtatatacatgctgagggaaacacccaagggtcttacggctagcttcacaaggtcgtatgctagacaatatgtggttgaagcatcaccccttctaaatatttgatattaagtcaattcctaatattngctgtttttatataatcatgctaagccatatatgggcctgtttgtccagaaatcgtaatacgttgacacacgacctatgtttttcttttcttttatcctttctgggctaaaaaactactatttaacaagttaacat

SEQ ID NO: 7371 - DNA, 371 bp, Oryza sativa
  unsure (1)..(371): unsure at all n locations
agctntccaacaagtactcatggtccctgatantcctttaagtccgnnggaatnggatgctgtcaagagacccgaatccgaatccaaaacgtgtaaaacttgatttcttgtcttctatggaccacaagtgacatggtgagatagaagtggaattagaaaaggtcttgggttggtccccaatcaacttctttaatcattcatgcattccttacgctcggtctcttttctttcgcccaagcaggtacctctgcaaacgaanacacacaaaacttattgtgtagcaacgtttgttcaaatatataacaagtaaatctaatatagaacatatgcgcgtcggtagcggctacgacgccatgaggaggctntcatgc

SEQ ID NO: 7372 - DNA, 388 bp, Oryza sativa
gaccacaacgcttcggccaatcgagtatgccactgccgaggataatcagaaatctttctcttaatcaattagatcaaacttttgttagatgcctcggcctgcccattagcttgtgcataatatggtgaagaattcaagaatttgatacccatgctatcggcaaactgaacaaactcatcggacacgaagattgaaccttgatcggttgtaatggtttgaggaataccaaaccgatagattatatgctcttgaacgaattggacagcatccccagaatcaactttcttcaaaggaatcgcttctacccacttggtaaaataatcggttcccaccaatataaacttatgccctttactcgatggtggagtaatcattccgatcatatcaa

SEQ ID NO: 7373 - DNA, 374 bp, Oryza sativa
  unsure (1)..(374): unsure at all n locations
tgctattcgcattgttaagcaactgtagctaacatgtcgcagccaattctctgtatggcaagcaaggattattctgctttctgacatttattgatagatgatataatatcgatatccacgcatatatattgataaactggagtatgttcagatagtttcagaattgtgtcaattgatatcacaaaccaacttcactggcaaggccattccagatacatttactactggaaggggtacgttccaacacaaagtacgctcttcaagcctagaatacgtaaacctggaggagaggcgttcacctctgaatangtaacgtattatcggatactttttccaaaaagccccctcaacttctcctttctttcccaaatcgc

SEQ ID NO: 7374 - DNA, 183 bp, Oryza sativa
  unsure (1)..(183): unsure at all n locations
atcacacgtatgacaacgaaccacatttatcaaacttgcatgatgtgtggcacgaatcaaatatgtcaaacttgcttgaagtgtgacacattaatttatgatggagagnactcacagcttgtggctcacatcagattgaacttgtagtcataatgagtcgaatcgaactagctaggctggtac

SEQ ID NO: 7375 - DNA, 427 bp, Oryza sativa
  unsure (1)..(427): unsure at all n locations
acctgcaggctgcagcttgcttagatgtgagatggtcttcttgtaggcactntgagctagctagatgagacattagctgctaattaataacttattaaaactaagtagaactggttacagctaatatttaagctcagttctcacccattaacaaatagggtagggtgatccgttaggtgcaaacccacaaaattgtcaaaaccaaaacaagattcgattcatacaaaacttatgtttctatatgcccatatgactctaaccaagaaaacaggacgacaaaaaaatcagataactttgacttcagcgccagttagttaaacctgcatttttcatacatggaatctttaatttactccatatatatatatatatgcataatactacatcattaatttctgttgcttgcagtatcatacagttgaaagcg

SEQ ID NO: 7376 - DNA, 397 bp, Oryza sativa
  unsure (1)..(397): unsure at all n locations
gcttacttgcatgcatgcagacgtanactnntaaccttttccctgtctgcgttttattttngatccatgacactgtcgttagcccatcacattggtgaccatttcgtcttggccaaccgatcattattgcaactgagatctcgccaatttgtttatcagcaatgaaacctatggaggctgtaacaagtgcccggtctgcccagattatgcctttatcctggcttcggtgctttctatgtgcaaatggcctttcttaatcctctctacatgttgtgcttcctggttccatcgattcactgctttttctcaagcgtggaaagcgcgcgcaaaggaacaaacattctttaatctcttgcgagactacttgttcacaatgaagattnntncttttctcctt

SEQ ID NO: 7377 - DNA, 269 bp, Oryza sativa
  unsure (1)..(269): unsure at all n locations
cacaatacacttgtaaatccttctntggatcaggtcttatcattatatgagctgatattaagcgattcttcaactcttgataactctgctcacattcttctgaccacttgtactttacatacttttgaaagaatcgngtcatgggcttagcaatcttggagaaattctctataaacctccgataatattctgcgaggcctangaaactgcgaatctctgaaaatgtctttgtgtgttccagttggttacggattccacattactatgat

SEQ ID NO: 7378 - DNA, 333 bp, Oryza sativa
  unsure (1)..(333): unsure at all n locations
agccaccgcggatgcagctgaccgaccaaagacngagagtttattgcacacgagaagacaagcagggaaggaaatgagtgccanaccgacaagaggcaggcaccccagaaaagtgtgcaacgagacatcgagtctctgagctcatataagcgcaaaggcctgaacaacccgagacgaacttgccacaagatcaaaccataacagctagatcaacggaagctctaatattaagtcggctcggccgatctagccaacgaattgacaaaatataagtacagctacatacccactaatcaacaaagacatccccacgctaaaacaacgacgaaagaa

SEQ ID NO: 7379 - DNA, 197 bp, Oryza sativa
  unsure (1)..(197): unsure at all n locations
tgaattatgtaanaaatagattaagaaacagactatggatcaatacttgaatgatagcttggtcgcatttattgagcgtgagatgttntgaaagtcaagtaccgtgatattataaaccactttcacgtcatgaaggaacgcataattataactactcttacaagctatgaaaaaaccgaaataaaaaattagagata

SEQ ID NO: 7380 - DNA, 419 bp, Oryza sativa
  unsure (1)..(419): unsure at all n locations
tggacaatcaaacagttcataaatcatgatttggaatcatttacacaaaacaatcaagcatatgttactccaagataactgaaccctcacctcttcattgcctctatgtcatcgctagataaattctgtgctgtattattatcgacaagagatctattngccctagtttcatcctgcgagggaccatcaccagcatcttgcgttgtatcatctatgtgtaaatgggaaccattgttacaaacaagaaatagtacaaactatgaactatatcgatgagtacacgaactgatcaacaaccatgtgtaagataactcaactagaacaatcattgtagcaggacattnttttataaacgataagctaattgactttgagagtactttttctcaatagcaccaccaccaccattcgtcctagat

SEQ ID NO: 7381 - DNA, 160 bp, Oryza sativa
ctcccgagctcctcgatgactgaggaacccatcccctgttgtctttccgacgaagcgcacacgggacagactgtgcgccgactgcgcggcatatcgtgcattgtatggtaggtggatgaccggcttcgcttttccgggcctcgttgaattggcgggttcc

SEQ ID NO: 7382 - DNA, 264 bp, Oryza sativa
taagctgctggcagccacggcgcacgggacggagccatagtattaagaccggttctatctgtttaactggaaccagagcccttaccggtctggtccaggtaaaagaccggcatgctatcgatccatacatgaaccggtgagaccgtccggctatgaggtataatcgctattaataccggaaataataatatggcgcttgaacctggtctcatactcgttgtatgtagtgatgggcacgacgtgcatgggtgatggtgggggaaa

SEQ ID NO: 7383 - DNA, 420 bp, Oryza sativa
  unsure (1)..(420): unsure at all n locations
taagtcacctgacgcatgcaagctttcttnctgcactgaagacagtgtttcttttttgttgcctgctccgncgccgcgtgcccgtgcgtcgactcgttttggctaggcacgagcaggcttaaatatgagaaaatgaaaaaagaacagcagcggaaacaggaaagaaacggaaaggaaaaagtgggacccatgtaggtttcctcatacctttgtcatgtgggacccacatcatccaagtgatcgtgcacccggtctgcgttctttctgacactgaccagttaaccccttgcacgatccacttcatggtctacgtgggctgtttaatggcagcaaggccccacccgaccacatatcgatctttggactatgagtcgagtctaccccatcaccagcttggtagactctgtctaccatgacttc

SEQ ID NO: 7384 - DNA, 169 bp, Oryza sativa
ggaggatgacgatgacattcctttcaacgatacaaccatgcctattgcacagcaaggaccaatgactatagctcgagctcgtgaacttaattatcaggtaaagtcattcctaactaatcatacaagttcttctcagaattgggtgctactaaatggatgttggatctac

SEQ ID NO: 7385 - DNA, 371 bp, Oryza sativa
aatgtcttataacctgaaatggatggagtatctaaaacaacgaatttagataaaatatttcctaaattaatttattttaggacgggaatagaattgtagagaagatcctatatatatacccgcacaaatcgtactcgtagatgacatatgcagaacgtgccggatcacgtcattaaactggtataaaggccgtagcaaccaaaaaagaattgataaaagacagagggcccaccgtatatgcatgtacttatgtgacataaggactatacgtgtcctggaatcaaggtgttacccgatctcttttcaagcgttggccgggtggatcaataatcggtgatcgatgccaccaagcgctatgaccacaccaccgt

SEQ ID NO: 7386 - DNA, 321 bp, Oryza sativa
  unsure (1)..(321): unsure at all n locations
ccgggagagggttgtctatggttatggccccaccgctntaaccttgattcatctcctagtttccactgatctccagcgctttttggatcgacggcgacgccgccctctccatctccagagagagccctcttctccgtttcttcctactaggctactactactcctcctcggctcaacccttccgtacgctcacccccacgcgcgccggcttctcccagaacgcgccgcggtgagcgccgccaagcagccttcactcttcgcgcgcggtggcggcggncagtctcagacgcttcttctccgggatctcggatggctgatact

SEQ ID NO: 7387 - DNA, 222 bp, Oryza sativa
ggcccagcaactaatcgcgccgcaccagcgagagcggtcgacgcagaggaaccgctgccgctcccgagcccacacagaagatcagcacggccgtacagaggaccgccttcgcttctcatccgagaggaaatccctatgccaccccaggccccaagcccgggcccgccaccagcgacagagttagaaaccgtgcctatgcccaagcgttacttgcaacctagc

SEQ ID NO: 7388 - DNA, 412 bp, Oryza sativa
  unsure (1)..(412): unsure at all n locations
ctatttagnncctcccgacatcaggaaagaccttgttatatattgcgatgcttcaaggctaggactangaggagtattgatgcatgacgggaaagtttgggcctatgcgtcacgacaattgcgaccacatgaggaaaactaccctacccatgacctagaactcgcaactgtggttcatgcgctaaagatttagagacattatctaattggaaaccattgcgatatctacactgaccacaagagtctaaagtatatcttcacccagtcagatctcaacttgaggcaaaggcgatggttagaattaatcaaggactatgatttagaggttcactatcacccaggcaaagcaaacgtggtggccgaagctctgagtcgtaagagccattgcaatcatctgagaatggaacggatg

SEQ ID NO: 7389 - DNA, 291 bp, Oryza sativa
tctcagcttacaatctacaccttaccattagggagtagggttttgaattttatagcggcccttgcagcctctaaaaggggcaggaggtgctgtaaaggtggcacctcatgtgctttaaatgctcaacgaatgtgcacgtataaaattttaaaatatctacaaagagttagggtgtaaatgtaaacttaaaaagaggttaattttttaataatagataaaaaaaaacaactgattttgagtaagaatgactcaccatttggtctaacactctaaacagatcttttttggggg

SEQ ID NO: 7390 - DNA, 389 bp, Oryza sativa
  unsure (1)..(389): unsure at all n locations
caagcnngatagccacaaagacaagcatttgttatttaatccaaatggatacatttgtgaagtgcctgagaagctgattgaaaatgcaacggagtttctaaaatccaaaaagatgagaaaggtcgttatgacattaaagaaaaagagctgatgaagttactgaaagtcaagtacatatctaggcttgtagatcctgtggaagctgatggtgtgggtgctgctcaatccatatgagaaccatcaacacagatgacgtaagatcttctatagactctctctcaggggagtttgattcactatgtattccaagtatgtacttggtgtattccaaataggttattatgtaaccacagcctcgagagcttcttgagaaaataacagatatggct

SEQ ID NO: 7391 - DNA, 240 bp, Oryza sativa
  unsure (1)..(240): unsure at all n locations
cgcatcctctctatcgcgcgtatgttctcgggattagcnntttangttctngtgangagaccacgaacaccgagggagtttgtctcaccggcacactcgaacacacacatattcggngttcaagttcatgcgcgtggacctaagactgtcgaaagtcttggtcaagtcctgcaacaatgtgtcctggtggcgcgtctataccaccaggtcatcgacatacgcttctacattgcgccctat

SEQ ID NO: 7392 - DNA, 387 bp, Oryza sativa
  unsure (1)..(387): unsure at all n locations
agctttagaatccaagaatattagttctttttcnttaaaagagaataggtgttaatacaaacacccacatttcacaaaacaaaagggtaagccaaaaaaactaatacaactgaacacaaaactccataaatctaaaagtaagtaccgtgatagaagatttccataaaagggacctcacaatccaaaaaaaaaaacaaattataagttcaacctaagagcttttagaatccaaatagatgcatgaacccaaggcaatgtaaaaaaataaaggataaaccacctttaagaaaaccaatagtaagtaccaagttaaagatttagattataaatacaaatgcaagtcggcgacaaaaacaatgttttctatttttacaanagcaaacatca

SEQ ID NO: 7393 - DNA, 323 bp, Oryza sativa
  unsure (1)..(323): unsure at all n locations
cacttatacttcaccagcgctgaaacgatatggtttttcaaaagaaaggacatatggagaaaaaaaattgaattatttccaccacatctatgcatcagttagctagtcctcccctttcatgatgcacaagaagaccactacgtacgaacaaggaatccaccatgcatcgtttgcttccatatgagagagacaaatcaaaatccaaagcgtgcaaaaagaaatcatctgattgaagccaccatccacgtgtgcctgttcacgcacgggtgattgattattccttntcggttggtcgatccgatcgaaagagaaagctccatcta

SEQ ID NO: 7394 - DNA, 223 bp, Oryza sativa
gaatggaagccaccccagaacagtacttcaggcccgcagtttctaaggttgggaaggatcttaccgagaatcattcgaggacattttcaaaatccttcgaccatgacaccagttgttgaaaaagaagaaaaaattgtgtggagcccgcaatgcgaaaggcggtttaaactctcatgaaaagctggttcctcgccggtgtaattttgcggatactccaaggctt

SEQ ID NO: 7395 - DNA, 162 bp, Oryza sativa
gctagtgagcctgctataccagtgacgatatatgatcttgccctatcgtgtgttattttgttgtaggctgagtgcctttaaaatggaatatatcgtatattaaaagtgctttataaatggttggggtgacccggctttctggacgggataataactacgtcg

SEQ ID NO: 7396 - DNA, 334 bp, Oryza sativa
ggaaaagcgcatggcgttggagacaaacgactcatacaggttcaggccttctaataaagaagcaataccctactcctgaccggcgatgagaccgccgagtggatcatcgattgaatgactggggaaaaataaacatgtgcccctagaggcgcccggacaccccttatatatgggaaggagtccggactacaaaagacaatctatattcctaacggaatatgaagagacgaggaaaatacagtccgaaccgactaagcctcaaggtgtgtccttgatacacaagataagaaacaaacccgagacacagacaagatattctatctacattaagtat

SEQ ID NO: 7397 - DNA, 187 bp, Oryza sativa
  unsure (1)..(187): unsure at all n locations
tcttgaatcngcctgcccttaataaagccatactggttctggtgtattatanaaaggatcactttntgaattctatttgccactaagttgtcaaaaatttcaaggatattcccattacagaaatacgcctgtaatcatttataatctctggatttagtttctttggcactaagataataaacgaatg

SEQ ID NO: 7398 - DNA, 389 bp, Oryza sativa
  unsure (1)..(389): unsure at all n locations
agcttcagctntggtctagtaccttcagtgttgttctcttacattgggcaagcagcatacttgagagaacattcagagcatatagccaacactttctacagatcaacttccagtatgtgtagaatcatcatcatacttcaatagggcatacatctgactttttggacagaggttaattaattattttccacatgtgaacaattccagacgtgatgttctggcccacgttcatcctggcagttgctgcatccattattggaagccaagccatgatatcctgcgcatttgcaaccatttcgcatttgcagacactcaactgcttccccagagttaagatactccacacatcaaggcaatattcaggacaactgtacattccagaagtgaac

SEQ ID NO: 7399 - DNA, 401 bp, Oryza sativa
  unsure (1)..(401): unsure at all n locations
ttaagtcacctgccgcatgcaagcttcgaaggccaatgggcgtcatccgactaatttatgagaatcttaaggagatggtggagcacggcgttctccctgccaaggagatcatcgggtggcgaccagcgcacggtgaggctttcccgtctccggatactcatgagattgtggtcttctcgcatttcttctacggcggctctgctcttncgacctcataatttttccgcgggatcttgaattnctatggaatcagcttgcatcacctaaacccgatttccatagtgcatatcgccaatttcgtccatgcttgtgaagcctttttggggatcaaacctcactttgctctattccgccggatcttcttctctaagccccaaccaaacaagaacaaaccgtgtgta

SEQ ID NO: 7400 - DNA, 147 bp, Oryza sativa
gagcaatgcattatgataaacccatgttactgtttatacttatgatatatgctgccactaccatataagggatggcggtgtgaagtataaaatacgggttagtgcagacccatgatgtaatatatggcactactatgtgggtgatta

SEQ ID NO: 7401 - DNA, 447 bp, Oryza sativa
  unsure (1)..(447): unsure at all n locations
agcttgtctttaatcaacctcatgatgtattgttcataatatattccctgagtgaaggtccccttggagatggcaatctcttgcatcataanagacacaatgtcgaactgacgaccctgaatgattgcatcgatgacgtgccaagccaccccccaaatgtcatcattgttgccaaagcgagggaggatagtggctctcacaatcctgttaaccacactggggatagtcctcaagccggcaaccttcccatgtgtgtaccgcgctccatcttcatagaactgagagagatagtctatggagagcggattgtgggtgtgcgcctcatgcaaatcatgtccaaaatccaagcgtatgttaaggagccgccggaactgcctccgagagatagaacactgaagggtgtcggacatccacttcatatcactatagtcttcagccacccacact

SEQ ID NO: 7402 - DNA, 417 bp, Oryza sativa
attaggcgccaacgactagtgaggttcactgatggcatcgccaaatcctgtaccaggtttgaggatccctctcgtagaagatgttttcagcagctgcaggagctgctatatcggcatgttcccacttctgagcgttcatatggcttactatagaaagtctgtccacgtgaaaagaatgtaacttgcaaaggatgttagctaaactggcctcgaaatattagtttctcttggcatccaatactccctttgctatcttatctagcagagagagaggctctgctatcctttgaagcacaccgcctcttctggcctttcggcacataagggaactagcatgtctcgatgttctttacctttcttttgctgtctcactaagataccacagcaagctaaatcgggtggccgtcgcgaacctaa

SEQ ID NO: 7403 - DNA, 283 bp, Oryza sativa
  unsure (1)..(283): unsure at all n locations
ataacttcacgaggagttctcttcaatcttgtgatgagtaacgtggtactacttactactggtagtagttgtttattaanacacaaaacaaattctatacaacaaaacaatgtatagagtcgagtcgccgcaaattcagaatttgaatgaaagtcacaaatggaaggtagcgaaactccttcactgatgcgcagagaaagcctagtgaattgtcatatactaacatccatctcttctttggatttctactccataaagggaatngaatttaccaggatcattc

SEQ ID NO: 7404 - DNA, 119 bp, Oryza sativa
gacaaaaaaaccagaggggggcacatacgaaccgataaaacgcacataaaggacagtacaacgtaatgaggagcaaacgcaggtgctacagaaccaccagcacatgggcgccgacaaag

SEQ ID NO: 7405 - DNA, 441 bp, Oryza sativa
  unsure (1)..(441): unsure at all n locations
agcttgtatgtntatactcacccatttgttttttgaatacgcgagaggcactacgaggcgaaaagtgatatgtcacggaaaccaggtaatactgcggatatatagaggagtagactacttcagacttatttgtgcatcagccgaccatgaatactaaagtcgagctcggagacaatgcttttttgctatgccggacggaccagcgctacagattaactatggtactttcaatggataagcgagctattactgatttatccacggcatatactaccatgacacttattagaatatgtggcactgaatgcgaatcacaaccataatccanaagttttatgattttaccactggatacttacggagcgttacctggttaagacatgattgctatattgctttttgcccctgctggcctctgataatgagcctcagctgacaacg

SEQ ID NO: 7406 - DNA, 465 bp, Oryza sativa
  unsure (1)..(465): unsure at all n locations
agctntatgtgatcacgacatctctttattcttcatgtatgntccaaagagccatgatttgtgagtgagcacaatccagcattagtttgagaaatggagcaatccaacaggccaactgttctaaccttctgtatggataggagagaaaaaaaacgagcctgcttaaagaaaaggaaacaagccaaggcagcatgcatgtgagctagctccaacatattatgttctttgtcactcaccaattagctctctctctcttggtaggtgaagcatccatcactcgtacggaaaccttcttgtcagtacaacaaactgttgccatctctgaagaaaaagaaaaaagactagataagaanaggggatgataaaacatgcaacaacttgtggttgatccatgcaccatcaactgaacctctganagacggttcgacactttgacatgacagtgtaatgtaatgatgtaaactg

SEQ ID NO: 7407 - DNA, 371 bp, Oryza sativa
gagaattcaaatgggtcctgaattgtgttatagatggattctgctacaaatatcatagcagttgattctatcatcatgaagcatgttgtttgtttattattctaatgtgtatttgacatctcataatttatcctgcacccacatcattatcttatgtacgaatggaacagaatacagaataagccagagaggaatggtcttgccattccagcctctttccctttctttcaaccatatgaactactacgttgacatgcttgctgtagttgaatcctaaaatatatccaacttactaaccatgtttgcaagcttacgggacaaacatacctcaatatcgtaattaattcacttattcttcttatagatactac

SEQ ID NO: 7408 - DNA, 415 bp, Oryza sativa
catttttgaaatcactaagggatttatttctttttaagtgtgggttgaaaaagtgacttgcgtctcgaattcacttaagagatgcttttcaacaactcaaatggtaatgtaccgacccccggggtcagatcattacttatcggctcccagagccatttcacttgattaggcggctctcagagcctctttcattttctcggactcccagagtccagctgcccagcagcataacaatctgtttccactcgggaagcctaatttatgatgcccgtagacatcccgaatcacacagattcgtttctgaccactcaggtcatccatctgccacgtaggctgattctagttacgattcccaaaccacaacaacttttcacaaagcacacgcaaacatatctacgcaacgggaaccacctcc

SEQ ID NO: 7409 - DNA, 457 bp, Oryza sativa
agcttgatggagtactactacttacttgtttccgtattcccaaaaactcacttgctttctagaaacggcagggatatataaaattttggaaactatgaacttttacaagagttagtttaatttatgcagcatctctatttcaaaggaggcccaatgtgttcaccttcgtccatgtccgaccatttttcatttttcagctagcaatataaagaaatttgtgaaaacaaattactagtaggttttgttatgagtgatggaactgggtcaaatcgagatgcatttgataggacagtggtaaggggtgtatgattttaagcttgaggttctgtattcaatccttaacacgttcacaaaatcttctaaaaatgttctagaggtgcgtctctccctctgaatcttgttttttttttaattgggtcgaatctctgcctatcgaacaagcattttgactatagat

SEQ ID NO: 7410 - DNA, 298 bp, Oryza sativa
  unsure (1)..(298): unsure at all n locations
agctntatgttcggcgcagactaaacggtatcttatgagcaaganctggtctatatagcacccttctgccttaaaccataagttccggaacctttttcaaaacccaaaggaccgggtctgctacaaataatggattaagaagagctctttgggcgcgaaaacaaagagcagggccaatatgtaaacttggattggaccgcgaaaatttatccaaggaggagagatcagataatgccgccggttggtatctaactgctagccaacacgaaggggacaatgggcttgcccccgcctggag

SEQ ID NO: 7411 - DNA, 393 bp, Oryza sativa
gcatgcaagctattccggataccccgtgccgagtttgttctttgacgaagcggcgcacccggagaacgggtacctcttatccaaccagcgcctacgtgacctttgaatggacttagtccccgtccgacagtgcctctacaaaaccgagcaaaacctccaggacaaaggcttgcttccggagctgtcgcacaccgccgacgaacaccaacacccttcctgacgatcccacatccagctgcctcggagcccggccatcgtgactgcatattaattactgctggctgctgatatatactcgtattgagccctaattctatgctttatccgaacggatttacatatatattatatctacatgcacaccgatccacacacgtatgtataattttatgt

SEQ ID NO: 7412 - DNA, 149 bp, Oryza sativa
tttttttttataagacttggctgaaatatcttacttgaatctggaattcaaagtattaggccaggttacaaacctcgcatatttaggaaattacttcctattcctgataatgttaaatttatattctaaagaatatatatttaatccac

SEQ ID NO: 7413 - DNA, 326 bp, Oryza sativa
caagagatgaccacacagcagaatttgctttgagagggatgttctggatataaatgtacgcatccgtctagtgtgcatcccttgcaagaagatcagccatgcaagtgtagagctcaatctctggtttgacaccatacttctcctccagtgaatcaaatatatgaaacccttgagataccaagccgctgtgtctgcatgcagaccagacgcacacaaacgttatcttatcaggatggtacccaagtgaccccatttcatcaaaaagtgctatggcattttcgccagattgacaccgagccatatcatttatcatagcaatgaacaac

SEQ ID NO: 7414 - DNA, 180 bp, Oryza sativa
gtagcaccaaaacaagaaagagtggtctgaaaagatgagctttaattcttatttctacccacttggtcttttactttagaaacagaagaatataaaatggatctatacaacaactaccacgcgatgtacaagaaattttacagacaccaggagaccaccccacgtacagcagcagcttca

SEQ ID NO: 7415 - DNA, 422 bp, Oryza sativa
agcttaagcattgtttgatccaagctcaatgattattaagctttatatcatttataaaaagccagcatttcatccatgattatcagtaattgtactcatttttgttattgctatatacctgtaggcataagaagaaagagaagaagtcgaagcacaaatcaaaaagggcagctaatgaagcccaactggaagtcctgtcactaccaactcagattgtacccatgctatttctagttcttgtgtctgaattgcttctctacagtgacagctagaaaacatacgggtgggctgcaccgtgtaagaatcagttctttagtttggtgtggaagggcttcaaactttgtattatgtatgtgggaatttcaacccaggctaatctacgtgccaaaatttctcttactaggctcaaacggttaaaaact

SEQ ID NO: 7416 - DNA, 426 bp, Oryza sativa
  unsure (1)..(426): unsure at all n locations
cgctgcaagcttgtatatgngctctacggtggaactgtttttttgattnttgnctcagcnncangcacaatatatcatttattctcctctgtaataacctcgtaaaagcgaaaacttctgttgtcagatgttgctaattacaaaggcaaaatattcaagttcgcaaattcagtaaacattgcagaagctgtgataaatgtgtggatggatttgatcatcactgtcgggtattttcttatacaaacctatgtttgtcttcaaattttattcgcacgtctgatttttgcatccattgcagtggctaaataattgcgctgggcgcaagaactaattcacattttttgctctgatgattaccagcctcctctgggtctgtaaagtggccttactcactctctattcngaatacatgtttaacacagtact

SEQ ID NO: 7417 - DNA, 191 bp, Oryza sativa
cctcttcgtcttcttcttcttcctcttcttcatggggggggtagtttctgaatcgtctctactgctaaacttcgactctgatgcccgcattctcttccttctctcctaaatcacattctattcggaatttctttttgagggtactctaatctcactaatggagtgaatgaatggttgaatggtggtggtgt

SEQ ID NO: 7418 - DNA, 365 bp, Oryza sativa
gcagcgacgaccccggtgtacctgtccggcagacgtatccggtcgacagcctcgacttcattaccaacaacttcgggaagatttctcttctcgactctgaatcagacccgtcgggagagaaccggatttccggcccgtttggattccctaacgccgctgaaagctacttctagaccatcttaaccgaatcggcttcaaaccactcgggcgagatcgcattttctttaacgacaccagatcaagatgatggggcttacccaccaatcctgatgaagctccccgacggattatcgggcgtcttcaccacgacagcgtcttcatcccgtaggcctatgcggaagtcggcttcaacgccgatttcgcct

SEQ ID NO: 7419 - DNA, 398 bp, Oryza sativa
  unsure (1)..(398): unsure at all n locations
acatatcctctctggtagggttagggctttaagatgactatntgtctttctttaataagctaatgaattttaagccttaagtttaatggtaaaatcttatctccatttcacataagaagaaaaaactacttcaacctaactttttcttaacagtgtaaggttgtcttctgcacctagagttgggaacccactctcttttattttacgcgtacgctnttcaaaatnngtaaatggtgtgtttatttgaaaaaaaatctatacaaaagttgcttanaaatcatattgatnctttttttacaaaaagataataattaattaatcacacgctatggaccacttcgttatctgtgcgggagggagtacttcccatcccttgctgacagtctaagagtgcttat

SEQ ID NO: 7420 - DNA, 480 bp, Oryza sativa
  unsure (1)..(480): unsure at all n locations
gcgtacgtatcgtacacaccgattaatggatttcaccattttttattataatngtacatgagtaacaatcttaactcaaaagtcattatatattagccgtaagaaaaaaaaaagttgaaatttctaacaattntaagagtgaaattctatcaaagagttaaatattataaagttgataggctaattcacaaggtattataagaaatcttacgaagaaagtttctatagacgatgtaccacttagaaactgggaagacgtgcccatgatangtttgtactcccttccgtttanngtataagacgtntngattttagtcaaaatcaaattactttatnnattaactaagttatataaaaaaaacagtaacattttaacccaagacaatttattatgaaaatatatttaattattgatttgatgaactactttagtattataaataatactatatttgtctataaacttagtcaaaaataaaa

SEQ ID NO: 7421 - DNA, 114 bp, Oryza sativa
  unsure (1)..(114): unsure at all n locations
tctgaataaggatgggtcgcttgctgcttgacacactttatgttatgacagncatgctcctcttgatgctcttcagagagtcgggaaatctattgcaatgcacatcgttgcgac

SEQ ID NO: 7422 - DNA, 369 bp, Oryza sativa
  unsure (1)..(369): unsure at all n locations
gcgagcttccgccggcgaggagggcggcgagagacgacnaggacttgtggaagttgaagccgacgcgaagcttccgcgcctcaccacctccgccgtcctcttcccgaccccgaggccggtcggttcctataggcccgccaagggcaagccgatgccgccgcccatcaccatctccagccgccgtcctcgacccggcacacctccacctgcgcccactcctgccccatccgcccttcgctgcccgccgccccggaggatcccgtcgacggccgcaagctccgcgtcgcactcgcgcacagctttctcgtcgtgtccgtcttctgcagcgcgtggttcctggacgatggggatggggatggggatggggat

SEQ ID NO: 7423 - DNA, 77 bp, Oryza sativa
agcagtatgaggcgagagaataccgatctaatgatgaaaagggggatctatccgatggggacttacctcaacgtatt

SEQ ID NO: 7424 - DNA, 377 bp, Oryza sativa
gatcctttaagtgtgactcatattttatatatgagcattaaactagtaagggcagccatgctttgccttactagagacaggtgatttacaattaaaattaaaggtacgttattctatttttaactgagtgttcattgactctcttttatctcattaacaatctcgagatacttttattgccaataaatatattatatttgaaccatcctcccggacctctgtttacttgattcatatacatgcaagttgtcatggatgcgaaccaataaacgatagaaatttcttttaaacttatttattatgtcgcgaacttaccgatcgagttattttaattctaaaagagtattgaaattcaacttgcagacttatcactttta

SEQ ID NO: 7425 - DNA, 328 bp, Oryza sativa
acaaacatatatgatgagtagtatctgatataaatatcctactcgcgaaaaatattatgtattttagaatatttataaatatgtatttctcctcttgacaattttgatttccccgagcagatgactctgtacgtttaaacactctgtccgactaatcatagcccacaagcatcgggagtcggcctatgcatttccccaacatgcatatgagtgatatgagttcgtcattaatggaacaaaggttcacggatcaaaatttactactcgggtacttttgccatattaacagcacaaaagaatttatctcatccctatgctttgaattatt

SEQ ID NO: 7426 - DNA, 262 bp, Oryza sativa
  unsure (1)..(262): unsure at all n locations
atatgacttctaagatgagaaatacaccctatgctaagtgggagcacatgatttgaaaaagggttagttntataggtatcgtcattgcacattactccctccggttccataattcttgacagtatggataaggttgaggtcaaacttttgtaacttgagtatcaataactntaaaagatttagttaaacgaacttaacaacatattaaatttgtcttcaagactatgaaaaagtaacatgcattatttatgctatatatata

SEQ ID NO: 7427 - DNA, 463 bp, Oryza sativa
gcagcttgaagatgtgttgcatcttgttgattacttgtcttataagggtctggccttattttcaaattttgaggaagctcaagaaaccctggaagaagctgaaactatgctctcatctctgttgaaggccaatgaggagctaaaacttgaaaaaaaccagtgcaggcaagccagggaattggtggttgctgagagaacttctttgatcaatgatttgcaggagcttgaagcgtcaaattcatttacagcacagaggtatgacaaattgcatgaacaggtaaatggatgtgtagcagagatgacaaaccttgctactataattaaagaatcttttcatcaagtacaaagaggtactacacgagaactatttgcattctgctcggaggttatcagttctggccaggacttgaggagatggatatatgaatcaaggtcttatcttggtaacatgggagcacttcta

SEQ ID NO: 7428 - DNA, 404 bp, Oryza sativa
  unsure (1)..(404): unsure at all n locations
gctgatacctctgtaaaaatgcagcttattcctgagtctattgtaccttgttcttgtaaactatatggtatggatggtcccacactcatcattatcagtagcagaggaagttcttagtacaggacctggaatagctgttgaggtaacagttattttgtacttcataagaccgacttactggttgttgtaatgacctctcacctactggtggtttgataatttattatactttctcctgtntaagtgggtgactgggctgctttaattaacttaacatattatacgattgttttaatttctattttgagaattcaaatattaaaatctatatactgtaaaaatctctgtatgctaacaatcgacataatgatgagtgcaggacttatgatttctgtcatgcgaca

SEQ ID NO: 7429 - DNA, 386 bp, Oryza sativa
gtgattgccatcaacgtggccgagtctgatgtgggttaccctatcacggtatttggcactgtgctggccacggatgaatatgatttcaggcgtgtctatctgttcaagcgtgacaggaacaatccccagaacatcacctcgccgggatgttactgaatcgttcctcctccttgctagattaatactatttactgttcaaatccaaatgccattgcctttacaatccgctgtctgatattctacactatacaagacctgttaattaggctcacattgttaagtgaaatgtagacggttgcataagttcataatggctggcgaaacgcctgatacgatagaaatccttggtcctggacattaaaaatcctactgccagatcttaaacc

SEQ ID NO: 7430 - DNA, 347 bp, Oryza sativa
tatcttcactccttctaataacagaaacaatttttttttttttgggggacgcaacacatttaacttcgtttatggctgtttaaagcagaaccacatctctctgctatgggggttcaatggaatcttaacatgttattgctttgcgctcccctgacctagtaaacacagtccgccccaggaggtatctaaatgaatctatattatttgtactcatcaccccaacagtatagaatacgggaacatctattatagtgtactatatccaattaatgagtgatatgaaaaaattcaatattgataatagccttctactaacatcattctcctctcgtagacatacctcagga

SEQ ID NO: 7431 - DNA, 423 bp, Oryza sativa
  unsure (1)..(423): unsure at all n locations
acccgcaggcatgcaagctngacacttgcacagaanggntccatttttttcccctgagcgagaaagcgggcttgtgatcgctgtgcatgacacccctcctctccaggccgagcttatggcacatgttgctcttccctgaaacgcagtgcttgcagcccatgcactctccgatgacaacggtgagcacatggtctctcacttcgaactcggtcacaccttcaccaacactcttaaccacactacacatcagatcgttccaaggcagtgttccgagcaacttgcgagacatggcggcaacagcaaaagagaccgctagaacagcttatatagactatacagacccgggtgctgcgtgcacgaaaattctgcggaacagatcgggttgagcctgcgtttagaaacagcacccaatcatgatccctc

SEQ ID NO: 7432 - DNA, 226 bp, Oryza sativa
  unsure (1)..(226): unsure at all n locations
ctgaggagatcactctgtaccgcccatacctacaatttcattntatagtttagcatgcccttggtgtacttctgttttattntattctctcttacttctacatgtcgtggtttgaatttcttgatccataatttggctataggactggtcataaccattactgagttaaatagtgcgatgaactaatgatgtcagatttatagagcacaatgccactagatgctta

SEQ ID NO: 7433 - DNA, 136 bp, Oryza sativa
  unsure (1)..(136): unsure at all n locations
cttgtcaataggacgatgatgagagacgactacgggngttgatgtaactgacgcaccgacgacggagaatgggagggagcaaactgaaccctccgcctctgccctgcgcgtccgagctgtacaacgcgtccccgct

SEQ ID NO: 7434 - DNA, 398 bp, Oryza sativa
ccggattttcatagatctcatccagagtgggaaaaaagcattgatggtgacgcacacaccttatgtcaccagagaagcgaagcgattctcgacggtcgatgaaggtcaagattgagtattggatgacaacaccctcactcgtctagaacttgtggatgttgctgttgacctgtcgcagatgcctctcaaaactatcgaggtccactgatgtctcccatagatggtcgtgtgagacaagggttggagggggccaccgacgtgtttgggttcacagtcctcaccaccgccattgttgaatattgtgctctacttgaaggtttcttgtttacgtattgtgtctcatcaccaccagatccaggcgaacaagagagacgcatgggatgatgctatggcacaca

SEQ ID NO: 7435 - DNA, 229 bp, Oryza sativa
ttcttcacgtactcctattgtttctgtgatgacggatgcaccacgacagctactacatatggacactgttggtccagctagatgcaatccgttggaggaaagaggtatgtgttggttattggtgacgatatttctcgatattcttgggttttctttatgtctactaaggatgaggctttttgacactttaaaagttgtatactcatttggctcttgaatttttggatct

SEQ ID NO: 7436 - DNA, 376 bp, Oryza sativa
  unsure (1)..(376): unsure at all n locations
agctttgtacagatgaatggttaatatctttatgtctcgagttatacgtacggctaatatntcagtcctatttgtatattatataattcttctgctaatacatggacaacatagctcacaaggctgactatgcccaaacatacgaacaaagatttttttgaacgactctcacgagacgatgcgaagttttatttatagagcaggaaaaaattacaagattataaccctggagggtcataacccagagaaagaagaaaatataccaccacccacacaccggcagcaccaacacacacgaccaggagaaggttagcaccggaccggtcgccgctagaccaacaaaggaacacagatgaaatcgccctacagcaacggg

SEQ ID NO: 7437 - DNA, 230 bp, Oryza sativa
  unsure (1)..(230): unsure at all n locations
tgagccgtagcgagagcacgtgcatatctcgctgtggttatcattacattgaggcgactggtattgcagccgagctctattcagtaccacacgctgagtgaagatgtagcctttattttctgcttaaatcanaatgagggaaatgctttcctagattcgctatatttgtcttctaatctgtgagaaaaagaacaacctttattaattaagtgccaactattagctatgct

SEQ ID NO: 7438 - DNA, 368 bp, Oryza sativa
  unsure (1)..(368): unsure at all n locations
gcgatgaaattaagaaaatatctaagctgctccttaactatttgatgctgcacatattaaagaacagttgacccgtgctcatgtaactacttacagagaaattaaatgcttgtgtaaaaacaaaaccagtcctacctacatatgcaattatattctattaatttgcagacaatactagaaaggaaaattgttgttgctacaagtacactagctcagcactcagctttcatgttagatgaccaaatcattctcatctaacctgcgcgtgcacncctgtgtcagtaacgtttatcatctgtaacacacgggctgcaagttctgcgtcaattaactcctgtgattcttggctgcataacacaatgaacatt

SEQ ID NO: 7439 - DNA, 185 bp, Oryza sativa
ttcaatctgctctacaaaaagtccaacgattcacatagtccaatatttctttaggttcattcagtactagggcttgagcagcttacagatcggcgggtggatcaggatgacctgccgatagtatgcagacggccttggtggtgctgtggagactacccagcggcgtggagcggtgaacaaagatg

SEQ ID NO: 7440 - DNA, 420 bp, Oryza sativa
  unsure (1)..(420): unsure at all n locations
agctaggtaagaaccgatcgacatgttttctacgttcattatggagattcgaacaaacatatatatatatatatgcatatatatatacgcaaatccaaaaagaccagatattaatactgctcagatacaactagccctactatatgcacccaaaacaatgctggttctgaaggccctaccaatacctgatttccaaccgtacgtgcactaaccggtcagcatcactgtaaaaccgtatctgagcaggttgattaccaacatacacaggactgtgatgagacagccaaaacagcatcaaacgggctcaattatgctgncgacggtcgataaggacctatttaaccatcatctatcttaatagataaagcactaagacttctacacgtatactattatacatatatttaaaaacattcataa

SEQ ID NO: 7441 - DNA, 261 bp, Oryza sativa
agttggattttgagtctgattatgaaacaagtttgaataatgatgtatatctattgaaagatatctactacgattagtaactgtatagaaccacaccatcttgtccaagttcataagtgttatgaatgtttaatttttagtacttctacagagataatatagatgcgagtctttgtgttcaataatcctaatctaaccaagctcgtatttaatcttgatgcaaaagaaattttctatttgttacatgggatgagttaattt

SEQ ID NO: 7442 - DNA, 397 bp, Oryza sativa
  unsure (1)..(397): unsure at all n locations
tgcagcgaacacgataaatgatgaagcctcttggcgaagagcgcgcatcctgggccaaagtcctagggcgaagaatatactccgaatgaggatgacttcgccatatctaggccagctcccggaaggcccacagggccattccagccgcttctgcccgttggccattgagccagcgatcgccaatttggcctattagaggcccatgcaccttaattacactatatacccatgtaaatgtccctttcataagggcaactatataaattccccttgtaaacctaaacccaaatagaggggcctgtaatagggttataaatagacccctacggccatgttaaggggggattntggaagaaaaattctcagtttaatacattcttactggttttcaaccact

SEQ ID NO: 7443 - DNA, 83 bp, Oryza sativa
ttttttcaaacatgggggatataataaaagtgcccttctaacagtaattttagttgccgctgtcgataaaccattcctggtgc

SEQ ID NO: 7444 - DNA, 321 bp, Oryza sativa
ttttttttttattcactaacgtctgtggggtttttcgacctctgtccatgtgcggtctggccaccttttaaaggaacctttcaattgtggcctgaaccatggaaaaaatcctcgataactggttttttgtcacattattccttttctactcttagtcgctccctttccaaaacaatgtggtgcggcttaagtcctattggtgcgttttggttatggatcatgtacttcccacattatggtttcgtcaccccttaacctatttaaatgccttactgaccctgtttaaagttctgctcatcttaataatttagggccattttt

SEQ ID NO: 7445 - DNA, 391 bp, Oryza sativa
ctgtcatctctaggcctattgcgcgacgcggatagcaatgtcacagagatacgatgctcaccgtgtttttttttttccacagtattatttgccaacttcctagctaattttttcttcttgggaagttgttctggcttgtcccgagtcctgacctcactctttaatctaagtgtctttattgagatggggatttgacggtgattctcgggaaggctcttgttgacccatctttttttttttaatttgcatgaccatatccaacggcttatattgaatttgtgtcgcatgtgacgagtgacgactattatttcacatgacgtgggttattctacaattatcacatgattcacttttcacttcgatagttagggctgttgccagtcaaagctgc

SEQ ID NO: 7446 - DNA, 212 bp, Oryza sativa
  unsure (1)..(212): unsure at all n locations
ngacaataaccttatctgntattgacggtgtacaccgcatgatattttatattctcaccatcttggcaatcaaactagactatgccttatccatatgcctcctattcttacatcctatatagggctatgtgtcctgcagagtttatattaattgtatcatatcctggttactctttgtccagtttttctagctacaaattaatgggatgact

SEQ ID NO: 7447 - DNA, 392 bp, Oryza sativa
agctctagacgagaataaggtgtgtctctactgctacaccatcaagactcccttgtggaggagtggctcgcgcaggcccacaagacttatatacctcttgagtctactcatggtcatggcgccatgaatgcttttgcttgcgtatactgcagctgtgtctcacttcatggctgttccatggtgcactcgctttgaacgcgtgcggcatcatgcataggaaggcgcggcgggcgatgatggactccggactaccagcgttccccaacgccgccggccccaaggcggccgcacatagaagcgccgctgcggtggcggctgcgcatcccaatgtgaagaatgagaagagagccgaccatgaccggtcgtctctgccgttcaagaaacggtgcaag

SEQ ID NO: 7448 - DNA, 386 bp, Oryza sativa
  unsure (1)..(386): unsure at all n locations
cgaacccaaataaaccaacccccaaggccacataacagggggcaaaggcagtataccaccggattaaacgtagacgctaccgtatgtgcaatccggtttggtaaatcatattcaaccccgcaaagacagaaacatgcaaatcaaagccactaattgtatatcaagaacaactggttggatgagcttgcagcatcatgccaattattatggcacatttcctcacatcnagaactgaaaaactgatttcaatgattccacaagcagaatagttctacacaacccaaactgaacttcaaaacatatgggacagtatcaggtatatctacactgagcttcgatatctccgcatcccgtttctcacaaaccatcatcactaggtcactcag

SEQ ID NO: 7449 - DNA, 191 bp, Oryza sativa
cccccccatatcatgaagcagacaaatacagctgcgtcgccttgacgacaccggttcgcagcactcggatgatatttggatgaatcgctcaagctgcactctgcggagaagtgacgtcggcgcgcgactttgcgacggctgccggcgacgagacggccaatcccctggaccgcaatcttggaaaactaaac

SEQ ID NO: 7450 - DNA, 384 bp, Oryza sativa
  unsure (1)..(384): unsure at all n locations
gcacggcatagcatcccgcccggatggaagcaggccgcttcctcgtcttctaccccgcgacgacatgcttctccttgctgaacccttccttggagcagacaaacctcagcatgatgaaggactcgttacacttggaccgccccgaccgagcaatgcggacggagaaccccacgcgccccgcgaaggcaatgtagaaggtctnggcggccacgccggactcgaactccatcccaacccggggctcaaggcaggggtcggagtcgaccgggaacagggccttgcggaccgactgcgactgcgattgcgcctgctcctgcggcggcggcgacggctggtcgacgatctggacgccgccgtgcagcggcatctggtcgacggcatgga

SEQ ID NO: 7451 - DNA, 354 bp, Oryza sativa
  unsure (1)..(354): unsure at all n locations
agcgcncaaaatgccacaaagctgttattttcttatatcccgatcaagctcttgatagacttcagagagacattaccggtcacctcctatgcatcatatgaacgaatgatcgttcctgttcttaaaaaatgatatggcgcttagcatggctgtttgaggcatgtcacgagggccttcaaccgaccctggcgaaacatgtctacaatcgctatgacgaagcacgacaataatacgccaaatgtcacaaagacagaggctctgggcaaatcgtcgagcgaagccgaagaccttcgcccccaagccgagggattcaaggcccgagggggccaacccaccaatggaggcccacttggc

SEQ ID NO: 7452 - DNA, 65 bp, Oryza sativa
atcggcgggagagcacagtcagtagagaacattcgtgtaaaagttattcaacacagcagtgttcg

SEQ ID NO: 7453 - DNA, 391 bp, Oryza sativa
  unsure (1)..(391): unsure at all n locations
agctnttgttaacattatatgattaagnnatcnctctataacttagnnngattctttgaactttgcaatgcagtatgaaatgaatggccgagttgcagattcaatgcttgtgaatactgcattgatgttgatctatgtcaccaagttcttctggtgggaatctggatactggtgcactatggacattgctcatgatagnaggtgntagctcctatgnttttaattacatgcatcttaacgtttcaaaatatgatgtctgaaaagaaattttctccaaaatgaaatgctgtatgtaggttaattctacaaatttattcatgttctttatagttaagaatagtagctccttacattcaaaggatgtcaccgtgatgtattcaagtgcttaaat

SEQ ID NO: 7454 - DNA, 239 bp, Oryza sativa
  unsure (1)..(239): unsure at all n locations
ctgccgtcaccgngaacaggagagaccctcacggatcttgttctatacgccctcgctggagccatccctccaccatcgccggagagagggagcaccatcgngagaaccgtgcctcgccgacggtcagatccaccggtcgcccttcccgatggtcatcggcgttggatccacgtcaccgaatctgtgtcgtgacgcttcgccgtcagagtgatggatgcaagctccgcctagtcgcgggc

SEQ ID NO: 7455 - DNA, 66 bp, Oryza sativa
ccttaataactccctgccgacggtaccgccttatctttttttgatcaagcatcatcggggccgcct

SEQ ID NO: 7456 - DNA, 347 bp, Oryza sativa
taggaaatactgcacccacaaatcactactcgggctgctggcttctgtctgcatccaacctgcaactcgtgcacatgacaaaaaaaaatatccaatacatctttcacaatacacgatccccaattaggaagtcacgttttatggataatgcaaataccattcttgtgcaagctatatttcaaagagaattgacttgtgtcaaatctactatgtttcactttcgacatcaattgaatataccaacttgaaagagaattgcttgaacacatctacctgaggcataacacgtcattattaagacttacccaaattgctaatcgagcgttttacaaccccaactgtatact

SEQ ID NO: 7457 - DNA, 198 bp, Oryza sativa
acctcgagcgcggtgatctctgcagttcacatgcgccccacaacaaccgatcgatcgatcgatcgagagcactcacgtaatacgtcgtcttacccgcgagaataatttatctatagctgccagcatatataacgagtcgatacagcgactcgcacctatcctaaccgcgcagcaaccactaagtcaacacggctagaa

SEQ ID NO: 7458 - DNA, 296 bp, Oryza sativa
  unsure (1)..(296): unsure at all n locations
agcttgtgccttgttggagagatcatcanatantatttagnatgccgatcgcggnacataaaatactcagccagtgctgctcccgtataacgagcgaggtattgtaatgtagcaggggaatccgccatttcagctactacaatagtgtattccatggccccctcttgatggaaagtagttactacttgagctacggaggatgctctttgaccgatagctacataaacacatattacatctcgccctctttgattgagaattgtatctgtagctactgctgttttgccggtatgtcc

SEQ ID NO: 7459 - DNA, 130 bp, Oryza sativa
  unsure (1)..(130): unsure at all n locations
ccgaaaatagccttttatgagtatatcgntaanaancctggattaggtggaatattcagagcaggctcaatggacaatggngatggaatagctgctggatggttaggacatcctatctttagagataaag

SEQ ID NO: 7460 - DNA, 472 bp, Oryza sativa
  unsure (1)..(472): unsure at all n locations
cttaagcaccgcagcatcagcttatacaatagctgatatnnngtactatctaaccaagcaannctgcaaatgatttgtgttctaacaaanattctttaaaactttagaaaagaatatgaaaattttgaacttctacgaagggaaaaacaatctaaccgttaatctatccttaatttggttgtcactaaatcacgcatcttcatgagacgattcgatcacaataactgtgagtacttgctatcgcaatttttacttgtagcaatattgtatggtatgtgttcaaatagtatacatgatatttacttttcgcaaacgcgtatacatgatatttacttttcgcacacgcatatacatgatatttactcactcagtcaaaagtaaattcaaatgtcatatgaccttgatctatcttctaaggcaacgaatatggctttcagatatatccaacctatgatctgcccttataagatat

SEQ ID NO: 7461 - DNA, 418 bp, Oryza sativa
  unsure (1)..(418): unsure at all n locations
agctngaatcaaagggggaaggactcttacttctatttacacaagnccaggacaggatctgttcgcctatcaacactcgaaagcgaggagttcgatcattcctggaacgccgcctctctcaagcgcttctatgcctagaatgggtgggcccccaatcgccaacttgtaaaaatgtacatacagtcatgtaagcccttcggcactatataagcctttcggcactatgaaagcctttcggcnagaacaataaagaagaaatagagaaaaagaaaaaactggatgtagggctattatccgctatggaggcccgaaccagtataaaatccctgtgtcctccgccttcttcttacttttcgtgtgattgataaattggggaaaaacccccaggcacacgcctgatcagcgaaaaagccagggg

SEQ ID NO: 7462 - DNA, 221 bp, Oryza sativa
  unsure (1)..(221): unsure at all n locations
tattatactcgtgttgatatctgtatctnaagtagtancgtagnattagcggatacatgctagatctatctcgatggctatgctataaacatatataatcatgttattaatatatatttcgatataagtcgattatactgtctcggcatggtgaccgatctatnccaatcacttgtattaagtatatattaatataagaactatatatcgctaatatctac

SEQ ID NO: 7463 - DNA, 396 bp, Oryza sativa
  unsure (1)..(396): unsure at all n locations
agaatcatcaagcacacgcataaatacaccagtgaggtacaaattgagcctccatgtattacattcaaactcagtcagaatcaggcctttcatcatcagagatattatcgctcggctgaagatcattgttgcggaattgttctacaacatcacctgcaatcttgtcagccgcactttgagcattactgataagatcaagagcagcttcttcacttgtcccgtctgcaaatccatcaatggtatcgacttcaattctcgggtacaaggattttgtcatcgccaaggccatgccagctcccatactatcagctntcttgatatttttgaatatacttccggagcaacactcagcttgtcacatatttcggttgcgtcgagtgcactcggaccaccatt

SEQ ID NO: 7464 - DNA, 202 bp, Oryza sativa
  unsure (1)..(202): unsure at all n locations
aatgtgaccatttctcattggtgccaagcttgctctttctcggcttctgtgaccttcccggtatctttatggaggatcccgaagttctcacgtgccgctagcccgtagcagttagaccatcttccaatgacagtcctgngcgccgtgggcctaccactagcgtcaacctgtcttataacttgcactgttgtcgggcatatat

SEQ ID NO: 7465 - DNA, 336 bp, Oryza sativa
tgacatggaaaagtgaaaggtcaccgccacaacacctgcagatttcggctgtggcctacgacacgggttatgcacgacgcaagaattgaccttctaaaagcagttaaaaaaacacttatagcgccggcgatactgactccacctaagtttgaggagtaaactggagggtgaatggaaaagagaaagaaactcggtaataattacagccgggtgacactgctcccaatattgctgctgctctcagccaattgcaacattcaagtgaagaatttaaaaaaaaatatcaaacctaaccatgggaagtgcgtagagatgtatatataagatctgtttggg

SEQ ID NO: 7466 - DNA, 255 bp, Oryza sativa
ccagacgactggttagcatatgggcccccaaagatgcttacgactataaaaaccgtatgcctatagcacataaaaactatatggagcaaacttctgtattatgtctaaagacttaagggcaaaactgaaaaataataccgttggataaacatccaaaactaattcaaaataaggttaagaattaaatttacttggctataaagcaaggaacatgagccatacccgtaagagactatgcttccttcaccccccgaa

SEQ ID NO: 7467 - DNA, 434 bp, Oryza sativa
  unsure (1)..(434): unsure at all n locations
agcantgtttagtactgtggatatacaagctctatgtcttgcttttgctagccctacacacagaggtacacatgtaattgcttattaaatgcataaaatttgtattggaagccaaagtgctaaccanaaacatcaccgatctaatatagaaattctatgcgttaactgaaaaatgctgatacaagacattcattcataatggttggagaataagctatcaatcaatgttcaagttaccattattagctttaagaaacatgtgggccttcatcagttgatggaattcaatatccatacattttgacggctgggattgaagaagattatctttttctttggctaatgatgtaaaggccaagcatgcctttctttgtcccccaaaaaccgcccagttctggatactgttaaaaaatagacattgctaaggagggaag

SEQ ID NO: 7468 - DNA, 414 bp, Oryza sativa
atatatcgatagagaaagaaaatatttacttgtgctctttcaacaagagggcccaaaaaaggtcatatgtttaactcctggcagtttgtcactctcacctttatgcacgcttcttttatcttggaaattatagaggtaagtatagtcagttggtggtgattcggcaaaataaaaaaaaaatcctcgcatttgtttcacaccagagctccaagccaaccaggatgatcagcgaattcaatggtttacttgggttttgcggtacttggattaaacagttccaccactcctctactgttgtgcactgatcccgttcttctattcgcagatcaatgttatcccagcgctctacttctgtccatattcaccctgacaacatgcaacgcgtgaggaggtgcggaaccggttcttcgatgt

SEQ ID NO: 7469 - DNA, 359 bp, Oryza sativa
tggatcaatgagcagctatcccgaaagtcaaatcccccgagaatttgatttggaagaaaaatcccgtcgataagaaatgagccaataccacgaattccctgcgtgtcgggggtcgggaatgccttcccgaacgccggtcgccaccccgatgatttccttcgccggaagaacgctgtgcgccaccatttccttcaaatatctcctgtacatcggagggcgcccactggctctcgaagctatctctttcttccgccatgaatgaaaactggatgggttaatttggttccagatatggctacagtggaatggcgaattggaagcggggacgcggcgagaaattttgcgaagttttgagggag

SEQ ID NO: 7470 - DNA, 89 bp, Oryza sativa
gactttttgaaacgggccttcttctacacgctcaacaaccaggattgtgcttaccacctatgaaagtgtcgacacttataacaacagtg

SEQ ID NO: 7471 - DNA, 65 bp, Oryza sativa
agcttgtgtgcatgggatacgttcccttgctccaactgctggccttgatccctattgttggagtt

SEQ ID NO: 7472 - DNA, 399 bp, Oryza sativa
  unsure (1)..(399): unsure at all n locations
cgccttgggaacgaccaccgggttcgccagccacttccgatggatgacctcgcggatgaatccggcctccaaaagtcgcgccacctcctcgcggatgaaggcttgacgttccggggcctggcgccgcactttttgccggaccggcctcgcgcccggccgtacagcaagacggtgctcaatcacctccctggggacccccggcatatacgccggtctccatgcgaagacgtcagcgtttgcccgtaggaaagagacgagcgcgtctttctatatgccgtccagaagaccaccgatccgtgtggtctttgacgggccgtcgcccagggcaaccttcttgaccgggacctcattgcacgtgactatccgctgcctcngggcgggggggtggatgtgccagcc

SEQ ID NO: 7473 - DNA, 400 bp, Oryza sativa
atgcaagcttatacattgaccacagcatgcattattatatttttaaatattaattctaggccagcggcatcttattattacatgagcacaataaatacatactgattcataatcaatggagaatgaccaaaaacctcatgcacttttgcagaggcagcttataaaatgcttataaaatcacgtgttctaaagggtaaaacagtttttggaacaaaaataccaaaacactttaatctagagatattttaaggctttctagcataattgtgaattatcttgagcattcaaacctatattagaggcactataaaatttaattatacaagaactagataaagaacacgggcaaaatggcacgtagacagatggtaaaccaatcaagtgaaaagaatatcagagg

SEQ ID NO: 7474 - DNA, 450 bp, Oryza sativa
  unsure (1)..(450): unsure at all n locations
actcagctgtctgagaaaatcgattttgtggagtctccattcctgtgtcatccatacttccgngttaaaaaatagcttttttgctattattttctatttatgtgagctgcgatatctcatctccaggttttgaagacgcttctgaaagatgatatcatttgcagagcacggatatctcctgaggttattcatctgttttgtgcacttgaatagaattcttatggcaatatactagtagcaaagtcgtgccttcctacccattatcttatgcgagctctagtctgtctggtgttactacattgtctgcgtgaaaccatcgtgtaacttctatcaatgcaagctgatttctatgttgttatctaaggccctgtttgattcagcttaggattattataatctggattattaggagtaagctgaaacaaacaagtcggatattatgatagatta

SEQ ID NO: 7475 - DNA, 416 bp, Oryza sativa
  unsure (1)..(416): unsure at all n locations
agcttcgcataaccctcatcgacgggggtaatgnttctctatatcctcttcgcccagaccttggatgatatgcagatttctcactctgagctaaaaccaagcaatgcgccttttcacggagtaattccaggattatccgcaactccactcgggcagatcactctcccgatcacttttggcactcgggaaaactttcgcacagagaatatcagctttgaagtcgccgatttcgagacagcataccatgccatactcggacgcccggcgttagccaaattcatggccgtnccgcactacacttacatgatgatgaagatgcctggtccccgaagagtcctattcctactgagcgacatctagcaagccgtcacatgcgacaaggagagttgcgacatggcccagacccccgagatgac

SEQ ID NO: 7476 - DNA, 443 bp, Oryza sativa
  unsure (1)..(443): unsure at all n locations
tctcnggttcttggtctctgcccgaggcattgaggccaattctttataagattcgagctatcgagcggatgcgcccccccagcaaacttagggatgtgcaatgcgtcaccggttgcatggccgccctaagtccgttcatatcaaggctgggagagaaagcgctacccttgtttaagcttctcaagcgctcggagccgtatacttggacggaggaagctgaaaatgcccttgcccagttgaaggcatatctcagctctcccccggttctagtcgccccagagccaaatgagcccctgctactttacttagcagcgaccccccaagtagttagtgcagcattggttgtggagcgcgatgaagacaatcctcatttcgtgcacccccattctgtgcttacttggccccggagcaaacatggaggagaggcccccgagtcaaacggt

SEQ ID NO: 7477 - DNA, 304 bp, Oryza sativa
ctcatatgcaccattagtagtgccgagatgtacaagtgatgttgctcggcgacatctctctcaagcgttggttgcgtccttctttttctttgaggtggcggctgagtttattcgggagcgatcaagatccagagaaatatttagtgaagagcgaggggatccctaacttttgactgctagtttattttcttgattctataactaaagaatcttagaatctgagcgatgatatggattatttaatagagccagatattctatataaactgcagttgctaattaactattccaaacaaagctaagt

SEQ ID NO: 7478 - DNA, 399 bp, Oryza sativa
  unsure (1)..(399): unsure at all n locations
ttgtcaaaatatattaaatatttgttttaatgaaactaatttggtattatatgttgctaatttttttaaaaaataaacttgatcaaacttaaaagaagtttgactattaaaaaaatcaaaacgacttataatatgaaacggagggagtatggtgatttttttaggcagtcctctttaacagtcgccaacgaaaaatcaattttcactgcaaggggacctcttaaatgaaagtgatttttgcctgtagttcgtgaccggaaaccctttgatatatatccgccggtaaaagtaaaagtgtggtgtcttaaacaatggccttttatagtgtcctttcacaaacaataactttttttaattcccaaccaataataacaatggcaataacaatnttattaataa

SEQ ID NO: 7479 - DNA, 403 bp, Oryza sativa
  unsure (1)..(403): unsure at all n locations
agcttgtaggaaaanatagtaatatttccaacccaagataaatntattataaaaatatattcaattattgatttgatgaaactaatttagtattataaatattactatatttatctacaaacttagtcaaacttaaaacaatttgactttgacaaaagtcacttgaaacggagagagtatttcaaagtgaaaacatttgtaaaatatgatacaaagtgaaactttgtgtatanaatatggcccaaatacaattactttttcattattaaatcttgtgagaaacatgtaactctatttatcgagtaatgctagcatgcaacatggatctttgtgtgtcttaattggagacaccatgaaggaaatagcaaattggagtttgaatatattttttaattatttatga

SEQ ID NO: 7480 - DNA, 354 bp, Oryza sativa
  unsure (1)..(354): unsure at all n locations
tttgctttttcttttcttttttttggctgagagagggctgagtccacaactggggaaaagtctcccgataccattgaagtaggggcctgcctctctcaagggaaacaagagtctcataaggaaagagaacctgcacagaccaatcaagaagagagtctttgtgtcaatgaaagcaatgagactatgtcacatatctgcctatctccgtgtgtgagctaaaaagtacccaccacggggtggaccaagaaagaggcacgcgaatgngtccttcccatcctctgtgatgccagctctttgtcattctttcacccttgctgagtaacgaagtgagcatactccagaaccaaatcatca

SEQ ID NO: 7481 - DNA, 322 bp, Oryza sativa
taaaactaagctgcaccctcctgaggcagagtcattctagcctccattagtattattgtacacaattcctgtacgcaccagcgcagaagattgcaaagaccaagagacgtcctccacgcctatgctgtggatctttatgcaaccaataccgttgatgcatcctgcacgtcacagggatctggctcgtaatacgtgaactcctgcagagagcttctgtgtgcaaacagtaggaaacattcgatgcacccagtgcgtggtgggtttaagactctcgtactgacccagcttattcttttttactctctttctctccccctctctt

SEQ ID NO: 7482 - DNA, 218 bp, Oryza sativa
aaatatggcacccagactagagcgcagccaaacacagcctgtaaattgagcttcgacagagaaaggacagagtggagctgcatgcggactccatgcacacgcgctgtacttcctcccacgcgaactgtaagagagaactattcgctcgatcgaactatagctagcatagatcccgggcgcggcgggcgatgcatgggccacaagggctctagatccga

SEQ ID NO: 7483 - DNA, 411 bp, Oryza sativa
acataccaataaaagtatgctccatgctcttctttatgagccatactatatcaacgcagggacccacgatccaaggccttacacaaaaatccttagcggctattgacagccttacccgatcattaaaatagccctcatatctaggtctaaatggtttatcctattaattgtacaagtgggatctataaatctgagataaaacggtgaggaatggacggaaccccaaccgcgatggcatttttgggacaaaatcccttgtacgatggtatttcttggaactcacacttgtcgatggtatttctgggacttgacgcttgtcaatggcattttatggattatctctttaaatatttatttatagatttgtacacctgcgagacatggatttttggcgctgatgtggagattaac

SEQ ID NO: 7484 - DNA, 161 bp, Oryza sativa
gtatagagaaaaatttatatttgggaataaaggataaattgatatgtaaatatgttagaatgaatgatgtaggtgtaattagtaattaaatttttataatggaaaagaaaaaattgtaaaaaattatacgcaaaaatataatgaaaggaaatatagtttta

SEQ ID NO: 7485 - DNA, 424 bp, Oryza sativa
  unsure (1)..(424): unsure at all n locations
tataagaataattagatctgattactcgtttcttatatgaagcatggcgngatgggctggattggtgtgcaaatggagattctgtaattcacgctattgatgaattgaataggccaaggaaaagaatatcagttcgagtactataatgtattcatatgtggagcgtctaaatgcaatactgtaactgaaacctgttgtcatgtcagttttgggctctccatcttgatccaatatgcacaatagtgtccagatactgtgtacccatctgtgcaaagaaaacgttagggagtcttcttctttagctagattttctattttccctaatagattatgtacctaggttaaggattcgctaatttctatcaattagagaaagaaaggatgtctcgtggagagaatgcgtgcangtgatctaactcctata

SEQ ID NO: 7486 - DNA, 430 bp, Oryza sativa
  unsure (1)..(430): unsure at all n locations
agcttgataatatattttccttccaatttatattcatattattcaaatacacataacanaatctctagtctcccctttatccttctctctccctgaaaagacaattggcctttagtagtggctcccatgtgtctagactgaaatggtttgttgtgataaacttgctgtactggttgatcagttgggtacgttggatttgcttgcaagttcattatggtttggtagcccccatagcaagcaggaacggaataactttgtcaagcttggaaatgcaaaagatcccatgccagcggcatgatgactgatgagcaccctccataaacttcatcaaccagctatatctataattccagtatagaacacgtgtataattgtagaaatagatatgcgggatactataaaagaactttgttcatatggattaagcaat

SEQ ID NO: 7487 - DNA, 350 bp, Oryza sativa
tcttctttgtagatcgactctcaccttatagcccatggattcttttgtgttcctccacaagctcagcctttaaagcagagaattctgcatgtgcacatacccgataaccgttacacacagtacacatcagtacccctcaaaatgttgaggccccgacagtcccactttgtagccacctccatttctattcgaggggatggagagtaagctctcacccaataatggtgcacaaacatttcattaatcacaccaaacagtatggaaagtgacaaaattgactgatttactaacaaataatacctcctggaagaagtcgatgccaagaagtttactatctgttctacctttaa

SEQ ID NO: 7488 - DNA, 430 bp, Oryza sativa
  unsure (1)..(430): unsure at all n locations
gctggcgatggaattagcagttcgtagacttgctgtattctctcaatctcgntgggctgataataagttttatcatgacctccgattgtgcaaccgagccacaattcttgaagatgaaaacagttcttgagtacaaatgaaccccctggtgctgctttttctagcttcacaatccggagacgttggatattggagagacattggagttcatctagtctgaatccagtttcactgtcaaaaactcctctaaggttgtagagttgctgcaactttgcaactccttttggaacatggtcgattgcagtctgttctaactctaagaaacttatgttcgacagtctcattaaactatctggcaggctatccaaatgtatgcaaccatgcaaagaaaggtatttaaggctggtaagttttcctatggattctggga

SEQ ID NO: 7489 - DNA, 368 bp, Oryza sativa
ccataaagaaagatggtcagctctttatgacaagagggaactcatccttcttttggagaaagaaggcctctgctaccacaacatgcttggaccgacagagagacatcataagtatctggaatccaaccaagtcaagcttaaactcataaaccttccctctgtagaacatatctaacgactcctgcaccttgtgcgcgcctgcaataccaggcttaacaggacagcacacatcctggatgagaccactgactcgcgagctctccacaggaatctcatcaaacagcgtgcccatgagcccgaccttcttcatcctcccaagaacgtcaagcatctccgcggaaaggcctagacccatgggcatactgggg

SEQ ID NO: 7490 - DNA, 303 bp, Oryza sativa
actccgtacgcaccgcggagcgggccacagcttcacaaatcggcaaattgcaccgcgttgggcccgaccacttcacaaatgggccttcagaaatggctgttctttaccttaacgcctgaaaggcgatggtccaaactgcatgaagcccagtcattttgacaagagctagatagatgaaatactccaatacattaatctttgtatttaaaaaaaatgaacgcaagcatgtccagactccaaaaaccagaatgacatgtgcgtatgaacaaagttattcggccgggccatattcatggagcacga

SEQ ID NO: 7491 - DNA, 259 bp, Oryza sativa
  unsure (1)..(259): unsure at all n locations
agcttcttccatagtgacttcttcttctcctttgtttatggagctgccgattngctgtctttctgtcttagcggtgttgccagagcctttacaggcatattttacaagacacacttactgtatctgagatttataatgagaaaaaatattgaacttatttgagaggaacccaaattaacgaatagtgacactaagctaatcaactaaacctttttacaggattaatcttaatatcatgccaaatatttattattaatta

SEQ ID NO: 7492 - DNA, 353 bp, Oryza sativa
agcttctcgggttcttggtctctgcccgatgcttctaagccaaccccgagaagataccagctatagagcggatgcgccccccctgcaagcttatggatgtgcaatgcgtcaccggttgcatggccgccctaagtccgttcatatcaaagctgggagagaaagcgctacccttatttaagcttctcaaaagctccgggccgtttacttggacagaggaagctgaacgtgccctcactcagttgaaggcgtatctcagctctccccagctctgggcgccccagagccaaatgaatccttgctactctacttagcggcgaccccgcaagtggtaatgcggcgttggttgttgaacg

SEQ ID NO: 7493 - DNA, 434 bp, Oryza sativa
  unsure (1)..(434): unsure at all n locations
tcacccggaagtcaccgaattccacaattgagggtgcatgttctttattatcagatcttacagncaaaaatgattgcaggtctttctcagcacattggtgaagacgctccagaccagactcaggttcacctataaaagatataatatacataccacatgatttttggcaagcacgtggtagaacttatgattttattttggaatgcaacaaacaactaccttgcaggtactcgaaaaattcgctcttgaccttgtcgtccagataatagccataagcatatgtccatttgagtacccgcctgcattcaataatctgaaatagacatagtggaatggtgcatgcatcacacgcacgtgaattgtatagtatggagtgtcattcgggtcatgacatatttatgatatcacacctgtgaccaacctcattatgaact

SEQ ID NO: 7494 - DNA, 362 bp, Oryza sativa
acttggggacactccgtatacaacagggagtccatatccatcaaagatcttggggccagcataccatctaaaaatgaagaacatgcctttgaatattgatgtcaaccatgcttgtttaacgtgctacttaaccatgaaattttatcggtctaccattgtaaatatacttaatggaacattatgtggctgataaagaataccttagatcctcacattatccactctagacaggctgcatgtgaagaatataccaagcaatttgcaatggatacatgaatcgaaaaatgcataatttataaattatctccggatattattatcaattaatataaaaatattcagcccatattaaaaatatatat

SEQ ID NO: 7495 - DNA, 451 bp, Oryza sativa
  unsure (1)..(451): unsure at all n locations
tgntatctgaacacacaactctcccatatgtgaatcaattggtatatataatgcctggagcacatatagcactagtgtggacacccttacagctagaatattggtcatgcagatggattccacaagttcaaagatagcacgggttggtacagagaaaacctgaacacggacacagagtagcctgctaaatctttacaaagcaatgcacctagacatgccccggcgaagaaacggcgctcgacgacgccatcgcgttctcgagacggagcgataagtccttgcaaggtaagctgggatcgccgatggccgatcaagtcttccccgccctggacatacctctcgcacgggcgcccaagctgatggagacgatgcgctacattatcgagtacgaacgggaggatgcgcacgacggcgtggtgctggagctcacgacgctggacttctacttatc

SEQ ID NO: 7496 - DNA, 77 bp, Oryza sativa
  unsure (1)..(77): unsure at all n locations
agcttganaaataatatataacaaaagcgattgattcttaaactgaaactgtatataanaataactcccatggaact

SEQ ID NO: 7497 - DNA, 390 bp, Oryza sativa
  unsure (1)..(390): unsure at all n locations
cttcataaaccggctgtatgagaacctttttaagtgatctttctatatctcaggcaacctccataagtcaagctttttgctggcttgcttgtgctccgtgcatcttggacagtacctgctcagataagcaagaaaagtgatgccagctcagacattgaccaaggtgctttctttatggaaaaaacagagcaatttgcaagtatcagtcaataagacagaaataatactaaccacatgtcatcagggcccagagggtcatccttcagaanagcatctaagcatgaaaataaattgactgcttcttgccgcattttctttgacataaatccaggcttgaagaccacagaaagntcatccatgtacttaatgtcatatacttcatgttctcta

SEQ ID NO: 7498 - DNA, 324 bp, Oryza sativa
agcttgtgcctcagctgatcacccggtcatgtctcattttccactctgacctcgccggacgcatcttcggtgaagacgacgccgcgcgacctgatggatttcgtcttgacctccccgtatcagaaaatatcccctctcttcttcaccgacggagaacgtggacacggaccacgccgtcgccgcgagagaaaagaaacacgggcttctcgtcagcgtcgtacgttccgttcatggaaacgacccggtcgtctcgttcgtctttcatcatccacggcacggtttatgacgggcggcgggaagaaagggaatagccttcatcaccct

SEQ ID NO: 7499 - DNA, 362 bp, Oryza sativa
  unsure (1)..(362): unsure at all n locations
actcaagctgctngcagatttcaaatctcttgagacagcgaagatgcatatatttgagctaatagtgcccctgagacttgttatagaaaagatggaagaatttcagcactatcttaactatatatgcacgtctaactatgtccttcacagcacgatnattgggtgacactgcttaacgttaatgatgtgctctttgtgtgggttttgtacgtgaaagaatntattttgagccaaccagaggcttacgagattaagaatgggaaataagctttcagaaggccaggagacccacctcttgatgaagttgtcgagatgctacagaaacagaagagtactatgctcagccaagaacctcgctcgca

SEQ ID NO: 7500 - DNA, 414 bp, Oryza sativa
agcttctgatcttgcagcaattctggtgtatctgatcatctaaaggcagaaaggtcatgaagaattttgactgcttaaatctccacgtaccgatcctaatgattactccgtattacatatggcactaagcaggcatcttctctgctttaatctgcataactagattcgcactgccaaaaatgtttgaaaagaatcccagccaatgaacagtgatacttcgcaagaaacaccaggttcctttcaactgtacacatttgctgtgatgggactgaactagtttgttggaagataacctattttaaacgaatgtgacaaacatcctttataaagaaaattgcttatcttatggaaaagatgcagttgtgacgacttctttatcggaaattatgctgtgtgtggtggacatgcacctac

SEQ ID NO: 7501 - DNA, 439 bp, Oryza sativa
  unsure (1)..(439): unsure at all n locations
ttttggagcacgtgagtggaattctttctatctagatgggnttccccaatacacagcatattgtcagaccgccgggcttcttccgaacgcatgtgtgcagtcctggttgagattgccagcgtggtgggaggagattttgtatgttcacggcaatactgtagagggcaggtttctcgtacagttcctccagtggagaagcagattatagatgctaacaacaaagatagaaatgtagaattgctatgtctacttttagctcttatactttgtccaagtgactgtcccagtatcccttaccacttgaaaatggaagttgcagtcgttttttttaatcattacgtgattanggtgtaacgaagggtgacaattattgaactacaatgtttgtcaattcacataagaaaagctaaagcatatatggtttcccaagatgttacaa

SEQ ID NO: 7502 - DNA, 446 bp, Oryza sativa
  unsure (1)..(446): unsure at all n locations
tttgctatgtgaaatttcaatgaagtatcttattttttgttacactcatcataatttaccaagccagcggtgtatcacttggatcatattattcaaggattcacaccgcatatgctacataataataatatagcgcttgggtgactacaatatatccaaaccaacttcggtgccttctaagtcgaatgcaccttgactttattcttttcagccctccacagtcttctgatttaaaaaaagtactctggagatcatggcgaacatgattgagcactcggctttggagtaatctaattcgagagaagaatatctttctgactgtgaaggtctcangggctactgtggagattatgggtaccccatacccacatggcatcggtatccaactagttataggggataacttatatctatgagatatgtaacagatcatgactggggtatta

SEQ ID NO: 7503 - DNA, 294 bp, Oryza sativa
actcttggagcagggcccttatttttgtactcgcatcccattcacgagcgggatggtgatggggatctattgaaagacatacatgaaacgaacaaatcgctcctacatggagggccttatactgaagctcaagaaacgacaacaacaaggagtcgcatactcctgcgcataaactcagagagctgagccccctctcttcctccgggtcaaccggctaaaagtcttcctccctgctagctaagctgctcatgcaatgctaagaaaaggccgaaaccaaaggaaatcccctcccga

SEQ ID NO: 7504 - DNA, 252 bp, Oryza sativa
  unsure (1)..(252): unsure at all n locations
aagcttgctgcataactttncanatgaatatatgtcacgtcccgatttattattttttaataaaaatcattctctaaaacgaaaaatagaattaattaaaattcgcatgtggcccggagaatttttgttaaattctccttggtctaaaatgaacccttaaattttacttcgaatttcagagcaccacaaataattattaagcaacaaaaacaattttacaagttattataaagaaaaactataaataaaccc

SEQ ID NO: 7505 - DNA, 383 bp, Oryza sativa
  unsure (1)..(383): unsure at all n locations
tcccgtgcacaccaactagctaatgccacagaagattcttatttattaattcgatacatacttccaatagtattacaccaacgtgtgaaatattttcttcaaattcattatattttagccacaaccaaaaagacaaaattctaacagattnttacccaataactggtagatttttcatttttttttgttacggctaaaatatattgaatttgaatatgaaactttacaaatatgtgtaatgctattaggaagatgtgtcttatttttccatcatagatgataaataaactttttntccatcaagacgatgcagaataagccagagcagtctgtgtgagacgcttcccataaaccttattgtcccgctacctgtgcaggcactc

SEQ ID NO: 7506 - DNA, 416 bp, Oryza sativa
agctactgcatcattatgcaagtggcttcttgttgttctgaaccctatggctgccatgtttggtggtatcgtaagtcaaaaggtcgtgaaagcatgctcagggaaattccatccactttaccaggttataatctgttaccttcattataataacgcaaatccccttttttatctgcactcttcatgtaaacattaatgtagatttcctggttttgcagttcttctattttgatactagtgaatctctccctgatgaaccattggagccagccgagttgaatccagagaatactagatatgatgcacaaatcagtgtttttggatctaaccttcaaaagaaacttgagcacgcgaaaaaattatggttggttctgggcgcttggatgtgattcttgaaaaccctactctattggcat

SEQ ID NO: 7507 - DNA, 394 bp, Oryza sativa
  unsure (1)..(394): unsure at all n locations
ggatgaatctatggctggcaggtcatcggttgtttttcttttctgngacctggatttcttctttggagcctgagccgatgggtctactggcaatgacctgtgtttcctctcttatccggcatcggctgattctcttatgagccctttaagaagaggtgaagtcttgggggcatcatatccgatgacaggaggagatggtccacctccattatgaatgagacccggagcatattcaatgtctctgcactattactctgcgagtgggagaggattctgtggctactagatgagaagaagactaatcatgtctcacatcggctaataattgttcaaacttgacaagggtaaagatatacctgaggaataacatctgggaacagatctgtatatacat

SEQ ID NO: 7508 - DNA, 439 bp, Oryza sativa
  unsure (1)..(439): unsure at all n locations
agcttcatgtgaagagcataacaccaatatgccatctgtgcctcttgatacctttnttccttttatgcatgtacctaaaaaagtgtaccccaaaacagaacaagatagcacaaccaaagcccccgagcattattgccaccactatataatttcataatcacatgacccttatatatggtctatgatctctgatcttgcaaatagtggaagcatacaacacaagcacttcagatcactccacggagaanagaaaaagcaataaaaagagaaagttcgaaaggagaaataaaatggaaaagaagaatgacatcaagaaagcttccaagcatgccccanatcacattgaagaaaaaaatggccnctttatagcctcaaaagccatctggaagccatttcaagtcaaaagcaaactgattgaacggcacacaccaaaccaaag

SEQ ID NO: 7509 - DNA, 454 bp, Oryza sativa
accttaaaactcagcttgtaataggcctcttttttttgtatattaatataatccaatctactgggtgaactccggtagtcttttcctaaaaaaaatccgagtagtaaaattttgtcacaaaatataagatattctagagtactacttagcccatccaacacctctcatttttttgttttacccaatcttacactaaccaccttccactctgtacgtaccatttatttaatagtgggtatcatagtatatatttagtcttacatcatagatggttcgttactaatcatgaaatatcttaatggttttttcccaattcgcttaagtataatgtggatcaatgtaatagagacatacaaataatccgatggctaagaataccatgaccgctgaattagtgataaatgatatgtacgatgtttcgccttcataaagaaaattttcaagaatttctcta

SEQ ID NO: 7510 - DNA, 193 bp, Oryza sativa
agcttgcacgtagacggattatataggttcggtccctttgaaccttacacccttaccccgggtgtttggagtaagggtgagagtttaacaggggtttttaatttataaaaagcgcgctcgtttcctctttttgggaatacaagttttttgggccgcctcccctttataaagggcgcagggctcctcttttttt

SEQ ID NO: 7511 - DNA, 402 bp, Oryza sativa
  unsure (1)..(402): unsure at all n locations
ttgctggggctactaaaactgcgatcatttcattttgtacttttaagaatattctacaagctttacaaattaaaggctgctctatgttagtaaatccttatatgaatatttagagacttttactacacaggaaggatataatcttatttcataacatggaaatacatgttttgattatcctacagaacttaaggttactcaaattaaagctaattgggtctacatgaagttttaaaggttagctcatctaaactaatcattctaagagataatagctttagaggcgattgatgcaaagtaattactttgattcacctaatcagagagggcatgatgatgaatctgagaaattgatntctttcaaaggaagtgaagatattctatgattcataagttgccatg

SEQ ID NO: 7512 - DNA, 269 bp, Oryza sativa
ccgccttttaattggtgtatggatgggtggttgcgatctatggggaagacagctcatattctctcttttggactcggtttctttatctttcttcttaattaaatgaggaacaattctctaatgtgtgttcgaggaataaaacctaggtttctaacacttgatagctgttcatgtatacatccggttgagctacagaaccttgctttgccaagactctttctgagattgagagaacgcaatcttatttaatatttgccacttcagagatc

SEQ ID NO: 7513 - DNA, 303 bp, Oryza sativa
agcttgttaagatgcagctaggatctctatatgatatcttcttgaccgtatcactgatctgtatgtcgacactgagtattggtggcatactccgcagcgctatggaagtgaccgagaccactatgcttattctgaaggagttgggaatgatgctgccctattacattcggtcgagatgctgggggccctggatgagacctgcgctgtatttgtgtcatctgccttctcttgtgaatatcgtgtccgaggaagatctgaagctataggacaaagtgatcttccgaataaggaactgccctaatt

SEQ ID NO: 7514 - DNA, 413 bp, Oryza sativa
  unsure (1)..(413): unsure at all n locations
tgccttgatgagagaatgaagttacagcggtggtgtcttgctttaaacaatgcactttgtcgaacctaatgggagcatccttcatgggaacatacacatctctgaaatatcgaatcgggactttccaagattgtggtcttgtgctatgcctacaaagatgtctccaaaccttataagcatgggttattataaacactttaggcacacatctccttgtgtttctacgaccacacatgattttggaattcactatctaccgcttgcttcctattaaagctagcacgaggaacataattgacctcgcaagaagcattgcacaattgatcctacctatgacatcatcacttacctcataatggtcatgcngatccctcctcatgtctagacgaagatgccgatgttcagcacaccta

SEQ ID NO: 7515 - DNA, 369 bp, Oryza sativa
acgcaggctcagcttcttcaagcaaaccggcagcctttttgttgttaccagaaaccttcatacctttcttcatattacaacctgacaacataattatttctagtgagactcaaaatagaatctgacaaccaaacacattaactactatgtgaatactaacctcaagatgaccccattgctccttattgaacatctcggactcattataagacagaaaattctatttcaatctcattctaataccgcgcacttttttgacaagcttataagaccttctgaaatgatgagatccattggcaattttatgccttttcaatgcatcttcattcagaacctgctttgtccaacaaccaattattaatatccctg

SEQ ID NO: 7516 - DNA, 468 bp, Oryza sativa
  unsure (1)..(468): unsure at all n locations
caccaaactaagcttggcctcgttactangggatgctccaaagataaatatctttcttcctgataatganatggttgaggaagaaggtagctctgaacattntccagccataaagatatatgatgaagatgtgaacatgaagcttcttatttgtggagcaccatgcatcttggtaagcgttagtggtcatgcctaaatttgtaatattttcttatatattattgcatttttcttatcccaaccaatacttccatctcttttacaggatgctagtttgttgggctcactggaggatggtttgaatgctctgctcaatattgaagtatgggtccattcttgtacttaccatgtgttgctttatttctgcatagaagtgctgagttctgaatagtataccccaacaatctagttcatggaaatgctagttgattggagtaatgaactatgagtctgttagcttacgggata

SEQ ID NO: 7517 - DNA, 359 bp, Oryza sativa
gattattctttgccacaatgactgaaaactgctataacaatcgaacacaccacccctcagactagttacaaggtgacatcatgaacagcgtatcacatgttgcagacactatgtacaaaaatgtgttatacatcgaaagaactaatgcccttatgggctttcagaatatatattagaaaatggatatcaatccagcctctacatcccacataggaccccaaatgtgatttcagaagatgtatggataagcgtatgttcacaatgatgctccttacaatcgagcgatagcatcgcatagcataatgattggagcagaactaatcgattttacctacaaatggctcgtaaattcacaagca

SEQ ID NO: 7518 - DNA, 407 bp, Oryza sativa
  unsure (1)..(407): unsure at all n locations
tctaagcaactgcggcatgcaacttcgctctgtgaaccacgcgactccagctatctacatcagattngctggtagtaggactgtaggagtacagtggtcccatgtctgctcgtgaaccattcaactgtgtgccacgtcaaaatgagtccatggcacgatggatccaacccgctgtttccgtcgtttcccgcgggggagcccacctgcccaacggctgcaccactgggccattgtctcggaaaagccactactcgttcaaaaaaaaaaaaaaagaggtcccgtctccgccacgctggtggctctggactctggtattccccaaccggagggccgtcttgcgtaccggntattcaaaaccacccacagggtactcccctttccccactataatccattttcgccttcgc

SEQ ID NO: 7519 - DNA, 332 bp, Oryza sativa
acctaaccaaatacaactcagtaaacagactgaagacattattttgctaacagaagggcacagaatattacacctacacctaaactgaacacttttgacaggccccgtgtggcatgtacgtaggattcacttaaggatgatattctctggggtagtgttcttggcaacatgttacgcagtgaagacatttcaaaatcccttacgagattggtaggctcagctaaaatgcttgatgtacaaagcattgcttgtggggagaatcatgcacccataatcactaagctcggggaggtctatacctgtggcagttatagcagcgggagattggacca

SEQ ID NO: 7520 - DNA, 412 bp, Oryza sativa
  unsure (1)..(412): unsure at all n locations
aagtaccttgtacaccagcctagcgaaggtcgctccggcatttctcagaccganaggcatcctgaggtgacaaaaggtgcccaacggtgtgatgatggctgtcttggggatgtccgccgggttcatgcgaatctggtaatagccggaatatgcatctaagaagctcatgagttgcaaccggctatcaaatccacgagctggtcgattcttggcaaggggaaattgtccttcggacatgctntgtttaagtctgtgaaatcaacacacatgcgtcatttgccatttgatttccgcaccagcactggattcgccagccactcaggatgatcgatctcttgaatgaccccctgcttaagcaatttttggacttcggcttttgctgccttctagcgatcagcagacatcttgcata

SEQ ID NO: 7521 - DNA, 468 bp, Oryza sativa
  unsure (1)..(468): unsure at all n locations
agcatatctttataggtatgattaacactcttatttatgctcctaaatcattataaagattaaattatggtttggtcgttctcctaaacctgaaggtgaatgttattatgtctctcatgtntcactgcgccctatacattattcacacaatgagatgtgctttaaagtttgcgtcagttaaagttattcttagtattcatagttcattgaacgctaacaatgaagatgaaaaaccacaaatccacatttacattaacaacaactcaagtcacactaacgcacttatgtatatgcatgcacacatttatgtttgcactcttgtcttatgttataattgaaaagggtttacatttgttctcaattcttattcatgcacgaattcgatcaacttcatctacgtctaaaataaaaaatttcggtcacaaaattaagaaactttctttcaacttagtttgaaagaattgctta

SEQ ID NO: 7522 - DNA, 409 bp, Oryza sativa
  unsure (1)..(409): unsure at all n locations
ctactaccgacctaagaaactcagcttgangatctcctcgaatcaatagctgatgaagatgatctttatctcctcgggagacgtattctggctgggttggatctttctggtccgaagccaacgagtaacttcttgttgaagaatccatcttttgaacacctctcggcggaatcctttagcaccaaaaccccccacctagcgcgccactgtcgacgtttgatgacgcgaataccgtatttgcaaagtatggggatccgtggtactacgatatatgcgagactgaggttaaagacatggggacgaggatttttatacacggtccgatcctgttagccaaagcccgtcgttactcttatatcatcataatcgcaccccgaccataattggagaacctatctaactgctggcc

SEQ ID NO: 7523 - DNA, 370 bp, Oryza sativa
  unsure (1)..(370): unsure at all n locations
agcttagctacttgcttctattttcaaaaccctgccacaacatggagcgtccgcgcgcgcacaatttgtggaaccatatggcctgtgccgtctctatctccatcgccttcatattttcacatcatgcaccctagactaaccatttttggggggctgggtggtaggtgcataagaggataaccaaattccaaaacttttgaatgagaatttcaagcaaattttaatacctaacaacatattccaaaatttcgtttgtcttgggaagctcctagtactaattacatatattataattntattgtttttatacatgtcatggatagtattcatatatatgaaggcaataattatttgcagatatatcattcac

SEQ ID NO: 7524 - DNA, 342 bp, Oryza sativa
agactgctgagtcatacagagagactaacacaactctacttttatgaccacaaatttctaacatattgattgtgagtataaatgtcggtcatgatgaaggccgatgacaaaaggagatattattatcaggagggatctaccacaagtggatactctctaatcgacgcctaattaaaacatgtgaataccattgtatccttatagctcatcgaagatgtgtatatctattatttctatcatgtatagactatcacatgcgcgctgactgcatcgtaattcttaaggatcatttggactactctattgaagagctccataataagcttaacgaagaacataaca

SEQ ID NO: 7525 - DNA, 430 bp, Oryza sativa
tcacgctggacagagagcgcttgctcaagcaaattctctaatcttctctttggtaccataacaggtgggggaagcaccttatgccattgctctagcagcttctgccgtgagtatgaaaattcaatggctagcttctaagaaccaagtaatacatgctgtggagaagaaattatgcggcctgacagatcatgagctctttttatgttgacaccaaagggtggaatttcactctgcggagtccttatagcacccatgacattgtcatttctcaagagttcaagatatttttgctccagtgtcagaaatatagcagactttacaatgttttcgtgcaaaaggccaaccttctttaatgtaaccactgcactatcccaatctccatcaagtacctgacttcttgaaagattcactgttggggaatgcagagata

SEQ ID NO: 7526 - DNA, 385 bp, Oryza sativa
gacctatgatactcagcttgagaacatcatcaatttgccccctaattgcatttttcttagggtacagcgacctgagtagttccccacagtcctgacttcaaatctcttatggagcgcatttcagattgggttgtttggttcatatctcttatggagcgaatttcaaattgggttgtttgcggggctaaccatcctacttcaatggccgtatatatcctactggatgtagaggcctcgtaaaaaatacccttctcgtaaaagaatatatatggagattgacatatctcctgttatatggtggagcgtcctcttgctatcctgttggctgactgctatatataactcggagttgtctagactaaaacattgtaatatgcgactaaag

SEQ ID NO: 7527 - DNA, 415 bp, Oryza sativa
  unsure (1)..(415): unsure at all n locations
agcttcataagattagtctagctcccccagctttaatgtgatgacgaatcgagcaacgatgtaaaagggtgcgcaaagccaacctatataggacgtggcactgcaaaatgatatgaaaatagataaacaaatatatgataattctaatatttatgaggcaaggaaaacattaatattgtattatatggtttaaaaaatgttgtattcaaattaacttttaacaaaaggaagtgaaattcagtgactgaatccactgaaacatccattntacctcatactgcaatattgcanacttcatcggctgaactgacgaatttatcgtagtagagcttatatcttttcgatgacataaaaaaattatgcaatatttgatgcatgaaatccgtaaggtaaaaggcttaatccatgggttttt

SEQ ID NO: 7528 - DNA, 466 bp, Oryza sativa
  unsure (1)..(466): unsure at all n locations
tataaaactaagcttaagaggtgcatacctgtgctaatccagtataaactgtatgttctaatcggtgatatagctttgacagacaagacactgttttctccagtggtctataccatgtcacatatatgtccgagttgccactaacctacagattgaaacataagaaattagattaatgctttaactacactgataattcataatgctcgtgattaaaactggattcagttataagcaacatgtgctttgtttaacatcagatgacagcatggagaaaaatgatgttagcacataagggagtgaagaaattacaaaatctataaaactgatagtaccatcttaagcacacatctgagccagtaaaactgtgtgtgaaccaactgttaggacagattnttattgaatgactatgaccatgaagagtaaattgaaatgaactttcattaaactaagaacacaactaaca

SEQ ID NO: 7529 - DNA, 387 bp, Oryza sativa
ttattattcacacacaggccaccgccgggctaagagcgtttgtgatgcaaaaatcagaggagaatttgcaagcggtaaattttgcttttattcacctttgattaattgttgtttgatcgatcactgaatttatattggttgtccctaatattgaatacactcacaatttttgcaggtcagggatcttcttcgcgaaaagagttcgttcaagacccaaccggattgggttacagttcttgatggacctcaggaaggcgcatatgaatgggtacaaaactggcctgatttattcatatggttcagaacattactttgtgctcctgattattagaaatgcctcacatttgtcagattgacaatataagttctttttgtttataaaaaact

SEQ ID NO: 7530 - DNA, 409 bp, Oryza sativa
  unsure (1)..(409): unsure at all n locations
agctntctaaatcacagcctttcttattgctttcgtttccttaaaagagcaaatccatgcgaatcaaaagtatgatctcattagttcaacagagcacacaacgaaaagaaacagaaactactccaggagccccaattactatggttttatcggaaagggtaatggagcacagacaaggtgccaattaccctgtccctgcgagctgattccccaataccgctaggatctctcgatttcttattctctttggttttattcatcctacatggacaacatggttcgaagaggtgccacagccctagttgaagctgcatgagttccactgaacttaagtaggatggatatgtcattttctgactcttggaatcaaaactggcagagaactgtacacacgtgcattgcatgactt

SEQ ID NO: 7531 - DNA, 363 bp, Oryza sativa
aactcaagctatgctgctccatagcctgtgtctctgagaagaactgatcatgttttatgtggaactatggagttactgtggcaagtccattctcaattactaagttgattgaactctgaaagtgttatggttatagggaccaccgcagcaacatcccagcccttaggtatttaaattagaagtatggttaaattggaaaggggtagtttgggcccttagccattaggaactggaataagtaagagttccaattgttatggccacttgcacaaatataagttaactagaaaaggacccgtgcgttgcaacgggaagaaaagacaagaaaattgagagaaatagagtgtgggtggcagatcgcct

SEQ ID NO: 7532 - DNA, 415 bp, Oryza sativa
caatgtatcgggttgttcgtgttagatgcctcagtctaataaggattacagattattgttatttatttgtttaaaaagagctttatcctgattgacctacaaacccacataaggtgaagcttatttgtttaaagaccttgttatcataagtacccatattaacctgactgttagctacaagtagccacattactggttttgaaaggtatactccctttgtcctaaaatataaagaattttgagatatatcacatttatcaaaatcccgtatatcttagttacaagtagacacattagtttggtctccatctgtcctaaaatataaataagtttagatgcatatgacacattcaaggactatgaatttgaataggaatatatcacatctatcaaaatccttcatatgttggatatc

SEQ ID NO: 7533 - DNA, 460 bp, Oryza sativa
  unsure (1)..(460): unsure at all n locations
atgttgatgatatagttggcaagatgttctttcaactcagatttttcttcgatctaaaagagacctttgctagcatccatgcctttaggatgaagctgaattctgaaaagtacaccttcgaagtaccgtcacggaagctgcttggctttatggtatctcgtattggtatacaaagccaacccggagaagaacaatgccattttcaacatgaaaccgcgcagttcccagaaagatgttcacaagctgattggattgcatgcggcgcttaaccagtttgtctcacgacttggcgagcgtgggataccctttttcaagctattgaagaagaccgactatntcctgtggggacccgatgcccagcgagcctcttgagacttcaagaaacttctcacaacttcgtctgtcctaacatcaccacatacgtatgagccgctggtattgtatgtgtcggcgacatctc

SEQ ID NO: 7534 - DNA, 389 bp, Oryza sativa
tgcagcatgcaacctgttcttgtcgggaatgtatgcttggtgattattgtctcttgtacaaaggtggttctgtaactttcactacaccataacatagtattcatggcacttaactgccggcaaaaaaaaaagttagtggcaaactatttgccgagaatatatcaagtgccggaaataattttggacatcatatcaattgccggcgattaaaaaataggatagcaaattaagtgccggcgataaactattataacaagtcaattgatctgccatagataatttaagataacccaaatctgccgggaatcttgttaccggacaacaaatcttgagtaaacttttatcggttaaaaataatggtgggcccaacaaaacgcccaaggctggaa

SEQ ID NO: 7535 - DNA, 418 bp, Oryza sativa
  unsure (1)..(418): unsure at all n locations
ataaaactaagcntagcgaatcacctaatcttgaccttatgccagattttattttgtatgatcatatggatcaatgtctatatacggctggactaaagtattagctaggacctcaactatcttgcgtcgctcatcggctacattcataatatcggcttaaaccaatctattaaacaccatagacagtattatcaaccgattgggcgtgtctaaggattaataatccttgatatattcaacacataacatatttggcctaacttcatcggctgagactatcaactatacactatcggctaatcaactatcgaacgaataattctgcttatattcttatctgctgaatggaagagcaaatcatatgcgacgcactttacacactcgcggctagcagcggacctgcattgaaactaagcat

SEQ ID NO: 7536 - DNA, 290 bp, Oryza sativa
cggactgcgaaaggagacacccgcgatcgaacaccggtcgacaggcgaggcatgcaaaaagaagagcatttcgagagaagcacaacgtgcggcgtgtcggcgactcattattgtatctgataaacactcaaaaggcctctctgtataccttggatgtcttaaaaggttcattctcattccttgggatgagaaatgggagctataacatatccacattcattgtattaggagatggcgcatccctatctaaggtggggctttttttgagacagagggaataattcactact

SEQ ID NO: 7537 - DNA, 284 bp, Oryza sativa
agcttgatcgattcccgctgtgaaacaagacgttctgttccgtgaggtataagatcaatcacttggcgcccatccgaggcatcgactatggatatttgatgatcccctctttctttacgcgcgatatttttactacatctggtggagttgtttataaaccgtataggtactcttgttaccatcaaggaagaactggctcctttctctgtttcccccacctatatgggaaattttaagaaacgaacagtttttttcaataccaggggctggggaaaaaatgggaa

SEQ ID NO: 7538 - DNA, 114 bp, Oryza sativa
agcttcttaggccctgtttggaggagcttatctcatctgtagcttttcccataagctgcttctgctagaagctgccccaaacaagtcacagcttctaagaatctggagttacca

SEQ ID NO: 7539 - DNA, 196 bp, Oryza sativa
gagtactcgagatgaggggcatatttatttgtgttcaaaaatatgggaaactgtttaacaagttaaaagggaaacattctatcgatgcaagaacctcggctatatgcgccagtaccgagaaacaaaaaatttgcctcaaccctgcatgaaaaacttcgagaggcctcatatggattgggcatacagaatcaccgaa

SEQ ID NO: 7540 - DNA, 340 bp, Oryza sativa
cgctatagctcgcaaacaatcccgctgtcagagcgggtgggcatcaccaaagctgggccctctgtcattctcatcagacgtgaacctccatcgactgcagtcttactggcctccagctgttgtcgcctatgttgacccactcgtgttggactccacaccatcctctacctaccaatcgccttgatctctaaatcacgccgactacttgacctcgacaaaatccgacatggaggtgcctgatccggccatgggaacataagatctagccacggcggcaccaggtccccaatcttcctcgccggtgagcgccgcagtggcgttcagcactctagctcaccac

SEQ ID NO: 7541 - DNA, 438 bp, Oryza sativa
tgaatcaacaatcaaaattcatgatttcatacgagttataatgtatcatcttaacaagcacataggttgaagaataaacactatacacatatatctattgcatttatcactctttctcaaataacctttagcacaaaataaccaagagaattctttttgaaccttttcttttcttgagcctttttgctcatatttttctcttttattccgggtacgtccctgtcgtcaagactgtttccaaggatatggcacccattattttgctcacatcgaatacgtccttgtcatcaagactatttccaaggattcgcgattcatttttttcatattgtttattctctttttcacaatgagcaattaaagctatttgaggaataacaattcaataaagcatatatatagagcatttataaatcaaaccatatgatagcatcaaca

SEQ ID NO: 7542 - DNA, 251 bp, Oryza sativa
ctcaagctccctcatccacaactggactctctgagagagtagtacatctcattcttctgacataaaacaaacagattaataacaacagacgcttgaaaagcatcataaaacgcaaagcacacgcacagaaactcagggcagttcacacaaggcagctcccaagtactgaacacacagcgatgcttcagaaaaaagtatgaagaaagagcaaccatgacaacaaatgccacgcttgcaacaaggtgatacag

SEQ ID NO: 7543 - DNA, 130 bp, Oryza sativa
aaccactcgggacaaacacaacactcttctttactcaccgaggaacggaaggcaagcacagtccaaaatacctaagcacaatatcttcctcaggcgacctagcaaaagccaaatgccagaactacccaga

SEQ ID NO: 7544 - DNA, 430 bp, Oryza sativa
  unsure (1)..(430): unsure at all n locations
tacagcctagtcaaacagagccttcacagagttttcttctttttttaatagacatctttctattagccattagataagtgctctctcggattttattttaaattttatctattaaaatattttaaaaataactcctattatcaaagtagtacatatttaaaccaccaacgctcctaagaacaattttttatgactctgacatataatagcgtatactaaccgccgcacagagtaaaactaaccatttagtgaacactccttacaaccatcccagaggaggacaaggagtaacctgtaaaatgtcacctataccatntgcaggtgacccccttgcaaaatagtcaacccttcttcatacatacggtagcattgattaataattatatgccgcatcataaagaacacttctcatactatagatcctctataa

SEQ ID NO: 7545 - DNA, 436 bp, Oryza sativa
gctttggtgatcatgtatataccaagttcattattaatggtttgtaaaataaattactaccaaaaaatggacttcataggaaaagcatatgtgcgtatcaacacggaagacaattataataccgagaaacataatacacaccaaggtgaactcgtaaaaatataagaataaccagactaacattatgataggagttttataactacaggtttacatactgctcaagtttagacacagtattgcatcgaatgatactgaaggtctgaaaccgatatggtcgatctcccacaatttcgagattagagaggtggtcgactcacccttctctgttagcactggaaaatgcagcactgcataccttgcacataatacataccaacagctagctggtctagcaccaattaaccatctgcgaatatatagcttattctaacat

SEQ ID NO: 7546 - DNA, 175 bp, Oryza sativa
acacatggacgctcctgatcgctccccatgacggattgacggttcagagcataatggacatttcgcatacgctaccaccatcatacctgcctattttaagaggagctcattcacacttcaaaacacacttaagaaagctcaacatttctatctatactttacataagtaatctag

SEQ ID NO: 7547 - DNA, 385 bp, Oryza sativa
  unsure (1)..(385): unsure at all n locations
tataggctacatggtttgttctacatgtangcactttgagcatacatgtgccttcgttgtgacatgtcttgggtagcataacatttaaacaaataaaaaaagttcaagctaagtaacaaaagggtctacggtactgactaacactaccatgcatgagtgctgagctcgacgagctattcgagctcagctcgttaaggcttgtgaatctcacaacaagctcgggctcggctcgtgtgaagctcgagtcgagcttggcaagctcaaatgcttcgagcttttctgacaaccctatatgtatattcgactctaagttgcctatttcggtgtaacctaagattaaagcccttaacaaaaaaaattttggctcgaatcaaattttcatctt

SEQ ID NO: 7548 - DNA, 283 bp, Oryza sativa
ttatggctaacatgttgacatgcttcgtctcataacgctgagctcgatcaaattgacatcttcaagaaagcctcttggcaatgggaagtcaacctcataaacattattgtggacgcttcctgcacattcaaagataccccaactgaaacatcacccttgtgaatttactccgagcaatttgacgcagtatattaatacaaaaaagactctaaactgaagaagagttataacaacaaataaccatcgaaaaactcaatatttcaaaagacattctatcttttgg

SEQ ID NO: 7549 - DNA, 394 bp, Oryza sativa
aagctgttagaatatataccttcacagaagatactttcttatgtaccaaccgatcattgcgaacaccaagccccaagattcataatgacccagccctccatgaaggaacatcttcagttactgcagcggtatgttcaacaccagcagcaatcattttcacacaaactccctatacatatgtttaaccattagcaacagtgcatagtgtattgagaaaatctaaaagatatccatcttccttctctttgaagcaacacgtaataagtgggccacgatgttcagattattattacatgaacatattatttattggctctgggtgctgtctatattggagagtaaaactgttacaataacgtgagaggatctacacctgcagtccacctcatgatat

SEQ ID NO: 7550 - DNA, 457 bp, Oryza sativa
tctcaacaatctataaaaagaaatgaatcttataggttataacttattgaaagggcaaccgagaatataaagggaattccacacgtaattgttctcacatcttccaatgtcttggaccacaaagatcttttcttcaagcttttcacatagttcctttgactcttcaattctattctcacgacctcaatattttctcctggaagattatctggacacagtgccgaaattccaaaagatttaaagtggcattgctctgacaacttaactgaaatagatatggatattgaaaatacaaagaaataacatttttcccttagcttgagcaatccacataagtcatttgtttgggtcatgaatatcatctggttaggtaatgggcacagaactattgacacaaatatttgtcactctgtccaagacatagctagaggattctgtaaaatacgtatcatacctt

SEQ ID NO: 7551 - DNA, 425 bp, Oryza sativa
  unsure (1)..(425): unsure at all n locations
tctaatcgactgcagcatgcaactccagaatagccgaacgtttttctttttgttctgaacccantagatcggttgatacctgactttttaacaccgtaagctataaaagaaacaaagctcctgctgattgtctctcggcatatcgatctttgatcgaaatttatttatctccctgatgccgcgtgaagcacaagaatatgccgagccggctggtgcctcctgccgattagattggccactaccccggtcataccagaataggtactgtcgttagaccggcgcaatgaacagtgagatctgcgatcaaaagaacaatgtagccgatctaaaccaatcaaccgagtgatcattgtattgcttggcggagtaaattgtagattaattcggttgttatccgaactctcattcgacgaacagttttacta

SEQ ID NO: 7552 - DNA, 380 bp, Oryza sativa
  unsure (1)..(380): unsure at all n locations
acaccatanaagactgagctcgcaacctgagcactcacanttgctggaagaacctgtatttatacagacacccaccggcacatggaatacgcctcctattaccccaaaagggggacagcctatactccacactcctgcgggctcgtgaacaaacagattctgcatgatcaaaccatgtcatattacgaagaacatcaagggtaatctaccccaattcgtcacgagagattcatgaagctcgtgctggtgccgctgcagataccttgtatcttaacccctaacgacggaaaacaatggggaggtggacaaaataagtacgtgactgaacgagataagattaagatacaaattagcccaccattcatgactcaaccacttac

SEQ ID NO: 7553 - DNA, 385 bp, Oryza sativa
gcttaagataccaatgcgaagtcatactctctgtttgtggcatgaccacaactcactactgcccatccgtgacagttgaaatccaagggttgatatttccagccaacctcattcttctcgaatccaaagacctaaatgttatacttgggatggattggttgacacggcacaaaggagtgattgattgccctagccgcatcatcaagttgaccaatgcgaaaggagaagtggtaaccttccagtctccagtgccgcagaagccagggatcagtttgaaccaagctgttggtgaacgacaagaagtagcattggagaaaaccactaagaaagtggaggatattcccatagtcagagagtatccataaggttttctggatgatctgac

SEQ ID NO: 7554 - DNA, 433 bp, Oryza sativa
  unsure (1)..(433): unsure at all n locations
agcttaaaagacaaacttgggtaggcatattctttgatttgttgggctttgtggctcagtagaaatgacttagtctttaatggctacaaccacgtatcttttttgtaggtaattttcaaagcaactcatttgtcaaggctttggtctttgcttcttaaagaagacgaaggcattgaagtaatcgcgaagtgcaagcttttagagaagcgtatgatggagctcttctctacttttgggtggaactttagaagaaggattgaagcttagcttttagttcctcttgcttgttatccatctttaaaacttatttatgctttacccatgtaacgggagagacttatgtactcgggtttgtgactcttangctgggtacaccctcacaaagtgtagaggccgggtgtttcatattccattatctataaaaaaagatgaa

SEQ ID NO: 7555 - DNA, 428 bp, Oryza sativa
tgcagaaactttgaactattcaaggtaccggacagcaaaatttgttttattaacatggaagatgacaagagcaacaaccaaagtactcatgggcagcactagtactactgttctaaccattctttttcagtcatttggtactaatagtaccagtgtactaccaactactaccaatgctctttgggagcctgtaaaagatgagatctttggcatggcaaaaaatgtccaaatctgcaaaaggaaaatgataccttggaagcaaagaaattgtgtatatggtcaactaatattgagcgtgacgtttcttcaggaacactggaaataaaggcgcagtttggtactactgacaaagaaaggctaaggaaaaaatgcaaaagttttgaaatattcccctaaagcacatgcctttaaccatcctgaaagtgaca

SEQ ID NO: 7556 - DNA, 349 bp, Oryza sativa
  unsure (1)..(349): unsure at all n locations
agctnttctttgctcctagtgcccattgcaggatttctattnttgcnccctgggcccatagctgggctattaggagtccacaaacgtcaaggccttccctttggttggcccttcaccctttttggcgccacgggaggggttttatctccaaaacctgggaggggttccacaagttatataggtcaaggttgatataaacccactaagggtatctatattaaaaaataaagttgaaaatattttgcttagaacccatattgccgcaattggcacataagggctatgtgcctcgggcaaaatactaacactaatgagatactctgacatgaactctatggtcccgtgctat

SEQ ID NO: 7557 - DNA, 440 bp, Oryza sativa
tgaattggcaacgagagggcatggatgcggaagggaggattattttctcattctccgaagtatgcaatgacgagggaaaacttggagctagtctcctagacattatcatttcgctctttttctttgtatctcaaatctaagatgatgagcgtatgcactcgtgtaactattgcccgcgcatatccaattatggaatggatataaaggccggatttctatacattatttaaatagttatcgaatatctatctttccataaaaaaagggaaatacaaatactctaccaagaggttcaaaagaatctgctgacaatagctaaggaatattcattctaagccttaccgctgtaactgcttaacacatccacaaaatattctgatggatttgccattcccacaacccagaaatgctcaatacaatctcaggtgaacccggtgttt

SEQ ID NO: 7558 - DNA, 341 bp, Oryza sativa
tagcttaccacagccgacgaaactcataggctggtttgtcattctaattctggatcctggaaccacacgactgttcgacatatgggtccccatggattgcttacgacttattataagccgtaatggtctaatatcaattaaaaaaataatatgtgagtaaaactttcgtatttatgttcttagagacttaaaggccaaagctgaaaaataatacgttgaataaacatcataatcaaattcaaaaatacagtttaaaatataaattttagcttttgcttataaaaggcaaaggaaacaatgaagcccatagcccgttaggagtactatgctatccttctcac

SEQ ID NO: 7559 - DNA, 420 bp, Oryza sativa
  unsure (1)..(420): unsure at all n locations
tgttctgaagaagaatcgatattctgtggagacgccatattctgatgtcataccatacttccgngattaaaaaatattcttttttgtctattattttctatatatgtgagctgcgatatctcatctccaggttttgaagacgcttctgatagatgatatcatttgcagagcacggatatctcctgagggtattcatctgttntgtgcacttgaatagaattcttatggcaatatactactagcaaagtcgtgccttcctacccattatcttatgcgagctctagtctgtctggtgttactacattgtctgcgtgaaaccatcgtgtaacttctatcaatgcaagctgagttctatgttagtatctaagggcctgttcgattcagcttacgattattataatccggatattatgagtagct

SEQ ID NO: 7560 - DNA, 422 bp, Oryza sativa
agctttattagctaaaacatggcttgtctgtttctatgaccaaggcatctcctatataactatgtccctttctcggcgtttaacctccttaacaatgtaagctagtgcggaaagatctttctctttagattgtatgagctgagccgctatcaaaccatcagttggtactttaattattttaaacttaaagaatagatagacgaacttctttatagaaatatttcacacgaaatataacgtttagcagtttataacagcgtgatattgagaacccgaaacaaagataaaatctgtgtcttaagaaaaaacgtagattaaaatataatatattctcaaactacatatttagactaatttatcataaaactattttttaagatatcgttcacatattacggcttttttttgaacacgcaaaatac

SEQ ID NO: 7561 - DNA, 427 bp, Oryza sativa
  unsure (1)..(427): unsure at all n locations
ctgaatcaagagcacctcgctcttatacacaagtgtacgtgtcttatatatancctagaggggggggatgaataagctttcctgaaatattctcaacaaaaacatccggtaaattgacatggccgggaaccttctgtggatgaacaccggaactttctaacagtgattaacagcccggaacttccggattcttagacaggaacttcccggcatccagaaaaaacgaaatatgagaagtataacaggtcctatcttaggaaaatcaggcacagcggtgcacaagatgaaaatcacaagataccagttgattcaaacacagatcatgcacaccagagacataggcgagttttttccgaaatccgatcacacggatcctactcttcggtgagggctccaaagagcgggtctcgataaccccttgctcact

SEQ ID NO: 7562 - DNA, 334 bp, Oryza sativa
agcttataattaattaatcacgcattaatccattgcttctctttccgtgtcagaagtgagggttcgcaatcctcacctaagaacacaagctaattagagtgcaagccatatgcaactttttatattcatttatctctgaattttcggattatattgcgtgatagctaaaattaagccctacatatgaatctaatgtctttaatagagaacaaatataatttacagaactagaattttgaattgatttacaaaaccacgccgcggagtataatttataggtgtttaaagaccctcatcctcttactggtcatggcaggggatacgtaactgacca

SEQ ID NO: 7563 - DNA, 461 bp, Oryza sativa
  unsure (1)..(461): unsure at all n locations
ggaaggatgaattgnagcttcgctattcttgagctatatggtgtttctttgggatatcttctttgtaggtaagcgaccatgcgctgtacaatgggttccgggccgccggaaagcatggcgctgccgtcatgcagccgccgacgttcgggcaggtactctggccaaaaaccagtactcccgtgggttcaacttcttccccaattcattctgcttctttaccaacgtcggaaacaactgcctgcctgccgcctccgcggagctcgtacgccgtcgccgcgctctgctacccccgccggtcatgcctgcttcgcttgccaccgctgcgctagcccgccgtcgtcccgcccgtctcggcccgtcgtagaagagagaatagaagaaaatatacgagaacagagaagaaaggcgaagacactagagatgtggtggcacatcattntctctcactgacatgtgtggcc

SEQ ID NO: 7564 - DNA, 436 bp, Oryza sativa
  unsure (1)..(436): unsure at all n locations
ctgcccggcgacttcaataagctatgcaaatgacagagggtttttttatgtgtgattaaatctcccaaatggagaaagtcattatgatgcatccactgggcaaggagtcggacttacattgatgaaaaacgtgaaccaaaattgcggaagagtgacgataaataatcttggtgccacaagcaaggatattgcagcataaagtgcgataaagaacaagaanaatcttgaccaactgaacatgaaatggtcttctgtgagaacccagaccataatgacatcgacgatctcaagtcctaattcctcctaccagtctcaagagtcagaccctctatggctatctaagtcaatctcttccacaatgtgtttatcctcataatctgccaagcctaaagaacccttgaggttcatgaattgcatagactctgcagcttaccat

SEQ ID NO: 7565 - DNA, 316 bp, Oryza sativa
  unsure (1)..(316): unsure at all n locations
agcttgggatntatggaacccanactngtctaagtttgtgtcctcttgatgtagttaccaaagcctttgtgaccctcacacaagtgcggtactcatcattggaattcccattatatatagcaaccattttgccctctgaatttttgggaatttcttatgaatcataggtaagaatctctggccggaactttcttgttttatacccggaacttccggtcaagccccttctgcctttcagaggcctcggaacttcctgacaaaatgtttgaaacttcctgtcttacagggcaagaacttcccggcattttgcccgaac

SEQ ID NO: 7566 - DNA, 86 bp, Oryza sativa
agctttaacgatacacgtaccacatatgtccatctttatctgtgccacttcatccaccctgagtgttgtcatgagataggagattt

SEQ ID NO: 7567 - DNA, 401 bp, Oryza sativa
tgtagctgaactatagagaggcgtctattgtatggatattaggatacttaatatttgaagaagaggagactatcaatgagtgcggaagaatatcccgcagtgtgtcacgcataatcttcttcctactatctcattatatctgaagagttactcctgaattcaacatcatagttctcttgagcaatttatatataccttgtgagaattatctctgggctaggtcctaattagcgcaccggaatattgttcactataactcaactaaaatatactgattgctttggtgacggattaacactagtatacatagtaatagcttatacacggggtttaggtcatcattatccagcaattgttgccgatcccatcaatcaattgacgtgggtgtacaggtggtgaca

SEQ ID NO: 7568 - DNA, 142 bp, Oryza sativa
gaccttaagcgacgcagcagcactgagagagaatgcgacagtctgtttttctgctcaaaccacgacggccacaccggaaagaacccatcgacaggaccatgcaagaaggacgccagcgggccacccacctgagacagacagc

SEQ ID NO: 7569 - DNA, 412 bp, Oryza sativa
  unsure (1)..(412): unsure at all n locations
agctttcttcttcaacgcttgtgattgttttttaccgtcggattctctctagattcatgcaaggcacgaaaaaaatcgaggcgcctataaatcggacgttgttccaccaaatagatcagaattgtttcactatatagaccgaaaatgtttcaatcgtttaaaaagctgaagcacaactaaatcacctcttggaacattntgctataatgcatgaaacaaacggtttccaaaaaatcaggtgttgtttcaccatatataaaaacaatgttataacaaatagcgaaaggatgttttaattcactgcaacatttgatctatacatagtgaaacatcacgagtacactgactgaaacattgttggtagaacaaaaattaaaacggattcccttaatagagcgtttccataatatgt

SEQ ID NO: 7570 - DNA, 401 bp, Oryza sativa
  unsure (1)..(401): unsure at all n locations
acttaagcacgcagcatgcacttgcgacaacgaagttacttattttatgcgcgtaccgaanagaatggatctgctgctggatataatgttattcattcggatacacagcgcacccgcatggacatctgattgcctatatctttacgcgagcactgggatggataccctcagagtgtgaagccaggtactactactcgcgtaatcgaccaataggcgagctgaacctatgcacacacgagcggctaaacgcgcttgaccttggacataaataaagggctcaagtggactgtttcaccaattacctaaacgagtgcaggatagccgcttactgaagacacagtactgtgattccaaacggtatcagactttaactcatcggctaactaattatagagaatacg

SEQ ID NO: 7571 - DNA, 251 bp, Oryza sativa
  unsure (1)..(251): unsure at all n locations
tctaatcgactgcagcatgcaagctgngaatacactaagagattctctgtttcctatgcanttacaaaacctactgacaatgatagcgaaacagtcgaggaaagaactcgaaagaaacctacctatcggaaaggcaaacatatggggagggggggaggtcttcgttccccncctccaatacacttacacaactccaccccaactctcacacataccgcaacacctcactccaaacacactacaaccactac

SEQ ID NO: 7572 - DNA, 369 bp, Oryza sativa
actcagctctggacaccctcggagtcgacacggtacaccgcttcttatctattctatctgaagagcatagtgagcaacatcacctttctgtttctcgaaaggtttttgtctatgggagatgaactggaggatccctttgcatagataatcaagacaacaggaagatgcttcatatgatgctacatgtatggaaatggcaggcaccggcaatatgtgaagaatataatggctgtgtggactcagcttgagccggcatcgcaaaagctgcacaagaacacaacagtgacagcttcactcttcttttagctgatgtacttgtatatgatgcctgacggacatgcatctggtgagttcttacaagaacaaatc

SEQ ID NO: 7573 - DNA, 382 bp, Oryza sativa
ctcgacccgggatccttaagtcacctgcggcatgcaagcttgctaattgcactcgacggtcgaactccttcgaccataactgaactgaatgcgcggttcaggctgtcatattggaccttcacttgaagtaacatctgactgggtcgatccattgtacgaattgacattttcttacatccatctatgtacattctttctgtgatagtggaattaatgattggactgatgagagatgacaataataattgcaattaccactagatgattcgtaagaatgtttgcgcacacgaaacactttggcctcgaagtctgtgccatactgaccttatgacctgacaacggtcgccacaacgacactgcggacgctcacgccacctgggga

SEQ ID NO: 7574 - DNA, 404 bp, Oryza sativa
agctttctctttcgagctagctagctttctatttagccggccacgctagcttgcagaagccgacgtcttagttggaatttacagaaagatgcaccagcagatatacctaatcgtattctagctacagttctgtcggtggctattggaattccagcctagaacttgcagctatttagtccctcttgttctctgtgatgatgaagcgaggagagacgggatattatctaacgtcttgcccgcacccggcaaaaccggctcttctttgtttcttccaatggaggaattggagtcgtcttttaaatagccgtttgccagtggattaagccccaatattggtttttttttttatgcgcggacccaaataaaatttaaactccttttaaaatgtgttcgaatttattgtt

SEQ ID NO: 7575 - DNA, 279 bp, Oryza sativa
  unsure (1)..(279): unsure at all n locations
tcgatccctatacgaaggggtagcgaagtatgacgcggagaaccgacagcgacgacgccgcgcggaagcaagacggaatgaggatatggcgcaatcaaaccggaataatttctcgccgcggagagcgagcgagagcgcnagagagagagagagatatagagagacaggagaagaggagaggagagcggccgcgtggggggaatctgcgcgacgacctcataggcggcggcggcgataaagcggatgctgcggacgagtggtggcgggggatggggaaac

SEQ ID NO: 7576 - DNA, 430 bp, Oryza sativa
  unsure (1)..(430): unsure at all n locations
tctaagtcacctgcggcatgcagcttaaagccgctaaataagatcttttgttttcttgctaaaaggggttgngctaactaaggacaatttggctagatgaacatcggaacttgcagttaagatgttggttctgtatgataaacgagaccattcatcatccttttatagatngtcattatgcgaaatttgtttggagagcagttcacctcctcatttcggcttatacctccctggaaccatatcctatatgtctgatggctggcttttgacggttgacaagaagagtaaacccatacttatacgagcatctgccatatgttgggctctgtggttgagtaggaatgatatgcgatatgacacatccccatctatctcatatttcgcaggtcatttcacggccacatattggctccagtgttgggcacacctg

SEQ ID NO: 7577 - DNA, 405 bp, Oryza sativa
agcttactgggttagtctacatgatgcatgtaaatattcttctggttatcacctacgggttagtctagacaaaattaacaagcagactgactcaagattccagataagaacaatcggatcaaaatgaaactttaatcaggttttaggttgtataaatggtatcaatctttagtcacattatgttagggcggccacaagatagaatgattttgggtggcccatttaagcaaacaattagagggttaaacccagcaaattttattctgtaccacctcctggtttagggccatccggaaaattctgaaaatcgggagaggaaggtgaaaatcccaccaattcattttttcttgttcagagataacatacggaaaagaatctttatttacttagcagtttaaaatcttt

SEQ ID NO: 7578 - DNA, 174 bp, Oryza sativa
tgcctaagcaataacgacctccaggcagcaaggggtttttcaaacttacactcaaacatgctttaattcactgtgcgacaaacaccctttcacgggaaatgtccattcacaaccatatccctatccggggaacatagagaaaactcatggggattgtacaccgccttcctacct

SEQ ID NO: 7579 - DNA, 423 bp, Oryza sativa
  unsure (1)..(423): unsure at all n locations
agcttactggattactaggagtcatgattgtttttatttgtcattctacctaaatgtgcataattgatctttttgactgcgtgcccatcatgggtatgtgctatagaacttttataacctagctaggaaaagcagctataattcaaccgctacaaacctgtattcattttgaatatgcgattaattgatattgataaacaactgcagaatgngaaacgactctgcaatacataggtgttctaagccttggtctggtaagtattttccattttcaaactgtcggtacatatcatatattcttctgtcaattgcctggaaagaaagcaataagctttggcctttatattactactcactccatccacaatcatggcaagcggaaacaacacagttacatgacattctttactcttggagactatc

SEQ ID NO: 7580 - DNA, 421 bp, Oryza sativa
  unsure (1)..(421): unsure at all n locations
agcttataagactatctccctaaattatcgggtggtctcaacttgtaaggcgtataagctgcagactggtgtcttcagattcttacagcttgagctcaaaagctaagataataattaaagcagttgcttcgtggtagtcccttatacgttatcaattggtcagcctaatttaagctgagccaaatcaacaattaatgaaatactcatgcgttacanatgaaataactgagcacaaatcaataagtagtgttgttacttcctgtgttagcaaaattaattgggaacaacagacctttcggcatgtggttattggatcatcagaataaaatggtggataaccaacaagcatctcatacatgattgcacccaaagaccacctgtatggcanaagaagtacattgataaaatctaattatcaaga

SEQ ID NO: 7581 - DNA, 388 bp, Oryza sativa
  unsure (1)..(388): unsure at all n locations
tatgcagttcgtacaggatgatntgtgaaagaagagggatattattttgaggaagaaggtccatgttgagcagaaagatatggtgacagcatttgcgcgtttcgaagcgagtgacagtggggtgggattctctagctgcctgctggatgtgtctgaatttcctcacggttcatacaagatgaagtggcatgcgtgctgcatcgacaaagatggcgcctattatagcttgctgcctctcaacgacggcgcagccttctccgttcgctcgtctccaatgcagtagagatactgctatgttgtgttgccattgtcgccgttgctgctgctgcaaggcattttatctgtctatataaatcatcagttgtaacattatgcgagcaatctccat

SEQ ID NO: 7582 - DNA, 316 bp, Oryza sativa
agcttgcaagacttcatctcatgtcttttttatgtttgtgtatccatcgctaaagattgtagcaatcagagttttcggcctgatcttttgttattctaacaggctacagcccatggattgacatgcactgatattctgtcatcctgcaaggttgtggttaattctcgtcataacaagagtggcaacctgatgaagccatccacggttactttatttctaatcttcttaaacgaaaatccttttttttcgagaattaaagttttggcggtgtacttgctgattcctgccaacgggaaaacaaattgaaagcatgaat

SEQ ID NO: 7583 - DNA, 416 bp, Oryza sativa
  unsure (1)..(416): unsure at all n locations
gctatatatcaaacaaaatttctttctgaactatctatgcccttggtttggtccacaatatttctttcaacttccaacttttccataacatcaaaacttttatacacataaacctctaactttttcggcacatcggtccaaattcaaccagactttcaattttggcatgaactacctaatggaatttggtcactgatcgaaatccatctctagnctttgaattaatggtcttggaagcgtagatttcactgccatacatttaatacacgcatgcatatatcgatggcggcatgtagataaacaatgtgatgccatcttggtcccggccctgcttgattgatactagtaatacttctcatctcttcttttcaattgagaatcttaagtattacttctactgcagtacagcagtaact

SEQ ID NO: 7584 - DNA, 313 bp, Oryza sativa
ctccttgctttcttttttactgggcacgtcgtgcttttgaattttctcttctatggtgacttacattttaattcatttttaatacacgagcatggtgataacttcgatgcagacttgaatattcatgtaaatgagttgcatacctcccagctagctagaaacccatctcaagagcatgattattcagcaaagtcagatcatgctgcttatgaagccattgtggaatattattctagaagatctcctggctcaagaaaccataatgaagctcattccaaggactgcttacgatcctgtcatgctagcagaaaac

SEQ ID NO: 7585 - DNA, 173 bp, Oryza sativa
tctccacctttggcccgcatatgatgaaaggactgttatgtattttttcttccttatcgaggccatgcacgactacccatatctaaccctgaccccatgatgtcccgggcagacctgttataaagtccattccaatctcctaccatctccattccggcattcaaagaggctgg

SEQ ID NO: 7586 - DNA, 400 bp, Oryza sativa
  unsure (1)..(400): unsure at all n locations
ncagcttgagctaatactttagcccgaaaattattttctgccctcctatggatcaacctgcgagcgagcccgcatgcatatgcataccggatatctcgacgtcgctaggttacttctgcacaccagcggtcgtcgactgcatcgtatccttggtgcccagaccggcgtggccttgcgaagcacgcgcatggcgtataataatctgcctaatcaagtaagcatccactacccacatttgtctggcgcatcagaggcggagaaaggagctctggttaggagcatcgctgaatcgagtggagtgaaagcatcgaggctgcccgattctggaatcgtcgtatcaagcgccacgaataggactgggtcaatacttgtgaagcacagtaaaaagggattggctcct

SEQ ID NO: 7587 - DNA, 393 bp, Oryza sativa
agcccagtgaaacaggagatcatacagaggttatggacagcccagataccacctgcatagatcacatctaccacatatgcaattgtgaccaaaatgaaaagataaagttgctatagagatctccataacttcaaaattctgaatataggactattatattgtaagaatcgtaccaagattaacttgtttggacctttttccatgaacaagccactcgaatcataagaattacttactctcctatgattgatgcagcacaagatctgagacaaatacaaaccttgttacactcgaactacatggatgagattatgttccttatataaagaactgagattttggcacttgatggctctcctatctactggtatcggcacaacaaaacgagcaaag

SEQ ID NO: 7588 - DNA, 226 bp, Oryza sativa
attaaaaccgtgactgtagtattttaatttttatacgtgtgtgggtgattgaaattgtggaacaaaattataatgaatgcttaattgtattcaaatcgttgacagatgttgttatagaattgaatataagtactaatgcatgtgatataaataaatgtatttttacttttaatttgaaaggtattaataagtgaagattgattataagaatgtttttggaaacaat

SEQ ID NO: 7589 - DNA, 281 bp, Oryza sativa
gaatggatttggtaatatagtgatgaccgcttctataaaaccctacctattgatcaagcatgaaatctttgattacatcccctttcccttattcttttctaaaggtgatgttatgtaatcacatacttaactttacgctatatatttagacactcatttagagtattaaattatgactacttacaaaactactcccctcaatgaaggctcatgtgcgaaatatatttttgagcctaaataccctatatcaaagaatttctactgtggatcatttatgctta

SEQ ID NO: 7590 - DNA, 395 bp, Oryza sativa
tacagggattctccttgtgttgtgatgccgagcttgtctagacgtgatcacaaatggacgaaacctactatagtactagtagtatgagcactacttctactctaactactcctcgagcccagttattccatccatcggattcctttcacagataggcagaaactatcaagcctataagttttttctttctgtgtttttctgaaataattacagaaggccctaataataaaaactaattataaaatccggtgttaaaacagcgagacgaatttattaagcctaattaattcatcattagcaaatatttaccgaagcaccatatcgttaaatcatagagtaactaacctatatttaatatcttatgtgagtgtttaaacagttgatgtgacatattg

SEQ ID NO: 7591 - DNA, 474 bp, Oryza sativa
tcctaacgcgattcttatgtactggccagctctctgcttccatatatcgctctactacgtacccggacagggatgacctaattgatcttgagggctgtcaccacctctacactcaccacacacctattgtgtgatacggagtaaacaccgaaatatcaactacctatacaccgcgtctaagtaattaataacatactttaatgttagctacaaactaaagcaatcactatattgtactggattatagtgaacgatgaacccgcacgctgattatgaactaaccaagtgataattctcaccaagcataactaaattactcataagatatttctattataatcagagtaattaacatagcaaaagaagtatgaagaggattaccgacaacttctgaactcctccgacttcttctactctactctgctcctaatatagtataataaagtacaatagagtctcttataattcagctca

SEQ ID NO: 7592 - DNA, 362 bp, Oryza sativa
aacggttcgtcgggacaatagagcaaagctctcttcatactgattggacgtttcaaacatgatgaaactcttttgttctcacattgtaccaaggagtcctttattacacccatggacttcaagaccattaatttatataatatgcgccatactattacacatgcatgcccaatcatcgcagtgcatgctactgcttccgatttggttccaagattcgtcatgcttcctgtcggtgaagtacatgaggaacttattatcttccactgctcatgcacatcatgtgcgtataccaacatatcaatatggttacgtgtgcacaaatgcagcctccagtggattataatacaaaaaatggagtaata

SEQ ID NO: 7593 - DNA, 410 bp, Oryza sativa
gtgtaggtgtttagaccggtatgaagtgttcttcttttatcaacctatcaaccactacccatatagaatcatgtcctgccgacgttctgggtagaccgtgtataaaatccattcctatttcttcccacttccactctggaatcttcaacggttgtaacagaccggctggcttctgatgttctgccttgacccgctgacatacatcacatatagccacatattctgctatctcacgtcgcatactggcccaccagaattgttgctttaggtcttggaacatcttagtgcttccagggtgaatggaatacaaagtttcatgagcttctttcatgatagtatccttcaactccttattatctgagacgcaaattctttctactaaccacacagttccttgctcatcttctaca

SEQ ID NO: 7594 - DNA, 339 bp, Oryza sativa
  unsure (1)..(339): unsure at all n locations
agcttntccgggccgtctctaccgtatttctttcattctctgtacttttaccttcgttcatgtagcatcgtagaataagatgggcgatgaccgtgttgtgttgtgccttctcctgaatgttaagtaattcccgggaacgattgaaatctccatgcatgggctaccggtttacatccatttagacaagaaaaccatctttttacagttacacaggaaatatgtgtactatcacaatgtcttttaacacatggcaaatatatgagtcaagactgaaaataatgcttttattattaaataaaagacatagacaaaggttaaaatcgtataccttataaaaaa

SEQ ID NO: 7595 - DNA, 465 bp, Oryza sativa
  unsure (1)..(465): unsure at all n locations
tgatcgattccacctctgaaacaagaagttctggaccggtttgtataatatcaatcacttggcgtccatccgatgcatcgactatggatatttcatatccccccttttctttacgcattatttttcttactacacctgttgacgttgcattatataccgtatntgtactcttgctaccatcaagatagatctgtccccttcctcggtttccccccacatatatgggatattttaagaaatgaacgtctttcttcatagcagggtcggnggaaagaatgggaaagacgatttcactatatgtcttaccgggaacaggaagaaattgtatctttntacctcggtttattatagtaaaaatttagcaacactnttcccacatgatctcttgcaggaagatggtaatctccaacttcgacttgcaatnttattctcatgatatagcaagtaactcnataatttatatac

SEQ ID NO: 7596 - DNA, 374 bp, Oryza sativa
tgagagattctgttaacactagctatgttgtaatactgatggtattgttcatactatccgcactatgaataatacttaattatatccttgttaccactatatatgtttgcccaccaaatgattgaaccacctataatgattatgccattgctataagttctaaatggcatttgtatgcattagagagacgtattgatgatattttcctttaccactattacatactacagcatttccatcccctgttattgtactatggtccaagagtggtgcaactgctccatcaccgcatgttaccgttacatgcgactgacaactcactgcactctagcatatgctacatcatctatggtagcatcatttgtctttgattt

SEQ ID NO: 7597 - DNA, 390 bp, Oryza sativa
gacctaagcacctgagctgcagctccccttcacttcagtttttaattgcggcaaagactttctactagcttgtacttcttagcaaagctcttatttttttgttcaacctatgcttttcactggaatcactcaaattcaaatgtgtgaatatctacccctcttctgttaggcaaatatttttggccttctgtggaaatgtactttcttcgcttggataaaggtactactagccattggtatgaatcttttgacatcctccatgaaatatggctctaacggcctatcaacttgaggtaataagccgtcactactatcagatggaagtgctacctttggtaaatggtccacattgctatttttgatcgtgttgactgacggtaaaaatataac

SEQ ID NO: 7598 - DNA, 138 bp, Oryza sativa
  unsure (1)..(138): unsure at all n locations
ctctgggacgggacaagcccgattagctttatctaattcgcaaacaatcatggggngatatgaattgtccacgaaaggccgttgttctccttattgattttaattgaaccttctttctaagaacatctatgtgagtgc

SEQ ID NO: 7599 - DNA, 175 bp, Oryza sativa
agcttctccggctagaccaatggtcgtatgggcagtggcgcacagcctctctccgaacgctagcggtgacgactaggagcaaaacccgtgccgtctggctcgcaccccaccgttcccctatcgccgaaatattgggcggggggaagcgctcggtgaggccgaatgatccgcgact

SEQ ID NO: 7600 - DNA, 375 bp, Oryza sativa
  unsure (1)..(375): unsure at all n locations
cacatttgacgaagtgagatgctcatggtcgctcacaaggacaaaacaaaatatagatacacttcctctgtctcataagtgtagttgtgattttctgtgaccaacatttgaccatccattttatttaaaaaaattatatatttttttaaaaaatagttaccataaagtactatttatggtgtatcatctaataacaataaaaatactaatcgtcaatattgttcaaataaaacggacgatcaaacgttggacataaaaaaccacatctacatttatattgggacagagacagnatttttttaatatatatgtatatgttttggataactaaagaagagtagtggagtgagagtgtgagacactcacttaaatagc

SEQ ID NO: 7601 - DNA, 339 bp, Oryza sativa
agagaattttcgaatggattgcgcgttactataccatagatggattatattgctcgctccctgtgacaaacaatatgttcagggagtgctctcatatggacaagaacgttcacctgataaactaataagaacttggcatggggttggacatctatacaatgagatctagtatgttggctgaacattagcacaagaaccttgtttggctacagggatatagcttgatcacgagcatactctgcttgttactaatacctgaaaacatgagcctggcaagctactatttgcaaatgatggctttcattcatctgtttccaacgacaaacatcttgtcccaat

SEQ ID NO: 7602 - DNA, 463 bp, Oryza sativa
  unsure (1)..(463): unsure at all n locations
gtcatgttggaacatatgtactgtccctttttcccgcattctnttgctctattacttcttctctgaagcacccgtctgtattggacccttgcaccttactgtctcctatatcatttctactcttttctgtgtggcgattgtttctttgatggaaggccacacggcccagctttttatctaaagcagaagtcctacatagtttttacgtaacactgtggttaccggttttcagacataatcacatgctctcatgcaaaataacaaacaggagtgtggtgagtggtgattcttaataatcttaataatcggaatattgctttccctaccttttctatatcgtgaaatagagacagtgtgtgtaacacgagcacgtaccaaggtacatcgacgatagcatatattggttaactaactagttaataaataaacgagaatattatgggatgacctaacttcaaataat

SEQ ID NO: 7603 - DNA, 341 bp, Oryza sativa
gattgagagaatacatcaaagtataggagtgttttggagacggcttaaaaaatatgtctggttgagcactttggataccttgtgggctgccacttgggcttattactcttggagaacttcttctagacgggtatgtgtcgtccgcgagcttccaaagatcttgtgaatgttccgggaaagattgtgaaggtttttctcaccttcacaaggaaacgaggtcagggaagtaagattcttgtgctgagttttcagaagttggtctacgtatagcaactcgcactcgtgcgcttttctagaaagaaatgtgagttggatcttggcggcacctcattctagaaatg

SEQ ID NO: 7604 - DNA, 151 bp, Oryza sativa
  unsure (1)..(151): unsure at all n locations
tttaaaagctaatctaactgtcagactgaatgagatctgtaaattatagatgtttatgtaatttttaatttttttttttnttatatgtatatgaagaggagagttaaatggtattcaacccccccccccccgtttttgatctccccccccc

SEQ ID NO: 7605 - DNA, 400 bp, Oryza sativa
aagctactatagccatacctctactcttcccgagactttcggactcctgagtcctattctaattctattccaccagctagatactactaaactaaacttgtgaggaatgagagagcctctgcttgaggcgtgtgttgaagtgaacagagtgagctccttatatataaggggttattacggttgtggaaggggaattgtcccaagtacccctcaaccgccatcatgagaagaattggagcgtccctgtctaaacaagatttccggcatactaaaagggggtggctattaagctggagaagtggatgggtttagagacaacgaatttaaacatgtttcagccttcttaatcaaaagtaatacctactctgtccaggattgaccgcccatgtatattgatcat

SEQ ID NO: 7606 - DNA, 388 bp, Oryza sativa
  unsure (1)..(388): unsure at all n locations
gcacttcttgcaagacaggactggcatctcatttgtaaccctgaaagtctctgttctatggtcctcatggcaaaatactttcccaatgtttcccttggtgatacttggtttggaggcaatgcctctccggggtggaatgacatcgagtatggcccgtccttgcttaaagaaagaatcatctggcgcattggtaatgggagatgtgtgaggatctggagggatccatggctgccaatgaacttcttcatgagaccgatctcgcaaaagaacaactgcaggttaaaatgggtgtcagacactactgcggatggtggttggaatgaagagaaaatcaatgaacttttcctatcgatagatgctgaataatttcnaaaatcgtattcatctc

SEQ ID NO: 7607 - DNA, 440 bp, Oryza sativa
gcttactgtatatgtttggagatggaagatggttttcgtaccatttgaaaaacagtgaacatgttataaatgttgcaaaaacaccaacaaagattacaaaattttactgttcgagaaatatatgttcctgtcaatcccattggtacctctagtaccctacaaaattctctaacagcggcacacctgggaattgggagagtttccctggaaactgatgcggcaatggttaaacaagtagtaatatctacagactacgatctctttattcgcgggggcttggcccttgaacaactgttggtaacaaattttgtcaatattcaggttagacttatgcctaaaatgtaacagagtagctcatgtgttatctcaattggggaactgttgcctggctcaatctgaactaatactggttgatatttcagatgaaatctcggatcatg

SEQ ID NO: 7608 - DNA, 184 bp, Oryza sativa
ctcggctccgcgccgcgcctcctttggtgcgccctatctcgccgcgcgactctgcccggactctccacgcggcgcaagcccaagatgaaaaaagagatgaaaaaagaataaaaagcgctgctgtactggggcctggtccctatcacgcccagacaacgtaaacgtagacattgacgttatatag

SEQ ID NO: 7609 - DNA, 425 bp, Oryza sativa
  unsure (1)..(425): unsure at all n locations
atgacgttacaaagataacggtatactttatcatgctattgaaataagagtaaattttacaatgggccacatattttgaccaacgtttcataatggactacggttaaatcaatgttttcactaacatcatacatctttacataagttttcacattggacaaagggtgagcaaaacaagggaatatgagagaaattcatatgatttacatanggataattataaaaggcaaaacattctatggtatcttccttcctttcagcgggcgggaaataaatagttctattttcttgtattcattgccccaatgatagatcattttgtgccacttttaaacatgttcacgtcattgttttaatgtgaattgctgaaaacagatattttctgatctgcctaccttttctaaagatatttactctaatattgt

SEQ ID NO: 7610 - DNA, 228 bp, Oryza sativa
catgatgtctatgttcaaagccatgtttattatctatcaattacataatactagcacactgtgccgtacaccaacctacctatgttttcttagcacattgtacgagttctcatcaaccaaaagctgacgcggtgcaaatcatgatgcaaaattgtggattaatctgagaacaatccatcagagttcagatgataaatcaaatgacggtgaggctctgctggtgagtgc

SEQ ID NO: 7611 - DNA, 404 bp, Oryza sativa
  unsure (1)..(404): unsure at all n locations
ngcttgatacctcttgcagaggcatgtatttaacgatcgtatatgtatattatttctcatgtgctgtaggcttcccgaactcagtttattattactgatcaaatgctagcttccaaatctacggggggcaagaacaatactgaaaatactcgatgcaattcttatcttatatatatatatatatgtactacagacggaagtttgaagatcatcatcatatcttaaaaaacaaacatgattccctttgaatctttcccccgatgctacctcatacgatgaaatgggacccacgaaacgctgatatattatgcatttttaacnacatgaggaagataaactcgatatatgaatcaatgtaagtttgacgcacacaaaccgaaactatttaaagtagttgagaagtt

SEQ ID NO: 7612 - DNA, 453 bp, Oryza sativa
agcttagaagccctgtgacattgcttcatattatgttacctcacaattccagtaaaatcatatctttcattgaccaatcttttaataatagtggtggcataaaccttagaagagcctttaaattgttcttcaactttagcaagatattctctggttgtctgagtatatgggactgctactcttattgcgtcaataatggaactcttgataatcataaggcatttacgggttgaaatatcccattatgcctttacttcatcatatctcctttatagggtctcataattctcaatttccggtctaggctcaaccggaggatcattatggagggcataatcaatatccaacagagctagaagtaattccagcttctgcttccatgaagcataatcacgtgcatataagtgttcaatattgccattattacggcaattcgtgatgcataagatgctg

SEQ ID NO: 7613 - DNA, 305 bp, Oryza sativa
actggctagctaagctatagtagtagatcaatttttgtgtcgaaaaatgtagtaactgtcgtggaagcacgtcgaagttgctgatcgcacacacacggtaagcacacgggtttaattaattaatttgtacatatgtatgtatatatacctacattaattaatgcaagacgtgcatgtccatcgagtttgtcgaccgatcatcatgcatctacgagtagtacaaattagttgagtattactctgttttagttgtataccgtacgcctactaaacaaaataataaaaataatatgctgcatgtgcac

SEQ ID NO: 7614 - DNA, 233 bp, Oryza sativa
tccccaattgccatgagatagaacacatagaatcttcttcatcaaaactatttctcaaatataaattccctagatgcataatgttccctaacatgcgaatccaccggtcttcactatctggcttagacctaacttgaaggcaaacacagtgttactcattcttctgctattgccaacggcttcccccatgtacataaccgacatttttgtaactctaatggtttcaagaattg

SEQ ID NO: 7615 - DNA, 262 bp, Oryza sativa
  unsure (1)..(262): unsure at all n locations
acgtcttctcgcccaccgtatctggacaactccccgtgccctgcgcggcttattgacgcctgtctgtggagatgactcccccttcctgccgtgaccctgagatgtctcccactgctcccgagtgagatggagcttcccgccgatggcgatgggccccganagatgacgtggcttatcaccatcgactaccttgaggcgacctaacgcctactcgatcgacatggtggagaggtccagcagagattcaatcgaacgagcgatc

SEQ ID NO: 7616 - DNA, 345 bp, Oryza sativa
cttcttctctgctagatgattactggacacaacagctttgtaaatttcatgtgctacaaatacaatataatgaatgatggagcttgcagttttaaacatggctctcactttcttatgaagagtaagaggggcataacgagaaaatagataactactgttatttgcaaagaaagtaaacacaatgaattgctactgcttcatacttaaaacagttatagaagcactcacgtactgtccttctcaatgctgtttgctacttgattcataaaatccatagtgaacatatgcaagcaaatctgcagtgagataagaacattgcggtgttatacacctcaagagaaagtg

SEQ ID NO: 7617 - DNA, 432 bp, Oryza sativa
  unsure (1)..(432): unsure at all n locations
gagagccattttgtaaaananaactaaacaacattnttttccttactattttgaaatgcgtttttggaaatatttttaaaaaaattattgtatgtatttttttattgattctccaggtaaatttaacttgtacagtgggttacttgttactcgttgtttgctagtagcagagagaatcatcatgtattggcttaatcagctattcgaaaagacaataccggaggaactagcaacctagcagtgccagaacaggtttttatgttgctgctggtgggtgggtggacggtcagcttcgtggaggtgtcatttgaattccacatgcatcggttgggttggaagcaattagcttaacaaagcaaatattcatctagcatatatccatttatgctaaccaccggcaactaactatataaatataccttcanatcgatc

SEQ ID NO: 7618 - DNA, 368 bp, Oryza sativa
  unsure (1)..(368): unsure at all n locations
agctnattggctgctgcctagatcatgtggttgccccagtattagattataagtatggtgacataggcttgcatgatgctcttttcggtaacgcgtggcagcagtttgattgtcctttcgcttgcgaaatacgtctagagattgcagttggtgctgcagaaggccttgctcacctgcactcacttaatgtggttcacggcgatgtcagaactgccaatgtagtactggatgtttattctaaatctaagctcgaaatgcctgggataactgcatttatggcaaagattgcaggttatggaacacaaaggctcctttccttggataaggccaagcatgaaatatttctaacagagaacatccattacaag

SEQ ID NO: 7619 - DNA, 321 bp, Oryza sativa
ctaataatatactgtagtgctccaacatttctgttcccaatactgcaactgatgtctatgcaccatcgtttctgcattacagtgcagaaaggcacaaccaagctgctgtgggccaatgatacaacccatcaaacttccaaaacttaatgcggcttcagcaattatatcacaagctttcctgatcactggggaagagggtggagagactgcggttgggtgttgaatgagcatatgactgagagtagagcaggttcatcatgggctgcaaatatcatgtacctaacactccctgagaagatatagtacattatacagatatga

SEQ ID NO: 7620 - DNA, 335 bp, Oryza sativa
  unsure (1)..(335): unsure at all n locations
ataattagacccacctgcggcatgaagcttaacagaagagaccggttttaatatatgtgcatgacgagttatctattaattacgactaagttggtagtttccttctatctttaggaaagtatgtntaagggcctattagggctttatctttttcttttatctttaggaaaagttctttcttggtcgacaaggacttgtatcaacccatgggtataaatatgtaccacccgcggctatgtaatctatctccacgatcaatacaattcagcgcatcgccacccgttttacttctaactttgttttacgttccggcggaacatggcacccgacgcggg

SEQ ID NO: 7621 - DNA, 173 bp, Oryza sativa
gattcactaaattcatcctgagagaactccacaagtttgtttgcttaagacagaatacatatcccaactaatttggagattccactaactctcatataggacttctattggactccaccgccagctcagtaactagacacacattgtatactactactacaacaagagataat

SEQ ID NO: 7622 - DNA, 359 bp, Oryza sativa
tctttttgttttccgattacacggaagtggcacaataaaacatactatcgtacacaaacacgtgcaaatctctccctttggtaaattcctgtgttgtttgctagatttcatgcgctcgaaaaattgtaggttttcagtcacgatatgaaagaagcttatggatggttgttttggttgacgtggtatccaaaaaaaaaattgaaaacatgtgggggttgacatgtcacgggttttctttcttctccaatcattctcttctctattcccatctcttttcacacctcccttctctttccgatctctcttcgcggcaatggctgatggcagcgaggggagaagcggtcatattggcaagagag

SEQ ID NO: 7623 - DNA, 303 bp, Oryza sativa
cctgcactggagttaagcagatctgccaggccctgtgtttttacatatacacgctcttggcacgcacggtgggaccgattataagttataatcacaacagcgttctctcatggctgagaaactaccagcatcgccgtcctcagctaacaaagatggtccttccaaatctatgatccctaagcttggtgtgtctgaagttaatgagagcaatatcgtgcccatcactttggacaagttgacacccgaacagaagaaggattctgatgtaatgatgcaccatacacagacggtatgatgaaattc

SEQ ID NO: 7624 - DNA, 432 bp, Oryza sativa
ttatatttttgatcgatttttggtaaagactatgaaccatagaattgagttggtttagaataattaaagtagaatattgattgataatttaaaagtaaaagaaagggggtgtggcttcatgtgggaagcaaatgagggataaaatttggactatagattaatcatctaaaggctagaaataacttaggtgatatatggtctaatgagaagatagaaaacattaactaaatgaagaagaactatgatattgtaaaaaatgatggagaaatatatgttgaaatattatgtaacttacatcggatgatgaattaacatggttctatttaaaaagcttctaaatataattaaatatagatatcagcctgttcgtatgaaggttaagatgtaacaattactaatggatgaaaagtgagatctttgatgttagcttta

SEQ ID NO: 7625 - DNA, 365 bp, Oryza sativa
  unsure (1)..(365): unsure at all n locations
tgtgaaaagtgctnttctgaatggagttatttgtgaatatgtctatgtcaaacaaccatctggttttgaaaatctaatatttccaaatcatgtgttcaaacttgataaagctctttatgtgttaaaacaagctcccagagcctggtatgaaagattgaaaacctttttgcttcaaaatggtgttgaaatgggggcacgtgataaaactctctactcttcataatggcattgnatttcttcttgtcgagatatatgttgatgacatcatatttggtggctactctcatgcacttgtttgccaattttctgatgtgatgagcanggaattcgaaatgagcatgatgggagagctgacttttttcttg

SEQ ID NO: 7626 - DNA, 267 bp, Oryza sativa
actgagctgcggctataagactagagttgctttctctctccgaggtgtctacaacgttataccaatagacttggtgaactgctgccagacttcattaagcgtaacatgttaagtgggagaagccgactggagactagtggtgtcaacctaatggtctcacaaccgtgtataaaacagtcttggaaaggcaacttagggatttgaaattgtgcgaatgtggaataaagaaggctttaccactcaagataattttggaaaaccaaaccc

SEQ ID NO: 7627 - DNA, 363 bp, Oryza sativa
  unsure (1)..(363): unsure at all n locations
agcttcngatgggcatcgtctactctgaccttaacacggcatgttctaaggatccttacaccctacctggcgcgccagatgaccgagcgtggggctccttaccgggagaccgcgctggcccccctttgacggttcggccggtgactctgggtgagactctaaactcccaatctgtggaatgttcgcgagacatgaagcacacaatacgccggcgatgtatacaggttcgggccgctcagaagccgaataccctactcctgtgttttggtggattcgtgtatgaacgaactacacagtatgagccagcctctccctcgttctatgttctcaatctggaaaagctccttctccctctaagtgggc

SEQ ID NO: 7628 - DNA, 376 bp, Oryza sativa
  unsure (1)..(376): unsure at all n locations
attatgagaaggaaaatattgagacaatgtgttgtttcttttcctttggcngtgaaacatgtcgtctcggtgtactgttgattatgagaatgaaaatattgagacaacgttgtttgctctagataaacttaattgtctggtcatgttttaacgagctcagacgaatcgagctggagcctcgcagaggttgagcctgtgttaagctcgaatgtcaaccttggctcgtgcgagctcggcttgttatatcagccggacccggttggtaaatgcatgggcatccgccgttgatctttttgaagtgtttttacccattctccatttgaagctcatggcaagatggtcagctgagctgtatgcaatgtacaaacgttttgac

SEQ ID NO: 7629 - DNA, 450 bp, Oryza sativa
  unsure (1)..(450): unsure at all n locations
agctnggacttctcttcatgcacaagttgtcggttggcttggatagtggcctcaatgtccttacgttctcgccgttcagctagtcttaacttggctctctccagtttgaattggtgttgctcaaggtaaacggctggagtaaggatatcggctaactcatctaggattaaagcctgaatctcgtgtagctgagccctgattgagccacagtcaaccactaagttgtctagcgatgatgcttctagccgatctaaaatgcttccttgagttttcttcacatcatcagataaaggagccaacgctntgcttgtggtatcttcttctccttcatcaagatagtctctgatgtcaaaagagaaaagatcngctaatacctgcagtgacatntataagcagattagacgtaaacgatatagccgatngaatgcttctatgataaaagaacttact

SEQ ID NO: 7630 - DNA, 284 bp, Oryza sativa
agattctcgcttaaaagttctttacaaaatatgttatcttctcctgactttttttagattatgggaataaatcctagcccttacttcaaaagaagctagagccacttattacaaaattctctcaagagagcaaaacaatatggcaacatcaagcaaatccaaaaacaatccgacaatatcaagcaaaaccaacacataaggagtaacaattatttaaatctatttgaaatcttatccctagttggcaaaatcttatgacgtacttctctgacacaaaaccatct

SEQ ID NO: 7631 - DNA, 445 bp, Oryza sativa
agctacttgcttgatgagtgacttgttatgtttacactctacggcctatatacgcgtggtatgacggatggaaaggtcggtattaccctccaaccatcattggtgatccatcccagccgttcaaccaaaacctggatcgaacggagctgcggtggatttggtcgaaccatgggctggtccggcctggccacatttcggcaagtggcctctctgttgctcccaatgcctactcgataatttggaccaattggacgcgtcatttttgctgtcttggcccattcattgataagtctgattctcacatcgttcgatgatagatcgcctgttttgacgctattatcctctatattatggccatccctgcaagaggtaagtattccaatgctagtggaatattctattattgacataatattgcattggaagcactgactagttctcctta

SEQ ID NO: 7632 - DNA, 191 bp, Oryza sativa
tcactcaaacactgatcatgtccggaacggccctgacccggcggctcagcttgagacgcggagtctgcgtcgctcgacaacatacgccctcccggtgcagcgacgacagcttcgggcttaacctcctgaccgccggcaacgggtgtactgaccatcgggcgggagcgccggcggaggtgtcacgggatagc

SEQ ID NO: 7633 - DNA, 271 bp, Oryza sativa
  unsure (1)..(271): unsure at all n locations
tgcagcttaataaagggggggggttattttatggcgagcaatggagatatttccggtgattcttttcatttggacataagccaactcacttaaggggccaagtagatacccagggctggccaaaannnagctattataagatacataatttgacccacggcgatcatcgtggtggtggtttctttcacgtcaacgcgtgttacaatgcgaaagcactatggaccctcctcataactcagatgaacgacgtatatatatatacaatggagcc

SEQ ID NO: 7634 - DNA, 327 bp, Oryza sativa
  unsure (1)..(327): unsure at all n locations
ttaagcaccgagcgcagcttttcattatcaaattatattaattcattgcctcacttttaatttagaaatcagctcaaagctagggggagtttggaacttgaaacacaacttgagtagatcccggtataatacataggtttacacttgacatcacacaagttctaaaagtaatgaatctgggataactggcagggggcataggcatactgagtgaaagaactctatgcaaattgtaganggcattatataaactttaggacgataagcacactgcaggagacatttatcgaataaagtatgtcactgtattgacattttatatcattt

SEQ ID NO: 7635 - DNA, 359 bp, Oryza sativa
ttaagcactgagcagcagctggactgccgagtctggttgacgaatgtccaaacataactctagggctactttgcatcacgccatatgctgtgtgattgtgaaatatatcttctgagtgggaacgatgtgaccaccccgacggaattcttttgaagtagtgagataaattcctgaccgttattaaaacaccctataataacttttgaacctgcagatatcttgtcttggaggcggcttaaactttgcttacaacaaaaatggacgttggacttcttgaatatagacatgctattaacgctcgacaccaggactgtactcacaactaagaggtgccgacacatatacagagcgactcttgt

SEQ ID NO: 7636 - DNA, 398 bp, Oryza sativa
  unsure (1)..(398): unsure at all n locations
taccaatgcgagttcatactcctggatgtttcnttttcacaactcactactgcccatctgtgacagttgaatatcaagggttgaattttacagacaacctcattcttctcgaatacaatgacctatatgtcatacttggaatggattggttgacaacgcacatatgagtgattgattgttccatccgtaccatcaagttgaccaatgcacaatgagaggtgggaaccttacagtctctaatgccgtagaatccaaggattagtttaaaccatgcttgtggtgaaaaacaagatgtatcagtggagtaaaccactaataaactataggatttcctatatcagagagtaccataggattttccggagatctgcaacaatgcaccaaaaggatatctagtt

SEQ ID NO: 7637 - DNA, 397 bp, Oryza sativa
tcttaagtcacctgcagctgcagcttaaggctaacgggcatagccccaatgtgtaaggcacttctgtgtcatccagtggtgaggacagtgacgggcactccgatgaatactgcgaactaggtgagttcccggatggcagcaatcttcagagcccgtcttatgctgcttttagccccaggacagatcaagaaaacaagaaacatctggtggctcttgatgactccttgacgtactttgagatggaaaggctatctatcttggaagagctcaagacattggaggagaggctctttccattgtaagatgatgacatcaacgacaccagtgctgctggggccgatcttaaatgaatatgaactgtcggctgacggtcttcattcttcgggaaatggtgata

SEQ ID NO: 7638 - DNA, 374 bp, Oryza sativa
  unsure (1)..(374): unsure at all n locations
tggatcataactctataataagatgataattatggaacaatgatcccgtggagggcatttcagcattcaattcgatgagtttctttttcacatatttttttcaacattttccaggaatgtgttatatccaagaggtacattaatccaatacaactctatgtatagaacatgaagccattctgctaacaaagatgtgttatgttccctgactacagtgggaacacggaaggcataaccgaaccttacagcctgccangagctttgataggataaagcttatatcgggtaacaagaagaatggttactgtatatatgctttggctgcaaagactaacatcattcctcttaagcacgcttcaccggcctctgaacat

SEQ ID NO: 7639 - DNA, 423 bp, Oryza sativa
ctgagatgcagctgaagcttttcttacacatgtttattatttgtattgaacatgctatagcttacaaactcaggggagtgtacgtcttatgggacaaagggtctatggtagcactattcattacatggtacagtcgacatgttatataacagctataatgagaatgaccttatgatattaatgaaaaacacatgtttacttcattgaaaactcatgagcaagcgaaataatgaatagcactaagcatggtttctcaatttcatttctggccatacagatcctcaatttctcttcctctaccacagtgaggatgataagctttacagcagtcccaaaaagtgaattgtatggccgaataggagaaatcatattctggctgaaagcatatgcaaaaagagcctatgtgataatatcattggtaaa

SEQ ID NO: 7640 - DNA, 433 bp, Oryza sativa
  unsure (1)..(433): unsure at all n locations
gcagtctctgactctatcctttctctggtttttacatgtatattcattcttatcttggtttaaatattgtttttctaaaatacatatcaatgtatgatctaattgcaccattgattttttaataaatcttcataacatgatcgtacatgattatatgttgacagaaggatatatgtctaanaaagcaatcgttgtcctaagttataaattattgtttcaaccacttaataatatgtttcagacangtgaaacattaaaaaatatattagggtatcactacatgtaacatgaaatcccaacgagtaaaacatttaaagtcttacaaacatataatatatgtgggaaatacatggtttcatcgaaatatttttgtataacgcgtgatatatcgaatctgtattcgtgaaaattaaaataaaacacttgtgaacat

SEQ ID NO: 7641 - DNA, 276 bp, Oryza sativa
  unsure (1)..(276): unsure at all n locations
cttcttctttgcagctacgtgatgttctgtttccacaataacttcaccaatgaatttaacctgggcatatctgcctaagtgttcatccttggtgaaaaatctggatgagagatacccaacatctgaaggtcctgatattgatatagatatagtatgtatgcatgtttcctgttcaataatccaatttatctatcaactaganatttcaattattcagaacgttgttttcacccatgtgttcttaccagtcttaaaaaaaaactatggctcatcgtc

SEQ ID NO: 7642 - DNA, 388 bp, Oryza sativa
cttaccgggctggagacagcggtcgcccgcatttacactaaccttgctgctcttgtgaggcattttgatgctctcaatgctggaggcaatggtgggggtaatgaccatgacattgaccgagagtacgtccaggataatttagaggatgaatatattggtgacactgaacaagatgatccagatgcttgagatcgtcgacggctacacaacaattcaccaggtatgggtggtcgcccgcgacgcgaggtacgcaacaatgatgatgctttttctaaattaaattaagattccttcttttgatggaaaatatgatcctgatgccgacctctcttgggagagtgctgttgatccaaaaatttgatgccatgagtttcctgagagcactata

SEQ ID NO: 7643 - DNA, 285 bp, Oryza sativa
gatcacgaatttccgtttttatactatcgcgatccgccagggcctgttccaccgtcggcacacgggctgatccacgatcataattacgcagcgccggtggtggacggccatatacgacttgaaatggcgtcatcttaagcgaggattggaacaccgtattgaagcataattccgcccacggcaaccaccgaagccactggtgtgggcgatcttctgtgagacaccggagatacatcccgacgacacggttggctgattccgactggccgtcactctgcggatgga

SEQ ID NO: 7644 - DNA, 315 bp, Oryza sativa
aacactcttactttctgagccattgctttcacccttatggtatacctcttacaacttcttcccttgctatcgggatgaacatgtcgccaaatttttcggttatgtagggccggccgaatggccttttcagtataccttccaccagcccctcacaacaaaggtgaatatggagcttctgccgaaaacgcgccaaaactatggtataccgcgaagcggccccttttggccgatgtccctgccaaacctatgtttggttgctgaaaataaaaaaatttcctttatgttaacaaaaaaacatcgagaaaaattccttct

SEQ ID NO: 7645 - DNA, 245 bp, Oryza sativa
cacatttttattttttatttttggcggccatgcatattctactgctgttctgatgcatgggaccaacaaattgactgtatgtaatttcccgtcagaatttcaatataaccgatcgaacgactcgctgcttgaactatccccaactaaacttgagctgtgtcagaaatcagaaattcagaattcatgtcagtcctgacatgaacagagccgcgaaataactccttcctctctctcctctatctctc

SEQ ID NO: 7646 - DNA, 298 bp, Oryza sativa
ttcgccttttctggaacctatacggcccccattgtttgggttattcgtagaatggtatatttaccaatgaaaaggaatttgtgaataaaacctttatgtacgtgttcttagcgatataaaagtaaaggctgaaaaataaattttgatgagaaaaaaatcgcaaagttcaaatttaaagttgaaaatttaaatcttgggtgataaatataagtattaacgaaaagatgagaccgattatcttgtgcatgttatcgacaatattaatgctgttaacacctacctactgtcagttttgatg

SEQ ID NO: 7647 - DNA, 156 bp, Oryza sativa
aaattagggggggggtttttttttttaaaaacggagggtggtgttttagttatgcacagcatgaattgaaaactaattgttttgtagagatatttgatgtgtggaagtcatggggaattgttgggattgatggttgacaagggataaggttctgta

SEQ ID NO: 7648 - DNA, 449 bp, Oryza sativa
  unsure (1)..(449): unsure at all n locations
agctngcctcagagcatagtgcatgaagatatgcacccaataaaatgcgtttcaaccttggttcctggccaaaagcaccgttgaagaacacagtatctcaaagttaccctttcagacaaagggtattttttgtagcttggtcttgctcactccctccagtgcaaaaagaggggtaaaggtgtcattttggtgccatctctaatcaaacatttaaatttataatcaatctcttctaaaatatttagattggatataatatgtatagatatgtcttgtccatgatagttgatttaacacacgttgaattgaaattaacggtcaaagttatatattttagagactgtcagtgntcaaaacagcatggttctgctgctcgacagagtagtaagatatatctgatcaaaacannagtaccaacctactagcagctaatgactagttcttgctat

SEQ ID NO: 7649 - DNA, 405 bp, Oryza sativa
agctggaatatccacccgacgttcgtactccatccaagcatgaatgaactgtatggtcggttcaggttgcgttatcggcccgccacttgaagtaactctgactgtgtcaatccattgtacgaattgacatttccttacatcctcctatgtacatccattttgggatagttgagttaatgatagtactgaggagtgatgaaaagaatagttgtaattaccacgaaatcatcgtcgacaatgtttggacacacgaaacacctttgtcctcgagttcggtgccttacggaccttatgacctgacagcggtcaccacaacgacactccggacgctcacgccacgtggggagtcctaggggatttacgtgccattctaaagcctcagcagcaattcgacgttcatgctca

SEQ ID NO: 7650 - DNA, 360 bp, Oryza sativa
  unsure (1)..(360): unsure at all n locations
ngcttgaactattgatctatcatcaaatattcaatatctcagcatcaatatgcaaacatacattacaaatttacaccaggaaggtgaggccatgaggcaccaaaacagtattgttcacattgcaagagaaagtttntttaaaaaattgtaactgtgattaaaaagtagagtgagtgataacagtgttcttaccttgcaaggtaaactgagcttcccagaaaaaacttcgacagtagagcagaaaccactggctgaagaggcatataaagtgacaccatagcagggcccaaaattttgttggcccatgtcagtaaaccagtattaagagcagaagaaatgaatccctgcaacaagggataa

SEQ ID NO: 7651 - DNA, 231 bp, Oryza sativa
tccaaaaaatcatgtgttgttttaccatatataaaataatgtttcaacaaatagcaaaaggatattttaattcactgcaacatttgatctatacataatgaaacatcacgagtacacttgatgaaatattgttggtgaaacaaaagttgaaatgatccccttaatagagcgtttccataatacgtgggtgatttgttgcaacgacgcatgttgtggggcgtgtggtgggga

SEQ ID NO: 7652 - DNA, 93 bp, Oryza sativa
  unsure (1)..(93): unsure at all n locations
agctntagctgatttccttgccgagtggactctagtgccaagaagacatgccagaggagaagatggaatattggactatgtattttgatgggt

SEQ ID NO: 7653 - DNA, 330 bp, Oryza sativa
tccatactcagtcggtgtggctgccatttgatttcccaattccatctggaagaaacaaccagcaaaaaaggatgcttgcaggaagcagcagaaaatactaatcatgatcaattctcccatcatagcatttctgtttagagcatgtatatctttgtttttttgggttcataggacaaatttcagaaagcagagcattgcaatatcagaaattaggcttattccttttgtttgacctcctgtgttgtttgatatttaattgtctaagcaataccattctagtagtactgagctgtgatgcataagaacatacttatatacacttgtcatttt

SEQ ID NO: 7654 - DNA, 308 bp, Oryza sativa
gaataatttaaaggagcgtcatatttatcccgaagtggtagtatatgtgactaagcgtgtccaatacaacggtattgtgccacgtggagggttcccgttgtgtccgccaccatggcatttattttaatgcgtgggcccgtcacttaacggttctatgtcatatttccagtatgactatgatggatgaacacgtatcgtgctggtgtaaggctcaatcatgaatgttggtaaagctctgatgcgggtaatacatcgggtatgtatttatcgcgtgccatgctcttgcatgagtaatatttcgcatcatg

SEQ ID NO: 7655 - DNA, 348 bp, Oryza sativa
agcttaagaacattccaaccaacctcgtatcttttatgctaacaagtctcttaatgttcgcacagttaccggatgggacttttacaccccgcaggcaatcccacataactcgtttttctgtagcactaagagtgtaacatgccggaggtaggtagtaacagccattttctttggcttgaggatgcagatctttcctgatgtccatgtcttccaagatctttccgtgcttgcaaagtgtccttcatcttgccaggtgtgttcaacaataccccgagcacgccttcacacacgttcttctccacgtgcatcacattgatcgcatgacgaatatcccagtcctttcaatac

SEQ ID NO: 7656 - DNA, 420 bp, Oryza sativa
  unsure (1)..(420): unsure at all n locations
gattctttccggcgtattctgatgatattatagaatgttatactaatagctacatccctgattgacatgtgtgtttgtgaaagatctctcgacaatggtcagtatacatatggatganacgatttaccttttcaaagttcagagttagcttctccaattttggtgcgttctgaaggaatacaaccaatccatataagttcgcatccaaacaccattgaccaatagtcatgctgacaagaaatgtgaattttgtgtcaatttgcaaatgttttccattgtcaactgcacgatacttgaatgattatgttgcaacaaataacccttgccatgttttatacaaattttcaacaaaacatgaaaacacatccaacgcactaacattatgcgatataagaacataatagcacatgcgatttaatt

SEQ ID NO: 7657 - DNA, 198 bp, Oryza sativa
gcttatcttttgtcaacacatcatcatgatgtatatactacgcagaactttgaacttgagtggaacttttaacttccacagcagtctgtttgcgcctgggatactagtgctacgaagaacatcatacacagaatgccaaattgaccattctgatgaaggttctgtataaatggatctctcttttgtgacaatcaaaca

SEQ ID NO: 7658 - DNA, 429 bp, Oryza sativa
  unsure (1)..(429): unsure at all n locations
atcttagatgggagtcatttgangttagaagtccgtgttgcatctcgaggacgagctgctcataaggaggggtataatgtcattggcattgggccggaatgaagatgcccatatgcagcccatatcaattaagttagatataagattagattgagttagagataagattagattgaatccttacttatgggtcaagctatgtcatctatataaggatgagattgtgtctattatcatcaagcaatgaatatcaattaatctaacctctcccttccaataatgttcttctccctagactagatctacatcccttctctaggagccgacgccgccaggctatcttcctggcggtgtttatcccgtcatggactctagtcatgacagtggttgtgagaatattttcttatgctttctctgtacagattcgaa

SEQ ID NO: 7659 - DNA, 358 bp, Oryza sativa
ggccttactcctgttgtcctgggaggtaccgccgtcgacgaactctgactgcgccgacttattggcggaattgtacttacttaccttcttatccctgcgtccaatccgggattgaagaagtaatagaccgcctattggaacgaccaagtcaagccggtgacaaaggaaatcgaatcgggagacaccgatcgaacagacctatcgcggtggtgctccaggtgagcccgtactgggggtacttggtgttgggcttccgcgcctgcacgcgctcgcaggcgcggttactctgggtgccgcgagcacaccacgccgccggcgagaagtcaatgaagaacagacggagaagaacggaacgtca

SEQ ID NO: 7660 - DNA, 427 bp, Oryza sativa
cttgctgagaccggcagaagaattccttttgtatactttgtagtttggggcgcagtatatagcctaatttgaaacctcaatacatgataaatccatagcatttgcaggtagtaataccaacttggctaaattaaagttgctttaactgattgcgtggtaatacatggtgccaatggggtgatcatacatacataatcatgaactcctctctttaccaagaatgtattattatacccaagtactaccgagtaccaacatcatgtaacttcatcatcataccatagtaccaccatacatgctctggcgaactgactattagtggcacaccgaatgactttcatataagggtcatgacacacatcatacacaagagtacaagacctcacgcacctgactcatactcaacgtacgacgactatacacacac

SEQ ID NO: 7661 - DNA, 366 bp, Oryza sativa
tactcagcctctacgctggttagttttgaaattgtaaaaaaagttttatgaaagatgatagtttgaaaaaaagatgagaatttatatgtgtaggaaaagtttggatgtgatgtgatgaaaagttgagagtcaagcagaagtttgatgtgaactaagacatggcctcaatctttcgttgtcgattgttggttgatgctttctctccctaatacctagctgcttcactaatgttaaaatcacgtgggtagttaatacatgtcctgaaaatttatcccaaagaagatactagtctatgggttaaacccacccagtcatgcatgcaggcagacagacgaacggtatacactggcaagtctccggcacgca

SEQ ID NO: 7662 - DNA, 397 bp, Oryza sativa
ctgcacttggatggtggaaggaaaatttgctttattggaatataaggtggagaagggaaatgttgtactgtcctccaccgttcttatgaaaacatctggatcctctctcgccacaccccaggatcaactgtgatcagggatggtcggctgggccctcatggcttggacttcggcctggggacatctcctgaaaattctattatcggttttaggaaatttggccttaaactttgggattttgatgaaagttcacacacccaactttctatggataccatggttctcccactttagtatgaattttctcgcaaattcaggggttattaacttgatacaaatattcacaatcacttgtgagattaagcttctattcactatgtggagtgtttattatctg

SEQ ID NO: 7663 - DNA, 400 bp, Oryza sativa
  unsure (1)..(400): unsure at all n locations
tattacctattttctcatattctttatcatccagctcataactgacagtggcaacagtgtccataacatgacgaacacngggtgccacaaatgccactatatgctccagtccagaatgaatgaacttcttgaaggaagcactgatctcacctatctcagaataacaagatttgaatttctctcggtcaacaggagcattgaaagcctgttgaacaacaggaatagtcagtacagctgggttgtcaacacgaaaatactatgctacgaacaaagtgattttatcagataagagtgaaactattagttggtcttggtgtaattaaagggtatttgaaagctcattgtataagtttatattgcccgcagggttcttccacatttctatattcattttgacatg

SEQ ID NO: 7664 - DNA, 340 bp, Oryza sativa
atggagaaagatatattttctcgttggaaacagatacagtattgaaacatattgtatggtgtatttcaacagagactatgcaataaacaagggcatataagaaaatgacccaatatagtatacatgctagccttatgtttcaaacaagatgaagaaaaccttgtgccatacatattacacaaacggacagatcccatccgatggcgaagtatatattgaggcatctaaggaatatatatatccaagtcgttggacgtctcttatgcatctcaaaaattaatccctgtcggatgatgcatgcatatggacattcaacggggttcataatctaatctcttca

SEQ ID NO: 7665 - DNA, 314 bp, Oryza sativa
ctgcaacttctctgccgctgcatgctgctctctttaaataaaaatattttgggtgtagcctattattttgtccgggtgacactactaaaaaaaccatttgttcccgacgatggtgtctcattttccaggcggaacatacccttaaagtcaaatgaccgtctacgaaaatataaatcggagtgaaatatgatgtccgcctgcgagaatagacttgaatataaatacatgctggctgctatttattctatatccttagtgctcccactcacaccatttctcctcacctcttctcaccagcggccccttcccttttc

SEQ ID NO: 7666 - DNA, 275 bp, Oryza sativa
  unsure (1)..(275): unsure at all n locations
cggcgaggtactgaccacagcggctggagcggttgtcgtatgtggaaagagaaggagctcgcatggagagcgattcccgcgatggatgaagacgggacttgagatgatatgtagaagacgactatggggtcctttatatatccatgggagcccaggatcgagcccacatcaacgggaaaaactctgggaaagttatgatcttcgtcngaaaaggatagattgaaccgcgaatttggaaggatttccatataaacttctggtgatttcgtggggaa

SEQ ID NO: 7667 - DNA, 427 bp, Oryza sativa
  unsure (1)..(427): unsure at all n locations
gctgctcactgattgagangttttgtatatggcatggcattgtgggatagatagcaacacgctgctgtgtctatgcattaaagagagctcaccatctctagtaagtgctattctatgcagagggagcactggcctggtacacagggattatggacttcatcaaccaaccaacacgtgcaaggctgctctgaacgtacccaccacccttattacaagaatgacagccggatatctctttactttatatatacatagaataaaattcntcttctccattcttttgccaaatgggtaaaccaacgtgttataaatattctaaaactcaatatctggactgtttcctccatttttcaaatatacgctgagtatagctcgtgtgccaaaattcttttatttcacggaccacattttaatttaaacgtgacta

SEQ ID NO: 7668 - DNA, 178 bp, Oryza sativa
tgtccaccgaagtgtagacgatgaacactccttctctgctagacctgactaatactctatctgtttcatattacaagagtttctagaattgcccacattcatatagatgcaatgaatcccgacgtacataatttatgtctagaggcattgacatatatatgaatatagactctgcttg

SEQ ID NO: 7669 - DNA, 323 bp, Oryza sativa
agcttctattagtagattgatttccttagccgaatataacaggaattcgactattggcgacatgataacatccatcggctgatcccgagatgctgcagccgataatgactctaagccgatgacgtctctgccgattaccaaatttcatcggtcgaatggattttcttaatttattagtagtcttatagtagtcatagaatttacattttgatgagcctctgtttaaagaattcagattataagacttttctactattgcccacattcatatatatgttgataaatctaggcacacatatttgtctgaactcatagcatattat

SEQ ID NO: 7670 - DNA, 394 bp, Oryza sativa
ccagtgctcggtatggtgggcgttgcccatactcatagttagctcatgatgcaccccgatctgtattaaagaggttacaccgttgccatggaccttttgcttacaatccgctttcaacctttcgctgggtgggagggagacaatgtgagatgggaatcacgaatggagggtacttagagaaaaattagacttttgcatacttatagttcaaatgcagcttatatatcttggatagttggatagggaagcacgagtacttgatggatcatcggagagagaaaagtgaacagtactattgccagtatctctaatgtggatttttctcacgagaggtggcatgggcgtatttagaaattttaaatggataggccaacctatatattgttttaaatac

SEQ ID NO: 7671 - DNA, 418 bp, Oryza sativa
gctgcatgcaagcttgaagcatagacgagccttctcagcttcttataaagggagggggttgctcagctgagaagaacaacgaaaacaccattcagagcaaagctttctagcgcgctcttaccctgcattccaccattcttagtggtagtgactttagcctaccttggatagtatattgaagcaaggagttgtgttattacgctgtgtcaggtgagaacagcatgcttgtacctaccttcgggtttcccgagagggaaaaccgtatgttagcttatctgtataatatgaagtaattgtccttaagtattcctgcacgtctattctagacacgtggttatgctaatgaccctatatgaagaacctcttcggcttttctctgttttacgctgcatctcgcataggcgtctggagaattggt

SEQ ID NO: 7672 - DNA, 292 bp, Oryza sativa
ccccgcaagggatcaagatggatcggtggatatggtagtaagcctttgtacccgtggtgtcgtacagcatggcggcgcggcggtgacagcggctcgatcagctttaccacgtggcgccgatcggagcgagcaatccatcacgttttcgacgctgctgacacggatcatgccagcttttcttattctacaccatgcagtgcctggccccatgtctgtctgatacctctgatcattgcacagcacatggaatgtctctctgctagagtagaaaagatatactgtactgtagatg

SEQ ID NO: 7673 - DNA, 308 bp, Oryza sativa
  unsure (1)..(308): unsure at all n locations
catgcaagcttgtattattaacactttctagtggcttacggcgtatgaaagaacaacattctattggtgttgnttgtcttccatttctaagttaggttgatggagatgaagaatatgtttttttttgntcacagatccaagccgatgcttgtggaatggtgttctagctacgttatagattctacactggctctttgttctagatgaaggttgctactcagggattacttgagaggtccaatagacaggtataaattattactaattttgaatggatcattttgttccaccgatactaccacttattt

SEQ ID NO: 7674 - DNA, 332 bp, Oryza sativa
cgcacacgatagagtgcgagagcttataagaacacacgcttaatctcctacctggcgcgccatatgacgaagcgtgggggtccttaacgggagaccgcgcatgcccctctttgccggttcggacgggggccctgtgtgagaatctaagctcgatgtgtgtgtggaatgttcgcgagagtgaaaacacacaagacacgggcgatgtatacaggtcgggccgctgagaagcgtaataccctactcctgcgttctggtggatctgtgtatgaagaagctacgaagtgcgagccagcccccaatcgttctgggatcgtttttttctcctctctcta

SEQ ID NO: 7675 - DNA, 351 bp, Oryza sativa
ccgccagacgctaattttatcttgtgaagccacgaacccactcttgtgcattgattcttgttggtattttgagatctaaaatacaaaaacgccgcttcatattcgctcgtcgcgtacacgctgatgttttgaagaaccgctctacgtgtgaatttaagccaacgtttgggaaagagatcaatggcagttacattatccttgagcttatagaaacgaagttaataaaattatgttgatttaagttaatgcattaaccgcttaattaaattcccgtgtaatactgttttgtttaccatgcctattaccttctgtatacattatattgctatctgtatataccttggtacccta

SEQ ID NO: 7676 - DNA, 206 bp, Oryza sativa
gggaaatgtccgaactgctccgcatccgtcattgggagaacatctataacgtccacgcctaaccctatgatcaaccgcgatcacagggggttcggtgcgaacactatagcttgggccactccttgcacttgcccttcgttcagtggactccctatacccttcctctattcatttctcggagttttgggttgattcactgatgtttc

SEQ ID NO: 7677 - DNA, 369 bp, Oryza sativa
ttattagctactttactacctcgcaatgagtctgggtggattccggggcaacccgaacccttcgttgaaaatgttaaagcgatcacaatgaggggaggtaagtccactcatgatccgccaaatcctaaccctgcagggactagcagtattacccaggaagcatcatctggtaacaaagctgatgaataagttagcttgagaagacagtgtctcaagaatactgtgacacacgactgttgctattccctcaaagaagcaggaaactgtctctaaacgagcaacttgctcattttgttgaggtgattcaaaagaatcctattaatgtgccattgttggatgccatgccatttgcaacatactcacattatt

SEQ ID NO: 7678 - DNA, 190 bp, Oryza sativa
  unsure (1)..(190): unsure at all n locations
gaggtgcaaactaccctaatgtgatgatattgttgatgccaaaaacacacattggcctgtgagatctgcttatctccagtgcangtccaaaggttggtgagatgcgggcgtgccagtcagtttgatcctgcaactgacatgatatgtatacagtagatcaaacagccgatcgtgtgacaagccgatgttg

SEQ ID NO: 7679 - DNA, 378 bp, Oryza sativa
  unsure (1)..(378): unsure at all n locations
agctntgaagcgagtccagttatggcagcgttgtttcaccaaggttgatagtaagatgaaggtgcaaaaaagtaaggcgaacaaacacactgcaaggtgttttgataagcagaaaaagacatactagttcacagagaggggtggtataacgcgtggtggtgttagattcggcgcaagagccttcaaagttgaaggtgaggggaacttatgttcttgccaaaggccattgctataccatatgccttgctcacatcttatacacgtttatctgattcatgcaattgatgaggaatctcccaacagaatgccgtatcagttctcttcaatagcacgtgtgaacacatgggcaagtcgctttgagcctaccttgccccacat

SEQ ID NO: 7680 - DNA, 217 bp, Oryza sativa
tgccgcttgacagagcaagtcagcacggttgctttctggcgctcgcatcccggagctcgcttctcgtaaccgctgttcgctccgggaactcctctcctggtcgcgaatcccatccattcatttaaaaacggagcatatccaagattggtgatgtattttatgaccaggggaatgctagagctaactgagcttgtttccccctgttctaggacctact

SEQ ID NO: 7681 - DNA, 303 bp, Oryza sativa
ttggtcttaaaatgaaatttcatcatttattctctcgtggtgaaaaagcttatgattgcgacccaatccacccaacttcaacaccaacagttatctatgtccaagtgccatggtatctatcccagaagaaaatggtgtctggacaaaatctgattgtttcaaaggtccagaaagttctttctgaggaatcaaaaataaagtcagatgctacaataaaatgggcacttcagcttcataatgctggctattctcttagtggaaaatttcaagcctctgatctctgtgtcgatccatcaacagaat

SEQ ID NO: 7682 - DNA, 460 bp, Oryza sativa
ctgcacgcatgcaagcttaggacaatgcgagcgaatatgatcaagtgctccatactcaaaacaacgagtcggttctcctcttttcctgttcctaacattattcatagctcgagagaatttgttagatagcaaaaccaagtcctcctcctcgaactgttcaagttgatcatcggacatggcattaaataaattgatgaagaagcaccaagatccaaagaagttgaagacgaaaccaaagcactagacttagaatcacctttacgagaaggaatattcatctcatgagttttcagtttagtgtaaagcgaatccaaagtcaaagtatacatgttaacagactcctgaatagatgtaactttcatctcccaaatagacatgtcaagaccattcaaaaagtgacgagaaatctcagaatgtggataattagcaccataagaagaatcaacagatctaagatcac

SEQ ID NO: 7683 - DNA, 345 bp, Oryza sativa
  unsure (1)..(345): unsure at all n locations
ccaccttagtagggacctcctctttcatggagtaaatgaccttcgcaagaaccctgcctctgaaccttggtccactggaccaacatagcatccaaccaaaagtaccaactggtttgtccacaattctgtcggtttgtaggtctaaaaggaaatctaagaacatcacccaaccctctctaattggaggggaattgtggcaagtggaagtgttatcatggtggacaaatactatggtaatctgttattgacatcatatggcctnccaatactagagcatcctaacacagccgagcaatgtgaataatagcaactagatgctgcctactgtgtcaacacatgataacc

SEQ ID NO: 7684 - DNA, 234 bp, Oryza sativa
acaatgcattaaaccttttacaccatattcaacaaatgggcaccgtctagtgccaattgtaaacagatacgtgctgattcgttcaaaatacgtcttaacatacatatgttctgatcttactaagaccgactccctgaaatcctttggacattacgggggtggtatctgaatcaccttaggctcaacactgtcctccaagattagccttcgtcactgcgcgacaggcgactgggg

SEQ ID NO: 7685 - DNA, 122 bp, Oryza sativa
atgatgatcagagcaaggttcttctactgacactcgttgcttccgcaaggcagagagacacgccatgtgtgatgcgtacttgactggtcgatcactctggttgctggctcgatgcacggcgt

SEQ ID NO: 7686 - DNA, 381 bp, Oryza sativa
  unsure (1)..(381): unsure at all n locations
cacgcatgcaagcttgtatgttgtgaagaaagaaatntctaaagttttgggcatactccatgcgcacactgcgttaacagatgtgcttaagtccctagaagacacatggtttcaccacacctggaaatatatggcatatgtggtgtaaaatctgagtgaataaactcataaaggatttaccaaccgcctgaataatgagcacaatatataatcagcctaagccataataatggtcagtaaaatgcacacttacgtggcagaagcaatgatattgtatccaatcaattgcttaaaacccaaacagcacctcgacttatatataaaaaagacagcgggacagctataataaagtttacttgttgacaccttttaagatgcatt

SEQ ID NO: 7687 - DNA, 259 bp, Oryza sativa
  unsure (1)..(259): unsure at all n locations
gccgagctctagccgagcctataatatattcgagcctttctatattgctggctcgagctcgactaccgagctcgtattttaagtaaaacaatatatatctcatagataatctttatgnaaaatatataatttcctagttcatcatatttattagacaaggaaaaacgactaaatatatttttgaggccattataaggcatccaataacatatttgatcctccaatttatttaataaccaccaaaaaaatcctatatttt

SEQ ID NO: 7688 - DNA, 370 bp, Oryza sativa
  unsure (1)..(370): unsure at all n locations
tggcactggttgaacatgctctgtttgtcttctgcannaagtgtgctggcatttgtgatttctgtagttgattntactgataaaaagtgtggatcatgcaatttattgataggggcaatgtttgctggttgaaaaaatgagatgtgatttcttaattgtgatcgttcgggattacattttaaacagataatatgctttcagaaaggagatcaggtaggttacatcaaaggaattattctcttgccatgaaaatgggaattaaaatgaacgtagaatattgtgtgttcagctggtagaaaatgctaccagataactaatgaaacagaaacagtagagtttcaagagctattagtgtaagagtaattgatat

SEQ ID NO: 7689 - DNA, 447 bp, Oryza sativa
agcttgagtgtgtgtgagatatgagctgccattacctaatagatgataggagcgagtatattactgtgtatgtttcttgtttgctgctaaccatggcaggattgcgcaaggggaaacaagatggtcatgctcaacgtcaacatctacaccttctacgagatatgacgacttcctcacgtgatgcatatgaggtacatgactataatattgcacaagttgcatgtaagttaccaatctatgatgaaaagtatgattccgctgcatacattacatgggagctagcagtataaaaaccaatttatgagtatgaattttctcatgctcaaatgattaacgctgctagtaataagtgtaccggttctgcatctttttgtggcatactgtggggaataagcttgaaacttgtgatgaatgcaaaatactgatgagaaaaagaattgtgtttca

SEQ ID NO: 7690 - DNA, 421 bp, Oryza sativa
  unsure (1)..(421): unsure at all n locations
tttttaagtgttgcgatggtccaatttctcccaaaacaaattgcagagaattggcgatttaaatttgccgaacccgacgttacggggagaatcggatgtaactttttttgtagatgtccgtggatatattataagcctaatttcgagtccgtatgaaatagatatgactgttttaaagaaagtcactcgaatcanggttctatttcctttctagtggcggcaggatacatggcaactcacaaaagctatcggcaacagatcaaacacaaatagatagtgatttggtgggtgactgcgatggtggtgacggtggtgatgaccgcaaaattgatgaatgtggcgatgtgcggtggtggcagaaactccaactctatcgcctacactaaaccagcagataacacaccgatgcatcgatactcac

SEQ ID NO: 7691 - DNA, 228 bp, Oryza sativa
cattattgtacttttcttacaaaggagtctctcatttattatggaagctagatgcgccaagttaaccaattagctggctggtctccagccagctttagaaagtattgattgatatgatatattgggcatgttacctctacatttataagatgatgatgtggtccaaaatatatgtagcaaagaccaaccagctttagaaatattgaatgatatgaaataattgtacat

SEQ ID NO: 7692 - DNA, 303 bp, Oryza sativa
tgtaaataattctcgagaatacctatgaaggcccatctattatgaaattttggaataatgtggggataaattagcagatacacgctatgtcacgggcaaaatgaatggtaaatgtataagcgagttttataagctaacactactttctttgaaccagtgtatgaaagacggtggtctaggaaaaacctttaatggcttatacccttagtcctatgaatcctgtcgatgcccacttttggggtggatatcggtaagagacaagaccttagattcactgcaactaccggcaaaataatctatttg

SEQ ID NO: 7693 - DNA, 381 bp, Oryza sativa
  unsure (1)..(381): unsure at all n locations
aagaacaatcatcataaagcgtttcaacaatatcatactaaacctgttctaatatatgtcgcaaacaatgtcataatccattgcctacaactcataatggaatgttagtatgcacggaacatgcaaagacagtgatccaggtaccatacttaacgagtacaatatttcttcactgtgacaatttgtctaataataccaaccataccacccacaaaatgtactagagtcaatttactatgacaactacatgaaggagaagcncctaacaaatgtatggcgataataattggttggaggaaacaaagatattgtgcttcatgtttcacctgtcacctatccaccacagtatcctcaaaaactatacacaagcatatacatcta

SEQ ID NO: 7694 - DNA, 392 bp, Oryza sativa
agcttctatggttcttggtctctgcccgaggcattgatgcctaccctgagaagataccggctatatagcggatgcgcccccccagcaaacttagggatgtgcaatgcgtcaccggttgcatggccgccctaagtcggttcatatcgaggctgggagagaaggcgttacccttatttaagcttctcaaacgcttcggaccgtttacctggacggaggaagccgaaaatgccctcacccagttgaaggcgtatctaagctctcccccagttctggtcgccccggagccagacgagcccttgttactttacttagcggcgaccccgcaagtagttagtgcggcattggttgtggagcgcgatgagaacaattctcattttacgctttcccaccct

SEQ ID NO: 7695 - DNA, 175 bp, Oryza sativa
  unsure (1)..(175): unsure at all n locations
gatattcttgcaccctctttggtnaccattctaaattagcctgcttactcattatacaaatatatatggcttattcgggctatactagccggctttacagagatagatacaatattgccatcggataaactaataataatcgtactagaaaggaccctccccgataatcatttga

SEQ ID NO: 7696 - DNA, 440 bp, Oryza sativa
tgcttacttcttcacgaactggagactatcgactacatttcactggcctactcatcattggagaactgagatcatcaacatctgaacccgactccactgttgatgtgtcactgcttctaccctgtcatgagtacatgaaaaaaacaacgctattaattgtcaatgagaactggttcatgggagagcacaatgcctttattcttgttttagaatattttacataacaatttaagttgttcagactttagacataacaagtggactttaccttcaaaagatgtagcctatcaaatgaacccctttgtttgctaatttagacaagcgcctggtatgtatagtaaattttccttcctattatggcaagctgcaagcaccaccacaataccaccgttgaggtgtgctttaacttcatatacatgttggaaaaaaaatctttgaaa

SEQ ID NO: 7697 - DNA, 313 bp, Oryza sativa
agcttatgctttgtgttcttaggatgctcttatctcatatgctgaactcattctagcttatcttttgttgtgtatgcttcaaaactattggtagctgctggtttatgtttaaaggatttaattttgggacttcgttatgttgccttagatggtggatgacaccattgaattacgtaggcctgatatattgtgttgtcccagttcctgtaatctattattggaacacgtcgcctgtttttattataatagagatgcccaattccttgtatctatgtgtggaacagatcatccgtttctgtaatatagatgggag

SEQ ID NO: 7698 - DNA, 293 bp, Oryza sativa
tccctggatgatgatagctgatcatgcttgtacgctatcactgctgacgttgcacaaattcaagatggggattgaggataaattttcggttttggaccacgttgggcttgagtggtatacatgccgccaccatgataaactccactattgaagtgagttttgtgttgaaattgtggccttgtgggggcggccttgatgtagaatatcttacaccctgtggtattgttgttactatggcctgcgggagcgaccttgtacataatgtaacattaatcacattgtcaagcaagctg

SEQ ID NO: 7699 - DNA, 436 bp, Oryza sativa
  unsure (1)..(436): unsure at all n locations
agcttatttcttaaaatatctaatttatttctataatcaaatcaataatccacgataacaactctaaatttacaatcactggtttggcagcaattggagttttacaggaactggaggtgatagtgcttgaagaactaaaatcatggttgtatgcaatgtctgattttggctatacattcactttggatgtaaatgccggtttaatataaaccattatataaaaaaaatgcaatgtctgattctgcacgagcacatttcttcagaaattgaagtgctaacaagttcaagaaacatatttttnttcagttttgagcttcgagaagtgatccgaaccgaagaaataaataataaagctgaaataanagcacaatcatgaacacttattgtgctattatatcttattatatcttacttgtgtacagctgctgtcctgatt

SEQ ID NO: 7700 - DNA, 414 bp, Oryza sativa
  unsure (1)..(414): unsure at all n locations
cgcaacttatatttatattttaaaacataacttttagttgattttaagggtttatttntattgtggtctatttttcagtattggttggatgacatataaattatttgtattactctgttcaattttatagcacttattagccgttgcttaacccattatagccgaacacaactcttttgcttgcccggcactaaaaaattgtatttctaatttctacggtgcaaaatttgacgaggtcctatctatatgatgctctgggagatgaatagttatagtctgtgagattttttcatactgagtgaggagggcatggcattatcacaaagtagctcaatattcgtgtttggaacacccgagaatatttgaatgctctctgttttcgtgtgaaatctctcacgcanggatcaattcaag

SEQ ID NO: 7701 - DNA, 369 bp, Oryza sativa
  unsure (1)..(369): unsure at all n locations
agcntcacatatgtattgtctgtgaactgatatatctgatacctgtntaaaaggtcaatacaaccaatacaatatactctaacatgcacaagttcttcaaaataatgacctactctntttttcccacccatgtcattaagccttttaacccagcaccatatatttttttgagggtacggcaggagctctgccggaattttattaaaggagagaaaaacagttcagagaatacatgggaagacatcgaaggagaagaagggagaaacctgataaaacaaagggaatccgaaaaagaaaagacaattaggggggttggactttactattctcgcaacgcgatcctctgtgtaagagatgtataaaaaattc

SEQ ID NO: 7702 - DNA, 402 bp, Oryza sativa
catgcaagcttctttagtagagcaatgtcttaatcgaatatatccagaatctgataactgacggcttgacaactctcatcggctaatctcaggacttcaaaaccgatgctgactctaagccgatgactactccgggcttaccaaatttcactgttaacaacggaggagaaagaacaccaatgattggaaagtaaccgggcggatctaatcgggttccccctttccttatggcgcacgagagagatctgtccgttgccgcagtaacaacgcgatcaatgggtattgaatcgcctgcccgttacggaggcaatcttggggttggattctgatccgttgcataaggatagagacaggtacatcgcattgcatttaacgcacgcacgcaccgtcttgcccacgccc

SEQ ID NO: 7703 - DNA, 242 bp, Oryza sativa
cctcgaaatgctgcatcaatagtacattaatcaatcataagatcaaaagattggtcaaaaggtatagttaagcatctttatgctactagcatagtaaagagttagttgtactatatggcaatgccaaatcttgctgtgtctgctataacaatcacggattgaaatgtgaacaacggaatgaatgtctgattcaaggattatccatccaaataaactacatcaagatatagacatgttgatct

SEQ ID NO: 7704 - DNA, 384 bp, Oryza sativa
  unsure (1)..(384): unsure at all n locations
agcttaagccttcatttactggtgctacactgtcccgaccacccaaaggagtcatggctaggtacccacaagaaggctcaatgctctgaataatagcagagttttggccattttacacatcaacaaaggatctgctggtgctcatgcaagccacaagcctgtacataatccaactactattctttattttctgcgaacaaatgacaaagctagctatcctaattcatagaacctgttacctgggccctttaacggaattccatccaggaaaagggcaactgctacgtgaatncctgacgtcggcatcaacaatcataaatgtggaatcattgtaattgatgcccgcctcatagtattgttctttcgcaatatgaatcgtacctt

SEQ ID NO: 7705 - DNA, 426 bp, Oryza sativa
tctcgtgggacaagctcaatgagattgctctgggcattgctatatggatcaactacctgcaccaagggtgcgagatgcagattctacactgtgacatcaagccatacaacatccttctggatgacaactttattccataggtcgctgatttcggccttgcataattgtacccaagggagaagagctttgtgtcagatagggctttacgaggaacatttgggtatatggctccagagatggcatgtcgtagttttggcgtcatatccagcatatccgatgtttatagctttggaatgctgctgcttgagatggctggaggtagaaagaacgcagacccaaatgcatactcatattcgagtatggcatactacccagcatgggtgtatgaccagcttatagtagatcaacaagttgatgagatatcta

SEQ ID NO: 7706 - DNA, 229 bp, Oryza sativa
atcctcggttctcagtagatagtttatcatgcgaacccttctcacggaaactcggtgcctaaaatttttacactaactcttctctctagaatgtagacatgttgtaaactggaataaacagaaacctagtgtgagtgaattaaatatttaagatgttgaaaacttttaaggttatttacttaataattttataaataaagtagtggttgaaccgttgtaaacaatctac

SEQ ID NO: 7707 - DNA, 447 bp, Oryza sativa
  unsure (1)..(447): unsure at all n locations
agactggtaaaccatctcttcangagtaatgctacgaccatcaatctaactctgacattgtgctactactctcatgtctgaatatcatgcttncacataattggttcattttcagctgttagtctcccactcctacctaacataatntgtcgatatttaatccagttacagttagttcctgagactatctttatgtttgtccgaaagtgaacagactaacttgcccttcgaaatctcggcttgacctctgcaaagtcagtgccgtactacatcgtattgatctgaactatgacaaacgcgaccatcctgcattcgttgatctcaattcttaactaccgactagtcatacagttgatttattaacaaattacataattattttgggcaatgattcatgcatgtttatttgcttgatttgacccatcttcttcatgaggagcatttatc

SEQ ID NO: 7708 - DNA, 321 bp, Oryza sativa
  unsure (1)..(321): unsure at all n locations
atcaagtattgggttgggctttgttaaaattttcattatgtggctctggactcactgtgtgaatttgctattttgtgactatgtataattgggtgtagctcggttgagtaaaagccgggatatttgattctattatcttacaaaaatcaaataaaagaaattctaccgtaattagcctattgggtgtgtttggataatggaaaaataggaggtgggattgagattgagaaatgaatatagggttaggattaaatggaagaagactaatgaatggntaagatctaagaattctttggttgggggatttcatttctaatccca

SEQ ID NO: 7709 - DNA, 435 bp, Oryza sativa
  unsure (1)..(435): unsure at all n locations
agactntggtttattgctagctatctagctatcaacatcttatttgctccttatgtgagctacaacctcatttattagctcgttntctaaactgctaaaatattatgtttggcgtaaaagttttttaaaaatatattaatggattttaaaactctaaaataataaatacttatgacttataatatgctatatgacacgtctcattttccgagccgcatagtagctcaacccagatattccttccatttcagccagcctatactattaattatactattaattagaagtatttggatatggcttattagattatgttgacgatttttaagacaagtcatttactttctgaactatttgccgaaaaattacctcaaaacacttttatttatacccgactatgtgaacattacctacaccttcttatttttttttttt

SEQ ID NO: 7710 - DNA, 430 bp, Oryza sativa
agtgactggaaaataacatccggccatcattttcattataatgaaattaagttctttgaaccacactgaatgttgcccctatcatgatgtatctgacttactcaagctgatgttgctgtggtagtttctttctcatgtttagttcagatgatgctcggtctgctctttttaattcacatatatgcaggcatcatcaagtgtctttgtttaagggcttttaactattcgccacttttagatttggcaaataatggcttctaactattcgccacttttagatttggtatatactatttgccacccctatctcaatgacatgtgggtccacatgtgtctataacatatgggtctagtggcataaagtaattgcaactctaaatgtggcaatggtaaatatctctttttttaaagaaatgttacactggaactt

SEQ ID NO: 7711 - DNA, 351 bp, Oryza sativa
  unsure (1)..(351): unsure at all n locations
tattgctgaaattagtctggatctttattgatggaatgttgaaacttgttggcatggtctactacgaatttgtaatgaagactatttagttgcattgttcatatatatatggcttacttataagtttaagctaaaacatgactatatcacgcagcaagtcacctgcggccaccaacctctcggtgcacgcttccacgacgcagcccggtgcatcttcacgtctgtgcagctgtatgagcgccgtggatgctgcttccggtggcaacagacacactctgaggttagagctagcagagttctgcatgattntctgtcagttcatcaagtttagacaatggtttgggtagggtt

SEQ ID NO: 7712 - DNA, 368 bp, Oryza sativa
gagaacttatagagttgacatggcttctctcacaacacgctctggtgcctcaatttcacaatttcaaccaaatattttctgcacaactattgtatttggatcagctgcccagatccatgtatttgtttagaacacaaaaaagacagtgatcatatgatgctatgaattgaattagtgatttgactgttcctttttattagagggtaagttgacgaactaattctaaagtggtctgatggatccctgcctattctttgaagaatatttaattatatgctcgcatctctcatttatgtactctcaactaatactacgtgcacattcactttttcttctagtctagtattccacgcggcaaagcaacgtgt

SEQ ID NO: 7713 - DNA, 274 bp, Oryza sativa
agcttgagctaccttcataagttgtcctttgtagaacaatttcggcctttgcaccggaagcactactagtttcttcaaagattccttgacattttctagtgctccaatgtcctcaaaggtaacacctatctcatctggagggatcacatctccaagaagccgtgtttcgaattcattctctgtcgttacattcctaaaataacaatgggtgcatattgtccgtaagcacagcttacatgaatagcctccacagcccaaaaatcatgtcattact

SEQ ID NO: 7714 - DNA, 281 bp, Oryza sativa
acataaaattatgtatgaaatccagaagaggcttcaattccgttttttacaacaaaaaatcttcagaacatacttacccgtcggtggtggattacaataattataagggaaaaaaccatgatcccgggactagtttctataatagggaaagttgccgcatgtacatttgggaaaaattgaattaaaaaaattcccctacccgctacagaaaaattagttgctatgttaaaaaaaaataaatattaggcctgggcggggaactccaaaactttaaaaaacta

SEQ ID NO: 7715 - DNA, 406 bp, Oryza sativa
  unsure (1)..(406): unsure at all n locations
tggagaaatatgcataatattggctgtgctaatgccactactagaaaaataatttttcatagcggtatcctatattttccactggcggttatatgaaaaatccgcttgcgaaattctaacgagggatagagggtgtataaccgccaacggttacttatgagcaccgcttgcataaacacatctatttttacaagcagcgctcctaagaccccgctagtaaaaatagattttcagtaacagggtgtaatagccaccgccatataaaatcatgggatnggcataaatcccgcattcacacacggtgagaccaagtccaacgcatacactccaaccactcctctccctttcatcccacttctcccagatacaccggccatctctcctctcacttaatcatgggtggtgt

SEQ ID NO: 7716 - DNA, 300 bp, Oryza sativa
agataagacacttcagaagttttgtcataataaccgcgttgaccaccaaccactatatgtgagagtgagagaatattaggaaatacacttctgtgttgttcaggcgctggtgattaattcgagtgtgagacatgaggtaaggctcttgggaagccttaaattttgaggcaaaattttaagcgtgagaagtgtttaaaaccgagttatcatgtatccctaattctaaatgctagataaaaattttttccaatgatagatgccaaattggggttttatgaatgaattctaaattaagtgtta

SEQ ID NO: 7717 - DNA, 339 bp, Oryza sativa
ctcatctaacacgggttcattacatgctcctttcgactatcaacgctggaatgcgaatagatcgaccattcctggaacgccacttcccttaagcgtttctatgtctataatgggtggcacccaaatcgccaactggtataaatgtacatatttctgtatatgcctttctgcatctctcattttgtaagcctttcagcacaataataccaaaaaaaagatgaaaatgattataggaataataactgcatgtatggctattatccaacttggcgggccgaaccagtaaaaaatccttgtgtctctcgcacttgtctgaatgataatccgtggaaaaacccc

SEQ ID NO: 7718 - DNA, 369 bp, Oryza sativa
gacaagacatatttacatattatcaaatatccgatcggctgataagacgatggtagtattccatccgatgacgatactatccaatgccgatatgagtttgagcaattatctatatgtccagtgtatatgatgatatacaaacaatcaggtcatgataattaaacaacaatatactcccgtataaacccaatcggctaataattgattgataaaataatgtcggtcgaatataaacatacttgactgaaagcgtgatgtcatacaatccaatgcgatttgataaacagttaaacctttgtgcaatcgggtaaatccaactcgtatgtaatctttataagccaatgcaatgtccatataactcatctgctg

SEQ ID NO: 7719 - DNA, 71 bp, Oryza sativa
tgcagcttggatactatcggtctggttaactaaatcttgagcgatctaatatctgctgattctggttatga

SEQ ID NO: 7720 - DNA, 262 bp, Oryza sativa
  unsure (1)..(262): unsure at all n locations
gaccttataaactctgcttgacattcagaatataaaaaatgtggttgaacattctttacttaaatnaacaggtcaaaataatatgtaatatatcacttcataaacatgcaagatcaattccgactttacacgctataacgaaaatatcaaactagactatatcacgtatatatgcatcacatatccaatttattgtcatttttacaacttgacaaatgggattacgttaacactggatttctggactagtatatcacatatt

SEQ ID NO: 7721 - DNA, 91 bp, Oryza sativa
agcataatggggtgaaccagtgcattactgccgctatgtgcagcaaggaacatggcttgccgcatgagctgtactgggccattcggtttca

SEQ ID NO: 7722 - DNA, 354 bp, Oryza sativa
  unsure (1)..(354): unsure at all n locations
aactaccacctggttcgccagccactccggatggatgacgtcactgttgaattcggactccaaaaatatcgccacctccttgcggatgaaggctngacattcccgggcctgccgacgcactttctgccggaccggccttgctcccggccgcacggcgagactgtgctcaatcacctacctggggaccccgggcatgtccgctggacttcatgcgaagacatcagcgtttgcccgcaggaaagagacgagcgcgtctttctatttgccatccagaagaccaccgatccgtgtggtcttggatgggccgtcgcccaaggctacctccttgaccgggacctcgtcgcatgtcgccat

SEQ ID NO: 7723 - DNA, 459 bp, Oryza sativa
agcctatgctgaggctcgcaatactagcaagttctatctcttatagctccgtacggcttaattagcatatgatgcattgcacgcatgaagatactcttgatgggtcaatgtatacttatcatcgtgcttgacctgctcaagtctcaagatctcatcattgcttctcaataaagtaattaactggctgctagtaatagtactactattccttttcttttttagaattagtactactattcctattagatgtagtagctagctcttgttaattgtaatgctccaaagccatgaaatcatgagaaaagctgcagatgcttcattcaagacaagtatcacccattaattctgactaccgataatctgtattaatatctcttatacaacagtaagttctttggagtttcaccaagtcaagctggctagctcgatgatgctcgatactcgctcgagctcgaactc

SEQ ID NO: 7724 - DNA, 424 bp, Oryza sativa
  unsure (1)..(424): unsure at all n locations
tatctaatagacttgccgagacgtgtctcatgtgttgtgactatgctcatgtgttgggcagtcacggagtgcgggtaaagtgtacatccactgcagtgtgagtaaaccaaatctattcgaatagccgcgctcgcggttattgagcaccgggacatgtattacacttggctagactctaaattcttaacttgtgggggatgggatattgcatgatgaattttatgctgatggagccacattctgagaggagggaaggtggacatcctcagaaaaccatgacgattcaatggcgggaagctatccttgggatcacaatggatggtggacagaaccgtcgttgtttatagtgaacactggtgctanaatttgatcagtctatgctatgttttaagcttgtgaaaagaatgtaaaatagctttatgca

SEQ ID NO: 7725 - DNA, 216 bp, Oryza sativa
ctaatataacatgtgatatgatgaacacttctctatcatgaacataagcttcctgctgaacgtcaacaatcacatatctagagaaaatggaataccataaacatccgatcattggtgaacacaaataatatacaaaataccataattacttttctcctatgcgtgctctgactatgtacatatggcacgcaaggtttgtgataaattcatctcaca

SEQ ID NO: 7726 - DNA, 466 bp, Oryza sativa
taaatctaagcttgaagaataaagtgttctctgaaatacctcgaagtgtttttttacagcacacgtcgtcgtctgtgcaacctgtatggactgtcgaccgcgatgtggtggtgccctggactggcgaccggcggtgctgtccctggatggatggctggcaagccggcagtccccctgataggcggacggcggagccctggactgatggccggtgaagccctggacggccggccggcggtgacttgaatcggcagccgacggtgctcaagacggagctggcgcgaggagctcccaaaaccctagcctggcggcgtgggcgctgcttctcgcgagaaagaatactgcgcgaggaaggagcgagaacgacaatgatgcgggcggaaaaaacaatggcgcggaccgtaataataaattggccgaatggtgggaatgggagggcgtaccgcttaccaaattctgaagagat

SEQ ID NO: 7727 - DNA, 455 bp, Oryza sativa
tagagcaagtatataagtataatagtaagttataagccgacttattgttgatgtggaggagaacagagaagagaagcccgctgttaatctacagtcagcttagacacaagaaccaaaaaactcttggtgagagacaagtgtcctatattaatccgaaagagctaattattatatggatggactgagagaagtcttaaaaaaatcttatagccaacaagtcagctatattattaacctcgctcttaatggagtgtggaaagaacttgcaatatcatattttacagccacttttcaaccttgtaataataactaatatatttaattccgacgagaagacctactatgcatgatcagtcaaaagttctccaaacctacaagcaccagggtgaaatagttttcagagaattgcacccaggaatataattctaaaccttatatacactgcaaagacaggc

SEQ ID NO: 7728 - DNA, 453 bp, Oryza sativa
  unsure (1)..(453): unsure at all n locations
tgttcggtgcgcggaggaagacaccatatgaggtcggtcctcagttggttaccccacgaaatgcctaatcagctctgatgcttttaatataaacaataagctacttctaccaagttcacatgccaagcttatgatcatctatatcagcgaaaaatggcgtgggtcggatgggtgaagagctggaggtgcgtcgatcacatcacgtgctatgcgatatagatagcgtacaatatcacatctctattcctaagcacaagacacttgccaagattggcactctctgacataataaaaggatgccatcatatcgaatttccaacatacgtacaatacataanatcagaagctctccatggagcacggataaccttataagcttccagatctaagagacctcaagcctctgataatctgatactacaacgatgctgaaggcatttgtcatctactact

SEQ ID NO: 7729 - DNA, 298 bp, Oryza sativa
  unsure (1)..(298): unsure at all n locations
acatcttcgataattatcgaatgattatatactaatcgatataatgtnttatataacttgcaacttaatttgaaaagcaaaccctacattaaaatatgagagatttntaaaagtggcttctgtggataaccaccttttagaaaatgatgaactgaacacgtgatacaatacgtatttgcactcttaggaattatgaggaatagagaagttctagcactatattagcttattttcacgagttagtgacacatntcatttctattnttactactagggtagtaccaatgagtgtgatgac

SEQ ID NO: 7730 - DNA, 442 bp, Oryza sativa
  unsure (1)..(442): unsure at all n locations
tctagagtcttctaaggttttacgctgtctcccagtcctattctatggaagctcttctgcgcctccgtcatggccatggactaattatattaatcgattntttaaatttattctaactaatacttaattaatcttgagttgttgcacgagaaaagtttggaatgatgcggccatgaacttcacgagtgcagttcttccgatgatgacgttgtatgctgtatcaaattcagcgacatcaaaggtgatctgctccgttcggaagttatttgcttggccgaaagtcataggcaatgtaatcttgcccaatggcttggacgacgactgaggagtaatcccatggaagggttgatcggtgggagtcaactcgcttcgtggaattcccatcgcgtccaaagtgctggcgaagaggagggtgatggagttgccgccatctatgagaact

SEQ ID NO: 7731 - DNA, 267 bp, Oryza sativa
aactattttatagtgtagttcaactggacaatggtaatctggaattgctgatcacgtctagtgatgtgttttttttaagctgaaacgggatacgtaatggttgataaaaaaaaaaaaactctgtggcttacgcttgtatatgtcctgaagttgtcgcggcaatttacatctataatagaactggcttaccaaatactatgtcatctgacaactgcccgcttatgtacatcggactgtgctctttcaagaacgtatgttctttgggat

SEQ ID NO: 7732 - DNA, 334 bp, Oryza sativa
  unsure (1)..(334): unsure at all n locations
ntactggttgacaccttttaagatgcatagtaccaacttctattaagttgagtaactgcggtataaaaggattttaagggtatgggcacttgatcacgcgcactctggcctaagcgaanagtgcctgagtccctaaaagaacgtgacaggccacacctganaattcgcattgcaataattccgaagaattatatgaccgcgtaaaanaagatttatcagcattgggcaacactattgtgcgcataagttgccaaagcaaaaaatgcctaagtccctaaggagcacaatagggccacgctgtaaaagtattgtgctgaggtaccgttcaggccta

SEQ ID NO: 7733 - DNA, 178 bp, Oryza sativa
cgtcgtctgtctcatacttgtgtcttgactccgtgcggagctctggaatgcagctagattcaggtttatgtgcatgtgacagctaagctgaatcacttaactctaacaacatttacacaaacgagtttcagtgtcagctgcctgttcatagtggaccactgtacagtttacttcctct

SEQ ID NO: 7734 - DNA, 464 bp, Oryza sativa
taacatgcacagatgccacatcatcattcactaacaatatgttccatcatcatccactaattaacaagaagtcacatcatcatccactaacaatcatcacatttaaacatcatgcaaacatgctatatctttataggttttataatttaagagcttttcaaatacaaacatgttaaattatcatccaacataattcacataatgtttcaatgtatatcttcatgcaaagatgccacatcatcatccactaattaacaagatgccacatcatcatccactaacaatcatcacatttaaacatcatgcaaacatgctatatctttatagttgttataatttaagagcttttcaaacacaaacatgttaaattatcatccgacataattcaaataatgtttcaatgtatatcttcatactacaatcccgcagcaatacgcggagtttcacctaataaataccatgca

SEQ ID NO: 7735 - DNA, 203 bp, Oryza sativa
  unsure (1)..(203): unsure at all n locations
tcacacacgccggttgcgcttacactgagataacagtatataatacactctcatttctatgcacaaagtatctacatgtctactacataatggcactctacaacggttgatcggccagtgtcaattgnccgcctccctctttaactaaattacgtgtatacgatgacgttatatgaactaaggccgattaaggaccgcacacg

SEQ ID NO: 7736 - DNA, 436 bp, Oryza sativa
cctattacaaaggaattaaaactgcgaacggtctgatctgtattattaacacttaacagagcaagcaaacatccttattaagacagccatatcatacgcacatgatatcgaccgtcaactgaccccaaacaagcaacctaaacacacaaactaacaaccagaagctagaccatcgataaactatatgggaaaaaacgagcctaatgctcagaacggctcctgcggtcggtggagtagaaagcgttctcctgctcgtcacctagtccctctgaacgactcctggagcctgacagatcagtctcgccgctgccactgtgagtagaggacaaccaaccttcgtgaccactggctgaacctctggcggctgatgcttggagcgaaagagagagtgaacacgggagctggagctggagctgcacgaactgcgggcagaact

SEQ ID NO: 7737 - DNA, 358 bp, Oryza sativa
cgacatatcgtgagttacgtggtgtgctatcatatcatgaaatccgcatctatgcatttgtgagactatagaatatacacatctagagcacctctttattatcgacctaggatcaaagttcacttgcaaactacatgaggtaatggctcagagagcgattacattttcaatttcctcctttcagatcatgccacttaataatgactctctagggaaattttccaacatctacacttgttatttgaacacaagaaaaaatgacgtcttactctgtaagcatgtgcctttggcgacgaaccgctcgaaacgccttccaaaccccaaaaaaaggtctgcggacgtttcctaaaaagcgttt

SEQ ID NO: 7738 - DNA, 168 bp, Oryza sativa
tctttttaactctggtctatgtacttgcacacatcgggtcaagtcaactcccgagaacaagtacctacttcttaacttatatggtatgtactctttggctgagaattcgaacttcagccctacctctgcaaaaacagccactaaaagagactactcttctatgctctg

SEQ ID NO: 7739 - DNA, 364 bp, Oryza sativa
ggcacacaactgaggcttctttgatactgcagatcatcctgtgaacaagcacaactcgtgttgtaggacaccgattcaccaactttttgatgatgagaaacagtgtgggtcctgatgaaggctgacactgaactcctatattttcagcatgggggctcgtcgagaattgtatactctctaaccgacgcagaactataacttgcgaataccattgtatccatattacacgcgcacgatgtgatcatccttcatttccatcgcgtgtagactatcacctgtgcgtagactgccccgttatactagaagatcctggggactatgccattgcttacatccatactaggcttacgtaagatcataacat

SEQ ID NO: 7740 - DNA, 454 bp, Oryza sativa
tcacggctgaaggggacctggttcttcagcatcctgattgttttcttgtctggtctaccaacactttcggccagtctgttgcaagaatgaccctcacagagtccggcaacctggtgctgtataatcacaacaacttaccggtctggcagtcattcgaccacccaacggattccttgctccctggacagagattggtgcaaggaatgagattgaagcctaacgcattggcagtaaatctgattgccagcgacctgtattatttaactgttcattcggatgggctctatgcatttgcaggatctagcaactcccagccctactatgagttcacagtgtcaactggaaacaagtcacagaatcctccagcgtatttaactctggcgaacacgagcttggacatatttgttccatcctcttcatctgcaaatctggaacacttgtcccttcaatcacc

SEQ ID NO: 7741 - DNA, 377 bp, Oryza sativa
tcacaaattcaggtgacgaatagtagcaggtctctctcgtctcttattgttggaggcaaacgaatccttcgatccataggatcaaatctctctctgctccactctactgaccctgatcttggtgtgcacgtgaaatcgtcgacgaaatgcctgagagaaccactctgctttcccttctgctgatggatctctgcatgatagactcgtctctgtctcttctattctaaggaaaaatctgtggggtgtcactagaaaatggatggtttaccggtgactactgacgctttcttggagatccctttgcaagagcattggtgtggatttatgtttctcgaactggcagactcgattctcatgtaagtctgatccaatgatac

SEQ ID NO: 7742 - DNA, 168 bp, Oryza sativa
  unsure (1)..(168): unsure at all n locations
atatcactcggatcatgtattcaaggantacaccgatatgctcatataatataagtccttggtaactatatatcgaaccactcggttggtggatagttatatctgacatatgcttgggtgtcactaccgatagcgaggctcccatagtcattatcatgcctgcttatt

SEQ ID NO: 7743 - DNA, 418 bp, Oryza sativa
  unsure (1)..(418): unsure at all n locations
ctaagcttgtaccaaaggtagctagcttcagtcttctatgcacctggtctgtgtatcgtgctgcgataaatatcccatggagcatttatataacacttttgtttgatttgatagatcgtaattcaagagctcgcccaacatttgaagcaacttatttttgacaaagtgaaaaggaaaactgagcttctgatatttttcaaaataaatccacaatgcgctaatagtaatgaagcttcttgttggtacagaatggaagacgtccattgctgcaactacttcaccctaattgatcacgctatctgcctccatctgatctggcttgtctgaactatcgtgtgccttttcttatatataggcaagctagctattctagttagtatattaacgagaacataccgaagagctgngttataaatat

SEQ ID NO: 7744 - DNA, 190 bp, Oryza sativa
gacgaccagtgttattgcagactgaactctcctcaacggtcttacgtgggtttctgctgctctacagcaaccaggttgtaatgcacgtatccatcgtagcactattctgtgtatatgaaactctgagtcacagatcacttgtacagcactaactgtgaaacactgatgtagtgattttctgactcttctc

SEQ ID NO: 7745 - DNA, 462 bp, Oryza sativa
tctaaagcacgatcacatccttggactaacaaatattcaatttgataaagatagggtgtgtagcacatgtcaagccggcaaacaaattggagcacatcaccccgtcaagaatgtgatgaccactacaagactattggagcttctccacatggacctcttcggaccaattgcttatctaagcattggaggtaacaaatatggtcttgttattgttgatgactcttcacgcttcacgtgggtgttctttttgcatgacaagagtgagacacaagctatcttcaagaagtttgcaagaagagcacaaaacgagttcgacctcaagatcaataaggctagatcctctaagttcgctcctaaagtggatgagggattcttgcttgggtatgggtcaaatgaatacgcataccgcgttttcaacaaaacctccggtattgttgagatcgcgcgtgatgtgacatttga

SEQ ID NO: 7746 - DNA, 337 bp, Oryza sativa
tcttgctgctctgtaccccacagaatggagcggcagttccttttctatcacactgataccatatgtgtccttttaaacaaataattactcagaggccagaatatacttactttggagatgatgatatggagttgtaactcggctgtaggcgaggtgccacaactgcaaagaatactcccacggggggcttatctgtaaggaatgcagccatatactcaagaaagcttgtttggctagctactacccattgagaatattcatcctgtatacatgcgagtctcgcggtcatgcgagaatatatataccacttcaaagaacctacaatggaagttgttac

SEQ ID NO: 7747 - DNA, 319 bp, Oryza sativa
cttagcacgagctgcactttctgaccagacaatccattccgacaacaatgcagacattcatgaaggatcagaggctctagttcattgctgctacgcaagcgtctatccctgtacgccaaatccgatagatcagcaatggcttaacccgtcagaccgcgggtccaacacaagtgcatcaatccgttcaacattaagctactatgcggaataaaataatgactacctgcttgatgacgaacacatccagctctgacgcgcagcttctggacacttgccctatttggttggaatacaatgtcacctgctacagcttcgatta

SEQ ID NO: 7748 - DNA, 416 bp, Oryza sativa
tatcaagcctagatagaaagtagcgatgtcgagttcgactactccaatctcgccccagatggtctctcccactgacgatgaactcctacaggcgcaggccaacctgtggcgccacagcctctactacctcacctccatggcgctccggtgcgccgtcaagctcggcatccccacagtcatccaccgcctcggcggcaacgccacgcttcccgcccttatcactgcactgtcccttccgccggccaaacttccattcctccgtcgcctcatgcggctccttgtcagctccggcgttttcaccaccgagaggggcggcgcggccgcggaggcggaagcggtatacagccttgcgccgctctccctcttcctcgtcgacagcgcgttcactggtagcgaggtcgacgacagccacacca

SEQ ID NO: 7749 - DNA, 298 bp, Oryza sativa
ttcactcacgcaggctatttgtgctgccatacttttgcgctctatatgacggttatgtctgcagtgtatccacctattttttgtcaaatgaagtttatgattatcgtgtggtctcctcaaatgaatgtatgattagcgcttggtgatattagtttgttcaactacggtgatgttactgtgttgaataagacgtaaactttaaacagcatgagaacaccatggttgttaaaattaaatccatgatctcgcgtctaaataatctactgaccactttactaatcttttactatgctaatat

SEQ ID NO: 7750 - DNA, 457 bp, Oryza sativa
ctttatgtgagacttttcttaaagcggccagataactttttgttatgcatccccacaaaaatcaaaagggaaagtagacagactaatcaatagtattaaacactatcgcataggattccgttggatatagatgtcacgggatagattaattaatgggcatagaaattaatctgtctctcctgaccaggtgctgatcttccattccatccaagatcttcctcctcggtatcgtgcatctccacacacgatagctcggtatcgcgcgctccgtgatacctcgccggtggcgagtccttgcggcagctccgcatgtgatacctagccaactgccgcaccatctaacctgaagcagcctgctctcctctgagtcccctcgtcagtaaggcgtgtgacacctcgtcggcgggcggcggcgactcgctgcaactaactcgacactggtggagaaaccatcttt

SEQ ID NO: 7751 - DNA, 236 bp, Oryza sativa
tcgttctttagaacagcagggagaaaacaataatttgaatcaatttattattgacctaaaatgataaagtaatacaaaccaaaaatatatgcctgtgatcgtccatcatcattaccacgctgttagtggagggtttataaggatggagtaagggaactatacgtgttgtggtggaatatgacttgtggtggatagatgagagactctctttatctggaggcagatggagatctctt

SEQ ID NO: 7752 - DNA, 457 bp, Oryza sativa
  unsure (1)..(457): unsure at all n locations
actcagcttattcgatgattactaatacgctgaaatataaattactttgtaaagcttttatcaatatcaatggaacatggaagaaaataacaaatactattcatattcagagaaacgtacccactaatacacctatattgtgtctacatggacatgttcaatacaagtaaatgtccgtgtgatttgataacgacagtgagtctagtacttgtgggggcaggcaggccataagcagctgaggcccaaggcccaatcgcctcctgcagcatggcttgccgtatttaattaataacatgcaaatctttcccaggaattaatctgtttcagccaaagattagcgctagataatatgggttcatcgctgtgaagcctgggcatccgcccctgcttgccgggaggtgaatccgcctctggagtccaatacgttgntactaatacccgttctaacttagctgtc

SEQ ID NO: 7753 - DNA, 223 bp, Oryza sativa
agctagactgttgacgacggtctcgtggactgtaacgggttcgcgacgaattatgttattaaaaaattaagaggaaaacacctgagaggatatgggctactactctgattggatatacctctacacaacgactctggtacagacacattcttgccataattacactactaccctgcacaaattgcaaagtggagaggttgccactacattacaaatattgtaa

SEQ ID NO: 7754 - DNA, 457 bp, Oryza sativa
  unsure (1)..(457): unsure at all n locations
tncaatatagtaagcgaagagcgctccataattgcgtatatattatcacatgaacatcagcagcaacctcctcactgcaccaagaagaagcagatagcgaaaatgtcgtcgactaacagctcaggcgatccggcggcggtgcgcgtggagggcggctgggcgagccccttcatgaaccgcgtggtggtggcgctgaagctgaagggcgtggagcacgagatgttgcacgagacggtggggaagaagagcgagctgctgctccggtccaacccggtgcacaagaagatccccgtgctgctccaccacggcaagcccatcgccgagtctctcatcatcgtctagtacatcgacgaggtctggccaggctccaatggcgccccgttcatactcctccgcgacccctacggccgcgccgtcgagcggctctgggcaaagtacatcgatgacaaaggaacta

SEQ ID NO: 7755 - DNA, 422 bp, Oryza sativa
cgcgatccacatgtatatcccttccttgatgcctgaacatatataaattatcattaggaacaagcatatcatcattgttattttgatataaacaacaatgtcagtactaacagcatcgaacgtagatggcatttgcacttcatggtccacatctgaatcaagggaatcaatctcatcctcttcttcctctggcacaggggagggaggattggcagggatgtagaccaccctcagcttgaactcctcgaccaccttgcctgcctctttactgaactacaaaccgcaacatttaacatttagtacatcactcataaatcaatcagcatctatgaactcgattgagactgcaggattttaccatgtcactgtgaatgtccttctgcgttgtgccatcctctaccacgacgctttggatgagaaac

SEQ ID NO: 7756 - DNA, 375 bp, Oryza sativa
  unsure (1)..(375): unsure at all n locations
tgcacgactatgtgttgctcaagaggtttattcttatttctttgaaattgaactatgagtaactgaaggcgacattgttggtggtcttttttcactgacgatatataccagcttatggatntttaaatgtattgttctaaaaattaatgcnagtatatgtatgcctgtatgccatcactacgcgtgttaataatgctcacaagtaattgatggggctgtacgaaactctgtggaagtatccgagaatgtatatcttaaatgaatgatgtcgacatacaaatacttactgctacgacttaaacacacaaaaatatttttagtaatagtgataccaaaccaactcaatagatttgtgtaacacacacgatacgagag

SEQ ID NO: 7757 - DNA, 383 bp, Oryza sativa
tgaagcttctcgtacaaagagggaaaagagggtgtctttttatattacgataactaatggatcattgaaagagggccatatgactctttttttctgactaagtcactgtgttatgtaggacaaaaccatcgtccaaccaacttttttaccttgctcgactatagtgatataattgagggatgcttgtatgatgtatctagctttgtgtatgagggacagaggtcagacttggtctatagttgggggagaaaatagacagttttctttgaactctttgaagtagaactagcacgctggatcttttgtagcagtaaaaggaataagttcaactgccatccctcaacttacaccgagtttgttcgacatcccttatctgcaatacc

SEQ ID NO: 7758 - DNA, 110 bp, Oryza sativa
cgaggaaatgctctagctgcacgcaactgctcacgtggggggacgctgacggctgcaaaggccgaatattgcatgaaagggccagtaactcttggcagcaaaggcttaaa

SEQ ID NO: 7759 - DNA, 459 bp, Oryza sativa
  unsure (1)..(459): unsure at all n locations
cctttntagctattttgctatgtgaattttcaatgatgtattctactctaagttgcaagcatcatattttacaaaacagtcggtatatcactcggatcatattattcaaggattcacaccacatatgctatgtattgatatcaagtcacttggttgactacaattatcaaaaccgctcggttggttggattatttactccttgactatatagttagattattcgactaatcacatagtcgaaggctacacctattaggtgcatctagtcgatgcacctaagtttacattcaattattttttaaccctccacaatcttcagatttggtaaaagtactcgggagaccatggcaaagatgattgaagcactcggctttggagtaatctagctcgagagaagattatcttttcgactgtgaaagtctcacgggctactgtggagattataggtaccccatacc

SEQ ID NO: 7760 - DNA, 462 bp, Oryza sativa
  unsure (1)..(462): unsure at all n locations
atgctaattgctggttaagcaccccataaaatagttatgtttttttgtatgcaaaaggtattttcaaagatgaaccttgagtttgaggcaagatgcttggcatataagaggctgcacatttgagtcacatgtgaaaagaatgctcgcaagaaccatttgtgtagtagtgtgatgaaaataattatttatacaattaaaaggttggaaatccctatgtgaaaataatggtacttgtgcctatattattgtttgccaacaaccgatagaagttgatagtttnttttttttgagaactcatgcactctattaaaagaaagcgttttagaaacacaaagcatgagttacattaactgctccattangagtgaaggaaagagctcttttagtaggacaaacatctctggaacaaatgtgagaaatattagagcaatcaaaagctaagcagctgttagtctgagcttg

SEQ ID NO: 7761 - DNA, 82 bp, Oryza sativa
cttcttatgactacttatgtgataccaaataggctaccttcaaatagtaggattcactttacaggctgtaaataatacatct

SEQ ID NO: 7762 - DNA, 463 bp, Oryza sativa
cgcgaaagtctattagctgtaggaattagttgaaagcactgtgtcttggtatgaactcctgatcgtgtgcttgatttggttgccggcgaattgccttgtatcggggttcaatgggattctgaattccctcgaaaacaaatttatgaaaaatttatcgatcgattgatttgtgcaacacgaacgcctgtaccccacagaaaatactgtatgtgtttggcattaaatgttaaataatcggcgttgaaaacaaaaccaaaaaaaaaaaacaacaacccggcgcatatgctctgaacttttactgcatctcctgttgctgaacaggaaaaaaaagtagcatgctgagggaagcactcgtggtgtggtgtggacgtgtggtggcaaaagtgtgtatgcatgaatccacccactatgatttctatcctggcgctgaagaatgttacgtatatgcatgtgaactttaaca

SEQ ID NO: 7763 - DNA, 189 bp, Oryza sativa
ttgcgtgatgaaggttggcaaaacagcgctttgaaatattgataacatatattgagactaatttgtggaattaatagatgcacatgtgaatagtcttagcgatgcccacacactaatgagcttgtgcatagtgatccatttagtgctcgctccgtgtaagttattattattagaaggattgtgtgctaa

SEQ ID NO: 7764 - DNA, 445 bp, Oryza sativa
tctattgtctgtgatagtgcacttgctgccgtgcagatcattttatatatatgtaccaagtatccttaagattctcaacttccgaaagtagccaacatcttcagtatgaatctttatgctaaccaattcggtctcatgcaaacgcagcacaaggcagcggagctctggcaacctcgcaagggtttccatgtcctgctctttcacaattagcacaaccacatccagacaggagaggttcggagcaagcgatgatttaatccatgctggcagtccagagaacacaaagcaattcagacacaggtatcggagatgcatgcaggagacagatcttgcactgcttgtcactctccttgtcactaggggtgggccctcaatgtgcaagtcccggatattgtgcagcttgcttaaggattccaacaaagctctctccatgctctcattcaaa

SEQ ID NO: 7765 - DNA, 76 bp, Oryza sativa
aaatacctacccgttcatattcttggttactctagacttttagatagcttgtggacacaataattcagtgtatctc

SEQ ID NO: 7766 - DNA, 457 bp, Oryza sativa
tagcaggcgcgaagtctagatacattgaagaggaaaagctttcttatgctcctatgatggcttctcgcaagcttaaacactactttcaggcccacaaagtcactgtgccatcacagtatcctttgagcgaagtgctccggggcaaagaaattactggctggcttatccagagggtggcggaattatctcccttcgacctgcattttgtcgcccgcactgccatcaagtaccaagttctatctgacttccaggccaaatggacaccggcgttcgcctccgaaaccgagcgccgtgaacaaccttgggtaatgtactccgacagctcgtggtcacacaaagtggcgggcgccgtggcggagctcacttcaccagagggcatgctgattcagatagctgaagactgcacttcgacacaaccaacaacacggcagagtacacatgtgtactgttgggccta

SEQ ID NO: 7767 - DNA, 460 bp, Oryza sativa
  unsure (1)..(460): unsure at all n locations
ctcagctttgaataatttatactggatctacaaacattaaggagttgtgttatgatgttttcaaaaaggactatttaaatttgagatgagttctggtgaatctttggatgattatttgggccatttcaataaaattttgagtgatcttggatctgttgatgattcttatgatgttaactattatcaatctgagattgctcgtctctttatgaatgatcttgatatgagagtttgggatgttaaagtgacttctattcaggaatctgttgacatgaacactttgactttggatgttctttatactaaattgaaaacctatgagatgaatattctttcaaaaagaacagattcgaaatctactgctntggtgtcttcatctggatcttctttggatacttctcctaaagatgtacttgctgnttttaatgccttgtccaatgatcaactagctgaaatcagt

SEQ ID NO: 7768 - DNA, 451 bp, Oryza sativa
  unsure (1)..(451): unsure at all n locations
tgactaggtgtgaagaagctggtttaacgatgtctgttctgttttaccaaaggaaagggcttctgtgacatatacccatggacaattcaaggcataatgtccttgctctctgcaatcgtgacaaaaggggacatcctcttctggcattggaagctcattgacctgggtggcaaatgctcgatcaaacacatactgattttggtcttgacttccaactaatggtagctgtgaactaagcagcatgcttggaatggaccaagggtgtgccctggttaactctcttgaagccagtggtagattgagttgaaaacttgagttacttgaggcatacccgctgacattctttcctttgtctctgttaaacatctgttaccgggattcangtgagagaggaaacaagccantaaagaatagaccacaactagagataggaccttaaaagaactaactc

SEQ ID NO: 7769 - DNA, 454 bp, Oryza sativa
  unsure (1)..(454): unsure at all n locations
tgaacagataaaggtagtgtaaaatttccttcggcctcaatgtgtctgaaaatcagagacagatgcattctggttttgagcaaaagaacaaagctttgacatagtgtgaaaaagaggaggttgatcagcccatacatcataccaaaaggagcatgtatttccacttttcagatgacaccttgcaatacctctaaagacatccattaatttgcaaatgtctctccaccagaatgagcccttcaagtttgtcagatgagggacagagttaccataacaggaggaccaaacaagattgacccacggcaaatccttcttattgtaaaacttttccaaaaacttgatgagcaaagcttgattntggatagaaaggtttagcactcccaggccaccttttctcttaagcttacaaaccttatcccaggctgccaaagattttntataggagttgacctca

SEQ ID NO: 7770 - DNA, 194 bp, Oryza sativa
  unsure (1)..(194): unsure at all n locations
gggtaatatgaaaacaagcagtcattatgaatgatctggtctgtttagacaattgtgaatacttatatgctttccatcagtactgaattacatgntcgaaactgacagtattttaaatctgtataaatgacaccagatgacttcctagagataaaagagtagtgaatgcgacatgtcagtgcttcttgcgtatg

SEQ ID NO: 7771 - DNA, 464 bp, Oryza sativa
  unsure (1)..(464): unsure at all n locations
tcaagtaatcaagacagctatctgaagatcctcatctgttcttattgcaatggacttagaatgcaaagaccttcattccccggccgtaagtggtgtgattgacacgcacatccttcctcgtgtgtggtaaattcgtgtaatcaaacataaagcttggaaaatgcccttttatcctcaagtgctttgaactgtaaattatataagctctatgatccttaagctaagcagttagtaaacgtggcaaaaaaaagtgtggaggtataccaaaagatgtaccaaaaagggtgaaataaggggaataaatgcatattttgggtcactgttttggaatcttgatcaacaaaaggatttgttcagttgtttcatctgggccaatatgcacgcaagtctcaaacgaggacaacacacaattttcaaggtacaagagcaaatatgtntatgaccagaggcatctcgattcatat

SEQ ID NO: 7772 - DNA, 405 bp, Oryza sativa
ctgtgtcactatttacagaacaatagaacgctacctcattcatttctccaatagaaggctctccaagatggctctcataccacgtgcaccagtatttctggctatagccttcttggctactattttaagtgcaccatccagaaagggtaacttaacctggaagaaaaaaacaaggatgacgaatacatattcccggaaaatagaaaaccctaagcctatcacctaaattcatgtgaactcactttgttcaagctaaacattttcctgtattgtctggaaagagaaatctttggttctgtaataacctgaatccacaaaaaacatttcgtttgctcccccgtgcagtcaaaaaaaaacataaaatatatcttctttggcctcaaattctttgtaagggaaaaaaaa

SEQ ID NO: 7773 - DNA, 440 bp, Oryza sativa
  unsure (1)..(440): unsure at all n locations
cattagaacataccttcgtttcacaaagtgagacactgtttatcttttactacgactntctagcacgtggcggaccattgatcttattaaaaacaattaagtcattaataattacaatttgcggcgcggaacacgagggagtaattaataatcaattgaaggcgcgagttgcaccagcgctaaccagtgaccatctttacccaaaaaaaaagtatagcgtaaccagctaccatcatttttaccaaaaaaacatcgttgcccttcttactacgtactgtatcctcatgacccatctaagtgtcacataaaattctcttacataatggcatcctcgttaccgatgtaaatctcaaataaaatattctatctatgattatattgcaccgacatattcgctgcagttaaatctgtacaatcagatctcacataattatattatg

SEQ ID NO: 7774 - DNA, 300 bp, Oryza sativa
cagaccggcaggtggcatgcgaggacatggcgatgcgctgcgaaaaaaatagttgttgagacgcttgttttgagagggtagcgtgagaagagaccaccgtggtgaaaactaccgttacttatgcacatgcgtgcatgtgctacatgaggcgtccacgtgttacggagcaacacggacaccttggcggggcgtcccgcacgcggtgtgtggcccgaacatgtatatgcgctgcaaaagatgcaacagagcattttgtaatgtaagatgtgagtcagatatgattatagtagatttgtatca

SEQ ID NO: 7775 - DNA, 203 bp, Oryza sativa
taacttagaaactcctagttcacagcatggccaccgccgtgcatatactttcttaataaattacttgcatatgcaagcagtttaattgttttcacatctctagcttagaacattctccattaatcactcctatactacttcttcaattacggctgcatctcatacaccgcatattcatgagcgtgcactcgctatgactcgca

SEQ ID NO: 7776 - DNA, 456 bp, Oryza sativa
  unsure (1)..(456): unsure at all n locations
tctcttgctgttccccataacttccgaactgagtattttctattgaccttgaaatttgaaagatcctcccgccatctggtgtacaactctggatattccttcttagcatccgctgcctccaagtatttactaaggtcattttgcgtaaatggacagtaagagtgaagagattgaaggcttgtacaagcaacaacataccattggtcatgccctctaagaagaatagatgagcctcttttaaagaatcaagaaatataagaggctcctcctttcccttccatataatttcggcagttgactgcgtataaagaacaacgtagtcaagcatttgtgttatttatgtaacaagtgatagattcatattatgattattgaattagaacctctgcccgtgagataagactatagaaacaaacgtcgaatntcatgttcgcaaaggcatcgcgacatttctct

SEQ ID NO: 7777 - DNA, 294 bp, Oryza sativa
  unsure (1)..(294): unsure at all n locations
tacctctctctcatacatgtcgctcactctcttcacagttttaatgaaaacatagaaatttgaganttaatccttgggaaatctcttacttcccacttcttctctgttagtctttatgggttgatcaagttataaaaaatatcatattcaccaaacaactatataaacaatcatatacattataactaattgttataatatgctaagttttctatcaaactaacagttgtagaccgaagttaaattatacaaacagctttgtcatgtatcacanggacatatttcagtctagcg

SEQ ID NO: 7778 - DNA, 465 bp, Oryza sativa
gggagacatgcatgtagcgagaaccagagataatacacgtgtgataccttaatagaggagatggaggagaggatcagaagctgggaggatggaacgttccaagctgggtaaggacctagtacttggccactttactcgggctttgctgcgtgtgtgcgtgcactgatgcaaagctctagctagtgtagtgttccagaatagaaggaacatgtgtgcgtgtaccgtagtatagtactatgcaaggctgcgactgctgctgtgctacttgcgatgctataataaggttatgttggggtacttggatacctctgtttcctaacgaggttacaacaattatttggtatttgcatctgaattaaagactctctagctagtctagtgtgctttattgccgggcacgcctaatgcccagcgatcactcgcccgtccccctactcccccttctctctccactcttcttactac

SEQ ID NO: 7779 - DNA, 251 bp, Oryza sativa
actgcttctaccaatgcagtccaacatattgacttatcaacactccttgattcacacgacctacaaactaaaatattatcatatattcttactcacctatacatcaacaagccaacataaacgttgacaataatatttaataaactactactatcggggtaatttacatgactaactgaatggaattttatacaatgttaaataattatgtctatacccctatcacatacacttttgggacttattatgta

SEQ ID NO: 7780 - DNA, 468 bp, Oryza sativa
  unsure (1)..(468): unsure at all n locations
tatctcacacgcacgtaaaacgatgcgactcattagtatatgatttatttagtattaagtattctttaaaaatggattaatatgattttttaagtaatttttttataaaaaaatacaccgtttaatagtttgggaagcgagcgcgtaaaaaatgagttagataagttaggaaagaagaggaaagaacacaaccatagcaaggccagcagttccaaatctaggtcgagatgtacaaacttatgcaggttctattcctacaagtatgtgatactcggaataaagaatttgtaaagaaaataatttgtaggatacaaatactatagaaaatctacctcttctgcactttgtaacaaaggatcggaacttacaaaatcgtatcanaattctttagaatagctcaatgcatttgaactttagaggaaagttatccaaccttatggaaaaatttattctagcgtatatctctta

SEQ ID NO: 7781 - DNA, 409 bp, Oryza sativa
  unsure (1)..(409): unsure at all n locations
tcaagctataacatgggttcctttctttctatcatggagaaactttgtttcttttggcataagaccaatcatagttggcaaacattaagtccgagtattggacaaatagatatgtaggatagaaccagacaaactgaccaagcacaagtgtggctataataaacaaaatatggtcacctaagagcactctttagttttacaagcaaacattgcattcagaggtccaagctacttttcagaaatgggaaaaaaaaggtacatgtaaattttaacagatgtttgtctagtacagacagccaagaaaagggcaagaaaggcaactgattaataacatgtggaatattcattgaanaacatcagattgcaaacctttgcccaaatggagatgtcattatcaacagaagcttta

SEQ ID NO: 7782 - DNA, 461 bp, Oryza sativa
ctgatgcttcgcgctggcccgccccgtccccgtggttggttggtttggtttggttacttgctactactcctactacgactactattccctccctggtttgctcggacgaacgagtcgtggactcgcgggttgggtctgcgcgtctgaccgcgtggcgttgctcacacaggcgagcgaaagcgagagacacaggcgggtgggggggcgacagatagggagagggagagggagagggagagagagacgccgccggtttcttccgcctgctcccgctcgttcttcctcggtgtgggtgggtgagccggtccacgaggcggcgtctgcgactgcggggcaacactgtcgcagcacatgggtcaggagacggggccggcgttggcggacgagaatattgtgcacaacgagactatagagcaagcgacgcctccttttcgtttgttctccgatccatcaagtgaact

SEQ ID NO: 7783 - DNA, 353 bp, Oryza sativa
taactgaactgtataaatactcatgatgcattgagagcgtgacatcgtgcaccagcctgctagcccgggatgacatcatggacgctacatactacggaagtgcttatcaaatgactttattcgtggcctctgtggacgtttccccatgtcactctttcacgacacactctcctgttccgtttttttcaatagtatacgctatacggctaaatctatcatgccttctgctggtggcgtgctaaatatacctctatagattagagctcgtatcttgatgaccgtggtgtggccccaatccagctgggcgaaactattgcttgtgatgcctaagtccctctttttctgtcttgttt

SEQ ID NO: 7784 - DNA, 462 bp, Oryza sativa
tggtcttcataaaccggctgtatgagaaccttcttaagtgatctaccaatatctcaggcaacctccataagtcaagctttttgctggcttgcttgtgctccgtgcatctcggacagtacctgctcagataagcaagaaaagtgatgcaagctcagacattgaccaaggtgctttctttatggaaaaaacagagcaatttgcaagtatcagtcaataagacagaaataatactaaccacatgtcatcagggcccagaggttcatccttcagaaaagcatctaagcatgaaaataaattgactgcttcttgccgatttttctttgacataaatccaggcttgaagaccacagaaagttcatccatgtacttaatgtcatatacttcatgttctctatcagaccagtccattaataacctcatggtcgacccacgaacaccgttagaatctgcatcaatatgctc

SEQ ID NO: 7785 - DNA, 455 bp, Oryza sativa
  unsure (1)..(455): unsure at all n locations
tgactactttgcaccttttaacaaaggattgatctatcttctatttattgatgagtcttttgatattaacaattcttaatttgaaattgctcaatatcttttgaaaagtgttgatatgtaaatttgggagatgaaagtcactttgattcaaaagtctggtgatatgtcttatttgagttttgaattctctttacactaaactgaaaactcataaaatgaatattagttacctcaagactgatttgaaatctactcctttggttccttcttcgagcttccattgatgcttcttcttcatcggttnttacgagttttgagtgccatgtatgatgatcaatttgagcaactaggtgaggaaaccttggttctgattactaacaagttctcttgagcttntaaaaattcgaagaacatgaagcgaaggtgactagttcggtgctttgagtgtggagttc

SEQ ID NO: 7786 - DNA, 236 bp, Oryza sativa
  unsure (1)..(236): unsure at all n locations
tagcacggctgcactgcaccgtctgtactctctagaaatacagctattctggtcacttntgtgtagtgcgagtgtgtgcgtactggttggctcaccttcatctactcttcaagtcagcatcttgcgtcctctcacccaagacataccttggagtaccctacttgtgggcatgctctcgctaagacataacgctaacttgtgttgtggctcgaggcaaaacatacatcttgcattgc

SEQ ID NO: 7787 - DNA, 453 bp, Oryza sativa
  unsure (1)..(453): unsure at all n locations
tcccggtttagctcgctcttatcttttcagctgcatatgttatcttctctatntttgtaagacgtggatctatatgtcaacaattgtcatttgtatatcctggctggtcctagacagggatttaatgcacattcagcttaaaaattctggttcgtgaatttatgggcgtgacagtaacctgcgcataagtcaaacaccaacatttatcacctgcttttcgtcgatcaaaccgctgcagtattctgtgaccagatcattcccttgttacatagaaagaacgaaagaccacaagaggaaagggctttggcttatgtgtatgagaaatctttgacaattccaatgccatccctctctcattctaacctgtgcatcatggtattccccactgcaagattgttgcgcgtgtgttctatgattacaaactgaacatctccatcttatagactggagctg

SEQ ID NO: 7788 - DNA, 435 bp, Oryza sativa
  unsure (1)..(435): unsure at all n locations
tattagcattttcacgctcatgacgacgaagactaatgatgcgtgctctgtaaaagctagcgcatcttgtgggtcttggaaaagacgcaaacttggcttgtaaagacatcatactcaacgtacacacgtcgaatctggtaggagcaggagcagagagccaaaccagcaaacatttgcttcgcacaacctgtagagatttcacagtatctccagttaaagctggccataaaaactgatattaacccaaatgcgtgttcatgaatgttatgtattgtggtgagaacggttagggtgtcgtantgactagtaactgactacgcgtaaattctgtacagttggtcccgattggaagatgctgctgaattagaatagagacagagtagttagcactgcaggaatgcatgcatgcagcgaacacacgaaaggcaggaagca

SEQ ID NO: 7789 - DNA, 467 bp, Oryza sativa
  unsure (1)..(467): unsure at all n locations
tatagttntgagaaaatttcatctatagcacacatagcattttacgttattttccagtcttacgaaaaagaacatgcaagttcaactacgtacgtgtattgtctgtaggagaactgtagaagaatatgttacctggcgaattataactggtctgctttgctgaatgctatcgcataaggaatcttgccttcttttgctcttcagctgacaaccaaaaaaagcaatgcacctacccttcacagccaatggctggctctatgatgggttggttatctttggatgaagataaaaaatgaaccgagtaagtgatcagttaccactcactgagcagcatacagtggaatcaaaagattttgttctcaaaaagacttgctatcaagaagggcagatttctgaaatgcccgtatatgtttaatttcgatgttcctcttaagacatcatgtcctgaatagacaatcaagttcatt

SEQ ID NO: 7790 - DNA, 162 bp, Oryza sativa
  unsure (1)..(162): unsure at all n locations
actgcgctcactgtatttcacatatgtcatttatanacacctctgtttctaactatcttatttacatcaaggatgaatggtgctcagcattgaagagcctgctattgtataactgctgatatgacctggcagaagaccttgtcattgtccttatagtgcaat

SEQ ID NO: 7791 - DNA, 395 bp, Oryza sativa
  unsure (1)..(395): unsure at all n locations
ttactccacatgagatttattgcgacgaatgcatgctttattatttttgtcagctgtttacgagaagttaccttgttctacggatgatgcacattaatatagaacaaatgctcttgatttatactaccattgtcccaaaataagtataaccgtgggtttctgtgtccaacgattgaccgtctgtcttatntgaagagattaagaaaaaattagtcacacttaatactatacatgttttatcatctaataataacaaagatactaatcataaaaaaaattttcaaataagacggacggtcaaacattggacatgaacagtgcaaaactacacttattttgggataaaggtagtattactttgatagcagtgttagagctgcttccattgtatattc

SEQ ID NO: 7792 - DNA, 153 bp, Oryza sativa
gagatgacgggagggaataagagtgataccatgtgggctattgtggacccatgcggtgcttcgaaccatctgagtggagacttcctgagactcaggtgctgactgctggtgctcagacttttcgggggggtcaaatggccatgctgccctgac

SEQ ID NO: 7793 - DNA, 80 bp, Oryza sativa
  unsure (1)..(80): unsure at all n locations
caacanatattattttagatgattactaaattataatactttactattatgctcaattgaaacaactattctcgttattt

SEQ ID NO: 7794 - DNA, 264 bp, Oryza sativa
gtgtgcgcctggggcacggctgctactactagtgcaactacgcccctccatacgcgcaatatgggcattaacatcttcccctatggccctccagacaatgtgctgactcagagctcctggagaccagcagtctttatctgccctgctcggtggcagcatccagcgtggtcagagaacctcaaggggagacgactaatgatcaactgtacatgtagcgatcaaatgagattgcgttgtatgagatgctagactcaacgtaaaggg

SEQ ID NO: 7795 - DNA, 447 bp, Oryza sativa
  unsure (1)..(447): unsure at all n locations
tgagtgtgtgtgatatttgagctgccactacctagttgtttatatgagcgtgcatatttntgagaggttcttgtttgctactaaccatggcaggattgcgtaagggaatacgagaacatcgacttctacaccttcgacgagatatgacgacttctccacgtgatgcatatgaggtacatgactataattttgaacaagttgcatctaagttaccattctttgatgggaaatatgattctattacatacattgattgggagctagcagtagacaatgaatttgatatatatgatttttctgatgctcaaatgattaaagctgctagtaataagtttacctcttctgcattattttggtggacttatgttagtaataaacctgaaacttgggatgaattgaaaaccatgataagaaaacgctttatgacatcttattacaaatgtactc

SEQ ID NO: 7796 - DNA, 414 bp, Oryza sativa
  unsure (1)..(414): unsure at all n locations
ctgcgagtctaagactatcggnttggctaagaagtcatctttcttaattctaagggtaacttccgggcatatttgagttgcccttatattgctcctacgggaatgtactatcattggtacacgtaaattttgggttttccaaccatttcttttcacaaaagcttgtgatatgaaagaatgggaagctcccgaatcaaacagaactattgcgggtactgagttgacagagaacatacccatcacaacgtctggagcatcctgagcggtttcagcttgaatgtggttcatccggcctcgaccaaagttgttggaagcacgagaaccttgtccacttgcctgagagctatgacgagactgagctgccgctggagtaagagttctggcagtgctgccattagcatgccctgagctggt

SEQ ID NO: 7797 - DNA, 395 bp, Oryza sativa
  unsure (1)..(395): unsure at all n locations
actcagcttaccaatatctggctataacataaaattatttattcacagaattgcaagattgaccaaaaccaagatttcgcatttcatcaaagattacaacaagttctactgcgtgcagatnttttgcattgaagaataaaagactttaccttgacatttgcaggattctcaaactgctgcagcatgaacgcgctatgatggttctcatacagctcggcggccttcctcaccgtgccttccataccttttgttgggtcggtaaggacgagttttgcgccgaaggccctcatggtcaccctcctctcaaagctggtgtatgaaggcattgtgagtatgagttcataccctttaagagcagccatgaatgccaggccaatacccatgttccctgatgt

SEQ ID NO: 7798 - DNA, 288 bp, Oryza sativa
  unsure (1)..(288): unsure at all n locations
cctcacgatattcaagcacacaatataatgatttggtccaacgtgaatgttaactgacaacaatccgagtatattgacctgattgattgaagactcggtgggatctcttatgggnncgctttccgatcatatattaaatttatctcgttcggcgattagatagtttctcaactcagctattctcaaactttctagctcattacttgagtacggatttgtcgtctgaaatggctgtatgccataaccgagcctttttaattatcggtttttttggccaatgggtaaaaa

SEQ ID NO: 7799 - DNA, 109 bp, Oryza sativa
ctttcggccttaaatactcagcttctgggttgccttttccgcgtgtggcgcaccctctttctttttagagatccattcgaagaacacggcggctaattgaagtaagaag

SEQ ID NO: 7800 - DNA, 435 bp, Oryza sativa
tcggatgtgcatcgactacaccgaccttaacaaggcatgttcttatgatccttaccccctgcctcgcatagatcagattgtcgactccactgcggagtgcgaccttttgtgttttctagatgcatactctggttaccatcagattcgcatggctagggaggatgaggaaaaaactgcgttcattacccccataggaacctattgttatacgacaatgcccttcgggttaaagaatgcaggtcctacttttcaacgtactacttgaatttctttgggtaaccaattatgacgtaatgttgaggcttatgtcgatgacttggttgtaaagacgcgcaaccaggaaatgttactctcagatctagcggaaacttttgagagtctccgctccgcccgcataaaactaaaccccgataagtgtgtgttcggtatacctgc

SEQ ID NO: 7801 - DNA, 398 bp, Oryza sativa
  unsure (1)..(398): unsure at all n locations
tcttgcgtcttcttgagtntgacatgagtgacactgtctttatcagtaggtgactaacatcggaggagtagcttgagtgtgtatatctggtggaggatctgggatgaacagccgctagctgctcggctcgagtacgtactaccaactgtactcgccgtgtggagtatctttgatagtatctgacgcctctctattcttcctctcgccgtgtccggcgctggatctctgatgatctgattgaaccgggcacacagagtacacagacagataggcatgcagtaatggctactgctacctccctaacggccattgacatatggagatcgattcatcgatcgattcagcattactggtactactgggagtagtgttcttggagttagagccggctatgctcg

SEQ ID NO: 7802 - DNA, 461 bp, Oryza sativa
  unsure (1)..(461): unsure at all n locations
tcccggnttagctcgcttttatcttttcggctgcatttgttatctttntctattttgtaagacgtggatctatatgtcaacaattgtcatttgtatatcctggctggtcctagacagggatttaatgcacattcagcttaaaaattctggttcgtgaatttatgggcgtgacagtaacctgngcataagtcaaacaccaacatttatcacctgcttttcgttgatcaaaccgctgcagtattctgtgaccagatcattcccttgttacatagaaagaaggaaagaccaaaagaggaaagggctttggcttaagtgtatgagaaatctttgacaattccaatgccatccctctctcattctaacctgtgcatcatggtattccccactgcaagaatgttgcgcgtgtgttctatgattacaaactgaacatcccatctttagagactggagctggacaaagc

SEQ ID NO: 7803 - DNA, 453 bp, Oryza sativa
tctgatgtttacgcgccacatggaaattattaaccaccagtgtgctatggctagctagctccgcccgtttgtgtatgtgttgtgcacagtgttcatgcagatgaggcgcagctacccacgcgaggtaagcaggggcgtatggggaagactccaaacgacaccaacagcagtagctcggtggacgaggcagggagccgctcagatgtgtatcagctacagtcactgcagctggggccccacgccctcccccagatcaacgtactgcctggactttattttttttttcctcctgctccatccctaccgagaaaaatatgggccccggctaaagcgaccggctatcgagtgactgcattgtggagcccggtaggggttttgctgattatcttttgcagctctttaatagaaacacgacgtgataaccttaaacacggtattgtgtgtgttttcttt

SEQ ID NO: 7804 - DNA, 238 bp, Oryza sativa
  unsure (1)..(238): unsure at all n locations
actcactcgcctgcttgaactcagctgtctttttctgngacacagggaatgtgtaaaaacctatgctgttgtagaactactatgaagaccgatgactcactctactcagacttattatcacatccattaacttttgtttgccgtgctctgagagacaaacactgaaaagcacatgactgcacgacttttatatgaatcagttaacgctctatttggaaattgcggttaaaaccttctg

SEQ ID NO: 7805 - DNA, 456 bp, Oryza sativa
taccttcattgcccgcctttcttttaacaaaagaagaggtggatttttgttcttcatgtaaactatcttttgagcaaagtaaaactctggagctcgtggttcaatattgtgcttcttgcaaaacggaacccacttcctagcaaattctgcagtttctgacagagcctcaaaagttaacatagctgaaccatcgtcagaaacatagcatgacactctgtcaacagggtaatccacagccagaatggacaaaacagtgtttgctgtgatcagaggaggttcctttagtggatccaccgtactgacaaagacatcaatgggagcaagctgtgatggctctccctccctatcatatctgcaacattagattggacgcctcatgacacagaatatcaatgtaagagagtttcagtgccacgaccctgaaaaaatgtatatcaagtatctcatcttacctca

SEQ ID NO: 7806 - DNA, 382 bp, Oryza sativa
tgggcaaggcttcgtaagaagagaagagcctatgctagaagcatctttttcattatatacgacccagttggagcaaatggagccactccagaatacattcaaacacagggcgaatgactcctttcatgataagaaccaacattactccgctagaggtcgctgaagcgaaatcgccctacgacataactcccggattagacagccgcacattgctgactgctgataagaacaaaggcagctgctgcactagtccggtctgccaaaacatccatggcgcagataaacactgtcgggcacaaagaggtatgcaatgacaaggacaagccagctaacatactttcacctctcttgatcttccagaaatatacttacggagcaacaa

SEQ ID NO: 7807 - DNA, 463 bp, Oryza sativa
ttatcgatcttagacgtaaaggcttgttcggtttggaggttattgtatgatgattgagaccgaataactctacaccgcaatagtgtgaaataaatcccctccaattcctccctcatggggattaaccgaacaaaactttaatgaacaactattatgagaaacaccttcggcctctacaccagaagagtgcacacatccaacaggaatccacgatagcagaaaaaaacttcaagagccctctaaccatagcctaaaacgccacctatatgccgggtagaaaactccatggtcactagcttcaattattgacaagccccagtgatagtactccataaatagatcttttagaagatagcccatgaacggagccaatctaacttaggccctgtttgattcagcttaagaatattataatctagcttattaggaagtagctgaaacaaacaagtagattattatagca

SEQ ID NO: 7808 - DNA, 279 bp, Oryza sativa
  unsure (1)..(279): unsure at all n locations
tggctgtgaagtgctgccagcanagatactagcttcaagcctttgttttattttaacactcaataggcgggaacacggacaataggtggaagtctggctgttaacaactcgataaatgaggacgcacggacttttgctgcttaaatatcatcagatgctactcggactggtgaataacactgctgctaaaaccgatgcctaaatagctattggcgccgatctgagacggatacaggcgatgatgctgctggtcgtaggaaatacccctactgctatgtg

SEQ ID NO: 7809 - DNA, 253 bp, Oryza sativa
tgtggactgtcgagggctacaaacacagcctaactatactgcatgctggatgggatgaaaagctgtgatctgactaaatgatgctgaacacatatatcacatcatattacagtgctagacttgttactacgccattactctaatgagttctgttgtgaggaatctatgacacacgttgtatgtaaattacgctgagttaccatcaatgcatcatcacggactgatatgtcggtatgttctcactcctaacttc

SEQ ID NO: 7810 - DNA, 370 bp, Oryza sativa
  unsure (1)..(370): unsure at all n locations
aataaagggncaatcctgtctttcattcaatcacttatttggcatgaacagggaaaatggatggaagtgggtattttacaaacttgataaatgaagagggtcgctcttttgctgcttaaataactgctgtcgctgcttgtactggtgaatgctgctgctgctgaaatttctgcctaaataactcttgctgctgctgtgtgatggatgctgctgttgctgctgctggaggtggtgaaagctgctgctgctgtgtgatgatggatgctgctgctggaggagaaagctcctgctgctgctgctgatatgatgcaagaattcgagctgctgctgctgctcctggcatatacgcagctggaatgttgccgcatat

SEQ ID NO: 7811 - DNA, 185 bp, Oryza sativa
gtggcagatactttctccaactcattagaatgcgtttactcattgagaattaatatatggcacggcattatccagaattcaaacggaatgtatgacatcttttgggactgccgcacctacttatctctagcattgttggacatcactatgtgtctagattttaacacaatatatgtatcttttgt

SEQ ID NO: 7812 - DNA, 459 bp, Oryza sativa
  unsure (1)..(459): unsure at all n locations
tgagtgcgtcatcggtgaaagcgctgttagcgccggcgactgtgacaggatcaagctgataagcagtatcagccatggggtgaacgtcgatggttgacggcgaaacaaacgagaccgctcagctaggggtagcgctagcgcgtcaccggcagcaaccgcgggtcccacctgctgcattctttgctgcaccccgtttgcgacacgaagcttttcacatgccttcacatcctgcacaacagctgcctgcttcgatttttcaagcacaacatcaccaattttcacaccataggcagcctctatgccacccacttctgcaacagaacggctcaagacaacgccactggaaacaccttcacccgcagttgactctacacaatgatctctatgnttaactggcatccatactttacttcttttcggtgaactgatttccttctcctgtcgcggtctagaacttct

SEQ ID NO: 7813 - DNA, 409 bp, Oryza sativa
  unsure (1)..(409): unsure at all n locations
aatcactaagtgatttatttctttctaagtttgggtcgaaaagagaaacttgcgtctcaaatcgacttaagagatgcttttcaacagctcaattggaaatgtaccgacatcccgggtcagatcattacttctcggctcctatagccattccacttgattaatcggctcccagagcctttttcattttctcggactcccagagtccagctgtccagcagcacaacaattcgcttgcactcgggaagcctagtctatgatgcccacagacatcccgaatcacacagattcgtttctgaccactcatgtcatccatctgccacataggctgattctggttacgattcccataccacaacaacttttcacatagcacaggcgaacanatctacgcaacgggaaccacctcaca

SEQ ID NO: 7814 - DNA, 436 bp, Oryza sativa
cgttcattacgctgaggtttatatgaatgcgaagaagctctatttattgagggtcttatgagggcttaacaaagaaattcatgacatgcttgattgttaaagatatacatctctttctcattagttacaacctggttgccctgctgaaactacgatagaggatgatatgcaaaagaaacacacattgtctttggctgcaatgactaactatttgcaggaagagcgttattactaaaaggagagagacatgaaagagccacctattccattgttcacactctacttctagacacctccatcatctatagaagacatccaaggtgaactaaatggtactagctttaatcaacgtgagtgcattgtatccaagtaaattgtccctgttcatgaaaagtagatcaccgtagtggaccaaatctggaattctttgcacagt

SEQ ID NO: 7815 - DNA, 195 bp, Oryza sativa
tggccgcggacgtctatagccgcagactccaccgagatatctttgtgtttagctgggggcctatctgctgatactatatatgctcgatagtacggtactcgtgatactggtgggtgaccacgtggatcaccactgttgctgggtgctcgatgacttcttgcacgtattacaactatttcactggctgagctgatg

SEQ ID NO: 7816 - DNA, 436 bp, Oryza sativa
  unsure (1)..(436): unsure at all n locations
tcgcagaaccctcatcgacggcggcagtgcactcaatatcctcttcgccaagaccttggatgatatgcagattcctcgctccgagctaaaaccaagcaatgcgccttttcacggagtaattccaggattatccgcaactccactcggccagatcaccctcccggtcacttttggcactcgggaaaacttccgcacagagaatatcagctttgaagtcgccgatttcgagacaacataccatgccatactcggacgcccggcgttagccaagtttatggccgtcccgcactacacttacatgatgacgaagatgcctggtccccgaggagtcctatccctacggagcgacatcaagcaagccgtcacatgcgacaaggagagttgcgacatggcccanacccgcgagatggcgtcagcccgagaggatatccgactg

SEQ ID NO: 7817 - DNA, 456 bp, Oryza sativa
  unsure (1)..(456): unsure at all n locations
tgtaaaccgaaatattctgctcactgcccagagcccagtattagttaatgaagggtacatgcgtcttttggcaacatccttattttggccaaacagagctcagtcccatataatgtgggacagagggagtattttctccatttccaactatagttttaacaaccatatcaaagagggagtggacattctttggcacattaatagataaaccaacccatggtctattacaatcagttttttggagccataacaacctcaagcgtaatgcccatcccatcttttcaaggttaagaataccgagacctccataagacagcggccgacacacatgatcccaagagaccaaacaatttcctccattagcgttatctcttcccttccaaagaaaaccacgacgccttntatcgatggccttaaccacccacttangcaggcctaaagccatcattgcataaa

SEQ ID NO: 7818 - DNA, 326 bp, Oryza sativa
  unsure (1)..(326): unsure at all n locations
atagtctcaccaacaaactgccaccatcatgttgtattgcttacgtctgcacataccaatatatatcttaatctcactnactcttatacgaggagtanatgattccatatcaactattatgtgtatatgtagtgcaattaaacatgctangggagtatacgtcacatctatcatgacacatgtnggtgctctctatatgtggtggtcatagagtgagggcgtcatgtgacgctgngtctcctcttaataataataataatggattacacaacgcatatgatttgtctcggcgtctttttgagttattacctgactagtgtgttaca

SEQ ID NO: 7819 - DNA, 463 bp, Oryza sativa
tcagaaaaagtcttggaactgtgcaaagtcatctagtaaggagctttttaactataatagagcaaagctagtacaagatacccctcaaggagctaaagacatgattaccactgcacctgaacattggagcagggcattcttccagctagggtcaaattgtgattccgttgataacaacatgtgtgagtctttcaacaactctatcatggattcaaggttctttccagtcatctctatgaatgaggccataagatgcaaagttatggttagaattgctgacaataggacaaaggcagataagtggcaaggtacaatatgcccaaacatattcaagaagctgaaacttaacattgagagatctggccagtgttatgtgttgtggaatggacaacatggatttgaggttcaagagaaagagaagaagaagtacacagtcaacttatgacagaatacatgcagccgc

SEQ ID NO: 7820 - DNA, 117 bp, Oryza sativa
cgcggactggtggaattccccgctctgtaccgacggtaaatctttatgctttctgattatactcgtattcccctaaaagacaagtgtgttatatgactgcaaacaaagctctccctg

SEQ ID NO: 7821 - DNA, 453 bp, Oryza sativa
  unsure (1)..(453): unsure at all n locations
tagaaaaacgaaatgtggcgttgttagctggctcgtgcatggagaactgtatcagatccaccgcacatgatagaagaccccgtcgctgacaccgtggccgctcgtcgcctccgccgccgatgacgcccatctccccgtcgcttccgccttctccaacaacacaacaacataccccctcgccttcatcgtcgatccgagccgcatccgctccgctcacaacgctccgtccctgcatccttgtggccgtagcctggtggacgcagagaaggaggagaggtgggagaagcatgaacgaaggggagcggcatggaatanggagggaggtgcgggagagaggggcgaancatggagggagactggagggggaaatcagtagtgcctcgcttccggagacgaacagaatcgatgggggatttagatctgtgcgaactcgcgagagaggagcgagagaga

SEQ ID NO: 7822 - DNA, 402 bp, Oryza sativa
tcaggatgagactctctgaatgatggaccctgtctaaacgctttatattgtttgtcccttctgcgaagcggcgcgcgcgggtcctgatctcacagttccccgagggtgccgcgggtctccgtatgagtggctgcatctacgccaacgtcaacctcgagttccggggcctcccgctgacccattgtatccacgccgagcagtacctcgtcagcaacgctaccgccgtggggaagtcgaagctttgcgccatcgccatctcccacatgccctgcggccactgccgccagttactccaagagatccgcggcgctggtgggatacagatcattgtcacctcctccgacgccaagtggcgcacggtgtcgtacctcctcccgcgtccctttgggccccatgatctcc

SEQ ID NO: 7823 - DNA, 255 bp, Oryza sativa
tgacaataacattagattgtataagcgatactatttacaaactatgttttctatagccgatcagctgtaaagtctgaagtactaatagcacgcttgccgatacgaccgatttactgataggcagtgatacactaactatgaatggtgagtctgtgatcaacattaaagcctcaactagtgatttttttaacacaataatctcttcgagaatacaattctgccttacatgatggaaaaaatgcagggaagttctta

SEQ ID NO: 7824 - DNA, 445 bp, Oryza sativa
  unsure (1)..(445): unsure at all n locations
tgatccccanagagtggctagttttttccgctatacagctggtttttacaagaatcttgtaggagactctctaggcaatcatgatgagttntgtgttcaagtgcttcatgagtttgctcaaacctttgacttccaggagatgaaccttgatacagctctgagactatttttggagacatttcgtctgcctggagaatctcagaagatacagagggttcttgaggctttctcagacagatactatgagcagtccccacaggctttcgcaaacaaggacactgctttagtgcttgcttactcaattataatgctgaacactgatcagcataacatgcaagtaaagaagaaaatgactgatgaggacttcatcaagaacaacaggaacataaatgggggtagtgaccttccgcgtgagatgctgtctgaactataccactccatatgc

SEQ ID NO: 7825 - DNA, 200 bp, Oryza sativa
tcgtactgtacttccggtgattttattgaactggcgagcacatgcgtggcctgtgctgcggatagctcctaaattgtaatcgggacactgcgattaagtttgcttgtgtctatgaaagaagtaaagcggatgggttgatctctcttgccgatctattaaaaatttgaatagttctgtaatatttgtatcatcagcgactt

SEQ ID NO: 7826 - DNA, 453 bp, Oryza sativa
tgtgcacactcaagtggtatcagagccacactcaagtggtattatatccaaacccataatctctggtgttgggccaacagcggcaacatgatgtggcacgagtactttctacatatggtgtgatccctcttggctattggtaatttctatttcagtttttatgtaatcaagtgtcaaaagaaacaatagctagttaggggttcaaattaagatacattactccaaatacataaatgaatattcggtacttgcgaattccattaccaatttgctgtaaaggtaactacacaatttctatttatcatgaaaaatacagatctatttaatttccctatgcaaatatagtttgaaccatacatacctatataccaaagttcggtaattcagtgatgcaaccttacgatgatactctatgccgtttacgatatcctcatcataaggtagatccccttg

SEQ ID NO: 7827 - DNA, 265 bp, Oryza sativa
  unsure (1)..(265): unsure at all n locations
actcagcttgatgacatgctttgccgacctcgacacatgggcacgatatgctgttcacaaggggcccataccaacaacaagttatgacccagaccatagtgtgccgngaagcccagcggtacgcctacgacaccaggcctagggaataacttgtctgtcaacattatagatgccctgattagataaatactcaacaataggtgtcccataccaaccatgtggttgcagctatatatgcgtggatataataccgacggaatgggtc

SEQ ID NO: 7828 - DNA, 318 bp, Oryza sativa
  unsure (1)..(318): unsure at all n locations
agtggacgtgtgctgatcagnaaacatagtacagcttaccctggtgtaccccgataaagatgtattaacggagtctgtagttgctggaaaacgaccacagcttaaacagagctaggagttggggccgcatgcttgtctaatttgtgccttgctagcatcttaggctgtgtgctgagatctagctggcctgatctcattgtcgtggtagcttagattactcggtggtgttgtgtgacagttacagttcctctcatatttctctaattaactgtgtattgtaaagatttgacccgttttgtttaaaatggagcacaatct

SEQ ID NO: 7829 - DNA, 467 bp, Oryza sativa
ctcagcttggagataccttgaacattactgtgcagaatatatgtgttctgttctttgccctccgtgtatacatttagtccagaatgcatattgaaccttttcaatatggtccggattaaagcactggtaactatcataccttccatttttgctccaaacaagatgcattcacaacataatcgctccatgttgattaggaactcgagcatgtcagcaaaacagagtggactgtgggtagcatatcttatgcatgcatgtttattcaagttaactaatatgcttacacaggtttgtatgcatttgtgcagaagctactacgaagagcaaacttgcgtccttgaatgagaagctggacatcctatagcggaaactggaggtgcttgaggttcaagtgagcagcgcaacaaccaatccatccgttttcaactagtaagtgcagttaaaggctgcttgtctgcacataagta

SEQ ID NO: 7830 - DNA, 219 bp, Oryza sativa
atgcctgacctgatcacacttgaagatgtcccttttgcttcacaattatatagatttctgagggttagtgcaccaacctttctttgatgtatttctggccgtgggactggcagtgccttaacaaagatgatcttgctttcggactgcgtaaacgatgagagccgtgaaggcgtgataaaacctacggatggtctattcgagacttgattcacgcagtga

SEQ ID NO: 7831 - DNA, 229 bp, Oryza sativa
tcacgcattacttataagagatacttgcttatgctttattaaatattagtcactggctgagatattgtgagacctctagaatcgctatcatggtaatcgtgatatgccaacgtgatagaaagcacgatttgcgtggctatgccaactctatataggttacatgaactgcgtgaataaactattgactataacgtgcatacaatatgatgtggtgtgataaacgatgacg

SEQ ID NO: 7832 - DNA, 440 bp, Oryza sativa
  unsure (1)..(440): unsure at all n locations
tgaagctcgacttgactttcgaacaggcatgacgctggttgtttgttcttcaagnttgacaactaaaagaattggaggggcagggaggagaaatttaaaaaccatttcgcaaagaaatgccgaaaggcaagaggagacactttgcaaatagggttttcaaaaaacttgtccttaaggattgaccatttggctcaacctataatcaaattggctctgataccactttgtcacgcccagaaatttagcccaaatttccagactattttgtgtattaaatccctgtccaggaccagccagggtacacaaaacgacaagtaatatacagttccaaacgtaaataaaacgtagaatacttacagaagaggcacttagtcctcacaccgaaacaaaagcagcagcagcggaaaaaagcgatcctagcgnggcatcagctccactcc

SEQ ID NO: 7833 - DNA, 428 bp, Oryza sativa
  unsure (1)..(428): unsure at all n locations
ttccatagagtccaagaacgccgaattccgagacccgtgttttagatatcgccgntttactaacggtcgggtgagctgaaaagtgacctgcggtctgaccgtgggccttatgccggtctgaccggacctgttagccggtctgaccggcgtggtaaggccggtctgaccgaccccactggtctgttgcactggtctggtttttggtggcgatacagagccgtggacggtctgaccggctactacactacggttagaccggccaggttgagtgggctcaatgattgcccttgtacggctagatttctatctgttacaaagtattccggtctgaccggacactctatggcggtctgaccggagggcacagatttggggattttgactcctacgcgtacgttttggtgttaggggtatatatacacattcct

SEQ ID NO: 7834 - DNA, 246 bp, Oryza sativa
  unsure (1)..(246): unsure at all n locations
gattgctctatcagagcatggtgagacgcattattcaacttatgctggacgtgtgattaaattatgctcactgcgcagcgatttagagaggatgtagatcagtgctgcatggctgtcacttatcactgccacaaccagtaaacaaacactcgtcttcggagaaaccaaaggagacgcacactacgctgcatcgccgcgcgtgatcgctactncagttatctctcctcattctacttactttacctg

SEQ ID NO: 7835 - DNA, 465 bp, Oryza sativa
  unsure (1)..(465): unsure at all n locations
actcagcttactgtttgcaccttntagagcattgtccaactcctataaagtttagtaactgcggtataaaaggattttaaggtattgggcacttgatcacgcgcactttggcctaagcaaaaagtgcctaagtccctaaaagaacgtgacaggccacacctgaaaatatgggctgcagacatattaagcctaggccaaaaaatatgccttcgacaccctttaaaggatgacgcatgtgacatgctcccgagtaacaaatcttctgggtaatatagaccaagtgtagctcatatgaatagcttctgatctgaatgactatcccttatgggatactccaaaataaatataataattgaatcccgactggcgcaagtattcagttgatagcctttacggagaataataattggtccagtctttgagcatagaagatagactcatgactatgaatccatgtggaatgta

SEQ ID NO: 7836 - DNA, 471 bp, Oryza sativa
tgagggtcggcacatcataacggaagtggaagaagatggacgttctattgccccggccgaagccgccaagaactatgtacgtcacagcgggtgggttgtgcgggataacgtgcctgtcagtacggtgtactggcgaagaacaagggcacgcggagatcatgagagctttatcccagattcggagaaagagatgttgtggaccacaatgctcgagacattcaccctttctgcgggtacagaggacaaagtgaaaaggtggactctgaagaaaatggcagaacagtttcagagcttcaagggagatctgtaccagaagtatatactgaaggggcagacaccgaacttcgacacattcccaaagctaagggatcactgggacgagttcgttgcatataagacaggtgaacaagggaaggcgatgatggaaagaaacaaagaaaatgcagccaagaagaagtccatcaccacttg

SEQ ID NO: 7837 - DNA, 463 bp, Oryza sativa
  unsure (1)..(463): unsure at all n locations
tggtgcgtatagcaaattcgcctataggagaaatccgtctgttctatacagacctctcggctgatactcctatacttttcctcggtgcgcgtgcgctgcagtagtactcctctgcttcgattgcttgcgcggcttttctcctctgcacgaggacaagaaacactgagtcggactgggaatcgacgagacgacgggagccgccgccaccgccgataagatcgatttcttcgatcgagaaacaatcgccggtggccgggaatagtaaaacgatctccaatgctctgataccacttgttatgaaaatagatgcacaacggagacacaaattnttacgtggaaaacccttgcgggaaaaaaccacgggcgccgaccggcaatgatcactatagaggagatgattacaaacgtatgggaatcacaataggaacgtcaccccttcccgtacagcttacaagagtatata

SEQ ID NO: 7838 - DNA, 464 bp, Oryza sativa
  unsure (1)..(464): unsure at all n locations
taacggtgtagatcacccgacgaatatctttctcacctgctatgtgtgccgcntgatgcaaattcgaacccgacagcaacaatgccgccgatgacaacacgaacagtcgaacacgacgatgatggtgatgaagaaaagggcccatgttgtacaaaaagtttctgcagcgtgtgccggctagtaaatctatagtactagtactagtactaccttttactgcctgcaacgaaaggatactcgacaaagaagactatgcgaatagcaggcggctgcctttgtttcctccgtcagccagccgggcatcgctaatgctaatgctaatgcagtcttgtcaagtggcttntgagggtttgctaaaaagatactgagcttccgagagatgacacgattgatcagagatagaagaacgatgcggagagtgagacttgagagatagctcgaggagttggagtacgcccaatgag

SEQ ID NO: 7839 - DNA, 253 bp, Oryza sativa
  unsure (1)..(253): unsure at all n locations
ataggaagaagagggagctacctgatcttaaggaatgatgggggtactaccgacanggggtngattgtggtatggaccgaccgcctgcatgcgttaacaaaaaaaagccaagctcactgagtggaaggaagctccgattaaggcgtcacccgccgaagagagccgtagagacgggaagaaagtggggtgggaacacctcaccactgttggctagatagaggagactagggagaagaggttggtcaggggcctc

SEQ ID NO: 7840 - DNA, 425 bp, Oryza sativa
tatagatgcgaacctacaataacataagagaactgaatttttatattctgtcagcattcaataaccaaccaattggactgatctgtaaaataaagaactgatctaaccagaccacttgttgtgccaacagccaatgtcatgtttaatgagcaaaaagcaagtgatgatacagcggaatattctccatccatatttacaccaaccacctgtggtaaatagtaataacttgcatgagctaacatgttagttatttgtcaacagggaacaacacaagcaataacacagcacaactgaccttttcatccaagacaaacattggcgtcagaactggaaagggtgcatcccatattctcacagaactatcttgataccctgcaatgtatattctttccaccgcgtaattctcgttcattgacatttcacta

SEQ ID NO: 7841 - DNA, 400 bp, Oryza sativa
  unsure (1)..(400): unsure at all n locations
gcatggcttgcaagataagaccacacagaataatacattatgcacaaaaaaactacatggagccctctgaaagactgaagaactgtggtgatgatgaaaaacaaaaactgcctgcctgcacatctttctcagcatatgaaaaatggaatatctatcatcagctggccagagagacaagtttgacctgaagctcgccatccttaaaaatactaataaaaaaagatcacgtttggcatagagctccaggacaatcactttattagatgaagcaactgaacatgtgattcacctgcttcatgtcaaaaagggtcctgagtttatgacaccactacttctataacctatcacatnttaactaaactactctataaggccaataaatatctaggatcacctcctg

SEQ ID NO: 7842 - DNA, 219 bp, Oryza sativa
ctgtgctacaggagtctgtaatattttcataagctagccctgcagagcatttgcgtatgtatccagcagctgtggttctgatgatagtctgaattcaacgggtgcgcggacttgttgactgtactgtgttgttactatgcttctcaacctttcagcaataggctcagtgaaaatcgcttgtgcgctcagccaacgcaacatgcctcgcttggcacgctt

SEQ ID NO: 7843 - DNA, 445 bp, Oryza sativa
  unsure (1)..(445): unsure at all n locations
tgccaaccgctactgggtccgccttcttccttaagacgagatgaccaggcatcagctccgtgggtcgaacttttttgttgtaagttgccgaagtgcttgtggcgtatttgtacatgtgctcaagcgcctcgactcttactccttccaagagttcgagcgatacttcgcgtccttcttcgcccccagagaacatcacccttggtgagttagcccctagctctgctggggtcattgtctcatcgccataaagaagcataaacggactaaacttggttggtcttgtgggggtcgtccgaaaggcccagagcaccgatagcaattcctctggccatttgcctttcactgcctcgagtctcntctttagtgcttctaggatcttgccatttgtacgttcggccgccccatttgactgcgggtgtgcgaccgacgcgaacctaatttccag

SEQ ID NO: 7844 - DNA, 455 bp, Oryza sativa
tgacctacactcagatcagctgatcaatctgcccgacgcgtttggtgaactctccaacctaattgatcttgacctgcatgccaaccagcttaagtctcttccttcatcatttggaaatctcacgagcctagcaaaccttgacctgagctcaaatatgttgaaggctcttccagattgtttaggaaaattggcaaacttgagaagattaattgttgagacaaatgagcttgaggagctaccctatactattggatcttgcacatctcttgtggagcttaagttggatttcaatcagttaaaagcccttccagaggccattgggaagttggagaagctggaaatactgacattgcactataacagaatcaaaggattgcctacaacagtgggttcactctccagatagagagagctggatgtcagttctaatgaggttgaagtaatccctgagaaca

SEQ ID NO: 7845 - DNA, 198 bp, Oryza sativa
taatagtgccattaaatagatctcaattttacgggaatacctggagtggaacggagtcaatcggatgagcggttgagaagatatgaattcggaagtttatttgaatttctggaataagatgaatggtttatggaatttatagaaataatattctcaagaattatcgacagtcacttacgtgcgggaccaaaagaaatg

SEQ ID NO: 7846 - DNA, 467 bp, Oryza sativa
gaaatcagtttgcaaggattttggcttatattatctggtgacaatgtttcggaagaaataaaccaaaagaagagctgaatatgacttctaaaataagctaattttgtacgaaatatgacataccataatgctatgaatgtgaacggcattctatactaaattaacttattttaaaacgaaagtagtaattaataaatggtggagcatccggctagaatggaacacgaagggttttccggattgctatcagaagggcaattcaatcttttcacaaaattaagagggcattttaataattctgtgctctggacccaacctcccatcaagacatcatgtgccttttattatgcaatcatgtgctactgtcgcagtacagaagggtttgcttatgtctacgaaaataaagacacaagatttgacggtgtggccgtattcttattcattctcttctcttgtggcgtgtataa

SEQ ID NO: 7847 - DNA, 361 bp, Oryza sativa
ggatgatgagttatattatcggagcgatgatggggtattgcttcgatgtttaagtatcaatcaagccaaggttgtaatgggagaagcgcatgaagacatatgcggcataaagcttcggcgtacagggtattttcggtcgacaatgttagaagattgcttccgatattatatgggatgtcaagactgccagaagtttggagcaattcagatagcatcaacgtcggctatgaatcctattattaagccatggccgtttataggatggggcattgatatgatcggacagattaatccaccttcaagcaaaagatataaatttatacgggtagctacggattactttagtaagtgggtagaatcg

SEQ ID NO: 7848 - DNA, 444 bp, Oryza sativa
  unsure (1)..(444): unsure at all n locations
taaaactaagcttgctaggaaccacatcgcaatcaacagaatctgcatatgagccaatgtaaaacgaaaccctacaaacctgtgttacctttgctcttccggaatcgtctaaccactaaatatggtaagggtgtggatgtgtacgtgtagtcaagccaagcttcttgacaaaatcataactcaccaagttgttgcaactacctccatcaatgatcacacgtgcacgacgagtgttgatgacaaataaaatctgaaacaaattatggcgttgcaacctgtcatgctgctgtacctgcgtgctgagcacccgctgcacaatgatggttctgtagtccgctgtgtcatcacgaccaaagaattcgccatcctcatcctcaacttcttcttgctactcttcctcttncatgtcagaggtggagatgtagccatcttctgtagcaacat

SEQ ID NO: 7849 - DNA, 216 bp, Oryza sativa
tgcacgcatgcaagcttgccaatctcgtagaagtttaggcaagacctctcacatggcaccgattttgtgagcaactattttgatgactatgtggacaatgttgctgatgatccgccccacttgaatcatgtattggctgcaagcaacgcaagcactatttcataagctccaacaaaagcgcaggagaggaacgataattttgtccctggcggctct

SEQ ID NO: 7850 - DNA, 330 bp, Oryza sativa
tctcgtcatactcactcagatctccagacatggactggctctgaagaactgtgattcggcatataacgcgtgctttgtcaatgttatgagagcgctcatatgtatgcagtacgtaccgctcgtcaacttggctgccttggtatgcatataccatagctgattgggctcatcattctaggatagcggatgatgtgtacactctacacatgctcgctggtatctaccagttattagtacggatgccacttctcaaagctgatatatctaatgcgcggagaacattgaaaactcattgaacccaactgatatgttgcataagctatgagaccg

SEQ ID NO: 7851 - DNA, 463 bp, Oryza sativa
  unsure (1)..(463): unsure at all n locations
agctggatttgacaatatatttattatttagtagtgaattggtcattgatttcggtgttattatttattacttgacagtgcatcgaacgtggccttttggctgcatgttcaaaaagtcccaagcaaggtgggagctaacggatacggacgaagcccgcattagtgttgcttaagatatattggttggtaatcaggaacgttggcagtggtagagaactccatagttggataaaagctttttagaggtggatcggtaaaatgaaaagaaactcaaggccggtgaaataatgcgatcactcacatagacatatagtttgtttttccccgagctcccagagataatagatactagtactgtagtacatctcgcagaattgagacgagtatgctcaattaattgagcgataagacgagtatatagaggtcaatctcgggtcatncaacatatcaacatactcgatca

SEQ ID NO: 7852 - DNA, 411 bp, Oryza sativa
tctcgggttcttggtctctgcccgaggcatcgatgccaacccctaatgataccagctatagagcggatgcgccccccagcaagcttatggatgtgcaatgcgtcaccggctgcatggccgccctaagtcggttcatatcgaggctgggagagaaggcgctacccctatttaagctcctcaaacgctccggtgccgttatctggaccgaggatgctgagcgggccttcactcagttgaaggcgtacctcagttcttccccagtcctggtcgccccggagccagatgagccgctgctactttacctggcggcaaccccgcaagtgggcaacgcggcgttgggtgtggagcgcgacgaggacaaccctcaccccgcgcattcccaccttgtgttgactcgacccgggagagagc

SEQ ID NO: 7853 - DNA, 421 bp, Oryza sativa
ctggaattggtttctccaactgcctatgaagatgtatgtgaactccttttaacaggttcttatatgtgtgtttttatatggttttcctaaaacatggtcggacttgttggcaggtggtgccaaatgtgttaatccgtaattttccaaagtgtaagacattcagcaacctgaaatatttgaagctaagtgagtggtttttgagagatggttgctatcctctacttttcttgcttcggcgctcacctaacatagaataacttcacctgcaacttaacaaggtaagatataatacctcagccccttccatattgctatttgtgctcatggcttgaagttgatggtgtctttcattcttgttatcagtatggatctgatgactatgaggattaaccagatgctgctgcagaattgatcctacttg

SEQ ID NO: 7854 - DNA, 424 bp, Oryza sativa
  unsure (1)..(424): unsure at all n locations
gtttttgaaatctaattgtattaagatacattaggaaagagaataagtcattttattaatgatgaaaacgtattttgaaaatccctaattaagatacattgtccttagctatttattntatggatatgcatggaatatctagagaggataagttacagaagtgatcaacagacacataacacatggctacagctatatatcatgattagatagtttaagatgcccgaggaagtgcagtgactattaagtgtgctgtgattgacgaaacgttgggtgtgctttatggatcatatcgagtgttaatccccacttgctttggctggaattgaacttggccccaaggacattgacaagaacgttacttgtctggtcatgacacatactccaagcatgcagtgttcgctcgatctgaacttccaccgga

SEQ ID NO: 7855 - DNA, 428 bp, Oryza sativa
  unsure (1)..(428): unsure at all n locations
atactctatagtctacctgctgcatgctagcttaagaagctgagaaccctanagttgtcatgtcatttggatcgtgaaagcttgcctcagtccattggtgactgtcataatcttcaaagctttctcctgcgtggcactggtatcagggagataccaaactccatatgtaaaattaaaaaactaagagtgcttaacattatgcattgtcgctctttgaggcaacaatggtcagaattctttgggacgctttgcaacttacagtccatcaacttagcacagattgagggtatccacaacttgttcagttcatttgcttgtcataaactacgcactttgacacttagtggaaccgaaattaccagactaccgcaatgcctcacattggtgagcaccctggaatacatagaccttcaaaacttgctggggct

SEQ ID NO: 7856 - DNA, 434 bp, Oryza sativa
  unsure (1)..(434): unsure at all n locations
tcgctcctcaagcagagcgactagtttcaatcaatgctgttcttataaccttcctgtctatgcaatgtctgctttcaagctgccaccttctgtgattgaggaaattgataagcgaaggcgggcattcctctgtacggnggaggatgtttgttctaaagcgcgttgcttggttgcctgagatgtggattgctctccaaaagaactgggtggaattggagtaaaaaactaaaagtcaaaatgaggctcttctcctgaagcggtattcagcctcttctctcagaatcttcctgtgcaactgatttggaaagaattgatggcaatctctactgaaatccttctttagacacactggactttgtacaaaattttgcggagctcaaagctatgaggaaaattgaaatggtctgaattcttatgcatgatgtgcttggatc

SEQ ID NO: 7857 - DNA, 374 bp, Oryza sativa
  unsure (1)..(374): unsure at all n locations
agctntaacatatcacttgagtgggtntggaccttgtttttggttgagttgggtagtcctctgagtgagctttccatatagtccaagatcatcaaatacggactcccgagcgaaaagttatagtcgttttactatgtgcttctcagaaattctgaaaatatttcggatatatccgaaaattattggaaattccaaaaatggccacgaatctgagattggcttctgtaaattttcggacatatccgaaaatgcttttcggaacttccgaatattacagtcttgacctacaatgtcntagttttgagaggctcgggtatataaactcctacacccctcctttgaggggctgctgttcttgggcaatattaaacaca

SEQ ID NO: 7858 - DNA, 446 bp, Oryza sativa
  unsure (1)..(446): unsure at all n locations
tataagctggtaaatcatcctgtagatctattctccttgagccgattgtagnttctgataggaccataatgctttagccaatcgtgtgtgccattgccgaggaaaatcagatatctttcttttgatcaacttaatcaagctcttattatatgcgtcggcttggccattagcttgtgcataatagggtgaagaattcaataatttgatacccatgctatcggcaaactgaacaaattcatcagatacaaagattgatccctgatcggttgtaatagtctgagaaatcccaaattggtagatgatatgctcctttacaaactgaattgcatcccagaatcaactttcttcaaaggaactgcttccacccatttggaaaataatcggttgcaccaatataacttatgtccttcttgaggtggatgatctgacgacatatcaattccatc

SEQ ID NO: 7859 - DNA, 432 bp, Oryza sativa
tgcttaatagcaccagctcctgtaactcccaatcattccatagttggatcaacgctgccatctttacatgcgtttcaagtttcgacaatgctcaattcagtttctgcagtcctgtatgaaaccagtgtttactcaagataatcaatccaagagatattatgcaagaagatcatttgtttcatccaacactgctagcctgtaacaagcatttgtgtgttcaaagccagtttgtttcttcattagaaatatgctactagtgttgttcatattaaaataatatctcagaaacattagaaatctggacattctgaaagtacttcaaatgatgcagaaagagtagacaaaaagaacctacaatatagcataagtgcataacttgaagttaatttgtccaattggaagcatctgtatatcagcatatggaaaactgat

SEQ ID NO: 7860 - DNA, 453 bp, Oryza sativa
  unsure (1)..(453): unsure at all n locations
cacctaagttcccgtgacttgctgagtactaatgttctcacccttgctctatataaatatatatatatagttcctccgccctgaagagaagataaagtgaagtgaagattatggtttcgtcctggttcccagccgtcgcctgtggtgttgggtgttagaccgttggttccgctgctgttgctgttgttggagttcgcctcgtccgcgtcgtccgttgtattctcgggctgtctgagctgcaacctaagttaatgtaaataagtcctctatttattttaaggattgatatgattcatatttgtcaccgtgggtaccagcactatgtcctgngactggtaccgagatcgcggnttcttaggaagcggttcgcgccgcttttcctacgacacgctcctgtcatgtgccgctgtacggcggtatcatattggggtgtgacacaccggcacccagcgc

SEQ ID NO: 7861 - DNA, 439 bp, Oryza sativa
  unsure (1)..(439): unsure at all n locations
tgcagtcttttcgataacactttcattggcagtttttcgctccatgatacttttcatcactcatgcacatctattgcgtacacgtgtatctatcatgtgagaaggaagttttggcgcacaccgggatatggatatactcacancatgccattaagtgtattaattatggttttagaattcttcacatggcatgtcactacacgatgtgcgacatccactgttagacacaccgtctcgtcggtcctaccatatggctgccccaccgtatatgcccctgcctcacacatcatgaaaccactatgcatggatactgcctccgctcatctatctaatccgctaggtctatacacattcgagaagtacggttgtacgggtggtcgttcatgcttaacttcatggctcggtcactaactgactggngacggtactatccttttca

SEQ ID NO: 7862 - DNA, 410 bp, Oryza sativa
tctgcaagctctgccttcagtttcattatctacaaagataaatatatcagtaatgaacacatgtttatctacattacagatttacagacatggatggcatgatattacgaggaaatacctgttccttgacttcccaatcaagaaaagcaggattgcgtacacaatcaataagcacctcaaccatttcaggcatgtaatgtttcagggctgcataactgtagctcatcatctcacggttagcagatgctttcacattgccacctactgcctcgatttcacgcacaacacgcatatggctcctgtttgtagtggttgtatatgccatcttcttcaacagctgagtggcacctattgtttcacgtgcttcatgtacagaaccacaattaacatatactccaactgaacaagat

SEQ ID NO: 7863 - DNA, 383 bp, Oryza sativa
agcttcatcaccttccttgctcacacgttcttgctgctgccggtgattgtggcatatctcccaatgtgtacgtctcatattatttcaggaaagaagcaatctttcatacatggagtgaggagatatatgggttcgggatctcaggatcttacacaacgctgagtgcccaagttttttatattccagatccatctaagttaagggtgacaaagggtcgacgccaaactagacgcatcagaaatgatatggatgagtcagaagcaggtgggaggactttacgctgcatcaagtgtgatctgcgcggccatacttacaagaaatgcccgaagaatgcagaagttccaagcggcgcagatgctagtccatctggacaggcaagtgat

SEQ ID NO: 7864 - DNA, 216 bp, Oryza sativa
cactgagcaggggcgcgacctgacggaaattctggaaaaagagaagtggcctctgcatcccgaggaccagaccagctctccgcaccgaggcagcacgcaagggggccgacggcgcggcgctgggcgaagacacagcagcccgggttcggaaggaccgccgaccctgaagaggacccgatggagcaaagcctcaaaccgacttggcgaggagccccc

SEQ ID NO: 7865 - DNA, 435 bp, Oryza sativa
agcttggactcgtgtcgtggtgaagggtaagtcccagacgacgcatggcttatcgccgtggtcggtttggacccttgtcgatctacacagtgatcaccaacaatagatgcaatacactgatacagtatcaagtactcgcagcaatgttgctgacagttgccgtggatctgtgtgggaaatacaagattcggttgctagctcttaccccagaaaacaccatgaccagataagcacatcggcaacttggtgttggtgatgaaaagtttggagaggttatatcgcgagcggtgtccgtggttatcaccggtacgacggaaacgtacgcatgattttccgcgtggaccgtgtgcgcggtcatggatagctacgccaccatgcgacgcccgcaccgagacgcacatgcatgttcctctcgtcgtgaaccaagcgtgtggg

SEQ ID NO: 7866 - DNA, 253 bp, Oryza sativa
gcaacgcgacgtgggctccgtcgtcgacagcacatgccatgaacacctccgcgacgtccgccggcgacacctgcacctcatcgagcagactccccgcctcacccatgatctcggcgtggacgtcggcgacggcatcctatctcgaggtagacttcggtcagtacacgccaagccggagccttgcagtaaccgagctcgaccttgcggtacatgccgacgggccggagcagcgccgggtcgagcctgaccgtgt

SEQ ID NO: 7867 - DNA, 467 bp, Oryza sativa
  unsure (1)..(467): unsure at all n locations
agcttggacgactagaagagtaatagtactcaattccatatggactggaaatgattctgtaatcaaatgcctctaacaagctgtggtaaccttggaccgtctatgatttaaatcgttgttgattgggacctcccttttatatcatgtaacttagctgctgttgcgagttctctgaaatgcttgtcacttttttttaattccctcctgaatcctgaatgatggtcatcagaatgtcataaaggaagtggttgattctctcagttggcaatctaaaacctgattgaagtttctgtcttgaacaagtgcctccacaacctggcgttgacaaacataaccatatatagtaaacgcatgagtgacggatacacaggagagatcatgtcacatgctcatcttcactacattcagagctaattatatatatataanaaaatgctgatgttcgattatgtcacatgctcatcttt

SEQ ID NO: 7868 - DNA, 500 bp, Oryza sativa
cttaaatctaagcttgacatctcttagaggggattaaacatgaaactgatggcagtttatatcacaacatggctcggtcttgtttaatatggcaagtctaaattaagctaatttggggagaaaattctgaagtcaaagctgaaactctgaaataagagaaattgtttatctaattccctcccccccccaaaaaaaaaaagaaaaagaaaatgacaattcatttgtgtcagcaaaaagaagcaaatacaagtgcaaatattattaatcatcattcatcaatagtatagcatgtatgctttgcatatacacaataataatagaacaaagaggtgaatagataacatacgcgcttaagaaaactgattttaaaaagtcctagacaacctgaattttgaaaataatgcgtaccaccccacataagaaaaatggctgttgaatctctgtccacaaggtatactcatcacgtcttttaaggaatcaccacactctaagaaatatta

SEQ ID NO: 7869 - DNA, 397 bp, Oryza sativa
  unsure (1)..(397): unsure at all n locations
cttggtagcatcaaggttcctaagggcaccatccttacgatcccgatcgcaacaatccaccgtgacaatgaagtgtggggggaggacgccgatgatttcaagccaaagaggtccgaaaatggagtgttgaatgcagcgaagcaccccagcgcactactcttcttctctatcgggctaaggtcgtgcatcgggcaaaactttgccatgatcgaggccaggaccatcatcgccatgatcctgcaaaggttctccttcacgttgtcccctaagtacgtccacacgccaatcagtgtgatcacgctaaggcctaagtatggtcttccaatgatccttangagcctcaaggtaaagagagatangtaagatccaaggaatatcttacttacacttctttttt

SEQ ID NO: 7870 - DNA, 418 bp, Oryza sativa
  unsure (1)..(418): unsure at all n locations
tgcgaaattngcagcatccaggcccttgttagatatcatggttacctcagttgtaccatcagtccgtagtgattgcagtcttcacgacagttgtagaacccctgaaaaggatagggggtctataacaaatcctatgagaagaacaatcccttcatggctcattgacaaaaccagctattttacatcctttagtgagcttaagattaatgaagaacctgatgatagcagcattccatcattgagtgctgaagctatgactgcctttgctcaactccttttggtttgcaatcaatctgcacctataaccctagcttgaagcgttttcacttactggtaggtggttcaaccttacatgtttattaactactatgcagtctttattcgtcatttaacgaagaatgtcatgganataatacac

SEQ ID NO: 7871 - DNA, 445 bp, Oryza sativa
  unsure (1)..(445): unsure at all n locations
agcttgtttcggctttcgctttaacttggtatgctgcatttggcacgtgcaggcagagcaatggagaccaccacagaggctgagttcgatacttgctggtgggaactacgcgcagctagaacgatttattagtatattattaattaagtattattttttttctgaaaaataatcaaagtaacttttgtatatttgttttacacaatacgcactgtttggtagttgaaaaaatgtgcatgtagaaaataaaggagataatttgggaacttcaagaaaacaattcagcgtagaaaagcccgctcatgatttttgctaccatatcaccgtaatgcccaggattgcttgctattgnggtgactactgtngtggcaatgatgctcatgatataaacnagtcctatctggtntattttagttgtaattgcgctttgtgtatggaatggtat

SEQ ID NO: 7872 - DNA, 442 bp, Oryza sativa
  unsure (1)..(442): unsure at all n locations
taatccgtttgctggaattcgccgctctcgtaattgaaaggttagctcttcgatccacatgtgcatacgcagntctgttgcaattcttgtaggatctacgattggtctgtatagtaatagtattgtactgcgaaatttgctccttcttgccctgtcaaatgttgcagtgttctttttttcccttttcttttcggtgttgtgccgcactatgtggatatgcctgttcttccagctcctctgccctcacaggtttggtgtagtgcaggtgtaagattgttttccgatgtttgcgcagntcctatctaaatttcattcagcatttctggcagtttgcacagatctgttgttgtattgcacttcantttatatatcatagaacagtatgcatttggtgcacgctttttggctaacttatttcaatcaactcatgattngcgtattt

SEQ ID NO: 7873 - DNA, 246 bp, Oryza sativa
tggatcatgtgtaggcaacctattaacatgtctatgcaatggatatctatacatatgctgaacacgttgtatacacgggcccgcctataatacacattgcgtatccatgctcctgctacggactgctataaatatgcggcaccgatgctctgttctcatcatttgatgctcataatgggtgtatacaagcacacttaggctatcgctatggatcgtacacattcttacctacggcaatgtcggatt

SEQ ID NO: 7874 - DNA, 229 bp, Oryza sativa
ggacgacatacagctcgagacttgaggtccaagtctcccttcttatctctcctctgtgcatgtgggatagcttgagacccaatatttgtggtattgtggctctctggtacaaagatgctcataatacgacttctagcaaacccgatacatggctcttactggttcacgccctctggtacgtcattctcctactatccatgctatgggattttatgatgtgcatcacaca

SEQ ID NO: 7875 - DNA, 377 bp, Oryza sativa
  unsure (1)..(377): unsure at all n locations
agcttttgagcatgacgagcaatgtcatctacttttacctcattgacggtgacttgnggtgtaaggccggtgttggcggctattaaatgccaattttatgccgcccatacctacataaaacataagttctaacacatccaacatagtggtagggtttaattttgacagattccacgagtgttggtgtatatttggatgcgggtaataaactgctagagtggggagcacatctagacttaaatagagaagaactacatcaatataagaattgggctcacaacttcatcgaaacattagaaattgagcccaactaatatagaaatggaccgagggagcagatatggaggtccaggantaaagcccacaggctgatgagc

SEQ ID NO: 7876 - DNA, 409 bp, Oryza sativa
  unsure (1)..(409): unsure at all n locations
aaccgaatatagttagaatacgactattggcgacntgatgattctcatcagccgattctaggacttttaagttgatattgactctatgcagatgatgacttcagggcttactaaatttcactgttaacacatatagtattagatagtatctaattgctatattttgaatcgaagggaataaaatttagttgacaacgctgtcgacaggggatacccgtagactggatatagagggtattgtggtacgctggtacgaggatctacgtagtacgacatcaagcaaacaggagacagggattatactggttcacgcctcttgataggtaatagccctaatccagtngatatgggattatatgatggaaaccacagattacaaagggaataacagaactcgatgatgccgacg

SEQ ID NO: 7877 - DNA, 440 bp, Oryza sativa
  unsure (1)..(440): unsure at all n locations
agactgaaaaaaaatacaaatgggattattttatgagaaatatataaaacagagaaaatgttaccaaatagactaattagtagtcctaatgacatattatagagggcatgtgaattgggtagtaaatactctaaattctcccgatttaagtcatgtttagttcgtgaacaaaaatttttggcatgacacatcggatatacggacacacatttgaagtattaagcgtataccaataacaaaacaaattacagattccgcctgaaaactacgagacaaatttattaagcctaattaattcgtcattagcaaatgtttactgtagcaccatattatcaaatcatggcgcgattagacttaaaagatntgtctcgcaatttccgttagaactatgtaaattttttttgtcacatgtaatacttcatgcatttatctaaatattc

SEQ ID NO: 7878 - DNA, 421 bp, Oryza sativa
  unsure (1)..(421): unsure at all n locations
tcgtgcagcaggagcaagaagttcagcccagagtcgtcgttccgtgaatatcaagtggaagttttccggagatgacccatacccaatccttccgagaagagtagttccgttagccttctagatcgtcttttgnttgcttgtgtgtaggggtatggtttgcatcattggtggggatgcgaccatactatgttggttgcttaatcaacttgaaaaataaaaatctactcacaacagatcagtatgcaagtggcttagtaccttatctttagcaacccctctcttcctcatctcttccgccctggcagaagatagtcagtgttagagagaagagcaacgacggcgtattaaagtcaccaatcaatggttcagntgaaagctaaacgtatcccagtgccagaaaaccctgctcgtgatcaacatt

SEQ ID NO: 7879 - DNA, 449 bp, Oryza sativa
agcttacggtccataacttgataactctattcacaggattggagaggaccaacacatcatgacgagccatcacatcaacaatgcacatgataggggtattcaaaggatggctattgtccttttgcgcaaagccagatttgtaattcttttcacaagcctaagatctagcattgactaatcaaattttagtaccagtgttcacatttaaacaacaacggttctgtccaccatccattgtgatcccaaggatagcttcccgccattgagtcgtcatggttttctgaggacgtccaccttcccgcctctcatgaagtggctccaacagcataaaaatcatcatgcaatatcccatcccacacaagttaagaatttagagtctagccaagtgtaatacacgttccggtgctcattaaccggagcacggtattcaatagattggttactacact

SEQ ID NO: 7880 - DNA, 409 bp, Oryza sativa
ctagccgatgtcctcactccatctgcttatctagaacagcatcaattcaaactggagaaagccagcatagactgtgcgaacgccaagaacacaaagagattgaagctaccatccaggccaatcgggaactcgtgcgtgaagaaaaatccaagcttaatcaactatctgagagcccgagcaagtctagtattgatcggtttgaagctcgtaagattgagctcttagcacaactccaagaatgcaatgacgaactggatttggaacacaagaagctagccgatctctacatgctgtcgaagaacaaaaggcaatgttgaaatcggctatcaagaatgtcgctgttatgaccaaatccttaaaagttatccctggaaccgacgcccaagacgcccaagccattgaagaagta

SEQ ID NO: 7881 - DNA, 423 bp, Oryza sativa
  unsure (1)..(423): unsure at all n locations
agcttcttcggctcggcttctttcagatgctccagaagttcttctcggggcaggtcgatgccgacgagatcagcctggaggtttctcccgtcagatgcaccggagcagcgttgctcatccgagctgacaggggaggactgatgaccgacgaccaccgtgtatctttctcgccgctctttcgcttcgtctgctctcttcctcagcttcttcatctctttggccaactgaagcttcgacgttcccgtgacggaattgatactgaaaagagaagcttgctgatcccgagttttctgatacatgatgcgatctacgcagtcctctatgtcgcgagccatgtcgcgaagctcttcgatggacagcagcagcacgctttcacggctcaccgtncgcaagagctgctcgtcaatggctacggcgatcatg

SEQ ID NO: 7882 - DNA, 479 bp, Oryza sativa
tagtgcgtgtgcgtcgccattgtcgatctatcgagtgtgttctctacaatttgctactcttgcgtgtgtcatcgcttgagttcgctgcttgcgtgagtttgctgctccgttcgtatccttgggcaaagctgacaatcggtaattaatgatgggggaggatgacttaaaaggtggaagcggtcttcacccatcagactagtcttttgggttgtgtaggcccataacctaaagttgtggctcttgttgggcaagtggtacagcagacccaatgtgacctggatggcccacggttggtgggccgagctgcacactctaacaagtggtatcagagtctaaggtttgaaacccggaacaattttcatgggttacatggtggggaggccgagtaaaaagtcttcggggtcacatggatcgatatgaccggtagatgttgtgcctgaggccaggtaacaagtcttcggagtcacatgggttgatgt

SEQ ID NO: 7883 - DNA, 445 bp, Oryza sativa
  unsure (1)..(445): unsure at all n locations
agctntatgctctaattnttttttccattcagtgaatgagatgcttgtgtccagccatccaacagatattttgggtgtttgtacaaagcctatgtacatgctagaagaaaggaggcatccaaaataaagctacaaagttaaaagcaagactcttttgctgaagacctacatcctaatattaatgtatataagtggtcatgctgctatcacctttgctagaacatatgctatgtatttactaatagaagtactgcgtcctacatggaacattaggcaactatgacacatatctagctatcaaccctctatcctgccagctacataattgcaatgaaatcatgtttgcaggccactgctatatgaaatttagcatgcacttctgccatcatgcttgcttcttaaaaattggtgtgcatcttcatttatctagacacataaatttcat

SEQ ID NO: 7884 - DNA, 375 bp, Oryza sativa
agcttaatgccaactctaggacccaaattctcaattgcttttgtccaaagccagcttttagtgtagtataaatcaaaagcacctctaccctctgctttcacctgctttttggggaaaaaattacccatctctgccattacacaaaaaaacggttcgcgtttcttttatctaccaccggtgtcgctcctcctcctcctcctcacttcgtcgtagacgacgctcctcctcaccctgccgactgcgtctaccgtcgcacgccgcatcgcatccgtcgtcgcagcggctcccgccgcaactgctcgtggggagacggcgacaacgacgaggacggcgccaccgacgaccgcatcgacgccaacttcttctgtgacgcgc

SEQ ID NO: 7885 - DNA, 470 bp, Oryza sativa
  unsure (1)..(470): unsure at all n locations
tatcgnggcgacacgataataatgattaccaccggtggtgttattggggaaatacaaaatttccaaaatgagattaaaaatccaaaaattaatggatgtagttcttgaattttatcgtcagatgataaagatttttttaaaaaaagaatcatgcataaaccacgaaaccacaaaagttctgaattcaaatgttcgaacatgaatttcatgcggttagcgtgagggtgcgataacctctcgccaaacgggtttgcaaacctgctcctctcctctgttctctgttttcaggctgaagtcgatttgttcagagaatcaaactgccgcgaaatgggaaacaatgcatgcctgatctgcgtgcttctgcacagtctgatactgccatcaaaatgtgtaattactctgtcgcttcagaatttcagccgtactgtagccggcatttggacttctgctctgaagatatttcctgcact

SEQ ID NO: 7886 - DNA, 391 bp, Oryza sativa
caacatgtattgactgtcttttgccatgagtttttctctggggttcctccatcacactataacacaatgatacacaatgaagctgtctgagtgatgtcgctggacttcttggtggctttgatattatctgatggcgctgtcgcgcaacatgagctgtatcactactactgctctgtgtttgacgcccgttaaataccaatcctgtaataaattgcgttcatggctggcgtggtcatctgacataaaggcattgaatgacatctactgaatcataattgcatgcgatccataaaagaccgaattgcaagcgatctggcactgcttcaatgactgatgctatttttaacaaaactaactcccaatgaggaaacatccctgcttaccacatcac

SEQ ID NO: 7887 - DNA, 389 bp, Oryza sativa
  unsure (1)..(389): unsure at all n locations
tcgcaagtaaatgggtagggatgtgcacgcatactcaatattcttgttttcttatgttggagatgaaaatgcatccgatgggtcttcttggaacttctctgtgtgaaacaaggtttttgtaggggatgcccgattccatgatgtgtgaagaaccattctgggtaccaatacacattgtgtttagcaaacctagtgccaattgtggttgcaaaacttgtttaataaacaatgtaactaatcacagaacgctctgtttaacggtgaactatccctgtcttcatgaaggcattgcatcagctgtacaccctcatatatatacttggttagggacatgtagcgctctgtgctacaacaatatcactaggnggagcgaaagtatatctgtatag

SEQ ID NO: 7888 - DNA, 249 bp, Oryza sativa
taacaagattgctgtcttgcgatatgcagacgacacaattttccttattgatgataatctggagcatgcaaaataattagtagctcatcttgcgcctgccagagcaactttacggacctaaaacttcaacatatgtgaatttttttgctttggcgaagctgatgatgaactcgtctatagcattattttcacctgacatgtgggtgattcacctccgaaatatttgggtattcccattgaccaaaaaac

SEQ ID NO: 7889 - DNA, 452 bp, Oryza sativa
tgtgccactcggtgtgacacattcgactctctcaagctaccatttatcttatagcagccggcgaacaggttgggtataccaggtaaactgtacataaactgtcatcgactcgtcacattatacaagctagctagcacacaacattgactatattctgtgaagagactcgctgattactatacaatctataaaagcgcagccaatgctccaactctatcgtggggaatgaggggcgactctgatgcatgctttacaaacacactggctgaacgacagagagcagctcacatataagagtagaaaagagaacgtgtataacgttaatagaataaatgcatgggactgcagatgcttaagatagatctttcttatgtactggagactaatctgataagtaagatctctgcacgactgcgttgtacgctcatccatagcccatcgaaaacgacatg

SEQ ID NO: 7890 - DNA, 402 bp, Oryza sativa
  unsure (1)..(402): unsure at all n locations
agcttaccggatagcagctgtgccagatggttgttgatcgcgccgacattttctgaaatcgacatttcattgtcgttgagaatcaccagcatatcaggacggatatcgcccgcgtgattcatcgcttcaaacgccatgcctgcggtaatcgcgccatcgtcaatgacacagacggtgcggcgattnttgccttctttttcggcagcaaccgcaataccaattccggcactgatggaggttgatgaatgcccgacgcttaatacgtcatattcgctttcgccgcgccacgggaacgggtgcagaccgcctttctgacggatggtgccgattntgtcgcggcgtccggtcaaaattntatgcggataagcctgatgccccacatcccatatcaattggtcaaac

SEQ ID NO: 7891 - DNA, 89 bp, Oryza sativa
  unsure (1)..(89): unsure at all n locations
agcttatgtaggggacatacccgacattaccatacanctcgatgacttgattacggaaccccaacccacctttagcaacccctgcgctt

SEQ ID NO: 7892 - DNA, 258 bp, Oryza sativa
tctagcactgttcccagccgacggtcgcggggtagttccctgactatatgtgatgtatcaaacagctccgtatagctatatgggaataacaaaccactctcgcttgagggatcgacataggcgttcacactagacctgactccagcgcccttatattgcccacattgcacttgacttactaaagcaacgaagctttcttcttgataaaagtgccttttatggggagcactaccaatgctacatgtttttctttgaaaa

SEQ ID NO: 7893 - DNA, 347 bp, Oryza sativa
agcttaaaggtgctatgatcgtgcttgtcaacttgtcaaattagttaccaacagtattcatgttgtaataatatcaagagggagctaatcacttgtttctagctagctagtgtcatgtatattcttaagaaatttaataactagaacattagttagttacgccaagaacaccaggccagatgactcatttcattattccaacatggcaaacaataattctagtggcatcaggtggactaagctagtagtaacctatacaaatttccaacacggcaggctaattgtcacaaattttgtctcgttcgatagcatctaagattgtgtaggattgctataacataaattac

SEQ ID NO: 7894 - DNA, 463 bp, Oryza sativa
  unsure (1)..(463): unsure at all n locations
tgtctnggtgtgaggaggctggtttactgatgtctgccctgctaaaccatatgatagggcttctttggcatatacccatggacaattcaaggcatagtgtccttgttctctacaatcgtgacaaaaggggacatcctcttctggcattggaagctcattgacctgcgtggcgaatgctcgatcaaacacatactgattttggacttgacttccaaccaatggtagctgtgaactaagcggcatgcttggaatggaccaagggtgtgccctggttaactctcttgaagccagtggtggattgagttgaaaacttgagttacttgaggcatacccgctgacatatctttcctttttctctgttaaacatctgttaccgggattgaggtgagagaggaaacatgccacgaaagaatagaccagaactagagacaggaccttaaaggaactaactcttcttgctgat

SEQ ID NO: 7895 - DNA, 386 bp, Oryza sativa
agctttctgataagactggttgaattgtctatcggtttggatcccatctgacagtagatcattagctcttgttgcttgttattattcaagtacataaaggctaactgaaatggccaacacgaataatttcatttggttggctacgtgtacagcttgccggatgcagtgatcggttcagtatagtgtctaacatcagtttttttttactctgttataaaaccttaaatggaattttagtgaagaatgccaggtcccataaccaacactaccatctttcagcaaaactagttccagcacacaacgggttcagctgaatagtcatatatgtttacccatgataatatacacataggctcttttttgcatttgctttcacggcaaattat

SEQ ID NO: 7896 - DNA, 471 bp, Oryza sativa
  unsure (1)..(471): unsure at all n locations
ngagtttgagaacaatgaaccagagagagcaagaattcttttgtcaacgccacggaaagaggaggcactgagagggtctggatgaaatctgccattgttgaaagggagttatggaatgtagaccatgaaagaaagctgttggaggaaggtctgaagttattcccctcattcttcaaattgtggttaatgcttgggcaaatggaagaccggcttggtcatgtagccaaggcaaaggaggctaatgagaacgcactgtaacactgcccgaactaatctagaggagaagataaatggcttgaggaagtcacgtgctgttctcaccatggcaagaaagaagaacccagctacacctgaactctggcttgcagcagttcgagctgaattgaggcctatgaacaagaatgaagctgatgctttactatccaaggcattgcaggagtgcccaacacgtggtatcttgtgcgctgcagc

SEQ ID NO: 7897 - DNA, 436 bp, Oryza sativa
agcttgagctgaattataagaggctctattgtactttattgtatactagattacggagagagtagagtataagaagttggaggagttccggagttgtcggtaatccacttcttatttcttttgctctgctaattactctgattattatagaaatatcttttgagtaatttagctttgcttagtgagatttacttcttgattagttcctaattagcatacaggatcatcgttcattataatcaattaaaatatagtgattgctttagtgtgtagctaacattaaagtaagttattaactacttagacgcggtgtctaggtagttgatttccagtgtttgctctgcatcccacagtatgtgtgatgtggtgacagccctcaagatcactaaagtcctcccaatccggatgcgtagtagagcgatatttcagagcaaca

SEQ ID NO: 7898 - DNA, 458 bp, Oryza sativa
tacaccaatgttaagctaatatcctacaacaacatactgtgaatcttcaagttacagaataaaagctctatattttatctcaaagatcatgacaatgaacgaatatttataaaccgcgtgcgtatgcaattgagtataaatacaggggaataaacttttttctgtcgatagaaatagtagcaacttcttttgagagaaaaagaaagagattactatggactcattttattttattgaccattaactatttgtggttagaatgagaggcagtgacgccggtcatttactttctcgattctccgcgcgcgaccactgtcttcacatgtaagggatgcatgcaaaaaaaaaaccccgttatttgatgcacgccactaacacatgtgacgtgaaagaaaaatagcagaaaagcccaatagaacatctcatggttttcacctgaacaataaaagggagcttct

SEQ ID NO: 7899 - DNA, 342 bp, Oryza sativa
agcttcatcgcaccacataactcagcgtgtttcctcgtgttcgcgtgtgtttatccacagcttgtttgtcgatcacttacggaaacctgacaagtggtatcaaagctcggttcagagcgtggacgcgagatcgcgctcttgagggtgtcttcatgcctcgaggacgcacgcactccccgcgccggcggtcggcgtcaccgtccgtgcatgtttcatgttccggcggccgcgcctctggcagcggcggtagcgaccgcgggctggtgatccaccgcgtggtcaaggaagcatgaggtgcggcgaactacccgctgttgacaagaaccaactacaacgattggt

SEQ ID NO: 7900 - DNA, 463 bp, Oryza sativa
  unsure (1)..(463): unsure at all n locations
tatcggatcagaccgataaaattatgttcaataattattgagtggttcttaagacaagtagtaatataataaaatcctaattcagtccggagatatacggattcagctgtatttacagttttacactcatgacatcaaatcacagtaactaatcaactaatagcacatttgtttggcaacaagtatatacagatgacattctgtatttcgtaacacggcaagtgaatgcaagagaagtaattttgcgagtagaagggactaaaccaaacaatacatgtattttttaaaacgcctctataaaatgtctctacactataaaactcctgatctaagaggcaatttgcataatgcctctacaaaagtgtctntatataacggttnttgtgtagtgacaggatatgatcacacgtncgcaatttatacccagaacaataccataatgttcacactgctaagacatcat

SEQ ID NO: 7901 - DNA, 385 bp, Oryza sativa
  unsure (1)..(385): unsure at all n locations
agcttgtcaacgtntattcctcaccgtctttatctccgtctttctctcgccgtcgtgtctgctcggtgagaacacgcgtctcctaccctttctgtatatgacattaccatgctgtgtctcaccgccgtcgcgccgctggccgttgccggcgagccgcctgctcgggtactgatatactcggacatgtctgtgcaacgtctgtgcaccgtgagccacctatgtgtgctcggatcacggtggaccgagcggatgtatagtgggacccgttagtggacccagtccgggtgcgctctctctcaataacgcaagttttccttgagaataacaattcacactactgcacttcttcatgtaattaacacctaaacttatgatggccatatct

SEQ ID NO: 7902 - DNA, 355 bp, Oryza sativa
  unsure (1)..(355): unsure at all n locations
ctgacttgtttctcctgtcgctccctcccatcttagagccaggcattatgaattngaacatgaacaacctgcacaggaccttggcaggattgtatgtgacgctatagactgcccaggtacgcattaagaactaatacggccatgtgattggtatgcatatgctcacgccacacaacaagaagagtggtcctatgagacagctatactctgatgagatgacgactactagcaactgtaagaccgcagtcaaaagacatggccagcttaagatgcagagtgcttcctttgcgaagagaccagtctttggtagagatactgatagaaatacatagagctgtcctagcagaagctgcac

SEQ ID NO: 7903 - DNA, 378 bp, Oryza sativa
tgtcatccagcacgtgcattagaatatgtcaccacatgttttgttgactgctgactgtgcagaggagtgtctaacccacaactctgcagtgattgtagtgcattatgagctgtttgcgttctagaagactgatcctctctaatgcgtcagagatacgatactgcgcgctctggatatacactgtggcataacactgcgtcatgtgagggatacacaagtcactcacatttgcacgtggcgctcactatagaggcatgcttactgactagaactctagtttactggcctctgactccgttgggtacatgtaaactattatctgctgctgtcttagagatgtccatatgcctgtggtatgcgccacaaaggcgctcttac

SEQ ID NO: 7904 - DNA, 434 bp, Oryza sativa
  unsure (1)..(434): unsure at all n locations
agctttttagtttacatattttggctctttgctagtagagtcagaattagaatagtcttccttagttcttcaagtcttctggagaattcgggtatggttctactatctcttccctctcttgtaagattttatccattaatgaaatatttttctttatatagttgtggtcctttactatacttgtataattatgcgagtaccaaatttggtttatacttgactcgtattaaatatgtggctagcttaccaaagatatgcaatggtattggcttagtgttcattcatatggttgctctatgtcatctgcagaggtgtagagtaatatttagtaatgtaagtgtggtgcttagaatattagatattattaagtggtgttatatgccacagatctgtaaggtangccgctgatggtgatagctcaacacgggtattcc

SEQ ID NO: 7905 - DNA, 418 bp, Oryza sativa
  unsure (1)..(418): unsure at all n locations
tgtccgnggcctgaaagttctctttctcaagagatgcatcttgcaagaaccgggttgtttcttgatgataaacaagaacaatgttatgagggccagagagacaaggcttatgcttgatcaaaggtgatgagggtcgttcagtttcatgaagatggacaatgggttcagaagaaatgaacgaagatacaaacatcacctccttgtacgcctcatgcttgggatgagcctctttggtgctggaattattcagggtgtttccatagtcttcataaagatcacccctgaatcggaatggaatttcctgaggatgaatttcttcttcttccggctgcagcaactcgaatgaggattcagcagttgagtcgggttccgactccacatgcagaggatcctcatggataatctcgacctccgagat

SEQ ID NO: 7906 - DNA, 384 bp, Oryza sativa
agcttagatatgctttcttacaaactatttctgttgtactctgaaatacatgtagaccacttctcgcatggtatcgacggcgttagcgcatgctcctcatataccaacctaccagacgagcaagcgctgactgtcacatatgacgtttacctttgacgcatctgtcttaattataaccatacactatgcataactagcatgacgaccacacaaccgaatacggccgctgtgcttatgataccagcaaacatgtgcactatctaacatatatgtataatggcgcgatcatcacgagactatataatccgagcgggagatactcatcagaatagtacagtgatgtaagtgtacctcatatttcttacaatcatgcatgagacatca

SEQ ID NO: 7907 - DNA, 307 bp, Oryza sativa
  unsure (1)..(307): unsure at all n locations
ccttaactcactagctgttttactaactgggagagatgttctgtcttagagcatcnctcttggagggaaatatctttacttcgtaataatctttaccttcttgaatggagactactccagactccatcagaatgcttgtccaaacaatgctctcacataaaaagccagaagaaataccgtcggttagcctattgcttagttgactcttttgagcgatgtgattgatgaaataaaatattcttttttgactctggcgatttgccccttgcacaatcactgttgagcagagatattcaccaatttgagc

SEQ ID NO: 7908 - DNA, 334 bp, Oryza sativa
gtccgctggtgcctgttggtttattttaatgcaactctttataacatggcatgtggatcgtgcccttctgttacgtggtctttggaaagaaactttgggcctcatgtggacggagtaccctttctaagtagctaatccttaatgacatggcatatatgtacttgctctaaaaattacctcatgatttctgcttctataaatctgcttcctggcttcttcatcacggaaacgtcaccataacttttacgttacattatgactgtctgctacctatacgtgcaaggcgctccaactaactaattttcgtatataatgaactgttgataattctttt

SEQ ID NO: 7909 - DNA, 483 bp, Oryza sativa
actaagcttggaagaacatgggtacataaatttctttagtagtattttttattgctcgcataaaatccatgtcacacaaaacaacatacgacataaccctagtgcatcaagcacaataatggagtaatgtctattgtatacatgtgacttctttaaataacactgcacccaatttcttttaaattctgcacgttatgaactgcccttcacattttggggaacttactccgcatacccttttctttggcattcttctgccaattttcaggaaccttaatatttctagtgatgatgaatggggagcaaaacaagacggaaccaataaggagattatatctggactaaattgcaaagtgtgggtgcaatttgagaactacgacgatttcaacagtgcaatgcaggcattatgtggacgttcattagaaagagtaagattttatattctgtaccagtatctctaatcctaacttttattagttacat

SEQ ID NO: 7910 - DNA, 358 bp, Oryza sativa
agcttctactgcatgagcatcaactccatctggaaggctgacaaacgcaacgaattttagaagacgtcaaatgcatgactggatacgcagtttgctttctataccaaggacaacacttgggccagttatgcatcataatggtgtgcatcaaagtggttttgtaccatgcactgaaccagaccacatgaacttttgcgcaccattagaatctgacactttacacaacactgggtctgtaccacaaagtgaaccaagccataacttccatgttatgtcagaagccaacacttcatagacttcctttggaaggcatgcagctctttctgaaagacgtcaaatttatgaacgtttgttcatg

SEQ ID NO: 7911 - DNA, 486 bp, Oryza sativa
  unsure (1)..(486): unsure at all n locations
taaaactcagcttaaacgctggaagcagctgaatgttactagatgagtgttgtttatattatcaatagtacttcagtccanaataagcatcatgtgatggtccacagagggactgctgcatcttgaaggtacaatacattatgcttgaatcataacacatgcagcaatcatcccttattcagattacaacgcaatattgcaatgcccgtactagctacaaattagttattcatcacaaaaatacgcaaactaaacaagtactctacctgtactgagacctgtactgctgtacatatacacgagcgtttagcttgctgccgctatctatggcacggaccatgcatgcattgcctactctcacaattctctcaggccgtagagtgatttgtattctgtcacaatacaccaactactactggtgcagaatctntcatgtaccaacaggaccattntcagccattagataaagaaacactgcgtgagcac

SEQ ID NO: 7912 - DNA, 363 bp, Oryza sativa
gcttgccactgtggacccagcttttttcccccgcagccagtctttgagcgctgaagaccgagccacacccaccggaagttcctcctcatccctaagatgaatgctgcaccgtcggtgcggccactctgcgccaatccggtctacttcaccggacacgcctcgcgccaatacagtcttcctacataggtcgatcctgacccgccaaaacggcctctatctacatcagacgcgcctatcgcgccgagccggtcatcaatgtaatccgctgcgctattctgcaccaagactgtctccgacccctgcgccaaacgatggcccgccggccatatgtatcctcctgacacgcacctatatagacgtttg

SEQ ID NO: 7913 - DNA, 468 bp, Oryza sativa
  unsure (1)..(468): unsure at all n locations
taggtcttgatttttcactagagcatgtggaaagagtatgcctctgtctatagatcttctttctttgtaggtaaatttctttacttcgtagtaatctttaccttcttgattgtagactactccagactccatcagaatgcttgtccaaacaatgctctcagataaaaagccagaagaaataccgtccgtaagcctattgcttagttgactcttttgagcgatgtgattgatgaaataaatatttctttttgactctggtgatatgcagcttgtagaatcactgttgagcagagttattcacgaatatgagcgtcgtactgcaaaccagaatgaatcggtatttcaattcatcagtcttgcaaattctgcattgttttagtgaccttttcgttntggctgtactaactacatgcgtagatccactaactgagagttctttacaggtgaaacatgctttggatcctaatg

SEQ ID NO: 7914 - DNA, 421 bp, Oryza sativa
agcttgttcacaagtattaagaaaaggtgcaaaaagaccatactaccctcaatgattattcctgtactaaaactcagtggtggcggtctgtttgctgccatcaaactcacacgtgcatttcatacacattggcgccagaaagctggttaaacacagtaaaaacccactcacacgcaaattaaattttaaactggtaggcggcaaaagcacatacggcaatacaaactagtactctattcttttcttctttttcactgataactatgctgaggggtagaatcgatagaattctggtaaaagttgtactaggttggaacatgtgggacaaattttgaatgccaaaacttgttacatattgcgacggagggagtagctactaataagcttccgtgtggcgtaagcaccaagccaccacaagatg

SEQ ID NO: 7915 - DNA, 439 bp, Oryza sativa
agcttgtcatgcggcggcatcctccactgtacatgccacgtcggagctcatcgccggcggctgcgtcctccgtcatccactcctcacgctggagctagtcgccagcgtgccgcatcctccaccatccacatcacgtcggagctcatcactagcggtcgcgtggcctgcgtcctccgtcatctacgcctcacgctggagctagtcaccagcggcagcatcctccaccccacgccgaagctcgttgcggtagtcgcgtcctccgtcatccatgccccacaccggagctcgtcgcagacggccgcatcctcctctgtccacgccaagtcggagctcgtcagcggtggccgtgtactccttgctccacgtttatccactccggcgacagctccattcccgactgtcgcgacaacccacgtccatcagctccgatgccgagctc

SEQ ID NO: 7916 - DNA, 472 bp, Oryza sativa
tcttcttgaacacccacttgcaccccacaggtttactctcatatggtcgctctgtcacctcccaagtcccgttagcgataatggaatccatttcactacggacagcctccttccagtagtctgcatcaggagatgcatatgcttctgaaattgacttaggagtgtcatccacgaggtacacagtgaaatcatcaccaaaagacttagccgtcctttgtctcttactccttcgaggagcttcactgacatcctcctcagagacaagttcatgtgtatgttcagtttgttctggtggtgtgattgaactgggaattatttcagagggttggttcgaaccactatgtgtatccttcattgggaaaaagctctcaaagaaggtagcatcacgagactccataattggaccaacatgcatgtccggtacctcggatttaactattaaaaatctataggcaatgctatgatgagcata

SEQ ID NO: 7917 - DNA, 448 bp, Oryza sativa
agcttgtacaagttgggaaggggttttttgagagaaaagaataatctacttcaaccgatatgcccttatgcacggccatacataacatagaaatcacacgtggaaggggtgggcaattagctagagcagcaggtgctgtagcgaaactgattgcaaaagaaggtaaatcggccactttaagattaccatctggggaggtccgtttggtatcccaaaactgcttatcaacagtcggacaagtgggtaatgttggggtgaaccaaaaaagtttgggtagagccgggtctaagtgttggctatgtaaacgccccgtagtaagaggggtagttatgaaccctgtggaccacccccatggtggcggtgaatggaaagcccccattggtagaataatacccacaaccccttgtggtatcctgcgcttggaagagaactatgaaaaggaaaaata

SEQ ID NO: 7918 - DNA, 398 bp, Oryza sativa
agctttactcctgatgcattaacgatcttgtatccactagttattaaacaagacagagataaatatctggaacacggtgccgtcattatagctgaataaaattatatttattttcattttgtcaaaaattatatgtaaataattattaaaataaatactcttgtgcaaaggaatcttcctaaatttgtatttcaaacattttatgtatgcatatgaattttgtctttgatatatgaagttctgtcaaaatatattacgattttttcaacagttcgaaagctacacttattattctacacatgtatgcggacacttctattaatttatattaccgctagcaattccaatcattatgtcatcagataattgtcgcgtctctagtacgatatatttatcac

SEQ ID NO: 7919 - DNA, 437 bp, Oryza sativa
agcttgacctgaattataagaggctttattgtactatattgtatactagaataggaagagattagagtagaagaagtcggaagaattccggagttgtcggtaatcttctctcatttcttttattcggtttattactttgatttcaatagaattatcttcctaagtaatttagatttatcttgtgagaatcatctcttggttagttcctaaatagcatacgggattattgttcactataatcaactaaaatatagtgattgctttggtgagttataaacactaaagtagatattaattgcttagacgtggtgtttaggtaattggtatccagtaattgctgcgtatcccatagtacgtttgacgtatgtgtagaggtggtgacagccttcgagatcacttaagccctccctatccgggtatgtagtagagtgacatct

SEQ ID NO: 7920 - DNA, 369 bp, Oryza sativa
agcttggcttaactcacagttattggttctttcaacgagcagatgctcatgcactctgtttcacggtaccgtatcatcacgtgacaggaaatatcagaactcagtaatgctatgctatggataataatgcacactctctgttattctgaacgcctgtactgacacatgtgtttgatgtacggacggcatacgaggtgaagatataatacatgatccttgcaacgggaaggtcctgcacacgttcgcgcgttgggttacatctcacggctattatatgcgtgcgtcgacggattccatgaggtgtatcgtacctctgtctggattctattgtgggtacaacatggaatgctaggacacatctaccttatc

SEQ ID NO: 7921 - DNA, 318 bp, Oryza sativa
  unsure (1)..(318): unsure at all n locations
agcttctcaaagctggttntatcagagatgtactccatccagagtggctagccaacccagtcatggtgcggaaggtcaacgggaaatggagaatgtgtgtctattttaccgacctcaacaaggcgtgtcccaagaatcacttccctcttcctcgaatagaccaactggtggactgaacagccggttgtgagttgctgagctttctcgacgcttactccggctaccaccaaatcagcatggcgaaagaggacgaggagaagacggcactcattacgccgttcggggtattctgctacgttaagatgccgttcggactaa

SEQ ID NO: 7922 - DNA, 414 bp, Oryza sativa
  unsure (1)..(414): unsure at all n locations
tcggtgatggcaccatcctgctcgcagtggcgtcgacaacattgtccatgagcacaacacgtcactgtgacggatctggggtcaccgcccataggtcgagtgcatctcccccacggcttcacccccacactgctcactatgctaaagcaaaacatatttaattctctcagaggcaagcatgtataggcgaatccaattaaagcaagcagagatgagtaatgtgccaatccatggcaaagctgagaagaacaaacaaaatcccttgcgctgccacctgcaccaccagttcaccactcatcgtgcggctgcccgcggcgacgacgccacaactcctcttatgtgctgccactcgccatgcgtncaccagctcctctgctcgccacagctacccccttgcactaccgtgcgtctatg

SEQ ID NO: 7923 - DNA, 415 bp, Oryza sativa
  unsure (1)..(415): unsure at all n locations
tcagagtcacctgatgcatgcaagcttgacttcagcagcgagcgactcctctccacaggcttttctngacggctgcgacaaaaccaactgtgacaaaacagctccaactaggaagatcttcagctctggtgtgggggaaaagagagcaagactgagtactacccactgtactcagcaagtcataccggaagaggaggtatgatgcatgatataaccaacagaggctaaaggttcttttgcataaagctagcatttaaaagcagtagttgaaagcagttaaacagttgtagtaattaatcaatattaaccaaacactgtccaacgctacaccacgttgcaacatgcccaaccaaccacctgtactacaccagttcattaagctaaactaggggtgagactaatcacggtgaatctg

SEQ ID NO: 7924 - DNA, 479 bp, Oryza sativa
  unsure (1)..(479): unsure at all n locations
tactcagctgggatttgattggggattagttgaagattttttttttgaatttgggtttgaggattctttgtttgggaatttgggtttcacgaattcgggcttgaagattctatgtttggggaatttggttttgaaaattttggatttgaggaattccttgcgtggttctattggttgagtgttttccattcgagcaattcttcttttgcaagtttcttcatgtgcattctcctcttgagtattctccactgcacggcttgattggattccgtcagcccgttgtgttttcccttcttgcctctgggatctgtttgccctcattgcttgataatgcaaagcctgcaatcgctgcaactccctttgtaacccttcatattgttctctgttcaccgttacaaccncttgtgcttgcaccattatttgctagatctactttcgtcggagctgatgttcttgccgtttcttgactctctcaatga

SEQ ID NO: 7925 - DNA, 257 bp, Oryza sativa
tcctgggcctgatgcttacgtcaaggaagtcgtcatgcatacttctgccgcagatgaatgagctctgatcttgtgggatcaggcattgcgttcgcagccggaataggattgctcgcactgtggacaagatagtgctcgaaccgtggaccagacatatctgtctatagccatcgatgatctctgcccctgattttttcgggataagcaccacggtggcataaactacgaaggcgagatgcgagtttctgagatcgagc

SEQ ID NO: 7926 - DNA, 431 bp, Oryza sativa
agcttgccattgccattgccaacccactccaccctcacctgttaaagcactgcctcactccctcccttctcaacccggattccacctctcctccgcccgccacccaccgagttctctcccatggacggcgacggctgggtctgggtgcggcggccggccgacgacgacgaagaggagcggccgctgaaggtggtgttcgactccccggccgagcacttcacggacgcggcgcccatcgggaacggcagcctcggagccatggtctggggcagcgtcgcctccgagaagctccagctcaaccgtacgttgccgcttgccgttatttctcggtttcttggccctgttgatgctgctcgcaaggcgttcgacgaaatgccccagctggactatgctcatgatagcgacagtcttctactttttttctttcttat

SEQ ID NO: 7927 - DNA, 476 bp, Oryza sativa
tgacgccaaccctacctggcgcgccaactgtcgaaactagatttctgtttaataaaaggggtggctatcaagctggaaaagtgtatgggtttggagacaaaagatttatacaggttcaggccttcttattcaagaagtaataccctactcctgtccggcgatgaatccgccgagtgtcttcttaattgtatgatttggagaaaaataacatgtgcccctagaggcacccggaccccccttatatatgggaaggagtccgtgttacaaaagataatctatatccctaacggaatatgcagatacagataaaatacagtcgtaaccgactaagtctcaaagtatttccttgatgtacaagttgagaaacaaacccgagacacatataagatattctatctatatttggtatcctgtattcagtccaaataccatcgccgtgtagatatgggatatccataatgtggaggcccatcatg

SEQ ID NO: 7928 - DNA, 323 bp, Oryza sativa
atgcaactttgctttgaatgtgccagattatgttgtatttctgcccagagggggtccttgaaggctaagtatccgatccatcatcagggttgatgaaatccctcctcggcattggatcttgtcagcgaagaataagccgattgggagttggcccattccgagttgtctagctgagctcattggatgatagaattcataagaagcttggatggttcttccttgatgaatgccaacaggaaggatgcatgggctgattgcaccgagaagatttccctggatgattggtatacttcatggttgatgtcttgaatctgaagccactg

SEQ ID NO: 7929 - DNA, 456 bp, Oryza sativa
aagccacgagtacgccaaaactgaagacgccgtcttctgatcaaagcagtcgggtcccagttggaagcaaaacaagggtacgccggctaccggaggaggtggaagtaacaatcataaggaccgcaagcgtaagcctgcggaacttgttgcaaccgccagtcactcttctcgacagcgttcgcgcgtcaacacgttcgacaagatcatgaactcccaatgcccgcaccatcctaactccaaccacgtggccaaagattgtttcgtctacaagcaattcgcggatcaatacaccaagactgcacggaagaactctgacgaagaacaaagcacgtcgaggaagaaggacgactgcgacaccccggcaggttttcaagatcaccgcaaggagctcaaccatatcttctgcggccccctggcttatgagtctaaacggaagcagaagttgactgaacggga

SEQ ID NO: 7930 - DNA, 438 bp, Oryza sativa
  unsure (1)..(438): unsure at all n locations
agcttacatatgtaattgtttactatctttactacttaggaacaaatgagtgagatgataatggagaacagcgtatacagccgagtgacgaattattataggagtcatcatgtacaaatcaattcatgttcacaggttcggacctccccactatatcaactgttgatggacctaaacgactttataaaaagagactcgaggcctatgatactggttgaaaagaatatggaggctaagctcaaatgggactgggcagatagtcaaattcaatctgacatgcttgtattaaccaaaacaagtcatatatatcttttaggccgagatagttgtgctctntaattgggccttgaaattatgtcgtgatccaaggagaggagtgctaccctctctggatacacacaaccctaagatgtactgactggtagacatacatattat

SEQ ID NO: 7931 - DNA, 455 bp, Oryza sativa
  unsure (1)..(455): unsure at all n locations
tggtggacataaccaatactagcccctgatcgctagtgtttatttagacgatcatcaataacgcgcatgatagatcatacatgcaataataaggaggattaccttggctccagagaacaatataagcgaactattagtgggagcaacggctgcatagatagctggagcattgtcaggagatgttgcttcgaccccaaaatgggtgaaagcaaaagtgtgatctggcgactgcttaactattacataactgattcctgagtgcatgtcacataatgcacagacaattatgtgagtntagcttatacatatagagtttaagaacaagccatattcgattaatgcaccgtttcatctcctggatggcttgaggaaccaagcgcagcctttatatacatggtaggcgctcttcaagacatctatgtaactctgagagacatggaaggggctctcacggc

SEQ ID NO: 7932 - DNA, 415 bp, Oryza sativa
cgacctgatgcatgcaagcttatccattccatattctttaattttctccacaccctgtaaacaaaataggtcaatttaagtaaaacatctaaaactgatgttatcagcattggttagagcatggaaccattgatatacaaactacataaaagccaattaagaaaaaaaaattccagataccgtcacactactaataatggccaggcaatttatggtagatgaagttcctcgaagtaaaaggccacaggtaaaaatcatttgtcagctaattattctcggcatatagaatctctaccaaacacactatcccatagttttggaaaagctacaggtctgtcttataatacagaaacctcatcccgcatctgcatatctaaatagactaaaaaaggtcgagaaaactgcgtgttaactc

SEQ ID NO: 7933 - DNA, 453 bp, Oryza sativa
  unsure (1)..(453): unsure at all n locations
actatactacatgtatgattagccgagtatcattcttgatgacaacagcacaagggcgagggtcaggagcaagagttgactgggcctcatcttgaatcgcttntgtcaaatgttaacagctagagcgttgactaaattaagtgttctgctgttgatggtaatctgactgggagaaaggcttgtggaattgcacatgtcttatagcaaacaagacttgctatttttggaagcacattatgatagactagtagataagatagataagctatttttggaagcacattatatataatagcagaaattaaatgtaatcatcaatgtggtatacgtgtactctcttagaggataatacagtcaataaataatatatggccggtattggttttgagatatagcctcatttggctctatctcagcccagcactacagaacaccctcgtgacttcagcctaa

SEQ ID NO: 7934 - DNA, 349 bp, Oryza sativa
agctttgcgatttgagtgtgtatgaaattaaatactgctacaaatgtattctttcctttcaacgatatgcagaattatgtacgagccatccatacacgacctctgttttatttgttccttccattgtttgtatttgaataaccttcctaaaattccggcatctaggctcgatgtataatccttagcttattagcgcgagcaaaaaaagttgaatctaaaatacaactctagagctaattttaattttcaatcatagtttattctttacaaaagctcttgagccattaaaaatacataaaagcttcgatctataaatggtgggatactccctccattgcaaagtacatat

SEQ ID NO: 7935 - DNA, 368 bp, Oryza sativa
cttgagtcatacactggtgatccgatatatcaaggtgacggctaggggctctatcttgtcgatgtctgagatgcactcttagatcaggtgttgcatgtggcgcaccgttggaatacccaacggctcattgctcccgtaacaaggtcgctctcatgccgttcgtagctcgaaccgcttgatctgcaggaatgatttttccgagatcacattcagagcagtggaagactactcttgcacacgcgatgagggcgatgtactctatcagcggacactgtgctatgaactcgtagaacgccttcttgaacacactgtatcgtgagagatggcacaggcgccttagcttttgtgaactgatgacgcataatata

SEQ ID NO: 7936 - DNA, 391 bp, Oryza sativa
catgcaagcttctaaaccagtccatacaaaacattctaattatatttcttaagaaaagatcgtaggaacccctcaagttataaaaaaaaccccctgttttatggataattctagatatatggctgctttcaatatatttgctattatgtttccattatattttgataaaaaaagatgggtctcaactttggtagccagctcatgaatttacatgggtaggaagaccacataacactaaatacattttggcacgtcttcgagaccaaaaaggtgctgcaggtactacaatgatgtataatttaatctgttaaatacgctatttccatgtgctaaatcaatcccagataaataagttccaaattttcttgtttacatgtagatacttgcacat

SEQ ID NO: 7937 - DNA, 448 bp, Oryza sativa
  unsure (1)..(448): unsure at all n locations
cgatgggctgcagaaagccttatcgagggaagagactggctagctgcaacggatgaagctgagcgctgcttctatgccatgattgatcgaggccttctccttcctgccgactacaccgacaacccttcaggcaaagtgaagatgtgcacggtcgatccacatgttttctccttcattgccaggttgcacaaagacgatggccgtgctccagctgctgatagcatcgacctgccgcccgccctggctcatcgcatctccattgccagaagaattcaactctccaacaagacacgacaacgagtcagcgagggtttgaagaatcagatggacggcggtggcgagccacaagactctgtcgcacaaggcatggtctgtggaattcaactttncaacaagacacgacgacgacaagccagtgaggggttgaagaagaagatggacagcaatg

SEQ ID NO: 7938 - DNA, 297 bp, Oryza sativa
agctttgccgacatgtgtgacccctgctctctgcgatgaccttctgccagtcatttagcgctgaataccgcgccacacccaacggctgctgctcctcacacataagtggactactgcaccgacagtcgagccactatgcgccaagccgggatcctccaacggacgcgcactatgccaattcggtatccctccataggccacaacttccgcgccaagccggtctccatatactgcgtccgctcctatagcgcctagccggcctacggtgccataagctgagcttttctgcgacaagcc

SEQ ID NO: 7939 - DNA, 466 bp, Oryza sativa
tatgtcttgattcttcactatagcatgtggaaagagtatgcctctgtttatataccttctttctgtgtaggtaaatatctttacttcgtagtaatctttaccttcttgattgtcgactactccagactccatcataatgcttgtgcaaacaatgctctcagatataaagccagaagaaataccgtcggtaagcctattgcttacttgactcttttgagcgatgtgattgatgaaataaatatttttttttgactctggtgatttgcagcttgtagaatcactggtgagcagagttattcacgaatttgagcgtcgtactgctaaccagaatgaatcggtatttcaattcatcagtcttgcaaattctgcattgttttagtgaccttgtcgctatggctgtactaactacatgcgtagatccactaactgagagctctatacaggtgaaacatgctttggatcctaa

SEQ ID NO: 7940 - DNA, 442 bp, Oryza sativa
agcttgatgatttgttgctgcatttgtttatgtatgagccttcttggaagattttatacggaattcccttctgcctttagttgtgcccatgaacagagagactgtcaagatgttgaatgatgatgggaggaaagtagttcttatgattttacaggatgatgaatccgatgaaaattccccacggctgataaaagtattgaggtctgcagccagtgcaaaccgtgatctagtgtttggttatgtaggagtcaaccagtgggaggaattcactgagacttttgatgttaagagctcagagctgccaacgatgatagtctgggacaaaaaagaggagtatgaaatagtaagtagatcaattttcacattcctctttcaaaacaaacgcttggtgttttttcttatgagatgccaaagaatttgcctattttcatttcttaagttt

SEQ ID NO: 7941 - DNA, 459 bp, Oryza sativa
cttcactgacatctctttcctgatattgattataaatgtcagcaagaggatgtatgaagcgcataacagaatatgtacatctatttgaatatagatagtcaatcaccagagtttcaagatcatcatcgtcgcgggcatactttgcatagtcatttcttagagtgcgcatcaaaatcattgacactagcccagtgagaaagataaccatcatgaaagaattgaagattgagaaccaatggatctgccataaaatggattatctgtggtcagaggaaatgctgcaagatatacatgggaaattgagaatcaaggcataattttttatgtggaaaattggcaacaaaatacataagaaccaaagtgcagaaccaggctttaattgcagaaactgagttcttacctggtgttcaaagaaagggtagtcaaggtatacatcagagcggtgagcacatggtacat

SEQ ID NO: 7942 - DNA, 439 bp, Oryza sativa
agcttaaaaataaaacttgaagattgttgacaccgggagcagacgatagtgggtttcctccagtccactcaactcaacagcatctgcacctgcacggctgcacgtacggtacgggcgtgttggagtaaaggaaggctgtatggttggctcgaaacaccacaactccctccctttgctgccgtctccaagttgtagccatttgctttatttgctctgctctgatcggctgctccaacaacaaaattcaaccactcgactgtcatgcttttttggtcccaaagagcatgggcaaaaataccattctcctgtgtacaaacagcacctgagccaaagccctgagaagacatactagtttcaaggctttgttgaatttgaatgttgatgactaacgttgccacaactatgattgctaatggtattgcttaacacatgaagtgtg

SEQ ID NO: 7943 - DNA, 480 bp, Oryza sativa
  unsure (1)..(480): unsure at all n locations
ttgaaggccaatgggcgccatccgacgtgactgttgataaccttaatgagatggtggcgcacggcgttctccctgccaaggagatcatcgggtggcggccatcgtgcggtgaggcttttccgtcccccgatacacacgagggtcgtggcttctctcatttcttttatggcggctntgctcttccgacctcgaaatttttccgcgggatattaaacttctatggaatcagcttgcatcacctaaacccaaattccatagtccacatcgccaatttcatccatgtttgtgaagccttcttgggaattaaaccccacttcgctctgtttcgccgaatcttctttctcaaaccccaaccaaacaagagcaagccatgtgtagtcggaggggccggatttcatctgaggggaactctgagccacaagtacttctcaatgcccttcaagacttcaatacaaaggtggcatgcgaactggtttatgg

SEQ ID NO: 7944 - DNA, 400 bp, Oryza sativa
  unsure (1)..(400): unsure at all n locations
tagacatatactctgcttcagcagtctataatgcaacagttgcttgcttacttgacctgcaactaacagcacatgctgcaatagtgaatacataacctgtgagcgatcttctcttatacaaatctccagcaaaatctgaatccacataaccaacaagtacatctctagatctcccatactgcgaacatgcactatatgtaccatgtaagtgtctgaatatccattgaacatctttccaatgctctgtgccaggattagccatgtatatactgacaatacttaatgcatgtgataagtcatgacgagaacataccatggcatacataagtgaaccaactgcactngaataacgaactctagacatggacgtaatatcataatctgactgtggacataaatc

SEQ ID NO: 7945 - DNA, 320 bp, Oryza sativa
actcaagctgggagcgacttgagagaaagaagcctcctgattcccagctctgcttcatatgtcagcccaagtgataccaacttactctcaatatcttctctagtcagctttcccagctgatgaatggtgaactaagcgttctacaaagaaaaagaaatgcctacacggagatatcaacaaaacattgcattaatgcaagatttccctaaggaagatccttcatctaatgctatcaaaaacactatccacgccaaaagcctaaatgatggcctgtagcatattacaaataatgataatactgtgattgataatagattact

SEQ ID NO: 7946 - DNA, 413 bp, Oryza sativa
  unsure (1)..(413): unsure at all n locations
ctctaatcacctgctgcatgcaagcttctgggcacgtgccactagtaatttttcttcgtccaattgtagcattntaaattgaaatggcatcctctcaactcgaagctggtggtacttttccacgtcagagaaatcagcgccgcattcaatgtaatccaacgctttcaagagtatgcacaagggtttcttgttcgtcaatcggagcatatcatctacacttctttcaagctcaccgttgagtctagtaaccatcctgcctatttgtataatattttggacaagtctcttgaaagtgtcacccttacagatgtcagcgatcttcaatttgtaaatgtaacatttcatggcatacaccggattcgatgttcgatattcgtccaccatgcttaaatattcgcggtcccatcgggagt

SEQ ID NO: 7947 - DNA, 456 bp, Oryza sativa
  unsure (1)..(456): unsure at all n locations
tgacgccgaccgttcattcatagacaaaattaacatagattatattgtgtttgtttacttctatagtactgtcaatacacaaacatttaaccaagattttagtaaaaaatattggtggtagatcacacatggtagtattttacatctgaaaaactctgattcatatatcatctgatcctacctatcccgttatgggccaaaagcccataaatgttgaggttaaataaaagcccaactttttcttgaaattaacaagttacggaagtccactgataaaaaacgtaatcaaaatttcttgtaaataatatgttacactaatatcccgttttgacaagtagtggaataacctatattggctgagatcagatgaaaaactgtaggaactattaaatggccaacgacttgtttatatggtctgtgattagcaacactgtcggtaactngataatcaccaac

SEQ ID NO: 7948 - DNA, 294 bp, Oryza sativa
  unsure (1)..(294): unsure at all n locations
ctttaaacgcattctgtctcatgtacaaattcatctcgagtcaacgggaatcgccaaaacaagacagtgttgttgctgaaaccgaacttgggccttgggccctgtaataaactatgcccatctcggaagtgtctccctccacctccacgaattatcacttaaccctagctttattgtcctctacaaatagctttgtacatcctaaaaaaataattgggttntgtttagttgaaatttgacaagtgccattcaccttgtctctagtactcgttcgattagtcggcgactattgat

SEQ ID NO: 7949 - DNA, 446 bp, Oryza sativa
  unsure (1)..(446): unsure at all n locations
tctacgaattattagaagcaattgttgaccagccaccaccctatgtattatctgaccagatctctccagaagtttgtgcgtttatctcctcctggtctgataatcatatatctgaaattacacatgagatgtagtcttattactgctgtcctgaggattaccctgcatactactatggctgttctgctctatatttcaaagncttgtatatcttttgtgtgcgagtccagaataaaaataaactgcaactgcagaagaaatgtgtggaattattgagaacgctatgtgtgacttgtatatatgtgtagcaattccctcttccaggaagttgatggatcttctgtaccaaagtgttccttttgttaaccttcgaagatgcttagctctattgttagcatatgtgatcatgaagatgttgatggacacaattactgaaatccacaatc

SEQ ID NO: 7950 - DNA, 485 bp, Oryza sativa
  unsure (1)..(485): unsure at all n locations
tatcactgagatattcatactaatcgntagacatggaagccgttacttcgtataagaagcagagaacttgattaaatcactgtcgaaggctgcgaggaacatgtcggaaatcgaggacatcatggttatctctggctgtagcagcagcctaaagactcttggttccctcgtgaaagaagctgaggaactcctgcctagagcaagggcatccgaaatggaagtgataattgagcatcctagctgtgtcaatcgaaatcagattaattaaatcgtacataatctgtattattttaatccataccctcattggaaaactgtgtgccggggaaatctgataatcgatctganaaccgaaattaaaaattactcgtgccggtcagtaataaaatcaaagtgaaaatcggcctttaatcatctgaggccaatgtatagtatnttttttcttacnactttgtacattccattntgctggtcttctcttcttt

SEQ ID NO: 7951 - DNA, 334 bp, Oryza sativa
agcttctgtcatgtgaagctattcctgttacagtttcatgtataccatatacagattgaaaccttaacatggattatcttgctaggaaataacataaggtagtatgataggcaggagcatgacctattttactaccatgatttcaccaattaattttgtacatttatcatgactaaaccttatgggtttgtctgcccccaagatgcaatgattcacatcttattactgctttttacttaacctagctcatgtttgatttcccagaattctaatggccttatttatttaatgacatatataatggtttctgttcttgttcctgtaacattaccct

SEQ ID NO: 7952 - DNA, 505 bp, Oryza sativa
  unsure (1)..(505): unsure at all n locations
tagaaactcaagcttctgcaagatctcttcggatgcaacatgatggccttgatgggctcttcaaaatatagacaaataaaattgtccttcaactactctactctactggcaccagtagctaccttagaaaatcttgtgcttaagctgtgtttagatccaaaatttggatccaaacttcagtccttttccatcacatcaacctatcatacacatacaacttttcaatcacatcatcttcaatttcaaccaaaatccaaacttttccctcaactaaacacagccttagtagtcagtgctctgtatagattacaagagtctaaaattcacaaaacattctgtggatgtctctgttgtttgttgggatcccacaatgcatatatcatcttctttgaaaatgcagttntttatatatacagatgggtcctcttttntaanaaatgtatatctggatggagccagccgctttgctgtctgaattgcaatatcgcattgcatgtgctctcca

SEQ ID NO: 7953 - DNA, 391 bp, Oryza sativa
agacttgtacttttattagaatactcttctaaatatatttctggtattgaaatactttccgagtatatgagtaccaactttacattatgttcttgttatactgaatatacggctagcttatctaggagatgctttagtgcgggtataatgtttgcttatgcaattactctatgtcatgacgatgatattagagtagtatctggcagtttaggcgtggtgtctagattacgggatatcattatttggggttattatattgtggataagaggtgggccgctgatggtgacagctcagtacgggtattcctctgcgcctatatataatcctaagttaatttcctgggagggtatttctccgtatttagccacggttagatggtcatgacgggct

SEQ ID NO: 7954 - DNA, 465 bp, Oryza sativa
tcgtacccgcgatcctcttagtcacctgctgcatgcaagcttgaccatgcacatctgttggtagtattcggtgctgttaaatggcagcatgttatcaacactagtggcagcatcagaagtttttacatttcttgcaattgccttttggagctgaatctcatcagtatcaactttgctaaattctcttattactagtaactattactgtggagtttgggtaactttacagtgatgtttacctccgtttcacgggccctgtgggtggcaccttattttactttacaagcgaatcctgacaacaatttatagttgtgcaatacagatggcaacaagaagtctatctgatttcagcatgacaatcaatcggtccaggcgtccagccacttatgatgtaacatgatcttgttggcatactagcttagacattcatcaggtagtctgtcctcttttattagtgcatatgct

SEQ ID NO: 7955 - DNA, 346 bp, Oryza sativa
actaagcttccaaacttgacgtaagattctctgtcttgggaggggctattttcaaaaaatagctcccaaaaatatttcactaagaaaatatggctaagagcacttaaggatcctcataaccacacatatgaaacccctcttaataatatggtttttcccaaactcaaagtgtaaaatagagctagcctaactcggctccgggtcttctgaccactttgaatttgatgaattggggggttgtcgacgtttgagatcgcgactacagtatttgcatagtatggggatcgttggtaccatggtatatgcaagattgaagtaaaagagatgcagacaaggatttttatac

SEQ ID NO: 7956 - DNA, 341 bp, Oryza sativa
  unsure (1)..(341): unsure at all n locations
acataaaaagattggtgaaaaatatcgtttgctgtaaaggaatggacataattntgttgcatgattcaaatggtctgaaaataatttgagaggatctgtaattgaaaaggggtggtattgtgtcnggggtgggtgaacgaatgcgcatctcgaggaggttgctttgatgaaaaaaaggaagaagaaaagatgatattgggtggtggaggaaggaccgttactaggatggatagctttgcggtaaaaataacctgtgccttgcctccctgaaggatttttcactcacgatcggtactttataatactttctaatgcaatttattacgggaaatccgttttaa

SEQ ID NO: 7957 - DNA, 487 bp, Oryza sativa
  unsure (1)..(487): unsure at all n locations
ctcagcttcgagccgcgncttattggcccgggaacgacatgatgctttagcaagcctaagaacaaggggatcaaggtgtggagcatctggggcctcctgcacaagaagagcagcaccaccaacagtgtgggtgccactgccagtgcgttcgccggcgaggcacgggcggcgccaccggagctncgggcaaggggttacgacggccagatgctccggtgcaacagcagcgtcagcgcaagaagctcattcagtggaattggaagctcattcaatggcggcaggttggggatgaggagggcacatgaagttntgcttgagaggaatttcagcgccaggtactcttcgtcttcctcctgcaggtatcagtttcacaaggatgattactccaactccattgcaacaattctggagctggagctggaagcaggcctcctcgttcctccacctttgcgaggacctcacttggactctactactactgaactca

SEQ ID NO: 7958 - DNA, 288 bp, Oryza sativa
  unsure (1)..(288): unsure at all n locations
agcttgactgcnaccttgtttcttgccttatacgatactgctctgaatttcgggtgctccttacagtatgtactgactacttgacctgtaagttactgtccttaattatttcttggaatttatagaattggcttgttccctgtcactagtctgattattatgaatcatccgagcatgaagttctgaaagtgagatgcctggtatagccagcattcaaccatagtgagtgcccataatacgctaaaaagagtgtgcattactgtagctgatgcatggctcgctcctact

SEQ ID NO: 7959 - DNA, 198 bp, Oryza sativa
agcttagattgtagcgacgtggcggtgttgttgatggccttgctgtgataccacgagtacggtgctcgttatgtttgaccgcccgtctcataatgaaatcgcgtgcttgctatatacatccttgacacaaacataccagcggtatgagctttatgagctcattgacatgtactgaatatgctgcttataccgcactgt

SEQ ID NO: 7960 - DNA, 418 bp, Oryza sativa
  unsure (1)..(418): unsure at all n locations
tgttcggcgaanaaccgtcactagctcctcctcctcctacttgtttctcgtcgatgccgaacctcgtatcacatcgccgatagccgtctctagctcgtacaccacaagatcgattcacgctcccaatggagccctgattcgtactcacggccgaggcacttcctcgtccacccatggctcgatgtctattctcaccttcctgagctccgatttggaccgcggacggctgttgctatcttgtcggttgtcagtttgatttgtgtcaccggccaccgggatcctcctaccccacataccctccatgtattgccgcggccgtggtcacgagctcatcgggctgcggattgattatcaacaccatctgacgttgagagatcacccaccaccaaacccgcatatgagacccactggctgtcgc

SEQ ID NO: 7961 - DNA, 452 bp, Oryza sativa
  unsure (1)..(452): unsure at all n locations
tcgtacccgggatcctcttagtcacctgctgcatgcaagcttaacattttccatgaccttgagtcattgactagttctgccatggcatgatgtccacagccactaatcttataactcctaattagtgtcctatcatgtggatccattatctaaaaaagtgctatcatgatcattagtccattacatgatcgaatgcaacacaagctgcatgcgacaggaaccgacaactaatgtccaaaccaattaaccatactagccaaacttcaaagatagtataacttacccacgaaaagctatcttgaggagctaatgatcctaaagccttaaatagttaaattgctatctaagagacggctatctatgcccagcgaaggcaataattagctcatcattcaagaccattcaacattaatgcatggaagaagctaaatacttttttnttttgctgactc

SEQ ID NO: 7962 - DNA, 476 bp, Oryza sativa
  unsure (1)..(476): unsure at all n locations
ntatgacagctttttttttaaagaagtctttcatcatccattgatttccttggaacagctctaacatatgtaagttacactaacaaaaacatgtttatggctttcaattccatctaatttcatatacactggtgactggttcatctcttcctctatcaactcaaagctgcaccactgtttatttgcatcatcatgggaatataatgatgcaagaccttgctgctgctgctgctgctatattccccccagaaaatggggggttgtcaacaaaattactgacatggacagtagtaatcaacttcatcagattcagaagtcaccagcactggttaaggtgttctgcagatggccaatgttttggctaaaccttgtgaccattggcggatccattctgctcaccgatcttctggaattcagcttggatgacctcaacaaatcttgcgtcatcggggtcacgcttcggaatgctgacatgt

SEQ ID NO: 7963 - DNA, 350 bp, Oryza sativa
agcttgtcaagcgattttatctctagttttctctgtacctgagatacgtcttgtgttcatgtgccatttttcatttttctttatcttgtttctaacaatttttttgtatatttttttgcaagatagaaatatattatcgatcatgatcgttccatgaattattcccggcaaaattctggaccttatcgggatatcggaagctggccggccggtgtatcttgctctctggtctgctataccatgtgtctgatgaactggtgtggacctcgtcaatcgatgactatgatcatgatgatacatttgtcaccatctgcggcacaagtactctgcaactctacgtatggtgatat

SEQ ID NO: 7964 - DNA, 475 bp, Oryza sativa
  unsure (1)..(475): unsure at all n locations
tgcgcaaaagcgacacatcaactccaactttcacagtgaatgcatgacatcgntgccaagcttgcgagagcaaagcatatccgactttaccacaaacttgtgtcgtcgttgacgagctcatcacaaaaactaccaagcagctgcgacttcccatgacggacatcaaccaaagccaccgtatcgtcgcttcctgcttatggttggtacctatacacctagaaagcgactgcaacgtgttatcgttgccaagctacattgcaccccaacaacaaagcagctctgactccccctagcaaaatcaactaagagcatcggccgcctactgcaaagcaagaaacgaatccaagaaggcgaaggcctcgccgaacatcccggcctattgagtgttggtgtggaagcagaaagcccgcagctaacgtcgatttgacgatcagacatatacatgaaaaggttctccaaaactacacncttaaca

SEQ ID NO: 7965 - DNA, 454 bp, Oryza sativa
  unsure (1)..(454): unsure at all n locations
gtcacctgctgcatgcaagcttcggatagtccctccatatctccatcacaaaataaatcaatttagatagaaaaataacataatctagtagaacgaatatgaacagattagtcacatccccgcctagaccgtttagacctatgcatgtgcttcagttcattcccttttctttttttttaagaaaaacatttcatttcctgcatcgtatctcttaccatttgatcctattactgctcaaacatgacttgtccatatactccagtcaggagattaggtttgttcggtttttttaattctttctttgtgcagttctgttttgatactactccctccgtttcaaaataagtgtagttttttactgttcatctccaacgtttgactgttcgttttatntaaattttttatgattaaatatttggtggcattagatgataaaatatgaatagtactctat

SEQ ID NO: 7966 - DNA, 487 bp, Oryza sativa
  unsure (1)..(487): unsure at all n locations
ntacagngagactgaaataatagctgatgctatataagcaatctctgtacactactgactaanaaatgagaacaatatcaactaaaggcatctaataaaagcaagtaatgatgtagtagcatgcatgcctggcaaagcctcccaatctgaatcattgaagtaggcatcatagaatttctctggaacagattctggcgaggaagccaaaaggaacttccagtatccacttagagtctggacatatggcaagcccttggaccaaaacgcagcactttccagggcaccacgaaccgcgtcatcattccaaacagcagagtcagaattaagatagttcacattcctccgttcatgccaatacttgagggctcctattgacaagagaaaacaaatcaatccgaaaatcactgtacaaccaaatcttctatctacctacatagtggttctgggttcagtgctgcaatctctaccttcaggtgtgtcatgtgag

SEQ ID NO: 7967 - DNA, 423 bp, Oryza sativa
agcttgacattactgaccactgggtctagtaccaggggttaccgccccgggtggaccactcggtcatgatgatccgagcggtcaaacttgattgcaatctctgaccatcgaagatattggggcgtgtcgggctgaacagcattgatctcccgttcggtcaacttttgcttccttttagactcataagccatggggccgccgaagatatggttaagctccttgcggtggtcttgaaatcctaccggggtgtcgccgtcgtccttcttcctcgacgtgctttgttcttcgtcggaattcttccgtgtagtcttggtgtattgctccgcgaattgcttgtagacgaaacaatctttggccacgtggttggagttaggatggtgcgggcattgggaagtcatgatcttgtcgaacgtgttgacgcgc

SEQ ID NO: 7968 - DNA, 443 bp, Oryza sativa
tatctcttacgctccaggaatggatcagtcagaacatcaccttctgctctcctcgaccaccgccgactggtgtttccgcctgcacggctggcctattatgccgccgttgttgggcgtctacgtcttcatcgaccggcttgccttcgccgccgccgactggtgtttctgcctgcacggctggcctattatgccgccgttgttgggcgtctacatcttcaccgaccggccgcctcgaccgccgccgactggtgtttccgcctgcacggctggcctattatgccgccgttgttgggcgtctactagtatgagtcttatcccattatagattgctatattctgggacggagagagagagagagtatcttttaacaaagatatgacacatgcctgtacatgtacgggtcttgttgcctggctgccacaatataattcagatctgaact

SEQ ID NO: 7969 - DNA, 438 bp, Oryza sativa
catgcaatcttgtgcgccttgccaccagcaggttttctctggcgcggcctgtgaaccgtcgattgctgctgcgagcacgttcacacccgtgtacatgccagcatctgcgtggtaaatttgccaccgtagtaccatcattgtttcgcgtacaccatgtataatatattcagcgtggctcgatcgctgttaatagtatatatagtatctgctagctgcacgtactggttgttagtccttcctgtgtacatgatcatatcacatagtcaaagccacgggctctctgataactaatcatacagaggtactgatgattaataagctgtctctggataaggagatcggttgacatggatacatcggcttactaattgtacgggttatataagggggcggcatcaacctggaaggactatgggtggggcggtgtacatgcagatt

SEQ ID NO: 7970 - DNA, 373 bp, Oryza sativa
agcttgccgttcgccttgtgaacgaccaccgggttcgtcatccactccggatggatgacttcacggatgaatccggcctccagaagtctcaccacctcctcgcggatgaaggcttgacgttccggggcctgccgccgcactttctgccggaccggccttgcgcccggtcgcacggcgagacggcgctcaatcacctccctgtggaccccgggcatgtccgctggtctccatgcgaagacgtcagcgtttgcccgcatgaatgagacgagcgcgtcttcctatttgccatccagaagaccaccgatccgtgtggtcttggatgggccgtcgcccaatgcatacctcttgaccgggacctcgtcgcatgtggcaa

SEQ ID NO: 7971 - DNA, 412 bp, Oryza sativa
tcatcaccttccttgctcacacgttcttgctgctgccggtgattgtgttatatctcccaatgtgtacgtctcaaattatttcaggaaagaagcaatctttcatacatggagtgaggagatatatgggttcgggatctcaagatcttacacaacgctgagtgcccaagttttttatattccagatccatctaaggtaagggtgaaaaagggtcgacgccaaactagacgcatcagaaatgatatggatgagtcagaagcaggtgggaggactttacgctgcagcaagtgtgatctgcgcggccatacttacaagaaatgcccgaagaatgcagaagttccaagcggcgcagatgctagtccatctggacaggcaagtgatggtaggcgaccacctggtgaaggaacaacaagc

SEQ ID NO: 7972 - DNA, 442 bp, Oryza sativa
agcttatatttatcattcatgcgctctatgttttctttttttgtttcatgtagctttcacatcaattcagcacgttgtttatcatcaaaatttaatttttcaaaagatggcaaaggcattaaatcatatgagcatggggcaataacccataaacaatctcaaaagggcacatctttatagtagaatccagctaatgattataaacaaattcaatatgagacaaacattctttccatatcttaatattcttctttaaaacaacccttaacatagtatacaaggttcgattcacaacttcagtttgaccatcaatttggggataggtaataaaaaataaaagcttagtcctcaatttagcccactacgttcttcaaaatggctaagatatttagtgtcacgatcagaaacaattatgtttggtcaccatgcaaacaacaatttc

SEQ ID NO: 7973 - DNA, 487 bp, Oryza sativa
  unsure (1)..(487): unsure at all n locations
tcttcgtggcacctcgttgcccacgtgccctcttctgtccaacggaggtgtgacttccactagcctcctcctcctggttcccctccacatacctttccacgtgcccctcctggttcccctccgcatccctctccacgttcccttcctcattcaaatactggtttgggtcctcgttcccctcttcttcgttccagtactggctgctctcctccgcgattgtatcgtacaatatctgttcctcatcgtgatcagccatctgttcatacaggaaacatctgctaagtcatgagacatttatgttttaacaatcttatatgctaacaatcatatgctaagtctaggtgacgtatattataggaccctagctagtcaataaattatatagtaagtctaattacaaatctaataatcttatattaaaactcaaataatcttatactaaaactcanatagtgataaatgctaagtctacgtgacgtatattata

SEQ ID NO: 7974 - DNA, 403 bp, Oryza sativa
  unsure (1)..(403): unsure at all n locations
tgcttatacacggtctattgttgaaatatgtttctgaaaagggtcggttngtctaattttcagccatctatgagctcaagtccaaacacaacaacaacgcaatatatacgcatcataagatacatggccagctcgctcgcttgctctatccattttgggatcgggaggcctctggaatacaccacgcttggttgcaacctgcacaggagttggagaccattgtcgcgcgctctcatggaaagcacaactatttcatgaaactagtgcttcgttttgcatttcatgacatggagggcgtccgcttctccatggaaaactacctggtgccccaagtcgttgagctgaacaagctatgcgcatctggacgaagctctttgactattccttaccgtcggtgatacgc

SEQ ID NO: 7975 - DNA, 474 bp, Oryza sativa
acactatgaatactcagcttggttccattacacggtttggttaatacgcactgtgtgttctcttacacgaccagatcttacatggtctttcatctctgaaggatctgacaaggccttatcagttctgggcgtccccagccgaagaacccttgggttcctcggaggccttgttgagacggcgtaaaaggacataatgataggtttcaacgctaggcgtcgtcagagtgatgcgttgttgggtgaaaacactttggtcattatatgggaccaagaagaagtctttattgatactgtaagggtgcttacaggtacaatggtattgactcatacatagaatttacgtagttggtctatgttccatgaattctctaattcgcgaccgtcgacgtctgcgattatgtatgcgcctggccgcaaagcttgcgtgatcgtgtatggtccttaccattatggtgagaagtatgttcaccctgc

SEQ ID NO: 7976 - DNA, 413 bp, Oryza sativa
  unsure (1)..(413): unsure at all n locations
tgcttactacatattaatagaccaaatatccatattgngggtgggaatagatttgatgtgacctaacttgtattaaggctgagtttgaggagaaggggattgggaagatacgcaaaacgagatgagctattagcatataattaattgagtattaactattttaaattttaaaaatggattaatatgattttttcaagcaacttttctatagaattttttttacaaaaaacacaccgtttagtagtttgggaagcgtgcgcgaaataaaagaaacaaacaaactcctattgtcatgctgccgaatgcagcctattcgacacaagcacatatgtatgtgactacactgtgtaacttcaaaactattttttttgaacgactcgcacgagatggtgcgaagttctattgatagagca

SEQ ID NO: 7977 - DNA, 482 bp, Oryza sativa
  unsure (1)..(482): unsure at all n locations
cttgaccgctgacttggagtgaatatttttaaagtgggtgttcgttataatcttgtgccgggacccggaggtagttgcgctaaacgggtcaaagtgtcaaactttgccctctgttttggtgtcggaaaattatgggagagggggatactttacgacttgatctacagccctctgttttgntggcacacggattggtcgaaccttcttgtacgatgggtgtacggtacccatccattcatgacgttgttctacggtcagcgttacggcatgctgcttgattttgttcacttgtcggtaggactaggatgccaaaatagttggtggtattgcacaacctaatttcttagttgtttcttttttgtttcgtcttttattagcggaattaacatgttttcacatcataatgatgcttggttagaagagctaaaggttctgctcgtcttagttntatttggcagaaaagaatgcatgtatgacatttg

SEQ ID NO: 7978 - DNA, 463 bp, Oryza sativa
  unsure (1)..(463): unsure at all n locations
ggatctctaatcacctgctgcatgcaagcttcggcactcatattattntggtatcacattcgaagcaaaacagccctacatctagtctcatatatgcagagatccaatccatgtcagcaatgacatcattattgttcaaggcctgtatttcaatactgtcttcaagatccacgatcaaatatctgatattatatgatctatttaactgaggaaaatacattagcagtccttatacttttcatcagatgtttgtaaaaataacatgacatcacaagccttgggatcatattagcataatttgatctgtgtccagcaaaaataaatatgaacagagctngcgcctttcataaccaagcttctttcttgtcctatctnttctttttgagcaaatatcagagaaccccgtggacatgggctgttgtaacaaanacccctatgtataactattaatttttatgtcccc

SEQ ID NO: 7979 - DNA, 440 bp, Oryza sativa
agctcgcttttatcttttccgctgcatttgttatcttttctatctttgacagacgtggatctgtatgtcaacaattgtcgcttgtgtaccctggctggtcctggacagggatttaatgcacattcagcttataaattctggttcgagaatttctgggcgtgacaaggatgaggtggtatgtttgcatgttgagctttacaattactgggttataactttatagtgagataggattcacattattggtagctgtgcgttctaatttgggatgtagggagtacaggacaacaagtgccattccttcaacaaggtgggagaaataaacaggaaaccagaattcacactgtgccagaccacactgaactgtccgattttacgttcttgattggtttttatcttcaactttggcttcatctgaaaaaatgcgcacagaaatctat

SEQ ID NO: 7980 - DNA, 404 bp, Oryza sativa
  unsure (1)..(404): unsure at all n locations
agcttattactctctatacactcttctgctaagatatctattgacactgttagttattattctagtgctacaggaagtagaatagagtaactctcggagtcctcggagtcttcggaggaatttcagtatgactttagtagttttccttctttcttttgtaagactttcagaattaataaaatgctattctttatatactctgatactttagtatgtctaagtattgtctttactttatacctgtatcgatacagctgtatagctagcctaccagagaggtgcagtggtgtgggntttagtgtccgattattcgattgctctatgtcatctcaggggatgtagagtagtatttaataatgtagacgtggtggctaaaatattaaatatcattatttgggatatat

SEQ ID NO: 7981 - DNA, 480 bp, Oryza sativa
  unsure (1)..(480): unsure at all n locations
tgtgattcgtgcattgtgatcaatgaagaagaattattctattctttcttcctctgncgttccttctgtcccacggtgtgcccttctgcctgtgcacttctttcttactttgttcaatcttaatgtcgccgtgcctcgctgtcatggggactgcggcctatggcgccagtcaaccacaactactacctccgatcactgtcagggcatgcagatatgttctgaattgttctattgtagttgatatatgactagattttattgttagggtttacagtaaatttatatacatatattctaccattttgatgctaaatactgcacaatacctatatttttttttagtttgactacatggctgtaaataataggtgaatttaattatggagaaaattcttaaacaacaagcagcagatagcacccacaagattggggtttatcgttctacgaatatgaaggagcataaatatgataaagtaatgt

SEQ ID NO: 7982 - DNA, 379 bp, Oryza sativa
  unsure (1)..(379): unsure at all n locations
agcttgacttggtgttatgaggctggtttatcgatgtctgccctgttaaaccaaaggaaggggcttctttggcatatacccatggacaattcatggcatagtgtccttgctctctacaatcatgacaaaaggggacatgctcttttggcattggaggctcattgacctgngtggcaaatgctcgatcaaacacacactgattctggtcttgacttcgaaccaatggtagctgtgaactaagcagcatactcggaatggaccaatggtgtgcccttgttaactctcttgaggccagtggtggattgagttgaaaactngagttacttgaggcatacccgctgacattctttcctttttctctgntaaacatactgtacag

SEQ ID NO: 7983 - DNA, 448 bp, Oryza sativa
  unsure (1)..(448): unsure at all n locations
tctcctgcgaatgatagcaatatgcagtccaatctcattatcttataaccaatcaaggatgatgcagtcactagaacaatgccagctacatctctccagaatcagaatgagtagccatgtgtgtgattttcaaatcgctacttatcnacccaaccgggaggttgcagcaatcatgtaataaacgaatatattcatgataataacaatgaagttgtatggttatggatgatcatgttgaggatgcaatgtaccgatgttaagcaccttccctttttgtttaaggcagggccttgtattcatgtaataagggagacatgtgtaataaaaacaagttctatgaggattattttggaagatgctgatatgggattatgtgtataattggttactgtcaaaggagacctatggtctcatttcagaggaactcatgtctaacctcgagttaata

SEQ ID NO: 7984 - DNA, 445 bp, Oryza sativa
agcttaaaggaaatataacaacatatattgatttatctttcaaagtactataagaaaagtaaacatgcatttatttattgaatatattacaatagaaaaacaaagtcaaagatatattttgaaaaccatgtcattgtccaaaacatcaagaattatggaaccggagggagtactacgtttactcagtactatgttctcatgtgtgtgcctacgaggcatcctaattagcacccaacttaccaatagcagccagatatgccttttatcctatgttcgcacgcacaaaacatgtttgcgcatcaaaataagtgttttataagtttgtgtactcgcttaaaaaatgttcatgtaccaccaatggcaattactctatacttcgagtagggtctaccgctaatgtgtcacctcataagaaaagataaaataatcaaagggaaaacatatc

SEQ ID NO: 7985 - DNA, 310 bp, Oryza sativa
gcccgccgaagccgcaggaacatgtgcacgcccgaaatcacaataacccccaactatgtgcgaaaaaacctcaccggagtcagccgggacacaaactgacaatttagatacgagccatcaaatagcggaaccactacaaagaaaagaaacggcgcggcatacagctagcgaggctcagctgcctcccacaggcggataactggagaaagccaacgattctatgctggaccatctcttcacagagaccgaagtatcgcagaatagcaaggacatctcacaagccacaacaattcgcaggcgcaagaaccaa

SEQ ID NO: 7986 - DNA, 384 bp, Oryza sativa
  unsure (1)..(384): unsure at all n locations
atcttgtccatatttggcaggacagtgtataaagtgcatacacatcttaaggtatgatccataaatagttagctatttgttatagtatgatgcacaacatatatagtctttaacgtaggtccactataaaataaaaatatgagatggctgctaacttttttgggatagtggggagagagagagtaagtagaggagaaaaaaatagttatttattcactatggccgattgtaaccttgaggtgcaccacaagaaacttttntctattgctggcttacacaatgtgtaaggtgcacttcatcaatatatntattccttttttactgtttttaatcatgatgtggttgtcctaagcataactcatctctgacccatcatcggtactg

SEQ ID NO: 7987 - DNA, 483 bp, Oryza sativa
  unsure (1)..(483): unsure at all n locations
taaccgctatccatcgaaagttcggaacaaagatataactctcttatggtggnctntcgaaatagtattctcaaaatcccttactataaaaacaaaaaaaaaagcgtatcattcgaaaaagatcgatggtcttttgaaatagtattatataatatttaaagataaatatattactctacaaatttacgtaaatatacgtagttaaactaaatctatattacaaatatgaaatatcccatcaatgatctttgttcgttcgatcttaacatacgaggttgatatatataataattaatgctttgatattttcttatttcacatcatattttagggtgtcaaatatcactcgacaaatattaaatgctaatttagatttatatttgtgaaaatgaaaacaacacaatttagttggttcattttacaccgttagattaattgtttctcctatatacggatatatgacaaatatataactggtgaccg

SEQ ID NO: 7988 - DNA, 469 bp, Oryza sativa
  unsure (1)..(469): unsure at all n locations
catcagattcatcaacatgagaaatagcattactagcaataaaagctagatcaacaacttgcttacctttgccctcatcttcatcttcagatccatcaaaaacttttatgagttcttgaattaaccactgcatgcaatgcttcttcttctccttctgcttcatgttcttcttcttgttcacgtcatcatccttgactcttccatcatcttccttcttgcctctcccaagcttatgacaatgcgagcgaagatgatcaagtgcacaacactcaaaacaacgattcggttctcctcttttcctgttcctaacatttttcatagctcaagaaaatttgttagatagcaaaaccaagtcctcctcttcgaactgttcgagttgatcatcgganatggcattaaataaagcaagaacagaagaacttgatgaataaacaccaacatccaaagaagatgaagacgaaaccaaagc

SEQ ID NO: 7989 - DNA, 429 bp, Oryza sativa
  unsure (1)..(429): unsure at all n locations
tcaagtcacctgaggcatgcaagctttctattcgtttctcttggtttgatgacagatatttcacatctgtctgctccatgagatgagaaacagacaaagtaggccaacacagtcatgacttatccaacaactaattgcctccaattaacataaccacctaagcacacttttacccatatcagtcaccacctgcacaattntccagatcagctgtctctctagaagaacaaaccttttgttgtcagtgcagtctctgctctccagattaaggtaatctgaaaagagtaattaagtcagcaaagttgatgatgacagatggaatcatacaatgctgcttctatatatacaacctaagccacaaactcacacaagatagaagagcaagtttttgctatgatcggaagacacatgatgaatgcacaacacttc

SEQ ID NO: 7990 - DNA, 463 bp, Oryza sativa
  unsure (1)..(463): unsure at all n locations
taacgcatcgggggaggctaatgggcgatcgatcgccagtgttctcttccagcgatcgggttgccccccctccccttatactcctctctcttctcccccttactcctccccttcttctctttctactacagtacaccacacaaattttttaaaaaaacaaaagttagaacaatctatgtatagaaatactatatataaaaaatttgaattcaaattcaaatttgaatcaggtatgtaaacttttgacttataaactttgggtctataaactttaggtgtataaactttagatgtatagaaatattgtatatagaaaatatttgaattcaaattcaaattcgaatcggatataatttaaattcaaatttgaatcgggtatgtaaacttttgattataaactntggatctatannacttacgtgtataaactttagatgtgtagaaatactatatatagaaaata

SEQ ID NO: 7991 - DNA, 380 bp, Oryza sativa
tcacctgatgcatgcaagcttctatccttatttgtggatccaatttattatgctacctagctgaaattgtatgttcatcgagtgaaaactttcatgctgaaattgttttgttcgtttttcccctttaagacttacatatattacaataacctgcacaatttttattaaggtgttacagtttattctacagcaaagttacaacatactccatgcaaatgtaatacagtaacttgcagcatttctgacactaataatggcaaaatttagtatttatataaccacactcatgaagcgcgccgatggcacgcccagtcatctagttagctttgttttttagaactcaaaccaagcgcatttcatattagaaatgcaacattttg

SEQ ID NO: 7992 - DNA, 387 bp, Oryza sativa
tcatacattaaaatactgagggagtatcatgtttcatgctagctagctagaggcttatgcaccgatcctatcacattattatcaacaactaacagatactaattcaagaacaatttattaacatagtactcttattaatttccataaacatatatactccgtatatacgttgagcatggatgtatatctgcatgcaagaaagacattcgatccagctagcgcatttccgtcaacactattagaaaaatcatttttcccgatgtgaggactttttctcgcatgcggacataacccttggagttaaatgactcactacataaatataaaccgtggcgaagttcgctattcacctgcgagaccacttaagtggtgcctgcgaaaatctat

SEQ ID NO: 7993 - DNA, 430 bp, Oryza sativa
cttacacacacaccattgctacaactttcatactttgtgttaacttctgagttagaatgtgatgctagtgtgagtggcattaagggttagatggtatgcctgttgcatactttagtgagaagttgcatggtccttgtttgaattattccacgtatgataaggaattgtatgcccttgtacattctgtaaagacgtggcatcattattagtggtctaaagaatttgtcattcattccgatcatgaatcgcttaagtatcttcgctctcaaaataatttgaatcgtagacatgcttatgggttgaatttattgaatcttttccttatggtatcaaacacaagaaagggaaagataatgtgattgctgatgctttgtctaagcactatattttcttttcccaacttgattgtcggattttggacttgatcaat

SEQ ID NO: 7994 - DNA, 480 bp, Oryza sativa
tccttccggataagatatcttctggataagctatcttctgtaattatctttccactcatatcttgattcgtccagaataaaataggtttcataacaagtatgtcggttctacttagtggaactctgctagttccaccctcgaggcactttggacatttgggtcacatgattctgctaccatcatctaggtgcccaccagcccctcataagtcataactcataagaggagttgaacttgtacccttgggaacatattgcctaccagcctcttgatctcttataaagttgcatttcgctgaatttatctccattcaaaaacattttctgttcaaaccatgtttgctgccagcctgtcacacaatattagagctatatgtttagtgaagatgtgtaaacatgaattagaattgaacctatgagtcacatgagtagcatatcggagaatataatggtcgagcctggcaccgatggggtggccac

SEQ ID NO: 7995 - DNA, 295 bp, Oryza sativa
agcttcgtgaagactttgatcaaagcatgttaccctttgatcaattgcccctataattgaaaagtcattattattttgtttgcaacttgcattattagaatcacacacttaacttgcttggcctctgtttgcgtgccaaaccgacggacctacccattagtcgcactaatttccgtatgtcgtactaccctgattccttgtcgctccacccttgtggtacctcggtattcgtgctctctgagcgcgtataccaaatatcccacatacacgcgtgcttgtcgaaaacttgggaaat

SEQ ID NO: 7996 - DNA, 449 bp, Oryza sativa
ctcagcttgggacaactggaagttgtacgcaacaatttctcatttaaagaacacaagcactgaacagtgagaacaaaacttaagacataattgcttatgttaaaatgatggtgatcaaaaaaagaaaaatacaatttgtcataaagactaggtacagaaaatttctgtaacttgttcaatgtacatacatgacagttctagtgtactaaagattcttattatttccatccagttcatacatctgagatccatcagacctaatataagtggcaacggcccacatgttttcagaacctagcatattatgatagcactgacctagatacttgaagtaaagaactaaggctcctattgagttccatgcagtcaacttccaatggcagcatagtgttccgaaagacccacatggacacaagagactatgcttagatgtagatatatcatgtatg

SEQ ID NO: 7997 - DNA, 438 bp, Oryza sativa
agacttggatgacgatctttctatgtttatcaaaattttgagtgatcttagatctgttgattcttcttatgatgttaattatacacaatctgaggtttctcgctactttttgaatggtcttgacatgcctatttgggagatgaaagttacagctattcatgagtcacgtgacatgtctactttgactttggattcgctttacacaaaactcaaaacacatgagatgaatattcttttctcgtaaagttgattctaagtttagtgctttggtttcttcctcgacttttttggatgttggtgctccttcatcgaagtcttctattcttggtttaattaatgccatctccgatgagcaactcgaacagttcgaggaggatgatttggttttggttactaacaaattttctcgagctatgaataattgtatgtacaggaaaa

SEQ ID NO: 7998 - DNA, 480 bp, Oryza sativa
  unsure (1)..(480): unsure at all n locations
tcacaaactgagacatctatggatatgcaagaactgttgtacttatagtgaaacaatatcaaagtatcccatgctacattttgatctaaccccaagaacatcaagatgcattagctgaaacatcgaaaaatcacaaattttgccattttagatctagcttattcctcctctccagtgaccaccggtttcttcagtctcatttgcaaatccaagctagggcaccatgggcccttctatctccaccaaagctgttgaccatcaccccgtcattgccagtcctagccctcagctatgtcgttgttgctactcgggcaaacggaagctgcctcagctccagattacggggggcctgtcatcttcctccaagctccccggccttaagctatgttgcgagacctagtcggtgagccacacgggaggacgtccncactgcttgtggcagccaccatgtctgccgctccacaagaaccttagtgggag

SEQ ID NO: 7999 - DNA, 385 bp, Oryza sativa
agcttggattcagctaacaactgccctcttcctcggtggagtcatactccttataatgaaaactacaggcttggagaagattcacaccgccgtgtccaagtccagttgtcccctgatgtggattggttcgctacctttgtgaaatgctcgcaggaaatgaatagcagcaatgtcatgtacaggcctgtggcttgccggagcggcaactcttctttcgtctatgtgctaactggtctgggatcttatttagctgagaaccttgagccttcctgtggatacctggcaatgactcctttagctctgggtggtctagagaattggcgaactgctactgcggctgcgacactggaggatgtaaattatgaagatgttgcagatccatgag

SEQ ID NO: 8000 - DNA, 429 bp, Oryza sativa
tggatgacttcacggatgaatccggcctccagaagtctcgccacctcctcgcggatgaaggcttgacgttccggggcctgccgccgcactatctgccggaccggccttgcgcccggccgcacggcgagacggtgctcaatcacctccctgtggaccccgggcatgtccgctggtctccatgcgaagacgtcagcgtttgcccgcatgaaggagacgagcgcgtcttcctatttgccatccagaagaccaccgatccgtgtggtcttggatgggccgtcgcccaatgcaacctccttgaccgggacctcgtcgcatgtggcaatccgctgcctcggtgcggagggggcggaggtgccaagcctctcgtcaccaccctctggcttggtcgcagcaacgaggtggtccgcgcgctgctccatgcaagcgagc

SEQ ID NO: 8001 - DNA, 442 bp, Oryza sativa
atccttatagtcacctgctgcatgcaagcttgagctgaattattttatgctatattgtactatattgtatactagaataggaagagaatagagtagaagaagtcggatgaaatccggagttgtcggtaatccactccctgtttctttctgctctgttaattactctaattataatagaattatcttttgagtaatttagttttgcttggagagaattatctcttggttagttcatattcagagtacgagatcatcacttactataatcagctaaaatgtagtgatttattttggtgtgtagctagcattaaagtaagtaattaatctgcttacgcgcggtgtctacgtagataatttccggtgtttgctccgcatcccacagtacgtgtgaggtgtgtgtatagatggtgacagccctcgagacactgaagtcctacatgtt

SEQ ID NO: 8002 - DNA, 424 bp, Oryza sativa
gagcctacccagccacccaaagtcttgtggtgccatagtggagctgacccgacgtatcaagctggtcgaaggtgtcatgctagcacgggggtttagcgacagcgaatcttcttcgcctgccttccctgttgtcccagacgtgcctagcctgccgaacgcgtggcttcaccctcgtcggagtctcatcctttgtccacggcggcttccctagacactgacatcactactatgtttggtgatgcgccggctattccgcccctttcgcccttggtgcatcgcaagggcaagcagccaacggccaaaaccttagcttcagagtgcgcgctccagaagccgtgtttcgttcgctcagatttccgaccaaagtaacggtaagcaacttgctcgggccgtctagacgattacaagaacacgctctatgaca

SEQ ID NO: 8003 - DNA, 361 bp, Oryza sativa
  unsure (1)..(361): unsure at all n locations
agctcggttatttcttcttcttctctctcttgttngctttctgtaggtttgtgtcaagattcgcggttgctattcagacgcgatttcagttttcaaatcacgaagcctcatgtttctgttgctntttggcctactggtttatcgattttgaagcagaaattaaccgtatccttgtactgccattgcctttcttcttctttttttttcttacccttttgctctgttcttgcagcaatgtcatctgataactttgcttattcctttcacagagaaaaaaattaacataacctttgtttttttaagaaataatctggtttctgctggttggcttctaactctgagatcccgtgtgctcgcaatc

SEQ ID NO: 8004 - DNA, 484 bp, Oryza sativa
ctgcaagccagaacgcgaaagacgaagcaggaggtaccgagatttgttgcacaagatgttctatagtatctgagcttggcgaggaatgagactgagaatgaaatcaatactctgtcctccttcgatggaatttaccggaacgacggaacattaagctacctgatgacagaggtatatatcaactgtgtgtacgtcgtaaaggaaccattttattttatgtgacatttggctcttaacttgtcatatcgtacgtacgtcgactcaacaggaagatatggaggctccaaaagaatgctccgagtacactgtcgagtatgctgttggcgagcgtgaaggagattgatgatattaaagttgagaaaggaaggctgtatgcgcaattcataagtgcgttaaagaagctttgccgaaagaagatggacgatggtggtagtgccccatctgccaacaattaagctagccgatcaacaatgattggtctcca

SEQ ID NO: 8005 - DNA, 342 bp, Oryza sativa
aatactcttcttatacatttatggtattgaaatatgtttcgagtatacgaatgcctactttacattatgttcatgttatactgaatatgctgctagcttatctgggagatgccttggtgcgggtataatgtttgcatatgcaattactctatgtcatgacgatgatattagagtagtatctggtagtttagacagggtgtctagaatacgggatatcattatttggggttatatgctgcggatgatatgtgggccgctgatggtgacagctcaataccggtattccttccgcgcctggattaagtcctatagtaaattcctggggagggtattcctccgttt

SEQ ID NO: 8006 - DNA, 471 bp, Oryza sativa
cgacgttactgaccactgcgtctaggaccagtgtgtacctttctctgtggaccactctgtcaagatgatccgagcggtcaaacttgattgcaatttctgaccatcgaagatactgtggcgtgtcgggctgaacagcattgatctcccgttcagacaacttttgcttcctcttagactcatcagccagggggccgccgaagatatggttgagctgcttgcggtggtcttgaaatcctgccggagtgtcgccgtcgtgcttcttcctcgacgaactttgatcttcgtcagagttcttccgtgaagtcttggtgtattgctccgcacactgctggtagacgaaacaatctttggccacgtggttggagttatgatggtgcgggcattgtgagttcaagatcttgtctaacgtgttgacgcgcgatcccttgtcgataacattgagtggcgcgtgcaacaagttcctcaagctta

SEQ ID NO: 8007 - DNA, 443 bp, Oryza sativa
  unsure (1)..(443): unsure at all n locations
agcttncattttagttnttctttggttgtaatgatatttttccttggtataacaatgtccgtatttctaaatttcaattcaaaaaatttctcattatgcatatagatttgagcaataatatgtaatgaattgttgagaactactatagcacaagtagcacactactccgcaatacccctatgcccctcccaccccacgcattatttcatttaccacacaccaaatctccaaatcctatatatttacatcggtttccacatacccatcgactgcaaccaacaccaccaccttttttcggatttaggaggcaacaacgcatacaatgttctctaacatcgcgtcaccggcacttatacccactttttttcttgccatccctgaccacctacaagttgggagtccatgtgtaccacgatgactgcaatgttgtactggtaagaaca

SEQ ID NO: 8008 - DNA, 479 bp, Oryza sativa
tatattcaaacctataacatcaaaggcaaaaagacattttctttcttacgtaatagtgaaatgataaaaaatgttacggtaggggcatggaagggatcaagttgaaatttcaggggtatagaaaggatcgggtaaatttcacgggtacgaaagggatttagtgagttttcatgggtacatatggaatttactcattaataataaccaaaacccataatatttctttctttcttgcttgcaaacttgagcttttcaaggcttgttgatcctcaatagccatatttaaggtcttgggtcaccagccatattgtcataccatggctgacagcctggaatatgggatttttttttctaagatcgggcactcttgggaattgtaacattccaatcgtaagaatgcaggaatagagaaaaaaggattatgctagcatataaacttgactctaagcaatctcaatacactagatatgccacttttg

SEQ ID NO: 8009 - DNA, 271 bp, Oryza sativa
agcttgatcctagcgacgacgagctcgtctgctgctacctgctccggcgcctccagggccagcccctcccgctcgaggcggatcccctgagcgcgcggccgctgaatcttgccgcggatcacggccgcggcgacgaggccttcttcttggcggaggcgcatgccaagaacgcgaatggaaagcggcagatgagcaccgtcgaggggcagagcatgtgcgtggacggcgggaggctccgcgtccctgatgacagtcgcggcggcggcggatt

SEQ ID NO: 8010 - DNA, 448 bp, Oryza sativa
  unsure (1)..(448): unsure at all n locations
tctccccgcgcgggagacgcggacctcgccgaagcctcactcgcgaggagtcatcccagcatagcgtcgttgccgcctggttgaggatgaggagtcgctcanggaggaggagctcgagctcgccggcaacaaccagcgcgcattcgtcttcgtttccgccgtgacggcgacgccacggnccctgtcccttcatccccgtgctcgtccccaccccttcatctccccatcttctccaatcttggccgagggggttggctctgctgtgctctttagcggcgagtgagtataacgagggaagagagggaaacgcaacgccatatgatggacgcggaagtcgaggacggtgcgaccagcggcaatggatggatgcgaagaatatgatcaacacaaccggtgtccacgagctagctccgtaatcaccggttgcctcgcttcatctgcacaaccg

SEQ ID NO: 8011 - DNA, 335 bp, Oryza sativa
  unsure (1)..(335): unsure at all n locations
gacgtggctgatccncacgggctgggtgaccctgtttattaatgtcgtgtgggtaaagagtaccccctttgcagaggtcattgaactgttcgaacagccgtgcccacagtcaagggcggatgcgaggtgattcctagcgtagttttgtttgactactgcttgtgaaattgcctgtgggaaactgggttcgatgtttgaaaaatcatcagctgacgggatcaactatgcccgggtggccgtttgaaaagatgttggccccggtggcccgttgaaaagctgttggccgggtaccaaccctgtttcaagatctaaagactgatacattgcacatactc

SEQ ID NO: 8012 - DNA, 442 bp, Oryza sativa
tatctttcgctcaaggtccctggtagggattgaacccttggaagctattgtacgcttgaagatcagcctgctgttgttgcatcagattgttgatgttaacgaactgagcattagcattttcctaccattcttgcgtctgaacgatgtgtccatcgaggtagtactggatctctcctgtctgcatatcaagggtgtctagcctcctcgtgatttcacccaagtcctgggaggaacttgagcgccaacagttggaggcgggaggcatcccgcttgatccaaaggaacaggtgtgcgcgttcccccagtgtacttcacgcggtgcttgccagcggttctcactggcactgtgctaggacgaacctcctgtgttgtgtcgtggtgcttgggtccaaccgggtgcatcccccgttggatcccagtccgcctcgtacatctgcatggg

SEQ ID NO: 8013 - DNA, 433 bp, Oryza sativa
  unsure (1)..(433): unsure at all n locations
ntgtaatagaatttgggaattctttcacattggtatcattgaggcattaataccgaaggttaaatagctccccaactgaatatggaatggtctcgataggcaagccggataattctaacacagcaaggtacttggattctgagaaaatgaaataagaagctgaagataatgccatgctagtgtcaaatgctatgaaggtacgtagcctggatggatctacagttgatcgaatttcactgttgcattggagcacagagacgcggcgagagtctgatcccacttgtaccaccccatgagtgtcatcataaactgtagagaaactttctttctttgattggaaaatggctagttctcgcaaaatatcatgcattcgaagacactgaatcctattaaaactattccttgctacgacttgaatcatgcttcgtcggac

SEQ ID NO: 8014 - DNA, 443 bp, Oryza sativa
  unsure (1)..(443): unsure at all n locations
tccaggagttttacaacgtctgcaggaatatgtagctgcctgtctctcaccatgggatggacaactggctcattctacagagttttacaacggacttactgtttcgtcccggaatcacttggacgttactgctgggggtgccttcttatcaaagacggtcaaaggggccgttgatctcatcgagaagatagtgtcgaacatgagctgcagtgaagaacatctccagacccatcagcatggcatgcatactgtcaaggagacaaaaatgctggccgcaaagctggacctcctgatgaagaagctagatgatcaggagaagaacaacccgtaggccgctgtcaaggcactagactcgcacatcacttgtgaggtctgcaggaacactggacactcggggaacgactgccccgacattcgtgaagaagccatgttcatggngaaca

SEQ ID NO: 8015 - DNA, 428 bp, Oryza sativa
  unsure (1)..(428): unsure at all n locations
tggttgtcgctgccgcagcacgtntcgcttagcaccattcttttgtcctgatatgtatgtatctcagtttttatctctcgcatagtttacattcacatgcagtccccgttatgcatggatgatttgccattttgtttcgtggtatctactaactgagcacatgatgaatcacctggaatctaaattttacattttttgttgacatgttgcttaatttagattgttctaggtatataacatttccttttgaatatattgattgcatatatccagagaacaaaatgtagcgttagtagtgaaactgcagtggtgtcccttttatgtggtcatttcaattctaatgtttggatatatagatttaattaatttcaaattgaagtatatgacccgaagaaaatcatattgcttgtntaataattccaggtcat

SEQ ID NO: 8016 - DNA, 432 bp, Oryza sativa
  unsure (1)..(432): unsure at all n locations
cctatgaaactcagcttaaatggtcccatctgataagccactcgtgcacattagtgttcgaccactcactctgccaccgaaagcactggtgcgccgcaacagacttgcaacatcaaatatatgagttcactaacaagtacacgtgtctattatattgcgaccaactggtaatctagggaaaaaagggcagtcacccatgatcaaacataaactagattagctttacaaatactgaaacactctaacggcactagccaagtaccttcaaaatgtggtgcaagtctctagacattgccaaagtaaattgggcgtggactagacattntgcanagcctacagtatgctgaagttcagtngacactcttctgaacaaattgttctcaagcattttcactaagttttgagatcaattaaggtcgatcaaacaaatta

SEQ ID NO: 8017 - DNA, 441 bp, Oryza sativa
  unsure (1)..(441): unsure at all n locations
ntgtaatagaatttgggaattctttcacattggtatcattgatgcataaataccgaaggttaaatagctccccaactgaatatggaatggtctcgataggcaagccggataattctaacacagcaaggtacttggattctgagaaaatgaaataagaagctgaagataatgccatgctagtgtcaaatgctaggaaggtacgtagcctggatggatctacagttgatcgaatttcactgttgcattggagcacagagacgcggcgagagtctgatcccacttgtaccaccccatgagtgtcatcataaactgtagagaaactttctttctttgattggaaaatggctagttctcgcaaaatatcatgcattcgaagacactgaatcctattaaaactattccttgctacgacttgaatcatgcttcgtcggacaagctctg

SEQ ID NO: 8018 - DNA, 436 bp, Oryza sativa
tgattgctcgttcattactaaattgtttatttggaatgaatagtatacactgtcgatgctaatttttctgtcatgtgatggatcgtcgcatgatttgtttgttttattgattgaataaagtgttgggttcacacaagtagctacaaagcccatgtttacaagtgatcctgcatagcttcacgtttactgtttaagcattaaatgcattatgtttaggaggagatggcatagagacaagttgtagtatcttactgtaaatgttgtcttttaagcctcctatagatgacgtggagaatactaatagtaagatacttactatattattgcccttgtcctaagggcacccatgtattgtattgatctcgtgatacctttttatgccacacaaagcgtaaaagatattggcattattcaagttcaaaaactcatataatat

SEQ ID NO: 8019 - DNA, 438 bp, Oryza sativa
ctggagaaaccgctgccagaagcttcgtgtgagaggagatccagtggctcggtaggtgtctagccttccatggcctctgccgcctcaatgccggagtaaggaggttgactggacgtggatgaggcaagccgacacgagggccaagcggcggtgagggggggggggcatggatggccgccagaccaaatcttgccgtaccgtggaggtgccccgaaacgaggcagtggtggtgcttgcagtggcaacgacacaactccacttgtcaccacaccacgcaccgcatcgtggtacaaatccattgctgggaaaccaagtggaagcgacaattgtgaccaatcttgctgcgaagaatgttgaaattataagcacataatgatttatattatttcataaataaatcatgacattgcagatgtaaactagattgaacgcatcatt

SEQ ID NO: 8020 - DNA, 370 bp, Oryza sativa
tcatgattggaatgttgccatgttggatgaaactgatttgtgtggatgttaacagaatcagaaattcagaacattaccctttttattattgactctttcttccatgtctcgatacccttcagaaaagctctagttgaagtgcctaaaatttaattttgaaatgtaaactgaagtcaacaacagcaggaaacagatcaatcgactgtttgcagattcaagaagcatgggagtacctaggaaaaggatgatcaagagaactgtgaccagccaatcatggaatatcacattgaaaatgacaccgatactaattcctagcatgagcatcggctggataagaagggctagatcatagtcaatcactggcatgtcc

SEQ ID NO: 8021 - DNA, 431 bp, Oryza sativa
tggggcaatctctgtaagcaatgccatacaattgttctgacttattatccaatccaaacagattgatctagaaacttaaaaaaacagaatattctctgttataaggcttgatattgcaacaatctggttttagattcaaaaggatctgaattcaagatccctgcaaggatcaaagttttatttgggtgggttatcctttgtgaggtccttttgcattctgtgaatcatttttctctcttctttttaactcatataatctgcctgccatacctaacagacatccaaactaggagtaatcctgagcttcagttctgaagaagtgagggtaaaatcgtatgggtaaaatcacaattgcaatcaaaactaggggtaagaacacaattgcctcattattatttctatccgccatctgcctgtactagtattttatt

SEQ ID NO: 8022 - DNA, 437 bp, Oryza sativa
  unsure (1)..(437): unsure at all n locations
taccgcacacaaagtagtcgcctttcactttttccttgcctttcttcttagaattgattgttgtcttgggtttgacatcaggtttgactttcttgttgttgtgagatgcatgggggttcttcttctgcaccaaattggcgctagaacctccctcgaccttttagccgcgggtgtcttttgccctcgccttctctccaacacccaaagagccaatgaaatcagtaacactgaactcttgcctcttgtgtttcaaagaagtggcaaagtccgaccacgaatgtggcaatttggcaataatgccacctgccaccaacttatccgacaacacacatttgttgttctcaagttccttttgcagcatctgaatctcatgagctggttccactacagatcagtcatcgaccatgtngtagtcatagaactgctccattacatac

SEQ ID NO: 8023 - DNA, 365 bp, Oryza sativa
gttagtggcgtagagctttcactataatgtgataatgaaacctcatgtagagtttttgagggaggagaaccgaattttatcgccggtcatgtgccgcgaacaaccggaatccacgatccacacgttctccttcctttccaccaagcctacacacaatcagaaggcgaagcctcagtaccggggttagacaataataaaaatttacgaatccacgactgagacacatgaccagaagatccaataggcatatattcccgtgcaaaatcaactttagaattttcagaaaaattcctccgaggccggcctgaccgaggtacatgggccggtctgaccgccactgcaccgccacgttgaccggtgtcctc

SEQ ID NO: 8024 - DNA, 440 bp, Oryza sativa
tgagcctggtcttggcaatccgcgcatttatgtgcgtctttcgcgtatgtggaacttcaatgaccctaaggatgatatatctcttctgcatgtagcacttgtattggttgatgagacggtaagataattactgctatacacacacttctatatacagtaaaatatatcttactaaaccggcactaaattagtatggatattaattacaggaaggcagcattgcagctcagatattcccaccagatggtaaactctttaagcccctgttgtcggaaggaaagatttactacctgacacactatattgtgaggaattgtagcagatcctacaagccagtgagcaactctcttgctattgcattcacaggatggactattgttgaggagtatgtgaatgcacccaccagctttccattctacacctactccctgaaatctttc

SEQ ID NO: 8025 - DNA, 303 bp, Oryza sativa
tgcctcatgaatcaaatattgttgagcaaggagagccagaagattgtgttttttaaatagaccaaagagccaggagaacatagagagttatgttgccatggacagagattgcagtagcgaagatgaagggcctatagaatcagataatgacctcgacaatgatagcgattctagcgactaaacaattgatatatatatatatatatatatatatatatatatatatatatgtgtgagagtgtgtgggtgagtgaattaatatctcattctccatgagcagaggcattattgtcacgtcccaaa

SEQ ID NO: 8026 - DNA, 362 bp, Oryza sativa
tcttggacgagaattcaacgcggcacttaccaccatccgaggtaccatgggctatctcgcgccagagtggctgtatgggcagccgattaccaagaaggcagacgtgtacagcttcggcatcgtgctgttcgagatgatctcagggataaggagtactgtcacgatgaaattcgggagccatcggtattaccccagctacgcggctgcgcaaatgcatgaaggagatgttctgtgcttgctggacagcatgctggacagaaatgccaatgtggaggagctcgacatcacctgcagagtctgctgctggtgcatccatgacagagagggtgacaggccattgatggggcacgtcgttcgcatgt

SEQ ID NO: 8027 - DNA, 434 bp, Oryza sativa
ctatgaaagatgacgggttgacactctatcatgttaagagtcctctgcaagttctttttttaatctttctaaatgtcatattcgctgaaaggagacttcagtgttgactttctttatctggacttatttttactgcagaagtaccgcacagctcgctacaagccagacctatgagaaggtctatatcaattgggcacctctctgacttgcattctatttatacatattcttacatacgggaactcatttttcatgagcaaaactgtttttctagaacttcgtggcaataactgaagtacaattttcatgataatggcatgggctgtgaatttatttgtaaaagcatattctcacgatgaaatattaaatacttagtgtgagaacccttgatgcaagatagcacgcgtgcaaccatattctagtttatgtgaggt

SEQ ID NO: 8028 - DNA, 407 bp, Oryza sativa
  unsure (1)..(407): unsure at all n locations
ttgtatgaacatagaatttcctaacgggggaagaatcaacagctctgttcttgagtagatggccatgccttgagtgtcaaaagggctgagttccttgtggtctgttcaacaaaaatgaatagctgcatagtacgattctttatatccggcttcccctgatctttggggagaagagtgtgttctgtctaatcaaactacaaatcatgaaagaggcgtctgatttgttctactgtggcaggcatcaatgtgatggggcaccttttatgctgtagagcaaaacaaaatcaaattagcgactgattggtggctaagataaatagattgtgggttgcttctttctgatcataataatggaaagcttctttgtgacagtaatctacctgngagactgacttanaaatgcaact

SEQ ID NO: 8029 - DNA, 441 bp, Oryza sativa
  unsure (1)..(441): unsure at all n locations
tgggcaaacctaataatcgagaagaactaanattaaattcatataaccacgtgcacgatttagcatagatcgagttctaatttataaagaagagaaccaatgtgtgaaattatattgatgaaatgaaactcgttaattgttaatgttgaatactagacatctattatattattaaaggaatagaaaaagaatgctccacgttcgctctcatggcctagaaattcccacgttaattaaagaaaatctattatattattaaaggaatagaaaaaagagactccacgttcgctctcatgacctagaaattcccacgttaatcgaagaaaaaaacagagtccgtataggaatacaattaggaaataactgaaattcggaattaaaaataaggaatattagaataggagactagagtccatatagaaatacaattaggaaataact

SEQ ID NO: 8030 - DNA, 436 bp, Oryza sativa
tctatgagccccttgatgagagatgcaatacgaggatcagcttccatacagaaatcatgggactcacgtgctaaggaagtctctagtccaggctttaattctgtgcttcagatgggtcgcattggatcatcaaactggtctgagagcatgcgtttatctaatgctgacatcccaaggccgactagcaccttgtttgaacaaaatactcagttttattcaaattataatgtcccatcttaccctgacaatcagttctatcaacctgctaccattcatggctatcacctggcaacctctttgaaaagtatgaatgcaagtcacagcacgcactccagcatttcactagatccacggcgacttcctagatcatctgaatctgctggttctaactacgcagattctgcaaggtatgctcgtaaccaagatgtaattggtt

SEQ ID NO: 8031 - DNA, 314 bp, Oryza sativa
  unsure (1)..(314): unsure at all n locations
ccatgaaactcagcttagtgaaagtcgagcggagatcacagcacatcagtgtattttttcttcgccaacactaatcactgtagaacattcatacacgantttgtccgctcacataactagcgcatatctggtccacatagcagacgtacagagtgacacaagcactgcatgctttctactgcggattctttattactgacactcttgttcttgcccccgctgtactcggcccaataatactgatatgaggacgacaagaagggacctgaagctttcatgatagcagctcggtctcctcttgacttgtcacagac

SEQ ID NO: 8032 - DNA, 340 bp, Oryza sativa
ttggagaagaagtcttatgcggaggcctgacttatacttcatttgttcgcctgagaagcaggcgctgaatgcccgctagtccgctgctgtttattgttgattgacaagccttaagtgcctctgtaataaagtaaatattatcgatataccacagatgtgtctgttatataatgtgtgcatggagtaccacggcttttcctgggacagggattaatacactatcgttcgggaaaatgcaattttcttgggggcgacactaaccattgcctaatcatacatataacaggagcactgtttattgttctaacataggaaacatgagaagcaatttctctacttg

SEQ ID NO: 8033 - DNA, 437 bp, Oryza sativa
  unsure (1)..(437): unsure at all n locations
cttatttntattacaaggaggtcctgtcttcttctctaacggaatagagacacaacagagccatggctgagctcgaactcaagctcaccgacgggcaaacagttgcgcgaatgggggcgacatcaaaagagaacatgtagagcaagacattgtgattccattcctctacttttcccagatagtggtggctgaacccgcgcacgcggtggctgcaagtggcagcgagttcgtgacaccatgcatgcagcgttgcgacactggatggctcgatctattgcatgcatgtagagaacatcacatgcaagaaaaacatacattaaggactttatcctactgctaagaagccacatttcagcttgaggtgaagggctaaaacctcaccaaaacagggaagcaaagaaaccgagctctgtcagtcaagtaaagaagaacagctt

SEQ ID NO: 8034 - DNA, 341 bp, Oryza sativa
tactaagcctgaatgctctgttcacattcaacatacaggtaatgatattgatttattttttgttcaaaagatggcattctgatgccattagtcagattgattaagggaaagcactaacggagtaatcctaacttcttcagtggggcagcgaactccagatttgacctctggaactttacggcatgcctctacgaattcaggttcagcaggtcgatgtatagctacaatgagaattttaagttgtatgaaatagtcaatcggcgatgagataaatgataactcactagtagctgcattcaatcaccttcatctacacctcacctcctagcattcgttcatta

SEQ ID NO: 8035 - DNA, 309 bp, Oryza sativa
  unsure (1)..(309): unsure at all n locations
tggcatcccaaagagggtgcattttagtgtcttttcattgnttcagagacatgtggcctaataccaatgaacattcggtggcacaccaatcttgtggtggaaaataattaatgaaggttaaggtccctgctgcctttaaaagtggttttgagaacaatggttcatgtaatagtttatgtaacatgaaaacctatagaagttctaccaaggctaacttaaaaagtcattctttggacatttaccataaattaaacaaacaattatacttatagctagcaaaagttaaaagtactatactatttttttttt

SEQ ID NO: 8036 - DNA, 438 bp, Oryza sativa
tgtccagaaattccatgaacactctgttcatcagattcatgaagaatgcaggtgcgttagtaagtccgaaagacataaccgtgcactcatatagcccgtaccgagtggtgaaggccgtctttggaatatcctcttcccggattatcaactggtggtaggctgatcgcaggtctatcttataaaacactttagctcctttcagttgatcaaacaaatcatcgattcgtggcaaaggatatttgttcttgattgtgacctcgttgagtgcgcgataatcaacgcacatcctcttcgtcttatcctttttctccacaaaaatgactggagcaccccaaggtgaagtacttggtcgaatgtaccctttctgcagctgctcatcaacctgcttcttgacctctgctagttcgttggccgccattctgtacggtctcttgtaaa

SEQ ID NO: 8037 - DNA, 443 bp, Oryza sativa
taggaacggtaagatatacatgtccaaatctgaatttgatgaatattctttactaattaaacgatcacatcaaggagtagtatgggacgagggattaattgttccgtccagcgtatcttgcggggctgtggcgaacgccagaagcgagccggtcgatcgtgtatatatatactaatataaaatatgatagtcataagaaaatttggaagtttaaaatacccctgaagataaaaatctttctctggctcatgctaaagggtaaaatcttgactaaagacaacttgtttaagagaggatggaggaaaggtgacactaagtgtcaattctgtgatcaacaagaatccattcagcatctctttttttattgtgttatggcaaggctgatctggaacattatttcctgtgctttggatttgaaacctgtttctgatagcaaccagctg

SEQ ID NO: 8038 - DNA, 441 bp, Oryza sativa
  unsure (1)..(441): unsure at all n locations
tgttatatccatggccatcatcactcatcatttatcaaatccgatgtcccccaccatttgcgtgcaaacaaacgtncctgatttccttttcctatgatctcactatccacacatgtacctctctcaccacgtgatcttctccccctccattagtggcccagaatcactcgcctctccctctcagccactggtgtcaacccctcgcctcgccatgcagcctgatcaggtgatcccattgtcaacgagaggtgatgtcatctaactgccgcacccccccccccccactctaattttcctcttctaccacttctgctgcaggaaggcaaacttgcgagagagatctatcaacaccgtgccttcctttccaacattgttgccggtgcccacaccatgccattntttcctctcgagtcaccaccaccatcccggtttgcaaatttt

SEQ ID NO: 8039 - DNA, 435 bp, Oryza sativa
  unsure (1)..(435): unsure at all n locations
tggaactgcgactaaatnggagagatgctacaagttcaaagttttctagaaaaagaaagcagtatgaggcgagagaaaaccgatctaatgatgaaaagggggatctagccgatggggacttacctcagcgtatttggccgatggtgcggcagatgggctcgcggaggttgacatcgtcgcaggcggagatctggctggggatggagtcgcctgtgaattgccttgcgcattggaggaatcgccggagagagagagggtaaagtttcgcttaagcggtgaaaacggaagtcacggtgtgagatttctcggggataacggttagtatttaaagcactagagtaacggttgggaaaacggtagagtgcgaaacttgcttggagtcgatacacggcaaatccggaacattatcaaatatcccggacttggggggcatgt

SEQ ID NO: 8040 - DNA, 436 bp, Oryza sativa
tcgacaggccatcggcctcctcgtcccggtccacctcgatttgctttgactgggagaggaggaagatctgaagcacgcaaaactcctctaccaagtcacgacagctaaggcggaggcagactttgcgaagcagggagaaacgggcctccatgatgccagcaaccttcggtttcctgatcggcgcgatcgctttgcgccgtcatcggagagctttcgttgcgtctgacctggcctcgaaggggatggagtggtagaaccacttcgacatccagtggcgatcccacttggacatagaagcattaactggccagagatcggaacgctcggggcgaacattgaagttcacgctcccgaacgctgtcttcttcgtcttcaagtttacggtggcatagaaaatggcaccgaaaagctcagcactcggttcgaacctaccagt

SEQ ID NO: 8041 - DNA, 420 bp, Oryza sativa
  unsure (1)..(420): unsure at all n locations
nntttagggcagaatacatgaagtcttgttttatcatcagtattgcttactctgatttatcacttgttcgccctgcccacacccctctaaccataaatcttggcttcgcccctggctaacgtggcatcaacatcacaacatgggaccaacatgtaagtgattcttatatcatctcattttctttctccacttccctctcctttctctcccctctctttctctctgagttaggtgctcgcttactctagccaccgggaggcctggaggagcaccggtgagcgcgagtcacgtatatacgagttggtcacaagcgcagcgacggacgacgagcaaccgatgggcgacgagggcagccgccgcccctagccgatgtggacaaagggtttgtgccctcacaccgtatactatagatggccaaat

SEQ ID NO: 8042 - DNA, 440 bp, Oryza sativa
tttaaaaagtaactaaaaaatcatttcaggtgttactccattttccaaccacaccagcaattaatccagggcccaactatgcagcgcttgcccaaaattaatgcacatgcaatgcgaggagagcatactcctacacacatccatccatatgccctttgctcgcgggcaatactactagcaattgatcgttttgattaatggcccatgatgatacgatttgaccgctccctcctccgataccatatctgattccagcacgagaccgatagatacgaatacgatttgaccgcccagcccagtccatccatccatggacagtgcagatggtgatatgcataatgcgtcgttgtcgtcgcgatgaattaaattgttggcaacaaccacaaaaaaaagcaaagcgaagcaaagcagcagcacattgtccatggctgccgcgtgct

SEQ ID NO: 8043 - DNA, 325 bp, Oryza sativa
ttctttgatcaattaattttcttcaccgaatatagcaagaatcttgtctttggcgatgcgataattcttctagggacttaccaaattttggcgttaacaatgtgatgggcaagacttgtagaggagtacattttaatatccttgatttataacatgaaaacgctgatctggatggtactgtcttttgtcttttggtttttatagcacgcaacaactatataaaccgggggggaaccatgcgatggacaaggcataccagcttacataccgagcgatcttgtactattatttctaaaatcattatgtactatttcaaggacatact

SEQ ID NO: 8044 - DNA, 431 bp, Oryza sativa
  unsure (1)..(431): unsure at all n locations
tgacatttccaaagcgtttgacactgtctcttgaggttttctgttgtcaatgatggagtttaagggatttggcccgaattggcgaagatggatctcggctgccctcctaactgaagaaacaagcattttgattaacggggtgctgtcagatccaattaaaccggctcgaggactgagacaaggcgaccctctatcgccgttgctttttatcttagtcatggatgctctgcaagctttggtttctcgggcaaagctggctggtttgctttcgcctctaaatgcaagaagagatttgctctcggtgtatgccgatgacgcggtgctgttcttcaagccaacaaccactgaagccaacactatcaagagattgctgactctttttggtgaggcaacgggactcanaaccaacttctggcagagcgctattacac

SEQ ID NO: 8045 - DNA, 428 bp, Oryza sativa
taacggcaccgtcgtgcccagacaaccactgcgttcggagtttatcgggcagttcgaccatttactccatcttttgcacgacaagttcgtgcccaagctcgaggagctggagttacctgcggtaaccaatggctcgccatctccgtcgccgcctcggctgctgctgataccctgtgtatcgctgctgcgagaggccggcgtcacgttcaggaagaagaggtcgccccgggatatgttcgacgtaacattcgacaggaagaggggagtcatggagttgctacgcatcgagatccatcttgcgaacctgacgcagctgatgaatctcatcgccttcgagcagagcagggggacaacgcgccgggactccggcgccgctgacgagctacagcgcgctcatgtcgtcgctggtcagatcggggcaggacgtc

SEQ ID NO: 8046 - DNA, 356 bp, Oryza sativa
tgtctcagaataggagctctaatcttgaagtctggcaacttgagccttgtactaaattcaacctccaattctatgtaccggctatcattgaccaatttcttaagatgcttcaagaacgaaataatatctacatcagatttcaaataattcccaacggcaaaatggagaccgtcatttaattggggggtcctcatcccagctgaaaatatccactttgtgtatgggcctacccacttctctttttcttcaaataccctctgcaaccacacgttgttgtgaagggtatatttactgatcatagctttccaagcagtaaaaaactccaccttcttctcataatcattgatgcatgccct

SEQ ID NO: 8047 - DNA, 425 bp, Oryza sativa
tacctcatggagagttcctgattgtccgtacagtgagagtaataatttttgcaaaaccagaatgacgtttttacactaagaataaactagaatttactggttcattgacattccacaataattttagtatcacatggcatactaattcataacaaactaaagtaatgaatgatacaaggggccctaagaatcacattatctgtcaaggaaacatacatggataattctcttcctttatttaatgaagcaatgtaatgccactagcacaattgtttgcttgtcaaattacctgtgaacctgaaagatggcctttttgctggtcattgtcaaatcccgacttgctttcacaagcctttcccttttatcattctacatatggaaaactgatgagataatataaaaatattgctaacttaagaaagata

SEQ ID NO: 8048 - DNA, 459 bp, Oryza sativa
  unsure (1)..(459): unsure at all n locations
gcgacctataaaactaagctgcattaggtaggccctttagcatcccattgcaggtcggcgcatgctaaagagtggaggcccacaaagtatgcctggtaggcagagtgcgcccaatattgtcggttgctcatccaagtctgacaagccggtcctccattcctaaggtcagctaagggggaagcacggcgtcccaaactgccaagaattgggagatgactactgagggcaccacggatgtcgtgaacctaagcgttatcagcgaggcccgaagcgatcgtgtgagacgttcggaatccagaacaacactgacgttcatgggattagatataaaaatatgggacccagctcacggcaaggaacaaaataattggacctaatcactcaatgaaagatatagtctttctaccgatgccaaaataactntccaacacctgtgacaagttgtaaaattgttgtaat

SEQ ID NO: 8049 - DNA, 439 bp, Oryza sativa
tacattaatctgacagtggcagctgtgtttcttgattttttttttttatgctctgaagaaacagggcaaatattctggtttgttcaacaactctgttctgcagtgtggcaatggcaacttctctcggcagattgccctgttttttcagaagcagagttatgcatgagccaggagacgtttctccacgtgtcataccatcctaaatactgaaagttttcctagaagaagcatctaaacagtcacacccactattcagatctatggaagttattgaggaacaatttttgttggttcattttctaatagtaaggcctctcctttggaacaaaagaaaagtgaaataaattatgaggttttgtattcgtatgggaaaatttctattagagccctttggagtaaaggaccggtctctacaaatttctatagaatggggcaatct

SEQ ID NO: 8050 - DNA, 408 bp, Oryza sativa
atacaaactcagcttacattaaggctttacaagggcaatacgtcaagacaaaaatatatacgaaaaactaaccgcattgcaaatgaattactactatgccaccccatatcatgatctataacaacattgatctgtgtctcttcgccaaaatctccagctgcacagatgaaaaccatgaaatgctatatacctgaataacaaaacacaaaccgacgataccacacgagtgaagactaataaagtctcgactcttgtcattctatgctccttatcactctatgaatcatacgaaatttccgacccacagatctatatgtgtatacataaggcccagttgataagtgcttcaaatctaagcactggaaccgtggtttggaccccaatcttaatacggacatttcctttcaa

SEQ ID NO: 8051 - DNA, 370 bp, Oryza sativa
tcgtcctctgaacttttatctgaacatttgcttctgatgatgatttgaactttcataatacacgagctggttcttgatttgatcatcagacacatgcaaattcgctcatttggtactgaattttcagtggttcttgatttgatcaggtacctgtatgagctggattcgcacttggatcggctgctgctatctgcatccaaagcaaagatcagctccccattctcccgcgaaacacttcgcgccattttggtgcagatgacggctgcgtccaagtgcaggaatggctcgatcaagtactggctcagcgccggccccggcgacttcctcctctcgccaaagggctgcactgcgccggcgttctacgccgtcg

SEQ ID NO: 8052 - DNA, 436 bp, Oryza sativa
ttgagcttgctgtacaaaaaaaaaaagaaagaaaaacattattttagattgatataaaatcagaagtgaagagaaggaaaaaaaaaaaggaagggaagagaggaagttgttgttgttgctgttgtgtttgtgttattttcgtgctattttgagtggctacgcttgtgactaggctcgcgtctctaaagggttttgcctaggaccagcacaataccatcgttgaatgattattcaacttgctttgattaatgtggttctagctgtaccttgatattacttgcagccacctatagctccacaaatttttatctactatatcacaggatcgtgtttgttgtcggctccagtactactaaccgttgttgctgttcttgctgtttgccaacgccttttacataacatagtaagaacatgtaagaactcgtttgcacaagtt

SEQ ID NO: 8053 - DNA, 434 bp, Oryza sativa
  unsure (1)..(434): unsure at all n locations
ngacaatggacctgacatgttggaaccttaaaagggtattctatttaattgtagggtcgaatcgaggatacacagctccattggattttactgaactcaccacttgtatgctgagatagcacacgacaattttatttgttatctatggccgaagttgcataatgaaccacatcttaattacctcatgttttcactttggactagtaacaatttgttggttgcacattgtacctggttaatctcttcttcctctgccaccattaacaccttagtggcaccggtgaacgcacatgtacagcagctcgagcttcctggtgtgcaggcgaaggcttctgggttttttttttccactttttttttcgagcaagaggagtcgaagctcctcccgtttacatttatcagaaatgagcattacaggtagcagtgggccagta

SEQ ID NO: 8054 - DNA, 434 bp, Oryza sativa
  unsure (1)..(434): unsure at all n locations
ngatatttcaaaggcttatgatcgggtggactggggttntttggatgtataagctgggtttcgctcatcgctgggttagatggataatagtttgtataaccacggtgagatactctgttaaattcaatggaactctgctctctacttttgctccatcacgcggtctttgtcagggagtcccgttatccccctttctgtttctgttcatagccgatggactaccattgctgttggaagacaaagtggctcaaggagctctctcgccagtgaagatttgtaagcaggccccggtgatttcacacctgctttttgctgatgacacgcttttgtttttcaaagctgataacgttcaagcccaggctgtcaaagaggtcattactgattatgctttggcaacaggccaactcataaacccggcaaagtgctcaatcatg

SEQ ID NO: 8055 - DNA, 428 bp, Oryza sativa
tgccgccgaacggttagcgcttgagcagcattgacgaagttgttctgcggtccttgattccatggcgaaactcccaggctcggctgaatcggtggcaaccaattatgcgccccttgacttgtattcccctccggatgggccgatgggtttgtacttgaaatgcagtggggttggttgagttgctgaaggaaagcttggagttgcgcctgcagagccgaaaccccttccgccactgtttgtggcgcttggccaagtggttgatggtgtacttgagcagcgactggctgttgtacgtgaggggctggatgcgctgctacggccaattgctgcttggcgaagtacatcggcgcttgtgcgacttgtggcggaaagggctgagtcgtcacttgcggatggacttgaggtgggacataccctgccgaatactg

SEQ ID NO: 8056 - DNA, 385 bp, Oryza sativa
tgtattcggggtataaatatagaccccagatcattgttatatatgacaacaaatccaatacaactttggtgcatcgccacccatttgttcttcttttctgcgacttctctcaacaagaggtaagtctcgatggcttgtgctatcggagctattatgtcgctttaaaagttttatcatgaaccatctgctatcataaggcttagttaaatctagccttagtatctcgctttagccctataacttagtcttcactttagggttctcgccgttatcggttaaatggtctaacattataaaataacttaaggcttcacccttccggaaaaccgttaaataactgagatggtaaaacttaaggttcttttataccttggcaaggcaaatc

SEQ ID NO: 8057 - DNA, 435 bp, Oryza sativa
tgagcgtctgcaatggctgctcctcagagcaagaactcatcgtttatgaagcccatggccggcagatctccaaccaaggtatgctcctacagctcaggcagctaatgcagagcatgtaccaaggctactacattctcaacgccttccaagaacagcacatcaccggtaaacgaaggcgatcatcatcatccctcaaactgaagaagcttcaggctgccatggaggatttggaatctgccatcgatgactcgaagaaagagtttgctgtgttcttgctaggctgcccatgcttgcctcagcgaccatacgacactcacctgttcacggagaagtgcatgtttggtcggcacgaagagaaagagctgatccgagaatttctgcttcaaccttgtgattcttctttgcgtgttcttccaatcatccgcccccgagaag

SEQ ID NO: 8058 - DNA, 429 bp, Oryza sativa
tgagagcaaaactacctaatgtggcccaattcaaaacacatattgcatctaacctacatcttacaagaccgaacaaaatggtccaggtccaagtagtgataacaagcagtatcaaaagaattcaaatttggagtacttgttcattgcatatgaactaattggttatgtttttctttaaatgacaatatagaatactaataataatatatcactctacaaacatgtaatgtaagtttaaattcaactactggaatttgtaacaaaataacagatttgactataaatatacttatactagttagagtttaatttgtcatttttgttacaatttatagaagtcgattttgaacttgcaaatttgtcaagtgatatattacacattaatctatttggtcaatttttttaataactatttacttaggcctagtt

SEQ ID NO: 8059 - DNA, 438 bp, Oryza sativa
tggctgtggtggggatggtttgcccttacttggagcacgttgattttagtggtctccgtgaggtcactgaccgtgggcttcttccactgatcaactcttccgagggtggtctagtcaaggtcgatttgagtggttgcaagaacatcacagatgcacctgtttctaccctggtgaaggggcatggaaaatctctgaagcaagttagtcttgagggctgcagcaagataaccgatgctagcctctttgccatctccgagaattgcactgagcttgctgagctcgatctgtccaaatgcatggtcagtgacaatggtgttgctaccctggcatcagcaaagcacctcaagcttcgtgtcctgtcactgtctggttgctcgaaggttactccgaagagcgtgtcattcttgggcaacatggggcagtctctggagggtctca

SEQ ID NO: 8060 - DNA, 110 bp, Oryza sativa
gagtagcttatcttagctagctagctatccttatgctaaatgctgggctgcttctcccggctgcagcggtcggcgtccgctgaggcggagcctgttcccattgtgcaatc

SEQ ID NO: 8061 - DNA, 437 bp, Oryza sativa
taatgtatgtaaatgcaataatatcttgacatgaaaggcagattttttatatcagtgcgacatataaagcgaatatagttaaatcagataagatcggctgaaaccccgatactatcctaattaacaaccagaaagcaggctagagattgctattctaagcatgacttaatggatcaaactcaactgatgcagcattaagtatgaaaagaggaacaatatctagacaatcaagccactggaagattcatagaatggtggatatcttatataatccaaatcaacatcgagatctaacctaatcggctgtcttttgcatgcaaatgttagccgataatagattagatagagatattgttgaagattatgtaagatatgcgataactcggcgaattatataaatgagattagagtctcatgaagatgtagcacttatccct

SEQ ID NO: 8062 - DNA, 438 bp, Oryza sativa
  unsure (1)..(438): unsure at all n locations
tggcgcacacganagagtgcgagagcttataagaacacacgcatattcctctacctggcgcgccagatgacggagcgtggggctcctcaccgggagaccgcgcaggcccccctttgccggttcggccgggggccctgggtgagattctaagctcctagtctgtgtgtggaaggttcgcgagaatggaaacacacaagacacgggcgatgtatacaggttcgggccgctgagaagcgtaataccctactcctatgttttggtggatctatgtatgaagaagctacaagagagctggagaaccagagagctcttactctctccctctctgatcgttctggatccgaaaaaatccccttctaagtgggcaaggtcctccttttatacctcaaggggataccacatgcaccatctctctttntgtggggacttatcctatct

SEQ ID NO: 8063 - DNA, 435 bp, Oryza sativa
tgggtgttggaggcggcgtttctcctataagatcagcttatttcttctgtagacgatacaccttgctctccaacttgcaaatcttgcctcgattccaattatccctgtcatgagctgctttgtctcgctccacacttactgcatccatagcactaagcatatgcaccgcatgcatcagagtggcactctcttcaccatcaggacaggtataggttccatagtcttgaccatgatgctcgtgaggatgatactggaaagctgatgaatccaactcttcttcatagcgttgacgcaactctccaatggccaccagagctgcttcttgacaagcctggctgtacgaacttccttcagcttcgaacttaatggaccgaaggtcttcacgatcactagccaacgttacacgaacacgacacttctcctcgtcggggacat

SEQ ID NO: 8064 - DNA, 420 bp, Oryza sativa
  unsure (1)..(420): unsure at all n locations
cttnggtgtcgacaagacgacaagtatacctccatgctttcccttaatctccactccctttccttgaattcccttcctgaagctatctcaacacattcaactcctattcagctttgctggaaacctatgtatttgctttcttgtctcacaaacactaaggcatgattatttactgcagagtgaagaaatttacaagcagtcaccttgctgccttgtaacactcgttactctttnttttctcatcattgacgcttggtcctgaatggcttcctccataagatggttactaatagctttggtctcaaataatttattttaacaactgtttaccaaccgtccaccctagtataatctagctttcaatgatgagcatgttggggttctgcagcaagatctggattcttttcttttgtaattgaa

SEQ ID NO: 8065 - DNA, 329 bp, Oryza sativa
taaaggtagcaataaccatattctcttgcgagctcatctcttattacacaagagtgtactataaatattagcttattcctcaaggttacctttacatgcacattggtgttgtccttatctgttggaagacttgctcatttgcgtgttgatcggtctttattctccaactttcaatatgcaagcactatttaagctgagatttttccaactcatctccctaattttgagtgggcatacttttcgaacaactaaatggtgtgtttttttaaaaaaaagggtctattaaaagttggttttaaaaaatcatactaatctattttttaaaaaaa

SEQ ID NO: 8066 - DNA, 434 bp, Oryza sativa
  unsure (1)..(434): unsure at all n locations
tagcatatgtgtgcatatgtgggtgtatgatcacgatcatatattttaaaagcatctacacaagtcacaaaatttgacaaagttcaatgaaaatacaagcaaccaaatattgtataagattttcgataataagaactatatttggctctggtaggaatttatatcaaatgaggaacttttaaatttatcgttttgaaaaacaaatcatccggaatttaaaacaagtttggatcaagattatagaaactctatttcactatctcgtatctctcaataacttaggcttagatcacgcaatgtgcaactcacatctctcaggttcctggataatggttggctaatttcacttaaaacttgatagagtacttaaccatgaacacatacattagagatataaaacagagcaactattcatcanttcaacatggagaact

SEQ ID NO: 8067 - DNA, 425 bp, Oryza sativa
  unsure (1)..(425): unsure at all n locations
ntatgttgtcatgcatagactgaataatatttaagctagggagtttataagggggtatagtagtgatatagtatcatttatcattctatatagattttactttgagcttttgaaagcacataaaacgagagcggaaattgagggaaaggttagcaaccatgaagttgtccatgagacgagagatttatagcacacaatcacgcacataggattatgaggcctggtgaacaaaatcagtgctttgtgagtctcagctttgcgggcgtgccagataagctacagaactctgatcatcaggaggaggttggacagactttaaggagtagaccagtaagaaggagtaactgtaatcctagagtgtttgggccggaatggacctaacttctttgtaagatttttgtttgcttgaaaaagaaggcacagtg

SEQ ID NO: 8068 - DNA, 431 bp, Oryza sativa
tggacttctctacgtgcacaagctgttgattgtgctggattgtatcttcgatgtccttatgctcccggcgattggctaacctctgcctggccttctccagcttgaattggtgttgctcaagatagacggctggagtaagggcgtcggctaattcatctgggagtagagcttggatatctgtgaaccttgcccggatcgagccacagttgatcaccaagttgtctagtgatgcttctagccgatgagagatatcctcaagcattctcttcacatcatccgacagaggagctatggctttactggtggtgtcttcctctgtttcatcgagataatccttgatgttgaagaacagatcggctaaaacctgcaagagataatattttgaatggttaaggatcaaaacatgattggccgatctcaaatttgtgtca

SEQ ID NO: 8069 - DNA, 434 bp, Oryza sativa
  unsure (1)..(434): unsure at all n locations
cgccactaagtaattttctctttgattcttaccttttcagttctctgttcaccttttttataaaggttgctaatgattattatcttctcaacttttgaaaaaaaaatcaaaacataacaacaggtgaaacatatcagaaaacagatacagatttcttagaatcagaatccaatgccttcagggatgatggttcaacagcttccactgcagttttggtgggtggccatctatatgtagcaaatgttggtgattcccgtgctgttgtttcaaaagctggtaaaggtatgtaacaacacatgcttgttggatgtagtttttcatctgaacaaccacttggattcttatcattgatatctgcttaatgtttctaaatttcccagcattgatagttntgttgaagaagtttggtacctaatgtctcatataaacccccc

SEQ ID NO: 8070 - DNA, 432 bp, Oryza sativa
ctcatcaaggtgctcgaggccgactccatgtgagttcacccgatcttttctcctgcttgctactccagtatttgggctgaatgtatagctctgctcctgctatgagattgataagttgttgttgcttcacatgtccgttctcccaaatacgttgaactctgtgctgctcaaatacaactggcagtgttgatttgaattatggaaccataatggtcagttacttagttgtttgaatttaatatccagaaacatccactgttatgttgtaaaacctcctggctttcaatgggcaaaacctaatagaagacttattcagtttggccttggtgaaatctgtaacctggaaacatattgttttgttttcatatatgcagatccaacaaatgctttggttattactcagtatagtggaattccatcgctcatcagccc

SEQ ID NO: 8071 - DNA, 434 bp, Oryza sativa
tagcatatgtgtgcatatgtgggcgtatgatcttgatcataatttatatatagcatctacacaagtcacaaaattggacaaagttcaatgaaaatacaagccaccaaatattgtataatattttcgataataagaactatatttggctctggtaggaatttatatcaaatgaggaacttttaaatttatcgctttgaaaaacaaatcatccggaatttaaaacaagtttggatcaagattatagaaactctatttcactatctcgtatctctcaataacttaggcttagatcacgcaatgtgcaactcacatctctcaagttcctggataatgggtggctaatttcacttagaacttgatagagtacttagccatgaacacatacattagacatattaaacagagcaactattcatcaattcaacatggagaac

SEQ ID NO: 8072 - DNA, 442 bp, Oryza sativa
  unsure (1)..(442): unsure at all n locations
tcttgctggccgagcagatcgatccagagacgttcttgtatggttgtatgaatcagcacctgcttgttggccgagaagatcgatccaactgctgtgtatatcatcatacataaataagatgggaaagaaaggccggagtaacgcaagcgaccgtttgaaaacatgaagaattgaagatgaatagacaggactaattntttcgggttgctctgtgcgcccactgacgctccgtttcttcaagcacacgcctaggagcgcgaagaggttgggaggcgggtgctgggggcgcgggaaggcagctgcggcacatgggtgcgacatcgcgggcagaaggggaagtggcgactatagcgccggggccacgggaggcgatgcggccgtgagggggggtccacctgtggcgttggtcgctccgagggcgctacggagatgcaatgaggat

SEQ ID NO: 8073 - DNA, 440 bp, Oryza sativa
gcttctagtgatttctcatatagcacgacttagctaaatctatagttattctttaccaatagatactttgtaaataaaataactcatctaaaatcttctataaactaatagatcctatacaacaaatagttcttatatggaatcaaaagtcgcgcaacgcatggcttgttatcattggggatattaaagagacgtttcaaagtttctaagatccaaaagtttcaaagacgcattacaaatcgatctatttaatttgtaattatttctgtcatttcagtatcatgatatgcaacctctgtccaggtgatgccatcagaatttgagttgatgatctctttcatcgtatcgatccaatgcagattgattagttgagaatatataggaaatgtcggaatgaacaatcatgaattattagaaaaatgtaaattaaggaaaatata

SEQ ID NO: 8074 - DNA, 438 bp, Oryza sativa
  unsure (1)..(438): unsure at all n locations
ntcaccattgtcgaccacgtgtggtgtaccataccgccaagtcgatttctaccaggtaggttttcccaaatatgatactcaagtgatactaatatatgagagcactaccagcttcgaccaatagaaatagagctattaccttacagataaggggcccgaaccttgtatagaccttgtataaaaatccttatctccatctcttatatctcaatctcgcatatgccctggtaccaacgatctccataccatgcaaataccgtagtcgtgatctacaacatcgtcaagtagtatatactggtttaaagttggctgcagtgtatactggttttcggtcaatattagtatatgcagattttttttacattggtatatactggttttttagtagtggtatatactatttatcagttcgtagcggtatattcttttgttaagcta

SEQ ID NO: 8075 - DNA, 441 bp, Oryza sativa
tcagcttctcatatgtaggagtagaccacctaggacggctaggatctactgctcgtttagtttgaccgactaacaggtaccgggcacatgcaaattctacgccgagtttaattccaaaataattcttcaaactttcaactttttcatcacatcataacttttttatacacacaaacttccaacttttccgtcacaacgtttcaatttcaaccaaactttctaatttggtgtgaactaaacacagccctagtacactgtcattctccgtcaatacaatgcgaccattccaggtgtactattacttcctccgtcccagaatatagcaacatagaataagatgagattaatcctaggacaatatatctggacatatacattgcctcatgtccagatacattgtcctaagattggtctaatcccatcctagattgctatattctg

SEQ ID NO: 8076 - DNA, 436 bp, Oryza sativa
tgaatcaaagtgggaaggaccatacctcatcaaacacaagtctatgacgggatcttttcgcctagcgacactcgaaggcgaggagttcgaccattcctggaacgccgcctctctcaagcgcttctatgcctagaatgggtgtcacccaaatcgccaacttgtaaaaatgtacatacagttatgtaagcccttcggcaccatgtaagccattcggcactatgtaagcctttcggcaaaaaaaaaaaactggatgtagggctattatccaccatggaggcccaaaccagtataaattctctgtgccctccgccttctttttatttttcgtgtgattgataatttgtgaaaaaaccccaaggcaaacgcctgatcagcgaaaaaggccagggggagaaacgaatcggtcgaagcatcgctcgccgaacgttgaaaccgc

SEQ ID NO: 8077 - DNA, 438 bp, Oryza sativa
tagaaagttgtttaatctgcataacatttaaaaggcagtattactatgttagatcaattctgttggactttaaaaggcacaccaaaaaaaatgtaaaacagggcccaaaaacttatgttatgctttattaagctttaagaaagaagaactcacctctcttgctcccaattcagtaaagaagtgatcgagcagtgagcgctttgcctcccgcacttgacagtagacaatagatttcggaatagagttcctcaaggttgaacataccatgttaatatatgccagaaccgttgttcctgttgagtatgaattgtagcaaggttcagcagaaaatacaggtaaaataagttaaaaggcagccaagcaaagccttgatggcatgtatattcatcattaaactaaattagtgggcaatattacacaaggttgcaacaatatgat

SEQ ID NO: 8078 - DNA, 434 bp, Oryza sativa
  unsure (1)..(434): unsure at all n locations
tgtccatctgttccattnttgggcacgccttctntattcaatgcatattgtggggccgctattgatgggttctttgggccgacattgaagattcctttgggctttcaaatgggccgcaatttatggtttctttgggccgacatgaacgtctctttgggctttaaaatggcctcaagtgatggtttaattgggccaaagttgacgtttattccggcttttaaatgggccgctcttgaacgatttctttgggctccgtgaaaagcccgcgtttttcacccgatgcccgctaagatggcttcaggcccacgttcgtcaacacacaggccccagttgtactggccatcatggcctttcactgcacaacacatatagcccattaaagtacagttgtacagggcattagcatgcggatcatcatattgtcatcatcaaaa

SEQ ID NO: 8079 - DNA, 431 bp, Oryza sativa
  unsure (1)..(431): unsure at all n locations
ntccagagacctattatacaccgtgtgtatgcatgcatggttgatcatcagccatatcaagccggcgacgtcattccgaagctccccgccgtcgccgagtcgttctgctcgcggtcaccgctatctggaccctgccaagtttcattggacgctcggtaagcatcctatgatcccatagcggcacatgcatgtagctaaacatctagatcaatgctctagctccacatgcaccatcacccgagaaccaccgcagctcgcgccgccgtcgccattaattccggtgactaatgcttgcaataataccaccaaaagcgtcgccttgaacccctttacattatatccttacgttgcacgccgagatctgccaccgtttgtcgccggcgagctcgaggacgagctcggccatggctagctctgtatcagctcgaacc

SEQ ID NO: 8080 - DNA, 431 bp, Oryza sativa
tatcattgtacttccctatcttgactatcaacatcaagttttcttcttgacgttgtcagtcgggggctatcatcataataatggagtgtgattttttatcaatttaatttgcttacttggtctatcattgccttgtttggttttttctacttagtctgcgaggactgaaagtttttaatagcttctttgggttttaggctcaacaaagctcgataaaagcatttaagaaatcaaagacttggctagaactatcaagcacagcataaatacaccagtattgtacaaattaagcctccatttgttacattcatactcagtcagaatcagttctttcatcgtcagagttattgttgctcggctgaaggtcgttgttgcggaattgatctacaacgtcacttgcaatcttgtcagccgcattttgagcattactg

SEQ ID NO: 8081 - DNA, 440 bp, Oryza sativa
  unsure (1)..(440): unsure at all n locations
ngagtgtgtgcgatttttgagctgccactacctagtagttaatatgtacgcgcatatttntgtgtatgtttcttgttttctactaacaatggcagggatacgcaagataattggggatagctgcgctcaacatcgacatcttcgtcgagacatgaggagggatcaacatgaccattatgaggtaagtgatgatgttctaggtaagatcaaatctgcactgccttatttcgagggagactatgatcctcgtgcttacattaattgggagctagcggttgatagtgaatttcaaaagcatgtcttgtcggagaaacaaaaggttatgtgtgcctctagtgttttaattaaacatgcttctaatgattggaaacatctttgtaggcataacaaaataccacaatcttggaaagacctgaaacgatatttcagagatgtttatg

SEQ ID NO: 8082 - DNA, 415 bp, Oryza sativa
tggatcttcctcgggtactgatgtgaccatggctactacggattcttttattgctcacataatgcgtgaacaagaagacatcaagatcaaggtctccaagtgctggaatccgattcggccacctgctgcactgttgatttcaaacggccgccgaatctgcatacgacctccgtttttggcccgcgagtacttgatggaaagcctacggagtcctctttccaatggatccagcctcatcgccaaattccatcctagtcatccgcggatgaacaaacaaggtgctgcgtcacctgtcatgggcctttgggcttgtaacttcgtttgggaccctggcccaagtggggcccaagtggggtgcgccccaaccaggtggagcacgaccctatagtgcccttggtcgtcctcctatctcttt

SEQ ID NO: 8083 - DNA, 393 bp, Oryza sativa
ttaacttgtctaacggccaacagtgatgagatcagtaccggtctgctcctgctcacgatgtggaactcggacaatctccccgctgttgttccagctcccaaggcagtaccgggcggcggtcgggtctctcgtcgttactcttggcgcctttgttagggaaaaccatcggcggcggcggttggtacaaccatcggcgggacaacaatcaggccgatgaaagcctttttgagacggtagatacactatataatcggaacaaatattggtatataacccattaacttggttttgtggcaacaaagtgctaccaatgaggccatatggcaagtgtggtctagattatatagtatatttgataactagacgattacataaacaagattagagtatcat

SEQ ID NO: 8084 - DNA, 411 bp, Oryza sativa
tgctgggtttttctcgacgtacaagctgagatccgtgcctgtttagagcgtggaattcaacgtacttctccaacccgtgatgtccattgtcctattcataagacaaagaatcacgacctctcaagctgcaaggttcttctcagcaccatgaggacgtcacctcctaaggttcaacagtcacaaatctctcttagagatgcggacaaggaacgaggagtgacggttatctcagatcgattcgttggggtaatcgacatcgatcctcacgagctgtctgttctacacttgttcgaagaccagacctcatcatcaacgagtacaccacgtgatgtattcgccatcgatgggaccaacacatctgcgcacgctaacgcagaacggaggatcaagtggttacaccggcccagcaca

SEQ ID NO: 8085 - DNA, 436 bp, Oryza sativa
  unsure (1)..(436): unsure at all n locations
cgaaacacaaacaaaaaaatggtccagggtatgaaacggaaatcatccaagtctgtagttaacaagattcgggctggcacccaaaacttaaacccttgccttctcatcacctttgggcccttcatcataaacttaacattgcagatccactgcaatttgggacgatgagtaccacagtgccagatgtatagacataccgcatccacttaacaatgatttgcagcaacaaaatattcattatggacaacaatgaagcatggaatggaagtaatgacttgggatttatggaagaaactntgttttgtacttaattttaattntatgatttgatacaacatgattcatttctgtgctttcttggcaagtaccaaagacctatttctttctctctttntgtggngaaacagacattntcccgcatagatcactgctcatt

SEQ ID NO: 8086 - DNA, 435 bp, Oryza sativa
tgagacatcaactctagaggatgagaactcaacaaatgatcttgtttgcttctctttcaaagttcctcagtgttcatgctcacataaagaatcctcagagttctgtctgattactatcacttccttgtgtgagaaccataaccaccttttgggccttacctctaacatgtttagaaggttggttttggatgcttttatttatcataaatattgcaaatctcatatgtgtttgtggtactaatcttgcagcgacatgtctccatggtcgagcttgtgaccataaacaaagcactgccgggagataccccggattatcttggtaagttctctttataataaaagcaagaaccagttcttaggatattatacaccttcgggtattcttggtcagtaactatttcaggttgagattaagaacgaaggacgtacgatgcc

SEQ ID NO: 8087 - DNA, 433 bp, Oryza sativa
tgcgtttctcgcccgcgccgtgctccaatgccgccctttgtttctggcgcggctacaggtacgacgccggtattgttgcgccatcactgggccgccataaatcgggcgcggtttcttggcctaaaaggatgggcgcgtgcgcacgcggcttttgcataagcgcggaggcaacctcgcggtgagcccgcagctggggaaggaagagacgagacgaaaccacgaggggaaatatgagcaaaatcaacagctagctgcagactgcatgcatctgcagttggttggttggtcggcgcgcacgtggagggagagttgagcggcggcacggcagcacaaggcgttctgggcgactctccgcgtgggttgttgcttgctcgacgcccaccgccgcatcgcccgggcccgcctctgccgcctcgtcgcccgctatcgtgtc

SEQ ID NO: 8088 - DNA, 432 bp, Oryza sativa
  unsure (1)..(432): unsure at all n locations
tatcaccaattcatacttcatacatggagttcatagtttctaactcatactttcatagntcatattaaatcatacagatacatggcacttgagttcatacttataaatttaacggttcatagttcatagtaaacatgccacttgagttcttgacataaataataaatagttcatcataagaagtcaagaacatgaccattaattaacaaaataagaacaacaagtttgtagattagaatattgcattccactaatcagattcagagacaccatgagacttatcagaatcgaaggatcccactgaaacgtctccagcgccattgccatcaccatcttctgagtcagatgatgaaggtccaagctgcattgtaacatcattcatcaaagagtgcacgctcttgattttcttctttctaaggcgcacaagcctct

SEQ ID NO: 8089 - DNA, 426 bp, Oryza sativa
tgcgtggctcaagatgtcttattggtgacgtgacttattatatttcttgaatgatgtaccactgagccgtgtgccatgaacgtactaatgttcattaacgcgtacatcattcataaatgctcgagtctctcatactgatcttatactgctaccaatcacctacatgagttactatgtgcacagttcatgccatgtacctccgcacgcgtgaggcatattgtgtttccttatttaattgctagagcatcttcagagtgcgaatagacttttatttcctagactttattaataatcggtatagtggcccgcgcagattgcgctgatagtatccgtacattcttttatacaatatcatatatattattactatagactattaaaatatattaaaattatagcataacatttatatttgtaccaacttga

SEQ ID NO: 8090 - DNA, 432 bp, Oryza sativa
taaatataaccgtcacttgctaatactttatccaattatctatagctcttgcgtcctcgtgagaatctaatcgcgtgatgatttcgggcagtggaccggtaataaccatttgataaccacgaatcaattaacaaagtactacaactgcagtgtttgaaccgatctcgcctcgctctaataaacaacttccatcttccgattgtccggggttggtgagttggtctgttggtggccgcttgcttcttaattcatttggagattataatctgattgttggattgcttttgtgcagagtttgactttccggaggatcgcgaagaaagaaaggacagttctgttggccccaaaccttcctacacccccaaatgctagctcgagaggtgaggagctccctcactcttaagttgatttaactcctcctaaataatcaaa

SEQ ID NO: 8091 - DNA, 431 bp, Oryza sativa
cgcaggcacgccgaacacgcacttgtcggggttcagctttatgcgggcggtgcggagactttcgaaagtttccgctaaatccgagagtaaggtctcctggttgcgtgttttcacaaccaagtcatcaacataagcctcaacattacgtcctatttggctacccaaagaaattcgagtagtacgttgaaaagtaagacctgcattctttaacccgaaaggcattgtcgtataacaataagttcctatgggggtaatgaatgcagattttttctcatcctccctagccattcgaatctgatgataaccagagtatgcatctagaaaacacaaaaggtcgcaccccgcggtggagtcgacaatctaatctatgcgtggcagggggtaagggtccttaggacatgccttgttaaggtcggtgtagtcgatgcaca

SEQ ID NO: 8092 - DNA, 433 bp, Oryza sativa
acatcaactctagaggatgagaactcaacaaatgagcatgttttcttctctttcaaagctcctcagtggtcatgctcacataaagaatcctcagagttctgtctgattactatcacttccttgtgtgaaaaccataaccaccttttgggccttacctctaacatgtttagaaggttggctttggatgcttttatttatcataaatattgcaaatctcatatgtgcttgtgggactaatcttgcagcgacatgtctccatggtcgagcttgtgaccataaacaaagcactgccgggagataccccggattatcttggtaagttttctttataataaaagcaagaaccagttcttatgatattatacaccttcgggtattcttggtcagtaactatttcaggttgagattaagaacgaaggacgtacgatgccta

SEQ ID NO: 8093 - DNA, 439 bp, Oryza sativa
tccagctcactccaacgtgttggtttgtttaggtgataacaggggtgtgtaagcagaggcagtagctatcgccgtcggttgggctgtagctggataagctcgatagatctccacaaatgaaattacctcattcagtgagtaagcatggaaaattaattaccttatggttgtagcctaaaaaaaatgaatattagaaaagtatctaatatcaaattataaggggtgaggggcttctaacccagatcgtctagcccatcatcttgtgaagctagttaaaaaaccctggatgtttctctggtggtagcctcaacgtagcttcaactggttgcaggcatatgtagtacagtatatatatatccattccatggacgtacattgaacctggcgttctagctacacgtacgttacgttgaacctggcgaccggcatatacgattac

SEQ ID NO: 8094 - DNA, 417 bp, Oryza sativa
tgcttaagaggggtatcgaaccggccaccgctaaatggccggatcgatcgaagttctggtactatgctcatggtggaacgctaaacccagttgatggctccctggtcttcagcgatcagatacgcgaggctgtgcgtcgactaacggacgcagtggaagcctcttctcaaggcacgttccgacccgacagagagaaggacgagctgtcactcgccctgcagactccagagcatccaggacgaacacgagggaaaggggtgattccttggaagactggattcaaggaggacatccacacgtacaggagtcggatgaggagcaagagagataccgaggcgaagattgcagatcttgagtacagggtatcgagctacgagctcagcatgcaagaagaggtggcaaggaaggttgatgaac

SEQ ID NO: 8095 - DNA, 429 bp, Oryza sativa
tgacttcagcagcgggcgactccactccacaagcaatccttgttggtagcgacgaaaccaactttgacaaaacagctccaactaggaagatcttcagctctggtgtgggggaaaagagagcaagactgagtactacccactgtactcagcaagtcataccggaagaggaggtatgatgcacgatataaccaaaggaggctagaggttcttttgcataaagcttgcatttaaaagcagtagttgaaggcagtataacagttgtagtaattaatcaatattaaccaaacactgtccaacgctacaccacgttgcaacaggcccaaccaaccacctgaactacaccaagtcattaagctaaactatgggtgagactaatcacggagaatctggttgatcgcccataaccgcgggcactgctattcgaatagt

SEQ ID NO: 8096 - DNA, 438 bp, Oryza sativa
  unsure (1)..(438): unsure at all n locations
tagtggattaatacgattatattattcttagaaaagtaatgtgttctgcaatctctccgcgcgatatgtgtcgttttttatgcaaaaaaatatgtgacggtatagacgtatcataacaaatatcatattgatatatactagctatggaagtaatctattatttgagataaaaacaaagagagagaataatacaagtttcgatggcgcccatcctcttagttagcacaaaaaggaatcaacaaaaatgttggcttacatacacacgtcatcaaattcccaaccgaccaaccgcaagaaatactctntgaaattgagttagctaatctctcggttcacttttgggagatatatggcttaatcatgaaatgtggtggtgaagtgcaggtagcatatagtcaaagggaagatgctccatcactgtcttgcctatagctaact

SEQ ID NO: 8097 - DNA, 393 bp, Oryza sativa
  unsure (1)..(393): unsure at all n locations
ctactggatatggtttttctataattcaaaagagcttaaatacgtagttttgtagtaaatttggcctccagtttgcagtgctgtggtacacaaagtttaatttgtagttcttttgttaagtttgccaaagtatacgtatattttataaagaaaattttaatcattttttagtcaactgttttaataaaggaaaaggtccaaattacctctgaacttaaggcgatagtccgaattattccatgaatgacataaccagacattntacaccctgaacgtctcaaactggacgaataacccctaagcactatttgtgcggttntaacatgagctgacacacgtggcgacaacgttgtaatccggtcaccataaaaatagaataaatccataggtcca

SEQ ID NO: 8098 - DNA, 436 bp, Oryza sativa
tatgccatcgatgtctccctatggcgatggaccattcgataacaatgtagtgtgccgagatggctttgatcgcctaaactcgctagagataaacaatcctttgtttgagaagcgcccccatgacatgaattattccgcaaagcatcaatatgagaaagagacttcaagtactttcaggaagtaccctgctggcttaggtaatacttcacttaaagatattagaaattcatcaagaggaaagcttgaagatttcaatagcattgttgttttggagccaggcttagggaaagtccaagagtcggggaaagccttttgtacgccagacccctctcacatcaataagaatttcaggagagagatgcagcaggctgatttttctttgcagaatagagggagggtttcaccaaatcttttagacactgaagatgttgatgtg

SEQ ID NO: 8099 - DNA, 375 bp, Oryza sativa
cgctactatgtatctttgtatggacaaagagaagtactttttatcacttgtactttgcacaagattgagatttaaaaatttagctatgcacaagcagtggtactgtagtagtacccgttactagcatatgttctctgttactgtaattcgtcatgatgttactgcaaaaagtgtagtaacgacctataaatttcgtagtaacgacttatacatttcgcagtaacgtaccatgttaagcacttctgcgataatgctacttccaaatcaaagtaagaagcttcgatttctatagtaaatataactaattcgaacaaacactaattcgaacaaacatataaaacaaacaaacaataacctctaatcacttagtgtcat

SEQ ID NO: 8100 - DNA, 433 bp, Oryza sativa
attaacaggagcgttctagtataggcggaacgaacgttctaaatatggtttgataactagtatcatgtttcatcacaacgattttcaatagttgatctaatttgtttcaaaatacttgaatccgagcttcttaaagtattcccggaatccatacacgctctggtcatagttgaactgcagaaagtacaaaccatcacatcagttcaactgtaaaacgtcagccagtttgtgaagcatacgactgacaagtgacaagtattctcttctttgcggtaactaaaaccactcatgcagtaaagttcaaattcgaaggactatgtaccataagtttggaattgacttacaaggagaactttcactgagtactttgagacattagggtccaccgcctttcctgtgctagcagcctaagagagtgcagaacaaatcatta

SEQ ID NO: 8101 - DNA, 425 bp, Oryza sativa
ttcatcttaccaatatattcggcaacactaaggttgcctttcctggtggtggacagcgccatgtgcgtgttgatcacatgtgccctggattgagaagcaaagatcccttcgatagcctcccacaccttagaggctcttgtcagggtggtgacttgaattatcatgttgcgcgagagaaaagatggtatgtagctgagaacctgctgctcctgcacaatccacaccgcatgcgcaggatttgacaccttctcggtgacctccttcccgtcgttgtccttgccggacaccaacatgatggccgatagcgcctggcttgcgccatcaaggaatcctgccatctgatctcctcttagagtggcaagaacttgtgccttccatagaacatggttggatttggtcagcttcgctgacaccatatgctcatg

SEQ ID NO: 8102 - DNA, 397 bp, Oryza sativa
  unsure (1)..(397): unsure at all n locations
ttctacatccatatgatctactttagttgattggtattgcccatataatgaaagcagatcttggtccatggagtcccaagaagggtggaactccaacctgtccgatgctttttcggccaaataaatagaaaagtgggaccagcacaatgagcaagctgcgcgaaaaaccgcttctttttccggttccgcaacaacttgggcgaaatggggttctaccgggaaaccatggtcgagttttcgaccttggttactggtcgagccactggataagaatctctggagatctttcctctccacttactcgtaacaggctttccctctgtataagacttcttccgaatggcataatngtcctgtcctattgacacctcgatctttaagaanactgactcctcct

SEQ ID NO: 8103 - DNA, 470 bp, Oryza sativa
  unsure (1)..(470): unsure at all n locations
gcaactacgcgttatatnatttatttacaactgcgctaattttgtcacatccgctntctctgtgtgtagattaaaaaaatacataccatattctttcccttgctttgctatttgaatgcttacctcagtgcaagagcaaggaagaggtttgatagctaataaaatgagtggaagaaggccgccatggaagagtgtggtgtccaaagccacaccttctttctcccataagaacagaggtcaagagctgccggcaaggcgctgctnttaatctgactgatggctcacgataagttggagacgtacttgagatagataatntatgtatttcgctatttcgaatacctaaactcaagcggtgctaatttgctaatccaagccttatcaataataccaacacgccgtctgatccaagagtagcaacctctctgtctctcatagagggaacctcactgacgcattcaaggctctgc

SEQ ID NO: 8104 - DNA, 447 bp, Oryza sativa
  unsure (1)..(447): unsure at all n locations
ttaccttattctgtnttccatttgtactctctgaagtccatccagacattgcgttctaattttctaacttggaatcctagctgctaatgttgaaattgctaaattctttgcaatatatgtgatatttgcattgctgatgaacaactaaatcaaccagttcttttactcctgcagtttaatatgactccaattgaagttgccgcttatcgaggcagacaggacacttgttaaatgttgttttctttaacttcaccaatttcaacactgcctgattggagtatcgatggagttatttctcatgtgcaaacttttggattgagccaacggtatttgttcctttacatgccacctgtaattgatatcattgttatcatcattcttagnttccttaccagtaccacccatgcttgtattgataaataataccgattcactgcattaacttgt

SEQ ID NO: 8105 - DNA, 433 bp, Oryza sativa
agcttcgagtagttatcatcaggtatacttctatgcctatgttcacaggctgaagcgccaagatttgagacactctgcacacccatagtaggatcccttaccttgtcattgaagagactgcgcctatgcaaaccacgtagatgctgtgatacagcctgccaaatcaaaacaagttgtattttagtactaaataatacttgatttggattaatgcaagataaaataatatgagacaagactggaaaatttgtgataaaaaataaaatagttctgacaatatttctgttttaaaaaagttgactataaaacatagaaaggggcaccagacaggtcaaattaaaattttcttaatcacaaaaaataattggtttgctgattccattgcattacataagttaacaattaaaaatttgataccattattctagccagc

SEQ ID NO: 8106 - DNA, 282 bp, Oryza sativa
gaagcatcttctctatcttactcgtccctcggcaagagaccgccaatcagcagctatagtctgctcctcggatcatggtcgacagctacagggtgcaagcacaacataaaataatcaatcactgaagtttagcaccgaatatgactcaaaagcacttgtataacgatcctttggggaaaaaaaaccactttaccataatatcgaggaaagaaaaaccactcctatctaggttgggggctacacatactactcatccaaagttgacctgtgattttaaaaaaa

SEQ ID NO: 8107 - DNA, 440 bp, Oryza sativa
  unsure (1)..(440): unsure at all n locations
agcttatagaatacataaattggtcctcaatgtataggtttaaaaaggacttggcaaaaaagatttacaatgccaaggataacattgcagactatttccctctctaagaagaattaacttgatcttgcaaatgactgaatatatagcaatcactcaatcaggttgatttcagcagtaagacttgtctttcagattttctacaacctaaacccaaatggtaaataatcgtgatttgccactgtacatgtgcacattttactagtctgaaatcttactgctgaaacatgaaatatgtctttccctgtccacggtcagtagcgggctacaactataagtagagacctgttcatcatggacaggcaggcagatccaactggcttttgcccggtcttttggcccttgcacactnctgaaccgcagattctatatggtcatgtcta

SEQ ID NO: 8108 - DNA, 461 bp, Oryza sativa
  unsure (1)..(461): unsure at all n locations
taactagtatatcgcacttaaccaagatagtactaattccgcctatacaagcgaagttgatgatacttactttctcgctagagatcaaaactaatgcagcccaaacttgaaaacaaaaactcatcgaaactagaaagttgtatattgaaccgttgttaaattaaaaggaccttatgtgtacatatttatacccataggttagatcaagtccaattctactacagttagatcagcttaggactctatcccaaataaggaaactacatgatacaattccgactcagacatgactctgatcggcaaactagctaagtccgaatccaacacgagtccatcagctcataactctgtccatagaaaatagaaaccaaaataaacgttccttataacggaacgagataaatttaccaaccaaatctacgaaaatcatggtgttaattctctatnttgattcagtattg

SEQ ID NO: 8109 - DNA, 365 bp, Oryza sativa
  unsure (1)..(365): unsure at all n locations
gcatgcaagcttctaagaatgccataattacttgtttactgctcccatgcattgaatccctttggccagttgggacatggcaaatggcctcacttgcaaggggactgtatgggatgatgattaggctgttgccttcctatgtgcgtacatggtttactagtttaagagatcggtcattgtcatcctcaatcgagtccttcactagagcatggtgcaggcctnctcttctacttgatgaaatttctcaagtattacacttttggttaaaaaatatgcatatttaattctttatccagtactcagccctttcgagtgtctatttacaggcctacccttgacactatattatgacacagtatgttatt

SEQ ID NO: 8110 - DNA, 471 bp, Oryza sativa
  unsure (1)..(471): unsure at all n locations
tcttctctcatcatatattccagaaggttgatttatttaacatatggatctagtgacacgcgcactgaaatcatacaggggatttaaggttccttgtcttgttgctcacaatatgtgttagtagtttggatgtatcttagatatagatagatgcttgttaattagtattccctccgtttcatattataagtcgttttaacttttacccacttgaacttatttagacttgatcgaatttataaaaaaaatagcaatatttacaacatcgaattagtttcatcaaatataatattggatatattttaataatatgtttgttttatattgaaatgttactatatttttctattagtcaaacttataaaagtttggcaaaataaatcacagtaacctataatatagaacagagggagtatcangacagataagttcgatatagtgtataccgctattctgacactagtatattat

SEQ ID NO: 8111 - DNA, 477 bp, Oryza sativa
  unsure (1)..(477): unsure at all n locations
ggatatggcggtggagtcatatgtgcgtgactctatctgttatggtatatatggtgatatccactaatattacacacataagtacgttctaatacgaatttagtgggatcatggatataccacctatttccatctctttgagagtggggacgaactcatgtggtgatgagcgtgcatgtgtgtcatctatgtaaatgaaaaaaaaagattttaattggattatgaagttaaaagttgggctcaaccccaagctggctcatcgttatcttggccccacgagtggaatttcacctatgtatttttggtcaagaaaagaataacgtgcaaaattgtgataaaatgggctgaagtggtatacacagagatatgataagtcgtgttgattntttcctaaatcagaaatctataagttaaacctaatttatggagaaatgtagcactcttgtaacaccaaattagtctaattaatcctaatat

SEQ ID NO: 8112 - DNA, 413 bp, Oryza sativa
  unsure (1)..(413): unsure at all n locations
gcttnctttgcaatgcagatgctttttaagctcttacatgaacttactaggaactaactagatttcagaagacaacaatgtcataatgaccttactattcatattaggagagaaatattgaaaagaagaagaagagaggagctgtgggtgggtttatttgcgagttctaatacaaatgtgccaatatactgtttatgcttatttggatgttattaatatcaatccactgtatctcctagttggatatcctaatccaaataacaaagtccaaaccaatgggaacataaaaacctagtctaattatgtatgtgtatacaataaccatctaacaattgattttactgtaggcactgactaaataaatattttagtaatttctatcttgtcattctatcttttcttttttctcatta

SEQ ID NO: 8113 - DNA, 469 bp, Oryza sativa
  unsure (1)..(469): unsure at all n locations
cttaaacattntgcttcagcacacttacgcataaagaatacctatactgatacaggaatcctcaccagatggaccaaacaagaacaactttactaanatttacaacctatagcacgggagaggactgcctctctctctaaaaaaaaacaatctacaattttaaatgaacactaatatcatccctcaaatgtctacaggagtatagacgcataacagattactttacagctaaacagatggaaacaggaaaaaaatctgtataatcaacggaaatctgctgatttcgtttcagaaaaagagaaatcatagcataatcgctaccacctatcaacagattcaaacataaaccacccaacccctaccagcacctagatcaccaaaccgtgccacactcacctttgtgccatcttcaccgccgccatccttcccggcggcgacctcgtcgtcctccgtggactgcgacttcttc

SEQ ID NO: 8114 - DNA, 431 bp, Oryza sativa
acttagggggtacttgcacaatgtataacactgagttcagaataggatcaaagaacattcaagaaaagtcacccatttcatgtataagtattactaacatctttagtgtagggcatctataaaaacatctctagtgtagtgaaattcaatagtacacccaataagatgactgcgcatgtgcagacacatcctaattagcaatagaagtgtttgcttttgtatgacatggatgaaaatggaggcttggagaaattgggttgattagacccaaagggttcgtatcttctgccttcggtctcaaacgcaaactttaccgttgcttcatcctttcggcgatcaatagccgtatgcattggcccgattaaagtgctaattgtcaaagtacttaattagcagctgctcgtctgttttctttttccaggaaaaaaaat

SEQ ID NO: 8115 - DNA, 382 bp, Oryza sativa
  unsure (1)..(382): unsure at all n locations
tgctcagatcgggacctaatgggatagacagatccagattctaacgtggcagagggggaagttgcatgatgacctgatgatatgcactggtgatggtggaaagattgcgagggcgcactgatgtagatgaatccnccgagtggtttgaagccagcctaaaagattaagtgttggagtacatctcggcggaatttggtaagccaaacggtgccgagtggtcacgacctcttccccgactagttcgaatccgagtcaagaagagagatgttgccgaagttgtcagtgatgaagtcgagactgcccaagcggtatgcctggccttggaggaacgagaaagagttgactcctggagtaaaacccatcgtacttgtcgacggaaaac

SEQ ID NO: 8116 - DNA, 68 bp, Oryza sativa
tctgtctatctattgcgatatgagccgtcatggacaactttctttatagaggctgatgatcgtataca

SEQ ID NO: 8117 - DNA, 413 bp, Oryza sativa
  unsure (1)..(413): unsure at all n locations
tgcaagcttacatttcccatgcgctcaatctcttcaattaacgggtcataggtcgtgcctggcgcgccaatgcactgagctttgtaagctgaccaagccgagtactggccatgagttgtgaacttccaagtgatttggtccggttcttcttcatccagctgcatgccacggactgcaatctataatgccacgagttgttccacaagggtcactgagatttgcgggtttgtctccaaggccaaatctccgacccaggcatcatacgccaaacaatggctcttaaagaagtgaagagggccttctatttttggttttctgtcatcagtcatcacccttctcttttttggtttgtgtgatgctaatcgcgtcactgcgtcgntcaccacgagccgtccatgtgaagtttacgtaag

SEQ ID NO: 8118 - DNA, 471 bp, Oryza sativa
  unsure (1)..(471): unsure at all n locations
tcattgacatcaaccttgcgctcgagggtctgctctcgtacaccggcattagctngacctcaaccttgaccacgagccatcaatggagaccagagagatgagagagaggcaatattgacaagtgagccactggtcctaactgcaatcttttggtaagaaaatctggtttaatgcgaaagcattggattaaaggtggtccaatctaaaatcatgataaaaaataaatagcccaatatgcaattcactttattaatatttagcatgctaatattcaacttaaaatctattgtcactctgtagctcacccaaacacttattggatgtgtcgctatcgacgaacacggaagacccgaaaatgtaaaccatttccattatcttaanaaagttacatccacacagtaaagctcagttccatgggagttaactttgcaacctaacattattcagataagcaaatatcggcgtgaggga

SEQ ID NO: 8119 - DNA, 368 bp, Oryza sativa
agccagttcctcgacagatgcttctttttatataataagtattcgcgacctccttatggtatctaatgtattcgcttgagtgagacatattcacatcgatgtgggctcctcgcttagtcgaactattaagtgctctagtactatgactctggataaagaaggaagatgctaacttcctatgcgaagctagagtagtaatcaataacttatgcatggtgtctaagatagcggatacattcatttgttgtgaggtccacggaaagtgaagtatgtgctacgtggagacagctatgtccgtcccttacattcctccatgttcagttacatcatagagtcctaggccgcactcagattgacagactacggga

SEQ ID NO: 8120 - DNA, 387 bp, Oryza sativa
aagctaatttatgagccagtgtagtgaaaacatacattgataagatgcataatctgaaattttgggcagtagcaagtaaatctgaaattgaatcacaaatgagcacaaccggtgctctcatcgccatgcatgggctaccgttgcccaaccatggattccaaatataaatatcaccatatccatgactaaaccaagccatttaacacaagtttgatgctgacataaattgactaacacatcaagcgatcgtcctgtaactatgggcatggctattcgaatagttttattctgataaggtgtacaactttacccacacgaaataaacaaggatcaaatgcttcacacgcacacaggtgtgaccacacaagtatacaagctcataacatg

SEQ ID NO: 8121 - DNA, 478 bp, Oryza sativa
  unsure (1)..(478): unsure at all n locations
ctgtaattntatacaaagtatagaattagcaccaatctaagctatatacgtgttccgcatgaaccaaccaaacatacgtggccttttcttcaagattaatattatcactggtgtaatcacccatctaaaatgatttacttgcataatgatcactccaaaattgcctctctgtccacagatgagagaaccacgtgccactcanaacaagtggttgtacttctgtatggaggaaggcttcgaaatgcatcagctttccatcttctattattgggacatcattattgatcaagcaaactgtttaacccggggcccttgttggtctctttcatggtagatagtttaatcgccagtgttgcttttcgtacatcatgccttgcaattntgggcataaaatctggtgtacacgacacaacagaacgcantaaaatttcattcttttgaaagtttgactaatgaagtgggcaatgcataatcacac

SEQ ID NO: 8122 - DNA, 423 bp, Oryza sativa
  unsure (1)..(423): unsure at all n locations
gttgacggtcgttatttattttttcgaccgtcaatattaccaaaatagatgaaaactaatgatgcttacaatgcataaatatgttagaataataatattccactagtattaggtatactaacctcttgcagggaatgacactaaagtggaggagaatcgacatcaacacagacgataaatcaatcagacgatgtcgagaactagacttatgtatgaatgggccaagaactcagaaataacatgtcgcgaccgagaaaaatacattttcccgaacgctagtgtattaatccccatcccaggaaaagccgatgtacaccaaacaaacatgatacaaaaggcacatctnnntatatatcgatatatttaccatattacaaaggcacttaaggcctgacaatcaaaattaaacagcagcggactagc

SEQ ID NO: 8123 - DNA, 339 bp, Oryza sativa
  unsure (1)..(339): unsure at all n locations
cccactacatgttggggacacactggtttgcatgcaacggcggttctttaaaatagaactactggatacaatggtggatcccctatggagcttaccacgggatatgcaccaaatatttcccatctacccaaatttggatgtgctagatacgtccctataccgccacctaaacgtacgtcgatgggtcctcatataaaattgcgaatctatgtaagatttgaatctccgtctatcattaaatttttagaaccattgacaggagacctacatatgggtcgatacgctgattgatatttaatgaagatcatttcccggnattagggggaggaaagtacctac

SEQ ID NO: 8124 - DNA, 461 bp, Oryza sativa
  unsure (1)..(461): unsure at all n locations
ctaagcttgtatttgttgaatgtcatggtaaataaaatttaatattcattattgaaaaatacctatttaggaaaattcttttttttttacttagaaatgtgagcatttatgttgattctagcttttctataaccctaatggtttatataactgtgtgatatgcatggcatttcaaataatatgaaatcattggtaaaacgtagcaattatgccacgaatacattagatgctcagttagagttaaaacttgtgccattatgtttttctaggttcctcgcttggtaaggatgcactccaatgagaatggaggtaagtgcaccaaatgttgtaaccaaaataattactaagtattagttngatctgatcacttggagtgattgtttcctttataagcaaatccacccctatgctaatatcttctttattctgtggtcaatataggatattcaagaacacatgct

SEQ ID NO: 8125 - DNA, 386 bp, Oryza sativa
agcttgtatatactaataatattgatgcaacaattaattaattcactgaacaataatggatgagaaaattattattgtcacaaatttcaaatatttggacctatcttcgcaagcggaatttttttattattgcaggcgggcatgctatattatctcacgcggaccatatagccgttggaaatttggtcataattcggcatatttcaatccaaaataacacgataataaacatgatatttacaacgggattagatccagtgataatggtgaatgtaatcaacatgagcatgcttaatgtataataagcatcaacaatcacataataacacaatgttgacattgcgaggaacatcaacacgaaaacttctaatagaaataatgtaaca

SEQ ID NO: 8126 - DNA, 469 bp, Oryza sativa
  unsure (1)..(469): unsure at all n locations
tganaactggaaacttggtaactcaatgtatctccacaccataacatantttttttggggcactcttgtagctttcaagctatntttgcatagaaggagaaggaaaataagctgaaaatcctgattntggagttctccttcgtttcctacccatcgctctcatgccacggtgccctagctcgccttggccccactattcagtgacctgngcacccctgcaagcctcaaaccaacttatggtcatccttcccctacctcttatgcttaaacagcagggaaaaacccctgaatctccctaccattctttttcctctgttgctggtttctgttcttccatgagctgagctccctcctcatttccccctcgccaaatcttcataaaagtgcaagaatcaagccctgcatgtcacgccactagatccccacgattctaagctttccatccatccaaatagcttgcacatgcata

SEQ ID NO: 8127 - DNA, 437 bp, Oryza sativa
  unsure (1)..(437): unsure at all n locations
agcttatccncaattccacctaatgtgttttaaccgcaaaantcttacccaaccacagtctactaagggaaaaaaccgtcagcgcacactctctctctgctactgaccccgaattatcaaaattccactacttctactctaattagagcaagcaagccgaaaccctagctttgcagcgaagacgtaattagcacccaacagcgcaagtaaccgcagcggcacaactcgggcggtcaagtagacgaaacagttcagtgaagcaagcaaggagagagtgacaaacagaaatctgaaatgaggaacagcgtggctactccacggcgctcaaggagtaccttcctcgtcgtcgtcctcctcctcctcccctgaggcggcctcctcgggagaggagaacaacaccgaggagatcacccttctcgctccggacacgatgctgg

SEQ ID NO: 8128 - DNA, 453 bp, Oryza sativa
  unsure (1)..(453): unsure at all n locations
ttgaccggtcatcgctaaaccaacaataagctntaattgttctctccatccttaanaaagatataggatgcagcacattctagcacaacaaatctagacatatatacgtacagatttattgcactattttttntttgcggagaacagatttattgcactataatatgtcacaactaggaatagattgattttttaatgaacggatggagtatctccaaagtcgggactccaaacaaccgaggaagatgtttggacgagtatgtcgcgtgagttcgtggcgcacaaattgttcgcggatttgccatttcgctagcaggctgctccactagctggctcgaataaacggagaagcgatacgcgtatatacatacttgtgggcgtaacgtaaccgacggaatccaataatacgcacttagtaagtctaattttgggacagcaacgtggtctacatat

SEQ ID NO: 8129 - DNA, 148 bp, Oryza sativa
agcttgggctctgacagaaaccatatatttgtgttacttacgctactaccaccggcctattatataagggattatgtatggggtgtgtccacctgcatgtataaaaaccacccgctactcgcatggtctcgagctgtgggtcaagccg

SEQ ID NO: 8130 - DNA, 404 bp, Oryza sativa
  unsure (1)..(404): unsure at all n locations
tgctatagtagtagaaacagttggaaacaaagctacatatattgtacttttgaacaacgacgctgcaaatagacatacacagaaagctataaaatcatcatgctgaatgtattctattgcatcacgactatctacaacaatatagtgaaacttatgctggcaaaatgagccattaggacagtgatggatgttcagtactaacaacactggaataaattttgaatgagaaccattaaaagagatgatgacctgcatgtgccattagtgcggtttaactaaaagagaaagggaggagaacagatctacttttccaatattgttagagggcttctatggataaccatttggcataacctanggtcaaggcggctttgataccaactgtgcacgcccggaatttatat

SEQ ID NO: 8131 - DNA, 405 bp, Oryza sativa
agcttgagcacagatcaaacttattagcttatactggctttgtcatcatatcagctgggttatcatgaatacttatcttgcataccttgacatcaccttcagcaatcacacctcgaataaagtgatatctcacatcaatgtgctttgttctctcatggaacatttgatcctttgtaagacatattacactttgactatcacaaaatatattaatgcaaagacataactccacaaagctcagtgtacaaacctctaaaccaaatagtttctttacaagcttcaaaaatagccatatactttgctttagtaggtgataagtcaacagttgcttgtaaacttgcattccaactaacagcacatcatgcaatagtgaaaacataatatgtgagcgatcttctcctatcc

SEQ ID NO: 8132 - DNA, 448 bp, Oryza sativa
tgtcaaggtggagacaaagtcttctgaagtgattactattttagtggggtctcattatataccaatacctactggagatgaaaccaaggtggtttgaagtgatgaaaccgaaaccgagattatcacagcgtatgacaccgatcggaccatgacctttatccggtctgaccggcgacttcaggtcggtctgacgcgcctcaaggcaatgatatgatagctacagagtggcggcgctacagaagggaggagcaactagaggcggctggcgtggttgccaccttcgtcgccggtggctgatccatgagtgtcaacaccctacaacacttgctgcccatgcccacctcgctctgtcgtgctacccttgtcgcctcttttggctccaccttgttgcgctgcttatcgttagtggtcgtcgagctaaggagactgccctcaccgatgccccact

SEQ ID NO: 8133 - DNA, 395 bp, Oryza sativa
  unsure (1)..(395): unsure at all n locations
gattaagacttaggagtttcacttactcttgtgtgcgngtagtataacggcgtagtggtatgtatgcatgtgcttctttgatgtaatagaaacaggctaggaatttaaaactagcctgaagaatgtgctgatgtcttgacaagcaatatcaatccactgaaacatcccatgttcccactcatagtaaaccgataccgagaaaaaatgtctacgtatatatatatatatatatatatatatataccatgatctgaagaaggaaacgtgaccgactctgaaaaaccgaacaaaaataaccaagactgaaaccaattttttttcgttagaaatgtggtcagcctttatcactaaccgaaattaatttggttgtcaccatcggctaactgaagtgagaa

SEQ ID NO: 8134 - DNA, 242 bp, Oryza sativa
ctatctcctatatgtatcgagctatatagcgaatgcgcccccccattaagcctaaggatgtgcgatgcgtcactggctgtatggccgccctaagtctggtcatatacatgctaggagagaaggcgcctcccctatttaagctcctccaacgctccgggccgtttatctgtattgatgaggctgaactggccctctctcacttgaatgcgtaccttaattcttccccagtcctggtcgcccca

SEQ ID NO: 8135 - DNA, 380 bp, Oryza sativa
ctttgatcaattgcccctataactaaaaagtcattattattttgtttgcaacttgcattattagaatcacacacttaacttgcttggcctcggtttgcgtgccaaaccgacggacctacccagtagtcgcactaattcccgtaggtcgtactaccctgattccttgtcgctccacccttgtggtacctcggtattcgtgttctctgagcgcgtataccaaatatcccacatacaccgctgtttgtcgaaaacttggggaatgggtttgagaagccttcaaaacccgacatgtggtgtcggtgtgtttgaaaataaaatgaattgtgaaaacttgcgatgcgggggttgtgcctatgtggcacttgtccgtattcgcatat

SEQ ID NO: 8136 - DNA, 428 bp, Oryza sativa
  unsure (1)..(428): unsure at all n locations
ctaagctgtaacatgccatggtgaagaaagtatccagacagttaatattagtagtagcctacttgaaatcgtatccatgtagctgctccataacctctggtgccatcctaataaattacagtagtccacagattatatgtgtgaagacacgttaatggtgcataaatgaaaacatatttgctactttttttcagatgagtaccagcaaggagttcccacgaaagtattcctagcccgttgcctgtcaccagaatcaaaaaggcaagcagaaaccccaaaatctccaagcttgactacaccccgtgaatcaacaagtatattccctgcctatgatcgaaacaaagaatgcagcaatataacatnctcataaacaactaattcgagaatatctgtgtgagatatccatgcatggctcaacagccatacat

SEQ ID NO: 8137 - DNA, 231 bp, Oryza sativa
gaaaatcatatatgtttaaggggaaaaatctgtcagaactgcgtctttttctgtacggcttaaatataataaatttgaagatcagatctcacacgtgggtgtaatactatagaagcatgtgtcccattttttctagaatattctgcgatattcacttaacggagtgcatggagtgtacacgggaagttagtgcgcatacgatatgctccccatatatatgtgtgtatgagt

SEQ ID NO: 8138 - DNA, 439 bp, Oryza sativa
  unsure (1)..(439): unsure at all n locations
agcttaccaaacatggagtaactattcattgtttctattgtcatgaagctaaccacaacaaaaaagggtgtgagctgaggaagaaaggaataaggcctaagaacaagataagaagaaatgtagttgaagccacagaagagccttcagtcatgcctcaggttattaaaactctacatttcagattatgttgtgttaatcccttgaactaaccaatgttgtgttacaggaattaatgggaccacaagcaggtggctcatcactattagctgaggtgaatgacaatatgttggatcatatgctgcaggaggtattttcttgttaaggtttagatcactttattcagatgtaaacacatgtggcatttgtaccataactgtcctcctttataaacctggttaacattcagtttgctactttgctctgatntttaattcatgta

SEQ ID NO: 8139 - DNA, 475 bp, Oryza sativa
  unsure (1)..(475): unsure at all n locations
agtctacatgatgcatgtaaaaattctcatgtttattatctacggtttagtctagacaaaattaacaagcagactgactcaagattccagaaaaagaacaaccggcacaaaaagaaactttaatcaagttttaggttgtataaattttatcaccattttagtcatattatgttagggtggtccagaggctagatgaattttgggtggtccatctaagcaaacaatctagagggttaagcacagcaaattctattctatacccaactgcacgctttatgtcataccgataaaattttgaaatatcgggagaggaaagtacaaaatcccaccaaattcatttttggttcagagataacatagggagatggaattccaatatttctctagcaagtttaagttttatcgactcattctcaaaacccattttcttaggggctatgttaacccgatattntagaaatccgtgctaatacat

SEQ ID NO: 8140 - DNA, 432 bp, Oryza sativa
  unsure (1)..(432): unsure at all n locations
agcttgcccgcaggtacaccgaacacattcttatcgggtgtttagtttatgcgggcggagcggagactctcaaaagtttccgctagatctgagagtaacatttcctggttgcgcgtctttacaaccaagtcatcgacataagcctcaacattacgtcctaattggttacccaaagaaattcgagtagtacgttgaaaagtaggacctgcattctttaacccgaagggcattgtcgtataacaataggttcctatgggggtaatgaacgcagttttttcctcatcctccctagccatgcgaatgtgatggtaaccagagtatgcatctagaaaacacaaaaggtcgtaccccgcagtggagtcgacaatctgatctatgcgaggcanggggtaaggatccttaagacatgccttgttaaggtcggtgtaatcg

SEQ ID NO: 8141 - DNA, 440 bp, Oryza sativa
  unsure (1)..(440): unsure at all n locations
tctctgctggatacgcacaattcttgcaagatttgtangggtattctttgtgagattgcttgcactgatcgctcagcccatttgtgtaatcagggttgattaatccaaaagaattaatttctggctggatacttatctgagcaaaaagatgatgggcctggctctcacatactccctccgtttcacagtataaatcattctagcattttccatattcatattgagtttaatgaatttagacatatatatctatctagattcgttaatatcaatatgaatgtggaaaatgctagaatgatttacattgtgaaacggaggaagtatcattcacgtgtttttttttctcttttggagagagacacatattcacatgtttgcttcagtagttctgtgtagtactcttgccagttgccacctcctcatttcaagctgctcacatg

SEQ ID NO: 8142 - DNA, 435 bp, Oryza sativa
  unsure (1)..(435): unsure at all n locations
gctttttgaaaatcgcgacttccttgtattgatcgttntcacgtttcaatgttccgtcctttcattcgaactgaacgcttttagttggtttctttattttcgaactttctctcgtattgatgcttttgatgttctctttggacactaaatctttaatttagttttgaaatatcagatttcctaaatttttatttgaacttgctagtttgtgaaaagaaaatatttgcttgcatttaaatcttgggctttttttgtgctctaccagtataagttttgacttataacaaagttctagagttacgtttccctgtttatcgaaaaaatatcttggttgcggggcagttgtctacatttggttgtatccttttgattttatgaaaaccgtagtttgcttgtaccgaacgatttattggattcttccgtgacgcgttattt

SEQ ID NO: 8143 - DNA, 431 bp, Oryza sativa
  unsure (1)..(431): unsure at all n locations
ctgcagctgcaacttggcctgtggagagacatttatttattattgttgccgcncgcggnacataaaatactcagccagggctgctcccgtataaagagcgaagtattgtaatgtagcacgggaatccgccatttcagctactacaatagtgtattccatggccccctcttcatggaaaagagttactacttgagctacggaggatgctctttgaccgatagctacataaacacatattacatcttgccctttttgattgagaattgtatctgtagctactgctgttttgccggtttgtctgtccccaataattaactctcgctgaccgcgcccaataggaatcatcgaatcgatagcaataagccccgtttgaaggggttcatatacagaacgcctggaaattatacccggagcangagattcaattaagc

SEQ ID NO: 8144 - DNA, 426 bp, Oryza sativa
  unsure (1)..(426): unsure at all n locations
agcttccaacaataaaatgatgttgtgttctttcacaatcatctctgcctcgaaattcaaaataaatggcatttttattaattatgtgactcaataaagaaaatttacatgtctatagtttggaagaaatcaactaaaaattaacggagtgttcaacttccatgataacctataggcaacaatatatatttatcatcacaccaaatcaccaatgtaacaataatggcagcatagagcttaagaaataatctggacgattttacaattggatgatgttggtaggaaatgaaggcagggaggggaagcaccaatgatacagcgatagagacacggcgcactcatgggtatgctntcgattggattttagtaagattatagagttgccgctaatttcgtctttttgataggattntagcaagatcatag

SEQ ID NO: 8145 - DNA, 471 bp, Oryza sativa
  unsure (1)..(471): unsure at all n locations
atagacatggagagggacagccattctgcctccatatctaggtgccctttaaggtctcatgatgtcccagtctgcaatgggcactgcaagaaggctacaaccaacggtgcatattcacccaaatcagtaccagctccctctaatatggtttctgctgttagctcaatgctcttatcccttggagaggatcccttcangaaagaacttgtaagtactcctcagcgttacgtgcaatggctgatgaagttcagagcatgtaacctagatgtgaagctgaatggctntacactcaataatttgagtgtataccagagtccagctggagatgctgctgaccatcgagcaatccattctgagctgcatttgccattttgtgcgcagtgcgagcaccatcttctgccgttctatggagtaatgcatattggctaccttgacggcggagatggtgaagtgattgatcgatctcatttt

SEQ ID NO: 8146 - DNA, 435 bp, Oryza sativa
agcttggcatacaattgatgttcccgtttctttcccaataccagacggagatggtgctgatggtcttcctctgattgtgagtatatcagaatgtcatcaatgaaaaccacaacaaacttgtccaagtattccatgaacactttattcattaagttcatgaagaaggcaggagcattggtcaagccgaacgacatcaccgtgaattcatacagcccatatcgcgtagtgaacgcggtcttcggaatatcttcttcacgaatacgtaattggtgatatccggaacgaagatcaatcttggagaatacagtggcacctttaagctgatcgaacagatcatcgatccgaggaagagggtacttgttcttgatggtaacttcattgagagctctgtagtcaacgcacatcctcttcgtcttgtctttcttctctacaaag

SEQ ID NO: 8147 - DNA, 490 bp, Oryza sativa
  unsure (1)..(490): unsure at all n locations
aactcagcttgcaccctatcccgtgggggcaggagttggcaagtgtttgtttcgtttntggtggatcgagggtatatgagatatctctcccccgggtctcgtgcatggatgctatcatgatgttacatccggtctcaattgagttgccactggttgaggtccctacattctatgctggacggcccatatctctcctccgggtctcgtgcatggatgctatcatgatgttacatccggtctcaattgagttgccactggttgaggtccctacattctaggctggacggcccatatctctcccccgggtctcgtgcatggatgctatcatgatgttacatccggtctcaattgagttgccactggttgaggtccctacattctaggctggacgggccatatctctcccccgggtctcgtgcatagatgctatcatgatngtacatccggtctcaattgagttgccacttggtgaggtcccgacattctatgc

SEQ ID NO: 8148 - DNA, 259 bp, Oryza sativa
  unsure (1)..(259): unsure at all n locations
tggaccactcggtcatgatgatccgagcggtcaaacctgattgcgatctctgaccatcgaagatattggggcgtgtctggctgaacagcattgatctcccgttcggtcagcttttgcttccttttagactcataagccatggggccgtcgaanatatggttgagctccttgcggtgggcttgaaatccaaccggggtgtcggcgtcctccttttttcttgacgtgctttgtccctcgcggagttcttccgagtagactt

SEQ ID NO: 8149 - DNA, 472 bp, Oryza sativa
tctagttgaagatcgaaatcaatgcagctcaacccgtattcaagaactcattgaaataaacgaaagtaaaaagggtggcgatgcgctgagattgtattgaacgattgttatttgattacatgggttcgggtcatatttatacccgagatacaaaatgtccttgccggacacaacacttacctctaacaaactctaagataacataagtctttacggcagacttttgcccaaacatatctctaaggaaattatatgaaatatcctaattaatatatacaattgcctaatccaagagctttatctccatcgtggcaatccccgtaaagcattttgaatgattctagaaacaaccttgaaaccgtcttcatcggaatcggttgcatcacctctatcggcttgtcttggagtccgtccatacacaaattgtcttggagtctgttcagcagctggctacaaatctatatgccggtat

SEQ ID NO: 8150 - DNA, 420 bp, Oryza sativa
  unsure (1)..(420): unsure at all n locations
agcttgctntccccccatggtggcatgttctcgccactcggcccgngaggccctatttgatctcccattctccctgcctccctaccaagtcctgtcatcctgtattcatgttccatctagacgtctgttgttcgatcttggagtgtgcaatggagaaaaattttgatcttggaagagagaaacaaaacaatatagttcatcccactggtggaatttgggtattgcggggtaatattaattcctctaatgttcttcagtgtagctctgaataattcgtgttcctaggttgttacaattggagaagtttcgaattttctcaacatgtagaacatcggatcttgattaattacttctgaatggaaatacttgcctcttttggttcagttgttctgaatggaaatcagattctatcaacctaat

SEQ ID NO: 8151 - DNA, 479 bp, Oryza sativa
tgacgctttcctacctggcgcgccaactgtcgaaactagtattttgctataataaaaagggggtggctatcaagctatgaaagtgtatgggtttggagacaaaaagatttatacaagttcacgccttcttattaaagaagtaataccctactcctgtccggggatgaatccgccgagtgtgttattgattgtatgatttggagaaaatccaacaactgcccctagaagcgcccggaccccccttatatataggaaggagtccgggttacaaaagataatctatatccctaacggaatacacagatacagattaaatacagtcgtgaccgactaagtcttaagttggttccttgatatacaagtcatgaaacaaacccaggatacacataagatattctatctatattcggtatcctatattcagtccagatatcatcgccgtgtagatatgggatatccataatctccacatgatgtga

SEQ ID NO: 8152 - DNA, 269 bp, Oryza sativa
  unsure (1)..(269): unsure at all n locations
acacttgtgcatggcgctatcacctgtactgnctaaactagggaagagtatttgcaatccactgcatcacctcctgtgtaaacttctaatattcttctgctagaatgaaaactttgcgcgacacttgcatcttgtgtacgcatacaattcatttaggtgaccttatataagagtataaatgttcttatatagtcaaatatgctgagatcgattcattttaaaaagatctcatgaaacaccggcaagaggttcagtgaacgcgtttattg

SEQ ID NO: 8153 - DNA, 435 bp, Oryza sativa
gcagaatcatcgcgcgtacgagagaaccgaagcagatgtatttgttccaacaccattatttaacatagaggaccacacggtgaaactatgcgaaccaaccccattctggagcatgaactccatcatgttatagctcatgggcgtcggtgatagctctggtgctggaagcataccatcgatgtacttcacaactatgtccatgcttggccctgccttgagcaatggatgtgagcacattaaacctaggttcaaaacaagagtcacctcctctaagctgaacctccctgcaggccggcgatccaccacgttaaggatggataccgtaagaaaaagctccatcacccaatctattaataaaatctcgtcagtatcgcttttcccaatcaggcttcagtcacaggtgacctccaggaggaacacacacgacgcgaacac

SEQ ID NO: 8154 - DNA, 267 bp, Oryza sativa
  unsure (1)..(267): unsure at all n locations
caaataaagcccacactgtcaaagtttggttatgccgagatatgctcaaggtctattacccaaatgagaaatggtttatttgggcaacaaagtgaactagcccttagtcctttctgaaagcttgatttacaaagagacctataataaaacttattctgaaagtaaactttnttttgcgacaaaacatcattagcatcgtggtctaacatgacggcgtccctagccacccgatggaagctaaaccactcatatcatatatgaagccta

SEQ ID NO: 8155 - DNA, 389 bp, Oryza sativa
  unsure (1)..(389): unsure at all n locations
aactcggtaccaactttggtcacaccgaccaaggcaagccacgatccccactcttctccctccttcacgtaagccaggaacaacattgccacacgccacatcgccgcattgtaaatggcttgaccgaagctcccttggaggccgatctagtatccatggcatggaatcttttgaacacagttttttgagatacattgtgtggtttaacctcacgatctcatgctcaatccctaacatgctcataatttctttaaaaaaaaatatntgaagagatgtctctccctccaaatcttcttttttttattcttaaaccctaaacccaataaattattgtatacacatttcagggcataagaaccaggggtntaaatctcctgttatagctggtt

SEQ ID NO: 8156 - DNA, 272 bp, Oryza sativa
attaatcgtgcatttgataatttcaacattttcaactgttcttatttttggctgagaaaaaacaagagaagttgctgcgcctctctatattgttcatgtcctgtgtattggatattgtgcattgactacaatattttgctcaggctgcgtaccgaggtcatcaagcgagaacgcacgaccccaaggtaatatggtctgttggaattgttgagaaagcaattttgcgatggaaaaagaagaaaaaacgccttccggggatcgcatctggaatg

SEQ ID NO: 8157 - DNA, 434 bp, Oryza sativa
gcttcaagttttcattatcctggaaaactctttaagcataatcacgagctctccggtgtagattgcgcatttctgaaatggaaatataaatgttgttacaacgtcgtacattgatgtcttagacagtttttattttattttataacgaaatgaaaatacaattactagctaagcgatgaaagttaatgattaggattattattgtgtttgtccctgttaccaacatttatctaaccaggttggtcttgtggtatatggtaatagcatacaacaaaacaagaaaggaatcacatagataatggcagacctgaccactatttgtctaacagtctaaccaactaagaggatgctatttctctaaataatccatgtctaatataaaggctgaagctaaatagcccaacagttgcagtgcagagggctcctccacaatc

SEQ ID NO: 8158 - DNA, 447 bp, Oryza sativa
gtactatttgatgaatggtgctcacagaacattacagttcttcaagaagaggattgccaacactacgaggctgctgccgctgcatttgatttcactgagatgtcagctgatcagctacttctgtctgacttgacaaatgaagtgttgctcgacatctacaagaaatattctgtttccaagtccttgctctcccggttttcgtcttttgatagaccgaaacctgtgggaaaccatgccctcaaggaattgtggtctaaagtaagctgccatctggatgaacagccacagtccagcatagaaattgacacaattttgtcgaatgatctatccaagaacgatcactgggtgaattttcagagagatgctgatcacttggggaacatgttggcagactctgtgtttgacaggcttctgacagagttcactcttcagctcgcaaaagtttga

SEQ ID NO: 8159 - DNA, 426 bp, Oryza sativa
agcttctcttttttcggaggaagagggttatatgtgtcgtcgcgtgtacttgtagctagtaataacagaggattgtgagggtaaatttaaataaaaaattttggttatggagctttttgtcatgttataattgtggataggtgctggcagcaaattaacaagcaaaacttcgtcccttggcctatggatcagctaattcaatagacgcaatctaacaaactaacttaagatagtgatgatgttctctctcatggcctaatcttcttatgagtacataactctcgttttgatcgagtttgacgcttgcgacgtggctatcaaccagaacaaatccaagacgccatgcaatcgctacaccacaaacaatgtcgtaccaaccgtgacgcacagttaatgatccttgcaatgcaatcgagggaacaatgt

SEQ ID NO: 8160 - DNA, 419 bp, Oryza sativa
  unsure (1)..(419): unsure at all n locations
gctgtaagaagagaagagcagtntatataagcagtgaatcagaatactctggtacagactctgaggttgagggaagcaaactcttcaaaatagatggggtcacgtcagtctatacatgtggtcaccagccaacctctaagaataatgttgatccgatgaatactagcaagtcaaggcagtgtggaagtattctgaagaagctcatggatcacaaaagtggatggatttttaatacaccacgtgatccagtggtatatggaattcctgattactntgatgttattcgcaatccgatggacttgggtactggtaaaaggaaactcacaagcaagcaatattccaaccctatgagttgcagagatgtgaggtgacttctcaatgcgatgaatatatcctcaggaatgatgccacggatactg

SEQ ID NO: 8161 - DNA, 418 bp, Oryza sativa
gcactatttataaaaccttttatctgattaaccgtagcttcttcgcattagacatactacactcaaacactagtcattccttatttgcctatccctatcaattatcatgtttaaattttcacatctatttcctttagaataagtattctatggctagataaacctatcacgacgtactccatctaggcactaaatatatcacgacttactcccaacataatattaataatgaccggatggagtattatctttttaccctttaaacttctgatcttggttgtatactatattttccctttcagaaagttgtgttaacattttgtacctacttggatattctatattgtaggtggagacagaaggtggagtacaaccaatatggctgacagccatgaaacttgacagaacattgagatct

SEQ ID NO: 8162 - DNA, 432 bp, Oryza sativa
  unsure (1)..(432): unsure at all n locations
caaatctacagagtaaaatttcttcgtatgcggtatcaagatccaattatactgtacttgaatagcctgccaaaccaaatcattcatcttatatccagctggagatactggtcgactcangctatcaaaggcacctgacattgtccgggctgagaaataatgctagggcatagtaagtagaaagattgaaagcctcccctgtctctccattgcttcaattacatgtggcttggtagtcaggcactcttcagaaattgagagtggtgagcaatgtgatcatcaatgaatgtagcaataaaaaagtaggagtggtcgtatccaggttgcatgcggagagtcaaaggagctcccacagccttgcacgcctcctcaaagttgcgaggtagaagctgctttgccagaaaattgtcatcctctccctgctcaagttca

SEQ ID NO: 8163 - DNA, 430 bp, Oryza sativa
agctttatgtgcaggctttagctaattctcgacaagaagtctgcagacgcagacgctgaagtaccattgcgatactattatgtcatttctgcgtcagcctagacccttttccatgaaactataattcgtatggcgaattccaccagtttttttattctcacctaataattgtttcatctgttaaccaccagctgcattgagctgatcggaattgacactttggtggacaaaacaatttccagagccttgttgttgggtagtggccgggagagcaacgtacaccatctatccgcggtcaaaacgacagcaacgccaccactaattcgaaattaaatcgattgattggcacatcgagcaaccctcgacgcagacttttgtcttgtcaacgtgttggtgagagcacctactagtgtgcgtcgactgatatctg

SEQ ID NO: 8164 - DNA, 391 bp, Oryza sativa
cttatgtctttcatttctgtgaattctataattgcagtttctcaatttctgagaatctaagataaaaaactgaattgtttgggagagctttatatttctagggaagctgtagctacaacaaactccccaaacaggttcgaagcttcatatcaagttcggtgtccaaattccagcgaggcccatttaaacgaccatatgaaaggccgatagtgatggacggcgcaacgcccgggtgaataattgcaaagtatttatatggaaaatcctcaacctcgatagtccaaattatcgggcaccctcccgctcacttcatgtatacacgcgggtgctctgcctgctctctctctctcttctctctgcgctctttacaatctatgctcccaaataaagg

SEQ ID NO: 8165 - DNA, 295 bp, Oryza sativa
aagcccatccagattgtgtctgtcatccaaattggaacataattattgaatattagcgcagcacacaggatggatcattcctttaaaattagctcagattttagtgttggtttcaaactcagagaattgactaatggcaactcctaaggtggactgcacattcttaaaccatcctgaaaatttttatttgatcctgggatgctgaaaaggtcaaactaactctagaagttatacctgaccttctttcagattcacttgtgctgtcgcatatctgacctctgaatggtcaatttat

SEQ ID NO: 8166 - DNA, 480 bp, Oryza sativa
tggcttctctcatactttactcttggccttaagctgcgtgtatcttgtttgtctccttcccggaaatgtggcttcactataaatcacctatagttgggaaatccaggatatgccatttcattgaagtgaattctagattcgcaacttgatgtctgtcttgtgggtcctaaagcccccatgctacctagatatcgagtggaaaaaatctatagtggctatctttggagcaacaaatcattaagaagctaccctgaagaaaatgattggctggtcgtgtgaaattatcattttatctccttcacatataggttcctcaaagcacggaaatttgatgttgagaaagcatagagtatgttgtcagatatgcttcaatggagaaaggaatattgtgctgacaatatataaggtaaaagatgcgtggaagcacatatctaatatatatatgccattctaatatgacaccttgttatcctctctctc

SEQ ID NO: 8167 - DNA, 408 bp, Oryza sativa
ggatctaagcgacgcggctgcagcttggagaaacttagggtgtgttttacctaccccccttaaacggaatcttggccccgagattcggaggagctggcgaagaggtgcggatgggcggcttttaactcgtcttccctttcccaggttgcttcctcctctgaatggtgactccactgaactcggcaaaacctggtgaccttgtttctggttcttctttcgctggtatcaagtatacgaaccggcttctccacatatgtcaggtcctcctggatatcaatatgctccgaatctgcatgttcttcgggtactcttaagcacttctttaattgggacacgtggaacacgtcatggatgccgatcatgttggatggaagttctagctaataagcaacttcccccttcgttcca

SEQ ID NO: 8168 - DNA, 427 bp, Oryza sativa
  unsure (1)..(427): unsure at all n locations
agcttagtggagtgttgccattgcgattgttctccccctccgngaaagcaagctagtcaaagagaggagagggaggagcacgagagataggaggggaagatggaagagatggaataggtggtcaccatctgctgtgggggtagggtcgactggtgtcaccaacgtcgggcggtcatcttcaacaggctcggccacacatccaaaaacctcgtgcaacaaccatggttaaactacaagaaatgtggagagctcacttactatggtggcaacgacaactcgggttgcaagtgtgaggacgttagcatagaagacaatgcctgggccaggcctccttaccaaggcccttgtagaggttattgaaggtgaggtcttgtagcgactagttcgcaccgcgtccttctcgacctcctatcattgtagaagtctg

SEQ ID NO: 8169 - DNA, 460 bp, Oryza sativa
  unsure (1)..(460): unsure at all n locations
tgccaagataccactggtaataccaacatcatggaatgtttatgatgagaagtacagaacgccatttatgccagcaaactggtgcagaaagaaaagggaccctccaatcagtgcaactgcatatacatcagaaattaagctattaatatcatggaaataaagatcataataatgcaaagggaaggaacaaatataaacaagtatacagacattaagtcgccaccccctgctccccgctaccagcctggtcggcgcccggctcaccaccgatgactgtcgctgcccgccgcctgcgcattcaacgacaagggcgggagttcgccgcagccgcagccaccgctcccgtcgtcgtcgtcgttgccagcggccggatcaacggctgacggatccgctgacccgtgaccttcggccgcttgggtcgaagaagacgaangagagagggaggagaggcggttgtatc

SEQ ID NO: 8170 - DNA, 426 bp, Oryza sativa
  unsure (1)..(426): unsure at all n locations
gcttcgtcctcggcaatcaatgatgtattggagcgtcaggcacctctacttcccacgttgccagaatttctcgctgctgcagcgttgggagaatttggcttggatggccgccgccctgcttcaaactaccgggggaaagcacatgggatggtcaccacccttgtgccacctccggtcaaaagtacgtttcgatcaactacccctgttcgtcatgctttggatttttcggatgttttggggagagatgatcatgggggtggagaggatcgtgggtttaatcatcggttgcccaaattggattttccacattttgatgggagcgatcctcagaactggaggatgcgctgtgagcactattntggagtttatggcacgcatcctagtttgtgggtgagagtggcgaccatttatttatggggagagctg

SEQ ID NO: 8171 - DNA, 475 bp, Oryza sativa
ttctttagtagaatcaattccttaaccaaatatagcatgtattctactactgacgacttgataactctcatcagctaatctcaagacttcgaagccgatgctgactctaagccgatgattactccgggcttaccaaatttcactgttaacaatattatgtacaaagtgctcagggataacttgagccacaacttgctgcctttgccgattgtcgggtgttctctgcccagatggtatctgttgcaccgtctgttgctgaattggctgaactacctgttgtcttggtggtgtctactgcactagctcgacaattggctgtgttggcaagaacattgaagcaatttgctcctatgtcagccgattgatgttctgtccagcatgttgcggttgttctctggtctggacacgaatgataaccatatgcctctgtgccgacgaaggtgcacctggtgctggagttgaaactgctgtcgtt

SEQ ID NO: 8172 - DNA, 287 bp, Oryza sativa
atggattaaaccggacttggagtttctatctgaagcaaaaatcttgaacaaaccagagcaagagcaagactaagcaagagcaagagcatatcctgccagactaagcaagagcaaggaacaaacaattcgctgctccaacaatatgccatttccaaaccattagacaattctttactatcattgcattaccaagaaaagtttggattttttttcctaataaacgttttacttttgtaaattatgaaaattgaaagagataacaaaaagggttgaccttgcaaactctg

SEQ ID NO: 8173 - DNA, 285 bp, Oryza sativa
attggtattccctgcactcacaaatatttgcacaattgagtattaaacagttaccaaagacacaagaaagtgctagtaatgccatggtagcattctaacaagctttaccgaacatacaacataggagtaaatgcttttacctgactgacgaagcctggagcaacttatgtaaaacatggctgcaataaacaaaatttacaccttcagaattcacacaataaaacataccgagcacaggatgggtgtgttcatcttttaccactccaatattcatttctagcattg

SEQ ID NO: 8174 - DNA, 71 bp, Oryza sativa
tatcctacacataaaccgctatagaacttaataaatgatccttttcatctgcgccaatatgcgtggcgtcg

SEQ ID NO: 8175 - DNA, 429 bp, Oryza sativa
  unsure (1)..(429): unsure at all n locations
agctntagtaatcttagctatttacacttattgatagatattattcagctatgctagttttcaccagagattatatcagagcaaaatcaactgccagaactagtaacattgttgtttatcagtgatatcatgattggtaaataatataccaattggcaaaagaaggaaatacacctaacagactatcaccaacacaaaagatccatatatgcttacaaaagtaccacataggaaaatctcacctgacgatgaatattgaacaggtatgtgaattcgatactcactataatttccacaaattttcatggccacaggcattcattgagaacaaaagtagtgcacaattcagtgaaacataaggcttcaattntcatatcattgttttgaacattgactcatggtcacatgatattgctgaatcaacttatt

SEQ ID NO: 8176 - DNA, 334 bp, Oryza sativa
  unsure (1)..(334): unsure at all n locations
ggtaaaactgtagttactaatgtctagtgtctgaccctctggataatagttaattcttaattccaagccattggtctcccatatttgacttgacctgttacctttcaagtttttctttgatttctctcctacatatgttggagttggcatgatctgcccatatatcgtgaatgtgtcggttcttcttggcggtatcctctcatggggtgtgatgtggcctctcattgcccagaagaaaggaagttggtaccctgctgatatctcagacaacagtctccatgggctgcaggcttacagggntagcatacacctttccgctgatttccctttatga

SEQ ID NO: 8177 - DNA, 426 bp, Oryza sativa
  unsure (1)..(426): unsure at all n locations
agcttgttggctcgatatttacattctttctagcaggcatgtatgcatcagctgccaacagtgcatgtcttttcttttccttcttataggatattctcttaaattactcatccgatttacgatccgattacaccgttttgttcataataatttaatctttataagatcttacatgattatattttttaaaaaaattacaaattattttcataatatatctaaattacttttagatttcattaaattatttcttagacatataaaagtaaatttaataaatcctaaaaaaggtaacttacatatatattataatagtaactcaaaataaaagaaagtaacttgtcacgacatcaaaagttaatttattgtggnggtaaaaacataagtcaaactaataattaaatttaatcaacataatatagaact

SEQ ID NO: 8178 - DNA, 449 bp, Oryza sativa
  unsure (1)..(449): unsure at all n locations
ttagagtcacctgcngcatgcaagctgggctgatgtctacagcagttgttcttctgtgcatancctgtccgctcgacccaaggcatttagttggggaagattatgatggtcttctttggttacgatggtactaaatggtgggttatgtcgcgatcttgactcctcgggtacctttctggtatcacgatgcacggctgacatgtaatcaacactgctcttgtgggtaaagatgtacacccctagctagagtataaactattcgaatagccgtgccctcggttataggcaaacctagcaatgacctatagttagaggttttattctaataatcgggaatgacctagattatcacctttgggcctagtttaaggcaaaatcgcctgagtacaccgcttgataataattagactagagataggtcatgagttgactaacatgcccttaaacaa

SEQ ID NO: 8179 - DNA, 395 bp, Oryza sativa
  unsure (1)..(395): unsure at all n locations
cgctctaatgatggcttcgcgcaagcgtaagcactacttctatgcccacacagtcatagtcccatcacagtaccccttgggcgaaatactccgaagcaaggaagtcactggccggctcatcaagtgggcggcagagctatccccgttcgacttgcattntgttgcacgctctgctatcaagtctcaagtgctagctgacaccagtacttgcctccgaccctaagcccgacgaccaattctgggtgatgtgctctgacggctcgtggtcgcacaagggggcatgcgttgcggcattcctcttttcaccgaatggtgtgccgatttggtacacaacgagattgtaactcgacacaaccaacaatgcagcagaatacgaagccattctcctgggccta

SEQ ID NO: 8180 - DNA, 423 bp, Oryza sativa
atcctctgagtcacctgcggcatcaagcttgcaattttagctcggtatatctttttttctgcattatgcagtcctttataatcctggatgatgaggatctgaatgtcaagaattgttgtttgtgtaccctggctggtcctagatagggatttaatgcacattcatcttcaaaattctggttcgtgaatttatgggcatgacatctccactgctgctttggttgaggaggagtgcgagcagcttgtcggggctagcggacacctcgcaatagggggcatctccaccatacgcaaaggtcgtagacacgcgagctccgacaccggtggatacatgggtgcggctacgtcccagtcagctttgctgtgtcaaaacggggagaagatggacagaactacactagggaagagagaataatggaagaag

SEQ ID NO: 8181 - DNA, 416 bp, Oryza sativa
cataaaggtatttaatgatgcgctctatattgcaggagttcatgatccttgctactggggccgcttcattcaaagaggccatgaagatgggtgttgaactgtaccacaacctgaaggtaactctttcatcttcattttaaaccttttccccatcttacgtcattgaaaattaattaattttatctgaacagtctgttatcaagaagaagtatggtcaggatgccaccaatgttggtgatgaaggtggttttgctcctaacattcatgtacttatgcctgcagcagtgaattcaattatctttctttccactatgctggtgatccatgtgaagtgcttcacttcaattatgttaacctcgtttgctctggatatgcttgatgttagatgctgagataacttcatgtttgatgtatga

SEQ ID NO: 8182 - DNA, 453 bp, Oryza sativa
  unsure (1)..(453): unsure at all n locations
cctgcggcatgcaagcttccccctttcctttgctctcccattcgtctncacgccattgccgccggcctccgtgctctgttcgccggcgccgttccgtcgtgcgcttgtccgaggagccggcacgagcaatgacgcggaaggggactcccaacgcgccctctccttcctcttccccggcccgaggccggagagattactcccgcgccgtcggcctctcgtcactgcgcccgcccgcacgggagagcatctccccgttctccctcctcgctccatctcctccccttagactcgggtagtagcacgagtagcctccccgtagctagccggcgccgccccgaccgttgccgccgctcgccgtgtgctcgccgccgtcgccgcccgagctctgaagcgccgctcgtcgccggtctcgctcggcgcagctccgnccaatccaacgctagcatcggattc

SEQ ID NO: 8183 - DNA, 381 bp, Oryza sativa
  unsure (1)..(381): unsure at all n locations
gtctgccaaaccttttcggtattttcaggagcgaaccccactgcaacactctctggcagggggtatcactggagcgcagctactgctctcaattgcaatttttgcagactgctgcctactctgacagcaaagtttaaccgtcaactaatggcagtcgatgcanatggtgaatcaattatatatgagatgcttaaacaggccaagcttttgcttantcttccattagtgacataaactagctagtactctatcatggaaaanaatattttcgcttttattttcgagagtatacttatctaagcacgtaaccatgaaagatntataattagattttttatatgaatattttagctttttaatattacgggcaagaatattctt

SEQ ID NO: 8184 - DNA, 355 bp, Oryza sativa
  unsure (1)..(355): unsure at all n locations
agcttaccccgtgctctatntgggcggttgttgttctaggtggcgtggccactagctccctatgcggtcggcgacggcaatggtggcggcagatctccggcgaagaggtcctaaattaacttgaggaaatgggttcatggggttcccaggagcatgttggcgcaagggtttggttcgagactcaccgaggcagcgacttgacgggtgcgggttggcggtcgcgccctgttcggccgacgccgngcgtgacgatggcgcgggcgttcccggcgaatcagaaggttttggtcttcggctttgggtgtggaggttgagagtggtgtggagagttaactggcgcgagggttcgatttat

SEQ ID NO: 8185 - DNA, 475 bp, Oryza sativa
  unsure (1)..(475): unsure at all n locations
cttgtaattgtgtcgtgagctaagcctaaggtgttgtccgccctatggcaactctaagacgtccgaaatcatatttatttagaaatcgtcataatttagagtcaaattttgcttagatatttctgccattgcggttcctcgctagttcggtttgtggaaccccaacttcaagtgcttaatcattcatctgcaaattgagttgcaatctaccttattcttgcttgtgttcttcgactcacatgtagggattagccctctcggcaaggtcaaccagacagtgcacgattgataatcggatcgtgttgattggaagccggatcgtgtttgtcaagtttccaccaaatcgagagttatcaatacctatcggaagatcgtgacatagttcctcattagtattccattctgtattcttacatttgctcttatacaggatttgatgatcggatntggtacttaagtaccgtcaacaatgcta

SEQ ID NO: 8186 - DNA, 435 bp, Oryza sativa
agcttttaaatacatatcactaacttactattttcaaatatcaatatccttctctgtaaaatatggcttaaaagaaacgatctactttggcagaggttatgagcaagatatcgttgaatatttcatttcgacggttaattataggacctaagttagttgaatagaacgatttgatttctcaactagttaacataactctatcagacgaaaatgaccaattttgagtcaaatccatgtacaacgcaatcatcaactccaatgtaagaatctgcaagagaattttatggaaggtaaaggtatcactaaaaattgaaatatttatgtggtttctgcactaaaggtaatcttaaaaaaaagataaacctcactaagagaaaatggaggggggacaagcaatgttatttttataatacacaagggactatccaacatctt

SEQ ID NO: 8187 - DNA, 399 bp, Oryza sativa
cgcagaagccatggaagatatgccacagaaccaaatttatccaaaaaatcacatcacaactatgtaaatgatgcttataaaaattacttgaatagagcaatgatcagcggttcattatttcctgaaacatataacaactgggttagaaattgtgaaacatttgatgactgcagaagatggttccgcatacctaataacttgatgacctcgaagacataacctgcaacgttctcatctaacagatgacagtaaatggaagatcaattccaatgtccttgtttgtactatatatattagtaaatagcagagatcctttgacagcatcagcaaatagaactacaagagaagcatttagtggagcataatcttctgcttcagtagagatgattaaactcatat

SEQ ID NO: 8188 - DNA, 385 bp, Oryza sativa
  unsure (1)..(385): unsure at all n locations
gatgaaacaatgtangactgcgctggactatttcctcaagtattcttcttggtctgatgtctgcatgaatgaacttttatcacttatcaagttgacttgcttgtgtgaaatgcgtcttagtatttttttttccggcactcaaatgggacctatctgtccgtggttaatcctaaacgctgttcttgccatcaacttctagtatggccaaattttaaacttattaggaatataaggtcagaatatatgttgctagtgtcccatggcagagctccggtgatatcctgcagggttcctcagagagaagcccttccaattagctccatccagcanatatgcgggcttcttgtggaacagaatggctaggagaatcgtgccatgtgacttg

SEQ ID NO: 8189 - DNA, 459 bp, Oryza sativa
  unsure (1)..(459): unsure at all n locations
gtgtatgtngcttcccatacaccgaacggaccgactttgttttctctgaccctgaccagaacagctggtgctcatagaacttcctttctttggaactgagtgctaatgctggcaattagataaactgaggattcactatgctgaccggggattggtggatattttcccaaacctttgaactgactttcgtaatccacagacgttgactttgctttgacttgctcttgaatcaaaccacaagtattttcaagaaactggcttgatctgtgccaagtgttgaatgcgacttgtcttatgctggttttctaagctgaaatgttgacctacttcatggatgtatcttataaatgaatctgtcgacttgagattgtggtaactctgctatagggctcagatgtagcctcttattactaacccatatactacactgggtgttgcctctagtaaaacgatgacgag

SEQ ID NO: 8190 - DNA, 432 bp, Oryza sativa
agcttggaatttgcggaccgtcttcttttttaatctcaatcgggccgaagtttcgtccgattaagatatggtcacacagacatgctagatcggcattaaactagagcccatcacggataacacttatctgtgacggaccatagttaaggcccgattgagatgagggttccatatctcaatcgggcctaaaagaagcccgtcacagatgacggtcatctgtgacgggctccaactagaggctcgattgagataagtttaatgcccgtcacagatgacactcttctttgacgggcttttattaaggcctgatagagattacttgtatgctcgtcacggttgattggtttaaggcccctacagatatttgttggacagtataaataccccccacctagtggaactgtatctcactggtcaactatttggtgggaa

SEQ ID NO: 8191 - DNA, 406 bp, Oryza sativa
acatcctatatagtggatgggtttatttctaacaaattccacgagtgctgatgtatatgtgtatacaggtggctaactatcatagttgagaaaaaaatatacactaaggagggaattatcaattccatattcaagcacatggagtcttgagcctaccaatcccacaattaattcatgaatatacaagtctggacccataggtcaagaaccatgagaaggcctatggccaatcgagccggttaggggtcggacgacccatgaccagcccagctggtccagatactttctatgtcagtaattactaacttccaatgacaatgttgtggttgtttcctcgctccaaccatcatcatgaagacacttgcatgagggaatgagataccctcttattccatggacttcacta

SEQ ID NO: 8192 - DNA, 427 bp, Oryza sativa
  unsure (1)..(427): unsure at all n locations
agcttgttacaactactaataacgtaattatagcatggacatgctcaattagcaacctactacacgtacgttacacgacgtagcatcaagcaccactcatatatgtactaatacacccatgcgtgtcgtttcatcgtgacaccacactctctggcagtgtaaatccgcgagaagctcacaaaattctcacgcactgaatttaattaaatacataaacatcagcatggaaacgttctattttaaattggaatcgtatatacactcgtaaccacgtagaccatttaaagttgcttccccaagtctagacttactccctcataaaaactaacctatctttcaccatcttatttgtcctgaaaataatttggatcttttaagtaatcattacattagagtttataanagtgagaaaaatacattcgaacta

SEQ ID NO: 8193 - DNA, 450 bp, Oryza sativa
  unsure (1)..(450): unsure at all n locations
atctcaacccttatagtctatatttgtttttatctaacggagnaggctgtgtctttttccccgattaatgtgaaaatttctagcctccacggtgaacgtggtgccttcttttcgagctgtcttaataatataatatatgtggcgttgtagtttgcaactagtaaccacactcattactccatctattacataattaatacagcagtatggcaattgtaattttacaaataaacctgaaagatgcatagcaaatgcgattgtatatctaatagtctatccccattgcattggaaattcagctagttttaattatgtcacatgcaggttgagttgaacctactgccagttcttcgggttcctttcctaaaacagcatccctgtacctttatgttaatccatttatcactcattagaatggactattgtatttccagcatgtggtccaatagt

SEQ ID NO: 8194 - DNA, 367 bp, Oryza sativa
  unsure (1)..(367): unsure at all n locations
agctntgccctggggatacaattattgttctnggtctacaatctcaggagccctttgggcttcaagcgaatcgtggaatttacaggtactataacagctaactagtttcttatcatgatctttatgtaaattcatatttcagttaatttttacatgtcacaaaatcagtggttgtttggttgcatgccaaaccttttgtgctaagttgtggcataccacctttttgtggctaagaaatccttggcacaagttaatcagaatttgacaaggagttgtgtttataacaagttgagcattaagctaagatttagttgcctaccaaaagggtgatagcaaaccaaacactagtctaangtgatcaaacata

SEQ ID NO: 8195 - DNA, 336 bp, Oryza sativa
  unsure (1)..(336): unsure at all n locations
taggagcatcgncgcccacaaatctgcttgcactaacacctggaaaacaaattggatgctgtattatttagaagaccatgagaaaacgtcacttcaagaaacaaatgcaaaatcattgaaaggataacctgtcactggaggtagagatttcctcacagttggtgtgctttcttgtggggtaactggagaagcactcgctgggaccgtggctctagccgcagaaagttgtaaactctgttgaccaaatgcaaataatgtaaagttagcatcttacaaaagggacaaccaagatgccaattcaagaattggtagagcaaggacaaaataattatttgc

SEQ ID NO: 8196 - DNA, 466 bp, Oryza sativa
tctgttaaaacaagatgaactgcttgagatatatattatcttcacatgtgaatattgatatccacaatatccaatgggcgtcgtcgatcgagtgagaaaagtggccctttaattatctgtctcaacttgtaatcaggatcacctttcatcatgatatggtcgtcataggcttatagtaaaatcacatggcccgctagtatcagcaagaacaacttgcattggccatggaccattaacatttttgcatgcatggtgcatcgattgctgaaatgtccaggtgaagccctggtacctagtgataaagcgatggcacagtcccaatggcatgagagaaaaagagaatataaaatgggaatttcttttctttcttgtgtaaataaaacgagacggaactttgttcggcttttattattagaagaagagaaatgacccaatttataatgaaaaccacggccacaaaccatat

SEQ ID NO: 8197 - DNA, 431 bp, Oryza sativa
agcttggtctctaacctcctaggacccaaacaagtttgggtacctaaaagagcttgatcttcttttgtaggtgaactaccgcaccggtgggagccattgggtgcttgatagtggatgcactcaacacatgaccggtgatagggctatgttcaccacatttgaagtaggagggaatgaacaagagaaagtgacatttggagacaatagcaaaagaaaggtaattgggttaagtaaaattgctatctccaatgatttgtcaattgataatgtctctcttgttaaatctctaaatttcaaattgctttcgggtgctcaaatttgtgatcttgtcttgtcatgtgctttctttccacaagaggttattgtttctagccttcttgacaagtcttgtgtgttcaaaggttttagatatggaaatctttatttgggcg

SEQ ID NO: 8198 - DNA, 265 bp, Oryza sativa
gtacttaaatttctgccttgattgcaggcgaatcagtatgaagcctagactattataaaaaaacaaatgctatactctaggatacaactcttttttggaggcatgggatgcatttacaaatttacagttgtgggataatagtatatatcatgggaacacgttttacagtacagcggtggggtgctacaaacgtattggggactagttacctcttccacataaataacaatgaatgcatggcaatttatggataaaatgagactat

SEQ ID NO: 8199 - DNA, 416 bp, Oryza sativa
tcatgatgtatgtgttcatcattgatcccccgagtgaatgtccccttggagatggcaatctcctgcatcatgagagacacaatgtcgaactgacgaccctgaatgatcgtatcgatgatgtgccaagccacccctctaatgtcatcattgttgccaaagcgaaggaggatagtggctctcacaatcctgttaaccacactggggatagtcctcaatccggcaaccttcccatgtgtgtaccgcactccatcttcataaaactgagagagatagtctatggagagcggattgtgagtgtgctcctcatgcaaatcatatccaaagtctaggcgaatattgaggagccgccagaattgccttcgagagatagaacactggagggtatcggacatccacttcatctcattatagttccc

SEQ ID NO: 8200 - DNA, 483 bp, Oryza sativa
tgcatcatcatatgaagcgcgcacttctacaagtttgtggacatcgttggtgtgctctaaactcatgagaaatctaatggtgcagagatcatgcttttgagctaatatggggaacctataaaatactcaaaaatgaaactagcacacatatatatatatatatatataatgtaaaaaaaacaacatgctactgatccaatcggttataagttggtacaactaaggctgcaatccgttacaactgtagatcgagtaataacctagcatgatttgttttcttaatctaaccattttctttaaaaaaaatgcctgtttgggaagacaaaacataagtgagaagatttctgcaccctccactactgtcctaggtaattaatttaagaatatattcattatatgagtgtgtaaagttatacctttacatgtgtaactaaatttctaattaagcataagcaactagctctcagagcatgtacaatagca

SEQ ID NO: 8201 - DNA, 420 bp, Oryza sativa
  unsure (1)..(420): unsure at all n locations
agctnttcctgttcagcctgatggccgatcaatcaaaggcgcacgacctctctccgagtgtgagtggcgacgacggggagccgaacccacgccgtcgagctcgtactccaccgccccctccacgccaaagtcctaagcggggggaggcgctcgagagggtcgaaagatccgcgacttcaccgatcgcgggcgatggaaaagaacggcgagatggggagcgtcgcctcctcgtctacggcgacggcagcacgccccagggcgcgctccaagctgcgggcgcgctcttacgccacccgcctgtcgtccctgacccggagtctccagcccaacgatggctggacgacgtggccaaattggtcatgacggcgcggcagtgtcacgcccggaaattcactagtaatttccgaacttatttgtgca

SEQ ID NO: 8202 - DNA, 471 bp, Oryza sativa
  unsure (1)..(471): unsure at all n locations
tgatcttgcaactatggcacangatggaaacggtgatattcttatttgactcacacaaaatcttcgtaagattctttatttctttacctcataattggtcatctaaaggcattgtccacaaatatgtgataatattgtctgtatgcatggctctgaagttatataaatgcatgcttgctccaaaagttgctgcataaaagaacaatgatactctcttcaacctaaacctgttattgcatgagcatgcctgtcatattgatatatcatggcactactgttgcctatccacattccccatttcccaatatctgcaattgcatgtaagacatctgacatttcttgctttgacttcttcgttctctatttatactcccattcaacgccatatatctgtagctgccattcctgttcatatttattatctctttngacaggaagtcctgttcctatttattgtgtcaatacatcatg

SEQ ID NO: 8203 - DNA, 437 bp, Oryza sativa
  unsure (1)..(437): unsure at all n locations
agctctaatgattntgctaattctgtgacttctgccttttgctgaagcagctcagcttctcttttggagagctggacagcaagaatatcaacctgcaaaatattattactctaatcaaactgccaaaattaaggaatgcacctccacaggtaactggatttttataaataataattaacagtaagggaattgaaaggacttcaaattttaaattatgctatgtggagcataatattttataaacaaatacagttaaatataaatgcaggtcaagatgaaagataaacctaaagaaaattatgctttacgtacagaatacaaggaaaccaaccatagatatagagtcctcaagttcagccttagttntgcctgtcacacggcctctcagtgactctaatacagtctttagattcttcagaaggatatcacgcttcaac

SEQ ID NO: 8204 - DNA, 371 bp, Oryza sativa
atatattggaagtctattaaatttcctacaaacgctcttaagccgccacgtgttaatcctacaaacgcttctaagtcgccacatggtgttttaataaatttaaggaatatctaataattcttaagacggaaaccatagattttattttaaatacggtggacccactttaaatccttatcgtgtacgtgcactggtgcacgtactgtgtgcacgtacgtacgccatatatcctttctctcctcctcttcatgctatattatgtagaaaatacataatacatcattagaacattagaatatttaccagaataattatagttgaagactcatactaactatatttagtaagttaaagagataaaacacatttat

SEQ ID NO: 8205 - DNA, 328 bp, Oryza sativa
gcaccacatgatagtggccgtcttttacctgcctgggcaagttcacgtgaaagaaacacctggcccattttctggccagtaaagcttaacatcaaaatactcatctatatctgacaacgcttttactcagttttatccaagaaaaatttcgtgtctgacacaaaacactggaaggaccctgtttcacaagtatatttcaacgagattgcagattatgggtctaccgttcgcaatgtcatggatatgaatgcctgttttggacggggagaaaactatgatcttaaatctcttcatgggcttgtcgatagtgacaagttatgaccatgtc

SEQ ID NO: 8206 - DNA, 434 bp, Oryza sativa
  unsure (1)..(434): unsure at all n locations
agctttanaatgcaaaatcaaatcaaagtgaatacctcgatctaaaaagatcaattttagaataaaagcacgaaagattttaaatactagacatggattttatgcatgttagttttaggaggtccctctaattgtaatttcttaggtttaggaagttattaaaaacataagaatcagcatgatgcatatttagaaaatagcaaattttcagtatgttacagctgcagagcctcggtcagaccggacaccggtcagaccggccactgtacctcggtcagaccggcctcggagaaatttttctgaaaattctcaaattgattntgcacgtggatatatgcctattggatcttctggtcgtgtgtctcagtactggattcctaagtttttattatcatctaactccagtactgaggcttcgacttctgcttatgtat

SEQ ID NO: 8207 - DNA, 432 bp, Oryza sativa
  unsure (1)..(432): unsure at all n locations
agcttccgcctgcagcttgacatctccgtcgccgtcgtcgtcgtcggcggcgtcgtcgctttcttcttccagctccggcatctgctcgtcatcttcgtcatcgcttctcctcctcctctcttcgtcatcttcaacgccatagctcacgtattgttggtgatcgtgatggagcgaggagaaagggtcccaagagacgaagtcccatgtcgttgtcggctgcggcggcggcggcgaggccggcatggcattcaccggagcgtacgacgaagggtggaagagctggccgggatccgcgccgaagaacccgtccaccgtgacggtctcggcggcaacatcattctcctcccaccgctgctccacctccaccaccgggtgcaccggcgcgccgccgccgacgccgncggcgtctggtctcagccagttcatgacaag

SEQ ID NO: 8208 - DNA, 460 bp, Oryza sativa
tactgctacatggcatatataactcccagtattcaatatctgctgatgtcctgtaattaattgcacaatcacatatgcaaaagagctggcgttggcacatgattaatattatcttatacacacaaaatataatattttttccatgtaattatctcaaagcctagttttgcataagatggcacataaaacggacattttccataaatttagcatatgttatgttctaaaaagttatatattcctatgcgcatggcacagattaacaccacacgacatatgtccggttgatcccagtcactgtggcagtctgccagcaggaaataacttattacaatgtggttttactctgcccaatcataagtaaataaggcagcacccgtacaaagatttgcacgaatcccgacatcgatcgatcgaatcgagactggagaaatcatcagaaatgtaatgcggctaaagt

SEQ ID NO: 8209 - DNA, 428 bp, Oryza sativa
  unsure (1)..(428): unsure at all n locations
gcagctgggaaaaaatagccgcgtctattgtcgattattggcacnctagtgtcaatggtgtgcacaaggcccaaaacacgaattataagaaatacaaaccttacagaccaccaacttcaagcagcagatgaataacaatagcaatccaaaccaggatgagagaacatgctttgtgtgtagcttgtctggtcatctgggcaagacgtgtccacaacgcaaggggatgatgccacctgcagggcagacttcaaagtctgccaatgtgaccattggcaacactggagatggaagccggtatggtattttacctactatttgttagctaattagtctactaactggtgggtcatacaagggctaatgtacatggttttactgacatctcattgtgttcttcttatcaagtcgcacgggattctggccgtcta

SEQ ID NO: 8210 - DNA, 470 bp, Oryza sativa
  unsure (1)..(470): unsure at all n locations
tcctgaccatgtgagggaggatttaaatatattcaatctttatgatttcacttngatagctacagatcagttcatatgtgtcacgacccgaggccatgactagataaccaccgccggaaggatagccgggtggtgtcggctcctggagaagggatgtagatttacgctatggagaagaacattgtggggagggagagattaaactaattgatattcattgcttaatccataatatacacaatcacattctcatatagatggtataacttgaactctaagtaagacttaatcttatcttatctctaacttaactggtatgggctgcctatgggccttggccttatggcctaatgcccatgacaatatgcttgcactaaatgcctttacaaccgatagactccccagactataaccagtccatgtgctacgcaccacgctggaccaggatcaacttgagagtgcagcgctca

SEQ ID NO: 8211 - DNA, 409 bp, Oryza sativa
  unsure (1)..(409): unsure at all n locations
ggatcttaaagcacctgcngcatgcagcttggcccgaagaacactttcttgtttcccccttactccgaaaattttaccatctgtgatctcaactacacccttttttattcgaaatatctttgaggactgatagttcacaaaggctatcgttcatgaacaatctgaaaaaggatgaaatgtcaaagaatgattatgcagacacggctctcagtgaaggtgtagtacattcgaaaatggggcatcatcaattcatcatgctgaatcaactcctttctagctataggatgatacgattgtgatacctaaactgaactctacaattcattgctgagagatgtcactattaattactgtcgctcactgaataaccatgcggtctttattctcgtgtaccgctaaactgccaatg

SEQ ID NO: 8212 - DNA, 373 bp, Oryza sativa
gaccttaagcaccgcggctgcagctgatgccctcacaacacttcctttaggcaaaccacaaccttagtttgtcgaccataccaaatccgccactctattgtacgcttttgttttccaaaaagagagagtgtgcgtaatatatcattatcaaagatgaacttcttctgagataagtacaacaggtcaggaaatgatcttattcatgaaaaacaacgcgcgttatgatccttagcctgtgaataacgattggcctgggccattatgtgtctgatactaggaaattagtaccgacatgggagggagataattgatgctacatgatgaacaggctacttgtatgtggaaccgtccgacctgcggtcggtgcggtcag

SEQ ID NO: 8213 - DNA, 208 bp, Oryza sativa
ataaaactcagcttataagtctttactgagaccacgactccaaactgttcattactctggaaatttcagacacgaatccggataacatataccgcactcctatcttgccatagacataacgattcgctcctattcttgtggaaaaagaattaggatatctataagatcttatcccctcacgaacccagaggaatctcgctttgattga

SEQ ID NO: 8214 - DNA, 394 bp, Oryza sativa
  unsure (1)..(394): unsure at all n locations
gtcacctgaggcatgcaagcttaaaaataaaagaaaaaaaggttgagtgctcatcgtgtgcatnnnataaaactaatgagactaaataattagtgcagaaaattttgacataaattttgaaaataaaataaatgtaaaaaaaataaaatttttatttgaaattttaataggacaatggatttttttatcaggagcattcataaaaaaaaatgttgtgaacattggtatacctatctttatatgaatgctcctcatttttatgaccttttttttaaaaaattaatacgtattttttttatttcattatctaaaaatattttttgggataaataatgcatcgcacaacaaactcataactataatagtctcatgcgagaaagctttataattttaa

SEQ ID NO: 8215 - DNA, 480 bp, Oryza sativa
  unsure (1)..(480): unsure at all n locations
tgtggtgcagtgcaggtgggaattaagccatggagtcgccggctatgtcgtgcgtgtcgtcagaggcggaagatcagcatgcggcggcggcggcgatggtggtggctgggtgcccacggtgcctcatgtacgtgatgctggccgtgtccaacacaaagcagcccagatgccccaggtgcaacacccccgtgctgctgcacgttcacaatatatcttccactccaaacaaaagctagctagcttcacctacctacctcacctacttaattcatggcttcttcttcttcttcttcttcttcttcttcttcttcttcttcccacttgcgagcttaacaatgcttatgcagccctagcttgatgaaatcatactgctagttgcgtgttccttcatattattagcatcaactagntttctttctctcttaatggctcatttcatctatgtaaggtatacgggatacagcttaattaaccttgtgc

SEQ ID NO: 8216 - DNA, 264 bp, Oryza sativa
  unsure (1)..(264): unsure at all n locations
aatataacaagtctcatggggcacatatcacgacgctgatcatcacataagcttcaactgcctaattaaaattatgaaagttacaattaccaatcctaaactaagtgtgaacagagacattgccattgcacaagtgagaggacacatgccacaacagcagacaccttgcaccttgccactgcgttgctggtactctgaatgagacattactggtaatgctatcctgttacctcggctttcggactaaaggctacgccnatggta

SEQ ID NO: 8217 - DNA, 377 bp, Oryza sativa
tgagcaccaaggccggctacctggcgtgccactgtctacagtggatacccggagaccggatatagagggtattgcggtacgctggtacaaggatctacgtagtacgatatcaacgaaacaggagacagagattatactggtttatgccccttgataagtaatagccctaatccagttggtttgggattatatggtggaaaccacaaattacatatggaataacagaacacgatgataccgacgagatcgtagtcgatgtggtccgactatatcgcccggtgacttggctcctgtaagctccggcttcgtaagctgtggtggttggcttggctatgagaatccatgccttagatcctcccagcgggttccttttatat

SEQ ID NO: 8218 - DNA, 431 bp, Oryza sativa
agcttcatgcactaattgagtatcttgtgggacgtccaccaaactacttacactagactggtgatcacaatcagccagcagacccgagaggattttatcaatagtggatatatggcagtttacagccggataaccacttatcaattgatgcgccgctccaaactgaaaaattctagcttctctatgtttgccgttagcaaacaaatgaaaatactttgtatttgaatcaccctccaaaatatccttagttttagccctttgataccacttaatttcttcttctctcataagagtagataatctattcctacaaaaccatctaaaatcaatttcctcgtgaattagaagaacagattcagcctttttatccaacaaatccaacctatccaaaatctccttttttttcttttttatacataccactttgatgt

SEQ ID NO: 8219 - DNA, 171 bp, Oryza sativa
ggagcacagactccaccggcaacccggcgctggagaagagctacttgacctgagactgatagcctctgctgcggctgggcgctctatgacagaagatgctttggcagtagattctgcctaagacgtggatgagttggatctttcactggctcagatataacaatatggtct

SEQ ID NO: 8220 - DNA, 401 bp, Oryza sativa
  unsure (1)..(401): unsure at all n locations
agcttacttttgactgctgcctgaagcgtattattgncttctgcttggcatccacctgctgagactgattgccctttgcttggcctgcagtacgtcggggagagacacaacttctttcatcgacgacaattctttgctgaggctgacagtgcatagaatggttagcgctgaaagtatcattgccatgatttttttttgcacagttacgtggagcaagaggagcattggtgctgtggatgataatcatcgatgttgttgctggagctgactagctgacgagacaatcgcagggttgctcgttggatttctgcgggcctggtcaacaacacactgaagtggcaatccttgagcacaatgtttgctccttccacagaaaacatgtcaccttgcgagtgggacac

SEQ ID NO: 8221 - DNA, 217 bp, Oryza sativa
aatctagctggaggaaaaggaggatgcagcatggtaagcaatttctcagcagagacactagcgaagcaaggggaatcggatttctacccaccaaattcgttcatacctctggggaacggataaggactgcgggctcgcgcctggatactggaccaacaaatttctggttagaaaggaaaattgtaatcaccaaaccatcacaagaaaagaggtgtga

SEQ ID NO: 8222 - DNA, 398 bp, Oryza sativa
agcttatccagaatagacaagttcaaataagttttatgtttaccatgacatggcaacgtcattactaccatataatctaccaactgcagacctacaaacctcattcatcaaatgcgatgatccaaattcatcgcatccaacacctcaaatcatcccacgtgtcccctcagatgctcaccccctctcactccgcccacccgaaaatcactaacgaaattcccatcctcaccccaatcatccccgatgccgccaacacatcgcgccactggctccctgacatctcctatcccggttctctctcccgaacaccccataccctagaactgtcattatcaccgatccatgacagcgccatgctgcgccatgaccgctgcgccatctactgaatccacatctgc

SEQ ID NO: 8223 - DNA, 421 bp, Oryza sativa
  unsure (1)..(421): unsure at all n locations
gcttggaagccctgtagatcaagcatctcctttgtaccaaagaggctgatagaacgagcctgggccaattttttgcttgtcaccctgcgtacttcaacatctgggcgattgcatcgaagggacaaccggcgaatcttttctcctgcaaatttatcctcatgcccatgtaatatgggaacgaaattctcttgagcggacaaagatatgatcatgtcaagcaccatatcatgcaccctacaagctagtaccttgccatcataccgaacacccactgattcaatcatgcttctgttgatgagctcattgaaataaatctgtcctgcttgctccaaatttttacccatttctccaacaattagtccttcagacatnccatctcatactagtttgtcactctcaatcacttggtcctccggaaata

SEQ ID NO: 8224 - DNA, 223 bp, Oryza sativa
tgtactgaccctcccggtcagaacattacttctcggctgcgcataccattccacttgattaatctgctcacagagcctcttcatttttctggacttccagagtccagctgtcccgcagcacaacatttcgctttcactcgggaagcctaatccatgatgcccgtatacatgtcaaatcacacagattccgttcttgaccactcaggtcatccatcttgcccat

SEQ ID NO: 8225 - DNA, 333 bp, Oryza sativa
  unsure (1)..(333): unsure at all n locations
agctttgcgagtctaagactatcggnntggctattaagtttacttcctcaactctaaggataacttgcgggcatatttgagttgcccttatattcctcccaggggaatgtactatcattggtacacgtaaattttgggttttccaaccatttcttttcacaaaagcttgtgatatgaaagaatgagaagctcctgaatcaaacagaactattgcgggtacggaattgacagagaacatacccatcacaacgtctggagcatcctgagcggtctcagcttgaatgtggttcactcggcctcgaccaaagttggtggaagcacgtgaaccttgtc

SEQ ID NO: 8226 - DNA, 450 bp, Oryza sativa
  unsure (1)..(450): unsure at all n locations
nggtgtacaagcgggagatgggctcacacagggagaatttggttgtggtggtggtggtggtggtcacatccgctgcactcgagtgcgtcccgtaccaaccaaacacgtccgctgtcatgggtggcaatctattgggcgatcgattagtttatgcttaacactaattgcactgctcccacaccttaatcgatcttaattaatcgctaacctttatgtcatgtctagctagtgcaattagagtaacctatatatcacacaaactaactacgtgcgcttaggattagtgataatggaatctgataagttgttaattaattaaaccattgtttgtggattgtggaactggatttgttaagaaaaagaaaaagactttgatagtgaatatatatgttgtatgtgtgtgtatatcctaagtctctgtggctaaccagttgtgtccacctagatatc

SEQ ID NO: 8227 - DNA, 435 bp, Oryza sativa
agctttgcgcagctgcgacaggatattttatgggagagatggagaagactagcccaaagtgaaaccatgagtaaatctatctagttcaaagtgaaaatagtatcttacccctagttcaaagtgtaacataggcaaaaataagtggtttaatgtgcaactcactcatcaaaatatgaagagtacagaaatcatacgagccaaatgggcctgcagtcctgcacgaaactgcaaaaggccaacctgcaaaattggaaataagttcacttttgtttcctcaatttgtcgcggagtacgaaatttgtccatggatcgcaaaactagatacaacgcatccccgaacttacctaaccagtacaaacgaggtccctcgacagtattgtccccagttttggctgacgtggcttctttaattaagccttaatccaacgtgtcatt

SEQ ID NO: 8228 - DNA, 416 bp, Oryza sativa
catggtgtcttcaaacgtaagtatgccttaacctggcaatgtctttactgtctctaatgccatgtcagagacttcaacctaaggccatcaccaatgcgtgccctggagagtatccctagcggcgagcatttgcttttctatccgcgccgtccctccgcgatgggactcgtccctgtgctggtggatgcggctctctccgtgcctcgctagcttttcatggggacccatagagtggctctgattgtatatgccctaatgagttactattatagatgcgcttgtcttcaacgtatgcctcaatctagcgatatctttatcgcggtacatgtatatttttatcacttctaacatgtggcaattaagaatttgtcactctgctgttataacatgtgtatcctcatgtatctatgacacat

SEQ ID NO: 8229 - DNA, 420 bp, Oryza sativa
  unsure (1)..(420): unsure at all n locations
ctgcagcttgcctatgccaacctttttcatgttaatgcgcagctaaatcaaatcgccgacgcgcgatcgatcgatggagacgtgacgtgcctgtctcgcggttcggtggtcctatatgctatatactcactccgtcccaaaataaatcagcttctaaaatttaaaatcaaaataaatcaacttttactcttttacctaccattagtttgcaaatctaaaaattttatttctttcataccctttacctacctattcatcgatataacttcacaattaattagagatatcttgatcattcatatctctctttanatccaccttggaaatatagggtttgagtaattgtgggacagagggattactaagcttgtgcatgggtagtcacagctaatgagcaaagcttgtactattggactggtt

SEQ ID NO: 8230 - DNA, 448 bp, Oryza sativa
  unsure (1)..(448): unsure at all n locations
tataacacattcggggggccacctccacatccaaacctcgtatcttacaaacggttatcatgtgggagcatggcaagtgatggagctgagggaactgacaactacatgtgttatctctcgcaaccacgacgtagtgacgtccaccccattgaaccccaaccgccgtgactccgccttgctcgctgacctcatacttcatcgaagggaaatcaaaacatgctgctctttgccccaaggttcgtctttgctgctcctccaacatgtccttaacttttgtgggccacttctttccacacaggatatctacagttgcctctntgtgtctatcgacaaaccaactattgcacttcgaaaatgtgtatgccacaatagcttgtaccaacagtttccgaatgcctctcaatacattattgaaactctctggcatattactaatcatgatgctatg

SEQ ID NO: 8231 - DNA, 428 bp, Oryza sativa
  unsure (1)..(428): unsure at all n locations
gcttatgggtctgaagtcctccacccttgttgcttcaccctttntcggaattagacaaatgtttgctgaatttaggtcttccagtctatctgagttcagagagctgaaatggttaatggcctgtagcaaatctgatttaatcacctcccaagctttcttaaaaaaagcccctatatagctatctgggccaggtgctttttgtgggggaaggtttgatattgcttcttttaattcttcttctgtgaaatcttcctccacttccgacagatcaagggaagggagacttaattctgaccaattaagagttaaggagcgtgggacatactgccctaatctctgggagaaatatctctcaagttcagcctccttttgttctgtggttacagctatgcccganggagtgattagagccggaatgaagttttttc

SEQ ID NO: 8232 - DNA, 465 bp, Oryza sativa
  unsure (1)..(465): unsure at all n locations
tcgtgcttgtcaacttgtcacanaaagtcttctacacgaattttggcgactccactggtgaaatctgctcaacaccatctcaacttcgatgccgccatgacaaagccgccatcaaccaagtcggaggtggaaccatccaatatcatgccaatctcattggagaatcttgatggggaagcacgcaaggccatggaggagtagattaaggcgatcacgcatgaggcactgatgagaacatgcactaggacccgtcaaggtgtggttctcaagcctggaccgttgcctaaacctatttttgatgtggtaagtaccgaagaggtatcaatccctatccaacaacatgtagcaagtacaatagattcatccattgctgctttaaatagtaagatagatgcatcttttgaatctcgctttgatgaattcttgaagaataagctcggctctctcttagccgatntctaatct

SEQ ID NO: 8233 - DNA, 371 bp, Oryza sativa
ttttgcaactcaaacacagttataccatcaatatattcactgttcatccaactgaaattctgaacacagcttaatcacaatcaagtactctaacggtcttaaacctcgtagcttttgatctagaaagacactaaaattttatctactctgaactcaatgagctgctaggatcacaatggaatttgctcatattcttttgaactcaccattgccctttctggttgcatcttgtatgacacgagagctataccaatacagaccccttgccacatatcaatacacttcactctgagacaagccttgccatactcctgaattaggaactcaatatgccagtgatgccaaagttacttgacactgaccacctaatg

SEQ ID NO: 8234 - DNA, 416 bp, Oryza sativa
cgtctccattgatggtgagatataagcgagtgatatgtctgatgtttgcaatggtttgatcagctaacgagtgctgcgagaggctggcctactatggcatgagcaccaacctcgtgaactacatgaagacgcggctcgggcaggagagcgccattgccgccaacaatgtcaccaactggtcggggacttgctacatcaccccccttctcggtgccttcttggctgatgcctacatgggcaggttctggaccattgccagcttcatgatcatctacatcctggtaactaatcgtcttggatttcagtttctgattgctatgatcgatggtgtgatcgaagagagagatgttttgatggttgcagggtttggcgttgctgacaatggcgtcgtctgtgaaagggctggtgccggcgtg

SEQ ID NO: 8235 - DNA, 443 bp, Oryza sativa
  unsure (1)..(443): unsure at all n locations
tatatngcanagtttggattatcacgggtgatccttcccatctaaactcatgtcacaactgagctagttggcactcttggttacatcccacctgagtacgcccaggcatgggttgctacattgaaaggtgatgtatacagtttcggagtggtcctgcttgagcttctcactgggaggatgccagttccgatactgtctaccttaaaggaacttgtcccatgggtacaggagatggtatcaaatggaaagcagattgaggtgctggatttaacatttcaaggcacagggtgtgaagagcaaatgctaaaggtccttgaaattgcttgcaagtgtgtcaaaggtgatcctttgcggaggcctactatgatagaagtagtagccagtctgcacagtatatactctgacggtctgacctaaagatacaataatatgacaaataatct

SEQ ID NO: 8236 - DNA, 422 bp, Oryza sativa
agctttgcctcctcctccatctttgattttcttcccatgccaccgccgccctttcttgatgcttttccttgatcgatctggtgcctaatggcgctgcctttgcttcgcctgctgctgctgcttgtgctatcatcggatcctctctcttgccagctcgcccactctactgctgcaggttaattggtgcccttttatttctttcgttaggccccttggctaattcaggtgtgctgctgattatcctcattgtttcttgggttgatttttgcagacacacaaaattggggacagacctctgttgttcatcttacgtgaaaatgtatttacagactttctttttttttgctgggcaacactggcaatctattctggcattaatctctctctctttcgctacttcctgatatggtcgggcattccat

SEQ ID NO: 8237 - DNA, 455 bp, Oryza sativa
  unsure (1)..(455): unsure at all n locations
tctagcgttaagtccacaaagatatttatctccagatcgaaccgagacacgaaaaagaaaagaaaggcgatcacacggacagttgatgaaagaagcacgggtgtcatccatcggagaaagtaggtcggtccacgattgttctagagaatggccatctctgtcgtaatataagagctttccgttttctttgcagccggacaaaacctaccgtaaacaggatactctccctccgtcccataatactactattatccagtagtactagataagatacaatcaatacgtgatacgccgccggcggtggaggacgctaccaccgtgcaatgaagagctaccggtggatgtggcacggtctacattgcacaaaggttggccggcgggaggcgccggngcattggtcccacatgtcattagagattgggcagtggtggagcatctgtacgtcagccatggac

SEQ ID NO: 8238 - DNA, 381 bp, Oryza sativa
gcttgctggcgcatcaactggtactgtattaacataagcatgctatcgcgaataattatttcactgttggtatgctcccatgtttcttatgttcatgaattggttgtttatttgcaaaattagaatataacctaaaagaaggctagctgtaatggtcagaattctgtcactgaccttggtgctgtactgctgttgcatttgtgatgataatgctactggtatacttgatgggaacacgagtaaagaacgttgagaaagagttgatcttcccgtgagtgactcagaaatcaaaattttgcagcaactgaggtagaatccgtcctattgagtattaacaccatcatggagtattaaccacgatcatggatcacacgttgggca

SEQ ID NO: 8239 - DNA, 378 bp, Oryza sativa
acccttaccccctgcctcgcatagatcaaattggcgactccaccggggggtgcgaccttttgtgttttctagatgcatactctggttaccatcagattcgcatggctagggaggatgaagaaaaaactgcgttcattacccccgtaggaacctattgttatacatcaatgcccttcgggttaaagaatgcaggtcctacttttcaacgtactactcgaatttctttgggtagccaaatacggcgtaatgttgaggcttatgtcgatgacttggttgtaaagacgcgcaaccaagagactttactcttagatctagcggaaactttttgaaatctccgctccgcccgcataaaactgaaccccgataagtgcgtgtttg

SEQ ID NO: 8240 - DNA, 349 bp, Oryza sativa
tagcaagtgtgagttcttgttggccgaagtcaaattcttatgtctcgtgatatctgctaaaggagttgccgaggaccccgaaacagtgaccgctgtcactgagtggaaacaacccaaaacagatactcatgttcgcaactttttgggtttggcaggatactaccggacgttcatcgaaaactactccacaatcgctcgacccatgacacagttgttgaagaaagaggaataatttgtgtggagtccgcaatgcaagaatgcgttccaaactctctaggaacagctggattccttgtcagatttaatcttaccggatactctcaaggacttcatggagtgctgtgatgct

SEQ ID NO: 8241 - DNA, 424 bp, Oryza sativa
ccccttttcatcaatggactcctgacgtctacgaaggagtgtggttcgttcgacaaattcctacctctatatctatctctgaggtgtttgggttttgcaaaactccatagatatgcagaagagaaatgctatccccactccgaccaagacagaacttttaccaaaagtttattgtgatctttttgttcaaataacaattaaggtgaagcagggtcaggaacaacgaatctctttatgataaacagatccattttgcaagctcgttattacgggtagttcctacaaagaatcggactaatgacgtatacaatgcttgaattatcgacgtagatgctacatagtgggttctcatccttcacagactacgagtgtaatatgagcattccttgacaaaaagatcaccctaagatgatcatctcatggc

SEQ ID NO: 8242 - DNA, 417 bp, Oryza sativa
  unsure (1)..(417): unsure at all n locations
agcttagcgtaaatgccgagcgctcaggcttgtactctttctccnagccatgatactcgcaccctgacagtccgcatcataccacgtgaaagacagagatggatggcattgtcagtgtgcctgtcaatgctgatcccaatggatgntgttgggccctaccctaggttgcccgcagtaatgaccatggacgtctccatggcactaggacaaacgatgaaagaagatacaatggcgctagggtggatgtgccatgatggatggagaggcatcgccatagataatgtgggggagtggagaaactcggcggatgtaacgggagagttgtgagatgcggtgggattctgtngataagcgcactgatgcagtaagcacattgaggcaacaagtgacgctagtctactaatatgggcatgatca

SEQ ID NO: 8243 - DNA, 417 bp, Oryza sativa
  unsure (1)..(417): unsure at all n locations
agcttaacgtagttgccgagctctctggcttttattcgacctctntgccatgaacctcgcaccctcacagtccgcatcattccacgtgaaaaacaaaaatggatggcattgtcagtgtgcctgtcaatgctgatcccaatggatgtgtttgggccctaccctatgttggccgcagtaatgaccatggacgtctccatggcactatgacaaaggatgaaagaaaatacaatggcgctagggtggatgtgccatgatggatggagaggcatcgccatagataaggtgggggagtggagaaatccggcggattgtaccggagagttgtgagatgcggtgggattcttgtgataagcgcattgacgcagcangcacatggaggcaacaagtgacgctagtctagtaatangggcatgatca

SEQ ID NO: 8244 - DNA, 394 bp, Oryza sativa
  unsure (1)..(394): unsure at all n locations
agcttcacggcaaggcgagagagaagcgtacgtcgtcgncgncgccatagccgcccgcgngcatatgccgcgntttttagtccacaccggtgccccagatctagaaaaaaaaaaaggagggtcgcgagtcgcgacgacttgaattgtgaacaggagtagtttggaggcatggcaattatgcctggtttaggcagtacgatttacgtggcgtgtgcgcgcgtacgtccgggatgacggcgcggtcagtgggcgacgttggtgcttccgtggaggctaaaaactatctagaggcangaagagacggggaaattgtcgtgtggtaagggagaaattncgttttgttggcgtgttgggtacgacttggcgttggccaagtgttgatgggtcactgtct

SEQ ID NO: 8245 - DNA, 471 bp, Oryza sativa
cgccaatgatgaggcagagcaatggaacattgtgaaacacattgttcttgtgaaagtagcatgacttctaaggacaataccacacagtacagactcccctaatgctaagcaagcgatagcaaagaagatgactacgagacgtgatggaaatggacacgcatccttgcgataatccagtacccaatcgagagcacgcacgtaccgggtcgaccaatgatctgaagcttgtggcagttgggattgggatgggcgctgggctaaagctccggaacctggaatccgaccgcgcgaaccgaattccctccgaggatgccagcttctggcacacagagagaaaccaaaccacccatcagcgaaccccaaatacagatttcagaaccaccctccccgaaatgctcaattcgaagccgcagccacgcagattggcaaaacccgcggttaccttgtgcggaagctcgtctagcgacatgg

SEQ ID NO: 8246 - DNA, 429 bp, Oryza sativa
agcttgccatcacgatcagcacatactctttgttcagagtcggcgtatagaggagacaaaagggggagaatctcaccatggaagaggtacttgcagatctcgcggcggttcttcttggagatgatctgcgacacaaaaaaaaaacaaagcgcggcatcgcgtcagacaacggaacgggtagagcatagcggagcaaacgaatgtggctcggtttcggaggtcgctactcaccatggtggcggagagctcgaaccggaggagggcggcggcgccggcggcttcggggccttggggaacgagaggcgaagcagcgaggcggtgagaaaaaccctagctttgtgatgggttgatatatagaggccaccacatgggcctccattgtgggctctgtttcgccttccatgtgttctgggcctcaattgactacac

SEQ ID NO: 8247 - DNA, 311 bp, Oryza sativa
cgttctacaaattcctacctttatatctatctatgaggaggttgggttttgctatactacatacatatccagaagagaaatgctatccccactcccaccaagacataactttgaccaaaagtttattgtgatcttttagctcaaataacaattcaagagaagcatggtcacgaacaacgaatctctttatgataaacagatccattttgcaagctccttattacgggtagctcctactaagaagccgactaatgaccgatacaatgcttgaattatctaccgatatgctacatagtgggttctcatccttc

SEQ ID NO: 8248 - DNA, 348 bp, Oryza sativa
gcgaagatgacatcctcacaaaggcgctcggaaccaaagaacattctggccggactaagggaattggtagcgatgtgccctggaagcatggactcccgcagtacagttcccaatacaagaaacggaaagtctccaaggaagagagggacgctcgtttgaaggccgaacttaaggttgaggtcattcaagaactagaagctagcatgaacgctatggtggaagaaagggttaacaaggtcctcgccgacatgaatataccccgaggcacaacacctgctgtgcatccaactcctcgtgcacaacacgacgcgagttcgtcacagcataggagtagttgtgcattcacag

SEQ ID NO: 8249 - DNA, 315 bp, Oryza sativa
acctgcacggcattggtaaagttccattattttatattgtgcaatcgacaacataaaggattatatgcgctccacaatataaattaaagaacagaaaaaaccaaagaagggcattgattcattcaattttacttttcagagtaaccggctacatctatcttacaaatatttgatgcactatcacataatagctcacaactgtacttaaataactttaaacaacttttcttcttggtggtttctttattattttgccaaactgaaaacaacttctcaaagtgcctttagcaagaataattgattaaaaacttgctg

SEQ ID NO: 8250 - DNA, 414 bp, Oryza sativa
  unsure (1)..(414): unsure at all n locations
catgcagcttgaagaaatttttccgatatttcccnggcgaaaaaaaaggaattcacaggaattgatcactcgagacacacaatgagcgttcaaaggtataaactcatattgctctgaattagtttgccaacttctactatctatgttactcctgaatcctttacgtacctgaattcaaagaagggcgagaagcttaatgaactacaggaaaaacatactcagttgcagtctgatctacagaaaagtaaggaaagaaaagaagaaaaatcggcggagttaagcaagaacaaagagctattgaagagccaagatccagtgaaaagaaacattgatgacaaccttaactacacgagaacaaaggatgaagtggaacgacttactcatgacatagaattacttgaggacaaaatactt

SEQ ID NO: 8251 - DNA, 267 bp, Oryza sativa
acgatcggaggttataattttaagcgctaatgaaaagcctcgcgtcaccaataatgtttaatatctcataagctattcggataagcttgtgaatcagaaaaacacatggattaaagactattgcgtatattgagttgcatgtgtcgatcagttcatccaaaaaacctatattgagttataccaatcaatcagttcgatctaaagcttaagctaatacaggaagggctaacgtgttaccttcgctacttacatcttacgatcctaccc

SEQ ID NO: 8252 - DNA, 394 bp, Oryza sativa
  unsure (1)..(394): unsure at all n locations
acgaaaatggtgaccagctgattagcagcttcaggacgagtgattataaagaccttgatcggagcattcgaccgagatcaactcaaccgaatactaatgcagggagcaagtaagccctaacactgctttatttgtaccacacacactttaacacttgggcacacttaactacatatattttggattaaaaaatttcataaaactacactgtcaacaaacatggtcaccggcgagatgatatggctgttccacctaagatgtagacttgggagctttaatctatgtggaacaatcacgatgccatgtccacaccctanatactctcttcatttagctttgatggacacatataataaatgtgtgttggtttctacaacttgaacccaaaacatat

SEQ ID NO: 8253 - DNA, 374 bp, Oryza sativa
ctcacgaatctttaagaaaacccgcgatcgacgaagatccggttaccgctactatacgcaaacaactgaaaacctatgcgaaagaccaaaagagagatcctatttagactaattagtacggccatcaaatagatctcaaatctacggaattactggaagttgaacggagtcaatcggagttgccaatcgggtgatatgaattttggaagattaattggaggttctggaataggagaaatggtttatggaattttacagaaataatattctcaagaatattattgacaagcactgtcatgtgggaccaaaagaaatggtctatggaatctcggaagaaggaattgaattatgggacaaaggtaagaggatatatt

SEQ ID NO: 8254 - DNA, 259 bp, Oryza sativa
gcaccctactactgaagacgctatctctttaccgatcacttctcgcgcccacggttttctgcgaacgtggctgtgcggcgcgcacacagagacgcgtgagtggttactccgcacatacgaccggccacggaacgactgagctgttggagggctcaaagtactaccactgcgtgcgatttagtatgtcgtatcgtcagctcacaagccacgcttctataacgacgttctttttctattgtcagtgagctgataacttgac

SEQ ID NO: 8255 - DNA, 455 bp, Oryza sativa
  unsure (1)..(455): unsure at all n locations
tgacgcaacctctacctggcgcgccaactgtcgaaacttgatttttgctataataaaaggggtggctatcaagctggaaaagtgtatgggtttggagacaaaagaattatacaggttcaggccttcttattcaagaagtaataccctacttctgtccggggatgaatccgccgagggtcttcttaattgtatgatttggagaaaatcaacatgtgcccctagaggcacccggacctcccttatatatgggaaggagtccgtgttacaaaagataatctatatccctaacggaatatgcagatacagataaaatacagtcgttaccgactaagtctcaaagtatttccttgatgtacaagttgagaaacacacccgagacacaaataagatattctatctatatttgggatcctgaattcagtccaaataccatcgccgngtagatatgggatatc

SEQ ID NO: 8256 - DNA, 212 bp, Oryza sativa
tcagccatctttttttttgttttgtagttttgccgacacaaaaagaaggcgtggattcacacaactaatatcttaaaataagtggtgattttcctccaggatgtagaacaatataagagatgccaggaccgcactgctcgcaactcccgtttgcgtctcttcctacagtagttcaatgctgacccagacacaaactctcttaaatttttgca

SEQ ID NO: 8257 - DNA, 293 bp, Oryza sativa
ttggatctgcattccttcttcctccagccatctccaatagtagcattccgaagctataaacatcggatttgcttgatatgacaccgaagcttcgagagatcatctcgggagctatgtagcccacgggtcctcgtgcagcgcttacagggacgaagctcttatcccttgggtatagcttcgcaagaccgaaatcagcaacctttgggacaaagttatcgtcaagaaggatgttgtgaggtttaatgtcaaagtgcagaatctgcatctcgcagccctgatgcaggtagttgatc

SEQ ID NO: 8258 - DNA, 298 bp, Oryza sativa
  unsure (1)..(298): unsure at all n locations
ctgcacttggtcaagcaagtccgctctttgcatttcttgtccaactacaattgtgtgagccatggagctatatctgtcatgtaacttcgcaatgtagaatacaccttatgtgatgaacatctctcctcatgagangttagccagaacaatcagctatactttgggattgcactttctgtgctgtgtggttggaggccaacacaattacaattataagcaacatcttgtaatgcacaatgcacttttactctctagcaaatatgatcatctactataggttacatcattcagtcctatg

SEQ ID NO: 8259 - DNA, 456 bp, Oryza sativa
ctatttagtggttaccaccataatccgatctcataacttcatttgtatttagctttagtgtcttaaatttcttaaaggaaatcggaggtcgctaatgggtaaacataaccataaaaaatcatttgttggctaatatcttaactttgtgaaatttacacttaaagcttaacaacgccattaaaatttaagggaaagaatatctttatctcatgagacgtttcaaactcccctaagtatgtgacataagcgacaatggcacaatttcaatgacgtcttacttccatcattatagaataattattctcctcattcttatttaggcttagttcactaatgacgcagcggaatttaaaacatcatcaatgtttgattaagtccacaaatggatttcttaagtctgtaccctatatgtgacttgtatttccataacaaaaccctcaagtcatgttatgtata

SEQ ID NO: 8260 - DNA, 283 bp, Oryza sativa
tgaagccgcgaagtcctctttggtaatcggaagcggattctgtttacgcacattttggatgagcagtatctgatgttaatagatgacccctcaacagatgatgttacttgaagacctgatgaggatcgatgctggttatcggcaaccatgatctattcgaacagatgactgattactattaaacactctgccgcgatagccgtagacaccaagcgccgtgagacacgataaacctttcctaagatgcacatgtaagatatgagctcgtcattaatggaacaaa

SEQ ID NO: 8261 - DNA, 411 bp, Oryza sativa
  unsure (1)..(411): unsure at all n locations
actataagtactctagctcggcgtggcggaaagcttctactctcttctagacattcttcttattatttacatgatacataatgaacatttgtgctctttacccgttcctaccttgcattcagatatttgcacctcactgttctacagaacgaaccgtgcgggcccatcttgaccgattcaagaaccattttcgggccaaggatgacgaaataggccgcaagaacttggagatggaggccctcgccaacaccctgaaagaggcgatagccgaaaacaagcggcttcaatccgagttggagaaaggaaaagaagcttgggccgatgtcgatcggctcaatgctgaactggagaaagggagagaggccatatctgatgttgatcgcctncatcccgaattgaagaaagagaaag

SEQ ID NO: 8262 - DNA, 229 bp, Oryza sativa
gtatgtattcacgacaagtataaacacctcctggaactgcacactatttttcacaacacatgtattgaacatgtcaaattgagaggcacagcaatgtttaattagtcttgcggtaccatatgtagaggccattgtaagaacagaattgcacatagtactactggcgtactttcaattcgagcctaggagcacattatataccgtacgaagactggcttgaaaaacacaa

SEQ ID NO: 8263 - DNA, 155 bp, Oryza sativa
acaccacaactaactgtagaacaatggtccgttatagagttgattccgaacgccattggcgagttattcacaatggtgctgaacataaccatgagttgggtcgacctcaaaggtacacttgctgagatcaatgaggactctttcatttctaaacc

SEQ ID NO: 8264 - DNA, 285 bp, Oryza sativa
cctcaaattctgcaagatatttcccttgcgaccgatcctcacggcgaggaggtgggtgtcccagccgtaccgcgacttcgtctttttacggtgcagcgccacccaatagccttcctttccgtcgggccttacgttgtcccggtagcccggcagctctgcgaatggctccgacgtacccggcttggggccatcgattcaatgcctcaccagcttgcacggccccgtaagcgccaccacgaagtgactccgatcggcgctaatggcgaagccgttggggtacgtcat

SEQ ID NO: 8265 - DNA, 258 bp, Oryza sativa
  unsure (1)..(258): unsure at all n locations
tagctacaaacacgatgcagctatcgttttcttgtacttttgttgcttgctgcaatccacgacaatacgtttggagtggcttactccccttctggtataatacacgcaggtgctctattaccttggtctcacattgagcttaactacgaacttttgtacatacgtatgcatactttccacaactaactctcatcttattgtgatngatatgtaaagatttacttcatgtatacgagctttcactacacgatctatctt

SEQ ID NO: 8266 - DNA, 419 bp, Oryza sativa
tcgagttagagcagtaattaatatgctcatcagccaacaagtgctttgcattgcatgtgtgttcccgactaggttccttactgtacatgtacacagccatacaaacgatgtgaacaaagtaaacttaaatcccgtaaaaatgatcagtttatgcatgcgtactcctctcctgcagaatggaagaactagctaagctagacatatcatggagcatgcagtcaaaggccaaggtaaagtcctcctcgttcgagaagactcgatctccatctccttcggtcctgcagctcaggtcaagaggagaaaccaatcaaaccatcccattcccatttgccagttgccacaagcgcccattggcagtaccagtaggacaaataatggagtacaatccgtcattcatctttcctctggaatcgggcgtc

SEQ ID NO: 8267 - DNA, 397 bp, Oryza sativa
actcggatggatatctcggcttcgaaaacttgcagttcttcccgtcaatccttcaggacccaaacaacttacttttcgcccatgaaccgtttgtgtcaatggattgatttgatcaaaaacttgagataagggatatgtaccaaagaaggtatcgtaagtagttattaataaaatcgaggttgaaatttacaatgtaagttttactccctccatcaacaaaagttacacatattacttttgacaccaagaccaaagaaaaattaaatcaccttagatgtacaaaatcaagtagtgaatacacgcatgcaaccaataagtatttagaggactccttgggatctaataagacatttaatttatctcttcattaagtcttgaatgtataagactacaatag

SEQ ID NO: 8268 - DNA, 393 bp, Oryza sativa
gaattaatgaaaacattcaagacgcattttgacaaggataactgccccgtcaaggcgccaaaggataataaatcaactgttacaagcccacaacagtgtgcgcttcatgtatcccaagcatgaaatgcttcgcatctcagcattttgatgcgccaccaaaaggtcaaaattttgatgatgtgaagctaaggcaggaaaagtctgctgtcataatcttattcaaaggcctagcatgatacagattatttgaacagcaatacaattgcagtggcttgtctgctcaaataacaagctaatcgaagcactacagcaccaaaaacgttttttctaccaaatgtgtttccactaatgattattttcttcactctcatggcaaacaagaacatcaagtag

SEQ ID NO: 8269 - DNA, 467 bp, Oryza sativa
  unsure (1)..(467): unsure at all n locations
tcaccgagcctccagccgntgagatgtcatgagccgccaaagtttatttattaatacaactctaccacggactcctcctctcaaactgctaattttttcggtatccatgcatacacgtaccgtgtccctgcatactatccggactcctgagctcccttttggattgcaacaccaacacatgcttgatttgatcctgcatgcatgcaacatgcatgcttttctccaataatctatgcatgttgaccgtctctccaatattggctcaagttcccatgtacatgcagccagctacacgatacttnctatgcaccttgcttcttgtgttgaagaaaaccaagccaaacccaagtccctgttagactctgctacccagcttggtctgttgtgcgccctgctattgtgcgtgtcaagcctcacgactttgctggctgagccataccgcacgcttcttcctgagcgccggtcct

SEQ ID NO: 8270 - DNA, 467 bp, Oryza sativa
tggaccgcacaactcgcacaaatagcgacttagtaattttttatttcgttctttgccgaatcaactcatcaacaacacaagcatgtaaaacaaatctcagagcgaaagaagagtccaactccttagatctttcaatgctcaattccaatgacttgcaattaacataattgacatctggcaaagcatgaatttcagaaaataaaactttaccatattgacaattatcatcattaggaatcaaagatttcaatgtggcaatttcagcactcacaatactaatagtgtgatccttctcataaagcgcaacagatcatgtttgaagtttcttagcaaacttcatagccgcctattcttatcgatcataacttagcttttgtgtattatcatcatcagattcatcaacatcggaacatgcattacgagctatataagctaagataacaacgtacttacctttggtctcatct

SEQ ID NO: 8271 - DNA, 71 bp, Oryza sativa
aatgaatggactcaattgacacagagtaaattgcagtatacaagtgccactataaaatgatcattcgacac

SEQ ID NO: 8272 - DNA, 464 bp, Oryza sativa
aagctttttctgagtacattatgccatacagagtacttattcttattcatgcctgttttggcaagatcatgaacctgaccaccatagagcttctaagtgtgatcagtgctcggatacgctcgactctcacttgcgtaagttccctggatctcgtggccactactggttgtccggagacgaaagcctctgcttctctccccaccaggcaccatgccaccaccggcactgtcgcactgagccattatctctgtgagaagtgaaacgctcagaagtgaaatggctttgtttgaaagagcttctagccgctgtaacttcttttaaaatccgtaactccttcaacagttcagattttcatcaaaattctgagaattgatagatgtaaaacattgaaataaactgaatgtcaaacgtagaaagcataacttttcagatttcattcagcttttatcagctcttgactaccc

SEQ ID NO: 8273 - DNA, 224 bp, Oryza sativa
aacttctaaccatgtaatgcaaataatatggcactgttctactttatggtccatgcaacttaactattactacatgtcagtaatggcttagtcatactgatctgatgttactgtgctgattaacaccaatgtacatactattcttatgtacatcactataacaatgcatgtgtaccatgttgtgtctctatttcttgcaatcgctatgctgacgaacctgatgg

SEQ ID NO: 8274 - DNA, 452 bp, Oryza sativa
cgagcaaccttcgcaaacttagcatcagtgttagcaatatactgttacgtgcacaagatgagctgaaagtgctggccaatattgccagtctcgcatcactgaagattacatggggaatggtatctccaccagatgctgccgaccaatcagatgctgcaaaatttaaccttggtcttccctctaatctttcacagctggatctctactgcttcccgtcgagacaatttgggacgattagttctgacagattaaagaaactgtattttactggtgggaagttgcatagtctggaaattcagaatggggagtgcaaagtagaggtgctgcgcttgagatgcctcaaggatctgcagtttttgtgggaggaattgcgtgaactgtatccaatgctggaagttgcgaagctcacactgttacgagtagctattgccgctaacaacataaagatggac

SEQ ID NO: 8275 - DNA, 313 bp, Oryza sativa
  unsure (1)..(313): unsure at all n locations
tttgctaatctatanattggtgcatatactaagttattattgtatagttgtgttacaccatttgttggtgataaacacacctatgttcctatgtgataactttgatattgtgctgtttgctatatatttggtcttatcttatgcagtctgaattgcaaagatgcgatgcttctgaaagaatgatatgacttgagcataaccttgacagatttaattaatatggtatatgttgttccctactgtggactttgaagtctattaacatgagttggtctacatattgacacatgagtttctaaatatggttctacac

SEQ ID NO: 8276 - DNA, 438 bp, Oryza sativa
acactcactgtgatatacgtattactgcttgattggtttacttatatggggatatactgtggtaatcagcagtgaacagtgacctcactactacgtagtcactagtgctctacactatgttacacgatagatgacaagtcaccaggagaacgggttgttgtgaccattattatgcggcggcctttttgtttgtttgttcaccttccaccggagaggccggacactgccgatacgtcggcggacatggggctggcggtcgacgtgacggtggaagggaaggacatggcgaacgagtcgaacccgtcgttctgcatcagcgccagcatggtgtagctcaccatcgtcggcgccacctccggcatgggtgcgtcgccgtccaggtactgtgagacctggcgcatggtggggcgcgcgtacggcaactggtgctctcacatg

SEQ ID NO: 8277 - DNA, 292 bp, Oryza sativa
gctgcgacgcatgtatcgtgcagggactgtctaaacctgaacagcactgtttgtttatattaataaattgccaaaatttaacgtgaaggcgtggattaacaaagtttttgagaagtacctcaagttcagtttggcaatgagattctttatataactcgcaaataatatattatgaaacaaactcgctttttaaattaatacaaacacttaggaaaaaaattttggcatgcttttgtcagaacattcttctttttggcatactaaaaatttttatttctctattaaaagctct

SEQ ID NO: 8278 - DNA, 472 bp, Oryza sativa
  unsure (1)..(472): unsure at all n locations
acgacaaggccaattcgagtgatcagccgccgtttgtattcttcggcagcaactgaaactgcaacaacccgagagcccccgactggaaaccagtccgatgtagatctaaatcaagagattcctgaagctgaagcgcagacaacttctcaaggaccaaaagttggtaatgactcagtgattgggtctccagataaagagcaaggatcccctcacgctcagncaggcacatcctcaggtaactcaacttctcaagtgatgccactctgaataactccagcttgttcgtctaatatcttgtgaatacatcangtccactaggcggcgacgaagaagaaattctccgcataaaggcagctaatgactctcgtnctcctatcttactcaaatggtgggacgagaactctcaagtttccggcatttgtataaatcgccaaaaaaagacgaagaagtgtgccaactgaagaaagtactt

SEQ ID NO: 8279 - DNA, 383 bp, Oryza sativa
gccttctgatcttaataccggggaacagtgcatttctgttgttagtttatatgctacggtgttggtgcttttaagatcaaatggattttgaatagtggcctaaaaagacacatttttgcatcgcataattctagcgaaccctggctttttgtctatgctttttagactagtgttgaataaaccatgattcatatgggtgtgggtgtttaaccaaataatccgaggatgatggctatctgcttcacgggcggttttaagatgatcattcattccgcatctgcttggctttcattagaatatttaactcaaaactacggccaatcatttggcctacacgttcttgccattaggatgcaataatgctccacaaagaactgacccaa

SEQ ID NO: 8280 - DNA, 249 bp, Oryza sativa
  unsure (1)..(249): unsure at all n locations
tttaatcttagatactagattaaaagatcaatgatattaatatagaaatgcaaaatgaacatanatatgtctttcccatcctgactgcaaaaaaatgtctctgttagactacaacgtcctgaccatatatcacatcgtatcaaaacagcgagaaacactcaatagaatctatttttttattattcatggtagatgatgggatacagtgactatcccattggcccttcaatgcaagaaatcacatgttca

SEQ ID NO: 8281 - DNA, 478 bp, Oryza sativa
  unsure (1)..(478): unsure at all n locations
aagcccgggtgaggtcctttcanaataatagtatatatacatangattatatttctgttatacagctgaaccatatgtcgtcatgttataaattcctattccagcaaggcagcaaaaccatatgaacaaggctagtccaacaacaagcgccactttggttgacccaaatcgttgtatagtgaacaagacaataagaactgccacaggtattatgacaacttaacctgccaaagtttcacattaataataagtatgatgtactcgtagacagtacagacttaatacttttgctgaatcaattagagctatgtgtcaataaactgaaactctgaagtcaccttcaataacactagatatttcaacctttaagccattgacagcagacatcactgcagaattttaccaatatagagaactggaattagttctacatgaaagagaaaacctcggctatcacaatatcactcataaaagcgta

SEQ ID NO: 8282 - DNA, 225 bp, Oryza sativa
  unsure (1)..(225): unsure at all n locations
ctctggctggctangtggtctacatatagataatgatctcttataactcatctctatctgcgactttgccattgtgtgattattagtctatataggatgctggataaagcttcagtctgaccatatttcagagtcgagattctaccatcatcttagtatcacgtattgacttatttctatgatgtatgtgctgctcataaantctaatacgaatcancgtattct

SEQ ID NO: 8283 - DNA, 415 bp, Oryza sativa
caactttgtgattgcttgtaaactttgtaaagtacaaaagaagaaagagtatacacataaatgctataagctaacaagtttggtgttgcaaaagaacacttaatgcatttggctagaaactttatgagaaaatgaacacatttggcatgtacgaaacacgtcaaaaagtatatggtatgaatcatttcaacaacatcctttgatgtagtgacttctttggaccaaaaatcttgcattggacacaatccttgtccacaggttaacaaacttcataagcacctttgatcccaaagccacttttattggctataataaccaccacctacgcacttgccatcacatcgatcaaagttttacttcttcaaatagctatgggcactactacctctctattgctttctgtctctggctcttc

SEQ ID NO: 8284 - DNA, 418 bp, Oryza sativa
ctgcaggcgctgcagaggctcacaagcattgtaggggaaattggcatgacactgcggtacaagataacaaaacattccttcttactgcgaaatcttgcagagatcttgagagacagcagccgtagcaatcaagaactaagggaggctcgtggcaggaatccttaaaaatcttgccattgacagaagacacaaggcaggagattggacaaatgcaagtgctcattaccaggctgatcaaagcattcctcgattccaacggaccatctaattcaaatgttgattgcttgcttgccaaggtcgctgggcaagcactggtaatgcctgcattagaaaattcacataactgcttcgttatattgaaggaaccagagtttattaataaactaacaaatatgatactaatccatgatgagtaata

SEQ ID NO: 8285 - DNA, 120 bp, Oryza sativa
cacgagctgcagctgttgttatgcgcaatctatgaactgactgagtgatatatatttgtaatcattactataataagaattaaagtgcgttactcattacttgactaccccacacgtgct

SEQ ID NO: 8286 - DNA, 440 bp, Oryza sativa
  unsure (1)..(440): unsure at all n locations
tagccgtgtcttacgcccttcatttcaaagaagaaanataattctgttatctaaatttctgtgtgcagcacaaacgcacttatttaatactcagtgcggatacagaattaatgtacatgaacacgaagtaaaagcgacgacgtatgacgacgaacaagaagaagcaaattaagccatcaaccacatgcatacatgtaattatggggagaaagtaattaagcatataaaccgttcgttcttgcgttcattcgatcgggatcgatctagtattggtcggcggcgtgcttcttggcgtccttcttctcgtggtgctcgtggaaggcgaaccccgcggggcccagcgcgggcaccgncgacacctacttctttaacttgtgcccgtgcgcggtctccgtgtccttcttcgcctggtgcttctcgtgctgcaacgacgtaccaca

SEQ ID NO: 8287 - DNA, 338 bp, Oryza sativa
  unsure (1)..(338): unsure at all n locations
tctaaggatcttggtctctgctcgaggcatggaggccaacctctttatgtttcangctatatagcggatgcgcccccccatcanacttatggatgtgcaatgcgtcaccggttgcatggccgccctaagtcgggtcatatcgacgctgggagagaacgcgttacccttatttaagctcttcagacgctccggaccgtttacctggacggaggaagccgaaaatgcgcttacccagttgaatgcgtatcttagctctcccccattttggtcgccccagagccagacgagccctcgttactctactgatcggcgaccccgcaagtagatagtgcggcatt

SEQ ID NO: 8288 - DNA, 440 bp, Oryza sativa
  unsure (1)..(440): unsure at all n locations
tcaagtgatttcaatttttcaattcatcagcttaatactgttctgtagtcttatattnattntccccccgttcttttctcatggccctgcgacgctcgcgtgttgcgcatttgtttgctcccttggtggtaagagcccaacctctctcccatctacatgaatgtatcctcgctaagtgtgggggctaagttttcgagccctattccagccttaagttgagcgtcgggtgccgacgaagcccaagaccccctgtgctggctctttcgtagaggctagttatcgtcctgccggctggatacagtgcccggcctggctcaactgtggacggagatcgctggctctagagtttttcggctctcacactcgtgcgacagtagtcgtccatgtagaaaggagagatactggaagaggccaccgaaggaatgagcaaacagaatgtg

SEQ ID NO: 8289 - DNA, 470 bp, Oryza sativa
  unsure (1)..(470): unsure at all n locations
tanggatgtgcaatgcgtcaccgggtgcatggccgccctaattctgntcatatcgaggctgggagagaaggcgctacccttatttaagctcctcaaacgctccgggccgtttacttggacggaggaagctgaacgtgccctcactcagttgaaggcgtatctcagctctcccccagttctggtcgccccggagccaaatgaacccttgttactctacttagcggcgaccccgcaagtggttaatgcggcgttggttgtggagcgcgatgaggacaatcctcattccgcgcacccccaccctgtgctggcttggcccgggagagagcacggaggagaggcccccgagccgaacggtggcccaaggcccccgacgaccggagcaggcactctgcccgcttgtcagacagtgccaggtgcccccgacccccagtatggcccgagggccactgcgggaaggccgacctatcgcc

SEQ ID NO: 8290 - DNA, 94 bp, Oryza sativa
cacaacggtactgtttttgagcaaaacttaaggcctaatttatgttattatgctgctcaccaccatatatttacatcctaaacctactaaatgt

SEQ ID NO: 8291 - DNA, 466 bp, Oryza sativa
tcatggcgatgcacgttgtgcactctccaatccaacgttctgttgtatatccatatgtgttcccagagtaatttgaattatttcgttcagcatagctaccactgttgagctgctctcaattatttgatgcacatccatatagccatatgaagcattatttggtactgccccatccaggaactattcgcatctacaaaagaaagaagagcgatcaaagttgaaacaataatgatcaacagtgctgactattcaggaacggagggagtatggaagtaatgcatctgcaaaataagctcacaatctttgttgttttcatgaagaagagagatatacgaactgtactaaacaaaaaaaaaatcctgacttctgagttttcagcatagtagcatattccgtattcgcattatgttctgagttttctgaacagaactattgggcaaacatcagctgtttaattcagagatct

SEQ ID NO: 8292 - DNA, 196 bp, Oryza sativa
taatgtttgttccgctggtggaacgatgtatgccccttaaggtatacactggtgatggctttttatcgaggcttggctgtaccagaagtttactctacaaaagggtgcatgagggcttgggtgcgggtctgaggccttctatagggttgagatttgggagcttaattctatcaaccatcaacagaaattctatacg

SEQ ID NO: 8293 - DNA, 358 bp, Oryza sativa
accgggcgcacgggtattctcacctcgatgagccgaaagtacacgccttcctcggcaacagcttcagcaacgacaaggctgatggggggtacctctacaccggcgccacccatcacatgactggccggcgggagttcttcaccgagcctgactctagccgccgaggctgcatcaagtttggggatgcctcccgcatggagatcaagggcggcggctccgtcaccttcaccgcaaagaccggtgagcacaggctgctcaccggagtctactacaacctcgtgctgaggaactctatcatcatcgcgtgacagctggatgagaacagctcacacgtgttggtcgagcaccgagtcatgac

SEQ ID NO: 8294 - DNA, 314 bp, Oryza sativa
ctgagctgctcattctcactagcatgcagcttagcgctgaccagtgtgtgtctctctgcgatttttgttcttcatcatcgctgcctgtgcctatctgtagcacaactctccatgatcctacttcggatgagtaagtcaggctgccttcagagatttagaagactcctgagcttaacttctgcatttcttaagcaccttactttttctgcccgagaagtgacgctcacattgggccacatcttttccattagaaacttatacttgggcctgttgctgtacgatgcagcgttctacacaacgggtgctatctgtgt

SEQ ID NO: 8295 - DNA, 413 bp, Oryza sativa
  unsure (1)..(413): unsure at all n locations
tgcagccctgcagtttgcggcacagagggcatgacatctatctgttaagatggtagntcaataggactacctcgaataagtgaagaagtatatttcaaatgaccagatcctgtcattgataactgtaaaggaagtnttatctgagatgctaatgccagcactgcattttgttgcttcatagattctttaggtcgtggtactacatctgcagtctccaacaatttatcagagcttggtttatctctgatttcatcactgtcattacatgatgccaagtcagcaggaattggcttttttcgagagggtatatgagaccctctaatgacaagcttctganatggaaaaggatcacattatatagagatgattttaatccacaacgagatcaaatatggagaaaaatanacagagca

SEQ ID NO: 8296 - DNA, 270 bp, Oryza sativa
  unsure (1)..(270): unsure at all n locations
ttgctctcatctcaagactgctctgctggaatatatggagccagtgatgactggacattatctcacgctactcaaactaattcangagtatagagaatacttatgtgctctatactatcgtgcgtgttattactaagaattatgatctttattccaacatacattactatagctcacgagactgctatatggtttcacgctaaacactgctgcgctactctactaattaaagagctgtgcactactgtctgcatgctactataaaccaga

SEQ ID NO: 8297 - DNA, 468 bp, Oryza sativa
tggtcaaacttaaagaaatctatactatggaaatatcttatgacttattatatgagacgatgggagtggatataaccgactaagtcactgtttgtttcagcttaagactattgtaatctagattatagaactagattacttaagttggattataataaacctatatagaataagctgctagctgtctgtttctctgaattattatctgttagccacccaacaattaaaaaaagcacctttagagtggcttaccagattataataatctagcttatgattataataatctatcataataagctatgtgtttatttcagcttactcctaataatccatattataataatcctaagctgaatcagacagggcctataacttacaacctactccctccgtttcagcttataagacgttttgactttggtcaaagttaaattatatcaagtgtgactaaggttatagaataat

SEQ ID NO: 8298 - DNA, 294 bp, Oryza sativa
  unsure (1)..(294): unsure at all n locations
ctatacttatatgtatcagcacaatgaaagggcactgtttgctcatgantgagtgggaagctggagaacataatctgaacctgttgggctttgtgctatgcgggtctttcttgtacagatgctgctttatacgttaactcacaaacattatgatctttttctatgccctctgggttagagcagtctcttaatggcctccctgagctgactgagtggaaaattactggaacacatcatttatgtacaatgctaaccaaattaaatgaaagtgctaggggatggtgtgcatctcta

SEQ ID NO: 8299 - DNA, 471 bp, Oryza sativa
  unsure (1)..(471): unsure at all n locations
tataaatgcaacacaaccaaatacaagaaggtcagnttatntttcttcttttcatttttccccctttttggtgagcgaaaatgttagtatttaccttcatatatgcatctatgtcaagatcaggggtaatcccagcctccttctcccttttaatcactgccttcatgatttctagtttatacaacaaagttatagcatttagttaagagtagctaaattttcatgaaattaaggtctttattacattgggtattaacttagtcacctgctctgctgccaacgccttgaaatcttgctgagaagtcgagcgtctccctcacagtcatatcagcaacgtgaaggtcatactgacttacataagctgatgtctttgctggaacgaactcatctagcttcacaccattgtactcaatttcttctgtttcctgcaatacagatatgcatagatactaaagttgcaacagtacacat

SEQ ID NO: 8300 - DNA, 238 bp, Oryza sativa
gctgcactactctgagctgctccatactctttaagatgccggatggaaatgtaatgtgaacagaaggattggatattggaacgatcacatcctgtggaaaatattcaatcaatttagaactgcgttgttctcaatccgtaggagtgagcattgccctattctgctacatattctctatataatccccatcattccgtactttgtggtattttatgcatgatactcctcaacattttct

SEQ ID NO: 8301 - DNA, 429 bp, Oryza sativa
  unsure (1)..(429): unsure at all n locations
atcgggtacttatgtatcgcgngccttgctcttgcatgattattatttcgcatcatgtaggtaaagtgtataaactctgcagagctaaaactaatcgattaaccgtgctcgcggtcatgaatggcgtgtggatatgtattgagtatagacttgtgtttattcttctaaatggtgaaaattatcttcaaattgtgatgagatttgagaatgatcttcttctgccatggaaggcaatgaggtgcatatttatacatgattaatgcctaccttgatgcccaatatgtcaagtactagcttgctgaaatttattttgaagtaaacctgattagaaatgttctatgcaaataaaacttactttatgctaaaaagaaccatattatgccttccttgaatattgtcgaaactagatttcggcaataataaaacggg

SEQ ID NO: 8302 - DNA, 426 bp, Oryza sativa
tgtgactgcagatcatttctaatatgtagcttggaaatgaagttttgttcagtgttcactggagcattttgtttaaccactacgtaagcagaaaatggttttcatgattacatgaggtatggccacttgggaagctcttgtgcccttctttgatgacacttttattcccatggcagatgacacctctggtgatgttgttgtacttctgaaaatagagtttcagaaccagcaagctaataagttattgtcggattcatctagttctgaagaacccatgaactgaacaaattaacagaagtggcaaaagaactcaccgggatcccgtcacgaaagcatcgtcagaagaaattctggcgaggccggccaacgccatccttgatcgcgtcggtcaggacggcagtgatcagcacagataacagaagccct

SEQ ID NO: 8303 - DNA, 389 bp, Oryza sativa
  unsure (1)..(389): unsure at all n locations
tagtcacctattcaacattgataggtgggctctgtcgtggggctcatatgaaagaagcgcttgaactatttgaggacatgatcgagaaggaccgcattgtgccagaccaactaacatacaatttgctcatcggtggattctgcangctatgacaggtggagaaagcacaatcgatctttggatttatgaggaagaatgagtgcgagccaaatgccttcaactatgccactttgatcaatgggcactgtaagaaaggggaagtggaggcagccaggggggtattttaagagatgattaaatctggggttcagccggatgctgtcagctatacctcacttgttggatgcctttgtccgcatgggaatgtggatgaagggatcaatcttgtg

SEQ ID NO: 8304 - DNA, 467 bp, Oryza sativa
  unsure (1)..(467): unsure at all n locations
actcagcttctgaaatagatcgatgattctttgtcacagaacttattttatgaattgcttcacataccacgtatcaatgaactaagaaatcctgtcttgactgcctgactccccttggctatttcattttgtaatttagtctgcttaacacaagcaaagcaataaggacaatcagcactgttaaaacaaataaaaaaattgtatagttcaagcagttggtgaatggaccttcaatgatattatgagttgttcaatatcagattgaatgatgttgattatgtgaagaagactgcgcactaagctagaccctttcatgtggaacaagtcctctatggcctaatacaagagagttagtacgatgttaaataacagagccacttgatatttcaaggaaaagcctttgtcatgagaaanaaattccaaggatatgttggtagctntctactaccttcaatgacacaatcatt

SEQ ID NO: 8305 - DNA, 176 bp, Oryza sativa
  unsure (1)..(176): unsure at all n locations
aactctcctaattgtccaatatgcctcctagtgcgctattctatatgataaactggtctgctttcatattcatgatngcttgaatgagatcgcatagcacataaaaccttctaattcctttcacctatgtttaaaattaaaaagtgagcactccacatggactgctaaagtaatac

SEQ ID NO: 8306 - DNA, 469 bp, Oryza sativa
  unsure (1)..(469): unsure at all n locations
tatcgatcgccgcggccgtctgctccaccggcaagatattgtttccttcatcggcgcaccgccgntgtctttgccacctcggccgtcattaggccccttgttgccacccgagacttcgccgccggccaagctccgcagtgggccacctcctgtgctaccccgcgcatcaccactaccgttgtgctctccaacgcctccagcctcgtctaggccggtggtggtggccgctgcggtctatgcgccgtgcatgttgctgccgccgctggcgtggccgggcctctcctcgccttggtctatctgtgcgccttgcacgtcgccgccgccgccacgatctctcccatcaccgaggtcggtggtggcgcttgacgtggtcttgccgccgncgccgactcgctctcctccgtagccgatgccactagccctctccttgtcgaggccaatggtagccgctgctgtatgtgcgcccctg

SEQ ID NO: 8307 - DNA, 264 bp, Oryza sativa
  unsure (1)..(264): unsure at all n locations
ctatctcatcttactgcgtaacttcgctnttcaaatagcattcatatgatgatacacctctataacatatgccatgagagagaaacacttgtagtcttcttatgaaacatcgatccgcttttacttctaatataacataatctacatgcacgagtgatctataggatcatatttatttatgagaagcttctatccactgaagtgttgtgtctagctgctactaggtgaagttactggataagggtaaaatatgccagggttgta

SEQ ID NO: 8308 - DNA, 444 bp, Oryza sativa
  unsure (1)..(444): unsure at all n locations
ccgcgcgntgttctctgttctttttaacacttcgatggcatgctatttgtgaatgtaacacacataatgcgggtgacaatgctgcttcaaaatatcaatccataagtggatctaatgatgatctagtcttcgctgacttctgttttcacacagtaatgtatcaaacaccacctcaagggtaggtttccttgctaaattaggtacaagtatgaaactttttttgatttatggagagttgactgctagcattcttcagagttggatgcccggctggactttttgttgctcaatcagatcgcgctactggaaagcagccactataaggtgacacacttacatcaagaaaaggtatacagacatgcatgtgtcacttatccatgctatgcctgcgcatgcaaatatgtcagcatatacattcgcacaactttagctctcgagtatact

SEQ ID NO: 8309 - DNA, 359 bp, Oryza sativa
actgactatatttctttacaatgtcaacaaattactatggtgcatctgcaggtatggcatgcctcgctcatactagagagactacagcgcgcccatcacaacatactacaactgtgttggatggtgtgacccacatcctgctcgattaacacttgtgagttgacagcttatagataacaccttgcgctcacacagtacgggtcttttgtgaagattcatagaccaattctctaaggatttgcagaactcagaagaccctatttcctactgtattgttcactgtgacattttctcgtgactgaaatgaggcattatatttacttccacagaaatgttttttacccatttagtagtttttc

SEQ ID NO: 8310 - DNA, 459 bp, Oryza sativa
actcagcttctggaagcctttctttgaagtatacacgggcaggagctgttgttctgcttctgttgtcacgtgccataagcaacatctatgaattgtaccggggaacacctttttaatcgctgctctcattgctttatctcggactgtcatcactgaacctggcttctgtccattcattgctcgcatccatgttttatagacccatatgaatgtttcagttgtttcatcacaaatcaaagcacatccaagcaatattgtttgcaggtggttattatttccaacaatgggtgcaaatggcatgttgtaacggctagtcattaaggttgtgtcaaagaagacacagtctctatagctttgatacagtttccgtgttctgccatccacccaaaacagcgccttcaacacgttgtcctcatcatatcttgcagcatagaagaaggaggggttatctgcttgagt

SEQ ID NO: 8311 - DNA, 267 bp, Oryza sativa
  unsure (1)..(267): unsure at all n locations
tcttttgctctacttgtgctcaccatgttcgatntgtagaccttttatgcagatctaagataattttggagatatcatttagcaaaatattagataagctttccatctgttattactcccgcaaaatcatgacatggctcatttggcaaataaacaattttatctgtccatcctgtagttgatgacatggtactgaaattatgtaccatcagttgcaagtaaacaatcaaaccacctcagagttcaaaagaggatgaggttcatcct

SEQ ID NO: 8312 - DNA, 173 bp, Oryza sativa
ctactatagttatatatacgtctgttctactctcagatcaattatatacatcatgagctgatatattgctatcacactcttctgtgatattatacacataatgcatacatgtgttatcaaacaatatgatggaaacaaagaaatactcattgatcactgctactatcattaac

SEQ ID NO: 8313 - DNA, 458 bp, Oryza sativa
tatcgtctcgctgagacggcctctgcctctgtatctctctgtataattcagctcctctggctctgtctcatgggagagaagaagattatccttgtttgggccatgcgacagaagaagattagcccttcatctcgggcctacgaacgctgacagtgaaacagcttttctccggagtaaacacgagctggctggctgagacctgggctgtgtttagttcagcgtaaagtttagattttggttaaaattggagatgatgtgactgaaaagttgtgtgtgtatgatatgttgatgtgatgaaaaaggactgaaatttggatccaaactttgaatctaaacacagccctgatgagatccaaggccctcaccattggacgatgcatggctacaggaaatggtgggagcccggatcggacggcgacgagacagcgtcgtgctttacgggctggtactggccgtct

SEQ ID NO: 8314 - DNA, 437 bp, Oryza sativa
  unsure (1)..(437): unsure at all n locations
taacaaaacatcaagcaggtacccaagatagaagccttacttttttggtcgtctccaacaagcatcatatcaccctcattatcagtataaacaatttgccagtctttgtttgaagacaccaattcaccatcgaattcaaacatcttgtctagctcagctttgagttcatcatagttactgaactttgaaagatccacagatctgccaagtgcaacgccttgcttatggacctgcatgaagaatcaatgacatgatgttattacatagtgcagaccaatagtcaaacttgacacactcatgctgcactgaataatattgctcatgattnttttttgggacaagaaatagcaaaattgggtttaccataccacaaaggggataaaactgagattttgcaagaaatttacaaaacgagaacttcagcatgtcaactacga

SEQ ID NO: 8315 - DNA, 263 bp, Oryza sativa
cttacctactggaggggttggttgctagacatggaaactctggcacaaacatctaccgtgctcttaaatgccgtgagccacagagcaaggagctcctgtcctacatgagaattctatacaatatcttgccttacttcaagtttggctatattgcaaccaatggggcgattgcagaagcattgagaactgagaacaatatccacataattgattttcagaatgctcaagggactcaatggatcacactgatacaagcattagct

SEQ ID NO: 8316 - DNA, 410 bp, Oryza sativa
  unsure (1)..(410): unsure at all n locations
tctattctcagctctgcaccgtaccgtgactcgtcaccagtctttattctatcgaggtgggtgaagggtgtacaaaaccgctcaccgcacagttaccacgcggntaccgtggttatcacgtgcggtaaccttttcagttgttgaaaccacggaatgtctcgcggttatcacgcggttttcgtggtggtcacacggttaccgcggtaaccgtcttaccatggggtgcggtaatcgtgtaaaaaaagtaagagaaacctggttggatgcacgcgaatgtctgagctactctaaacgcagactcgccctgccgctgtaccactcgcactgtgccactgtcgataaagtcggtactctcagcctatactgatcaactgtcaatgcgaggataacactagtagtaactacttcta

SEQ ID NO: 8317 - DNA, 220 bp, Oryza sativa
gaccaaacatctaaacatttattattataacttatacaagaagtatggttctgaaggcattgtcatttgtttttcaggctctggtttgcacacatttgtattgtatttatggcctcatattgccctctttacaatcaaagcagttcattgcggtccgactgatttaaagagtgctccttatgatactattctccttaaaatgagaccttcatggttggag

SEQ ID NO: 8318 - DNA, 473 bp, Oryza sativa
gaccttgaatctcagctgaagagccgagatgaatcccatgccgtactctctctttcttgctgatgttttcaataacaacggtctgagttcacttgatgctgtcgaaatcttcgacaagctgagagctactccggatacatattttaagaacatcatagaagctgggagtatgggaggaggcctaccgctggcgatgaccaagtacttatacccgagaattgatattgatgctgttgacggctttgcagacgggacaagtgaacaagccgcccttgacctcatcagtgatgcgcaaaaggctgctgacaagataaccgctgatgtacttgagagattccatgacaacaatcttaagccgactgagtctgattattctgatgatgaaagaactgcagctaattgattgtgtattctgatgatcatgatgatgatgatggacgcacaatttgtgcaatactgatcaagttatgctg

SEQ ID NO: 8319 - DNA, 236 bp, Oryza sativa
  unsure (1)..(236): unsure at all n locations
cactgagctgcagctaacttacaggtcttctcttatgggaacttgtttttgctatacatctntcgcacataaccgattgacaatgattgagattacaacactgcaaccagtgtgttaaaccaaatgcactagacgtttgtttcacaacattttaaggcagtcttcgaatgaaaaagtctgaattacaacgtgctgcaacagcaaaggagatgcctgtagacaggattcttaaacta

SEQ ID NO: 8320 - DNA, 362 bp, Oryza sativa
acctattatactcagcttccagagatccatgagtgtcctctatacggcttcttctttttctagaggacaaccgtcgcagaaaacgcaggttaaatgagacaggctccatcttcctcataagcccttgattacgacgtgaaatgtgctccaccgtttgagtcgccctcattatcgacacatagttcaaaccttttaggggcctcatcatggatatgcaaagaaggtggctgtgtgagatatgtgatagtgaaggtaattgattgcccatatgcggagtgcacagactgacttagatatatactatcagatacagagaccggactaagagcagagcccacgctgctctattcaggaaagtgaca

SEQ ID NO: 8321 - DNA, 395 bp, Oryza sativa
  unsure (1)..(395): unsure at all n locations
gatcttaagcacctgngctgcngcttcacttatgcttcgctcgatgtgtgtgaatgtagcgatacaattacacngaacagtatgaccatgatacgcaagctattatgtgacctatgaaactcagcttataaatggacaattcaaaataaatattgaaatgtgtggaagtatgacatatagtatctctaacttgtccggcggacaattttttgtatacataaaaaagggggatcaaatatattgtacaaagaaaccaatgtctactaatgagtgttgtcatgctaatatttctttcgtcatgaataatgcaaggtgatctagtgaattccaatgtcgtatacataaactgatcaagtgattgtctctgcacgatagactgcagctgacatataatc

SEQ ID NO: 8322 - DNA, 207 bp, Oryza sativa
tcgtggtgcgcatgggcctggacattacctagtaacgcactaggccttgtgttcgagcatgtacaggcttacttttgggccatcgtacatgaggtgtgggggacctcttagtttattattttaacgaatggagataatcaaggagaagccgctgatgctgggatacacagtgccatcggcgtcagatgaacaccttattcactcatt

SEQ ID NO: 8323 - DNA, 459 bp, Oryza sativa
  unsure (1)..(459): unsure at all n locations
tcaccccttcagtattgctatcgttatttacatatacatgattatatgggcctctagctgatgggccagcacacaaacacacacacacattattctatttacagcccaacaggcaccaaggtatgaaatacacaaattcactccaaaattttaaaatatatgcaaacataatatgtgtgcaaatcgaccaggtctttttcctgcttttcaaatgtatttctaacttaagccctgcatgtttggatatccacgtgagcacttcagttcagattaaaaatctcggagagctttgaggtcttccattttctctacagaatgctcacttcgtcaagaatntccccggcgtaaagcatggatgggctgtgagatacaatcacgatgatgcagcttgccgcaagagcgctgatgaagcctggaagaatgatggatggttaagaaatactgagtaaatctgattac

SEQ ID NO: 8324 - DNA, 198 bp, Oryza sativa
aaaaaaactgggtcaaaaacatacccagcacgtgtgtaactgaacgaaaaaacaccgaaagcaggaccggatccttttccgaaaagacggccccaccggtaatgaagagcaaccctgaaaagaaaacaaaaaaaggctcaacagcgggagccccgcttcggcggaaaccacgcggaagcattccgcgacaaaatgaaa

SEQ ID NO: 8325 - DNA, 250 bp, Oryza sativa
agtagctaagctgtgcttttcatcctgcatatgatgctcttccatgaacggaaattacagtttaagcagccacaccgtgctcgccatatggtacctcccaaaaaacaaatgctgacttatacttaggtccgaactctggaacggcaatgatccatccgcttactgaaaatacacattcagtcatcttgactaactttttttagacttacttgtaacagtcttctcatacacaggagttttcgttcatacc

SEQ ID NO: 8326 - DNA, 302 bp, Oryza sativa
gcttatagctaactgattagctgcacctgttgccgaggatggcgtggaggttgaccattaggaccttctcctgcggcgaagaagcgccgcgcttgaggtcagggcggaggtaattgatccaccggaggcggcagctcttgccgcagcgctgcagcccggcgttcctctgcacgtcggtccacgacccctgcccgctccgcagcatgtacgccaccatcttctcgtgctcctccggcgaccacagccccttgcgaaccttcctacacaccactcgcgcattgttccttccgcacagccagaac

SEQ ID NO: 8327 - DNA, 471 bp, Oryza sativa
  unsure (1)..(471): unsure at all n locations
tcacggccggctgaggaacagaacgctcaattccctggtaggtatacatgattaattagntttctgcatacatcaatttgcttagttttctgcatacatcaatttgccggatatgatgtagcagatcttgttataacttgaggttgataagtgctttgaaaagggttcttaattttcagtcttctatgcattcttctattacctcaggctgttttgtttgctatgtcctatgatagttttcaacttttcaaatttcaaatccttataaagattaagagaaatctttatcttctgattttccttttctactactaaggctactacaatggcaatccggtcagaccaaatgatgctaagggtgcacagaggaatgaaccgggcttctttaagaaactgtaagctgcaattcgtgtacagaatatcagatgcttctgtctgtagttacccacngatttgtttttctctttgcat

SEQ ID NO: 8328 - DNA, 298 bp, Oryza sativa
  unsure (1)..(298): unsure at all n locations
gctgcactcattaatacaacgtccttcatatacatgactatatgtcacaatacatatcgtactaagactaacatgatctctgacttgagtgatattaggatgctatatctttataatggatacatgtgtgcattataattcttatacatattatactgctatgtcacagatggaaatatataatcagttttgaagagcatcaatgatgcacacatacacattttagtacacattactatactgtttntattaactgcaactaaactcttgtactatgaaggcctagtagtatatatta

SEQ ID NO: 8329 - DNA, 468 bp, Oryza sativa
  unsure (1)..(468): unsure at all n locations
taacgtgaactaacggctgtatataaggagatgtacatatgtttgttgcacaatatgcatggccagaccggctagaagacacttattagacgctcataacccttggattccctttcatccctagaaaagaaaatccgcgttcccttctgttgctttttaagttgcttctgcttcatctatatatgtccaggatcccttcttgtctgtatatccaattttaagcatggttggcgctgccgtgccacctacataacgtgagttgaattgatctttctttctagaggtgaatttgctctgaaattttggtttgctcttcaatcatcatagtggccaataaatccaagttgctattatcccccccccccccaccaaaaataataatccaagttgctaattggaagcccacgtcaacatttaggctgagttcgttntcttcctttcacagcccacatgacccccggtgacctg

SEQ ID NO: 8330 - DNA, 254 bp, Oryza sativa
tgcaccgccattttctgaggcgcactccgcactttggaggcatctcaatcctgtcagttactccctcgatacaactcccttcccaaactcctggataccattgggctgtttctaactaagtctgtgctgggcgcagcaacaaattttctactggccactttagtaatactgctgcccgtcggcacatactatcttcccccttactagagtgcgagacttgccagacagtctcactagcagtcagtgcctgaata

SEQ ID NO: 8331 - DNA, 353 bp, Oryza sativa
caccggccgatgtctgattaatgcacgggggtacaatagggtaataatatataggggtttagatttgcagacaacagcatttaaaagtcactttattgcccatagccattttaaaaagacgatcctagagctacacagtattattaattaaggtcgtgaacccgcacgagcctgccttaacccaaggtctacgatgattcagaccgaactggcaacccgaccctgggtcccagcttgtgccaagccaacccaggccaaccattccacattttaattgttgagcaaagtttaagaagtaaaacactaacttgggtacatggctcggcttgccattaccgagggcgcggctattc

SEQ ID NO: 8332 - DNA, 328 bp, Oryza sativa
tggatgcatgagcatggcaacgctgccattcccggcgagcctttctttgcatcatgtcgacggcgtcccatggctcaccggcgccgccgtcgtcctcctcctcctcgaggcccaagaacgccttcagcccggacatgcactcgcggagctggtgctcggcggccggcggcggggtgggaggcagcgactacaccgacgaggagcctgagctctcctgctggtggtggtggtggtggtggttcaccgcagcggcggctttgcgtcgcttcttgggcggcggtggcgctgctgcagctcccattgtctgtgggaagttgagcttggactt

SEQ ID NO: 8333 - DNA, 392 bp, Oryza sativa
cggcaatgttcaattggcgcccgccaccgcgttgtattctataatcaaaccatggtcgctccgaggttgggctttggactttattggtcaaaattatccttcgtcatcaaaagggcatatgttcatgctatttgctaccgattacttcaccaagagggccgaaaccgtgcctctcaagaacatgactcatactgaggtaattgactttattttgaaccatattatccataggttcggtattccacaaacattaactacggatcaaggtgccttttttatgtctaaagaagtaaagagttttgccgaatcctatggaaataaatctgtgagttcttctccttactacgctcacgctaatggacaagcccagtctaataataaaacattgttga

SEQ ID NO: 8334 - DNA, 444 bp, Oryza sativa
acccaaaatcttcatagactgcgatcattattcaatcacacaaaggggagttccttcaagaatgctctgcaggacaacatctttgctaattaatgtcaacagaactcattaaggcatagccaacctgccttgcagctcacgagagtacatgcatcttcacttggagaggggatatatattgatactctcctctagatactaaaggtttggtcttcccaggatctaattcacgggatctccgatcacatagactgggttaccaccatagtataactcatatgggtctcaaacccatctccttcgatgcattgtctatcacaatttcgcgataatcccttcgagaagggatccgccaggatactcgctgtttggatgtaatcacacattataactccggagtgtcttaatatactaacagacttcaatcgcctttcacatgtctag

SEQ ID NO: 8335 - DNA, 460 bp, Oryza sativa
  unsure (1)..(460): unsure at all n locations
agcagcaccgatggaacctttctgtcgtgcaagcgtttattcttttgtctcacaagcatgaagttgacctggatacaacgcttcttaacaaacgcactctgatttttagcgaccaatgtatccagcctcacaagcattgcttgattacatggctgcgatggtatttaaaataaacaattgtacatgttcaacacaagtaatttcagctatatgaccaaatcctctgtctctcaataaaaacaagattcagggaaaatatgaactgaacttcatgcctaccctaactgaatcctcccgtcgatggcgacatatccttggtgatgaccctggccagagcccagctggggcagcgactgaagatggcccatgggttgggtatgaaaatatgtggtggaaaatgcatatgtagtgaaaagctgaanactattgttggatcgaanaatgaattgtctaaattcgt

SEQ ID NO: 8336 - DNA, 352 bp, Oryza sativa
gacggagctaggggtatgttaagccgatctggctgcatgctgcggacctgcagtctaattgctcctctttattctggcacactgattctgttgaaaactctgctgtgacgctccactatctggactgtcaaagctgacattatgcatgagtgaccaaccgtatcttctctggatatgaaaactctgacgcacgttatacatctcatctactgctatgtataaacgctttgtgggatgggtagtcatactatcctctaagtgactacttgcatgcattttaaataattatttatatatatgatatttgcaagtcttttttaaagacccataggaatacgggttgcctttcagg

SEQ ID NO: 8337 - DNA, 331 bp, Oryza sativa
ctgatggtcttcctctgattgtgagtatatcacaatgtcatcgatgaaaaccacaacgaacttatccaagtattccatgaacactttgttcatcaagttcatgaaaaaggcaggcgcattggtcaagccgaacgacatcaccgtgaattcatacagcccatatcgcgtagggaatgcggtcttcggaatgtcttcctcacgaatacgtaattgatgatatccggaacgaagatcaatcttggagaatacagtggcacctttaagctgatcgaacaaatcatctatccggggaagagggacttcgttttgatgggacttcattgaagctctg

SEQ ID NO: 8338 - DNA, 395 bp, Oryza sativa
  unsure (1)..(395): unsure at all n locations
ctgcagcttttgtgatgcgtgctggtagagatgtaaaataattcctctttgctgtttatcttcaacatagcagaagatcatatctgtgaagagaatatatctaagcttcagctagtagatttctgctcttgtttncttattatatcgtgctcgaatacanatgttgatccattnacatcacaacttataacttatctgtggatggtctgtaagaattgaatatactattaaccangatctctattctaacgaatcggtcgaggtgatacaaacgccaaacttcgtatcaaaaaccactgcattgatcgtcgtattctatcaggataatntatttaatgagaacaccatatctaagatacccaaccatcacgcttgcattatctttgtacacttgc

SEQ ID NO: 8339 - DNA, 385 bp, Oryza sativa
ccgccgccgactggtgtttccgcctgcacggctggcctattatgctgtcgttgatgggcgtctacgtattcaccgaccggcttgccttcgccgccgccgactggtgtttccgactgcacggctggcctttatgccgccgttgttgggcgtatacctcttcaccgaccggcttgccttcgccgctgccgactggtgtttccgcctgcacggctggcctttatgccgccgttgctgggcgtctacgtcttcaccgaccggccgactcgtccgccgccgactggtgttctcgcctgcacggctggcctattatgccgccgtgttgggcgcctacgtcttaccgaccggtctcctcgttgcgacactggtttctccctgacagtggcta

SEQ ID NO: 8340 - DNA, 149 bp, Oryza sativa
  unsure (1)..(149): unsure at all n locations
tacagacacatacagttaatcttattctatattgaatctaatatgtatntgagaaataacgtgacggatatttatatactataagattggcgtgcactcattaagcacaatttatatatcattgaatatatattaatataatacagtac

SEQ ID NO: 8341 - DNA, 407 bp, Oryza sativa
gacactatagaaactcagcttggattagcgtgacgaaattacgcagaagatgcgtgttttttttgctcaggcgcaccagtcgtacacactggtcggacggaggagtcgtacgtatagcagggttgtaactactatttgtaactgcactataactatcatggaaatacagcactgtgtctatagaaactatgagataggggaactactatataactattgtaactggaatataatgtgatatatacttcttactacgactccgttatgaaacttattcagcccatgtcgagtttgtctagtcaaatgtgtgtggtggagcctaatctaataaggattgaaaaatccttgtgatgtgtactctaaaatatatcgaaagatatctagctagttcctagctattaatgctt

SEQ ID NO: 8342 - DNA, 434 bp, Oryza sativa
  unsure (1)..(434): unsure at all n locations
tctgtatcgctgataacaaaccggcgtgtcggtcatgcatatatcacacattngggctggtttcaacaacacacattttaatgtgccgcaaaaaccataaccagcttgatgtgttctcgctttcaacaaatgcaaaagcaacaggaacgacatggctatccgcgtcgactccgatcgcggttagaattattcctctgtacttgcctgtcatgaaagtgccatcaacacagagcaaaggaatgcaatttctaaaggcctctatcatgcacccaaatgaccagaaagcccgacgaagaacattctccccatattcattcacctcatcgagaatagccatgtgtgtgcccgggtttcttgcctgcatcacctccaatagtgggggaagattgtgataagaatcctcataagttccaaacctcatcttcaatgctttc

SEQ ID NO: 8343 - DNA, 281 bp, Oryza sativa
  unsure (1)..(281): unsure at all n locations
gatcttacacgcgctgcactttgctctgacatagaagtcgactgaaactaatattcctcactggcctgcaccatntcacttgtataatgaaagagcggtaacaccacattatatctacagtctggacacataaccctgttttgatgttcccttccaacagtttttgaactgaatggacctgcctctttcangatcaaagtgatgtacaacattttcttagcttatggacagaaaattatgcattgggtggaatatcaatatgtaacaagtcaaaacaacat

SEQ ID NO: 8344 - DNA, 391 bp, Oryza sativa
  unsure (1)..(391): unsure at all n locations
tgacgacgaccctgtcgtaaagcttctcgtccttcgtcttcttccgctccaagaatcgcttggcctcgagcggcgacacgtctcccttgccttgnggctttgccgttgccgcagcgggaaggtgatcggcggggagctcgatcttgtactccggacggacgaaggtgttgaactccgcgatgaggtccgagtggtcgccgaggagcaccgccgcgccgtccaccaccagggaggtggacgcgttcgcgtacttgccgtactcggtgaggatggtctcgagccccttgtagacgcacggcttcaaccagaagcggcttctcaccttcctcatgaaggcgagagccgcgcgggtcagctcttctcggttcgccggcgccggcggcgacgccat

SEQ ID NO: 8345 - DNA, 482 bp, Oryza sativa
  unsure (1)..(482): unsure at all n locations
ctcaagcnttattngactgaccacttaccactgcctcagagtaggtcgttcattccattctttgcatatgtagcgcgtaacacatcgataccagaatcctatcaagaaggccgaagtctatctgtgcagaaactatataagaggatcgaagtacgcactgatcactactactctctatatataggctttgtgaaaactcaactacatacaatgcgagtgcccagttcatgatagttcgtgaagaggcacatacaccattgcacttcactagctcgtacaagatgattgacaaatgaatggggatccgttgggaaagcttgacggggaagtcattattgatacttcgattatgctggctggttaatcgaccccttgtccctgttcggatccccatagagaacaatagtcttgcacaactcttgatgcaaatgcacgcagtcatgaccggtcaatgatgctgttaacatggctttacctacata

SEQ ID NO: 8346 - DNA, 138 bp, Oryza sativa
  unsure (1)..(138): unsure at all n locations
cacagttacaaatttattatagtgtcatcactgcagattgaacatttcatacctcanacattgtcaaggatcaaaaagagtggactgctgatcagaaatacactaatcttttacgatacatctttcaagcacgttcat

SEQ ID NO: 8347 - DNA, 457 bp, Oryza sativa
  unsure (1)..(457): unsure at all n locations
gaacaagacagaagggcacagagaacaaccctctggattgtctctgtgaagataagaccagattatgccatgtggttcaattctcttgcagcattccacctgagtcaaaggacttccacagctacatgggagatccttgtttataaagatttgcacgtcaagctgttgcagcattcttctgtaaacgcgcttttgaacgtcactcattctgcagaaaacaatattatcctcctttccaagcatgagatgcccaatggtctcttcctttgttcttctcaacagaaatttgctaagaactgaaacaaggtgcttcttgcgcttatcagcaacttgtacaaatctctcangagcactgaacctctggccatgttttaaaggctcgtcataatatactcgaaagtgttctcgatcccncaagcaaccaggtacaatccagtcaaacagattaaataattct

SEQ ID NO: 8348 - DNA, 427 bp, Oryza sativa
tgtaaccggttggctgccgtgtgtcgggtcaccccgtgtccatatggttggcaagtccttggggcacccctacacactcatgcacggtgccattgccgaaagtagatttcgttggtatattggacgagcttcttgaagatatcgataaagaaggagttcatgataggcatgactttagacgagacactggtacacaccaatgcccgcttatatactttgaagtctccatattcttcttgaaaccttgaaggtgtagatcttgtagtgcttggtggggcccacagcgccatgagcacctatggggaaagggaacccttgtttccacttctccgacaggtggagctgggccaacaatttggtaaaaagtggctatagggaaatgtataaataatctgatcattcttggtgcatggactatattgaagca

SEQ ID NO: 8349 - DNA, 197 bp, Oryza sativa
  unsure (1)..(197): unsure at all n locations
attcttcgcaacttgaattcnatctcgtcagtaaccacatggctttatgagtatcagatatcgcactcactcgcgacatctccggactttgactcggaaattcgcaagaatacttgagtgcgattcaacactactgctaccgacgccggtagcagtatgcgtcgctccaactgagagaagctgtccagagctacctc

SEQ ID NO: 8350 - DNA, 362 bp, Oryza sativa
tgccacagttgcggcaggcgtagtctcgtgccggcttgtggttgttatctgcgccgccctgggcgcctctgcgagcgccaccctcggcgcgtcttcacgcccaccgcagctggacgcctccgcgcgccttgcgcggcttgcggccgcctatcaagggagaggactcccccttcctcccgtcaccctggctggcctctcactgctcccgagtgagatggagcttcccgccaatggtgataggccccgagagaggctgtggctcatcgccgtcgacgaccttgaggcgacctaacgcctcctcgatcgacatcgtggagaggtccagcagagactcgagcgatctgcctgtacttctctgggac

SEQ ID NO: 8351 - DNA, 439 bp, Oryza sativa
  unsure (1)..(439): unsure at all n locations
tcacgccattatgcacggacgccgcgcgtactacngttctttgttctggtgncggccggcgacctctcaccctgtctggcaccggagcgggttctatcacgccggcttcttgccaactgcacggctacgtcctcctccgccctcaaacgcagcaagatcgcggccaacgtgacgtcgacgtggccgtcgccgttctcgaccaccgtcgcccgcatcgtcctccagccgccgccgtacagctcgccgaggatctcgaggcactcgcggccagggaagaggtcctccagggcgccgcgagggtgccgcgttctcgcgagctcctccgcgcgcttgatcgtggcgaccagatacgagtacctggcgtggaactccaagatcttcctgaacgtgacggcggcggcgtggggggtccgctccatgacgagccagaacgggtcgc

SEQ ID NO: 8352 - DNA, 382 bp, Oryza sativa
  unsure (1)..(382): unsure at all n locations
gagatgactgtgtttattagtagtcattctcctagcatgttatatgcttattttgattatggtaagggttatagcctacgctaataaacttcttaattaccatgatctttatcatatttgggggatcattttaagagtttcttactcggattcctaccaaatatatctatttttggaccttttgagtgtttatcactcggcccttcttgtatttttttgtccttggtatattcaagttgagaggcagtcggctgggtatcttactaagtaccatgcgtgctccgctataaaaccactcggttcttgactatatgtttagttnttcaactaatcacatagtcggnggctacacctaattangtgcatctactcgatgcaccat

SEQ ID NO: 8353 - DNA, 390 bp, Oryza sativa
  unsure (1)..(390): unsure at all n locations
tcagccaacanatcanaagaagtaatgatgggttggttttcttttacatgattcacccaacaagtcaaaagtgagagcacttaaatgctttcttgggaagggctaattcacttcaaaaagttgcaaaagggttggctgttggtggaggcagcaataaatgcatttgggggtggctgatgtggtgatgaaggggctgctggttgtggtggaccaaatttggcggcgttggaggtggatttgtggtgaatattgtggtgatggtggcaaccggatgaaaataaatgaagtgatggtggaagtgtttgtcgtgaccaaatcctgagcagaactcgaaactctagaggactaaactactagaaccagcaactcaccagtcgatgcatcaaaact

SEQ ID NO: 8354 - DNA, 403 bp, Oryza sativa
  unsure (1)..(403): unsure at all n locations
tcagctgactgccttgntagacacatttatgctcacggtaattcttctgtccacacttaaaacataaaccattagcccgacgataatccttcagttggttggccttccataagtcccctttttcaaacttcacaggagatgtgtcaactgaaacaatagactgatcaggtttgttaacaatatgcttaaactgcaacttcttatgagacttatgagactgcatagatagcaccttctcctgagccaatgccacagcagctgcatgggaaactgtacttggcaatgccactaaaatagcagatcanatcttctcctttaaccctaacataaaccgagtgaccagcatcataccctcataagcaagatcaaacaagcgcacttggtacacacaagagtcaaaagc

SEQ ID NO: 8355 - DNA, 437 bp, Oryza sativa
  unsure (1)..(437): unsure at all n locations
ttggatntagcttgacgaaattcaggcagaagctgctcgtttctacgtgctcaaccgntccagtcgtacacactggtcggacggaggagtcgtacgtatagcatggttgtaactactatttgtaactgcactataactatcatggaaatacagtactgtaactatagaaactatagtatagtgtaactactatataactagtttaactgtaatataatgtgatatatatttcttactacgactccgttatgaaactttttcaacccatgtcgagtttgtctagtcaaatgtgtgtgttggatcctaatctaataaagattgaaaaaccttgtgatgtgtactctaanaactatcgaaagaatactaggctgntcctagctattaatgcttggtaatcacatgcttccgccccaattgcttgaataaaaacagcagac

SEQ ID NO: 8356 - DNA, 449 bp, Oryza sativa
tttcaaaggactgcaccttcaacatactgtgttaaaactctatacagaaaagatcctgctgattcagaggctgtgttggcagcagcacgtgaaaaaataagggtgtttcagaacactatttctgagtgtgaagaagtggagaacgatgtggatgatgctgagagggatgaagattctgagtgtgatgatgctgacgatgatcctgatggtgatgaagtgaatattgaggaaaaagatgtcaagacttccctggttaaggcacaagatggtggcatgccaactgcagttggtgacataaagaaggaaacaaatagcatagttaactcattaacgacaccactcatccacactaaatcttctgagagtagctcattgcgcactctggacaagtcttgtacaagtccgtactacaagtgatctaccagctgaaatctcatcggattatcatg

SEQ ID NO: 8357 - DNA, 312 bp, Oryza sativa
ctcttccggagcgtcagaccgcgagtcgctgcttctttttttctctaccgacagagaaaccagccgtaccagcgccaccaattatcaagactatggcttgcaagactcttcgcgagttcgctgctccctctgctgacaatgtggccattgtgccacagatcaacatgggagacatggatttcaatttgaagtccagactcatcacgatggcgcacgctagcccattctgtggcaagcctaatgaggatgccaatgctcatctgcaacagttcctggagatctgtagcatgtacaccatcaacggcgtcagtc

SEQ ID NO: 8358 - DNA, 469 bp, Oryza sativa
  unsure (1)..(469): unsure at all n locations
ctagagggtgggggggagttacagtacgagacanaatanaaggctctgttctatggatgatggngacatgcatgagcattgagcaagcatggcctcgtagagtttgttggaggagtgcaacaatctgttaaaggcgcgtgccaagaagtcctcctatgattatccgcagccagccggccggtattcccccacgtgcgcgctcatgcgatcagccggcatatccccacgggagacgggacaatcccatgcaggatggatggagcagcgagcgcacggccacttcacgtctctcctccacgagagctgcacagtaaaatatcggacgccggcgaggcgaggcgaggtgtacacatacnggtgacgcggtcggacgacgtcaccgggacggagagtcaaggcaaatcatggtcatgactcatgagagcttcagttggaacttggaactcggtctgaacgcaatgcagtttca

SEQ ID NO: 8359 - DNA, 238 bp, Oryza sativa
tgacttactgtcctgcactgcgtgagatacgacagtatgaaattcctgtcactgcaattaccccattgtgacaacatcttgaaggttcatgagaaggtcaacaagaattgcttgtcgctaccactcgtgacgatttgtatttgactattctgacccataacacaaaataataattccacatcattaaacgtagtccgctgccgcacgctgcgggccgcgctacatactaacaatcgtc

SEQ ID NO: 8360 - DNA, 315 bp, Oryza sativa
atactaagcttaatttaccgggaggagtagcacgcctagactatgtattgactctttatattcaagatcctcgcactttcatctctttcaaatctcccacatgaccaggttgatcgctgaacgtacgttcttttggtaacatgcctctactgtggttgccacagtattctttgatagatatacatatttctctagaaaatgcaaaaatacctagcattcgcatccgaacatgatgtacaccgccaattctttgatcctagtgatgtccttttcccgagagtgtgtcccgaattctccaactgttgtcctcaccct

SEQ ID NO: 8361 - DNA, 276 bp, Oryza sativa
  unsure (1)..(276): unsure at all n locations
tgatttcggatgcagtgtaaattgattaattangagactgaccatgggaagagccctcttgagatcgtatggacagcagctagtacctctgacaatgacgcaagaatcaagtcggccacaatatataccctcttggatgtgacatagtgaagtcataatcgactgggacttatgtaaacaccttttgtgatgactcttatccacaagccatgcagagatcgaagacgtccaatggtgtatttatgcctgatacgcaataactctcgtgatggtgaa

SEQ ID NO: 8362 - DNA, 303 bp, Oryza sativa
  unsure (1)..(303): unsure at all n locations
tacctcaacaccaatcgcacagaacatgatcgaacactaaatggcgaaaatgttgatctgtttgagtggcggaaagaaaaagaaaggactcttcctgtgctagctcactttgcacgggacgctctattggatctggcttactgtgtctcttcagagcatgcattagtgagggtggaagaattatccaagaatggaggtcatgccttgcacctgacatagttgaggcaatctnttgccttaaagacttgattgaagcatatgccaggacgccacaccggctagaggatcccgagattgtcgacg

SEQ ID NO: 8363 - DNA, 293 bp, Oryza sativa
  unsure (1)..(293): unsure at all n locations
atgtgtatgcgtgaaatcgatcctcaccctggagatccccgcatgcactgattaccgcagaggtcgcaccaagaccgcatcagcatatatttgtgcgctctctcgtgtattaactggaattgcattgcggcatttagtctggcatctctaattatccacacncatgatgcgcgatttgcatcttcattggtatcatcaagtagatctatcatgatattatcttcaaatcttgactactattcttatcgtgatacgcaacgacctacacgcacatatcatgcgtgtcttctgct

SEQ ID NO: 8364 - DNA, 432 bp, Oryza sativa
  unsure (1)..(432): unsure at all n locations
gacctatgatactaagcttcttattcatttatacctanagtcttngtaatcattctcatgaagtgatcagaaggattcctcctcaagggacatgggaagccattagattcgaagaactaaaaacacacaaagaaaggtcaaatcgtgagcagtggacctatttaagcatgcagtgagtgatctacagaaaatatttacaaggtgccttcagtaattattgattaggattttcttccattttgatctataactccatatataaaaaattgaactaccatttgtgtttgactcacaccaaattgaacattttaaaaaaatggtaatatatatccaaattttggccaatcaaagattcttcttgaactccaactttcacctcaaattaattaatctctgtctgttntcacactcaacttgatttggaaagaacat

SEQ ID NO: 8365 - DNA, 385 bp, Oryza sativa
  unsure (1)..(385): unsure at all n locations
tcttttcagactcagctntggctcgagatagtcgactccttattatggcattgnactgttttgcattaacatagacaggctcttcaattgcatcggtaggcagtggtagtccagctggatgcatcccgaccaatggtggatgcatctgaaaaaaggaacatcacaaaaacattttaacagagagtggaagtagcatacaaagacccacaattacgtaattgtttttttttgtccggatgcgacggatcaggttataaaaggctatgagatactggcctaccctccccacgcaaagtacatgcagctataataatttgtacatgagagcttaccataagctgtccaccataagctgcataaaggcgttcgtaatatggatcaatat

SEQ ID NO: 8366 - DNA, 108 bp, Oryza sativa
tatcttatatatttctcaaacttttgttatcttgttaactgtatcatcagtcttcttcagtttcgatttttctaaacttctaattttcttctgttgtttcctttcatt

SEQ ID NO: 8367 - DNA, 443 bp, Oryza sativa
  unsure (1)..(443): unsure at all n locations
tgccggctgtgcgcgatgatggngtgaaaacagatactgattttttcgatcgaccgaacgacgttntcgtaatatgggtactgtttctgaccgtactttntcttaatttttaaaatttggtttttcataatttcttttacatcgtattaatatcgatactgagtagtttaaatgataaatatgttccattaccgatcgagtattgtttccgactgttttcagcccgcgcgtgcacccgagccggcggctgttgcggggacggtggcgtttaatgtggatgccacggggacacggngtgcggtgcgccggtgcggtggctggtggtagatcgagctatagcgttagccggaataggagtggagttcgcgggcccacggatcgatcaatcggtgccgccgcgacagcgtcggcagccggcaggccggccggccggcctcgcgtac

SEQ ID NO: 8368 - DNA, 442 bp, Oryza sativa
acctataccaggtttcgaccctgcaaatgccgaagttattttttatctatcatgggaaggcccaaaggctgcagtcaaccaaagagatgcagatcttcttttcctctggagaagggtatttcctagtctattcttttgcagacttttaatttggtgtttgttatgttccttccaaaaatacttaccagtactagctattatctaatcccctttctatacaaccatatggttggagtgcacttgcatttgttttgatgtcacaaattattccagcctacagagatttttctaaactgaagttcattatgacgtgttgaaattacttggtagtgtacatcagctaaatatcttttgttctagtaaactgtgctgctgtctgctgctcgcaagtttcttttcattggagtattatcttagagagatttttctttattaaagtatc

SEQ ID NO: 8369 - DNA, 312 bp, Oryza sativa
  unsure (1)..(312): unsure at all n locations
tcgtcngcccagcaaagcaactccgactctaccccacatgttctatattagagtgatgaacacgcgctgtagcaaggaacgaagccaaggaagtgaggcctcgtcaaacaccctatacctgaagaacttctgggacattgcaggagtccaccaaagctaccattgcgcgcagagggttcttggtgttatgaggggttaacgccaggacgagacctctaatgaggggaacggcgccaaatggcgtcgccgtcgtcatgtcggcccatggcctggcaaggctttcgccagcggttttccatcaaaaccccacac

SEQ ID NO: 8370 - DNA, 234 bp, Oryza sativa
gcactatagtacttcaattggggctgcagccaacacttcttcacatggatgagcttttccataccatacaagatataaggagaaacaagtatttgagattgaagaggcaagtgaaagcagtgaagaatgaagaagagggacacgcatcaattggactgaagatgacaatatacaactaatgagctcttggtcgaacaactcagttgatcccatcaaaggcgatgactaaaaaat

SEQ ID NO: 8371 - DNA, 427 bp, Oryza sativa
  unsure (1)..(427): unsure at all n locations
actcagctctctttctggtgtcagcgaggcctaagcctcttattgttacttcgttctgtggngggcgacacactctttggttgtttctacgaattaagtcggagctgctcgctgttggggtgcggcgacgcttggcaacgatgacgtgttgtagtctcttccaaagagttggtgctggccatgtgaaagaagtggctctttggtagcttggctaatgtccattgtggaagtcggagttgctctcgctctggcgactcttgtggcttcagtgtcgctgcggcagtgaagtcagcgctgctgggtcgcttgggcggctagctcggcaacgataacacctcttttgtgatgtccgagctgttatgccgcttttgtgtttagcttggcaacaatgtcctgcatttgggctccgctgttgtcgtaattgtgt

SEQ ID NO: 8372 - DNA, 460 bp, Oryza sativa
  unsure (1)..(460): unsure at all n locations
ttgcgtgagctagctagtgtggatcttgcttagactatgatttctgaagcatgggctggatctttattccttgcttcaaagaagactntgagaaagtaaaagcagcaaagtcaatcatcaaactagaaaaaggggggaaaaaacaactaggatcaatggctttagtgaccactaaacaatttgcaggatgatcatttttattcttttttggttgggtaacatgatgtccattgtcatatggcatgcatcacaagctgcaagggtgaatacactagaagtaccagcctaccgtgtgtatacacttgaggagctccaagaagcaaccatacaacttggttcatccaacttgatcaagagttctcctgttgttaaggtatgcagaagtgaagtcattntgagcttcaagcgaanaatcaaagcaataaatgcacatacaaatgatacttcactcatattaacc

SEQ ID NO: 8373 - DNA, 141 bp, Oryza sativa
gaaatcatcttctttattaacaacaaaacaataccatcacagatctcccctctttggtacaataccctatggcgatgtgcgatcaccatcatgaagaaagacacaaaactaaaatgactattttggctaagtttttcatgg

SEQ ID NO: 8374 - DNA, 171 bp, Oryza sativa
tcacctcaagcgccatgcggagacctgtgccaagaagcaaggaatacaactccggcagcagcaacttatgctaaacccagacagtacggtacgcacgatgggagtaccaatcccatgggtgctcgggaatctctatgccggcaattcgccagacaagatatacccctgaac

SEQ ID NO: 8375 - DNA, 310 bp, Oryza sativa
tgacattgacttctgcttgtgcaaaccttaggctcgtacttctgcgcgcctgccttggagtcatgatgactcgccaaagtgtttgaataggaggtagataggtcttgttaagtcccccatcctgatgcaatatgaatatagcgatatgatttttaacatctcacataaaatactttacagactattattgatctaagtgtgaacaagtagaatccactgagtgattcatttgaattaatctagttggacttttcatgggagcgaattatgaagagttaccaagtttgtgctttcagtggtaggcgacata

SEQ ID NO: 8376 - DNA, 131 bp, Oryza sativa
gcccaagcttgatatcgattaactgcaatccctctccatctttcctagattatctcagttggctgattcctacacctatgtacacatacatgactcgacaatacttatgatgctcgagcttactacataca

SEQ ID NO: 8377 - DNA, 334 bp, Oryza sativa
ggatccttaagcactgggctgcagctttggggcatgactggaggttcatgctgggggatgcggacccgagggtgaggacgcatcagtttctaccgatggatctgctggctcgatgtgatctttgatgaattcgagttaatatacgattggttgacttatggcgaattattttgttgtgagttgatgcatacctgtggataattctgtggcttggtatgaaaatttggtgatacatatgagtggaagattatttgagctgatgtatatatagttgtatgttgcgttgacgatgatgttgctctatctgtgaatcgattataaatttaatgtttct

SEQ ID NO: 8378 - DNA, 479 bp, Oryza sativa
  unsure (1)..(479): unsure at all n locations
tanatgcttaaccgttactgagctgaccgtggagtgtacctgtacatgtgatgcacagatattgaatcttgcttacgacttcaactatataggatacaagcgctggagcgccattcaggcatgtgggaacctgatgagtcatgaaagtctgagggcctgaccttgatgtatactatgaatacctagtgcgttgaggatgcctgcctaatcctgtttccagagtactactgctaattcgagatgcgaggcgccagtttcagtagccaacagacgaagtgttgctgctcctgctgctggccgaatcactacaaagttaacctgtgaccatctcttaacttgggcgctgcttgcagcagcctgaagctggggccgcacgatcatgcattatccactgcgattgtcatatgtacataaacagctatgacacactaacagattgttggggaagatcacctttagttgagaatctatagttactg

SEQ ID NO: 8379 - DNA, 288 bp, Oryza sativa
ataaccatgaactgcggctccgccaccgtcaaccccttgaatccccctccattgcccacctctttcccggaggcttcaccacgcggcactgcgcccgtatccccatccctcgccggcgacgacgttgcgcgcgcctcgtctttcccaccaaggaaagatgagggagcggcgcggcggccatcgccagactcggggagctaccgaggcacacgcgcgcactccccagcacgctccttcggcttgatgacaccgccgcggtgggcgcggccaggaaggtccgatcgcaat

SEQ ID NO: 8380 - DNA, 440 bp, Oryza sativa
  unsure (1)..(440): unsure at all n locations
tatgaaactaagcttacagggtgcatgtntatcccctcaacaatacttctttatcttcactaatgttatgagttacctgtagaatatagagcatatcagctgaaaagcaggaagatgaataatggaagatgcagaaagtagttagtgaagaatattgcacaagagtataccctacataggtaatctgccagaacataaaataagttcctcatatcttaccatagaggtacacatagtaatacagcaaaccctaattccagtacattgcaaaccatcatggaaatgggaatatatgctagagagtaagaaatacaatctagtgatctacaggtttctntcacataacacataaatgatgcctctgcggaaagcgtgaaatggcaaatatattacaacttattcttaaccaaattcatatgaacatgatatcagtgacaaag

SEQ ID NO: 8381 - DNA, 445 bp, Oryza sativa
  unsure (1)..(445): unsure at all n locations
gatccttaagcgactgagctgcagcttagctggtaaaacacgagaatttattacttatacctcaatggttggaacactatatattaccattcctaccaccaattacaaaacaatgtcttacaaaaacagagatgattgtcattggatcatgtctttaggacgactatggcaaggtggatcatgctgtataagaataagaaagggaaaaagattattgcaacggatgagacagtggatggggaacaattgtattgattcctattggtgtatatagagaacatggtgacgggtaaatcaagccaaatctttaaagatatcacatgcatcatattgaatcacaatngantatgatctatctctagctataatatgtttatgtacacttgtagagtaccctgaacagaattgtatttttataaaaataatacacctacctaggacattt

SEQ ID NO: 8382 - DNA, 478 bp, Oryza sativa
  unsure (1)..(478): unsure at all n locations
tctgataaactgagattatcggctaacccatcactaactcttctatatatttcttgctgaaagtatccctgatcccactgataacgagtaggcccaaacaattcaattggggtgagtgctgacccataccacatagttccggcaactactaaagctgcaaanaaaacagcagcgatactactggaaagtacagtttcaatattgcccatacgtaatcctttgtatagacgttgaggtggacggacactaagatggaataggcccgctaatatgcccaatgtacccgcagcaatatgatgagaagctattccccctggaacaaaaggatcaaaaccttctgcaccccacgcaggatttacagcttgactttatcagttagtccataacgatcagacacccatatcccacgaccatactaactcgttacatgaaatgcgccaacgccaaagcaagacactcctgcaagaaatacatgaat

SEQ ID NO: 8383 - DNA, 237 bp, Oryza sativa
aaaatatggtatagaacttttttatgtcatgaaaaggacactgtggactaaacatatttaccacttgtggtaattctccataatcttttttaagaaggaattctccgtacttaacaatattactactggttttaataatccaaaatgatgactaaactgcacatctactctcttatcactattttgcaacaacaaattctagaaatagcctctttactctacttatttatatgcata

SEQ ID NO: 8384 - DNA, 386 bp, Oryza sativa
cagcttaggaaacatgccatggataatcttcatcggctcatattaattctaacagggattaacattaattattaatcacgaagtactacttgacattgacgattaccctactacatactctctccgtcccaaaaaaaaaggcaaaccacgcggtttgcgtgccaacgtttgactgtccgtcttatatgaaatatttttataattaagaatatcattgttgttagatgataaaacatgatgaatactctatgccggacttatcttcttcagctttttcataaggtttctacataagacggacgggcaatcatggacatggaaaccatggttgtcttttctttttgggaagagggacgtagacaatatatacttatcgatcttgaact

SEQ ID NO: 8385 - DNA, 211 bp, Oryza sativa
gcttatggctgataggctgcaacaagttatcattatactgattcttcaaaacccattttgattaaggatagaactattcaagactgtttgacttggaattttgaataccttcatcaatgtcatcattttaaaaggagaaaatcccctgtatacccttgaaattttagctaatcccttcaatgccttgaatttttcttacttccttggatac

SEQ ID NO: 8386 - DNA, 435 bp, Oryza sativa
tcgcagaaccctcatcgacggcggcagtgcactcaatatcctcttcgccaagaccttggatgatatgcagattcctcgctccgagctaaaaccaagcaatgcgccttttcacggagtaattccaggattatccgcaactccactcggccagatcaccctcccggtcacttttggcactcgggaaaacttccgcacagagaatatcagctttgaagtcgccgatttcgagacagcataccatgccatactcggacgcccggcgttagccaagtttatggccgtcccgcactacacttacatgatgatgaagatgcctggtccccgaggagtcctatccctacggagcgacatcaagcaagccgtcacatgcgacaaggagagttgcgacatggcccaaacccgcgagatggcgtcagcccgagaggatatccgact

SEQ ID NO: 8387 - DNA, 466 bp, Oryza sativa
  unsure (1)..(466): unsure at all n locations
agcttgctgggtaattacttattattagtcttcgttgaatntcataaactgagctacagaaaggctctgtntatgattgatgagattgatttggagttttgaactgctgaacttaatatcgttaaattgaacaacttcatactctttccgtttcacaatgtaagttattctaccatttctcacattcataatgtctagattcattaacatcaatatgaatgtgagaaatgctagaatgacttacaatgtgaaacggaggaattagcatttctgtaacgtactctttcttataacttaatctattttttcaagaggagagaatattgagaaaatatggctttcatggcttcttgggagaagataaataataagatgctatagcttcaagcgataacagttggtgatatagatcaatcattcaactagaaatatctagaattatatagctgtatagaaaacagaggga

SEQ ID NO: 8388 - DNA, 463 bp, Oryza sativa
agcttataagtagaaacttgaatcgatctataatgcctcagctaatcttgtatgccactgccaaggaaaatctgaaatctttctcttaatcagtttgatcaaacttttattagatgcctcggcttgcccattagcttgtgcataatacggcgaagaattcaacaacttaatgcccatgatattggcaaactaaacaaagtcgtcagatacaaagatcgatccttgatcggttgttatggtttgagggataccaaatcggtagatgatatgttccttgacaaaccgtatagcatcccctgaatcaaccttcttcaaaggaatcccttctacccacttggtgaaataatcggttgccaccaatatgaacttatgtcccttgcttaaaggtggattgatttgaccgatcatatccataccccatcctctaaatgaccatggcttgatgatatgattcatagctgat

SEQ ID NO: 8389 - DNA, 480 bp, Oryza sativa
  unsure (1)..(480): unsure at all n locations
ggggctatcccatactagcacatgtggttgcactgtatactaaatgaactgacattgagtgaagtccttaggtcggtttgggcacactctccccctatcggtacacaactaatcaccatatgtgcaccacttgaggcccaaacctaaaatccatgttttccatcattttatttatcaaaatcacaagtattaaagttctgtccagattatttcaaaatcaattnttcatatttgtaatgagcccataatgacaaggaagaccattctaagcatggctaagcattatagtaacctagtgactccaaaattcatatataaagtggtatagtcatattgttcctaaggttaggaatgagggatatggatatatgtggcgtcaaggtgaatgcaaacaatangagtttgtctaacaaagttaacaaaattntaatttattagtgtacaatcgacatgcaagattngcaaacattttcaataacc

SEQ ID NO: 8390 - DNA, 442 bp, Oryza sativa
  unsure (1)..(442): unsure at all n locations
agcttcaagttgcgtaggtagagacgcgtttgccagcgaatgcatcggtacaggcaccgaanaatctcatgagttgcttcccattgtggcggagatcataagtagagtaatgttccggcttcttctctggcagaataatgaactcgacgctgtcgaggaggttgttggtggccatggctcgggcgacagctttgccaatggtgagacaatcatagtatttcaagtagaaacaaacgctgagatggcgaagggggatatcctgtcttctgaaattgagaatgttgtctgttgcatcngcgacagcagcgttcatcgggattgtatccttcaaggtggcataaccgcagtcgggcacgaaggaatcatacgctaattggaatcgcgagagcatgtggcggaggtggatcgtcctcttggaaaggaggcangttctgacagcatc

SEQ ID NO: 8391 - DNA, 511 bp, Oryza sativa
  unsure (1)..(511): unsure at all n locations
ttccctgtattaggacctatgaaactcaagctaacagaataacaccgcgtaacagaataacacctctagcttcttctgcatgctcctacatgcctacagcagcagcaccgggctaagctgaaatgaactcaagccaagcaaaactgacatttaaataactagttctcatttctcaagcgaaccaacaatgagacgtcacataaatagctgatactgcagcagaagatataaggtcttattagaccgatagagttctcaacgactatntatggccagggacagagtatctctcgctactcctaatgatagagttctcaacatctcgctactcctaatgacagagttctcaacatcaacaatcagggacagagtattctcgctactcctaatgagagttctcaacatctcgagagttctcaacatctcactactcctaatgacagaagtctcaacatctcgctactcctaatgacagagttctcaacatcaatagtcaggaacagagtatctc

SEQ ID NO: 8392 - DNA, 196 bp, Oryza sativa
agcttgacggttctttatgagcacagatattatgatgttcagccagcgacgcacacgcagatgcttttggtctttgcatgataatttagtgagagagaagaaatttaccgttagcctccgtgttccttttcttttcatatgttaaagaggcgcacatgcgtatgtaagtcgttttcatattttttttagttaaacc

SEQ ID NO: 8393 - DNA, 487 bp, Oryza sativa
tagaaagttgtttaatctgcataacatttaaaaggcagtattactagttagatcaattctgttggactttaaaaggcacaccaaaaaaaatgtaaaacagggcccaaaaacttatgttatgctttattaagctttaagaaagaagaactcacctctcttgctcccaattcagtaaagaagtgatcgagcagtgagcgctttgcctcccgcacttgacagtagacaatagatttcggaatagagttcctcaaggttgaacataccatgttaatatatgccagaaccgttgttcctgttgagtatgaattgtagcaaggttcagcagaaaatacaggtaaaataagttaaaaggcagccaagcaaagccttgatggcatgtatattcatcattaaactaaattagtgggcaatattacacaaggttgcaacaatatgataaaccacttctcaacttcaacaaatggccatcattgcaaagcagtaacag

SEQ ID NO: 8394 - DNA, 393 bp, Oryza sativa
  unsure (1)..(393): unsure at all n locations
agctctgacgatacaggtatcacaaatgttcagcgtgatctgggccacttcatccaccatgagtgctgtcatgtcaaaggagatttcttcgacccagagggtgccctatcggcaagtgacgaattcaaggatcttcangaggggaacactactatgccataatgtaactagatgacgttatttaaagtgacaatgtaaaacaatattgtaatatatatattctggcaacactcttgatttatgcaatataagtagatttctcagcaccaaatgcttgataatcttccaatatatgtacctgcaagaatttctaataaataacttaaaagtaatttacggccaaattatatttagatttcaatattttctacatatcttcgcaggcagaagttt

SEQ ID NO: 8395 - DNA, 478 bp, Oryza sativa
  unsure (1)..(478): unsure at all n locations
ntgtatactcctacaaatntagttgcagaagcatggcatntttgtgcctcgtatgtttatgtgccattatgttcacataactaggcctcactatattgttgtccatgtctactcttatatctccatcttacccttttcacttagaattagtcactttttttaactagctgacctaagttggttctgtagaatacgtcaaacttgctcagagttttgccattcactaactgatgatatgcttattttctcttttgctccaatcagataaaaaaaagtaattatcacccagctcctatattttcttgatttgcacaaatgattctgaacattcccctagagtttccctataaaataccttggattgccactacttcttggaaggatgcgcaagacggatattcaaccaatcttcgataagatcgcagcacgggtcaccggctggaggggaanaacatgggaccagtanggagatcaactc

SEQ ID NO: 8396 - DNA, 316 bp, Oryza sativa
  unsure (1)..(316): unsure at all n locations
gcttctgttcttttagagtcccctgtaacagagattcatctgtcctttatgcaataaggctacaaagatagcatatgttggccatttcatagaatgatctttagaacattcattctggaaacaagaaatgcattctgtgttttctttgagaagcttcaccaatcatgtcaggaccatacntaaaaaacatgcatatatgtcagaaaatggttctgcaaagttacccacttacaaagaatntctgaatctggctgtgttagctcccccccaattgcaagttatttcaaattaaactatgtgacggaaaatttgaagt

SEQ ID NO: 8397 - DNA, 476 bp, Oryza sativa
  unsure (1)..(476): unsure at all n locations
ctatgaaactcagctttttatagctatattgctatgtgaatcttcaatgatgtagccaacttttgttacactcatcatattttacaaagcagtcggtatatcacttggatcatgttatttgagggattcacaccgcatatgctatatattgatatcaagtcacttggttgattacaattatcgaaaccactcggttggttagattatatattccttgactatatgntctggttgttcaattaaccacatagtcggaggctacacctattaggtgcatctagtcgatgcacctgactttatttttttcagccctccacagtcttctgatttggaaaaagtactcgggagatcatggcgaagatgattgaagcactcggctttggagtaatctagttcgagagaagaatatcttttcaactgtgaaggtctcacgggctactgtggagattatgggtaccccatacccataccgcatg

SEQ ID NO: 8398 - DNA, 301 bp, Oryza sativa
  unsure (1)..(301): unsure at all n locations
agctttaaccagctcttacaagatcttaccaatgttagtggaatggngatgtacaccgactcaaccaagcagcccaatagaggttggatatatcgatgcctcggcaaacacttgctgtacggctgcaatcaaatctgtggagctctgggtaggcttaaatatgtagcaaaggaatagcaaatgctcaaatcagagaacgcaaagctgaataattgttcaaagtcaagtaccgtgctggtcctaagctanaacgtactatagacgcgagccttnacacctacgattccactagatattccta

SEQ ID NO: 8399 - DNA, 398 bp, Oryza sativa
  unsure (1)..(398): unsure at all n locations
tgcataggaaccacatcacaatcaacagaatctgcatatgagcctttgtgttacgaaaccctgcaaacctgtggtagctttgctcttgcaaaatcggttaaccactgaatatggacaggatgtggatgtgtacgggtaggcaagccaagcttcttgaccaaatcagaactcaccaaattgttgcagctacctgcatcaatgatcacacgtgcacgacgtgtgttgatgacgaagaanatctgagacaaattatggcgctgcaacctctcaggctgctgtacctgcatgctgagcacccgctgcacaacgatggtcctgtagtcagttgtgtcatcacggacaaagacttatacatcctcatcctcaacttcttcttcctcctcttcctcttccacgtc

SEQ ID NO: 8400 - DNA, 373 bp, Oryza sativa
  unsure (1)..(373): unsure at all n locations
agcttcagaactgagtggcggaaggtccgtcctaatccgtctcgcacggagccatctgcttccagtctgctcgagaagccgccagtaacgggctgcggtgtcagggaggaaagaggacgatgccgtcgacgaagacggccggtcctcccaacctagcagttcgctggcacgcaccagcggcggcggggggtggaggccaaactcgaggtcgtcagggagctccgagaccaccggagccggatgcggcgcatacggcggcaggtgcgtctcggaagcangcgggtcgtcggtgttgtacagggagtagacctcctgcagcggaggggaaaggtccgcgtgagaggtggagtacngtggatgcgacagcttcggc

SEQ ID NO: 8401 - DNA, 492 bp, Oryza sativa
  unsure (1)..(492): unsure at all n locations
ttcnctccgatagacaattatggcattgcatatgttccanatgataagaaatatatactaaatgaacaatgtagagagaggtacaatgttaatttacatggcacaattcttaatagcaatccaaacatatgtgcaaaacaggcggtaaattctagactaaggattaagtacttgaataagttacatcacagcatttaagagttatgacaaattcaactacttgtgtaaatttggcatgtttcccgctatggcatgcaaaaaattgcggttcaatgccaaagtcatactgaaaaagcttaattaatcataaaatactgaacatgataaggggaagatgaactaatataaagggaatacttaaagatgagaagcacctaaaagggaatccaatcttatcaagttaaagacatgaaatagagtattgcgctataggcagggatgtgacttacttaatacatcccatgttccaactgtaaagacatgtgaaaagtt

SEQ ID NO: 8402 - DNA, 473 bp, Oryza sativa
  unsure (1)..(473): unsure at all n locations
agcttgcagtttgccaaatgtttgtccattcaactcatgcacttttctattntttaaatatctcaggctgactatctacgctgcttcagttacgcataatgtattgtttgtagaagactagaagatcaattggtcattgattactaatgtagaaactgtctgcatcataagttgtgtttgatccagcactgagagagagacacatcggagatctgcagggcttaaagtatgaagatgctggcaaagaaaagccagaggcttacagagcatttttgtcgcacaagaggaaccgacaaattcctgtaagcactccattgtcttacnttttataacacatcagtattgattcagcaaacagaatatgcttctgataccatacatannggttanggttcaccggngaaggagcagtgggggatctatggnggctagacgactggagggaaactagnggtgggtagctaatgggaggg

SEQ ID NO: 8403 - DNA, 469 bp, Oryza sativa
  unsure (1)..(469): unsure at all n locations
tactagataggagtgatggagtttacattgggcgtacatagtttcttacacatgaaggctgtgtttagtccagcgtaaagtttgtattttggttaaaattggagatgatgtgactgaaaagttatgtgtgtatgacaggttgatgtgatagaaaaagactgaattttggatccaaactttggatctaaacacaacccaattaaatagttatgaaaaacttagaaaacattgacatgatagattacacatttgatatatcatcctctanatatacatgttcctattcgatctttagagttngttaaaaaaaaaagataaaactcaactactatgtgtatatttaaattatatgtttttacaccttattaaagtcatatttaaatttacatatttgtagcgtggtggttcacatattaatagatattatcagntttntcatannatttttataattatatattcagatgat

SEQ ID NO: 8404 - DNA, 465 bp, Oryza sativa
  unsure (1)..(465): unsure at all n locations
agctttctgacaatgcaattttaggggcccataataagagaataaaatgaaccataacctagtagtttcttgcaggagctaaaaaacaacatgatcacacttcacatgccatgaatacaaatacagtactgtcagttcataaaaggggaatgcctgcagccttttacaccaatttctgactgaattctaagcgcacacacaaatttttcgcagtgaagtctgcatttgaccactaacatcatacaatctagctcagtcatttcagcattcaagttcatcaaaatctcagaagttagagagcaccagaaagtgccaaaatgcagtaatgaactgctaagtgcagagatcaaagcacctacatacattntgcactgaattctgcttttcaacacaggcatcacataacaataatcataacaggaatctagcccagtaatttcagcatttgaagtcatcanaatctca

SEQ ID NO: 8405 - DNA, 453 bp, Oryza sativa
tatgagcgctatgtaactaaaaagggtggtgaagtgaaacattatcgcaagcgtgcaaaacgagtaaatactgatgctgatgaagaattattagaggtaatctctgacacatggatcttgtctcaaccaaatgacaattgcatctttcggtctctctgcatgcaattggggtagttaattatgccaatttacacactgccctttatataactagaatgcatgggtggtaatagttgttatccttatggtctgaacttaatagggaggtgaagatgacggtgaccatgttgacatggatcaaggttctgatgaagagcatgatcaagagaccaatccccttttattatccctagatgcagagaaaccaacaaaagagcagatgatggagcagtggttcagccaggatgtattcacagaaacacgaacaggtgtggttgagcacagtgatagtga

SEQ ID NO: 8406 - DNA, 472 bp, Oryza sativa
tgccacatttgtcacttgtgcctatctgacctctatttatcttgccgcgagtctgcaacaaccgcagctcatggcgcgtagtggtggttactggttgctgctaccaacgttcagtttgcagcacgttcttttctctcctgttccaatgatatggtacatcatactacagttcaggaagagtacaattgtacaacgaacctatcatactgtcatgtactcctgtctgtccacgctgacctccagctaacacacatgcattcacacaagttgaggcatgcaagaaacactaaacaacatcgccgttgtttcctcatggaagtgacgctgacatgcgtcgatgcaatattaattatagggtgtctgcattacacttgtgtcgtgggagatggaagagccgtcaagccaagccacaccttcttaaagacggccaagctatgcgggtatggatcactagaagtgaagtcattgcatt

SEQ ID NO: 8407 - DNA, 490 bp, Oryza sativa
  unsure (1)..(490): unsure at all n locations
ctttaanatatacaaaaccatcatccanaaccacattagggggttatatggatggtatggtaaagtttaaggggttggatgtctgattttaaagttcagggtgctagacggacttccatctaaagtttacggnggtgtttggactttttctttttttaaacatgttttagccactgttccttgtatggtggtggctaatgatgactacaggggtctcaaaattaaaaaggtcacgaaattgcatatttgttactcctttntatttagattatatcgatgtttgatcattcgttctattaaaagactatataaatattatttatttttgaactattttatcattaaagaaactntatgtatgacttataatntaacacatttacactantttttntaataaaataaatggtcaaaactttttcaaatgttaattatgtcaattaataaaaataaatgtagtaatataattatctcatctaactaaaatccg

SEQ ID NO: 8408 - DNA, 465 bp, Oryza sativa
  unsure (1)..(465): unsure at all n locations
agcttatgcctcggcgggcgaatgggcttcatggtacttggctcagcaaatctcattcaggccagaagatgcggagggagtgttgctcctacatcaagaccctctggtaatctcggccgaagtagctggcttcgaagtccggtggattttggttgacggaggaagttcagccgatgtcattttcgccgaagcttatgccagaatggggttgccaaccctagccctcacacaagcaccaacctcgtttcatggtttcggcagcgaagcagttcaagtcctaggccaagtacaactggcggtggctttcggcacaaacaagaacaggcgcgaagagcanatactattcgacgtcgtcgacatcccatacaactacaacgtccattttggttggcaaccttgaacaagttcgaagccatctcccaccataactatctcaaactcatgatgcctggtccgacaggcgtg

SEQ ID NO: 8409 - DNA, 480 bp, Oryza sativa
  unsure (1)..(480): unsure at all n locations
ttaaaatatacaaaaccatcatccataaccacattatggggtaatatggatggtatggtaaagtttaaggggttggatgtctgatnttaaagttcagggtgctagacggacttccatctaaagtttacgggggtgtttggactttttctttttttaaacatgttttagccactgttccttgtatggtggtggctaatgatgactacaggggtctcanaattaanaaggtcacgaaattgcatatttgttactcctttttatttagattatatcgatgtttgatcattcgttctattaaaagactatataaatattatttatttttgaactattntatcattaaagaaactttatgtatgacttataatttaacacatttacactantttttttaataaaataaatggtcaaacttntttcaaatgttaattatgtcaattaataaaaataaatgtagtaatataattatctcatctaact

SEQ ID NO: 8410 - DNA, 449 bp, Oryza sativa
agcttcacggatcttatagccaccctgctctatttcttgattgtgaataagctcgatagattaaatgttgaataagcacatttgtccagcagttgtcaatgcaatgctgaattctcggtactccacaaagttggactgtcaaagtacttacaacagcaatgtccagccatgcgtttgcaagttgtgtcagagtatggtcctcatcaatctgttgcatgatctttaattgcttctcggcatagtctgaacggtgcatcttaatgaagatctggacattcaatgcatgcctgtaaccgaaaagcaacagatagtaaacaagatcatcaacaaacagtattccacaaatgaatggggcaccaaacagaagattctgaccaccaaggtttgcagttaactaaatgatcagcaacatcaaatcgaatcagcaaagatcagaattaccagtgttg

SEQ ID NO: 8411 - DNA, 455 bp, Oryza sativa
  unsure (1)..(455): unsure at all n locations
tattcccatttgttgcccaatctctctcaattccttacggtggttgattggttgttgtcacgaacgtcagacatgtgattcatgaatctgatcacggccggactatgattgttccacgcacgtaatcgtcgttgtcgaatgaagtactgctgctgcaagtcatgctctccaaattgagttggccgaagtggaggataatcttatctgactgaggattgctggctgaataaatcataaaaaaagataatgaaatagctattataaaattaaaataatggatttaaaaccatattataataaattctcactttcaaaagatcgcaggttaattacaacatcatcttttcgtctatacttatactctatgctaaaattgaaatttttaaaggtaatntatgagatttatttatcattngctttgaatcgtaacaacacgtgtaaaattattcttatta

SEQ ID NO: 8412 - DNA, 413 bp, Oryza sativa
  unsure (1)..(413): unsure at all n locations
ctattctttgctcttatgtattgtttactttggtatttctcacttctaagatacaatgtgagtatttttattccatttagcaattcaaagctatggattatcatgtcctcagtggcaaacatcttatcgattatcgatagcaccgtagtacgttttttaagctcttactatcgctgtaatttttaaaactttcttaattgacattgtcctttcgactaatccttcgaaactgtgttccgtcgttaatcatccatcgagaatgcgcccttaccacgtgatctggcgacgtcctctcttataattttagcacaggcaaaaaaaactctttagcacatgattaattaagaataataattataaacttaaaaatagatttattttgaatttntaaacaacttctatacagaaaactt

SEQ ID NO: 8413 - DNA, 468 bp, Oryza sativa
  unsure (1)..(468): unsure at all n locations
tgggacccgggaggagcccatccgcgccagccgcagtcgtcgtcatcgccatccgatcgcctgaggatttctatggtttaggaggaaaggaagcgagggcgcgtgggtgagaggctgagaggagacgagggaagtgtgcgtgtggatcgtctcagcaatgcgggatttgaatttatagaggcgatgacgtcagcgcgacacagcgttgtctgcacgcgtgccccgcgcgagcttcggagcaacggttgagggtttaacgaaatgggacttagatnttggaacttgattggattagtttccaaattcgaccagaaatttgaactataactgatgctatgtattcttgttgctcgtggagtcgtggtgattttgaaaatgaaatgtgcagcctcgaggtgccaattcatgaacttcggaagggattttacccatattctgtttgctctgatttctgacggcattcaaact

SEQ ID NO: 8414 - DNA, 224 bp, Oryza sativa
  unsure (1)..(224): unsure at all n locations
agcttagntntctattctttgctcttatgtatggggnactatgntatttctcacttctaagatacaatgtaagtattnttattccatttagcaattcaaagctatggattatcatgtcctcagtggcaaacatcttatcgattatcgatagcaccgtagtacgttttttaagctcttactatcgctgtaatttttaagactttcttatatgacattgtgctttc

SEQ ID NO: 8415 - DNA, 341 bp, Oryza sativa
actcagcttggacccggaggagccctccgcgccgccgctgttgtcttcatcggcatgcgatcgcctgaggagttctagggtttaggatgaaaggaagcgagggcgcctgggtgacatgctgagatgacacgagggaagtgtgcgtgtggatcgtctcaacaatgcgggatccgaattcatagaggcgaggacgtcagcgctacacaccggtgtctgcacacgtgccccgcgcgagcttcggagcaacggttgagggtttaacgaaaagggactcagagtttggaacttgattggattagttgacaaattcgaccagatatatgaactatcactgatgctat

SEQ ID NO: 8416 - DNA, 405 bp, Oryza sativa
  unsure (1)..(405): unsure at all n locations
agcttccagattacttntgtcacagctgtcaantttgattngaccatcgactttgaggaacttattattaggttagcttaatgctgaggtcctgtttagggtgagaattcagacatgtggcacaaacttggatgaaaagaggacgctttgcgttaggcatatgttgcagtaagatgactcaccatagtgctaaaaagaacgacagtgatggtgctggtgatcattattgcattgccgtgcagctgagtatggccagatcttgtaaactgcaattgcaacgagacagttaagcttaaggagaagaaactaagacatacttctcctgggactaattaatggcaagatgagaagagaaatacagatttacagatggtgtgaagcaatagtcttgcactgacggactga

SEQ ID NO: 8417 - DNA, 166 bp, Oryza sativa
  unsure (1)..(166): unsure at all n locations
gatacncaagcttactgaaaggctattgaacacacgaacaacctttctattattttaaatccncncgaggatatagggcccacactctaaagaacactccagttgaacgtgcgaggatatatgcactttctatttttcttcaagacatcgatataaactataccac

SEQ ID NO: 8418 - DNA, 418 bp, Oryza sativa
acgttgctactgagtgacagccagaaccgcatctgggaacaacaatttcttatcatattatgtgggggatgtcatttacaccctgttacaacatatacgaaagtgcaatttactctattctttgttgacacgttgcatctggcgatagacgaagaccgcactagatcttgccaagacggaacagcacgctgtaataattttcataaaagctgattccatatgaacaaaatgtaagtacattcacgagccattgtttcttcagtgtggtataaggtgatttcatatgaacaaaaggcgaatcccatctgacagaaatggagagttcttttgaagaacgtccaggaaattctggtacattctttctgagttcaagtctaaaaataacctggtcctttcgctcaacatctggagcatacta

SEQ ID NO: 8419 - DNA, 484 bp, Oryza sativa
  unsure (1)..(484): unsure at all n locations
ttaacacatatcatcatcgtgattacccctattacaagctcttattctttntaatctgctaaatatacatgtatttctttntatatgtacagaaatcgagacagattaagattacaactccgatacctatgtgtcgattaattacgtgtataaccttaccaataatttgttaaatatgattatgtatttagccgatgtaaactaaattaagtataaatgttaggatatatcaaatactaataaaaaatccattgagatggagatgaatgtagaaattgttcatttaaagataaaaagagaaaaacaggaagacccatacgtgtatgctcgattgcgtagaggagttgtttgcgtttcacaattgattttgacaaacaatttttgaaaagaaattttgaaacaaacgatgaggtttacattacacaataattgaaagtaactntacatgagtaataattagaggagcnntattttgttcacaatt

SEQ ID NO: 8420 - DNA, 469 bp, Oryza sativa
  unsure (1)..(469): unsure at all n locations
agcttctcctgtgaatgatagcaatatgcattcctattacattatcacagaaccaatcaaggatgatgcagtcactataacaatgccagctatacctcttcagaatcagaatgagtagccatgtttgtgattttcagttcgctacttatcaccgtaatcgaaagtttgcagcaatccttgaataaataaatatattcatgtctataaacagtgagcttgctatgcttatggatgaatcatggtgaggatgcaatgtaccgatgttaagcaccttccctttttgattaaggcagtgcctcgtattcttgaatatgggagaaatgtgtataaaaacaagttctatgaggactctttcagaagatgctgatatgggattaggtgtataaattgttactgtcaaaggagacctanggtctcatttcagaggaactantgtctaacctcgagttataaccaacctgttgatgga

SEQ ID NO: 8421 - DNA, 484 bp, Oryza sativa
tctcctgtgaatgatagcattatgcagtcctatcacatcattatgtattctatcaaggatgccgtcactagaacaatgccagctatatctctccagaatcaaaatgagcagccatgtttgtggttttcagtccgctacttatcatggtgtaatcgaaagtttgcagcaatcatgaaattcataaatataatcatgtctgtaaacagtgagcttgctatgtttagagatgattcatgttgaggatacaatgtaccgatgttaagcaccgtcccttttcgtttaaggcagtgcctcgtattcatgtaatgagggagaaatgtgtaatacagacaatttccatgaggattccgttgaagatgcggatatgtgatcatgtgtataatatgttactgacataggagacctacggtctcatttcagaggaactgtgtccaacctctagttaataaccaacctgttgatggaagagataaccaattaaact

SEQ ID NO: 8422 - DNA, 369 bp, Oryza sativa
agcttctcctgtgaatgatagcaatatgcattcctattacatcatcacagaaccaatcaaggatgatgcagtcactaaaacaatgccagctatacctcttcagaatcaaaatgagtagccatgtttgtgattttcagttcgctacttatcaccgtaatcgaaagtttgcagcaatcctgtaataaataaatatattcatgtctataaacagtgagcttgctatgcttatggatgattcatgttgaggatgcaatgtaccgatgttaagcaccttccctttttgattaaggcagtgcctcgtattcttgtaatatgggagaaatgtgtaatataaacaagttctatgaggactctttcagacgatgctga

SEQ ID NO: 8423 - DNA, 466 bp, Oryza sativa
tctcctgtgaatgatagcattatgcagtcctatcacatcatctcatatcttatctaggatgcagtcactagaacaatgccagctatatctctccagaatcaaaatgagcagccatgtttgtgtgtttcagtccgctacttatcatggtgtaatcgaaagtttgcagcaatcatgaaattcataaatataatcatgtctgtaaacagtgagcttgctatgtttagagatgattcatgttgaggatacaatgtaccgatgttaagcaccgtcccttttcgtttaaagcagtgcctcgtattcatgtaatgagggagaaatgtgtaatacagacaagttccatgaggattcttttgatagatgcggatatgtgatcatgtgtataattgcttactgacataagagacctagtgtctcatttcagacgaactgtgttccacccttctagtaataaccaacctcgtgatgg

SEQ ID NO: 8424 - DNA, 440 bp, Oryza sativa
  unsure (1)..(440): unsure at all n locations
gcttgcttgatgcttggtgttactattatcttgttatgctactaccaggattcctaattcgcgcgtacgcgccgcgggcgagcacttccggcccacacggcccgtacgcgcggtgctgccagcgctaatcgagaatttttttcatagcgcacgtttaatgtaagtaactgtttaaggataatgataataattaatgaaagatttttttctttttgagaatttttactaatagatagaaatttttaagttacatttgaaaacttttgacttaagaattaaactttgaaatctaattgtgaaaactctccactcatatttgataactttcaactccgatctagaaacttacgactcaagatttgaaaacttctgactcagaatngataactttcgactcaagtttgaactttcaactcaagatctaaaaactttcactcaaa

SEQ ID NO: 8425 - DNA, 488 bp, Oryza sativa
  unsure (1)..(488): unsure at all n locations
tgtagcgtatgaataacaatagaacacatatttccactttatatattagatgctgcctgcataacacactatttgatactacctccgcccccaaaataattgtaattctaggttggttagcatatattaaggtttaagaagaaagactatgataccccttattaaatggtatataagtaagagtgggagggtagttgaaggtaaaatagagagaaatctgaataagaaatgattaatgagaccattagtattctgttgtgatcaactattttggacaaattcaaatcctataaatacaattattatgggacagaggcagtaataatgagctaaacgaagaagttacattaataagttctgttatttttagcaagtctgattaggagttcagagtaagttgtacttttatgaccatgagcccatctgtgcatgatgcangagaactgggatcatgtcttgaagacctcgccatcaagttcactcatatc

SEQ ID NO: 8426 - DNA, 322 bp, Oryza sativa
agctggagaaattacaagagctctgatattgctatggttgtggaacgaatggagagatccaagcaagccttgggtgggtttggaaacgccttgtgatggtgtggatagggacctcttcgccgcctcaacaaagataactgtgggcgatgggaatacgacgcgcttctgggactccgcatggattaatggccgaagaccaaaagacctaatgccgttggtctatgagatctccaaatataggaagaaatccctacggcaatggaaagataacgacctctgggtgcatgaccctacccttcatgcgggttcatttatcaaaatc

SEQ ID NO: 8427 - DNA, 427 bp, Oryza sativa
tggatgacctcatggatgaatccggccttcacaagtcgcgccaccttctcgcggatgaaggcttgacgttccggggcctgccgctgcactttctgccggatcggccttgcgcctggccgcacggcgagacggtgctcaatcacctccctagggaccccgggcatgtccgccggtctccaggcgaagacgtcggcgtttgcccgcaggaaggagacgagcacgtcttcctaattgtcgtccagaagaccactgattcgtgtggtcttggacgggccgtcgcccagggcaacctccttgaccgagacctcgtcgcatgtgatcatccgctgcctcggggcggctgggacggaggtgctgagtctctcgtcgccacccgcgggcttggacaccgcggcgaggtggtccgcgcgctgctccatacaagcaa

SEQ ID NO: 8428 - DNA, 462 bp, Oryza sativa
  unsure (1)..(462): unsure at all n locations
agcttgtgtcttggtatgacatcgaatgttgattcaggtaatcatttctatgtgcattagaaagctatacttgnnttttagttcatggttgcttggttcatatcgcgtaggctagctctccattagaaagctatactggctgttttgttcatatccttggaattttaacatgttctatggtagttctctgaactacattaccttggtcaggttgaacccttgttttctaatgtattactggttagttgcagttcttaacacaaactggatcacactccagtgtgccctctttcttttgctagttggattcaatattagagaattctgcactagtatctttttgccatactggtcaaataattcgtacccacttccatttattactgtccaaataattcgtacattaacccactcctttttatttcagctctcgcgttgtgacctgatccgcacatgtacaca

SEQ ID NO: 8429 - DNA, 325 bp, Oryza sativa
  unsure (1)..(325): unsure at all n locations
ngaatgcattctcaatttctcatcaggcttccataaactgacatcgtactggggatcccaagtgttttgnggcagtagtaaagtggtgactgcgcggccgcacatgcgcggatgcccgcgcgggtggtggcgtcgtaaattatggctcctccaccaccgttcgctcgatcaccgcctgcgctgcagcttccgcgcgtgaaacatcgcccggccaccggggcggcgtgagcggctgaaatggggatcgacctgctacacaatgcagcttgtccgagattgacggcgttagttgttcncttgtgtgtgtgtgtgtgtgtggggggga

SEQ ID NO: 8430 - DNA, 454 bp, Oryza sativa
  unsure (1)..(454): unsure at all n locations
agcttggaaggatgacgatagcaccatgtactgtatcccttagccaattgatgtgagcatgccagaggagtgtgcctcgttgccctgttatagtgaaattatagagaaagctgcttcctggctgtattgggcactgtgttatgtaagctggcccatcgtaccaccctgtccggatctgccttaccccgtgcctgattagtatgacatgcttgtttatcaagttattcaccaagtgtattgttgttgcataaatgggaacaataactagcacatttctgttttctgttcaacagagaggatctaatgcaagctatacatactntttaccttttaactaacacagcatgatattctccttttcttgttgggtacttacagagagcaaaggagccttgaggtggtgattcanattgtggtgcaaaatacacgtggagttgaagcatatgcatggagt

SEQ ID NO: 8431 - DNA, 419 bp, Oryza sativa
ggagaagctaggcacaatatcaatcttatgttagtagagttagggggtgtttagatcccacccaaatattttacaccctgtcacatcgaatgtttgaacacctgcatgaaatattaaatatatatatgctaaaaaaataactaattgcacacattgcgactaaattgcgagactaatcttttaagcctaattactccatgatatgacaatgttgtgctacagtaaatatgtgctaatgaccgattaattgggctttataaatctgtctcgcaactactgacggatctgtaattagctttttattagtgccaaacaccccttgctaatcctattaatattcatgtgacacccaaaacttacaccttgatctaacacccccttatttctgataaaagcagtgcatttcatcatcttctaca

SEQ ID NO: 8432 - DNA, 463 bp, Oryza sativa
  unsure (1)..(463): unsure at all n locations
agctngtaagtgcctagtgctgccaatatatatggtattcgtaatacataaatgtaggagggtaaaagtgaataattggtttatatggtgcagacgaatcggtgatattgaaaatggaagctcttcttcactggcattcatcagtaacatgacatcattgagcatcctgtatgcataacttttcatccacttaattaaccaaattaatgctcagaatattgatgtaatttgaaccaagctggttagatcttataacacataacattttatttttttgcaggattttgaggaactgtaggatatctgataatcttgcatcattagactnttcaaagtttgcgagtttaagcttactgtaagcattnntgttctactataaatngtagtcaagcatcttttgtcaatatatttaaatgtatgggatggacatacattgctaatgactgtntaccatttttttctt

SEQ ID NO: 8433 - DNA, 438 bp, Oryza sativa
  unsure (1)..(438): unsure at all n locations
tagcaagagtgctgnaatggagaagaagatagaacaccttgagcagaaattgcaggtagcttatgccaaatccgaaaaagaaatgatatggaatatctgaatcaacactcgctatctagtcatctagtactatgaaataaaataatcaatcataccatctttttgcaggcaaaagattctgtggaatcgacattccgcgacttcagccttgactcatcaacgctgncaagcaaacaacgcgacagatcgctggctcctgaaacgacacctccaaacccaacacaacagcaagaactgcgagagccttctggtatcatggcctttaagttcatcctgggagtcgcgctgctgtccgtgctcatcggtgtatttcttgggaagagatactagcgtttatgcctttcagaatgtctactgggaaacccccattgcaatact

SEQ ID NO: 8434 - DNA, 244 bp, Oryza sativa
  unsure (1)..(244): unsure at all n locations
agctggtcacttgctacatattaaccattctgctctcccatctaatctaatcctcgaaaaaaaatacattatcacgccgatcgatcggtcgactctctatagctagctcaataatgtatatatatagtaggagtttgattcttttttttttactatagtgtcagttgcttaataatgttgacccatgcaggatgtgacatataccanatcanaanagcatgcatgagctcggctatgcagggca

SEQ ID NO: 8435 - DNA, 481 bp, Oryza sativa
  unsure (1)..(481): unsure at all n locations
tcttatgataattngcctcgttgttagccaccattgtccataggaataataatacttactatgacctacatacatttacatcggttgaagatcgaacaaagagtgtgctgcaaagagcctttttctcattgggtgcttgcatcaatgcttttgtgcattgtcgacctgttctatgcatagatggaacttttatgacaggtaaataccgaggtcagatattgacagcaattgggtgtgatgggaacaaccaggttctacctatggctttcgcatttgtagagagcgagaacactgaaagctggtactggttcctagagagagtgcacattgcagtggtgcgtatgaggcccaacgtttgccttatacatgatcgtcatgcgggtatgttgcgggctattgactacttgcagaacgggtgggatgagaagggacttncagctaagtggcctgatgttcggagtcggtggtgcatgcgtcacat

SEQ ID NO: 8436 - DNA, 452 bp, Oryza sativa
  unsure (1)..(452): unsure at all n locations
agctngcatgggcacaacatcacattctttatcatcatggtaatttccaattgcaaaattaatgtgcaccagttttgttaccttcgccttaccactggtgttcagccattggatgcagtatggatgtgggtgcggtttggtgctaaatgcaagcttctccaccatctcgctgctagccaagttgttgcagctacctccatcaatgatcatgcggcaacaacgctctttgacgacacactntgtttggaacaacgtgtgtcgctgattntgctccgccttctccatttgtgcgctaaggacacgctgcacaatgaggctctcatagtgatccgcanatgcagccccaatgtgctcttccggtggctcattatctgcatggtcagccgcaagcaaagcaagtgtatcatcatcgaaatcactagcagaggagtactcaccnatcgtttttacta

SEQ ID NO: 8437 - DNA, 483 bp, Oryza sativa
  unsure (1)..(483): unsure at all n locations
tgataagatgaccgncgattccatacacatctacattgatctgctgaagtctcgtagagcagaactcttagctgagctaggaaagaagccgagatcaaagttaaggaattccatcaagcatctgtcagatctgagcaaatccttaaaagtgatccctggaaccgatgctaccgatgcccaagccatagacgatatagaacaaattaggcaatgggccatatcggctattaacaagcttgtatcaagttagaaaccaactgtgcaatacttgtaatgcagacaaaaacatagtatgttctgatattttgctttagaaacccatcattgatattttgcttttgaaatccgtcattttacatatatgtatgcccccttaattatgccatgctgaggacacattgataaaattataattgtgctaagggcgatatgacaaatatcggctatcacatatcggcacgacaccaccgatataacttatat

SEQ ID NO: 8438 - DNA, 124 bp, Oryza sativa
ctcccgatccccatcagacaagcgatgcagcttctccgtcggaccaagatgggctcataaagtcgcattgtgaacgaccggccaatgcggcctattacaagaatgagtggacccagcctcgact

SEQ ID NO: 8439 - DNA, 487 bp, Oryza sativa
  unsure (1)..(487): unsure at all n locations
tagtctctctactattataaaagcagagtcgtcctccttatattctcttctctcacaaaacgaggcagnaaaacaaaagtcccaaaaattctaccagcgaagtgttgggttgggttcgtgtccaagtaagcttagtgaggtgaggtgagaggttgagccggggaagaagatgatgaacaattaagtttttatttgtattttatttttgctctattntgttttatatttttgtgtttggatgttatttctattatgtgtatcttggaaaaaaatgtaaaaataatctgcaaaattaagcagcttaattatcatatggtcgtctgcctcattatgtttggctgaactaatcgaatcaaaacacactgaattttctcctattcctggaagactaccacattacgttaccgtttcaatttggtcaaaggtctacttttttcgatctcaacatagatggacaaaggttagttgctaaaatgaatgtactaca

SEQ ID NO: 8440 - DNA, 215 bp, Oryza sativa
  unsure (1)..(215): unsure at all n locations
catgcaagcttgacaacaatatgtgcttcacagccacatctggttttcatcatatatggggtctttctttnnttttttccggattcatcactaacatcttttactctctcctttatggacccttcccttgaacagtaataccgcttgaataatatttcctcattttgcttcttgtgctgaccaacacgaacagagaaaccagcttcatgtgcata

SEQ ID NO: 8441 - DNA, 477 bp, Oryza sativa
  unsure (1)..(477): unsure at all n locations
tctgatgcaagatgggaaggtggttgtctatgcatctcgtcagttacgtccgcatgagaagaactaccctactcatgatcttgagttagccgcagtggttcatgcgttgaagatttggcgtcactacctctttggtactcgtacggaggtgtacacggattacaagagtttgaagtatatcttcacccagccagatctgaacatgaggcagcgaagatggttggaactgattaaggattatgacatgggaattcattatcacccaggaaaggctaatgttgtagcagatgctctcagcagaaaaggctattgcaatgctacggaaggacgacagttgccgtgggaattatgcaaggaatttgaaagattgaatttgggaattgtcagtagaggtttcgttgcaggattagaagcgaagcccactctcatcgaccaggttagagaagctcanatcaatgatcctaatattcaagagat

SEQ ID NO: 8442 - DNA, 437 bp, Oryza sativa
agcttgttgaactcttcccagcttctatgtctctatctgagccgaagatcttttttgattcccttcactaatctcctcagaagatacatccccaaaggatggttgcttgtatagatccttgatagcaagaatcatctcataagccggaggtttcccggtaccatcacaagtatctgccacatattgatcttgttgcctccttgctgcaaccactgcattcttctgaacttcctcctctgtcacggatagcttccctgcttgatccgccaatagatcatcaatcttgtggtctccctccttttccctgaattcaaaaccatcatatgcatctacccttggtagcaccttactcgttcaccaatcacattttttcttcctacaaaagaagactcgactgcctgcttccgaaagacagatacgagctcaccagaaactga

SEQ ID NO: 8443 - DNA, 487 bp, Oryza sativa
  unsure (1)..(487): unsure at all n locations
tcgacttctccacggcggcagcgttgacgacgaggaactgctctgtgtggatagaatgggacagcgggaggccccggaactcgaggttgacgctggcgtatatgcagccactcatgccgagacccacggcacccacggtgaaccgtgagatcgggacccgcgcgcgccgcatcgcataagggacaagcaatgtgaagcgttttaacagggtccatcattcagagagtctcatcctgaagcttgcaagtctctgagcagtttcataccaattnccttaacacatctctcgaatgaggaagtatgtagggatttagtgaagatatctaacagagtatcataagattctgtcggtaagatgtttatttctccactttgctgaagctcatggggataaaacaacttaagggcaatatgcttggtgataatgctcttgatgtaacctgtttgcatntatgtgatacaagcagcatcgtcttcatagataatg

SEQ ID NO: 8444 - DNA, 436 bp, Oryza sativa
agcttggaagtgtgtgtgagtgaatgatgtgatgtctatttataggacaggtatgacggttatgggaaggggaattgttcgaactgccctgcaaccgccatcagggattgatatggagcgtccacgccaaaaccaggatccaacgacgcttaccaaggcccagccgaacctgggctgggctgtcacgcccaaaaattcccgaatagaattccaagcagaatgtgcattaatacccccgtccaggaccggccggggtacacaaacgacaacgttgacatacagatccacgtcttacaaacatcataaaagtcttagataaatgcagcggaaaattataagataaccggagctaagccttgacttggactgttacggaacaccactccacatgcattctcaacggcacggaacgaagctactcctcggaaaaccacca

SEQ ID NO: 8445 - DNA, 483 bp, Oryza sativa
taagctgatgagcaaaggtgcgattcacttatacttcaacactcctcacgtggaagctccctcaggcctcagacatgcaatagaagtggactacattttttttatttaattgtgtcatccaacattcaaactcgagacctctagctctgataccatattgagttgcaagccagttcaacccacaagcttaagttgatgagtgatgaagcacgcaggcaatcacctatacctcaatataagcatatgaaggcacaccagactgaagttaacgagaagagcaagcaggcaggactatgttgtgagtctgccacaacaagaaggcgagaaggcgaaagaaggcgaaacatcagtccacctatacagaaggcgaaagaagactcacaagaaatgcagcatgccaatctagcagcaataaagaagtctgtctgaaaggcaatgtcacaactaaacactaacttgcagagatgaagaacaccgaattat

SEQ ID NO: 8446 - DNA, 351 bp, Oryza sativa
agcttaaagctaatagtaatagctaaggttttctgaaacgtacgtgttgccgtgcatgcagctcgcctgtgtgtctctggtgcccccgtcgccctcgctgcccccgacacgtctccccctctccacgcgtcgccgtcgtcttcctcctcccctcgccgtggtggctatatacaccgccgcggcgatcaccttgcctccttctgtctgtcgatctgtccgtcgtcgacgacgtctcgatcgatcggtggtggtggtggtggtggccatgagtctcgtttgagaggtgagccgccggccgggccattgatgagagcggcggcgtctgccgggcgacgcgattgtcgttgtggc

SEQ ID NO: 8447 - DNA, 359 bp, Oryza sativa
  unsure (1)..(359): unsure at all n locations
acataattaatgttcctaaaataaatacgcgcgatggatcgttaattaattttagagacaccaatttgcatcaatatcatctattagcagcggaagacttctttaaatcatatgatacagtagcaaatatctttgccgttctctctctgagaaaagtcatccgttggttcacatctaaacagatgttgaacatggcaaaatctatacaaatttctattgagatttgcatgncagactgacagatcaaaacggataaattgccactgtcctttttaataattatcggacccggagggactctaatggactattttcggtctttgtacgtatgtcattggccaccttgcgcgcgggagagc

SEQ ID NO: 8448 - DNA, 400 bp, Oryza sativa
ctcaggtcactgagtagcatcatacgtaatctaaagagagctgcgctgaaaactactaaatcgctcaatggaccaaaacttgtcatgtcctcattccggaattggcaagtataccagaagaataaaactttgcaccggtgtcgcaacattacaaaaacacataaatcaagcgcgtaattattcacaggagtccaggaccattcttcctgcctattttcaataataagggtgcagcaagcatacactttaaacactcaacgaatttgtgcatgcacatctgacaaagactaagagaagtgaatgcacaattcaagaatcttaactgatcaaaccatagagaaactataaactgtatgccatggcatatgtatgggcccataattgcagcttaccacgacca

SEQ ID NO: 8449 - DNA, 208 bp, Oryza sativa
agctagtgagttgtgatagccatggaacttgactctgacgagttggtgttcgacagctcatacctccgcatctacaagaacggcaaggtagaccgcctccaccggccccctctcctcgccgcgggcgtcgacgatgccaccggcgtcgtctccaaggacgtcgttctcgacgccgggacaggactgttcgtgcgcgttttcctgccct

SEQ ID NO: 8450 - DNA, 452 bp, Oryza sativa
  unsure (1)..(452): unsure at all n locations
nggctacgcaacgttgattgacagttgcctaattcccgttgatattatgctgncagatttgagttgagctttatcagcagtttcagtttgacaaatccttcttaggccttgtttagttcccacacaaattttacaccatatcacattaaatataggctaaaaaataattaattcagagattgcgactaatttacgagacgaatgttntaagcctaattgctccatgatttgacaatgtggtgctacagtaaatatttactaatgacgaattaattaggcttaataaattcgtctcgcggtttactgacggattctgtaattagttntttatttgtgctcggacacctcatgcgacaccctatataatacccgatgtgacacgctaaaantttacgcgcgggatcaaaacactcctaaagcaattgaaaacttgttaaaaagtcttgaaaatg

SEQ ID NO: 8451 - DNA, 442 bp, Oryza sativa
  unsure (1)..(442): unsure at all n locations
agctggagctggtgaacttcacaccattcttacgagtttctatgattatgtaattgctagtgagtttcttcctaaccttctgttcatctttctttgagattctgaacacatggccaagctgccctttttctagcttcaattgcttatcaatagtaagatccagatcagcagctgtatgcttgtgcaaattgttgatgtgaatttcaacttcagaaagctcatccttcagcacagccaaatcagaagaatatcggggagatatcctatactcaccattctcaagttgatcaaggtcaatagctgtctcaacaagagaagcaaacctaccaaacctatcctctgtcagccactcatctaaagaattaagaaactntgtccttatcagcgcagaanaactgccatcatattgttgaagaacattcttgatgtatgagaactctat

SEQ ID NO: 8452 - DNA, 464 bp, Oryza sativa
  unsure (1)..(464): unsure at all n locations
tgtcgagttcttctcgtatggcttgttttcgatctggtgcaaatctcacgcagtttttgctttactggcttggcgtccggtcgcaccatgagtttgtgctcaatcacctccctggatacccccagcatgtcggacggctgccaagcgaacacatcagcattgtcgcggaggaaggtgatgatcgcgagttcctatttctcgcctagtgatgccccgatcttgacggtcttgtcagggttggcactggagagtggaacgattntgattgcaccgtccggtttcgccgtcttgtttgttttgctcactttcttgggtggctcaactgtggtgggtgggctgggcgtgtgctccaccatgtcgaggctccgcttgtcgcattgcactgccagcttagcattcccttgaatagtgattgttcccttcggtcccggcatcttgagcacttgatacgcgtagtgagatgc

SEQ ID NO: 8453 - DNA, 435 bp, Oryza sativa
  unsure (1)..(435): unsure at all n locations
tgcaagcttaagataccaatgcgagttcattctctttgatgtggcatgaccacaactcactactgcccatctgtgacagttgaaattcaagggttgatttttccagcgaacctcattcttctcgaatccaaggacctatatgtcatacttggaatggattggttgacaagacacagaggagtgattgattgcgccagccgcaccatcaagttgaccaatgcaaaaggagaggtggtaacctttcagtctccagtgccgcagaagccaaggatcagtttanaccaggctgctggtgaagaacaagatgtagcagtggagaaaaccactaataagctggaggatattcccatagtcagagagtatccagaggttttttcggacgatctgacaacaatgccaccaaaataggaatcgagttccggattgacttggacc

SEQ ID NO: 8454 - DNA, 468 bp, Oryza sativa
  unsure (1)..(468): unsure at all n locations
tggagtcctganagcatggacagtactctcaccgntagatggtatataatatggccaagtgctagagtggttttacttcgtgctgtacatgtggtgtacttctatttggccttaganaattttacatgggccctttcagcaaaagcgatgtggcatcattgatttttagtactagaatacatataccttcctggttgataagaggcagtcacaatatgttactgtatggatcaggttgtttttccttcaagaacctgttcagaattcagataccttgaattttccttgtgaagttgttgcatttttcactagcagcacatgatgtggaattctgtttccatctacatcaattctagtggagttaacatccatctctctctctctggttgttgcgaacagtttcactggaatatattgttgtggatctgggtangggcatggatgagctgcaagcatgcaaagcatggt

SEQ ID NO: 8455 - DNA, 468 bp, Oryza sativa
  unsure (1)..(468): unsure at all n locations
agctntaccaactgccaagcctgtactcctctcctttttttaaaggaaatcgtttagagcaagtactataatatctcatatgttgcccctaaaaatgccacattagattgggtgatgaggtataggagagaagtggagagagagaagatgagccacccctaaatcaagagataacctccacacaaatttcaagaagtgtgtgagagtattagagatattggtatttgtgtgttagaggtgatacattgcatgtgttgcctcttaattcatgagtgaataacatagataaatttagaggtgatagtcacatctaccatagcacttgcccttagaacagcgacacggtcttcaaaatataactgtgacttcttgattctataaaagaatatttattaaaaagatataactcttgacttcttgcttctatacaaaaacattcattaagaagtaatatatgcatatttttat

SEQ ID NO: 8456 - DNA, 155 bp, Oryza sativa
tttgttgagacattctgaaatcactaagtgatttatttcttttaagtttgggtcgaaaagagacttgcgtctcaaatcgacttaagagatgcttttcaacagctcaattggatatgtaccgacctcctgagtcagatcattacttttcggctccc

SEQ ID NO: 8457 - DNA, 483 bp, Oryza sativa
  unsure (1)..(483): unsure at all n locations
actcagcttatggcatccgtggctctcatcattctccttctcaaccgatatctgtacgggccgggcataaagtgctatgcgctctttgtctgcatggtagcgggcatgttcggcctcatcgatgcctatgctgctggaagttcgatgcatctgcgaacctccatcgttgtcttaatattggttacggtagttnttgcagctgtagtctatgtggcaatcatcggtcgtggacaacgtgcaaacataaatcaacatcagtcaaaacaaacacaaaatcaacaaaccaacaaggaagatggcatgatggacacaccaagacaaacacaagatcaacaggaagctgacatgaaaaagaaagccgacatgatggccaagtacttaatgctagcaggaatattggctgcgagtgtggcctacctcacgggcctaaaaccacctggtggctgtggagggatgaagggatgggcactctgttgcaacccg

SEQ ID NO: 8458 - DNA, 435 bp, Oryza sativa
  unsure (1)..(435): unsure at all n locations
agcttctccttcatacacagatccctggattgatctgctcggtcaacaaaggggttggtccacttccactgcttgctgatctcagatgtttcagtgtaggttctttccccattcagctataaatctttttataatacatcttgattgatgctaattgagtagtcacactaatttcttcgattcaaagtatcccaaatcagtccctttctattttccctgtacaacagtatatgcactaaatgactacaaataattcttattactaagcaacatttagtgaatcaatgagaatacacaggcaactgtatgattcagtgaagcaatgacctagatggagattttttttatcatatatgcaacacagtgctctcattcagagttncttttgtgtgattcttcaggctctgggcattttttctacaaccatcaatgatg

SEQ ID NO: 8459 - DNA, 483 bp, Oryza sativa
  unsure (1)..(483): unsure at all n locations
nggccgcttgccgcagacctgcagcagtgcataaaataccattttgtttgaaggaaagaatgtttaggccatgtttgtttaggtttatacgatcggtttatgagaagtttaagtctaaacaaacaaatcaatttattggttcggcttttttaagccataagaaaaaactacatgtcacagtagttntttgggattatggaaagtgtattttttactcgaccattaaactcaggcttctaagtcactgtcttacaaaaacatcctccattcaaaagagttggcttaaaagctagtaaacctaaacaaaggctctgtttggatccggaatcttgctatttagtagtattatacgtagattactgacaaaacccattccataacccctaggctattntgtgagacgaatctaacgaggtatattaatccatgatgtgctacagtgatgctacagtaattagccgctaatcatggagtaatatacat

SEQ ID NO: 8460 - DNA, 396 bp, Oryza sativa
tgatggtgtacatgcatgctcgatgatgatcggcttagattttgttgttccggacgcttgaacgggtgatcaagccgaagatgcgcgaggcggaacgatgaagtcgaagcagagtccatgcctatgtcggagacgtgccgatgtccacgatgcggtgggcgacgcatacccgttcactgatcgggataaaagaaagatatacacggatacaagcagcagcagcaatgcagttgcaatttatagatagcccaactagcagcacatgggccaagtccattaatgcaccacagtccacacgggcaagttaaccagccaaccaatcatctcccatcttccattaccacaacgagagagacaaaggggacaggagccgatgagcggtaggacgccgcgttg

SEQ ID NO: 8461 - DNA, 428 bp, Oryza sativa
  unsure (1)..(428): unsure at all n locations
cggnggcgatcgcagggactcgactcatgaggcagctgggtatatgacttgaggtgatgaacggcggagcatcgaggtgctgcggagggaagagaccttggacgtggtgcattgccatggagcgagcagcgcggagcgtgaccatgaaggcttggcggcgcgccaccgtggagacaatgcagcgtgcaaccggcttggtgtggaggggagctgctacgcccttcctcgggcggcaacacaacggaggatgctcgacggtggctggcgatgatgacctctgaggcacgcagaagttggctggcgaggggcatcngaacaacagtgtctgttgacgacagttaaataccagatttacaccgttaatgcatgtataaatctaaaaatataaaacatacaacatagtggtaggcttcattctaacaattcaa

SEQ ID NO: 8462 - DNA, 290 bp, Oryza sativa
gctgcaagcttctcttactgaaggaggaaaagatttatcattatatatttcaaccacagtactcagcaagccacaccggagatgcataattaatgcattggagtacaaggggataataatatatgggttaagttttgcatctaacatcatttaaatgtcacttaattgcccaaagccatattattaagacgatcctagagcttcacagtattatttaacaaaggcgtgaccccttaccaacctgcctaacccaagcctacgatgataaaccgaactgcatccgccctggt

SEQ ID NO: 8463 - DNA, 469 bp, Oryza sativa
tcaagcatccgtgatgttttatattccgtttgcgttattagtgaactaagtgttggtatttaatacggttacagataatatccgcaagcgcacggatatactgatgtagcacttcccctacggagtattccaagggtatcgaaaccaagggaacgtgtgtgtggtcagatcttcctccggttcatccaaggacaccaagcaaaggataggccaggatagagaggattcactagtgagaaacagtgtctagggaaagcttaactttaatcctaatgcaatacttcaggcactagcaacccgctgttctcagatgtcgctctactacgtacccggacagggaggacttaagtgatctcgagggttgtcaccacctttacacccacctcaaacgtactgtgggatacgcaacaattactggataacaattacctaaacaccacgtctaagcaattaatatctactttagtgt

SEQ ID NO: 8464 - DNA, 464 bp, Oryza sativa
  unsure (1)..(464): unsure at all n locations
agcttgtacaagttctgactctnctcatgttgtcttatctggcaaagaaatcatattcacctatgatgttcactttgaggtactagctntgcatgttttggttggattctgtttcccccttcatgtgatagttgcctattctcttaatgttaaatttattgcaatgatttccattgaatctttttccctcattgcaggagagtgacatcaagtgggcttcccgttgggacacctatctgttgatgactgatgatcagattcactggttttctattgtcaactctctcatgatcgtgcttttcctgtctggtatggtcgcaatgataatgctccgcactctatatagagatatctctagatacaaccaacttgaaactcaagaagatgcgcaagatgaaactggctggaagctttgtcatggagatgtgttccgcccccaaccactctgattactctgcgttatg

SEQ ID NO: 8465 - DNA, 461 bp, Oryza sativa
  unsure (1)..(461): unsure at all n locations
gacctataaaactcagcttgttatgtatcctgccatggaggagggcagcagctaccttgttttcttgcatttcttctccatcttcggtgcattcgcttccttctcacaatgtgngatgctcctaatttcccatgcttcttgcataccaattcttgtctgtattttgtggcgatttaaatttggatcatgttcattggtaagcacaaccaaagcttaactacgtcgtgttcagatactctgaccgtcaaaagaatatatatccttcgtaagctagtctagtgccacaaattgttatcttctttgacaggttttnttctcaagcatcaaattcgtttgacccctataagctgacaatcaaatgatttgttggttgaacacgagcaatagtgttaacgccagatgagctactactcgatcactactactaccacctcgcgtcgtctgattcatactacagcaca

SEQ ID NO: 8466 - DNA, 475 bp, Oryza sativa
  unsure (1)..(475): unsure at all n locations
taagtcacctgatgctgcagctgggctgtatactatgagtgtgtgttttgtacgatgaanaagagccctattcagagaaattgacatgcttatgatacatcatttgtgacttgtgagacacacacagacatctgaaaggacggtgcaaagtgatcattataaaccaacatcaggtagtgatttcttttatcctttcggaacanaatgttttggttatctgtaggtgataaacagatgggatgatttaaggaggttgtacattaatgaccacaatgatcaaccagccagagagtatccgaaggtggtcgaatcagagtcatatggtggttncttagtgaactgtgatgatctgattgataagcttaacacatcgattctaattatctcacaacacaacgaagtatcttgctgctattttttccgcagaatgaaatattagtaatcctgcagttaaacataggaggaatactatact

SEQ ID NO: 8467 - DNA, 497 bp, Oryza sativa
  unsure (1)..(497): unsure at all n locations
gacctatgaatctaagctgcctttattttgttgacgagattctggtaccttaattcttttatccttaactatcttttctttcttattggtgaaatgtcatcttctcagttcagcagctccatttgttacaacatcctgtcaagaatgctgttgcagagaggaagcacacccgcatctcatcagatatgagtgatccttcaacacctaagaaaattgaagatgccaagaacatctccatatacaatgatgtgattgacttcacattgtttgaactcgagactatcacaaggagcttccgtgctgactacgttcttggtgaaggagggttngggactgttcacaagggctacatagatgagaatgtcagggttggtctgaagtcactacctgttgcagtcaaggtgctcaacaaagatggacatcaaggacacagagaatggcttgtgagttgcaacttggtcatattcactatgtgtgctgatgtccgctatgtacat

SEQ ID NO: 8468 - DNA, 222 bp, Oryza sativa
agcttcagctggatcatccttaatgtcttatgaagcaagctgatgacgtacgaactccacatgttcatcagcaagtgcttggacataaaacattccagcacctagcacttcagtgacaataaccttaaagaaataataagtcgagttagcatagtatttttgatacatttaactatatagaacattaaattcaacaaacaaacctttagagtctctttacta

SEQ ID NO: 8469 - DNA, 464 bp, Oryza sativa
  unsure (1)..(464): unsure at all n locations
agcttactatcagtcatcggtacgatgtttctatttntctacaagagtgacctaccttcatatgttcactggattccttcatttccactcataagttgctatcacccaaggtgtatttacccatagcttccctctaaatctgctcggntggaatagaggaagaggaaaggagagatgaagaaagggctgtgtaatttttccgtgaaatgagagttatatcaatatatgtagacatccgtgataaggatgaaagtatattggcatgatcatatgtactatcaaaacaacaggcatgtcattgtttatatgaaaacagtctactgattanacccagcattcgtgccaattatttgagcaaatggtttggtctgagcagtatcatataactgtccttatgcattctatgtgtgacgcctaaatccagcttacttctcacttcgtgatctcactatgatctttatttt

SEQ ID NO: 8470 - DNA, 396 bp, Oryza sativa
aatctcaatggcatgatcacattaaccgtgtcttaacagctttgcattcagaaccaaaagcaatacggcttcatctgaatacacccatgagagatcagctaggccatatgtaggatcaaactatgcatagctaactcgaatgtagctatgaaatgaaggcagcaagcaaagtgaatgtgaatccatggcgaatgaattgatggaggaccccggacctgcacttggccagcaagaacgactgcgacggctgagatggaagcgtcttccataatctcctccaggcccgcgtcgcctcatctgggctggatctcgggcgcgaagtcccgggcgagctccgcggcaggcttcgcggattcctgcacggaatggaaggtccacgaccgacggagacggagt

SEQ ID NO: 8471 - DNA, 351 bp, Oryza sativa
ggacccaagcgacgcagctgcacacgcggagcgccatggtttgactagccaggggggcaaccagaggcggtaaaggacatcactgcggggagaaaccaaacatccaaaaccggccgcagtatgagcaccgaacaagaggcactcgacagacacaaaatcataaccgggagggagggataccgaagaaccgtaagctgaggaccacaaccgaaggcggaagagacgacccaaaaccaaacacacaggcgggacaaacacggacacatgaagggaaaaaccacatgaaaaaaaaagcgcaaaaactcacagcaagtaagcgaggacagaaagagacaaactgggagacaaaaa

SEQ ID NO: 8472 - DNA, 476 bp, Oryza sativa
  unsure (1)..(476): unsure at all n locations
tggggtgtatntctggcatgtagaaccttagatgggtatgcatagacagatatttggggttcctgtacttcagattttcatttccatcagagagtgacgatggatcatgtgctntgaaatagtactctttgagccgagctgactcaagttgtcgtagaactgaacagtatgacgaattgagccacttgaagttgtcaatgttntccacatggacagtagcaggtagaggaggattgcttatgaaccacattgtcatagctgcaaaattaagtctatcagtgacaatgtggaatacatgcttctctggttccttggcatgtgtcaccgttgatctaacaactactgaggctgcaaggacgttatctgaaaatatagcgtagtggtatagagaccgatcctcacgcttngccttatcttcttcctcctttcaagcagcatcacgataatattcccggaccacaccatcacgaaaatga

SEQ ID NO: 8473 - DNA, 466 bp, Oryza sativa
  unsure (1)..(466): unsure at all n locations
tataaaactcagcttgggtgtatntctggcatgtagaaccttagatggtttatcttatacagatatttggggttcctgtacttcagattntcatttccatcagagagtgacgatggatcatgtgctctgaaatagtactctttgagccgagctgactcaagttgtcgtagaactgaacagtatgacgaattgagccacttgaagttgtcaatgttttccacatggacagtagcaggtagaggaggattgcttatgaaccacattgtcatagctgccaaattaagtctatcagtgacaatgtggaatacatgcttctctggttccttggcatgtgtcaccgttgatctaacaactactgaggctgcaaggacgttatctgaanatatagcgtagtggtatagagaccgatcctcacgctttgccttatctttcttctncttcanagcagcatcacgaaaatattcct

SEQ ID NO: 8474 - DNA, 477 bp, Oryza sativa
  unsure (1)..(477): unsure at all n locations
agcttcttcctgaaataatagtggtcactttatgcatatacagcatgtctctgtggattgttggatattgtcatcaccttgaggaatacttgtctcacaggacttgatgataacagccatgaatcaataaatgagacctgaaccatagtntttttttccctttcagttgcagccatgtgtaatgtacataaatttcctcagcaatatcaaaagttctaaatttaaaattgccaagtattagcatggtcggcttgtcgtggtattccatcacaaattacaatattagtacagggttccttntgtgttgacagttaacacgaattaattgtaaagtgtaaacatgggcatagattgaatattngaatngcatataaaatgaactcgtaatactccctccgcctcaaactactgggtagttcgtcctaagtcgaaacattatatcnttgggccatcaattctagaaattcatatagtata

SEQ ID NO: 8475 - DNA, 476 bp, Oryza sativa
  unsure (1)..(476): unsure at all n locations
tagtgtgccacttcatcttctcaagagtggtgtcacttgttatattactggaagaggaactcttggaagaagactatctaagtagtactacaccaagaaaagacacacagcaggttaatcaattataagaaagagcatccgaaatagttgctagtcaaatattgcagtcagaggattcaattcatttctgataaatggataatgaaaatcagcangcaacaaagcttaaagcaaatttatggagtactaccaatctggggggaagtaaggagaataaaaactactaacaagctatgttgtggaactatgacttgcctggccaagaatgtccagttagttggcacagtttctgaacatacaccagatagaattagatctataaaatgttcacaaacattcgaacaaatgagatgaacttatgtgaatcaccataacatggagattattctaataatgtgtagtgatcgagtgcgtat

SEQ ID NO: 8476 - DNA, 431 bp, Oryza sativa
  unsure (1)..(431): unsure at all n locations
gaccttaagcacctgcagctgcagcttaaaaaagataaatgatttttaacataattcntggatattctctgtaaaaaaacataatgtttagtaatttgggaagcgtgcgcgtgaaaaatgatggagtataggttgggaaaggtgagtgccgaactcgaccttaacccggntataaatatttctagtctatacattatctctattattttaaatacacggtcatcatcctctaccgctcgcaacgcgagaaaggctgtgttcagttctacgtccaaattagaagtttgaagaaattggaaccatatgacagaaaagctagaagttatatgtgtcggtatgttgtcgtacgaaacatttgaagttgaaaaaataattaaatcttaatgactaaatttgttaaaccatacctgccactctctgattcgtggtaa

SEQ ID NO: 8477 - DNA, 450 bp, Oryza sativa
  unsure (1)..(450): unsure at all n locations
tcagtgactgaactgtggaaatggattataatctgtcaagtcatattcgttgttttacttgtagaggctaaattcaaacttgtatgttcgtgaagtgatattagtatgacatatcaatcttatcaatgttttttctattttttctataattgnttaaatgacatgtaagaaatgaaggggcatcccctcaaatgtgaactctgtaactgaaaactggtttgtttgtgcacgtgtcagcggatggataagtgggatgaagttgttttctatccatttccttatgccaaatttgatgtgcctccaagtagcaaatgtgaattgcgtgatcgaaatgatgaaagagactctgtaccgaactgtgcttgttcatgtgcatgttccctgcattattttctgtcgctgctgtttgttgttngcctacaagtttaacattgactacagggccgagtg

SEQ ID NO: 8478 - DNA, 463 bp, Oryza sativa
  unsure (1)..(463): unsure at all n locations
agcttgcccgcatgtacaccgaacacgctcttatcggngttcagntttatgcgggcggagcggagactctcaaaagtttccgctagatccgagagtaaggtctcttggttgcgcgtctttacaaccaagtcatcgacataagcctcaacattacgtcctatttggctacccaaagaaattcgagtagtacgttgaaaagtaggacctgcattctttaacccgaagggcattgtcgtataacaataagttcctatgggggtaatgaatgcnagtttttcctcatcctccctagccatgcgaatctgatggtaaccagagtatgcatctagaaaacacaaaagatcgcaccctgctgtggagtcgacaatctgatctatgcgaggcaggnggtaaggggtcctangacatgcctngttaaggtcggtgtagtcgatgcacatccgaagcttgcccgtcgcttggg

SEQ ID NO: 8479 - DNA, 472 bp, Oryza sativa
tggtgctgcggcggcattctcatctgtgttatgaatctctcttcatttggatcaaaaatgttgcgaactaccaaatctaggaatattcttcagccgtggcacatgttttactatatctatcaacaaattatacaaactttagatgtcttatagcaaaatttgcgttcaaggaatattttgaagctataacgcaaatcattcaagtatgcaactaggcaagatgggctagaagaagaagagatgtgcttgcaaaccaaagccagcgaactacaccgactgaaaaatatatttaagacaataaaacgagagcaattctcttgcgtcagctttggtaacccctcctgttcagtgccacattcatggctaactcaccaatcattccatgcaaacctgcacgtttcctcataatgcgcaaaatacgtgtgaagactacgacgaatcggccaatcagacaagtcatctctctcggact

SEQ ID NO: 8480 - DNA, 273 bp, Oryza sativa
  unsure (1)..(273): unsure at all n locations
gcatgcaagctatgctgcagctgcgctgcagctttgctgctgctgtttncccttatgtgctcagccttgtccacgccagggcgtggcgtggccttccttgcgccgatgatgacttgttggtgagaagaatgttttgaatctccactttgacgctgatctactacagaggaggaagctttgcttgtgggtttacaaatgggacatcggtagattttttgtcgtgcgtcgtttctccttctctgttcccttttcttttattgtcgtgttctttac

SEQ ID NO: 8481 - DNA, 489 bp, Oryza sativa
  unsure (1)..(489): unsure at all n locations
tatgccttatctcatgttntccccacaggagtttttctagagataaaacaaggcatggattactccttaaaccttacaggtttctgatagagtaatcaccaatcatattattcctatttttttcccacggggttttttgaaggaattaaacaagttgatctcaagatggactcgatcaaaagggggagtgttacaaaagcatcatgagacatntttgatctcatcaaaggctcatcaaagagcaacaatggcaggattcaagtgacttgtaatagccatattatggtgaatttgtgacacataaccagccatatttagtggcttaaatcatccttaattcctaggagtatcctaggcttgtgcatatgtaaatccccactataaaaggggacatnttgagatcaataagacttggaggattcactggttttcactgttcatctttgntctctaatattaagcgcattcttgtcttgtcataatacatag

SEQ ID NO: 8482 - DNA, 199 bp, Oryza sativa
gcttgtcacccacatcggagattgccctattcattccatcatcttcactttcacatgctctggccttctttggcttgcttgcagatgaagtttcaggatcaagatcaatagtggttggagcacgattcaccttttcgttttcaagttctacatcttcagtaccaagaactgaacttgagtcctttgcaaactttcctgt

SEQ ID NO: 8483 - DNA, 436 bp, Oryza sativa
  unsure (1)..(436): unsure at all n locations
ncatgatccattcggtcttaccttgtgctcagcactggctgtatttatgctggatgcaacttgctttcggatataagggtcagttntagttcagcatcacgacgctccgtcgagagattaacaaacttctcttttccaatcttggcttggcataaatgataaagctccaaatttttgcatattagatcaatcagatccctgaaaaaggtagagaagattntactgtaagacatncattgntcttaaattttgcactgtttcatgtacttcatgtgacagatcagactnttcacaacctggttagcagagcgataaggttaacgtttcttgcccggactgatatctctcccaggacattattaactatatngatgacgtcctctggaccttccttgtcaggcttacacgggagtaccatagatctgttacccactct

SEQ ID NO: 8484 - DNA, 465 bp, Oryza sativa
  unsure (1)..(465): unsure at all n locations
agcttatccatcttcatatggagattgaagggatttttttagactcttaaaataatattttattaatagaccctatataaatttattttaaaatttaaattttttggccacgccaaagaaattagcgttgctaaataatactgtggcgtgaagttggaacttgaaagggtatgccaggtcatagtcttaccacgccatcatgtgtggcgatgcagcctcatgatgcaaagccgtcttctctatgcgttttccatatgtttagttcgtgaaaagaaaatntntagatgtccaaagataaaaacttttgggactatcgacaagtgcatgcgacagatcttgtgcggtctagtagtgcggtagtgccttgctttgcttgctttgcatgtctagtgcctttattctngcagattgattcaagactcatcgagcttgtgagttgtgacagcgagggagtatggagtgagt

SEQ ID NO: 8485 - DNA, 457 bp, Oryza sativa
tgtgactggatcgaagttcgtggcttgaacgatatgtccaaagacatctattctaaggcccacttcgcaatccgtccgtttgcttcgcggttatgaagtatatccccgagtggaaacgatgtgaccaccgtgaccgagtgactctgaaagtagtgagataatttcctgacggtaattaagacaccatataataacttttgaacctgaggatatcttgtcttggagtcagctaaaacctcgctaacgaaataaattggtcgttggactttttgaatatggccttcctcttcacgctcgacaaccaggaccgtgctcacgacctggaaggtcgccgacatatataacagtagcggctcttgtggatgcggcgaggccaaaactggcggagtggtgaagaagttcttgacgtcttcaaagggcttttgtgcttcgggtccccactggaaatcgtcagtct

SEQ ID NO: 8486 - DNA, 426 bp, Oryza sativa
agcttctggcgtttggtcaagcctggcatatcctattctgacgatctccatatcctcccctcgaacgacatgacgatgatggacacgtcgtcatggtagatcctcctggccccatgcgggatctcgagcagcctgcggcaatccatgcctgcataatcgatcatgacagcattgtcaagctaagctcaagaaatcaagttaaatttgcaacaatctgttaaatgtcaaacaggagggcattgtattttgctcaccggctttcctcgcggcgcggaggacgagctctccaacgaggtgcttcgccgggtcgccgtcgggctgctcggccgggaacatggcgacctgatcgaccacctccttgttggtgaagtactggtagagcccgtcagaagacagcacgaggaacctgtcgttggagctgatccg

SEQ ID NO: 8487 - DNA, 428 bp, Oryza sativa
  unsure (1)..(428): unsure at all n locations
ngtaagctcttgttcttgtcggaatcgctaaacctgaacctcttctatgctgggcatgcgcaccttttatatcttgaacatcaaggaaacaactttgagtaaaactccaatctctctcacggtacaactgggacaaactatgaggagatgagatggtttctggttagtgacaagcgacaggacgtggatcgatggtgatgatctagcangcttggccagctttccggtcgctcccggggacagtgacgcggcatcctacttggagagttggagtgcacacgcaggagtcacgatgtgtgtctcgcgtttgataactgggacatttcagtttcagattcgcaggtgtaagcagagaaacagtatggtttcagcgaagtgtctgacacttggtttaattctatgatttaagctgctactactaatctttc

SEQ ID NO: 8488 - DNA, 224 bp, Oryza sativa
  unsure (1)..(224): unsure at all n locations
agccttatatatatggagtttcttataatatctatttaaatgaatttctaatattataatagttaattcattcattagtacccttgaacacttatcataaatcattcagctatgcaacataaaagaacacacgcatactcctctagaacacgggatttnttttctggtctccacggaatcgagttgactctcgtaaaaattgtacaatgccttgaatgtgaaaa

SEQ ID NO: 8489 - DNA, 350 bp, Oryza sativa
ttggcaaccagaaagcaggctagagattgcaattctaagcacgacttaatagatcaaactcaactgatgcagcattaagtatgaaaagaagaacaatatctagataatcaagccgctggaagtcttatagagtggtagatatatcacataatctaagttaacgtcattgtataacctaatcggctgccttccattagcagatgttagccgattataggttagataaagatattatcgaagactatatgagatatatgataactcgacgaattatatagacaagattagagtgtcataaagatggaagcactaatcctgagaacataagtcgtcatgacaagttttacctc

SEQ ID NO: 8490 - DNA, 173 bp, Oryza sativa
aatggtggttaacactatgaactccagctagactttatgcatttaatgatggcatctgaagagacaaacctgaatggttcaatcctttcacagcatcaaagtttttgtacgtatatcccacaaagctgaggtcttttgaaatcatcatcatctgtaaatggtttcacaaaatc

SEQ ID NO: 8491 - DNA, 470 bp, Oryza sativa
  unsure (1)..(470): unsure at all n locations
nggtaaggagactggcgtgggatctctcgtaattntgttgtttccaggacaccaactcaggtggctagccatgctcaaaagtacttcattagacagacaaactcatcaagaaggaagaggaggtcaagcttgtttgacatggtcccagaaatggtatgcaatttttgcttgcaattttcgcttgagacaggaggtgtctattatctccatatatgttaaattgtgtcctgatatttctatatcacgaccatcttatgttcgaatttcatcttcaacctgcagcccatggacgaatccccagtggtcgtagaacagcttatgctccatagtactcaagacgaagccacaagctcaaatcaattgccaatatcacatcttgtgaaacagaaggaacctgagttngctagacacctgtcggatttcagctaaggaacatgaggaattgagtcacaaaccttcactacacacta

SEQ ID NO: 8492 - DNA, 449 bp, Oryza sativa
agcttaattgcttcaaagactatgatcatgtttttctctactataactcattggtctccgaactcgccaaaggccctgagttcgaatccacttcaggatttgaagtcctgtctcagttcatgctcgtctaagaggctggtcgccctacagttctttttgtttggcagctagttgaaatgtaagctctcttgctttctcctctggagattcatatagttcctctcaattcaattctttaccgttcgtaccttccttcaactcatttcagcccagtggagtgaataagctaggaaaagaaaaggagactaaagcgaggaagtagacctagttccgttttctactttattctagcccctcagtggagagaaccttacccggtatttgaagaagccaagcatgaagccgagaattagctctttcattgatgatggtcgacgtaatagctcctt

SEQ ID NO: 8493 - DNA, 464 bp, Oryza sativa
  unsure (1)..(464): unsure at all n locations
acctataaaactcagctggaggggttaccagtgtgcggcatttaacaacatttgttattctttccagctttccaaaaaacccagtctcgcagagcaccaattaactcttttaggccagtctcaggagtttatttatttgagcctctgtctcggataagattagtgcgagccacatccaaatacctcggncaaattattctgtttattattatattaggccgcaggtggtagaatccctctgtctcacgagcaacacagccaagtaagctaagtttggatctgataaggttgggttaaagccaaagtaaggaatgaatggagaagcacagtctggctctataagtaaggaaatatctctatccggttattgtagtgaaaatcagtctcgaggggagcaagccaacttcaaattaatatgaatacgaacctgggtcaacaagtcgaaagtcatatgaacttagaga

SEQ ID NO: 8494 - DNA, 434 bp, Oryza sativa
  unsure (1)..(434): unsure at all n locations
ctctaagncgactgcagcatgcaagcttctacaagaaggaccagagacctcttattttggtatctgcagaagcattcaagttcagagggctaaaatagcctcccagttaattaaaaaaaaaaaggaaaaacacaccatatgcaactcccattatgccgctgtatgtgctgctcttctatatggtccaaatgatacaaaaccaagtgcatggatgcaattatacaacctatgcatgtttgtagattataacttggaggccatatgactccagtttgggttcccttctgttcattagaggcattacacggtttacaaggatagaaaataagggtattgaactatngattactcctagacatttcttctgtatatggtaattggaatataatgttgcattacccatacacctacgactgtgaagcaatactaacaag

SEQ ID NO: 8495 - DNA, 317 bp, Oryza sativa
  unsure (1)..(317): unsure at all n locations
atctttgtctattatatatttttaaatatttattntacaaatatattgtccagacatatagattatgttaaaaaaatacttcaataaaaatcatatatttattgatatttatatatatatatatatattataaagaaaatagtgcccaaagtttgttcctagagaccatgttgttgtcattttgacaagtattattaatctggaagaattatcggagaaagaagagagtataaaagaagtgttaagcataggtccttcatcgatcattgttgtttngagactagcatncttcttatctatcctacatgctacatcac

SEQ ID NO: 8496 - DNA, 460 bp, Oryza sativa
  unsure (1)..(460): unsure at all n locations
ggcgcctaaatctacacgtttactgcgatgtaaattcanatatatgtaagagcgcacagaataacagagaaaccagacctccaagaaggccgcggtctgcgcgaactgcactagtcgctctacggcggcgtagacggcctcatggccgctctccagcaacgccgtgaccccgtagtacagcacctgcgccctgcaagatccacgaaaccctcaaatcaagccgagataacaaggatccaaacgccagcaagccgtggcgcgaggcggcagagtaccattcgaaaaagacggcccactngtaaacggagaggtagagccgtcgcaccgccgacccgacgcccgtcatccgcgagcactcagcagtatctaacaaagacgcaggagaggaacgccaggcctgtacatagatactggcttggattaatggtcgcgtggactgatctactatagtgttgatact

SEQ ID NO: 8497 - DNA, 154 bp, Oryza sativa
tatcacttggatcatattattcggggattcacaccgcatatgctatatattggtatcaagtcacttgggtgactacgattatcaaaaccactcaggtggtgcatctattagatacatctattcgaagctcctggctttatattttcagccttca

SEQ ID NO: 8498 - DNA, 484 bp, Oryza sativa
  unsure (1)..(484): unsure at all n locations
tcctcctgcagcagggctatggcacaagcagaatctatatcctgtggcctctgaaccataaccactactcttatctcatctttcaatcattccacanacttggtgaaaaaataaacaggaactaatgatgaatcataggccattagttggtgcattaacccatcaaatttttccacatactcactcactgacccagtctgagaaatatgaatccattggcgaatcagtgcctgatgcctatctttagcaaacctgctacacaccaattcacataaccccacccaagtaattccctgcagttgagacctaacagattgcatccagaacgcagcattgcccacgagattcagggttgcaattnttacccaattgataggatgtgtgccataaacttcanaatattgctcacaatttgatttccacatctgaaggttatcaccattgaattgtggacnaaccatgggtggaccgttagcactaatgt

SEQ ID NO: 8499 - DNA, 420 bp, Oryza sativa
agcttcgtacttttccaaaatatattgtgtctcatgcgcccaaagcatccattaataaacaatgagacaatccagtatacagagaaattaagcaggtgcctctttggaaacgatacaataagttgtaaaatatttaaccaatttgctacataccaaaaggaataccaaaagtaactatcaagttctattgattggtgcgaaacaatgatatgggcacaaaaatttgtatataccattattttcataaccaatcaatgtgaaatgacaactttaagccacttttccaacttttttaattgaatatacaattatgttcagcacactcctaaacaaatgaattccacgagaagacttttacatgttcctcaaatgtgcagccttctatgtgataagccttttgcctcgactcatgggctacct

SEQ ID NO: 8500 - DNA, 460 bp, Oryza sativa
  unsure (1)..(460): unsure at all n locations
tgattatctcaggacanatacttatttgagtatctgtttatttgatgaatatggatggtcttagaacgaatattgtgattgagtatcgttntaagaggacgactgtggatgggctcaagaccgataccatatgtagagtatcgtttcgagaggacgactgtgagtatcgtttcgagaggacgactgtggatggacctatgaccgataccgtgtgtgaagtatcgttgtgagagaacgattgtggtatgggttgattaattctatggtgttttcggtaaaacacaagttatatattatacttataccgaaaacaggggcatgtgtttgtaccataatttggcttataattagtgcatttactcaggccatattacgtagaatagtatgtgtaattggtatgggttaattatagagtagcgccattatagtgtcacgatatttggtgcctggaagtaaatct

SEQ ID NO: 8501 - DNA, 146 bp, Oryza sativa
gctcaactcaatcaatcctacagattatactgtccaaagtacgacggaaaaaaaaaaaccatgacaaagaataagtttcactaaacaagcggaaaatcgtgttctcctaattgcctaatactaaaaaactgaaaggacgaaagata

SEQ ID NO: 8502 - DNA, 439 bp, Oryza sativa
  unsure (1)..(439): unsure at all n locations
cggantctaatgatagtacatcgttacataccaggtgaaggaattctctattagagatgccaatgctacaccaccaacaatcggaagaagtgaaagtatcacccaaactgtaggcaactgccatgccattcaattattgaaagataacccaagtagttcttctcagatatacataatatattgcagcaatcaacattatataggacactacaagtttcctcgcctaggaaaattgcagagaggagaacagataagataggttccatagctttgatggtatgtgtgaatgacacagcaacctctcccaggctcatgatagtgaaaagatcgcccatagtatggaccacagctagaggaaagatggcaaagatctgaataggataacacattagcaacagatactccttgttataacacctatttaacaatgtaagtgtgt

SEQ ID NO: 8503 - DNA, 227 bp, Oryza sativa
  unsure (1)..(227): unsure at all n locations
gcaagcttgcagcttctattgtanggtagtgttgtaatctatcttgtaccattgcagctacttgataattttagtgtaactgataagcgtcttccttgttatattttgagcagtcatcataacttcagacctattgttgcatttcgttttcttagtcacagtagatgactgcgaacctagaatatgcatccttatcttggtcacgtatatgtcttgaagccgaaact

SEQ ID NO: 8504 - DNA, 462 bp, Oryza sativa
  unsure (1)..(462): unsure at all n locations
tcattgcagacctcacatgatgggatatcattactacgtaactcttctttgagatcaagaaatgatcgtatgccaagaccaatctttcctgtgggagtgtatgacagccaacgatcctgtatgagttcattaagagttttctccttttgggacaatgagaagttggtaatggaagtaggcagacgggattgactgccctgtgaagcgtctgcaattacaacctgngagcagaacaccaaataattcgtcacactaccataaaagtttgcaacaatacaaatataaaacatttgcttaaacagaaacaaaagctctcatagtgactgggtattactagtacgagatacctgggtctcaatccgtgtgttaagagcatcgatatttgttatgctcccatcatttccagcttcatgaactattgcttncaactgccagtacaattacatgaatatagcgaatact

SEQ ID NO: 8505 - DNA, 467 bp, Oryza sativa
  unsure (1)..(467): unsure at all n locations
catgcaagcttcgtactttgtacaaatatatatagtgtctcatgcgcctatgcatccattaataaacaatgagacaatccagtatacagagaaataaagcaagtgcatctttgttaacgatacaataagttagaaaatattcagccaatttgctacataccaaaaggaataccaaaagtaactatcaagttctattgattgttgcgaaacaatgatatgggcacaaagatttgtatataccattattttcataaccaatcaatgtgaaatgacaactntaagccacttttccaactgntttaattgaatataccattatgttcagcacactcctaaacaaatgatttccacgagaagaacttntacatgttcctcaaatgtgcagcctcctatgtgataagccttgttgcctcggactcatgggctacctgtagaaatatactttgtaatgttcttacacagaacta

SEQ ID NO: 8506 - DNA, 439 bp, Oryza sativa
  unsure (1)..(439): unsure at all n locations
tgantatctcangacacatacttatttgagtatcgcgttatatgttgtatatggatggtcttagaacgaatattgtgattgagtatcgnctttagaggacgactgtggatgggctctagaccgataccatatgtatagtatcgtttcgagaggacgactgtgagtatcgtttccagaggactactgtggatggacctatgaccgataccgtgtgtgaagtatcgttgtgagagaaccattgtggtatgggttgattaattctatggtgtctccggaaaacaaaagttatatattatacttataccgtaaacaggagcatgtgtttgtaccataatttggcttatattagtgcatttactcaggccaaattaccataatagtngtgtgaatggcttgggttaattattagagagacgccattataaatgtcacgatattt

SEQ ID NO: 8507 - DNA, 439 bp, Oryza sativa
  unsure (1)..(439): unsure at all n locations
agcttcagagtcgccgcccttagctttatcgtcttcttagttttgnntgcttgctagtttccgtgcttaaggtttgtgcttgtgggttagtccgcggtcgatatcatgtgtgagtggtatgacagccttaattaagaattgtgggcctctttttcagtgttttaatccagattaagataatggcacttaatttcataaaaaagattagtttccgagccatctgttttcttcctttctcttatttctacctatccccttcagatggtgaagacaaggaatgatccccgtgactccagcgacgccaggggcagcgaagagcagaccgatggagctcatgtcagtggtgcatctggcagcagaccaatctcaccgcccgaaaacccaacagtcactcaaatgatgacaatgatgatgcgacagatgcagcaacattaccatc

SEQ ID NO: 8508 - DNA, 459 bp, Oryza sativa
  unsure (1)..(459): unsure at all n locations
tctgtatgagatgaaatatctaaccaaaaagaatggagcttctatganttatgaaaaaaaatcattgatcatgcaacacgatgcatcgcacaatctatgatgggctgattttaagagtaaattaccctgtcaccatcactgattttaagagtaatttactcttaaaatcagcacatcataggaaacaaactcttgattgccatagttttgatagttaccctgtgatggtgataaaatccatgaacacagtgatcacaatgacatgcagtgctttgctgctcagtttcacaattagtttgccaaatcactcctgtcaagcattggaatggaaacttagaattcacaactacgcacaagacacagaaacatagcataaaagtaaagggtgatggcatccataataaaacaacccaggatcgatgcctttcttcgatgcgaatggcaactgcaggtagtcta

SEQ ID NO: 8509 - DNA, 473 bp, Oryza sativa
  unsure (1)..(473): unsure at all n locations
gcttgggctatcccatactagcacatgtgtgttgtttgtatacgaaatgaactgacattgagtgaagtccttatgtcggtttgggcgcactctccccctatcggtatacaactaatcaccatatgtacaccacttgaggcccaaacctaaaatccatgttttccactattttatttatcaaaatcacaagttttaaagttctgtccacattaattaaaaatcaattttcatgtttgaaatgagcccataatgacaaggaagaccattctaagcatggctaagctttatagtaacctagtgtcaccaaaactcatatataaagtggtatagccatattgctcctaaggttangaatgaggaatatggatatatgtggagttaaggtgataatgcaaataataggaagttatctaacaagttaacaaacattaatttatagtgtcaatcgactgcagattgcaacatttcaaaac

SEQ ID NO: 8510 - DNA, 432 bp, Oryza sativa
  unsure (1)..(432): unsure at all n locations
ntgcatcccatatatgtattgaaacaatcttcaatcatcctctacctatagaaccccgctctcctaagcaaccaattcatcttatgtgccgattgatgagttccacatattccttcatccacctctcccatagccactttagattgatcatcatccaaacacttcaatagaactcccatagccactttagattcatcatcatctaaacacttcaatagaactccatctatattntagtgatataaatctccatcaagcaatgtatatttgaacgcttgccgccgaattcttcaatcaaccttaagtgcagtgtctttcaaatatctaatcaaaggaatcctccaatcttcttctgtttcttgggcacaaatgtccgaatttacaattaatttagcctttgaatcaattgcggcgtgccccccagcgctctgt

SEQ ID NO: 8511 - DNA, 485 bp, Oryza sativa
  unsure (1)..(485): unsure at all n locations
tgtgcaattacataagctagaccttgaaggatgtcactatcttgtctacgtgcctacaaagaagagttaaatgaaggagcttcagtacctaaatgttctcaattgctactcactcacagcaatgcctcatgctatgggccaacttacacatcttcacacattgcttggttactttgtccccaacattggtagtagtgcaatgtcagagcttcaatcactgctagacctcaatagactatggctgtatttagatccaaagtttggatctaaactttcgtccttttccatcacatcaacgtgtcatacacacacaacttttcagtcacatcatctctaattctagtcatttttcaaactntgcgctgaactaaacacagcctatcactagtgaaccttgaaaaggtntcagacactgaagatgcacgaatggcaaaacttcaagagaaagatnagctctagacattgatgttgacgtggatatggat

SEQ ID NO: 8512 - DNA, 194 bp, Oryza sativa
agcctgcaaggtgtgctctttgtgtcttgtgatatgacaccaggtccttggcgcctcggaagttatccttgtcggctcgtgcttctcgtcggggagacaagatctggccgtgttatgatccttctcgggctcaaatgttgtcgatgttccgttctccgcttctgcaggaggatctttcgacgtggagtcgatcg

SEQ ID NO: 8513 - DNA, 485 bp, Oryza sativa
  unsure (1)..(485): unsure at all n locations
tctcaaacgctcctggaccgttacctggacggaggatgtctataatgccctcacccagttgaaggcgtatctaagctctcccccagttctggtcgccccggagccagacgagcccttgttactctacttagcggcgaccccgcaagtagttagtgcggcattggttgtggagcgcgatgagaacaattctcatttcacgcttccccaccctgtgccgacttggcccggnggagagcatggaggagaggctcccgagccgaacggtggcccaaggcccccgacgaccggagttggccctctgcccgcttgtcagacggtgctaggagcccccgacccccatgaaggccctgaggccactgtgggaaggccgcacctatcgcccttcgaccccgaggctaaccctgtgctgacccgacccgggaaagagcagggagaagaggcccccgagccgaacggaggcctaaggcccctgacgaccggagttg

SEQ ID NO: 8514 - DNA, 416 bp, Oryza sativa
  unsure (1)..(416): unsure at all n locations
agcttagacgatgatcntagtgggatntatggagtaattgctaagcagaaggcatcctcgatgcatttgtaccgtcgtataacagcacaagaagaggtacgatgtgctaaaatttcactgaactttgctaatgtactgaacggtgttgttcattcaattgatacacctagataattcatatgatgccttcataagttcattttcattcgcacctgaactcttcgagccagcaattcattattattcacattgatattgtaataaataaacttaattatctcactcacactcatatatatacacacagtccaagacctgctcacaccttacacccatatgtatcaacatccatgatcagtttgtgccttgctactagcctactacatagatatacaagttatcacattgactgttct

SEQ ID NO: 8515 - DNA, 473 bp, Oryza sativa
  unsure (1)..(473): unsure at all n locations
tagcgagagagcgctntcaggctttgccggacaagcgttcataatgaagcatgtggcttaattcggggatattggacactacgaatgatctgttcaggctctttgaaccgtccgtgccacgttgtggacgctatcgagaacaacgtccctacctggacattgtatgtaccaacgtccatacctggacgattcatactatagcgtccttactatttcagaaaatatctgactttaccatttatttaattntcaagacaattaattatttgaggtgaagaatttggaagctgcaatagaatgacaactagggatatactctcttcattttttaatatatgatattgttgattttttaagatacgtttaagcattcgtcttattttacaanaattatgtaactattatttattttattggaacttaatgtatcatcagatggtctttaagcatggcttacaattctatatttacac

SEQ ID NO: 8516 - DNA, 454 bp, Oryza sativa
  unsure (1)..(454): unsure at all n locations
agctttgaaccaacaatattgttattataatntatttattnaacattcaattcataccaatagacttctagtcgatagtactttactaggattttacattgtaattttttttttaaccaactcgatctgacttagcttaaatcttaatcggtcaaaattcatgtactctcgatcaaaaattcgaaacacaacttacaaatattacgcatatatagtttttaatatgattttagtgagattaagatgtgtagttagtttttcatcttttagagagtgtgttagatggggcgcatatgcgggtatactatgacgttatagtgatgtgtatacgtgtacgtctatcatgtaatcgaaaaaattcaaaatggaaaataaaaagtatattcaagagaaccagacgtgtcacgtgtccatccatactctgttgagatntagaagtgaatccgcggcatga

SEQ ID NO: 8517 - DNA, 449 bp, Oryza sativa
  unsure (1)..(449): unsure at all n locations
agcttctttcaaaccaggaatatgtatttatgagtatgcaagatttcaagttgcacagcaatgcaatgttgcgagtaattcatggttttatgcatacatttccaacctgcttgacatacactgtatatggcaaatgtggcatgacctgtccttgtcgatcaggaaccgttaatttatgcagtaaggtaacatctgcaacatggtgatgaattctgtgctactaccatgcttcatggctgcacatgcacatattgatctcgctttttcaaagaaactgacttgtaaataaacaagataattttgctttcttttttaagggttgctcccaatgataggattcagagggagtgcatatntgaagtgttctcagcaggtcaccacgcctggtcactgtcagcaatctaacacatactgtcaacgaaatagcggtgcagccgacaggtcacaca

SEQ ID NO: 8518 - DNA, 474 bp, Oryza sativa
  unsure (1)..(474): unsure at all n locations
tggattacanaaatggggattaataatggtttaatttattttaattagtccgcttaatattactacttagttgagtggtactgttgtcacgatccattgttagctgtcactttgtcttatttttcttcctaattatgcaatttgccatcttgtctcattaattgtcttcttttttattatgttctcttttgttgtctagggaaagtcttgtcttatgcatgatctagtagctggctctacatctacagtactaaaatggtttgttttacatatccatgcatagctaatcattccaatatattgaggcaatgatgttagaagcacgtactacatgtattacattacactgacaaagtgacaattatttcagttactctgtgtgatattgtacagtatgaaagagagttagaaccactcttttcaatatatggacttatgggatattatgcgtatgacgttctcacactataattt

SEQ ID NO: 8519 - DNA, 348 bp, Oryza sativa
  unsure (1)..(348): unsure at all n locations
agctntataatacaccaagctactccacattgctgcagctaggcgccttgcaacgagcctatctcgctgcaaacaagttccatgcaatgcaagttcccatgcagccacatgcacgtccatctacaggcaaagttcattgcatcggtagtgggctgtccccgtgaaaccctcaggcaacactacagctggttttgtccctagtctctacccttattttttttatcgttccaaactttgattagctagagtagctctctactacttgccgacaacttctcttaaatggctggtatgcagtcacctgagcctgacattcgggacctttctctggacaatgcatgggccttg

SEQ ID NO: 8520 - DNA, 482 bp, Oryza sativa
  unsure (1)..(482): unsure at all n locations
tgcgaaatanattaaaacatttggaaacgaggtcacatattttgtaattntgaataactggtttcaaaagaaagttataaaatcaacatactaaatttattttattgcagcaagattaaataaaacagtattgtaaaacttttgctagtaaatgagccattagtacagtaatagatgtacagtactaataacactggaataaattttgaatgagaaccattaaaggagattatgaagtgcatgtgccattagtttggtttaattaaaagagaaagggaggagaacagttctacttttccaatatttttcagagggcttctatgggtaaccatttggcataacctagggtcaaagaggctctgataccaacttgtcacgcccggaatttctatccaaaattccaaacgcttacatgtgtgtgaaccctcgtccaggaatcagccgaggcacacaataacaaantgataatagagtacaaatat

SEQ ID NO: 8521 - DNA, 392 bp, Oryza sativa
  unsure (1)..(392): unsure at all n locations
gaganaaagcaaaggttgaacacataggacattcggtagaacaacaaaattatgcaaatatatctctacgttctcttggtcaacaaacagatcgaatagagacaatccttatggaaggctacaaaacaggaagacctgaggtaaaaataaatattccttctaattctcagtcttctagttctcagtctgttagtcctatgtttgtcccaacaattgatcctaacatcaaacttggaaaacaaaaggcttttggacccgcaatctctgaagaactagtcaataagctagccttanaactaaataatttaaaagtaaataanaacatcaatgagatttctgataatgagaaatatgatatggtcaacaagaattttaaaccttctactcttact

SEQ ID NO: 8522 - DNA, 367 bp, Oryza sativa
  unsure (1)..(367): unsure at all n locations
tggcatatcacacaagataagactctctaacctccataagtatcgataatagctgacctcaatggtggccatcgatacatatgcgcaaaaaagtgtgagactgtccattccttcaagatgtaggacctcaagtgatggaaaatactgcacaggaggaagcctcttacatnttgcgcaatctttgatggttagtttaaccacaatatacaagaagattgccctggccaccaaattggaagtatgctaccagggtatcgccaaaccttgaagtggtgacacacataggggttctaagagcctccatcacttcctcagcatttgatgcatttacctcgtcattcctaaacataccccaacacaacaacat

SEQ ID NO: 8523 - DNA, 196 bp, Oryza sativa
  unsure (1)..(196): unsure at all n locations
tctagtactccgatgcattgatgattntntatataacggcattgatgaattgatgtgatagtggcagtctaaatgcctaaaaatcattcttttttttaaaaaaatagctttgcatatcatattcgagttggattggccgtgaatagctgagataaaccggtgttgcacatttctggttgcctatatataccccaag

SEQ ID NO: 8524 - DNA, 487 bp, Oryza sativa
  unsure (1)..(487): unsure at all n locations
cttctgcagaggccctgcttacttccaaaacaaaaattttctatctatcacattgaatattaggacatatgcatggagtattaaatataggaaaaaaaaccaattacatagattaagactaatttgagagacgaatcttttgagcctaattatttcatgatttgtcaatgtggcgctacagtaaacattngctaatgacatattaattaggcttaatatattcgtctcacagttttctggcggaatctataatctgttttggtattagactatgtttaatacttcgaatgtgtgtccgtatatccgatgtgacaaccaaacctaaaagttttccccaactaaacaaggccagatttcactcttcaggctggaaattttgagtctaactagtttgtaaagtacaccagcggtccttaaacttgtacggatgtatcatttacggccctaaactcttatatgcttaaccagagtaaagtgcattggcggt

SEQ ID NO: 8525 - DNA, 328 bp, Oryza sativa
gccttctatacgaaattaagtctaatcgtatagtgtaatatgctcaattgatacatgacttctgagtatgctactcaaaagtaaaccttagtatggaatatctgcaattcttgtgtccctcctcactaaggtatcaaataaaatcatgtttcaaattgtcctactggcaactggcaagcctgtaagtgtcaatttaatttacacaactggaactaaaaattgaggtactaaaacatcctcattcactacagtctacaatatacctttgagaagcaataatagtgtattgcacaacctcccagatccactcccattggaaccgaatgca

SEQ ID NO: 8526 - DNA, 488 bp, Oryza sativa
  unsure (1)..(488): unsure at all n locations
tatcgaaccatggttgaagagtgtagagtcctttaactagatattgttctatagnttatgggtacttttggaggctacctttatatctaacgagaaatgttatatccttttcagatctttgttattcctgtgttgattggactcctgttcgagttactggtcattgtacccatgagggtgcctattgacgagagtccggtttttctgttgtatcangattgggctcttggattaatattcttaaaaatatggactaggctggtaagattacacaaatttgtgatcattttgtcacctcagttaatttgttgattgtgctccttagaggtcattgacgtaggtttgtgctgattatttggcttacataactgtttcagcgtatgttggatcaaatggcacctttgtgtgatganagctggaggaccaagtttgagagggttagagaggatggcttctcccgtttgagaggtctatgggtcctgcatgaa

SEQ ID NO: 8527 - DNA, 235 bp, Oryza sativa
tgatgttttctcatggctagaaccctggatgaagaatctgatcgtgaaaatgagggaactcaaatacctagtgttgaatatctttaaaaagctattgctagacttgtgtataagaattctagatttgagaaaatagtaatcaatatgaagctactattgaatttcttaatgctgaaaatcctagatcaaaatctcttgttatgataatgatgagtgaaatcttggaggtttattt

SEQ ID NO: 8528 - DNA, 480 bp, Oryza sativa
  unsure (1)..(480): unsure at all n locations
tgaatcctgctgtagactcggggcaggtttgccaatatatttcattcatatatctttcctgtgtttgagtataaacataagagttntggttacacaagtgtgtatcaagtatcagatggcttatggatatgctccctttttataaattatctgttctactctgcgatgaataatagaccacacatttccctcataagcttatcactggcaaatatatatagaattaatcaccaaaattacgagcaggcataatgcgcttgcagagcaaaccgatcaaccatgcactcggattggatcatttatcttgatatgaaaccacgcgttgttacattgttagttacatagtctacaatttagcctaatactataccttaatttgaactgaacatccattngactacagacccgtttttgattccaccaattattttgtctgtccaacaagtagttctagtttactgcatgtcgcatgtcatatat

SEQ ID NO: 8529 - DNA, 379 bp, Oryza sativa
  unsure (1)..(379): unsure at all n locations
agcttaacaccttctgaaagctggtaagtctctctcttgcatggaagcatcaaatgcatagcattttccgaaacacaaataccaacaatgaaaccttcatagaggctcatgacgaaggaaatgaatcccacaagcattaactctgcatatgtagacactcaattagataagacgttaaagaaataaaattntaaatgaaatagcataaattgtgtgaaatacaaatataccgtaagcagctattttgaatatttttgtttaaccaaaataagtgaaattctacaacagatgtaccatgtttatatattgaagtccggttaacaatatcgaacataagcaactgaagatattcctgaatgataccttcttttaatctctc

SEQ ID NO: 8530 - DNA, 386 bp, Oryza sativa
gcttgatacagatcgatcgatgcatgcactgctagctccaattcgatcgttcacgactaatgatcaactcaaatttaaacaccaagaaccactattaaccaaaaaaaaaaaagaaaattaaaaccgcatgagaacacagcaagaggagaagagttaatcagagaacagcaattaaagctaagataattgattaccagatggatgcaaaggaaagaaaggataaagcaaggattgttcatggttgagattagattaacctgcatgttgttgtatcggttgaaggtcttgtagcagacggtgcaggagaactgggtagggccaatgaggatctgggacggtgtggggatccagtactggcccttggtcagcttccctatccctatgga

SEQ ID NO: 8531 - DNA, 438 bp, Oryza sativa
cgcacccctacctggcgcgccttctgtttaaactagatttcggcaataataaaagggggtggctatcaagctggagaagtgaatgggttcggagaccaaggatttatacaggttcaggccttcttattcaagaagtaataccctactcctgtccggggatgaatccgccgagtatcttattgattgtatgatttggagaaaatcaacaacgcatatatgcccctagaggcacccggaccccccttatatatgggaaggagtccgtgttacaaaagataatctatatccctaacggaatatgcagatacagataaaatacagtcggaaccgactaagtctcaaggtatttccttgatgtgcaagttgagaaacacacccgagatacaaataagatattctatctatattcggtgatctatattcacggcaaatatcaat

SEQ ID NO: 8532 - DNA, 475 bp, Oryza sativa
  unsure (1)..(475): unsure at all n locations
tccttctgattgctatntgaagcagagaacggacttctgcttggtatcgccctcctgagattgattgccctttgctcggcctggagtacgtcggggagagacacaacttcttccatcgacaacaattctttgctgaggctgtcggtgcagagaatggttggtgctgaaggtattattgctatgatttattgcagagtcaggcgcaccaggaggagcattggtgctgtggatgatatcgtcgatgttgctgttggagctgactagctgacgagacaatcgtagggttgttcgttggatttctgcggtcttggtcaacaacacactgagttggcaatccttgcgcacatggtttgtaccttcgcacaganaacatgtgaccttgcgggtgggacactcccctggtggatggtctttttcacaacgagggcagagtgtgagacacctgctagcaatgtgtccaatttctccacaacgg

SEQ ID NO: 8533 - DNA, 401 bp, Oryza sativa
gagttatgcatttgtgtattgatcagaccgctcacaatttcttgaagctcgatctcccccccagatgaaccatatagccaagagaaaccatgaaccagaatagaagagcttgccccacccatgagtaaatatttcatagtagcctcattagaccgtagatctctcttggtatatccagacaataggtaggaacataaactgaaacattctggagctacaaagatagttattaaatcgttagcaccacataaaaacattccccctagagtagctgttaatacgaataacagaaactctgttatagccatttctgtacattcaatgtactctacggatagaggaatacataaagttgaacataatataataagaaatggaaagatttcgttgaaattgggtcg

SEQ ID NO: 8534 - DNA, 101 bp, Oryza sativa
acctaagatactcagcttactgggatgccctaataccgcgtatgggcaaccctctctacaattaagagatccattcgaagaacactgcgactcattgaagt

SEQ ID NO: 8535 - DNA, 456 bp, Oryza sativa
  unsure (1)..(456): unsure at all n locations
agctntcattngnnttgctattatgttattttatattaataccggcaaggggcaactggtaagttatcatacaatggaaatatatttttgtccttccattgctgcagctatcatttctttaggattaaatttcagaaaactgcaattatttggtcgagactatcactttgctacaactttaaccggctattttataaattgcaactntagcagtggattttatcaaataactgcaattntcccatatgtgtatgacatgtgggcccaacttattactacatgaatatttcatttgtgtatggaagacatataaagttgtagctttctgataaaattatacactatngttgcaattctctganatgcgcagttaaagttgtagcaaatgatatgtgccttgctgtaatttactttcttttangaaaagtttgttttgcatctacatgaatatgtttc

SEQ ID NO: 8536 - DNA, 476 bp, Oryza sativa
  unsure (1)..(476): unsure at all n locations
acttgctgggttctaccgctgctntggaatgattnttcaccattgcagccccattacatgagcttaccacgagaaatgtcacattcacttgggctgcaacacaaaggaatgcattcgacactttgaaagataagttaacacacgctcctttactccaacttcctgatttcaacaaaacttttgagcttgaatgtgatgctagtgggattggattgggtggtgtgttgttacaagaaggcaaacctgtagcatatttcagcgagaaattgagtgggcctaattcgaattattctacttatgataaggaattgtntgctctagtgcgaacattggaaacatggcagcattatttatggcccacagaatccgttatacactctgatcatgaatctttgaaaaacattcgaagtcaagctaaacttaaccgtaggcatgctatatgggttgaatctatggaatcttttccatatgtcatc

SEQ ID NO: 8537 - DNA, 445 bp, Oryza sativa
  unsure (1)..(445): unsure at all n locations
agcttttaagaaatcatagacttggctttatttatcaagcacagcataaatacaccagtattgtacaagttatgcctccatttgctacatttatactcagtcagaatcagtcttttcatcatcagagttattactacttggctgaaggtcggtattgcggaattggtctacaacgtcacttgcaatcttgtcagccgcgttttgagcattgctgataagatcaagagcagtttcttcgcttgtcccgtctgcaaagccatcaatggcgtcaatttcaatccttgggtacaaggatttggtcatcgccaatgccatgctagctcccatacttncagctntcttgatattcttgaaatatacatccggagcaactctcagcttgtcgaagatttcggttgcgtcgagtgcactcggaccactgttatngangaacatagcttggaca

SEQ ID NO: 8538 - DNA, 412 bp, Oryza sativa
  unsure (1)..(412): unsure at all n locations
ataatccaaaaacttgtgctattaattggataaatgtcttaactccctcttttcactagtctttagatgccgcgttacaagcctgagtacttgtttggtgttgagggatttgtccaggagttgcgtacgatgtcctttgtcatatgatttgagactgcccctttntatgcccagattcctcatgatcgtcacgaagagaagtgccgagtcaaagtcaccttgaacagtaatagtgaagatatcccctcagtgatgttcgaagctggaggaagaaactatatccatgcatgtcacgaagtggcaaggatctgcatatgagagctccgcgatcgctacagtgatcagttggccgacactgagtatcgctaccatcctcgtcaaccacaaggaagtgatcgtggcatctacctcg

SEQ ID NO: 8539 - DNA, 453 bp, Oryza sativa
  unsure (1)..(453): unsure at all n locations
agctcttaaaaattttaatcactggtaatttcacaaatacatggcttaaagaanattgtatgcacatatttacattgaaaagaactattgtaatatcaaacttattagatttcatacacttattgtaaggaaaaaaagtacattttgctcctttcaaactattttgcttgagcagttaacccccaaaactattttttggtttattttacaccctgaactatttttggttcaatttactccctaaaccgtatctcttttttttcctacctatataagttgtattntgcactaaaatttggtttggtgatgatatagatatatacaactcagatctccattntttttagatttttntatcatntgttaggttggaagcacctagactaatttaatcatcgagactttaaaattcaagcaaatagccatgatnttttttgaaatattgcaaactat

SEQ ID NO: 8540 - DNA, 442 bp, Oryza sativa
  unsure (1)..(442): unsure at all n locations
agcttatggaaaatgcatcttattgacaccttattgaaacccggagagcgaacggngcattgtacacttcaccaattgggtcaaatgatgactggtaatgctcttcaatctctagtcttgggtgcacctgcatttttttttggggtaccctatattgtatttgtgcattcattgattaatatgtgcaattaggtaataaggtggatatttcacccatcaatctccggtttgatgcacttgtgtttcatttcatcgatgttactaacagtacgatatgcactttttcatgtattggctgtatgcggcgaataagttgaaatngttgcttgtgactaatgatgaaatgagagatcacatatttgagctcttgggtcatcttttttccccaagtggaagcaacggcatcaggtgtgctctgcacttctttttatttaacatactg

SEQ ID NO: 8541 - DNA, 467 bp, Oryza sativa
  unsure (1)..(467): unsure at all n locations
tgtgccattntntgcagatgtgttgtttaagagagctcgcctatgcaggtgtgcacaccggtggtgtttatgtgagaggagaggaaaatatgaaagacaaagaggccgacggagaggtggccaggccgccgctgctccctatcgccgtccccaccatcgctccccaccgccgctcggggcaaggtgaaaaaagaggccgggggagagaaagagagataacggagagagagaggggggaaggaggaggaagaagggaacgaaagggagaatgacatgtggggcccacattgncgatgggtcccacttgtgtgtgtctgtgagtgacatgtcagtcctacaaacatacaaaaatttgccttttgtttactctagtgtcacataagcaacgcgtcgacacacgtgggacgaagaccggatcgacagtaccacgtaagtgccacgtcagctaaaaccggttggaacgcacc

SEQ ID NO: 8542 - DNA, 357 bp, Oryza sativa
atgagtgtcacagtatcataaccattaacctgcttttctaaatctgcagaaaaataaagaggagctgttaaaaaaaatgatgtgttaaatgccataaaaaaaaaaacggactcttttgagaagggaaagtccaagaagcttttctctccacattccaccataaccgttaggtatggacttggctgttgtgctatttacgatgcatatctcacctttacttatagtattagcacctaagatcagaatctgcaaaagctaagattgtgaattatcagtcagacgagcgaaacgcttatcaagagtacaagtcatcggtaactgcatttaattctctttgcaaaagagtggggtcttccc

SEQ ID NO: 8543 - DNA, 413 bp, Oryza sativa
  unsure (1)..(413): unsure at all n locations
atatntatagtaagatatgataagaattgcaggagagttttatgatagaataattgagattagccacgcgaattgttattggcagtttctagtaaaaaaaagtgctttcatggtgacacaagactacatccacttggcactatcatcatttttgtcccggttggtgttatttaatctcggattcaggtctcggtttataacccaggactaaagagtttacaaaccgaactaccgtgggtttctcgagcagtggcaggaggaagccaattaagtcagcagcaggtagacataatataaatctaacggtttctattgaagtttgacatcaatctaatgcctcanataaataaggtgatttggctgcctaaatcacaactaatggggacaattatacaggaacggtagatatacat

SEQ ID NO: 8544 - DNA, 468 bp, Oryza sativa
atctaatgtgctactatctatatcttgttgtctcagcttgtactatggactgattgtctcaggctatatgtttgtaagcagtacaccatggcattatgccaagtaggtgtcggacttcaccttgatacactggtcgtacagtacttcatatatcatacctattgttgaccgcacgacatcttcttatgccctactcatacatatatttgtgactgacacctaactcttctgcaggaactgccagcttacgctcttattcagtatagctactgacctcatacttgttctatatcaggtcatacaccttgttacagtcaagagcttttgcatatgcatataactctaatgagaggtgctcgtgtatacgatttctttttataaatatcagtttcttatcctgcagtgctctgtgttcaatgattgcaaacctgtgagctcattgtgtgaatgattttcacataaggtact

SEQ ID NO: 8545 - DNA, 282 bp, Oryza sativa
tatgggactcctttacaatggcctacttaagtgccatatgggtatttatggcctaaaggagtacctagactatcaaagggacaacttcaaccatgagggtcttgggtatgttcctccaccaaaaggaaaggtggacaagagtgtgatgatcaagaggccccaaggtcttaacaattttgttaaaggcaaaagtatcattcctaatgattatgcttcacattgttcttttgatgcatcttatgttcttaagaagaatgctagtggtcgtattggtgctaagta

SEQ ID NO: 8546 - DNA, 97 bp, Oryza sativa
  unsure (1)..(97): unsure at all n locations
cttacactggtcactgctaacacgccctctctctcatgtgcacgtgtggcagtacnactgtgccatattgcattgaatactgagtgtgatgtgtgtg

SEQ ID NO: 8547 - DNA, 172 bp, Oryza sativa
actcacatgcctgtaagcccataataattaactccaaacctcttcaaaaagggaaactctgttaagaacccaccctttctgaatggtatggttttgccttcatggattcaccttaaacaaggaacccttggaatcatataattgaaaattattttatggtaataattctttc

SEQ ID NO: 8548 - DNA, 356 bp, Oryza sativa
tcctcattggttccctatgacggtaatggatgaaatggacttaaccacgttcgttagtaactgttattaggcatcaataaaagaaggaatgagcttcaatctcaacacacaactcaagtggagatctctaactttcattcaaggctactctctagcagagtgttagaaaatatggagagagtgaaggcaaattccaacagcagtctctcaactcttgtacctcggcagatgtatgtgttataaaaatgagtactcgatatttgttctgggtttttaaattttcttgtttaagtaaaatatattctcatcattgcagcttcatcgcttaatattttatataaagtgcttcaatactc

SEQ ID NO: 8549 - DNA, 273 bp, Oryza sativa
tactactgcgacaagtatctatatgcttgtgtggagtgatacgtcagtaggaatgttgtcagccgctagggagatgtggcatgtccgtggcattaatgccactgagtaatataaccctatttggattcacgatattcgcatttcacgcactgatacatctcgttagaaccaagattgcgcgaagacttctgtggaggtcaacaacaactgctatactgcaacgtctgtacatagagatatcgctataacctcagagaactatcttgtgttaag

SEQ ID NO: 8550 - DNA, 270 bp, Oryza sativa
  unsure (1)..(270): unsure at all n locations
gatacaataattatttcgagagcaccatcggcctctgcattcaatgagtacacataactaataagaaagaaagaaaagataaactccttttgcgagacagcagaacaacgttcaagtgccctcttaccatagcctagaacgccacccatatgctggggtagaaaacttcttggctactaacttcaactggtggcangtcgcagtgatagtactctacaaaattgccttctaatgaatagcccatgagcggagccaacatgtagatataaa

SEQ ID NO: 8551 - DNA, 282 bp, Oryza sativa
gcagcttaagctatactcgaatactgtggcatcatattagccaacaaactctctgtctagatgtgccactctagacgacgcgcagcgtgaatggcagacttgaccgtatggtctgtgcatgacgactctttctgtggcctatccttagaattgacttctaagttgaaaacttgccagacctcgtgattgacggtacatgatatcacagcaaacgacctgactgtggtcaaacactttctgcgtgatgagaggtagttcttatgacgaccagctgctcatggt

SEQ ID NO: 8552 - DNA, 435 bp, Oryza sativa
  unsure (1)..(435): unsure at all n locations
tgtgcgacacaatatgctagcacacgcgacaaccaaatgatcctatccaattacttagaatcaactcaactccatagtgcagttgtagcgaatcagaaaacaactctaactcggactgtgagctgctgacgcacgacaaggcgcgcgggcacctccgcgagtacgccgacaacgccgccctctgggaccacgacttcggcgcctcgctggttaagcttatcaagctggccatgccggtggggagcaaaggggagataatgaacaagtgccgcgccatcaaccacagcaagagctaattctgccacttatgcagggggttacgtacatgcatgccgacgatgtggtcgtaaccatatggtntcttgttatatctcatcggtctaaaatacagaaaacccttgtcttcgaaaaaacatcatataggactatcaaatc

SEQ ID NO: 8553 - DNA, 86 bp, Oryza sativa
  unsure (1)..(86): unsure at all n locations
tctaataccttaagttcagtacatcggtcttcaatgaccacacaggtgtatangtntgactctttcaattgtaatatggctattta

SEQ ID NO: 8554 - DNA, 371 bp, Oryza sativa
tccaacgccatcacatgtcggggtctggaggtgctgtgtttctgtgttgagggctgcaacgatctggacgtgttggcacagacagagcaatcttgccttcacccactccgcggtgcgcgacctactcctgagctgggtggtgaagttgcgcaagtggttgccgagcgtgatcgccggggcacggagggagcctgccgccttgacggacatcttgcggatgcggatggcgcggtaacggaggttggagatgccacgggcgttcgtccgctctaggcggagtcacgggaagacgaagatgtcgagcgcctccagcacccggcagagcgtcgtaacagcgcgcatgccgtggatgttgtctcgtagatacccac

SEQ ID NO: 8555 - DNA, 168 bp, Oryza sativa
ttgagctgttgcgtctctggtctactagctcatatctgatgcacatattgcgcacgctgcggctttcactatctatgtcgtgcggcattactgtgactgatgtcaatatgctgagtcgggcactgctgattgactgtgtcactggttataactatatcaatctgactg

SEQ ID NO: 8556 - DNA, 233 bp, Oryza sativa
atactcatctggaatttttctctttcagtataacgttgcttggcaagcaagttcagctactagtatgcaattacatttatatactatagtatcaacatatgattattctataattgttggtgaatgtagcagtatattgtcctttcattgctctagcattttatgatacttaatagatattctcctacactccttattagattctgacttgtactgtctgtgatactttgttg

SEQ ID NO: 8557 - DNA, 289 bp, Oryza sativa
taactgttttcacccttagttcattcttaactcgatttcccttggtcatgaaaacgaaaccgttgtgaaccgagaatgactattcaacaaattaatcgggatacattcgatcaatcgggcttatgcaaaaatttgatgtacaaaaatatatggatggtctcattgctgacaaaattgatctaagcaccatgtgtcggctcttatcacagatctattatattataacagctgtgaaagaagtcactacgttcgctgtgtggctaaaaatcttcacattaatcggagaaat

SEQ ID NO: 8558 - DNA, 172 bp, Oryza sativa
attaggagacgcggttaatcattttacaagaattggtagagactgattgatatctccagcgatgatataacagtgctcaccaatcttatgagcagttgtttcttttttattccaggctgtacttagtggtcgaacgagttcacttacatctcgttcaccgcacgtttaactg

SEQ ID NO: 8559 - DNA, 443 bp, Oryza sativa
gaatattctaaatcttcacagcccttttggatggatgagaatggtcattaaagaaactggaagcatactcgtgtcaaattcttgccgacactatctttaataattgaccaaaggctgatgcctctctctttctctgtaagctctggcaagttactctcgcgtttgatttgtggtaataagtgactagaatctttcatttggatatccaaaagttcctcaccacaactggttgagcttaacattgctgaagatctgtcggttggttcaatgaagtagtctgcagcatcaaaaaaagtagactcatctttacaagtcaagtcaccaccatcttgcttctcagatcatcagattctgtagtgctgtattctgcattgacagcaaacaactacaacaataacagatgctaatggtcaattaatgaatgaaaggtatacgcactgact

SEQ ID NO: 8560 - DNA, 205 bp, Oryza sativa
gaagtggaaaaggaagaagatattttaaccgagggggaacttggaaaagaatccgggcttggtcttgtaacaataactcttattgtgctcattccaattgtggaaggtgccgccgaggtggttgttacaacccatacggtggatcaagatcttgtagccgataccgcacgggctcaagcttaagccaaacttcacaaaatggata

SEQ ID NO: 8561 - DNA, 240 bp, Oryza sativa
atgtgatgagcatagtgcggagatttggactttggaggatgagggatgggaactattcgcgccacttgcttacaggatgggaagggaagtcgcggaacaacccgtaactcggatttgtaggtcggggtaggcagcacgctccctattcacgccgcctgactgttgtgatatctcagggcagttaacttagctttattgattgtgatagctccaagtctttgctttgaacttgggtaaatg

SEQ ID NO: 8562 - DNA, 277 bp, Oryza sativa
tactcagcttggacagtaaaaatggatatatattggccggtggtctctaatctagagaatgatcagtctcctcacagatgaacatggattgtccttttgtttcggggaaaagtataattgtcttattgatagacatgcatgaagtcgttcgccagcttaagatatccgacaacgatcatggaaacgctgttgggagggggcatggacaactcctgctgcagcttggccacggaagaaattgatccgcttataaatattatacccacgctagatatat

SEQ ID NO: 8563 - DNA, 395 bp, Oryza sativa
  unsure (1)..(395): unsure at all n locations
ttgaatcaatggagaagttatgtttatattttttacgacgctcatatcaaaagccctttcacctctttttcctcttttgacaattattactctaaaatgccttgttatgaggtggtgatgaacagacactgaaggcatgccttgcattangagaaatcttgcacaatctacagaagcaatgaaacaaattctatatgcactttccatgtctggatggttagaagagagctcatgagacttgctttgatagccaaaatcctcaagacctttccttcccttactgtgatcacttgtacctccaccaaccttgtctttgtttncccatgatacccatcaatngatctgtgtcgattcaaatcanaaattgtggcatcttggataaacttcttggaaca

SEQ ID NO: 8564 - DNA, 420 bp, Oryza sativa
  unsure (1)..(420): unsure at all n locations
actcagcttgcaaccttcgcgttcccacgtcgtccctcactccctctttctgcttgggtgtaggcgggacatctcatcatctttttggtgctcctgctaccagatctactgtcgctgcacccgccttctaactaatcaaaagaatcgcacctgcctctaacactaacacacattcttccatccccgtggctttaacatcgccttgtcacctactcgtccctgctgctcatcatcggtcttctaccaccttggctatcgctctaaagttatcctcattatcccctaccttccacctggccaccacctctaagcctgaaacactaatccaaaggaagtttggttgagttaatcgtcaccggtgggaaccatcaaccctctcctcttctttcttnctatctnccccgtctaggtgttataacg

SEQ ID NO: 8565 - DNA, 248 bp, Oryza sativa
actgctgatgtgagattgagtgcacacaaccgatgcacacataattttcgcatacgaaaaggctcacttgaggctatcgacattgtgacacacttgaagacactaaatcttgactaccttgattctgccatgatactacagcctgaaccattgtatgaaatgaagacctgaagaagatgcaattacagaggaccaataacgactagtgtgaagaaagctgacttatcaaacgatgattaactctactg

SEQ ID NO: 8566 - DNA, 413 bp, Oryza sativa
  unsure (1)..(413): unsure at all n locations
tctactggtgtttttctagccgtattggacgccagtaccaactactgatgcacaattttgaacctcggatccctaacccactctacatgcatgtactacctccattccaaaatacacgggctcatcttttcgcttatgcttatgcttatcagccaaaatttaaattttcaaccttaaatttagaggtgattntagggtttttttttcatcgtagtttattttttagcctttacttttagatcgctaagaacacgtatataaaagttttattcacaaaatatttttcgtttacaaataggacgtttggcttaatcctagaatacggttgatagctatttctaacacaataccttatctcaaaataaaaatatttgtccaccgtacttctctcaaccaatcacaaccattctctt

SEQ ID NO: 8567 - DNA, 440 bp, Oryza sativa
  unsure (1)..(440): unsure at all n locations
tatgctcacatccgctaggcccatcattgatgacaatcctgaatccatcatcaaaggtctcctgctttgcaatgggcttaacagcggtaagaagatgggccataacctcaacgggtctttcttctggctatgacaattgaaataagtgccaggtgtagtatcattcagcaaaataatgtggctactcaaggatcatgatttggtgaaatgtgatatcatgattcttataaattattttaccacaatcaacgtgtacacggcaagtcggcaagatatattaacatggtagatgagcggatgacctgcgtggcagtgcccggcctcttagcgaagtggtagagttntatagttactaatccgtagtatgttacggacatgaggatgaaaaaaaagtaaaatgttgtgttagatccaagaagcctaatgtataatattgaact

SEQ ID NO: 8568 - DNA, 283 bp, Oryza sativa
  unsure (1)..(283): unsure at all n locations
tcatctgtacttncatcagacttgtccccgctcttagactcctgttgtttctcaaactggaccatcatattttcgataacttctaatacactgttgacagccattttagttgagtcatgaaatcccatttaagcatttattgcctgaatcacattaacacgggagaggttaagttcttctgatatagatacttgcatgctttgatcagtaacattatgtgtagacttatcttcactggcacggactgcatcaccattcttttctaccacatgaaccatgggac

SEQ ID NO: 8569 - DNA, 429 bp, Oryza sativa
  unsure (1)..(429): unsure at all n locations
taccaagaacgatagttcctcatcaagccagtttatatatgcatcaacgtcgncgatatttacaaaactagctgctcggacctcatttgctagagactcaacaaagtcttcttgtgtcttcacatccactttgacctgaaacaaatccatttttttatataaaaagtaagtcctcataataatctacctgaattagcagtggactaaaggaattcagtagtatatatttctgaaaggtagcatcatcttgaataacttacagcttagaggaatgttgatctattctcaatctctccaatcatgttgcttctcacatcagagacacttgatgtttgtgatcccagagaagttgtgtccttcttggcttcacgcttcatgagactttgatagaactctacaacctctggagcacggtgtaccttgtcacca

SEQ ID NO: 8570 - DNA, 238 bp, Oryza sativa
gaaaggactttatgcttatatatatatagtcatgaaatgttatttatgtaatatagacagcacgtcccttgatggcacattgtgtgtgccatcacatcatatcatcatcatagtgtggcgaccgttagatacggttaatataatgagacggcactatcagtgcatggatccaatctgtgatcacattacaacaatatgtcaccacctcattattatgtaacctattgatctcacatcg

SEQ ID NO: 8571 - DNA, 334 bp, Oryza sativa
ctctgcacttggacccggggcccaagtccatttcaacaagaaaggttttcttaaatgccacaaacacgaaggtaatttattgagttttaattatttcaaatttaaacaaggattcttttgatattttagaacaggttttatacagaaagctttcacacgaaacgtactggttagttgtctgaaaagcgtgtaaacaacacaggtgtgttagttcacgctaaaattgacatttgaatgaattggacgatgcgaccgaaaagttggaacttgtgtgtaagaagttttgatgtgtggaaaagttggaagtttgagaataaaattggaacttaaccac

SEQ ID NO: 8572 - DNA, 278 bp, Oryza sativa
  unsure (1)..(278): unsure at all n locations
gcatcggctatcatagttcttctatctcgttacacagatgatcanacaacatcaacttctcttgatatgcttcaactcctgagagtagcgaccattggatatctataccaaagaaganatgcccacctcactcataagtgctgttgtgaccgtgtctaactatggtcacatgtcataagctagatatctacatnggtctatgcatggttangcacagtaactactagaagtcagctatgaaatctnatgtaaggctgctcactttcatgtgaatgttg

SEQ ID NO: 8573 - DNA, 417 bp, Oryza sativa
  unsure (1)..(417): unsure at all n locations
actcagctgatcgtccacttgacttgagaagtcttggaacacaatcaagagatgtgaagagacacctnccatgacccaaaactgctcgttccttcaccaatcatcgatgcctacaccactccatctcattttcagaatgcccgtagcaaaaatgcaggataatagtgacatgaaccaaaggctggcgatattagtaagctgcagaatggaacaaaaggaggaaaagtaaggttcaggtcattggtcttctacaatttcacaccacacagaattacgagcagaataagcgttacctctggagtgataaattttcctgtcagcaaacagatggcaggcaatgtacagtaagccaatagtggaatggatgtccaaggatacacgatggaattaatgtaggaaaatctttccaaacatttc

SEQ ID NO: 8574 - DNA, 190 bp, Oryza sativa
cttacatgggcatactgcacattgtgacattgggtgttttggcaacatcatatcaccatctcaaaaaaacaaaacaaaacaattgggagacaagtgcatctagctaactgcacaaaacagtagagaacactgtgtgctctgaaaatggaatccctaacaagaacctgcaagctatatgtgcctgtcaact

SEQ ID NO: 8575 - DNA, 244 bp, Oryza sativa
cgtctgtgggatgacgtacattccagacattactatcccactttaggccttaaactagctcttcccaattctttgaattggattgcaattttaatataattcaatattcgcaaaatcaattgatccgcaaacatcgattaaccgctttccttcactggttgttatagcggacagagaagaaactccggttcgagagtgacgcgttaaaccagagactcttcgcactcagcacaaactgatacgc

SEQ ID NO: 8576 - DNA, 115 bp, Oryza sativa
attatacctacagccaaatgatatcatcatccacttattgagcattattactctcgttatatgaatatttacatgattatctataatgaatgattaactgctatttaatcatata

SEQ ID NO: 8577 - DNA, 455 bp, Oryza sativa
tggcatgcgccaccgtgagcacatcgccgcctacggcgacggcaacgagcgccgtctcaccgggcgccacgagaccggcgacatcaacaacttcgtctgggtaggacaagatcgctcgtcacactcatctctagtgaaaaattttagtcttaataggtaccaaaaaaaaaaaattgagccccactaccgtactctctacaggtagtagaaaataatctgaactattaatctcatttgatcgaagggtttagatctatttgtactacaaccctaattagcggtagtaaaaatatggagggacattattataaaaaaaagacgcggagaggtatataatcgtcatttagcagtgattaaatctttttcctttatttttttgttttttgatggaatatgaataatactagcgtaatggatgggcacatatcgatctttgccggaaaaaaataaataat

SEQ ID NO: 8578 - DNA, 408 bp, Oryza sativa
acgacgaagatcagctggtaaatgaagcaagcatggaaagcaatgggagggtgatcgcgagcatgaaatcataggataatgactgactgacggatctcagctgtagtgcgactctacaatctacacactccctacctggttttacctccacacctgcctccattcattcgtcgaactaaaatagtgtgtgatgaagatggatggatgcctcaccggacgcgtcgatctacttgtgtagttcttcttttttgtgtgccgtttaaacataaatacttttcgatgtatatattaatcggcattcatagtgcagccagtgtcgtacgcctgtgaccagcgtaacatctatgttaatgactcttctgtgcagtgatcacacatacagaatgtaacccttctttgacatatcat

SEQ ID NO: 8579 - DNA, 328 bp, Oryza sativa
accaccacaaggctacttcttctgggtgcccttcacattcctttccacgtgcccctcgctggatcccctccgcatgcatctccacgttgccttgctcgtgaagtacaggtttggatcctcggtccccttttctttattccagtactggctgcttcgctccgcgagtgtgtcgtacaatatactgtcctcagtcgggtcgagcatctgttgatacacgaaacatctgctaagtcacgagacatgtatgtgttacaatctaaggcatgtatgctaagtgtaaatgtcgtccattagaacactacacaaccctacgtgcgtgaaggaatta

SEQ ID NO: 8580 - DNA, 301 bp, Oryza sativa
gctgcactgcaccttgtgcgttcacggcattctgttgttatgtgggcgccacatattgctacctctgtcccgtgcgcgtgcacaactgacatgccgagaggaaccagtcatttccatatccaactacgctgcggtggctaaggacactatgcctcgtcggctgtgtgtatttgggtatgacgggtgcggctacttagtctgcatgctcctactctgaaatgtctgccgtctaactaccaaacgctactcaggccatagattcttcatagatagacgctcgagttggcagcaacattcagtg

SEQ ID NO: 8581 - DNA, 229 bp, Oryza sativa
catgactggttggagaaagatgcgccgagcatcctcttgagattggctgaccattgtggctgggcttgatggcgatggcttgctgacctctgtgggatgacgcagcaactgatgtctgcgacggaaatgatgggcgatcgaggaagcactatgatgcggcgcttccatggcgacacgtcttggccactgattgtagcggcaataggcatggctacgggctatagcaagg

SEQ ID NO: 8582 - DNA, 122 bp, Oryza sativa
cgagttccaaaaaagatattatcgaaatcacgcagcactttttcaaacagtttccatgtaaaccccttcctcccaatgtcagggtcacagtaagagtgagtctatgactcagtctatccgtg

SEQ ID NO: 8583 - DNA, 445 bp, Oryza sativa
acctatgaatctcagcttataggagggacttggatcgatccatgacaagctttctcgataatatctcaatgcttcggccaatcgagtatgccattgccgaggataatcaaaaatctttctcttaattaatttgagcaagctcttgttagatgcctcgggctgcccattagcttgtgcataatatggtgaagaattcaacaatttgatacccattctatcggcaaactgaacaaactcatcggacacgaaaattgaaccttaatcggttgtaatggtttgaggaataccaaatcgatagattatatgctcttgaacaaactgtatagcattcccagaatcaaccttctttaaaggaatcgcctttacccacttggtaaaataatcggtcgccaccaatataaacttatgtgctttactcgatggtggataatcatgctgatcatat

SEQ ID NO: 8584 - DNA, 339 bp, Oryza sativa
  unsure (1)..(339): unsure at all n locations
ctctcgagtcaagatgcttagatttacttctgtaactatagcaataatatgactcttatattagccatactatagttcttattggatatgtctatgacctcatangtgtctactcaactgtattatagggaagtccggaagtctgaatattacacaaacatgagtgnctaaacatgcatgatgggtgtcccacacaggaatagcagaggggaagcttcatattgattctcactcggatactagatgctatgcataccctgaacacatgatgcttcgagactgggccgactatctagtgactgaattaagctctaagaagtatagttggatgatctactc

SEQ ID NO: 8585 - DNA, 247 bp, Oryza sativa
cctttgcgagcatgcgcgctgttatgatgaaactcacaccctgaaaagtgcgtattctgagaaccgctcaggaagctggttggatgtatagggttccactaaggcatacaagccaaaccggggaaatataatgccatcctcaacatgaaaccgcccagattccagaaagatgttctaaagctaaacggcttcatggcggcgctcagccggatcgttataccactcggcgagcgatggatgccttttt

SEQ ID NO: 8586 - DNA, 451 bp, Oryza sativa
  unsure (1)..(451): unsure at all n locations
nttcttctcaactcagatccaatctagccgggatgattaatctctgcgatggatccaatcaccgtcgccgccgagtcttttctttgatcggcaagaccggacgtcagtcaccgagttttgttcttgatcagcaaaagatttgaagccaacagctattatgagcctccataagtagttgttcctgtcaattctattttatgcaatgagatcaaatctgtcgccatgtgctgtcaagcaacagatcaagcatcagcagaaaacatgcatgcaaagctctgaagcatcggcgtctttcctcgtcgacatcaaaatttggtggcgagattcaatttcggaatcgatatggactccaacccagctgattggagcaatggtcgcacaagggcatcgatcaagccacttctgtccaagccatacatgcaggtgcatgatctacctagacagatacatg

SEQ ID NO: 8587 - DNA, 466 bp, Oryza sativa
  unsure (1)..(466): unsure at all n locations
tagcactgagctgcagctagcatgggccctgcatgtacacatctatgaccaagtgagaagcanagatgtaagagatgatgaggtgccaagtgaagacgtacatactacatatagtgaaanacatagattgtgtggacaatgaacttgtnaataacactattcgttcaagtgttcactttctcatttttagttgctaactctaaaaaatagaatttaaccaacaatactatcaatgcatgaagcaaatattggttaattaaatttttactaagtgctaaaacaaagttcatttagtttctgatttttaaacgatattatgccttctttctttctccctctctctcacacttatatctttctttgtacctatacctaactatgaactgtatgaggaagtctcagcgtacccttgcgcacaggggtgtacggtggtgaacgactctaggattggtgtatgtgcggttat

SEQ ID NO: 8588 - DNA, 376 bp, Oryza sativa
  unsure (1)..(376): unsure at all n locations
tcagttttagcccccagaccaggtgttccatttcttttatgtgttatccaacgcgacacgactgtgctgacagcctcacattntttcatctcctttctcggcttcttcatggtgaagcctttgaccatctaaatctcaagaataatttaatgatgcgcgagtagctgatttgaaacgtaatgctctattaggaaacagacaatatctagagtttcggccatgaacaccaaccttctgcaattgcactgcaattgactctttgcccgtccttgcagcaagtgcaaagtagcaaacaattacctaaagccagtcattgtcagcagctaacagcaaagaaaaacagatcaaactcagagagattgtttgttcattctca

SEQ ID NO: 8589 - DNA, 243 bp, Oryza sativa
  unsure (1)..(243): unsure at all n locations
atgactttatatacatgatgacgaatagcttctactaataaacaagngcanggtcaacagtaacgacctacacaccttgccacctataagcgacaattaatcatttggctcttgacatacaatgttccatatttttaagatcatcatcacacgggattgatatatcctngattaacaccatccatgacatgacaactcactgtatactaatacaattatgcactgacatactactacaataca

SEQ ID NO: 8590 - DNA, 321 bp, Oryza sativa
  unsure (1)..(321): unsure at all n locations
attatttattgacaatgtctctgttcttcttcacctgagtcggcagaggccacacagagagagtgagctctcttgcttttttcaactagctagctacctccactgttactgttgctgctgctgctgctgcaacatctccatccggcattggagaatacaatcgatccattaattccagccatgtgtggaggaggccccgacaatcaccacgccatcaccgtcgccgncgacctgtcgccggcgtcgtcgtctgtggtggcggtggagatggcgcctccgcgcggccaccgccccgggaaggaggtggagtacaatgaggag

SEQ ID NO: 8591 - DNA, 187 bp, Oryza sativa
attctgtcactctctacgtcttatcatcacaacactttacacttgtccggccttgtattgattgatctctttttgtctaacgccctctgatgcttggaacatgccactgcacttatgcagatgctctagctttaatcatgggactcgtgatcttgcagctgtacgctattcccaaatcttggtcaca

SEQ ID NO: 8592 - DNA, 356 bp, Oryza sativa
  unsure (1)..(356): unsure at all n locations
cataaagggcaaggctctaattctcaaacccccttggtcttttggagaaccaactactggccattttaccaaatggtatttcctaattctttggtcttcatgccaaagaaaccttcttcttataaaaatacatttttctttcactcctttggaaattctgtaaaaagacaacatgtatagaggtgtactgctcanacaagagtttatcaaagttactcttcctcctatatattgcaaattccactgccaacatcctaccctgttttgcattttctcctcaatctgtttccaggctttattcatgaatcatnttttattaatcggtatacccaaatactctataggcaaattaccta

SEQ ID NO: 8593 - DNA, 297 bp, Oryza sativa
  unsure (1)..(297): unsure at all n locations
tcttagcactgcgctgcnctgctgatgtgactttctgtgcgcgcgaatacctgtgcgtgacnataacccaatgccgtgctaaaatgactgaaaattgttgagtgaaatagcttgggacctgcagctgcaactctgtagatgctgactcttcattgtgctcggtggatgagtacacgttgaaatgataatgagacctgattataattgaagcagtgaatgcacttatcttatattgcatgctgcttgactcatgataagtatgaaagtctccacaaactaatgtctgcattatgactt

SEQ ID NO: 8594 - DNA, 219 bp, Oryza sativa
ctttgcttttttatttaatatgaatcatatgcctatgtgaatgtttctcaagatcgtattgttattctaacgcaatactgtcaaacaatcatgggacactggaatttctgggtaagtaaaaattactgttctcatggaaactgttatctaaaccatttagcgcttatagtctctctggggttgtatcagatctgctcatgttttatttcagataataag

SEQ ID NO: 8595 - DNA, 458 bp, Oryza sativa
tatgcataactccattccaccaaaatgagtgatcaaacagagtatttgagaacaaaaaactctagttaatgaatatcatatttccagtccttaaaaccggtaaattatcaaattttgtaccataacagaaataaacattttcgagctacataataccaaatgccagagtaaaacatgtcctcattcctcagtactatacaacacatattagcattctagttagaacccccaaataatctactacatatctcgaaattaaatccggaccacacacaagtttcaactacagaatgcgcagtcagtcgaaatcagcacgaactaatcggcatagatacggatccaacgcagtggaaacgagaaaatgaacaaagctacgggaacagaacgcatcgaggcaaatcttgatccagatcatctcgccaaccgaaccagccattcgctaatcacctaaccgacac

SEQ ID NO: 8596 - DNA, 354 bp, Oryza sativa
gtcatggtcctccccttatatgactcgcttacagaggtctcacatctcttttttttaggtggttgaactctaattcaaaaaatgttccctccacaacaacttaccaatatgactttgtaatcataggaaagcagaccatttttaaaaatcttcactgttcggatctcaatgctagaatctgtgattactatcctaggttatctaaatcagaaactctcaagtcctaactttgttgacaaacagttttacttctgccgaccgagtgaatttactgagttagagtatttaactaaagtgttctccggaaaaaaatttttttgccaattcgttaaaagctatccccatttttatttt

SEQ ID NO: 8597 - DNA, 189 bp, Oryza sativa
  unsure (1)..(189): unsure at all n locations
acagtcactctggagtatcaatntgtctcgctcagagcagaggcaagaataaattacatgtctgngagttnggagtcatcaaccaatcaactcatatcagaaatcactgagtgaacaacagcatatactntccctccagtgaagcatctacnaacagcttgatggatttattgtcactgacatcatcac

SEQ ID NO: 8598 - DNA, 301 bp, Oryza sativa
  unsure (1)..(301): unsure at all n locations
cctactcaaccgcgggactgtagacgtccgatcacaccaactccatacgtcgagcgaagcgtacgtgctaacgccacctcgcacgcagctcgcggcgcacaaacgatcgaaccgtgcggtgacagcaaaccgcgtgacctgaaagaaacacgtcggccgcgcatgtgccgctccagaaaaagtcgcgcgtggctaccaatcggatcggcaacgacgacgatactgcaagcanagcaatatcatagcagatcaatctgncattagaaataatctaacagagcaacagaatggaacgagaaac

SEQ ID NO: 8599 - DNA, 207 bp, Oryza sativa
tgtctatatgcttatgagaagatcacgctattgagatctaatgctgaattgatgataaatattgattctatgatatgaatgtaatcttggaagttatttctgaataatggttacagatgccatctgtaattgcttgaatggatatgagattgaaaatctaaaattggagcttctttgtcttggattgcttgcatactcgtgtgtgat

SEQ ID NO: 8600 - DNA, 342 bp, Oryza sativa
gtttaactctgctattgatacctattactaggaactgcaaaatggctgttatgcggaaatatctctgaggttggactattaaagtgcacaaaaaacatgggaattctctgagtaatttgttaacttgatgagataacagagagaatgaaacaacagtgctgattcaatcgacatatgtgtttatctggcgaatataaacatatgactccaactactctttaagtaccttctctgggagccgtcagctactaaacaagatatcttctcacaagattctatatggttggctcggaacctgctatttgacattgcatctcacatactgtcattgatcatgcttaa

SEQ ID NO: 8601 - DNA, 94 bp, Oryza sativa
ttaattgcaaccgcaacaggaaacgtgactttttaagtcggatttatacctattcatcgataaaaatactgttagagccttataggttttcttt

SEQ ID NO: 8602 - DNA, 187 bp, Oryza sativa
cgcatatgacgatcttcttataaggacaaaaatgaccgagggatgataaatactatcgccaatggcgagccgcgtatctttgtgaataacgaccatcctcaccggtgcgctggagtaatgagtctgcggactacagacacgtatacgactgacaataccagaacggatatactacaaacaaacattg

SEQ ID NO: 8603 - DNA, 142 bp, Oryza sativa
ttgaagcttggatcggccctatacgatattcttagaggcatttgcttgacctggatgcggatggaactgtgtatgtaaggaacttggagacctggaacttgtcccgcgcccctgggggcagacagcgtgccaccatgccttt

SEQ ID NO: 8604 - DNA, 348 bp, Oryza sativa
  unsure (1)..(348): unsure at all n locations
ttctgcttctgcttacatggatcggaccagccagtggtatgtgtaccaacctctgatgaaatcttgttctttgtgacactctttcatctgaactaatcatcttcttcttccattcaaatcgatggatcaaaccagggtctcgtcgccagacatacccgccgatcttctcatccggatcgccgacgacgtctttcctctccttaagggtcttttccctttttctcatttcacttcacctcttcttcgaattggtatatattttttccgctaacacgtaanaatattgcacgtcaagtcgtcaatatacaatttngtcttctaaagtctaagaaccagaacatactctgt

SEQ ID NO: 8605 - DNA, 55 bp, Oryza sativa
  unsure (1)..(55): unsure at all n locations
tctgctgcctgcntgggactctaaagatctcccggacccaactcttttttttccc

SEQ ID NO: 8606 - DNA, 362 bp, Oryza sativa
  unsure (1)..(362): unsure at all n locations
tgaattagctcgattccatagaaatcaagaggtgccagagcaaagccctggtggaagaagggctctaatcctataatctcactcgtattangggtggggaagagctccgtgatggctaagcgccagccgatgatctcttgtgctggcaatagcttgtcctccaccagatcatctagtttgctcccattgatgatgcaagctttccgctccaaatttggatctagaagtggcatcaaagcaacgaaagttgatgacttggtgatgcagtagctagggttgcagaaagtggatttggaggattggaagcaaggtgcttgagctttgagcttataaggtgcagaatctatatccggatggtcatg

SEQ ID NO: 8607 - DNA, 327 bp, Oryza sativa
  unsure (1)..(327): unsure at all n locations
catggatatcacatacctaatagtagttgactaaatctcggcaggatccaccacatatcatgtcgtatacngaaactgacttcacatatggagggagttctgggatantgaaagacaccagagttctacatgganaccgacaggactactcagatgtatcatattggtccctagtctactgacaagcgacacctgtggtataataaagcccctagagaccgagacccatgttaacacacacatacaacacatgggaccaacatactcaccatcactaagctaatcccaacaaccgcaatgctcaatcctgacacttcgactcagcgc

SEQ ID NO: 8608 - DNA, 433 bp, Oryza sativa
  unsure (1)..(433): unsure at all n locations
tcccttctagatacccaagtgatgcactcaatacactcttcgagccattgtctcccacagncccaatcgccaatacggctcacttataccaccgccacctaagccaccatgctgtccacacactaaattagcctctccgctgccgctcaccgtcgccggagaaccctagccacctcccctcttcagccgcaaccactttgaccccttaatgcccctgcaatccttaaccctagcgccaccggccgtatttggggaacagctggaggtagaagaagagaagagagagaccgacaggtgggacccaagcacagtgccatttaacctttntcccgagttaattngaattccaaactntaaaagcccatatcttttaaaatatagacctagttctagtgaaacttggaccacaattcttctaaaatcattctctatc

SEQ ID NO: 8609 - DNA, 178 bp, Oryza sativa
  unsure (1)..(178): unsure at all n locations
gtataaatatccgatgaacatgtgacccggacatgattaaatggaatattctgacgtataaacacctatataacttngacctgagattctgcttgagtcgcaaactcctacaataatggcgtgactttaaatgctcttacctacacagacggctcactggagtccaccattatatacg

SEQ ID NO: 8610 - DNA, 296 bp, Oryza sativa
ataattggctcggactcttgagccaaggccggaattatattccattatctaaagaaaatggaaccgccggcgctttcttcaatgccggggaacctgccatcggttgcgccgcccgccggctgccgatctaatcatcacaagcccaacgttggcggatcaggccggcaccggcccgggggtgggggcctgagccctggcggtcattggctgtctcgtccacaaaaggtgaaaaaggagaggaaaggatgtgaccaagtggagaggaaataatgaggagaaaaggtgagagagagatg

SEQ ID NO: 8611 - DNA, 98 bp, Oryza sativa
ggtggcttgtgctgcgatttcctcctaatggtacatttgcggcagtgataagcgctgtcagaaccagtgacctaagctatatttattgtttcttgagc

SEQ ID NO: 8612 - DNA, 145 bp, Oryza sativa
tggtcgcggtgctcttgtgaaaatctcaataaaaacaccacattttcaacagtgctcattctgaataaatgctactaatgttcttgaaggttctaataaaaaatactctctccgattctaaatatttgacgctggtgactttttt

SEQ ID NO: 8613 - DNA, 245 bp, Oryza sativa
  unsure (1)..(245): unsure at all n locations
gtaatgaactatttacctgttaactcactaatangcttgatcaattgactttattcgttgaacatcaacaattnaattcctaattaaaaatcaataattcaacttcacacaattnatcttactttctaaaattactaaacattgtatacctacctacagagaccccctcctcttaacacccccataagctcgatcctactatctcaacgctccttgaaaaatacttataaaattaattaactatc

SEQ ID NO: 8614 - DNA, 379 bp, Oryza sativa
  unsure (1)..(379): unsure at all n locations
tatgcatatctggatctggatcctgcttaacaaacatataggatgagtagtatctgatataaatataatactcgagaaaaattcaagcagtttataaataccgatttcttctcttggtaattttgaattccccgagcagatgactcattacgtttaaacactctggccgactagtcatagccaccaagcactgggagtcggcctaagcacttcccaaacatgcatatgagtgacatgagttcgtcattaatggaacaaagtttcacggatcggagtttactactcgggtacttttgcaattattaagagcagaanataaatttatctcatctctatgcttttggattattccgaataatacttagcaccttgcgttact

SEQ ID NO: 8615 - DNA, 415 bp, Oryza sativa
ccgacttagcacctggcgactgttgcaccctaccgagacgtgggtgcgcgcggagcactgtgacgaccagtgcgcgcgcttcgcagtggcgcgccgcagcggtactgtgggctgcgcaagctaagttactacttgatagtcatgctatgatagacgagcacaaatacttgtgtcttgtatgacaatgtcactcacggctgtgagacccacggggcatcactgcactagcgcgaagacaacatgcaatagagtgtgtctttaataaataataggaaacaaaataacctgactagtatattactaaaatttttactatataatttataaaattcacgcacatctatatgctcctatgtcgtttatccggcccgatatttttaagtttttaataataatttgcttttattatacacat

SEQ ID NO: 8616 - DNA, 195 bp, Oryza sativa
ccttctgccccactttaaattaaaaaacaaaatcgaacgtctctgggggttgcccgtccaattactacctcgactatgaacggatcaatatcggccaccgcacaactgggaccaggagatttggcgtttaaacggcgcgaaacggatggtactctctgcaatgtcgtgtcccaacggcctcaggatggtaagggg

SEQ ID NO: 8617 - DNA, 159 bp, Oryza sativa
  unsure (1)..(159): unsure at all n locations
cgatgtgtaagaggatgcctctgattcaactacctttttccagacttgaacatttccatatgagcaactatgttgtagtatgaattacagtttggtcattttgtccanataacatttttattactccatattacttgctgtattcattgtacattcatg

SEQ ID NO: 8618 - DNA, 383 bp, Oryza sativa
  unsure (1)..(383): unsure at all n locations
actcatatgagcatgttngaatttattttgtctgtatcgaacgcaagttggaaaaatcgatctctcctgccaatctgatatctgtatttgtacagttagtagcagcattatattattgactttatatggatgaataatatattcatatatagttcactgccttgcttaacgcaattgtgttatgaaaaatatgaatttttttctcctatcttcgggtgaaacaatgaacaaatactctttaccaatagcaacaacaggaatattatttttttatgtaccgaagaaaaaaaccaagcacgtcataggtcgacgtgtatatgttcgtctttcatatctctgctctataaaatcgtgtatataggctcgattatactcctaataca

SEQ ID NO: 8619 - DNA, 286 bp, Oryza sativa
  unsure (1)..(286): unsure at all n locations
tcacctctttgccttcatacgtctactcgaggacaacatcctatagaaatgcatttcaagaagtcatccangagcagagtgacgtatcaatttggcgacagagcttcgaacggacanacctcaaactggagacttgcttcatgatggtgcatcttctcagcatagcagaagtgtgtagactagatgtgaaagtcatctactcaatgtnnttgcagatacaagccttcagagggagctgacatttgtaatctaccatttctcagacatcatggctttgtactctgct

SEQ ID NO: 8620 - DNA, 394 bp, Oryza sativa
  unsure (1)..(394): unsure at all n locations
tgaacagntactaaacaacacgagccggggtgccctcttactttctgctctaaaccgaaatggtctcaccaaaaccttgtgctcttggcgaatcacaaaatggaagagcaattatgttaagcagccctatgctattaaagaattagtcctactaatgagcaaagatttggagagatctagcaatatgttattggtctaatatgatctatgcctctagtccacttaggcattagtgagctcaaaccttgaggcccaaatatcttaaggagggatggggccatttgcaatcactgaaattggatatttgtctccaaccagtgagacattgtgatgagaggataagtgcctgatcagaaataaaacaatcaagtttgaaagcatatgagtacaatga

SEQ ID NO: 8621 - DNA, 286 bp, Oryza sativa
gcacccgctgcagctatcacagctatctagaagtgtctacaaactttctttatctaataacggggttttccagcatagccggcaacgcgttccgtcgaaagccaagtggcggaaaaaaaggaacctcttgcccagctttatcacatgaacgaagctcttttgtgttgacaaaggccttgtttgacattggaaacaaagtgctctcactaaccgcggccgctctcttggcctgcagttcacttcttatgtgtgtgatctgcctcgctgtactactttctctgatctg

SEQ ID NO: 8622 - DNA, 310 bp, Oryza sativa
tccaaataatcttgtttctctcaatataaccattattaattaaatctagatacatcaacctaacagaaaatattccattctgatgataattccatctaaagctatcaaaggattgattcaattgaatatgtacaatagaagcacacaattcatgccaatatgcaagattctgtccaactaatgatctcctaaaggaaacattgagtggaacaaatctcataacattagcaatagtagaactttttcttcggaccataaagtataaagatggatatttgtctttaaaagccaggtttcctagccatttatc

SEQ ID NO: 8623 - DNA, 288 bp, Oryza sativa
  unsure (1)..(288): unsure at all n locations
ctgcagctatttaccttagatgatagtgacatacatggcgctgtcgcgcatatattcgctgacgtgactatatgcacgtgtggcgttactttacactgctgctcgcgtgcgatgggntcgctgacgtggcttatccgcgtgtggcgttactttacgacggtgctttcgcgcactggttcgctgacgtgacttatgccgtgtggcgtatctacgacgatgctccgtgcacggttcgctgcgtgcttatccgtgtgggtagttacacgtgcttacgcatggttcctgcgt

SEQ ID NO: 8624 - DNA, 168 bp, Oryza sativa
tgataaagagagaacccctgatagctgtagtatgcttcaaggggatcttgctgttgctgcgtcatattgttgaagatggtgaactgagcatcaataaaatggtggcattcttgcgtttgagctatgtgttcctcgagggtgtactggatcttcccagtctgtatatta

SEQ ID NO: 8625 - DNA, 271 bp, Oryza sativa
  unsure (1)..(271): unsure at all n locations
tttcttatgaacaccgtgcaaacacacaattcttgccatatacaattctggccaacgactttcggaatatgttgntctcacagagatgaaatgggccaccttggtaagcctgtcgactatcacccaaataaagtcatgggccgatgatgtttgccgtagaccggtgatgaaatccatcccaatttcctcccacctacattntggtatctttaaaggctgcagcaaacctgcgggtttctgatgttcttgcttgacttgctgacaacatcac

SEQ ID NO: 8626 - DNA, 259 bp, Oryza sativa
  unsure (1)..(259): unsure at all n locations
tgttccgtggtgcttgtgacgacagaacatctgtgcataagcatgtgcagacacataccagctcatggtgtgggaacacttgtanttgaatgacatcatgtatgtgtgtataatgctgtgtggtcaaagaggacgacaggcgaagagtaagtgctttgtttctctcttcttattgtttttcttgtgtgtctcttggttttgggaggtcctactatgtctttgctgacttgatgctgactgcatatcgtgttgtcatctg

SEQ ID NO: 8627 - DNA, 310 bp, Oryza sativa
tgcttactcatgctctaagatagattctggggaacgctcatactgtgcataaaccattggaaacctggtctttctaaggatttccaatacatctgaattccttctcatcttatcaccattcttctgttctgatgtcaagtggctgcaaaccaaacaaaaacttggttggtgcaatgacatgcttatcgaaatcgaaccctggaaaacaaatcctttaccgttgaatacctaagctaagaagaagttcttggttgcaatccagccatacaagggtaatagtcaaaaatcacacttgctatactacattggg

SEQ ID NO: 8628 - DNA, 461 bp, Oryza sativa
  unsure (1)..(461): unsure at all n locations
cacacttctgctcactctctngnggtagataccctgcctgccttatcttgacataatatctcaaaacctgtgtggtgngtacctngcactagagctcgatgtntcatggnctnntttacgcaactctctagctntntctgcatgaaagttccannacaaatgcnntgtgtcggcatagagggaagaactgcctgaaccgatcctaaatacctgatgtccatgtanatgaactcactatgccactagtggagtcaggacccgccataccagtgtaactctgcaatttgtgcatattctattacacactggttccctgcatttcttgtatcgatcatggaattcgattcatcatcttacaagtgcttcgtgaactcaaatgagagatacgcgtatgacctgcctatctgttgtgactattattcactatattttcgttatgacttactatacctgctatgtaa

SEQ ID NO: 8629 - DNA, 454 bp, Oryza sativa
  unsure (1)..(454): unsure at all n locations
acctcatctcaataatcttttggttggctctccatgcctttgcatagcttatggggnacctgaatttggtctcgatgtgcctaataattgattttggttcaaagccaatgttaccaacaacactgctgtacatctcacttgccacaaaagctgaagtgatgtttcggtgatacttctccaccccttataagtagcacttgtgctcggtcacaatgctaactttccaataatcattccatttacccttatatgcatggacacgccacggacaatcttccttcatgcaccttacttcatacacataatttngtgacttgatcaccctanactctctctgaaggaaactgcccaatgcttcacccgcttcttcatctcatccttatgagcatacctngcaccctcaattacactcgttctcttatactcccagggtacatgatcacnctctgatata

SEQ ID NO: 8630 - DNA, 204 bp, Oryza sativa
gtatgcactctagaatctgagtgtttatacgcattctagtgcatctttggctgccaattcactagggttgatttagacttccatatttctggaggggttatgatattatagattacttgattatagatacagaagtacttcagagatagctactctttgataaattgtatttaatctacatttgctattgctttattatctgac

SEQ ID NO: 8631 - DNA, 281 bp, Oryza sativa
actctcttacatctcttcatctctcagtcaatcaattctctactgatctagtctatgctttactcaactgctgccccaatctttatgcggtaataatatcactagaccaacgatatgacttttgccgttgcaactgcttgtgccccatgccgaaataacacaaacactatgctgtcagcacatacccgcacacatataaaactgcatgtacacgactcggtggcagcaaggcccttgtatactcacacactcagctgcactactgctgctgcaccttgtca

SEQ ID NO: 8632 - DNA, 348 bp, Oryza sativa
agctcttcttttctcaatgggatgaagtcgaattcttctaagcccttccatcaaggctgctcttatttcatccgaacaagaacgcgggttccaagtaagcactttgaataatctgtggcacttgagtcatgggaccatcctctttattctttcatatacataactatcaaaaatcttgggttataactcatttgatctcctacagatatgttatgccgtcgaaacatggataggtgggtttgtggcatgatgaacttggcgccagcgaggtcagccggaatggtgatcctggcgatgacacgggcacaatgatctgaaattcgtcggcgtgcttcgatgaatcataca

SEQ ID NO: 8633 - DNA, 156 bp, Oryza sativa
tcggtcctgcggtttctgaggattcgtctgacactggctgtaaatagaattctggatccttttctgactgcttgcagtccttgcaataaactacgctgccctgcacggtaatagctgtgggagttctggacttccaaacaaactcccaatagtact

SEQ ID NO: 8634 - DNA, 271 bp, Oryza sativa
tagaacgtgtgacattccaggcattgtgaccatcgactacagattcacaaagttacatggcgataaaagtaagtcccaaggagcattatcacaattacacaacattcatctacaggccaataaaaaactactaatacattataagttaacatgccggataaaggatgtcctaagaagcgttatcacaattacacaacattcatttacaggccaataaaaaactacatgaagttaacatgataaggtatcacaattacacaacattaatcta

SEQ ID NO: 8635 - DNA, 315 bp, Oryza sativa
  unsure (1)..(315): unsure at all n locations
gcacgcgctgcacttaaagcagatatgatgatcgagaaatgttgctttactaacacatagacacccatggataaacattgagataatatcgatttacgacttactttgctgattgaaatcttcagtagnttgtaggaataagatctgaatgtcaaatcataccaaacaccaatttggacctgtctcgtgagacaagttgtttaagatcgctgctatcacataaagctgacctaaaatcaaattatggactgtttgcttatgctgagatatgatgatgtacgagaagatctcacacaattgggcattaaccccact

SEQ ID NO: 8636 - DNA, 348 bp, Oryza sativa
tgaaccaaatgtcagcattatacatgggaacataaacatctctgaaatatcggttcacggctatccaagaatgtggtgatttgttatgcctacaaagatgtttccatcattataagcatgtttaattaaacactagaggcacacattaacctttgtttttccgaccaaacatgcttttgagattcactatcacccgtatgctccaataatgtaacacgaagaacatattctccttgaaataggcaggcagatttgatctacctaaacctcatactacctataatggcatgtgatccctctcatgttcgacaagatgcgatgtgacacagctatccattatctgcgatc

SEQ ID NO: 8637 - DNA, 252 bp, Oryza sativa
  unsure (1)..(252): unsure at all n locations
ggtatcnactagtatagggatactatattatgtatatgtacagatcatgacttggtgtacgttcttgatatacnngacgctnagtctgnntgtatattgaagtaattagaaaccatccgtatggtaggtttatctgtatctgccccatctattangtggcggagccttagggcaataacacctacgcaatcatatcaccgcgatcaatccaacgagaggatacttatggagctgactgtaatttgctcctct

SEQ ID NO: 8638 - DNA, 189 bp, Oryza sativa
atgacttcacggatgaatcccgccttcacaagtctcgccacctcctcgcggatgaaggcttgacgtttcggggcctgccgccgcactttctgccggaccggccttgcgcccggccgcacggcgagacggtgctcaatcacctccctggggaccccgggcatgtccgctggtctccatgcgaagacgtca

SEQ ID NO: 8639 - DNA, 229 bp, Oryza sativa
atataacacaatactgacgcattcaccaccaaaggctgtgtctgaacatatatatggaatttattgagcaatatcctacaatatgcctacaatcaaataatgcaagtgactactattacatacaaaattgctaacaacaacactatattactcttatgaagcaaaaaaaatgcattaacaagaccttatgaatcgatatactcctatcctctgttatactccttctaca

SEQ ID NO: 8640 - DNA, 442 bp, Oryza sativa
  unsure (1)..(442): unsure at all n locations
ntcctcaagacttaactcatgacacgggnactcatgtgatccttatgttatttcaagagttcctgagagggaagatttgtgccaccttaaaaactgtacttataatgaaaatctacaacttctgaatcttaagtacgtgcctgaattccatagatgttatagctggtcattatgtttctcatgttggataatcaatcgaatttcgttcacctgataggtatgacactatgccttccgactatgtttctatgatcataacagaatatggaatggtaagatgtgttcctttctacttctaaatcaattcctcatgcttatattcaaatcatattatacccatgttaacttcngttctttttgctgctgtttntgtgcttgaatagttcatataatgctatatatgctgacgagtttaaaatgtagtacagacacttggatcatc

SEQ ID NO: 8641 - DNA, 201 bp, Oryza sativa
  unsure (1)..(201): unsure at all n locations
gacactggttgctcgtgggatccttctgtccgctgctatatgctgaccaatatattatgatagctgtactgatgatgagccgtcgtgatttgttntgagtggcggcgaacacagctggaatcttcttagtattattacttgtatatatattngaattatctcggntcacaatataagaattagaacaagaatcttacatct

SEQ ID NO: 8642 - DNA, 374 bp, Oryza sativa
  unsure (1)..(374): unsure at all n locations
ctttgacacttactcacctgttgctagattgaccacaattcgtgtgctactttccctaacagcctcacatggtcttcttgttcatcaaatggacgtttagacagcttttcttaatggagaattggatgaagagatctatatggatcaacctgatggcgttgtagttgaaggtcaaaaacgcaaagtgtgcaaattggtgatgtctttgtatggtctgaaacangctcctaagcaatggcatgagaaatttaacaaaacattgacatctgcaggctttgcagtcaatgaaggcagataatgtgtgtactatcgccatggtgngggtgaggcgagtattctatgctctgatgttgatgacatactgatatttggga

SEQ ID NO: 8643 - DNA, 265 bp, Oryza sativa
  unsure (1)..(265): unsure at all n locations
tagcacggcgcactatacacaaactccagcttgcttcgagatcgtgcagagttgttaactcgtctggattttgcccggcttatctgagtcatccttgttgacccaacccgngggacccgcatgctttactgagtgtaatgggtaactgtagtctgcacatcgatgtgatctattaagataactaactataaaactattctaatgaactatcgcagagaatttagctataatcatatatcaaagtagtgacatccatatcaatcat

SEQ ID NO: 8644 - DNA, 219 bp, Oryza sativa
ctcgccactactgcctgctcatcaaggcaccattttgctatatgcggccagatctgccacctcccacgagtttgtggggctctcacttgtgcaccggtctcccacaaagaggaagtggagagggtatcttgtcacgagaagaggagatgctgctgactctgaagtggaccgtggcggtagttgatctctatgcgaccagatctgtcaccttccacttgc

SEQ ID NO: 8645 - DNA, 300 bp, Oryza sativa
catctttatatacatgacgattacacccagtctctctacgagacagtgcccacatcggtacgcctttcttgcgggtcggaacctacccgaccaggaatttccctaccttatgaccgctatagctaccgccgccgatcaccggggcttcggtcgccggcttccctggcattaattcaacaacttacttgaacttcccgcactgggcacgcgtcaaaccacatacatgggcttaccactttgcggagaccatgagttttggtaaacaaggcgccgggcctggtcactgcgacccccttttgc

SEQ ID NO: 8646 - DNA, 329 bp, Oryza sativa
  unsure (1)..(329): unsure at all n locations
ttaagtatagattcttgtttgntgtttcttatctcaataacctgaagtcgtcggaagaatcattgaatgaacangttggttttgtgtcatgtttgtctcgcggatctgctaaatagttttgatttgcttcaatatgacctttttttgttatactcaactggagaaagctaagaaaagagaggcggctttcatttgaacatttgcgaaacgtgaacaagaaattgcagaactgaaggtaccctcttactgcctcattttgctatanggagatgaaagacatgtcaatatggataaatctgtttaatattctgtacttctccattaatgga

SEQ ID NO: 8647 - DNA, 235 bp, Oryza sativa
gtaatgcggctatgatggttttttttttggactctatctcgatgtgcggacaaaaaatcaccaaatagggaagacgacaaatccccggaatcttactattttaataggttagatatagataagatatggaatttccttatgattcacttatggagaaataaaaaagacttttttgttgacgtaaataaaacactcaataccttattgcatgatttatacagtaccatgcataacg

SEQ ID NO: 8648 - DNA, 251 bp, Oryza sativa
  unsure (1)..(251): unsure at all n locations
accttgccattctcatattganacatatattttgtgaactgcatatagatacacactaactgctggctcgttgcgtgcaaccgacgactaccagtatcgcactaatccgaggtcgactacctgattcttgtgctcaccttgtgacctcgattcggctttgacgcatacaattccacatcccgtgttgtaaactggaatggtggaactcaacactgggcgggtgaaaaaatgaaaccacgggtgcttgatgc

SEQ ID NO: 8649 - DNA, 462 bp, Oryza sativa
  unsure (1)..(462): unsure at all n locations
tgatctaactctatgattacattggtaatatttgaataaatcatttttttattaaattgatgatatttgaataaatcattttgtttcattttagatgaaattcaaaattttaaatcactataccttagcatancaaattcaaatctatcgtgaatatgagatctgaaactgtgccgaacatgaccatcaaatatctatatgagaaagctcccacatctatcaaaagatctctgctagttgattagaaaaataatattattgtgactattagattatattaaaaattcaacatgggtcttggtttccttgtgtggttgaaatataatttcttattagaggaaccgtctcgtagacgacattattgtgacatactggctacggaattgtggatgaatatatatgttanatattatataaaccataaatggtaaaataatgcaaaaatgaagtgaggaaaataat

SEQ ID NO: 8650 - DNA, 219 bp, Oryza sativa
tgacacttatgcccctcgtccgccttgatagtacaccatcaaatgacttaaccacagatgtgcttatcattgatgggcatgtcgttggtccagaggagaacatggcggtgagtataaacaggaaaccaaggagttggactctgtgagacctggctcctccccgtggaggtactgaggccactggtttctaggagatactactatagacagacaagtgtg

SEQ ID NO: 8651 - DNA, 415 bp, Oryza sativa
  unsure (1)..(415): unsure at all n locations
tatcttgttgttctganggaattcaagaaatgcttcaaatggtctgaattcgcangtttatttgggctggaatctctcagagggtttaaggtaccgttcctttcgtcacttcccccaaagtttaacctgcaaagnttgntcttcttcttcttcttcttcttcttcttcttcttcttcttttttccctcttgctctgtgtctgattcttcctttcccttttcgttttngttcttcactcgtgaataagctttttgtttttttacattcagtagtacccactcactagtagaaatagtcctctgtttcttctccactactgttggacatgtttgcttgcttgttgtgggttgtggcacccaaaaacgngatggtgattganggggtgggtgttggtgtgttcctgcatattctttga

SEQ ID NO: 8652 - DNA, 296 bp, Oryza sativa
gtggctgcacattattatacatgtggctaactatcactatactgacgcatattccatttgcatataatctactcactggtgggtcgtgttgaatcaataaggtgcaaaaaagaactatcatcgatttgcgcaacgttgggcgattctcgtgacaagttgaattatttctgggacccgattgtcgtgtgcgcccaaaaaatacaaaaaaagcctgactcattccgtgagctggtctggtaagacaccgtgtaactcccctcagcctgctgcgaacctcgggagtctcgggagcctcg

SEQ ID NO: 8653 - DNA, 441 bp, Oryza sativa
  unsure (1)..(441): unsure at all n locations
tcataataatagtggaggtttatttttttattttataaactctaacccaaactaagagaagagctattgagccctttttccatttattacacattatcatcattaaatctgcccgataacttttagagtcattggaatactccgaaaaggtgtgtgttacaacttacaagtaatgagtagggacaaaaaatttctaattatgtcaataaaaacagaagatgattctctggaaatcacaanaaccgaatggaaataaaaaaatatataattcagcaacctaaatgtactgcattaaatctgacctgtcgcaaagtcttcatattcatggngataagtaccccacgtactgtgaggtaggctgctgcagaatatgggaacaatatctggactgccaaacgagataatgtgtctactcttgatgaatacagaatcaaactcaac

SEQ ID NO: 8654 - DNA, 449 bp, Oryza sativa
cttattacaccatcttaaaagtgtgcctgtcacccacatggaattgtctaaaccaatgacagctggagatgaaagcataccatccaagtggttggtctagatgcttgtcggaatatcaagcttaaatcttcctgttggtctcctatccttacggcagatctcactttttctgaacctttatttggctaatggctacaccctgacaacttcaagcatggggttacaattcccaaggccgtgagggagaagcatgtagtacaatcatagaaccaaacacattccaaaactacaggtagaacgtgagctaacaatgatctgagacatggagagttgtggaaagtgctttttagactaagaccacacattctcaaaacaacctgaaatttctacactgcactagaatgccgacttacattattttcaagaatgcagctcacaatgccatgagt

SEQ ID NO: 8655 - DNA, 152 bp, Oryza sativa
gctctctcgcgaagtctcgcgctcacagctgggatggattgctggccatgccattgactcacatgctcgcgcatgtatcgcgcatctcgcacctacggttcgctctctgcttttgctccttcttctgctcgacgcgcgacgagacactatat

SEQ ID NO: 8656 - DNA, 356 bp, Oryza sativa
  unsure (1)..(356): unsure at all n locations
tttcattcganaacaacagacattaacttctaccctctccctctcccttctctctctctgacttatttttgataagaaaaagtaatgttgcctggatcaactgttatatttggtggggcattggatttttatggatgaagataagaaattgagggttgaaccaatgaactacttgctttttaatatctgtttagttcatcggatggagggtgacgacaaggtgaggtcaacaacgacaacagatgccccttgagcttccagatccggaatctgatcgagcccttcctcctcttgtcctccttcctacctgatttggncgagcttgagctcttgggtgccagaattgccacgtggcg

SEQ ID NO: 8657 - DNA, 392 bp, Oryza sativa
  unsure (1)..(392): unsure at all n locations
tgtacctctgtctcggcacgatgggctaacccgtcatggcccggtccaatgataatggagaacaaatagttgagagttccaaaatatatttattccaatcatataatgcacaagctaatgatatgagggacctaaaatagacttatttagagctatataagagacggcctaaagagatgaggatagcaaaataaactttttacaagacaaggtgggctttcgtgccttcngtcggccccggcacgaaaagtttattctgccgttggtgcagcactagagcccggcccggcatgataagggcggccatttggccatgtatagcttcgtgcccacatgccccagcgatggtctatgcatgggacaacacgcccctgcgcctcgtgagcagtaca

SEQ ID NO: 8658 - DNA, 344 bp, Oryza sativa
  unsure (1)..(344): unsure at all n locations
gttctatgtgatctgcagctcgaagagttatgtgttgctcttgngagtgtctcatgtctctaccttgtgtgtgagcnatatacatgatcttctagattgatacaacatcactcaatatcagcgtgtggatataacacaaaagtgtcactgatggtggccaatgtgctgacattctcactctgttgtaccggatgatacggatagccatgagatacatatgagattacacttaatattaaggcttataggcnaccacactaagtctcatgaactatgattgacccattgtattgatagttaaacgaaatatgcatctactatgtaatcttgcattatgcacatat

SEQ ID NO: 8659 - DNA, 294 bp, Oryza sativa
  unsure (1)..(294): unsure at all n locations
tgactgttggtcgcagnctatgaagattatgggtgaatcttctacgaagcttactaaagatctaggagtatgacttatacgctccacccgaggggtagtctacagacggtctaataccacataagattctgagtgaaacttgcttgcacaagacttgcaattcaaggcgtaatccattgttcaagttgtgagtaaatgtatcttggagttctaagtggatgttcaaccttgatcgggctacatcgaagcgctggtatataaaccgtacattgaaaaggccaatctcagtgggat

SEQ ID NO: 8660 - DNA, 310 bp, Oryza sativa
accaggtaactctactatattttaatatcaccttcaatcttttataatggtaagtggtgagacaaaattggaagtgaacgttggaagatacaagaatacaagagacgggcagtgattttacgtaggcgtattacgactcatttaatgataaccaagttgtcggccagactcgcacatctaactgaactcgcaagcgtcaattcggagattagctagaagttttatattcaatctcaaatttgtgatgtaacctagataaaccttatacgttcaagcaagaaaaaaactccgtgtccattatgaatggggg

SEQ ID NO: 8661 - DNA, 128 bp, Oryza sativa
gagaacatgtgctctggtcaagaacgtgactttttaatgagattctaaatcgcgtattaaggtattagacttgaaacctcgtgttgttactgttgtagcgtgagacgatcgaagaggtcctcgtgact

SEQ ID NO: 8662 - DNA, 309 bp, Oryza sativa
ccataaccactactcttatctcatctttcaatcattccacaaacttggtgaaaaaataaacaggaactaatgatgaatcatatgccattagttggtgcattaacccatcaaatttttccacatactcactcactgacccagtctgagaaatatgaatccattggcgaatcagtgcctgatgcctatctttaacaaacctgctacacaccaattcacataaccccacccaagtaatttcctgcagttgagacctaacagattgcatccagaacgcagcattgcccacgaaattcaaggttgcaattttta

SEQ ID NO: 8663 - DNA, 394 bp, Oryza sativa
tggtgagttttcttggtctcttttcttcattacatgatttggtctttgatcaattcgtatgtaaacaactgggtcttgacgattaacgcttggcagatacaatagcgagactgaatgagcctgcaccctgaaacaagcgaacacgtcatcagtgagaagagaaggtaggctagcatcctaagcaactataaggaaaacctactagtgacctcaccgatagaaaaagcatcgcggcgcgtatatactctgacaatgagttcctgagacaggcacaccttggagcacgttcggaaggaaatcaattaacggcaactcctctctgtggaaggaggctcaactgctattcggcaagggtgtgtgctgcgatggcgtagctttgttaatgtactcatct

SEQ ID NO: 8664 - DNA, 270 bp, Oryza sativa
gatatattctggagatatgacaacatgtgttttattactgctaagaagacagcttcaaaccttcattcgtattaatgttaggaggactgatgaatttacatgatgttctaaatttctcaagccttgctcaactgaccgttaagactcaagaccactaagcatagaacattaatttacattggtgcatcatttcattgagcttccattgcccataggtgtatctctgttgattgcatattttcagcaatgaatattatcatgactgcatat

SEQ ID NO: 8665 - DNA, 132 bp, Oryza sativa
gacctctgagatagatataatagtgttaccaaatagttgatacgggatatagttatatcaactgaataataattaatttaagcaactctataaaagttcctgaaataccgttacagttgaaaatgatacagt

SEQ ID NO: 8666 - DNA, 107 bp, Oryza sativa
ctattgcctgaagctattaaaagtattaattattataagatactgtacaatacatggggactacagagttatgaagacgccgttttaaatctacctaaagtacacac

SEQ ID NO: 8667 - DNA, 272 bp, Oryza sativa
  unsure (1)..(272): unsure at all n locations
tcatcttgatcatctcttcttttcttctctgaagcatatgccattattatgtnggtntgcagtggtgctactactaccaccacagtaccactacaatgtgagggtttcaagaagtntatgatgtgtgaaagaagaaggaatatatcaatatctgtctatcacaccatggcctcactgactacatgacgtggaactcgatgaagatnggcaacggactgtaggaccacctgataactaatgcttattaccactatctctctctgctttgattt

SEQ ID NO: 8668 - DNA, 325 bp, Oryza sativa
  unsure (1)..(325): unsure at all n locations
tgccactacatgtagtcaaggtgattgataattatatatatattctgccaaactatattcagatatggcatggctaaanaatttcataatatcacacgcttggtagttttcataatgtatgaatataaatttaatggttgagtgtcatacgtagctctgaatttgaaaagtgaaacataaattaattttttttagggaggagttgagattttaatacacgtacgttccgttttcaacgtgtgttaagtagcccacaatcaatcaaagaaaaagatgcaattgggacgttaattagtctgattattgcagaggcttcgtttttcta

SEQ ID NO: 8669 - DNA, 328 bp, Oryza sativa
  unsure (1)..(328): unsure at all n locations
tgaatgttggatcactattagtgatatactcctttacttctactntgtctctacacaacataacgagaatacccggctatcgatcacaatggtccaacagtatagcatatttatctcataccagagtagcattggtaccagtaatactactatcagagacactcaccagtgaggagaaaaacatattttgctgatgtctatctctctatgcatgtgngaacttactatctgactactatacgtatctggacttacataacactactgcactatcatctcgtaatagatgttgtgcttacatgtataaaatgatagtgttattatagct

SEQ ID NO: 8670 - DNA, 355 bp, Oryza sativa
  unsure (1)..(355): unsure at all n locations
ttcaatctggctttctttntttttaattatccagcagattggtgcaaatccttctaccttttttcagctgaagggtcaatctgaataagaatggtagattaattaagtgatgatgctagcatatgtcctcacttttaatggacatacctgcttgtaacctggtaaacttatgtctttgcggtatgaatatatttgacgagtttacaccatcttgatcctgtcagctgtttgttgggtggccttacaatatcggtttattagcttcttttggtttgcatttttactttcaatggttatttaacctgtcatattggtgattgacctttnnttttccgtatactatggaaaaaacata

SEQ ID NO: 8671 - DNA, 231 bp, Oryza sativa
ttatgagctaccttgaagaaatatataaaaggtttttagtggggcccgttttggcggataaacactacgcgaaagatttccgccacatgttctttcatggtttcatgttcaccaatataaattttagactgtaatctaactgtgaaagccggactacgacatgatttgatctatctgatacgctgtagactctttagagcggctggcatttttcataataaacctggattc

SEQ ID NO: 8672 - DNA, 388 bp, Oryza sativa
tggatctcgggtgcatgagaggaataaacacaatccagtatatatgttctggccagatggatacgtaatagcctacttctatgtggtggactatggatcatcaaaggaaaaaaatgatgtggaaagaaaagttaagtgagtacaagaagttctctgctcactggaagaccctttttttagtggcatagatcctcttcttatatgtgaaggggataccgttgcatgcatgaaggagcggggcctactaagctagtctaaacttgatatgcttagtcttgtcgttttccctccaagctaactgaccagatgtgactgccacacctactagttgacaagtggagaggggaatcaaaagtcttcgtcccaactatcttcgggcctacacgtc

SEQ ID NO: 8673 - DNA, 156 bp, Oryza sativa
  unsure (1)..(156): unsure at all n locations
gacagctatcatcacattctgcattcatccgtattatactattcngcgtacaccagcgttaaggccaatactgcttaaaaataccaccgcctgcactatcgagactgtgaatcatatacatttgcgacatgagcatcacaacggatgatgaactaa

SEQ ID NO: 8674 - DNA, 224 bp, Oryza sativa
cactatacatgcaattgcacggagagtgctgtcacatcggtatgtacagcgacgtgaaggacagtgccgtatgtgatgcttactgacttgagatagcaaatctgagacataggtgcaaggatgcttgccgttaatcaatgaacgcaatgcgtacaccatatagtgttacacaagatatagagatgtcttcatgcacggagtcctgttctctagagtgataaaac

SEQ ID NO: 8675 - DNA, 263 bp, Oryza sativa
cacccaagcatggtcttgaactttatgttcgatagtacttagttagtgcccctccagtgaatatctacaaaatagaagtattcactacaaacgctaattgtctccatatagacgttgtgcggtggaacattccctgaagcattttctctttcttttcattaattacggacgggcacagacgctgtgcgccaactcagagaaacaaaactgctggctgctccattaaccaacccagtactttagtccactactcaggcagggga

SEQ ID NO: 8676 - DNA, 193 bp, Oryza sativa
acccagctgcgaactttcaagtagatgaatttcacgtcaaccgatatcatgccggctagcgcgaattaataaattgtaaaccccatactaccctgaagtgactagccaatgatatcacggcttaagacatctaccttaaaatatctaatgagcaggagctgacacaaataatctgtctcactaccttaacaaa

SEQ ID NO: 8677 - DNA, 171 bp, Oryza sativa
attttagcacagagaatatcagctttgaggtcccgtatttcagacagcataccatgccatactcggacgcccggcgttagccatgttcatggtcgccccgcactacacttacatgaggatgaatatgcctggtccccgtggagtcctattcccacggagcgacatatagca

SEQ ID NO: 8678 - DNA, 378 bp, Oryza sativa
gaacgcatgcctaattaatctcgcattggaccaatggaagaaaaacaagtgaacaacatagcagctcctcatctcattatctatgccgagctgctctgatagaaagcaagccgtagacactaactaatgcgcccaatatcctccattaatgacgagaatataaaactgagcttccataggaccgatgtgtctatactaagactgctctccatacctaatcacagaacagctacaaagcatccttgtgacaatgaagtcacaaccagcggttcattacccaacgaactcagcgcatcagaccaaattgcgggtgccgagaaagcatataattgacataccatgatcccctgctctccatctataaacgcggcgcagaaa

SEQ ID NO: 8679 - DNA, 102 bp, Oryza sativa
cttgtttatgatggtccgatgataatctctcttcggaaaatttaactataatttttcttattgtaaactaatactttctctgtttcatattataagactttc

SEQ ID NO: 8680 - DNA, 313 bp, Oryza sativa
atactggctgacttagtattatgtcgcctgtctttgttgagcgcgatgttttacttccttttgtctggcggacttttgcatggcggtcagtgccataggccgctagtgaccacttgcatatcctttatcttaccgcaacctggttgtatagactctgtcactcaccgggtgtaacgcgtctgatgacctctttgtttgttaactattatatcatctctgcactgttgctgctatgagcgaaggctctgcgtgtcttcctttccaacatgatggtcgtcttgccgcttcggtatcgatcattttcacagtactc

SEQ ID NO: 8681 - DNA, 68 bp, Oryza sativa
acgtagctgcgtctgacacactgaactgctgtaattccggcgtacagcggataaatggttcactctgt

SEQ ID NO: 8682 - DNA, 494 bp, Oryza sativa
  unsure (1)..(494): unsure at all n locations
gacctataaaactcagctgtctaccctgcttgacaccagggattcagagactttcttagctcagaagaatcatcatacacacaggagtagagtgttacgcttcatagcagctcgaacctgtataatccctctctcccttcctctctgatctacatctcgtgggcctagctcccgcaaattcaccgcggttgcgtcgaaagagactcctcaggatttcatccgctcccccggccgaactcacaaaggggggcctcacagcctcccgctagagagcatcacccctcgacatcagtggacccactattttcgaccattagaattgctaacaaaaagtaaaagcccctaaggcccataggggctgtccatatcgtttacgcgtatggtgcatgtacatacgctacatccttccctcttattcaagctcccctncactgtatagaanatatatntttgtgataatctanatcatagagctaatattntacgtacatcat

SEQ ID NO: 8683 - DNA, 431 bp, Oryza sativa
  unsure (1)..(431): unsure at all n locations
tacctttattgataagntctcgaaaggaatatacagctcacatggtgtctgctgagtgatgtcatcaacggngcaagtggattcgtcctgngtttgcatggcgtccatgctctgtgatcctacctgccccngtgaggcgcagctgctacgggttcctgacgggctcaccattgcagaaagaatggtcggctggggatcatgggaccgatgtgcggccatgcgttcatcaaccttccttgccacctcctcttgcatgctgagctcgtagctcgataccctgaactctagatctgcaatcttcgcctcggtatctctcttgcttcttatccgactcctgtacgtgtggatgtcctccttgaacccaatcttccaaggaatcacccctttctctcgtgttcgtcctggataatgcagtctgcacggcgagtgac

SEQ ID NO: 8684 - DNA, 196 bp, Oryza sativa
gtaagcatgtccacacactgtgcattactgccaaactgaggatgttcggaactctcacctgagagactggtcgacatgtacttcatatatcatacctaatctgccgcacgcatctctatgactatatccatatgtgatgcaccaattttgaggctgcatgtacgctctattatcttactactgacgcatactgttc

SEQ ID NO: 8685 - DNA, 453 bp, Oryza sativa
  unsure (1)..(453): unsure at all n locations
tcaatatcaatatcttngcatctcacacatggntcattgcttgggacaattttggaacaagatggctcgctagggagagagacactattctttaaggtttcgaacttctcttcaagagtgaggtatgctttgtccaagccatccactctctcttgaagttgagtgttcgccacctcaagattagcatgagactctttggtttgcttgtaaagccgtaccaatgcctcatttttttctctctctccttagcaagctcactcttgagttcatgggaccgctctttctcacgaatgagcaaagcctcttgcctctcaagagttgcatattggtcttcaattctcccaagcaactcactcaagtgtggtagggattccttagttatggacttgaacaattcatcatccataacctcatcctcctcatcactaacaagatcaacattaaatgacttga

SEQ ID NO: 8686 - DNA, 480 bp, Oryza sativa
actcagctttcataagggcttcgacagggggtttattcgttctttgagccataagataaagatcggatagattcgaaccgcaatttctaaggtaatcactactatgccagcccaaatcatgatcttcaccaacttggatttggttctctcgcgaaaatcgcgagttgcagagatgagaaccatgaaaagcaagatcccgaataagaaaacagaaaccgaggaaaccacaagagtgaagactagtagagtctcgtctttggtcattctttgctcctttttcactcaatgattcattcgaatttcccgaccaaaaattctatatgtctattcatagggcctccgtgctaagtgctacaagatctagtgcactggaactcgtggtatggacccgaatcctttagtatggaacattgtctttccacagtaaaacccccagtatatgaaagaatgaaacgtgctctcgtctttcttgtggataag

SEQ ID NO: 8687 - DNA, 404 bp, Oryza sativa
  unsure (1)..(404): unsure at all n locations
cgccacagntgcggcaagcgacgtctcgagccggcttgttgttgccagnggcaacgccctgagcgcctctgcggacgccaccctcggtacgtcttctcgcccaccgtatctggacacctacccgcgccttgcgcggttaacggccgcctatcggggaagatgactcccccttcctcccgtcaccctgagaggcctcccactgctcccgagtgagatggagcttcccgccgatggtgatgggccccgagagaagctgtggctcatcaccatcgacgaccttgaggcgacctaacgccttctcgatcgacattgtggagaggtccaacagagattcaatcgagcgagcgatctgcctgtacttcttaaggacgcatccggaagagctcttcgacagctctatcctc

SEQ ID NO: 8688 - DNA, 396 bp, Oryza sativa
  unsure (1)..(396): unsure at all n locations
ttacgtgaccttagaagactcagcttgtctccagaagcgataggctcccgcttctttttttactactctgacgacgaggatgatgccactgaacgtgaccgctacgaggaaagagatgaatatgaggacgtggaggctgcggctgataatgccgcgggtgacgcagtcgaataccgcgccgacacccccaggtacacttctaccccaagttctgtgcacaacgaacatggggtggatgcgaacagctccccccttcgtcggacagatgtataacgggcgaaggccctatgtgcgctctcttctgtcgcggcggcgaagggaggtactgtctaaaaggtggctaacaagaaaggactcgtcgatgtcgctcgcgtatntagcgatgacgagtccttc

SEQ ID NO: 8689 - DNA, 297 bp, Oryza sativa
ctgtgtctggtgtacacatcctctggtgtgatgagtcagagagctacctcatatgcattaattctacattattaatctgaaactataaaccattagccactaatgcacaaaatctccagatttggaagtggcacttctttaatctgcaagaattatcttcagctgactgtactaagttgagtgactgtgattagactaacgggtgtacaacagcgatacataaagcttctctgatatttaacggagcgagcatctactctggcagtcagcactactgactgccactctgttaccacg

SEQ ID NO: 8690 - DNA, 230 bp, Oryza sativa
ttggctgtttacttgcaatccagtgaggcaccttctttttttgaacaataccttcttgaaatggtagaatatatagcctcattgaacagtttcagatgatgcaaagacgattgagagtaggccgtggacgctacatctggtgaggtgaaaacttgagacgaccgcgagagatagaactcaccatgttagattacgaggcatttctttttcagtatgtcaagaatatttgt

SEQ ID NO: 8691 - DNA, 195 bp, Oryza sativa
  unsure (1)..(195): unsure at all n locations
acaatacaatactaccagaatagttcactacagacgatggtgctactcatatctaagaaattcatgctactttttgcttgtgtgtgngaaataatatgttgtcatgatacccgcttgtattgtgctatgctacatatgttcactgccaatgacttatgacgttaccaacgattcagttcatatcataataatata

SEQ ID NO: 8692 - DNA, 352 bp, Oryza sativa
  unsure (1)..(352): unsure at all n locations
gacgaatattattatagttcaaaggcatggaacaatatcgtactagaagcagccagtgcaggtggacaagtaagtcggcaatattttgaagtcaaaattacagtaaaatagaagcccacacaacatggttgataagcagcctacctgattgtaggcctcatttggtttgcagtcaaccgccatgttcatacgggcaacaaaaaaatgttggtgaactggtgcatacaaactatgggcaatagtagtaccatatttcctttgctccccgggcatgagagctcctaggctaagaattccagtaagctttacttctgcttctatcttgccatcctgcaaccaacaaaanaacata

SEQ ID NO: 8693 - DNA, 141 bp, Oryza sativa
atcgatgcgacttcatttttatatattgataaaatcttagataaattgaatattgtatcgaacacgattgtattatataaaaggatgtgagataacctaaaaatatgtaagggtagatgatcaatgtatccaggtagagga

SEQ ID NO: 8694 - DNA, 95 bp, Oryza sativa
ctgcattgactgttggtcccgccttgtgtggacctgctagctatttttttccagactgtgtgaatatgtgaatgtcaggaactgtcagtctgcgg

SEQ ID NO: 8695 - DNA, 424 bp, Oryza sativa
acagagtttaatatccttatgctgcatgagattttattgtcttatcactagccctgttggtctagaaatatatgggctggcattcttttagtaaaatagacaggaaagaataactatatttggtgtaccatttaaaggagctgtattcttcaaatgcgtgttgaacacatcccatgacccgtcagcataacgattgctgacatctggtgaaaaatataagcatttatagtttcaaaaacaataatataggcattagtaatggcaaacagtgagataaaaagaattcaaatggtaccttcccgtgttatagagtcatctttgtagcaaagcataaccatatatgtcttgtggtccactgggttagggaggatgttcccatccacggatggttcaggtaaatcagttatcccaaaaaccttgatga

SEQ ID NO: 8696 - DNA, 91 bp, Oryza sativa
cgagacgacaaaccgttgctgctgcgctgacgaggatgcctgccgccatcgtgacggaacaatcgaggcgcaatctgcgtcgctaccgtcg

SEQ ID NO: 8697 - DNA, 425 bp, Oryza sativa
  unsure (1)..(425): unsure at all n locations
tcaagaaattcgttntaaaatatgccctctcagaatattttcttctaccatacagcttagacaatttttttctaaactatttgttaaatttattttaaaatatataatacataatttagtagataatccatataataatcctgtgaaaaaataattcaatcagggatttaaagtcgatttggatgaaacatcccccaaaaatttttggattaaacataagcaggtcgacagcttaaggtggtcgtcaggatacgccttcacagaaaatccccggcgacctttcctcccctctcaaaggcggaggcggaggatctttcgccgatccccaccgccgccgtgcttcactggggcccactgctctcatcgncggcacaggtcggcagcagcacgaggagattntcttcttctttntttttttctttctc

SEQ ID NO: 8698 - DNA, 148 bp, Oryza sativa
gttgacaacccttgttgaatgtgatttatgttttctcaaccccctcttttgatagtttgcgctcccgctaggcgctctttataggacaaccccttcactctgaggaccctcttatggtaccgcttcgagaacacgttaggaccgcccc

SEQ ID NO: 8699 - DNA, 413 bp, Oryza sativa
  unsure (1)..(413): unsure at all n locations
ggacctataaaactcagctgcagagtttatatggcaagagttgtatgtttacatgccgttcccaatataatagtgtcagacagaggtagtcagtttacttcgaagttttggcagaagttataagaagagatgggtactcgtttgaatttcagtactgcttatcaccctcaaactgatggtcagacagaaagagtaaatcaaattttataagacatgttgagagcctgtgttctagattttggtggaagttgggacaagaatctgccgtatgtcgaattntcttataacaacagttatcaagctagtcttcaaatggctccatatgaagcattgtatggtcggaagtgtcgtacgccgctccttttgggtcaaaccggtgagcgtcaagttnttgggacagatatatggcgaga

SEQ ID NO: 8700 - DNA, 175 bp, Oryza sativa
  unsure (1)..(175): unsure at all n locations
ctctgttggcaatagtggtggcttgttaacatatcngcactctggctgtggctatgtgattgagtgtctgacacatgatgctaacggtaatgcaatcgcctgggtcaagtcagggtaattatcattttacaaatttactagtataactgtgtatgactactgactactgtgatct

SEQ ID NO: 8701 - DNA, 470 bp, Oryza sativa
tctttcataccaggaataggaatttaggagtatgcaagatttttagttgcacagcaatgcaatgttgcgagtaattcatggttttatgcatacatttccaacctgcttgacatacactgtatatggcaaatgtggcatgacctgtccttgtcgatcaggaaccgttaatttatgcagtaaggtaacatctgcaacatggtgatgaattctgtgctactaccatgcttcatggctgcacatgcacatattgatctcgctttttcaaagaaactgacttgtaaataaacaagataatcttgctttcttttttaaggtttgctcccaatgataggattcagagggagtgcaaatttgaagtgttctcagcaggtcaccacgcctggtcactgtcagcaatctaacacatactgtcaacgaaatagcggtgcagccgacaggtcacacatcttcaggaaaccgaaatgtactac

SEQ ID NO: 8702 - DNA, 417 bp, Oryza sativa
tgcttgacgcttactgcggctaccactaaatcagcgtggcttataggacgagaagaagacaacattcttcacgccgttcggtgtattctgctattgtaaaatgccgtgtggactgataaccgcaagaaataccttccagcgtacgatccaaggggcacttatcgatcacctgggttacaatgttgaggcctacgtcgatgacattgttgtcaagaccaagacaagtgactcattcattgatgatctacgggaaaccttcgataacctcagacgatatcgcctcatgctcaatcctaagaagtgcacgttcggggtaccgttaggcaaactgctcgggttcctcgtgtctggcagaggaatagaagcagaccccgagaagatcaatgctatcgagaacatgaggtccgccacaagact

SEQ ID NO: 8703 - DNA, 254 bp, Oryza sativa
cggaactataaaactcagctttgctcgataattgagctttcgagatgattgtgtatttatgctcatgagcccgattcctcacgctctcagagtctcaggaactctgggaccctgcaataatgcaagcatgcaacaagaaagataagcttcatcaggcttaattacaggtgatggataaattcaattgtatttaagacagaatgaatgaacttactggttgtcagccatgttgggagcaatagttaagctgatcg

SEQ ID NO: 8704 - DNA, 356 bp, Oryza sativa
tgagagactctattagactcgctttatgctttctcagagcattgcctattggttcacttttcactgtaaaggatcatacaatggcggtcaaccctcactgctctcgtcctatgatccactacaggtgacctacttcctctagtaaaactatctgaagattgtgtctaccctgtggtgagttagctgtcttacttgtgcgactatccgctggataagactgtgcatctggtcttgtggcacgatacaggtcgtggtctaactggtctgtcacagcagccaaccggatgttgttgcttgccaactgtttaggatctcgttctgctatcttttcttgccctaattacgtttttttttcc

SEQ ID NO: 8705 - DNA, 454 bp, Oryza sativa
  unsure (1)..(454): unsure at all n locations
tgctgcgaggaaggtgatagccaatagncatattgtttcatcactatttatgcttaagaacgcttgttggttacatcatgcacggagaaattgttcactgatcctattttcggcttttgctgaattgctctataacaatttttatctgattatttgttagcgcagtatgcgcgaatcgtccaaaagcttggcttcccagcaaagttcaaggtaatgccactctagctcacatcaattcattcagattgattgtccttgcttatatcagcttgacgcattggaacatgatgcaggatttcaagatccacaacattgttggttcatgtgatgtcaaattttctattcgcctggagggccttgcttattctcatggcgcattctctagtgtaagttgattacttactttnttacattgtctcagaatgcatcctttgaatatccattgaaactgatg

SEQ ID NO: 8706 - DNA, 446 bp, Oryza sativa
ttcacaacacacaacgcagctctcaccagacaccattcatgtcttgttcgatcagcttgactatggagtatatccttcaacaaacactgatgatgatggttgttcttgaaaaaatcgaacacaccggtctatgagatctgcttagctcctgtgcaggtttaaagattaatgatatgcgggcgtaccagttagtttaatcctactactgacaagatttacaaataatagatcaaacagccgatcggctgacaagccgatatagtagttccagccgatagtcgataatagccgatgccgataccagccgatagcgataagtttaagcaatcggctatatgtccaatgtagataatgatatcaagacaatcggctgatgataatatgatgtagcaatataatccagtagaaaccaactcgctcacaatatgaaatagtagaacaaatat

SEQ ID NO: 8707 - DNA, 339 bp, Oryza sativa
ataagcatgcattgtacaatttaattgtaggcgaaatcgatgagacttcattttatcgtatccgatattaatctttagataatatgggaatatttgtgtcaaacaacgaatgtacttacacaaatggtgttgagataactaaaatatgtacgggtagatatctaatgtcttcacactgctgggagttcgctaatatagctctcgacataggtggacggtgttctaatcgtgaaaactctacgttctaaatttcgcatatgtggctgtacgactaacctctgtgtccgatcggagatgtcggtgttttacaacaacttgctcgagcgtttcgttagttac

SEQ ID NO: 8708 - DNA, 485 bp, Oryza sativa
  unsure (1)..(485): unsure at all n locations
tagcaattacctatccacgaagctagntatagctggacattgtaaatntcccctttagaaacttatcaaattcatagtctctctttttttttattgataaaggagagttttgtgaaaaagaaagaattacatggtgtttagggtccgatcctgaaaacaagcatgggctcctcatctctctgaattggaagctccgctaggttggtggctcccatcgtggcgccgtcccctttatctataataggatcattatcggtgtgcttgtcaattgttagaaaattcttaagttgtgttggttacactcaaatggtttattgcttgacttaatgcacatgtgggtcctgcactcatatatcattttaagaacaagaagataaataaaggaanactacgatttttaacacgtcatgaacaagttctatctttatttttaataggtgatgaatatgattntttgacatatncgttagtcattttcttaataa

SEQ ID NO: 8709 - DNA, 492 bp, Oryza sativa
  unsure (1)..(492): unsure at all n locations
actaagcttaaaacaagttatcttctgtaaccctctttggtgatggaacacaaaatacttgttatttattgggtatactccctccgggctgataatattagtcattntggacaagggtaaagttaaactttaaaatctttgactacaaataatttctaaaatatttatcttaaaaatatgaaaaccatatgcgtagattagtcttaaaaagtacttcagtaaaaccatatatttgttgatattcctatatatattataatagaaaatagttatcaaagttactttttggagaccttgcctttgtccaaaacgacaagtattatcaacccggaggaagtacttgttatgacatagttctgacccaacttattatgcttaattaaaactagtcaccttcaacgaatattgttcctcagtaacctgtaaggcgctgagtgctaattagtgaataccaagtgctctagtagaaagtgtattaggctcaaatagtga

SEQ ID NO: 8710 - DNA, 177 bp, Oryza sativa
aaacattactcttgtcattaacttgacacaagcaaaagtatgctattacacagacaaattatcaacacctattagaaactacatagtactttttacacaactctattgtatttaaccctgtcatatatagcaagtgtacaagcaactgtttaattagtcttctggtaccatatatat

SEQ ID NO: 8711 - DNA, 435 bp, Oryza sativa
taccctggctctggaccacaatcatgaagcccttgccagattattttcatgcttgctcaacagttccccaaacctcaaggatcttgaaatcatggtacgtgctgttgcattttaatcccaaggcccattaaaaataatccactctcaaaaacacatttttatccagccctaattatctttccccttttgtgttcataggatccttttgatatccgctactctggtcacttagctacagagttttgggagaagcatataactgcggattgcatccaaaatcacctgtcagttgtcaccttctacatgcgcgagtcgctctttggaggctaccctcgcatcggcctttgtcagttcctggtgatgaacgcgagggccctcaaaagaatgagcattaagtatcatcgctcgctgtacaagactgaacatgtcgcaacc

SEQ ID NO: 8712 - DNA, 185 bp, Oryza sativa
tctaccgagaagcttgataaacacgacttctgttgcttcttgtgatcccacatatagctgcggcactggcataaagttgcaacggtacttggaagaaagagataatgttttgatcctctcctggttttagataattgctgcttaaggatctgttttaaactcagtagaataggctggttgtattt

SEQ ID NO: 8713 - DNA, 463 bp, Oryza sativa
  unsure (1)..(463): unsure at all n locations
gacctataaaactcagcttgggagctacagagcctggtaaacaatntgtaatctctgaaccctaacccncattgattttgctttcgtcagggaatcccacgccctccaatgtgttctcctccggccattatctgcaacccaccaaaaattccttgtcatcttagtcagatcatcacagactgactctgggaacttaaaaagccccatcacatagactggtatggcctggataacagccttgatcaagatttcttttcccccactagaaaggaaattttcaccccatagaattacccttttcgcgatttttgcttccaaactctgaaacctccctttatgcattcttccctcaggtgtagggaagcctaggtatctgtcctcaaagttatccctctccacctgcagagtgtttcttatatcctcactgatgagggagaagcttcaccgaagaagatcgaacact

SEQ ID NO: 8714 - DNA, 262 bp, Oryza sativa
ttgtattgatcaaagcaactaccttcattaatctgctagtaaagccacacgggtacacaaaaattactaatgaaatgttcagtaacaacgtgactcttaactccgcaagtacattctgctggtgtaactcaagtacataactgtggaaagttaactgtgtgtgcactctctgtactaaagcttctcttgcataactgaccaatcaagatgctttccgcaagttacactccgactgcaggttttacactctttattaccgcaa

SEQ ID NO: 8715 - DNA, 205 bp, Oryza sativa
gtacatgggtgacttatgcacaatgtgttaatcaactaattacaagatgagttagtgtatgacatagcctgacatattctttcatcataaaagtcacattagatacatcaaattacacgtagcaataaaattctgtaatattatgatcatgatcttttattattgctcacttattaaattaacactactaacggagtactgtctt

SEQ ID NO: 8716 - DNA, 451 bp, Oryza sativa
ccgtgacagctcaaacaagatcaactttgattttcaacagcaaagacgagtagagtggaccagcacccagcacctcggcgtacgagcgaatgagcgatcgatagatactctcactcaccttttaggggttcctttccagtagaagtggttatcccaggctctcgtgcaccatcgtctttggacagataacaaacagctctctctacataatactgctactagtagtaacaggagcgacgtgaacgtgaaatcgagagacgtagaggacgcacacgcaaaaacgccacgcctggaaagcccaaaagaaagaagaaaaaacaaaggaaaggggaaggcagagttatgtttcccatgtgcgtcacagcctcggtggcctcgcccgtctccgtcccctgaaccaacggagccggcggcggctcatgctgctgatgttggcagccacagataaagc

SEQ ID NO: 8717 - DNA, 216 bp, Oryza sativa
tgcccctcctcgtttacgaacacgaaccaagttcaaccatgactacacaacgagtggccacggctcctgcgccgataaacgggcaaacactatggcaacggtcaaattgctaaacacaaacactcttggcttacgtacctgcctgccaacacacttctcactacaggaatacccgtttccgtgggagcagtgcgtaccttactcgacccctttctt

SEQ ID NO: 8718 - DNA, 390 bp, Oryza sativa
tgccggcgaacgacggcgcttcggcacaaacggatggcaccttctggtagagcgcgatgcggcgaactcaccggtgaccaaagaagcggcggaggaacaacggacagcgccggcgacgaggaagaagcggcggcggagatcgggttgacggcggtgacggagctccggcggtcttctgcggcggcgaaggggcggacgatgatggcggcgacttggcgaccacgacgatggccttcccgagtgacgacgacgaccgtagcgacggcggcgcacgactggagcggcggcgacgactgcggcgcgaaagctcacggtgctagggcgctacacatgacggcgggcgaaggcaagggaggcgacgggtagaggagaagctcggggtccttatat

SEQ ID NO: 8719 - DNA, 113 bp, Oryza sativa
tgtgcatctcattgagcagcgtgtaaacaaatcaactacttgagtgattatgagtttacgagtttatatacccttagcatcatgtcatatatagagcatgggtctatcaccat

SEQ ID NO: 8720 - DNA, 471 bp, Oryza sativa
  unsure (1)..(471): unsure at all n locations
tatcactgtgatacanattctaattntacaacgttttaaaatgcaacagtagttggtggcagtgaatcctattacactctagtctttctaaaattgtaattcatatttcatccctacactcaagttatcaaggaaaggtccatgattacaaaatcatcacatatacatatcacagaaatggtaatttgcaattgaaccaaggtaaaaagaagttaagggctccttttattaacaaaagtaacaatattgtgaagggtgttcactgaaaaaactctttgtttcaaacaatattatcacatgtacgattcatttttctctagtagaaagataacaggcatttacttattttaagcaaatatataaaccatgtgtgggtgcacttgcgcttagatatgtatacaccaacagttagctagtgacatcttccacttaatactgctatgtggactatagaattccaaaagagataat

SEQ ID NO: 8721 - DNA, 167 bp, Oryza sativa
  unsure (1)..(167): unsure at all n locations
gctttacacatacaaccatngctgctgttatcacaaaaacaagggggtgctgggttagcacgaagcagagtatttttaacatttcaaaagcgatagtgtgcgttagacaacaactgacgtgatagctatgataacacagacgaatcttttacaaaaacctattatat

SEQ ID NO: 8722 - DNA, 163 bp, Oryza sativa
ctgcgctgcgtgcttccgctacgagctaacaccacttctcgaaaccatcttaacacgtgatcatgcatgcctacactaacatccgggtgacatacgtaaaacctgatatttaattccatacaacaactacatcacacaactgtagtaaaacaattctttgtta

SEQ ID NO: 8723 - DNA, 456 bp, Oryza sativa
  unsure (1)..(456): unsure at all n locations
tctttatagctatattgctatgtgaattttcaatgatgtagccaactttaagttacactcatcatattttacaaagcagtcggtatatcacttggatcatattattcggggattcacaccgcatatgctatatattggtatcaagtcacttggttgactacgattatcaaaaccactcagttggtgcatctattagatacatctattcgatgcacctgactntatttttcagccctccacagtcttcatatttggtaaaagtactcgggagatcatggtgaggatgattgaagcactcggctttggagtaatctagttcgagaaaagattatctttccgactgtgaaggtctcaagggctactgtggagattatgggtaccccatacccacacggcatggntatccgactagtaataggggataacatatatctatggaatatgtaaccgatcatg

SEQ ID NO: 8724 - DNA, 58 bp, Oryza sativa
ttgacaaaaacgcttttttataaccatcagtaaacaatcaaaccgctctagcctgctc

SEQ ID NO: 8725 - DNA, 413 bp, Oryza sativa
  unsure (1)..(413): unsure at all n locations
tctatagagcggatgcgcccccccagcaagcttatggatgtgcagtgcgtcaccggctgcatggacgccctaagtcagttcatatcgaagctgggagagaaggcgctatccctatttaagctcctcaaacgctccgggcccgttacctggacggaggaggctgagcaggccttcactcagttgaaggcgtacctcagttctcccccagtcctggtcgccccggagccagatgagccgttgctactctacctggcggcaaccccgcaggtggtcaacgcggcgttggtcgtggagcgcaacgaggacaaccctcactccgcgcatccccaccctgtgtcgactcgacccgggagagagcanggaggagaggccccccagccgaacggcgtgccgaggcccccgacagccggagc

SEQ ID NO: 8726 - DNA, 346 bp, Oryza sativa
ctagtttcgactgaggcaaccgagcctcttatcttttccacaaattgcgtgtgattttaacatgtgcactgctatcgaagcgttggagaatgtgaactatacggtcattaaattataaacatcgaacctatgagagaaagtgacaatattacttaattttttaatagacgaacagctagacatgtttaaagaatttatagaattgcatatttatggatagacggagtacataccatggcgtttatgtttattggaatactgatcccctcacgtaaaatattttaaaaaaattgcgaaatagattaatataagattttagtgactctcatataccaaaagtctttta

SEQ ID NO: 8727 - DNA, 496 bp, Oryza sativa
  unsure (1)..(496): unsure at all n locations
acctataaaactcagctttgcaacaggaatgcttcgttgtggataggtagataatgattatgctggtatggctagattcatgggtgggctgaaccgagaaattcaggacattctagcctacaaagaatataattcaattaatcgtttgtttaatcttgcttgtaaagctgaaagggaagtacagggacgaagagctagcttcaggactaacatttctgcaggtcgtgctagctcttggacatcttctaacgctgctgcaccgtcaactcgagcagaagcaccatcgtcctcaagcaacaagctgcgtccctctacaacaaactctacaccatgcccgagtgaaccaacaagaggggttgctgctacaccttccaagagctcatcatcagtagcttcatcangaaggacaagagatattcagtgcctacgctgcaagggctatggtcacgtgcgcaaggacttgccaagcactcgtgtaatgatcgtgagagctgat

SEQ ID NO: 8728 - DNA, 154 bp, Oryza sativa
gacgccacttacttatattattctactggagagatcactaaaggaagccactcctatgacatcttaagaatggcttccagtggggctataacgtggtcgcacctaatgtaggcactgtactggagagacacctctcatatgaatggcttctaag

SEQ ID NO: 8729 - DNA, 470 bp, Oryza sativa
  unsure (1)..(470): unsure at all n locations
ttaccatacagcatatgcttcacatnggtcccgcttctggtaattgtttttactaaaacaaagggattcaccatccatgattcatatgctgagaaatatttattatgacgaattatgctaacttcttgttagaactgcagataatgtgaagctattcgattggattaacttattgcatctaaaggtgtggcgtccaatatgcagctgcaatttttgggtcatatgaacctgcattatgttatgaagtgatggggtctgtccgacatcacggagtctgttttatatatgtatttgtaaaaaaagggtagcaatacattgcccatagtatccatgggagccagccttgtaaaattgcagatacaatcgtgaaagtatttaagcctcatggcaacacttaagtcgcaatattagtctgatatctacttactcaaactaaagcattttacatctctgctcatgggtcacatgtc

SEQ ID NO: 8730 - DNA, 216 bp, Oryza sativa
ctaccgaacttacgacgtttattcctatatacagtctatatgtctcgtttatgcattgaattattccacctatattgctgctgcagagaacatgataaaaaatttatctgtttaatgcattgcatgcattttaggaatacctttcgagcactctttttttttggtctatcataactctctttacgagcttactcagcatcaaatagattacttgtc

SEQ ID NO: 8731 - DNA, 475 bp, Oryza sativa
  unsure (1)..(475): unsure at all n locations
tacagttntcatactatctgatggatctgcatcactgtcagacttagaatcatctagctcaagtggtatataatcaggatttggctctaagctttctcctttgacatctggtgctttgaagatcacagacttaagtggagagtgcaaaggagattcatatttgcaagcatcatgcttagcattctgtttgggtacaagtaagaactgcgtggcaatgagaatctgttattgcaaaacgtggaagacgaatggctataaaaggtcttgttatgagtgcgaggactgaactctctgccaagatgagcgagagagatcttgtaatcatatataactctagattttggtttctggtatggctgcagttcaatcctctttgaagcaaacaggtgcaccagatntaanacctatactacgaaaaaacttgattagcagtagcaagtctagagacctaaagataatacgtcagatcacaaat

SEQ ID NO: 8732 - DNA, 467 bp, Oryza sativa
  unsure (1)..(467): unsure at all n locations
tctcaaggcgtgaagggtgggatctcctttctgttagatgatctgaccagcatgcatacccttctagtgaagctggcaaacaacgaggagaacttggatgagcacgtgaaggattggaggaacaaggtgcgtgagctgagctatgatattgaagactgcatcgaccttttcctgcacaaggtgagcagttctaatgctaaagcgggccttgtccggaagacggcagctaaaattagaaagttatggtcgcgccacaaaatcgcaaacctaattgaagaacttaaggctcgtgttatagaagaaagtgatcgccgtttgagatataattttgaagaagttgctgataattttagccatgttncaaatgatcctcgactgccagcactctatgtggaagcagagaagcttgttaggattgatggtcctagagagaagaatatcgagtggctggaaaagatgaatctcag

SEQ ID NO: 8733 - DNA, 429 bp, Oryza sativa
actaagcttgaagcctgaatccctttatgatatctggattggattctgcagaacaacatatggatgagtagtatctgatgtaaatataatactcgagaaaaatttaagtattttaaaatatttataaatatgtatttctcctcttgtcaattttgatttccccgagcagatgactccgtacgtttaaacactctgtccgactagtcatagcccccaagcatcgggagtcagcctaggcacttcccaaacatgcatatgagtgacatgagtttgtcattaatggaataaagtttcacgaatcataatttactactcgggtacttttgcaattgtaaagagcagaaaataaatttatcttatctctatgcttttgatttattctgaataatacttagaaccttgcgtactcagtccatccaacgagccccc

SEQ ID NO: 8734 - DNA, 171 bp, Oryza sativa
cattctgctttctgtttaccacaaagctatacgctcatatgtttttgaatgaggagaatgtaggaaaacacaacggagttataggatgtttttttataaataagcacctctaaggtgtctaaggtggcttcgagagcgtatactttaaaacaatggctgaaacatctctaa

SEQ ID NO: 8735 - DNA, 399 bp, Oryza sativa
  unsure (1)..(399): unsure at all n locations
ccgacttaaaactgaggacaagagaaaaggtggaaggacgaatgggtttgttgtcgattagaaataaacggtgagcacaaatttaaatcctgttcaaactgctgaaggaggctgaattatctgactagctagttgatttatttatggattaattgtatactataaaataaacaaaaatatattatataaggtaacctaagcaatgttaatggataaaatatttagaaaaattgtaatttcaaaacaggcaacggataatcgggttgataatccgcaccatgtaagctaaaaagaatgggacccttatatcatagctatacttgaataacatttagaactttcctccatctctctgtctctangtcctgccacctttgcatgttcttttcttcgtttcct

SEQ ID NO: 8736 - DNA, 127 bp, Oryza sativa
cccacgcaaaagactggaccataccgtcctgcaagtgaggacgtctgcgtcacacctgtgccaccgccattcgtgtgatcacgtatggcatgaatgattctgaattattgtgttaaatattagattc

SEQ ID NO: 8737 - DNA, 454 bp, Oryza sativa
  unsure (1)..(454): unsure at all n locations
ngacttggtgtgaggaggctggtttagcgatgtctgccctgctaaaccaanggaaggcgcttctttgacatatacccatggacaattcatggcatagtggccttgctctctgcaatcatgacaaaaggggacatcctcttctggcattggaagctcattgacctgngtggcaaatgctcgatcaaacacatattgatgttggtcttgacttccaaccaatggtagctgtgaactaagcagcatgcttggaatggaccaagggtgtgccctgtgtaactctcttgaggccagtggtggattgagttgaaaacttgagttacttgaggcatacccgctgacattctttcctttttctctgttaaacatctgttacagggattgaggtgagagaggaaacaagccacaaaagaatagaccagaactagagataggaccttaaaggaactaactcttc

SEQ ID NO: 8738 - DNA, 178 bp, Oryza sativa
tctccaggctcctctgaagatgctgctgtctgtaagctattagatgagtaacaattgcttctgtgctgacgtgactaaaacgatgtcttggacttacaacaagaactatgagcaggactgataacatccagaacctctctgctaaacgttcggggttattgctaactgacttcttgtg

SEQ ID NO: 8739 - DNA, 249 bp, Oryza sativa
ctcaccctacggaagcccactacgctctatgcgttgggcaccaacggccataacaaaaacactcctcgaactgtcatatgcccgctacgaaaggcatttgtcgtaaaatcacacatataggctatatatggacgcaggacagtgttgatgtgatcactatcgtctgcgatatactacaatctggaccagcctatgacaacgatgcgtgatgctctcgatacacagtgtacgtaccacatctacacaaac

SEQ ID NO: 8740 - DNA, 167 bp, Oryza sativa
aattgttgtcgaaaaaagattggaaaatttctcgtaaaaattgactgtcaatataagaaatcgaaaaacttcaggaagaatatatcagaaaaaaaaaaagaagaggtttaagaattgactgctgtgtaaaataaaagaaagatggataaaagttcggaaaataaaag

SEQ ID NO: 8741 - DNA, 425 bp, Oryza sativa
  unsure (1)..(425): unsure at all n locations
ngaaagcgtgcacacaaacacacaacatattgtatgtctggtctataagcagctagatacaacaaagatccaatcatacttctatattcctgttgatcaacagcttctccatcttcatcaggatccaacacagctgtagaaccaattggtgttgaaattggcttgtaattctccatcttgaaccgtctcaaaatatccttcgtatacttcgtttgatgcacaaaaataccttgaggtgtttgcttaatttgcaatcccaaaaagtacaataactcacccatcatgctcatctcaaattccctgtgcatagtctcaacaaaatctacaaccaaagcgtgagtcgaacaaccaaagatgatatcatccacataaatctgaacgaanagttgattatcagcatgcttaagaaacaaaaagcgtttgtc

SEQ ID NO: 8742 - DNA, 115 bp, Oryza sativa
  unsure (1)..(115): unsure at all n locations
gtcactcggagttcgaaatcatacgaacggtgacccatccaccgcccctgtcatctattacaatccctactcncctctacgattacaacagatcaaatcttagctcgatttcttc

SEQ ID NO: 8743 - DNA, 487 bp, Oryza sativa
  unsure (1)..(487): unsure at all n locations
actcagcttcctcttgaatgtaaaactactggtggtttaaaacatagtttgatttaattcataaacggttaggtcagtgacactatacttaaagagaattagttaattacaggctcaaagtttcaacgcacatacacttaacgtgactcatgatgtacaaggagaccactatggaattttttttcctaacaatttgagctacaaccagctattctntattaaaaacaaattagaggctagtctttattaaaaagaagaaaaatctttcaatacgacaagcaacaaatattattttcctcatgaaaatatcatcatttattttccttgtcttgttatctatcgatgatctatgaggtacacaacaatgaaggtgaaatagttgcgtgttccatcttagatnnttttttttcaggagagtttcaaacaagttcatccactagttctataattntgggtgtgacgagatatatggacagggaagcaatac

SEQ ID NO: 8744 - DNA, 291 bp, Oryza sativa
  unsure (1)..(291): unsure at all n locations
tattnatgcagctaggcttgatatgattatcataaaaggcttttagtggggaccgttcggcgatacaactcgaagattcgccacatgtaacttacggtacatgtaacacgcttaaaaattcaagctttcctctgcttgaagatctttcttaatcaaacaagccttcaaaatcatgtcactcaatggcttcacagaagacttagaaatgacccacacctggaggactgtttgttctgttggtggaccgtttaatcaaacacaaaaaactagcgttgtttgtgctctcgataa

SEQ ID NO: 8745 - DNA, 417 bp, Oryza sativa
tgcattgcaacaaggaaccagaacgggtacagagtacctgcacgagttcaaccgccttgcgcgctacgctcctgacgacgtgcgcaccgatgctgagaagcaagagaagtttttgtttgggctcgacgatgaattgaccaaccagctaatctccggggtttatgaggactctgagaagcttgtggacaacgttattcgtcaggaagagcaacgcaacaaaatggaccgaaaaagaaaggcagctcagatcagctttcctcatgggaacaatcagaagcctcgcttcatgacgggacagctaggtgggccttccaccctgatcgtctgtcagcacccgccctatcacccgagtaacttcgacaacgactacaacgggggcagtcacaacaacagtgagcagcacaaccacaactcgac

SEQ ID NO: 8746 - DNA, 453 bp, Oryza sativa
  unsure (1)..(453): unsure at all n locations
tggaacggagattggagagacattncacaggagttgatagtattcacctgaagatcatgtagaggtacatgccaacattttcagccattctcgtgtgtaaaccccacggttaacacttagacaacatgtaattaatcaggcattccaaattagcgagaaacaacacatgctctcccagccaccagccaaaaaaaagaacagcgtctcctatctagccactttttctgcgtcatccagggtgggactcgaaaactgggaaaagatcacgaatcccaccgatacaagaatcttgtaactcattattgttttctacgttgcaaatatgcaatgcgtcaggttgcagttgctcgatgccacattccccttaagctttgcgcttgtccttgtccgccaaaaggatgtccttacaggcctcgtagaacatccaggtgatgccggaattgggcatcacct

SEQ ID NO: 8747 - DNA, 290 bp, Oryza sativa
ctctatcgggtgacactcggggtagatttttggtatccatgtgaactctctatttagcgagtcactcaggctaacgtcgtagcctctcttgtaagcagtttcgactctgcatcatttgagctaaagttggtaagacacggctctatgccattactctggcaggctgtcaatattcagccttcgctggagctcttctgctctcacaaagtgtgctgagacagctgtccgtagcgatggacttttatagagtttgaatgctggactcatagatcagatgtctttgcaacaaa

SEQ ID NO: 8748 - DNA, 456 bp, Oryza sativa
tgctctgatctcaatgtcgagaggattgcttatctctattacctcatcatcttttctggcattctgcataagtcaagttaatgaatcattaataaaagacagtgattattgatacagaattattcaaaatagagtcaatttaagatgagacatactacctccttcgcatgcccttgttgatctggtggtgcgatgggcacaagatattgttgatctggtggtgcgatgggcagaagatgttcttcctgaacaggagtgtgtactggtggtagatctgaggtactctcaagcatatcttctttagctgcagaacctcttccttcttctacagaagctacttgtctcattgtcctccattgcattgggggaagaggaggaggtggaggcaactgaccttcatctggtgataaacttactggattgtgcggaatgaaggcctcattttgatgagccatc

SEQ ID NO: 8749 - DNA, 244 bp, Oryza sativa
  unsure (1)..(244): unsure at all n locations
ctaagcttcggaccccttcggagaactgtggaaaattctacatgctttataattngtccatttgagccaagaatttctggggttggttccagtgtgctgagagttgtgaaaaaaatatccaaaaaagaataataaaaagttgcatttctctcctcagcactagagagagaaagcgaaaaaccagaagaagaggagccgaacttgtgtgagcatttctgcccccccccctctcccccaaaaccct

SEQ ID NO: 8750 - DNA, 461 bp, Oryza sativa
  unsure (1)..(461): unsure at all n locations
ttcatgacaaggcatttgcaaagccaacacacgtttttcatatttctacgagaagggtcccagaccaacaacaggttatgtcccagaccatactgtgccacgaagcctaggggtcctccccgacactaccccggcgaattcacttgtctctcggcatcaaggctcccctgattagctaattactcagccaggggtgtcccactccacccatgtggntgcactattatatgctcggatgtaattatgaaggaatcggtccttaaatgcgaccgcacaagcattccgcccaggaatggccttgtgtcacgatatttatttttaaatctcaatttctttcacaaggcaccgatccaggcgtcgggtnttccaatcgttgtgtaaaccaagttttacccaagatgtttaccatactttaagtttgacggcgaccgtcgatactcgcaccgagtgcacgaataccg

SEQ ID NO: 8751 - DNA, 149 bp, Oryza sativa
ccaccccctattttcagcacctccctaatgtgaaattattccttgcacacaacctttaacaacttgtaatcactgcctactcattatcactcttcgttcttaaaaacacccactgcacctacggtgacagatgtctggcaccattgatc

SEQ ID NO: 8752 - DNA, 338 bp, Oryza sativa
gatgcgcacatatcacaatggcacagattgctggtatgcaccccatactcccaagattgattattctcgagcatgctcactagcaatatttgatgctctcttcaaaaggcagcacaccgagcccatattggggccacttcgtaacaagtaccaaaacttcatatgacatgactgtatctgcaggcagactaatgcacgtaacaatatgcaatgtttagcatcacatacatggccacatcatacgaacgattaacctcaactaggcctgacatgagaatggcatatatgatgatgtacatgcgcgccatcttatactgatcagagagctctagtattga

SEQ ID NO: 8753 - DNA, 422 bp, Oryza sativa
tctcgcacacaaacagaatgtttcaagaggaattttgcgatttttaatttgatgaacccggccaagcgggggagaatcggatgtaactttttctgtagatgtccgtggatatattataagcctaatttcgagtccgtatgaaaaaagatatgactgttttaaggaaggtcacttcaatcagggttctatttcctttctattggcggcaggatacaaggcaactcacaaaagctatctgctatagatcaaacacaaattgaaagtgatttggtgggtgactgcgaccgcggtgaccgtggtgatgaccgcaaaattgatgaacgtggcgatgtgcggtggtggcaagaactcgaaactctaatcgcctaacactaagaccagccaattaacacaaccgatgcaatcgaaaactcaacaagcct

SEQ ID NO: 8754 - DNA, 218 bp, Oryza sativa
  unsure (1)..(218): unsure at all n locations
tgaatgaacttgagaacaaactctggagagggaatgaanatgtgtttaaatggggtggaataccctctcttggccggctggcttttatagggtacccacaacggtcatgaaatggcatgtgggacccactagccgttaccctgccaaaagtggcaggtaaccgttgcctggctggttcggtcgaaccactgggttctggttagagatgaccactaccc

SEQ ID NO: 8755 - DNA, 96 bp, Oryza sativa
agcagattccagacccgcatgaagagagcacgccgtgacttctctggtttctgcgatcccccacagacgaaccacggtttacgatccctcaggcga

SEQ ID NO: 8756 - DNA, 425 bp, Oryza sativa
tggaagctcatgtgtatagcttcatatgtatactctttgcctgtgcgggcatcttgttcctcttgcagctgggatctccttgagaaaaaaaaaactcactcgattgattgaaaaataaaggaaaactttctgctagaaggatagccttggagctgtgacagttttgttttcgtttatgtatgtgcaatatatataggcgagaggtgagtacgtataaccttaatcctaagtaattacgatcaatgtgcatgggaaaatacactggaatagtcatggaagatgcaaatgcttgtgttcttctgtgtttgccatctttcttaattttcattaacatgtttaggagaactggtataagttgcattttcttgtgatcgggagtagccgcgttgttattaattaatgccatttgaaacagatcgacgtgt

SEQ ID NO: 8757 - DNA, 482 bp, Oryza sativa
  unsure (1)..(482): unsure at all n locations
acaagagaagcaaagctctccacaganatgagttgttggatgttacgtatgtacaagcttgtcaaggccgttgcttgtgaggaaaggccaggaggaaggcgtctcaacttgcagttttcgatcacaagctcctccaatgcaggcattgcatgcacactatttagttgttgatcccactcccactcctcccactccaccatgcctatcagattcatcctcttcagcctcgggaaggcatgagcttggcggagttggctcgatgatggtagtatagttaggaattcanggccaacacgcttggttgcaggggcatgggtgagctgaaagtaatacagagacggaagtcggcagaggccatctgggagttggttgcagcaagcgaggtcatccatgatcaccatcgacaacctctcatatgcacctgctactcttgacatcatccaccttggtagctgctctccanaatggccactaatctcaat

SEQ ID NO: 8758 - DNA, 337 bp, Oryza sativa
tgtgacactctgtcgcctaaaagtaacggttcttgtgtgcgaggcgattgagtttgttcctgcggcaatacttaaattattcgaaccaaatagtgaggaacttttccataacttgcgggaagccactcaatctatttgtgcaaaagaaaattcatatgcacagctcgctgaaattctgcgactcttcaatagactgggcgcatgcacttttaaaaatttttaatgttgacattaccaactgatagtggttctacacactctttataagcgaattactcataccctgctctaagttcatcgagccaagttagcgaatgataagcgcactatagtgcac

SEQ ID NO: 8759 - DNA, 350 bp, Oryza sativa
tgtgacacacgatgtcttgtgtttgcagcctggtgtgctgacactatgtctgcagcatgtgcatgccaacggccacactaactgtgctaaaaattactcctcatcagtatcaaaatataagagaatttatacagatggaatacttcttagtacttcctatatccaaaagtctaaaatctatttcttttggcaccaagaccaatgaataattattcattcgcaaccaagaccaatgaataattattcatttacagtatgacaaaaaccaatgaacacgcaaccaatatagtatcaaatagcttcttgagtgtcgatcaacaatttaatttagcacatagtgactataaata

SEQ ID NO: 8760 - DNA, 105 bp, Oryza sativa
  unsure (1)..(105): unsure at all n locations
caaatactcccaaatgtcatacagaatctttactgcttccctcanggactcaagcttgaatattcggcctatacaaccctctaccaactttatatatgcggactg

SEQ ID NO: 8761 - DNA, 425 bp, Oryza sativa
gaatacctcagcttggtaagttgcgacaacagcatacgagagagaaggatgaatttggtgttgtcttggcccgaggaacagggaggccatgtgagtgacctggctacgagaattggaccaggccgccgtggatataatcaaagcaatgaatgcttatggctccattggccgttgcggccgcccacccgactgtcttcttaccaggttcctcaactcacctggcaagttcttcacacgcgctcattttataaagctaaattatgtgtttctaaaaaagatgctatattaaagctgtttttaattatatcaattcatgtgttcaaaagtaacacctaattaatcatatgatgatacgccgttcgttttgcgagcccacgagaaggggtttcctaaacaacccaagtgcaattggatgcgacgcgcct

SEQ ID NO: 8762 - DNA, 430 bp, Oryza sativa
  unsure (1)..(430): unsure at all n locations
tgaaagcgcgcacacaaacacacaacgaactgtatgtctggcctataatcttttagatacaacaaagatccaatcatacttctattttccttttaatcaacagcttcaccatctccatcaggatctaacatagctgtagaaccaattggtgctgaaattggcttgcaattcttcatcttgaaccggcttaaaagatccttcgtatacttcgtttgatgcacaaaagtaccttgaggtgtttgcttaatttgcaatcccaaaaagtacgataactcacccatcatgctcatctcanaatctacaaccaaagcgtgagtcgaacaacaaaagatgatatcatccacataaatctgaacaaaaagtgattatcaccatgcttaagaacaaaaagcgttttgtaacctttccattgaaaacctttcgcagcaaa

SEQ ID NO: 8763 - DNA, 473 bp, Oryza sativa
ctctctcgagtatctgtaagaatacgatgagctttgtgtttatcttcagaatctggagagtcatcgggtttggaccacaggaagagaaggctgccatcacaggcgctggctttacgccaagcctggcatccgatgcagtgatgtaaccgaccgggttgctacatgaaccacagcaataacgttaattagtatatgatataaccatgctgtgatgtgttgcacctgaaaagtagtactatgtgctgatgagcgatgcttactctgttgacccgaagtagataaagaggttgatgcactgtgagtacgagacgtgagccgccgctatgaggtgcgggtccgcgatgacatcctcctcgttgccggcgtagttgcagagcaccatgccaacgccgacgggctgcttcaccaccagccccttctcaactgtggcgttcacccctctggtgcagacaactatcttgccgcgcaccttg

SEQ ID NO: 8764 - DNA, 162 bp, Oryza sativa
  unsure (1)..(162): unsure at all n locations
gtactaattcgcaattagagatctcttccacatcacacatttatattacngactggctgaaaagtctcaactaacagtagtcacaccactcactcagtatgtcacctatcagtacttcagcttcttaaaactattaaaagagaaataaacatgaactagcct

SEQ ID NO: 8765 - DNA, 410 bp, Oryza sativa
  unsure (1)..(410): unsure at all n locations
tctcaaggagatcttcccggacgagatgtcggtgtctactatacccgcaaaagttggcttgtagagatccgggctaagagaagacctgctcaataaaaaaaggacagttattaatcaacttcagagctctggatttagcattntaagttgtctactgtgtttgggtaattgcgaaaatgtgacaggagacgtatttgatagtgctgtgataaagggtgtgtgattccaactctaagatcatgtatatcttctctcattatttntttgaaaacgtggcagacattgatcagtgcatgcaggatgggtatatgcatgtgtgctgcttgcattgtaccgagacatcacaaggtagtagtatagatttggctggtagtggtatcgtacttggtagggtcggtgcacatgaggac

SEQ ID NO: 8766 - DNA, 166 bp, Oryza sativa
tcttgtgcacgcctatacaacgcgtgtatctctcgcaaaatcacacaccatgcggcaatcgtgagatgattttgcaaggactgcttcctcaaacactagtggcgtgcggggacatcttgcgaacgacgctaccgatatagatattttaaatgtatgatttacaata

SEQ ID NO: 8767 - DNA, 451 bp, Oryza sativa
  unsure (1)..(451): unsure at all n locations
atgtatcttacgtcttgacagttatgtgtcaacggaacacgtcgtaagggcattaggttcttggacccgagatgtgtgcaaaaccgaaccactcgcttgagttggtgtggtcaaagtgccttcctccgccacaacacagatgaagacggaggagagatcgacaatcatatgtgaccatgtcaccgctccagagatttcaacatatacatcatgctggtggtatgtacactcaggtatacgaaatgcagcaaaagattcacaatttcttntactcatacttatctctagttgagtctgtcttgatcatacatggttatgcgttctcagttcattntcgtatgctatgggttgggtgggcgtcgacattcacaggctntttaaattaagcatgatgcttaggataaatagcctggcttaatcaaagttgacatggtgcaagttntcttaaatg

SEQ ID NO: 8768 - DNA, 348 bp, Oryza sativa
  unsure (1)..(348): unsure at all n locations
taatttaaaaaatcgggccccaccacttatgtatctgtctggaaaaaacaancccggttttcaatccccgtcatttttctcccaccggcacagtcaccaaacaatggtaccatcgacaagggcgcgtattgctgccaccaacacgtgctaaaccttaagaattgtgccatcggcatgctaaacttccttagtcaatggagcgggtatgctagtactcctacattattccgtgcgcactcttatacaaacaaaaaaaccgtgcggtgtacgcaccgtcgcggtgccgaccgaccgccagtcgtctaaacatgggccgtgagccgcgaacatacaccttaaactaacacg

SEQ ID NO: 8769 - DNA, 470 bp, Oryza sativa
  unsure (1)..(470): unsure at all n locations
tggctgagcttatcagcaccacgtgaaacgaggcatgccattagcgcatcgttaagtatggactattataaattacagaagtgaatttatttgattnttaataaaatatataaagtttttgcacgaaattagtggttcagaaaacgtggctcatggcaaactggccctaagacatgacaatgacaatcagtctcatttattcataatgggatgtctcataaacatcccaaattaattatttgcagttgtttgtgttaaatatgtgatccgaattttggaccaacaatatatttggattagttatctaataggactgcattataggattagtttcctattaggactttgagtctttacctattaggactcctagatttctcctatatatatatcccttgtaagccgtacagggagggtgcgacagctcaatgtatccnctgcgttngtatctaactcctctatagtgatca

SEQ ID NO: 8770 - DNA, 383 bp, Oryza sativa
  unsure (1)..(383): unsure at all n locations
aacagactactttgaatgtcgttcaatggattgatcacaagtcattaactgtataaactagcctacttgttccaacgctaatcatacgtctcatatgaaccagaatactctcaatagcggaattgctactaacaatctacttatgatggactcttgtacaagtagtacccatccatttgcgtctgctgtgnaacagacatccaaatccgtctatactcagttgcgtcaatgccctacttacacttcaactcagaggatggcccgtacaccatagtggtactgcctcgacgaatgacggtatgagcacatatgaaatgaacggtgattaccaccacaacgactctttgtcacctcttttttttttttttggtttttagtttttt

SEQ ID NO: 8771 - DNA, 395 bp, Oryza sativa
  unsure (1)..(395): unsure at all n locations
tgccttgtgtctatgctttccttctgcgcaatgaaaagaatgggtgggttacctcctggtcttaaatcagctttattactatgcacaattatcgcaaatataacatatattgggggatcatgatggttcaaaaacttggatgtattctgtgtatattaatattaaggacgtgagaatgaaaactcttcctttcatggcttcatggaggacaataatggtaaccacagcttgttcacatatgcaaccatcaagcacaaaatanaacataacttgcgagttcatgatgttacagaaacttggatgtattccgcgtctattaatagttaggatgcgagacgatgaaatttctccctcttatgtcttcatggaagacaataatggaacaacacgtcttt

SEQ ID NO: 8772 - DNA, 422 bp, Oryza sativa
  unsure (1)..(422): unsure at all n locations
nggtttattatatatacttaccttntactttgattttctaactgtatacagattaatccaaaaacttgtgctattaattggataaatgtcttaactccctcctttcacttgtctttagatgccgcgctacaagcctgagtacttgtttggtgttgagggatatgtccaggagttgcgtacgatgtcctttgccataagatttgggactgctcctttctatgctcagattcctcatgatcgtcatgaagagaagtgccgagtcaaagtcaccttgaacagtaatagtgaagatgtcccctcagtgatgttcgaagctagaggaagaaactacaccatgcatgtcaagaggtggcaaggatcgccatacgagagctccgcgatcgctatattgatcagttggccgacactgagtatcgctacca

SEQ ID NO: 8773 - DNA, 135 bp, Oryza sativa
  unsure (1)..(135): unsure at all n locations
gctgacacatctctagctcattcgtgagaactgatataaaaaagaatcatanattacacagtctacttcgtacggagacagcatgcattatctctttagtcatacatgttataacaagctctctattaaatcact

SEQ ID NO: 8774 - DNA, 479 bp, Oryza sativa
  unsure (1)..(479): unsure at all n locations
ttgcgttctctaatcgcctcgtcagggtactaatcaatcatcttcgtctaatcctcgaatctctcgtggggcccgtctaatctcgcgattntgatgctcgtggtggaaagcgtangaggatcccgtgcgagttagtctcaatctctcatggtttcgtgcgattntagggtgatccacctcttaatcgagttacggtttcgtgcgattttanggtaatcctcttaatctctcattgatttagggtttcgtgagaatcgaggtaaggatctgtgttatttatatcgatctaatagatggattggttttgagattgttctgtcagatggggattgtttcgatatattaccctaatgatgtgtcaaatggggattgtttcgatatattaccctaatgatgtgtcagatggngattgtttcnatatattaccctaatgatggataataagagtagttcacagttatgttttgatcctgccacat

SEQ ID NO: 8775 - DNA, 144 bp, Oryza sativa
  unsure (1)..(144): unsure at all n locations
ttctctatagcacggctacccactcacgagggagcaaaacctctgaacttcaaccttaaatggctgatgcatgagcactaaagacctcttcaaaaccttttcaacacctgtggcgcgtattgctttacatccttctnactgtct

SEQ ID NO: 8776 - DNA, 397 bp, Oryza sativa
  unsure (1)..(397): unsure at all n locations
tatcacgaacggcgcatcctaggacagagaaatatgtatctattctttttggagatgatgtcacgtcctgataaattcatcccgaaataaaatttattcgctcaaaggaataatagaattaattaaaattcggaaagaaattggctaacactaaaaatacgtacaagaaaaattcaaatgtggcctggagaatttctgttaaattctccttggtctaaaaggagccctcaaattttacttgaattttcagagcaccggaaataattattaagcaacaaaaacaattatcaaagttcaataaaaagaaaatctaanaataatcctcctcttcctcctttgggccaagcccagcccgaagaccttctcttcttcctctctatctgtccctgtccttctc

SEQ ID NO: 8777 - DNA, 486 bp, Oryza sativa
  unsure (1)..(486): unsure at all n locations
ttttcttcaacttganatggtacaagatcaactaatgtttctcaatgatttgcaattcaatatgtaagtttcagcatttggtagtagttaactaatttggcttttttttgcctgctaaaagagttacaacatccaaaaggaattggaaaaaggtatcaaaccaaaaggaggatcgtttgcctgtaaacgccttagtacggtgaagatcagatgcaccaaggatgatcttagagtccatatgctggcacagctgttcaattctaatggcttgtccttagagaagattttcgtccgtcgaagtgggagcttccgtaagtattattgttcatatatttgcttcctttntttaattctttttgttgtacaaatgttataacatttcatcaaaagatatgctgatcaagaggcatgctatcacgtgatagaaacatgaacaatcaaatggaanaagttcaactatttaacttctttttttttttgaactac

SEQ ID NO: 8778 - DNA, 124 bp, Oryza sativa
gaatctcgagaattaaaatgagcgtatgtccaaaatattttggaactatgcacaaaccatcaagactgtgtgacacagtatcattctgcttgtcccggctcatggttggatacttaataatact

SEQ ID NO: 8779 - DNA, 477 bp, Oryza sativa
  unsure (1)..(477): unsure at all n locations
tgcgtntggcccgcgctatgcctgtgcggatgagctacatgggcctgcgtgaggaagcgagcaataccaaactggaacagtcttggattcatggacagggctcctcttggcccacgcactttcgaagagtcatctgggcctcctgtcttttcgtaccacagtcaaaagaactcggaataagttaacttaagatccctcacattagtccttcaaccgcaatacaaatataacgcttttctagactcgcaataccagagtacttaaggtcccagtgcagtattttgcccgatttcagctgacgtggggagttgactgcagtcaactcggttgactccaatccgcgttcgcgatgtcgttcgctgccttttctagtccaacggctagtagagagatggngaagatacgatagaggggcgagagaagaggaagaaggctagtcgttaacatcgttggtctatatgggtcccacgctgactc

SEQ ID NO: 8780 - DNA, 472 bp, Oryza sativa
  unsure (1)..(472): unsure at all n locations
ttatgatntatgaagctaacagtcaaaacatttggtatgtctcggtcgagatagcggcagattacaatagtgtgtagagctgtcaaataatctcgagactcgcaagctactccatgtccgctcgctttaggcttgattcaagctcggctcgttttattattaaactgagctcgagcctatcacgaagctcgcaagcttctcgagccgagctcaaatagctcgacgagcttttgctgctgggcttacgtacaatttgccatcccttatgctaatctgttagggcttcgttagttcccaaaaacttttcgtgaacacatcacatcaaattntcggacacatatatggagcattaaatatagataaaaagagaaactaatcgcacacgttgtatgtaaatcgcgagacgaatctgttgagcctgattagtcaatgattagccataagtactacagtaacccacatgtgctaatga

SEQ ID NO: 8781 - DNA, 346 bp, Oryza sativa
gttactctttttaacttttgttgctattcgcgcaccagtgctgaaaaggcttcctaagcatgttcactgtagcaagtgacctgaaatctatgcctacaaaataatcttatttaacaggaaaaaaacaaattgtgcctctatctgtttttgtctgcgttagaaacttcttgtgaggcacgagaaagcgctaatctgaaaactcctctaccatatcttattaggctccctcccgacttgccctttaataagtgacacggattgattatggttgtttgtattggtgacaaaaaacatagttcgatacaaaagattttatggaacaatattactatttttcgagcttgcg

SEQ ID NO: 8782 - DNA, 453 bp, Oryza sativa
tctcaaatttccattgcgttaacacgttctgttttcaacacgtagaaaacgtaccagccgcgttgatccgttatactagtactaccactagcttcagtggccggccggcctcctgcgccgcgtttcttttcagcctttttctggtctacaactgtcccgcccggcttgcagggccgcgcggctagctgcaggctggcaaagcgcgcgcgcgctcgctgccactgcgagctcctgctcgctcggtcggccggcccgtcgctactcgctaggcgtcactagcgccaacccgccacgccagctcgtacgttcgtactgctgctcccccaaaacccaatgcaacgaacctttctactagctccgcctccgcgacacggcgcacgcctcgcgctcatgtgacgcgtcaccctccctgtgtactacgctgttggctcgctcgatcgatcgtcatgcatg

SEQ ID NO: 8783 - DNA, 464 bp, Oryza sativa
  unsure (1)..(464): unsure at all n locations
tgttattatgtacaggagaatacaaaaaaaatcctagcttgtgacatcagttgattaaataaattttacaatgatacaagagatatcggctgggaacaaaacgcagaaaagaaatgaagattctggggacctatactgatgacaaacttgcagcaaaacatgggtaaaatcaataacatggctgtcagcagctttcctcgcttgcgcgagatggaaccatgaagcctcgggagcccatccagcgagtgaatgttcgtctgagttgcctctgtaaacgccccctgtgaggcttggactccaggaaatcaatcatttcttccagcaaccagaggtgtgaaaatcagatgagtctcaactcatattcaccagccattgtgatgtatcgaacccaaggaagggcctgatatccactctttttgatgattntcagatagcgaaccttgcaaagcacaaagtcaataaag

SEQ ID NO: 8784 - DNA, 247 bp, Oryza sativa
tttaactttacgtaagattttgttttatatacactgacttcacaactgcgcttgtcatatataacgttgttgacctttgtacaactaaactgtacatttggtccctgcctgaattgaatagcagattttgatacacgtctatacccttcactgatgtcgtgtcaccctctccccattgtgaagacggcataataataaaaacatatcgtctcaatggacagatgtaacactcttgccctattgacaa

SEQ ID NO: 8785 - DNA, 401 bp, Oryza sativa
  unsure (1)..(401): unsure at all n locations
agaatagtcattagctcgcggcaacatgtcgtctgattacgacgctgtccgtcaccgcggcagctgtgtcaatcgtcaagtaaccgcaggcgccattatcgacacgcgcatgggcagcgaaccgaggggattcgtgctcgcgtgtgctgatctcgtacgccgatatcaggcaagtgaagggacggctactgagatggcgtcacgcccgcgcgagggaggagagggcctcaccatcgacagaacatcgcatatatgtcgggatatgcgtangctacgataacaaaaattaaaaggatctatcgcgtaaaccatgaaccatgtaagtattagatcatatatcattaccactcgacgcattgtgcagtggaagaaagcgctaataagtcaaaggaattctcgcg

SEQ ID NO: 8786 - DNA, 412 bp, Oryza sativa
  unsure (1)..(412): unsure at all n locations
gccttatgttgagagtaggaataaaaatggaccggtggatccatttgtgttatacccatcacacatcatgaaagttccacattaataggagctatgcatcgatcggtgtatatacatataggttcatatggcagtagtgaaagcaaaactagtatagatggagagcaccagcagctcgtctcattgacccgcaactacagaaatccatccaccgtagtgccaattctattaagccctgtttagttcaaaaataaaaaattctatgctaccatatctgataaattggacacatgcatggattattaaatgtaggcaaaanaaaccaattacacaaattacgtgtaaattgcgagatgaatcttttaagtcttattctgccatgatttgacaatatgattcaacagtacacatt

SEQ ID NO: 8787 - DNA, 466 bp, Oryza sativa
tggcgaaggaggggttcggatcgtttacaaggtataccaattatattgtactatccaaccgtacctgcacgtgtgctcatctttttactagcttattaagtcatgcatttacgcgaccataatatcccttagtgaagcatattaatattatttatagtaaccaactaaaataagtgtttgtagaacatactttgcaagaaacgtagttataacaataacatgtatattctgatttgtaatgtggccggttcacgtgtccgattataaactatgtactctatctgtccacaaatataattgatcctatgtacttcatctatccactttaacattgaggtggaattatttggtgttccaaaatcacacctatcgtttggaattccatattattgtagactgactgcgtagatgagaagtacattttccaaatgaccttcatgaatagagatgtgtacgtaaaattagt

SEQ ID NO: 8788 - DNA, 464 bp, Oryza sativa
acacttaaaactcagcttggaacgaattcaattgcaaaattctcagtcgtcgaaattcctggattggcatttcatcttgtacttcagtattgattttattctttatatggactagctgtttcattttattgcagaaagacacatccaattgctccaggtgcggtagtttcataatgcaggacatgtccatcagttgatgggctttccctacataaaggacacgaaggttctgaatatgccccatactaatcttctcaattcttggaagatcccaaaaggtgagaaactctagcctcggaagatgatctccataacactgtggcttgtttgtgacagagaactcctttaattctgaacagtccgttatattaagaacaaggacactatctggtatagtgagcgcaagagatgtctcgccactcaatttatatagaccaagcaatctcatgtgacttccatgaata

SEQ ID NO: 8789 - DNA, 286 bp, Oryza sativa
tcgctcgctcacactctctcacctgtgacgtcgtcgagctcactcgtacacactcgcagattttcttctcgagcaacagctgaagaccgattcatccgtgactcaacgcgtgaagtcttagacattcatcagtcgtcaacactcgcagacgattctcacacccaacagagatggtaccacatctgtaactccacattgcgcattctacacaggtctcgagctagcgagcgtacacattcctactagagcggttctcacctcgcgtcacgacatgtgtctccttcct

SEQ ID NO: 8790 - DNA, 231 bp, Oryza sativa
  unsure (1)..(231): unsure at all n locations
tgcgagtggctggtgcatttctgttatganctatttcttggaactgcgtacgcatattatgtttacttctatcactgtatgcaatggttcggcgtgtcactgtttgaaacaaacgtacctatataccttattgtatgatcaaactgctgctggtgttcatacactgctgctatggtcaacaagcgccatagcttacttgtcagcaattgcaaggctcccttacaatgtctc

SEQ ID NO: 8791 - DNA, 165 bp, Oryza sativa
  unsure (1)..(165): unsure at all n locations
tcatggcaacccacactttcacaatttattttttgctacactcgagatttacaataagcacatgagatgcaaaaatctttattatataacaaantgatgcaaaggtctaatcattttttaacctctaaaactaaggctttatcttacactttaaaactatgacac

SEQ ID NO: 8792 - DNA, 319 bp, Oryza sativa
ttctttgtagactgcgtgaagttccacttccgcagtgagatcgtgggaggccctgagtatcgcacaccccgctggtgaggtccgtatttgcgcttgaaggggggactaaatccatggagtacatgaaacattatgagtggcttatctcagacgtggtgggttattgagcaaaagtgtcaatattgtggcgctcatattaatttatatgcgtttgcataaaactgtagttaatgactcttctgtacacatgtgacccgtaatttcccaagaaaagtcccctgtttattttattccccttctccatacttattattttatg

SEQ ID NO: 8793 - DNA, 122 bp, Oryza sativa
acacagggcatagtttcccttttttgcccagcatcaccgaataactctccctagagggggagtgtcgcaccccctccgagtgggaaatcattttttttcatctaatcattaggagctttcta

SEQ ID NO: 8794 - DNA, 409 bp, Oryza sativa
tacggacacttcaaactcagctatctctacgctccggaatggagcagtctgaacatcaccaccggcttgccgtcatcgccgccgactggtgtcttcgcctatacggttgtttggtcacaccaccgatgatgggcgtctacatcttcaccgaccggccgcctcgttcgccgccgactggtgtcttcgcctatacggttgtttggtcacaccaccgttgttgggcgtctacgtcttcaccgaccggccgcctcgtacgccgccgactggtgtttccggctgcacggatggcctattatgccgccgttgttgggcgtctacatcattaccgaccggccgactcgtccgccgccgactggagtttccgcctgcacggctggcttattatggcgccattgttgggcgtatacgt

SEQ ID NO: 8795 - DNA, 325 bp, Oryza sativa
  unsure (1)..(325): unsure at all n locations
cgacaatagtntcggatagaaagtgtatttacacattcacatttcttgaactgcctgacaaatatatcttttcacgaaaatttcgattaaaaaggtaataatatattaatactcaattaatcatggagtaaaaatatattaaaactcaattaatcatggagtaacaactcaccttctaaaacaagtattactgatcatgttatccttacaactcctttctaaagacagaagagatatgtatctatagcacagtggctagagatgtatagtttcaacttctagaccagtcttcaatcctcaatacgttattatattcttcttaaaa

SEQ ID NO: 8796 - DNA, 329 bp, Oryza sativa
gtatcaagaacatgctatctgtctactctagacagataatactctatgcacatgcttatctctagaactggatctgtgatagtaactacacaggagtgtctgatcttgaaatccagagagaagctagaactatatactatgtagctctctttctgatgctacgaactattatctatgtgtgtgtgtaggtggtgaatgatgaacaaattatagtcttcactccatgcgtgttcgatatgcccgaacacaatttcctgtatactatttaataatatatgtttgacttttaagtgcacccgtattgacggttacaaacttttatactctgt

SEQ ID NO: 8797 - DNA, 421 bp, Oryza sativa
  unsure (1)..(421): unsure at all n locations
ttatcttattgatcttggtttatgtaagctattaatagtttgtttcatttcaccacattttcatggcatacactangactaaaatcttatgctntatacacttgtatttccaattgttgttgcccctattaagtttcaagtattttttgtatgatatggcattgtccaaattgtacagcatcgaaatggagggagtcatcanggcaacatgttgattatgaccaaaggcctgatatctttaggttggcaatattctctctgtacctgctatctgtctctcatatagtgctttttacttatttttatcttcgttttttttcaggggtacaattagatatgccagtgtccatgcccatttangccgtactggtagtaggagggatgatttagagtcattggcgtacacccttatatttctaat

SEQ ID NO: 8798 - DNA, 75 bp, Oryza sativa
cagcagaccctcgtaaacaccccacaaacatagttacaaaaaattatgttgaaacctcgtgaaccaaattcaaat

SEQ ID NO: 8799 - DNA, 479 bp, Oryza sativa
  unsure (1)..(479): unsure at all n locations
tagcatctattatcatgccaagtcttgaattcctcgagtttgctgtccatatgcggntcctgaaagatgcaacccagcttggttttgacaagctgcttagcttcgagaagcttggaagaagttcgctccagaaagtcaccatagtactgaaatgtggagatgcccgtctgtcaaaggtggaggaagtggctgctgcattgatgaactcagctgcggtccatcccaaacacccaactgttcaaaccaaatggcaagacgaacaagctgtgctctcaccctaccaagaggtaggaactgatcatgcatgcacattgatagaccaacgttggttcatcttattaattcattcccatgttgctttntgtagtaaaggtaattacttcccctatattatgcctcacaaactangagtcgaatctagccacttctagtttctcttcttttaattagtcctatatccattcctttcccttctttta

SEQ ID NO: 8800 - DNA, 471 bp, Oryza sativa
  unsure (1)..(471): unsure at all n locations
ngaagatcgattaggtgctccctttaagcctgcaggcttatcattacgatgcagcctcatcgtataaatagcatcagcgtctctttcgaatcagcagaattttgggcgatgtgcacagcagataaggattagaactaccagtagcgccccattctttcagacaaacctgtaataagtattcgcttgactattcaaatcttcaggcttcagagtactacatggtacgactcttaattactttgcgactgtcaggccctgattagcaacattgataccctgaaaatggagtggccaaatcatcgtgagatgaacaacatacagataccaacgtaagactgcagtgaataattcatgcaagcgtcagacgtcatatgtgcatacagccatacactgnggataaaaacattatactgcaagaggcaggcatcctgtatccacagtatgtctactatcctggtaatgggagacata

SEQ ID NO: 8801 - DNA, 172 bp, Oryza sativa
taagataccatattgcggaacacgaattgatattaaacagatcgctacgcgctttatcggttcacaacgcatttgacagaaacctcaaccttttcttaaccgtattggaagaagactgagttaattaaaaacaaagctgaaaagacttctttaattagaaagacataattta

SEQ ID NO: 8802 - DNA, 463 bp, Oryza sativa
  unsure (1)..(463): unsure at all n locations
tntgtatcaagtatcagcctcattacaaaaagtctagtggttataggaaacatgacttaacatcagaggaaaacatggcttggcgatgaatgatgtgaaactttgtctacaaaagataacttatcaattatccactacttggacacatgactaatacccaattcaatactagcatcttttaatccattcaagcgtgcaaaaatgtttgatagaatgaacagaacataacaagttaatcgaatgaatatacaaactcaccagctgaagctggaattaggtatacccccatcctaatcttgtggactgtgctaaatagatgacataatagtgcgcattacccaccagctaggttcatattattcagctgcaattataacacacctttccataccatttagtaaatatgtggtagatcagaaggatctgtacaattattcgagttgaatattaacttactcatcac

SEQ ID NO: 8803 - DNA, 370 bp, Oryza sativa
acttgaaccaacttaatcggagctaagatgaatttattatgaatctttgaagatcaaatccgattaaaacccttgaactgattctaattgaattatgacgcaataatgaattatttttgaaaacgaaaaagaaagattattgcgctagcgggctacggtttctggggacctggcgcacggcggtgggtcacgagaacggacggccaagatcaatccattcaaaacagacggccgagatcgatcggtccacgaccggttcacgggggaccgggacgatgacgtcaactatgacgtcaccaccggcggtggcggctaggcggctcgacagctcggacggcgcaagctcgccggcgaacggcggcgcttcgca

SEQ ID NO: 8804 - DNA, 371 bp, Oryza sativa
  unsure (1)..(371): unsure at all n locations
ctgagttgtaaacacctttgtatattctttgatagtcgctcctgcattcttcaattcaaagggcatggngatgtagcagtatgccccaaagggcgtaataaacgaggtcttcaagcagtctgattcttttagtcggatctgatgataacccgagtaacagtccaagaagctgagttactcgcagccggccgttgagtcaaccacctgtgcaatgcgaggtaactcaaaagggtctttgggacaagacttgttgaggttggtatcactactaganagatcttctgttgccccaaaaaaatcgtggcatcaatactaaaattgtggcattaaagcatggtgccacattattaaatcgtgttagctgtgtaata

SEQ ID NO: 8805 - DNA, 195 bp, Oryza sativa
tctccctcgccgatgttgtcgaggtcgtcttcgcccacgaacttcatcactctcagcagcggtgggaagcacgccgcgactaacccgactgcacaaaatcaacaatggcagcagaaggaattcgatcaattcacaaattgttccacacgcgtagttcttgcaacaagccaacaaccaaatcaacttccaccccaa

SEQ ID NO: 8806 - DNA, 371 bp, Oryza sativa
  unsure (1)..(371): unsure at all n locations
ttgaaatcgttgatcagtggttagtaatcattttaccctaatgttgngngcatctataattgctttctgtttaagtgtgatgtcgtgtgcatctgtaatcagtgttattgggacatggtcagaaaatcttttggcttgccagcacaacacaattttctatctacgtacatctgactctggtgccacatgcatctgacaccttggcagtatcaggcgtaaaacacaccaatgatgagggtggtattgattgctgctccgtcatgaaaaggaagcaatagaagctaggctgctgccctgtagactntgtcttattcctctttctattgattaggaacagtcgtttaaatcataccctttgctaagactctgat

SEQ ID NO: 8807 - DNA, 369 bp, Oryza sativa
  unsure (1)..(369): unsure at all n locations
gttgcagctacagctcttggaccaccagagaagccctcctagcgaaccaaatgcatccccagatttattggagctctgcttcaagacggtcctgcaacagaatagtacaatcgcaacaaaaaaataataataataataatacggctcaacgtgaccaccacagaaccaaaagaacatcgaaatatcaagctgcaaaattntagcatagttactggttaatacacacaaataatacatcaggtcatgtgaactaaggcatgtacatgaaccaacagatggactcaataacatcaaagcagataagatgcttaaagtccatatcagtccactagctagacacaaaaattcaatgagttgttcatagccatg

SEQ ID NO: 8808 - DNA, 121 bp, Oryza sativa
agaaatatgaaagaaaagaggccacggagagtggcagcccgccgtgctcctatcgccgtcccaccattcgtcccacccgcgctcgggcaagggaaaaaagaggccggggagagaaaagaga

SEQ ID NO: 8809 - DNA, 385 bp, Oryza sativa
atctctgaaacaggcaatgcattaaatttttgtagttagcggatgaaaaattcatttggagtttgagaatgcaaacgaagggcactaaatgcatccttatgtagtttgagatagtgaaagttttgtttcgtattggcatgtgtgaaatatgttaaaaatggagtcttttagaatgcaggcagtaaattctattaataactatgtgaaatcttgcgcattgctgcgagtgctgcgggtttactataataacaataagcaaaaatattgtataagatagcttaaataacataagcttacatttacataagttgatgtgatttaaatttaaattggatgtagaatgatgattcaaatgtaaaagtaagatgatatggctttgatagag

SEQ ID NO: 8810 - DNA, 266 bp, Oryza sativa
  unsure (1)..(266): unsure at all n locations
catccctaaactaggtgtcatgattatcatccaacctacagcttacgtcactctgcttgacaccatacgtgagatggcgaatgcatcctaacacaagctgactggtgcactctacgaatctagaatggcttccaatacggccgtaggcatgttacccctcccgcgcgtatatggaaaagcatgctcatgtacattgttagctgcgagcatagggctgcactangtcaggcgggcatgggatatggaccttacgacacgccccatga

SEQ ID NO: 8811 - DNA, 329 bp, Oryza sativa
aaaaaggattaatttagactgaaaagattcgggtgtttcacaggtcacaatattttatactatccatgttaattggcttgggatttcaattcaccttcagtttgacaatatagtgatatcatttactattgtagtaattcaatctagtggtgctgtgtccaaatagggagcatgcaaagaccgcaacgcatacatgcacagaaatcaattactgcaagttaatacatagattgaaaagacatgatttattgaagtactcatacaccataatgtgcaaggtacactaattattctcaagcttttagcaatatatgatattctacctaaac

SEQ ID NO: 8812 - DNA, 283 bp, Oryza sativa
gagcgtcttagggttcatggaattctactttctaactgttatgacttgtattgaatgcaagttagtctgcgctaatctgtgcagggcagcctcacttgatattaatgatgaatatgcttgtggagtaagcaagtaatctgcttgacatcatacatcctgcttgtggcaatcatcgctcacttctagcggtagcaaattactcacaaggacgctgggcattacaatacaaaggctgtactgccatcctcactaccagaataagtgactcacaaacgcgttcttt

SEQ ID NO: 8813 - DNA, 117 bp, Oryza sativa
aatgtgcggtgctaggagaccctagagtactgactgaaaaaatcagtgcaaaattaatcgacgagaacagcactcatcagttaagacatgagtgatgggctttctatgaaactttta

SEQ ID NO: 8814 - DNA, 248 bp, Oryza sativa
ctgctgcctcaattgtgcctggcaagcattaagctgacgctgcatgttcttacttcttgccgcctttttattgcgattgtagcattcttctgctcctccgggccttctctatatctacaaagctgcttcagctgattccgcacatacatactgaccatctgcagtacattgatcgatcataccccaacatgtaggactccttaatcactttatttttatagaactcacttgatcatattataacaatt

SEQ ID NO: 8815 - DNA, 223 bp, Oryza sativa
actttgtgagtgcaggctggaacttgtgctcatgtcacttacctcaagtcacacactgcccttcgctaaacgacctgtagaccctattggggatgctatgctaaacatacgctactggtgctggggcgcagacaaacaaagatcttgcatgctctgcctaacttttggttaattactatctcgcgtctgagcgctacagtactatcgtagctccatttactga

SEQ ID NO: 8816 - DNA, 272 bp, Oryza sativa
ttacacccagcgccgcttgtgtattatgaacttctcgcatcacctgacaacctggctaagcttgggtttgtatatctgcatgcgttgcaacacggtgacaggctctgctctgacgaagtcaccttgaattccttgatggttcgcaagcgtcacttcgagttgcgacatcaacagcaggcagagcctaaaaggttatgccatgatgcctacattgcgctttgtcaccggccgttcaagttttggctacatcatgacctaatctgcaagaacgt

SEQ ID NO: 8817 - DNA, 338 bp, Oryza sativa
  unsure (1)..(338): unsure at all n locations
tgaaatccttaaggcgggttgggcacactctccccctatcagtacacaactaatcacaatatgtgcaccacttttggccccaacctaaaatccatgttntacatcattttatttatcacaatcacaagtattaaagttttgtccagattattttacaatcattcttcatgtttgtaatgagcccataatgacaaggaagatcattctaagcatggctaaacattataagaacctataatctaataacatcaaaactcatatataaagnggtataagcatattgttccttaggttatgaacgagaaatatggatatatgtggcgtatagatgataatgc

SEQ ID NO: 8818 - DNA, 324 bp, Oryza sativa
  unsure (1)..(324): unsure at all n locations
gaagggagggggagaaaaaaaaaaaagaaggaggattgggggaaagaagaaggaaaaggagaaaagggaaatgaagatgaagtagaaggggatatggagatgaaggaggggggaaagaaaaggaaaggaagaggaggaaaagataggggaaggggagaaggaaaaatgaaggaaggggagtaagaaggaaaaagggaagagaaggngagggaaagaaggagaaaaaaaaggggggaaagaaaaaaaggttgaatagggaaaaaaggaagagaaaaaaagaatgtttaaaaaagaaagggaaaaaaaaagggaagagaaaagaag

SEQ ID NO: 8819 - DNA, 162 bp, Oryza sativa
  unsure (1)..(162): unsure at all n locations
cctatcgccacgcactggctgagaaatcactgacatattgngtcatcattcatgatcgtgactgagatgtttaccactgagatgccccactgttaaccagactccactccagcatgaacgaagcgctaatcgttaactgtgtgatgacagctaaagttctga

SEQ ID NO: 8820 - DNA, 258 bp, Oryza sativa
tttcgaccaaagtgcgcccgccggcgtgtggtctgcatatttcttcatggatgtcgagtagcaatgccctgccgtcctcggaagagacgcatttgcagagaactccattgcgggctttcttgtagagatcattatcgatcatacaatagggttttgcctgatgggatagtttctctgcctctgtgccgtcgtcaagtaatttggttgcacccaagaagtcaataagcagtgtgcgccagccttccgtcatctcgatgg

SEQ ID NO: 8821 - DNA, 300 bp, Oryza sativa
tttttttttgtgacgcctcggggggaagccctggatccccgaagagtaccgaaaaaccgcatcgtcactgctctgatctggatgggccgttgtgccaaaatggttgtagactattgcagtttagtccccggaggccatctgaaggtatcccgtggtccattacacaggcccgcgttcaggttggctcacatcccacccatggatgtgtttggtatacgcggaagggcgcgattgccttgagggacccttggataggctttcctgccgagccaaaacttctacctggtctctaggccaatc

SEQ ID NO: 8822 - DNA, 387 bp, Oryza sativa
caccatattgctgcttgttttattgaggcatatgtcccaacgtggacgtctcacattatttcaagaaggaagcaatctttcatacatggagggaggagatatatgggttcaggatgtcacgatcttacacaatgctgagtcccagagttatttatattccccatccatctaagttaacggtgaaaaagaggttgacaccaaactacatgcatcagacatgatatggatgagtcaaaagcaggtgggaggactttacgctgcagcaagagtgaactgcgcggccatacttacaagaaatgttcaaagaatgcataaattccaagcggcgcggatgctgatcatctggacacgcaagcgatggaaggcgaccacctgttgaggaacaac

SEQ ID NO: 8823 - DNA, 229 bp, Oryza sativa
accagacggccactatgacgctcccgtacttgagtgagaatacagacccttgccgaccgtatcttgtgtcaaatgtaccacggcaaaccgtcgtttagaggttagggtattctccttcactacaattataaatgcaaaagtgtacttagttgtgcaatttgtactattaaatatccaagtaccaattacacataataatcgggtcatggatttagggcatgggtggctg

SEQ ID NO: 8824 - DNA, 372 bp, Oryza sativa
atgaacaattagaacatgctgctgttttattttctgagaaacttataacattatctattaatactttgcgagatgtcaattctattaattgcaagaaattggaatatgagattgaaaaatctaaaaatttgaagtcttcttttgctcttggatttgctttgcatgctcgtgttattgatgaattggtttcgacaaagaacgttttgacaaaatacaaagttgctctaagtgcaagttctttgttcaatgttttatgtgcaaaaagggctaaacaaaacaaagattttttgatttctcaaagttggtcaaattgttttttgaatgagatgaaattgaaatatgctttacgatgtgttgagcatatagaaaaca

SEQ ID NO: 8825 - DNA, 75 bp, Oryza sativa
atatatctaacgaggaggacttctacgtctcgtcttcacttcttgtgacaactgcggaagtacacaagaaacctc

SEQ ID NO: 8826 - DNA, 247 bp, Oryza sativa
aattctatgatattatttaccattgattggctatgctgctgatgcattttattatctaaccccactggttgaggactctatgtcacggcttcttatatatgtattacagacttatagaacttccatttttatcggcacatgtgagcgggagctgttataaagtattgcatgatgaaatgtgttccatatccttaagaatggatgctacagggagaccaatgtcaggtgtggcatatattccatgagg

SEQ ID NO: 8827 - DNA, 182 bp, Oryza sativa
tgactctaactgaacaatattgctgaataccggtgtgacactcctgctaagatctggcagactgaagataagaagtcaacttccttactttagaccagagagactctctaacatctcgagtgaacctaattcactgttgacagcacttttgttgtatccagttcaaatgtcaatctgactta

SEQ ID NO: 8828 - DNA, 321 bp, Oryza sativa
aaactaacctgtatttcactatctgtcctttgatgtcagccagctcaaccctatgagttctgctggatattagttcttcaacagaaaagtgtgccttgggatcatcaaacttctccctccctttctgaccttgtatctcggaactaacaggcatattttttcgagggggttggaatcccttgacatcgttccttttgtcacgaggagatgttccagaagcaggttgcccatgtaatgttggacctgctggataaggcatcggtacgccaaagtaaggtgaggcagtctcataattcccaatgggctttccacctttgatgg

SEQ ID NO: 8829 - DNA, 375 bp, Oryza sativa
  unsure (1)..(375): unsure at all n locations
caatactgttattgcactgagattcctcttcgcggttatatgtcgctaggttggtatcaatgatattgaactctgtagaatgttcaaatatgcatccaattcatatagaaaatggaaaaacattatgtttgtttcaaacacagctttcaacctttcaaggatatgtatatgagaatatattgtttgtaattgtcatgagatatggatacagttccaatctacatgtgtgattcattgcttattcaatatatcaagtataggtagtgctagagtaaacgcaggaacatgctataatatatcaaggggtatcaaatgcgtctcgttntatccaatacgcaagcacatacgatgtgcaaaagttaaatgtttatacct

SEQ ID NO: 8830 - DNA, 369 bp, Oryza sativa
  unsure (1)..(369): unsure at all n locations
gcataaaatctgggtgtgctatgtgcagtttttgtatggggcttctcatggagtaaaggtgatctggggtgatggaggttcatgctgagagaaatggaaccatgggggagcagagacaatgaagaagaagattaggggtatttatgtcatttgtcatcaaaattgaattgagacagcttggctgacgggtattcaacttatcttttagagtggtattttttagacaatgacggtagtacagtggtacgagtatttttttagaggttttagcctatctggtggtntttcttggaggtgtacagtttttatggtattacttgctaccgcttaaattttggtggtattgatgtatccctcttatcttaattt

SEQ ID NO: 8831 - DNA, 56 bp, Oryza sativa
atatgtggtgatgatatgatgatgatgaagatttgagtcactacataagctcgtcg

SEQ ID NO: 8832 - DNA, 422 bp, Oryza sativa
  unsure (1)..(422): unsure at all n locations
ttagcatctatgaagatatcatcacttttgtaaaaacatgatacttcatggaagacaggaactcatgaatgcaaatggggtaattaactaacacgcttaatttctctctctttctcacacattatgtattcataactaactataatatgtatgcaatttttattctaacatttntttcaggggcgatggtcagatgcacatttctgccacaaaatagagcaactttttccaaggttcatgagtgtggcctacgcactttcaaaggctacaaggagtgacttgaataaattgctgggaagggcttgacaaattaaagtgctggatccatacaccacttctctcgattgttaattgctggtatgtaagacgaaactaacttcgtttaactgcaacttaatttgtacacaataatgtttgctgct

SEQ ID NO: 8833 - DNA, 414 bp, Oryza sativa
  unsure (1)..(414): unsure at all n locations
ccctaatcatgcgcgtgcttgtcgtcttaatgtgatcaaattgggaaaggaagaatcacttctgtgcttatctcggagctggaacagattatgacaggatcacgatggggtgaaaaaaagatttaaaaaaagattaggactgaagtgcacgttgccatcgaattcgctggcatttgcagcatgtttgtgcagtataattaagaagaataatntgatatctaatctgggcatgttccaaacagcttatggatatatggatcattcgagctaaattgtttttttttacaaacgtataatttctcaaaaaaaatctgtatcaccataactttctatgatatttgttagctggtatgtaagttttaagtcatccatatgagcaattntcctttgaccatatttatccaatcattccat

SEQ ID NO: 8834 - DNA, 185 bp, Oryza sativa
aagaaaaagggcgcgaggtgcgcatcgccggagacgaataaatgcgggagtgtcacacgggggcatcacgccattttttctgctccatgacactgcataaggtgtgatgcctgacagtctacaagcacgtttcctgatatgctgttgggtctcttaagcaccggtatcatgcctgaaaacaaaag

SEQ ID NO: 8835 - DNA, 404 bp, Oryza sativa
  unsure (1)..(404): unsure at all n locations
ccctgaaataatagatttcttaattttttattgtttgaagtaaaatgtaacacgggaacttatgtcatcttttggttctctctagaactccagctttagaacctttaagaaataccatgcaacacctttttttcaaagaatggcaagttacaatattactatttttcaatatatgcagactatgttcttaataatatggaaggtagccttcaatctaaacatctaaatgaaaatatacggtctggaagaggagcaacataccagagaacttgttgccctacaactcaagcattcagataggtccttaaaaattgagcttatagnctcttgtgagctatcattttcacatcttatagctgcaatctgctcatggctatctttaccttcattgcatagcaacttca

SEQ ID NO: 8836 - DNA, 407 bp, Oryza sativa
  unsure (1)..(407): unsure at all n locations
atttatttgattttttgtacctctctgattagagtaaaaactattcgaatagccatgtctacagttatggatagcacttgatgtgattctcagtcatcttaatatcaaagtttgcgttagatggtttggtttagtcatggatatgatgatgtttatgtttggaataaagatttgacaaaggtatcccacaaatggtgatgagagcaccagttgtactcatttctgatccattttaaatttgcatgcttgctgttcaaaaatttcagattatgatagttntacaaatgctatactttcaactgactatttgctgaataaaattatctntatgcagaacatgaactattataacatatttctaagatagaaacttgcgtacacctttcttatntttgtatgtatattaa

SEQ ID NO: 8837 - DNA, 88 bp, Oryza sativa
caacagcgaatactcgatagtttaggatacacgtatctctataaataagcgtggtgacatatatccagcactcgtggtgatattatac

SEQ ID NO: 8838 - DNA, 131 bp, Oryza sativa
gacctggtactccttaataaggaagaaaacgcataaatgatgaaatcaaagtgaaggagccgaaactcataatcggacatcggataatgttgggccactacggatgattggtacctacacatccgcagcgg

SEQ ID NO: 8839 - DNA, 338 bp, Oryza sativa
  unsure (1)..(338): unsure at all n locations
ttcaaattttcatttccatcagagagtgacgatggatcatgtgctttgaaatagtactctntgagccgagctgactcaagttgtcgtagaactgaacagtatgacaaattgagccacttgaagttgtcaatgtttttcacatggacagtagcatgtagaggaggatcgcgtatgaaccacattgtcatagctgcaaaattaagactatcagtgacaatgtggaatacatgcttctctggttccttggcatgtgtcaccgttgatctaacaactactgaggctgcaaggacgttatctgaaatatagcgtagtggtatagagaccgatcctcacgcttt

SEQ ID NO: 8840 - DNA, 294 bp, Oryza sativa
ctcgctcgtttaaataacaacgactcatcgatcaactacgttgtactctgggaagaaagaacggagacaaccctatcattgaaacgatcgtagcaatgagaaagcgtagtcgctcgcgcgggcgagggacacacggccctggctccaaggcgcgacgtgccgcgctccggggagataattgcatgcagccaggattactttaacatgaaggtaataactctgtaatcaattaatagcctgtaaatttcctttgaatctaaaggttggttaaattacatccttttaattgggctt

SEQ ID NO: 8841 - DNA, 412 bp, Oryza sativa
  unsure (1)..(412): unsure at all n locations
tgtagaagttaggaactatagatatgtattgttatgtatatgagcacgtcaatttattcttaaaatatgtatatgtgaaatcatacatgaatataatttaaatactgtacatcacaatntttttactatacatttaaattagaaatcgcataatacttttctaagtgtctatatattttagtgttctcaaatcagattagaaaagacttgcctttatggtccagtcttgattntaaatatgattgagatttgattcaaacaaattatattcagggtgctaaacataattggcatatttgtatttcaaatttgtaaacagaaatatgtgatataattttacaaattacaccacgtgtcctatgaacagtgtaaatttaatggcacattaanggatatatttcaatccttattc

SEQ ID NO: 8842 - DNA, 351 bp, Oryza sativa
atgatgagaacttcacgactagctctaaggttcagtgctcgctctactaaacatccatggttctggaaacaattaaatgtaatatcactttaagccactttctatttacgatgagttcactttagatcatgttttaacaagctacgaaagaagcccgcgtgaatactccgacatgcgtcgtacgctaaggttgagacacttgtatgagcgaactattaaccgaagagtatctctcacgatttctccgtggaatgttttagtcggcattaattgcttttatgattatttaacctattagctttatattatatcatatgtgacgtatactatctattaaccatcttttataat

SEQ ID NO: 8843 - DNA, 272 bp, Oryza sativa
atggagggatggtgtccaatttgaagaaaagctccttaatgtcaaagggttatcatatatacaaattggaatgaccactttcatggatggctatccgaatgggcaactcaatccgataaaactgggtgccatctttgtaactggctgtctgtaaaaaagttccctgcaagcaactggaaaaaaaccgacattcgtccgattagacacagtgcaacagggactatataagcttggtgcataaaagttcaagaagccgaaatgatgtaaatttc

SEQ ID NO: 8844 - DNA, 197 bp, Oryza sativa
gtcgtggaaacttttcttagactttccgttaataattgatgaataagcgcaactccgatgcaggcaccgggtcgaggacattagtgtcttactatcttgaccatgttaacattggtggagtgacacctggcctcaatgttcgcacagttttttggaacaagtaaaaaatactcatagaaagaaacgtgctagaaaaa

SEQ ID NO: 8845 - DNA, 402 bp, Oryza sativa
  unsure (1)..(402): unsure at all n locations
taaaacagaagaatgacatggcaaaccacatctacaactcgcaagtgggaagttcgttgtctactgcactgtagcagggtacggtctgtcgatctccgcagctcaggaagccgacgtatatatgagaaggacgtacggtagactcactcacggttacaggcacgggagggagttggaaggtcacctgtaacgttagattgttaattaacccgccagcactaccgatcaggctcataataagatatagtgattgtaaagaaagatatgaaaaccgagctatgatgcaagggatagagagatatgaaattcatcatttcaatgacaaaagaaagtagagaccanatttataaatatagcatgtcttatgcatactcattgtgtacgtcacaatctaatcacaac

SEQ ID NO: 8846 - DNA, 205 bp, Oryza sativa
ggtccttcatgatctgcctgtcacgatattttctttgagaaagcttgtatctccaaagaactccttgattttctgcctaaagtactgtaaactgtaatacccatttgacacagctgttctcttgctctcaaagatgactgcacactacgatgcgcctgtgtcataaaaaagcactgacacaacactgtatggagtgatcgtcgag

SEQ ID NO: 8847 - DNA, 426 bp, Oryza sativa
tgaaatattatttctttttaatatttgtcatctatcaaatattatctaatctatttccgaaggatgtttttacttgtgacttatatttttaaaattttttcaaaaaatgtttaaataatatggacggtcaaagttgaacgcggaaaagtgaaaggtgacagtgtgacacgtggtctaatcaatactgcccatcacggccagcattagatatattgtttgattgattgatacggatgcatgctgtatgtaaaatgctgaaatctgaacttacgacttcactttaataattactccctccgtttcacaatgtaagtcattttagcatttcccacattcatattgatgttaatgaatctagatagatagaatgacttacattgtgaaaaggaggaaatagtaaagatagttatgaagaatatacctcac

SEQ ID NO: 8848 - DNA, 266 bp, Oryza sativa
gtatcgtcacaaatccacacatacagccgaagctaaggtaagctgggtgctatgaggactactacataatgcgtgcctcactgccgcttcagtcggaaactgtctgccactgcataatgaatcgtcacgcgaactcttgctgcgccggccgtgacaatttatgttgacgtatatcaatctgcttatcgtatatactatcagcgtcacagcgttaggccatatgttaaaatccccgctcctatgaacgtgatataacttcgctgaac

SEQ ID NO: 8849 - DNA, 360 bp, Oryza sativa
gaatatgtatgaggagaaaggtttttttatatttcttgaggattctcttggaagatgcggatatgtgaatatgtggataaatgcttactggataaggagaactagggtctcattccagaggaactatgttttaacctcgaggtaataaccaacctgatggtggaaatgaaaattcagcgattaaccaaagagacatttgtttgaacaaaagtttcagatgtgtctttttctgacgtcagggttgaatgtgtaaaggaatactttgaatgcttaataatgacaacatgaacggaataatgggaagtaaactgaatgtaaagaaagcgaattccatgtgcctgttcgtggaactattcccag

SEQ ID NO: 8850 - DNA, 260 bp, Oryza sativa
  unsure (1)..(260): unsure at all n locations
ttctatgtgagcatgttgactcacctaactatgacataatcctgttcanatatagccataactgttaaagttaatctaacaagaggctaatacttatgttcatatctggcctgtctatattaagtgtggagacctgctgaaggctttttctttaatttatcactatcatactactgactaagacatgctgagctgagactgctataacactgatgattaacatctggaactgtcaaacaatattcactatctgtaaactt

SEQ ID NO: 8851 - DNA, 385 bp, Oryza sativa
tctgcttgaggcatatatccttgtacacttgcttaatttggagggaaattgcaaattgcgcttagctgtctcattttctattacaaaacacatgtattgattctctgcaagttacttccataaccaagatatttcattagatttcccttgtgacattacaatgtcaatgacttagccaatagactaggttctgatgcccttggcatctgtcttgttgttttcttttgcaagaagcaagatttaagggcatttattggcaattgtatattttccgtatcagaagatgcacagaacaatatagtcatgcactggatattctcttatgttctaccaatataatcacatctcatcgaaagatgtaactttgggatgacaacagtgagta

SEQ ID NO: 8852 - DNA, 281 bp, Oryza sativa
  unsure (1)..(281): unsure at all n locations
tgtagacaaccaactccaagactaagatgctccgtgtggactaacattacgacgacgatttcattcgaagtatcccttntttggtaccactaatcactactttcatgcactcacctctatttacacaatttttcaaaaaggaggaggttaagaaatgtcaattcgtaccatggatcgataccgtcaaagttactttcattggtctaacgataacgcaacctgagacgaccatgcaattcattcacggatggatggaataccaacgtcacgtgcaaaattgt

SEQ ID NO: 8853 - DNA, 185 bp, Oryza sativa
cagacaaacatgtttgtgactcacagagactacaaagtatactgtgcttgttctggactcccactataacctatcatgcttattcagccctggcatgcatataatacaaaacatccactctgtgtaaaccccatgaatgcattaggacaaattattctgacagcaatggaggcagtgcactactg

SEQ ID NO: 8854 - DNA, 362 bp, Oryza sativa
  unsure (1)..(362): unsure at all n locations
gctatgngccaacatcatctgacaacttggtcttcttctttataaactggtttagaaagtactgcaaccatcaaattggctgggcaaacccaaatccaacagttaaacagctgctgccacaaacttctaccagagatcagctcttggagaggtaaacaagctgtctactgatcttcacgcaatcaatcttcagctcttggagaaaactctcagtgatcatctaacatgaatacttgtttggataccacaaacaacacgtattggtcgcatgtcatgcagtgcaccagttgtagagctgcactgaaggggatgagggctctggagatcaccttgcaggtggcggcggtcgccgtcgtcgggtt

SEQ ID NO: 8855 - DNA, 343 bp, Oryza sativa
  unsure (1)..(343): unsure at all n locations
gagccgagatcaacactngtgaccatcctgttgttatatgtgtatgcctttgtcttgtccattctatgtcaagactttattctcatcacaagcttgacttcattcttgccaacatgacgatgtccttggcttggagaccactaacccatggtgtcattcattagccctcatcgagtgggacctatttcttttcacacctcataggagaacattagtctcaacaaatcggttgtcatccttcacttgatgaccaaccggttgcatatgaaagatatggatatngtttgtgtgtattcattaacatcacaagtgtcatatactcgtatgcaagctcaagtgcaaa

SEQ ID NO: 8856 - DNA, 317 bp, Oryza sativa
tggaacgttttctttttgttgccgaatgagactgcggatcaccttttattccattggtaccggacaagctatgaccaaagcttgctctctctagaagtggttgaacccggtgcccatttaggacgtatgaactgtgtttctttgatcccatctctcgaaagactctataccttgggatccttgaactgtgttatcctcaaaatcatttgatgccttatgttccttccttgatgatgaagcatacctagatgcttgaagaggacacattctgtggctgattatataatgttgaggactgagacaaacctttagctgac

SEQ ID NO: 8857 - DNA, 190 bp, Oryza sativa
ctatatttcaagaagatatctgtggcccattttatcctctgtcattcttttagggacgaagggtactgatttggatggatgcatgcggcaacctatgccttgaacttacagaaaattgtcgtcgttcagacagttctataagacttcaaatgttatctattcaccactgagaaggaagtaagtcatgaca

SEQ ID NO: 8858 - DNA, 443 bp, Oryza sativa
acttagaatactaagcctcgggtagtctcggatttctatgttgtgccagcttgttttatcaattttcagatttgaggttaaatattttcttttctttacaagtcaagaaaaaagacggcgacacactaactaagctggttcccgctgagtcttcatatagttcgagatgataggatgataagtcaagtcagaatagcttgactagactatgattctgcgtataacaagttcaaattttcaaaccttcaactgcaagtttgatgtacatgttgtgcagaaagcatgaaacaagattaattatagacaggccacccattcgaagtctgaagacttggagattagttagtctcgcctaatttttattatattatattattagcttttccaattagtcaaaccttaattaaggagcacagttaagagcctaacctatatattaacac

SEQ ID NO: 8859 - DNA, 169 bp, Oryza sativa
gtgctcctcctcctaaatgatttactctagttgtccataaatgttttagctgtggccacatgttatttatattctctcccgcatggtgtagctgattatagactatttggtatcctaactcttatatgcttgaattctcggatataaagtatggctctactcatgctat

SEQ ID NO: 8860 - DNA, 282 bp, Oryza sativa
gcttcttgcactgatcaactcttccgatggtggtctagtcaaggtcgatttgtatggatgcaagaacatcacagatgcaactgtttctaccctggtgaaagggcatggaaaatctctcaatcaagttaatcttgaaggctgcatcaagataaacgatgctagcctctttgccatctccgagaattgcactgaacttgctgaactccatctgtccaagagcatggccagagacaatggtgttgctacccttgcatcagcaaagcacctcaagcttcgtgtcct

SEQ ID NO: 8861 - DNA, 267 bp, Oryza sativa
gtcttattaacacttacagaacctctatgtttggaaccatggacctgcccgatttcacacctaggagacttaatttctcagatttcacttgaactatgcccagtcaaataatcgcttatatgacggccacctctgtggacgaacgtcaccatgcgcacctgtgacgaacgcatgcacgtaactgtacacctacgcggagcgcacaccgatgtatgcctctcgtagatacggctaagaatccctaacgagaggtaaatgccatctttt

SEQ ID NO: 8862 - DNA, 306 bp, Oryza sativa
  unsure (1)..(306): unsure at all n locations
aactttaggagctaccaaatggaacatgtattatgagaacatctgttggagtatgatgtatagggtccactttaagatgaaagactgaactatactcccttgtgatgcatagaaccgataggantatcttccattttttttatcatatcgaaaatcttgtaatgaaaaatacgcgatggttcataatattgcacgtgcacatagattctcttacttggataatatgatacatactcaatcttctaatattacacgacatgtgttagttgattaaaattaatttcacagcgagcatcattaaagatt

SEQ ID NO: 8863 - DNA, 256 bp, Oryza sativa
tagcactcgctgcacttatggaacatgcagttctcgatgcgtctatgtgtacactacagcatacgaccctctctggctatcatgtgaaatgagtgtagtgcaacaactgttgtggtagatggccctcaagccttctcacaaggaatgttttactcatttgtatacctaaaaattatatttacgattagttattcgcatagacttagggcggtaaaagtgatatggagtgatgtaaaaaagtaaatataatgtatgt

SEQ ID NO: 8864 - DNA, 245 bp, Oryza sativa
  unsure (1)..(245): unsure at all n locations
catgatgctcaacatctataattcaatgcaagtgacatattttcaacattcattgcacaaatctgccacagtaactataaatgcgtatacttgcaaccaagtatgactaggggnaagccgccttctttataacctcaaacccccattgattctgttcttaacaaattaaatggattccttaaaatcctgaatcatcgcatcatatcagaatcgtcttccaaattattctcatcatatctctcttt

SEQ ID NO: 8865 - DNA, 233 bp, Oryza sativa
  unsure (1)..(233): unsure at all n locations
ctggagtcgntcctcgctccaacccatattggagaccatattctctattaagtcaaccgctcctcgaaccattttagagaagaaagctcctccggttgccgcgtccaagggattgcgggacatgggcatgagtccatttgtaaagttttgcaggatcagctagtcgtccatcccatgatgaggacaggcgggcacgtactcctgaagacgttcccatgctccgggaatagact

SEQ ID NO: 8866 - DNA, 262 bp, Oryza sativa
ccacccggtctactatagttggggacacaccgccacttaatgacgggctcgtcactatttttaggacagcacgaccagcccatttcgaggtataggaggcagtctttaggaggagcctgacgtgctgctatttaaaaaaaaacagctaaggcacttctaacaatgtgtgcaacgcgtaccacaaggtgaggtgttttacaatcagaatatggaaatacatggaggaaagtactactagggtggtcgttggaaaaacaggttt

SEQ ID NO: 8867 - DNA, 372 bp, Oryza sativa
  unsure (1)..(372): unsure at all n locations
cttcccttcccttgcagctacagggatggttggatggtcgcctttttctgcacccacccctcgncgttggcgtncggcggatgatggaaactcttgccgcgccgcgccccaaccaaaaccccagattcacgggcattcgcccgtcgtgcgccacccccttttcccgcgcccacttggagacacctgcgccgtcattctcgtcaccaacactaccaccaacgccaaagcctatggcgccccgcgggtgaacggcgacagcattaagcccggcctcttcgaccacgccgcgccgccgctcgacctggatcttggtcccgtctccaaccttcctcggccgctcaccattaccgacctcttccccgcgcccatgca

SEQ ID NO: 8868 - DNA, 200 bp, Oryza sativa
ttgtcatgttgtcttaactatgctcctatgccatgtgtgctttctcacactatctgctctctgtaaataccggtggcgttgcactaacgggagggggctgccttttgacgttaacgacagcgtagtggaagatgtcccgactgaaacgcgcggagttcagcgactgtgagagacccgtggagcgctctcctctcaattgc

SEQ ID NO: 8869 - DNA, 388 bp, Oryza sativa
gcttaaaatgagcaactttattcttttttctaaacatgaactagaacagctagaacaaaagccaaaggaagaaacaaagttaggcagggcctcagcaaccctgttggtgtttccttggactattatgccttctattcttaactaaaaagaggctgcatcatataagaactaaaaatcacccattgattctgctcttgaaataaattaaatggaatcacatcaaattcatgatatcagttgcatagatatcaagaatcgtcattcacagattcattctcatctagatcagctctatgaactaggatgcatcactgaaataagatgctcttttctagagtaaatttcacaaacactatagatattttggcatatctatcaaaaaaccaca

SEQ ID NO: 8870 - DNA, 315 bp, Oryza sativa
  unsure (1)..(315): unsure at all n locations
tacagttcattgttctgatgaacacataaatcctttaacttgacccaatggaaagctacanaccttacgagaagcgaagcgaccaattggccgacaatgattaaattacaaaacatgcatgcaaatgaaacattccaccatactctgatgctcagccttttgtttctctctaatgggaaaccatccgctgggagtccttacacagtcatgggagtacacaaacactttgccacttggttggtagcacttgcaagttttctagttgcccttccactcatcttactagaactcgtagtccggatcagcctcctaatc

SEQ ID NO: 8871 - DNA, 345 bp, Oryza sativa
  unsure (1)..(345): unsure at all n locations
catcagatggcctgaattgttctaacgggagagactatgcaatgaaacctgtctatagttaactgcatacactgaacagcatcagaatatgagatctcacaactcacggaggaacagtttgtttttttgggtgtgcatatatcatacaagatttacctgagatgtttgcagagaatgtatatagagaacttaatgttgccgaccctttttttgggtgtgcatatcatagaaagtctgcctgaaatgtttcttatggggatgtatatagagaatacaaagggtgtatgtcgaaatgaaaatcttnacaattgcgtgcttactcccataatttatgtcctggagtag

SEQ ID NO: 8872 - DNA, 170 bp, Oryza sativa
gctataactggcctcacttgcgtttctactttacgctatcagtgccgctgttttcaaaaagtacagtttccttttaaactaaactcacaagacgtgtgaactgatttttgagagcactgtgtttttatacatgtacacttcacagttgaaagtgcaatttttgcggtatt

SEQ ID NO: 8873 - DNA, 454 bp, Oryza sativa
gacactatagcgaactcacagctggaagaagcacgaagttgacccagacttgttatgttgttatcatgtttcaatgaattatgtaccagaaatcattcttcctgatttccagtgtgactggtattcttgttgtagatactagcttgtagatgaaattgagccttgaaaatcttggccgttggtcccttctctttatgagatttctttaccatggaaattcgagttcgagctatctagtcagatgcccttacgctttctctgttttcttttcaacgttgttgctcttgtttttgcttttcgatttctcatttactgtcctgtccaccggagccatctcgaacattaatctcccttaataaagcctgcatatatgtgtcacttctcctaactcgggatagttgatacttcctccttctcgaatagaataaattggatgggacgtatcctagcatta

SEQ ID NO: 8874 - DNA, 349 bp, Oryza sativa
accctattattactttatcacgcatgaggaggataactagctgcaagacataagctcaaccaacgatccatcatatgatacgaaggcccgtgattagcgtgagatgcaagagatgatacacatgccggcccctacttcttggtcgtggcgccatgttcaagaaagcctgcaaccgcgtagtctgggcataaaaaattcagccatgtgtatagcttggtcagatgacatgcatctcgcttggaaattgctttgaggcacgacaaactgaacaagtggtgaacgggcagatagcatctgcatgcattacactttctacgataatagtatatccgccttgcgtgtaggaaaa

SEQ ID NO: 8875 - DNA, 309 bp, Oryza sativa
  unsure (1)..(309): unsure at all n locations
ctttctcttttgaagcgcgtacaaaagaaagatgtaccgcgaatattggcgctttgtatcctaatatatctcaaaagatataccatatgaattggcaagcttattctcggtctcctcatttatcttctatatatggtatatgttntgaggtgaagagctgctatttactctctctcctgctgctaccttggcttggttgaggtgcattggcatctcactagcctaccgagtatgtgctctctgattccctcttcaatctgttcatctcatgtctggctcttacagattcatcgcagaggttgtcgatct

SEQ ID NO: 8876 - DNA, 436 bp, Oryza sativa
  unsure (1)..(436): unsure at all n locations
ngaccataccgcatatgtgctgaactcctgcttggctttgttcttcatcaaagaaaattgtatttgtttagattggtttagaaatgtttaacaatgttgtgctagctagcaattcagaaatgttcagaaatatttgtttagattagttctgaaatgttcaaatatgttcggaaatatttgtacagattatttctgaaatgttcagaaatatttggtccgactagttcagattatttcttgaattcgtataagttcggtatgttgctatgtatgtttttcagatgcacatgtacagaactttacaaatgtagtggcctagactagagcagtgtattgatcatcttcttttagaggatttatgagaaatattgtaagggctaaagggcatgacaattggtagtgcccctgtgggggtactttcagtttcagtaatatt

SEQ ID NO: 8877 - DNA, 427 bp, Oryza sativa
caagagttttgagggcaccataccttttgtcttttatgatgaccctcatagcctagacatattatatcagtgtcaagcaattcattaactgatatcgattcaagtaaaggtacatacctgatcccatgtccaatcagactcaacatttgatgattcaagcagagctttgaacgcatttttagcttcctataagtcaaaagagaagtgtacctatatgagcttaaaacttgaaatgcacagtcaattcttaatatgtgcaagtttcccttaccaacttattagcataggtcacaggttcttcttcactagttttgtcttctactggagtaacattgatcttccctggaactgccatggtctttttggcctcctacagagaatataagcagcataaatgtacaggtatacacatataaacacatacata

SEQ ID NO: 8878 - DNA, 200 bp, Oryza sativa
  unsure (1)..(200): unsure at all n locations
acctcactctttgcgcatgccgtctctccgtgactcagcacattntgctgtgagcacatctggacagtctgatcacacctatatgtcttgtcagataatgagctgtctcttatgcgaagaaagagatcaggtttgttatcacactgcaataatgcgcttctgatacttaatacactcaatatactctttttgtctggttg

SEQ ID NO: 8879 - DNA, 415 bp, Oryza sativa
  unsure (1)..(415): unsure at all n locations
ttgaacacctgacgtgcaggtgtcttaacaagaatatgttttgaatcccatggccggcagatctccaaccaaggtatgctcctacagctcangcagctaatgcagaacatgtaccaaggctactacattctcaacgcctttcaagaacagcacatcaccggtaaacgaaggcgatcatcatcatccctcaaactgaagaagcttcatgctgccatggaggatttggaatctgccatcgatgactcgaagaaggagtttgttgtgttcttgctaagctgcccatgcttgcctcagcgaccatactacactcacctgttcagggagaagtgcatgtttggtcggcacgaagagaaagagctgatccgtgaatttctgcttcaaccttgtgattctcctttgcgtgttcttgcaatca

SEQ ID NO: 8880 - DNA, 235 bp, Oryza sativa
tttaaacttaccctgcggacctctttccactgcaccgttcgtgcagcgaagccgtggatcttaagaccggcgagtttctatttcggtcataagctacagtatacgcgtccgtcgctcgtaggtgggtgctctgaccagccacacactggtgatacatgactgaggaagactagagacaccttgttgttgttctctctgtgtgttgcgtgctggcggacactgatcatgacttctc

SEQ ID NO: 8881 - DNA, 412 bp, Oryza sativa
tactgcagagattggggaacagtgtgctaaaatctttttattcccacttgattgggttcctgctttcttgcccagaaaaatggaagggtgtactaatcaaaagtgagtttttttttaatgatttttgctcccgtgccttaacggagacatcacggcttttcgctgaacaaccggggaggtggatacatcaccaacctaataacaaagatgagagcataagggaaaaaagatgctacgtattgttctttgcttggtcgaagaacactatcagaagagtctggacatctatgaaaacgattgcttaacattcactcaataaaacattgtattaaaaataatatattcactcgagaacaacagactgtgggcttgttcttttttcaagttacctgcgtgcgtgcgtgtgtgtgtt

SEQ ID NO: 8882 - DNA, 433 bp, Oryza sativa
  unsure (1)..(433): unsure at all n locations
ttcacaccgtgaccaagtcgcaagcatctntgagggttgtttttcttaaaaaaccttgtcgaaaggcctttccgaccaatgtgcgcccgccggcgtgtggtctgcatatttcttcatggaagtcgagtagcaatgctttgccgtcctcggaagagacgcatttgcagagaactccattcggggctttcttgtagagatcattatcgatcatacaataagtttttgcctgatgggatagtttctctgcctctgtgccgtccgcaggtaatttgtttgcacccaagaagtcaatatgcagtgtgcgccagccttcggtcatctcgatgtctgccacgacgttcttgacctctgtagaccctgagctgttgtcggcattagatgtgatactttcgtcatgcgactccattaccgactctctacgttctttacagac

SEQ ID NO: 8883 - DNA, 395 bp, Oryza sativa
gagcccatatatggaaaggacacattatgccctcaataatggccctatcataagggcaaccatgttaaatcccctataatcataaaccctaaaagaacagagcctataataaggttataaatagccccctaaggccatgtaatggggggatccccaaaaaatttctaatcaaccaatacagtcgtctttatttccaacctgttgagagagccacgtcgttcgacgtgacgcagttatcgttcgacaacaaaaactaagcaaggaaatagaaagtggtactctatgatctgttctgtctctcaattgcctaaggtggtgacaagcgtgtattccacaaatgttagtcgtaagggtaagccttcgtgcatatttaattaacatgagagagagtactc

SEQ ID NO: 8884 - DNA, 177 bp, Oryza sativa
catcttcttaaacagaacatttctatgcgttaactaacctttcgagctctgactcaagcacctgctgcagtctaaagcgttactcacggtaacctaatacactttaatttatacaagatgctagaaatatactgccacattcaatactcctttttgcaagactagtagagactcttc

SEQ ID NO: 8885 - DNA, 335 bp, Oryza sativa
agagcgcaacgcgccaaggtcgtccaacacctagaagagtctaaataccgacaatgaccatgaacaggactacagttcccattcgcatgctaatggcgtacctccccagtctatgttctaaccgttgatcccgtttccgtcccacttcgtacgtcttcgcagttgccgatgctctccaacgccaaatccgtatacatttatgatgcagtgaaatggatcttgtcaatctctagagctatagttcgagtggtgatgaacaataccacgtcagctctggcgatcataagagctgttccaagcattaagcctgctccctaagttaccgctttgtttac

SEQ ID NO: 8886 - DNA, 176 bp, Oryza sativa
gactggtgacttgtgtgcgtgtgtctctaatttaattgttaagagtgtaaacacgaatttaaacgtattaatctcataaatacccccaaggggaatgataaatcttatattatggtgtgccctgcattttttattgcagtaataattactactaagggaagtgcttctgttaatcc

SEQ ID NO: 8887 - DNA, 387 bp, Oryza sativa
  unsure (1)..(387): unsure at all n locations
tagcacaatgcaatcgaaggtgatcaatagttctatattttaagcaacggtttggaccacctcttttcctgaacctgacattgttcatagctcgagcaattatgttagataccaaagccaaatcctcctcctcgaactgttcgagttgatcttcggacgtggcattaattaaagcaagaattgaagactttgatgtagaagcaccaacatncaaagaggtcgaagaagaaacanaagcactagacttagaatcaactttacgagcaagaatattcatctcatgtggtttaagtnttgtgtaaagcgaatccaaagtcaaagtagtcatatcaacagacacctgaatagatgtaattttatctccaaatagacatgtcagaccaatca

SEQ ID NO: 8888 - DNA, 362 bp, Oryza sativa
cctcgctttctctccccaagagttttgatggcaccccaccttttggcatctatgatgacgctcatagcctagacatattatattagtgtcaagccattcattaactgatctcgattcaagtaaaagtacatacctgatcgcatgttcaatcagactcaacatttgatgattcaagcagagctttgaacgcatttttagcttcctataagtcaaaagaaaagtgtacctatatgagcttaaaacttgaaatgcacagacaattcttaatatgtgcaagatgcccttaccaacttattagcataggtcacaggttcttcttcactagctatggttctactggagaacattgatctttcctgaac

SEQ ID NO: 8889 - DNA, 216 bp, Oryza sativa
ttatactatgacaaccctacgctatagttgttgccaagacaagatggtccagtcgaccatgtagagtaaaaggcagacaatatacactaatgtagccttaaaacttcatgaattgattattcacgggtaacagtatgtttgctctcttcatcaacggaccaaacatttaagactacgttacagatagcaaagcgacactcaaatggcttaaggctt

SEQ ID NO: 8890 - DNA, 336 bp, Oryza sativa
  unsure (1)..(336): unsure at all n locations
gaccggcggtatgtgacccacatatctcttcatgtatgtccaggaggagatgtctgccgtcctcggacgagacgcattttatgagtaccccgtttagcgccttcttgtatagatcgtagccgatcatacagtagatttttgctttatgggttattntctcggcttctgcgtcgtcctcgggcaactcttcgctgcctatgaatttaatgagtggggtgcgccagtcgtctgtggtctcgatatcggcaatgacgcgctctgcctctgtagcccccgagctgttgctgagggcgaccgggctatcttcgccgcttgcctctttcactgatgtccctg

SEQ ID NO: 8891 - DNA, 298 bp, Oryza sativa
  unsure (1)..(298): unsure at all n locations
gatagatcgcgatctactatcatacacacgatctacgaatctatatagatcctaatctacactcaacgacactatattaaaatgatagctgagatattgaatatgctcaagctatatataanatcaatcaatattcaaactatgtggtttcttataatattctattgatgacaaatatactatattgtatataaatgcttatgaataaataatataataaacttacaaaaaatcttagatccatctcatcaactcttgacagattatactaatctatatgcacctgccagactattct

SEQ ID NO: 8892 - DNA, 305 bp, Oryza sativa
tgggtctctttgaagcctccgcgagaggcgggcaaacagcagtgcaccacaaccggattgaccacagcggggagagggcagccggcagtgtctctccatgacgataggttccgtggattttttcaacaaaaaaaaaggagaacaaagaaaccttccgaatacgccggtaggttgaccgagatggaagaaacggagaaagactagagagggtttggcctgaaggcacgcgcagccccgcagctctgctctccaacaatatactccgccggccgcggatctcgtctggcgacgaggcgacgtggcgt

SEQ ID NO: 8893 - DNA, 445 bp, Oryza sativa
ttgaaactaagctctgataactgagaatttcggctaacccatcactatttttcattatattcttgctgaaaggatacctgatcccactgataacgagtaggcccaaacaattcaattggggtagttgctgacccataccacatagttccggcaactacgaaagctgcataaaaaacagcagcgatactactggaaagtacagtttcaatattgcccatacgtaatcctttgtatagacgttgaggtggacggacactaatatggaataggcccgctaatatgcccaatgtacccgcagcaatatgatgagaagctattccccccggaacaaaaggatcaaaaccttctgcaccccacgccggatttacagcttgtacttttccagttagtccataaggatcagacacccatatcccaggaccatacaaacccgttacatgaaatg

SEQ ID NO: 8894 - DNA, 121 bp, Oryza sativa
attagactgtgcaactgaaaggatctgtagtgagaggactgagttagaagtactacgctctgacaggttacactgaagcactatgattaatgaggtgtgataaatgctagccatcaatatc

SEQ ID NO: 8895 - DNA, 245 bp, Oryza sativa
caattgtgaaccagagatgccctctacagatagagttaaatcttatggagcgggctacaaagtaatatttgttgtgacgaatttatcaactttagaactggaatggttttaaatgagatgttactgaatgtcgctgacatgctaataaagtgctgactgaaccagattcaacagtgcgctgcctggtattaggcacgggccctaatggttgatctcacccccactacaatatctgtgtaactcta

SEQ ID NO: 8896 - DNA, 381 bp, Oryza sativa
gaaaccaactttgacaaaacagctccatctaggaagatctttaactccggtgtgggggaaaagagagcaagactgagtactacccactgtactcagcaagtcataccggaagaggaggtatgatgcatgatataaccaacggaagctagaggttcttttgcataacactagcattttaaagcatagttgaaagcagtaagacagatgctgtaattaatcaatattaaccaaacactgttcaacgctacaccacgttgcacatgtccagccaaccacctgaactacaccatgtctataaactaaactaaggatgagactaatcactgtgaatctggttgatcgcccataaccgcgggcacggctattctaataagtttactc

SEQ ID NO: 8897 - DNA, 177 bp, Oryza sativa
tctgtgtctaagcaaaaaggacaatgatcagactgtctgttgaacgtgctgtattcatctcgttaaatagtggattaaacattactgctataaaataaaatgatatgtattatggctgttaataagtttactactaatttgttgtaaattaaacatgaactgtaagacggttctaat

SEQ ID NO: 8898 - DNA, 306 bp, Oryza sativa
accttgaatctaagctatccgtccaaacccggtcgggcttccggttttttttttacaccgaaggtccctcaacttgtcagcgagataaaaaaacgtcctctaaccacaaaaccagatatgtggggtcccttaactatacaaaaccgatcacccaaggtcccaaagcagtaatgatgccggatttgtcctatgtggcggctagagtcagcattggacccacgtgggttccacatgtcaagatgccacgtaagacaatctctttcccctcttctctacaattctctctcttactatgctcctcgactg

SEQ ID NO: 8899 - DNA, 378 bp, Oryza sativa
aaatgccaatgataccttctttaacagaaaaaaatatgctgttgtacagaaaaattgccggtgataccttctttaagcagaaaatgataatgatatcttgtttaccagccgttctaacttttagagcatgtaaacctgctatcagttttgggaagttctcgcctacactgaactttataacatcactagcgtgagggcaaaccgtgtatcattgacgctgctcccttcaatcaatctcaggctcagcatgccgcgatcgtgacgaccccaatgcgatttacattagccacagttcattattcagtgcagtacttgagaaggcacatcatgagaaatgcaatttgttctatgcaactccatcccaagaagtaacaaaac

SEQ ID NO: 8900 - DNA, 326 bp, Oryza sativa
  unsure (1)..(326): unsure at all n locations
tgtgcanggtancatatctatacacactgttcttataagaaatctctcaatattcatattgtataacaagacctgcttttagtggcaaataatgactgggatagatcacaatacacatntgcattttgagacaataatatgatgtctggcatagtgacangcagtgagtatcaaactggtngcatgtgctangcttacatattggacatgactgtttacaaagaaaaaccactctttatatggtcctattgtctaacacattagtgctgatacgactgcgataacatcaaatacagtatttaatgcacttgcttattacaatatat

SEQ ID NO: 8901 - DNA, 408 bp, Oryza sativa
  unsure (1)..(408): unsure at all n locations
gaaactacgctttgtacccgaagctcatatctacgctctttctcttatnagtgcaccatagatcgcgcttgtgctagtttaccattattttcttactagcgaattcaggattaattcccatggcgagtttgaagtatgatctaccgctcttagaccgagacacaagattctcactttggcaagtgaagatgcgagccgctcttacacagcaagatctcgatgatgcgctctctggatttgacaagaggagacaggattgatccaacgatgagaagaaaagggatcgtaaagctatgtcatatattcatctttatctatctaacaatattttacaggaggtgcttaaggaggagacagccgctgggctatggttgaagctgtgacagacatgcatgactaaagatctga

SEQ ID NO: 8902 - DNA, 433 bp, Oryza sativa
tggagtcctgaaagcatggacagtactctctcttttagttggtatagaatatggccaagtgctagagtggttttactttgtgctgtacatgtggtgtacttctatttggccttagaaatttttacatgggccctttcagcaaaagcgatgtggcatcattgatttttagtactagaatacatataccttcctggttgataagaggcagtcacaatatgttactgtagggatcaggttgtttttccttcaagaacctgttcagaattcagataccttgaattttccttgtgaagttgttgcatttttcactagcagcacatgatgtggaattctgtttccatctacatcaattctaggggagataacatccatctttctctctctggttgctgcgaacagattcactggaatttattgttgtggatctgggtaa

SEQ ID NO: 8903 - DNA, 372 bp, Oryza sativa
tcattcattattcctgttatatgatatgattactttttaatgcttctctcagccatctaattagcctggccttccaaaatcaaatgcattagtcgatggttaaatatctttgtagcagttaaaagaagtgctagtctgttatgaagcatgttattacactgtattattagaatgggcttcaaacttacacttgcatttgcagagcatctcaagtcaattttgtcaatactcaatatacattggtcatgtaatgtttcatataataagtagcttatgagttcattttcttttgtccatgtacagctgaattggtatgaccattgacatattatggccagctctgtttaacctggtgggtttatatttagcaat

SEQ ID NO: 8904 - DNA, 389 bp, Oryza sativa
  unsure (1)..(389): unsure at all n locations
tgtcctaactcatatatgctagtaccatttcacttcttttcacaggtgctcaatattcaaaacgcttgacatatccattggcgatacctggagcattaagtctgtggatttgcgaaaataatcctcaagcaattcagtaacaatgcaacattcattacacttacctggacctggagctgaagctgcttcaggtactcgatggcatcgtcaagcatggaagctttgtccgtctgcatcggtgaatgaaaccatcagcacaagataaacgccaaattaactcgagagattagcttccagcaacacaagtaatagtgtgtataaatcgtngaacaaaaaatcgagtaagaaacaagagagacaattgtttttactaccttgctggagttggg

SEQ ID NO: 8905 - DNA, 255 bp, Oryza sativa
agacggctactgctggcaacgtgcgccaccgctacatttatgacgcgacgttctcctgagagcagccgcttctgacttcacaacagtgaggggctgcccgccacatacgactgcggagctacgctgcttactcagtctagatggactcgagaaaagcgcgtctactacgaatcgagcagtgtcgatacatccgtggacttatacgactgaaacgtaccgggaccggcgaatgaccgctcttcagccagtatattt

SEQ ID NO: 8906 - DNA, 427 bp, Oryza sativa
accttgaaactaagcttgcagaaaggctttgtttttcaccaccattttttaactgaatgctttcgtggggagaatgcacactatactgggtacattggatacttgagtgcaaatggtggagaacttccaagcattcatgtatcatggtcgtcgagatgcttctcatccttcatcttaagagcgttcctcttctgctgccaaaagtgaagaccttttttggtgcttgatgccaaaagggggagaaaagtgagatttatgttgggttgggactagtagtaatgaggttagtcacctcatacttaatacggttacgaggactcggctatattttgtatgcgattggctattactctatcttgtgagtatttgccgctctgtaaaacacttatggctttgacccttcggggcttgtactagcctatgttta

SEQ ID NO: 8907 - DNA, 263 bp, Oryza sativa
  unsure (1)..(263): unsure at all n locations
tgtctcgtgcacttgtatgtatcgctagcttataacaagtattacactaagcactatacttttagaaagggggcgagggagctgnggcggccaactgctgaaaatggcaatcttttctacaatgtgtgctctataaaggctattatcactcgcacataaaaattctgagagtacttacttaattaaactagcttaagctgactcaagctagctttctcctctgagaacacttcattgctgaaactactgtctaacaatttcta

SEQ ID NO: 8908 - DNA, 374 bp, Oryza sativa
atgttaatgagcctctaaacataatttacaaggaatgacaatatataaactttaaatacctattctggaaatccacaaatctagggcaaagtatcgcataaataaacataggatagaggaggttcacacatctgaaatatataggccattatcaacatccgagaattttctgtatatgtgctctagatgactaagcggaaccatttgaatagaggtgaaccagaatccaatccaaggtcgaattattcttctgtaaaaagtaaagaagaatattactataatgcagccataaacataaactacgcaattgtatataatgtatagaaattaacaatcaagtttttgacctcacaggaataaagtaaaataatatc

SEQ ID NO: 8909 - DNA, 432 bp, Oryza sativa
  unsure (1)..(432): unsure at all n locations
aaaaggatcccacctatcagtgacttcatttcacggtntcaccgttagcatcagagttcttactgaaaaaaaaaaactttacctcggaagcttgacgatcatcaaataaggacccacttatcagtgacccatcgacgtggttttgccgtgggcactgttcttatcatgtgatctatagaagtctagaacctaccacctccactgaatatataaagaattacacgtatctttgctccagatgagaaagggattacgattgattggcttcctttttagcttttctacggcgcatacgatgctgttntgcaataacaaaggtcaaagggagggagaaggaaggccaatgaaaaaaaaaagaaggggtggcaaccactccaaacacctgataggatgtacaaaaagaagagcaatttacggatgagtactactact

SEQ ID NO: 8910 - DNA, 184 bp, Oryza sativa
agtcatctacattctccaatctctatgagttgtaggcttataccgagtgctcgccgtacaggctgtggctacaaaagactgccgagtctgcgctgcagcgatcggctgtactgatgtcttctgtggcttttatacactcatttaggtatagtttatacctacacagcatctctcttgaaccatg

SEQ ID NO: 8911 - DNA, 428 bp, Oryza sativa
  unsure (1)..(428): unsure at all n locations
ntactctatagtacttgaaacaatcatcaatcatcttctgccgatagaaccccgctctcctaagcaatcaattcatcttatgagccgattgatgagttccacgaatccctttaagtactcccatagcaactttagaaaaagtacttcgtctatatttcggcgatataactctccattaagcaaagtgtatttgaatgcttgccgccgaatttttgatcaaccctaaaactagaatcttcaaatattccatcaaagggattctctagttttcttctgactcttgggcacaaatgtctgaatttacaattaatttggcctttgaaccaattgtaacatgccccccagctctctgcccgggatcggtcagaccggccacgcaatgccggtcagaccgccctgtctacccggtcagaccaccggtcatccgc

SEQ ID NO: 8912 - DNA, 369 bp, Oryza sativa
  unsure (1)..(369): unsure at all n locations
tccacatgtgggtatcaagcgatctattttaatttaacttaactaaatagcattggaaggaatccaaacttaaacttatgaggaaacatattctgaatttagacaaaattgttaatgcacacggagtagaaactctgtctcagacaatgttgtgcttacggcggaactcttgaactacctcagaaaccaccacaagggtcaacccttgacgcattgtgaagtgcattccacatgggacattattcgagatgtggtctttgcnattacgctgttaccagaaaaggtaatggattttcctactgtttttggcataactgtagccggtgcaagatatttttattgaagctgcgtgatgtgaaattcttattg

SEQ ID NO: 8913 - DNA, 285 bp, Oryza sativa
tctgtctttcttatgaaatcgacttggaagccacacctttgaagcgtttgtccgatcaaggactttgtgacagaaagcattgtttggcctactaccggacctttttcagtactacttctatacttctgcacccacctgtttccatttcagcaaggctggtcagcgagattattgcgtactttgtcagatcggcctgctgagaggattttcaaacctttgtgccgcaagactagtacatgtcgtgtgccgtaacaagctctttctcagtcaagggcgatgctggct

SEQ ID NO: 8914 - DNA, 367 bp, Oryza sativa
cctgacgtctccgccggtgctaatgggttactacgttttcggctccggttgcttccgtcattgccgacttgttatttcgccttcacggttgaccaactacgcaaacgctgatgagcgtcttcgacattatcatcggctgctacaccgctattgactggatcaccgatatcgtcatcttcatcaacaccctgtcaagcctgttcaacatagccaactctactgctatcgatgggcaacttcataatcataaccggctatttctgttgccgccaatggtcattatcgccaattgcgtttgccgtcgctgattgatttcttcttttccatgatagatggatttcgccatagccattgatgagtatctatg

SEQ ID NO: 8915 - DNA, 413 bp, Oryza sativa
  unsure (1)..(413): unsure at all n locations
ggggggtttaattgatgggcgttatcgaacatatgtcttcgtcaatatttcccaaataaaggagaactacttatgcttgcaatgcacatttatgttaaaataagttctatttcactagcactagaattctaacctcttgcagagaataaatataaaatggaggaaaatcggtagcaaaacagacaatcaaataatcggacgctatcaagaatcagacttgcggacaagtgggctgagaacatcaaattgacacaaccaaaacagtccataattcacaagtctttggaaaggagcaaaagaggaggccacctgccgaaattgggctaagtcggcccagcacatgttttggctgaacccgtcgtggctccattggatgcanggttttgatggacggctgagattgctccctatga

SEQ ID NO: 8916 - DNA, 273 bp, Oryza sativa
tctatcttctatgggtaacattagataactttacggactcaccttaatgggaagttctattattggggctgggaactcgagaaccctgggtgagaattggagctacgcgtagccatgctcaactacatctgcattatattgttctgcatatggctgagttctgattaaacggttgggaacaaatctcccgtgctccgaaaacggagcggtttattagcgtgtggattagtgaggattaactattttatacaaaatgaatcgatatgaattgtt

SEQ ID NO: 8917 - DNA, 268 bp, Oryza sativa
cttggctgtgcctgttcccacttaaatctctgcatacgcattttttttttactttcgggcgctgttcctcgcatactccaccgattgctgtatgatcaagatgaacggcaaggtacgtccactacttccaaaaataacctggaatgttgcacattaacttgctaaatttagagcatagctataaccagaacttcatttctgcggggaggtcaacgactgtgaaaccgatgatatgggccttgttattgaacatatcctcgtcatacaa

SEQ ID NO: 8918 - DNA, 387 bp, Oryza sativa
  unsure (1)..(387): unsure at all n locations
tactcaacgcttacttattaagaaacacatacagaagttagattagttttaacagagggtggatctgaggggcgaaatggtagtgacccaaaagctagattctgtttaaaacctgacgtctgggagtttcataagaaaacaataaaaaaaaactccaacgtgttaaacagttggaaacttggttgttctatgcaacttggcttccctagtcaatgaagtactccctccgttctaaaaaaagacaaaccatgggttcccgtaccaatgtttagctgttcgtcttatatgaatttttntataattagtatttccattgttgatagatgataaaacatgattaatacnttatgcatgacttatctctttaaattttttcatatttttttc

SEQ ID NO: 8919 - DNA, 347 bp, Oryza sativa
  unsure (1)..(347): unsure at all n locations
tggcactcccnctagaaaagttcagccatggggctatgtttgagctcgggatctggactgatcgtggaagaaaacaatgaccacagtcgagcatacaggttcgagccgcattgatgtgtaataccctactcctttgatgtgtactatggatcgatgagatgttttacaatgaggaatacagagaaaactaagtccaaaggcaatgaaccgtgcgcacttaacttctaggtggttgagaactataaaactcaaacccctctcacggtggtatggatcctcctattatacatgaagggtagtccacaatacaattgcatgcatggagttggggtgggaccactcttact

SEQ ID NO: 8920 - DNA, 129 bp, Oryza sativa
taacggtaccgcaaagggggaaaattactgtcgtctgcggaagtgtttaccgaggcgtagaagagctctgttcctctattttactccaagaagaagaaaaacattctcctccctcccctaaggaacctc

SEQ ID NO: 8921 - DNA, 454 bp, Oryza sativa
  unsure (1)..(454): unsure at all n locations
tctcanagctggttntatcagagaggtactccatccagagtgttatctaacccagtcatggtgcggaacgtcaacgggaaatggagaatgtgtgtctattttaccgacctcaacaaggcgtgtcccaagaatcacttccctcttcctcgaatagaccaactggcggactgaacagccggctgtgagttgctgagctttctcgacgcttactccggctaccaccaaatcagcatggcgaaagaggacgaggagaagacggcactcattacgccgttcggggtattctgctacgttaagatgccgttcggactaataaccgcaggaaacactttccagtgcacggtccagggcgcacttatcgaccaactcggatacaatgtcgaggccaacgtcgatgacattgttgtcaagaccacgacaagtgactcattgattgacgaatctgcnngaacgt

SEQ ID NO: 8922 - DNA, 132 bp, Oryza sativa
cttcagttaacgtcacgctcccgctggcggaggtctacattgtatgttgtatgtgtggatggtgtgtgaactcgtgtggtacaccggtgcgtgaactgtgtcgtgcatctgacaatcaaatgtcatgcatct

SEQ ID NO: 8923 - DNA, 363 bp, Oryza sativa
  unsure (1)..(363): unsure at all n locations
atgcatgattagactactggtgttaatatctaatagatcngnngcatcaacaaacaactgcttcttatgcactgccaagttagatattatttcatccaaagcgttcccaaggcctaatttacctggcaaaatgcaacatgatacttgcaggtaacttatgagatgatccagacattcttggcnattgatggacttggattgtcagatcaagtattaggtactgttcctactgatgggatccagtccaagacatcagaggcaccaaagaccacctccaatggaggtgaagttggcgcacatgtttgtgatgcaagccctatgacaaagagaggccaaactgatgggtcattgatttgtggtgat

SEQ ID NO: 8924 - DNA, 304 bp, Oryza sativa
cctgtctatacaccatattatacatgcctgggctgacacaccatgctcggcttttattatctctgtcttgcatcgtgcaaacatggatcgcatgcgacatttctgtgatctaagcctgctgcggagataatacaacacatgagtccactctcatacatgcacttgcaatgtgatatctacaatcatggcacataacatcctagtattatctatgaatttgcacgctctttgtgggcgttagcaagtgagcgactctggcgaatgatgtgttgacacatgccacaaattttgtggcacctaatct

SEQ ID NO: 8925 - DNA, 424 bp, Oryza sativa
gcgacttagtggacttcatctatcgatgatcattaacctatttacacgaaaagtagagacatgatgatggaaaatgcacaccataactcttccacttgtgtataaagactaaagagcatattgtcgatgaaattaaagtataaagctaaggtaactgtgaactgagcactttatgttgtgctaacctcaaaggagtgaactttgaaggtcaagactggtcctcctccattggaccgcatagcttcaatctcaacgccagaatcttcaatatacataaattccttcctgagcccctcttcaatacagtctagagcatatgcattcaccccatcactaacaaactcctgtgacgattgaaagcaccatattgaagactagttatgttcataagacaagagaagaatttcagcgagaaacagtacct

SEQ ID NO: 8926 - DNA, 468 bp, Oryza sativa
  unsure (1)..(468): unsure at all n locations
tactaagctngttatggcacataataacagagctagtgtgattaaatcacctatatgagattaatcaacgacatatcccatataatagcatatattatgagatgtgagcaacccttagttaaccaagcagtaaatagaaactattcaaataaatgattcaatatattaagatattgcgcacacgtatattgtacatcccattatagatatatggtatcgtattaatntacttgttgcatatattaatttagagggagtataagacaaacatgaatattagataaatgctagctatacatcttgtcctcgtataattacagatcaactgtaaaattggattattcattgtaaaattatgtgatgggataatccgtaaccataatatgattaacctagacaattctaacatacaaagcatgggtaattggtatacctcttataattattttgagaagtgaaatatgtaca

SEQ ID NO: 8927 - DNA, 210 bp, Oryza sativa
tagtgtcaaggcctgcgttcagaatctgtttatgagattcaaggtcgcgtcttgtaacctatatgtgagcagatttgacaacacaatatgctgtttgctatttgcggagccgtcgttctgcacaacatcgttgaaaaaccatctctgactcaaccgcgctacaagcccacggcgtcactttctgtctttaaactactaccaaccctgacg

SEQ ID NO: 8928 - DNA, 424 bp, Oryza sativa
  unsure (1)..(424): unsure at all n locations
tccatcttgcttggtcagtatttaatggccacgccatgggatctatatgttntatgatatgactaggcgaattaagaggcttgttagtcacaaatatccattgctggaacacaaagttttggtttacaagtaaagtgtacgaatctacaatgccgtgtttggtgcaactcgagttgtccatcgatttcacagcgatttcttgtttatggagaaaaggatggaatataaatggttggggccgtgtttggttggtctcaggtaaatatgcagatatccagctacactcacgcactctaacaaataaaaaataaataaataaaaatcgttgtagaatcaaaactggtacaaaatgagtggctatgtgacgtgtatattaatttcagccgagagtctgagcacctgtttgtaagcaccacgttaatta

SEQ ID NO: 8929 - DNA, 84 bp, Oryza sativa
gaagtatgaaatagaagcgcgaatggcacccttttctgacagagatcgcggcgtattctggtcatatgacctcataatatgtct

SEQ ID NO: 8930 - DNA, 411 bp, Oryza sativa
  unsure (1)..(411): unsure at all n locations
tctntgtgctcctcgaaatgcacggatcangctgtactggcagttacatgaagcaatcaacaacaaggtgagtactaatatatgagcaattccaagctgttcttcctgtcagaaacaaaatgnnnnnnagatgctcatttctttgcatctttgttccannccgagatcatgcgtgactcataggccgagcaatcactaaatacagcttattttttnaanaagcactgcacattcgatgggcattgcaactcaagtacaatggagcagacgattcccagttcttctgttgttgcgaaagataacgaagtggtcagtgcgattgctcggtctgtaccaagggtccatgaagaatactacnggccaagtggccatgaacctaatcaccattaagcacagctagctagctacata

SEQ ID NO: 8931 - DNA, 395 bp, Oryza sativa
  unsure (1)..(395): unsure at all n locations
tagaagctganaaaggcctcactgacggggacttgatctggacgctcgacgatagatgggatcacatgttcataatcctcttcgagactggcgatgatgtagctgatgagttcgtcgttgtcgacgaacttgccggagaccacgagctcgtctgccagcgcccgcatcttgccgacgtagttcgccaccgtcatgtctcctttcttcanggtagtgagggagaggcgtgtgttgattcactgcgcccttggtatcgaggagaacatcccctcaatcatgctccatgctgtcgctgccgtggtgcacgcagccaattggatgagcatgtctcttgtcatggaggataggaggtaggagagggacttctgatcaacagcaattcattcctcataatc

SEQ ID NO: 8932 - DNA, 345 bp, Oryza sativa
cctgaaccatgaatcaagggtgcagaatcattctgaatgttggcctaatgacatctaagcatacacagtgtaacaaaatactgcctccggttcatattataactcgttttgactttttttttctagtcaaacttctttaagtttaccaagtttatagaaaaatatagtagtattttcaacataaaacaaacatactatcagaatatattaaatattagttttaatgaaacaaatttggtattgtagatgttgcctaaattttctataaacatggtcaagcttaaaaattttttactagtaaacaagttaaagcgacttataatatgaaacggagggagtatgtat

SEQ ID NO: 8933 - DNA, 389 bp, Oryza sativa
  unsure (1)..(389): unsure at all n locations
tactcagcttacaaagcgagggtgagtccgcgctgaagaggcgcgaagatgacatcctcgcaaaggtgctcggaaccaaagaacattctggccggactatgggaattggcagcgatgtgcgttggaagcatatactcccgcagtacagctcccaatacaggaaacagaaagtctccaaggaagagagggacgctcgtttgaaagccgaacttaaggttgaggtcattgaagaactagaagctagcatgaacgctatggtggaagaaagggttaacaaggtcctcgccgacatgaatataccccgaggcacaacacctgctgtgcatncaactcctcgtgcacaacacgacgcgagttcgtcacagcatatgaagagttgtgcattcaca

SEQ ID NO: 8934 - DNA, 243 bp, Oryza sativa
ttctccgcttgggcctttaaaaagttctctgaaaagtatgctcaacccaaatagacagtgggatgcagaattcttaaaattaagtatacacgttccggagttttttcgagtgtcatcactggctatgggtaagctgtctgaaagtttctatacggcgttttataatgagtttgtctccaactggctctcggggaatacgagcgaaataataaacttctgttgggcacgccctaacttctgttt

SEQ ID NO: 8935 - DNA, 267 bp, Oryza sativa
tgtgtatttgatgcagctgacgcttgtatatgaatatatcaatataagatggcttatatatgttggtgggacccgcttctggacggatatacctacgtcggaaagcattcccgccgaagagtcctatgagcgactactgaactagtaccatacgtctgataccgcaccatctgcgcacatcatcactaatctgagatcgcaatacatgcagaacccttcttaagtgacgcttcatgcgtcccaatctctttctacactggtggcaca

SEQ ID NO: 8936 - DNA, 372 bp, Oryza sativa
  unsure (1)..(372): unsure at all n locations
gcacggtatccattntacaagtgtcactaaactatccatgaaattnttttatctactgctagaaaaactaaaatactaatttctcaactgtatacttactatataaggtgtcttcctattattgtatgctgattcctgcattgctcgtacgaagtgattcttcatgtttcacttagtgctgcangaagcagatcctttttgctgtaccctgtactcgtcacagataatcttgntgtgcatgcatcataattataggccgtatccttattgctcaatttggatttgaggatggtattgttatgtgaaatatcatcttatttacacgaatcgcttggccagataacttattaaactgtatattttacattttgc

SEQ ID NO: 8937 - DNA, 335 bp, Oryza sativa
  unsure (1)..(335): unsure at all n locations
atgtgctggtaaagtggttccccatcacacattgctgatgaaaggggagcgtttgcttagctgtattntgtaagctntctttatgtgcattggatgtaggccacacaaagctgaaaantttgtcctagttttgttctgactcgcaagatgtctgattttacagttggaacaaccggtgtgatgtaatttttgctagaattgtagattaaaccgattggaccttgcattgtctcaggttggggatgattagcaaggcgaggaggcacttaacgcaggctgggcatctccatcaatctgatccttcngagtgggagaagctgcangaggtggagatg

SEQ ID NO: 8938 - DNA, 504 bp, Oryza sativa
  unsure (1)..(504): unsure at all n locations
nggctctaataaagaccacaagaaaggctgatagctccncgccacttatcaagggccagaagcgtgaacgccggcaggggaaggtcgggaagttggcaccggagccaaaaaggggcaaggctgtgacgtcgatgccggtgagcaaagcggtgaaagtcgtgagggcgccggcccaatttgagctaggcatgctattggtggaggacaatgtgttagccgtgatgggtattgcttgccgagagctacataagcaatacatgaagctaagcaatgccaagcaaaaaatgagggtcatccatagttggacatcacgaccaccaaccgttcctatcatcgcctgcctatataactataggctttgatgacctcttcgacctttttaggatccggaagttggacactggtcttctaaaatgctactccttgtaagtgcataccttctatacttgtgatatgaatggactatatctnctaatttaaattagtctaatatgtaaatgttta

SEQ ID NO: 8939 - DNA, 102 bp, Oryza sativa
tctgatatgtagctctcctcggaatgtggattgagcatgcacaaagtatctcatctgctataggtctagacgcagagtctagactgcatgctattcataaga

SEQ ID NO: 8940 - DNA, 437 bp, Oryza sativa
  unsure (1)..(437): unsure at all n locations
tctactngttctggatgatgcctgngatgatactagtctggatgagtggaaatcaatggcagattctctaaaagattgcaaacctgtgagcaggatcctattgacgactcaaatgcaatcagtagtggacattgcagaagatggcatatgagttaaagctgactgtgtgaaattgggtgaacttgatgaagttgacaatctcaagctctttgaaacttgtttgctntctgatgggcgttctgaagattatgctgatttcgcattgattggtgaacagatagcaaaacggattggtggatgccctctactaacggctatggttgcttcacagttgagttgcaatatgaatccncaacactggaacaccgtacttcaagaaggctggcagtatgtagcgggaattgactttctttntactagttacaaccgtctaccta

SEQ ID NO: 8941 - DNA, 219 bp, Oryza sativa
ccagaccactctcgagtctagactcgagtcgaggcggtcatcaccatcgtaggtatcatcgtttctgctcgtacgcagcacagacgaggtagtgctggacagtcaatcaaggtgtaagactgttagtacaaacaggaacctaacatcatgtttactcggtctagaacagcccagagaacaaacccggacaactgacccatccacattcaggctacaagg

SEQ ID NO: 8942 - DNA, 218 bp, Oryza sativa
ctcagctgccaccgctctggttcgctttatcttttacagatgatatgcatggctccggggctgactctattgtagtagctgcctaagcgcttgtggcgtacttgcgcaagtgctctaactcttctgaccttacaccttccatcagttcgagagatgcctctcgcccctctttgctcccggagaacataacccttggtgagatagcccctagctacact

SEQ ID NO: 8943 - DNA, 85 bp, Oryza sativa
actctcgagtctcagactcgcagtcgaggcgagtcagtcagccagtctgtcacgtagtccacgcgtcctctggctcggtagcgca

SEQ ID NO: 8944 - DNA, 352 bp, Oryza sativa
tgccaaccgctactgggttcgcctatttccttatgacgagatgaccaggcattagctccgtgggtcggactcttttgttgtaagctgccgaagtgcttgtggcgtacttgtgcaagtgctctagcgcttcgacccttacaccttccaagagttcgagtgatacctcgcgcccctctatgcccccggagaacataaccctcggtgagatagcccctagctccgctggggtcattgcctcatcgccataaagaagcatatatgggctaaacttggctggtcttgtgggggtcgtccgaagggcccaaagaaccgataacaattcttctggccatttgcctttcgcacgcccctc

SEQ ID NO: 8945 - DNA, 145 bp, Oryza sativa
gttttgattaaattgtcaatagaccaggaagaacactaagtcatagggaaaggttcttattctgtcgccgtgatctacggccttattttatgacccatactatgtttcacactctctcagcacaatagatgctgttgctcatcaa

SEQ ID NO: 8946 - DNA, 382 bp, Oryza sativa
  unsure (1)..(382): unsure at all n locations
tgtcnggccggccaacgagagaggagcggcggtgctctccctgcctgcgggtgggaaggacaggaacggctggtgggatggaaagacactccacctccggaggcactgcaccagcgcccttgttcgccacgagctggagcggctcggcctcaccggccgcgcggtcaccagcaccggcgtcgtcgccgacatcggctacggccttccccccgtcgtcgcgctccgcgctgacatggacgccctccccgttcaggtcccacctcttcccctatctctgatttcggtctgggtgattgatgaatggttgtattagctggtaggatgcggagcagcttctgatcgctcatgcttngntntagtttcgtagttcactctaaatcgc

SEQ ID NO: 8947 - DNA, 297 bp, Oryza sativa
  unsure (1)..(297): unsure at all n locations
acgcattatatcttctctttatataaaaggaaaaagtacgaagtaccccccttgaactatcgcggtcgaccgaactacacccttaaactattaaaccagacattantcaccctcgactatgcgaaccagacaaataaccctccgactcaatccgcgggggttttgatcctacgtggcagtacagttaacattttttttataaaaaatcggtgggccccacctatcagtctcaccctcgctatctctctctatactctctcttcccaccaatcccctcacctacatcactctccggcg

SEQ ID NO: 8948 - DNA, 452 bp, Oryza sativa
  unsure (1)..(452): unsure at all n locations
cttatcagcaactgagatatcaactagttatattctttctaacacaattgcagattatataggcgtatattatanatataataactacactcagtttctttctttaaaaaaaaaaaaacaaggccccatttcaaaatttatttaactccagactacagtataaaatattaaaatgtttatgaatcgaagagaaattcttttacatggtattgcaattatattgggtataaaaatataaacagaaattccttttgccaatgcgaagtctctaaagatgtactaacttctgaggtctaaaaaactatctagatataaactctctaaaaatatcatattcccagcaatcataaaatacataatcacctgattagaatttttttaggctcacttttaaagcatctttctctatatatctaacttgtaaacacattttgttcttgcccctctgtcat

SEQ ID NO: 8949 - DNA, 181 bp, Oryza sativa
tgactgttgcgaagagaattcttccatatgaggaagtgacctggacgaaggagctttcagtggggtgctttgaagtgcatgtacgccactagcttccacatgccagccatgaaattctgacacactgtgagcggagctctctacgtcttgtgagagcgagtcactcaagaacggagtgcat

SEQ ID NO: 8950 - DNA, 492 bp, Oryza sativa
  unsure (1)..(492): unsure at all n locations
tcaattgatgagtcatctctcatattgtgtattaatctatatttgcacgacatgtaaacaatgataaactttcggagttattcggcttggagtaaaaacaaaggatntggatcttgaaggattaatctctatgattctttatgttagtaagagcctaagcctggactaaagattccctcttacatcttataattaagaatcataacattangttagtatatatactacatgacttactatgaataaatatgcaaagtgctatataatttattagaacacatataaccncgaataataaattnttataatatttatcanaagttgaacaagctcatgcgagtcgcttggtggaaactgtgctggctganaacaacatgaagaattagaggctgttgtaacttggaatataattacgagtgccagaatctatacttatgttactatnttctatcctaagttacctattagcacattaactgtttatacatgata

SEQ ID NO: 8951 - DNA, 361 bp, Oryza sativa
  unsure (1)..(361): unsure at all n locations
caagagatgctacaatggtgtatatcttaaagatacagatacatggtatgggtactctctctctcaaataaataaggttggcacggtggcatacccttacccctgattcccatgagacactgtctatcctttgcttgagcggttgagagacaaaacagcaattagagcgctagttacccagtctttattcaacttttattccggaagtttcaaatgtttgtttgaaaagaaagccaagttctcaaatgattctctagatcactcaaattgtatgaatatggattcctcaccagaattgcctctttgattcctactctaaaggtngatatgtggagcttggtanggatcaaaacatgcatac

SEQ ID NO: 8952 - DNA, 255 bp, Oryza sativa
tctgatgcgtcgctgggctattgttgacaacaagatgtcataatactggctctctctgatactagtcagatacgatacttgcttagtaagacgtgcgatatatcaggccagacatacgcattacttgatagctgtagctgatgcaaatactaacctgcacaactattcaatatgggacgaacatcaaactaccatgatatgtcagctcaaagggaaagtatttcccgaacacgtgtcctgcaaaaaaaatatctg

SEQ ID NO: 8953 - DNA, 499 bp, Oryza sativa
  unsure (1)..(499): unsure at all n locations
tacttctanacacataatgtaagcaacggagaagatcaactttatcatttctcatctgatagttctccatcttttgaaagaatatntgtaaaaaaaaaggtacaaatatcacaaggaactggagtgacgatctagttntaagggatcgtggataaaataagggaaatttatggggaaacaaaacaaaaggttacatgtaaaataagaaaacggttttgctaaaaaaatacgacatcatatactatttgatttcagccacttttttcaatgtaattgctacctctctgaatctcatatgtctcctcttttaagttgattnttatatactacttttaaatagcgtgtgtactgcgaanaanataccttataagtttcaaagtaaatacttccgccattctaaattgatcatcatatatatttatacaccaagaccaataattatttatatcgcatcaatcaagacaacatgcacacattctttcacaatgtatacatcaat

SEQ ID NO: 8954 - DNA, 219 bp, Oryza sativa
  unsure (1)..(219): unsure at all n locations
ctatctgatggatgtaatgagaccaacattcatacaagacattcaaccttactatctagctaaacactagaagaaaaatgtctatcgattatcagtcaacaatgtgaatgtcagcggatatatctatgactnatcctgctatgctgtaggtgtgaaaattactgtaatctgggtatctgccacacacgcttatgtgccacaataactgggttgaaatgc

SEQ ID NO: 8955 - DNA, 361 bp, Oryza sativa
  unsure (1)..(361): unsure at all n locations
tctntgctcattnnggtcatttgatcgcgatccactcaagcacttcgggctccactataataatgcaggctagtgtagcagcccagcacacacacactagtgcaagcagctcgagcttgagctccacctcgccatcgccggcgacttctcctgtcctgaccggccggagctccgatcttggcggtgaccaagagacctgacgagacgatgtccgccgccgccgccgccgccgcattctcccncgctccccggtacgtacctggttctggtcgccgtaatccgatctcctctttttttttttcgcacggtcttcaccggcggcgctgtatgttagtttactcgatctcgaatccccgatgcg

SEQ ID NO: 8956 - DNA, 282 bp, Oryza sativa
  unsure (1)..(282): unsure at all n locations
cactggtcactttatgaaatctgggctgtgaatatgagattatgtcacgttatgtanataagaaagtaagattgcgaacgcctacatgtgcgagtcattactctcatgggccacgagatcttctgtttgacgtgactctagtacaccattgattaataaataatgacaagatcaataactcgatacagtgtaagcatgtgacaacgaagcataaagtacatgctattcaatacggcgtgcatatagcttagtgcgtgtagtgagatgtatataatatgatta

SEQ ID NO: 8957 - DNA, 429 bp, Oryza sativa
  unsure (1)..(429): unsure at all n locations
taagctatatgctngatccgattatataactttcatgaacaatagagagtttatcatgaacaattgcttgttgcacatgctttttatcaattgggtatcgttcgggttgtgcactcaaaggcttctgcgcatgcttttcatcaagcgtatcaaatgtcgaattttatataaatattaacatgtaacagtgatacaaatttatattntccaatttacagtacatataacagattaacagtgcagtgctcatatgactaacatcatcaccagtgataaactcacacttataaaacctaagaaacatcgtcacttattcaaaaatacatggtaaatataggaatcccattctaaaaaattctgaaaacttgacaatccaaataggaacgccattatgaaananatctaagaacatcggatcccatagctagc

SEQ ID NO: 8958 - DNA, 247 bp, Oryza sativa
tcgttgtatcacgcactatgacttactcaactggggcgctacaagatctcacattgtctaactacaggccaaatgtctctggactaactcgggccgccttctcgctgtcattccctggtaccatgtgaacatgccggaaggcgctataatgagtcccacccaaacgggcatcagctccgctaagataccccacggctgtgtcagacagtacgcggtctgccggttaaacggcgggcatccattgact

SEQ ID NO: 8959 - DNA, 451 bp, Oryza sativa
  unsure (1)..(451): unsure at all n locations
cttgaaattctataaatgtaccggcatatattttcttgattagatgtgattgggtgtgacatccacacttaagtagtattagttattttctgactattacaatgtattgttcaatcaaatatactcagatttgccataattattttgtttatattatggngatattttgatctgtatggattgttcttgtgtgtgaccatatcttttagccaccaaggttaatattgttcttggtggcaataggtatttaataactactactctgtcccataaaaaacctaattctagctataaatctggacacttgtgtgttcatattcatagtcaggattggtcgttttttaagacggagggggtaagagccaagggttattagtgcactttatttaccaagtactatntggttacaaaataataccaatatttacttcggtactattagttcaaccta

SEQ ID NO: 8960 - DNA, 443 bp, Oryza sativa
  unsure (1)..(443): unsure at all n locations
tctaatcatgtggttntaggcattgatcaaagttgatagtccacatttatccactagattgaggcatctattgatattagtggattgctatacttttttgttttactgattgatgttttcaacttatattatcttgttcagcacgagtggtatacagcagataagactcttgagtgattcacgtaatcaaggcagaagatgtcttcttcaagacctactcaatgttccagttcatccagcangacccgccaaagctcccgggcaaggatattagcacaaacaactcttgatgctgaactcaatgctgaatatgaagaatatggcgactcctttgattactccaaattggttgaagcacagagaactactggacctgagcagcatgctcgttctgagaaggtcatagcttacttgcatcacattcagagagcaaagctaatcca

SEQ ID NO: 8961 - DNA, 141 bp, Oryza sativa
  unsure (1)..(141): unsure at all n locations
ctatgtaatagtttctaatgtacctgtgtgagtgttctttctcttgatgngattgctatactcataacttctcatgcactactacactcgtactgacgccttanggaattatacatataccactacatgactgagtgacat

SEQ ID NO: 8962 - DNA, 377 bp, Oryza sativa
tatattcagcgggtgatatgaaatccaatcattctattgattatctggatgagaaaggagaaaagatggtgcaagcggcgcacttgctccaaggcatcacaatactttgtcactgttgcaagagaaaagagagaaaatagcaccaaagagaaaatagcaccaaagcaccgcagagaaagtgattgatgtggttcaaaaataataaagcttttacttgtttaccgtgcttattatactctccaactattatgtttggaggtgggtgttgggaacccatctctcatacacggaaaacggagcggtccattaacacgtgattaattaagtattagctaatttctttcaaaaatagatcaatatgaattcttttaacaact

SEQ ID NO: 8963 - DNA, 202 bp, Oryza sativa
tttcctcactaccactaggacctatacagtatcattatttatctaggcccaagtgtgatgaattaggaacacttcacctgtttggcattattccggactaacgtctaaataaccctatcttatgaataccaatatgagtgaatgaacatttgtctgatgtcacatgttgatgcttcatgagtcaatcatgatatgcgttcaa

SEQ ID NO: 8964 - DNA, 190 bp, Oryza sativa
ctctgtagaagccgggaattccctccttctgatacactcgcttgatacagtcgattacaccggtgtagtgcacagcaccattacgagcacgaccttgttcttgcaatctagatcgcacaacctgccaatataagccaattactataactgaggatgaaagcgtaggcgcttctctagttcctagctactg

SEQ ID NO: 8965 - DNA, 373 bp, Oryza sativa
  unsure (1)..(373): unsure at all n locations
gcaattctaggatacaatcatgaaacacattaagatttgctcatcagacattgtttcatatttgataagcttctctccaaaatatttgacagagggcaaagaagagaggccgaaagagtcaagaaggatctgtttgccaacttcaaaatctgaactaatcggtaaacctccaataggcaaacccaaaacaatatgaactgattctntggaaagtggaatgactctatctctaacgatgatatcacaagaagtgacatcaactctttgtgccacccactaagcaaatttatatggcacgggacattcttcatagagtaagagagttttgagacatgtttagacataatctctctctgatgttcagacaatgaag

SEQ ID NO: 8966 - DNA, 88 bp, Oryza sativa
tgggagtaccagactctttcttaagaagcataactgctcggttcactgcatgcggaaaatttcatacttgcagcacttgcacattggc

SEQ ID NO: 8967 - DNA, 201 bp, Oryza sativa
tcgcggaacagggggcgagctaccatgacattttgccctaatcttgcacgtattcattcgcacttatctagcattctacacctttacaaagactaatatcattgatctgaaccttaacaacagaatgcaattgatattccctgcactactgctcactgacatgtggacctaagaggcggtgggatccatatattaatgatc

SEQ ID NO: 8968 - DNA, 300 bp, Oryza sativa
  unsure (1)..(300): unsure at all n locations
agcactggctgactgtatgtgtgacttctctattgaggctggctctctctgtgctctctcatcaaactcttgctcttcagctgacctagctcnctgtgacagatctgaattccttannacgagtatgactgaccgagatgtangcactgagatgcatgtgtctggaaccagctgaggctagagtatacactagatctgagctgtgtgattgctcaactgtagctggctcactgtgatctcaatgacctagtgtcttatatagctctctatattcctgtatgagcacgaatagactgtttg

SEQ ID NO: 8969 - DNA, 317 bp, Oryza sativa
  unsure (1)..(317): unsure at all n locations
tctnctcgtgattcacatcgtcaatcggtcaagctaataatgttgtatctgaatcatacactcgagtttggaatttggtatactacttcatcttctatatgcttaagaggatattccgatgctgattttggtggttgcagaagtgataggaaaagtactagtggaacatgtcattttcttggtacatcattgattgcatggtcttctagaacacactctantgttgctcaatcaactgctgaatctgaatatgttgcagctactagttgttgtcacacaatctttggtcttatctactttgagagatatgaactaac

SEQ ID NO: 8970 - DNA, 302 bp, Oryza sativa
  unsure (1)..(302): unsure at all n locations
atgctggagagagacactttaatnttcttttttctcttctctttcatacacacctgacacacacgtatgtatacatgcagcagatataagggcgcncactgatatctgcgtgctcatgtgcgcgtgtgagagctagaanaaangaaagtatataaagaattcttgctgtatataatgcctgacngtacntntcctacccttttctcttcgtgacaataattgccagactctgatcttacttgtgagacttctttggaccctcaaacatgagtgctgctactggtcctctcattagcttttgg

SEQ ID NO: 8971 - DNA, 447 bp, Oryza sativa
  unsure (1)..(447): unsure at all n locations
gctcgcagcctagtgtcanaggagagagcctaatggagagaatcctttgtatcccgggaatggctttcctcctagcccttcgtaccacgtggggtcacgtgctaagcaagccataggctagaagagtaagaatcagaagagaaaagcaccgatgcgaactgaagaagaagtacgttagatgactattaccagcaccgaatggcctncagcacggataactattcctagacgtcaaagaggaaataccttccgaggtgcacgacagttgacccagcacctcctaagccatggtggcagagtatctgatagtgaagggtcagatcaagtctcctcggattatgaagatgagtctctccgacatctcggcgaggaagagatggaatcaaagcatgctcccgtcgggagaaatnggcacgctgctacctgtgttacactctgccttatgga

SEQ ID NO: 8972 - DNA, 331 bp, Oryza sativa
  unsure (1)..(331): unsure at all n locations
ttgngacatagctgatgggtctctacttatagtctgtaacaacttaactaatatgcatcgatgattntttaagacacattntttacagtttgtattaagacacataaccaacatgatcgttgtttgctgtgggtattgcgactcaatagtatgcttcaatgtgcaacggtgagttgtctataagattcctgattcttctagtattattactcaaatattatgtaccaaagatatcaaaatggttaagcatgtcttaatcactttcatttttttttttgctaatntcacctacaaactgtacaagtcataaaatcgataaacattcaatact

SEQ ID NO: 8973 - DNA, 386 bp, Oryza sativa
  unsure (1)..(386): unsure at all n locations
cgaataaattccaaatccatatggcatcagccctagttctcctgtgccatctttgcatttgcccattctggctatgcgaaaatctgcagccttgaaaaatttccaaatcctctctatcgatctattgacacgaatctctgcagccctgaaaatttcagaatccttgattttttttttcggtaaaactttacaagtttgtggaatgatttaatttatcacataggagtattaatctatcttgttaaanaaaattactaccttcgttttttaatagatgacgccgttgattttttctcacatgtttgagcattcgccttatttaaaaatattatgtgaatgtgtgagatattcatcacactttaagtaatatgagtgacaaacaactc

SEQ ID NO: 8974 - DNA, 97 bp, Oryza sativa
tttctaaacatgcggatatatcgtgttgagtaccaacacttttaactatgaggcataatctaccacagtggggatgcacttcttttcatttgataca

SEQ ID NO: 8975 - DNA, 459 bp, Oryza sativa
  unsure (1)..(459): unsure at all n locations
nggctgaatctgtcgggagtctagcttcttccagtttactgacttgaaccacttgtgattctttatttcattgctcccgcctggtccacagcccagcctcctgccagcttctttgtgcagtaactgaaacataagatggactaaaaattcaatcccaagatcaaacaggttgactctagaaactagcacaaggctgcaaaaaaatatgggtgcggtgaatcatagcaacttggcaaacaacttacgccttttagcagagaatgaacttcgctagataaatatgccggaagcttaattntctccttaacaatcttctgctgaactntgtccctgtttccgccaacaaacggaggctgcagaatataataagagtgagcatgggaacaaaaggatatatagaagcaaaccatctgtaatgcanacacatcttctatgcagaaacatcgtgcttaaataact

SEQ ID NO: 8976 - DNA, 488 bp, Oryza sativa
  unsure (1)..(488): unsure at all n locations
atctccagcttggtgaagaagtagaagatggcatattgcttttagatacagtgctgattatccagcagtcaggtatgctctccaccaccagtgatagtcctcgctgcatagttggaagtagcagagcacaattgtgatctcagcacaagtaacgatgaggatgatgaagactatgaagaggaagccgaagatgtagtagaactggttcagccagattgatgtcagaatgaagaagagctcgatgaagacagcgccaaatggcaatatgccaccagcaagtattgagaaagctggctgcaggtaccatgcctgctcangaattngcctgngaatcttgttggtcttcactgggtcctcaatggctggctgctngaagcccaagtatacttcaacanagactagcggcacagagatgccaaaccataggaggaacagagcaaacattgttccanangggagctgcacctgatgatttctcaccccagatc

SEQ ID NO: 8977 - DNA, 451 bp, Oryza sativa
  unsure (1)..(451): unsure at all n locations
tcaatgtgctgtacattgattcccacagaatgctctctgtaaattttgaatttaataacagataccagctgagatcactgctgcactggaacctattaaagataacgaggaggcggtcaaagcatatggaatacaccttggtactgaaatgtgcaagaaaattttagctactggaatcaagaccttgcacctttacacgctaaacatggagaagtctgctctaggaatattgatggtaatttccacatcttacttgatgcagcatnttggtctggtgcatttctaacaaggtaaatttatccagaacctttgattaattgaggagttcaagatctcaaggtcattgccttgtacgcctcaacatatgttatcgtgtcaagacgatgtccgcctatatactgtagtggttaaagaatattgtcaagtattgatttattgtataacactatca

SEQ ID NO: 8978 - DNA, 151 bp, Oryza sativa
  unsure (1)..(151): unsure at all n locations
tgtgtgtcacgctctgatcagtcttctcttctgatgatgcacttgtctctatccagactgtatattcatctacnncacctggtctagtcctagttgtatgtatgacatttcctgtataatgtatgtctgactgtatagaatctgatctcac

SEQ ID NO: 8979 - DNA, 338 bp, Oryza sativa
tatcgtgaaatatagcaatcttttcacctactatctcatctctatggatacatatgttactattatatttttcacccgcttactaatcttaaccaatcataatagtctctgtttgatttcacatcttttctcaacaaaaacttcataaaacgcctatatttgagaacggactgcaaaattacaaaccgacctagctaactaatccgttgatctgtttttcttttaagaatgtgctcccatgttgttctgttgccgagaaagtttcttgtgaggtctccatttctgtactgtgttccattgcagctgatccccatcattatctgcggtactcgtactac

SEQ ID NO: 8980 - DNA, 300 bp, Oryza sativa
atagaaacacgtcactgatgtgcataatctaacaagtccagatgagcatacaacatctgcgttagaaggacgctcagttggacgctaaatgtaccaattcgctcactttttgtaaaatacacgccaatccatcggagaaagacactgcccgtatattcacaatattcctgtgtaagaatgtccgtgcgcagatacagctaattgctggactctgagccattaatgggactaatcaagatggctcgtcactgtctgctgtaggttgaaggaaataatgaggtggagacgaatgagagttac

SEQ ID NO: 8981 - DNA, 197 bp, Oryza sativa
gcactcgctcactgcacgttcgtcgctttctatacgatacagcacactctctgtcatctttgtgagtgcgatgctggctactccatgtctcatctcacttaccctcaagtcacgaactcccctctcgctaaacgacctgagtaccctactctgtggcatgctatgctaagacatgacgctgactgtgctgtggtatc

SEQ ID NO: 8982 - DNA, 377 bp, Oryza sativa
tttaatgtagttgtttgattaccgcatgactatatttgcggtatatactcttatgataaactggatattaattgtgtaggttcatgacacaatctttaattcgtagctagattagtgtatgggtacttttgtcacaatatactctaaggcatgatcctagagtatgaatatattagctttagcttaaataaacttataaaatagattaatatgatatttataaacaacctttctttttttttgaaaaaacacatcatttagcattttggaaagtgtaccatgaaaaatagagagtagaagttgggaagaggtgacaagaacacacccttaatagttattagaaatgtaaatcaataagtgcattttaaatataccga

SEQ ID NO: 8983 - DNA, 164 bp, Oryza sativa
actgtgtgtagttgtgttctgttacaatcagcggattgcttttcataaaatgcacggtcctacctgtcataacctctctctgctgggtgaacgaccataaccatccactttccctatggagttaatgatccaaacagtctcaatttattttagttatcatctca

SEQ ID NO: 8984 - DNA, 309 bp, Oryza sativa
  unsure (1)..(309): unsure at all n locations
tccanaccgacannagatgatttagatcgcagtctggatttgtgttctgcctgaatggaggcgctgtgagttggaagagttccaagcaagatacagtggctgattctacaacagaagccgaatacattgccgcttctgaagcagcaaaggaggctgtttggataaagaaattcgtttctcaactaggtgtgatgactagtgcctctagccctatggacctctattgcgataatagtggtgccattgcgcaagccaaggagcctagatcgcatcanaagtccaaacatantttacggcggtatcacctca

SEQ ID NO: 8985 - DNA, 91 bp, Oryza sativa
ctactactcggtatggtgtgtatgagtgcacctctccacaactcatcctggtggtactgcatgatgcctcgttggtcgctcactcttattc

SEQ ID NO: 8986 - DNA, 349 bp, Oryza sativa
  unsure (1)..(349): unsure at all n locations
ttattgcggctcatgtcactgcatggaattatgatcaagctaatcaccaagtgaactcccatacaaaaagaactactccaaaaattccattatccaaactcacagctcaactagggactctcatggtgttcatattgtangccacattccacgagagccccaagctcggcaatttactagtagaaccaggaagagaaaaacacatcatataaaacaatgaattgggctcacaagccagaacattgaattatgcaaccacactacccacattgctgagactgatgatccagagcatgtgatgccctgccatgaggcgccacatgggtcaccggcatttacctgtcaaccg

SEQ ID NO: 8987 - DNA, 66 bp, Oryza sativa
ctgtgtgtgattctgtactctgacaatggctcggtatctcttttacactgtgcgttcgcctgctac

SEQ ID NO: 8988 - DNA, 301 bp, Oryza sativa
cttgccgccgcactttctgccggaccggtcttgctccctgtcgcactgttagacagtgctcaatcacctccctggggaccccgggcatgttcgctggtctccatgcgaagacgtcaacgtttgcccgcaagaaggagacgagcgcgtctttctatttgccatccagaaaaccaccgatccgtgtggtcttggatgggcccgtcgccaaggcaaccttcttgaccgggacctcgtcgcaagtgggcatacgctgcctccgggctgtgggggcagaagggccaagcctctctgtaccaccctc

SEQ ID NO: 8989 - DNA, 365 bp, Oryza sativa
ctggtgcatatctccttactagctacgctatgacaactaccatcttaatgattacttgcatacctgccatcactcttgccctggtcttgaataaatatgattcgtggtcatgatcaatcttgggctgcaccggccaaactttatgagtaaccacaagtgaaggtgcctcttcatagtcataatacacaacacccttttactcatgctcctcttgagcatcatcaaaatgcggcaaatcatcagctagatcatccttatattcacttggtgaatcatatataccatcctccaaaatcagcatctgcttattatttgtgcagtccttctgcatgtgagcacgttcaaggcatttgaagcactgaata

SEQ ID NO: 8990 - DNA, 153 bp, Oryza sativa
ctccggtccttctgctgttgggacccaatagtgtctttttctttctgcaactttgtaatgcaatgacttgtgaactacacactatgtaagctacgttgtgggatagactttcgtttctaacatggagtacgtaatgaagtactgattatgggt

SEQ ID NO: 8991 - DNA, 478 bp, Oryza sativa
  unsure (1)..(478): unsure at all n locations
ttaggacctatgaaactcagctgagtgacacaaaacccacaatcttagtaccaaatgaaaatcaattgaaagtacataatatttagttaattntgcagctgctcagtttgaaaatttctctagactacatcaaccaataataatcaagtgctttacaatactagataaatcatacaagatccaacaggttattcactcacctgagaagtatcatggttcagagtacacaagtgatctttaagctcctcagaagttaatgcataaagtactgaggcccctcttctcttccttgccctcaggctgtcccctgacaatgtttggtccaataaatcaacctttgcatccttcatctcaatgtcactattttcacgacgaaattcttcttcagtttgtacagcactccccgacaatctgaccatatccattccatgtacattatcggtgcaagcaatgggtgtccccaaggaagtacaacatg

SEQ ID NO: 8992 - DNA, 298 bp, Oryza sativa
ggcttatggagtgtactccgactactactctgattatctgtctggtggggccaggcaagagctgtgtgaggaggcaaggaatacagtatggaatgtctggagatctacaggaccaaatggttacaaaaagagcacaagcgcaaaaggttaaagacgaaatgcatgatgagaagaagacaagagcatcatggagctaagacagcgaatggaccatggtgcaagttaggtattctaggcttggcttcaccaccgaaccatctcacatgcattattctacatgtgtcttcttctcgcagtt

SEQ ID NO: 8993 - DNA, 335 bp, Oryza sativa
  unsure (1)..(335): unsure at all n locations
actgaaataaaaaaaaagatcggtggacatgaaaacaatcggtcacttatgaagaataggccatcactctactggaaaaacaattttcccatatgaggtacctatatttttctaggcggacgaaaattttatcaccaccggttcgcctgcaagataggaagggggagctagatagccatctacccacgaagatctatcttcccagacatgccatataaggtgctgcctgngaaaatccattttcgcaggcggacggcttaagacctacaaaaatatatttattttgcaggcggacctcttaagccgtttgccttgaaaatgttgtgacattaaat

SEQ ID NO: 8994 - DNA, 315 bp, Oryza sativa
  unsure (1)..(315): unsure at all n locations
tctcaatggctctactaactgcttggatatgccttgatagcttgtgctaatcgactgctctctatcagtctccggggtgatctcttgattcaccttctcaaaactatcaaccagagtcaatagactctgaacaacatccacctgtatatttgaggtaaacctaacacgctccttttcagtctgcttccggaaattcttcagatcagcatttatacggaggaacatgtccttccctgaagtaattcggntgcaatactttcatactgagcagctgagttactcctttctttctcaatggcaatgatagcactctca

SEQ ID NO: 8995 - DNA, 297 bp, Oryza sativa
  unsure (1)..(297): unsure at all n locations
cttctcngcagacgagcacttgtcatcatcactcgagatgactatttacactatacggtacagacgctgaactcaatcgcaaatctgactaactacacttaagctcgatattattctctctctccgcgccgcacatgacgcacacttgatagcgacggacgcggatacctgtatgcactcaccatcatcctgtctctctctcgggagcacacgtatataccgccccatccacacgtctcgctcgcttatatttcatttactgctatcgctctcatacgagagatcgctctctctgcg

SEQ ID NO: 8996 - DNA, 429 bp, Oryza sativa
tctttgaattgtaccgaatgagcactacttacttcgctcaatattgtcaatgtgtacttcaattgctgcacagctgtttgccttttggataatccaagatgttagcatattcttgtgttgcaactcatagtttcaatgtggacatgtgcgtgattgtgctttgattttcaatgaccagatttcggtcctacaactcaggcagtctaccttccctgtcttgaagacaaacttttctttggagcgcagtagttcagagaactgaaacctgacaatagtgacctgtctacgacaatactgatataatcacagtgtcatctgaaaattgtttgaccaaataatccgattgtcatctgaaaataatctgataatggaactatatgctcaataatgatatctactacgttgcttctaatgtattaccacactaat

SEQ ID NO: 8997 - DNA, 324 bp, Oryza sativa
actggtcactaactcacgctgcttgctgttcactcccaatatggacagctctaagaaccttctcgatgcgcgtaatggaaatgttctgtggatcgatctaccaatcaagctcttacacacggagattacttgatgtttgcacatccatgctgtctgaacataaccaattgctgtctatgtcagcaagcattgacgtgtacatcatgatgcgcattacagatctgcgtgtggctaacaatttgttcgaagtgtctaacacgttcgaagaactaatgagtcatgctcaactgtctttttcacaatctctactacatcttcccccct

SEQ ID NO: 8998 - DNA, 258 bp, Oryza sativa
ctcaacttagacctagaaagcacatagcaaaatatatttcttggtttttcaagaaaaaaatctactcaatacgttctccaataaaaaaagaaaagtgcccatttggccataaatatgcagtagacacctgaagcacatcaagaccataacttttttttcttccagcataacacactagcaattataagtccacgacaataatgatgagtccacgtcaactactacgagtttgcgcaagtaccacaaccaacaaatatg

SEQ ID NO: 8999 - DNA, 240 bp, Oryza sativa
  unsure (1)..(240): unsure at all n locations
ctgggtgtgacaattcgcgcttaaataactctcgcggtatcgcggtatatgtatngaataatgctagccgcccttttgaggcggcaaatttctacgataatgaatcgcacctattcggtctgtccataacaccaatcaaaaattttctagtcgccatcaacgtcggattgtcctatccaaccagctggcacttacttaaaaatcagcttattagcactcatgctgagaaaaattggtata

SEQ ID NO: 9000 - DNA, 410 bp, Oryza sativa
  unsure (1)..(410): unsure at all n locations
taagtntacccatgaattctgaactgtgttgtttagtttcattttgtaataaaatgcanaggtctttcagctccaaattatttttgttgttcgcaagattagagtaactactattttttggctgatgccagctacaatgtttgaaaatttccaactgtacttgatgctacctggtgattggtaaccttttgttccccaccgatcactttaatcatacatgaacgtcctttttccctattccactgacaaatttgcactagtagtttatagctttaccatctggtactactaactgtccttcatagtggaatttaagtgtaacaattacttggtctgtagcctccaatacagatntgtaactttgagtttagtgaccagtatttgttatacttcaatacttgcgacgcatg

SEQ ID NO: 9001 - DNA, 297 bp, Oryza sativa
accagcactggctcctgggtgacctcgcgggccgaaaaaagacatcgttttcttctgtttttcgacgagggtccgccgtggtgacgacccgccacgaacgactactatgtatcacttctcattagcacaagaagaatgtcttctactcgcaaaacattatgaaatactatatcattctctactgtggttatacacacctcaaaataacatcacctctgtggtgcactgtagtgcacgctggttgcatgtagttgtggagaaacaggataaattctctactatatttgagaaacaact

SEQ ID NO: 9002 - DNA, 332 bp, Oryza sativa
  unsure (1)..(332): unsure at all n locations
cagcttaattcacccttcaagttgtaatcgtcgagctatatagcaagcgatagaaatatataatcgtacagcgccattgngggacttgaaggcggcgtcgatgtcgtcctgcgaccggtcagcgaacagcgacaggggaaggaacccggcagcgccgccgatgtcatcgccggcggcgaggccgtgatgacagtggaggtcgctgagttggagcatgatgggcttgtcgcctccaccgtcgatctggtgctggcggacgcgggaggcgaggagcgcggagtcttctaacgccgcggcggagtggtcatcggaggctcctcctcctcctccta

SEQ ID NO: 9003 - DNA, 265 bp, Oryza sativa
  unsure (1)..(265): unsure at all n locations
tagcacactnggaaagcttcactgtagcatgttacgctggacagcatccaccaacatctctctctctttgtcgttagaaaaggactgcgtgacaccacacagaaccccactgagagaggccagccaaaggtcaccaatggattctggagagagagaacgagagagaggcgacaagaaaaacctctgcgctttataatgatgtaagcatggagacgcggggtgctcattttgagacaaatatgctaggccttgaaacctcaaagct

SEQ ID NO: 9004 - DNA, 427 bp, Oryza sativa
tctaccgcaccgatccagctcgcctgcagacaacgtcaagggcttcatcaactgttcctgagaaaccagctatggcttggaacattcctggcaggcctgtttggatgttgttcaatgtcattgatctagttacctccactgccttagcatgccttgtcatttagtcctccaccttccgccgacattgtgcaatctcggttttcttctctgcaagaggatcgcgggcatcgaacgaatggctttcaatgccatcgcgcccactgccaggaaggccaaggccaaccattgaatatgattggtagtacttcttctcaatggctcgaagtgagttggtcttctattccagctcctttgaatatgtctctgtccgctttgttatattcatctcctctgcctgcttagtgtagatgacatggacaacactcac

SEQ ID NO: 9005 - DNA, 259 bp, Oryza sativa
  unsure (1)..(259): unsure at all n locations
gctgaataatgctactgctgaaaatacattctctgatctgtaagaagatatcttgaaatgacctccacacatcgttgtacttctttttgctatatacataaaagacaatgtgctgtcatgctgaattaactaggtcacaagaacatngaatggtaacactatcttacaggtctacatgatacgtcacaaagtcgataatataatcaacaatttataatcgactcttcctactggtggatatttatgtactatgtgatac

SEQ ID NO: 9006 - DNA, 500 bp, Oryza sativa
  unsure (1)..(500): unsure at all n locations
tcatctatgtacatatgacatcctcatcaaagggtaagtaactatgagtagttacctctggagattaatggacttcattatgtacatatatagtagtagtgtactatgaacagaacaatgctagccttcctttcctagtttccttaccgctggcatcggagaccgacaaccaaaccgtaaatccagcatgaagatactgccatttatcaaatctgctagctgctccttgctttccccccagagttgctacgactgtacgaacatggctgcgagggagaaatagtcttttaagcatactgagcaagacatcaaccaaaggtaacaaactaggagtagcccacaaaagcaacctgctaaggctttccagcacaacacattcagcttctgctaccgaatncactccttccgaagccaaccctacaagaaataacagcactnttgtcaattcactgtaacagtatgaactacacataacaacttctgatgcctgtaaacaacat

SEQ ID NO: 9007 - DNA, 123 bp, Oryza sativa
atattttaataacaaaatacacatctgcgggaagttgatgagactaatatggtcaaacagcggccctaggggacaatgacatcagggataagaacggcggaagcttaatacacacagcgccca

SEQ ID NO: 9008 - DNA, 409 bp, Oryza sativa
ttaggctctacctgccatagatagtgcagctcgatcatttagtgtattctattatatttgagaaagtatcgagagataccatatattctatcgtatataaaacttggtcactttaggaactactcttacgggcatgtactattattgtggttgggaatttgagatccttggctgagaattggagctacgtagtagcagtgctcaactacatctacattatattgctctgtgtactttcatgagtttcatgttgaaacaatgagcaaatgcatgtgttctctcgtcagcactcagctaagctaggtggagcatcttctagatttgaacgactcccttctcatcgcttggccgcaatgtgctgaccaggcaatgtaatattgcatgcgtttgagaaatgttggcctacact

SEQ ID NO: 9009 - DNA, 317 bp, Oryza sativa
  unsure (1)..(317): unsure at all n locations
gacattcccaccaggtgtgtgacaaattatatgatgtatgttnttcttttctattcttttataaaatttttcttacacagaccgctagactaataccgtgcatatgcactaaacatacactaactcttttattaatcattttcaccctaattcacgagttagatggcaagggatttgtatgacatcatatctgatagaagacaagattttgatccaccctttcggcgagaggggagtgatgatgcctttctacagctgggtattcaacccatctacagtggtatgaagcaggtatgtgctgatatggtatatcctat

SEQ ID NO: 9010 - DNA, 220 bp, Oryza sativa
aagtattggagactgattgatctcactcaactttttggtgcagctctatacgttacggaacgcattcaactggacgtttatgaccactggtgcatgcttgcagtcgaactcaatcgcatctaccgtcgtgccatttgtgcctattggcctattatgtgagtgccatgaggtatggttggcaatctagcgacagtgtccactctctgatcttactaagtgc

SEQ ID NO: 9011 - DNA, 486 bp, Oryza sativa
  unsure (1)..(486): unsure at all n locations
nttctcatctnttgagagaaagaanagtaacatgatgcatgatatctacttaaaaaatcatagccacgagatcagggcatcaggcacttatttgggcgcacaatgaacacgcagtagttatgggatggcaggcagctcacccataaaatctatgaagtactagtgccggcccaaccaaatctacgtccaccaaaccgcaactatgggattaccattggactattgaagcctgatcaaagatgataaatactaaatagtacgtagtcatcaccttaaaatatactactagctcacgttatgaaaaattactcacacattaactggatctaagtatctagcagcctagtagccagatatatataactcttgtctaatgtagtatttcttaaaaccattctggaaaaggcaaattggccctctcatggcatgtagagcaaaacaccattattttcgtgctatatatatatgtccacgagtcatactagc

SEQ ID NO: 9012 - DNA, 279 bp, Oryza sativa
cacgacacacaacaccttctggtgttaatatctcatggcgctgactctgggcgctaacatccgctctccgcgcggcaatagcactacgatacttctttaacccacatttccttcctgtttcgccaaacccacaaagaatacgcgaacccaatgggctccaatgatcataaagcactcactggcgtggaactctgacccttcttttgtctagattttaaaaagttttttttggtgaatctgccgtaccgttatgggactgacgatccactgccgcaccgc

SEQ ID NO: 9013 - DNA, 262 bp, Oryza sativa
gtgcgcgacaagagacttgtgtctcgattcaactttaagagatgcttgttaacagctcatttaattatgtatcgacctaccgggtcagatcattggttggtggcttccagagccatttcacttgattaatcggctctcacagcctttattatgttgtcggacatacacagaccagctgcccagcttctcaacaatctgcttacactcgggaagcctattctatgatgcctgcagacattccgcatcacacagattcgtttct

SEQ ID NO: 9014 - DNA, 135 bp, Oryza sativa
gcactggtcacttaccagtctgttgacgtgcgcccttgctacatcttcttatgctcgctcgcaatgtacgtgtgagaacatgtgtggcaactcaaggactgtctgtgctgatctgatactgaattctgtttgtcg

SEQ ID NO: 9015 - DNA, 65 bp, Oryza sativa
atattttacctccatagggtgacacctttacttatctatcttcaccgtccactacagctttttaa

SEQ ID NO: 9016 - DNA, 321 bp, Oryza sativa
  unsure (1)..(321): unsure at all n locations
tattacgtgacctatgaatactcagctttcacactatcgcgggtgggttcttcgattggatcttgaatttcctggntctttgaaaagaattcgaagtgataatggtggtaagtttaaaaatgcttcttttgaacaattttgcaacaaaaaaggtcttgaacatgaattttcttctcctcgtgtaccgcaacaaaacggtgttgttgaaaggaaatatcgtgtttcggttgagatggctagaatgatgtcggatgaatataaaactcctaaaaaatttgggctgacgcgactaatactgcgtgtatatttcaaatcgagttt

SEQ ID NO: 9017 - DNA, 332 bp, Oryza sativa
ctgtaaacagtccgactgtatcaagactccctgtatctttataagtctcgtggagtgaagaggatgaatagttatctgtccagcgcgctgggtgggtaacgtgtcctgtgtgtgtgggtctctcgctgcgagcttcgctgctagtgacaataggaatatcttatattagatgatatatatgcatgggacaccttgctgactgctgaaccgtctagagcgtgccgttctcacctctgaggcgtgcgtactaatgggaacacataactactgggaacccacttgctgcgtgacgggggtgctcgcactcacgtattactgagtaatgccatctg

SEQ ID NO: 9018 - DNA, 310 bp, Oryza sativa
  unsure (1)..(310): unsure at all n locations
tattaataacatgggatgtgcaatctatcaaaatatctgtatttgtgtataatcgacattgcctacatataaaaatacagtgatgtgccgtccacactccacagattataccatacgtaggaatagtacgagacatcatatatagaagcattaccacatcactttctcaatctcggcattagcaagatccactttcagcgcagtcaagaatgcctcanatgctttcttgtgctcctgnggacagaaaaatggggggatgatctaacatgaagcttatgtatagggcaacatgtgactagcacactggaac

SEQ ID NO: 9019 - DNA, 161 bp, Oryza sativa
ataacatatataggaacatcactcaagatcaagcagatctattttctatctaaagaactgaagaattgatgctataacgtactcattatatactcctcgtcacatgaagtatctacattctacatatatatatatgatcaactatatcattaatctatata

SEQ ID NO: 9020 - DNA, 472 bp, Oryza sativa
  unsure (1)..(472): unsure at all n locations
agcttcactccctctatagcatttanaacaatcatcaattattctcggtcaatgaatatctactctcctaagcaaccaatttatcttatgggccgactgatgaattccacaaatccctacatgaacttctcccatagcaactctagattgatcattatccaatcactttaataacactccatctatatttcggcgatataactctccatcaagcaaagtgtattctattcaaaggaattctccaagctatttctaactcatgagcacaaatgtccggattcacaattaattcggcattntatttaattgtaacgtgccccccagcctcctgtctgggatcgatcagactggccacgcaatgccggttagaccgctctgtctgcctggtcagaccggccatgtagagccggtcagaaccgctgtaccaccggtcagacacggcatgcaatgtcngtcagaccgcccctagtct

SEQ ID NO: 9021 - DNA, 474 bp, Oryza sativa
  unsure (1)..(474): unsure at all n locations
cgtctcctgtcctgacaaccaaacaagaaaagggaaaggggatttaataaagatagagagagataagctggcgacataaaaagaataaatcaagaactaaaaggaaaccaaaacgagccatgcaaagtaacgtgattcagcaacaacaatttctgttgcaagtgaggcacatcctccattcctgcctgcatttgcattcccataccaaacaccagctcacacacactgtcttccagaaacaaaaaagaacattttcttcttcttgataaaaaaaataaaaattgttgcacatggaaaagaaaagaacagaacagtcttaccattccaagtagtagagtgactccaacacaaaaccctacaactataaaccattctcaccacactcttctccctcacttgtatagagagactcattntgtccatccaatcctnctccacccaaaggtggcaacaatggcgagggcccccacaatg

SEQ ID NO: 9022 - DNA, 253 bp, Oryza sativa
gtactcttcgacggcctatgcacagccaattttcattagtgggggtgtatttgcacgcctaattcgagttattactactttagaatgcactgttccagcccaacggtgttggctcacttaggctgatggtgatgatgaaaccgtagaatttcagctcatagacccagattagatgtactgtgctgtgggccggtaataggccacttgatctcaaagatgtcccacatctgaccgatactcaagtgttgcttgg

SEQ ID NO: 9023 - DNA, 445 bp, Oryza sativa
  unsure (1)..(445): unsure at all n locations
tcagagaccaganagcaaagcccttgctcaaatgttccanaagatctatgctggtataaatttgnggtgccatttgcagttgctcaatgcaatacgtactggtggctatttgcctgatagggttatcaatcttattcttcaatatcttaccaacaggtttgtggaaaaactgtgcagcagcattctgtatttccttagtagctctgtggtctgccttcgtattgtttttgccactccctttctccattttgtctggttttccgcatgtttcacatggttgcaatcagtctttatctcagttccatgacaaattgctctagtcatcagaattgtaatggcacaacttccacttcattcatgcaatatggataattttcgcctgatttatatttacatgcctttcattattntagtgtacagtcagtatgtaatatcccgtttttgt

SEQ ID NO: 9024 - DNA, 258 bp, Oryza sativa
  unsure (1)..(258): unsure at all n locations
ataatactcagcttggctctcgctgatctgagtcatagcaagctcgctttttcttttcctgactgnatcactatggctgactcatacatttgaaggtaagatttcctggctgaatgagtacgtgcatgcttctgtatcctgatagaagcagcaattcttctcatatgctcgaaaaatattctagctaggcgtgctgcagtgttgaattacattgtatgtcaatgccaagtcagaacttattactaatacggaagatat

SEQ ID NO: 9025 - DNA, 385 bp, Oryza sativa
  unsure (1)..(385): unsure at all n locations
tgcggtagcgaagcgcacgctccaggagggctactatgatgcttcctctgccaagaagcagaggatgatccatgtgatcgacgcgccgaggaagaaggtgaaaaactggcgtcccgtcgccgtggtctagccgcggcggcgcatcgtcccggcggtcgccgcggcgcctccgctacggatgtgtagagctgcatgagcattgatccgtagtgtggtgctgcacaagtgtaattgtctcagatcaaccatgaatcctttgattctttgatgctcatgtagatggttntgaacttttgatctgttacatgcatcgttgtcaatagtcagttaagagattattctattgtgccaaacatctgatgctgatgtagatgttgcatcaatg

SEQ ID NO: 9026 - DNA, 364 bp, Oryza sativa
  unsure (1)..(364): unsure at all n locations
tgttgacgtattgtttagaagttcttctgtctgatatgagagaataataaactgcaagaacgacaattgtctgtttatgatacacattcttcatattatatttgtatgtgatcaagagatcagacaaaaaaggatgatgtgcaaacacactacactatatgtgtcggagaatagcacacaacatacatatataccatcaataatgtacacaccatcaaccaaatctggctgtgacagaattggtatgctctcgcgtgtagccagtggacaacaatgtactggtgagtgatgtngttgatgacagcatgctggctgcacctatactgctgatgtaaaatggaggtagctaataggctattttcgt

SEQ ID NO: 9027 - DNA, 409 bp, Oryza sativa
  unsure (1)..(409): unsure at all n locations
tgacgaagntgccggtgtcggagtacgagttgcttaatctgattatggagtcgatcatgtgatggccagggttggcctgagcatagtgtgtgcatccaatgaggagttggaggaggagaacgagaatgaaggtcatcctgtctgaaggtgagtgctccatgggtaatttgggcttttgtccaactgctagcttacgcctgcaagaattcangattggcgccaccagtgagatccttcatgttattaacatgtatttggttgataatgacagagcaattagtagtacatgtttatacttcatagtgtccagttatacttttattaaatgtgataaatactaccctcatcttacaatataagtttaactatgaatcatgtgtgtctagaatcataactaatacttgttata

SEQ ID NO: 9028 - DNA, 383 bp, Oryza sativa
  unsure (1)..(383): unsure at all n locations
ntacagacatctcgtcgatgaggcaactgctactgtggccgttcctgcctccatcttccatgaatcacatctgacagacgttcacatggcgacatgaacccccaaggtcattgatttatatgaagggcagcaacaaggagggaagggcgggtcgcaaacacatccccgcggccgtcgcatcactaccaccaccgacgcggagctagagaaggggtgaagcatatttcgtatgcgctcgcccagcagcatgagcccttgtggtcatcgattaccgaggaggacggtgacagagagggggagggtgcgcgtcaagcattgcagctagtcactacgacactgtaggggtggataccgaactggctangctcggctcgttatgctaa

SEQ ID NO: 9029 - DNA, 374 bp, Oryza sativa
  unsure (1)..(374): unsure at all n locations
ctatatcaaatattctggtcagctgacactgcagtattgtacactctacttatatgatgnctngactattattngtggttattacatatattgngttcngatatcatctgtgatgcatgatgtctgtgtcttgagagatcatacactgatctgactggctgtatctgcctgcctgcagagacactacagttgaaatgctctatggctctggatagaagaatactgtgactgacatcatgtattgtctggactgatgcgcgtggatattgatacaggtcttatttaagactacagagnatgcatactccactgtcctgtaacaaactatagtgctcatgttttgtcaaacagccatatgggtagacaattcacat

SEQ ID NO: 9030 - DNA, 302 bp, Oryza sativa
ctgttcgggcagctggaggaagaagaagacatatatatacgggtgggactctaatcccggctggcgttaccaaccggggctaaagattcccgagatctataagtcccggtggtattaccaacccgagactaatgttactaacccggactaaagatccctgcgggggcctgacaagccctgacagcatttgaaccgggactaaagatcaaatatgcccgttaccctttttaaccgggactaaagatcatctttagcccccgtctttattgcatccgggactattgtagaattcccgcgaccga

SEQ ID NO: 9031 - DNA, 452 bp, Oryza sativa
  unsure (1)..(452): unsure at all n locations
ttatgcactngaatgccagtggtactccagcatgcttgccttatatgcgcacaataggttatataagacaacccagcttgttaaaaataatagaacagacgtgtccagttttgtgctcaaattacatacataacccctaagtctcatcccatcttgcacgataggtgccatttatgtggatcattaatttgacggtacccgatgcctgtaaagtgagatcaacaaacaatcgattatatggttcaatggtagtcaatgttcacagctaatgaggctaacagacttagaagattagtcaaacctcatgaaatgacacaggcccagcccacccacatagtgaagctccccatatcttgcaagatgaaatacatattatgtgctatgagtaaattatagtcatgtctcatgactagttgaaatagcacagtacccgaagcttctgtccctataaa

SEQ ID NO: 9032 - DNA, 234 bp, Oryza sativa
  unsure (1)..(234): unsure at all n locations
aaaacaaagttaaaaagtacggagatgctggcggacgatggccttgatgcgaaggtaacattccttgcatgtcagaacaaaatcaatatatttttcattaattaacaacaaacgctctataagccttctttatatggccgcgctgtataagggcacttggttgtagagtgatcactttcacctatactcatttttaaaacagctggacgcccncctcttctctctccccactcc

SEQ ID NO: 9033 - DNA, 431 bp, Oryza sativa
tcatggcacatgggggtggtggcgacacttatgcagccgtgaagaagtaccttggtcggattctctcggaggtggttgatgcatcgatacaaaagctcgtggattctggtggtggtctgagtgtgtcccaagcaatgcaagctgctgcaaatatgtctgttatggagcgtgcgtgtgagtttttcacaggccatgcagcgcaactgtgtggtgtgccacttcgtgcagtggagcgtgggcggcgtgacttcccacttcgcaagtcccgtgatgctgcagaggcacttttactacggcttctacgttccaaggttgatgagttcatggggcaatctgatggtgcacttggatggctgagatccaccagctggtggaaatgagatgcaacgatgtcttattatctcgagacactacttaactgccagcagatc

SEQ ID NO: 9034 - DNA, 474 bp, Oryza sativa
  unsure (1)..(474): unsure at all n locations
tagccagctgtatggcacacgnttgtatttcaagcacatcatgatttggttcttcaccttcatgatatgtggtgagagtaggttctaaaatgtcattcatctgatgtggaaatgctgactccactaagctgtgaaggttcatgccatccttaaagatctcatcgggtgggcgctttcctgtgatcatctctaggacaattattccaaaactgtatacatcaccctcagttgagaccttgcaccccaagccatactctgcaacaaagattgaccaagttacttaataaaatatctgtcagtcgaaatataatactcgattctatggaatgggattgcccatcacctccgtgacagataatgtggaagctgtagatacgaacgaataagaatgaaaagttcttacctggagcaatgtatccaattgatcctctcagtacagcagagcttgatgaatttccaggcttatatgtcatt

SEQ ID NO: 9035 - DNA, 480 bp, Oryza sativa
  unsure (1)..(480): unsure at all n locations
accgaattanngttaaaaatcggtctccatcacttatgtatcggtctggaaaaagcagttctgtgtttcaatctcggtcattattctgccaccggcacagtcaccagacagtggtacgatcgacaaggtcgcgtattgctgccaccaccacgtgctaaacctcaagatttgtgcagtcggcatgcaaaactcctctagtcaatggagcggctatgctagtactcctacattattccgtcgtcactcttatacaaacaaaaaaacggtgcggtgtacgcaccgtcgcggcgccgaccgaccgccagtcgtcgaagcatgtgcagtgagccgcgaacatacacctaaacctaacacgcagtgcgtaatctgtccgggttcagctcacagctganatgtcaggtccagaatctgaaagcctgaacactgatcaacctaactactggtgtgggttgaacaggccatatactctactggatacat

SEQ ID NO: 9036 - DNA, 487 bp, Oryza sativa
  unsure (1)..(487): unsure at all n locations
acttctctctatccacatatataagtacttttagactatacatgatcgatcttcaatgtactatcttgaccaataatatatataaaaataatttatatttttaaagaagttgcatgttaggatagtttgtttaatgataaatctaacaacatccttattatgnccatgaattttatgattatttttttttgctattgatagttaagtcaaaacttagcactcttataataaaactagaggattgccccaaaagatatcattgcatgtagaaatctattaggatttcatatacaacccttggcttatatttctatgagcatctgaatcttatatacaactcttagattctattatatataatcccgagattatacatacaactcttagcttctatttatatgagccgtttgaattcatatacaactcgtagattatattctgaacccgtaatttatatacagctcttagctctatcttatgagcatct

SEQ ID NO: 9037 - DNA, 342 bp, Oryza sativa
  unsure (1)..(342): unsure at all n locations
aataataatacttactatgacctacatacatttacatcggntgatgatcgaacaaagagtgtgctgcaaagagcatntttctcattgggtgcttgcatcaatgcttttgtgcattgtcgacctgttctatgcatagatggaacttttatgacaggtaaataccgaggtcagatattgacagcaattgggtgtgatgggaacaaccaggttctacctatggctnttgcatttgtagagagtgagaacactgaaagctggtactggtttctagagagagtgcacattgcagtggtgcgtatgaagcccaacgttntgcctatacatgatcgtcatgcgggtatg

SEQ ID NO: 9038 - DNA, 62 bp, Oryza sativa
ctactgggatggtaggaccacaccttatgttcattcactcactcaatctggagacactatca

SEQ ID NO: 9039 - DNA, 494 bp, Oryza sativa
  unsure (1)..(494): unsure at all n locations
tgaactnggtcctggctatgcagtgcatccctcgcatcttgatcgctggcttaaggctgctagcacactcaaaatcaaggaattcgcctttgagcttcccctacgcaacaagacagaatacaccttcccatattcacatttgctttctgataaccgtagaggaaattcagttcaatctttccacctatcttcctgcacgctccatccaacacttcagtttgagtgcttgagaagcttgaagagtgtgcatttgagttgggtggacattactggggaggaattggcatgcttcatctccaattctttcaatttggagagtttggaaatctcttnctgttgcaagattggtttcctcaagacaacaagtgtgctgcanaagctcaactgtctgcgtgtgcagcatagccataggttagatatgatagagatnaatgctccaatgctctctagttntcattatcgatgggccactgacagtatatcactcggagatg

SEQ ID NO: 9040 - DNA, 191 bp, Oryza sativa
accaacggtactattaggtttataccttgtattcgtattggaagtactatatcgtgtcgccttattcacaggactgttgatctgtgacacgtctgtcatgtaagccttgaataacactttgttatgagtgaccttttttatctgaaactctgtaatacttatgctatcagaagtgtgatgtcttatgctat

SEQ ID NO: 9041 - DNA, 301 bp, Oryza sativa
aatatgtcatcgtcgatatcttgggcattctcttacatatacaaatagcatcatactttggatgatataatcactgagtcatattctctgtgaagtatgctacccctaatacgaatcctaacttctgctgaaggcacaaatgcaggagccaccttgccataaaactctcattattgcctgtgaggacataccacgccacccgcctttctagagattaagctgcattttcgcgtaagggcccaaatcatctttcagataccaagcacctcttggtagtcctaactccattcaaactaaagtt

SEQ ID NO: 9042 - DNA, 127 bp, Oryza sativa
  unsure (1)..(127): unsure at all n locations
gaacacaaggaactgaagctgcttgcatcttgtcttntactatgatatcgattccgacaaattattgtatataggctcgtgtagtgtcagactatgctgactctgtatgaccgatcttatatgacat

SEQ ID NO: 9043 - DNA, 309 bp, Oryza sativa
cgggacttgatctcactcttgatctgatgtggctgccccatcaataaccctgcccacgttggtctacatacagcacctgctatactctacatgatacatccaccttgttctctgatgcgaatagtgctaacacacatcttatggatggcctatactctagaaagcatactacttacacgaattgtcagaagatatggcactctatacaagacagtctgaacgggaatatgtatactagcccattattatctgaataaaagattcgcagaacatcgcaggtccttctcttatgcataagtttagaaaact

SEQ ID NO: 9044 - DNA, 484 bp, Oryza sativa
  unsure (1)..(484): unsure at all n locations
tgtgcatgtntaacatcatcaggcttgcaaagtaattgttttaaaaaaccagcataatgtatgaagccctctttctcccattgactaaggtagtgagcttgtttgtttgtttttatcaagccatgatctatcatttatgttgtaactctctttctcgcatgttttttatcttgtggtttcttgcagctattgaagcaatctttacaaatgaaaaggttcacgacattgtgcctatctccaaggattcagtccttatccttggtcaaggtaatattcaatgatatcttgaagattgcattctaaattgcatgaatctggatagtttgcttatcttcttctaaacctnctcctaacatcataaatattgtgtttgcaggcaacatngttttgtatggaacttctttgaatttgttgatatatcatatattcggtaaatctatctgaaaagctcgatgtncatttagtccttttttgtctcattggt

SEQ ID NO: 9045 - DNA, 154 bp, Oryza sativa
gtaacagactacacaatgatcaactgtaacagatgagagcaagtcttgatataagggaataacacatttaacccacttaaataatagtaatgctattaaactgcatgatttatctagagctttaattaaacataattttactactgtatatagc

SEQ ID NO: 9046 - DNA, 435 bp, Oryza sativa
  unsure (1)..(435): unsure at all n locations
aatctgcttgggtgttggatgacatggtgtgttctanggtttatatagatgtgtgaaggatgtgaaggtctatgagaagatgttggagatttggagtaacgtagagattaacagagtatgtgagtcaacaaaaaggaaggagacaagaagtacacagggattacagtaaaataatcaacagacatgtttgttctgaagatacttgagaaatcgtcccttagctacctctacagtgtaaatggactattattccacttgntacacgctaccgctagggagtagctagggactccacttgttgcatgcgtacaatgaattaatactgatttttctacaaaataaaagggtaccccttcgtatatagtagtagaaattaatacaaaaccaacgttggtgttttattttaagctaatcgtattaggatatgtcatgttc

SEQ ID NO: 9047 - DNA, 98 bp, Oryza sativa
  unsure (1)..(98): unsure at all n locations
gtgatatgctctatgatgttaattattaatttagctgattctctagaggtctttntattgagattgtatgttttatcaaaatgtgtaagtcattctag

SEQ ID NO: 9048 - DNA, 248 bp, Oryza sativa
cttgaattattatatattacatgtactcaattgcagtacaccgtttgtacattgtctctatagaccatgcttaggaaaaaatgttggcgcgttttggatactatgaaaccatgttgcttaggcccactacggattggccatagaatgatgtgaacgctaccttttatgtaggcagttcctatgggtaggtcttttttgaacaccgtcttggctgactgattttcttatatcgcgttgcacacaaatgg

SEQ ID NO: 9049 - DNA, 425 bp, Oryza sativa
atatcactctttatatgttgtgaacacgatatgggtgaaattctcagggcgataactgtagctctgcccgaatcctttaaccggctaaactcgccgcaaaactgtagctagtatcatctctttcgatatacatgacaacaaccaactcaccatcagtttcatctcaagcactcaaggctcgatctcactgtatacaaacacctacactagtctcttctctcaaactcctccctgaagatctggtattattattcatcgtcgcgccgcaattaacctaacccaccatagctgtgatgaaaatttctgatgcaacatcatcttggatcatttccagccatagctctcagacctgccattcttctcctcgcagctgatcgtcgtcgccgatgagcacgcaccagccatgcctgagcctgataaatgga

SEQ ID NO: 9050 - DNA, 497 bp, Oryza sativa
  unsure (1)..(497): unsure at all n locations
taccctatatccctctctattntacagctattatcctagtcaactaaagcactagaccccggtgatttgttntattcaagctcaactgacagcaaggaaagcactattagcaggcagcaaatacaaaattaattaggtaacacttataattatacgtcagtccacacaaatgtatacatttcagatttgagtcagcaatggtgattcttgaaagactaatagagtcaacagttcaaatccaaataatgatgtgatcatttactntcatatgtcttgtgaaactagaatttctacccacaattctgatgtaagagatagcgagatagccactacaagaacaataatntattntaccataatgtgtcatcattccttttgtccatactctttccaattttaatctctattttcacatgcacgctttcaaactgctaacgatggtntcaaaaaaatctacaaaagtgctttaaattgataatcatctaaggttttactat

SEQ ID NO: 9051 - DNA, 419 bp, Oryza sativa
  unsure (1)..(419): unsure at all n locations
tggaggaactggagtagcattaccaacttgtggagnatttggaggaactggagcaggtttattaatttgtggcgatcttgaaggaagaggaacatctttctccatatcaactggagttgatttcgagcaattagcagatgctctattggctngcaatgttggttttggaacatgatctttatttgaaactggctcaacttttgtcttggcaagggccatgccagataaagcttcagtactctttgtgcctggcatgactgaaacagattcctctgccacgcaatttgtcacgggttcatccttatttggtgttccattagctattgcatctgttgtaccttctgcagactgctcagggctcttcacaacatcaggtgtttcatccaaaggactggatgagggagatgaaccactcgtct

SEQ ID NO: 9052 - DNA, 223 bp, Oryza sativa
tagtgcattttacacttacggacattgaacccaagaagatttagtatttatttttaaaattatttttcggcagttactttgaccggtaaagctgtagacttgtatgcccacatctccatactactagcgaccttcagggaactggacttcgccagaccattaccactcttaagaacgcaatcccctccgagcttgtacaaattttccagtacgcggtataaac

SEQ ID NO: 9053 - DNA, 465 bp, Oryza sativa
  unsure (1)..(465): unsure at all n locations
tcatagctgccatgctagcacaggccggcaacacactatcaatctctacagcanttggtctgatgccttgttccaacaaatatcggaacattntcactgcctcttgactcatcccatttagaacataaccagaaatcatagtgctgccgataaccacatcaatggctntagaagaatcatagacactttgtgccatcctcactgctctgcacttgaaatagatatccaccaaagcactaaccaagaatacatccatgtgcacacagtttctgacaatataaccatgaagctccttcccctgattgaaaccattcaagtcagtcaaagctggtagcaagctcaccagtgtaactgaatccggtcgaataccactcttctgcatatcacanaacanaagcaatgcctgatcaacanaaccattntgcacacatccggatatcatcccgttccangtcaccaagtcat

SEQ ID NO: 9054 - DNA, 158 bp, Oryza sativa
tgtgggtatgcccctgtgcagctaccgtatgctgtctatgatgtcgcagtgcttttgaatctatatattagtaaaatgattgatgataattagtggtagtgatgggagcaattttaagtattaggacttacttatgagttaacatgagtaactctgag

SEQ ID NO: 9055 - DNA, 450 bp, Oryza sativa
  unsure (1)..(450): unsure at all n locations
gcttacatactggatggagttttntagtagntagcatgttggttattggcagtcaaattttttttagtagaatggtaggaggatgggcttatatttggcacaattaattattcagaagatgttgtctcaatcttccattttactctactaaacttattccatatgttttcttaaatgttaaatacttaaaatgggactgcagtgggtctctgatggttgcttgatagccataaggaaaagagagacaaaaataatgaattcatgcagaggtttcagtcaattgcaaataatatgagaatggtcgacttanaattgaggatggtgtgatatgacgagcctctggtgatatgatcattttcctttntcatgtcaggattgacatctttggatggcatactcagaatttccatgttcttcagctcgcaataattcatcttcacgtaatatgat

SEQ ID NO: 9056 - DNA, 223 bp, Oryza sativa
aatgctgtcgtcctacatgctttctcctaaaacggatcaaaagagatacgttggacgcagtcaccattccagatgaagattactgtaacacctaacatatggtggttgcagtgaattagtaaataccatgtgatagggaaagctttaagtggcatccaggaactaatgtgacaacagaaaaaatctactactgagcactcattagttcacaacatactactct

SEQ ID NO: 9057 - DNA, 437 bp, Oryza sativa
aatgcttccgccaaccgggtatgccattgccaaggataatcacaaatctttcgcttaattaattagatcaagctcttgttagatgcctcagcctgcccattaacttgtgcataatatggtgaagaattctacaatttgatacccacgctatctgcaaactgaacaaactcatcgaacacgaatattgaaccttgatcagttgtaatagtttgaggaataccaaatcggtagaatatatgttcttgaacaaattgaattgcatccccagaatcaactttcttcaaaggaatggcctccacccacttggtgaaataatcagtcgtcaccaatataaacttatgccctttacttgatggtgggttatgtcacgcccagaagtttccctttttcttgctttataattgggtaataattggcgagaaatatcttattaccta

SEQ ID NO: 9058 - DNA, 305 bp, Oryza sativa
ctctgactactgcctatgactcgcactgtcaattattgcgttaggtgtactttcaactcttgtcaaagtgacaacatcatgttgcatgagtgagtgcggacattctcaggcggccggatgaagctcatcacatctcaaatgagtctacttgagagaacattaattcagtgatagtggcctaactggagctctactgtactgtcacatttttagcggaccatcaaaacacttgtcactgaacaagcacaagggggatgcataaatataactacaatactagtgtagtatgagcattatacactatt

SEQ ID NO: 9059 - DNA, 434 bp, Oryza sativa
  unsure (1)..(434): unsure at all n locations
gagatatatggtgatgttatagcccaatacaacttgttgtgggattatggcaatgaactaaggaggtccaatcctgngagttctttctatcttatgttagatgagggcaaatttagtagcttgtacttctcactagatgtatgcaagagaggattcctcagtggttgcaggccaatcatttgtctggatggttgccacatcaagaccaaatttggaggtcaattgttgacagcagttggaattgatcccaatgactgcatataccccattgcaatggctgtggtagaagttgagtctttcagcacatggacatggtttcttgataccttgaagactgaacttgngatagtgaacacctctccatggaccattatgacagacaaacanaaggtaaccatttgaaaatttttaactgggattgtatttgtgcttga

SEQ ID NO: 9060 - DNA, 133 bp, Oryza sativa
tatcatatgctatatgacttatagcatatgaatgcgatactcatcgtatctgccttgtgacctcgacttctggatacgtaaaattgtacaaggaaaacacctaaatatcctgtctcttcttattactaatctc

SEQ ID NO: 9061 - DNA, 411 bp, Oryza sativa
  unsure (1)..(411): unsure at all n locations
taattctatgaatttgcntttatacatggctccaattgctgttattctcttgctccctgctaccatcttcatggaggacgaacgtgttggcattacaatagaactggccaaaaaggacaccacgantgtttggttgctgctgttcaattcctgtttggcatattttgtcaatttgaccaatttcttggtgactaagcatactagtgcattgactctacaggtatggcatggagtctcactctttaattcatctcttgttactggagtagaatttagcagtgttcaagaaaatgttttagatttcaaatttgttgctgacatgttagtacagtgtacccactcacttccatacatgattntagaatggcgtttgattgattggtaatacataattacacagcaatattctca

SEQ ID NO: 9062 - DNA, 456 bp, Oryza sativa
  unsure (1)..(456): unsure at all n locations
agctnttgaccctangggcattctcngtcttttgaagaatatatctttacaattgagccgaaagtgtcctccagcaccatttatgtgatgtctttcagccgtgagtctaccagcaagttacacaaattttaagtgtcctgtagcaaattttgcctagattcaaaccattgagaaggattcatagccccttaactnttaaatgttaagggactatgaagaatgtaaacaactaaactacaacacatttaatgtaatgtatctgctagcatggaccataccactcttgcagttgtaggctctttcaaggtagcttggatcctttgttntcctccagcagcaccctggcttgtggaaataagggcccttatctgaacaagcatcgaaaaaatttggtcagtgatggacaaggactataattntagatcagaccatatatgaattgtgtatataccttac

SEQ ID NO: 9063 - DNA, 54 bp, Oryza sativa
aacaggctttgggtccttgtgaatggtagagatagttgctgtaaacttcttggc

SEQ ID NO: 9064 - DNA, 320 bp, Oryza sativa
  unsure (1)..(320): unsure at all n locations
ctgatcattctctanatgcctctcacacttgccactggctgctgcatgctctgcacattggacttctaccatgccaccgcaagagattgagctcatgtatctcagtgggtgcagtgaattgaatatacaccctacgggattgagttttaatattcatagaattaaatctctgaatcgtactatgagctgatgtttaatttatacaaagtgcatatgtgcagctgaatgtggatgccaggtataaaatactactctagacacacgaaacttttctcatgaccacagccatgaaacagaagtggtcaccgcccttatctatg

SEQ ID NO: 9065 - DNA, 275 bp, Oryza sativa
aacagccaattaattcgcagtgtgcgccatgtgtaacgtcgtcgaccgacgcggcccgcgttggtacagcggacgaacacctgaaggaagagagtgacagccctgtgccaatatcatcaggggaccaggaagactaaacgaaccctttcggtatggtgagccaacccaagcgacgaaacgcctggacgtaaacatttcaaactgcacaactggccatttgggcggcacatcggcactgtggaatgacatattgtgatttgacactctgtgtatga

SEQ ID NO: 9066 - DNA, 177 bp, Oryza sativa
cttaactatacctgctattatgcgaattttcttatttcaagctactccaccgtagcttggctctaacatctgcgacgtattactcattataatggacgattgcatctagtataagaattccgggcgaaaagagtctctctctctgataacagactatttcttacgtaacatagaaaa

SEQ ID NO: 9067 - DNA, 417 bp, Oryza sativa
  unsure (1)..(417): unsure at all n locations
acactgtactacagaaatatgtnttatatacaataatccctatagattgtagacggaccgtaactgatcacgccctgcaaaatctgattttattttcgcacatggctccttaagaggcccgcatgtaaaaaatctattttcgtagacgaaccacttaaagggctacacacaaaaataagtatattttcccacgcggttcacttaaggggctgcgtacaaaaataaatattcatatacgggcctcttaagtggtctgcatgcgaaaatactcctcttttgcacatatattttttcctcctctctcttttccttctcaccattgtaattnttttacctattctcgcctctctctctcttcctctcctctcctctctctntctctcctctcatcaccgagcaggagtgggcgccaccacc

SEQ ID NO: 9068 - DNA, 235 bp, Oryza sativa
ctgtggcatttctgctcggcgttccactcatctggtctctaagataaatctatcggtttttctgaagagagtacccttatccttcggaggacacttgacatagcattcctctctcgaaactgtcatcagagactatctcaccacgatgtcgaataaacgcaaagagcacactacagctcttttcttgacagccttttgttgacgtgcaaattttcttatcttgactacacgcgtt

SEQ ID NO: 9069 - DNA, 451 bp, Oryza sativa
  unsure (1)..(451): unsure at all n locations
gctggtagctgccttgcatctcttaggatgatatggtccttgattgactctgccaaattcattctaatgtatgatactatgattcctttgcaggctaaggggcgtcttcataggtgggactttgagacggaagaggagtgggccaaatacaacgaccagaaggaagcgatgccgaaagctgcattccagtttggagtgaagatgcatgatggcaggaagacgaggaagcagaacaaggaccagaagctcacgaatgacctacacaagattaacaagatacttgcgaggaagaaaggtgacaaagatggaggggatgatggtgggcattatgatgatgatctacctagtggcaagaagcagcgcgcctgatgcaagccactaatagtntatcctgcgagaggtgtaaaaatgtatttgtactatgaattacagcgccatgaacaaacgacag

SEQ ID NO: 9070 - DNA, 188 bp, Oryza sativa
gacgaagaggagttctgcgacgctttgatgagtaggtgttataatagttggtacgcgggggaaagtttttatctaactattctgatagacgaggacgttatgcattgaacgaaaatttctgtcgagtcgcaacggttctccgggcattgggcgacccattccgtgattccccccccaacccctttttt

SEQ ID NO: 9071 - DNA, 488 bp, Oryza sativa
  unsure (1)..(488): unsure at all n locations
aagaagacaggatgataatagtatgatttgtgctntagtgaggagagagagagatagagatttttgcttcacactgctgctgctgatgctggctgctgctttgtgtgtgagtgtgtgtatcaaaagcagatggagcttaccttancttggctggggctgcangaggctggagcccaagtgatgaagagagggtggtgattgggaattgggaagggatggatgatngctgggggatgtgggttatgcatgcgtggatgattaggacatctgttgtattattaaaaaacagtagacaacgatcgaatcgcgatgaaactcgaacacacacacgtgtacgtgcctttgggaaanaaaataaaaaccggaggcacacaccctagtctccatggataaggaattaagcgcatctcgatagctntatggtaatatatnagcaatttaactattgttatatatacgttcgtgtatatgtaaccgctagtatctac

SEQ ID NO: 9072 - DNA, 407 bp, Oryza sativa
  unsure (1)..(407): unsure at all n locations
tgaccgctgtcagctactacaaaatctataccattaggctntcatcaaggaacttattctttctagattttgtgaagaacgattacacttaccctttgttaccgaagctttactatataccatatgtactctatctaatgttttcatattggactaaatattcttaccatttttcactatggactcacctaacacttgtgtataaccacatccaacatctccttcgcaaacatgtgagctacacataagtagataagatcattggcatgaagacgctgatgtactcgtaagatggtgatcccaaagtataaagggtgaaaatcctacttcatggcgaatgattggatagaagctactctaataaaccttgatataaatgtgataactgaatcaccctataagaatat

SEQ ID NO: 9073 - DNA, 164 bp, Oryza sativa
actctccgtacacgctataaatacagataactcacattgtaagcaaccactatagctactataactgcatacgtacaactacacacatactgtgcctgcacttattctccatctgagggccaaagcaatttagcctcatgccagtacccaaacctgctctattt

SEQ ID NO: 9074 - DNA, 487 bp, Oryza sativa
  unsure (1)..(487): unsure at all n locations
acacaagaaactaagcttaataggtagagatcagagctttttatgatgttcgtgangggactaatgttcagtacgcacgtctganattcagaagatggcatctaaatgttgttcacagttttttcaattggtttccaaaccttgaattacataaaaagtagaccttcatccatgacaaaaatcctcattctcttgtaggttcttagcctgatggagaaatggcggttctctatctcttgtgaaaaatatagaagagggaaatactctgcatgtcaccctgtggttctctatgttttgggaaaaatacagaagagagaaatgctctgcctgaaacgacttgtaaatcggcaaaagaggattgtagtttgttgatatagactcttttgaatctgaaattgtaagtttgcaggattatgctgcagctgaatctgactttttggcaatttgcatgataatgtcaatgatctttatctgaatatcatgcatg

SEQ ID NO: 9075 - DNA, 208 bp, Oryza sativa
  unsure (1)..(208): unsure at all n locations
ctctctcatgtntttgctctcttgcctgttgccttttgtcaatatgatgtaaaaatgtgggaaagatttaattgtattctacagtttaaagtgagaacttgagtttatataacactatataaagacctaatgtacttcatgttaatatggaatttattgtgaaaattatatgtacgttgaaattggcgttcttgagagtggcctcggc

SEQ ID NO: 9076 - DNA, 492 bp, Oryza sativa
  unsure (1)..(492): unsure at all n locations
tccttttactttctgagaagtatgttagtgtattctattccattatatcatgaagtcctccatttctttgcattattatatagtaagatgtgatactgctgcctccttttccattccaggtggtagaggtaaacgtcaaagttgaaagtgcaggcccacataatgtgcataataatgcattttacgctgaagaaaaaaaatttgaaatctgaactacaggcaatgcgtgactgtgacccttcatctgcacgccattggattgtaaggatttgtgtgagaaacattgtatcgtcgtgcaaactcaaactttctgtgtgactgacactgctggacgcatgtttgttcaagttangaacacaaggactgtaaatcgtactggacaaccaacagggtacaagctcgtacctggttcaagctgtcttccactggccctgtctgaggcgatatttctgagaagagctggattttaaagcataacctttgggtacatcg

SEQ ID NO: 9077 - DNA, 169 bp, Oryza sativa
agtctataggtctaatctgttaatatctgaacgacggagtgcacagcatgatcctggtgatcatctattaatgcgcgccggtttccagattccaatcattcgtgctatttacagtaacatgatacatactttgtggtggctctcacacattagctgactggatccacaa

SEQ ID NO: 9078 - DNA, 458 bp, Oryza sativa
  unsure (1)..(458): unsure at all n locations
tgtcgagctcttctcgtatggcttgggtttgatctggtgcanatctccgcagnntttgctntacttgcttggcattgggtcgcaccatgagtttgtgctcaatcacctccctgngtacccccggcatgtcggacggctgccaagcgaacacgtcagcattgtcgccgaggaaggtgatgagcgcgagttcctatttctcgtctagtgatgccccgatcttgacggttttgtcggggttggcgctggagagtggaacgatcttgattgcgccgtccggcttcagcgtcttgtttgtttgctcactntcttgggtggctcagctatggcgggtgggctnggcgtgtgctcgaccatgtcgaggctccgcttgtcgcattgtactgccagcttagcgttcccttgaatagtgattgttcccttcggtcccgacatcttgagcacttgatacgcgtagtgag

SEQ ID NO: 9079 - DNA, 298 bp, Oryza sativa
  unsure (1)..(298): unsure at all n locations
gattacaccaactcaaaacaatcttctatacattctattacatttcagctagcacttcactaatcaatttatctggaacaatattntcacatttgatttcttctccataggtggatattattacgggaaactcaaatttccacctgattacccttttaagccctccagcatcaggtaatggaactttattttgtatatggaattactggaaatgaaggaatggctacaatgtgatagaagagttatacgtatttgggaagtagtgaacatttgaaactttggtntcatatctgacttg

SEQ ID NO: 9080 - DNA, 470 bp, Oryza sativa
  unsure (1)..(470): unsure at all n locations
cacagntggctcaattagctactttagtacctgcaaatgagtctgggtggattccggggcaacccgaaccctccgttgaaaatgttaaggcgatcacaatgaggggaggtaagtccactcatgatccgccaaatcctaaccctgcagggactagcagtatcacccaggaagcatcatctggtaacaaggctgatgaataagtttagctagagaagacagtgtcgcaagaatactgtgacacacgactgttgctattccctcaaagaagcaggaaactgtcactagacgagcagcttgctcattntgttgaggtgattcanaagatccatatcaatgtgccattgttggatgccatgcaattgccaacatacgcacattatcttaaggatattctcaacaacaaaaggccgctgncaacaactgaggtggcaaactgacggagcagtgcagcaacgctatactccacaagc

SEQ ID NO: 9081 - DNA, 132 bp, Oryza sativa
attttcttgtgtataacaactagaatacttccatggtcaatattatcatcttttgaaacacatacatactttgtcctacacatggccctgtctccaacatatgacattgttaacaaatacataagcatggca

SEQ ID NO: 9082 - DNA, 340 bp, Oryza sativa
  unsure (1)..(340): unsure at all n locations
caactgacgtcttgacaactctcatctggtcatcgcaggacttctaagccgatgctgactctaagccgatgactactcctggcttaccaaatatgactgttaacacatgcgcagcagtgttggagtatgagaagtcatgcttcagaatttcttgtcttgataactccaaaacagagcttcctttgcttcttgcgatcggctttcatgagccgatactgatgtgctccaccatgctgaagactgatgcgcttgccccctgagccaatattgttgttcctncatataactctacaccgagaccatgatcttggcggtgacttattcttcagacatgtggata

SEQ ID NO: 9083 - DNA, 453 bp, Oryza sativa
  unsure (1)..(453): unsure at all n locations
atagtcagatggccattccaggataggaaagagggtagtaaatgtatgaatntagcatcgaataggcaaaaagatggcaaccatttgaaaagatattgtgtngttgagttgctccagaattgtgtatgttaattcaaactgctaggctagcgctgaacccattaactaataacgggattacataaaatgccataaaaatccattggttggtttggcctactctaattgatgaggggaatgctggatcaaagtagcaccatgaatggctaaaatatcattatcggtaacacacatacaagttgctgtacaaacaagagatatcagctccacgatgttgagcaaaaaagtgttgtttgttggagaacatttatatcagatctaacaaacctactaactgtntatgccacaacagatggaacatgaatcagctatagactgcaccaacaacaaatg

SEQ ID NO: 9084 - DNA, 509 bp, Oryza sativa
  unsure (1)..(509): unsure at all n locations
ctcagcttcgactaggctaaaggccatatatcgcaagcatagctgcaacagtgtcatccaatctatctccaataatcaattcttagtcctctttttagtcccatatagatatatatgttgctaccatcctccattaccctttgtaagaaatgaactaagctaagattgtacgatttaattataacatctaagtgctgaaaaggcatcggttaaggaaattaagcattgcatgcagttgggaatcagatcaccagtgccgtagcttaatatcgttccttgtgccatcttagtcctcttgtgaaagggtaataacctgactagcattccaaggtcctaagtttaaatctccatagaagcgaatntcagattagattgttaagtggtaagttctaattaaaatggatgcatatatccagtggattagaggcgggtaaaaaaacccttttaaaaaagctcagcctctatatcgataattagtgataccactgatattatcataaagatattta

SEQ ID NO: 9085 - DNA, 231 bp, Oryza sativa
tgtggctaacggtgcagatttcgtgctgagtgaatacatcatgctaatctctccgatacgctgacggtacctggctctgttttttgttcgctggtatgcactgcacagatacactttttcatttattttattgaacgctatgatttcactgtgagatatacacatacattgtcgggccagctcttttctatctccttttgccgacacagactttaactattaacataggct

SEQ ID NO: 9086 - DNA, 512 bp, Oryza sativa
  unsure (1)..(512): unsure at all n locations
tatttcttcctcttgtccacgcatggcgctgtcattggtaggtgcttgtgttctttgatttaagtattggtgcgatatctccattctcggctgcaaatatctttgaggtggttgctaatcgattaacagattccgctttgatgctcatattgatgctttttttttgccggatgatcaaacagcaggatcatggcaatctagcaataaatcgaggtattctaaatatttttaatgaactacaactttgtaggtaatgaaaagtgaagtatcatgactacttttttttaataagaataatacattttactgaanaatgtatatctcctgaatacttattataaggtgcatatacctcttgatgcctcccaatgatcgaccaacaaaattcagaagattgcatgaacattaaatacaatgaggaaccgtgaaaacatgtcggtaatctctggtttagacaattgaagttattcanatctttattntanagaattatagctagtattatagaatta

SEQ ID NO: 9087 - DNA, 390 bp, Oryza sativa
  unsure (1)..(390): unsure at all n locations
tcgacagcagcaagtgagctcacagagacatccatagctattctatatctgtaccaaagccacacgacaggatgaggatgatctcaccatgagtcggccaccggcgtggtctgcgcggcggcgaggatggcctgcatgcagtcgacgtggccgtagtacgccgcgtggtggaggcaggtcctcgcgtgcaccgagtcgaacatcaagatctggtgcgaaatcgtaactgttactgattttttcaaacagaattactacagtattatcagtatactgattntgcagttcttttctctcacatttgcgtcggcctggaggagcttgagcacgcagtcgatcttgccgtgcatggccgcgagcatcagcggcgtctgcagcataagcagaaga

SEQ ID NO: 9088 - DNA, 282 bp, Oryza sativa
ctgagagagtgagggatcttgcgtgttatgcccacgaaaacttgacatactgcacaatgagacggctgcgtgcaccttggcacgcattgcggatcacgaggcggcagattctaatattgtgttaatatgaatctcactaatctatgattaatactggtgtctatcatggacaagcactcttcttgcagcgttaacaccaacgccttatacggttcccctgggagcgggtgttctactctgtggcaggtttccagtattgcgatgtatacccacgcagtttct

SEQ ID NO: 9089 - DNA, 437 bp, Oryza sativa
  unsure (1)..(437): unsure at all n locations
tatcactgtggccattctgcagatggatattagcacatagatgctttattctgttccagtcctcaagcctatttccatgtaaagttcttctaaaagtgactntatcccaacccccctgcagagctttatccactgtgatgtgctttgtgttagtgatattgtacaggtctgagaattgctcatttaaaggcctacctccaatccaattgtcctcccaaaataaagttcgtttgccatctcccagtttcttagtacagaatttgtaaaaggtgtttttaatctccaataaaccttgccaaaagtgagagtcccccattttattcttaacctcagagaggggtttttttctcagatacttatccctaagtatatcttgccaccaaacttctttggtttccaaattccatatccattttcccagcagagcagtattcata

SEQ ID NO: 9090 - DNA, 453 bp, Oryza sativa
  unsure (1)..(453): unsure at all n locations
gtcgaagctcttcaccgagtgtgtcaacctgtccggcaatcatacagccgtcgatgaataccctcatataaccgaagcggtgtgggaggaatactgctctctcaagaccacccaagagtttagggaatcaagcgaggcacatcgcgtactgcaacagcggaatgagcacccgcatcggctgggcaccgcagggtacatcggcaaggaggcaatatgggcccaagaagatgcagccgctgcagcagtgaatgtccctgccccgttttcagacatccctgaacaaagagctcgcaactgggcgcgggcaaggggtaaggtcaacccggacggctctgncacatttgagaacaaaagtgatgccgtcgtctatcaggaactagtgagttcactacttaacctatactaattcccgtcgtatatagtacaagttcgtataaacgactactctctttt

SEQ ID NO: 9091 - DNA, 321 bp, Oryza sativa
tgctctttaaacttcgcaactttatgtttgtctgtaaatctaagcacaactatagcgtgaatacaccgaatatcgacaaatacctcaaatgtgagctgcattgtcaacgtttacgcgatatctcgatctactgaatttcaattactactggaatgtctctccagaaaactctcactagtataacacgatctgaactactaacaaaatgtttcatggacagctcccaacactgggagccccttttagttctcacagggattaatctcctagctactcgctcatcggccgccgctgttgccgcaggttgtcgctgcataccgt

SEQ ID NO: 9092 - DNA, 505 bp, Oryza sativa
  unsure (1)..(505): unsure at all n locations
tccttttgtataatgtttccacttagatcttaattcgtgtacataatataatatgtttcataacactgccccttggacgaatatgaattatgcgcatgtaccgtcagaaacttctcccacaacccagtggaaaaaaaggtaggagaaaaaagtgcatgacattttgaatattgtgttgcacctgttgccttattaaaaaccttggtgagaaaacccagtgggaaaaaattcaccaaggaaaaaagagtacaacagttggtcaagtcctcaagacttgttcatgattcttcaggatcacaatgatagattcttcttttaattgtntgttccccataatccatgcaattcgctaagtcgtctcatgccaataccataaacacanttgtgaaaacttgaggcgggccgagacttaacananacattngataagagacttgtgaggaggaggggtcggcacgcanaacgaagctcgtttattgcatgataattaagattaactattttt

SEQ ID NO: 9093 - DNA, 156 bp, Oryza sativa
gaggttccgcggtatgaagaaacatgaaagtgtgtgcgtttgtcaagagcttagactgccgattaatttatgctcaataagtgccagtcgaagcatttgttctttggggggtgaagaattggaaaaatgaagcccccgctttaaagggctttaaag

SEQ ID NO: 9094 - DNA, 506 bp, Oryza sativa
  unsure (1)..(506): unsure at all n locations
taagctggggatattttggcctcatcgtgttatagtgccaatatatctccctgataaatagcactctgctgttatgttcccataatccagcttcccacaccagatcttcatacctgtacaccattattttgtatcaacttgggtgcaatgctaaaagaatacctaaaattatttntgtaaggaagtgttacttactttactgtttttttcccaagaagttcagcaaaatggtttagttctgcgtgaagtccaaggtttttatggagcttttgaagaagctgccccaaaccattccaatttgcaacctttagctcatcaacagttggtactgctaagaaaagagagattactcacaagttaggtgacttaagtatattgacaaaactactatgttatacaaattctcttctcaataagagacataaatntcatganacaccatgttttctgacatttctaatgtanaaccccatctctataacttgtataaaggatccctggatttg

SEQ ID NO: 9095 - DNA, 83 bp, Oryza sativa
  unsure (1)..(83): unsure at all n locations
gccgcctcggaacatacttcgtcaagcatcactgatatcgctcaagctntattttcgctcaagcagtgcacaacacatcgtca

SEQ ID NO: 9096 - DNA, 463 bp, Oryza sativa
  unsure (1)..(463): unsure at all n locations
ngtgttcaatcttattctagtactcactcgactcacgtgtgtgtgtgtacttgtgctggtgcatgatgagtaaccaacagcctctacacaaaacttgtgtgtatcgtaccaacacgatgcaaggacgtattgttatctgcataccgnttaagtggacgctttccctccattatagccttgaagagaagttgcaaattaattgcatatttgtaggcttgtactagcacatttctccttgccacaatggtactcctgtcactaatcacttttgtaagcttatggaattttttttctattgtagaaattttgttgaaaagcaacttcacacagtagtagtactattgaacttacagacctcacatatgagtaggaccttaacattgatactgcatactactccataaaaacctgtatcataggagtaccacataaaacctgtaatcattgcaaacatgacatgatc

SEQ ID NO: 9097 - DNA, 230 bp, Oryza sativa
  unsure (1)..(230): unsure at all n locations
tatcacacacttaccattctttatcttctactttccactcagcattgtttactgacacagactgaatatcaggtctattgcgcatggcacccgctcactctcactcacgcagaagcagccctgcgnnnntgcggtgagaggggtttcagataacctaccatctacatgataattctcactcgacctgtagaaaattattgtcatatatcctgtacctgctctgtactgtg

SEQ ID NO: 9098 - DNA, 511 bp, Oryza sativa
  unsure (1)..(511): unsure at all n locations
taattatcaattagctagatgcatctccaggtcaacttgtggttatgtcgtcattaccaaccaataactagtaacaataatagtacatgatcgacagaagcatatatatatgatcaatntgtgagtggtcagtgggttaatttaaggcccgtttagttccccaaaatttttccaaaaaacatcacatcgaatctttggacatatgcataaatcattaaatatagataaaaagaanaactaattgcacagttatggggaaatcgcgagacgaatcttttaagcttaattagtccgtgattagccataagtgctacagtaacccacatatgctaatgacggcttaattagtctcaaaagatttgtctcgcggtttccaggcgagttctgaaatntagtttttcattcgtgtccganaatcccttccgacatccggtcaaacgtccgatgtaacacnnctaaaatntcttttcttcaactaaacacactctaagcaagcacataattagtcgtc

SEQ ID NO: 9099 - DNA, 212 bp, Oryza sativa
  unsure (1)..(212): unsure at all n locations
atggagtgcggtagtcttgcaatttttagtcacgccgcttgagataactaatatcaacactcgatcgttactgaacattatagctatatctgctaaatgtctgacatcatgcaatatggagtagtcaagatcttcattactcactgcatgatntttcgcactatgcatggcatattggagtctgcaataagtgctaatgagtgaaaagtaag

SEQ ID NO: 9100 - DNA, 505 bp, Oryza sativa
  unsure (1)..(505): unsure at all n locations
tcttgcanagagcatctntggttagtactcatcaccatcttttttgtcacgacaaaattgtacttttgatcttactgtactgtgtcacaagaagatttctgagtagcagcctagcaggaaaagagttgccaaacgatagtaaatgggattacagattcttcaccataaatatttacttttgatgatctacttgtaacagtaatatacttagcagtgcagaaattgttgcaaatttacctcaagtgatggtaaaaatctgtgcttttgtctgaaggtccctgcggttactggtatgtgtcgttcttccagcaagtggcatcaattggaaacaacattgcaatccagattgcagctgggagcagcctcaaggctgtgtacaagcactaccacaccactgatgatggcgccatgaccctgcaacagttcatcattctcttcggcgcattcgaagctgtactctcccagcttnctgacatccactcactccggtgggtcaatgcttgct

SEQ ID NO: 9101 - DNA, 411 bp, Oryza sativa
  unsure (1)..(411): unsure at all n locations
gcttctcaccatctcgctgctagcccaagtggtgcagctacctctattaatgatcatgctgcaacaacgctctttgacgacacactntgtttggaacaacgtgtgtcgctgattttgctccgccttctccatttgtgcgctaaggacacgctgcacaatgaggctctcatagtgatccgcaaatgcagccccaatgtgctcttccggtggctcattatctgcatggtcagccgcaagcaaagcaagtgtatcatcatcgaaatcactagcagaggagtactcaccatcgtttntgactaccaaaactcgcttgctagggcagtcacgctgcacatgcccaaagcccttgcaacggtggcactgaacatctctcattctgcctgtggatgccattgaagaagcactctgtgc

SEQ ID NO: 9102 - DNA, 108 bp, Oryza sativa
gctgaggccgagagcgctctacctgtcattgacattctacgttatgacgtagaacacgaagatcctgaagaatgacaccactctactgctgaggtacaagatgcatcg

SEQ ID NO: 9103 - DNA, 283 bp, Oryza sativa
taatgcaagtgactgtagccatgtgcaactggtatcacactgtggagcatgcgtcataaacaagcgtgtgcataatagacagctgcacagctgtgattagacaaagcatacatgctacattgagcctactcctcaattagatcactggtattggactatcctatatattgaaactacacgtgataaatactatctacttaatcgagaaatacgaaggattcgtttctatacagacagatcactgagaaatgcaaatctactttcttgttgtaccgatctagtg

SEQ ID NO: 9104 - DNA, 67 bp, Oryza sativa
cagcactgagtcagctgcgtatctactgctcacacctctgctatatgtcccggcgacgtactatacc

SEQ ID NO: 9105 - DNA, 485 bp, Oryza sativa
  unsure (1)..(485): unsure at all n locations
ctaagctatgggcaagctgcagctcgcactgaagcttcatcatcattgtgttggaactgtaacanaataagattactaaataagctaacaatacattctcagagaaaagtttgagcagttcatttcaacgaccatagcaagtcatgatcccatataattagcaaatttgtggccccatggaacagaattactaagcacactattatgtttttgaattttaaacagaggactgnaccttttcagtagttgaaggtaattctctgtgacattatgctccctccatttctccaaatcaatcacattcaccccagacatccaagcacacgactgcggatcatatgttgctttacccagaaggtttcttagttgtcccattctcagaccacanaactngacagcaccattgaccttatctcccatatcaatattccacaagagagagagatcacgttgaacaaccacatcatcatccaacacaatcacct

SEQ ID NO: 9106 - DNA, 330 bp, Oryza sativa
ttttaggtcttatgccacgcatttttttaacaaaatgcatgttcttctcttgaacttttgtctcttattgcagacttaacctatgctgtatcacgtatcactctaaatgataataactggatcagcgcaagttgataaaatgcatcatggatgtctgcatgtagatgtagaatacgcaaggtttttgtacatgatagtagagaggtacagtgtacttatgagaatataggatatgtgcgaaactttcgtgaagcgcttttggtctcaatacacactcaaatccaacatccccacctactagttatgatcaagtgtctttttagatgaatc

SEQ ID NO: 9107 - DNA, 338 bp, Oryza sativa
tcaagcgctaattctgcgttgctcttgtccaaatcatactgaatatatatctgtcaaaacattatttagtatataaatgtttgcagcgaacaaaagtcacagctgcacaactatatgatttccttaaaatgaataaatgggaacttgtacctgttcttcagatataacattcaccggtgttcgcaaagaaaacacaacatccctaccaaaaagacgctttcctttgatctcccaactggactctcttgagggtatatcatcgctgtgatttactggtttggcccagcaccaaatgatagaacaaatggtttccaatatttgggtgatttgatttatat

SEQ ID NO: 9108 - DNA, 132 bp, Oryza sativa
aacgggacgtatccaggtatattaccaagcttttagtttctttgtagacctgcgtgaagtttcacttaacgcagtgaaatttttggaatgccttcagtatatgtacactccgctgcgtgaggtcggcaattt

SEQ ID NO: 9109 - DNA, 492 bp, Oryza sativa
  unsure (1)..(492): unsure at all n locations
nggctgccagcatgcagtgcactntctgagatgatgatgtaccacatcctctctccagagaaggcgcanagacattgtgttgggaattttggtgtggatcttgacaacatttaccatacctctgttagaaattgtgatgctgaagggccccttgttctttatgtttccaagatgaccctagcattaggcaaaggcaggtattttgctttaggacgtgtcttctccgggaaagtcacatctggaatgaatgtccaattcttgagtcccagctatggtattggtgaaagaaaagatttgtatatcaaatgcattaagagttcccttatttggataggagataaaagggagttagttgagggttcttcttgctcctctatccctggtcatagagacttatttgacaaggccacatacactacagttaattgtatggaacataaacagggattagaanatcatagtcactggaaacattgtgtatgtgtttacttc

SEQ ID NO: 9110 - DNA, 447 bp, Oryza sativa
  unsure (1)..(447): unsure at all n locations
tgtgatgagaataaagtcttgacanaggatggtcaagacctcgttattaacatggttcaaccggatggtcacaagtgttgatctctgctcaagcttgaccccaagatggatggcgcaaggcaaaggtataatgtagctaagaatgttttcttagtcttttcccggacttggtatttggtgtagaccggatttgctagataggcgtcgtactatcaagaggggtctatgaagtgagcttgtggatgatcttgtgccatattagttcatatgcatataggtgcattttgtgggcttgtctaaccaagtgtgatgagttttctcaagtcctaaaccacgagagaagtgggcatgtctaatangagtgagtgacatcttgtgcgtatgtccggtggatatcctttggagtgtgagccctttatccttgacttaagttgtgtttcttggatg

SEQ ID NO: 9111 - DNA, 273 bp, Oryza sativa
ttcgtattatagctcttaacttcagttttgttgtctgaatctacaccatatcgtgaatacccactatcacaatcctaaatggagctgattgtcaacgtttcgccgatatctcgatctactgaatttcaattactgctggaatgtcttccatgaaactctcactagtataaaacgagctgacttactaacaaaatgtttcaggacagctcccactctggggtcctttgtgctcacggtaatctctagcactcctctcgccgcgtgtggcgcgtg

SEQ ID NO: 9112 - DNA, 430 bp, Oryza sativa
  unsure (1)..(430): unsure at all n locations
acacaagatactcagcttcttttgtaataagtntccacttagatcttaattcgtgtacattatataatagggttcataacactgccccttggacgaatttgaattatgcgcatgtaccgtcagaaacttctcccataacccagtggaaaaaaaggtaggagaaaaaagtgcatgacattntgaatattgtgttgcacctgttgccttattaaaaaccttggtgagaaaacccagtgggaaaaaattcaccaaggaaaaaagagtacaacagttggtcaagtcctcaagacttgttcatgattcttcaggatcacaatgatagattcttcttttaattgtttgttccccataatccatgcaattcgctaagtcgtctcatgccaataccatanacacatttgtgagaacttgaggcgggccgagacttaac

SEQ ID NO: 9113 - DNA, 365 bp, Oryza sativa
  unsure (1)..(365): unsure at all n locations
gtcttcgagctatagggtgtatatggcatccggctatacacagtatttcttggtgctgtgcttatgaccaactattaatttaattgttttataattaggctttacttctgataccaatactgatttggaaaaatgtganaataattgtgtaaatatgtaagtaaatgtttatcaaccaacacctcactttttattgtaagcatagctttgagagagattgccactaatgaagactctttgatgcatgtcgnaataatactaataatatattttggtaaacagctgaaataaggactcttttttaggagagcccctatgaactatgtatctttattaaattcgcgggatttttacgttcaactttt

SEQ ID NO: 9114 - DNA, 485 bp, Oryza sativa
  unsure (1)..(485): unsure at all n locations
taaagtcaacctgacttccatggcatcatatggcacanaaacagttctattacgctagcaatcgaacagacttgcacaaacaatttcaaagtttgttntgcagtcacctaagaccgaataattcaatgcaacactctatcctgttttgatagcacaaaaactaaatgacatgaaagttgcttccaggaaaaaaacaacaacattaaggaatatgaattataccaatgaatctacaagctaaaaatttgcacacatacctccaaacaacggtccacaagctgccgacttcttgggtagtcaccatttctgtagtgtccaaccgccagcagatatagcttctccctagtctgcagtgggctgttggattgacctaatgatgctgtgaaaacaaaacgaaattgatcaaaacagattatgctgcaaaaattatgtttagattatcgaannacaaacaagatatgagaccttcaagcatgcctattcca

SEQ ID NO: 9115 - DNA, 439 bp, Oryza sativa
  unsure (1)..(439): unsure at all n locations
cgcttcttgctatggctcatggcggtgatcaaatccctggtagctgtgaaacgctngccagtcagcttgctattggtgcatcatagtgttgaaatttgcgagctgtgcaccaacagactgctgccattcccatgactgtaccacatcatcctccaaggtatgttgcatgttccttgcctgcagttcaagtgtatccgtcccccggatgagttctcccaaatcccttcgagaggagactgagcaatgcatccaagaggatggaggtagaccacttgaactgaaggagcgcgagtatccccagtgcagctcctacggctcatgccaccggctgtcgctggcactctgccaggacgaacctccgccgtcatgttgccggaattgggtccaaccaagggcatgcgcggtcgggtcccaactgtctncatacatctgcactggt

SEQ ID NO: 9116 - DNA, 326 bp, Oryza sativa
tacttaatattgtataaattacttgtaactactaaagaatgttctatactctacacactgttggaaaactgactctcccttttctcggcgtgggcgagccgattttcatttatgttgtacgacgatggtgcaaacgcaaataatgtacacgaaacaatttatattaatagaaactcactgccatatggttaattgttagctgagaaccacacatggttaccatgctactggtcgttagacataattagccggttctttcttgacaacaaactggtcccttgactttccttctaggatggcttaaactcattacctaaaatttttca

SEQ ID NO: 9117 - DNA, 419 bp, Oryza sativa
  unsure (1)..(419): unsure at all n locations
gggcagactgatatctgaacgcaaatttgacgaggcatttacaatggctcttcanagaagtgacgtgtcgatagtgtcttggttgtgctctcangtatcttcctcttccctgaattgttcaccttatgtggagctaccagctatgtttattntctgataattatactactcaacaggttgatttgcgcgcattgtgctcaatggtccccgtcccccttaaccagggggtcctcctagccctattgcagcagctagcagttgacattgctactgatacgccgcggaagattcagtggatgacagatgtcgctatggcgataaatccaaccgatccggtgatcgccatgcacgtgaagcctatnttcgagcaagtctacaatgcattgtttcacctacgctcgcttcccaccaccagccca

SEQ ID NO: 9118 - DNA, 524 bp, Oryza sativa
  unsure (1)..(524): unsure at all n locations
tagtanattatntatggtttagccttatattctggtaggccggtgtgtatgagttctaataattcagaggagcttcctatttaccctgatgtggtagtttaggtgactaagcatgtccaatacaacggtattatgccacgtggtgggttcccgtcgtgtccgccaccacggcgttaagtttaaggcgtgggcccgccacttaacggttctaggtcatatatcgaatatggcttangatggagaaacacgtatcgtactggtgtaaggctaaatcatgaattttggaagggctttgttgtgagtaataaatcggatacttatgtatcgcatgccatgctttgcataattattatatcgcatcatgtgggtaaagtgtacgtactctgcagagttaaaactaatcgattagccgtgcttgcggntatgagcggcgtgtgaatatgtcatgagtatagacttgtgttctattcttccataagctgaattaaacttcaaaatgtggtgtgatttgtggattatgtcct

SEQ ID NO: 9119 - DNA, 419 bp, Oryza sativa
  unsure (1)..(419): unsure at all n locations
attcatactacaagaaggaatttgtctcaaggtggagtttgttgagttttgatccaaattcatttgcacttaataaaggccagcttctgccgtagcctcccttttagggtccgtatggattgtcatcccttntagggttccactgtatatatacctcttgtaagccgccgtgcggcgatgtaacctcacctcagatatagtgaagatattntgctggctgccgcccgtggtgttttctctcctatttttgggagggttttccacgttaaatctcgcgtcttctatgattgatctattgttctttatcgtttgttcgtctaatcgttcctaacaccaagcatatattcgtgtcataatccagctcgatatcattntgaaacgttgtacgtactagcttacctttcacaggagtacacata

SEQ ID NO: 9120 - DNA, 522 bp, Oryza sativa
  unsure (1)..(522): unsure at all n locations
tgatgatatggatgctganggattactccaagtttttaaaactgagctaagagattggtctgacgaagatctcatcaagagcattcgtgaccgtttcgtgactggaaattggtcaaaagcagctctaagaggacaggaaataaatgaaaacgatgtggatgacgaagaagtcgatggagattttgaagatctggagactggtgaggtgcatacaagcaaggcatatgaaaatacttcaggaaatggaggtactcacaagcaagatgaccttgctatggaagaaagaagactcaagaagctcgcacttaaggcaaaatttgatgcagaatatcctttcttacatctttgaatgttgtttttcttttgtttgttgtcaaataatatgctatcatttaaaaggggaattgcttttatggtccactctgcactgcatgtttaattcttctttngctgccccttagacttnaggttttttgtctcccgtggcctgtttcttttccaggtatctagtctaaagtctca

SEQ ID NO: 9121 - DNA, 280 bp, Oryza sativa
gctcgtactccaccgtacccctctcgctgaaatcttgggctgcgggaggcgctctacggggttgaacgattcacgtcttcgtcgcccgcaggcgactgtggatgaccgtgagacagggcgccgtcccgtctcatctactgtgatggctgcacgacgcagcgcgcgctccatgctgtgggcgcgctcctgggtcagccgaccgtcgtcctgcgagcagagactccatgccgacgtgggctggatgacgaggccgatctggtcatgactgcgcatcagctac

SEQ ID NO: 9122 - DNA, 194 bp, Oryza sativa
ctatgcaatgaactctggtcctgacctataatgcatctagtgaaacaatgtgagactacacctattctgtacgaatgcccacaaatacttcatcgtcttgacatcctgctgaattagcaacgatgctctctcttctatagctgtgacataactgctatgatggctttcggagtatgcattctgtgtagctatgc

SEQ ID NO: 9123 - DNA, 490 bp, Oryza sativa
  unsure (1)..(490): unsure at all n locations
ttgagctatatctgccaagtccatatcagctccaccgggagaatgaggtactgactatgtctgtccacggngagcctcaattgatagcttagacttgggaggtgtaagctccgtcggtcgacttggacgaggagtcatcttcacaactatgtcttctttatgccattgtatgaacatcttgcgcgcatcgcccaaagtcatgatttcatcatttgtgggcacgggcagcggatagcctgaccaggtgtcctttactgtatcgatggacaccttggcatacccagctagcaggtctgcgccgtggaccttgtctgtaaccgagggcttgaaagccatgccctcagcgacttcatgagcgaaagttgggtggactctcgctagtacgacacactgtgctgcgccctgcataatgtgaaagtgtgaatgtaatatcggaatgtgtacacgtcttttattagatatggatcggagacaacaattacctcgatgt

SEQ ID NO: 9124 - DNA, 194 bp, Oryza sativa
tcagttaaaaaaatataaattattagcatcgataaatcaattatttacaagctacaaacatgtgatgaatcagattacggtagggctgcctacgtcttagaacttagagcaaactactatgccatattcttatgtattcaggatacctctatgtaatgatatacaatgcagttcgtagcatgctacctatatat

SEQ ID NO: 9125 - DNA, 212 bp, Oryza sativa
taattctaataaccgccaatgctctggtctatatattattttattcccaacttatgccaacttcagtgatgacatgggggggacgagtgattactattcttcaaataattttttaaggatctaaataattattgctgtgtgaccctataacatcctcgatgctccctgcgctataattggttatatgtcctatccagcccttacttattaat

SEQ ID NO: 9126 - DNA, 216 bp, Oryza sativa
tttcatgcatgctaattgtctcttgtacacgggtgactatgccctgtctgcacgcacctgatgtgaatctctcatgttactgaagtgattacgcttttgtgctgataagactgaacacaaaaatgctgtgctaatgtgacgcgaatattgtacggacgatgagacttggacgtgtatggcagtcttttcttactgttcaagtcaatgatctactca

SEQ ID NO: 9127 - DNA, 522 bp, Oryza sativa
  unsure (1)..(522): unsure at all n locations
ntaatattggtctctctgaacacttagtaaatactcccaccatatcatctatgaataaggcatnggaacccggggttataactgcacaacanagaaattggaaaaggtgcaccatgagcatgccattgagtgaaatacaaacataaagtccgcaataggctatgaaacagtttggttcataaaaaggcaggaaatagtttaattatatcagtcaattgtctgataaataggcccattactattggcaactgcaatttttatacctttaaaaagtcaaacagtatggccttagatgagcacacagaaacatgcaacatttcactcagaacaaacccaaaagtgcacaaactaagattcaatatccaacctttctaaccttttctcctttgcttccaggtatcaaggtcagcaggtataagacccttccccattattggttntaaaatttcagcaagaactctctgatttcaagtacatanatatgtaagaaagaaacctaacanactaaacagtagtctagta

SEQ ID NO: 9128 - DNA, 458 bp, Oryza sativa
  unsure (1)..(458): unsure at all n locations
tctatagttntcaaatgtgtggttttaccattttcctctgtccgtaatacactctcgctcattcccctcgcaatttaaatatgtatatttaccattcttaatggagctcctaaacttctatatttccaaatttgtgttattaccatatccctacgtccgtactgcactctcgctcgttcccctcgcaatttaacctttaccagaaaaaccaaaaatagattgaagcagtgaaagataaacaagccacacgcacacgctgccaactaaccggtgggcccgtcaatccaccccacccgaagcccagccaatgggaagccaccgatacccacatctatggattgctgccccactttcaacccatatctaccgtccgtctccatctgacacctcccagtgcttgcgcccatcgaaccacccncacccanaccctatccaatgtgaagccaccgatacccaca

SEQ ID NO: 9129 - DNA, 502 bp, Oryza sativa
cgcttcattggagagatgctatccaactagagctgctggcaaattcttaaaagttggtaatgttttggaagagctgaagtacaggtgagatagttgacatgccttttctgccattcctactgtatggacgcatatgattgattaatgaaaatttcaagcatgttaggtatgacagagaagtgaacaatggccaccgctcagccataaagaaaattttggaagggaatgcttcaccatctttgatgatggtgctgtgcatttctgctatttactcttgtcctgacctaaacaacagtaagccagaggatgatagggcacatacagacgacgacaacagtgagaataaaagcttgagacctgctaaaaggaacatgtctacaaagattgaactaactgatggatggtatgtggttgctttctctgtattgcacgagttgaagctgaaagatgttagaaccttttccttttcgcaggtattctctagatgcgtcattagatctgg

SEQ ID NO: 9130 - DNA, 246 bp, Oryza sativa
  unsure (1)..(246): unsure at all n locations
aaccttacatgctagaatacaagaactcaatattctatcctataacatttgctaagtactctgctacctctcgctatgacacggagataatacactactatgtcattcacaccagatgctatgacaggaggtacatatcactatgcattgcaccaaatgtaatataaaatcncgtgttttacctcgtcaaaacacacagctaaaatacactcgtatgcgttgtgtctttctccactcatcctaaac

SEQ ID NO: 9131 - DNA, 440 bp, Oryza sativa
  unsure (1)..(440): unsure at all n locations
tcgtcgacaacaacatcaacaccagctccagccaagcactctcatacttaacaatgctggtatggactcatgtcggcgaaatcgtcttcccgggttacaccatgacgccgatctcaaccggtcctccaatgactgaaaacgagaacgtagtggctacgaaccaagacggctccatgtcgaanaatccacccgttgaaacggagaacggattaccgactacatccaaactcgagacggattctgatgcggccaaatcttgtccctccgacataaatcacgggccgacaaagatgacttctggtgtcctatccacaaaaccaagaaacatacccttcaagattgctgggtattcatcaacgtccgtgctgaaattcgcgcctacaaggaacgtggaattcagtgtatttctccaactcgggatgtctattgtcctatccaca

SEQ ID NO: 9132 - DNA, 427 bp, Oryza sativa
  unsure (1)..(427): unsure at all n locations
actcaagctttaaacgctggaagcagctgaatttactagatgtgtatttgctatattatcaatagtacttcagtccaaaataagcatcatgtgatggtccacagagggactgctgcatcttgaacgtacaatacattatgcttgaatcataacacatgcagcaatcaacccttattcagattacaacgcaatattgcaatgcccgtactagctacaaattagttattcatcacagaaatacgcacactaaacaagtactctacctgtactgtgacctgtactgctgtacatatacacgagcgtttaacttgctgccgctatctagggcacggaccatgcatgcattgcctactctcanaattctctcangccgtagagtgatttgtattctgtcacaatacaccaactactactgcttgagaatctt

SEQ ID NO: 9133 - DNA, 430 bp, Oryza sativa
  unsure (1)..(430): unsure at all n locations
ctctgaacgcgagcacggacaatccagtccacgtctccttacaagccggagtccagaccatgagcccncatgtcaatgccacgagcacccaccaagagaagctcagcgtcagtgccgcgccgaggaggccaaagccgagcacgaacacggtcagccacgatatgaggatgtggaagatcagcacggccatggtgatgtaggcaacggngttgacgatgttctgggcctgcaggaacctctgcatcgggcagaagagcgcgaacgcgagcagctgaggcaccaggccgcgcgcgtacagctgccccgctgccgccacatccgcgggctgcccaatgagccgcaggaacgggccggcgtaccagtaaaggaatgcgatgacgatggctgtcgcgaactggagcaccagcgccctctggcacacaatgcccat

SEQ ID NO: 9134 - DNA, 188 bp, Oryza sativa
agtgtcagtgcttttatattatcctacgatgagtgtgatgtgtacgtgtatatatatctgtcacctcttctatattatataccaatatcgctactctaattttgctgaataaagtgagtgcatagaaaatcatatcgagacattgtcctatgtacctcagcttgtgacagtgtcttctatacatattc

SEQ ID NO: 9135 - DNA, 405 bp, Oryza sativa
  unsure (1)..(405): unsure at all n locations
tatactcnctccaccattgaataaaccaacctagtatacgatgtataggactagataaggatttgtgcatattcataatgctagaaatatcacatcatatattagatggtttattttaaaacacagggtatggtggctgttcgaaggcgctaggacaattataattggctgcacgctgcagccggtttgaactgctgcaggtaggctagccgaacatgtcctatagctgtgtttagttccacgtcaaaattagaagtatgaagaaattggaacgatgtgacaganaagttgaaagtttgcatgtgtaaaaaaattcgatgcgacagaaaagttaaaagtttgaagaanaaagttacaatctgtctatataaggtagatgcagttagctagacgttgagttgtgct

SEQ ID NO: 9136 - DNA, 183 bp, Oryza sativa
agcgggatttttttgtcgaatatactgacggggcatgtgactgggctcacacgacatgcttgttgctacactcttggatagtgcagatgcactcgaaagtgtggtgcttgcaaaaaaatgaaaagggtataaaatattctatttacacttaacgaggatcacaaatgtttcgctgcgcgggta

SEQ ID NO: 9137 - DNA, 403 bp, Oryza sativa
  unsure (1)..(403): unsure at all n locations
tagagatgtatcggtganagagtggtttcaatctatcaaanattagaatcctcttgctcttcttcttggnttctactggtggggttgagcactgccaactctcagtcgagagagatcccgcacgaaaggaggggataacgatggggtggtctacccttttttattttaaggagtattatctcctgtataaaaagtacatcttttaatacttaaatcctcgataggggtttccaaaacaagatttacaatagagtttttggttggtgtgttttaaaggcattctcaatgtatgatgcttatatcacctttaagttgggcctctcgtaggtagttgctctgtccataanaacaagttctaatgtttattaccagttgtcgacggggataaccgtagaccggatat

SEQ ID NO: 9138 - DNA, 379 bp, Oryza sativa
  unsure (1)..(379): unsure at all n locations
acttcatatagacaaattttgtggtaaccttttgtttctttctggccatcaacattactgtttatagtgtcaaacctaaatccaagttttaatatatatagaacttcgctataatctgccacagaatatttggaattttctttctattcttgacctcgacatttgacttagcctattgttntgtcatgtgctaggattatttgggatgaaacaaggtgaaaggaaataaattggattataatagaggaaagaacagagaatggccctggacctaaacagcgcgatgctctccgtcgaaccgagaaagcagggccgatgggcactaagataaatcttaatctaatgcctcactgacctgagataggatccctccttatat

SEQ ID NO: 9139 - DNA, 526 bp, Oryza sativa
  unsure (1)..(526): unsure at all n locations
ctcagcttatctttccataaccctattgatctggctagttntctatggatcatatntaattttctagatcaaatatatacaaaaacatgattaactatattattcttaggtgctgtgtgtcaaatgagctaaccatggatgcatgcaccggtcaatgataatgcaggtttagccgatgacggtcctgggtacgagtattgcttcctaaagtgcatcgacgaatgcaaccaaacctgtaagtcgagtggttacacccatggaggcgactgcaacactggaccctgttgctgcctttggtagtagtgtagtagtgctcatgagaaatcaatggattaatggaatatgtttcattacttccattcatgtaaacatgattactgcttgatgtgatggctattggtgaactgaaataaaatgcgaatgtttttagtgatgcatatgatgnagctactgaaacacatatacagtatgttaatgagtgaaaggactatgttgacactttgactatgacacataccttttgtgt

SEQ ID NO: 9140 - DNA, 486 bp, Oryza sativa
  unsure (1)..(486): unsure at all n locations
tttctgccagcatctgcgccagtcatatcccctgacacgccgccgtcgtcgccgctatgtactccgcctcacaagacgagagcacgacaaccttttgcttgatggactgccaactgactgggttggcacccangaagaagacgaccctgctggtgcttttgcgagtatccacatcgcccgccatgtctgcgtcacagtatccgacaggctcgggcggcgtctccatcctcttgtagtagcagccgtaatcaaccgtgccggcgacataacgcaggatgcgtttcaccgccgtgtcgtgctcggtggttggagcttccatgaagcggctcacgtagccaacagagaacgcgaggtccggccgcgtgtgaaccatataccgcagacagccgacgatgctactgtactgggtggatccaccagcgccgctgtgctcgtcttggtcaacttgagacgaggctccatcngtgttgaacagggaatacattc

SEQ ID NO: 9141 - DNA, 454 bp, Oryza sativa
  unsure (1)..(454): unsure at all n locations
ggctggcgacccgtctcgccacggaactcacaatcatctctccaacccctctcatggcctcgaagctaccagccagctagagcacaaactccctatctctcccacaagagtatatgctgccaatttgtttgtgaaagctctcttcccacaagtgcactccgtctctttgctttagggaagaccctaccacagtccaccatgagcaaagttattccatgcgacggcatgctccacctacatgtcgcttgcatgagcaaagttattctatttgcccaccaaatagattttaaaatttttagtgccgtttccttaatgaaatttggtcgaccgaacctttcggccgacccggcaaataattttttagtgcgcacactntgcattgacacctgatgtgctgagtaggcagtttcagtgcttgctatatcgtctaaaggcaaaatgcactgattctgat

SEQ ID NO: 9142 - DNA, 179 bp, Oryza sativa
ttctataggctttaacaaatgcattgctcactcttgatcacgtgattcaactctaaataacatatataatcttcacaaatgcattctccttcctggatctgacatattcaactgatctagtgaatcatattaactgccgcactggaattgtggctttgtgcgcctacaacggctgttat

SEQ ID NO: 9143 - DNA, 498 bp, Oryza sativa
  unsure (1)..(498): unsure at all n locations
tccgtagctccttttcttccgtgtttgaatttttctattttgaagacgtggatctgtatgtcaacaattgtcgtttgtgtaccctggctggtcctggacagggatttaatgcacattcagcttagaaattctggttcgagaatntctgggcgtgacacgggagagagcaactcatgcacaggggagaaactaacaccggtgaagcagcttagaaatcggatcagactcgcggcctccttttctatcatgagaaagaacgtggacgcgctgttgcggatggaatcgtgggaacgtgggttagtggctgcaaaaggatagcgacgtgacgtgacgtgacgcacgcacgccgncagccagccacgcctcgttcacgcccactgtccagctctgtccggcgcgcgcgcgcgcgcgcgtgtggcatttcgacccccacctcaactggtcaacagggagcctctaatactccctattaggttgagatattctcgcttaatctga

SEQ ID NO: 9144 - DNA, 85 bp, Oryza sativa
acgctggtctagacaacggtcactgacaacgtcttgtgtattgttttttggtacgttcccactctataaggacttgtactgtgct

SEQ ID NO: 9145 - DNA, 437 bp, Oryza sativa
  unsure (1)..(437): unsure at all n locations
tctaagttagctcgcntttatctnttccgctgtatgtgtaatcttttctatttttgtaagacgtggatctgtatgtcaacaattgtcgtttgtgtaccctggctggttctggacaaggatttaatgcatattcagcttagaaattctggttcgtgaatttctgggcgtgacaaccagccaccacctccacgccggcaagcctcatgctgctgcaccggcacctcagtcgtgcctccacgcactgcgcccggctccgccgccaccggccgcgcctcaccggcctccgccgacgccagccgctcctccgtgcgcgcgctgcctccgctgttgtcgccgcgattctcccggccgtgtctcaccggccccagcggcgtctcctttcgtcgccgctgttgcccacagccgcgccagcctcctgccaggctgctagccgcacc

SEQ ID NO: 9146 - DNA, 428 bp, Oryza sativa
  unsure (1)..(428): unsure at all n locations
ttccttcatggagaggtcccttggggctgtgaacacttctcttgccgtatcttgaatacgttggagagaatgggccaagatggtcatgatggatcggctaggcgcaaccacaatggccatgatgctaatagcagcatcgcagcaagggaagaactggagtacgctgctgacactgagcatgatgaggaggtacttggtcgtccacaaagacaacatcgccggcagcgccatggcatgggcgctccaccacagcgggaggtacgtgataatgatgattctttatgcaagatcaagtttaccattccttgctttgatggaaaatatgaccctgatgcatatcttacttgngagttagccattgatcagaaatatacttgccatgattntcctgagaataaacgtgttatggctgctactagtgagttcac

SEQ ID NO: 9147 - DNA, 136 bp, Oryza sativa
gcttcgtgtcaaatttaatactatactaacgcgaaaatatcctgtcgcaacacaattacacaagtctgtggtcggctcttctcctgcggcggtgaccgaccttgcctttcggctgcttctgttccggactgcctct

SEQ ID NO: 9148 - DNA, 449 bp, Oryza sativa
  unsure (1)..(449): unsure at all n locations
tcagattaagccacatatagaatctgggcatgtgantgtcacattatccgagcatgatggagctcgagtgctcgactgcatcgatcggcaacgcaacgcgtgcttgctnggngtgctggtttttccggctctacaggagtatagctagctagcgcagccgtttctcaggaacggcggttntggcaaccgcagctgatttcaccgtgaatttgggttgaagtcacctcgttgcttctgtaacagtgctccatatggatcggacagagagggagaaaatattagtactagttgggttttgagttaaacgaggactttggattagtctgcgatgcagtgttctgcgtaaattgagataaaagagttattattctctgatgatgtacacatganagcattcatattgttcanactganggcccaatgtttaatcaatttaaagcgatcttaat

SEQ ID NO: 9149 - DNA, 299 bp, Oryza sativa
  unsure (1)..(299): unsure at all n locations
ccctacgacggagctagttatttgtttaaaaaaatttgtgatctaccacaaccactattacaaggtgcataataacaatatcatcgtagttcttactatgcttatatgtgcatacctgaacagcaaatatcatgtccgctatggctctctctctaaaatacaaattagaattcctcttatgtacgcatattttatgcaaaacaaatacattagtgattgcgatttctttgtatcttgnatgattaacattgccaatgacttaacagtattctatttaattatggcgggaccaacggtga

SEQ ID NO: 9150 - DNA, 434 bp, Oryza sativa
  unsure (1)..(434): unsure at all n locations
ntgtagtgcttttcaagccggcaagcaagttgcatgttctcattctactaagagtatcatgtgcacatctagaccattggagctcttgcatatggatttgtttggcccaacaacctataagggcattggtggtaatagtcattgtcttgtgattgttgatgattattctcgctatacttgggtgttctttctgcatgataagtctattgttgccgagcttttcaaaaagattgcaaaaagggcccaaaatgaatttaattgcactcttgtgaaaattagaagtgacaatggttccgagtttaagaataccaatatcgaggactattgtgatgatcttggtatcaaacatgaactttccgctacctactcacctcaacaaaatggtgtagtggagaggagaaatcgtacattgattgagatggcaaggactatgc

SEQ ID NO: 9151 - DNA, 182 bp, Oryza sativa
gtggctaaaaagtgccaaaccactcattcaagttgacatcttacggtgaaattgtgttaattggatcaaaaatgggccgtgctactgagctctaagacactcaggctacccatcaatctgagatacaagacggcaatgtaaatctgacctagccatagatgatgactcttatgacaatgtgt

SEQ ID NO: 9152 - DNA, 290 bp, Oryza sativa
ttcagcatgtgcaggtgaatccctgagatcttcaactctgaacactagaaagagatagagcatgagaataagtggagatctaattcaacttgcatttagctgcagaatatgatagtacttacaaattacaaccacgagcaataatttctccattctgtactagcactgctccaactggcaccttccacaaatctgcagccctctgagcctcatgccatgctttccttatgaataactcatcaagttttctcttgtcaacatctcgctggtattgcttctcccattcatca

SEQ ID NO: 9153 - DNA, 533 bp, Oryza sativa
  unsure (1)..(533): unsure at all n locations
ttctgcagatggaaacgacgacgaagctcatgaggattctcccatgtgcgaactgcatcatcatcacccgcccactgcaccaggacctgttccaccatcttggcacctttgcggatgaaacgacgctccagcacatgaacaggttggggcggatcggctattgtcggacgaagcacaggcaggggcgcatgaacgtgttcaccaggagccaatgccttcttgagttgagagacatgtataactggatggatcaaactggtagcaggtagagccagtttgtacgccacttcgcccacacgctccaacacctgaaacggaccatataacctgaaagatagcttgcgcgggtgaccaccgatngctggacaaacggttggagtttcaaataaacccagtcaccaacaacaaaagaacgctcagagcgacgctggtcctnctgtganttcattctagtctgagctcgtaactaatggctgtggattaaagattgcatctgctcccccgtcatgtaccagtccaacagatcctttgat

SEQ ID NO: 9154 - DNA, 442 bp, Oryza sativa
  unsure (1)..(442): unsure at all n locations
tttcttacttttgatggttctccatctctctgtctctcaaaatagaaattgtctctcatatgtttcctataccaagctggataattngtgtcaaccaaaatgacaaagtcataactatacaacattcttgaaaataatagtgtgcaagcatataaactatatataatatgcgaagaccattcccaaatatgtaccagcttaggcatttagagcattaatcatagtaatggagcaactgagaaactttgaatatgaagaatagaagtagcatgcagttattagccacaaacatatccgtaaccttgaaaaagtacagtgttaagttaccaacagaattctaatctatgttaaaanaaactgcaatgatataagtgcatccttgtagtgcgatgaggataatcttacattatcagacatgttacgggtggcaccagtctctttc

SEQ ID NO: 9155 - DNA, 89 bp, Oryza sativa
ttctcaacaaatacttattgacattaatactggattttcttgccaccacataactgactgtattgacctctcatacaaaccttgcgact

SEQ ID NO: 9156 - DNA, 486 bp, Oryza sativa
  unsure (1)..(486): unsure at all n locations
tctactctccaggtatttcagtacttacatcttcagcatgtatcttgcaatatgcttcctaatccaaagactagtccactgcaaaagatcaactacataaaggtggtctcacttttcttcgctccgcagaatttatgcaggggggctaatccacaagttgcggaccaagatggcaggacggcattacagtgtgccatcgacggtggaacaagcgacgacgagattcttgtgttgttagaagattatactagataaaatctgcgggggaaaaagccctcacttcagtagcatttcttctgtgacacagaccacgcccgttgtgaagtcaagagtaacccggctccaggcttctcccagcttgtgttgctcaatgacccaagtatgtggcgtgaagtagcctatgggttcttctgaagcttcagcaacatgatgtgcctgctccttntcttctnctatatatatacccatttcgtgccggattctctt

SEQ ID NO: 9157 - DNA, 298 bp, Oryza sativa
  unsure (1)..(298): unsure at all n locations
tctgaacatgaagtggtcttctgagtcttgtgcacatataagtgcagcacagtgcagtggatgacaccgcgccgcccttggatcagtgagatcatcacaatntgattttggttttccgcaggtgcacttgtctgactggacttgatggctactatcatgtntgagtggagcactacaaacgcaagaggcanaggtactctgtattatgctggagatgacaccatacggttatggcttctatgtgacgctgcggcaacaagatttggtacggcgtgctcagttatgtacacagccatgc

SEQ ID NO: 9158 - DNA, 507 bp, Oryza sativa
  unsure (1)..(507): unsure at all n locations
tanaagtgtgtgtgagagtgaatgagatgatgtctatntataggacaggtatgacgggtatggngaggagaattgtccgaactgcccgcaaccaccatcagggagtgatatggagcgtccatgccaaaacctggatctaacggcgcttaccagggttcgaccgaacctgngctaggccctcctggcctggccttcggcatctctcctctcttggtcctcctctgtccatttctcagagttttgggctgattctctggtattttgatgaagttcacaacccatccttgtatggatacatatttctcctcactttagtctgatttccctcccaacttcggggttcatcacctgcatacaaatatataccaacacttgtggaatatgtgagaattaatacctaatcactatgtggatgtntattatctggacttatgcagatgtgacggatagaatcggcattaataaccgccacagtgtactaggtaattagtagaaactagtcgacat

SEQ ID NO: 9159 - DNA, 323 bp, Oryza sativa
cctgacgaagaacgacgacgggtgctgactgaataactcttgatactgctgctggccattcattattatgaggatgaatactcactcgctacatgagttgtctagctatatgtaaaaagacccttctgcacactttgcatgagatgctcactattgtgcacacgatatctagacatggcacgttgaacatagtacgtgtataaaggtgagttagaacttttgagaacgggggtgcctcatcatatcttatccctcccgattagtctgactatgactcggtatgtatccgtacacctatgcataccatctatcttcttatattc

SEQ ID NO: 9160 - DNA, 380 bp, Oryza sativa
  unsure (1)..(380): unsure at all n locations
tcggatgtgcatcgactacaccgaccttaacaaggcatgtnctattgacccttacccnctgcctcgcatagatcagattgtcgactccaccgcggggtgcgaccttntgtgtnttctagatgcatactctggttaccatcagattcgcatggctagggaggatgaggaaaaaactgcgttcattacccccgtaggaacctattgttatacatcaatgcccttctggttaaagaatgcangtcctacttttcaacgtactactcgaatttctttgggtagccaaatagggcgtaatgttgaggcttatgtcgatgacttggttgtaaagacgcgcaaccaagacactntactctcagatctagcggaaacttttgaaaatc

SEQ ID NO: 9161 - DNA, 439 bp, Oryza sativa
  unsure (1)..(439): unsure at all n locations
ntactgctgtctntcacaatacagaaccaaacagacctcggggtctctgtggatattccacaaacacctcgcgcggcacgggaaacggtgcagcgttctccacaaactcaaccaccagtgggaaagagtgctgctcctacctccaagggcaggatgggctggtacggngcgagactcctgatgtgttcccggatgaaggaggcgccgctcggtcccctcttcgtctcagccgccgccgccgcagcagcggcaggctcctccacggaagcggccgacgccatggagcggaaggataccctggacgttgccgggcggcggcgtcccccctcgccggcgacgaagtgggcgggcgaccggtgcgggctctggatgcgagctctgacgctgaaatccatcaactaggaggtgcggcgcgggcggagtgtgttttcatgtggca

SEQ ID NO: 9162 - DNA, 103 bp, Oryza sativa
tggctcctgctctactcggacctgtagcttctgatacagtggtaatgctttgtctttgaacatttcttctttttctgtgtctgtccaatgcatcagagactga

SEQ ID NO: 9163 - DNA, 518 bp, Oryza sativa
tctagagcggtgctctcaccaatacgaatgtactcgtccacagtatctgctggtactccataagccaacatacagaaagccgctactaccttctgcagacaagataatccgagcacaccggctgcattcctcttctgcttaaaataatcgtcatgttcctcaacagctttcattatgcgaagaaatacatgtatcctcatccgaaacctatatcatgatgcaattaaattaaattagaaatactataaaacacgacacataaaaattacataaacattatagagaacatgcgaacctgcgtctaaagatgtttggtccaaacgttggattatctgagaaatagtctttgtaaagaagattgtgccacaatagtctatcccgatgcactacctcatgttcatgaacagatccaattcgacccggattatttactgattcctcaatgatcatttgcgcagcaccaaagaatagatcatgctcctcatccgacgaagagggatcaatcaattcgttcatta

SEQ ID NO: 9164 - DNA, 417 bp, Oryza sativa
  unsure (1)..(417): unsure at all n locations
nttgtcctagctggagaaagagatcgataggtacagcgtacgtacttgtgtatntctacatccactgatagtggaatcttgacggcgacctcagctcccagatagacgccctccccatcttctagcttcttttcctgttcgatccacaccggccgtcaatcttgttcagttttaccatctcacagtacaatgtttggaactttctagcttggattgcatgtaaaaactacacgtgactacatatcgtaggacgtgcatgtgtgtgtgctcccggaatgaaaacatgcatgtncgttgttatgatatatcaatacttacttccacaaacattatgattgcatcctattntatgagtcgcaatctactacatgatcgagttctaagccctgattctaaaattataatctagcaactaac

SEQ ID NO: 9165 - DNA, 482 bp, Oryza sativa
  unsure (1)..(482): unsure at all n locations
taagctgggatatatntgcctcatcgctgatatagtgcctatatatcttcctgataaatagcactctgctggtatgttcccataatccagctttccacaccagatcttcatacctgtacaccattattttgtatcaacttgggtgcaatgctaaaagaatacctaaaattatctttgtaaggaagtgttacttactttactgcttttttccccagaagttcagcaaaatggtttagttctgcgtgaagtacaaggcttttatggagctnttgaagaagctgccccaaaccattccaatttgcaacctttagctcatcaacagttggtactgctaagaaaagagagattactcacaagttaggtgacttaagtatattgacaaaactactatgttatacaaattctctcctcaataagagacatanatntcatgaaacaccatgttttctgacatttctaatgtaaaaccccatttctataac

SEQ ID NO: 9166 - DNA, 421 bp, Oryza sativa
  unsure (1)..(421): unsure at all n locations
actaagcttgatccaccaaacaactgataactgcaaaaaaagcccgtaaaaggtcatngagatatgattacttgttggttatccactaccatagaaacacttatccattaacgtgagaatttctagcctataaaaatagccataaaagaatcagcgtcaaccgtattaaaaaccgtagttatactataacattgcggcttttaatgtgagctagaagtaaagaaagataaactgatgatagatcgttcgacctaagccacatttgcaaaaggttaaccacccccctccccccgcacgatcctctctctcgccaccacctagatgtttggtagagcagttgtagtgtgacattccctctctctcagctctgcagccaccagatccactgctggcacctttctctctcgctcgaacgcaacgc

SEQ ID NO: 9167 - DNA, 367 bp, Oryza sativa
acccattcgtggctgtcgcacagggtgttccatgctgccccgccgacgactatggatgctacgacaccgatgtccctctgaatggcggcgaacttcatactacttggtattcacgcccttccttctctctcagagagacgctgagaaagctcatcacatgcacctccgtactggagcagatccacgtccgcgcggtgctggcaactcccgcatgtgcggcgctatcttccacataaaatacgaaacctttgccccctctcttgagagcgctcctggggttactagccttacgcggcggggtagtgatttgttccttggtgcccctttttttttatgaggcgtcctgagttgttaaatcaatagttgg

SEQ ID NO: 9168 - DNA, 340 bp, Oryza sativa
  unsure (1)..(340): unsure at all n locations
acactatgtnaactacatgtctacattactagatagtggagaactaaaggaggatcgatcactatgagactgttattgaggctatcctcagagtacatgagttaaaaaagagtggtatacgatcatagcacgcattccatcatcaataaggccataaaagatgctctgctcacgatactttgggttaacagaaaccaatgcagggacctttgtcaacatcataaagaacatcatatgtttttagaaatcctttgctacagaaaaccaggccctgttcttggacttcgcttcatactcaacaatcaaagattcatacaccccaaacccgagaaacaatgga

SEQ ID NO: 9169 - DNA, 470 bp, Oryza sativa
  unsure (1)..(470): unsure at all n locations
ctcagcttagatacaatgcgagttctactcctggaggtggcatgaccacttctcactactgtccatctgngacagntgaaattcaagggttgattttttcagccaacctcattcttctcgaattcaaggacctagatgtcatacttggaatggattggttgacaagacacagaggagtgattgattgcgccagccgcaccatcaagttgaccaatgcaaaaggagaggtggtaaccttccagtctccagtgccgcagaagtcagggatcagtttataccaggctgctggtgaagaacaagaggtagcagtggagaataccactaagaagctggaggatattcccatagtcagagagtatccagaggttttttcggacgatctgacaacaatgccaccaaaaatggatatcgagttccggattgacttggtacctggaactgcaccgatccacaagaggccttacataatg

SEQ ID NO: 9170 - DNA, 260 bp, Oryza sativa
taagatgtttattctctagactgaacatatatacagcataatgtctctacacaatcgactgaaatgatgcttgttagcatcatgatctaacatcatgagttactatctaatgtctatacccactcgtcactatattgataattacatattgactagtgtactactaaacaataactcctctgaatgcttcaatggaaatatctagaaatactatccataggcatttatgatacctagataggggctacataatatgagta

SEQ ID NO: 9171 - DNA, 431 bp, Oryza sativa
  unsure (1)..(431): unsure at all n locations
tccctgcacaaacagaagggccattatcttgaatcatccaaatatgtgcagnttatatatgtgcagtttggatgacagggccatcagaggaaggttcggatgagcgatgactggaccataacctttctcagatattcagattgatatgcgtgtgtgtagtaacttaccatatgaaagtaccatgaccttgtcactgtctgttacagttggaaccctgtgagcgatagttaccacagcgcaacttgagaattgctgcctgatgaccctctgaatgattgcatcagatgcggagtcgatggatgccgttgcttcatctaacacaagaatcttgttcctaccgaggagaactctgccaagacagaagagctgccgctgcccaacactccagttactgccatcatcactcactacaattggccacatgaacaaat

SEQ ID NO: 9172 - DNA, 113 bp, Oryza sativa
aaggcgcctctgtttttcctagatgtgggcctcctagagctataattcttttccataaaagtcatacgcggtaacacgtaaagtatcgggatactcagcaaatgcaaaacaga

SEQ ID NO: 9173 - DNA, 527 bp, Oryza sativa
  unsure (1)..(527): unsure at all n locations
actaagctttaattagggggagaattcngcatataatattggttcagctgttgacgcagttggagcggcagtaggagccgcagtagttcatgcacttgtagtagtaggcctgcttgcagctcgtgcatgaggaggacgctgggtcagtgcatgcgccgctgcagccacccatcccaccggcgcacgacgagttgcagtactggtcacacttgctgcagatcatctgcgccgccgccggcgccggngaagaagacagcacgaccagcacgacgcacacggcggcgacgacggccaccttcacaggggaggccaccatcatatgggctttgtaactttctttggatcttggtcagaagaggaattaagatgtgagatgtgatatggaaaatttcaggcaatgacgctatttatagctaggcaactgatgctgaagcttgctaatatatgtacttggatatatctgtgtggatcgatcactggattntgcgtgcaggtaacatgcaccgtatttcgtcgttatcatatct

SEQ ID NO: 9174 - DNA, 123 bp, Oryza sativa
ctctaacatctgtcccttatcccctacctctcacctagattcggcgcgtgctctctataatccattctgttcttaacagaaccttcttcttaccctccccttcttatgtatgacaataccact

SEQ ID NO: 9175 - DNA, 446 bp, Oryza sativa
  unsure (1)..(446): unsure at all n locations
tggtcanatactactntgcanatagactntcattttagatagtcagataagtatatatgtgtgttcgctagattcgcatacaatcggtgttttggatctacattgtatttatttatttatttttgaagaaaagacaagaagatctacattgtatttatgaaatgttagtacatccaagtgataacgattgggtcactattcaattattggcacttattcggcgtaaaatttcacgatatataagtgaagtaaaatcagcatatatacatagttttcgccgcgtcctggtatatggtcccggaagaaagttgttgtgctattagccatgcctggatatgcaaccaaacaaggaacctctctcacacccaaatccgaagaanatattgcctgnggtccccaggcctgtgatttgtataccctctttgaaaagtgatgttgtggaacat

SEQ ID NO: 9176 - DNA, 143 bp, Oryza sativa
  unsure (1)..(143): unsure at all n locations
ctcaactcgtctgtgagatgtatgaacaaacactgtattctactgaaaacaactattgacatcgctatacagattctacaacgatataaacactactgtgtnaagcataagcctcctatactgaattatagacttcctatttt

SEQ ID NO: 9177 - DNA, 514 bp, Oryza sativa
gctttctggatgccactgtgtgcatatttaatgcatctagtttgagactccaatgtcgaaatcttccagcatcctatcttcctcagaatatcacgtattctacaaaaactcaacaggacacaatatatcctttatatattctaacttactggattaaattggtactcttgcttctgaaaacatcttgtcttgctgttctcaatcaatctcattagtttagtcagtgcactagcatattatgctaagaaactaagaaaatatagagtcgaggtaattgaaaacagtacttggggtatcaactacgaacacacatagacagaatagctgcaataaatcactaagactaattggactttgatgaaatttaccttaagcaaccagatctttacaataaatagttgtgtcaaccaatcctaggggatgagagatgtcgtaattatcttatcaatttcttggcttatcttcacatttgattggctatatattatcgagtgcttaatacatgtcaatggga

SEQ ID NO: 9178 - DNA, 517 bp, Oryza sativa
ctcgggtgagctcgaaactatgtgcaagatattgcagaattcctgctccactcaagcaaattctatattgtcgctatgaacaacacattcatgaaacaagacagagtggtcaaatccttcacctactactaatctatttatagccacaataaacacctaacattcaattttcttgacagtacttcataaaagaattttcgaagaaatatgtagagaatatgggtaccggatacccacacggcctccatattcgactagagataggaggtgggccagattcatatattatgtaatagagtagaactcggttgctatgttatcttgtaccttaaggcagggtatagagccccgacaggtactaccatgtaatagattagaaaactgatgtcgtttctagctaggtgtctacttcgtaaccctgccccgcaacctatataaggcaggcaggaagacccctccagggcacgaacacataatcacacttgagatcgtcagtcaatacacaattgacggatat

SEQ ID NO: 9179 - DNA, 290 bp, Oryza sativa
tcttgtaccacattatcacgcacatggaccacagtatcaagtgccgaacatttacccatgtatggtgctggaggcctgacatgccctggtagaagccaagggtatactcgcgcattgcaggtgactcgcatcatgtcgcggtgcaacagatactcgcaaagagcaactcactttgctccactatagcttgaactctcagctgtctgagccattgctggcatctcttcggctgactaactgctctcatcacgggccgcgataccctctgacgtgtggtgtgtgcaacgcgc

SEQ ID NO: 9180 - DNA, 488 bp, Oryza sativa
tcaggaaggcacagattcctgaggggattatggcacataagattatagagttccgcgcactgcatcaaggaaccagaacagttacagaatacctgcatgagttcaaccgccttgcgtgctacgctcctgaggacgtgcgcaccgatgctgagaagcaagagaagtttttgtttggtcttgatgatgaattgaccaacagctgatctcatgagtctatgaggattttgagaagcttgtggacaaggctatccgtcaggaagaacaacgcaacaaaatggatctgaaaaggaaaggcagctcagatcagctttcctcaggggaacaatcagaagcctcgcttcatgacgggacagctaggtgagccttccaccctgatcgtgcatcagcaccgtgcttatcacccgagtaacttcaacaacgactacaacggtggcagtcacaacagtagtgagcagcaccaccacaactcaactccacccccattaatg

SEQ ID NO: 9181 - DNA, 152 bp, Oryza sativa
gataagatacatgacgttcagctggggactagatctaaccaatgacctattcggatagaaaaattctgatgtaggggagtagggtgcttaaatttgggactacgcgcattatcacaactaaggtaaagactgttccaaacactattaatagc

SEQ ID NO: 9182 - DNA, 316 bp, Oryza sativa
acggtatagggctattaatagatagagcatgcactcggaccaaatattaccgattcactctgatgagttctatataaaacgtacactcaccgggctggtcaaaccggaaaagactggatgatgggctgacctcatgggccaacatattcccaacaatgcactgctaccctaaatgacagcgagatgggattgagagaatcacacgatagtcatgccaccgttctaccggtcgagccatatgaaagacattcattctatcttactgatgcaaccaaacttgaacacgataacccagctgtccgaccactaaacgtat

SEQ ID NO: 9183 - DNA, 256 bp, Oryza sativa
gaactggtggtaactctgcaaagacttttatagatgagtattaacaccgcgaagtctgaccgaaataagagtgggcaaacactatatgcaggtccagaatgagggtaaaagttcgagtcacactactggtcacaactaattgttccatatagcataggggcaacataaatggagcataccaagcccacaggcaactcacatactaagttaagtactcatatagagtgggtatggatcggcatcgagcgaccatctt

SEQ ID NO: 9184 - DNA, 413 bp, Oryza sativa
tcgtgccgcgtgccctcttctgatctgcggttggttgacttacactagcctactcctccaggatcccctccacattcctctccacgtgcccctcctggtttcactccgcatccctctccacgttcccttcctcgttcaagtactgggttggatcctcgttcccctcttatgttgtccagtactggcttgcttcctccgcgattgtatcgtacaatatctggttctcatcgcgatcagccatctgttcatacaagagatagctgctaagtctataggtcactctttgctttaacaatcctatatgctaacaatcatatatgctaagtcatatatgctaagactaactgtcggatatgctaagtctaattaccaatctaataattctatattatgactatgataatcttatacta

SEQ ID NO: 9185 - DNA, 423 bp, Oryza sativa
  unsure (1)..(423): unsure at all n locations
taagtcccactcatctaggatcttanttaggctcttatttatacatgtattggccagaacatatcttaattaatcttaactgtatgagcctttatagtatggatccatgagcaaaagcttagcttaataataattcgatcccatgacatatctttcacaactatatcaaagtgttatgcagacagcacacaacatgttgntactagaatagacaaccgtgtttgattagtgcacaacttataacacaggataattgagtgggttacaccttttgagtggctataagcgctatttaccactcttagttttgggagatattcttatatatatgattaatcataacatgctgtaaaatctaattgcatgatcgactatgcagtaagagattaatttggagctcttccatgggtatngctcccctat

SEQ ID NO: 9186 - DNA, 416 bp, Oryza sativa
  unsure (1)..(416): unsure at all n locations
taaagacatgacaactctggtgtgtctagctccacgcttaaattgtagttcggacagataaacatggacaaaagtaaaattgtgatgtgttgaaagtcgatggacgaaaagttgaagttgataaaaagtggatctaacaggccttggcagatacactagccttagaagatggcttatttaattatctggaagctactattntcngatgcgcgcgcgtcttctgctcattgcgctaatcttctagcttannnttggtggaattcctatttcacacgtcttgtgcgacatggacggctgtgagatgggcagtgcttgtatcatggatacgtcctactattcagatgatgattaatttgtatacacatctggactaattctagaggtactatattatttcgtgtactcatgatggtata

SEQ ID NO: 9187 - DNA, 143 bp, Oryza sativa
ctagattcatgagattgtattagtcataaaagctgacatgggagtcgaaggcatactgtgaactcatttacataccgtgaaaacggcttcggaatcttaattgatttagtggggaacctgcctcagtcaatattgagaaactc

SEQ ID NO: 9188 - DNA, 266 bp, Oryza sativa
tctcaagcaccgagctgcgctttgtcgccagtctatctggactatgacttaattcttataatcccatctacttgactatctctgagctatttcacaccaaagtcacgatcttctacgatgatgaataggacgactcttcggccgaaaaaagacgaggcattgtgtacttgcttcactgcaaaattatcaaggtgagagatcaatatgagctggtggtattattgctatcgactgagggtataatcttggctcatcatgagataaac

SEQ ID NO: 9189 - DNA, 142 bp, Oryza sativa
actgctttaccaataggtgagactcaatctggagacgttttcgcctatattactactaatgtaatctccatttcagatggacgaatattcttatgcgcagatctattcaatgcccgaattcggcctgctattaatgtgggta

SEQ ID NO: 9190 - DNA, 478 bp, Oryza sativa
  unsure (1)..(478): unsure at all n locations
gtgcagatcattaagaacaagaatctgtctggtagacagcatgatgatgagattganggtgaaatagatagcatggatactgagacactttgngaacttgatagatntgtggccaactacaagaagaacctgagcaagcanaagaggaaggctgagcgagccatgcttgcaaggcangatgcagagttgcatgcacaacatgttgccccacaacaaccagtatgggcattcaatcattcctattnctattctataagtagcactatatnagtaattgaatttatgaatggtgctgaaagtacagttcttggattgagagtcaagacctaatattggtgtaaaatctccagcanagtaagtagatctgtctatttgacttatctaatgtcagtcaatgcaggactatgatatggagcatatattactatttctattgacaattgatgtgatgaaatactctctggcaacaactgtatat

SEQ ID NO: 9191 - DNA, 199 bp, Oryza sativa
  unsure (1)..(199): unsure at all n locations
tattattaggttagcttaatgctgacgtcctgtntatggtgagaattcaaacatgtggcacanacttggatgaaaagaggacgctctgcgttaggcatatgttgcagtaagatgactcaccatagtgctaaaaagaacgacagtgatggtgctggtgatcattattgcattgccgtgcagctgagtatggccagatctt

SEQ ID NO: 9192 - DNA, 381 bp, Oryza sativa
ccaaactctaaagaacactccagttgaatgtgcgacgatatatgcacttctctttttcttaggactcgagaaaactaaccacaagatcctcgtacattcagctggtttgttttttcaatatatagaataataattgacgccaatgcgaatcgatagaacgggtgcgtcacttatcaatcttggcatgtagagcctacaacactgataatctggtaccaatggatatggtgatctaataacacagagaagttggacaaagtgtcatagcgtgcgagccagaagacaaacattggtgcaccatattactcctgggaaatgggtccttacaaaatgccgtcaacatcatcatatggattacaatgtactgtgtcttgcacacaa

SEQ ID NO: 9193 - DNA, 324 bp, Oryza sativa
  unsure (1)..(324): unsure at all n locations
acatggcgggaatgtccagagtgtcgntgtggtgaccattgtcatgtgataaggtctgtaagacaacgaactcgaggacaaagatgcttcgtgtgtcctaacattacgacgacgatgtcatcgtatgtatccttcttttggtaccactaatcactactttcatgcacttacctctatttacacaattgttcaaatatgaggaggttaagaaatgtcaattcgtacaatggatctatacggtcagagttacttccattggtcaaacgataacgcaacctgagacgaccatgcaattcattcagggatggatggagtacgaacgtc

SEQ ID NO: 9194 - DNA, 446 bp, Oryza sativa
  unsure (1)..(446): unsure at all n locations
tnccatcatacacatgcttgctgtgaagataattggacaggtgttgtatatagcagtggtgaagcctctgaagatcaagcaattgcccaccaaagtaatattactcaatgtgaggagcaagcaacagaggagagtctaacagaatgtgaaccacaaatcttggaaatggaatcagtccacgatattaaagacactgaagctactgaatctgaaaccattttccagaaaaacattgntcctacttccgaggagtctgtcccagaagaaaatgctacagcaaaagaacctgcttttgatgacagagaaatacaaaatgatggagcagaattaacaaaggaacatgatggtgtgaaggacgaagaaatacctgatcaaagcagtggtgctattgttgaggagacagctcaagaagcccaattactagcaagtgagccaactgatgatgt

SEQ ID NO: 9195 - DNA, 423 bp, Oryza sativa
  unsure (1)..(423): unsure at all n locations
tgcagctaaacaccttattttgtgaacataagtagacagtatttataagttagtacaaggcaagtgcattaggcttgtgcagacattgaacataatgaatatgtgcagtccaatgtgcattactactaanatgctggcagtaaatgtgcacatcggtaccaagttatcanatataatcaggagtacatgttacaatgggccacacatctgacagaatgaaagagagatagttngaacattgtaaacataagataaactgcatatgttatattctttgtagatgagcacattntttgttcatttctctctatatacatcacacagaaaggtgtgacagctagttgaatatgtattaacatgttcctaaatgactngtacaagaatctttctatttactgatcactacatatagaatttgttatg

SEQ ID NO: 9196 - DNA, 471 bp, Oryza sativa
  unsure (1)..(471): unsure at all n locations
tcttcgcactatagcgggctaaccatggaggatgtcatcgggaagtcgccctgccggagcgcgccgaggatcaccggagctgccgccgactgccaagacttctatcagttctcatgccggaggtcaagcatcacgcatggcgtcgaaaccagcggatgacgatggaggcaagtatggctgcagtacataggaacgacgacnggaggatggcgagccagtgctgttggatggcaacaagctagctaatgcatgttgattaagttaattattgtggcaacgtggccaaccaatcggaggacgacatgtcatcgctgctacagtgccatgcacaaaccaatgcgtgggctgaagaagtcctgttggttcttcttattcgtcccacatgagatgccgagctttgattaaatacggccgccgtctacatcaaccatcttcaataacttctncctaattcttctctaatataatctc

SEQ ID NO: 9197 - DNA, 290 bp, Oryza sativa
acattaggacttggaagaagaaatattctaatatatctgaactgaggaagatgagtgctgctctttgggatgatgacaatattatcatatcacttgatcataaacattatgcagaccacattaatgtatgccacaaccacacttacaccattttattggtacctatagctaagatattattggttgctgaaacttatacaggttgctaaaaatcagattacctgctggaatttacagtggctgctgagatatgattggctgctgaaattatagtgattgctgaacttata

SEQ ID NO: 9198 - DNA, 335 bp, Oryza sativa
  unsure (1)..(335): unsure at all n locations
atagctcggtcagacatataaatgatgtatgttgtcggttatactaactcaccaaacaaaaggagatgggcttcaaaattagtacccatttggttgtggcananaattggattgcaaatatttgcttgttaattgggtcataccaaaccaatatataacgaaataaggagaagttgatatttttaatactattgacaatgcatcaatacccacgcataactaatgatcactgtaaataaaattcatcatcaacagcaaaaaattgcaatataatttcaacaataagctaccctttgcaataatttttcatgtaattttatgcaaattgaacaaac

SEQ ID NO: 9199 - DNA, 256 bp, Oryza sativa
  unsure (1)..(256): unsure at all n locations
cttatcttcgntctctctgggccntgggcatatcaatacgtgagctttggagcctggagcatgtctagtagtactaggatttcgcttntggtctcccgtctccgtggacaggatcgcttgaccaacgcctgatgatganntataagacctgcctaagcaacacctgggacatccgtattatgatattatctgcactgcnggttacttctaaatgatcanccgcacccctcgtcgtaccaggctggctcgtgcatgc

SEQ ID NO: 9200 - DNA, 439 bp, Oryza sativa
  unsure (1)..(439): unsure at all n locations
gacaacctacatcgacacatatcccatgctcgacacatggatagtccacatcctctgtgcaactacatgagggaagtaccacaggtgcagcgtctacatcaactggttagttcgcgcatcgcccagagttctgtcccggaggaagattggtctcttgacacatccatcctcatcggcaaggtgtgcaaatatccgagcatcttngaaccaccctatgacttgttccctgatgaatgggcacatgagccaaccaagatcaaggagaaagtcaggcgcgccatcatgaaggagtattggaagcggcgttatggggagcacattctccttcccggaccaacgatctccttcgactacaacacnatacgcccttgccagcagagcacatgggagccatgcctccacttgtgcgcggtaggaggatcgtccgactacaacaaca

SEQ ID NO: 9201 - DNA, 169 bp, Oryza sativa
  unsure (1)..(169): unsure at all n locations
tacactgggattatcgatcacacgcatcgacactgttgacatgagtaatatacctaccaatcaacaaaatgtttcagtcttttcagagatggagttgaactgaacagagatgaacgattcagagaanagatagatgtatacattgtctctcacctgatccggtgctgat

SEQ ID NO: 9202 - DNA, 411 bp, Oryza sativa
  unsure (1)..(411): unsure at all n locations
gggcagacgtttctgttcggcagcctcgacttcgtcaccaacaacttcggcaagatttctctcctcgactcggaatcagaccagtcgggagagaaccggatttcggtccccgttggattcccgaacgcggctgaaagctacttcaagaccatctcaaccgagtcggnttcaaccactcggccgagatcgcatcttcttcaacgacaccagatcaagatgatggngcttacccaccagtcctgatgaagctccccgacgatatagcgggcgtctncaccacgacagcgtcttcatcccgtaggcctatgcggaagtcggcttcaacaccgatttcgcctagcttcagggaagtcggcgtcatcctccaaccactcggcacgggttcgacggataagctggatgactacaaca

SEQ ID NO: 9203 - DNA, 292 bp, Oryza sativa
  unsure (1)..(292): unsure at all n locations
gttaatttatgtttcattngatcttgattattcagtggatactggatagaacacctatccgaaagctataagcacgtgtaaaggagaaaaagagatgaanacggtctatagaattgctgcagcanagactccaaaatagtgtttgtacatgaggtgaccaaatattaatgatgtttgtacatgaggtgaccaaatattaatgatgtagtatacattaggctattgggatagctacaaatgagatgtcaaatttaaaagctagtagtggctatactattaaacttagtctaag

SEQ ID NO: 9204 - DNA, 333 bp, Oryza sativa
  unsure (1)..(333): unsure at all n locations
gctaagatgaataaacaagtctctagtcagctctggtctctctcatggcaagctattatagatctattgctccctcaattgtaccctacttcacctagctctgntctactntgagtcgntgccatctgacctccctctgacagatgtgtatccccatggtggatctaagaatcatcgcaccagcataagaccatggaaaagggatgaatgcatgccatgcctgtgaatnntangtaaaatacatcatagactgaatagcagacatggtataatacaactgctgcgcctacttagataaagtntcacaattaaatntcatatgaattgagtaat

SEQ ID NO: 9205 - DNA, 469 bp, Oryza sativa
  unsure (1)..(469): unsure at all n locations
tgactaacaacaatttacatggtatattccttccttcctttccatattgtcacacttggtagagctttatctgcaatcaaatcagntgcttggaaacataccttcaagctntggaaaacttcagttccttacaagaatcgacatttctgataacagtcttaatggtagtctgccaaaggagatcttcangattccgacgatagcagaggttgggttctcattcaacaatctcagtggagaacttcctacagaagtagggtatgccaagcaactccgcagtttgcatctctcatctaataatctgtcgggagatattcctaatactctgggtaactgtgaaaaattgcaagaagtggtgctagaaccagaataatttggtggaagtattcctgcttcgcttggcaaataattagcctgaaatctctcaacctgtcacacaatatattaaaatggtcaataccagtgtcac

SEQ ID NO: 9206 - DNA, 353 bp, Oryza sativa
  unsure (1)..(353): unsure at all n locations
tgtgttagtaagacaataccattctgtgctgatctntttctgttactganagtgccataatatntatgctggcaactcgcacatgatgcattgaactagatcttacatatagctatgctaagcataacacaacaattaagttatatttgatctgcgtctccatcctcacttatacaacagattaggaggcaatgcaatgcgatctactttgattaatgggctgagggccgatatgcttgcttttggcctttgcagggaacatagagcatcttgctctgtgatgaccatagtattatgtatactcttcatatgtatgcaggctttggattactaaagcatcaaccactcacact

SEQ ID NO: 9207 - DNA, 338 bp, Oryza sativa
  unsure (1)..(338): unsure at all n locations
aaggatagagtgagataacatcccaagaatcaatctcatctccaacaaagaaatatngccgatatacgtaacttatagtgaaactgatcataactagcgagacaacatgaaatgcaactggcaacgtggtgggacaaggttttaccttctcatgtntcaccatggaatcactcgactgtagcggtaccgcagagctccactactcatatcgttgtactncaaactgacgctaaatcgagaggagcacaatgtgagatcatgtagctatatgctacctgacctgaactgtctgcaattgcgagagtgcgacttgcaggaatcatgatggtctctgcata

SEQ ID NO: 9208 - DNA, 431 bp, Oryza sativa
  unsure (1)..(431): unsure at all n locations
tgcaacataaatgatacgatattcggnnttctggcctctttgctgctagatgccccttgacttcatattccaacattttatcctcctttcccatttatagtctctctactcaagtgaagtattcgcacgcagaactagtaagcaggaagttaactgtatttgaagaaatcactatgaatagcactattatgtaacaaggatcctcaaaagaacagcacaacataatattcagacctctcgtaaggaagaagtaaatattcttgctatcttaataaagaagtanataacacacatatattattatcaaagtaaataattacattatgatactaatctgcacagctctgtcagaattatctataacaacatctataagatagagcagcaatctgcactaatactgaagcttcttgatttaaatggacttacaa

SEQ ID NO: 9209 - DNA, 280 bp, Oryza sativa
  unsure (1)..(280): unsure at all n locations
tgcagcttctgttagctactttatcttttccgctgcattatatctttatattntngtaagacgggcgtctgtatgtccacaatttgtcgttgtgtaccctggctggtcctggacaaagatntaatgcacattcagcttataaattctggttcgagaatttctgggtgtgacacaatctcacccattcgatctctgtatagatgaatattgatcgtggatatgatgaatgangaatgaggaatgtatcatgttcgtgaagaagaagaagaagaagaagaga

SEQ ID NO: 9210 - DNA, 325 bp, Oryza sativa
aagtttgacgatgagctcaacggttgttactgagagtagacaacactactttctgttcttgaacttatgagggtaaaggcgagacatggatgatctggtaccagtcttgacactctgttagaacttctgcacataatgctctcgaggtctaactcactaccatccatcacatatcacgcgaagaaacctctatgctcccttatactctggtgtggaaaagaatcaagcgtgcgctaatcactgcatactgtacaggaaagagtacacttctttagatgaatgtgcaacatgcggtgctatctggtacaaatcatatagcaattct

SEQ ID NO: 9211 - DNA, 267 bp, Oryza sativa
  unsure (1)..(267): unsure at all n locations
gatgcaacatcatgcatatttaacattgacccatcggagaaggaacaaacaaacttggtgaagntattctatgattgcacactagtttgagttataattcatacaagaattgttaagtttggttatttctaaccatgcttcttctaatgacagacaactaaatacaactacttgactaagcctatcanattcttccatctctttgaagaatnnattgtgggctgtcaaactgatggctctctggatggccagttactgctatactat

SEQ ID NO: 9212 - DNA, 266 bp, Oryza sativa
  unsure (1)..(266): unsure at all n locations
aagatgtgttacctgatgatgatcctggctgaacacgaggtggtccttgttctttatatatagacacaatcattgagtccttaccagcctctggttcttgngaagatgacgattgcgcttaacttacgatttttatcgacctacatcactggttcatcgggccttggttgtgcattacagctgttgcgactggcttccagtaggcggataggcactctgatcggctttgtcatccgaagcatgggcgccagccgtatggctttctg

SEQ ID NO: 9213 - DNA, 333 bp, Oryza sativa
  unsure (1)..(333): unsure at all n locations
ctacgacgcagttcatatgaccacaaagctagaccggagatattgcgccctactcgaggtataaagaccatattacacattaacagctgacatagcaaattgatgatccatacgcacagtaaggcaaggtctgaatgtgcaattcgcctctatatcgcaagttcacgcatgcgggtcactcgtcaccgatgagcaaccgcacgcgatgttgatccccatggagtacttnctcatgggatatgggctctacagaccttcccagctggatagcacgccccggagcacactgaacccattctgtatatctgctgaacttctgtcacctgagagcat

SEQ ID NO: 9214 - DNA, 310 bp, Oryza sativa
  unsure (1)..(310): unsure at all n locations
tcatcagataagctcactcttgcccttccaccttccaaccaggcattgtatctcagaacttgaaactggtgaagaacagatcgaacgctatacctgacactcnctcttactgtcaaggcagtcaacgatgcacgggcatttcgagccaagctcaagcgcgaccggcgtcaggtgtttcgctgctttcgtcataatgatgcgcnctacacgagcattnccctganaacanantgaccatcataataaatacagtcaataacgacgaattgaagtttcagaaccaagttgagtttggcacagtgtacgtcat

SEQ ID NO: 9215 - DNA, 221 bp, Oryza sativa
  unsure (1)..(221): unsure at all n locations
tcatcagtaaaaagataatctattgattgatattacctatgtaaccttttatctgaggagatatttgaagatgaatgtgtatatgtatagaaaaaatactatccgtctatgatgaggatttnactatctaattattccatgcgaaaaaatatagattaaataaactatagtaataatactggaaatactaggactggaaaagatatgacggcctatgaata

SEQ ID NO: 9216 - DNA, 428 bp, Oryza sativa
  unsure (1)..(428): unsure at all n locations
acttctgtcttctngaataatggagaatgaagtactaccacttctccatttcaattaaccaacagaattgtgcggcttgcacaatcaataactcctttatgtcttgtcaaccaatccattcctagtatgacatctangtctttgcactccacaaggataagattggctagaaaaggtgacccttggatttctatcatcaaagaggaacaaaaactaactaatggtaagctattacttggtgtattaactttcatgggagtactaagttacacttttcttaacccgtgtacccaaacaaatctcttggatataaatgaatgcgtagcaccagaatcgaataaaactgtagaaggaatngagttcacagggaacgtacccaanaccacttctgacgctgcttgagcttcctttgtgacacatgataaaca

SEQ ID NO: 9217 - DNA, 302 bp, Oryza sativa
  unsure (1)..(302): unsure at all n locations
tttcatactatagacgtgctcttcttgagaaatgggaacatctaanacaaggtgacaaaactggtagggagtactttcatgattntaaaatttgtatcacttatagtggtttacaagaatctaatgagaacacaatgactatgattttcagagggcttaatttcaatattcangctgggcttgttaatgtgacatataatcatatangccaattgttcatgcttgcttgcattgttgagcgcaaaattttggagaatccaacngagcaacaagatatgcttgtgcctcctatcactgatgtt

SEQ ID NO: 9218 - DNA, 358 bp, Oryza sativa
  unsure (1)..(358): unsure at all n locations
tgcttttctcgcccgcgccgngctccaatgctcgtccttgtcctctggcgcggctacaggtacgacgccggtattggtgcgccatcactgggccgccataaatcgggcgcggtttcttggcctataaagatgggcgcgtgcgcacgcggctnttgcatatgcgcggaggcaacctcgcggtgagcccgcagctggtgaaggaagagacgagacgaaaccacgaggggaaataggagcaaaatcaacagctagctgcagactgcatgcatctgcagttggttggttggtcggcgcgcaggtggagggagagtngagcggcggcacggcagcacaaggcgttctgggcgactctccgcgt

SEQ ID NO: 9219 - DNA, 368 bp, Oryza sativa
  unsure (1)..(368): unsure at all n locations
catactatagacgtgctctccttgaganatgggaacatctaanacaaggtgacaaaactggtagggagtactttcatgaatttaaaaattgtatcacttatagtgggttacaagaatctaatgagaacacaatngactagattttcagagggcttaatttcaatattcaggctgngcttgttaatgtgacatataatcatataggccaattgttcatgccttgcttgcattgtgagcgcanaanttttggagntcccacggagcaacaagatatgcttgtgcctcctatcactgatgttttgcaggaagttcagaaaagtctccanaatgagaagaacgatatgtttgagatgtcacttncatcactc

SEQ ID NO: 9220 - DNA, 258 bp, Oryza sativa
  unsure (1)..(258): unsure at all n locations
tcactgggccgncataaatcgggcgcgggttcttggcctataaagatgggcgcgtgcgcacgcggctttgcataagcgcggaggcaacctcgcggtgagcccgcagctggggaaggaagagacgagacgaaaccacgaggggaaataggagcaaaatcaacagctagctgcagactgcatgcatctgcagttggttggttggtcggcgcgcaggtggagggagagtngagcggcggcacggcagcacagggcgttctg

SEQ ID NO: 9221 - DNA, 388 bp, Oryza sativa
  unsure (1)..(388): unsure at all n locations
atataaaggacgagagccgtgcgtggcaccgtacatactgcctatagctggaagcgtagtggtgtgaacgggtcaaaacagtagcttttcaacgagagacgacgaaagctcgggcacggcttcaccttcctcccaccgatcgacggcggcgatcggcgccattccttcttcttctccagcgtgtgaaacgatcganacagcgaggcccccacagtcgtgcagtcactgtacggcacctaaatactgctttttggaccctcgcgaagacgaacgttaatatagtnttggtcacattctgcgtatctaccctctcatgaatgatcggcgtgacgggcgacacgtccgaatatcatctccgtgactgtactagctgcaagagtctacctac

SEQ ID NO: 9222 - DNA, 254 bp, Oryza sativa
tgacaacttatgcatttccggagcggattaatcccaggaaaaatgggagccaacgtgttcacgccgttcacgttgccgccgcttgggtaacgggaacgcttacaagattcacaaacttccggaacatccctttttctactctaatttaaacacaatatacacatatttgtggtgctatattcaagctagtcgttggccaacatatttgtctgaaactcctctattccactgcattgttacacttgcgtttaagt

SEQ ID NO: 9223 - DNA, 140 bp, Oryza sativa
  unsure (1)..(140): unsure at all n locations
tcgagatgctcttggcatgtggcttcataatactaacccttgaccaatatcacacacttcctgctattgctggatgaggtatgtgtggtcatgaatcatgaanacctctagctactatagtactcccttccgttcgaaat

SEQ ID NO: 9224 - DNA, 444 bp, Oryza sativa
  unsure (1)..(444): unsure at all n locations
tatgttctattggtatnggtatgcttgttgctctattgatatatgctttagtaaagctgcattgcttaaacgtgcatctatataaaccttcaacttcatagtattgcagctacagtatttcctaatttgcatttattggttgggtcttcagtaggcaactattatttttataaatgtcaataacattgttatggctaggatatccccaagacttttacgacgcttatatgatagacctatccctcgcttagctctagccgatccccctcccnctccggcatgaggaccggngaccgacctcatctcctcgatctctaccgtccttcctactaccccgaacactaatttgacngtgcctgcacatctcctgtagttggagaatacactaatgtgttttacattttcaatcacccaatgagtataaaatatgtgattctgtatatc

SEQ ID NO: 9225 - DNA, 379 bp, Oryza sativa
  unsure (1)..(379): unsure at all n locations
atgatntacctgtagaatatagagcatatcagcttgaaagcaggaagatgaataatggaagatgcagaaagtagttagtgaagaatattgcacaagagtataccctacataggtaatctggcagaacataaaatatgttcctcatatcttaccatagaggtacacatagtaatacagcgaaccctaattccagtacattgcagaccatcatggaaatgggaatatatgctagagagtaagaaatacaatctagtgatctacaggtttctttcacataacacataaatgatgcctctgcggacagcgtgaaatggcaaatatattacaacttattcttaaccaaattcatatgaacatgatatcagtgacaaagaactct

SEQ ID NO: 9226 - DNA, 302 bp, Oryza sativa
  unsure (1)..(302): unsure at all n locations
taaatttataaagaccctataaattatttaaattaaattttggcacccaagaaatagcgtgctaataaactgggcgtgagtggacttgaaggtatgcangtctagtcttacacgcctcatgtggggatgcagctatgatgcaagcgcttcttagcgttttcctatgttagttcggaaagaaattttagatgtcaaagataaactttggacatcacagtgcatgcacaatctgtgcgctatagtgggagtgcttgtttgtgcttgatgctaggctttatctgcagatgataagactcatcact

SEQ ID NO: 9227 - DNA, 437 bp, Oryza sativa
cgtggcttgaacgatatgtccaaagacatcaattctaaggcccacttcgcaatccgtccgtttgcttcgcgggtatgaagtatatccccgagtggaaacgatgtgaccaccgtgaccgagtgactttgaaagtagtgagataatttcctgacgggaattaagacaccatataataacttttgaacctgaggatatcttgtcttggagtcagctaaaacctcgctaacgacatataatggtcgttggactttttgaatatggccttcctcttcacgctcgacaaccaggaccgtgctcacgacctgtaaggtcgccgacatatataacagtagcggctcttgtggatgcggcgaggccaatactggcggagtggtgagaagtttcttgacgtcttcaaaggctctttgtgcttcaggtcccactggaaatcgtcagtc

SEQ ID NO: 9228 - DNA, 454 bp, Oryza sativa
  unsure (1)..(454): unsure at all n locations
gcttgcgagaaataaaactccacgcggtctcaactttttgtatcacacncagtacacttcatgttcagggtactgtgtgttccgagaatataccgcgaaatcggaaatagagtgtggtaaacaaccccttcttaattcttgatgggatatgttctcgttggttccaatgccatccagaatgttataataaacattcaacangaataaaaacccatgcaacanacatactccatccgtctctaaatataagagaatttggtccagactcatggtagtaggatacgtcccatccacctataatctcttatgttnntggacngagaaagatactgtccacanatctaattactgctactgacatcncataaaaggtttcaaagaacaatataggatgaaaatatactcctccgttntaataatacaccgtgatnttctaatattgaccatctctatc

SEQ ID NO: 9229 - DNA, 282 bp, Oryza sativa
tctttgtatcctaatatatctcaaaagatataccatatgaattggccatcttattctcgttcctctcattttcttctatatatgctatatgttctgagatgaaaagctgcctcttcctctctcttctgctgctaccttgtcttaggtgagttgcattggcatctcactagcctaccgattatgtgctctctgattccctcttcaatctcggcatctcattatggctttacagttcatcggcgagttcgcgatctctctgcttaattcgttcgggcagtactt

SEQ ID NO: 9230 - DNA, 428 bp, Oryza sativa
acaacactagctctgaatatattctatgtataaaaattagaacggagatttgaccatcgtgcctgagcttgtgtctccaaagagtattctatggtttccctcttggcacaagttcttagtaatatgaaaattcattatgaaaaaaatgaatcaattgggaaccttcaaagcatactcacagcatgcattgcagacaagagtattgtcctgtgttggatgatgtatggcactataaagcatgggaagatatactaagaactccactaaatgcggcagccacaggaataatgctagtaactactctagatgaaactattgctcgtgtattgtggtggaacgcactcatagagttgatttgatgtcacgcgatatatgatgggagttacttctgaggagcatgaacatcaaagaagagaaaacagtgaaaa

SEQ ID NO: 9231 - DNA, 349 bp, Oryza sativa
  unsure (1)..(349): unsure at all n locations
agtagtcctgagaaacacagatccatgcatgtttgtcgaaagctttgtntaatttctcatcattgaatactttctgagcaagtgtngtcttttcgattccnncctgtccaataatagcaagcttgtaagtcttcttttccttgtgtgtaagaacctggctcaccaattntctagaagcatgtaatatctcttttcccacaanggtggattcagcaatttgagaaacttttctcaaatctgatgttgaatctttatgagatgactgtgtattctcaagtgtacanatatttatcctttgctatttttangttctgtcaggtttaatttataccatctatgggaaccaatg

SEQ ID NO: 9232 - DNA, 451 bp, Oryza sativa
  unsure (1)..(451): unsure at all n locations
agttggcacgacaacactagctcataaatattcaatgatcaanaattagaagggagattgaccatcgtgcctgcgtttgtgtctccaaggagtattctatggnttcccttttggcacaagttcttagtaatatgaaaattcattatgaaaaaaatgaatcagttgggaaccttcaaagcaaactcaaagcaggcattgcagacaagaagtttttccttgtgttggatgatgtatggcactataaagcatgggaagaattactaagaactccactaaatgcggcagccacaggaataattctagtaactactcgagatgaaactattgctcgtgtaatttgggtggaccgcactcatagagttgatttgatgtcagccgatatangatgggagttacttnggaggagcatgaacatcaaagaagagaaacaagtgaaaaatctactggacac

SEQ ID NO: 9233 - DNA, 389 bp, Oryza sativa
atgacggtttacactaagaataaactagaaattactggctcattgacattccacaataattttagtatcacatggcatactaattcttaacaaactaaggtaaagaatgatacaatgggcccttagaatcacattatctgtcaaggaaacatacatggataattcttttcctttattaatgaagcaatgaatgccctagcacaatgttgcttgtcaatacctgtaacctgaagatggcttttgctgttattgcaaatccgactgtttccaagccttcctttatattctactaggaaactgagaatatataaaatatgtactaagaagaacagctgctctacatactgtttacatgtcaaggaaaaatgtcactaaaataccactaaaga

SEQ ID NO: 9234 - DNA, 489 bp, Oryza sativa
  unsure (1)..(489): unsure at all n locations
ctctacatatatatgtntcactatatctctcatgatttttttttctgaaaactcctttattacatatatatgagagaggaatcactcacacacaagataatagcaccaaaataatgtatgcagcatgtgagaaatgatcataanaagaacaacacaagaagtttcattatttttttgaattntctagtggggtcaatccattgtcaacatttacatgtatctaagggtattntangtattttcaacagtattggttaaatggtatattatattgtagaaacaactgataaactcattggcatactacagaaaangggcanaggctatgttaaatattttagattctctctnaaataatagaagaagttccgtagaaaaattgagaggaatacagtctctacatgctctctagaacanaagaattgaactcaccannaatcccacagattaagctcatatngtaagactttatatgtgatcgaatggata

SEQ ID NO: 9235 - DNA, 424 bp, Oryza sativa
  unsure (1)..(424): unsure at all n locations
tgcagcttattctttgtcaggaaaagaaagtgaagtcaaatattattcttaacttgctggaaatacatcttgcggcagatgctgcttcagaggatgaatttctcgatgattctgaggatgatgaacgccgaattatgagaaaaaggccttgtaatactttataggcggcagagacttctgagagggatccaaagagaaacaagaaatgctntgcagctcttaatcacaataacttanagttaatttatttgagaagaactctaattatgaatcttatgggccaagacacatttgaacagaanagtngtggggaagttggtagagtcaagaatgatgacaatcattatagttatcagatgcctaaaaaacactaccagcttggcctagtaacaggtaatcaactacaggcagtcttctcaagttt

SEQ ID NO: 9236 - DNA, 455 bp, Oryza sativa
  unsure (1)..(455): unsure at all n locations
tgcagcaggcaggcatgtgcgtagtgcatacatacatatgtactatttaatagctgatgatttttccatgaaanttgatgttctactagtagtagatttaaaagttggcaatatatatccgtcccactctgctgaagggagtagacgggcgaacaggggaggctgcgagaaccgagaggtgcacgagcacgagtcgggaattttcggccgcggttgggcctanaccacggtagcctggctggatgacggcccatcaaccttcttggccaagagagttcgggcccatgttacgatgccacgacggaactgtggatgaataagtctatttctgtcttctcatgtcttgccaccggttgaatcgtgcccctaaatcgcaaaggaaaaagtacaccgaaggtccctcaacttgtcatcgagtacaaaatcgtccccaactgcaaaccaatatatacatc

SEQ ID NO: 9237 - DNA, 509 bp, Oryza sativa
  unsure (1)..(509): unsure at all n locations
agcttctggccctcttnctgatccaccagatgatgagtacgacanaactntctcaatgaaccangcacgctccatcanngttgtacaaaataactctntcttcttagttgcagaccccgcacaaatgaccaatgtcttatnttcctctcatgcaatcctagcctctntaaaagcatgtaccttataaatggttgacccatcatgtgctgatactntctaatagtcttctttatacccagcatacgctgcannattttttttntgctaatgtgatataataatatgttggtaactttctttgctatcctacatctctaatttgtttcaccttttcttatatggaccttatgctacttcataatgagatatgtacattagtccattgatcacaagattttattcaaatgactgttcaatctgctggaacacactaacaaaacatacatctttctttgaacaacatttgcatgactggagttctgcaacattgtctatctacttacttgatc

SEQ ID NO: 9238 - DNA, 320 bp, Oryza sativa
  unsure (1)..(320): unsure at all n locations
cctacgcttactaccaggagggtgatgaagacgatggcgctcagcaggtcttagatacggactgtgcaagtggcaatggcgtgccgctgccttatctacttctgcttttggaatggattccggaccgctcggtccgatgatctaagactatgcctgcgggcttatgatgtaataattcgcactagactctcgtgtatgtgcacttggtatttcagctaagaactcatgtgtaccagactacttgatccagggaaatggtactgtntacacgattgattcctgttatataaacgggagtgcacaacttctgtgcgccgctt

SEQ ID NO: 9239 - DNA, 469 bp, Oryza sativa
  unsure (1)..(469): unsure at all n locations
ctgcagcttagtaccttactgcacatgatcttggtattaagcttttctttgtatactgagccanatgatccagaacccaacanattagtcggcgcgaaaccatctggtgctnttaccaactgcgaataagagaccaatgggtggcctttcatggaagttcttgaaggggctccctttttagttctcttgtgccaggttataagcaagtagagtgatgagaggatggccagtgctgcgaccagagaaacaganataggtagaactgggaaatgttntctattctctagtaatggacaacatcgaggcagatgtagatcaggtattccaccacagagtttggcattgccttggattgagatcccggatgcatctgcgaaagcaccaatggttggcactttctccataaagcttgtgaaagaaaggttcaaggaatgaagcatagtaatatctgctaaggatgtgggtatct

SEQ ID NO: 9240 - DNA, 439 bp, Oryza sativa
  unsure (1)..(439): unsure at all n locations
aatgactatangacatggagaaagtggtgaaatgactgtgttctgtggttacattaaagaaataatagagatcagctttgatggcaccaaacctctcacacttgtgctcttcaattgccattggtttgacccaagccaagtctggtactcgccaagatatggccttgtcgaagatgctcatgcatcaatccttctcaagtttgagccatttgttatagctcatcaagcgacacaagtgtattacatgccatacccatgcaaatctgtgcaagatctcactaattggtgggttgtatataacgtgcagccaattggtagattagaagtacccactgatcaagaattatgatttgtccncacactgatgttgccactattttcagaagatggtctgctggcagtttgtaattgatctggctgacttgaaatattctgaaag

SEQ ID NO: 9241 - DNA, 367 bp, Oryza sativa
gggggattttagctacgcgagacctttttgttagctgaatgaattaagatgacattactgcttcctgaggatctatcgtatctgatcttgagatcttatgctctccttcaagagagaataaacatggagacaatttggttttttcgtaacatgtgcttctgtggactgtgatacctaaattgaataccgttgttacgtgatcacacattttcattgtatctgaaatgacaaatcatttgccgtggtataatttaccgtacataatcatactgggtcatgatcactttctgcgactgtttgctgagttaggatattctcctcgctcaaaagatctcagaaatgaccctacttaaattgaacctcgtaa

SEQ ID NO: 9242 - DNA, 417 bp, Oryza sativa
  unsure (1)..(417): unsure at all n locations
ctcgcaagtagtatactaatgccctttgtcttgacctaattagagtaaataattgggctgctnttgaggctgcagagatagtaacgatatgctgacgagaaaacgaagaggtaggattcttgacgttctgtggagaacttgaatctacataacagttctggaggaagaagtaagctgttcaatactctgctntctttggtgtttctcttcttcactaggctctctctattgatgactagtcagttaggccttctattggttgctaagttaaatctctctttggatattgagtacaaaaatcgagcttctaatatatggggtccacaaaaggacatggataacagtaatatcagatagcacatcanagaggagagttatgctagatagcctgggaatcaacatctccattggtactat

SEQ ID NO: 9243 - DNA, 442 bp, Oryza sativa
  unsure (1)..(442): unsure at all n locations
atgcattttgccaatcgcgatggaggngatgaaagggaaaggattggcgtacggaaagtacaatctattacgcaggccacattaaatgcttaggcttntggaaagggaataattaataaagttactaacataaattattatttagtggcagagaaacatcatcctataaggctaccattattatcattctatatagaataaacgcgaatattagggaatgatataatatcaaataaatagaaggagtgagactttgaacacaagccggcgagctcaccaccttgtggagttagccggaagacccctcgagtattatcaaaagacctaatatcattatatgcctatgaaattatttacggtctaagtttatggccctttttaatcacatcaatgaagaagaacgaagatatagagtaacacatgattctatgtagaattatgt

SEQ ID NO: 9244 - DNA, 321 bp, Oryza sativa
cagtcatacttcagagacaataacactggagcttgattaatattcacaccgacgtgtacagcctccgactcgtgcctctagagatctcttgtccatgtaagacagggagcagatctggaacgatatgtacatgaaccacgccggcgtggatgccgtatgcgatcccaacaagctgaaaggcgagttctacaagacgcagatggagcgtgtgatcatcccgaggcactggtgctctatgaaagacccaataaagcggcctaacctgaatgatgctatggatgtgctgcagcggtacgactactggaatctgccagatttcac

SEQ ID NO: 9245 - DNA, 333 bp, Oryza sativa
  unsure (1)..(333): unsure at all n locations
cacctagaacaaggcagatcacaaaaagagagtgacagagagatacacttagcaagagagaagagagatcgttacggccaccttgagaaaggcgagcgggtccgggccgaagagctccttgatctngggatgcttggccaggaatctcctgcgccgcgtcgcgtgcggctcgtccgtgtacgaccagaagaagtncgtcgccatcacccctttcttcttccgtncatttcccccgcgcggnngccattgccaccccaaacccncgcccgcaaccgcaagcaaaagcaaggatccgatcgacaaacggcggcgcgtctaccttcactcctcgga

SEQ ID NO: 9246 - DNA, 512 bp, Oryza sativa
tagttcttgctgcatctgtcaaccaaggaatcacataccaatgggcagaaagagttttttacgaagccgcgacggtatgcactacgattaaaggtacatgtaggaatatgaagacatctgaaagtctaaatcatcaggttgaactttaaaggaatacaagtcaactacgcaagaagcttacacagaatcaacacatggtcacggtcgtgaacaatccatccattggccaagatcagggttcgatccccactaccagttcactgaagaagccttttattcagaaactggtggctcaatttcagttcagagctaagcaatcattttttggggcaatattctaatatgtaaccaagtatataattcccaataactcatataaagctatatactactactagctagagattggactttcaaataaagtgacaacttataatcagcaaccgtagtagtagtaatctatgaacacaatgaccatggaaccccttgaacactgaccatcttttgcctgt

SEQ ID NO: 9247 - DNA, 423 bp, Oryza sativa
gcacgagctcagctgatcagattgagaaaaatactgtgataatataatgtgcaatttttgagaatttcagactattagaggtaaatgagaacactctgaaatcaaaagttcactgacgaattcactgttgagcgtctttgtagcctgtgactttcactgatataatactggaaacatcatttggataatagaagtgatagcatattatgaccttgaatatcatactacttgatttttttgcaacttttataacaagtgaaaaatatattttgataaacattataaaattcatatcatgaatttatggcaattagcttgtgcaactggtcactcttgttgttcgcgccctttaacgtaacggtgtttgaaaagattgtcttttaaaaaacaatgtatatactcctaaactgtattcgatcatag

SEQ ID NO: 9248 - DNA, 343 bp, Oryza sativa
  unsure (1)..(343): unsure at all n locations
catgttgggacactcctggacgatcaattctctgagtggtttcaggcggcacaattngacaggcaaatagttccagctgcagtctgtaactgacagtgtatgcacgcaagtgaagaattcaccaatctttgggggatcactcgatcccttgcaactccagaacataagattctgcaatgccgggcgatcttgttcctggtccttgtcgcaaccgtctcctgtcaaccagcttgggtatatcacaccaccgtaatccctgatgcaaagtactgtaatccccgacggtggacggagcccctcaagaacctnnctctgaagttctggaggggtgatgtgcttgatc

SEQ ID NO: 9249 - DNA, 291 bp, Oryza sativa
  unsure (1)..(291): unsure at all n locations
actatacgtgcacagcggtgtgctcggtgagctataccgacatgccggggcgggccatggccgcgaactccaggctgcttagaacgaagacggtgcgggttgtcctggcgcgtgtcgtgactacaacaccggcgcccgccttggtgcacagattcttagacgtgcatctcacctgcagctatcaataggtcangatggtgaagccatggacatggcatatgcagcttatctagttgactatcctgggctggtgtctgcttctcgatcgagcctgattacctggtagcacgc

SEQ ID NO: 9250 - DNA, 346 bp, Oryza sativa
  unsure (1)..(346): unsure at all n locations
atatntacattggagctatgttntacacacttctttgtcttcaaaattttgttgctagttgatgagagagaaaatntgtgtggcgaagaaagaatatatagaaatttagtttatttgctaaagaaggtcttataacatagttgagaacgataatatagtgaaaggttatctttgataatagacaacaaactacagtgataaataaaataagacaacacattaatattagtctaaactctataatagagataagaatattcgggtatattataattttgataaaatgaatgcatattggcattgtgaagagtgtatatttatatattgatgactgcttatgccaata

SEQ ID NO: 9251 - DNA, 221 bp, Oryza sativa
  unsure (1)..(221): unsure at all n locations
attcaaagtcngaattgtgtatgagtngaatntaaacatgcatgtttgtagagtggcatatcacatattgatctagcttgctgtttttcagtntttagtggatttttgagtgatattaaaacaagaagacatcctgtcaaggtataaatagtttcctaaaaggtgtatattntgtaagaatacaatctatggattgagagagagagagagaagagaagaga

SEQ ID NO: 9252 - DNA, 483 bp, Oryza sativa
  unsure (1)..(483): unsure at all n locations
ctactccattttgcttaccgctccacaaaccgttgtgattcacggagcagcccaaccaccttttagcctttcactagacgccaacccacgcgtttcatggtgtgttaacaataatattataatacacgtgctttggatggttattagtgtcaataatataaaagtttattaaaatttgagacaaatgttgaatacgttggttacattcaaattatagttgattactcctttttttaaattatattggttagttcctttntgaactattaaatgtcatataaaaaggaagtaatagatcaaaataacagtcaacttcagttactactcgataattattagntttaaaattgacaattaaatgaaatactatatgaagaacccatcccattctttatgactganattcagaatcaatccctttttcactgaaatttagaatccatcgctattttgacagaaattaagaatccatacttaatatat

SEQ ID NO: 9253 - DNA, 420 bp, Oryza sativa
tctgccgcgacttagcacgcgctcacttccaacgacggatggaattttatgctggaagttgaatgaaacaatttgtttctctctgtcatctgattcgtaattctaaatgtggaatatttatgaagagttcaaagcttcaccaactgaatgggtgggatctaaagctgaaagttgaatgaaaacaaacaattgtgtccttcttatcgaatctggcaacaaaagtatggttacaatttgcatgaacatcctttgttgaactccagtgaacatcgtacagtctgcttcatactgatagaacgattttttacattcttcaaattcccttgtgaaatcttgatgtagactgggatcactgggcaacttagactctgaaggatggaactctctatctatatactaggaacactgatgggtcaatat

SEQ ID NO: 9254 - DNA, 379 bp, Oryza sativa
  unsure (1)..(379): unsure at all n locations
tcanagagtgtgtgaatgagggagaggagagagtatttataggtctatagataccctgggaatgtggagatgcttaagcatccaaagagcatctcttctcttctcttgacaagtgtgcatgacggtttcttcatgtataacgctcacaaccgtcattgggatgtcatccacagcgtacacgtggaaggccaggatcaaaggtgccagtggcggttcagccgaacccctggttcggtcaaaccacgggccccacctcctggcctctcctttggcagggacactgactggtgggtcctgatggtgcttatgacagttatgacccattccatgcggtttcacctgacttgtgggccctccaatccatgtgcttgcatctgat

SEQ ID NO: 9255 - DNA, 397 bp, Oryza sativa
accgcatcttaagcactgagctcagcttacatctttactaacagaccatgacttgaataagagacagattgcattcatgaacagtgagtgcattgcccagctgacatataattcagttaatgatgcacaatacaggtgtgacaataaatgaacgtacacttgttcggacagaaaagaagcttggtgctaatcccaatacaacatttatttgttttgtcgttcagcatatcagattgaggcttgtggctatgatgtaattgatgcctgattgtggtgtcttacaggaggctatgaactattgattgctctaaatactccgggcccatatcaattatatcaaacgatgcccagttattgacactgccctcattattatacatttgataagcaaattgtt

SEQ ID NO: 9256 - DNA, 407 bp, Oryza sativa
  unsure (1)..(407): unsure at all n locations
actgcacagcacacgcgcattagctattcagcggaccggcgcacggtntcctcacctcgatgaccgaaagacacgccttcctcggcaacagcttcagcaacgacaaggctgatgggtggtacctcgacaccggcgccacccatcacatgactggccggcgggagttcttcaccgagcttgactctagcgtccgaggctccatcaagtttggggatgcctccggcatggagatcaagggcgtcggcttcgtcaccttcaccagaaagtccggtgagcacangctgctcaccggagtctaactacatcccgtgttgaggaactctatcatcagcgtgggacagctggatgagaacggctcacgcgtgttggcgagcacggagcatgacgaattgngatcgcgcgtcgct

SEQ ID NO: 9257 - DNA, 334 bp, Oryza sativa
  unsure (1)..(334): unsure at all n locations
ccaccataggagacttgtatgcttccgtggagagantgcacactatagtgggttcatcggatactcgagtgcgaatgttggagagctcccaagcattcgtgtatcatggtcgtcgcgatgcttctcatccttcatcttctgcgcgttctccttctcctccacaagagtgaagacctcttntggngcttgatgcccaaaggcggagaacagtgtgttttatgttgggttgggactagtagtagtgaggctagtcacctcatatttaatatgtttatgaggagtgggctatatcttgtatgggtatgggctattactctatcttgtgtgctatttg

SEQ ID NO: 9258 - DNA, 378 bp, Oryza sativa
  unsure (1)..(378): unsure at all n locations
cacatcatctggtgtcaactttggcatccaagattatactcctactcattgtcttttcttttntggtccagagtaccatgttgccggctgctntagttntatctgaacaatcaaacctggtagttatcttcgcactattataattccttctagatctgacgatgctgatactcttgcgccttgacatttggggggtaggaaaagttgacatcanaagatagtgtcatgactcatgacagtattagttgtggaaacctgatngggcaccatattatagtaatccaactgcatnctatttatattgcagattangatagattacctctatattaaaaatatacacacctaatgtatacaaatggaactcaatatggacat

SEQ ID NO: 9259 - DNA, 458 bp, Oryza sativa
  unsure (1)..(458): unsure at all n locations
ctacgaaggctcttctgntagctaacttgcatggaactcatgtagcacagntaacgatggatgcttgcanatcatgcccactacttactcttaanaatatgtcttttcactttacaagagaaactcttcctgcacaatactatagccaaataaatgggtaacattaatagtagcaccagaagctggcaatttatgtgaccagaaaattanatgagatacattntggtactggatctttgtccttttaacttcccttccagcaatggtngatttactttgaagggtaatgactttgaatttgcgagtgatcttctgcngatgatgcctttcggaggatntacattgagagactgtcaatgcttaagcataggttctatgttgacttccagtaatcttacctctatactgtagatcgctgtgcacagcacatctaatatttctgttgaacgtctgttcta

SEQ ID NO: 9260 - DNA, 453 bp, Oryza sativa
  unsure (1)..(453): unsure at all n locations
acagcgcgtaacttctatgtacagcgacatncaacttcgacgtgctcatctaanagccctggatgccaagaaaatggcaaaccttcatatgaaaaccttagacaaactagcaatccgaggatgaccaaatggctccatctttaccgctagacccaataaatggccctacacctcttcgatggtacatgaatggtggaaggcangcgccanagcangtaatgtngcatgtggtccttctagtttcatgagagaattggaataaagaaaccagaggacctttcagcacatggagctctcggtgcccaacttagtctnccaaaatatggtggagaccacaacgtgggccttgcgggcgctagaaaaccaaccgcttggtagcttaanntagcgtagactggtntctagttgatctcgatatatnttttctctatacagttctctacatgtcaaaga

SEQ ID NO: 9261 - DNA, 523 bp, Oryza sativa
  unsure (1)..(523): unsure at all n locations
tgtgatcatcatgcagtgctcatcatacttcttacaactatgtacacgattatctnttcaaataagtagtgtgcaccatataaacactattactaactaggtcgtccttctcacaacaactaatcactgaggatatttcttcatcagacagcaacgaaatatagaagtgtactgaaaggaaaaaggttctttttatataagcatagacattctagttgtttcattatgcttatgaggacactaataaagcagaactttccatctctcatatccaacacatcatttgtttgccgtacatacaaaacagggaaaggatcagtgcaagcttaacagatgctgcatcgctggtcccgcttcaagctattatatacgttgattccaatgttgacatctctctaactacgtactactatcgacccaacgtcaggaccgcaagtctttctcagatctgaattatctcannatctttgtagaatagcaactaatcgtcctaacaatcattcattccnaccaataataatat

SEQ ID NO: 9262 - DNA, 392 bp, Oryza sativa
  unsure (1)..(392): unsure at all n locations
gtcacctgcggctgcagctanattcacttgtacaantagaaacagatatagcatatttgatctgtgaatacgtcgtttattcaaagtcgaatttgtgtatgaagtgaatntaaacatgcatgtttgtagagtggcatatcacatattgatctagncttgctttttttcaagttttttagtgatnnttngagtgatattaaaacaagaagacatcctgtcaaggtataaatagtttcctaacaggtgtattatttgtaagactacaatctacggatagagagagagagagagaagagaagaganaatctctgaaaanaagttcaatcacatccagaaatgaaccagtggtatggttttgactcactaaaaccagactgctacactgaatacac

SEQ ID NO: 9263 - DNA, 361 bp, Oryza sativa
gatccagggagcagccccaccaccttttagcctttcactagacgccaacccacgcgtttcatggtgtgtaacaataatattataatacacgtgctctggatgggtattagtgtcaataatataaaagcttattaaaatttgagacacatgttgaatacgctgggtacattcaacatatagttgagtactactctttgtaaattatattggttagttcctctttgaactattaaatgtcatataaaaaggaagtaatagatcaaaataacagtcaacttcagttactactcgataatgatcagtctaaaattgacaattaaatgaaatactatatgaagaactcatcccactttttatgact

SEQ ID NO: 9264 - DNA, 403 bp, Oryza sativa
  unsure (1)..(403): unsure at all n locations
atggatttacccctanacattacatatttctgatagagtaatcaccaatcacattatttctattnnttttccacagggnttttcanaggaactaaagaacaagtcggtctcaagatggacgtcgataaaatgaagagtgttacanaagcatcattaggtcatatttgatcttatcaaagggcagcaatngcagcaatcaagtgaatcatcaatcttgtataagtcattttaanggagcattgtgacatataaatagccacattcagaggcttaaatctcccctaaatcctaggagaaatctaggcatcatgtatacatacactgtanaagaggacatattgagatcaatannaatgatcgggatcattngntcacctatngtatctaataaaaacatcatata

SEQ ID NO: 9265 - DNA, 322 bp, Oryza sativa
  unsure (1)..(322): unsure at all n locations
gggcattatctttgattctttccatcatcgcctgcccttgctgacctgtcttgtaagcaacgaactctgcccagtgatcccttatcttcgggaatacgtccaaggtcggtgtctgctcctttaagatgtatttccggtacagatctcccttgaaggtcttgaactggtctgccattttcttaagagtccactgtttcactatgttctctgtacccgcagggagcgtgaacgtctcgagcattgtggtccacagcatctctttctctgatnccggatgaagctgtcatactcccgcgtggctctgtctgcgcagtacaccttg

SEQ ID NO: 9266 - DNA, 312 bp, Oryza sativa
gcagctaaaattcgttttgacagactgtttttttcagaacaataacctttcctcacatgtaagaccggaaccggaggcacccatctcctgggactttcgcacgggctcacttgcggcttattctagagtttgaacaaaaccttccgagactagggcctgcgcatactcatcaccacctccctcgtaagttgcatacatctgtaagctctatctgccagctaactgccagccatcacccaaattcgcgcgtctggtcccggctcagttacattgcggctgcacttaacataaccctcaccgggcacgctgctt

SEQ ID NO: 9267 - DNA, 178 bp, Oryza sativa
  unsure (1)..(178): unsure at all n locations
acagctagaaggttgatgaccctatggtgtgagtccaagctcggagatggangaacaactataatagcggtcaagccgtagagagcacggaataaagtccctatcatcaggcctcaccaatgtgaggaatgtagcctcatcaacgcagtcactgtggttgtccaagcaccactcaatg

SEQ ID NO: 9268 - DNA, 415 bp, Oryza sativa
  unsure (1)..(415): unsure at all n locations
cacggaatgaaacaattcacgtccttggtggctatgtttgaaagtgttgcgaattgagtggcacatcctgaangtggtgcagcaaatcgaatggcatcttctaaaaattctctcctaaaccatctgtaatatgtgatagaaaaatgccgcatgtttgaatggaaaagaacaattgntatgtaatcggacatgttatatgtgttttaagtgagaccgctatatttaatattattcgtcagtcaataacatattgcatggcggatcaccanaaatcttagctacacataaatatcntatgtgaaagaacttngaaaaacgaagaaaacgctcgctntatatatatgatcatattgatcattatctttagcttgtatatataagtggacaccatataaagtcagatacgcatgtttgt

SEQ ID NO: 9269 - DNA, 491 bp, Oryza sativa
  unsure (1)..(491): unsure at all n locations
tcggatataagtgcgtctaggagtgtgctcgccgttggatcgtgttgcggtgatcaagatccgtccgatcgatcgtgctggcgtatgatgtttgaatcgaaacacgggaattcgaacagtttttcttgtgaaaaatgaacttcattnttatggttgtgttctgccgctgcacctgcaccgcagaaataccaacagctatgtactgttagctgcagctgctggaaccatacctgtagtgtctcttaaaatatttctttataaagataatggctcttaaaataatacgaatgaaacaggggaatttgaacagtttcctaatgaagattgaactgtttttcgttgtaccaaacaacccctctcttaagagattggcgaaatttgttacatgatattgcgagtaaacagcttgaggatatttnttaacataatatatttctgaagacactataacactattatntntggtcacatgagaacctctggttggtcga

SEQ ID NO: 9270 - DNA, 278 bp, Oryza sativa
  unsure (1)..(278): unsure at all n locations
tcgtctttccacccgggcagacgtttctggtcggcagcctcgacttcgtcaccaacaacttcggcaagatctctctccttgactcggagtcggaccagtcgggagagaaccggatntcagtcccgtttggactcccanacgcggctggaagttacttcaagaccatctcaatcgagtcggcttcaaaccactcaggcgagatcacatcttctccaacgtcaccagatcaagatgatggggcttacccaccantcctgatgaagctcccccgacgatta

SEQ ID NO: 9271 - DNA, 410 bp, Oryza sativa
  unsure (1)..(410): unsure at all n locations
aattcacactaccttcgcggtgcgccacacgatgactatcatagtcttctaaagntctacctgggtgtgtgcgcatncattcngcaacctttacaaccttgtagctggtgctgtttattaacatttcacggtaaaacgggctgaaaaggacacttggtctttggcaagcctttcaccgccacgaacttctcgttcttgtttcgccaattatcagcggggggccgaacgcatanttttcggccacgaacctcctagtaaagcacaaaggaacaagtgcaaaaggaaaaatgcggacgatatcaatcccactttccagcanaatcatatagttggcgaaacattaactttctcattatataaaataaggtcatagtggctacaagacgaaaacggctcaaggtcgaacatgc

SEQ ID NO: 9272 - DNA, 352 bp, Oryza sativa
  unsure (1)..(352): unsure at all n locations
ctccgctggngaagagatccgtttatcgtcaactcgacttcgacttcgccatgacgaagccatcatccaagacggaggtagagccatctaatgtgatgccggtcatattggatgacttcgaaggagaggatcgtaaagctgtggaggagtacatcaacgagctcacacgggaggcgttgatgagaataactactangactcgtcaaggcgtgatcatcatgcccgggcccacgtccnangctcgctcgcgacgtggtatgtaatgacgaggtatcgcaatctatcaaccaacaaatngcatctacaatagaattatctatggctaattntaaagatacattagatgtaatgg

SEQ ID NO: 9273 - DNA, 397 bp, Oryza sativa
  unsure (1)..(397): unsure at all n locations
ttcgttaattatcagtgacattcatttattgatgtgtcaaagcgaaatatggtttgtatgtagagaagcataaaacaattaaaaaagaattaaatatcgttaggacataaaatgaagttttttccctatagccaagggagtagattgattcaatactaccttcgcggattaagtgcttcactaaaatagttctctctaataaagtttcaatgctatctcgtgggttaagtactccactaaaatagttgtgtaaaaacattacaaaagttgtttctaaaggtgacccatgagtctgagccaagctcgtcacatangagggtgcacatttgaggaacatgtgaaaagaatgcccatggagatcatttgtttatgagtgcgatgaatacaactgttcatt

SEQ ID NO: 9274 - DNA, 106 bp, Oryza sativa
tgatcgtctatcagcaccgtccctatcacccgagtaacttcgacaacgactacaacggtggcagtcacaacaacagtaagcagcacaaccacaactcaacttcacc

SEQ ID NO: 9275 - DNA, 496 bp, Oryza sativa
  unsure (1)..(496): unsure at all n locations
ctcgtcgccgagtggaccgagtgccaagaagacatgcctgtggagaagatggagtattggactatgcattntgacgggtcanagaggctttcaggcaccatagcgtgggttgttctaatttccctgactggagaaaggctgagctacgtattgtggatacatttatctacgtctcacaacgtggcagaatatgagacgcttcttcacggattaaggattgcgatctccttgggaatacggcgtctgatagttcgtggagattcttagttgcgtgttaatcaagtcatgaaagagtggtcctgccttgatgataacatgaccgcctatcggcagtaggtacgcaagttataagataaattctatggccttgagctaacccacgttcttcgacataataatgaggtagccgacagactggctatatttgttcaaacnagaggcacttccttcgacatgttcgttgacatctttatgagccaccgtacaaggaaaaaat

SEQ ID NO: 9276 - DNA, 376 bp, Oryza sativa
  unsure (1)..(376): unsure at all n locations
agtcttactgaagcaatcgaataatttaagactggcggagcatctctgcctgacatcagtgtgatgataaagaaccactgtgcacatgagaanacgcacgaaggtacgcgttactcaatatttatttattgaaatcctgctaaatcatctacttccaaacatcttgtctatgtaagcancatttcctgtacattgcaataatagttcgtgaaatgtcagttacattgctactttgtttgcaagtttctgactaactttggaaaatgtactttggtcatactaacggtttgtctgaatactaggagaagaaaatggtcatgctaatgcatggaatgaaacactgcctgttgatgtcactgttctataaatacagtgt

SEQ ID NO: 9277 - DNA, 216 bp, Oryza sativa
ctatgtacgtcacagcgtgtgggtcgtgcgggataacgtgcctgtcagtacggtgtactggcgaagaaacaaggcacgcggagatcatgagagctttgtcccagattcggagaaagagatgctgtggaccacaatgctcgagacattcacccttcctgcgggtacagaggacaaagtgaataggtggactctgaagaaaatggcagaacagtttca

SEQ ID NO: 9278 - DNA, 334 bp, Oryza sativa
  unsure (1)..(334): unsure at all n locations
cagacaagttctatgangattcttttggaagatgctgttacgtgattatgtgcataattgcttactgattaaggagacctacggtctcattccagaggaactatgttctaacctcgagttaataaccaacctgatggtggaaatgataatcaagcgattaaccaaagagacacttgtttgaacgagacgttcaaatagtgctttttctgacgtcatggttgaatgtgttaaggaatactttgaatgctaaataatgacaacatgaatggaatagtgggaagtaaactgaatgtagagaaagagaatccgagttgcctgttcgtgggaactaatc

SEQ ID NO: 9279 - DNA, 200 bp, Oryza sativa
acaaaacgacgatccccaattgagatggaattggctgcttactgtagtcaatctgaaacaccggcaatgaagattgcactgattcacttggcgccaaagccttcttaagttgagaaacatgaatcactggatgaatcagacttgttgcaggtaatgccaacttgtaagccacttcacccacacgagccaggatctgaaat

SEQ ID NO: 9280 - DNA, 387 bp, Oryza sativa
  unsure (1)..(387): unsure at all n locations
gagagaaagattacatggttagatcatgatgggtcagattgtgacagtggagattgattgataatagttgtatatatacaaagtataattgtatactgataattagaaatagaagctagtattatatataacatacaattgtactttttagatatgttgaatacgtaaattctggctataagatggtagtctaaaaaatataaagtatatgggcggtcatatctattatattattaanaacagcctanaagaaaggcacacgttcgctgtggaggctaaaatctcacttaatcggaaanagtagaaaatattaccgtagatcatagtatatcagatntagcgctcaattaataataattatagagtgacagtatggaatcttcacga

SEQ ID NO: 9281 - DNA, 450 bp, Oryza sativa
  unsure (1)..(450): unsure at all n locations
agctaacaccgagtattctacacttatgttcgctgcaaaatactgttgaattgcagaattccacgtctggttctggcggctctattggtgacagaaatggtcggaaagtgtcactggggatcatagcttttgtgtcctgtgctttccttgcaccacttgctgtacatttgggacaanggttcagaactactcttctattctgcgcccggacttgcatcatgggaggctttgctgttctatacgtgtatacccctgatgtcagtgccaactggccactatccccaccttgtgcatgctactagaattacctttccatacctgtgaaaatcatcttcatgctaaagaagtctaatacttcgtctgacaaatgttggacatacttaagtatctactgtgagacaatatatggagaatgccttaacatgctactaaatactctaactataaata

SEQ ID NO: 9282 - DNA, 383 bp, Oryza sativa
  unsure (1)..(383): unsure at all n locations
ttcgctttgtaagatgctgcaggagggcatgctatgtcaaactgactggtgcattgaataagatgtcttcaacatgctgtataacaccttntacctcacccggttccatgtttcctaatatcaattacataaaaaagaacatcaataatgcagagcattctctcaatgagtagtgggagaaaaagggtcattagcagcattacaaggtaatataaagagcagtactaaagggcctgttcactttgatgctattttcaaccttaccacattttggtaatgttactaaaaaagtggctacatttagtatgttntttttggcatcaaagtgaacatgcccaaagatgaaggaaagtagctgtgaattaacattcaagttattaaac

SEQ ID NO: 9283 - DNA, 294 bp, Oryza sativa
  unsure (1)..(294): unsure at all n locations
tatctccttctttttgctgtatctttggaggacctttgcccttgtgatgcgcatgtgaccttgatctgctgctgcttgatgctcctctcattagtctatttgggtaagtcccacaagctagttgtctatacacacctgttntgtcagattcatgctgcatgttgcttcctgttcttgtataatcttagatttccttttgttgatctgtcacatncttgtgtttgtctcaatatgaaaacagttatccctaagaatatangcatatagcaactagttgtacataactacttaatg

SEQ ID NO: 9284 - DNA, 165 bp, Oryza sativa
  unsure (1)..(165): unsure at all n locations
cgtagaataattgcagatacatgcataattgcagacagctcattataatagagctgaatacagatttcgctgctatcaggatatgggaagaaagcaatctctgttcaagagtttgcccgtgatntttgagcttttcttggaccttatatcagttcaacaatagcg

SEQ ID NO: 9285 - DNA, 291 bp, Oryza sativa
ttttaaacgggattccgttttttcagcttttatctttcactatgtcatttcattaattccttatattttcttcattttttcttctcagttagatttctttctttcgtaatattgtctttatgcttatggtttaatttgttaatgctaaaagcatttctgggtttcttcctttttggtatattcttcttttttttattgaacatcgctatcattaaaattcctattctttatttatgtttcaccatatttatttaatttttttttttactttactctactttttttttttcc

SEQ ID NO: 9286 - DNA, 315 bp, Oryza sativa
  unsure (1)..(315): unsure at all n locations
gcagcttctctcggcttacatcgtcaagggtcaagctaatattgangtattngaatcatacacttgagnttggaaattggtattctacttcatcttctatatgcttaagtggatattcagatgctgattntggagggtgtagaattgataggaaaagtattagtggaacatgtcattntcttggtacatcattgattgcatggtcttctataaaacaatctagtgttgctcaatcaactgctgaatctgaatatgttgctgctgctagttattgntcacagattctctggcttctatctacgtcgaaagaatatg

SEQ ID NO: 9287 - DNA, 211 bp, Oryza sativa
accgcgatcttagagcacctgaggatgcagcttctgatgaaccgaccaatatcacgtctctgaaggtcttctaatggacccaccttactatcacgcatatgacacttaataaacacacaatacataactgctatagtgcaacgactggcacccttcctcgaacatggacaccatgaacaaacaaaagagctatgtatcatgaagatcgagc

SEQ ID NO: 9288 - DNA, 103 bp, Oryza sativa
tatccctaccactttatggggggggcatggagagaactcatccaaccaccaatccaacatgaaccggccagccagctcgaatacaaccgggagtgatgagccg

SEQ ID NO: 9289 - DNA, 414 bp, Oryza sativa
  unsure (1)..(414): unsure at all n locations
gagagaaagatntacatgggtagatcatgatgggtcagattgtgacagtggagattgattgataatatgtgtatatatacaaagtataattgtatactgataattagaaatagaagctagtattatatattaacatacaatggtacttttagatatgttgaatacgtaaattctgcctataagatggtagtctaaaaaatataaagtatatgggcgggcatatctattatattattaannacagccttaaagaaaggcacacgttcgctgtggaggctaanaattcccacattaatcggagaaaaagtagaaaatattaaccggtagatcatagtatatctagaatttagcgcctcagatctaatagaataatatatcagaagtgacagctaatggaatctttcacggagctaa

SEQ ID NO: 9290 - DNA, 442 bp, Oryza sativa
  unsure (1)..(442): unsure at all n locations
ggatttgctgtgctaagaactaccttctaattggattntgctagcgctttagacagcataaattcaatcaaaatcccgtttacataatgagctgtctgtgcaagacccgtagttgtgaattgtaagctagtaacctcatctttttctttacacaagagtagattggaatagcacagcggtcaactcataaacccacattttgtagatggcatgcttaatatatataatggaattacacattgngacatgtaaaccacacatgcactttanattntgaaatatattcgatcctacaagttgtagatgatggctaaagataattacatgcgtctctcttgaagaagaaccaactgactcttattagactgganatggacacctcgcagccaagatatggcttgtattgatgatgatgatgatgatgatgatgatgatgatgatg

SEQ ID NO: 9291 - DNA, 206 bp, Oryza sativa
  unsure (1)..(206): unsure at all n locations
actcgattaaaactctcgatcgatatcctggcattcattcattcgcgttcatgtgaccgatcgatcgagtcaatgtaagtcatatatcgaattgatcgagagcgacatgatgctcncaagatcttgtcgcttatgaactagtattacagtagtaaaacacatgtactatacacgagtaattaacagttcatattgcaatgctacac

SEQ ID NO: 9292 - DNA, 389 bp, Oryza sativa
  unsure (1)..(389): unsure at all n locations
cattggttcttgcaagaactaaagtatgctcttggtggaaaggttggcccctatggaaaatggacgataatgacagataggcgaaagggaaagattattttgggtatttacatggctgtttaagatntgcattctttatcttactcatatattacttcaatacagggttttcttggtggaaataaagatgtatttcctgcttgtgaacagaggttgtgagactgcaatggataaaactgaaaatgagagggaaggcgcatgggagtggcttaccacaatacctactaagcattgtgatatgcatgcatttgacacaacatgcaagacgggcttagttgtcaataacataagcgaagtattcaatagctacatcatttattacagtgaca

SEQ ID NO: 9293 - DNA, 406 bp, Oryza sativa
  unsure (1)..(406): unsure at all n locations
ctgtgactcttgatggtgctcgacgggcaattcgagtttgcttatactggctcggcgaccatattgtctcatacctcctgggacccccgctgtcgacgtgcaacgacatgtccattgtccgngaagtgatacgcagtctattctctcaggacccccatctgacgcttgtcagtgcactgaacgaacatcttatactgtcacttcggtctgtgatttgtacttctgggcgtcactgggggcggtcaagatctcacatgtagctcgtgcacactgacgtatttccgtctgaaggatgtccttaccgcattgacactgtcgctataatgcgctactccaggcgttccaatgatatttggcaatctgctaaggactccgtcgatgtgtgcaagcagccgactgcatgtga

SEQ ID NO: 9294 - DNA, 380 bp, Oryza sativa
atatataggcctgccctactgtatgcttggtgcctatgaggctggatttactggttttgcattgtagccatattcacattctgggattgatctgtgctcggattgtctacttggctggattgactgtgagtgatttggacacttgttctgtgattgacatgtgcataggaacggatacttgttctgagattgatcttgtcagtcatttgactggctcccattcggacttttgtcaacttgattgacaaagactactcttgtgaccttgactcttaccactgctgtccgtatgtcctatgcacatgtattgcatgatctgtgtctctcttttattatgaagcaatattgccgcctctgatttcattacttaattatctgtg

SEQ ID NO: 9295 - DNA, 383 bp, Oryza sativa
  unsure (1)..(383): unsure at all n locations
agatgtntagtgagtattagctctatctctataataagaaaggattacaagttaaaaggacatgtcgttatatatagcattacgtttcanagatacgattcacaactcgatgtcaagatgagctatggagaccggagacnggcggtatggaagcatgtccacgatcgagatgcccgcacgggagggagggagccggtgcctgcccacgaaaccgattgtgagcagccgagaggagagcgagtctcagtcgtcaacctctggtcggctgattcgcttcactcgcatagcatatgatacgcatacgtacgtacgcacgccttgcatcatcatcgatcgtagccgaagtatatgtgtattattactttggtggccttggttaatac

SEQ ID NO: 9296 - DNA, 497 bp, Oryza sativa
  unsure (1)..(497): unsure at all n locations
actctctggcactagtggaactggtttcctgatataatcaaaggaaggtatataaaaattatacgtctttacagttactcttnttaaagaactattcaaaactgttaacttaagggcacagtagcatactcggcgcattcgtcatctacgaagacttcaatggagcttacacgagtcggctgaactgctgccctcgatccaaccttctgaggaatctgttgttcagtgcaatactatcatcagttcattgatcattactgaaccgataaacctcgagacatgtcgcataaagggaccttctgaagaattctattggcttatgggagaaataaataaccttgtgtgatgtccatttagcaggcctcatgttatttctttgtcccaactgcttggatccacggtctgcccgccgcgttgtgctcctgttctagcaggccatgactatgtaacaatctcatctgtgtaactgaagtggctattgcatcactctcaaattg

SEQ ID NO: 9297 - DNA, 141 bp, Oryza sativa
tgcacttcttacttagaattggagtagctgtttgtttatccagggccgcgacatagcaagaacctaatttcaaccgtatctggtgatatctatgacgagctctggagatgagtgtatgacatacactgaggcacgcacaca

SEQ ID NO: 9298 - DNA, 288 bp, Oryza sativa
  unsure (1)..(288): unsure at all n locations
tctgatagttaagattctggttgcgcggtatacaaccaaatcatcaacataagcctctagcttacgttctatctggctacccatagaaatattagtagtacggtgaaaagaatgacctgtattctttaacccnaacggcgatgatgataacaataagatgctactgtggtaatgaacgcagttttttcctcattctacctagccacgcgaatctgatggtaaccagagtatgcgtctagaaaacacataaagtcgcaccccgcagcggagtcgactatctgatatatg

SEQ ID NO: 9299 - DNA, 233 bp, Oryza sativa
  unsure (1)..(233): unsure at all n locations
tcatccgcatacatatatntgcttaanacagtgtatactcgctgcaccactatataaagtgcnagataaaaaaaatctgatatacgcatatgcatgcatncatatactctggccgtgcattngctatcacgtgcatgcatccatatactctggccgtgcatttgctatcacgtatagtttattcccaatagcaaattaatccatatatgcatagcaagcgacaacatcatgat

SEQ ID NO: 9300 - DNA, 319 bp, Oryza sativa
  unsure (1)..(319): unsure at all n locations
gcacagaactggtgaagatacgacacgctntgaatctgaataagaccactctncttcttcagaacatgagggtttggctgttgatccattaatcaaatacactaagtcggaagatcgaatcaagaatttcattatatctctctcctctgccttctatgttatattatatctcataaggataaacgatagggtctagaatagaagtaataaagcgaataacaacgggcaatatacatatttgctatatatcacgaccatcttattaataattctaatggagtatcttggacattggaatcgaataaaaaaatctatatta

SEQ ID NO: 9301 - DNA, 442 bp, Oryza sativa
  unsure (1)..(442): unsure at all n locations
gtcacctgcggatgcagcttagaatgcatacagttatcaatggcattgtcttcctatattaatagtatcaagatcaaatgcacaagaagaagagtagtgagtgagtgagtactgaccgtggaggaactgngagaggctgccattgngcatgaagtcgaggacgaggagcttctcgcccttgtgtccgaggtagtaggccctgagaggcagcangttggggtggcggatcttgccgagcaccgccgcctctgactcgaagtccttgtgtcccttggtgatcttctccctcangccgcttcaccgcacgaggctgccgtcctncagcgtcgccttgtacaccgtcccgtacgtgcctcttcccattatctccgccgtcgcgcacagcaggtcgtccgccgtgaacgccatcggcccgtcgaagtgcaccagcttccctcccacc

SEQ ID NO: 9302 - DNA, 469 bp, Oryza sativa
  unsure (1)..(469): unsure at all n locations
ctctgatggagccgntagttatgttaattctctcatcagcttatacttggcttggtggagtttgtgcgtttattgctctccttccaagttgattgcgatgagttgtacaaaattccacacaaatttatacgtctatatgcaatgcatgctggccaatttctctccttcctctgatgattgtgcagcagagaagacaacggggatatcgatgatgagctatatgaagctatacaagataagaatggcgtgcacagtgtggactgtggagatgcggtgtcgatatcctacacataacagtcatctggaggcgtgtggaggcctcaccnatgctctggaccagattgccctatttctcttcaccacaaatatcatcttctttttatttcaccttttacatacttatctgtgttcgtacgtattatgtgttgacagaccacattacacgtaccctctactgcattgaacatat

SEQ ID NO: 9303 - DNA, 219 bp, Oryza sativa
  unsure (1)..(219): unsure at all n locations
agtactgtgggataaaaggatgttaaggtattgagcacttgatcacccgcactntatcctaagcanaaagtgcctaagtccctataagaacgtgacagggcacacctgaaaatatgggctgcagacatattaagcctangccaaaaaatatgccttcaacaccctctataggatggcgcatgtaacatgctcncgagtaataaatcttccgggtgatat

SEQ ID NO: 9304 - DNA, 364 bp, Oryza sativa
accgcatcttaagcaccgagctgcgcttaaatcttcaaagaggagcatgcatttttaggattcttgggatattcaatcgagtgactaagtacacttatctcatgtttttggctatacttggacttgttgctctttgctcaaattgtgaagtgtgaaaaaattggggaaagaaataataaaattgtattgtaataagttataaagtgatagaatttatattttgatgatagaatgatatgatacgtgaaagtggaattatatatgagacgcttatgcaagaattggacattttttttttgaatgacgatgggcctacgcgcaaagtatgcgcgcttatttgaggcgactacacaagttatgtgct

SEQ ID NO: 9305 - DNA, 475 bp, Oryza sativa
  unsure (1)..(475): unsure at all n locations
ctcctggcactgttctgaccacacanacttctttgtcttctngagtagttgggncattggtcgagctatcatagagaatccttcaatgaaccttcgatagtatccagccaaacctagaatactccgaatttcagtcacagatttgggtgccttccattccgtaacggcctcaactntagtaggatccactgctactccaccggctgagattacgtggcctagaaaagcgacttcttttaaccagaactcacatttactaaactntgcatataatttatgcttccgaagtttctcgagtaccaatcgtaagtgctccgcatgctcctcctcgtctntggagtagatcaggatatcatcgatgaatactaccatanatttgtccaagtaatccatgaacactntgttcataagaatcataaagtatgccgggggcgttgtaacccancaacattactgtaacttatacaatccatac

SEQ ID NO: 9306 - DNA, 226 bp, Oryza sativa
  unsure (1)..(226): unsure at all n locations
agaactattcaagactggttgactcggaatattgaataccttcatcaatgtcatcattntanaaggagaanatccnctgtatacccttgaaaatttagctaatcccttcaatgccttgaatttttcttacttccttgtatacccnncaaatttgattatgatcccttctataccccctccgtcagttgaccgttagttaaccatctaatttttataaaaatgacca

SEQ ID NO: 9307 - DNA, 271 bp, Oryza sativa
ctttttggcacttcgggaaatacttccgcacagagaatatcagctttgaagtcgccgatttcgagacagcataccatgccatactcggacgcccggcgttagccaagtttatggccgtcccgcactacacttacatgatgatgaagatgcctggtccccgaggagtcctatccctacggagcgacatcaagcaagccgtcacatgcgacaaggagaagtgcgacatgtgccatacccgcgagatggcgtcagcccgagaggatatccgact

SEQ ID NO: 9308 - DNA, 336 bp, Oryza sativa
  unsure (1)..(336): unsure at all n locations
cactaaagagttatggccagattagtggacactactccgaaggccaacagcttgccaagacattcaactntccatgcanaaatatatcaatctacaatattttgtagtgcattatgcacatggtgtgaaagcttattaagttagcattccaacgcaaccaaccccatgtcaataaggagtaatgaacattttactgaaggctgctcagaaggcaaacaggcgcgcgagtcttctcgggaattcacttgtggagacctttgngctagcctatgtcctttanaattccaagactnttcatacctatctangaatggtgtcctagtataatatccctat

SEQ ID NO: 9309 - DNA, 484 bp, Oryza sativa
  unsure (1)..(484): unsure at all n locations
cggggaacgaggagttggttcagntnttctaggagaattaggctattagatggttgcagtaaaactgctggatcgagcacgtcaaggaaagaaagacttcttaccagaagttcagacaattggcaacattcatcacatcaatctggtaaagctgataggtttttgtgtggagagatcacacaggctcctggtttatgagtatatgcctagaggatcactacacaagcggatctattactcgcatagcaatgctccactagattggtgcacgcggaagaggataatcaccaatgtcgccaggggtctgtcttatcttcatgacgagtgtaggcagagaattgttcatttggacattaaaccacataacattctcttagatgacagcttcaatgcgaaagttgctgactttggtctatcacagctgatcgagagggagataagcanagttgtgacaacaatgaaaggacacctggatacatggcac

SEQ ID NO: 9310 - DNA, 466 bp, Oryza sativa
tggtggagcttgcttacctcttgtactcgacgtccacggcggtgttctctgtgagcgacgcggccatgccggggcgggccatggcggcgaacgccgggctgctcagaacgaggccggtgcggatcgtcctggcgcggtccgtgacgacgacacgggcgcccgcgttgctgcacagcttcttgtccttgcatctcacctgcagcagcgaatcggtcaggatggtgaagccatggacatggcatatgcagctaagctagttgcctatcttcggttgtgttctccttctcgatcgagcttgattacctggtagcacgcgccgcagccgacgccgtcccggtacagcgcggtgcccgcggcggcgaggaatccgccgccgttgaaggtcgcggccgccgtgccatacccgcaagaaccggctgtgccacgcaagaacaaacgaacagaatcaatcagtcgatccataatc

SEQ ID NO: 9311 - DNA, 213 bp, Oryza sativa
cttacattgtaacataacgtgatctctcctacgacaaacgtaatgtttaccactataactatggccttagtgaaaacaattacacgcgggctctaggaaattattacagcaccctttactacgtgtcatacagtgcgtatataaacattgcagattgaaattgactgcatattacaataaggctaatgacgcttcaaccagcctacagttctt

SEQ ID NO: 9312 - DNA, 457 bp, Oryza sativa
  unsure (1)..(457): unsure at all n locations
tccagatctggagctgaaccaccatgcacaatcccatcgcatgatgttcatatttttatatatacgaaccatattctgattcgttcctatacgcaaggagggcataggaaccctataaatcccctaatccccaaaccctatagatatccccacctcaccgaggagaacgatacagcaatggggatccagcggaagggttggcgtcgggaagtancacgggtgccgttgagggaggcctcgccagagacttggcggaggcagcgcgcttcttgcttttctcgctcgagggagggagccgacgacaaccgctgaaacgagagcgaaaccgtcctcgccttctcgccagacatggacatgcccgttcttgccagctaacccattagatccagcacgccgtcttctacctgtagcacgccatcgccgtcgcagacgcttcgctttctgatgcacagctgac

SEQ ID NO: 9313 - DNA, 206 bp, Oryza sativa
  unsure (1)..(206): unsure at all n locations
atcttgctcttactgctgctactgagatttgaactactaggccagaaggcttgtagtgaaatgtgcttcacactacactggatagatcacgctctgaaagcnacctgtgttacattgtcctacttgttatatactatttatgtaacatataaaaaatatgctattttttaataacttaaactcacataatatcaattattgttctg

SEQ ID NO: 9314 - DNA, 490 bp, Oryza sativa
  unsure (1)..(490): unsure at all n locations
ntgccgatatgtgagacccctgcaccggtgtccgccgccggccagccttcgtgcgccgaagaccgccacgcccaccggcagctcctcctcacacctaggtcgcctgctccaccgccggccgcgcctctctgcgccaagccgacctcctccaccggacgcgcctctcgcgccaatccggcctccctccatcggctgcgcctctcgcgccaagccggcctacatctccgccgcccgtgcctctcgcgccgagccggcctccgctgccatcggctgcgcttctctgcgccaagccggtctccgacccttccaccaaacgatgccgcgcagaccagaagcagccgtctcccacgccctcagctaggcgtccgatgccgcatgccttcagtgaccgcagacacggtcaccaccaccgcagtcgctgctgccgaacgcccagccacctcgcacgtggcatgactcgctcgcacccgactacttcctcgccgccgat

SEQ ID NO: 9315 - DNA, 334 bp, Oryza sativa
agcatcagtgagaactgatatgccttggacctgttcatgtataaagataaaagccagttactatttcctggaggtttgaaacatgattacccctaaatcgtactggtgattatcgatattaaaactttcatagaacagctcttgaccttacatattatgaaaataacgagatggttacagctagttaattacatgattctacaagtgcactatgcccaaaaacaataagacaacttccatgtaaattaccggtgtgacctatcctaaatgacggttctataacattccagagtgtgaatgtacaactattacgtaagtatcaagtcacaataaa

SEQ ID NO: 9316 - DNA, 305 bp, Oryza sativa
  unsure (1)..(305): unsure at all n locations
atgcactcaattaccattatgtctgtttgcataactgtgattaatactaactatctataaatcaattcttcacaggaactttctttcatagcagatgatctacatacgttgatagtttgactaaagtntctcaattcacctttaacttattacaaattactgtaacattctatgcaataatcactaaagcttgcacaaattaatgaatgttgaacacatgcaccggtagaattacagtacagtgatcacattggaactacgctggggtgtcgcactcttgctccttcacgcgtaattcttatact

SEQ ID NO: 9317 - DNA, 476 bp, Oryza sativa
  unsure (1)..(476): unsure at all n locations
tgtntgtggacatgaggcagcttaccatgggaaactactatctgttcatggagaatagatctacaagataacttaacagccgatgagtattacaatcttatggtagatgaaacagaagatctagttcagtccagattgagagcccttgcaaaggtgactaaagataaagaacaagttgcttggcattacaacaaanaggtggtgcccaaatccttttctaaaggggagctagtttggaaattgatcttgtcaataggaactcgcgataataaattctgcaagtggttacctaattgggaaggaccgtttcaaatatacaaagttgtgtacaaaggggcttatatgttgcaagaacttgatggtgaagtttttggacgagctcgtaatggaaaatacttaaagaaatattatccaagtgttcggatcaattcatgatcggctaagtgttgccgatacatgttagccgatgtgctgac

SEQ ID NO: 9318 - DNA, 316 bp, Oryza sativa
ctcggccagacggtgctgcgcctcgctttgggattgggaatcctgtgcataccagtgcctaaaaagtgtaagtctgaaagagtgagccgcaatctctctagctggatggattcccaatctttttaaagcacgaagtccaattcacgtattctgttcctatcccactagcttctgacttcttgactattgagaggcgcgccgcaagatcgtactttgccatctgcgtgaggtggctgcaattattggcatctttctccgcaaggttggacctttgattgtttgataacgtgctaaattctctcataggattgtgata

SEQ ID NO: 9319 - DNA, 368 bp, Oryza sativa
  unsure (1)..(368): unsure at all n locations
ntgagatgacatatttggnngcctgttggcacaactctagctcttctcttcaacttacctagagccggagctgtgccaaatggtccagatccttcgtatttttggagtagagttagcagagttgctcctataaaaatgaactaggggggtggtgatggagttttgctactccacagctccactctatccaaaagacccaataccttttaatttttcaaccatattgtgcaaaactaccactgacctatcccaacacacctcctcacctctcactcccgtaaccctcccagccaccgagccaagcggcgacaggcgaacaggtggtgagcagcatgctgactcgcggcgttctgtggcggcttatcgga

SEQ ID NO: 9320 - DNA, 179 bp, Oryza sativa
ttggacgatccctgcgcgcgagagtgcccgcgcatataatatctaccggagagctttcccaagtccacaacgaacatgcgcacaactgtactgcgaaatggcaccgtaacgaaacacgcgtgttctatgcacccgagatctagaacccccgcttttcgaaaagcgatttagtgtgcgcg

SEQ ID NO: 9321 - DNA, 231 bp, Oryza sativa
  unsure (1)..(231): unsure at all n locations
atgtcagtggagagtgactgagttagtatgtacctatcgctcatgacatgattacagcatgaaagaattatggattaattgtagatgtgatataaggangcatcaatatctgaatcaaccacttggatgtgtggataacactgtattagaaggctctaagagtcctctacatactttggaaaagaaacccccctctgctgcgcgcggccgccacactatgcaatgttactg

SEQ ID NO: 9322 - DNA, 338 bp, Oryza sativa
agctgtctactagtactaaaaaaacatatcgttactacctctgcgttgataatacttatcgatttggataacggcacggtctctagaaataattttgaccattattattgattataacatgtgttagagggttaccaatatatgattttattaaaggaccttcttaaactaagctatacatgtctattatcatgtttgaaagatatatattttacaaataattcatatatcaatattctaaaatttgacttcactcttgtctaagacgacacgtttaatacacccgtagaaatagcagcttgaacagcgtgagacgctaaatacgacagcggggagtt

SEQ ID NO: 9323 - DNA, 365 bp, Oryza sativa
  unsure (1)..(365): unsure at all n locations
ggacttagcactgcgctcnctactgtgagatcggcttctagtctactgtaaacacactttgttgtcgtgtacatttgtacgccccgagttactatgacttacgcaatccccactggaataactgctttgttttccatgaaactggtggagggaaggctattcaataatgacgcgcgtgcttgttctgtactctttgtttggagatggtggcgattttaccgaactgtctgatattgactcatactcaccagtcgtatatgggttgactgcagtctttgcgcagtgacgttgactggtaagagtgagtttcagtagacgggtacatactcatactttttttggagttagagcgagttgggccgacc

SEQ ID NO: 9324 - DNA, 292 bp, Oryza sativa
  unsure (1)..(292): unsure at all n locations
ctgactgatggaatctnangtggatgttgaatgaacaattgttcaccgctcgatagaatctaatgtgattatatgatatcaactcaccactgaatgatggatttatgtaatgttgatgaaatcaacaattgtgtcctggcttgataaatcatgcatacaatagtatggtacaattgcagaaatctttgtaactcaggttaatgtcagttggtcatactgtaaacgttttacattataaatccttggaatctatgtgactggtctggcactagctctagcatgaactccttct

SEQ ID NO: 9325 - DNA, 457 bp, Oryza sativa
  unsure (1)..(457): unsure at all n locations
taaaactcagcttanagagtgtgtgaatgagggagacgagagagtatttataggtttatagatactctgtgaatgtggagatgctcaagcatccaaagagcatctcttctcttctcttgacaagtgtgcatgacggtttgttcacagtataacgctcacaaccgtcattgggatgtcatccacagcgtacacgtggaaggccacgatcaaaggtgccagtggcggttcagccgaacccctggttcggacaaaccacgggccccacctcctggcctctactttggcagggacactgactggagggccctgaaggcgcttatgacagttatgacccattccatgcgagttcacctgacttgtgggccctccaatacatgtgctggtatatgattggccggaggagtgtgtacttgcatgccgggtgtgctatctccttagaaatatctgcatatacata

SEQ ID NO: 9326 - DNA, 307 bp, Oryza sativa
  unsure (1)..(307): unsure at all n locations
gatatgggtaaaatgggatgatatgggcaccataccttctatggangctagtaacattatactaatgatatgtgctaggaatgaagatacactgaacaaaacatgggctaatatgtgtaggattctatggactaaatcactgatatttgtgttttttttgaccgaagggaaatctatgttttaggtgtgtcaatttacatgttgctgagcttttatatttataagtctatgaatatcgccatgttaaattttggatactaccgtgtgctatgatatgatgtgagctttacacagtgatcattagtaa

SEQ ID NO: 9327 - DNA, 454 bp, Oryza sativa
  unsure (1)..(454): unsure at all n locations
ctaagcttatttgccaaggtaactggtgtcacagtcgatccttgttaatatccattgccttaacctcatccaacggcttagccgcttacccttntttatgtagtcacaagcaaatgcaactctggcccaattcgatgaccaacagtgtaacaaatgcaaaaattgcagcaaagctagggataacaaaattactagagtaataataaggtctactgcagtggtgtccacaatgatggtgccatcaggactacgtgtatgggtactcatccttccatgtatagcagccgctactccaacaaaacatatccccatgactgaagctaatccccaaatggttgtactttntgattcataataatggaggaatgcattactggtgaaaaagatatcatagagaaaagacaactcaaccttcatcacattgaacaccctcttataataatagcggcatcct

SEQ ID NO: 9328 - DNA, 427 bp, Oryza sativa
  unsure (1)..(427): unsure at all n locations
ctcagcttncagatctggagcagaaccaccatgccaaatcccatcgcatgatattatatatattatatttagaagaaccacattctgattcgttcctatacgcatggagggcagatgaaccctataaatcccctaatcctcataccctatagaagaccccacctcaccgaggagaacgatacagcaatggggatccaacggatgggttggcgtcaggaggtatcgcgggtgccggtggtggaggcctcttctgcagccttggcggaggcagcgcgcatcttgctcttctcgcttgagggagggagccgacgacaaccgctgaaacaagagcgaaaccgtcctcgcctcctcgtcagacatggacatgcccgttcttagcgcctcaaccattatatacagcacgtccgcttcttcctgtagcacgcca

SEQ ID NO: 9329 - DNA, 428 bp, Oryza sativa
  unsure (1)..(428): unsure at all n locations
actcaagctttatcgatccatgggttntccttaggcgtatttagtttacgtcaaaattaatattntagttgaaattagaataatgtgacggagaaattgaaaatttatgtgtagaaaaattttaatgtgatgaaaaagttaaaagttaaaaaaaaagtttgaaactaaacaagacccttgttctctactcctaattagggtcaccattaatttagtactccctccaagtctcataataagtgatgtttttgactttttatttacaacatttgaccattcgttttatttgaaaaattagtgcaaatataaaaaaaagataagttatatggtaaagtattttgataataaagcaaatgacaaacaaaataaataataattctaaaattggttaaataagacgaatgatcaaatattggataataaaaact

SEQ ID NO: 9330 - DNA, 489 bp, Oryza sativa
  unsure (1)..(489): unsure at all n locations
ctatgaaactcagcttataggaggaactnggatcgatccatggcaacccatccgatatgaccataatgcttcagccaacctagtatgccattgccgaggataatgagaaatctttctctgaaacaacttgatcaaactcttgttagatgcctcggattgcccattagcttatgcatagtatggcgaagaattcaacaatttgatacccatgctatcggaaaactgaacaaactcatcagacacaaagatagacacttgatcagtcgtaatagtatgaggaatcctaaattggtaaataatatgctcttgaacaaattgtatagcatcccctgaatcaaccttcttcaaaagaatcgcccctacccacttggtaaagtaatcggttgccaccaatatgaacttgtgtcccttgctcgagggtggattaatcataccaatgatatcaattccccaacctctgaatgaccatggcttgatgataggtttcat

SEQ ID NO: 9331 - DNA, 179 bp, Oryza sativa
  unsure (1)..(179): unsure at all n locations
gcattcacaaatgataactagattgtgcgactctatcttcactatctaatcagcgtatgcgcgcgcagagggagcttcatcatatctgatagtgcgacggcgctctcgtagcgcttctgttctgagccgtgatgtgtgcgcgtgagngatatccccggcggcgttgtaacgattactat

SEQ ID NO: 9332 - DNA, 459 bp, Oryza sativa
  unsure (1)..(459): unsure at all n locations
actcagctggcttttcttctgccaagatgccactggcttgttttgtgtcttcnatatctcttcgctcccgccgatcggccatcctctgcttagctctttctagcttgaattgatgttgctcgaggtacacagctagagtgatggcattcgctaggtcatctgggaccagggcttgaatntctgcaaaccgtgcccggattgaaccacagtcggctaccaaattatctaatgatgactctagccgaagggatatatcttcaagagttgtcttgacatcttcatttaatggggctagagtcttgcttgttgtttcctcttctgcttcttcatcaaagtaatccttaatatcaaaggagaatagatcggctaagacctgcaaaagagaaatntgaagatagttaaatatcaaacaaattcagccgatctaagaatttatgacaatgagaaacttactgggat

SEQ ID NO: 9333 - DNA, 382 bp, Oryza sativa
  unsure (1)..(382): unsure at all n locations
tttctggtatattacatctgtacactctcatggacatgagagaggttgatctcaactggagcggatagtggattatngctacttatgggcactctggnattatttttgccatactttaatgagatagctgctgtctaaatcagatactgacaaggcctgtgatgacatatgctcaaaggatgtcctggctcactatgagtcaactcacataattaaatacgcattgacattggaatatactatgtgtgcaaagattatctgaactattttacttctctgtatctgatgaacacatctgctcatacctacttatagtttatgtgtgagtcacttattcagctgtatgtctttctctcgtcatatagcaaatgactcgtgagct

SEQ ID NO: 9334 - DNA, 441 bp, Oryza sativa
tgtcacctgatgtactagctcttaagataggagacgctctggttatgtattcgcagcggacttgcttgtgttgtatgcatgcgcagatgaataaggcgaacgaactgcatcaggtagtagatgacattatgaataatcaactgcgagatgaatgatgtgtggaccttgtggtccgctctgattacaagtgagcagaaatgctagtcgctaatatgttgttagccagcacaatctgatgcagtctgtaacagaacacatcagttgtgttcttcgacatatgtctgaaacagctgtcataacatcacagagacagagtatcgtagcagtgcagaagatttagcgccaagtgcaactaagcacaggagagcgaatctccgaagcgtgtgcgtaagatgaattgctgagttttgaccgggaaaatacagatacgctttctcgtgg

SEQ ID NO: 9335 - DNA, 156 bp, Oryza sativa
atcgtcccagaacctagacgcgatatgactagtaaccctatgtgtagaaaccacctatcgacccagacaatacgcctataaaccctaggaacaactaacgctagcgggacgaatcccctaataagcgaatctagcatccaccatgaaagaacaatc

SEQ ID NO: 9336 - DNA, 138 bp, Oryza sativa
  unsure (1)..(138): unsure at all n locations
tgggctcctgcgccctgaggtgctttgatgtgtctgnagtggataatctttatataggatgagatgccttgcggttgtcaccattttgtatggaaggatctcttttttctctcatttttttgtttctcacacctagaa

SEQ ID NO: 9337 - DNA, 452 bp, Oryza sativa
tcaggaagagatgggttccaagctgaactctactaccgtttatctatttcagacagacagacaaactgaaagggtaaatcagattttggaagacatgttgagagcttgtgctttatacttcggtggaagttgggataagaatctgccttacgcggaattctcatacaacaacagttgtcaagctaggctccaaatggctccttatgaagcactgtatggtcggaagtgccgcactccgctttcgtgggatcaaacgggagaacgtcaggttttcgggaccgatattctaagggaagctgaagagaaggtaaagatcattcaagaaagaatgcgtatagctcagtctcatcataagagttatgccgacaatcaccgcatggattgaagttttgaggaagaagatcatgtgtaccttcgtgtcacgcctcttcgaggggttcatcgttttcaca

SEQ ID NO: 9338 - DNA, 173 bp, Oryza sativa
cgatagcgctcactatattatgacctaaataggtgctatgtataaaaagagacattttcatttaagtttgacatgtactagaggtttcatgcccgatatcatcactctggacctgcgaatggccaacatgtacatgttataactagtcagatcttatataacaccgaaaaagc

SEQ ID NO: 9339 - DNA, 468 bp, Oryza sativa
ctatctacctatatgcgcgaggccgagtgggccctgcattctccctcatgggcgtcggcgatgagctcgatgccttgctccctagagatacacttcaacatgactccgctggcaccgcacctgtatagggttccttatactagcacatatcgcttggagatgcgcacgagctttctggcttccgcgtgatccttatgaagagtgcgattgacgaggtatgcccagatgtcggccatctaagcgacctgacgtggggggtcggagatgaccccctcgggccccgaggactatggctcgcgaggcgtccggtggcgatttcggcatcatgcaccctcagtgaatccgagcgcgccgacggctgcgtgagccttatttcacaggctcctgtggggagtgaggctcgcgctgacactagacacgatagctcatcagcgactgcgttgtcgcgcctgggaacatgtctgagct

SEQ ID NO: 9340 - DNA, 284 bp, Oryza sativa
gacttagacggctgactcgttgcttgcagatggcacctaattactatacgtgcccccacactaggagcatgcgacgctgtgcgctagcgtatatagtggaaaagctacctattacttaacctcggcgtactgcgagagtgacgcttctagtgagcgcctattctcatctgcgccgagaatacctgtcttctacgacccaggcagcggtgctgaccacagcacctctcacctctcctggcatcacgaaacagagaagccagcacgcgcagccccgcgatgctcct

SEQ ID NO: 9341 - DNA, 357 bp, Oryza sativa
tgtccgcctcagctgctcgcggagcgccggaggtgggtctccttatgccggtcgtcgatcacgctggtacccaccgacatgctgatttacatcagcatctgtacttatttacacctccacccactacatcaacaagcacagcattgctgccgacacggcgacatgtataaacaactatgaaattaagggcctctctgaatcacagagttgaaaaaatggagaaatatgataacacaggattcttataggaatggaagtgtaaaacagaggattgcaaaacacaagaaaaacacaggaatggtccgttgattggagcgcagaaaaacgcaagaatcggatgagagagatagactcaaa

SEQ ID NO: 9342 - DNA, 137 bp, Oryza sativa
tgctgcgaagcgacatcctatcataaacataacatctgtgtagggatctactatctatttcatatatctgccaaaacatgaattctgtgccttcacatttcacgtagatgtacagggtggtaattataacctacaat

SEQ ID NO: 9343 - DNA, 424 bp, Oryza sativa
  unsure (1)..(424): unsure at all n locations
tggagatggcttgacactagatttgtttgagcactttggataccttgtgggctgtcacttgggcttattactcttggagatcttctcctagacggttaggtgtcgcctgtgagcttccaaagatcttgtggatgtcccgggaaagtttgtgaagggtttcctcacctccgcaaggaaacgaggtaagtgagtaaagattcttgtgctgagttttcagaggttgtactacgtagagcaacttgcacttgtggtcttttctagaaagaattntgagttggatcttggtggtcactcaattctacaaaatgacctataagtgttgagttgaaggctgtggacctcttctgggatctatgcataagtgaggcaaggggttaatcgagacctggctctttggagcacctcaacggagaaaatgatctgc

SEQ ID NO: 9344 - DNA, 429 bp, Oryza sativa
  unsure (1)..(429): unsure at all n locations
aactaatcttggtacctgacttatattcttgatcgacgctaaccgaagaagtcttagtgttggacctataaaaaagtaanttgataggaacaatgataataaggatgagatatggcatagatgacacagttctcttgtggctgttcacctgactgagatgaccactgatgtgcgaccgtcatagagaattatataatatataaagaagacatactactatgaatgtaaatctgatactggtgatcatggtaataccgtcgttagtgataaaaaaatacgttatacaactgtgtaacataaaactggaagatagcaatataaatacgctaacttattaaggaagtgcagcgcaaatattctgcacttgataacttactctatgtactgacagatgtaacatacaacagttttacgtgcaaatgaaaagtt

SEQ ID NO: 9345 - DNA, 470 bp, Oryza sativa
  unsure (1)..(470): unsure at all n locations
cgctgtgatggttaaaagaacatgcacaattgggtgggtgttctaccgtactgtggtnntttttgnttgttgatcctgtaaacaattgtaggattgtgaggtaccgggagagttccgctcaccatatttacacgccaacgctataaatgggcatttgggtgcaagctgctcaacagattccattcatgtgtataaattcagcagtagaaacttcatggcatattggtattaccaagcgaatgagcatatgcaaacgtttcacaccgataccacacaaatcgggtgcatgagcaaacgggaaagcatcaatggaagcaagaaaattactaggatttgagggaccaagaaggatctccaggcccaaaactgctaactcacaaggcaagaactcctgcgcaatctgcaccacaaatcatcgatcggatggcggatggtgatctgtcccattcactcgaaacatttcaagactg

SEQ ID NO: 9346 - DNA, 365 bp, Oryza sativa
  unsure (1)..(365): unsure at all n locations
taagtacgataaatacacatgacacacccaagacatataagaatatggaattgatgtggcatgtangaactacccgaaaagagaaatagaaaacttattcttatagaaatatatgtttatgttacgttctattggttgagtatgaatgacatgacgcttgaccaaccaccatgtattttatatatgcacgtgttttttagacatcataatggcttagaaccgcacagttgctaatgggtgatgaagagggcgagcttttaaaagctgcatgtcgtaatgtcgagacaacggttatacaactgtttacacaatttggatggagattcacaaataaaattcaatagtcgtatactcactatcttgga

SEQ ID NO: 9347 - DNA, 243 bp, Oryza sativa
  unsure (1)..(243): unsure at all n locations
cacaatgtatgtcaagatacatgccgttcctagcaagacggcggataaatataagcttcctagaaactggcaccggagtgattctnacagccacaaagcgacactgaataacccactgagtacacaaatgtcgcttcatggagatcctgcttgacgttcgaattgagcaactatactctgaatgttcctaagaaagatgcggcacgggtaaacacggatgtactcgagtacgaaacctactga

SEQ ID NO: 9348 - DNA, 493 bp, Oryza sativa
  unsure (1)..(493): unsure at all n locations
tcaccatcctcaactccttggcgcgcctctctntgtccttcaacaaaccatcgataatgcctgcgatacaactcaggttaattaggaatatccacacactgctactgatgaagggcttccgtctcaaactacgatttagacctgtggcagtaaaatttagttgtggtctaattaagcaagctcatccgaagagctacttggtgaaaaacaatctngtgttccttatcatatcactctaggaaattntcaagcagacaaaaataatctagctctgtatgtaatgcttgaaggaaaaatcttctatcaataatcacgtttcatagagatgatgtgcaagataaggtgatgaatcgcatcatgtgctnttgcttgcatccaaaccgttccatccatatctctcttttcgtcagtagacgttaatttactggtagtaaatttattctagtgggcaaataattatcaagtgaacactatattgtgtagtatatgacaa

SEQ ID NO: 9349 - DNA, 150 bp, Oryza sativa
aatgagaaaaagcaccatatctgttttgcctaactagatcatcgattatcaatactaatgatcatgactatgctacatagtctactgcgcattactacattaatactctgctattattacttactaaatatctaccatgctatatttttt

SEQ ID NO: 9350 - DNA, 349 bp, Oryza sativa
cgaatgtcgtcgatgaagaccacaacacacttatccaagtattccatgaacactttgttcattaaagtcatgaagaaagacggtgcattggttaaaccgaactacatcagcgcgaattcatacacgtccgtatcgcgtggagaagtgcggcttcggaatatcgtgttcacaaatacgtgattggtgatattcggaacgaagatcgatcttggaaatacagtggcacctttaagctgatcgaacagatcatcgaacccgggaagagggtacttgtttctgatggtgacttcattgagagctctgtgggcaacgcacatcactcttcgtcctgtcgttgttttcacaaaaa

SEQ ID NO: 9351 - DNA, 415 bp, Oryza sativa
gttgatcaactgcattgaccttcttgtactcttcaatagtacattctctcattttgttccactaagttatttaagtaactcaaggagattaagtgctaagtatatgaaaaactcgactattctctattctcgcacacaataggatatagaaaaaattactatccttaaagaggtacctatatgtatcacacttttctggtgtagattttggtgcctctccctaaaagaaaagaacaaaatattttctcattttcctattatagctgctcgaaggttttgaattagtagcttggtgttctcaataagagtgatgctatctttttagaaatttctgtattctctgctgactcaacttaattttagtgatttacttcaataaattagtgggaatgatgacatcacaatacgaatagca

SEQ ID NO: 9352 - DNA, 323 bp, Oryza sativa
atcgatgtggtaatgatacttatcgatggcatactgcactactagactttaagagatgatgattgccttaacatataaagttaatcttaatcgagccatttctctcttagcatgctatatcatgctatattatgatcatcagctcctagctctaatatatcgcaggtgtcatgtactctacagtatcgaaggcttactatgactgacaattgctgtcacctgagacggtgtgatcagaggaagccgaataaaattctatcgcattgctttataaatgataaacgcctattttgttttcctgacttaatttaaccctacgctgt

SEQ ID NO: 9353 - DNA, 280 bp, Oryza sativa
gacttgctactatactcctgctaactaggcatgagttcgctaggggaggatgggaacctactccgtgcacaccgaagacggatgagttcattacagcgtgattaatcaagtagtatcgtttttttttaaaacgggatcaatgcgaatcttttaacagctgtcgttcgaaacttttacaaaaaatacaccgttgtgcgtgctctagcgtggctctgaatcgagacataggtgtggaacttgccttgcaaccagcctgcatatttactctcatatgtcagga

SEQ ID NO: 9354 - DNA, 469 bp, Oryza sativa
  unsure (1)..(469): unsure at all n locations
tctctaactgaaggggcgagaaagatagagcaagaatgtattctttctcagtgctcagcaagccacaccggcagatgcataattaatgcaagggagtacaaggggataataatataggggttaagctttgcagtaaacagcatataaaagtcacttagttgcccaaagccattttataaagacgatcctagagctacacagaattattaatcaaggcctggaaccctcacgaacctgccttaacccaaggcctacgatgattcagactgaactggcaacccgaccctgggtcccagctctgtccaagccaatccaggccaaccattccacattttagttattgagcaacatttaagaattaaaacactgacttgggtacattgctcagcttgccataaccgagggcgngctatttgaatagatatactctgatcagaggggacattcttancacagacacatcttctca

SEQ ID NO: 9355 - DNA, 254 bp, Oryza sativa
tagacggcgactggcagttcgcgaacacccaatgccgttatatcctcacacttctaggacatgagctgttctcggcgtagggctccctgtgtatacacgtctataccgagactcacacactacacgggcgacacacagagagacacccactactcacccatatgacagtataatcgcgtggcctacaacgcagaggtggaacaactgtatggagcgcctgtgaggcgatatactgcagtatcgtgcattggtga

SEQ ID NO: 9356 - DNA, 486 bp, Oryza sativa
  unsure (1)..(486): unsure at all n locations
ctagcagacttcgtcgccgagtggaccgagtgccaatatgacattcttgtggagaagatggagtattggactatgcattntgacgggtcaaagaggctttcaggcaccagagcggnggttgttctaatttccctgactggagaaaggctgagctacgtattgtggatacatttttctacgtctcacaacgtggcagaatatgagacgcttcttcacggattaaggattgcgatctccttgggaattcggcgtctgatagttcgtggagattcttagttggttgttaatcaagtcatgaaagagtggtcctgccttgatgataacatgaccgcctatcggcagtaggtacgcaagttagaagataaattcgatggccttgagctaacccacgttcttcgacataataatgaggtagccgacagactggctaattntggttcacaacgagaggcaactcctttcgacatgttcgttgaacatctttat

SEQ ID NO: 9357 - DNA, 444 bp, Oryza sativa
ttggattcgctgtgctaagaacttccttctaattggattttgctagcgttttagaaagcataaattcaatcaaaatcccgtgtacataatgagctgtctgtgcaagacccgtagttgtgaatagtaagttagtaacctcatttttttctttacaaaagagtacattggaatagcacagcgcgcaactcaaaaacccaaattttgtaaatggcatgcttaatatatataatggaattacacattgggacatgtaaaccacacatgcactttaaattttgaaatatattcgatcctaaaagttgtagatgatggctaatgataattacatgcgtttctctgaaagaaaaacaactgactcttattagactggagatggacaccttggcagccacatatggcttgtattgatgatgatgatgatgatgatgatgatgatgctgatga

SEQ ID NO: 9358 - DNA, 386 bp, Oryza sativa
tggaaacgaaaccctacaaacctgtgtgacctttgctcttccggaatcgtttaaccactaaatatggttagggtgtggatgtgtacgtgtagtcaagccaagcttcttgacaaaatcataactcaccaagttgttgcagctacctccatcaatgatcacacgtgcacgacggttgttgatgacgaaaaaaatctgaaacaaattatggcgttgcaacctgtcatgctgctgtacctgcgtgctgagcacccgctgcacaatgatgggtctgtagtccgttgtgtcatcacgaccaaagaattcgccatcctcatcctcaacttcttcttcctcctctttctcttccatgtcagaggtggtgatgtagccatcttctgtagcaacat

SEQ ID NO: 9359 - DNA, 109 bp, Oryza sativa
actagtacacactatcagaacgactctgtcacaggtatgctcttgttgtgcaatgactcactgagtgaagcgaactcaacacctgtactactaactctatttactggta

SEQ ID NO: 9360 - DNA, 470 bp, Oryza sativa
  unsure (1)..(470): unsure at all n locations
ctactaatggggctcaagtactagctgcatctggaagggatggctatgacaatctttttcccttagcatctggggtggtacggacagaagattacgaaggttggcattggttcttgcaagaactaaagtatgctcttggtggaaaggttggcccctatggaaaatggacgataatgacatataggcaaaaggtaaagtttattctggttatttacatggctgtttaagtttgcattctctatcttactcatatattacttcaatacagggttttcttggtggaattaagagatgtatatcctgcttgtgaacagacgctttgagactgcaatggaagaactgaagaacgagaaggaaggcgcatgggagtggccaccaaaatacctactaagcattgggataagcatgcctctgacacaacacgcgagacgggcctaantgtcaataacataagcgaagtattcaatagc

SEQ ID NO: 9361 - DNA, 143 bp, Oryza sativa
atgctcgggaatctatgaatttccgcttggcagaaaaggttctacccacaacaagaaataagttcagtattctcgggatctagcaattaatgctcggatagggatgttcgcagtgatgttacaatatacacaataacactcta

SEQ ID NO: 9362 - DNA, 441 bp, Oryza sativa
  unsure (1)..(441): unsure at all n locations
aactaagcttaaacggccgaaatccctggactcccacatggcgggaacgtctttatgtgtcttgaggcgaccattggcaggagataaggtctgtatacaactaactcgagcgacaaaaatgctacgtgtgtcctaacattaccacgacgatttcatcgtcagtatcctttttttggtaccactaatcactactttcatgcacttacctctatttacacaatttttcaaataggaggagggtaagaaatgtcaattcgtacaatggatcgataccgtcagagttacttccattggtcaaacgataacgcaacctgagacgaccatgcaattcattcacggatggatggagtacgaacgtcacgtacaaattgcaagcttagactggaggaacaattcattaggtntacctaaatggtcggagcgtccaaagtgtggttgtaa

SEQ ID NO: 9363 - DNA, 412 bp, Oryza sativa
  unsure (1)..(412): unsure at all n locations
nttgagtgtgcccttgtggatgttgngctctacgttaggcatgtatgcatttgttgtgttattaaaattctatttttggctacatttctcctagctagctatatatataatggcgccaattagtgttaataattaatgagtgctactatatatactacggcgcaagggttgcactcagttgcctactttggcctgatcttataattatggcgaatgtgcatgtgtctatatcaaacattattcttgttgttttcatcaatttggccaattattaaacactttaacaacgagctgctctttctttaattaaagcctatgttcttttgtgccctccactaattttgggcttgattagtggcgaaagctcgtttttagcataatgggtgaagagtgattgtcggattaactgatg

SEQ ID NO: 9364 - DNA, 331 bp, Oryza sativa
  unsure (1)..(331): unsure at all n locations
gtgtacttaagtanagatacttttttataaagtcagtaagcttgttttaatcttaaatcatcaactatgtaatactaggacgaacgcgttgacagtccatcaatcccacgagagagcggcgcagaacatggagcacaagaacagttatcgcacctgtcgtatcctactgctaattgatcctactcgtcccgctgatatatcacagcgaagtatggatatactgtgctgtatatagactgtgtcaactgttcaaccgtattagtgcttgaagaaaattccgcgtgtctctggttttgctctttcctttataaatatactatatgttgtttcg

SEQ ID NO: 9365 - DNA, 390 bp, Oryza sativa
  unsure (1)..(390): unsure at all n locations
tcagaatagatggttntgtactctntggcactctgggaactggttccctgaaataatcaaaggaaggtatataaaaattataccgttttacagttactctttttaaagaactattcaaaactgttaacttaagggcacagtagcatactcggcgcattcgtcatctacgaagacttcaatggagcttacacgagtcggctgaactgctgccctcgatccaaccttctgaggaaatctgtgttcagtgcaatactatcatcagttcattgatcattactgaaccgataaacctcgagacatgtcgcanaaagggaccttntgaagaattctagtggcttaagggagaaaaaaanaaccttgtgtgatgtccatttagcaggcctcatgtta

SEQ ID NO: 9366 - DNA, 478 bp, Oryza sativa
  unsure (1)..(478): unsure at all n locations
ctcagcttataaaagggctatcgaacccatgaacaatccgtcctataatttatctattttctcgaggatatatggcccaaactctaaagaacactccagttgaatgtgcgaggatatatgcacttctctttttcttaggactcgagaaaactaaccacaagatcctcgtacattcagctggtttgttttttcaatagatagattaaaatttgacgccaatgcaaatcgcttgaacgggtgcttcacttttcatcattggcatgtagagcctaaaacactgataatctggtaccaatggaaatggtgatttaataacacagagaagttggacaaaagtgtcaaagtcgtgcgtagccaggaggacaaaccattggtgtcaccataattactccatgggaatatggggtcacttcacanatatgccgtacaagcatcaatccataantggaattacaaatgtttactgctggtcttgaca

SEQ ID NO: 9367 - DNA, 326 bp, Oryza sativa
  unsure (1)..(326): unsure at all n locations
cttagcactgngctcagctacatctactgtggtgccatgttacctgtgtcacctgtctgagtacaatactacatttttagacatatggtgcataaaacattatacttaataataatcctctctctaaaataactagatggatttaatggccatatgattttggtaagagatgttaatggattactgcagttgatatgtaaaaaaaactattttgtgcgtctgtgtgctcacaagagtctgaacagctgacttgattgtacaccacatgctgtttgaccctatacattggttctacatgggcgattgcttgctacacgatcgctctg

SEQ ID NO: 9368 - DNA, 473 bp, Oryza sativa
  unsure (1)..(473): unsure at all n locations
gcttcanaggtgaacctctngaggcatgccaagcgcagcgtggcattagactttaagattcaatcgaaggacgaactggaaaggaactctactgcagccagagctgcgtcatctgaaaatatgcctgaggaggacgcggaaggtccagatgctcctcttgaaacaaatggtgatgaagatccacaggccagtgcacgcagtgataacacagttgaagattctgaatctgatgaagagggggaaagagtcttatcgagacggataagagctaagacgaacagcattgtccaggattctgatgaggaagcagaagacgaatagattntgcttatggttgatcacaaattcattcagaacataagttatagctggcgtcaggccaaaggaagataagagtaaatagcaatagatactgacccagttttggatattctcaatttctcatgcacagtacatagagatatataatgtac

SEQ ID NO: 9369 - DNA, 202 bp, Oryza sativa
  unsure (1)..(202): unsure at all n locations
tgtcacttgacgactagtntgatggtttgtcgattctgttccccctcatgtgatagtgctattctctcatagtanattattgcatgatttcattgatcttttcctcattganggagtgacataagtggcttccgntggacccattgtgatactgtgacagatcctggttctatgcactctctatgacggctttctgctggat

SEQ ID NO: 9370 - DNA, 475 bp, Oryza sativa
  unsure (1)..(475): unsure at all n locations
tgttcatgtatcctgccatggaggagggcagcagctatctgcgtcctttgcatttcttctccatcttcgntgcattcgcttccttctcacaatgtggtatgctcctaattccccatgcttcttgcatcccaattcttgtctgtatttcgtggtgatttaaatttggatcatgttcattgttaagcacaaccaaggcttaactacgtcgtgttcagatactctgaccgtcaaaagaatatatatccttcagtaagctagtctagtgccacaaattagtttcttctttgacaggtttttttctcaagcatcaaattcgtttgacccctataagctgacaatcaaatgatttgttggttgaacaggagcaagagtgttaaggccagatgagctactactcgatcactactactaccactcgtcgtcgtctgatccatactacagcacaccgatccttccaccctacggcgacgcattc

SEQ ID NO: 9371 - DNA, 433 bp, Oryza sativa
tgtagaaaagatataaatatatgcaatatcatatgaatatgactattttattattcagacgctattatttttatataaacttgatcatacttaacaaagtctgagattataggagaaaaggcaataaaacctaacaaagtttgattggtaaaatagtcgaaacgaaatataatacgataaaacggaaaaagaggatcaaacttgatcgaagaaaaagttggtatattatctcgcttaatcaatcctcgatcgatctatactcgatagggggtgcagtggctacgtaccttacatgatcagtccaagacctggttgaggatggccatctgcttggcgatggccatctcgacctcgccctcgttcttgtactctccgacgccgccgcaggagcggagctcgccggcgacatctgtcatgaacctcgcggccttct

SEQ ID NO: 9372 - DNA, 322 bp, Oryza sativa
  unsure (1)..(322): unsure at all n locations
acatggctgcagataaaattttctatcatatcacctgtaatctngtgcctactggctaatgaatatccattgtcctcttcgaatacaatctgacaacaattgcgtgatggtagaacaacataaattcttgaaatgtactccgacacttcagatctctcctgaagacgtgccaatactggctgtcatggtactacactaatccacttatgccgtgtatggtaactggtggtttatgtcaattcattgctctgaataacactcactatgcaaatcgccaaacattttacgtgtgccaatcttgcttctcactgtgcgctactac

SEQ ID NO: 9373 - DNA, 491 bp, Oryza sativa
  unsure (1)..(491): unsure at all n locations
cggtatatccatggccatcatcactcatcatttatcatatccgatgccccacaccatttgcgtgcaaacaaacgtccctgatttccttttcctatgatctcactatccacacatgtacctctctcaccacgtgatctcctccccctccattagtggcccagaatcactcgcctctccctctcagccactggtgtcaacccctcgcctcgccatgcagnctgatcaggtgatcccattgtcaacgagaggtgatgtcatctaactgccgcacccncccccccccactctaattttcctcttctaccacttctgctgcaggaaggcaaacttgcgagagagatctatcaacaccgtgccttccttttccacatttgttgccgttgcccacaccatgccactttttcctctcgagtcaccaccaccatcccggtntgcanattntcgtatcattttcaccccgaatagctcgacataatcctataatactatac

SEQ ID NO: 9374 - DNA, 302 bp, Oryza sativa
gagtcgtgcataaggggcctgaactatatctgatctactataagtgctatgctcctggcttgtgtctgtgtaaggcaaagatccactccgctgcttggcaagcactctggaggagatatccatggagaggtcacaatcggatatatcctgaatggcacaccgagacttacggcaccattcttgacaaaaagtagggagagtttggtgattgaaagcactgccactgattccatcctaacacagctggatggaggcaaacgtgctgctatgctcctcacaccctggtgctccccgagatgaac

SEQ ID NO: 9375 - DNA, 194 bp, Oryza sativa
tctatttttgacaatataacagtgaattgtgaagaccttcgatatgcgctatcctgatattatgacctaaaattatgtgcctatgtataaaaagagacgctttcatttaagtttgtacttgtcagaaagtttcctgcccgatttcatcactctggacttcgaacggcctcatgtacatttttaacaaagtcaga

SEQ ID NO: 9376 - DNA, 317 bp, Oryza sativa
aactgcggggagcgcgcttgcggcaaccgccgtgacaatcgaccggcgttcacacgcgcgcgccggtcccccgaactcccgctaccgatactttactaccaaatactaagcaagctaggccccagcgcacgtgggcccaaaccatctccgtgggggtctaggaaggaatttatttataaaacatcaattcgagaaaagaaaaggtgaatttcacaaaactactacatatgagatacgctgaccaaactatcacaaacctatggattcaatattgaagttatcacagagcgtccgcatttatagtttacaacactatc

SEQ ID NO: 9377 - DNA, 304 bp, Oryza sativa
agcactcgctcactgcgttactgccgcaacacactctcgcacatgtgtaatggaaggtccctggtgaagaacatactgaagtgcttaaagtgtaaaatcacaaatagctgtggtgcataatgacacagaaaacaaggaaagcgcagttagagcttagtacaatgcgtgagcagatacctctgtgtgattaacaatgctggcctttactctccgagaaagatgtgctgaacgctcctgtactttttcttttttacagctgtgatagcaacgtttgctgagatgcctcgttaattttcaacactgt

SEQ ID NO: 9378 - DNA, 348 bp, Oryza sativa
ttccattggcaaaactatgcactttatgctaaagatccctcataccgtatattttctccaataacttatagtctcaagtgacttgctaacacatggcgcatgaccccaacagaactataggaatacatgatgtatacttgactatttggtagcgcatctactaaactatcgttcaaactgtctcagaaatatggagaaaaaactaccattcttacctaagcatttgggagatacaacccctttctagtggagacattcgaagatgtctaagcattgagctgctacgcagactaattcagtggagcaaagactaaggggatacaagaaattgtatatgcatagacatgc

SEQ ID NO: 9379 - DNA, 222 bp, Oryza sativa
  unsure (1)..(222): unsure at all n locations
tactcttcctgctataaagtgtacganaaggataagcatgctgatctggctacaagtcacatgccctactcacaatgctttcaaaatactcacctgcagcattcttcatgatcccatatgactctaccgaacacgacttggcacacatgttttctcacactgatcttttcaatgagctgcaacagcttccttcaactatgagtcgcataagtactagtgtat

SEQ ID NO: 9380 - DNA, 296 bp, Oryza sativa
tgtcagaagctaagaagtgggcgttgcacacccttattagctggtcttggattctctagcgttacgcacagtgcgctcacgcgctgaaccggcgactgtttccatattcgcgcgcacagaggtcgcggaccatcgcgtgatgacagttctcacttcccgatactcgcgccgaccgttgctgcgccgcggctcgcgacgtgtgtgtgttgtccgtcgacctttaaacaaagacaccaaacgacacatcgaatacactgtatcgggtggccctctgatgcagcgagacgcgcgcaaca

SEQ ID NO: 9381 - DNA, 473 bp, Oryza sativa
  unsure (1)..(473): unsure at all n locations
tattccttcccggattgtctctgatggatcggttagtcttggttattttttcatcagctcatacttggtttggtggagtatgtgtagttattgctttccttccaagttgattgcgatgagttgtacaaaattccacacaaatttatacgtctagatgcaatgcatgctggcaaatttctctccttcctctgatgattggtcagcacagaagacaagggggatatcgatgaggagctagacgaagctagacaagataagaatggcgtgcacagtgtggactgtggagatgcggtgtctatatcctacacaaaanagtcatttggaggcgtgtggaggcctcacgcccgctctggaccagaatgtcctatttctctccaccacaattatcatcttcttttgttttccaccttcttacatacttatctgtcttcgtcagtattcatgtgttgcacagagccacatatacacgggac

SEQ ID NO: 9382 - DNA, 62 bp, Oryza sativa
atgtcaaagatggtcttcagccgcgttcttctctatctgggcactcagtatttctcatgata

SEQ ID NO: 9383 - DNA, 483 bp, Oryza sativa
  unsure (1)..(483): unsure at all n locations
ctggcaacatgcaactttataaactctccgtcgtcttcacacttttatagtttctcccagtatcggagccaatatgttaccctgaaaattacctgcatataagagatgtatggtgatttatcaaaaaccaaatcattcctgctcaaccacagagcctaacatattgcagaagctcctacaagtacaagcttgctccttttcttgtccaccccanaagccaaccataanaaatgtgggttatgctactaagaaggtataaaccaaaagaaaattggacggctctctataaaaactttgcataatgacaatcaataaaaagatatcggatagattcanttttcatgcagaaacaacatctcanactaccatntcaattccgtcttgccaaattgtctttagttaacacgacacctttaatgataatgatttttcatgtaaatccataattttccgtcatccatagtcgactcgacgtccgtcatg

SEQ ID NO: 9384 - DNA, 109 bp, Oryza sativa
actcgcaaaacttgttagctataccttaatcgatgacgctgtcgcgataatgtaggattgagaattgcaggatgttactgaaaagggatactcaggtgccgcagagcgt

SEQ ID NO: 9385 - DNA, 434 bp, Oryza sativa
  unsure (1)..(434): unsure at all n locations
cgatgagtggagcgatngcaatgcaggacctactagggttagttttatgtttatcttcggaggcttaattatatcacaaggaatagcgcaaatcacaccgatttgcgaaatagaataatagtccaaagcactagtcaaaattgctggcctatcctagattcaatcctagctcaagcaagcaaatgatcaaacactcggactacaaacaactcgatgttatcacaccgctctatccaggacaaccaattgtcgaaactagatttccgcaataataataggcggtggctatcaagctggaaaagtgtatgggtttggagacataggatttatacaggttcaggccttcttattcaagaagtaatactctactactgtccggggatgaatccgccgagtgtactattgattgtatgatttagagaaaatcaacatct

SEQ ID NO: 9386 - DNA, 298 bp, Oryza sativa
  unsure (1)..(298): unsure at all n locations
acctacttgaaggccctgtcacatcggatgtttatacactaatttagaatattaaacatacactaattataaaacatagtttataaccttggaccaattcgctagacgaatcttttgagttcaatttcaccatgactagacaaggtgacgctacacgaatactttcataattatggattaaatagcgcttacaaaattcgtcacgcatagtagctttcattatgaaaataggtatttattacactacgtntcatacttcaaatcagcgtgaaacattacacgtgacactgactataaa

SEQ ID NO: 9387 - DNA, 496 bp, Oryza sativa
  unsure (1)..(496): unsure at all n locations
tattgctactatgttggctccatactgacacgcggatgttgtttattatgctaacaganattgataggtgctaagcacttggagattgtctctaaccagcaacataattacctcattcagcttttctacaataagaattnttctcttgaatgaccacaatgaattctatgccttctttttgcttaatcgttgatgacacatctatgctaaacataatactgatctttctgtgacattataagcatcctctgacaagtgttatgtagagcctgctgtcattagccgcaaatcgggtataagtgtatgatcaacaaagtggaacactcatggatatcatacctaattattgctgttaaccatgagacgaactcggcaaatccagaggtacacttcatatgatctggtcgaaatccacaccttataattctaatactttgagaccacaactatcctatatcattcgtggcccatgttctgcttatatatacacatggac

SEQ ID NO: 9388 - DNA, 81 bp, Oryza sativa
taaaacccgtgactgaatgtatttagttcgagaatcggcttttggcttgtagctgctctttagctgagttggtattacgcg

SEQ ID NO: 9389 - DNA, 287 bp, Oryza sativa
cacgatcggctatatgtgttggctttctctacaccgatcgatgctgcttgatatggacggatggaatatactgactcatccatcgcggctcagaatttgaccatcaatctcaccgatctgattgctggctgaccaccagtaaacctctccatcgtgagccgtgaatgctctacccctcaacacgtcttgacggttcactcgcatgatgaagatatgggaaacaaccatgtatgcggcatctgctgctcgagcactagcacaagttcttgatgtcgaaccacctcccc

SEQ ID NO: 9390 - DNA, 486 bp, Oryza sativa
  unsure (1)..(486): unsure at all n locations
tatcatcgatccatcggngttccttaggcgtatttagttttctttataactacaaatttagttgaaatgagaataatgtgacggaacaattgaaaatttatgtgtagaaaaattttaatgggatgaaaaaggtaaaagttgaaataaaagtctgaaactaaacaagacccttgttctctactcctaattagggacaccattaatttagtactccctccaaggctcataataagagatgtatttgactttttatttacaacatttgaccattcgttttatttgaaaaattagtgcagatataaaaaaaagataagttatatgtaaagtatttttgataattaagcaaatgacaaacaaaataaataataattctaaaattggttatataagacgaatgatcaaatattgataaataaaaacttaaaaggaccgaggtagtactgtatattggctccttctccctctgcagaggccatagagtagaca

SEQ ID NO: 9391 - DNA, 487 bp, Oryza sativa
tgctccgtcgtatgcatctccgatctggagcactttcacgttggttaggcttgatatggagatcaatggatcaatgttcgtcttacttcctgtgagatacagcttctccagtttatctccaactgtctgaaagagattggattccatcacagcatggtgaaaccttccggtaagatggagtttgcgtaaattctgtggtggtaagctcagtgcttcaaagttcagaccttgattaccttcagctgaaagaactttcagtgtgcgtagagagcgcattttgctgatggatgcaaagagcttgggatagtgttcttctccgacatcttcgatcgccaatgtcctcagttgagtcatgtgtcccaaaatttccacaagatttatggttgcaagaacacccttaagagtttgcagctgcatagactttcacaccacctttggagcttgaacacctcttgacttctcaacaatgccgcatacagcggagcac

SEQ ID NO: 9392 - DNA, 436 bp, Oryza sativa
  unsure (1)..(436): unsure at all n locations
tngagagcagaatggggagttctctctctccttcaatgagctgtaatctgatggagcnttttcctaaccctgtaattntggattgtttggtggattacttctctacccaagaagttgacagcttaattaagataattccaccagacaaagctcctggcccaaatggttataatgggttntttcttaagaaatgttggcccatcatttctcaagatttttatacgttgtcagcacactttcatgtgtgctatactgatctgcaaccgcttaatagctcatttataaccttagtacccaaaaagccctctccagaaactgctcatgatttcaagcctatctctctgatgggtatcagttngaaagtgcttaacaaattaatggcagatcatctgcagggtgtaatgctcaaggctgttcaagaaaatcaatatggatt

SEQ ID NO: 9393 - DNA, 284 bp, Oryza sativa
  unsure (1)..(284): unsure at all n locations
acctgacacacccagaacagccacggtattgatctgcagtggcctgtangaactaccgtgaaagaacaatagaatactgattcacatacagctctctgtttatgataagttctattgtgagcaactgaatgacatgatatgtgacaacccaccatctatgtcatataagcagggatcttatataccacacattggcttataaccagccagctccataatggggattaagagggcgagcctttcaaaggtgcatgtcgcaatctggatacaacggttgtacaact

SEQ ID NO: 9394 - DNA, 507 bp, Oryza sativa
  unsure (1)..(507): unsure at all n locations
ntactggttgacaccttntaagatgcattgtaccaactcctaatatgttgagttactgcggtataaaaggattataaggtattgggcacttgatcacgcgcactntggcctaagcaaaaagtgcctaagtccctaaaagaacgtgacaggccacacctgaaaatatgggctgcagacatattaagcctagaccaaaaaatatgccttcgacaccctctaaaggatgacgcattgtacatgctctcgagtaataaatcttccgggtgatatagaccaggtgtagctcatatgaatagcttctgatctgagtgattatcccttatgagatactccaaaatatatataataattgaatcccgactggcgcaaagattcggttgatagcccttactgggaataataattggtccagtcttcgagcatagaaaatagactcatgactatgaatccatgtggaatgtatccggaacaaattcaaattggagatatatatctcacgcttgagtc

SEQ ID NO: 9395 - DNA, 324 bp, Oryza sativa
  unsure (1)..(324): unsure at all n locations
acacgcgctcactgtcgtatctagaggcgngagtgaatatatctttatctctattataagataataaggctatttttctttgtatttctatgacaggctatttttcagtgccaattaatacacctaataatgagcaagtattacggcaaatgtttagcaatttggctgattacgtcttgtctctgcactcactattactacttatgcaatttggatgatttaagcactcacgacactatacggtatgatcctctgataatcaatggaatttcaatgaacagattcgttcccacataatgaatattatcgtgatgcttactattt

SEQ ID NO: 9396 - DNA, 472 bp, Oryza sativa
  unsure (1)..(472): unsure at all n locations
tgccagtactcaacgcgccgagaaggggggtggagctcaagctcattggtgctctatctcatttgctcggggaggagacaagaaagaaagagagggagaagagagatgaggtggtacctaacatgcagggccaaccttttttatcttatgttttggcttattgaaccaccatatcaacaaaaaatatgcaacttatttggaccaaagagggtcgattgaataattttgaaagttggagggtgtcaaatacctggcttttgaattcggatgtgtttcaaacaaagtgaagagttcaagggttgtcaaatgaacatgttcatattatatggcttattgaatttgttgatgcatatggtactccctctattttaaaatatttgacagtgtggattactacacgtgttttgactgctaattacaacatcttttcatctatttataactctcttgaanaaaggatgagaatacaatg

SEQ ID NO: 9397 - DNA, 144 bp, Oryza sativa
tctcccaaaaaaaaaaagtcaagcactactaaagtccatctcttagacaccactaattaaataatagctggttaagaaacacctgtatctgtgcgcagacttctttgcacacataaatccaggtctatcattatatttagcgct

SEQ ID NO: 9398 - DNA, 407 bp, Oryza sativa
  unsure (1)..(407): unsure at all n locations
cctgacacaaaagaaatacaatgatcatcactatatcggcatgatacgtaccaggaaaacttcgggaaagaaatacataccagctatcgggataagcatgaacagaagcaaaatcaatattgttcaactgctgagttctgtatgaagtctgagcaaagtgaagctgcccattccccgggattaacacccagtctttcagctattccaggaccataanacccttcagtttcaactgtaactagatgattagtgtccaaactntttacatatgcagccatctctgcaatccaagcctgttaaggaaccatcagggtttccactctgacaactgcattgnntgtgaaaatggaaatggatagtaccatattacctgaaggtatgggccagatgagttggacacacaccta

SEQ ID NO: 9399 - DNA, 213 bp, Oryza sativa
ggctttctccccttctttctgcgtggcaccatgcagtaatggtttaccgcctgccctgagatgttttcttatgcgatgaagcgctgtcgacggtattcacacggacctggttggtaacgtactgaagtactagttttatgtatatcgctatgtcgcctatacatacatgacgctaaaacggattgactggacgatagaattgcgcatgggttg

SEQ ID NO: 9400 - DNA, 440 bp, Oryza sativa
  unsure (1)..(440): unsure at all n locations
nggcgatggatgcttcgttcatgcaaaacaagcaacctncccatgtgatgaataactgcaccggctcatcccaagtacataggtttttctttttttttttttagcctgcagatcatcttgctgcttatactttattttaccgccccactccccagcaagtacatccatgtaatacccatcaggccatcatactcttaaatggcctataattaaacccaaaaataagctgacaaaccagaagcatcctaagtaacgtgattgcatctgctaaatccaagaaaaacacagacaaaaatntccttctccagaaggcaccacggaggcaagaagaaagaaagaaagaaagaaccaagggcatctagctcccctgaatcccacgaacctcatttaagcactcacaattcccttcctgccacccattttcaccacccacatttaca

SEQ ID NO: 9401 - DNA, 400 bp, Oryza sativa
  unsure (1)..(400): unsure at all n locations
nggaggtctcccgacgtggctgatcctcacgggctgtgtgatctgtgttagtgatggcgagagggtaaagtgtaccccctctgcagaggacaacaaactgttcgaacagacgtgctcacagtcatgggcggatgtgaggtgagacctaccgtaatattgcttgactactgccttgtgaaaatgctgtcaagaaaaggggatctgtgcttggaaaatctgcanctgatgggatcatctaggcccgcgtggccgtttgaaaattgatggcccgggtggccgtttgaaagttgttggtcgggtgccaatcttgatcaattatatagactgatagattgtgcatactccaaccggactagacgcactgtctcatccgcgtctgttgagacgcactcacttaatt

SEQ ID NO: 9402 - DNA, 221 bp, Oryza sativa
  unsure (1)..(221): unsure at all n locations
cactccaccacacagngataggatacattttctgtgtatcaatgttatcttttttctgtgcttttcgacactgtactgcatgtactctgcacttacacttctatatatacaatgtcgactgtcggctgtgattgatggcattaactctgactcaggagttatgattaacaccatctgcatctaatacaaatatgctcttgtacgcctttttctatggaata

SEQ ID NO: 9403 - DNA, 488 bp, Oryza sativa
tcacaaagcgaggttgagtccgcgccgaagaggcgcgaagatgatatcctcacaaaggcgctcggaaccaaagaacatcctggccgaactcggggaattggtagcgatgtgccctggaagcatggactccctcagtacagctcccaatacaggaaacggaaagtctccaaggaagagagggacgctcgtttgaaggccgaacttaaggttgaggtcattcaagaactagaagctagcatgaatgcaagggtggaagaaagggttaacaaggtgctcgccgacatgaatataccccgagtcacaacacctgctgtgcaaccaactcctcgtatacaacacgacgcgagttcgtcacagcataggagtagttgtgcatccacagaggtgccggcccctggtctcccgatcgcaccactagctgcagtggaccacatcgaggaattattgtatccgaccatatctataaagactttcacattcatattaat

SEQ ID NO: 9404 - DNA, 352 bp, Oryza sativa
  unsure (1)..(352): unsure at all n locations
tcgttagcanaatcgcgaattctctctctgcgtgcatgttctatattttgatggagcggtctgctaaccctgagattatggattgcttggtggattactatctctccccacaagttgacagcttaatctagagtattccaccagacaaagctcctggtccaaatggatataatgggttatatcttaagagatgatggcccatcatctctcacgatttttattggttgtcagcacactttcatgtgtgctatactgagctgcaagcgcttaatatctcattttaaccttagtacgccgaaagctctctccagaaacagttaatgatttcgagcctatcgatctgatgagtatc

SEQ ID NO: 9405 - DNA, 277 bp, Oryza sativa
  unsure (1)..(277): unsure at all n locations
ctgatatgtttggaggaccgcttatattctcataatggtgcgatataccacctacatgggcatggcgctaatgtcgtctgcggtatctccgcattacactatcagcctccgaaattggcnggctgataaataagatccgaagagcactcagcctttatatcagacaacagttctcgcatgacatgtgcgacgtcacgcttacagactgttgcatgctggccgcatcctccactggcattcgattgactatgttggcttaggcatggctcgcgatgtg

SEQ ID NO: 9406 - DNA, 473 bp, Oryza sativa
  unsure (1)..(473): unsure at all n locations
ctattagcgacctatanatactcagcttggggacgagaaagcacacaagagaacatgataagatatggtgtttcggtttgaaatttcagctcgaaatttccgaaattgacgctgctagtgatatgccctacaggcaatcatagagatgattgtatcacatactatgtttacatatttatccgacattgttccttgaaatagataactccttattggtttatgaatatgtgattctttcatgagactctctatgttgtttgtactatttctaaaggatccctgatcaaatatcatatgtggaacaaatatgtttatatgatcagcacatgtattaattgatgatcatgtctcatggatcatggtatagagataccaaattaataatgtggacacatgttggtgaacatgttgccggatagacccaacatgagacaatgcaagagccatatgtgtngtgtcatcagtgatctcat

SEQ ID NO: 9407 - DNA, 433 bp, Oryza sativa
  unsure (1)..(433): unsure at all n locations
tatctcctatgttacaggaatggatcagtcagaacatcaccacctgcttgtcgtcgtcgccgccgactggtgtcctcacctatacggttgggtagtcacacccgccgtgttgggcgtcgttttcttcactgaccggctgcctcgttcgccgtcgactggtgttttcgcctatatgattgggtggtcacaccgccgttgttgggcgccgttttcttcaccgactggctgcctcgtccgccgtcgactggtgttatcgcctatacggttggttggtcacaccaccgtttgttgggcgtctacgtcttcaccgaccggcttgccttcgccgccgccgactggtgtctccacctgcacgactggcctattatgccgtcgnttgttgggcgtctacgtcttcaccgaccggcttgccttcgtcgcaccgactggtgtc

SEQ ID NO: 9408 - DNA, 391 bp, Oryza sativa
  unsure (1)..(391): unsure at all n locations
ctttgagatggttgcagnaaaactgctggatcgagcacgtcaacgaaagaatgacttcttatcacaagttcagacaattggcaacacttatcacatcaatctggttaagctgatacgttgttgtgtggagagatcacacacgctcctggtctatgagtatatgcctacaggatcactagacaagtggatttattacttgcatagcaatgctccactatattgaggcacgcggaagaggataatcaccaatgtcgccacgggtctcgcttatcttcatgacgagagtatgcagagaatcgctcatttggacattataccacataacattctcttatatgacagccttcatgcgaaagttgctgactttggtctatcaaagctgatcgagagg

SEQ ID NO: 9409 - DNA, 260 bp, Oryza sativa
aactaagctatgcggacaatcgcatgcgccggggctattcagggtatgagagtatatttcttttgtccaccgacacgttgaccagataataatacgactacggacctcactacctgattcgtagaggtcctcatctatccccaacctttatcccaaagtacccatgcaagattgatggccgcttagttctatgttactgacttaattatcataggacccaccggggacacacatgtcatgatcgcacggatgacgattat

SEQ ID NO: 9410 - DNA, 481 bp, Oryza sativa
cttaagccttacctgtcagaagatgctccatgtacagtagctgtttctcaatcgagaatcctgtgcttaaccattatcaggcttcaagattccatggctcaagacatggttatagatctgaaggcaggtgtacttcaagcatcggccacatctgactttagagtataacacccatgagccaacttgctgctccctgttctgaacatgcagccaagctaaactcacatgacgagatagagaatataaacaacgcacactcttctcgtgtgagctaaagctatcgctggtgcaagtttctttcgtttgcgggactatgcatcatgtgatgaacaccgaacacaccgtaagtctctctctctctctcctttcgagttctctgtacatgtgctagtttctacagcgaattatgtgttgtgagaatcacatgttgagatcatctcactgtgagcggaacacggtgtactgtccatccaaagaaatc

SEQ ID NO: 9411 - DNA, 230 bp, Oryza sativa
aactgcttccctacaaagacattcatgacatggacgaatattgacatgttatcctttgggaatacgtctctgtgactcagacagatgtttatttacgtaataggtgaaatactcgtttggcttgtctgctaatgagatactgtaactggatatatgcttcaatacttgcaggcatgagtcttatagcgtttctgcaagggaacccttcagtagtaagtggagatacatga

SEQ ID NO: 9412 - DNA, 336 bp, Oryza sativa
  unsure (1)..(336): unsure at all n locations
acatgattatttactatggatcgctgaaggcatcatagagacctcggtgtatggaaaactattatctgatagtgacatgtcaatgagctacgcacacgatataatgtgttaacgcctggaaagtgaacatgacatcttaaatggccgagaattattgtgatgagagcctgtcactgctcatatgagaccttgaaatatcaagcatacatgattcccatagacgactactcctacctcgactcattggcggtgatactggacgtgtanttcacctacctggcaaaagacgacagaggttgaattgagagtatagactggctcatcagattgaggacc

SEQ ID NO: 9413 - DNA, 160 bp, Oryza sativa
cttatcaagatactctctgcggaatccagttgacatatggaaggcaaacgcccttgaggctcacgctctaatgataacaaccaacgtctgcataacactaattttacgccatccgatgcatctggggcctcccactcttcccttcgaaacttcaccagga

SEQ ID NO: 9414 - DNA, 456 bp, Oryza sativa
actcagcttcttatagctatcttgctatgtgagatatcaatgatgtatccttctctatgttacactcatcatatattacaaagcagtcggtgtatcacttggatcatattattcatggattcacaccgcatatgctacatattaatattaagtcgcttggttgactataattatcaaaaccactcggttggttggattatttattccttgactatatgtttggtttgttcgattaaccacatagtcggcggttacacttattatgtgcatctagtcgatgcacctgactactattttcagccctccacagtcttcagatttggtaaatgactcgggagaccatgacgaagatgattgaagcactcggctttggagtaatctatttcgagagaaaggtatctttccgactgtgaaggtctcatgggctactgtggagattatgagtacaccataccc

SEQ ID NO: 9415 - DNA, 432 bp, Oryza sativa
  unsure (1)..(432): unsure at all n locations
ctcaagcatcgcgnnaacagcannaaaaagggacatagaggcacaaagccattttatatagacgagcctagaggccacacgagactaaacaaggacgcgaaccctcaccaacaagccttaacccaaggcctacgatgattcagaccgaactggcaacccgaccctggggcccagatctgtccaagccaacccaggccaaccattccacaatgtagacgacgagcacatattaagagaaaaaacaccgactcgggtacacagcacggcttgcccataaccgaaggcgcggctgttccaatagatcacacacagatcagaggcgtacatgaatacacacgagacacaactaacacacctgtaggcacgggccacacaccaccacggaatacagactgaagacacgacaaacatacaacccatcctagccataga

SEQ ID NO: 9416 - DNA, 398 bp, Oryza sativa
tagactggtgactgcggtccaacccctatggtagtttgcgcgtcgagttcaagtcgtaactgaagaagtttgtggcgttacacagatccaaccctacatctctatggtcccaaaatcagaacctgaagggactgttttaccgaagctgtgataatagtctcgggtagaccattttctatctctgctcaactgggacaaatcttaaaccaagcgcccatgagcaattgtcttcagcaggagactagatctgtagcggacatgcatcactgcgtctgacaccgtccacctgtgtatcgcatcctaattccttcgaagtatcggtgccattcgcgtgcgccaaagtatcctgacgtgctgttaatctgcaagaacgtttctaacacggttgccagttcgct

SEQ ID NO: 9417 - DNA, 340 bp, Oryza sativa
aggaacaagagatgcccacacagcactaacagctagacctcagcgcccacctcttgaagagccagaaacgcatctcctctacaagcaagcgaggcaacatcatcagcaattacctgcagaaacgccccacaaacaggcctctaacacgaaaatggcatacgctgccgtgaaacatgatacataaacacttcaatgacacagacttcatgcactgagaagagacaagctccatgaacactaacagcaattccgcctgacaatgaaaatcgaactcaagctgactttcaagtcaaatcacaacagaaacacagagcataggcattaacgcccccagcttctc

SEQ ID NO: 9418 - DNA, 103 bp, Oryza sativa
gctgtaatggttgtaatattgaacgtccgtacgtggaccaatcggctaatttcatgtgacattgctctggtctcatctcggtacttcgagcacggtcgcgtga

SEQ ID NO: 9419 - DNA, 438 bp, Oryza sativa
  unsure (1)..(438): unsure at all n locations
tattcaaaggaccatccaacccatgaaagaaccatccttgatatataacttaagncaaggataaagggctcacactccaaaagatatccaccggacatacccataagatgtgactcactcctattggacatgcccacttctttcttggtttaggacttgagaaaactcatcacacttggctagacaagcccaccaaatgcacctacatgcatatgagctaatatggcacaagatcatgcgcaagctcgcttcatagacccctcttgatagtacgccgcctatctagcaaatccggtctacaccaaacaccacgaccgggaaaagactaagagaacattcttagctacattatacctttgccttgcgccatccatctatgggtcaagcttgagtctagatcaacactngtgaccattngattcaaccatgtttatacca

SEQ ID NO: 9420 - DNA, 361 bp, Oryza sativa
  unsure (1)..(361): unsure at all n locations
tgaagttcctgtactgattntcccacaccggtgtttcctctcatatacatctagngcatagagatatctcccaagtttctgatggagatgcaaagctcctgccttaaattgtttcccaaatcactgccacatacctcagttgcagcacttatctcttgaattatgcaatcaaaaactgttgtactgtcctctgtaaatgatttccaatggatcacgcatccggacatgatgtatgcggcactatgctcttgcaatatacaaacccatatcttcagatatgcacttgatcaacaactcatggatattctacaaaatatagaaaaaaatggtgaggcacaacaccttgacgaattgcgatact

SEQ ID NO: 9421 - DNA, 298 bp, Oryza sativa
  unsure (1)..(298): unsure at all n locations
cactcacaggctacacagggcatgtaactacccagccagtgcaccaagcgatcgattgacttgattcaccacagcaaaataatcaaataaaaccaccatggatgaaaacatacaacctccaactatcaatgtgtaacaacacatgtgcacagcttcactatacgattgacaccacagggcacacgtaatctcagcacacaggcagatagatttanactgactcacttgcatgcgcatcttgagcatgatgtgccagcaaaaactgngtgtatgcaacagacggtgctcactatatgtg

SEQ ID NO: 9422 - DNA, 431 bp, Oryza sativa
  unsure (1)..(431): unsure at all n locations
cacctactggcatattgcaggtatcctgtagacttgcccatcctttttgatgtgaaacatatccctataataacttgccatgtaacctcttcagcttactttcaggaaaaggcaaaagtacaagctgctcctggctgcagtagtcaccattagtacatcctggtgtctcttcagctcgccatggattgcttcttggcaaccttgttcaagtgacaccgaagaagcctgtccatccatacgaagatctggttattttaagaagtatcagtgtgcaatgaatgagtacaatgacctatctagcctgttcttcaacaccaacgatgacaccattagaaacctttacagtgctcgcactgatgatgaaatccatatcatctctataccttgtcttcttcttcacaacgnaattcctgggcattttcagctatggc

SEQ ID NO: 9423 - DNA, 480 bp, Oryza sativa
tggactccttgcagccagcatttccaatgcaggactttttatcttttggtcaagcaagaaaaatgcaacgattctagtaatgtagaaagcttgggaaaacatccaagccaacgagagtctcgatcctccaccacactctcttgtaagtccagttccttcataaatctaagagcgaagagttataaataaaattcataagatgcattgtgtcagccaaaatacttctgctaaaaactagagacagtcgaggtgaaaataaatctaaagttagctctatgtaacagaacacaagtatgagatcacacatttaatagtgtccaaattgttgccagctactatgattaaatgactatcaacgtgatcaagccgatgaaatatgcttagcactggtgcctcttgacactgaccccaggtccaccagatcaaacaggtagtgacaaaaactggatgtgacacccttaagagatatctccaatacca

SEQ ID NO: 9424 - DNA, 297 bp, Oryza sativa
gcgcgtccgcgccacagacttttttttacaacaacgctacgatgacaaagaaccaacttgtttgcgagcaggaggacctgctatgattcggagtttttgtttctttgtccggccattatacaacttgctggaggactccggaacatgtaaaatagaggtttcccggataaaaataagaggattgctctctcgatgacgagaccgttgaatgccttgcgttgtggtgcgtcgccttgggtgtatctaatgctggacactggatcttattacgaacaactagataacatgattggcttg

SEQ ID NO: 9425 - DNA, 449 bp, Oryza sativa
  unsure (1)..(449): unsure at all n locations
ttttagcgttaccgtgtgcagtatgctatggacgcacgggaagtcatactctgtactcattnntttatttatgtttctatttctatatttgcatgccaatatagatcacctgcaaatagtcacacagaagactgcaatgcatcccaatcatttgcaattcatcatgacacattccatcacaatacaattcactgcattgcatcccaatcatttgagattcatcatgacaaatttccatcacaatgcatttcaccaagcatagaagagatgccacatcccagacataggcatatattttggtaaaaattggttgtaatgaattagcatacaagctgatcctggtccatgtcacttaaagcaaatactcaaatctttgagacaatagctagcaccggattatttagttcattggtcctagagcatgtagttgaaacttgagaatacacctg

SEQ ID NO: 9426 - DNA, 142 bp, Oryza sativa
gagtatataaatagcacaaccctgctacctggggcgccaggaatgcgctttttttccaggcactacccgccagcagcccacctggttgcccgatggagacatggtacaccatatggtgaaccgtccctacatcccccttctt

SEQ ID NO: 9427 - DNA, 425 bp, Oryza sativa
  unsure (1)..(425): unsure at all n locations
tgtatgcaagacaactcagaagaaaacacgatcgacggaccacatcaacgatgtattattctccatcggcaccacttggacgccccacggctccaccaatacaaacaggaggctctgtcatctactacgccgcacgccgggtatcttcgtcactcacccggcaagcacgcttcgccgacctcgccacgggcaccaccctctccgcctgggcgctacgccacacgccgggggcttcgtcactcacccggctagcacacttcgccgacctcgccacgggctcgagggcttcacctacctctccgcctgggcgctacaccgcacgccgggggcttcgtcactcacccggctagcacgctttgccgacctttccatgggctcggnggcttcacctacctctccgcctgagcgctacgccgcacgctggg

SEQ ID NO: 9428 - DNA, 331 bp, Oryza sativa
gtgcagtgtgagactctatatatcgacacctttacaccacttgtgacacgggcgtattgtcgcttcttgggtagccctgcagagttaatgaccaagcaccatgccttcgggtattctgtgcaccacaacaggtatatcatctacagaactacttttgaacaaccgtgtggagcctgatgcaactgacggatacattgtgcggacataacatggtgtaacttatatgatataagggtatgggggaagacacgccagagcgtcaaatacgaaactgcaaggcgtcttctaaagaagttagattacagatcgaccaaacgccttcagaaactac

SEQ ID NO: 9429 - DNA, 501 bp, Oryza sativa
cggaagtgtgtgtcgacgtgagtgaagcgaggtctctatatagatgtaggtatgacggttgtactctgcgaattgtcggaaatgccccgcatccgccatcaggagatgatcatgaccgtccacgccaaaacctggatccaaccgcgtttaccagggttcgggcgaacctgggctgggccctactggcctggcctttggcccatgttctcccctggacctcctctatccaattcttggtattttgggctgatttactgatacctcgatgaagttcacaacgtatccttgtatggatacagaattctcctcactttagtctagatttcctcccaacttcggggtttatcacctgcatacaaatacacttgtggaatacgtgagattaaacacctatcactatgttggatggtttattatctgatctatatgtagccgtcggcggtatagaatctgcatttaacaaccgccaacaccggttgaatgctatagtagatatccgtg

SEQ ID NO: 9430 - DNA, 512 bp, Oryza sativa
tgcacgactggtcacctacatggatacgagatgtttcagtagtatcctattcccatccttacagcgaaagtatgaattatatagaacgattattaaccatcgataatttatgtaggtctctcgaaagcaacgataactgaactcggaaactttggtatcttcggagagaattttgtcttcgagtgtggcattgagaaggcttgattgcatcggatcatgaggcgccatcaccatataccaaccgatctgtctatgaacctaaagcgaattcaggccgtcaaataaccattatagcgcgagtgagggtgcgcacacaccacaccacgtaagacttgcgaatgagagagctttaccggtatccactttgatggatcctcatttattgatggaatgtcataaatcgacttgaacacctgcagattatcaagtaataatagttgtgtgagaatagctgaatacagacagacagagatcatgtgtctccacatatatagtaaaaaatatatactctt

SEQ ID NO: 9431 - DNA, 205 bp, Oryza sativa
gttttaaatccccccagtgtgaaaataacaatctgtgtagatctcagacaccgctcatagttaggttcgcattccagccgctggatgttggcaagctgcttcgcttcttgaatgagtggactcggactgtcgagcacatgatgactcacttatataagaactctgtgctggaatctgctcctgtgaacacactgttctggactga

SEQ ID NO: 9432 - DNA, 301 bp, Oryza sativa
ctatggtagggcgaaaagagacttgcgtctcgatacaaccttaagagatgctgctcaacagctcatttagtaagggatcgacctcccgcggcagatcattacttcccggctcccagagccattccacttgattagacggctcccagagcctttttcattatctcggactcccagaggccagatgcccagcagcacaacaatccgcttccactcgggaagcctagtctatgatgcccgcagacatcccgaatcacacagattcggttctgaccactcaggtcggccatctgccacataggct

SEQ ID NO: 9433 - DNA, 324 bp, Oryza sativa
caagtttaccaagctacatatcctctcattgctcaatcaaccaatggactgaatgaaatatgacaggcgtaccaaggagcaaaccttatcagctggcgcagccagctgcacatacgatgccgcacctactccaggcagattcactccaactgccttgccacggaacctgtgaccagtgaacgcattatacaacaattcacccaagtctcgtgagtcatgactgatcacactataataacagcatcactaatggcttatcttgaagcgagggccgcagcgacggtatcataccagcgagcaccgttggggaactcaccttcaggc

SEQ ID NO: 9434 - DNA, 182 bp, Oryza sativa
tctgttcttcattagtgtccatttgtttatggccccattgtcatgatctttaatggctgctccacaaaacagaccaggtgtgccttgtctcagaaatctgtattggccttcttaatgtgtcaagagctatttctaaatccttatttttgagttttcatatgtgaatgctagcaattgacagc

SEQ ID NO: 9435 - DNA, 292 bp, Oryza sativa
ctaactacagaagtggctaataagatagaaatactattaatacagtggaaactaaatgctgtcatgaaccataatatatcaaaaagaaatgattccacatgaaccagtaaagttacgtgacaactcagttcgaaaagacgaactttgcctgaatgaataacagactatgtttaaaacacacaatcatgtgcactactaaaagaatacattaaggagaactaaatgttatactaataaagaatctttaggcaaataaattgactgtactaaaatcctaaaaatacttgtaaga

SEQ ID NO: 9436 - DNA, 422 bp, Oryza sativa
gtaacacgtaccatccatggagatcacaaaaagaccgactgaacaaaccgggcgaaccgctttatttctttaccgcatatcataattctacatactgtgtatccttctagacgctctagccgaaaatacaacacaacctattcacacacttgatatccaagggtgcctgaatgcagtatttgcatcctacgagtacgtgaccatatcaaacatctctgtggcggagattaaatacacgttgctgtgaagactcgtagtaaagactgaatgcataccagctaatacccatatggtacaaccacttataccgctgaaataattagaagcttgaataattacatcctcttatatgacaaaaagttctatgagtgcttcacgggacctatcatggtcctattgcaacagtggaggcttgagtgccc

SEQ ID NO: 9437 - DNA, 416 bp, Oryza sativa
  unsure (1)..(416): unsure at all n locations
ctcggttcttggtctctgcccgaggcattgaggccaacctctttaatatacgagctatatagcggatgcgcccctccagcaaacttatggatgtgcagtgcgtcactggttgcatggccgccctaagtcgttttaaatcgaggctgggagagaaggcgctacccttatttaagctcctcaagcgctcggggccgtttactcggacggaggaagctgaaaatgccctcgcccagttgaaggcgtatctcagctctcctccagttctagtcgccccggagccaaatgagcccctgctactttacttagcggcgaccccccaagtatttagtgcagcgttggttgtggagcgcgatgatgacaatccttattctgcgcacccacactctgtgccgacttggcccgggagcangcatgga

SEQ ID NO: 9438 - DNA, 495 bp, Oryza sativa
  unsure (1)..(495): unsure at all n locations
ntagccctnttatccgatgatgtgaagaaaattcttgaagatatctctcagcggctagaggcatcatcgttagacagcttagtggttgattgtggctcaattaggactcagctacacgaggttcaagctctaatcccagatgagctagccgatgtccgtactccagccgtctatcttgagcagcatcaattcaagctggagaaagccaagctgagattagctaaacgtcgggagcgcaaggatatcgaggccacaatccatgccaattgatagcttgttcatgaagagaaggccaaacttgatcaactatctgagggcccgattaaatctaacattgatcggctcgaagctcgtaagatngaactctnggcacaacttgaagaatgcaacgccgagctggatatggaacataaaaagctagccgatctnccataatctgtcgaagaacaaaagacaagactaaaattggctatcaagaatgttgctgatctcacc

SEQ ID NO: 9439 - DNA, 314 bp, Oryza sativa
  unsure (1)..(314): unsure at all n locations
tcacttacgagtatcaactcanaaaggtcaggtcatgcattgctcaccagtgattccgatggacccaggagaatatctggggcttcttatgtgggtntcattggtgatgccaatgtaacttcgtacttgatgatgggttcattatcttcaggttatattccatatggtactaattttctacttctaggcanggaactgttcaatgtcattgattggtaataatattctcacatacgtatcacaggtctgaagtctcatgctgtgacactatacgaggccggaaagcttggtgattcttgcatcgctgatctatg

SEQ ID NO: 9440 - DNA, 161 bp, Oryza sativa
  unsure (1)..(161): unsure at all n locations
cttgacttctggacgggcatgaagcnggcgactcttctacatgttttacaacgtaaaaaggggagggacacggaggaaaaatattaataaactgtttcgcaaagaaatgcctaatggcgagaggagacaatttgctaatatgcgttttagaaaacttgtcc

SEQ ID NO: 9441 - DNA, 378 bp, Oryza sativa
  unsure (1)..(378): unsure at all n locations
taaatttgatatgaatgattcggacaacaaagtgaactaagccatgtgtacctatgaggagtggcagctgtgttcggcatcctcttttcccaaaccttctatctcgttttccgcgcgcacgcatttcanactgctaaacggtgtggttttgcaacaagttctatacgaaagatgcttaaaaaatcaattaatttattntggaaaaattagctatacttaattaatacgcactaatagaccgctcgtttttcggtggggaatgagttccaaccacatacacacacaacaaccacaatatggtgtgccatacggcggctgggccgcgctgttctggtgtccgtacacccgctacgagccgcatggctcatgagacgctga

SEQ ID NO: 9442 - DNA, 321 bp, Oryza sativa
  unsure (1)..(321): unsure at all n locations
atatacatcatcaagtttggaatttctattgcaacactngcagtattgtgttgtacattanaattctcagaattactggtgatgatgctttttatgctagtattgcactttgcatcagctctctcggcataactgtcaggcttgactccaatgatgcgcgttacatcaatgctcttagaatcactgctggcagacgttccagggctgcatgtaacactagcatttttgacatcactaatgttgagagtcccatagttcttgccatcactatattgaagccatctgtgttgtaggcactgtgcagctgttggacgcttctct

SEQ ID NO: 9443 - DNA, 483 bp, Oryza sativa
  unsure (1)..(483): unsure at all n locations
ctaagcttattccactgtctaagatcctcaccggttttcgtgctgcatccgtggaccttgnggaagccgtcggagcagactntgtgggtagtagacgcctggtcttggngttagagtaagcaatcttcgtgtcctccgactgctgcataattccagctgttcgagcggcagcagatgctgctctgcgaagcgttgttggtttttcatggggcatctgcttgctgtgctgttggggcagtgattgcttctgttgctgttggngcagtgattgcttcgcgtgttgnggttgtgcttngctgctgttttgtggatacgattgctgctataacaatatcaaaagaagaattcaacacgaaaaactttagtgaaaacacaaaaaaaaaataacaagtgttaatgacaaacaaaacctacgtgagaaataacaganngatgctgtagagaatgtgttaaggctactaatgccactatgacatatattac

SEQ ID NO: 9444 - DNA, 251 bp, Oryza sativa
ggacttacactggctgcactctgtggcgtggactgtccatggtttttttgtacatgtcatgttgttccccacatagtgcagtctcaattaacatagtccaaaaatgagtcagcactagtaaaatgcatcaactggggttatagtgttgaatatgtaagaatcagactggtaaaattatgacatcctctggatgtggaaaatgtactcgttaaaaagaaggtgacttatctactggagacagtaattgtttt

SEQ ID NO: 9445 - DNA, 429 bp, Oryza sativa
  unsure (1)..(429): unsure at all n locations
tctgaagctaggtgcacaaatggcttattttccaacgttggatacatntgacattaacatgaattaacccatgaactataattgggctatttgagcacacaaaatagatcacataatattatctgacgttgacatgaaggtctaatgtcatatggcaatgctgtgaaggattaatgtcacacattgacatgaatgaatccatgaactataattgggtcattngagcgcacgacatagatcacattattgctaacgtagcacacatgaactgctgcagtacacacgacatagatataagttggcataacacacataatagttcacatgatattgcattcagatagctgaataagtcacataaggtcacatgaatgggcttagtgtgtagaatatagacctctcataacacataggcacgtcagacatcac

SEQ ID NO: 9446 - DNA, 145 bp, Oryza sativa
atggttactggtgtatttatacacatatacagtagccagtcgaacagagaaatatacctacccatgctgtaatgtggtcacatgtgagaagaggtgtcatgattaccgatgtgtgcctttccgcagcagctcgcgatcacaccgc

SEQ ID NO: 9447 - DNA, 454 bp, Oryza sativa
  unsure (1)..(454): unsure at all n locations
ctcagcttaatacacanctctcctctttcaactccaatccgtcgttactgtgccggcctggcgcggtggtcaccatcgtccggtgcttctacttgccgctgggggtagtaagagtagctaggtttgtttgattgttcgtatgtccgtcccctgcaacagatgtctgttgcgtcgctaggttggggtcgcaattaaactctctcgggggacgggactttgttcccgntattaattctatcgtctttgcttttatcgtgtcgtctatctaatctaatctacgtagcccgaaaccccncaacattgccagcgcccagtgggccacatcacgtgtgtgggttgcgtgggttgggctggcaaatactacaccgtgggcttccacctttgcagagcactactggtctatgggttctggttccgtctgttctggcgctcctctctacgggtgatcgctaac

SEQ ID NO: 9448 - DNA, 110 bp, Oryza sativa
  unsure (1)..(110): unsure at all n locations
ctgtgtgattgnggggtagtcacctaaatgagttggtgaataacatgacgaagtgagtatgtatgagaagttgtggaaaagtgagtgaaaaataacaaccgcgatgccct

SEQ ID NO: 9449 - DNA, 413 bp, Oryza sativa
  unsure (1)..(413): unsure at all n locations
agcgacgcggccatgccngggcgggccatggcggcgaacgccgggctgctcanaacgaggccggtgcggttcgtcctggcgcggtccgtgacgacgacacgggcgcccgcgttgctgcacagcttcttgtccttgcatctcacctgcagcagcgaatcggtcaggatggggaagccatggacatggcatatgcagctaagctagttgcctatcttcggttgtgttctccttctcgatcgagcttgattacctggtagcacgcgccgcagccgacgcccgcccggtacagcgcggggcccgcggcggcgaggaatccgccgccgttgaaggtcgcggccgccgtgccatacccgcaagaaccggctgtgccacgcaagaacaaacgaacagaatcaatcagtcgatccataatc

SEQ ID NO: 9450 - DNA, 352 bp, Oryza sativa
  unsure (1)..(352): unsure at all n locations
atttggatccctgaagttcagaagtgaagttgcttcagacaatatctttgaagagtagcacanaagcagcatctgatgcctccagctctggcccattggaagtactttctgaccctcgcggtttctcctgcaagaaggatggttctcaacaagagctactggattcatcaaccgcatatctcctgcagcttgcctgatggattgctggataatgtgagacctctgagccattagcacctcatatgtcataggggcaccatttagaccttcaggaggggcggaagcagcatgagtgagagcaacaatggcattgaaccatatagatgagcccagaacagaagtaatggtcttt

SEQ ID NO: 9451 - DNA, 465 bp, Oryza sativa
  unsure (1)..(465): unsure at all n locations
atggtactctgatatttgacataatcattcagttctctcaatgttatcatttacagctcatcngtcaataggatccgtacgccagatatgttgtcttcttgtcgcttgaagtagccgttggtctttattccatgaagtatttatgcgttgcttccaaaagcaaggaaacatggcaacattctcacccctcttgtggctctcaaaatgttgctttaaccgctattttccttattgtgatagttcagaattagaaaacctcttaaataaatagccaagttcaaaataatttaaactaaaatttgtttaattntttacanaatgtcccaaatttatcaacgagaccgctgagagcagtaaccaaaactgggcataatactttggtattgcaagttgagagtcacgttatatttgatattgcagctgtgattcaagcttaacatcatgataagatcaaaagtaatctta

SEQ ID NO: 9452 - DNA, 349 bp, Oryza sativa
  unsure (1)..(349): unsure at all n locations
gtatcaagagattatattttctatggtaaaactcgataactntacgaactagccttagtggcatgttctattattgtggttgggaacttgagatccttggttgaganatggagctacgtgtagcagtgctcaactacatctgcattatattgttctgcatatggctgtgtatcggttaagtgtgtgggaacaaatctcccgtgcacggaaaacgggagcggttattagcgtgtgattaagtaagtattagcttatttttataanaatgaatcanatatgaattttaagcaactttcatatagataccgtttgcagaagacgtaacgtttagcagtttgaaaaacataca

SEQ ID NO: 9453 - DNA, 252 bp, Oryza sativa
cttatcaccgtcagctctatgtgtataccaagacctggcttctttatggtgtatgctttaagcttacttgtggtcttcgactttgtcgtcgaggtccaacgggtcgggctcgcaagtcgaagcgtatttgacaggcagccatatcttactattgatcagtgtaatatgtattaatatgatatccttatttaatacgcgtatactgttattaccatctattccttgtagaatatatgtatgtatatacctgta

SEQ ID NO: 9454 - DNA, 497 bp, Oryza sativa
  unsure (1)..(497): unsure at all n locations
ctctttcggtacctgctactccatntgatntaccattacatatgattattttgtttggctngcaatatgaaatagaanaaagagcagtatatgttaagaaaaagaattcttttagcttgtttgcaacactagcttttcttctttgtggttccatttatctcatccagtgctgcatgtagtcaggtatagttgcctctataatagntattntaatggtatttctgcattattcttgaccaatatgaactcttcatatngaaaaaaaggtgtatacttgactttttttattgcttttcagttacctaatttgatttacttgtatgctgctatatttgaatattatttgtaatctgcagggttgattgctaacgaaaccttggtgaaaacatgcattacatgattntgtgagcacgttgtcgatgagatgctcatatntacttgtgaacaangaatatgtcanagagatcctttctgaagcttctgaccaaaaatctact

SEQ ID NO: 9455 - DNA, 150 bp, Oryza sativa
atctatctcctctatcttcttatatctgccaaagaacaatagaattgcatgatgcgatttaacatatttctacgtgaaaatggtaaagaatggtaggtagtaacttaacaattagcatttctgaacattaaacaagctctaattcactcg

SEQ ID NO: 9456 - DNA, 497 bp, Oryza sativa
  unsure (1)..(497): unsure at all n locations
tcctttgcatcctccactcaaatctaagcctatcttgtgagattgagagattagatgagaggggaggagtgntttggagatggcttgacgattagatntgtttgagcactttggataccttgtgggctgtcacttgggcttattactcttggagatcttctcctagacggttaggtgtcgcctgtgagcttccaaagatcttgtggatgtcccgggaaaagttgtgaaggttttcctcacctccgcaaggaaacgaggtaagtgagtaaagattcttgtgctgagttttcagaggttgtactangtagagcaacttgcacttgtggtcttttctagaaggaatattgagttggatcttggtggtcactcaattctagaaaatgacctanaagtgttgagttgaaggctgtggacctcttctgggatctttgcataagtgaggcaaggggttaatcgagacccggctctttggagcacctcaacggagagtaggatct

SEQ ID NO: 9457 - DNA, 218 bp, Oryza sativa
atacttttttgagaagtacagtaagctgtgttattcactcgtcaagatcatctactttgtatatacttggacgaacgcgttggacagcagacaatccgacgaggagagcgtgcggctgaccgttggacagcagaggagcagtagctgacctggcgtgatctcctccggcttaaccacgcgcccctgtgtatacgcgagtaggtatctgcgctggatct

SEQ ID NO: 9458 - DNA, 327 bp, Oryza sativa
  unsure (1)..(327): unsure at all n locations
tataaaaattatacgttnttacagctactctttttaaagaactattcaaaactgttaacttaagggcacaggagcatactcggcgcattcctcatctacgaagacttcagtggagcttacacgagtcggctgaactgctgccctcgatccaaccttctgaggaatctgttgttcattgcagtactatcatcagttcattgatcattactgaaccgataaacctcgagacatgtcgcaaaaagggacctcttgaagaatactagtggcttacgggagaaatacaaaaccttgagtgatgtccatatagcaggcctcatgatattttct

SEQ ID NO: 9459 - DNA, 418 bp, Oryza sativa
gagctatcatacagaatactggcctgagccttacatagtatccacctgagacctacatgacgccgcctatcatacacagattgcggtgcattccattctgtaacggtgtgcgcattagtaagatgcactgatccttcaccggttgagattacttggcctacagaatggactatgtgtcctgatacctcacattcactatactctgcagatgcagaatgctcaccgagtatgtcgcgctccaatcgcaagcggttctgatgctgcttacttaatccggagccgactacgagatacaccctgagtagcgacatacatgtggccagagtatacatgaacactgttgtcataagattcataaagtatgccggggcgttggttaactcctacgacactactgtgaacttatacaatacatagc

SEQ ID NO: 9460 - DNA, 475 bp, Oryza sativa
  unsure (1)..(475): unsure at all n locations
taaatcttaactcgcaataggttcctaacaacgacggcatgtatcttgctaattaacggttaagatcccattggagggaatactgtgaactacgcgtagtggaagctaaagtggtttatccaaaaggaggatgcctttttagataatgttatatagatggacaatttgtgttttttatatcaactacgaggttacacaaatctttttaactaggtgattcaccgcgctatgctgcggaaatcactaagcaattcttagtatatttttttcgacaatcaaattatgagtaaaaagagagaaacgtgaaacatcatggtttatgagtacttatcatgaagcagacaaacgatacccgagttntaatgtgaaacatatngataaatatatgttaaatattataaaaatgatagatagatttgttaaagtattgtgcaaatgatgtgagggatgatgattagatatgcttgcatgttga

SEQ ID NO: 9461 - DNA, 355 bp, Oryza sativa
  unsure (1)..(355): unsure at all n locations
ctgtctgtctgtctgtctgtctgtgtgtgtgtgatgcatgcagtaaatgcaaattaagctcggacaaatgtccatgtaatatgtacagtaccatatatatacatgtgaggtgagaattgatttgcttttttgagaggattgaggttaggccagcagagctgttgacgcatcatgtatgaatacggtggagaagtgagagaaattctttgctggttggcttttctttaattattttttgactgggtagtgagcacgaagtcggcctgtgattngattcttttacatgtttagtttgatctcccagctatgggaagaatcatggggtttaattgtgtaggatcgaatacaagtaatc

SEQ ID NO: 9462 - DNA, 141 bp, Oryza sativa
ctgttggctctgagtctgcgcaagctcttggatttaacaaggactgcgaaccatgtctggtcaggagtcagaataaaaactaaatgtaatcagagtcgtaatgcgaaataaatctttagattagtgtctcaggctacggaa

SEQ ID NO: 9463 - DNA, 358 bp, Oryza sativa
  unsure (1)..(358): unsure at all n locations
tggattacaatacctagtaatattcttattgatgangacgaaggttcacttacgagtatcaactcagaaaggtcaggtcatgcattgctcaccagtgattccgatggacccaggagaatatctggggcttcttatgtgggtttcattgttgatgccaatgtaacttcntacttgatgatgggttcattatcttcacgttatattccatttgttactaatattctacttctaggcanggaactgntcaatgtcattgattggtaataatttctcacatacgtatcacaggtctgaagtctcatgctgtgacactatacgangccccgaagcttggtgattcttgcattgctgatctatg

SEQ ID NO: 9464 - DNA, 184 bp, Oryza sativa
gcttttttttccgttttatgccgacctcgggaccatgttgcctcggaagcacttttattcagacttctctagggggaatttaccatcgcagtacgcgtgccagcgacatggtgtctcacgtattgcccgtgtcggctacgtatggcagactgttagttgttactgcaaacgctgaaaaaaatga

SEQ ID NO: 9465 - DNA, 373 bp, Oryza sativa
  unsure (1)..(373): unsure at all n locations
atatatgggaattatcacatcattcaatcaacatatgggtgctctagaanacgtgattactagacgagagtttatgtattcattacttggtttttcggttgaagtntgtaatttgagcttacatcatcatcccaacatatgtcctaaagacacactatttagggtggctacataaaacaagtgtactaaaagaatgtttctgatgaggacacgnatagctcggatataaccatgactaccttatgtattaatcaatcaaaagtgcatataatctatattagagttacttgtatatatttgaataaacgtgcacataatgagtttgtgtgtttcgtttgcgaggtactgtttgggcaaagaaagaaccgagtgt

SEQ ID NO: 9466 - DNA, 168 bp, Oryza sativa
  unsure (1)..(168): unsure at all n locations
acagcgggtgcgcgcacccagcatacttaaggatgtgcagtgcgttactggtttcatggtcggcctaagtcgttataaaactatgctgggagagaaggcgctatccttatttaagctnctcaagcgctcggagccggntacttagacagaagaagctggnaatgccct

SEQ ID NO: 9467 - DNA, 181 bp, Oryza sativa
  unsure (1)..(181): unsure at all n locations
gactgatggaatctgatgcgtatgtatatatgtagacaattgttctctctggctctgttcataatctagatgtgaattatatgagtntcaaacttcaccaactaaatgagtgggatctaaatgtgagatgtctgaaattgagnattcgagaacaatttgttgctcacatgtcatctgattc

SEQ ID NO: 9468 - DNA, 480 bp, Oryza sativa
  unsure (1)..(480): unsure at all n locations
tgtgtgaatgaaggagagagagagttttataggtctatagataccctgngaatgtggagatgcttaagcatncaaagagcatctcttctcttctcttgacaagtgtgcatgacggtntcttcaggtataacgctcacaaccgtcattgngatgtcatccacagcgtacacgtggaaggccaggatcaaaggtgccagtggcggttcagccgaacccctggttcggccaaaccacgggccccacctcctggcctctcctttggcagggacactgactggtgggccctgatggtgcttatgacagttatgacccattccatgcggtttcacctgacttgtgggccctccaatccatgtgcttgcatctgattggccggaggtgtgtttccttgcatgccgggtgtgttttctccttaaaaatatctgcatatacatatttcaccaacactagtagaattggtagtataacccctacactaag

SEQ ID NO: 9469 - DNA, 244 bp, Oryza sativa
  unsure (1)..(244): unsure at all n locations
acaagcacggtacttataacacgagtggatgttcgttgtttatgattactcatgcagcagattatatgactcttaattaatatggatacaatgatctttaaattaaggagctatattatacataatactgaaattattgtcatgtatgcactatgatactgacctcaatttgactcgcatgtctgcacggacaattgctggntacgcactgatatacatatggcctacataaattatgtctgga

SEQ ID NO: 9470 - DNA, 416 bp, Oryza sativa
  unsure (1)..(416): unsure at all n locations
tcgacgatatcactagtgctacccccgatggtggctngaaatgcgctggtatanatgaagttccagcacgttcccatggtttgngtggtggattacttcctgcaaacacattccctagtgaattaaggaattggcccaaggcctaccaggagaacaattactcttcttgtaaatctcanaaggcaaaacagatggacacttatctatactaaaacactgatatttcaacttgacgtaaaatataccataagtttccctacaagaagtgtgcactcagacaaaacaacgtctcggaagcattaacagagaaatgatagtggataacttgcaagactaggggagaaactcataaagttatcttgcaaagataaatctactgcaagaacctggagtcacggatgctattacaatgttga

SEQ ID NO: 9471 - DNA, 184 bp, Oryza sativa
cgatatctatagctccaattctcctcaccaactacattttttgttttactgtgcaaatttaaaagcatgcatctcggcagatgttgatcttcttaggctcttattctcgtgaaaggctagtacattatatacctgtctactccttatgtcaattcatgtagacacttggactgttgtcacagat

SEQ ID NO: 9472 - DNA, 507 bp, Oryza sativa
  unsure (1)..(507): unsure at all n locations
ctaagcttccacgacgccgccgccgccatgggtggcatatctagcgatatagtggtgatacgaaaacactgaanaatctgagacccagcgcgacggcacgcanttggtcatccaagtcgtcgttgacatttttgttcgtacgttttctagtcgatcgagcagaanatgcacgatcaccaacgcgttgattcgttgacatttaaggtgagcatcaccacttgcctctaattaactntctctctcaagttccgtgcgtgcgcatcctgcatgccgctattgcttatacagttatgcagcgacctagctagctactcgtcactacaaaaggaaggctgccattgaagcgaactggccagcatattaacagagccagagatagctagccagacccttcttcttttaccgtacttgtcgggtgtttcatgccgaggtgcctcttttgccgtcgacggagaagaaggaaggattntcggcatgaagtgtcagagctanggtagcctgatgagt

SEQ ID NO: 9473 - DNA, 478 bp, Oryza sativa
ttattgaactcaacgtttgagaacacaccaaatcaccccacgcacaccgcttaagaaagagcggtaaaaatatctgaagactaaaacgtcacccatgcgtcaggtaaaaaacttcttatcctcctactctaattgaagacagacaagctgcaacagtaaaatcgttctaaatgggcctttgaagaataagccaagcacgaagccatcgtgtaatcaatctatggtttcatgcattcgtttggatgggaatggatggcgatgtgatggcgaatgcattaattattttctgtaatggtattgagttttctgttgtgtgttaggaagacatcaagggaagtaacgtataaataattatattgctgggtaccacttaaaaagcatacttacctttaatttcggagtactataagaaaaacttaggaaaaggataggtcaatcagtaacaatctcgatactcgtctgtggtaatgtggattat

SEQ ID NO: 9474 - DNA, 236 bp, Oryza sativa
tgaatcgcggaagatgatctctagattgggacgcgggtacttataggtgacggcgttgactttttattgatctctgagaagtaccctagcataacttaataaaggtttgttctgtataacttagcttgcataatggatgaagtacagtgaatctgtacgtcggacatatagtgtactgtataagtattatacactgctgtttgaggtgatctatgttgttgacacacaatatgcat

SEQ ID NO: 9475 - DNA, 501 bp, Oryza sativa
  unsure (1)..(501): unsure at all n locations
gacgcagctatctcctacaatcggaatggatagcatattatctccaccttcttgccttcgccgccgccgactggtgtctnctcgccttcatggatggttggtcacaccaccgttgttgggtgtctacgtcttcaccgccggctaacttcgtctgccaccgactggtgtcctcgtctacacggttggttggtcacaccaccattgatgggcgttcacgtcttcaccaccggccgccttgtctgtcgccgactggtttcatcaccactacgaccttctcgtctgtcgctgactggtatcttcgcgcatcggtttgcctctgtgccgccaactcgtgttaacgtcatcatggctatgcaactctgtcaccattgtgaggtgacttcatcttcattgtcttctgcaccagcaaactctattgcctatatttcaccaaccacgacatctcggcatgtgccaccatattcgacgccgcactaaactactacaagtggtgctccaata

SEQ ID NO: 9476 - DNA, 309 bp, Oryza sativa
  unsure (1)..(309): unsure at all n locations
tcaatcccatctaagttgaacaaggcctcagacaatcatgcttaagcatangaataaaatntaaaatgcagacatgggcgataatatgtggcaattaattaatattataggcaatcaagctgaatgaagttntgctagaacttagataaaccagccaagtgatatataacagtttttgaaagagaaagaaagggaaacataaaggacaatgtaacttgtcagggcaaaaaccaagcatgtcgttatgtagcttcaattgtcggatttatcttcaaatcccagctttatcgtatagtccctcctagtgca

SEQ ID NO: 9477 - DNA, 148 bp, Oryza sativa
actgacttgacttgatatattgacggtgagtatgacgtttcacaagtatgtctcatacactgtagctcgatcgtgctatggcgtccgaacactgggtggcgacctatcagctaagtgctccgatgttgccgcgcactcgtacacctta

SEQ ID NO: 9478 - DNA, 138 bp, Oryza sativa
  unsure (1)..(138): unsure at all n locations
gagtctctaactagcgctctcacgcgccgctatggcagcgcttcacgacccttggcatcgctctcatgtggcttggcagcgctcttcncgccgtttctgcagcgttcgtgcttgtgattatggcagcgctcacctcac

SEQ ID NO: 9479 - DNA, 410 bp, Oryza sativa
  unsure (1)..(410): unsure at all n locations
ctaaaaattctggacccacataaaaaagtacctctatacgatgcattgttgagtcccaacctttatattgcataaatattcttttagaatcctataactaggaccttgcatagctccacagatatatggatctagcgattatattaataacatatgaatgagtttttttttatatattttagaagaaatatannaaattgcaagaactctcaattaacttacaaacgttaaattgagcatggatctgagatttagagctgtgtgaaatggangcctaaagcaatggcacaagttggtatcttacagaaaatagacccaaaaatgtgaaaagaaaaacataattccacttcttccgtggcacgagccatcacagttagggatgtaagtgggtagtcccgtggctacccaca

SEQ ID NO: 9480 - DNA, 55 bp, Oryza sativa
tttagatttgtcaaatctttcttacttatctgcaaaatatctgatatgtgcatct

SEQ ID NO: 9481 - DNA, 342 bp, Oryza sativa
  unsure (1)..(342): unsure at all n locations
tataccatgcctttaatactcttttaagtgtgaaatcttcttactccagaagctagttttagcttataatctggtgattttccttttaaaaaaagatctaacgtgtaaacatcaaccaaacagacaaatcttttgcagtcctataggtgtcaccagcaaagaataattaacagcttactgtcagatgggtctgatgagggtgacattactagtgagcagagtctcacatctatctgtatatttggtgaaagaggcacagggaagactgagctactccatganatttataatgatcaaaaaatttagagggtttcatctgaggtatggataatatgtggacaa

SEQ ID NO: 9482 - DNA, 192 bp, Oryza sativa
gaacgattgaatctataaacttctatttatttgatctgaattaaagtatcaaggtccacctacaagtcattttataaaagtagaccagatccgaatatggtgataaactgggctttgtaatatgatccatgtgtgatgatgccagctacaactatttgctactatactctgtgtatgatacgatcagtcctc

SEQ ID NO: 9483 - DNA, 401 bp, Oryza sativa
  unsure (1)..(401): unsure at all n locations
gctatnatactgtaaagtggaccttgggcaagtagatggtggaatccgtttcaccggttcctttccttggtaaggtacaaggacccaagactatgatactagntgtaattattcttttcaaaattcctgtaaggctgtaactgttacaaccctggcaggttaacaattggaataggttcaattgcaacagtggaggaactctntgtgagaagtgctgccatttttttgatttgatgagaatgtttgcagctgcaaaccctgttcgtgtgatggcttctggagccattgatgtcaccacaaggatgaaatttatgatgggaaggtcaggttaattgactacaagatcgctgatttataagctggatggcattttcactcatgtgattatnntataagcttat

SEQ ID NO: 9484 - DNA, 66 bp, Oryza sativa
caatggtagtgaaaatgttctgttcctacatgcataagcacgtttcagaaaccttcaagtttataa

SEQ ID NO: 9485 - DNA, 322 bp, Oryza sativa
  unsure (1)..(322): unsure at all n locations
gcttcatggatggatcgattgttcatagttgatttcaggggcactnntggttgccttcctgggtttcatgttgtgtacaagggcattcttccttgntcccgtatgtaccggatggaacacacaggcacctctcgcagcagtagttgcagtatgtcatgcacaccgtcgtgtgagatgtggccgagcaacggtagctgcatttgcctgggcactctacacatagcacaaagagaaacacaatgtaaatctaattangggtagttacttcttgacattntgttaaaaaagaaagatttcttgaacacacaagaaaaatacacgt

SEQ ID NO: 9486 - DNA, 423 bp, Oryza sativa
  unsure (1)..(423): unsure at all n locations
tagagtcaccaaccccttgatctagcaaagagctaaacctagatgagttntgataactaaaccgcctagcggagccgatttctagatagctactcgtctcgtgggcaaaacggaaggttttcaggacaaacctgcaaagagatgtcgcactctcgcagcggcagcggacggtttacggcgcanaccgacaaagatggacaaactaagagaaaactaaaagcaatatgaaaaacgattcgatcgattgattgtagattggtttcttacaatgaaccggccatgtcccttatataggggttggtcttaccctctacaggccctcctccacgttcaactcggggtagaaaccaaaggaaacccgaaacatgtcttcctgagcaaggaaacttcgagacccgacgaaacagagtcggactcggacct

SEQ ID NO: 9487 - DNA, 131 bp, Oryza sativa
  unsure (1)..(131): unsure at all n locations
ctctgatangtgcattttagatcacgctatcgctgaacttatgtgtatagataaaggctgttagaattacgtacgcagagccactgaatatctgctgctcctgctgctacaggacgtatgcattgtaacga

SEQ ID NO: 9488 - DNA, 473 bp, Oryza sativa
actaagcttagatatgaaaagagttgttggagccagcttctgagaatctgaataagcagtgaaaccttctggataaagctccaactgtgttgagacctgcgttagggaaccagttggcaacgacaaaacggttgatgagacaagactaagagtagattcgtaataatgtgagcccttccttgtagtatgaaaggaaggggaccagatacggatgaagggttggattcttttagatcagtactctcactttgtagcctgtaaatgtctcctttgtacttagctgatctagggaagacaacgaacaccaacacaggagtagggtattacacctccgggtgccccgaatctgtataaactccagtctccctctcctcgcggggtggccgggccccgcaaatccatcacgaacgcagataccctgcacctctcgccgactaacaccctggtcggatcttcactctagagaatgggtc

SEQ ID NO: 9489 - DNA, 160 bp, Oryza sativa
ttgactacatcctcatgataatcttttttatttgcaattggccacattaaagtgataaaacttcatgtctgaaaaataggacttataatatggtattaattagttataagtgcttttactgaacagattaattaaacaacctgagctaagacactctcaa

SEQ ID NO: 9490 - DNA, 491 bp, Oryza sativa
  unsure (1)..(491): unsure at all n locations
gctctaccttactaggcaggaaaggatgcttcaggaatatgatgatctcccncattcatctctgggacatgatgttcttcattcattgacatttctactgaactatttgagatcttgacaccatcatccttctgaggaaaagtaaggcagtttaaatcagattcccagtcagctaactgtatggattagatntagcatgaaaccaagcaatttggagaagcatatatgccataaatctactaagacatttaagttatcctactntattagcatgcagaattaatctacaaccaagcaaggcagttgcgagactgtgtaaatgttaggagactactangaaagaaaaatcaatcttccttcttaccgtcttcttgctggatgaagaagtctctccactaccactttctgaaacctgcatcagtcaactcattagacgacaatactacttgttaggcagcanagtgtcaaaagaaaccattgcaacanactta

SEQ ID NO: 9491 - DNA, 435 bp, Oryza sativa
  unsure (1)..(435): unsure at all n locations
aatgctaccttcgaatgcgggttgagttcttgtctgcttcgctcgcgnacaaaattgtcctcctcgtgcttggctcactttggagatttcactccctccctgctgtgcaaatgtgatgtggtatctagaagggccattttattaaggacaaattaaaaaaaccaacggcagctgtgcacggaatggaatttaatttcatacaaatgtatattctatacacagattgaagactgaagatttcanaggatacgtatacggtcagtctctgacttgaaaagatatataaaggttatacggaatacactgtagctatggaagaactaatagacaggaggtggtccatgacaatggattcagagagattntgaactagacaagacaactgcagatcacaaattcttatgcgtcttttcaaaaaagaatgatagataaagt

SEQ ID NO: 9492 - DNA, 501 bp, Oryza sativa
  unsure (1)..(501): unsure at all n locations
attcctgcgtggtggacatgctacacagattctacatctctttcttccattgctngcagccatgcttgacattcgcaaaacccattgggtggatcagtntaaagctaatatactatatactaacactctatctgaataggatatcaagggatctattaacgtacacctatgcaaattcatgaggagttgcattgaccgcctcacttttctacgtttctgccaccatcgcaatctcgaggtcacaattgctcttggttcccatccatcgcaaccatttgttctgaacttagatgcttgtcccctgagaaatccncttctggcttcacttattgattgctaatagtatggtacattgactatcctatttgattcctatgaacattgatgctcactgtttgatacatttcactgccatatcatttgttaacataaagcatgcgcatttaagctaggtgcatgtaataacnctnggngctacttaatggatctatnntcctttac

SEQ ID NO: 9493 - DNA, 200 bp, Oryza sativa
  unsure (1)..(200): unsure at all n locations
taacaaggtgcgccggtatacactatgtacgatgtactatcgagcttctttntttttttacacatagcctactgagtaagagaatgttacattcatattttcaattgttctatgaaagatcctttgttggtccctaaactatcgtaggagtacaattattaccctaatgaactgaacatatgaatatgaacttgatgtgc

SEQ ID NO: 9494 - DNA, 297 bp, Oryza sativa
  unsure (1)..(297): unsure at all n locations
cgactgctgcagcacaagcatggcagatgattgaacatatttattaatttatcctcacgctagaataaagtccgcaacacaagccgtgaagatattgaatattgaccttctaatagaagtgtttcgctgnggtatacaaatatcatgtcaccacaatctcgcgactaatcgactatcgcattctggtgcctttcgntngactagagtggtcctgctgtatatgtggaggtaccattatactgagcttctgtatacgacatatctgcatgatataccattttatgtgtatccacatat

SEQ ID NO: 9495 - DNA, 251 bp, Oryza sativa
  unsure (1)..(251): unsure at all n locations
tgcagtacaagagggataacttgaacgtaaagcagagacaaatcgatacagagcaaagacatgggaacagagcaacaggacattagtgcagtacacattgacgatgcacggatgcacgatgcaatacctgaggacagcgcctgttgtacagcccactcgcgagtgaagcggtttgccgatgcattanctcggcggcgcaaccagctcggcctcgcactccacaaccttgcgggagcgcacgtcagatcgag

SEQ ID NO: 9496 - DNA, 353 bp, Oryza sativa
  unsure (1)..(353): unsure at all n locations
ttagcatattttgaatcttttcacagggtgttcttccagacggcaacgaaatcgcagtgaagaggctgtcaaagagctcaacacagggagttcaagagctgaagaatgagcttgctcttggcgccaagctgaggcacaagaacctcgtaagctttgtaggcgtctgcctggagcaacacgagaggctgcttgtctacgagttcgttcctaaccggagccttgacctgatcctctttggtaacaatactactactaatngagtctacattaccaattctcntctctgttntctctgcaaagatngatgtcatatcatcgcattgatctattaattaacaccttctctttgatca

SEQ ID NO: 9497 - DNA, 212 bp, Oryza sativa
ctttcaagatctacgcacttatcattaaatgtgttgacaaaatgcttagtgaccgaatcctttaattaagtgtcccacatgttaattaatctacagcgatcgttaaaaaacatagtctctgtcaaaataaaatttatattagaagtggtgttttaaataaagagggagagtctctgttatggctaatctcctttaaatagtatctattgtca

SEQ ID NO: 9498 - DNA, 472 bp, Oryza sativa
  unsure (1)..(472): unsure at all n locations
gacaacatattatggcgtacgaccagagtacaataatgcacatggaagtaattcaggtacaaccaaagcaaaccagtacacacgggaatatgatgaagcaaaggaaataagaagaaatatacaagcttatagttgagtcaaatatataatcataaatatgcaattcttccatatagttccaaccagaagtaccatggtatatgtgtcctttatcccctttatgacttttcctatagaatcacaatgatgtatgacattaatgcgatatatatgtctaaagaaggggggccttttaagatcatgtgccactaaacatggatacacnnctcagcacataaggaacccagcatgcatatggataggactaccaagttcgaaccggagatgaccaagactgctcagatgtttcctaccatgatatccagacataagcctacatcagcctcatcaaagtgatatcttgagtaaccct

SEQ ID NO: 9499 - DNA, 385 bp, Oryza sativa
  unsure (1)..(385): unsure at all n locations
gtgacaatggttcccaatttaagaataccaatatcgaggactattgtgatgatcttggtatcaaacacgaactttccgctacctactcacctcaacaaaatggtgtagtggaaaggtaaaatcgtgcatcgattgagatggcaaggactatgctagatgaatatggtgtttccgattccttttggcggaagccataacactgcttgcctgaaccaataggctttattgcatcgtctcttgaaaagaacttctatgagctaattgtggaggaaccaaatgtgcctatttcgagttttggtgaagtgtatattaccgaaggtgtagactaccaatttgaagcgtggatgaaggttttctagtatcctanatacaggctccggctcac

SEQ ID NO: 9500 - DNA, 208 bp, Oryza sativa
tgatcggagtctttacgatggacgtgacattctgatctctatgcggcctcaagatcaacaggatccaacaaaaggaatctatccttttctgccgtaaaaagcttaccaacaaaagtggacatattcttgacacttttgtctagaccctgagagaacgcgttggtttatatattctcagattagagcagatatacattggtttacgtct

SEQ ID NO: 9501 - DNA, 370 bp, Oryza sativa
  unsure (1)..(370): unsure at all n locations
gatagagncgaaccgcaattgcaaaggtaatcactactatgccagcccaaatcatgatcttcaccaacttggatttggttctctcgcgaaaatcgcgagttgcagagatgagaaccatgaaaagcaagatcccgaataagaaaacagaaaccgaggaaaccacaagagtgaagactagtagagtctcgtcttttgtcattctttgctcctttntcactcaatgattcattcgaatttcccgaccaaaaattctatatgtctattcataggggcctcgtgctagtgctacaagatctagtgcactggaactcgtggtatggacccgaatctttatatggaacattgctttcaagtaaaacccccgtatatg

SEQ ID NO: 9502 - DNA, 448 bp, Oryza sativa
  unsure (1)..(448): unsure at all n locations
actcagcttcttcttcttgtactctggtgctgaaggtgggcaatatttgtggcctctagcttctcagaagatatttnttcctgtctgtccaatagtttcatgcgcttgtcattgttttcctcctggaatntgctatatctatcaaatttgtctaactgaataggagactcctttgagtgaccatcatcactactgcccaaaccatttgacttgatttttgcatctagagctgcctttntagcggccttctgacccattggtcgctttggcatctcatcaaaagtgtcatcagcttcctcagagtctccttccaagtgaaatgatttccttntacgtgcattcctcatgttttcattgtatgttttccactttgagacttctcggcatattttccaaacctccattagcacaaagggtcctagctttgcctctttattgtcatccacat

SEQ ID NO: 9503 - DNA, 380 bp, Oryza sativa
  unsure (1)..(380): unsure at all n locations
tgtcctcctcaactccggtcaccgtcgccatttgccgattccttcttctccggtgagtcccaatccgattccatgcattagtagcatccctgagatctcactaatctcatggacacacatgcacgccagatnttggagtcgtttgagccgtcgccgttcacctggaggttcttgccgccgtcaagccattgaacaagccgccaacaccaactaagcttcgccatccctgtccaacagcacggtgagcacccaggaacccttagcaacgcatgcatgcacttcattcacctagaagcggcctctaaatcaacaagcgtcgtcaccccgaggaccgccgccgctcgcgccgacgtcgccatcgattacgaccaccacagctc

SEQ ID NO: 9504 - DNA, 389 bp, Oryza sativa
  unsure (1)..(389): unsure at all n locations
gagggggaagangctgtctatccactctcttctctccacggnggggacgccaccatagagggagaatagagggtgggtgacgaggacgacaagtggggaaatcttggggcggagggagagggggaagaggcctgctatcgagaaatagagggggtgggcaggggagactgatagtatggtatggattatataaggacgcgagtggatatgagtgtcagttgatccgccttgtgtttttgtgtcggcgtaaaaccaatacctttaatatattataggtgttgatataataatatataggtgtcgattcttctagaaaaatcgacacttataatattggtgctatcttttctatagaactgcacctatagtcgttgatggtactcgttcta

SEQ ID NO: 9505 - DNA, 388 bp, Oryza sativa
  unsure (1)..(388): unsure at all n locations
cgacatctactacctacttcaacaacataccttagtttaagatgggacactagtttcctcgctttacctttcttcgctgccagcaacataactcacgatcgtgatcacttcctgagtgctcacacacttactggcctccacagcagccccctttttggattgaaacaatgatttctntggtcgatctgacctctcagctggaaagcccttcntcaaagggctagttacttcatcctcaccctgcgtgcctttctcctttcctttcgagccatctgtaatctccttttgccaggaatgagcgtcactacccttacaactgctggcacccgatttcctttgcactcggaatcgactgccgctagttctatcactgcttccaccctcccat

SEQ ID NO: 9506 - DNA, 226 bp, Oryza sativa
cggccctgttccatcggtcgacagctctcatgtgtgtggctcacagtaaacaatggtatctacagttgcgtggaacccagtcatgtgtttggggttagaatgtttcccaaacctctaagctctgacgctgtaatccctaacacgctactctggcattgcatagactgcttctctcacctttttgctctgtactacaggtgctgaaacacattaggtcggaagatga

SEQ ID NO: 9507 - DNA, 505 bp, Oryza sativa
  unsure (1)..(505): unsure at all n locations
ccttgaaactcagctgagctggccacggtcagggcgtctcatgtagggatgtttggagtggagaagaggctctcgaggccgacgccgagcttgagggcgctgntgccggngtagctctggatctgcttcatcttggcgacgtacttgctgggcaccgggttggggtcaccgggctgctccagcgtgttgaactcgttcatgaagaggatggcgttcttgtccagcgcgcccacctggttgtagatcatcggcgacgcgttcggccccagcttggtctcgaagaagttgaagtgcaagttctcgttcaccacgtcccagtggatcaccttcccggcgtaccgcgtcaccaccgacttgagccgcttctgcatcgccgccttcagctggtccaggttcagcggcgtcacccacttcatctgcgagttctggtcgtcccagaatacgttgtgtcccctaatctttcaatttgtacaaccaacanannaaaaataatacttcctctctt

SEQ ID NO: 9508 - DNA, 192 bp, Oryza sativa
taaaggtcatacggattaaagttgatttataagataatctgaaacttttatcggtgaacgaatatcataagcttatcttttatgtttttggtgatgacaatatctatataaaatctagctgcaaacaatataactttagatcttgatacaaaacacctaacacgtggaaaacagactttacatctagacgac

SEQ ID NO: 9509 - DNA, 230 bp, Oryza sativa
ctgatactacgatgatgacagaatacatctgtagaatattttgatatgaatgaagataggaacaaatgatgcaaacgtaaggcgttccccgtgtttgtcttgctcaaatgtaccaacgatacatgtgacaaactgctaagtagcactgctaggtacagcctcttttcacacctctatttgacaacatcctgagaaaacgatgctaagcgcactctgctgaaaagatggtc

SEQ ID NO: 9510 - DNA, 425 bp, Oryza sativa
  unsure (1)..(425): unsure at all n locations
tatcgncaacttgtgatgcgaactcactcgcanagggtggcccaatcttcacgacaatangttngaagcanatggcaccggtgtaaactgtgcaccacgagggtactagctgcgagccgatgtgaccataactacaattgatacaagcgttgctcacatcatggatcaacaagaagccatcacgatcaagtccttcaagcgttggaatccgattggcccacctactatattgctgacttgaaaaggccgccaaatttgcattcgagctccattntcggcctgtgagtacttaatggaagatctcggagtcctctttccaacggatgcagcctcatctccaatttccatctgaattggccacaatcacataaacaagatgttgtgtcacctacaatgagcctatagactacttcatctgggaccct

SEQ ID NO: 9511 - DNA, 64 bp, Oryza sativa
gctggggaaatgggtagcaaaggagaatgtaactttttttcaaaccacctctacgaagacactt

SEQ ID NO: 9512 - DNA, 112 bp, Oryza sativa
tacgacttaaatataattttacatataagataaatatatattcactaatcacattggtaactagactatatatcggctataacattacatttaaaaatttaaaatatgatct

SEQ ID NO: 9513 - DNA, 439 bp, Oryza sativa
  unsure (1)..(439): unsure at all n locations
atcatcgatcatcaagtgttcattnnttcagagttcttttttagaaagattggagaggccttccccaatcttcattaacgccatgacactggtttccacaaaatttgcagacatgaagaaacatttaaggccaaaataacacaggttgatcatcgagcacgcaatctcagatcatataaacaaaagttacccatctatcctctagttacaagaattagaagctntagaagcctgagtccccaaacccacttttattcccttaacaatgagttatgtaaaacagcccacattgatccaatcatnnaaacttagaatattatgtctatttgaaaatttgtcaaggtgttcttgaagcaaagcaacattcttgcttttcagatagtccatagtcctgagtgtttcataactgggatggaatgattccttagaacaacttccc

SEQ ID NO: 9514 - DNA, 232 bp, Oryza sativa
ttgtgtattctctcaatttgaataacgtggaacttgcgataagattgctagctcgtacaacttcaactgctactagttgtatctacatgggagccactcacctttgttcggagctacggccaacaacccacgttccctgtggcgccgcgacgcttacagacagaacttgcacaacacaagtctgccccaatccccgtggggtatactataagtgtaatgacatcaagtagtt

SEQ ID NO: 9515 - DNA, 466 bp, Oryza sativa
  unsure (1)..(466): unsure at all n locations
gctcgtccagaaagggctacaanaataaacttggttgtctattatgagttgctactatgctgtatatctcaaagatacagatgncaggtatgtgtactctctctcaaaccaaataagtttggcattatggcttacccttacacctaattcccgcgagacactgcctttccttgtcttgagcggntgagagacagaacaacaattagagcgctagtcacccaatctttatttaacttttatcttggaagtttcanatgatttttcaaaagaaatctaagttcctcaaatgattctctcgatcactcagagtgtttgaatatgaattcctcaccaaatttgcctttttgaatcctactctaaggtttgatatatggagctnggtanggatcaaacatggcatacttgtattcacatttattactaagtcaaaaacttggactaaaatagatgactaatcatactcaag

SEQ ID NO: 9516 - DNA, 200 bp, Oryza sativa
ttctactagtcttctgttatgacgaataaagaactgccgaacctaacctatgtagatccatgcattggtgagaagactaacctctactctttgacatacgaaacctgaggtgttgaccaaaatctggacacgaccttatgcttgaggactctgcaactgatctccgaggacactccaatgtgtccaccaaagacttgagt

SEQ ID NO: 9517 - DNA, 123 bp, Oryza sativa
ggacggatgactatgtctaccggtgtccctactactgtgcctcctaccccagcattagctgccttgataaacctacttataacggtggtggcagcaacagctgggaaaggcctcagcagcagc

SEQ ID NO: 9518 - DNA, 66 bp, Oryza sativa
gccttatggcgaagtggctgctatgcaacgcctaaagacaggacgctgtggctcttgtgcgactgc

SEQ ID NO: 9519 - DNA, 499 bp, Oryza sativa
  unsure (1)..(499): unsure at all n locations
gctatccaatgagctagattgaatgaagcaaagtatgtagataatatatcgacatggngcgaaaagaatatatctgatcattaattntctaataatatatgaataaagaaacacataatatatgaaaatacattcatgataaatntggtaatgtcattttaacatatcagtacttttaaacttaaagcanatagttaatatggacacaaattagtttggttttcatctaatctaagtgagaaagaaaaagaatggaaaaagtagtanggtggggatacgtacgtacacgtacatatgtgggggttttcaagaccgagcgatgtggnggttttcaagagataataaattgatttggtattattttagaaatatttaatagttgaaaaataatgtgtctaccagattaaataaaaaccgatgggctattnngtttgttttcttagaaattttaggatntaatanagcgtcacgtggtgatcaaggagcgtttgtagaaatg

SEQ ID NO: 9520 - DNA, 485 bp, Oryza sativa
  unsure (1)..(485): unsure at all n locations
tcttctccacactgaattcctctactgcagcataatccagcaaaacagaacagcacatggtttcttttactgcagtgacatgaaactcagatgatccaatcccatgctgatatttccagtaaaccaatcaaaaatacaccagctattccaaataatctggcctatgcacataagactagctataagccaaattataatgcaaacaccaacatgatccgttcttaaacgcagcctacgataaatgctcgcgtgatgcatgggctaccatacttgtttatcctaacattgttaatcagacctcanaagtcatcgtcttgtcaatcaattttggtgagaagtaggaattgcacggtttggagaaagtaactcatgattttntttcaaggaaacatagaatcgtcaactggcttggatcgacaaatatcccgtggcacgacctaaagtagattaatatcagtactactatgtttnttttccaatcacgt

SEQ ID NO: 9521 - DNA, 415 bp, Oryza sativa
  unsure (1)..(415): unsure at all n locations
aactcagctgcacctcagcgttanggctcanggatttacatggttgtccttatgacagggacatttacatgggtatgcagggtcatttgcacatatgggcctctaatgggctgataggctgggcctagtctatggcaaacgggcctaaaagtctgggggaggcctgatgggccttcttgatgccgaactcgtcatagcgaggtcnttgtagttcgcccgagatgccttcgtctgagatgcctttactgtcggagtaccgacgcggctatctagccttcgccatctatccttatggctttcgccatagggcttcgcctgaatggtcttgacgtctttagctagaatccttactggtactatggtttcngcaggtccggccgaatggcttcatggcgtgcctccaacaagcccctca

SEQ ID NO: 9522 - DNA, 273 bp, Oryza sativa
gcacgcgctcagctgccctatggcttacgtgaagacagtgcgatttttttttctttttggaaaccacttctcggatggtgccaggttgtatatgtggagtcagtgctgtggcattatctgtgaggccgtctgttgtacaactgaattgtgatgctacccaaataagaattattttggtgtgaagtcagcatgaggtctgcgtagcataagattccgcattttattacgtgaagcggagttatgcatagtaaacaatttagacattattgtcta

SEQ ID NO: 9523 - DNA, 454 bp, Oryza sativa
  unsure (1)..(454): unsure at all n locations
ttggaactccttgatacatcaagggcttgtgtaatcaattagtggcacagcttatttggtgtgcttttacttgattggtaagttttgatgccaacttatgacagtgaaggtgtatgagtacggtgctcatcttgatttgccccaatttacatttggaagatgtctaattggcttaaaagtcttgttctttgtgtagttgatggatgcttctctccatcatgcgctaaaagtgaaatcaaactggaaatacagggatcagatgcatcacagctgcatcttcagatagtgaaatcatgtgctgggaacgaaacttannggccctgttgattcagtttagaattattataatctggattattatgagtaagatgaaactggtagctgaaacacaccagtagattattatgctagattattataatctatcagccatattactataatataataatct

SEQ ID NO: 9524 - DNA, 362 bp, Oryza sativa
tgatgcgtatggtatgtgacgaacgctgcaacaatgttgtctgccaatgcattcccaattacgaattgcatttcgcagtatcttttgcgatccattttacattaagcccttacattatattaccatacaaataacaatcacaaaccataatattactgacatgacaaaattatcccgaaattatatctcacgcattgacaagtgcacagaattgtacttctgagaacttaaatatgtaaatgttttgacgttgtcttgaatagtagccctgctaggtacttgtgaaaataaagtttggaaaacatctccttggctttaggcattacgtgtcggccaattcctataaaagtaacattctcaca

SEQ ID NO: 9525 - DNA, 325 bp, Oryza sativa
  unsure (1)..(325): unsure at all n locations
ggataacaagaggggtgcgcgcatttcgcaagcgaattgagcccgagtggatgctggagtttcgtctaaacgcctatcgcgcatggctggagatggaagaaccgcactggttgaaagcgcactacgacaagctgaantatcaggattacagctactactcagcaccatcgtgcggtaattgtgacgacacttgcgcgtctgaacctggcgcggngcagcaaactggcgcgaacgcctttttaagtaaagaggtggaggcggcgtttgagcagctgggcgttcccgtgcgggaaggcaaagaggtggcggtggatgcattttcgac

SEQ ID NO: 9526 - DNA, 279 bp, Oryza sativa
acatactgatgctgacatgataccacatcatgtatgtctacatagcataactgaattactgatggctattaccaagatcagtatcctgtacattgctcatagtctctgggcaagatggtaaccatctgaatggacagattatcatcatcatggacagtataatactatgtgtatcctgagactgtacatgggttctctatgcaaaatgcctgctgctgttctcagaaatgcctaacaaatcgtatgacattcctatttgctaatgacaatttttttttt

SEQ ID NO: 9527 - DNA, 310 bp, Oryza sativa
gcttatagatcgtctctttgtgtggactgattggctctgtttagtgtctgtcttccagaaagggcatctctttggttctacagcggttgtgtctcagtctggttgtgttgttgtatgcataacgaagtctttatggtactgatgaaaagaagaaaaatttgaagatcggatgtcttacgagtaattgggcatgatgactgttactactctctgtcttttttaaatgacggtgtgtctttcaaaagcattctttgtttgatgcagtggttctagtctggtgtgtgtatgctgcagaatcttctctacagat

SEQ ID NO: 9528 - DNA, 206 bp, Oryza sativa
atcttgcattgctccacctgctcccgctactggcgactcttaggacggtgtcgtttcgggcaatgcactcggacttctgacccgccaccgagagatttccgatctattagagctgcgcctctcgcgtcttttcaatcatacacttcaagtggactccgctcttattactttcgggttgctagcgctgtgctctcattcttttatta

SEQ ID NO: 9529 - DNA, 433 bp, Oryza sativa
  unsure (1)..(433): unsure at all n locations
gctgagctgtgcgtgctgggtactactactagctaggcagagcttgattaagttataataatttagacctttatctctccagctaaatatatagggatgagtgctatttaatttcttcttgtgctctgttatatatatatgtgagtatctctgacctgatcatgatcatcgtcgncatatactcatatatctctactcgaactcgcggtatgtatggttggtgattcgatcagctgtggtgaactgattgacccgtacaaagatgcaaactggattgtatctgcgttagagaatgggggataattgagacttgatgggtgtgctaaaggctctatttcccctttggatgatgattattgaaacattgagtagaaaaaaaaaactggaaatgatgcacggttgtgatcgtatttacagttatggaattataaaa

SEQ ID NO: 9530 - DNA, 386 bp, Oryza sativa
  unsure (1)..(386): unsure at all n locations
gcatgcatacatcatggtttttggtcatatacatagtaaacatactacaagttaagtgctcatacgatctttagaaacacaaatgcactgcttctaaagcataccaagagattgatatgtaactacacactgctacatacacgatgcacacactaactgcatgcaatttggttnttgagaagcattgtggcaccactgctcattaccatgaaagtttgtttacctatattccgttttcctggatgcttcaaacttaatcaaaggaattactcatgggttatgcncagaatgcatgcgatagcatttctacatagcggaggcagatggataacatatgagatgcctatatgcaagcttatagctgctacatatatatatatatatga

SEQ ID NO: 9531 - DNA, 325 bp, Oryza sativa
tctctgaaggagccatatgtggtgttctttacagcgacaagttttttttctgaaaatagagacctcttatcgaatagctcaaaaccgaacatgacatgcactgtgaatatcagtggacagatagaggaccatcctgatcttctcaagtactcttgcctagtggaatgcaggtgatgacatacctaacctctctagacatcatcaaacacacgttctatatacctgtgaacgtgatccatccatgccccagcagtgagatttttcacaattggtgcattatgtccaagcaaatacattgttggtggtctagagtctggagttctaa

SEQ ID NO: 9532 - DNA, 437 bp, Oryza sativa
  unsure (1)..(437): unsure at all n locations
gcatcgactacaccgacctaacaatgcatgtcctattgacccttacccnctgcctcgcatagatcagattgtcgactccacagcggggtgcgaccttttgtgttttctagatgcatactctagttaccatcagattcgcatggctagggaggatgaggaaaaaactgcattcattacccccataggaacttattgttatacgacaatgcccttcgggttaaagaatgcaggtcctacttttcaatgtactactcgaatttctttgggtagccaaataggacgtaatgttgaggcttatgtcgatgacttgattgtaaagacgcgcaaccaagagaccttactctcggatctagcggaaacttttgagagtctccgctccgcccgcataaaactgaaccccgataagtgcgtgttcggtgtacctgcgggcaagcttc

SEQ ID NO: 9533 - DNA, 226 bp, Oryza sativa
  unsure (1)..(226): unsure at all n locations
tgatacatggttcgggtctattatatcgagatcangaatgtattgcgacatatattatcttacaacttaatcctaatttctgaactttccaactatttagaatatgaatctattataatcatgctatcaagatatttatgcgatcactagacttatgattaagctttgaacatatatcgatcgtgatacttatggtgcttgcgacattagcgagtcttgtttgata

SEQ ID NO: 9534 - DNA, 499 bp, Oryza sativa
  unsure (1)..(499): unsure at all n locations
ngatgtcatcttgcagaatactgaattctgtctctctatgacctttcagatagacctanatcggctcaatattttctttagagatgtcggcaaccctacagcgtccaccgctgttatgcggaaccgttccttatggattttgttccctgtcctaggagtacgtgcccttgaggacccactagttgtcgtcgacattggttcgcctcgctgagacatcgtctactttttttcanaataacaaaaatacacaatntagtgctacaatctattacaatgaattgaatgtcacttataaataaatgaagcatataaataaactaaattgcacatctcacagtaatagaatgaattgaatgtcacatataaataaattaaacatatcatcaaatcctaanatcataaattcacctcataccatctattcatccacatatcatgcatctatcactaaattcattaatgcaccacatttcatctatttatcatcatgtcatcaatc

SEQ ID NO: 9535 - DNA, 438 bp, Oryza sativa
  unsure (1)..(438): unsure at all n locations
atattatacttattntaattgttgtgcatactacagctagatgcactgatcggttcaattatgcttttggttggagtgtgtgtgtgtgtgtgtatatatatatatcaacttgacaagaatatataaacccagtggcagtcttgaaattagcttagctggaccatatacgtgttatggcaaatataatagagtatgcattnttatttcgcttctgagatatacgtacgtgtacaactactggactccgtctgaaccaatttgtccatggtcttgggtcttgactgataaaagaaaaaactatatacatatataaatacacaattgaattactnnttgaaaggatatatntaagttagaaatcttgtactccctncgtttcaggttataagacgttttgactnttgtcaaagttacactgctntaagtttgatcaagttt

SEQ ID NO: 9536 - DNA, 454 bp, Oryza sativa
  unsure (1)..(454): unsure at all n locations
gtgtgaacacctgctgatccatccatagnattatgaatatgttgtgtagacgcaaaagtagaagtagcatgatattgttgacaactggctattttagagccaactttcttactagaataagttttacaagcatcttctaccatatttttatcaaaataagcactaaaagatgcatctatacaatgatcaatatgttttagaatggcaagacatggatcangcgaattggaggttaccttatcgtcaaatacgggtttgtaaagagaaccaggcttgagaaccacaccttgacgggtcctagtgcacgtcttcatcaatatctcctggctatacgccttgagatgttcctatatgggcttgcgtgctccctcatcaagatcgtccaatgtgaccatgtcgatctcgttcccgctcgccatggttgatgaagaaattcttgataatttggccacat

SEQ ID NO: 9537 - DNA, 210 bp, Oryza sativa
gatatttgtgtattgatctgcactgagcggcacagcactgatcaaatggacggcccatgtggtaaagagacagagtttttaatgggtttgccccaatatgcataacgcatataaattagcagtctttgttgtgctcctgtaaacaattgtgtaagcaaagagttgtatttttgtcttgcaaaacttcgtagttggcgtgagcgatttttg

SEQ ID NO: 9538 - DNA, 396 bp, Oryza sativa
  unsure (1)..(396): unsure at all n locations
aacaaatttcgcccagtaattgggaaaaaaatgaaatggaacatataagatacgagttaacaatacataatgcagctgataggatgtgaaaaatagaaaaatcacactctacgattcccttatggaatgaaatgctttagtactggagtctggactattctggtgtactgatgtcatatatatcatttatgcatacaatanaagctagtcatggataattgtgtaattaattctaaccacctggtggtgaaaagagttatcacaccctataagaagaggcagttgtagaaatacaggaatacttgggtagttagactacctggattctcttcgattaccctcgtccctcatgatcatagacgcaagatgaattaacactacttaaatggcatctta

SEQ ID NO: 9539 - DNA, 315 bp, Oryza sativa
  unsure (1)..(315): unsure at all n locations
tttcacacttccttgacattactggtctcctcacacnattataaaaccacaaaaatctctcattaatgcttgtgaggcgagaaggtcacctaataattcaactcatttcttctaacacatcactaggaatgttctggcgtgcatctgaatgaacatcagcttaattgcatataattgaggtgcaatgataaaagcgtatatatttatcttgttcccagcattttagagaacccatctatctcagaataaatactgctctacttgtaaagccctagaacataagagaaggtaaaacaaccttctcggcagttatag

SEQ ID NO: 9540 - DNA, 329 bp, Oryza sativa
  unsure (1)..(329): unsure at all n locations
ataaccggttctcaacggtggtattaagtattaataatgcttatatgattattaaatctccttaccggatgagatttttcctctataattcttcgctcggaattacagaatctatatcaggaaattctatcaataagtcttcacgtgtacacaccatagacaccaattaatanatatcacagaaagttatatgaaaatgcatacataaacagtattaatattatatctatatgtaaaatatcatcttcaaattcattatacattatacgtagagagaaacaaaatattatgatagatctatagactgtaaactctcttttattttctta

SEQ ID NO: 9541 - DNA, 191 bp, Oryza sativa
acttttgttgtaagaacggtgtcgcatgtgtcttccaccttgtgcttcccttaacacaggctgttgcgtgtcacgtgatgattcctctccaggaggtggttatattcggacctaggaattgtggccctgcggttacatgttacgtagaagtaatctcttgaaatcgtggctgaatatactttcaactgtct

SEQ ID NO: 9542 - DNA, 387 bp, Oryza sativa
  unsure (1)..(387): unsure at all n locations
aaatattacaatgttatcattaatgaaactacctagatatgataagtgttgctacatatttctataaacctggttaacctaaagaagtttgactagaaataaaaaagtcaaaacgacttataatatgacacggagggagtagtgaattagctgagcccaaaacaaacaatctctacattcttgatattcttcgtcgntccatattcgtcattagcttgctgctactgataatcgatacaggttaatgacaggcattacatgatcaacattcaaatttcctatggtccctttggagatctcctcggagtaagagtttcagagatcagcattgtcttgtttcagcaagtctctttggaacctgctgncataatgaaatgtgattgaagt

SEQ ID NO: 9543 - DNA, 211 bp, Oryza sativa
atctttctaaatgccccccgagctcataatcagccgtcacattattaagcagccttgaaaatagtaccacaatgctcaaggcgtccaatatttagacaattgcttacaatgtgtaatcatgtttcgaacctaaaaaaatggtgctctttcagacttgtgtgcatatttccaacatggttatatacgtatatgtctggggttaactcgtggc

SEQ ID NO: 9544 - DNA, 380 bp, Oryza sativa
  unsure (1)..(380): unsure at all n locations
aagatgcataactagacacttattactagcattccttaatcatttcagcattagagaaatcatactcgtcaaaatggttgactactgctagctgccaattaacataagcggcggaatcatacttaccatcgaaaactggcaaaatagagtctacccttgcgagatcattatcatatacctcatcagcatcatgctgatcactcctcatgtcgcgacgaagatgtcgatatggagcacaaacatccccaattgtctttgcgatccctgccattgttagtagaaaacaagaaacatgcacaaaaatatgtacgcttctatcaactacttggtagtggtagctcgaatatcacacacactcaagctnttaaccaagctcttac

SEQ ID NO: 9545 - DNA, 173 bp, Oryza sativa
cggacgtatgaatgtggtactcgggaattatgataagtaaagagatctaccatcgcatcaaaatagtatggtgcaaaacgttatcagggtgagagaatggagatcgcaatggggtgtgtgcagggaagagcagaaatcccattgtgggacgcagcaccaccccagagtgacat

SEQ ID NO: 9546 - DNA, 185 bp, Oryza sativa
taagtttgtgtgtaaaggagacactcacaaagtgtggtgtgactttgggaattcttggggggtcaatctagactttttaatattctctgatggtttggagcttagcaaaatacttctcctttctgcacgcgtaacgtgtttcagcaatcaaaaaacttttaaatttgaaatcaagttttattttt

SEQ ID NO: 9547 - DNA, 324 bp, Oryza sativa
  unsure (1)..(324): unsure at all n locations
gacattacttatagcttgagaagccttgntagcaatggtgactgtccgtatcgatcaagttcgaccgtcaatattactgaaatagaggagaactaantatgcttgcaatgcatatatatgttacaataataatagtccactaatattacgtatactaaccttttgcagagaataaacataaagtgaacgagagtcagcatatactcagacgataaatcaaatcggcgatgtcgagaatgagacttatgtatgaatgggccaacaactcagatatgacacgatcaattaggccaaaattcacaagtctactgagaggagaagtct

SEQ ID NO: 9548 - DNA, 336 bp, Oryza sativa
  unsure (1)..(336): unsure at all n locations
tgctgtatatctagaatgtacaanatgcatagtatgggtactcttaccagaatcaagttagtcagcacgatggcttacccatacgcctaaaatgtgaggcatcatgcttctcaaataaaaaccaagttcctcaaatgattctctcagtccctcatcggggtataattgtattcctcaccaagatattacnnctttgtncctggtctaaggtcatatatgtggaagttggtaggatcaaatgaggcatacttgaattactaagtcaaaaatctggaccanagaagatagcanaacatacttccgatcaagatcgtgcaagacaacaggcacagtcta

SEQ ID NO: 9549 - DNA, 347 bp, Oryza sativa
acgtaaaatgcatccttcttacttttgtgcccgtctgggaaagtttattggagctgcttctgttcacgctgcatacctgatatgagacctctgagcaggagagattcgcagattatcactattatatatttatgtgccgttcaagacaacctagatatcgtgtggcaaaagcaaaatgttattcctcatgctgtgatagatcctctttgtgagatcccatgtttgcttaagcttatagccagaatgaaattgacttatcaacactatttttgattatcctaaggaaattcgcgctctcggacaccttatttagttaaaagccgtttcactcatcaaggttcaatatt

SEQ ID NO: 9550 - DNA, 296 bp, Oryza sativa
attctgctctctacatactgatgagtattgcttcgaacacatccattgtatgtaaatctgcatattgaacatatactcgcaggacacgctacatctttactggttatgaatgtctactgtatgaggaaaccagtggtactacaactaacaccagctcgaaactgcatgaacaaccgatcgacacataagctaagatgcttctgcatcttgactgtttagaattcgagcgcctaagagaagttctgatgtctcatgctatattctttccatacatgctgatcaaagaatatcagcac

SEQ ID NO: 9551 - DNA, 417 bp, Oryza sativa
  unsure (1)..(417): unsure at all n locations
gatgctgtacccgattatgattctaagccgatgacgtctttgccgattaccaaatttcactgttaacaatattttagcaaagttatattaaattntctaagcaatatgaatattccaatactagattataaatttacagcgttccgtattataaaccggagatactattaacttgggtttaacgtggaattggggccttaaagccacgggcgagagatggatggagtcatggtctcatggagacgagaagaggaggagaagccgaaaggaaaaagtacaccgaaggtccctcaacttgtcaccgagtttcgaaaacacccccaaccgtacaaccagatattctgggtgccttaactaattaaaacaagtcaaaatgggtcccttgatgattatgactcccgtattggttacctgacc

SEQ ID NO: 9552 - DNA, 194 bp, Oryza sativa
  unsure (1)..(194): unsure at all n locations
cctctctatctgctacgcgcggtccgctngcgtggacgtgacgcgatcactccctgctctatctcacgctccccatattttcgctcctgccgcgttgctctcctctgcttcgtgagctattctccttctcaaggacacgcgaagcatgcccaatcacgggcactctcatcttggcgatgtgatatgcggtccct

SEQ ID NO: 9553 - DNA, 490 bp, Oryza sativa
  unsure (1)..(490): unsure at all n locations
tggccactcctcgcagctccttgttctgacgtcaacagcgaccatcattcctcccgtcttagcacccctgccagcagcgttgcccaagaggtaaacaacatcatcatcgatgcaactcaaggccgggtaacacaaacgcaggcgacctatggacaaggaagaagttgccccttgaccttgagcctcctccctgtgttcatcaccgctgttgctgagcatgaggctatgaagcaactcgtaatggtgacttgngttggtgtcaagatggacttcacgcgattcagcagtgcagtcacggcgccagtcgtcccatgaagtgaccgggataggcatgctccatgtagtgattctccacgaaccanggtggaacacggagcgtcgccgtgtcggctgaggttctctgctgcggcgaacccattcaaggtatgaagtangatctgcagaggtggaggtggtatggtggtggcaccgtcttggtgaaacgatctca

SEQ ID NO: 9554 - DNA, 493 bp, Oryza sativa
  unsure (1)..(493): unsure at all n locations
actcagcttnacttgtttgtgcacagctgcaattgctggatttatcttcacatctctgcgctcccaatgatcggctaatctctgcctggccttttcaacttgaattgatgttgctaaaggtagacggctggagtaagggcgtctgctaattcatccggaagaagagctcggatgtctgtgaaccttgcccggattggtccacagttggttaccaggttgtgtctaatgatgctcctagccgatgagagatgtcttcaagtgttcttttcacatcgttaggcagaagagctgatgctttgctagtggagtcttcttctgtttcatcaagataatccttgatgtcgaacgagataagatcggctaagacctgcaatgaataatatcatggatgggtaagaatcaagatatgatcggccgatctcaaacttatgtctataanacttactggaatagcaggggcagataatngctcttctttttcacatgatgacta

SEQ ID NO: 9555 - DNA, 403 bp, Oryza sativa
  unsure (1)..(403): unsure at all n locations
cattgggggttaatccacactgtccaggcaaagccttggatcggatggcgctgatgagggaaccaagggcccgcccaatccagcccatttatggcttggggtctctttgacttcttctctccatagacttgtgaatattgtgctattntggtcatgtcaacttggcgttttcagcccacttgtccgcaagtctggttctcgacagcgtccgatttattgatcgtccgtattgctgtcgattcttctccattttgtatntattctctgcaagacggtagtaatcctagtgctagtggaatatatattattntgactcanatatgcatcgcaagcataactagttcttctctatttatgtaacatcgacaggctattaacgaccaacattggtaatatcaatatc

SEQ ID NO: 9556 - DNA, 392 bp, Oryza sativa
  unsure (1)..(392): unsure at all n locations
cttactanacttctcataatctctgtcngtgncctctgcgtcttcaatgtcatgcaacattgtagatagacattgagtgtccaaatctatggtctctccacctaaaggagaaggtacgaacatgccttctcgagctgcggcggngttctctacatcctgatccaacacttcttcagctgcgacatcaggcgcctcttgctctccatgcttggtccagcaggtatatttcttcatgaatccattcattatcaaatgagcatgcacttcatccttgtcttcgatcatctgttcattcttacagtccctacatgggcacaacatgtgcatgctcatnctactttttctgtcattatccgcaaatgtgacaaaatcagtgaccccctctctatact

SEQ ID NO: 9557 - DNA, 449 bp, Oryza sativa
  unsure (1)..(449): unsure at all n locations
cgcacactgctttaacagatgtgcttaagtccctagaagacacatggttccaccacacctggagatatatggcatatgtggtataaaaatccgagtaaataaactcataaaggatttaccaaccgcctgaaaaatgaccacaatatataatcagcctaagccataatattggtcaataaaaatgcacacttacgtggcaaaaagcaatgatattgtatccaatcaattgcttaaaaacccaaacagcaccatgactatataaaaaagtcagcgggccagctatataaagctntactggttgacaccttttaagatgcattgtaccaactcctaaaaagtaagtaactgcggtataaaaggattttaaggtattgtgcacttgatcacgcgcactctggcctaagcaaaaagtgcctaatgtcctataagaacgtgacaggccacacctg

SEQ ID NO: 9558 - DNA, 437 bp, Oryza sativa
  unsure (1)..(437): unsure at all n locations
ctaagctgccgcacaagaattgtcnaagggcggngggattagctgacttgtatgcgccctattggtccggacgcgtcactggcgtgccactggacaaagcagccgcctccctcggtaaaagcagctaattattgccgagtcctcgggtgaaaacaccgaggaattcatcangattttttcttgcatcaatcgcggccattcccacaggaggagggagcagtacggatcatgcaaaggcgaatcttgccatggcggcaatggaaggaatcttnttggtattttcttcctatatgtgttgttatactgttgctgccgggtattgctctcaaaattgacatttttctactgccccaaatgttcaatatccaactgtaaaaaagctacaaatcgggggaccggtgaaagctgaatatacagagaccacggtgacctgtatc

SEQ ID NO: 9559 - DNA, 425 bp, Oryza sativa
  unsure (1)..(425): unsure at all n locations
agctaatctgtntaatatgaagtaattcttctttattttcctgcacgtttgttctagagaagtgtttatgctaaggaccctatatgagaaacctcttcggtttgttctcgtttttagcctgcatcttgcatatgcgtctggagaatctgtatccgtaaagaagtgttcccttcgggtggaaccgcctgtgagacgataaactcttagctagaacaagtgtgacttggaatatctttttaagttgcttctaaaaagacagataggtgaggcatacggtgagtaccgagtaggactttacatcatctgaaacaagcttctgaggctgtctaagtaggattcgccaccctgcaaagatcctaaagttaaaatatctctcgaagtgaacagtattgaacagtaatttgaacagttaactgaatagtaat

SEQ ID NO: 9560 - DNA, 279 bp, Oryza sativa
tgagtgtagtattatatgtccatatgccttataggcttaaatcatcataattttgctggtgtattgctatgcctttacagtcaaggttctgccgatgatctattctatatctggtattacgctgtgcgtggctttaccatttagcatccttagaggaagggtcgtgttaactctaagcttacttcgtttgcaaggttatagcatacttcaggaacatcttcccaggtgtccccatgtgtgtgtcatgccacaagtgcagccaaggatatgagcaccaca

SEQ ID NO: 9561 - DNA, 444 bp, Oryza sativa
  unsure (1)..(444): unsure at all n locations
agctntattaatgtgagtctctgccctttctctggtcgatcgatgacgagcaaacacagcgcgtttcgccacgctttctcccaacccccaactccatcccatgtcggcccatcgtccattcgtcctccagaccgatcacatattcagacccgtcaacttcagcatttcacgcggccactacgacagctgcttcggctgcactttcactcgtatcagcgcgaggggaagaagaacaatccgtggttttccgtttcttcagaggcatggacagatcgtctcacgactcgtacgcgaagatgcttgatgcttcccggaggatcctgtctcgaatattgattggatcactgcgcactggacactcactactacgttaatgctgctgccagggctgcagccaaaggaccacactgtcattggctccgggacaatatgaggccatatatt

SEQ ID NO: 9562 - DNA, 365 bp, Oryza sativa
tagtgtgacatactctgcggataactgatgatcatatctatcatgcgacaagcaagacaatatgctctgctacggtactgcattgcactatcgagactcatgcacgaggtctgaataaaatagaatctctgtgcactcccacttcatacttgccaaggatatctgtgattgaaccctgtgtgccaaacaaacagcgattattatccatgcagcacgtgcgcgagacacagctacgaaagcgcagctatgagacaagagcggcacactgtacatgcaccgatacttgccaaaacgcagaccactcttaccttcagcactccaacgtgcagacctacaaagagatcctttggcagcacatgaacgac

SEQ ID NO: 9563 - DNA, 451 bp, Oryza sativa
  unsure (1)..(451): unsure at all n locations
agcttactgtgcttacaagaagctctgaatgggccggcctagttcagaaaccgattagcccactccaactttcctcccctggtcggctagcggaaacgggagcggagtagtcgaggtggacactctcgttcgaaactctatatttttcatctcgttttccataaccactcgttctaaagtgctaaataatgtaattatttttaaaaagttttgtagataagttaggcggagtttagttccaaattttttctccaaacttccaacttttccatcacatcaaaacttttctacacacataaacttccaaattttcgtcacatcgttccaatttcaaccaaactttcaattttggtgcaaactaaacacacccttactgtgaaaaaatcatatcaacctatcttttaatcttttaattntttagttaatccttaattaatcatatgtcaatata

SEQ ID NO: 9564 - DNA, 439 bp, Oryza sativa
  unsure (1)..(439): unsure at all n locations
aaaatgtgggttatactactaggaacgtataaagaaaagagaattggactgctctccataaaaacttngcataatgacaatctataanaagatgttggatagattcatntttcatgcagaaacaacatctcaaactaccattccaattccgtcttgctagattgtctttagttaacacgacacctttaagcaaataccacataaagatcttaattntaagcggcatcttgagcttccaaattatcttgtttctctcaatatagctattattaattaaagcaagatacattgaccttaccgtgaacataccattctgattaaagttctatttanaacaattagatgagtgattcaattggatatgaacaatagaagcacacaaatcatgccaagaaacaagattctgacccactaatgctctcctataagacacattaag

SEQ ID NO: 9565 - DNA, 459 bp, Oryza sativa
agcttaccaaagtttccaccgagcaaagaattctatgcatgactcaagctagaggaagctaggaggtatgtgtttcccaaccttttattcttcaaggaggatgtaattgagaagaactattagtggattctgaaattctgtcacgtttctgtaggcaaagaaaggttggaggatctgttagacctggaagagagaacgttagaataaatcgtggtaatggctctatccaaccaaaggtgagtacaaagatgtgctccttcttttcctaatttcctgtaaataacttttattccttcttaatacaaagatgcgctccttgcgtattcccaaaaaaaaaaaaaggtgagtacaagaaatttttcttgatgatcattgttatatgcagaaactttgataagatgtgctgctctccaattatacatgctcatgcttgatggaacatcttcatatatttgaccg

SEQ ID NO: 9566 - DNA, 461 bp, Oryza sativa
  unsure (1)..(461): unsure at all n locations
ctgatgctgagaagcagataacgctctcaagttttgttctacatggntcactgcagcactactccagcttggatctggtcataattcagaaatgatccagtcaagaagcagcagttaacaaagtgctaaagcaaccagcgagattgtgatggatgcagtgagagaatcctgtgctagcaggactacagctcatcctctattcactttgcgtggttcacggatgacactggacctcacaacagccagtgggcactccagtgctcagggtgttgtttcagtgtcttccagaatgagggccaacgacaacttaaagcatggagaatgtacgtctgctgatacgagtttacaagattctgctcacagaagtaattcttctgagcttaggcctatgactaacgtaagctcagataatcttgtccgaatttggagaacatgcatagataattgtcactccaagacat

SEQ ID NO: 9567 - DNA, 439 bp, Oryza sativa
  unsure (1)..(439): unsure at all n locations
agcttaacatgcgaagatgccacattatcttctactaacaagataccacatcatcatccactaattaacaagatgccacatcatcatccactaacaatcatcacatttaaacatcatgcaaaaatgctatatctttatagtttttataatttaagagcttttcaaatacaaacatgtgaaattatcatccaacataattcacataatgtttcaatggatatctttattatgttttatgatatcctatatacttatatagntcatcctcacttagttagtgcttaaatgattaatctacggtccaaattatctttctcctttgtttctctaattaagtcatatcacaacaattggtnttagcctttagatgattaatctacgggccanactatctccctactttntttctttcatanagtcataccaccttactttttac

SEQ ID NO: 9568 - DNA, 401 bp, Oryza sativa
  unsure (1)..(401): unsure at all n locations
cgtgcccaggatctagtttgtataatagtagagatagagagtaggtatagatagatttgcgattcgatccatagcgcacaaaataaacttatcagaatcagcggtgggaaaaaccgggcccaccaaataaaccgcgacacaataatgcgacccactaagaaaataaagataatctataaaatgccattgacaagtatctaagtctcagaaatgccatcgacaagtatgagttctaagaaatgccatcgtacaaacgattttgttccaaanatatcatcaccattagggttccgtccattctgcgccgctaagttctataggatgatcagagtatttaacagcacggaatggacggaatcttaacggcgatgatatttctgagaccaaatcgttagtatgat

SEQ ID NO: 9569 - DNA, 404 bp, Oryza sativa
ttgggcttaatgaagagggcgggcatgataagaaagaaaagatggcaaccatgccttcaatgaagcaagctggaagtatgctatgcttgtctccccaactgcagatgatagtttgtactcgtacctcccttctgtgtcacaagcacttctagctatgttaattaagagcagagtccacctctgccctgcagtgatctgtcctcattgaacccccctgctccaagtgatacaatgaatattacatctaaccggtgagatcttactaaatacatgaaacaactgtgaataccagccgagggccatactgccagtcagccaagtactgactggatgcaacagcgatctaaatacttccaaacagtatagcacagtgacaataattcatgataagaaaaataattatc

SEQ ID NO: 9570 - DNA, 444 bp, Oryza sativa
  unsure (1)..(444): unsure at all n locations
agcttcggttagaatgcagtagtttcattgtttgtcgcangaatttcacaggaatcagttaatttcgtacgagaatcgggaaaaattcccgcattccagaagggccttatgcccttatccttcgttcccagaaggcctcacctttgcttccaagctaaatcatgcgtaaactactgagagcttcactccatgtcaaatgcccagcatttatattgaaagcaacccatgatcccctctagtgaaacaaaatccatattgacagcaagcatttcatggcgctactgctaagcaacaactaactcaaacaattcatcatcaaaacgccggaattaatcgctgagtgccccccccccccatctctacgacactacccaatcaaaccgcgaggcctgaacctactacagcgaggtgaaatcccgggcatcacgcacgcacctcgacgcg

SEQ ID NO: 9571 - DNA, 475 bp, Oryza sativa
  unsure (1)..(475): unsure at all n locations
taggctccagttctatntccattgctaagcgtatggttggtcatgttaagtttangtccaagttaagaaagatgcttanaagctngattagggtaaaggaatgtgctgaaatgcttgtcagagtgattggaccagaaaactctagttcacacatgttgccagaaccactccaatggcgtattaccagctcattttcaattgatgagtttgtggtcggtcgtcagaaggagcgagatgaactagtgaaccgattgttggaacaagcagacatacctaagtcaagaactgaaggagcaatatcagtatcaccagaggtaataaccatagtcggtactggtggaattggaaaaactactttaactcaacttatttacaatgataaacgaatagagaataattatgatatgagggcatggatatgtgtctcacatgtctttgataaggtcagaatcaccanagaaattctaacatctat

SEQ ID NO: 9572 - DNA, 390 bp, Oryza sativa
tactgtattgtacccctacagcgaatcattcttctactttgcctagcagtaaccaaataagaatgatggtcacccaccgtaaagcaagaaatgattccaagacggcgaaggcctcgtcagcttcggagtcattgcatgagtccaccaatggccaccgttgcacgttgaaggttcttggtgctaaaaaagaggggttagcgccataacagcaccttcaaggaggggaacgacgcctaatggcatcattgtcatcaaccaagcccatggtctggcaaggctttcgctagcgattcctgatcatagtcccacacaaccatcttacacaacgaccatcgtcggaccaccgcgccatcccattaccacccaagcccacttcaccaccccacaact

SEQ ID NO: 9573 - DNA, 461 bp, Oryza sativa
  unsure (1)..(461): unsure at all n locations
cggtagacttgtccttgaatgaactcaatgtgaacacgatatgtctattggtgctacatatgattcttgaggtctcatgatcacattgttcagcgcatctatggatctagattaagtagcactaacaattcatgcaaccatattgtagagagagaatctattctataccactaagtttagcccgtgtttagatgcaaaatttttcttcacacttacaactatttcatcacatgcaaactttgctacatacataaacttccaactgttccgtcacatcgttccaatttcaaccaaactttcaagtttggtgtgaactaaacacagccttattcaagttcaacgatttgctatcgatattgtctctttctataatataccggcgactttatcaattgctctacaatatgccattgggctagaccttcttctcanaagtaaccaaaatactcttagaaacatac

SEQ ID NO: 9574 - DNA, 408 bp, Oryza sativa
agcttctatttccaatcaagcatgtctattatccaaagaatttcagtctccgaccttgctgcatcacaaaagtctagctctataccaaatacttcgatgacgtttgttcctttgtacaggaaaagcaaagacatccatgctcggatgtctgatataaaagggtatcttggtgaaaactggagatattcatatgccaatgcccgtgctgcgttgctgtcgatgtaatcaaaagttgacttattaatgacgcaagccatcttctttgtatcctttcggtgggcaagaacagacacagtgatggatggccccatagttatttccagcttgggttcaacctccatcatcagaatgcagtcatgagcagtcaaatgtgctacaagtacattcgggatgccacaaggtgtattc

SEQ ID NO: 9575 - DNA, 468 bp, Oryza sativa
  unsure (1)..(468): unsure at all n locations
ctagancaatagaaacagagaagcanacagagaaattacatctgtcttctatgtcaatggcatttcgtaatacctaaagcaggatgcanaatgatcttggccattattgggttatacgaagtacatcctaatgcaacacaagctgcgttagatcaatgcagtatgttcagattntccttcagaaatactagtactccaagtccatggcgatacacaattcgaacatgcatgcttaactgagcattgagtcaatcgggctgcaggaagcaactggccgaaaatttgtggccaacgaacagcgtcgatcaaaattcagaagcaaagcaacgtgcacattaagctctagaaattagaanacagagagaataaaagcaacatgcagtatgctcaagcctccgggttgatcaaattccatactagttccgtttccagtgctaattcagtacaagatcatcagagacacaacta

SEQ ID NO: 9576 - DNA, 439 bp, Oryza sativa
  unsure (1)..(439): unsure at all n locations
agcttgcccgcaggtacaccgaacacactcttatcggggttcagntttatgcgggcggagcggagactctcaaaagtttccgctagatcggagagtaaggtctcttggttgcgcgtctttacaaccaagtcatcgacataagcctcaacattacgtcctatttggctacccaaagaaattcgagtagtacgttgaaaagtaggacctgcattctttaacccgaagggcattgtcgtataacaataggttcctatgggggtaatgaatgcagttttttcctcatcctccctagccatgcgaatctgatggtaaccagagtatgcatctagaaaacacaaaaggtcgcaccccacggtggagtcgacaatctgatctatgcgaggcagagggtaagggtccttatgacatgccttgctaaggtcggtgtagtcgatgcaca

SEQ ID NO: 9577 - DNA, 417 bp, Oryza sativa
  unsure (1)..(417): unsure at all n locations
tgcatgtacctcatgttggttcagtgaatagaagtcaactatattatggatccatactctcaaataggcgtgcaaatccaaaagagacaaattctgctgtgctgatggtctcaatgtagtactctctgcttatcaagatatatttagatagacgaggtttgtcgtccgtttcagatgacctatcccgtgctagtgtaccagtcatacctcataatatgaatgatgtggtttctagctttttcggagccaatatgtaggcatcaccagcaaaagtcaccatatactagtgcatgaagtcgcgcatttgcgtgactatcactatctttntctatatgtggttaagaataatccattactaatattatgttactgagaaaatttgtgtgaaatatatataaaatatatattagttctttt

SEQ ID NO: 9578 - DNA, 372 bp, Oryza sativa
aagcttgatctatcacaatttcttattctatggagataccagtctaatcgtagatgattaactaacaccataagcttggaaagcattatgatgtcagagtattataatgacaatccggcctggcatgtattggagtcaagaattttgcgggagactaactaattctgatggaacaaaaagctcggaactaaatgataactctgtggacatctgatgcaagtggataatgaatcccacaaaattcatgcttgattgtaaaattgctgcgaatgaagtaactaagacacctgccttggaatgcatagtgatgggtactgatatcatagtcaataatacagtgtttacatgcgatcatacaagcaagataataaa

SEQ ID NO: 9579 - DNA, 469 bp, Oryza sativa
  unsure (1)..(469): unsure at all n locations
gcgacactatgatactcagctgatgaaactcgactgacaagctcacttatacatatctttttctatatggtacataactaccgtctgaactaatcacagacagcttatctntatgacaggaatatatgtagacaattatactctgacaacgatctggaactgtgcatcctacattactgcgctaacgagaagaccctataacagatcactctcatcaaacttatatcattacattacatgatgtacatacatgactgtaagatgaacaaggtgattcatctttcacaaagctgagatgcacaaaatgaatgtgaataatgcttagtgaaagtaggtctgacagagcctcacgctcgacccgttagagtatgtttaatgtcaacgatcaacattgacacctgaagaactgatagcgcatactcacgacatgaattcacatattgtgacaggttgtctagattctgataca

SEQ ID NO: 9580 - DNA, 450 bp, Oryza sativa
  unsure (1)..(450): unsure at all n locations
agctngaaggagcccgagattgaagtggctactgccgtcccaccattattccaagccatgtttttcattattaatggtccgagtccttttgatgctggtgaaatctcgacaacttaaaaccggctcaaataccttttttaaaaaccttaaaggaaccggatgccttggggcctaccctgcatttggcatgaccaggtccttgtccccgaagatcgatattgatgctgtcgacgactttgcagatgggacaagtgaagaacatgcnctngatctcatcaatgatgcacaataggctgcagacaagaatactgctgatgtagttgagaggtttcaggacaacaatctcaggccgactgggtctggtattctgatgatgaaaaactgagtctgatttacatgtatagtataacttatgatgatggggcacaattgtacatactgatgaattat

SEQ ID NO: 9581 - DNA, 363 bp, Oryza sativa
  unsure (1)..(363): unsure at all n locations
gctagtccgctgctgtntatttttgaatgtcaggccttaagtgcctttgtaataatgtaaatattatcgatataataaagatgtgtcttttatatcatgtttgtatggtgtaccccggcttttcctgggacggngattaatacactagcgttcgggaaaatgcaattttctcggtcgcgacaagctggtatcagagccatctcgactgtaggataagccaagtggataaaacctaaggacatattntatacataaaactatntccgaaagtccctttttcctccttttccctgtgctatttgcaaaagggttactcccttcttccttcttcagatttcaactagtactagtnntggtagtttg

SEQ ID NO: 9582 - DNA, 419 bp, Oryza sativa
  unsure (1)..(419): unsure at all n locations
tgcctgctgcatgcttcgatcatcgtataatattgcgtgtgcctatcttttcattggttcttccgcgtttctcatgtggtttattcaaactaccgttcctttagttttctttgtttcgtgaatcttcagtttgtacttgtgctcgtatcaaaatcttggattctttttctattagcttttttttttttaatcctgtgatgccttaaaccccatttgggctgcaaagctntgttggttactttgaaatataaacatgtccttataaacttaattatcgcgaaattcattagttgtttgttcccatcggaggtcgatacagcgaanaagaagggggagggctaatgggcgggtgatcgtccacagcaatcgcccccgtcccttcctctaacacgcgcgttactttctttccctactgcacc

SEQ ID NO: 9583 - DNA, 453 bp, Oryza sativa
  unsure (1)..(453): unsure at all n locations
taagcttgcaactatanaacatgtgtaagcgctagcctgganaagacatgaaggctgcttcgatgacatgcggaccccacatgtcaacctaaaggaccgcggtagaccgggtacacagagacggtccacgggtcgacggaagcggaccccgtgtgtcaaccgaggcgagtggccaacaaacggactccactagacaccacacgggatgcacacgtagaaaccacgcggctaccgagcgggcacactaacacggacaccacacgcacaagcgaacgactaccgacaccggcacacgggtaccggtgtcgacaaccgcacaacgggtacggggcgacaccgaaaggacgagggcggtgaagcgagaggacggatccttaccaccacgcgacgaggcgtgggaacgccaacgacgaacgggcgcggcggagacagacgggcacaacggagacgaac

SEQ ID NO: 9584 - DNA, 452 bp, Oryza sativa
  unsure (1)..(452): unsure at all n locations
agcttggcgcacacganagagtgcaagagctcataagatcactcgcagagtcccctacctggcgcgccagatgacggagcgtggggctcctcaccgggagaccgcactggcccccctttgccggttcggccggggaccctgngtgagactctaagctcccaatctgtggaaggttcgcgagacaggaagcacacaagacgtcggcgatgtatacaggttcgggccgctgagaagcgtaataccctactcctgtgttttggtggattcgtgtatgaaggaactacaaagtatgagccagcctctccctcgttctgggttcccaatctggaaaaatccaaaatcccctctctaagtgggcaaggtcctccttntatatcttaaggggataccacatgcaccatctccccctctctttcttccaatttgacttctcttcattaacagacggagat

SEQ ID NO: 9585 - DNA, 439 bp, Oryza sativa
  unsure (1)..(439): unsure at all n locations
atgaagctcttgatctggcctatacagatcacactatcattagatattttcatacacatataagccatgtacagtaaaagagcaaaaattatattttccacagaagattctgaaattgtgcatgtgccttgcagaaatttttttttgtaagttatgtttggacttggaatttcaaacattgaagtactgtatttgtcctacggttaaaacttttggatggatatgcaattgtagaaaaaatagagtgactntcttagttttcaccttaccgagataggcattcactcgtgcaccttgtatttcactattgctctcttaaatatatactggtaataatccttgaacaactgagtcgtggacattaagggtgactggcttgttctcaactagaatcatcatcaccaccatgaaaatngatagtgatgcttcatttctcaag

SEQ ID NO: 9586 - DNA, 400 bp, Oryza sativa
  unsure (1)..(400): unsure at all n locations
taattgaagttcatgcttgcgaaaaaccacggccatcttgatcaaaaccaccatggcatattggttatgatgctatgtgtccgattattgaaaaatagtcaattttgcagttcagggtgtaaaatgggctttaccctaatttattctagcagttntaaaataatagtcttttggcttggtctatcagatgccctgtaaatgctgagaaaaatttatttttgccacccgttgccactcttctgttagtactcatttctcttattctattatcattggtcaatgtcacttgaccattagatatgccccccctaataccattatgcccttatgaagctaaattatagttgaaatagaanataaaggaaaaatacaatttatctttacctttngaaattcatac

SEQ ID NO: 9587 - DNA, 474 bp, Oryza sativa
  unsure (1)..(474): unsure at all n locations
tctttgaatagcctgttctagcaactgataattaaaagcagattgtctttatgtatacctaaataggtacacagactgcaaacagtctagttgtttgtaatgtgcataatggagctggngagaactatttcaatatgtgcaaacagtttatttaaagtatcctttaagccatgccacattacatggtcaacaaaaacaaaattgtttaatgaaagtaacagatctggttaccaactganacagaaatatatgctntattcttgcgtaatgaaaatcagttagtaccctcgaatttgaagagttaaaagaccctgtgattcttgacaaagcatctaacatggcaggagaaccagctccctgagccgaatcagatccaacctcctcatggtcaaatagagccaccattctcacaccagattcatgcgcaagagattcttcagaagaagtcgattctattanggcctgaaacagtat

SEQ ID NO: 9588 - DNA, 427 bp, Oryza sativa
ctgcatgcatgcaagcttcttcaacttataatgcgtgtgacttcattggccctgtgggtggtttcttctgatgcgtggtacatgccatatgatgtggatgacatgattgatgatgattccttcctctcagatataatagatgaggatcaacctggtaccgcttcagaaatagcagagaccaatgtaaaatcagggcataatggcaaaccagctgagcatgttgttatggttggttgctggcttgctatgaaggaggtaaatcttttcacttggcttacttctgttttgaaagctgctcttcaccagctgtatttatttttagcttctcaccggatgcagtaaattaactttccaaaatccttaggttatcaatgatacagtatggttataaactgggcttccgatgaataatagtatcgtagtatgc

SEQ ID NO: 9589 - DNA, 418 bp, Oryza sativa
  unsure (1)..(418): unsure at all n locations
cacaatattatgngcaatggtctcccctccagtaataagatatatactaattgctcatatgatcttgttatgtttccaactatatatatattttaggtaattggaatagatctcatggcaaaattgttcaaatattctgatgaataaatggttagatgttctgatcatcatgtacgtagttgatgggtacaaaaaaaatattatgtcaccgttgntaagcccagtttcacatcattntctaaaatgatgatatcactattaactattctagcctaaccgccattaaccattgatcgttgaggaggcgtattctcaagggacccttatctacaactgtgttaatgcatggtagcatggtttgagcattgagatcggaaaggacaccaatggcgaaatcactctactatgccaacattga

SEQ ID NO: 9590 - DNA, 441 bp, Oryza sativa
agcttgagtggaactaatctggtactttttaaatggaatcaacattctcctagaatctgtaaaaaacatattcatggtactatataaatatatcaagtaaagaaatatatgcaatccagtagcaataaaaagatgaatgtttctcaaatgcattgatgtacatgtagttagatgtacgctcaccatcatcaagcaagcgtttagatttatgcaatactcaaaattcaaactgaccatctcatcttctatctctattaactgtgatacccagatacatatctcaaatgattcactttgagtgcataagataatacatgtaagtttattggataaatctcttatattttttcccaatctctattttcttactcattatctcattggaaggtgggtccaggtcccacatgtcagtgagacacgagtaacaaataagggatgata

SEQ ID NO: 9591 - DNA, 451 bp, Oryza sativa
  unsure (1)..(451): unsure at all n locations
cttcgataacctcgcattggcagtacccgctccatgaacttaaattctcatgcactctangcgtccatgtttctagcagtgtgagaagttctggcgctcccgggaaagagaagtctcacacatattaaattatagttcaagttaagttctctctctcacacactcatggcagttctaccaatggtgacaccgatgtagggcacgcctctcggccctacctcaacggctgtcccaccgtagcgcacctgcctcactcaggggtgaaccatctatgcagggatactgcctcctctcggctatctaatccgctaggtctatacccatacgagaagtgcggttgtacggnggtcgtttcatgcttaacttcatggctcggtccttaattgaccggngacggtactaaccttttncagataccacccaaatccttcgtnncgcccagtcgaaaacg

SEQ ID NO: 9592 - DNA, 449 bp, Oryza sativa
agcttgagaggaactgactctgttatcttattctgattgggacatcatacctctctcactagtagtcttgtatacagaccacatatcatggatactcatgtataatatattgaagcacatgaactcatgtgtcaagccagggctcacttaaataagaatgacatgtttctcgaaatgcgcttgatgtgacatgtatgctcgatgtacgctcaccatcatgaagcaaagcgctagatttatgcattactgaaaattcatactgaccatctcatcttctatctctatctgctgtgatacccagatacatatgtcaaatgattcactttgagtgcatacgataatacatgctagtgtattggataaagctctcatatggtttgacaatctgtatcatcttactcattatcatattggaaggaggcgccacgtgccacatgtcagtgtgacac

SEQ ID NO: 9593 - DNA, 383 bp, Oryza sativa
tgcactatacgagtgcatggatacagcatcgtgacatgttgccgcgctagcgtgcatgagaattgacacacattatggattatgctgcatatatagtatggtcatcacacacgtcggggaggaatactataggagactactatgtaggacgcgctactatatctgacatatatgtctaggcgaggcgaaagcatgtgtctcactcggacgtgagcactatatgcaaggatactggctcatgtcggatgtctaatactctaggaatatacttatacgacaagtgcaggcgtactgatgatggttatgctatgcgacatggatagatgctgcagatcaggacggcacatctatttcgcaaccagccgatattacttggtcatata

SEQ ID NO: 9594 - DNA, 441 bp, Oryza sativa
agcttctaatggagagaattctcacattgtatattactccttgtgctgcacattgtttggatcttatgttgaaggacatagggaaactgaaggaatttaaaaaccccattgcccgtgctaagcgtgtcaccactttcatttatagacatgggaggcttcttagtgcaatgagggagaagacaagtggaaagaatcttttaagaccagctgtcactcgatttgccacaacttatcttactttgaagagcaattatagccaaagagatgaattgagaagcctatttgtgagtgaacaatggactgggatcaaattagcaaaaacaaaggcaataatataagagactggcattgttctctctaagaaattttggtcctctattgaagattgtatcagagcttcaaccccattacttattgtgctaagagttgttgatggcgatg

SEQ ID NO: 9595 - DNA, 469 bp, Oryza sativa
  unsure (1)..(469): unsure at all n locations
gggtcaatggatggagtatataagttgcataggctgaatacatttattggaccgtagagccaatacagaanagggcctcgacattactccctccataatgtaaggaatcttgggtagctaacttcaatagtgcaggttatgggtccaattgcagaatttcaatccaccgaaatactccctccgtttcaggttacaagacgttttaactttagtcaaagtcaaactactctaaatttgactaactctgtagaaaaaaaagtagtaatatttacaacaccagcataatttcattaaatctataattgaataaattttcataatatatttgtctttggttaaaaatattactatttttttctataaaattagtcaaacttagagtagtttaactcttactggagtcaaaacgtcttatgagtagtatcgcttctcgtaatgtttgactatccacctcagtttcaatcttaac

SEQ ID NO: 9596 - DNA, 324 bp, Oryza sativa
  unsure (1)..(324): unsure at all n locations
aacggntagnggnaaaagcacacgaccaccgncgagggcggagggctctggcangggcangggatgctcnnggacggggagaggctccgcgtcgctgatgacggcggcggcggttcggctttcttgccgccgtcgatccttccgtcgctgctgccggctccccgctgctccacgccgctctccccgtcctcgccgacgttccggccgtccagggtgatcgttcggagggcgcggccgccgcctgagtggtgcaaactgaactttgacggctcggtgttcaacgacgggctcccgcgagcgagcatctgcggcgtcattcgcgac

SEQ ID NO: 9597 - DNA, 477 bp, Oryza sativa
  unsure (1)..(477): unsure at all n locations
tatatggatcttntttcccgggactaaatagaattttagtcctctttggtaacaagattcctcagagctntcaaatcgggactaaagatgttnttagtcccggttnttaatacaaccgggactattgtgaaatctgctggaccgatcaaagatggtttctccaccagtatataatcaactcttcgttttgatgccgctgcttcctatcgtttccatcgtacgtgctcctctccacttcgactgtcaaccctttcgtccacaccattgcccccaattagctgccctcaagctcaaaccaattgtgtaccccatgctgtcaatcctagatctcctcctcagccagctggctaatttagattcttagatctcaatcccaattataatgattaattgngttatagttggggaaatggcactggaggagagttctctggcatcatccctctaatttcttcctaatcttactatatggcccta

SEQ ID NO: 9598 - DNA, 440 bp, Oryza sativa
  unsure (1)..(440): unsure at all n locations
agctggatcaactatctgaaggcctaatttagtctaatattgatcggctcaaggctcacaagattgaactcttagcacaacttgaagaatgcaacgctgagctggacatggaacacaaaaaactagccgatctcccaaaatctattgaagaacagaaagcaagactcaaatcggctatcaagcatgttgctgatctgaccaagtctctgaaatttatccctagaaccgacgctcaggatgcctaagccatagaagaagtagagcagattaggcagaaggctatatcgaccatccagcgatacttatctcaataattgttgtgtaataaaacttagaatttttgtaatcggcgaacactntactatctttacaatcctttgtgccgattaatatgactttgaaatgtgctcaaaatttttgcactgcattttgatatatat

SEQ ID NO: 9599 - DNA, 149 bp, Oryza sativa
  unsure (1)..(149): unsure at all n locations
ccttagatactcagcttgaactcaccatggagatcggagatgaatggtgggtgttgtatttggttacctagcgctggngacgcggcatggcatatcgacctcgaactccacggngaggccgaggaagccatggttgcggtctaatgtga

SEQ ID NO: 9600 - DNA, 420 bp, Oryza sativa
cagcttggttggcatacaattttttgtttttacttggaaaacggcggccacgtgtatatgtgtatgtgtttatccgaaaagcgaacgcgcgcgtgccccttggcggcgaaaggtttccataggttaacctaattaactaagggattaggagactatgacggtgattaagatatgattttcttttgtgcggaagaattttttactaaccgattgaaaacttttgaagccaattttaaaaactttcaaaactcaatttggaaaattttaactcgaaatttaaatgtgtgagaataattttgaaaacttttcacccagatttgaaaactttcatctcaagaattgaaaactttcaagtacagatttgaaaattttttaagttaagaattgagaaaatatgaaaaccttcgactctgattcaaa

SEQ ID NO: 9601 - DNA, 426 bp, Oryza sativa
  unsure (1)..(426): unsure at all n locations
tagcaacacttatattgntgattgcatgtgctctagtatgtatattcaatcgaaaagactggactgtacacaaaatatatcactggcgtaatcaatatagctgtcacacatgtcacatcagcttctcacatcccataaggaataactaatgacctgctctgcctaaacttgccatgttgaaaaattggggcactagcgctagactgactactgatcatctctttattgcattctaagatgcattgataatgctggaacccactaatgtctaaacagtgacatggccacacttctactagactcaaactgcactcttgacgaatctcttgaaatcccagagtttgtatcgacgtgaaccaatcatcctatcatgaaccttatcacattcataattctaacatgctgcgattgatatgaatcgtgtac

SEQ ID NO: 9602 - DNA, 484 bp, Oryza sativa
  unsure (1)..(484): unsure at all n locations
tactaagcttggncttaaccttagtcttgagattaccttggttagtaactaaatcatataataaatgctattaaaactttgaaattcataataaattaatgctagctcaaaaaattgtaaactaaattntgttgaacttaggacaaagtactctttatactgcagtagcctagaacttcacagaacttgggcctaaaattcatctaaaatttattagtacattatagaatttataaaattcacaactcacaaattcaaagtgataaaataaaaattccttcaccataaattatgtttatacagtacctattcacagtagtaaattcattcattntagagaatgctagatttttngcatattttgatgttgttcgttaccgttatttcttaaagtgggacaaattgatattggtgagggagttgattntattgctgactatggtgggaattctaactaaggcaagtgccccttcctttcaatact

SEQ ID NO: 9603 - DNA, 355 bp, Oryza sativa
cttcgcggacgcgtgggccaagaacggcaagcggcagaagcagacgatcaccgacgatggcgcggggctctggcaggggcacgggacgctcgcggacggcgagaggctccgcgtcgctgatgacggcggaggcggatcggctctcttgccgccgtggatacttccgtcgctgatgccggctccccgctgatgcacgccgatgtccccgtcgtcgccgccgatccgggcgtgcagagtgagcgttcagtgggcgcgggcgtcgtctgggtggagcaaactgaaccttgacggctcggcgtgcatcgaccgcccccacgatgttccacggcgtctgcaccgtaacaccccagcgcct

SEQ ID NO: 9604 - DNA, 476 bp, Oryza sativa
  unsure (1)..(476): unsure at all n locations
gctatattgatctttttcccggactaatagattttagtcccggttgtttacaagattcctcagagctttcaaatcgggactaaagatgnttttagtcccggctnttaatacaaccgggactattgtgaaatctgctggaccgatcaaagatggtttctccaccagtatataatcaactcttcgttttgatgccgctgcttcctatcgtttccatcgtacgtgctcctctccacttcgactgtcaaccctttcgtccacaccattgcccccaattagctgccctcaagctcaaaccaattgtgtaccccatgctgtcaatcctagatctcctcctcagccagctggctaatttagattcttagatctcaatcccaattataatgattaattgcgttatagtttgggaaatggcactggaggagagttttctggcatcatccctttaatttcttcctaatcttactatatggccctat

SEQ ID NO: 9605 - DNA, 402 bp, Oryza sativa
  unsure (1)..(402): unsure at all n locations
agcttactctgttttatggcagacanatgttgttcattctgattgaccgctggtggacgcgctgattggactcaacgctactcatatgcctatatgtgtgaactgcctatccgccgtactgagtcatgactgaaaacaggatggatgacttctcttgcacataccacggagatgcctctagcatactctgaatgagcgtaactcgctttgcgttctgataacaaggtgatgtacataatggtttatggtacgacaagtttacatagaaggctgcagttataggtctaggacgaacgcctatgctaaggagtagttattcattaatattgtgactacatttgctgccccagactggatgccaaacatatccatgactatcagatatttacggaagtacatgtg

SEQ ID NO: 9606 - DNA, 472 bp, Oryza sativa
  unsure (1)..(472): unsure at all n locations
ttaagtcacctgaggcatgcaagcttattctcttttatggctgaagtatgatttcatatttgttggccacgtgttggacatgttagctaacataagtatgaacaaatttcagtaatgtgggtacgccaatcaaacagtcctcggaagtacccaaaaccatgttagttgtatccactattacataacacgtagaatccacttgtagtctcgaattatgcctagtatgaaaggtgacctggaaagaagatgatgtataaaatggttattggaaccataggtaaccagaaaggctagaagttatagttttatgatagaacatccgtaaaatgtgtaattttttaattaatcatgttattaaatttgtagctntacgataaattggatagagcatctatagttttacanaaattactcanataaatgttggatgcacaaggaggtaaataatttcgttgatgtgtgcgtgtttttg

SEQ ID NO: 9607 - DNA, 472 bp, Oryza sativa
  unsure (1)..(472): unsure at all n locations
gctcttctcgatggctgggtntcgatctggtgcaaatcttcgcagtttttgctttactggnttggcgtcgggtcgcaccatgagtttgtgctcaatcacctccctgggtacccccggcatgtcggacggctgccaagcgaacacgtcagcattgtcgcggaggaaggtgatgagcgcgagttcctatttctcgcctagtgatgccccaatcttgacagtcttgtcggngttggcactggagagtggaacgatgttgattgcatcgtccggtttcggcgtcttgtttgtcttgctcactntattgngtggctcagctgtggcaagtggactgggcgtgtgctcgaccatgtcgaggctccgcttgtcgcattgcactgctagcttagcattcccttgaatagtgantgttcctttcggtcccgacatcttgagcacttgatacgcgtagtgagatgcggtcatgaacttcgcg

SEQ ID NO: 9608 - DNA, 458 bp, Oryza sativa
  unsure (1)..(458): unsure at all n locations
agcttatcaatatcactaaagacaatntcttttcttttattaagtaacgggccaccagagacattaactggaataagaaccagcaaggcgacagtcatgatgggcaaaaatatcttgaggcttgccaagaaacaaaacaaaagggttagtgtgcaaaacatagaaactggttaaataaaatttgatcatttgtctcatggcacaaactcaaaacttttgctcacaggaaagtggggaaagggaaaaagaaaaggtccaaggcgctgcctgaggaactatggctgaaaaatcctcaaacttctagcacaagttagttagttagtttccccccacgtgatggtggagttatatatactttgttctgtacagtactataaataagagaatgaccagagtacaagtttcaaaatatgactagtacatcctgtataggtaaaacttttttgagtaaattcatg

SEQ ID NO: 9609 - DNA, 438 bp, Oryza sativa
  unsure (1)..(438): unsure at all n locations
ataaatatactacatatttatatntaatggtgaatntaatgaaactaatttggtgctttagatgttagtacacttcactataaacttggtcaaacttgaagaggtttgactggacaaaactgaagtgacatataatatgaaaccgagggagtatttaggatttatgcgttnttcatatgggcatttatcttaattgctcctttcagtttctgaattctttgattccctccagacacaacctaggagatcacggagtccatcttctgttcagcctgcttgttttctggcatttcgatctgaaacagccgtactgctcttaaggaaagcacacagagacagagcccttggaattgtttgcctgaaagtaggttctttgatgtccttttcctttcttattgattacaaactcttccnctcagagggttntcatgacatgta

SEQ ID NO: 9610 - DNA, 448 bp, Oryza sativa
agcttcagccatcctcctctgagatttcatttagctcagaggagaaacggtaagaatccaccaacaggggcaggggttcatcatcgcagaagaatggcctggaaggcagctgcagaccatcaacatcaccttcaagcatttctatgacctcactcatcgttggacgatcaggaggcttcacctgaatgcaatgtagaccaacaacacacaacttcctttccagctcatgcatattcaaggtattggtgatctcacccatctcttgttgaatgagttgattatacaccaatgatggataatacacctgggttgagcttgacatgttctgcttaaagttccttcgccctccagccatctctaacaaaagcattccaaagctgtaaacatcagatttgctagatatgacaccgaagcttcgagatatcatctcaggagcaatataacctac

SEQ ID NO: 9611 - DNA, 472 bp, Oryza sativa
  unsure (1)..(472): unsure at all n locations
tcggaatcatatcgagcanatccgatgtctantagcttggaatgtttctactggagatggctggaggaagaagacactcagacatgtatgcagagaactcaaatcagacctacttcccatcttgggtgtatgaccaactaactgagcagcaagtaggtgttggtgagatacctgctggtactgttgctaacatgcatgagcttgagaggaagctgtgcataatcgggctgcattgcatccagatgaaatctcacgatcggccgacgatgagcgaggtcatagagatgcttgaaggtggcgttgttggcctgcagatgcctccaagaccattcttctgtgatgatgaacccgtgtcacttgcggtgaattctcaccaattctcctccgagctaagtgaaatcttagaggaggatgagtgaaacttgtgcatgttntgatgccaaatcagctagtagcttgcttgtaaatgctg

SEQ ID NO: 9612 - DNA, 449 bp, Oryza sativa
agcttatttatgatattttctttcatacgttgcttacattgtttatttcaagatgcatttgtcctgtgggacacctatggctatccagttgacctgactgaggttagctgtcctttttctgacctgaaagatctataaagcttcaatgttctatttatgctgtttcttattatttcatattccataggtcatgggagttgactatggcttgagtgtggatcgggagggttttgatgctgcaatggaagaagcgaggcagaaggctaggaatgcacgcttcaaggttgtcttttattcttactaagtgtagaagttaatcctgaatcgttttctccgtttgatatctctgatagtgtgatatgctgctggtatttcattatattgggccagcgttctgctcatgtgtgtcaagttgtaaagtcgagtcaaggtacccctggaccgactcg

SEQ ID NO: 9613 - DNA, 446 bp, Oryza sativa
  unsure (1)..(446): unsure at all n locations
cgaaacccttctagatagtgtctattctcgttgaagatgatgctgtcagggggtccaaatccgaatccaaaacgtgcagaatttcatcttttgttttctattgatcaaaagtgacgtaatgatataggagtagacttgggaaaagtataggtttggttctcaatcaattgctttgatcatccgtgcatttcccacgctcggtctctntccctttaccaaacaaaaacttttacaaacgagaacataaaaagtcgatgcaacaatatttgttcaaatatataacatgcaatttttacatagcttgcaacttaggttgataatatataaagtggccatgattatggcctcaccattntactcccccgaactatttcactggagcactntaaccccccccccctaaattanttcatttttttcattntacacccgaactactgaaaacg

SEQ ID NO: 9614 - DNA, 446 bp, Oryza sativa
agcttagcgttgattcagtgcatgtggcttcattactacatctttagatttatagctgatatttacgcaagggtgtcctttctgtaagatcaacgtgtgttttgattcttattctgtgatgatcatttggcatatgtgattatcggttttgatatttggagattatcgtcgaagtggttttggagataatcagttttcaggagatgaacagagtttactggtttgtcgggaccggtcagaccgggcggtggttgccggttagaccggtgctatgtgagcggtcagaccagccggcgctgtgtcaatttcggtttcgggttgtttgtttggatattcgtgattgtttcatggttatggcttctagatggatagtatacgtatgtaatactgttggttgctaacaatgagtcaagttggagatagcttggtctcagaatatggtttct

SEQ ID NO: 9615 - DNA, 464 bp, Oryza sativa
  unsure (1)..(464): unsure at all n locations
tactcagcttctcgtacaagcgaaaaagagcgcgggggagggaaagaagtcttatcggtgtggtctgngcgaaggtgtgtggtatctaccaatcattgatcgtttcaagagaatatttgccaaccccaatgaagaaaagttagtacgttagcatgccatagagagaaggaatgacggtttgctaagacaccttgcggattcgatccaatggaggaatattgatcgaaagcacaaagactttgctgtcgaccccagaaacatgaggatatgtttgtgtacggatggcatgaatcctttcggagacatgagcagttctcacagcacttggccagttcttattgcgaactataacttcccgccatggttgtgcttcanaaggaaatatattatgttgtgcttgttaatccaaggtccgagacaacccggcaatgatatcgatgtgttcttggagcctggtattgatg

SEQ ID NO: 9616 - DNA, 449 bp, Oryza sativa
  unsure (1)..(449): unsure at all n locations
agctntttttaagttcgcaaataactttgtactattgaaaacttgcttgtgtgggtgaaagaattaagttttgttacatagctccaagccccccaactcttgaattagtgcaaaatatagagtttatcgtctgaaataaaagtgagttaaacatttattttagttcaaatgaagagagctcactgaaacaagaactcatggccctaactccaaacttttggagcttaaaatacatagcttaaaaaaaaagaagaaccaacaaagacaacagtattatagaaccccggtggctcagaatcatggttccgcacataaggaaataacagcagtcactatgcataaccaggtaaagaataagtaaatcatcatcgctgatgtgttggccctcttcatagccttttacaatgccaatggtgctggcatcacatatctgaaccactatgttctaa

SEQ ID NO: 9617 - DNA, 402 bp, Oryza sativa
  unsure (1)..(402): unsure at all n locations
ntatgtgttgtatcataatagggataatatttttaananaatacttataagattacaagatcagaattgacaaagaatagtggttatatcattggcaatatgggagtggggaacatcgatcgtatttagcatcaaagacttaaatcaccagccccaaccaattcctgcttgcccttggtgtggaagaagtaatccttttatatctgttgatgcaggtgggttagcacgcttgttggagaagagaggcaccactgcatatcttgtattcaaagtgccgtcaaggacttgagagtgcctcgttcagtaatcatagttagctgaagtctgtggtgtaggtgtttagcttccaaacttggttagaattntgagtttcctgcttactggcgtagtatgcttcatatt

SEQ ID NO: 9618 - DNA, 391 bp, Oryza sativa
  unsure (1)..(391): unsure at all n locations
agcttaaatattagggggagaatgttcttgttatacaaatctttaagtcattttgacatttctctttttatgatgaagtcactataagacttgagttatacattaattaattgccggacctgtaaatccgtcaattatttagaagcccatgcttcatccctacatataagagatgcttcttttgtttagctttgtggcaggggaaggcttgttctgtttttattatgtttttttctttattgtcaaatgatcaggctatatgtgtacacctagcatagagccaaaaaatgttactactaatggtaagaagtggcaagtgtataatcacttaatcaatggcggagctaggtttggatgagagggggggggctcanccttcttctttctcctc

SEQ ID NO: 9619 - DNA, 403 bp, Oryza sativa
acctggaagtggtaataccgagtgggagggtatactaggataccacccacaacaccagatgctcagcacacaattttccatcacttgtttaaggtcgaactatctcttaaatttgcttatacgttctcttgcaaaatatataaatacctaaagggcaaacctctcatttcaatgtctctcaatattcgaatagtttactgagagtgaaataatatcttttccaatatggattcttccgatgtagcagtggaacaaaaagagattttattggaggatatgtggctaggatcatgtcctctccaagaataatgctctttgctgtataatgtgactcgaaagaaacattctgctataacgaaggttatgaatacaatatcgcttaatatttcaacaatatctcatt

SEQ ID NO: 9620 - DNA, 357 bp, Oryza sativa
  unsure (1)..(357): unsure at all n locations
gcacgggtgcttctacgcactctgatgctaccgttgatgtgccgacagccttgcgtatacactccatgaccccccgtcaaacattccttctcatggaagatagctctcatatggctcatcacctaggctctattgaggagataagaaccattcgggtctcgcagagcgaaattgtcatcgcgagcaactgttcctgggcatgactaatacgaaccatattgcccgtcttgcgatctacgcagagcagaatccataagtgctgcatgttgtatcacttatacatccatcaatacttcacaaacacttngtgcagggacaccatctcatgaatcatgacctcatttcgcgactgtagcc

SEQ ID NO: 9621 - DNA, 392 bp, Oryza sativa
agcttctaaatcaaagtatctttttctctatatcataatgcagctaattcaggaactcaagatttagatttagggattccaatttttaattttgagggcctagttttagttctactgctgttccgctctgccttaatggatgcaatcacagcatcagcccccggaccaagacctttcctgccaactaatttcacaccaagcttttcacagaggtaatgcagcctcatttcatcacctcctctaacctctcttatctccatagcctgctgtcgtgatagtaatgtgtagacataaagttgttgttgctggttgaaatgtgattggagttgctgaaacaacaatttatttgagtggtgctggtccgccttttccccttcagttgcacctttctt

SEQ ID NO: 9622 - DNA, 288 bp, Oryza sativa
  unsure (1)..(288): unsure at all n locations
gctgtgcgccggccgtgtcttcgccatcactgccgctggctgtcttcgctaatctccttccccgccgagctcagcggcctctccttctctgtcgacctgagctgaaggccttggcggcgtgctgctggctccaccgctggttgacccggagccacggagcaggatgggagcgtgggcgacgcccaaggcgacgcgtggccggagatcggcggtgggcggcggagcttgggctcgcggtgacggnggaggagtacggcagtgccgtgagcatcgagcctgcgtgcgggc

SEQ ID NO: 9623 - DNA, 436 bp, Oryza sativa
agcttcctcaatatattttcaagacaaatattatgatactacctaccttggcaggagtgattaaagccccagcacccttcttccggtccttttcatacacttctatcttgggctttcccttagtagaacctgcagacctgccaagttctttaccctcaagaacccgaagccgtgtctcaagctgcccaaatggatctcatgtcaatccaaggagtcagacaatattatggataaagaaaaggtatttcagaaagtacataccttgactcgactctcaagaccaatggagttatcttcaccatcaccaagggcatcataccgaatggcaagagcagtttttgcagcaagagaacgagaaatcttccccttgttgcttggagctgcttgaccaattaaggatgcatggtagatgagacccatacttggcgtagcatgc

SEQ ID NO: 9624 - DNA, 416 bp, Oryza sativa
  unsure (1)..(416): unsure at all n locations
ggagaagcatgcttacggtgtaagccaactcacagtggaagccggaagccagcttgtgggatacgcaagcttacagtgtaagccaacttacaacttacagtggaagccatcaacctcctctgcctataaataggatcctaaaggtccaaggtgatattgactgctcttcgacacttcctgccttccatcctatagctggtactcanattcagaagaaataaagtttctactcactcgtactttcgatattctacagcttctgtgtttgtctgctcgtgtggttttcggcagaatagaccggtttctcaacgatacttaagccccgtttgttctctccaactggagagatatttccagcacacgcanaacgaganaactcactagcacatngattaataagtattaactattataaa

SEQ ID NO: 9625 - DNA, 446 bp, Oryza sativa
  unsure (1)..(446): unsure at all n locations
atcttatggtatacatgggaagaattgtttcttaatgattacaaccacagtactcagcaagccacaccggagatgcacaattaatgcaaaggagtacaaggggataataatatangggttaagttttgcagtaaacggcattaaaggtcacttagttgcccaaagccattttacaaagacgatcttagagctacacagtattattaaacaaggacgtgaaccctcacgaacctgccttaacccaaggcctacgatgattcagaccgaactggcaacccgaccctgtgttccagctagtcccaagccaacccaggccaaccattccacattttagttgtcgagcaaattttaagaatttgaaacactgacttgggtacattgctcggcttgcccataaccgagggcgcggctattcgaatagattatactctgatcagaggtgtaca

SEQ ID NO: 9626 - DNA, 446 bp, Oryza sativa
  unsure (1)..(446): unsure at all n locations
acagaacttgttgttctgttaaaggatctngtgccagaggggaacaatntaccgcagacgacatatgaagcanagcaagtattatgtccgttgggcctggaggtcagaagaattcattcatgtccgaacgactgcattntgtattacaaggaatacgctgacttgaatgtctaccctatctgtggggcatcaagatacaaacgagcaaagagtgaaggtgaaggaagtaagtcaaagaggggaggcccagcanaggtggtgtagtatctcccaattgcggagcgcatgaagagaatgtttgcgaataaggaacaagctaagcttgtgcactggcatgccgaagaacggaaagtcaatagtatgctgaggcacccagcagattcagtacagtggaggacaatcgataggaattaccaggaattctcanatgacccaagaaacatgcg

SEQ ID NO: 9627 - DNA, 314 bp, Oryza sativa
ggatcttaagtgacgcggctgcagctgaataatccaatttgggagatttatttaagcatgggcgtgcgcctgcacacatctgttcttaactaaccatgtacgtattaccgtagatatgcattttctctatctgtatctatatacaaggcccaacgtgcgacctgctttaaaaacaatcactacatgatgtatgatagtatgtgacgacaagcctctggggtgcctcttacttccagagactggcttaggacattaatcaagggacggcgtatctccttcttgctccgagccccatactgttacttatcttcctt

SEQ ID NO: 9628 - DNA, 439 bp, Oryza sativa
agcttgccgttcgccttgagaacgacgactgggttctccagccactccggatggatgacctctcggatgaatccggcctccagaagtcgcgccacctcctcgcggatgaaggcttgacgttccggggcctgccgccgcactttctgccggaccggccttgcgcccggccgtacggcgagacggtgctcaatcacctccctggggaccccgggcatgtccgccggtctccaggcgaagacgtcggcgtttgcccgcaggaaggagacgagcgcgtcttcctatttgtcgtccaaaagaccaccgattcgtgtggtcttggacgggccgtcgcccatggcaacctgcttgatcgggacctcgtcgcacgtgatcatccgctgcctcggggcggctgggacagaagtgctgaacctctcgtcaccacccgcgggcttggatg

SEQ ID NO: 9629 - DNA, 275 bp, Oryza sativa
  unsure (1)..(275): unsure at all n locations
tcgagttggctctgataccactntatcatgctncagaaattaacccanatttcgagacntatttgtgtattaaatccctgtccaggaccagccagggtacacaaaacgacaagtaatatacatttccaaacgtaaataanacgtaaaatacttacaaaagaggcacttagtcctcacaccgaaacanaagcagcagcagcgtgaaaaggcgatcctagcggngcttcagcttcactccacaagcaaanactcaactggggtctgaaccttggtct

SEQ ID NO: 9630 - DNA, 451 bp, Oryza sativa
  unsure (1)..(451): unsure at all n locations
agcttcagagatcatcatctatgcgattatttcttgattagttacagccatctctaatgggtcctgatatatgcttgttaatttgcagtgcaagaagaggcaggatctatctcccaatggacgagctcgagatggccggactctctgaagatgacatcttcgacggccgcgtcacggacagatggagatgttttatgagggatcagatcacgagagcgagggcgtttttcagacaggccgaagaaggcgccagcgagctcaatcaggagagccgatggccggtgagaaatgacaactacatatcctttaaaatttccatctgaacattcttaattatgttaagttggttcacacgtatgaatgaccattaggttnngtgtgcaagtttgggcttctctacttctgtaccgacaaatccttgacgagatcgaggccacacgatacaacaact

SEQ ID NO: 9631 - DNA, 482 bp, Oryza sativa
  unsure (1)..(482): unsure at all n locations
cgacactatagatactcagctatgcatctggnacatatatgaaatactaaagatgtagatgattcataattctcaattgatcttttatcagaatccaaagttgaaagctttgtctgatctagatgactaaatagctagcaatgcaagatcattgacactagaaggcctcgtgaatgcatgatgaaccttttttctttntatcttcctanactttctatttacaatgccaatcccaagccacagagacatgtggccatagctccncagcacggcctttaaccctcttcttctctatgacacttcaaagggattaagcttgtgagacacaaaaacaagttcagtgtgcanaagaatgcaatctaacagaaggcccaagctggccgtcgatcgaagccgtgacaactntctcattaatacagcctcacacaatctaccagcattgaggatcataaaagcgtgttatccagaagaaaaaacataac

SEQ ID NO: 9632 - DNA, 452 bp, Oryza sativa
  unsure (1)..(452): unsure at all n locations
gccttctatactgttcagcgcagattgttcttgatgtcccgaagcgaagacgaagccggcgactcgtaaagatgattccatcgcgcttcttgatagataactcgacacaacccctacctggcgcgccaactatcggaacatgaattcggcaataataaaagggggtagcgcacgagacctaaaagtggatggatgcagagacaaggatttagacaggttcaggccctctcaatgagaggtaataccctactcctgttttgggatttgaatccgccgggtgtgtattgatctgacgatcaggttatgtctcatgccccctagagggcctcctgcccaccttatataggatgggggggggcaggattacaagatagaaaccttaaccaatacgcgatcggtttcctaaatctaatttacaatattatcaaatcaggactntagaccgctcaatg

SEQ ID NO: 9633 - DNA, 422 bp, Oryza sativa
  unsure (1)..(422): unsure at all n locations
tgagttcgtataattcagaggagcttcctatttaccccgaagtggtagtttaggtgactaagcgtgtccaatacaacggtattgtgccacgtggtgggttcttgttgtgtatgccaccatggcattaaatttaaggtgtgggcccgccacttaacggttctaggtcatataacctgtatggcttaggatggagtaacacgtatcgtgctggtgtaaggctaaatcatgaatnttggacaagctttgttgtgggtaataaatcgggtacttatgtatcgcgtaccatgctcttgcatgattattatttcgcatcatgtgggtaaagtgtacaaactctgtagagtaaaaactaatcgattagccgtgctcgcggtcaaaagcgacgtgtggatatgtattgagtatagacttgtatttattct

SEQ ID NO: 9634 - DNA, 460 bp, Oryza sativa
agcttgcgattatcgctacactaatacgacattagttttgtaagacggaaacgggtacgcgggttcagagagctcacaggagattcatacgacatacacaacggtctggagcatttctgtagcagctgtgaagctggaacagagagtcacacccgtcctcgaccgatttgtgttaggaagctcagagaacacttgtgcatcttgccgtgagagctattgacgatgacggagctgccagatggagtaggagttctggcagtgctgccattagcatgccctaagttggtgttggtaggattctgagggcactgtctggcatagtgacccatctggttgcaccggaaacactgaactgctgacggtccctatggtgacttgaaagaggtaacactgttgggcgcagtattgccactatgggcacgctgctgtggctgatgtgccggacggttcatctgaagac

SEQ ID NO: 9635 - DNA, 477 bp, Oryza sativa
  unsure (1)..(477): unsure at all n locations
ctaagctccaataggctgtgcngactctactccactagttgaacttttttatatccatcgcattggccaagttatgatggagagttcttcgcgcccgacttgtcgttaaagaacaacacacgaggaagaagaaggacaagaaggttcaagaacgatatggacaaagcatacaaaggctcagccaaccgacggtcacaaaagccgaacaatacaaattcagagccggtcatgcaaaatagatgctcgctatgccacgaactatgccataagagaactacgtgcccgaagcgagacaagtctaaggatcgaccgacaaagtgccgtangacggtgggaggtggtgagggtagcacacaggtgggattggatgacattcatttgctaagttcatattgttgcttcaatgtttactttctggtgtcctcctttccgttctcattgtgatctttccatttaatatttcttcaattactaatg

SEQ ID NO: 9636 - DNA, 341 bp, Oryza sativa
agcttctccctccacgggtaaactttcgttttcgcctccgccgccgtcgccgtcgccgccttcccggccatcgcctccacccgcgctagggttttgcctctcccacctcggcttggtacacttcacccactggacccaattaaatgggccaaaatatcatccggcccaacttaaatgggcccaattgttatgggccgcgtgaggcccggcccattagaaacccttcttcttccccgagaggaagagagagaaaaacctcgcagccgccgccgccgcagagcagcagccatggtgctcgcgcgcaagaagctcaagcagaagctccgcgaggtcgtcctgaa

SEQ ID NO: 9637 - DNA, 455 bp, Oryza sativa
  unsure (1)..(455): unsure at all n locations
tatccatggcagaggtacgttcctactcgtactgatatagttctatgctattgccagttcccgtggtagtgaactagttaagatctatggtgacgattntatttcagatcttgattcttgagaagacacatatttgttactttgctagctgtactgaagaaatataatgcatatatacttgttttactgaagctgtgatgtttcttagataaatcaatattagtaatcatttgtatttctgacagcaatggattcttcagatactccaacttctgttgatgggagtacacctacatctactgctcaagaatcagcatcagaaccaaagacaagaagatagactgacattgcttgcgcctattgcacgcatactactcagggaggggaacaaagatcaaatgcatgtactgtgacatggtttgcggcctgttcaatttgaccggttcacaacaatc

SEQ ID NO: 9638 - DNA, 446 bp, Oryza sativa
  unsure (1)..(446): unsure at all n locations
agcttctttatagctattgtgctatatctttcatcatattntacaaagcagttggtatatcactctgacggagctcgtggctcctcaccgggagaccgcgcaggcccccctttgccagttcggccgggggcttaaggtgagatctcaagctctcgctctccctctgtatctggaaagatcgtctgcccgcaagacacacgagacacggcgatgtatacaggttcgggccgctgccatgcgtaataccctactcctgtgtttttgtggatttgtgtatgaatgagctacaaagtgtgagccaactccccccccccgttctaagctctaaatctggaaaagaatccacccaaccccctctctatgggcaaggtcctccttttatacttcaaggggataccacatgcacccctnccctttccaaactggacttttcttctctttatgga

SEQ ID NO: 9639 - DNA, 466 bp, Oryza sativa
  unsure (1)..(466): unsure at all n locations
tgtcaagtcacaagtgatgttgagcatattgccaaaaagatgactttatttggtttgtggtgtgtacaagtattacctatgcatcgaccaacaataacccaggttntagatatgttcgagagaggtttggatgaactggaaatgccaccaaaacaaaatttcagtgaattactgtaagacactttctctacacatttttatgtggactggtaatattttcagtgaagttcatctatgctatttctgtttttcagagaccattcagttcatgagctgaatacagaaagtaagagttctactggaaataccaaagctgcacaagcttagtggagtgctaaaggttgaggagacaagcctcgtgaattcaaaagaccctacagtgactaccaactatgcaacaagatgatctgcagtatacagaaagtaagacacaagtcannatntggtattgtatcatcacacattc

SEQ ID NO: 9640 - DNA, 311 bp, Oryza sativa
tgcaagcttctcggaggactactctctgtcgcattcttagaatcctcatggcagagcagatacaaatcatctctcttccggaagaagtctccgttccctttgtccccttacctggttcaaaagctgcggaagtacgaggcctaccacaagaagtgcggccctggcacgaagcgctaccggaaggcgatcgagcagctcaaggcggtgcgcaacgccgacaacgccgagtgcaagtacgtggtgtggttcccctgcaacggcctcggcaaccgcatgctcaccatcggctccaccttcctgtacgcgctcat

SEQ ID NO: 9641 - DNA, 474 bp, Oryza sativa
  unsure (1)..(474): unsure at all n locations
tcctttagtagatggatttccttaaccgaatatagcaggaatcctactattggcgacttgataactcccatcgactgattccgagatgctacagccgataatgattctaagccgatgacgtctttgccaattaccaaatttcactattaacaggaatataacaaaggtgattttcaccatataagaggttgttatattcttttcccaaatagtgtaacctagtacaataatgatgtggttgtaattgaggccctgtttagttcccacacaaaaaatttacgccatatcacatcgaacgtttaacacctgcatgaagtattaaatataggctaaaaaattagctaattgcacatattgcgaactaattgtaagacgaatcttttaagcctaattgctccatgatttgataatgtcgtgctacggtagacactntctaatgacagaataattaggcttaataaattcgtctcgctg

SEQ ID NO: 9642 - DNA, 456 bp, Oryza sativa
  unsure (1)..(456): unsure at all n locations
agcttgcgtgctcgctcactaacacacttctgattgatggtctggccgtattggnttaaatcccatcggatttgaatgaaaatccaagtgcaaccattgtcctaccaccggaagtgcaaacaaatgacaatcctaatccatgctttgtcgacgtgcttaacagaaactcggctatccgggctgcctctacacatcgacagctcaagaatgatttagttgagcacatatggcagcgatatgggccaagaggaggttagagccatgtgtccaatgaaatggtgactttattattatctcacatcatgtatttctaagatcatttcatatataaatatatataattattatatacatgtttagtttacaagtcatgcggaatatttaaatgtactgtgcattgtcttatgtatgcaataaaatgactacaaagatcaattatacactagatcatcatga

SEQ ID NO: 9643 - DNA, 405 bp, Oryza sativa
  unsure (1)..(405): unsure at all n locations
gacgggtgcagcgccggatgcgagctcgcgctggcctcctcatnctcgagcgcctccaccccaatactttcttcgtcctcgcctcgtcgcgtcgctctgtcttctcccctccctgcctcttcgggtgatgtcttcatttcttcccctttcgtgcgaatgggaccaacggcggatcaagcgagggcgccgcagatcgactggcggcacagcttctccccatcctttggtgctgcattgctggtatcatcgtcgtgtttcccgctgttggtgcgtgtctcacggaggtaagggttgcagcgtgcataatgatgtgcggttgaagttgaactcagttttgtgttccttntttgatatttcgattntcttcttttcatagaaagaatggatnggagtaaatcagcagcg

SEQ ID NO: 9644 - DNA, 445 bp, Oryza sativa
agcttgcgtggaggtacgttgtttatgattccgcttaaaggcgttgacagtcaagtgtatgcgctggcgcacggcaatattctggttggcggcgcaagagcctccgctggcggtagcagtgttcaagttaaccaactgaacggtggacggatcaccaatggtgcggttattgaacgtgaattgcccagccagtttggcgtcgggaatacccttaatttgcaacttaacgacgaagatttcagcatggcgcagcaaatcgctgacaccatcaaccgcgtgcgtggatatggcagcgccaccgcgttagatgcgcggactattcaagtgcgcgtaccgagtggcaacagttcccaggtccgcttccttgccgatattcagaatatgcaggttaatgtcaccccgcatgacgctaaagtagtgattaactcgcgcaccggttcggtgg

SEQ ID NO: 9645 - DNA, 92 bp, Oryza sativa
ccaagtcatgctctctatgactcctatttagatcaactagctgtacgcatgcttcatcagggatccaacacatgctgtacgaacctggttgg

SEQ ID NO: 9646 - DNA, 313 bp, Oryza sativa
tgaagactaactgtgcttgcgatgcataattttcaaatacaatatctactaccactatgtgctatgctactaacatatatgcaggagaagcattcatctacggaggagaatcgacgacacataactgaacaattaatcaaaatacgtcgagaggtagagacacgggtggatgggcctctaaagccaatgaaataatatcaattgtgcccaactaatgcacttctgagctgaggaatcaacgacgagttcatctgtcgatgtgtgggctatatgggccagtctatggctctatcgaacccaaaacagtccagat

SEQ ID NO: 9647 - DNA, 340 bp, Oryza sativa
  unsure (1)..(340): unsure at all n locations
gacacttaaaccgcatcaatggcagcagcacacgagaatggcgactattacagaacagtgntattgtagcagcaacagaaattcgtattgcgtataaatagcaaaaggggttggttgtttctgcacattcaaggcacagattattctggtactgacacagctggggacagacaaaatagaagtactaccataacaatccagctccagcttagcaaatttctatgccatgatagatgtcaattttcaggcatggaaattggcaggaagcattttcatgctgcaatcttagattaccaatacagtatcagcgtaccacccctattatccgcactctgttctg

SEQ ID NO: 9648 - DNA, 434 bp, Oryza sativa
  unsure (1)..(434): unsure at all n locations
agctggctgttgaaaattgcaagatgtttcattataagagtaatgtnttggtattcaaggtcaatgactcccagaactcctnctttattcttgggtttgcataccatgtnccaagctgccagggactgaggttaattaattattagttaaaataactttaaaataaattaatactataatttttcagaataatttttataattaatttgagaaagcacacttactanttagtactatgagtcttaatgggcgcatganaaacgaggaaatagaaaantttaaaagggcctctcgaacgtaaggggcatcacaaattaatccccaccatccgagctctatataaactgcagaaacctcctaccaaattccaaagcaactgaagctacanaataatatggcttcttcctcctcctgtgcttggtgtctggtggtgt

SEQ ID NO: 9649 - DNA, 407 bp, Oryza sativa
  unsure (1)..(407): unsure at all n locations
cttctctgacaaattggatgatctgttctctttcctctctntaagaacagaaagtataagaatctgcttaagtaaactaaaacaacaagaaaatctagcgttattttgtcccttccaaacgagcagcagcaaggcgaacaattgaacacgtactggatcaaattcagttacggtccttatggaattcaatctggtttgaggtatacctgaacctgactgggatgccaacgcccgggcacatccggcggaggcgggccagagcgccgcgagcgtactcggcgaggtcgcagacgccgactacgacgtcgatgccggcgacgaccacgtcgtatgccgaccacgacgtcggcggcgatgaggaccttgtcgcccacagacagctcgtcgtgctcctcgtcgtcgtccgc

SEQ ID NO: 9650 - DNA, 349 bp, Oryza sativa
agccacgcgaccacgacggacgagcaccgactaatcgcagacgaagaacacaacgacgatgggcgtgcccgtgtggcggactagcagcgcgtgagcgacgcgaactgtggcaactgacagggacagcgtatcgaccgtcagcacacaccgccttcatgtcatcctccgattgtacgaacggctgcactccactccagtgctacagcaacaacacaaatggatggctggtactgtcggcgctaccaaaattgtaacactagcatatctgggcaacagaccaaactatctatctattatatactagaagtctatcaaactctctataaacgctcctaagccgacatgtgac

SEQ ID NO: 9651 - DNA, 446 bp, Oryza sativa
  unsure (1)..(446): unsure at all n locations
agcttgccttcaaatttgtaacagcagtatcattgnttgtagcattatcaagagttattggtgtgaccttgtcttctattttccattctaccatacattcaaaaacagcctgagctatgacaattccagtgtggggaggatccacctcgataaagttcaagacacggcattgcataacccaattctcatctatataatgtgccaccaaacacatgtactgaaggttttgattagacgtccataaatcagtggttaaacttattgattctgcctctttcaaactcttcttgagttgattnttttcagattcataaaccctcatgcattcattttttatagacttcctaccaataaactcgtagttaccattcatccatttcatcaagatattaaaccatttatgttctaccatccgaaatgaatactcatgagcaattatcatcttg

SEQ ID NO: 9652 - DNA, 470 bp, Oryza sativa
  unsure (1)..(470): unsure at all n locations
cattggcattgcagtgatgctaacctgtgtttggaatcctgttgttggatcgtgatccaacggtggtgatgatcngaatgtccttgtagattcgtcaccccctgatgatggcaacgatgattggtggcatcataagtcagagcagttaggtataatgtcaagtttagaatgtacttacacaaaaaagaaaagaaaaacactctggtttcttagtttctctttttgtttctgagacagggctactccgtatttaagttcgattgagcttaattaatttgtcgtaacctggtagtgagttctgtttaaagtaattatctggtttagggcaacatcaaactctagctgtcggcaaatgtgaaattccaagcttgtggaattagtgccatcaccaaccaccggtcataaaacacagaaggttcagtctaaacttagctcacctcaacttatgtatgatgactctcacataattg

SEQ ID NO: 9653 - DNA, 419 bp, Oryza sativa
  unsure (1)..(419): unsure at all n locations
agcttcacctgtccgcgcgttcgctntctctattgttctgtatcgtcatcggctttgtgggggttcgcccgaggaggcaattcgccgttgtaaacccggttcgcccggccggctgcctgtcgtgtcagcaactggctgtactcgacgaccgacacgtcgccgatcatcctatgggcttcggcttcagcttggtcgagtgtcaacactgcaaaagtaaagggtgtaaccgcgttgagcgtcaaacaaagcaaaataacaaagcgcaggagtgcatagcgaaagagcagtcttactattcgttccctcagggagaaccaacttcggcaaaccgtcagactctttgccttgatcaactgcgacttgccacgattgggagaggggaaagatgcgaagcatgcaaaattcctccaccaagtcgt

SEQ ID NO: 9654 - DNA, 472 bp, Oryza sativa
  unsure (1)..(472): unsure at all n locations
ccctgatcacccanantcacatctgactaaactgtctttcatctctagtttggtgattcctttcctactntcttgtaccatatcaccagctgtccatgcctcgcgggcgttggaggagcagcaagcaagaagaagtccggccgtgttctgtatgcatataactcagctgaaccattcacgtaaatcgcatggagggagtcgtcatggatcagcatctctgtgttgcaagttgtaaacatctccggaaccttcgcgctcaaatatatcgatgctcgatatatacgttggtttcattaattggtatagtgggtatgttgaaattcaatggaactatcaactatggttgattatcaaccatgcaccgcaaatattataatgctgacctgtctaagagcatccccagcgctcatccaaatatcatcctccatatacccatatggatggccatccaaataatattcctcattcatat

SEQ ID NO: 9655 - DNA, 316 bp, Oryza sativa
  unsure (1)..(316): unsure at all n locations
agcttggagctcgctcatagatcacgacatcggatgatggtctggcctagaagcagatagatacaacaagatccaatcatgcttctatactccttttaatcaatagctttaccatcttcatcaggatccaacacagctgtagaaccaattggtgttgaatttggcttgcaattctccatcttgaaccgtctcnaaagatcattcgtgtacttcatttgatgcacaaatgtaccttgaggtggctgcttaatttacaatcccaaaaagtacgataactcacccatcatgctcatctcanatnttctgcgcatagtct

SEQ ID NO: 9656 - DNA, 446 bp, Oryza sativa
  unsure (1)..(446): unsure at all n locations
ttgactttctaagttggttgttcttattcagacagcttcttgcttattctanacgggatagttctggtggagaatgttcaaccttaattatgcagtattgcttcaggtacccctttatttttcgtacaangtgatccttgcttttgctatcactgcatgaaccatcggatacttgtttcaacttgtatgatatgcgtgcattatgtgagatagaagatcactatcatcggctttcataggagggtggacctttttatatctttaatacttggaaagaagcttcttgctccaaatacttagtattgtcttatgcgaagaacgttgctgaattgttcttttattggctattgtatgccttattaggctcatgataactattatgatgaggcagtcattcagttttaaccatgttaaagaacataatggtgttcgcgtacactctattc

SEQ ID NO: 9657 - DNA, 393 bp, Oryza sativa
  unsure (1)..(393): unsure at all n locations
tataactgattcgagaaaatcaatttattttatgtaggaagtaactctttataaaatagaagttactattcataatattggaaattactacactcctaatgaaaggtaactgaaaaaacactgtttaagggaagtaactcttcatggtattaaagtaactatactgctatagagaagtaactcttaatagtattccatgtaacaacattgctacaaaagtaaatgatctgaatatatacattcaatattggtcttgtattatgatatatttccaatagagtacgatggttcaatatgatcttaaaagcaatatatattntaaaagatataagccaccaaagaatttaaaaatactagtgcgatggtgctagactaagattctaaaattctact

SEQ ID NO: 9658 - DNA, 384 bp, Oryza sativa
  unsure (1)..(384): unsure at all n locations
ctcttatgctggacgctatggttatcttaaacgcaacgaacaatgaaggtctaacacctcttgatgttgccatctacaagcgtgaccaatggtgtacactttccacagtaagttaattagcacacgttcattctgttttctctcatccttttatttatgttcctactttctgtatagntcaacccacgaataatcacgatgataagctgcttggaatggcgtggggctaacagccgtccatggtgcctccctgaacgtcaaagtgagcagctggacatgagagagactgagaatatactgtcaagctngtacagtaacttgtcgcagaacctactaacaatatcngtgctgattgcagcagcgtcttttgctgcgttatttact

SEQ ID NO: 9659 - DNA, 444 bp, Oryza sativa
  unsure (1)..(444): unsure at all n locations
agcttaatcataataatccgcanatctctatattacagcattaaacttcggatgatcatatcttggtcatacgaactctgaatcgacccgttcaagtctcctaatgtttggtataacctaaagaaccctgtgctttctttttatgtattgttattgcttctttgtaggcttgtagctttgctggtgtgcttcgcgtagctctcgtcgtcccggaggttcccgaagcgtggttcgtggtcgtcgccgaaggttcggaaggccgttctctctgagcaaggcaagtcacatcatccttgagcatattgaatcccagtttataaaattattttgaattaaattaatgcattatcgctttatttaaattcctgcgttatcactgttttatttagccatgcctatttacctttgttagacattattattgctattggtattattaccttg

SEQ ID NO: 9660 - DNA, 479 bp, Oryza sativa
  unsure (1)..(479): unsure at all n locations
ttctttatagtataatagatacataacatacgtgccncgactttgtatgctaaatattatagggctatagctgcaaaanatttgcttccataaacacatgtctggacagtgaggaaggtgagttgggatgcgattagtgtgtccaaaagtaacaaaataatattatggattgataagacctttatcaagtactatattgtggaatgataattatgatcagacctgtattaatcatgaactacgtgcaagtgagtgtacgtgttgcacacagaatcaaatagaatagtttcgaaccctttggttcctgcctagtaccacataaaattgttctttntttggttgtctacagacatatgaatgacccttcacaacaaagtccttttttgtttacatttcacacaagcttatatgatttaatatttggaattcanaattaactcanataaatagcgtgggacaaaccttctctaacattcttg

SEQ ID NO: 9661 - DNA, 366 bp, Oryza sativa
agcttgccgttcgccttgagaactttctctcttttcgccagccactccggatggatgacttcacggatgaatccggcctccagaagtctcgccacctcctcgcggatgaaggcttgacgttccggggcctgccgccgcactttctgtcggaccggccttgcgcccggccgcacggcgagacggtgctcaatcacctccctggggaccccgggcatgtccgctggtctccatgcgaagacatcagcgtttgcccgcaagaaggagacgagcgcgtcttcctatttgccatccagaagaccaccgatccgtgtggtcttggatgggccgtcgcccaaagcaacctccttgaccgggacctcgtcgcat

SEQ ID NO: 9662 - DNA, 435 bp, Oryza sativa
  unsure (1)..(435): unsure at all n locations
gggcaatattaacataacagaatggatgctctcttatcttaattattctatgacaaaacaacaacagagcagaccatgtcttcaaattaatgtcacatgtttaagctagggaaagagagagagaaacacgtaacagagatgtaatatcttacagtattaacaagatgaagagcctttttccctgacccagctgaatccttccttatccataaatgatgctccttgttnggcttctttgacaccctatgaccacaataaatgaacacttaatttggtacatggtgatgttacaggtcaaaacgaacatcataatatcggcagctgtcgttagaataaagagggcgtgtatgcagctgagctactcaaacacctcaccgagaaagaaagggatacctgatctactactcgcatcacatgtcttagctttcgagtcat

SEQ ID NO: 9663 - DNA, 460 bp, Oryza sativa
  unsure (1)..(460): unsure at all n locations
gcatgcaagcttatcaagtgtgagttctggttgtcttatttcaaattcttaagacacgcgatatctgctaaaggagttgctgtggaccccgaaacagtgaccgccgtcactgaatggaagcaacccaagacagttactcaagtccgcagtttcttatgtttggcaggatactaccggagattcatcgagaacttctccaaaatcgctcgacccatgacacagntgttgaaaaaagaagagaaatttgtgtggagcccgcaatgcgagaaggcgttccaaactctcaaagaaaagctggtttcctcgccagtgttaatcttgccggatactcgcaaggatttcatggtgtactgtgatgcttcgcgccaaggattggngtgcgtgctcatgcangacggtcatgtggtagcctatgcctcacgccaactacgacctcatgaaggcaactaccctacacatg

SEQ ID NO: 9664 - DNA, 477 bp, Oryza sativa
  unsure (1)..(477): unsure at all n locations
nttcgccgatcagtgcaatgggttccatctccggcatcgacgatctcgtcttcccacccgggcagacgtttcggttcggcagcctcgacttcatcaccaacaacttcggcaagatttctctcctcgactcggaatcagaccagtcgggagagaaccggctttcggtcccgtttggattcccgaacgcggctgaaagctacttcaagaccatctcaaccgagtcggcttcaaaccactcggccgagatcgcatcttctccaacgacaccagatcaagatgatggggcttacccaccagtcctgatgaagctccccgacgatttagcggccgtttccaccacgacagcgtcttcatcccgcaggcctaggcgaaagtcggcctcaacaccgatttcgcctagcttcagggaagtcggcgtcatcctccaaccactcggcacggtttcgacggatcagctagatgactacaatagctctc

SEQ ID NO: 9665 - DNA, 463 bp, Oryza sativa
  unsure (1)..(463): unsure at all n locations
acaatagtgccagttgcattcaatccaaccaatcaacagttatcttatataataaatcatatgttttacatacgcttaattacatgcaattcaactaatcaaccggccattccaaggaatataagatttcagtgtaacagtatttattagctctcagtacagataacataagcttacaatagcgctagttacattgaatctaaccaatcaacagcaatctcagataataaatcacatattgtacatacgcttaattacaatcaattcaactaatcaaccggccattccaggacaaaagtatagtaccatatctcgcttgtgcactgctagtctgccactatagactgctgcanagcacaatgttcagtgctgatatcttgctatcttctggacacttaacctgcggacagacagatcataacagcttgtgtcgatgcagctcagcgcattatcaatgttgtct

SEQ ID NO: 9666 - DNA, 416 bp, Oryza sativa
agcttatctttctaaacttacatctttttatcccacaactagatcacgttttgaaagtttgctcaattgattcatgccaacatgggctagccttctatgccaaaggcaacccaaagaagtttttgcaactaaacaagttttcaaatttgcttcactagaattgaaatcaaccaaataaagatttccatatctaaaacctttgaacacacaagacttgtcaagaaggctagaaacaataacttcttgcgggaagaaagcacatgacaagccaagatcacaaatttgagcaaccgaaagcaaattaaaatttagagatttacaaagagagacattgtcaattgacaaatcattggagatagcaattttacctaacctaattacctttcctttgctattgtctccaaatgtcactttct

SEQ ID NO: 9667 - DNA, 461 bp, Oryza sativa
  unsure (1)..(461): unsure at all n locations
tgcacgaggaggatgcaattcctagtctcattgcttcttcccgaaatcaatattagaaaaaaatatgtgatttatcaaatttatcatttgctaaatagtaaaggcgcatattttttctacagattattttacatctgtgttttatatgtataacatgtatttatcctcgtacatgcagctcctggctatcaagaagatcaacatggtagatctgtcattatcggaacaagatgagctcatagacatgcttgggaaaatgtccaatttgaagcaccccaatatctctgcgcttgtgggctactgtgtcgagtttgggcactgtgcacttctatatgaatatgcagaanatggctctcttgatgatattttgttttcagcagccacaaggtccagggctttgtcatggaaagctcggatgaagattgctctttggagtgcctatgctttggagtaagtacatt

SEQ ID NO: 9668 - DNA, 449 bp, Oryza sativa
cttcacagagcgaggttgagtccgcgctctttatgcgcacagatgacatcctcacaaaggcgctcggaaccaaagaacatcctggccgaacttggggaattggtagcgatgtgccctggaagcatggactccctcagtacagatcccaatacaggaaacggaaagtctccaaggaagagagggacgctcgtttgaaggacgaacttaaggttgaggtcattcaagaactagaagctagcatgaatgcaagggtggaagaaagggttaacaaggtcctcgccgacatgaatataccccgagtcacaacacctgctgtgcaaccaactcctcgtgtacaacacgacgcgagtccgtcacagcataagagtagttgtgcatccacagaggtgccggcccctggtctcccgatcgcaccactagctgcagtggaccacatcgaggtaattggt

SEQ ID NO: 9669 - DNA, 459 bp, Oryza sativa
  unsure (1)..(459): unsure at all n locations
tcggcttcatacaactgcaggtacatccaccatccgccttcaagactcattcctgcacggcttgcttgcgatagataccacgcctgctcctatcaacacacattatttcataccgatgcacttgtgtgccttgagcaacaactctatgtctccgtgcctttntgattntatcttccatgtactttgtcactacgttgccaaacactatgttgttatcggccatggacggaccaattttcttgtatcgatccctanagtacgctttcgtgccgtgaaggatgaattcaacaatagcaaccaatggaagtatccaaactcctcgcattacccagttgtacacctctngccaaatggttgtcattatgccataccgagatccatcggtgtcgaacaataaagaccacttctccttaggctcattctcaatccacntgagtgaaattctgatggacgaccctg

SEQ ID NO: 9670 - DNA, 438 bp, Oryza sativa
  unsure (1)..(438): unsure at all n locations
ctgcatgctagacatgagatcaccacctccactgtaattattgctacctgtaggaagtgagaggatgagtagtccaattgttggagccaaggctaggaacatctcctatgggtaaactaattgatgatgaattgaagaggtaattatattaactgcatgtttaattttgtggtgaaaccaacaagcaggctgaactgatcttgcaagatcactgaataagcatatgtaactgtcttgttattagttgggagagtatacaaaagtagtattgcattatgcatcgttcaattaattaggatgcatccatgcatgcaattaattaagttcttgagagaggagggtgatctagataattagtcgtgcctacattcttaattntggcttaaagnttgtaaatttaaatttgtgttgcttaattatccatgcttgctgaacatt

SEQ ID NO: 9671 - DNA, 465 bp, Oryza sativa
  unsure (1)..(465): unsure at all n locations
gctctntcaattatagacagtcccatgactctgtccttgatgccccgtcttaggttgagctcagcttgactgagttgtcttgactcttgtgctatatctaactgaaggatgacctcgagggccatgtggaggtgcatctttccttgngagatgagatttctgctccaagctttcagtctaccagctgttgcgcccagcttgtggtagagtctgtgatgaacttcatgatatggagggctcacagcccatgcttgagcaacgatctcctggaaacctggaaggtgaatccagtagttctgaaaacggaaggttctagcgcgcggcgcgtctccttgtcccgataataagaggnggcagtgatctgagagcgaagtcgagagcacatggaggaggtgcttctcanaggcggtatcctaatttgtgctacaaaagaaacgatcaagtttgaccagagtcnggttatct

SEQ ID NO: 9672 - DNA, 447 bp, Oryza sativa
  unsure (1)..(447): unsure at all n locations
gcttaccgtcgttccagcttctgttccatttcttgccatactaatttgcaggagcttgtactttaccaaatatcagtatgtgaacttcatcttcaaaaaaatcattttgtttctcccttttgcttttgatagtacatggtaatttcagcctcggtatctatctagctacatgtgcttcatacatacagaatctgtagctgttcagagcaactattgagctttctgaccccaccattatatgaggtacagtaccttttcctcaactttggcacttctgtttgtttctatcccaaaggcaaaagtctatgtattacttttaataatctatgtagcttagcatgctgctgttttgatctccaggtgagcattatcaactggtagttntttcaggcacatcactgtcaagatcagccagaatgtccttatctaatactgctgcatctactc

SEQ ID NO: 9673 - DNA, 424 bp, Oryza sativa
  unsure (1)..(424): unsure at all n locations
atacttcatggaagacaggaactcatgaatgcaaatggngtaattaactaacacgcttaatttctctctctttctcacacattatgtattcataactaactataatatgtatgcaatttttattctaacattnttttcaggggcgatggtcagatgcacatttctgccacanaatagagcaactttttccagggttcatgagtgtggcctacgcactntcaaaggctacaaggagtgacttgaataagttgctgggaagggcttgacaaattaagttgctggatccatacaccacttctctcgattgttaattgctggtatgtaagacgaaactaacttcgtttcaactgcaatttaagtttgtacacaaataatgttgtgctgtctactttctttcgtctcaaaataagtaaagccttgaact

SEQ ID NO: 9674 - DNA, 419 bp, Oryza sativa
ctgatatcctatgtgaggaacattgagaagcccggatgctctatggagatcctgaaggccgcgatcagctagatgtgatcagtgaatgatgcgctgatcgatatgaccgctcgcttctatgcagagctgactctgtgcaatctgaactgacagttaccttcatcagacaagaaatcttagccagtgcgtcgttgcgtgcattatatgacatcatgtcatctagtacaattggatcataatcatgagtgactagtggatactgatcttatgtgagctgctctgtgtgctgttctgagctggatgcgatatgaacagagcccagctatgcagtcttattcatgtttgatgggaagaacactaccattcatgtcagtatacactgcacagacgtgcatatgaccagctatgggatgtgaata

SEQ ID NO: 9675 - DNA, 331 bp, Oryza sativa
ttgagcaccaggtgctatagatcgaaccctcaacctacgctttactatacgaagcgcttaccagctgtgctgtgcttatcatttgagtgcatgggcgaatatgatgcagttacactagattagcaagccgtgtgcaatgaaaatatttccacaaaaccatatactgatgagagtcgggacgcgggaagtatttgattgtatttggatcgttggtcagaccagctggccagtgagcgcacacactcttgatccaatgaatagcctggtttctgaaacaacaaatttagtgctcgaatgttagtctatactactatgagggtaagggagtata

SEQ ID NO: 9676 - DNA, 438 bp, Oryza sativa
tgcttccagagcgacgtagttatcggattcttttaaaaaactttcttatataaaggtgtttatacgaaaaacatgttaagttgtttgggaaacgtgtctatagataatgagaaaatagcttaggtgtagctcaatcaaacttagccttataacaatagaaaatacaacaaatgccattgatgaacgctctactttaaacaatacaacgatgaagacaactttcaaaaaatatcattgtacaagccaacttatcatataaatactatcattagggtcatcatccatttattgcaagaaatataagggcatgtacagccgtctttattagtagtctctctatcgccatgcaagtaaatttgatgacatggaagaaagagaaaggacaaaagagaaatatggttggtatgcatgacaacagctcatagtcgactcttaaca

SEQ ID NO: 9677 - DNA, 385 bp, Oryza sativa
  unsure (1)..(385): unsure at all n locations
tgggctgctcccatgtcgctctcgctgcatgtgaatgaatttcttttatcgctcgcgatctccaccggatgtgccattaaccaaaagccatcgtcctcgcggcgagctcggtgcaaccactgcttccacctaccacttctactactcatacacgcagtgccattggtgtccacctcgatcgatctctcccctcacaatcctctctcacgtacgcaagctagctagctatctagccatgtcgatcagtccacgcttcttggccgtcgccgccgtcctcgccggcgcgatgtactccgccgcgacggtggccgcggacacgccgggcggcagctgcccgtacccgtgcctcccgccgncgatcgccggtggcgcggtgaacagctac

SEQ ID NO: 9678 - DNA, 460 bp, Oryza sativa
ctgcatgcatgcaagacttgcttgaacgatcttcttctgtctcatcaagataatctctgatgtcaaaggagaaaagatcggctaaaacctgcagcaacaatttcggaaagagtaagagctgggtaaaatatagccgatctaattattgagacaaaggaaaacttactgggatagcagaagaagctggttgttcttcctcctcgatgtgatgactccccacggccgatggagtctggtcacttgacgattgctgtacaggaggagaaggaggaggaggaagctgtaggatagataagtgttatatagagtcggttgagattgattaagtaaaagaattaaagatatcttactggtggagccgacttgacaattgtcgctgctggttttttcttcacagcagttttcttcttctgcaaccacaaagtccatgagtaattaactaaagagggaggtaacttca

SEQ ID NO: 9679 - DNA, 482 bp, Oryza sativa
  unsure (1)..(482): unsure at all n locations
cgacacaagatactcagcttatgatgctgaaatctggctgggtgtagcgcatacgactgatgtggagcgcatgcctacctggaagggctgtagcatctcccactttggggagcaaaggccacctgaagatagaatacaacactctatagtatggacgcaacccacgagtagtccccaaacaatccttgggagcatccttctcatagaagaaagtagtgctggtcggtgacaaagcatcctctacaaagatatgtggacgattcaggtcatcatcatctaaccccaaagctgtagcaaactgtgccatagagaccctatactgctgcacctgaatggtccacttcacaaaatcatggcccttcttggtggtgccaaagaaagcggtggagtagagctgaccaatcacttcctcattctaggaatactgcaaggccaacagatctgccacgtgctngcactcacacaccttgcgcacctcattg

SEQ ID NO: 9680 - DNA, 447 bp, Oryza sativa
  unsure (1)..(447): unsure at all n locations
agcttctcttactggaggggggaatgatatatcaagaataagtacaaccacagtactcagcaagttacaccgggagatacatgattaatgcaaggggtacaaggagtaacaataatagggttgggttttgcagtaaagagcatttaaaagacacttagttgctcaaagctattttgtaaacacgatcctagagctacacaatattattaatcaaggccgtgaaccctcacgaacctgccttaacccaaggcctacaatgattcggaccgaactggcaacccgacctatgtcccagctcgtcccaagccaacccaggccaaccattccatattttagttgttaagcaaattttaagaattaaaccactaacttgggtacattgctaggctttgccatattcganggcacggctattcgaataaattatactctgatcagaggtgtaca

SEQ ID NO: 9681 - DNA, 466 bp, Oryza sativa
  unsure (1)..(466): unsure at all n locations
tgccatatgcggaattctcgtacaacaacagctaccagtattctctgatggcaccgnttgaagctctatacggccggaagtgccgcacacctctcttctgggatcagacaggcgagcgtcaattgttcgggacagaggtattaacggaagcagaagagaaagtcagaactatcagggaaaggttgagaattgcccagtctcgacagaagagctacgcggataaccgccgaagggagctcacttttgaagcagtggattatgtgtatcttcgggttactccgctccggagagtgcaccattttcaaaccaaaggcaagatggcaccacgtttcgtgcgaccctacacaatcttggaacgaaggggagaagttgcttatcagttagaactttcatccaatatgatcggtatccatgacatantccacgggtcccaactaaagaagtgcttaagagtacctgaagaaca

SEQ ID NO: 9682 - DNA, 425 bp, Oryza sativa
  unsure (1)..(425): unsure at all n locations
agcttgttgtcatagcagntatcaatgtgttgttgttttatatatattttgggtatgctagcaatagtctgctgtctagtaattcaggtagaggtaagcttcttatttttgggcactcagtttatctcatcctcaatgttgcaatgtagcttgtatgctgccacctgtctgggaatttgtcagtgatatatgttatgtgtatttagatggtcttgtaggatctagctcttaatcatcctgttatgttctgaaagtagagatggtttggttctgtctggcatatcatccagttgccatgcatgatcatgctctggcaaccaggcaaatagatgacaccaatttcgntataagatatatcatctatccattctctgctgtgggataacttgcttccaactttaagaattaactacagaatgaatatt

SEQ ID NO: 9683 - DNA, 424 bp, Oryza sativa
agacgtcagcgagctcatagagcgtctttcttattgacatacgagagacctctagaggtagggacaaaatagacctttcacgcggttagctctgtgccaataaataagcttacagcccttcgtaagtactaaaacagagacgatggctactgaacacagataggcatctttactcgaatgctcatcgaaatcaacgcgtcaagatcacaacaggcacgagacacgcatgcatcaattcagtggacccacagacgactgtcaaatcaatactctaaaactcgcccaaatgataatgcgagttcacccgtgtctttctgaattcttgctaacattaaatcagcgactcgtcttcctcggatataaacattccctgaacctcagcatcaagtaacaatggcagcatgaaccacgttgacagtgtcag

SEQ ID NO: 9684 - DNA, 379 bp, Oryza sativa
  unsure (1)..(379): unsure at all n locations
ctttatcggacncaaactaaaattgacctggaaatctttgtcgcatctgacgaacatctactgcattcctatcgactagagtcgaacaataatgtcaccccgcatataattgggggaaaagaaaaaagagcaaagcaagctagctagcagcccaagccgcaaagcaggcccaaccaagcaagcagcccagcagcagtaatagcactgcagcatcagcggccggcagcagcagccagcagcgtaacacgaataattgccaacctcgagcaacatcagcttaaatagaaaagctatcagttgatctataataccggctcaaacctttttctttgaagcgagaatgaaagtacagtgtaagtatgattcaacttaatgaaag

SEQ ID NO: 9685 - DNA, 459 bp, Oryza sativa
  unsure (1)..(459): unsure at all n locations
acctataatactcaagctgtcggagaccttgcatggacctgtttcgtcgagacccctttgtctattccgcgcacgtggntcctcacgaggagggagcctctggcgttgatagcactgatggtgcactgctgctcacctttcgccctggcccgtcgcataagtagacgagcagttagtagagatagcacgtgagatattctcgattgctactctgctacagtcgtgtagtgcatggatataccggcgtgtggtataactgtgtcggagcctgtctttattttattggcttaagcaacttgaaccttaatgaaccacattaatagcagtattaaattcaagaattatggtagtcgtgcgtgattagctataatagtctgttctctctcttggctcggtctgtatgggatatttcagatggtgacaaccaggagaagtgctgctaccggtgatggcaaccaa

SEQ ID NO: 9686 - DNA, 326 bp, Oryza sativa
agcttggacacgagcatagctcatatctgttacacctgcgacgagctgcggttgataattcttcacgttgtagacaataatgacagactctctaaatcatatttttaactatggttcttgcccaatatatttaactatggctctgtattcaaatgccaacaaattagttagtaaatatttaactcaaacatatcatcgcgcatcgcggtggggttggcgaggactggagaataactccacctgttacgcatgattatgctttcggagaacataacctgaatgcttgataatgtccatgcagtgacaaacaccagtcattgatgata

SEQ ID NO: 9687 - DNA, 415 bp, Oryza sativa
ttcgatcgagcgctgcattaagataagcaatcaacagttgctcttattctatcctccagatcaatcacttgcatatataccactataccaatcgaccaagcagacaagcaaagcaatatctgtttctcttgacgacgccggtgatggcacagtctgcgaactgctgatgggaaaggagatgatggacagcaaggtcatttgtcacacatcattgctgacctggcaaggaataagggaaaatagaaagaacataagagtcggatggcacataatcaacattattgaagaagatggcatttgagagagcgccattagagaagatggctaatagttcaaaatgctcgagcacggaggccatggtggtgttcgacgactccacagacatgtagcgatgcagcatcaggtacgtcgagct

SEQ ID NO: 9688 - DNA, 416 bp, Oryza sativa
  unsure (1)..(416): unsure at all n locations
agcttcttctcctcctcggtttatatatcctcaaattaatagtagtattctaagtcaaatattacagaaatatttagattctaagtctcataattaagaaacaactttgatgaattactaccattcatctacgaaacgaaatatcgactaatttttccttacaaaatgtcaacatattgtaggtactccctatagtattgaccctcctaatcccctccctctcaggctgtgtttagttccacgccagaattggaagtttgaagaaattggaacgatgtgatggaaaagttgaaagtttgtatgtgtaggaaagtttgatgtgacgaacaagttagaagtatgaagaaaaagttgggaactaaataaggcctcacttatatgtgggtccaacctgattntaaatcttaaactatgct

SEQ ID NO: 9689 - DNA, 467 bp, Oryza sativa
  unsure (1)..(467): unsure at all n locations
tgtgttacatcttatcttattcatgcatattntcacggccttttctctaganacacactaatgtaaattggtcaacaaactggtagataaacatcacgctgcactagatttcgtgcgattgctatgaccatctgtatgtctaagtgatgctgaactttcatcacattacaacagatagctaggctgctggactgcaccacatggtccggagctggtccaggtttcatggatgctgccacccaaggcgctcttgaggcgggcaaaccggtcggtggcttcaagattggcaaggaggcgggtgaatggacaacctccaattttcatccttacctgccatcagagtcatatctcacctgcaggtagctggatcgcggtcgcttaacttcagattgatttgagtgtgtgtcatcgatgcatcatgcatgggaatcaatctgggctattctcctggattcaggttcttctct

SEQ ID NO: 9690 - DNA, 439 bp, Oryza sativa
  unsure (1)..(439): unsure at all n locations
agcttctaaggaaacatggtgaacaagcacatggtaatctcacatactataaagcaacagacattgttttcagtattttattgagaaaataagaaaagaaaatgaccatggacaggtaattaaaatttcaaattaaacagaatcacataggagaacctacgtagggcgtggggttcagataaatctttttggaaacaaactttacggattaatccgacgaaaaggaataaatccaaggccggatgaatccggaggaaactgcatgtacggattaacggaggaaagaaatcaatcaacgccggatggggcaaagagtgagattggcatcacaaaaccattcgcaaatcatcaaaacggacgtcgttaaacactcccttttactaatccaaacaaaacgatgaacaaaccatctgcttttctcccncaaacaaaaaaaaaa

SEQ ID NO: 9691 - DNA, 377 bp, Oryza sativa
  unsure (1)..(377): unsure at all n locations
gatgatctttataagacaacgatgtcgtactcttctcanagcctcacattcaacctcaaaactcttggcagatcctgattgtcgaagggtgaacacttttacagccacaattgcaccttcatcttctaaagtacatctatagacggaaccataacttcctttgccaagcaaattagcttctgaaaattcattacttcctctggctaatgcataatatgaaactctatgatagtgttcatcagtacctgngattgttgctcgactattttgtctccgtttaagcttcctgcagaactgaattagaacagtagctgaaactaacagcaagaatgatcctgttattggcagggcgaatttaagagacttatngccaccgt

SEQ ID NO: 9692 - DNA, 453 bp, Oryza sativa
  unsure (1)..(453): unsure at all n locations
agcttaagctgtgtttagatccaaagtttggatccaaacttcaatccttttccatcacatcaacctgttatacacacacaattttttagtcacatcatctccaattttaattaaaatctaaactttacgctgaactaaacacagctttatggtgtgtttgagaagaatgggattgagtagattgagaagatacgtaaaacgaggtgagccattagctcatgattaattaagtattaattattttaaattttaaaaatagattaatatgattttttaaagcaacttttctataaaaattntttacaaaaaaatgcaccgtttagtagtttggaaagcgtgtgtgcgaaaaacgaagtgctttctccctcaatgtcctccgaacgaacgctgccttatagtagttataggtcatggacgcctgacggatgacgactgacatgaagatggtaagtt

SEQ ID NO: 9693 - DNA, 411 bp, Oryza sativa
  unsure (1)..(411): unsure at all n locations
ttatgtgaggaattgatccttctatgtggcatgaggtaaccctgngtcggctngggaaaggctntgtcgcgaacctctgacaccggccagtgtctagagtaagttcgtgtcttgtgggtaaagtgtaaccctcagcagaggttaactaactgttcgaacagccgtgcccacggtcatgggcggatgtgaggtggttcccgttgcgtagatttgtttgcctgtgctttgtgaaaagttgttgtggtgtgggaatcgtaaccagaatcagcctatgtggcagatggatgacctgagtggtcagaaacgaatctgtgtgattcgggatgtctgcgggcatcatagactangcttcccgagtggaagcggattgctntgctgctgggcagctggactcttggagtccgagaaaat

SEQ ID NO: 9694 - DNA, 452 bp, Oryza sativa
  unsure (1)..(452): unsure at all n locations
gcttagttccctctctaagtcagcaaaatctctctacctactgtactctacctactgttactttatcccttaattttatctcttggaagctacacttaccgaaccatcttaagctcttcttgggaaaccaaaaagagacgggtttgggagttaaaagagacgggttatatccggttttacggtcgatggaagcaaaatagacttatttccactcccgaaactatgaatccacaaatccaagtgctataggctggggctgcggaagcgcctggaggcccaagaaagaagcccaattgtgtacgtactgctttntttggaatggaattgttagaagaaaaaggaataagtccactctgactccctaaattattgaccgatctgattcgtgtccctaaacactagtaccgaatttattagaaccacaactattaaagccggtggtaattgattct

SEQ ID NO: 9695 - DNA, 475 bp, Oryza sativa
  unsure (1)..(475): unsure at all n locations
gcttggagtcattgggttataactntaagtaagaaaggatgtggtgtctcaccccaatctggcaccgccgtacaacggcacctgacaggagcgtgtcgtanggaaaacggcgtgaaccgcttcctacgaaaccacgatctcggtaccagtcccaggacatagtgctggtacccacagtgacaaatatgaatcatagcaatccttaaaataaatagaggactctattaccttaacttaggttgcaactcagaacaacccgagaatgcaaccgacgacacggacgaggaaacaccaacaacagcagcagcagcggaaccaacgaactaacacccaacaccacaggcggcggctaggaaccaggacgaaaccctaatcttcacttcactttatcttctcttcagggcggaggaactatatatatatatatatntatatagagcaagggtgagtactntcgtactcagcaagtcacggg

SEQ ID NO: 9696 - DNA, 408 bp, Oryza sativa
  unsure (1)..(408): unsure at all n locations
agcttgccgacgccatagacgcgtgcatatctatgactgcccgacgtcgncgtgccagcctcctcgccggcgtncgctctgcccgcagcccgtcgccgcttggctgccgtgctcacccaccgctgctctgccgccgagctagctcgccgtccgctccgccggcgcgctagctcgccgtacgctccgcctgcagcccgccggctctccgcccggcccccgcatacacgcgtgcccatcgtctctccgctcgccgctggcctaaagaagaaaagagagaagagaggagaagaaaaaaaaatatgtgcagctgacatgtgggtcctatgtactttcttttaatatttttgctgactaggatgccatgtcagcgaaaccacccatatatactggcttggaacttttatgcat

SEQ ID NO: 9697 - DNA, 482 bp, Oryza sativa
  unsure (1)..(482): unsure at all n locations
tagactggaggaacaatccattagggttacctaaatggtccgagcgtctcttgtgtgggtgcagagatcgctggcaggtggctacatcctttgctgaacaaacatttcgaaggagatattntgtctgccccaatgtagacaacgatttcgttgtatgtctaaccatttacaaaatccgctatgatttgcacaaaattactacccaaactgaataacattactanttttacagggcaatccaaggatgggtggatttactcgatggatcgacaatgtcactctatcatatcatggccagaagataacagagtcagaaacacaagtagagtatcaacgattgaaggaccacgagaatacaatgcattctgaccgacctagaaggggtcgataggttaccgcatgcttgattcgtcgggatcgacanatatgtaccgtgtatcgatggcacttcttatctatcttatcattacaatgttaattat

SEQ ID NO: 9698 - DNA, 442 bp, Oryza sativa
agcttgctgcggtggccatgcttggtatacaacgatagtgttagtctagcaggcacgtggaacatatagatagcacataagtaggcaggatgggcattcgatatttggtgaaataatgcacgtccggcgtgaagactcctcgatttgggaaatttcttcccccggccttctgggccaagggaaaaaaaatcgggcgtttcatccctcaacccgagcgagcagaaaaagcaaaaagtagaaaatcaaaagagtcatcatgcaaggcttcaattgtgcatgcagtgtgggactcctgaaaggcacgatcatgttgagatggacatgcggtgtattaaaggtgtatttggtttacgggcgaagttggatgggatatgacaatattaattaacaacaaaaataaactaagcatccctaataaatcctaatcttaaaaataataatc

SEQ ID NO: 9699 - DNA, 439 bp, Oryza sativa
  unsure (1)..(439): unsure at all n locations
ggctgtccatttccacgatacctacggccaatcgctntcatatattctcatctctctcgcaggaatcatccaccagatactaaacaaatcatcacacagagccaaatggttgtgaacttgtaacaacaaagaatcatatgtaatttccccaccaaaaaaaaaagaatcatatgtaattgatcatgtcctctgctctctttttattgtctcacctccgagtgcagtggccaggatatttattccattttgttctactggaaaatgctgcaagctttcttaccaacgattactgcatttgcctttgaatcagatgggtgtgagcgttgtggactcttccgtagcgggcctcggagggtgcccatacgcgaaaggtgcatcgggcaatgtggcgacggaggacgtggtgtacatgctgaacgggctggggatcagcaccaat

SEQ ID NO: 9700 - DNA, 467 bp, Oryza sativa
  unsure (1)..(467): unsure at all n locations
tcttaagtcacctgcngcatgcaagcttaattaacgaaaggaccaacacatgctgatgcaatgcacgggcattaacttgaaactccgtgctgtactatgcacgatacgtgtttcttcaaatttcgcatggacgggtgtggctatcctactttgatgtacgatactaaggtcagaaatgtactgccacagatacagcaaacatgaggcctcaaaaggagtacaattttgtgctcaaatttccctacatcggctaagagtacaattttgtgttcaaattttcctacaatggctttggttgcttgtgctcatattagacgtctcttttcatgtgaaatttattatgtgtgacatgcaaccacacatgtgaaatttattatgtgtgacacgcaaccacacgtactaattaagctatccgtgtatacaataatggagacactctttgtctctatcctactcccttcagtact

SEQ ID NO: 9701 - DNA, 474 bp, Oryza sativa
  unsure (1)..(474): unsure at all n locations
tcctagaagattcacccaanatctccatagactgcgaccaacagtcaatctcacaaaggtgagttctttcgagaatgctctgcaggacagcatcttcgctaattaaagccaacagaactcattaaggcatagccaacttgtcttgcagctcacgagagtacatgcatcttcacttagagagggtatagattggtactctcctctagtttactaatggcttgttcttcccaggttctaattcacgggatctttgatcacatagactgngttaccaccatagtataactcacatgggtctcaaacccatctctttcgatgcattgtctatcacatttcgcgatagtcccttcgtgaagggatttgccaggtttctagctgtttggatgtaatccaacgttataactccggagtttctcaatttcctaacagacttcaatcgtcttttcacatgtctagacgatntcatattatcct

SEQ ID NO: 9702 - DNA, 442 bp, Oryza sativa
  unsure (1)..(442): unsure at all n locations
agcttattgatatcccactaaatatctgtgttggggaggaggggcaaggggaattanggagcgcataatggaaatacaaggtgtcaaatatttgtgaacaaataatgttcaagagtgttcagaaacatagggtaccaaaaaaaaaaggaatatcagttgtttacagaaactattacatcccactaacatagtagaacaatataataacaaaaacactattgcgtataatctccccttttatgacattctgtgaaaagaacctagttttaacaaggaataatgcagctgtgtaacactctctatgtattacctgaaagtaattaatcatgtcaactgagttgacaccaagtgaacctccatatattactcgacctcctcgtttcatcaggagtagctgcatcaaatcaaatagtcagcacgaccaacgatggcaatatgcaac

SEQ ID NO: 9703 - DNA, 451 bp, Oryza sativa
  unsure (1)..(451): unsure at all n locations
gctcacatatactagaaacgcacatgtcttctncctgtattctacttattcaaggggagctcctgtatatatggaggcagcaaaccagacatcaagtagtgtatgtaatatgtatgaagttcaaatgcgatcacgcttgcgactcttgctgttggtgcggaggcgcggttgaaggaggtggtggtggttgtggtatctgctgctgctgttgctcttcacctttgttgttgactttgatctcgagcaaacgctccacaggttgcctgcagatgggacatcggttggtctggtacctcagaacctttgcgcactcgctgcacatacactgcaccataaggaaaatgtcaaaagggtttgtcattccgaatatttcacgacgatgacgatctacgcatctactatgtaaaacatgaacagaagagttgtaggacataatttcagcatacaagta

SEQ ID NO: 9704 - DNA, 430 bp, Oryza sativa
agcttatctttaagagtacgagttcttttttgtttcagcgtggcagattatctactacttacacatattattgctagcttcattctacctttaggaaagcgtgattattgtccgactaggactgtatcttttccttctatctttaggattagttctttcttgtctgacaaggacttgtctcaacccacgggtataaatatgtacactcggggtctatgtaattatcctcacgatcaatacaattcggcgcatcgccaccctttgtacttatacctttgtttatacgctccggcggaacttggcaccctacgcggtgctgcatctgtgttcatctccacgaatggattatccaacgtttatcggccagtcaaagtatcgctacttggcggagtcaagctgcttatacatttacctctggattgaccgtttg

SEQ ID NO: 9705 - DNA, 110 bp, Oryza sativa
  unsure (1)..(110): unsure at all n locations
cccccccccatccgcccccctncccccacccccagggggctatagcctcaacacaaaacacacgcggcagagacggaccagaattcacaaagccgacagagagagccaac

SEQ ID NO: 9706 - DNA, 380 bp, Oryza sativa
agcttgcccgcgggtacaccaaactctctcttatcggggttcagttttatgcgggcggagcggaggttttcaaaagtttccgctagatctgaaagtaaagtttcttggttgcgcgtttttacaaccaagtcatcgacatacgcctcaacattacgtcctatttggctacccaaagaaattcgagtagtacgctgaaaagtgggacctgcattctttaacccgaagggcattgatgtataacaataggttcctacgggggtaatgaacgcagtttttttcctcatcctccctagccatgcgaatctgatggtaaccagaatatgcatctagaaaacacaaaaggtcgcaccccgcagtggagtcgacaatctgatctatgc

SEQ ID NO: 9707 - DNA, 471 bp, Oryza sativa
  unsure (1)..(471): unsure at all n locations
tggacatgccaacaacctcatcagccttattgatcacctcctttctcttcactggagtgggctntaggatttcatgatttgtgcctgattcacccacattagcaacatttggaggccaaagagttagtggaacaggtattaatgccgggtagaatgttggcattgtcagaacaaatttagtcttgaaaggtgcagcatggttcatctccaagtctagtgctgctagtgaaggttctgtgaactcagattcctcatgcttccttagctgcaaatccgacaggtgtctagcaaactcaggttccttctgtttcacaagatgtgatattggcaattgatttgagcttgtggcttcgtcttgagtactatggagcataagctgttctacgaaccactgggattcgtccatgggctgcaggttgaagatgaaattcgaacataagatggtcgtgatatagaaatatcaggacacaa

SEQ ID NO: 9708 - DNA, 426 bp, Oryza sativa
  unsure (1)..(426): unsure at all n locations
agcttcatcgattgtcatcatgatccttgtgacaacatccaagtagaagtttctgcaatgtcaacgctttttgaaaagttcatcgcaagattttctgaatctaaggtaaacctgttcatttctgccttcttattggtcctgtttgaccactcctatgatctctgagacatggggcttgtatttgtggtctggtccaagaataataagctctatttccagtagaagcttcaaataagttggcgttaagacacttcaagttgcttattggagaagctacacctttatcaagcaaggccctgaataccattgctatgcaaacttaagcaatatgtgactagtaactctattctattntgcaggacttgttagacaaatacttactcggatccaattatatgatcgctggctcacacaagaatatgcctc

SEQ ID NO: 9709 - DNA, 444 bp, Oryza sativa
  unsure (1)..(444): unsure at all n locations
ctctatgaactatganggcatgatgagatgattttgggtgaaggagtacatgggtatttatagtgcttgaggccatatgtacaactagctttttaacagcatncacgttagttttttcgtaattgacatcttagttatggatcaagttgaggcttaaattaagaacggtagcaaggacaaagctcatttactaccagaaataatttaaccatatcatcctcttgtgtagagtttatatgaaatatatatatcctaactaaattacatatctaaataattgcaagcatttgtattatattatttactatgcgctaatctatcacanaaaaatgagttgatagaanatggaactcanaatatatagttctagcttctctatgtgcagtaaacaaactccccaaatannataagttctcaaccaatggtatatataccanaatatat

SEQ ID NO: 9710 - DNA, 437 bp, Oryza sativa
  unsure (1)..(437): unsure at all n locations
agccttggacagagataccatcaatttctccagctcttgtttggggtagcatccttcaagttttagcagtgatatgatcatcctagtggcaatcttcagaattctcaggcaattgactgtttgttcactgttttgatctaccatcgtcctcagcttaccgacaaagctggatgcagagtctcctcgggcaatttcaccagcaagtgtatccaaatctttaccatctctgatccgtttttcaaatattgccacactaagtgacagtaaagctgcatgtagtttcctcgtcctgtccttttttttcttaccaatgtcctccttctggtcattgacgtcgacattatctttcgaagcaacggcaccagcaccttcttcaatgtcaggatctgtcttggttccgtctgtcccttttctgccttttctgccngcttttctcc

SEQ ID NO: 9711 - DNA, 464 bp, Oryza sativa
  unsure (1)..(464): unsure at all n locations
atgtccttaagtctgatatgtcattngattaagctggtgagaattggacacaggcaaacagatgtgctgttagctagctaactctagctagctacactccataggattgcaattgtgctattgaggggcatggtgtccggttggtgtcatgcatgagtggtcatgcttttggtatagattcataagttgcaacatcaaattatagatttcccccaaccgatcgaagtagctaaaatttctataaataattntaaattaattacaaaatcctcgatcatattatatatgggtttttatttgctaaaaatggngttcatatcctctaccataatgtcactaccattacagacatttattgacgtgtgtagcaatagaagcataggacccatatacttgtgactgtaatgatagtggtattatgatagaggatcctcattgatctagttctgagaaacattaatgga

SEQ ID NO: 9712 - DNA, 432 bp, Oryza sativa
  unsure (1)..(432): unsure at all n locations
agctngggcctctgttgcaaagcactacttttcttccacatgtctagngggtaaggcttagtttgtggctcatcctggttataaacaaaagtacacggattggagatggatgaagtcgggggtcgatggacattctccagggcaaatgaaggctacacgagctgcggcccggtagtcgagatgtcatggcagagggttggtgccctgctgctagggggctcaatcctgtctgcctgtcccaggtgtaccagccgtagggggattgggtcggtactcttgtttatggctaggatgggttgggaactatgtcacgtcttccgtccgtataccgtggaggtatgtggcacctggttgcacgtgaggaagatgtgtcttgtgggtaaagatgtacgcctctgatcagagtattatctattctaatagccgcgccct

SEQ ID NO: 9713 - DNA, 368 bp, Oryza sativa
  unsure (1)..(368): unsure at all n locations
cgtatgttctggctaatgatgtgctaacctccagtttcttgcanataatcaatgtggtggctgacatatctcgcatctgtagttgtgaaattcccggttcctatggctgctttgtgcctaaaatatgggaatgttggctatcaatcgccgaccagacgangatctgaagtattatcactattgactacatcttgagatgagtagttgcgacccagtactggatgtcaatgaaaataccattaccagcggcatttaaattatgatgcaggaggcaattctttcctttctgggcagaaaccttattctacgcccacaatataacacagcctgagctgcccattctgatggccaaccacaaccttcattta

SEQ ID NO: 9714 - DNA, 453 bp, Oryza sativa
  unsure (1)..(453): unsure at all n locations
agcttgtcaatggttcggcactgttcaatcgtttctttgccgtgtattgaatcctatcatcaaaccatggccgctccgaggttaagctttggatttcgtgctaatcgcaacggattatttcactaagtgggccgaagccgtgccactcaagaatatgacttatacagaggtaattgactntatcttgaagcatattgttcatagattcagtattcctcaaactttgactacaaatcaaggaccttctttcatatccaaggaggtgaaaagttttgccaaatcttatggtattaagtagttgagttcttctccttactatgctcgggctaatgaacaagccgagtcgagtaacaagacattgttgaaattggtcaagaaggagattgaagaacatccaaagaggtggcatgaggtgctttccgaagcattataggctcataagatatccaaata

SEQ ID NO: 9715 - DNA, 468 bp, Oryza sativa
  unsure (1)..(468): unsure at all n locations
cagtagtagcctctcanagtaaaatggccaaccagtattgaactgaaagtcatccagganaagctgatcgatctcttattttagagctctagttgatatgtgtgaacattgttaatttcgcttctttttcttcaatattagtgagtttcatctgatcgatgaattttatttttatcttaattttatgaggttgtctaatatcatattagacacatgtgagtgtttttctttttttgaagaattgttatgatgtggttntatatggaggttntggtattcactgtctgtttataaaataatccttgcttgaaacatcaccactcctctatgtntaggaaaattcactgtatatctctgagactntgtcaaatactaccttatatgtccctgaatnttgcgacattagagagcttaataagcacctcgctaacggctgcagaacgccgaggtctgtgacgagaagctcca

SEQ ID NO: 9716 - DNA, 454 bp, Oryza sativa
  unsure (1)..(454): unsure at all n locations
gcttaaagattgaatttgaatccatctgtcctggcttgaaggtgaacatgattttatttttaagaatgcattttagttactcttaacatactccagttactcaatcatatacatatctggttcacacatgatctatttatgcacttttgtcgcgtttagtctaaaacgatgctgtcaaattttaaaagggcattgctttactaaattgtggtgtatgtagtattagcatgtcaaattacatttatgcgtttcttgcttcccgaccatatgtcaaataactgaaagtgttagtacttgagttaacccttttttcatacttatgccatatagcaccctaattntgttcatgcgatcagaggataaaatattaagaggattctttagtatggctcattntatgggttctaagtttagggttattcagacagataacactntagctttctatataata

SEQ ID NO: 9717 - DNA, 471 bp, Oryza sativa
  unsure (1)..(471): unsure at all n locations
ttttatcaatcccatctggcaattatctctgcgggtgattcccgcatcaacggcgaatcatcggatcccgcaacaatggcgatccacgtcatctaaccggattccgcaacaacggcaaccctcatcgctagcccacgctcatgggattcgcggaagtccttaagcccgcaggataaagccattaagaaagaactactaagccagcctgtcccattccaggtcatatggtcgatacgatcgctacggcgcttgaatgccatataacagttgttgtttaaccttatgatgataaatatatgcaactgaacccccaccaccatggcaagttcagaatacatctgtagtatgaccgactgctccaccagtcaatccaatccatcagcatatttattntaatcatagaaattacaatttaatacatatagcatggaattacaaaaatataacaagagatgttcanagatgttggac

SEQ ID NO: 9718 - DNA, 129 bp, Oryza sativa
  unsure (1)..(129): unsure at all n locations
nagcttcgggctcttctatacttctcaactctggaagctagggagggagggaggagctccacctccatcacctgcagtggccgcccccaccatcgctcccctcctccggccatatccaggagcgtggag

SEQ ID NO: 9719 - DNA, 461 bp, Oryza sativa
  unsure (1)..(461): unsure at all n locations
tttgcagagcataaggggatttcttggagagacatcaatgtccagtgtttgaggngttgcaggatctcttcaagactgttagcattgatcggattgttactctcaagcaagactacaatgaagatttgatccggcagttttatgctacagtgtgggtggctggagacaatagtgagatgaagtggatgtccgacaccctccagtgttctatctctaggaggcaattccggcggctcctcaatattcgcttgaactntgaagatgacttgcatgaggagcacactcacaatccgctctccatagactacctctctcagttntatgaagatggagtgcggtacacacatgggaaggttgccggcttgaggaccatccncagtngtggtaacaggattgtgagagctaccatccttccttcgcttggcaacaatgatgacattatggnggcggattggacgtca

SEQ ID NO: 9720 - DNA, 444 bp, Oryza sativa
  unsure (1)..(444): unsure at all n locations
agtggcagagctagaaagaattttgagcctgagcaagcttcacttctagtaattgttatataaatttcatcatcaattcattcaataacatataaatttaatggagtttttgtcggtgagcatgcgcagccgcttggctggctccgcccttgcctccgtatgtctataaaaattgagaaaatccattttttaataacacaattcgaatgcatctgtctataaatgctgtgcaattcaaatgtattctgggagtatttttttcttctataagaaaataatgtattaagttttaatgcaggtgtatactatggtgcagttcaaatgaattttggtagtagcatttttttatggtgagaaataatgcattacattttgaatgtgtcanggttccgggttaggcataccctttacccttcgatatacgttacatattggtagggtata

SEQ ID NO: 9721 - DNA, 465 bp, Oryza sativa
  unsure (1)..(465): unsure at all n locations
tctaacatatctcagcgacaaggacctctntgtagagtttcatatgttcgtggttctctattttcttgatgaccaatttattatgttcccaaagtaaataggaaactcacattntggaagcctttgttntttctggaataatctattacaggaagaaacttggaaggagattgctgtttgataagaatacaaatgacgaacatgagagaatcctactctccaagctgaagcaattcttcggnggacagtttacatcaaaaatggaggggatgctcaaagatattacattggcaaaagaacatcagtcaagttttgaggagtacgtaagcaacaatccagagtcaaatcctctgatagacttgaatgtgactgtcttgacaacaggatactggccaacatacaagaactcagatataaatcttccattggagatggtacgtctatggatntcctgttaatttgact

SEQ ID NO: 9722 - DNA, 441 bp, Oryza sativa
  unsure (1)..(441): unsure at all n locations
gcttgacccctaaataaaagatagaataaaactcgtgctggatctagttgcagttgaaccgtacatgctcattactcacatgcatgatgcatctccagcaatctctctgacagctgttgtctatagtactaaaaaaacccaaacatagggacaattatgggtcattgtatctgattctgatctcacttctgctgaagacacacatattttagtatatctctctctttatttttgcatggtaagaagcgatatatcctactctctctagtttttaatatatgacattattaactcttaccataaatttatgaccatttatcttattaaaaattatgtaattaacatttattttgttgtgatctgttntgatactctaagaaagatttatattggtgcatatttctataactctntaccttgaaattatataatcttttaaca

SEQ ID NO: 9723 - DNA, 450 bp, Oryza sativa
  unsure (1)..(450): unsure at all n locations
tctgccgagtcgatggtggatccctggatgaagcctgtgcagcaaggaacatggcttgccgcaggtgctgtactgggccattaggtttcacgctacctggacttgcatatttgcatactggattatattctcataatgtcgtcaaaattgtatgaaagtttatataactatttaaaccgcatgcatactaccatggtacctatgtgtaaaggatattctccccatgctgcttcatgggagtaaagatgagcagctnttgcactggacaccagcatgcattcaggggtagggatatacatcaatctggatcgttcatgtattatctgacattgcaaaactcacccaggtatattcaccatgggtgcaagggataggagagctaaaggccgcagagagacactaattatntatttattatatcttatatntagtaatggaagctctactaat

SEQ ID NO: 9724 - DNA, 444 bp, Oryza sativa
  unsure (1)..(444): unsure at all n locations
agcttcttccannaagttgaagtattctttctgcctcaatcagacactatcttcttagggacgccatgcaaacacacaatccttgccatatacaattccgccaatcgacttccagaataagttgtctttaccggaatgaaatgagccactttggtaagtctgtcgactattacccaaatagagtcatggcctgatgacgttctgggtaaaccagtgataaaatccataccaatttcttcccacttccattcaggaatcttcaaaggctgcagcaaaccggcaggtttctgatgttctgccttgactcgctgacaaacatcacatactgctacgtattctgcgatttaacgcttcatacttgcccaccaaaatctttccttgagatcctggtacatcttagtactaccagggtgaatggagtataaagtatcatgagcttctttc

SEQ ID NO: 9725 - DNA, 414 bp, Oryza sativa
  unsure (1)..(414): unsure at all n locations
agcttagcaagtgtgagttctggttgcttatgtcaaattcttagggcacgtgatatctgctaaaggagttgctgtggaccccgaaacagtgaccgccgtcactgattggaagcaacccaagacagtcacccaaattcgcagcgttttgggtttggcaggatactaccggaggttcatcgagaacttctccaaaatcgctcgacccatggcacagttgttgaagaaagaagagaaatttgtgtggagcccgcaatgcgagaaggcgttccaaactctcaaggaaaagctggtttcctcgccggttntaatcttaccggatactcgcaaggacttcatggtgtactgtgacgcttcgcgccaaggattggggtgcgtgctcatgcaggaaggtcatgtggtagcctatgcctcacg

SEQ ID NO: 9726 - DNA, 89 bp, Oryza sativa
tagcgacactatgacactcaagctggtcggcagctggaggaggaagaactggagaagacatatatatatatgggtgggactctagtccc

SEQ ID NO: 9727 - DNA, 393 bp, Oryza sativa
agcttaacatgtaaagatgtttcttcatctttcatttacaagacgccgcatcatcatacactaattaacaaaatgccacatcatcatccactaaccatcatcacatttaaacatcatgcaaacatgctatattttgataggtgttataatttaagagcttttcaaatacaaacatgttaaattatcgtgcaacataatcaacataatgtttcaatgtatatatttattatggggtatgatatcctatatactgatatagctgatccttatttagttagagcttaaatgattaatctacgggccaaattatctttctccttttttcctctaatgaagccatatcacattaattgtttgtagcctttagatgaataatctacgggccaaactatc

SEQ ID NO: 9728 - DNA, 432 bp, Oryza sativa
  unsure (1)..(432): unsure at all n locations
taatcggaacccatattgccatggacagagagggagaatattatcatcaagataggaatacgggaacaccttttggagatatcgatccattccatggtgtacgttaatgcaccataccaagtgtaggaaatcaggtctgtttgttttgtgtgcaagcagtgtgttactacttgcttcattcaccccaactcatggagtccatgtgtcgcacaacaaaataacaaaattcanacaggccataaataagctcggattatcacaacacagcatgtatcttcatgtcggcaatggttctgttcggtgtgcttaatataattccgagatacagaaggggccatcaagtttgcagccttctcttcctacattactagggcatctgctggtatcaatggcatcanggcttagcgttgacgagagccatgtgcccgatca

SEQ ID NO: 9729 - DNA, 387 bp, Oryza sativa
  unsure (1)..(387): unsure at all n locations
agcnttgataattatgttcatgcttatnttattggatacaaaccggcatggcaaccgtgtgatcttgcatgtgccagacctacatatatttgtagcaatcaatttcatatctcaccaggctgatgggtatggctacccactggtctgagcatgcatgcatggagctgtcagcaatcatgcacgtgattgtcttttattctcataggcagagaagtgatactcttttttttagaaacagagagcattataaacagagaaactgatctccaatatccattttctccaatatttcgtatcataaatattaaaactttaatcatataagatattgctgaaatgcatatgtaaactgtgctgttaagttctagagaaaaccaacatatttat

SEQ ID NO: 9730 - DNA, 467 bp, Oryza sativa
  unsure (1)..(467): unsure at all n locations
taggacctatgatactaagcttatggcgtggaagaaattatctgcatcttcgggacaacttgaataagtanatttccctcttacaatagtatatatatcctaggcttcagtgttattcgcaggaggtattntgcaaaagttctgttatttttttatagtctgatagttacatgtttttcctcaacgagtatacaaaaggattttttttcttattttgaccatactgtcatgcacaactctcatttactaaataattcactttctgttatgacagcttggaggataagatctcaaatttagaagatgagaaccatttattgaggcagaaggccttaagcttatctcctaggcatagccgcaccatggtacatggaccttatattctattcaattgaggtatactatattctgagtcaaaaactacagtactaatgaaggtattntattttgttggtagagccatccta

SEQ ID NO: 9731 - DNA, 327 bp, Oryza sativa
  unsure (1)..(327): unsure at all n locations
aaaagcagctcanatttcggggttaaagtttaaaggctgtcgagatttttgcatgctataagctagcttagagattactttctacttgttccatttccagagaacctttgttctgtatatgttttacctttcgttggacatttggccatgtactatgaccgccatttctgtaatggaatataagatagagactctctacctttgtgcgtaaaaaataaaaaagcttagcgattcctaaaattgatgttactactactaatattctgtgctgcatgtggttgccacaatgcatactaggattaagcattaactgatgagttggagtcg

SEQ ID NO: 9732 - DNA, 444 bp, Oryza sativa
  unsure (1)..(444): unsure at all n locations
gtcagaggacgagttcaaacggcaggttaagcttcttgttaggtgcggcaccataatgctgttaccctcagaggcttctactggacttcatcactgcagctcctcatctatgactttgtgcctggcggtaacttatatcagcacctgcatgagtcctcagcagagagatcggtttcatggatggaaaggtttgacataataatcggcgtagcccgagcccttgcgcacttgcaccgccatgggataatccactataatctgaagtcaagcaatgtcttgctagatagcaacggcgagccaagggttggtgactatggccttgtgaagctgctgcctatgctggatcgctacgtgctgagcagcaagaatcatagcgcgctanggtacatggcgccggagttcacatgcaggacagtcaatgtcacagagaagtgcgacgtctat

SEQ ID NO: 9733 - DNA, 388 bp, Oryza sativa
  unsure (1)..(388): unsure at all n locations
tgcggctattgttttagcaattcatcaaatctctagtttattatattggtacgtcgngactgccaacttctttctctgtaaattcaattgtactttaattacatgcaactataacttctgtctaaatccgactacatggatttggtacgtgatttttaatttataccgacatatcccgcgcgcatgtgtatcaaccaatgcatgttttgctaaacatttttacgcatggctgcatgcatgcatgtgtaacgaggtgaagtatatacatcgcccgatgagatatggccatggaggaagagcatgacaatttaagcatgaccaatcgagagcatggcaaaagatttctacgtgccaatcggcgatagacgacaatagccatgcatgcatg

SEQ ID NO: 9734 - DNA, 362 bp, Oryza sativa
tatagaaaaaatatactactccctccatctctaaatatttgacgccgttgactttttaaaatatgtttaaccattcgtcttattcaaaaaatttaagcaattattaattctttttctaccaattaattcattgttaaatatactttcatgtatacatatagttttacatatttcacaaaagtttttgaataagacgaacgatcaaacatatttaaaaaagtcaacgacgtcaaatatttagggaatgagggagtactacctttgtcccaaaaatataaatatttttgggtttcgacacggtcttcaaaatacaacgttgtaacaaatataattacgaatgtacaataactatttttagtttg

SEQ ID NO: 9735 - DNA, 465 bp, Oryza sativa
  unsure (1)..(465): unsure at all n locations
tatcggagntcgtcagctagcagagagaagagaagaggatggattataggagaaagaaaggggtaatttggtccttaaaatatagaaaatgctatgaaggggtatatagtggcatatctcaaatacatgtgaaattataatggtatggtactaaataagtgaatagtaatggtatatttctaatccgtgaaatttataatggcatggatccaattaacccataaagaaactagtagtgatcatggaaaaatgatgaagctctcaaccaaaaaggaaaaatgatgaagctctcaaccaaaaggaaatgagctaatcattgatgtcatccttgacaataaaaccgaaatgtacttattcagttgatctgcactaatatgataagaattttactgcatgaccatcatttcactagggaccatcaatcaaaggatcatccagtagacgcacattagccacctcaatacc

SEQ ID NO: 9736 - DNA, 437 bp, Oryza sativa
tgaatgtttgatttccggcctgaggtccattgtagccgtcatctatctctcaccacaccgcgttagtgctgcataaagaggaagaaagttcgcgatggcattctttggaaagagcttctcaccctcctccagcggccatgatcttcagcgctcctccccaatacgaggaaagcctcccggcagctggatcacgatgaaggcgggtcgaggccatataaaacaaggaagtctggaggaacgcggctgttactgcgggagcagcggcagcagtagctgacgcggaatgggatcgtggagccaacgagaagcggctcggctccagccgggtgtgagtgcgatgaggacctcacgggcctcacacctagggtctatcgtagatccgtaacatgcacacgtgtcgtccatcgaggacggtgctgcagaggaggacttttgca

SEQ ID NO: 9737 - DNA, 443 bp, Oryza sativa
tctactactatgacatcaagtttcgttgacatttgtgttacactagccccatccaaggagtccctacttcaacaatgctggtgtggactcaagtcggcgaaatcgtcttcccggtttacgccacggtaccgatctcggctggtccatcaatggccagaaacgagaacgccgtggctataaccccggacaactccaagtcgaaagatcctcccgccatagtggagaacggaacgtcgacatcatgcgagcccgagaaggttcctagtgcggccaaaccttgtccttccgacaagaaccacgagccgacaaggacaacttccgaggtaacaaagccctggtgtcctatccacaagtgcaggaaacacaacttgcaagcttactgggtttttctcaatgtacaggctaagattcgtgactgcaaagagcatggaacccagcgtact

SEQ ID NO: 9738 - DNA, 461 bp, Oryza sativa
tattgttccttcatcaattgccaactgttggttatttaacatttcgctgttcattgcacagtcatccacaccagccggactagcccactgggcttgggcttgggatgtaacattgtctacgttcaaagaaagatttattcgtgaataaccaatcctgcttctggtctcagaaaggtagcagagaaaactattctaaaaattaaatcaattgtggattagcaatcatactggtaatgtttgtcggagtttctgctgatctgtaggacacgctagctgcatggtcagtttccaccagttcttgtgcccctgaggcagctgctgatgtcaccatgttgtggttatcatcaggtttgccagtgaaattatacccagaagaggacccattccggatgaactgtgaaggatcaggcaaatcatcttcagggttctgacctttactctgcagcacaagagcatgagga

SEQ ID NO: 9739 - DNA, 445 bp, Oryza sativa
tgctgcttatcaccactgttttgacttcatggatagattgctcgtaatttggaatgttgaaggagtcaagcttttccttctccacgagtccctgccatgttgaaagcagaaagcaagttctttcattttagagactctgtttataatatactgatcaggcgaggaaaataatatgtattgttcattttataacactcttcttgctatcaaccaatcatcctgtacataagactggaaatgtgaagtatcagcgtagaaaacaaggtgtaataatgtttggatatagagaccggattttaatccatttttttaaaaaaatagtagtaagtgctaagtggctcattttagattgaaacaaatctgcattgtcctgagtaaattgtcatttcaattaatcaaattggtttgaaaatcttctttttacagaatatgtcctgaggaaagc

SEQ ID NO: 9740 - DNA, 458 bp, Oryza sativa
tcggctcgtggcttcgcggctcccgagcccagtcagggtgcttcgatcggttcttctgcaagatcactgtcagcctgcgagaccaccagcgggagtgccagctcggctcggcttcgacgtggagctgtgagaccacaagttagagccacgcgttgtacatggccttaagtgtcttggtagtgcatcaagctctactctcaaatcccaatggcttcgataatatttattgatctactggtctaagcagcacaactgtgctttggaatgccatgttaccgcctcaactaatgaaattaggcacatgagaactagctaaatcaccgtatagttcttaattacttaatttccacggaagtgctatttgttctatggccatgtttaattgattgtgaacgaaatccttggttggttagcgtagtaaaagatctctcatgcctactcattcctaacaagaatat

SEQ ID NO: 9741 - DNA, 460 bp, Oryza sativa
tcgagacagtggtacttgaagtttgatgggacaataattaaatttgggtttcaagagaatgtcgaggacaactgtatttattcaaagtttaagaatgggagatttattttcctaattctatatgtggatgacattctactggctagtagtgatgtcagtctactgcaggaaacaaagaaattcttatcctcaaactttgacatgaaagacctcggtgaggcttcatatgttttgggcatagagattcaccgagatagaacaaagtatgcattgggactttctcaaaagacatatatagaaaaggtgttgaagaaattcaacatgtacagatgcagtactacacctgctcctataatgaaaggcgaaaagtatggggcatcgcaatgtcccagaaatcagtatgagctcaatgaaatgaaaacaaagccatatgcgtcagctgtaggaagcctacagtatg

SEQ ID NO: 9742 - DNA, 453 bp, Oryza sativa
  unsure (1)..(453): unsure at all n locations
tatgtggaggagagatgtaacaaataaaattaagggtgttggctctcatgcaagcttcaagacaaatacaattaatgtataagtgagagatagagagaggagaaaaaattgtagccaaccttatagctaatttattatatgtgttggctctaaaattagctaatagtagaaagtgagctctattattatccttgctctaagaaatggaggagactcgtaaaaacaggctggatcaataaagtttgggcatgtatatgatctgttttcccccaagaaaaatgttcgggcatttatacgggaggtggatttattttggaatgtcttgtccaataataaccccattacaagtgtgtcctccattccagtactaagttatagggtgggaagtagagcgagtacaacggttgtgtttcatacagttntataagcaatatatgttgtttagagattatt

SEQ ID NO: 9743 - DNA, 450 bp, Oryza sativa
  unsure (1)..(450): unsure at all n locations
tttcaaagagatgaataagntttacagctccatattctgatacatagaggtgtcttccaaagagttttagatattctgaaggaacacggacaagtggaacagatccacctgataactcaaacaaccgcaacaattggcccttcaaaccttgaagatcaccaggacgaacccaccatgaccgctcatctggcaaaccttggtctacatctggaccttcattcaaactacatgctaaattatgtgaccttgatgatgtgccacagttcccatctgtaactgtatagaaagctttggatggttctctagtggtttgagaagagttatagcaatatatctggttgctggtagttctaccactgcattcatttcttgaagttcccatgtagacaatggcctcctcttcattctgcgtgtcagggaacgacccaaaattcccaccatgttgatatc

SEQ ID NO: 9744 - DNA, 465 bp, Oryza sativa
  unsure (1)..(465): unsure at all n locations
tgacagaatttgatccacaacaagctgaattgcaagctatgacaacattttcaagtcgatctcaaggacttccgcatggcggaaaatgcgtaatactgcactcaggctgtgtttagttcacaacaaaattaaaagtttgattaaaattgaaataatgtgacgaaaaaattgaaagtttgtaggtagaaaagttttgatgtgatgaaagaattggaagtttaaagaattattttgtaactaacacggcctcaacatccatccgctgagggagtatacacggtcaacgacgcgtgctgtatcgctgtgacacgtgacgtgtgtagatataattaacagtcaacgcgcaacgatgcgatgttaaacatggcgttcgtgcgtataatgaagctttagcccctcccacagtggtcgctttagcagaaggttccttgggccttccaatgatngattaatcgcaatccatgc

SEQ ID NO: 9745 - DNA, 426 bp, Oryza sativa
  unsure (1)..(426): unsure at all n locations
tacaccttnctgaagctggtaagactcttttttgcatgtaagcatcaaangcatagcatttttcgaaacacaaataccaacaatgaaaccttcagagaggctcaggacgaaggaaatgaatcccagaagcattaactctgcatatgtagacactcaattagataagacgttaaagaaataaaattttaaatgaaatagcataaattttgtgaaatacaaatataccgtaagcagctattttgaatatttttgtttaaccaaaataagtgaaattctacaacagatgtaccatgtttatatattgaagtccggttaacaatatcgaaaataagcaactgaagatattcctgaatgataccttcttttattctctcgagagctgaatacaatgccttctgatctttatgtttcaagaactgtttgagc

SEQ ID NO: 9746 - DNA, 451 bp, Oryza sativa
  unsure (1)..(451): unsure at all n locations
tgtccctagagcaatgtctgaaacaaagatgatgtgatttagttattatcatttctcccgttctgattgtgtacaactcctgtacttctgaggcaatacgtcctcaatatgaaacaagcctcttcaatatatctggaaatttagaagttgtgcttgagaggtgaattttttatggaaatttagaagtagtgcttgagagttgaaatttttatgacagaacagcagggctttgtgcccctgattgtgtatttgttcttggaaagaagttgtttcctcataagttcaagttgaagcttcatgcatatcaatatacattattactatctgaaaatttgaatcgacttttctgtcaatagtggcataatattgctgtgcacatcaatctatctactcttttgtaaattntgacctttcataatttacaaatgagataggtgattttacaaaaaaa

SEQ ID NO: 9747 - DNA, 480 bp, Oryza sativa
gaccttagaaactaagctttacaatcccttctatgaaaataccagcctcttcttgctctcttgacctaactctatccaaactcgaaagccctgattcgttctggagtaatcagctgagtgactatctcattcttcagattcgcgcaaattgaaaagcagggattttattgaaataagttgaatatcccaacacttttacttatcttgtactacactagcaggtcccacaggccccaggtattccatcgtgttgagagttaaacaaaagagaacacaagtagagcagagagtgacttacaacagctgggatgtttgcgttggctggtatggacttgacaatttccatgagggcaacttcagcagcagactgttctgcagcctttctgttggagaatccgggcagggagccatagctggtgttattaatcaccactgtggacttgaagacaggctcatgggaaggtcccttcttggaggtat

SEQ ID NO: 9748 - DNA, 456 bp, Oryza sativa
tcagctctggacataccgtgcccattccgctgagtccaccactgtgctacctatagtgccaactaccaagcttagcgttgattcagtgcatgaggcaacaatactacatctttagatttatagctgatatttacgcaagggtgtcctttctgtaagatcaacgtgtgttttgattcttattctgtgatgatcatttggcatatgtgattatcggttttgatatttggagattatcgtcgaagtggttttggagataatcagttttcaggagatgaacagagtttactggtttgtcgggaccggtcagaccgggcggtggttgccggttagaccggtgctatgtgagcggtcagaccagccggcgctgtgtcaatttcggtttcgggttgtttgtttggatattcgcgattgtttcatgggtatggcttctagatggatagtatacgtatgtaatac

SEQ ID NO: 9749 - DNA, 462 bp, Oryza sativa
  unsure (1)..(462): unsure at all n locations
tcaaacgtgtgaaagcaaatatcacagataacatttcattctcctaatttagtaatcttattactgttttcagttccgcatgctgtattattttgaacctgccagaaaattatcaaaaatagtcagatcacatgtacttgtttggtctaacttgtttgtaatgagctttgttctcggtctgtagataacaggctctgccacggaccaattaggatcttttgacaatgtcgctttctttcattgatttatttcatcttaccatcacaggaaactgctgtcaaggactaccaaaatttcaagttcagccaaccgtactatcaagcttcaaactatctctccttgatattggaggatcaaaattggccttgggttgagaaacttgaagctctttctaagcttgaaccagattctcttgcaaagttcataccacatttgctatcgaagacattnttggaatgctat

SEQ ID NO: 9750 - DNA, 461 bp, Oryza sativa
taacaccttctgaaagctggtaagtctctttcttgcatggaagcatcaaatgcatagcattttccgaaacacaaataccaacaatgaaaccttcagagaggctcaggacgaaggaaatgaatcccagaagcattaactctgcatatgtagacactcaattagataagacgttaaagaaataaaattttaaatgaaatagcataaattttgtgaaatacaaatataccgtaagcagctattttgaatatttttgtttaaccaaaataagtgaaattctacaacagatgtaccatgtttatatattgaagtccggttaacaatatcgaaaataagcaactgaagatattcctgaatgataccttcttttagtctctcgagagctgaatacaatgccttctgatctttatgtttcaagaactgtatgagcaagaagaaaagaagaacttagcagtttcttaata

SEQ ID NO: 9751 - DNA, 457 bp, Oryza sativa
  unsure (1)..(457): unsure at all n locations
tgaacagtatatattcgacgcgttcagttactctccattcacagcactntntgaggttcaacttctcagtcgcctatgctcttataacattctagatgtcatgctgtgtctttttgttatgattttgagaaactcatcggtatacatatctgaaaattcaggttttgcgggaggaggaatttgcgcctgtaaagaatgcgaatggcgcgtcttatgatacccctgatagcgcaaagctgatgctgcttcgtctccatagtagatgggtagttgctgctggtggcttcttgacccattctgtcccattgtacatgacaggtaaattttctcctgtccaatacattcagaaacttgccaagaacaaaaaacaaggaaaaatgatattttcttttactaatattgtcatgattgattttgcttgtaggtgtggaagtttctccacttagctcctatgctg

SEQ ID NO: 9752 - DNA, 392 bp, Oryza sativa
atctcatcgacctataaataccatctcagttttagtgcatgcctgatatacataaatatcactgatcattaatagtaacctatccattcttttggttaaaaattaaaaaaaaaactaaagagaagtaataccatcctttaatggatgttctggggttccaacactaaatgagagtaatcatccattatcctatacttcatcaaatctgatgtcactgtgtctattcattggccactgtgataatcctttgggggacttggaccaaacgtgagtggtttacgaaacaaacatattctagtaaggtgataagacaatttaattaattgacagtaatattatgaggccaagtctaatacatcagtgcggagtgaaaaaaaatcagcgagtgaaaa

SEQ ID NO: 9753 - DNA, 461 bp, Oryza sativa
  unsure (1)..(461): unsure at all n locations
tcagtgttcaactnttattctcaaacacgattactttttatgatataggattgcaacgacacgattttgaagtttgaaccgggcaatctcatcctaaatcacggcactgacaagtgagaaacactttgttcccttcccagcgtttgctcgttcgacgacgactaacacgcgacaattatcaccaaatcttttattctttgaactaccactaataaccgtagcagcagctaagcacgtatatattactatattagtttatataggtaattaaacaccgagaaaaaacagctctacgacttcgctttctcacctcacttcttgcagaccaggccggcgctgcccttcccgctgccgcagagcgcgtctgccggcgcgtcgaccatgccaacggacgaggcgagcgcgccgtcctcgccggcgaagcgcgccacctcgcagtccgtggcgaagatgtcggaaac

SEQ ID NO: 9754 - DNA, 357 bp, Oryza sativa
  unsure (1)..(357): unsure at all n locations
tagcagtactcgcatatatcgtatcactgaagcaaacgatggacaactactggttcatgtagactcatcgaacaagcttaactgactatactcgacgtatgtatatggatctgggaaaatactaagcgatacacacttgcgagtcgctttgttatatatctgnataacagccttcaattagtttcaattcaagccttcatggagcataattggttggataactacacatctgatcagaagtttgcctcagcacacatctgagtagatacatgaaaagcacgggtaagaatctgctgcgacgctcacgagatttactaatattccagctgcaagcagctcctcatgagagattctcgc

SEQ ID NO: 9755 - DNA, 447 bp, Oryza sativa
  unsure (1)..(447): unsure at all n locations
ttcgtttatcataaaggtgtgattgggatgttatctctttatgtttgaaaattggccacatgtgttgtttggctgttgtaatttctgtggtgtgtgctgcgcatgagcacgtcagagctcattccgatagtgatggtcaagccttcgtctctccgagatgaggaaatgccgcgattcggacagcctagtagactggtagtgcctgttgttaccgctgggagtactagcaattgttcatgtctgactgaccagtacactgtacacacccttgtcatgtttgtctgaccgcacgaaagctgaaagcatatcacgaacaggtgcacagctgcaagccttcacttcaatgaaccaaacgaacagtgcatcagtatgttggtgacttgagatgtcacctttcgatctttntatgcatttctgtaaaaaanaattaaaagaaactcgctttta

SEQ ID NO: 9756 - DNA, 460 bp, Oryza sativa
tgatgacgatctaattatggacgagaacaaagtgtgggttgttttcattgagtagtattcagttactgttttactcgtcttttttcacttaattgtagactccgtctgaaaaatgtagttccctgacagattagattggtttgcattgcagacaagcattcagagatgagcttgatgtgctacaactaatacggcatccgaatgtcgtgcaatttttaggtgctgtaacacaaagcagcccaatgatgattgtaatggaatttatgcccaaggtttgtcctataggcagcgcttttttaaatttgcattattcacatatctgatcatctttagatctgagacctatttgataaactgcaataggagctgctgctttagatgaacttttctagttacctggtcattcatagttctgagtgataaaatgttgttgccattctcaagtggcaatgccagatct

SEQ ID NO: 9757 - DNA, 448 bp, Oryza sativa
tataccaagtccaatattccattgatgtggacatcgtatatgatctagtccggtcacagtttcgagaggctcaacaatatataatcgcctaattaataagaccatgcagtgttacatattggtttagttaacatggtatcatttaattatatgatccgatgacaaggctgaagtttattgtggaattacagcagaaagtctaattaagtatgtagatatccagcttgttgaaattttgcatggtagatcctttatgagttttctaaaaaaaatccccactgatacaaacacaatacaattatgcaacgttcacacaccattgattacatgtagactatttatctacgtggacaaaatctcttatattttaatatggaggtagtagtaattaatgacaagttatgcaaaaaaaatcacaaattaaattactcatttagacgatatcatg

SEQ ID NO: 9758 - DNA, 453 bp, Oryza sativa
taatagcaccagtcatgacttcaattactctccattttttttttatgacgacagcaggagctcagccggaatttgattaagaaggaaaacagaatacaaacagatccttgattacaaaagataaaaatcacaactcaaggaggcttaaacgcccagctacgtaagtctgataacatgctagctgtagtttactgccttggtgctagatcgtagaagtatcagcttgtaactaaataactaaccgggatgtgttactactagtagctcatctcatttcactttgcatctgatacccctatttctatttgcatcagttcctataatttgagaatacttactacggacaccattgagaatgtctcttctcttttgcttgggatcactttctgtatttcttatatccgtgttgaagcggtggggatatgatcgtacttttggtttaactccttcgtc

SEQ ID NO: 9759 - DNA, 395 bp, Oryza sativa
agatggtgtttttacaaactatccacattcttggagagcattaatgtggaccgtgactcttgttttagttttgtagccaaccgtagcatatggagatttgataaaagaataggatattcgaagaaacttggtaattcttttctctatgctctacactaggtctcttgatatagttttgtttttgtgtttttacaaaaccatgctcaaactccagtgccatgtttttcaacctatgtaaaggtctaatggagttttgcttttgcttttctttctttttttaaaaaaaagattggttcgatggagctatctcccagccccagttgggtcttgctgatctaatagaaattttctttccaacggggaattacacaacaatttacttcacgaatctaatg

SEQ ID NO: 9760 - DNA, 462 bp, Oryza sativa
tgtaccggttgatttggaattacctggacaagtggcatatgaaacaaaaacaataaactgtagttgcacagatccaaatgaaccagtcacccctgaaatgataagacttacaggagacctgtgctcgatctggtgcatcaggatcatcatccttgtcgaagacccgtgtaattcggttcacaagtgcgctcttgccagcatctctagggcccaccaatagaaacgttgttatatcaggcaacacatagtctccagattttgtgccacacactccttcaaccaagtccccaggtttatacctgattatagaatgactaacattaaaaaaaaaactcgttgacaaaaagatcagatcttgacttatggtttatggccgaacttcttgctagttactgattcatcacagtgtagtcagcaatcagcatataagtttgctttactaataaattattgtctggttgg

SEQ ID NO: 9761 - DNA, 476 bp, Oryza sativa
  unsure (1)..(476): unsure at all n locations
gacctatgaaactaagcttgggattncaagcgacgcatgngctagactgttatatcataaggggtcacacgagggatgagatcacagccgcataaggccatggtggctcaagctttcagagatcacaaagaatggcaaataggtgatgaactcatgatccacacacaaccactacgaataatattttcgtgaatcgggcacttgagcattttggtttgttccctaacataagtttaaatataaactatatattatacttgaaatatcgagtgaatggataattcggatgtctatcctccgtatagctagaaatatcttgcatgtattggtcagctatggtctatggctactagtccgccataaccatcagcactcaaggctgaatggaaaaggttaaagtctgactcaaatgactcaaatgtaaagtttttttaaagcaaaaggtaatgtgtaattacttaagcatatgtgcatta

SEQ ID NO: 9762 - DNA, 462 bp, Oryza sativa
tgttcaacagcatcttcacagagcacagcagcttatgatttattttgctgataagaaaaggagttttcgtacttttgctattggagactgggtgtacctcacattacagccctatgttcaaacttctgtggctgtcagagctaatcacaaattggctttcaaatattttgggccatttcaaattacagcacagattggaactgttgcttataaattgcagttacctcccaccagttctatacacccagtttttcatgtgtctcaattgaaatctgctactggctttacaggacatgttcagtctcatctgccatcgtctatctctgccttgcaagttccttggcgcattctggacaggcggcttgctaagaagggtaattctactatctctcaagttttggtgcagtggtctgagtcccctccagaagatgccacttgggaagactatgaagaattgcatgg

SEQ ID NO: 9763 - DNA, 474 bp, Oryza sativa
ctatgaaactaagctgtattgatggccaccgagtctacctttactttgtgttatcacagacatggtgtcttcaaacgtaagtatgccttaacctggcaatgtctttactgtctctaatgccatgtcagagacttcaacctaaggccatcaccaatgcgtgccctggagagtatccctagcggcgagcatttgcttttctatccgcgccgtccctccgcgatgggactcgtccctgtgctgggggatgcggctctctccgtgcctcgctagcttttcatggggacccatagagtggctctgattgtatatgccctaatgagttactattatagatgcgcttgtcttcaacgtatgcctcaatctagcgatatctttatcgcggtacatttaattttttatcacttttaagatgtggcaattaagaatttgtcactcgctcgttataacatgtgtatcctcatgtatctatgacac

SEQ ID NO: 9764 - DNA, 382 bp, Oryza sativa
  unsure (1)..(382): unsure at all n locations
ggacactatagaaactcagcttgcttccatatctatgttactacttctcccgtttgtatataacatgtttgggtttgcctaagcaaacttcttcaagttgccaagcttatcaaaaacatagcccatctacagcatctaattagatcattaaggccattgacaatatttttatattatattagtgctgtgttggaaatactgctgagctcttctattaagatcgtcaaacatggagaagcttggcttaggacaaacccatgacgccttactcagttataatatgaaacggatgaagtactacacaaactattatntctactttgatttatctctctgccatgaatatattactccatttatgggtcagaatataaccacgagc

SEQ ID NO: 9765 - DNA, 451 bp, Oryza sativa
  unsure (1)..(451): unsure at all n locations
tcagcttagtttgagactggatttcgataaatttttggtacctgtataacaccggncccgttntgggttcgacaatatttgattccgttttcgtatctggggtttccgattccgattccgtaaaaaatatgaaaacgaaaagataaaggtagtttccatccgatttcgtatcattttcatccctagtacggagcagttacaacagcagactataagccagctataaatacatttcgagaagataaaagagaagagagaaaagcaatagactacatatttgtagccagttgcagcacagactacaagatacatgtgtgtatgacaagtgcgaccagttattaattgtgtatctgttaacgaaaaaatcgaacacactggcctgggagatctgcttagctccagtgcaggtccaaatataatgagatgcgggcgtgccagtcagtttgatcct

SEQ ID NO: 9766 - DNA, 462 bp, Oryza sativa
tcactaacctgatataaacatgatgtatcactctaaactgcaggctagcttcgtttgatgtctggaaggagtttcagtttcagtcctcgcattctgtgtgagaaactgagaatgacttgtaaagagagcttcgcttgcatgacgttggcaagagcttcatatcgcttgtaatatcatttttccagcaatagatatgtaagcgagatcttggtagggctatcggagcagcactaccttactttgggtcatcgttttttcgtccactaataattggcctacttgtttattatcaagtctgaagacaacatcatgcacatatttggtcataatcattcttggatcgattgctaatcgagtaatttacagagggccacatcacacacaagccatattgttgggtacaacaagcatatgacacctactgattagccatcacacaaggggccatattgttgggtcgct

SEQ ID NO: 9767 - DNA, 435 bp, Oryza sativa
tcgggcaatttggcgaagaaaaaactagtcggataaatatcatatttaaaacaaatacaggttaaactaagtatattaggcataacaagcgtttcgttcttgtagagtagataattggattttgattgagttatttttctaagggaaaaaggaaaaggaggattcaaaatccttttttcttcggactttcccaaacacaaaatacctccttgtattcgcactctcaaatgagagtggaagaaattcgactttcatataatatcttaatagaattccatgtaatgatcaatgcattttttggattctatattattcgcatgtctagaatcctaccaagagaataccccccatttttatgtaattgaagtaggattgacgaataagaaataaacataatactgtttattagtgtcgcataaaacccgaaatggggcg

SEQ ID NO: 9768 - DNA, 284 bp, Oryza sativa
gacctatagaaactaagctaacataacaaaagagcccccccccccctatcttcttatccctttgaaaacgcgccatttacgagcaagacaaccgcaactactaaaagcaaaagaaaaaaaaaaacacgcacagccgcaagcacagtgaggctgaggcaagcggagcgcggcggagctagggtttgcctcgccccgatccggcggtgcgcggcggcggagtccgccgaggtcggcggccgcgtcggagcccccccgcggcgcggttggtggggtgggggggggga

SEQ ID NO: 9769 - DNA, 448 bp, Oryza sativa
tcgccgccattcgagcccgccgcatcgacatcaccgcatttcgttctcttcgagcatcgcgatgagcggcgggatggcgcaaagcatctcgctcgtggcggcgaccggtgttgaagcaaggggtcgtggaggagcgtccgcggtcgtggaggtggtggcaggcggtcgtggcggagcgccggcggtcatataggaggcggcgggcgcgggcgcggactaacgccggcgatcgccgaggagacgccgtgccacgaccgccggcggtcacgtaaaaggcggcgggcgtgggcgcggacgagcgccggcggtcgccgaggagacgccgtgtgctccgtccaagtgggacgagctcgtccgaccgattttgccggatgggtttgtcccggatctgggaggaatattcctttataggggccaacccatcccactcgctcctcaaccaaacacc

SEQ ID NO: 9770 - DNA, 460 bp, Oryza sativa
ttactttaattatgaacatattttacttgccattatattttattaaagggctattaattatccatgctctatatgttaaattcgggaagtttataatattatagttacagattatcccttaatgaacaatccggagttacaattgaactatgaacatatgaggtcaagatttataattagtacttatctgctattcatgtttgttatattctccccggtttaatatatgaaaaagataaattaattgtgtaactataatgggatgtacaatatatgtgtgcaacaacgtataaggttttggtcgcctactgtacatgagcttatttagaaagtgtactacccaatgctccaggtgattcctgaatatattgtagcttaattatacattagctagtttctatgaatgatattgtatatgtgatgcgacaagtttaagcactgggtctattgggttactaat

SEQ ID NO: 9771 - DNA, 462 bp, Oryza sativa
  unsure (1)..(462): unsure at all n locations
ataatactaagcttgcaattataaaacatgtgtaagcgctagccttttttttcaggaaggctgcgccgttgacatgcggaccccacatgtcaacctaaaggaccacggtagaccgggtacacagagacggtccacgggtcgacggaagcggaccccgtgtgtcaaccgaagcgagtggccgacaaacggactccactagacaccacacgggttgcacacgtggaaaccacgcggctaccaagcgggcacactaacacggacactacacggtcaccacccgcacacgtgaacgactaccgacaccggtacacgggtaccggggtcgacgaccgcacaacgggtacggtgcgacgcctaaaggacgagggctgngaagcgagaggacggatccttaccaccacgcgacgaggcgtgggaacgacaacgacgaacgggcgcggcggaacagacgggacaacggag

SEQ ID NO: 9772 - DNA, 454 bp, Oryza sativa
tgacattacggaccactgggtctagtaccagggggtactttcccgggtggaccactcggtcaggatgatccgagcggtcaaacttgattgcaatctctgaccatcgaagaaattggggcgtgtcgggatgaacagcattgatctcccgttcggtcaacttttgcttccgtttagactcataagccagggggccgccgaagatatggttgagctccttgcggtggtcttgaaatccagtcggggcgtcgccgtcgtccttcttcctcgacgtgctttgttcttcgtcggagttctttcgtgcagtcttggtgtattgatccgcgaattgcttgtagacgaaacaatctttggccacgtggttggagttaggatggtgcgggcattgggaagtcatgatcttgtcgaacgtgttgacgcgcgaacgctgtcgagaagagtgactagcagttgcaac

SEQ ID NO: 9773 - DNA, 459 bp, Oryza sativa
  unsure (1)..(459): unsure at all n locations
nttccagtttctctatgctccaatatactccatgacatttctagatcaacaggagaaacccaggaaataacagtcaaactcaacatgttctatttcagcctttgttttttacaggaaagggggaattctaatgcataaagtggaaactaacatatcagcttagcatctagggaggcactcgagaattaagacatcctacattgacttctcttctaagtctcaacatatatatgaaaaaattgtgctccctgtattacattgtatcccttatctattacgggctttatggtaacaaccaaaacacatgtccaacagaatatctcgctaacagtctgaaacttgacacccccaaaatgattcaaccatgacaataaagcaatggtaataaaatttataggtggtactgaagtaacatagaatcccttttgcaagaatcagtttatcctgcacgtaacaaat

SEQ ID NO: 9774 - DNA, 461 bp, Oryza sativa
  unsure (1)..(461): unsure at all n locations
taaaagagaagatctaattntaatttgctaaatctcattataaaattgggctagataaaattttgttaaatactttacaaatcatcttgcttgatataacgaagagaaacaagatttacctctaccggtaaaacggcttcttgaccataaaccaactcaaaaggagtgactttagtggcaccatgtttagatatcctatgcgcccacaatgcttcagaaagcacctcatgccacctcttcgggtgttcctcaatcttctttttcactagctttaacaatgtcttattactcgactcggcttgtccattagcctgagcgtagtaaggagaagaactcaacaatttaatgccataagattcggtaaaactattcacttccctagacataaaagaaacaccttggtccgtagttaatgtttgcggaataccgaatctatgaacaatatgcctgaaaataaagtc

SEQ ID NO: 9775 - DNA, 453 bp, Oryza sativa
tgctgttggacttctgtaaatggttacctagtcagaaactcttggatgccatacttggcatgcttgttgatgggacatttgataaaaacgaagaaaccacaataaaggcaagtaatcttcatgatctttgaagcaatgctattcttgcttaatcaagtgattcactctattgtacccacatttctatttggttctgttatctgatgttacctttcttttttttctctcagaatgaagatgtgatcatactatttttaaatgttttacaaaaggtacgtctctctcttggtcgcactccctgtgatgtgtgcacatatttgtggttggacatccatgttttggtgatacgcaacattggcgatttctaattggcagagcagcactgcactccagcattatgggcttgtggtcctacaacagttgctcaagggatccattacaaatagaaagttc

SEQ ID NO: 9776 - DNA, 451 bp, Oryza sativa
ctgaataagttgtgctaagtagaaaaactcttaacatatcttttcggtcaaaatatttccccattttctttgttaaatatgggtcaccttgaataagtttcgccaagtaggaaaacacacagacacacgaagattttttttttatcgaaatagtttcccaatttacctccaaatattcagtcgcttatggctcagattgtatcaagatttatatatcacatgaatcttacctttctctagcccctctcctccccacaacacatgtgaggcgagccccctctccgcctgtggccccactaacactggtgaggccttcacaaataaatcttttgtcttttcatgatgtctacttgtggtaagaacttcaccaaatccattagatttagatcatgccaagtattcttttgaaaaaaacttcagagctctttcgaattatcgaatgaaccttatg

SEQ ID NO: 9777 - DNA, 411 bp, Oryza sativa
acgcccccagcagagggaaccgagaattcatgaagtacaataccatgtagatgcagaagccaatttttatgcttttggattttggctcacatttgaatgaccttctatttctgcacattttcttagaataacatatccgtagaacataaggctattttttttcttgatgagataatgaagataatatcatatatttgtattgacttccatttcatcttctatcagatggttctccacaacaagtatacagatgataggtttgctcaggagttcggcatcaaggtctgcaatgacctagtctctgttccagcccgtgtgctgcctccacccatggtactatataggttttattccatttcttttgttcgcattgtttaaacttctgggaatttctaacaaccttaatctttg

SEQ ID NO: 9778 - DNA, 389 bp, Oryza sativa
  unsure (1)..(389): unsure at all n locations
tgaacaaganaaagagaaggatacagacctcgcaggtttatgtttttcggtgaggcgagtggcacctcgatgaagtgggggtgttcgagatggcgattgcggcagaggtagtagacgacggccaccctctttgaggaggacggggaagggggcgggggcggcgagcgcangtgatgagtcttgcccggtggctcgacccagaccttgttgcgtccagggctcgcggtggcggcgcgacggcgcgtcctcgtgccaccgccctccatgcctggtcggatcaaagccaaggcatgggcaaatgggagggaaggatgatctgatcaaaccctggccttgattgattcacaaagctactaagctagtaaggtgattggggatgggggagactg

SEQ ID NO: 9779 - DNA, 456 bp, Oryza sativa
ttagtggtagaaatctgttaagagttcacattgatgtatatttttcaaggagtgtaatataaattgtgtaaggtaagcaacccttgtgtgtacaatccctcggggttccctaaagggaaaaccatatgtattctattttgtggtaatgtagtagttttattaagctttccttgctcgaccttgttatgtttatgttagtttaaattctacgctaatgaccctataggagagatgcccttcagtaagttctcatagttcaccttgcatgcagcaggtaaagagaaccttttatctgttgaagaagtgttcccttcgggtggaactgcctggggagacggtagaatttttatctcacatgaatagacccaaggacgggattagggtaaaagcttaagctactccttcagcaaaatagttagacatatggtgagtaccgagtaggattacacatctatc

SEQ ID NO: 9780 - DNA, 449 bp, Oryza sativa
  unsure (1)..(449): unsure at all n locations
ntaaccaatcctttgagtggttntagaccttattcttgtttgagttgggtagtcctctaagtgagctttccatagagtccaagatcagaaaaaacggactcccgagcaaaaagttatagtcgttttactctgtgcttttcggaaattccgaaaaattatcgaaaactccgaaaattttttggaaaactccaaaaatttcagaaattccaaaaatgggtgcaaatctgagattggcttctgtaaattttcagacatatccgaaaatgcttttcggaacttccaaaaattacagtcttggcctctaacggctagttttttaggggcttgggtatgtaaactcctccatctctcctttgagtgggtgctattcttgggcaacattagacacatccaaagccaaatagccatctccatttcccatcctttgtggtgccactttgtgaggggga

SEQ ID NO: 9781 - DNA, 454 bp, Oryza sativa
  unsure (1)..(454): unsure at all n locations
ttcatcgaagtcgtcgagatctgggtcgntgttgtgatttcctttctcattgtagtccacgatctcggtcggacgcgagtcgacggcgggagagctccagtagccatccagctggtccgtcgaaactgagccgagtggctggaagatgacgccaacttccctggagctatgcgatatcggtgttgaagccgacctccgcctaggcctacgggatggggacgtcatggtggtgaagacggccgccaaatcgtcggggagcttcattagaatcggtgggtaagccccatcatctcgatctgatgacgttggagaagatgcgatctcgtccgagtggtttgaagccgactcgattgagatggacttggagtatatttcagccgcgttaggaactccaaacgggaccgagatccggctctctcccgactggtccaattccgaatcgaggagagagatc

SEQ ID NO: 9782 - DNA, 491 bp, Oryza sativa
cggacacttaaaactaagcttacatacccctagcaacgtcctggttccagagcaaactcttctctgttctgccatccattgcatgtacgctgctaagtagcaatcctccatgcagtacttgtcgttaacacctccaaaacagcctgttggatccacccgctccgacttccgattgaacgccatcaatctagtcgcgagccgaagccgacaagtcgcatgccgtcttcccagccatcgaacgacccgagcgctacgtctagccatctccctgtcgagtgcagctcatcgaaaggcctaggccaccccgctcagagtgttcgatccaccgaccgagaacgccgatcgcctctagcttcaatcaacccgagcatggggcctcacgtctccctgttgagagtagctcaccggaaagtccgggccacccgcccgaagtgtccgacccaccgattggatcgccaattggcttcgccgccatcaacccgagcaccacg

SEQ ID NO: 9783 - DNA, 431 bp, Oryza sativa
  unsure (1)..(431): unsure at all n locations
nttgtaactntttgccactttttgccctgcggtttgtctcatgtgcatgccaacatggaccaacgtgaaaaatgaccaacctaccccttctagctagtggtaagtctctcaggtgctaagcctgtccgcattgaatcttagtcataattcattcactggaaagataccaagagaaaccagcaacctgcccaatcttcccattttacccttttaaatttataaggcaacaacatcaatggcaccattcatgttacagtcagttcattaactttctgaggctgcattcggatgtcttttttctaacttctactcacagttattaagaccgaccggaccggcggttggactgaaaaaaatcggaaccacgggctccgccagtctgagttctactccctcatttttttcgcacggtctttataacttttaaaaaa

SEQ ID NO: 9784 - DNA, 438 bp, Oryza sativa
tcaagtgcatcagctgtttttcttcatcttgactgtgcttattaaagcaatcaaaggtaattcaatcaattactgattatttccaaatcccagaaaaaaatgttaatctaccttgctggattaattgaagaaagatcaatttctttcggtttcatctctttcgattccttcccggccgtttctccttcccatccaattgcttcaggcacataatcaggttcatcccagcctgctattacaaagcataaccagtgtcagctttaaaagcttccaaaattactagttattttgataggatcccccctccccctatttttttttctcagatgtacgaaattaccatgaggtgccggaaatgatgcttcgccgacaagggactgctgtatgtcaggacgtcctcgtttttctcggtagcagaaaaaatgaactttctcaatc

SEQ ID NO: 9785 - DNA, 478 bp, Oryza sativa
gaactatgaaactaagcttgagtgagatttgtaatgctgatgacctttctgatttatgtgcaggaacaacatggacctgcaaacacaaataaaaagaagaacatggacatgtgtgaagacctgaaatatttaatattaaacacctcaaatatcactaatggatatcccacctcatccattaggagcaagccccactccctatttcgaatttcttcaattatcttctcagagtcttcagaccgtttacctccaaatgcaaccatgttatatgtagtcacaactacaccggccattccacggaatttctccttgttatctgatgtaaaacggctgatatgttcatcttttatagttgaccaaagcttgaactgaaatgcccattgatcaactgatacagcatttgtggccaaacatagacaactcttcttgatacgacatgcagcagatacaccaaccaaggacttgccagcaccacaag

SEQ ID NO: 9786 - DNA, 461 bp, Oryza sativa
  unsure (1)..(461): unsure at all n locations
ctatgaaactcagcttacatggcactggtagcatcatataattgattagatttctcgaanaatatgagtacaacctgtgaaactctttgaatttagaccatgttttacgagattttatgaaatgccatgacatttctatagattgaatgatgcatccaggtgttaagtgaaatcaataagcgcaaattgaaagtatgtgctaaatctggtgcaaagcaaaacaaggtacactttacccattgcaaagtgcaacttactcaactaataagaaggttatagacaaaggaaagggggtaaattcctaacaaaatgttgcaggctcaaactctgtcatatactgtatcttgtaaaaattactactgacctttttgtgcttataaagaatttaaagaacattttggaaaaccctctgcacattnttcacaaacagcacgagctactatgtgtacaaaagaatacct

SEQ ID NO: 9787 - DNA, 464 bp, Oryza sativa
  unsure (1)..(464): unsure at all n locations
tcctccccaccacgcaactcatgaaccttgactccttgttctcaccggattcagccttgtgctcaccggatccgtgcgaggacgataaggtgaggagcagatgacgacctcgatgaccttgacggcgtgttctttttgcttatctcttagaccacaagtctaatctcaaacaaccatctctcctaaaatcactgttacctatgcagattcctctatcatcctgcgaaacaactccaaactttcaatgtgacaacctagttggaacttaaaatcatagacatgaggcaccgcgttatacatggcctagggtaaattttcagacctctccaatggaggaaccttgccgagaaattaaagcaacaatctcctccccaacgccggcaagagcattggaatgcgttnttttcgcgtagctgttcacatggttacaacttacaactcctggtcggntgaaaaaacacggg

SEQ ID NO: 9788 - DNA, 449 bp, Oryza sativa
tctcgcatctcattcttagccttgtcagttgaggcactataataccttgtacagagcaccagccagtgtgttgattgtagaagcaacaggctgaaaagataatagcattgtatttactaaaaccgtatacacattctgagaaaactaagtggttaactgtgacatgaagagtgaagtctgaccttccgcagtgtatagaacgattcaaggtacttgcacagggaaggtgcatcgtgcaggttgccgagaggcttgagaagattgcgtatgacaacaatgtcagaaaacgcaacggtcattccaccaccagttaaaggatgtcgcatgttgaatgcatcacccatcaacagcgcgccaggggttggaagtggagcagctggcatactcctatttggcattgtccttatgcttcctttatcaattgctgcaatgaaagaatcatggagttc

SEQ ID NO: 9789 - DNA, 456 bp, Oryza sativa
  unsure (1)..(456): unsure at all n locations
tcagctggtagctgcaattgatgaattattggcacattaataatatggctaggaattattttttcagcatttcagttgatattagtgtattaatggattatgcatagacggtcagactcagacaagcgttggatacaccagcacgagaactttctcgntctctctctcctattctcgttttctacttcctccgtttcacgtaagtcattctagcatttttcacatttataataatactaatgaatctagatagatatatatgtctagattcattagaatcaatataaatataaaaaatactaaaatgacttacatcgtgaaacgtgaaacgagagtagtcatcaagcgacctccacgcctcggcagcagcagaagcaggcgcttgaactctctcctggctcccggcacgcttgctgctctccctcccctgaggcgaaggtctctactgtgctcctc

SEQ ID NO: 9790 - DNA, 458 bp, Oryza sativa
tgccagtcgcaataatcctgtcaacctgcctgcccgagtatgcatgagttgaaggcatcaagcactttcttgaaatatcctttaatgtcaaataagaggcttctctttccaccaaggccattaccctataagacaaaaaaaatcttgtttcagctccatgaggattcttaaatataaacactacatactgtctcataatcatttactctgcacatgacaagatagaacaaaacaatttaaaaagaacagaatatgaaagaaaactgtagcaatataaatataaatgactaaaaaactaaaaatgcctaggtacaaatagttgtgacctcgatccccagtaattatgtagaagcgactcacctcttctctgtttcgctatccactctaggaaatgaacttttgggtatcttcgtagaagtagatgatgaaggcatagttaccaacaagtttccctgctc

SEQ ID NO: 9791 - DNA, 473 bp, Oryza sativa
  unsure (1)..(473): unsure at all n locations
ggacctataaaactaagcttgatcagaatccgaagctccccaaacaatctaatttttagtttatattctgataagttatagttgtagaattcaaaaaataaactaaaagccagactaaaaaatccaaccttttcatattttgacaactctatattttcagattgtagcaactctacttttccaggccttgtttgtttcaacttagaattattataatatggattattagcaataatttgaaacaaatatgtagattattatgatacattattataatctataagctagattagtataatatgataatcttctctaaatgtgccttttcagattattaggtggctaaagaccattaccttacccttaaaagttntatgcaaattacccaccactgccatcgaacccaattgatcgagcacatccgcttcctctgatcctctctccctagtgtgcgcgaatccggtgcctccccc

SEQ ID NO: 9792 - DNA, 434 bp, Oryza sativa
  unsure (1)..(434): unsure at all n locations
tggcgcacacganagagtgcgagagctcagaagatcactctctttgtcccctacctggcgcgccagatgacggagcgtggggctcctcaccgggagaccgcgctggcccccctttgccggttcggccggggactctgggtgagactctaagctcttggtttgaggaaggttcgcgagagtggaaacacacaagacacgggcgatgtatacaggttcgggccgctgagaagcgtaataccctactcctgtgttttggtggatctgtgtatgaagaagctacaaagtgcgagccagccccccatcctcctgggatcgtccctccccttttctaagtgggcaaggccctccttttatatctcaaggggataccacatgcaccatctctccttctctttcttacttgacttctttttattaatggacggagatttgta

SEQ ID NO: 9793 - DNA, 460 bp, Oryza sativa
  unsure (1)..(460): unsure at all n locations
nttccttgatcttgtccatgaagcccttcttctcgccgttgttttcgtactccgcaccgtgcacgccggtgccggtgccggcgccggtcatcccggcgtgcccctgctgcccgtacgcgccgccggggttccccatcatctgctgctgctgctggttgttgcccttgttgccgccggggagcttctccttgatcttctccttgattcccttcttcctcctccctcccatcccgtcgtcctcagacgactgcacaaacgcacacgagtacaactcaaattaaataaaggagttcagaagcgaggcgattaattagatttatgaatggacgacagtgaacgtaccgagctggagcttgagctgccggagcggtggaggatgccgccggtcttgtgctccttcttcaccggctggaactgcccgcccgcgcccgcgtgatgccctcccatttccatcacgcca

SEQ ID NO: 9794 - DNA, 444 bp, Oryza sativa
  unsure (1)..(444): unsure at all n locations
ttgctntgtgttcttaggatgctcttagcttatattctttactcattctagcttatcttttgttgtgtttgcttcagaactattggtagctgctggtttatgtttagaggttttaattttgggacttcgttatgttgccttagatggtggatgacaccattgaattangtaggcctgatatattgtgttgtcccagttcctgtaatctatttttggaaccgctcgtctgtttttattataatagaaatgcccaattcctgtaatctatgtttggaacagttcatccgtttctgtaatatagatgggagggagtttgtcctctcttttctacaaaacactgtatttttgtttgttntgggtgggatggtttgttggggagtctgttatttacgtgggaagctacaatggcgtgtggtttcaggatatgtgcttttgggcatattt

SEQ ID NO: 9795 - DNA, 451 bp, Oryza sativa
  unsure (1)..(451): unsure at all n locations
ntattttaacacaaactctgatagctctgtagttcagttgtaacttttgtaacagtagaataaatttcttgatttgttacactattgtttttacataaataaacatattttgatatatgtgtaacaaaaattaacaaatgcagtctacagataagtgtacaactaaggattataaacttacacatattagttacatcacacaaacactagcgagcgagtgtgcaccaagtatatacacattccaactttccaaacctcaacataattttctcattgagcacacccgtgcttgtgtgtaatccaaataaatgtataattaagatagaattgcttacaaatacccttctcacaccacgcaaacacaagcgccaagcaagtacaccacacacgccaaatataaaatggaattttccagaccttctaattttttttccaaaaaacacactcgtgc

SEQ ID NO: 9796 - DNA, 453 bp, Oryza sativa
tccagaattcagttacgacatgtcttggctaatctatgtctcttatatgggcagtcaaatccaagaccagaagttataccttgaggagtgcttaacaaaatacctgacaaaatcagctcatttgctaaatgaagcccaggcggctaccgaagtgaaggttatggtgcagaaaggtgtcggcctcgagctccgtggctcgcagtaccaccttgtgccaagatgggttactatcttccgccgaattttcaactggagactagccaagctttccacaggagagttttcagaagcttatgtcctgagtcagcatctttatcagacaccggcagctgattcacttccaaatggaggaacccagcatgatctctctgccagcagcaacaccacggatgaggcggcacccattctggaggatcgcggcatggcgccttccgtgtcgtcccgcctctccct

SEQ ID NO: 9797 - DNA, 460 bp, Oryza sativa
ttaatagttattggacattctatatctgattttatatttgttgggcaacgtatgatactcgaccaacagttaatggatccaaagtgaacgtttcccttagaagagggcctaataaggtctatacatgcgcttcagctttttatgcggccgaagggctttgggcctagtgggaggatttttctttgccaactctgtgacagtgagtatgattttcatacttaaaccgcaatactagatacaacgggttcctcaactattaaaaccggtgcaatattggtcccaggacagtttggatgacggtttttagctgtcgtggcacccacgtggctaatttgaattggtcttcatctaacgtggcattgacgtggtacatgaagcaaaatttaatagtttaatattaaaacaaaaattgtggacccatgtgttagttaaacaatatggttaacatttcttccaccta

SEQ ID NO: 9798 - DNA, 462 bp, Oryza sativa
  unsure (1)..(462): unsure at all n locations
tcactcggtgaaaaaaccaacagccaacaaggcatttttagcagcttggcactccagaaaatggacattgttctttcagaaaagacaaattggagcctcatttctgctggtgtgctgccaatagtgttttccccgttttgggttgatgtttgaattatttctttttagaattaagttgtaattttataagtcgcagttttcgactagcaatcttcgtaattaatttgcttcgacaagaaacctttgtaattaattggccgtcgcttgcacaggccggaataaattccattataagaaaaaaaaaattgcctaacacttgtcacccagcgctctattctgttgttggttctgcttttccgacctctttctagatcttcaattcttgtgggctattatatagcttgnngtggccacgtaattgcatggctagcacccagataaaatcatatatatttagtatga

SEQ ID NO: 9799 - DNA, 445 bp, Oryza sativa
  unsure (1)..(445): unsure at all n locations
tgtcgatatactggagggaattgggcattatatggtttgttaatatttaaagtagtgaatgaagcctcgactatatattattcactgtattggaacattataacgtattcatgtaactatagtgcatctatgtgatactttaaaggatctagaaatctcttcagaatgtaccatgttacattcttgatgtatgtgttgcttgttatactggtacaatcagtgtcagtcaacctcgacaatttttgacaaaacttagtactgaactacttaaacgataaaataacactataaatttaagcataatcaccttattatgacaccgacattgaatccaccactacaggaagagaacaggaaatagaagagagtgccgagttctgtactanaaataaatgataatgtattcttatcctacaagttgtatgggtcccaaagcacttgaata

SEQ ID NO: 9800 - DNA, 459 bp, Oryza sativa
  unsure (1)..(459): unsure at all n locations
cctataaaactcagctattacctggcacacttatatttgtaaaatgtttataagaaaacaaggctctgatatcacttgtaggatcaaaacacaagaactaagccaaccagagggggggtgaatggttggtatacccaaaaccccaaactttttgcggaattaaaagttaccctcaaattcgacggattgtggtctgaccgaagtagatgcgccggtctgaccacatgggagtcgtcggtttgaccggtatagatcacccggtctaaccgccaaaacctgtcgctgcctcctatcgccgctgccagtctgaccaccgttgatccactggtctgactgtccagatgccgtcggtctgaccgctagtaactcgccggttggaccgccgcactcgagataaaaaatcgaagaactctcaatgtagatcacaactttattacttctctctgtantacaaagtgc

SEQ ID NO: 9801 - DNA, 460 bp, Oryza sativa
tagactggaggaacaatccattagggttacctagctggtccgttcgtccaaagtgtgggtgcagagatcgctgccaagtggctaccacatttgcagaacagacatttggaaggagatattttgtctgccccaatgtagacaacaatttcgttgtatgtctaaccgtttccaaaatctgctatgatttgcacaaaatttctacccaaactgaataacattactattttttcatggcaatccaaggatgtgtggatttactcggtggatcgacaatgtcactccatcatatcatggccaaaagatagcagagtcagaaacacaagtagagtatcaacgattgaaggaccacgagaatgcaatgcatattgaccaacctagaaggggctgatatgttaccacaggctagattcgtccggaccgacacatttgtatcgtgtatcgatggcacttcttacctatc

SEQ ID NO: 9802 - DNA, 362 bp, Oryza sativa
tttttctgccgagataaagccccctcggcaggggcaacgagacagacatctatccgccgcagactgatgtctaaacataatgcgcgtatgacatgtgggaccatgcatataatagcgtactatctgtttataggtaactatcgtatgagctgtccaatacatcgaccatccatgattcgaaccctaatagggacgctactagcaaacttgctctcagaacatgtgtgtgagcaggtccagcaccaacatatcagccacctataaacatagtttatagagaaaatgctcatattttacccagagatgagaggagagcgacgatccgcgggctacatatctgtggccagttggagcaccaactt

SEQ ID NO: 9803 - DNA, 463 bp, Oryza sativa
  unsure (1)..(463): unsure at all n locations
gggggcgacgatgacaagacgccgactagggacggcgatgaggtatgcggcgacttggcaccggctgtcggggggacgcggtgctggtgccccggtggagccccaccccgagcgggtccctcccgctatcctccatcgacaacgacgacaagaccactgccgttcgcgtctccatcaacttcatccaagtattcccctctgtctccgctgaagccgtcgaggaccaggccgcatcggtcgtccactacaaccctgtcgccggccgaatcacgaagccagtcgtcggggagcctgagatcgacagtaccggcgaaggggtgtggttcatcggggccgaggtgagctacactgcctgcgtggactccgtgctcaccaccgacggcaccgtcgagattgaggggcgagcgcctcccttctctcctccaaccccctcttcacttcctcctccncttgccccgcctcg

SEQ ID NO: 9804 - DNA, 482 bp, Oryza sativa
  unsure (1)..(482): unsure at all n locations
ggacctataatactaagcttaactctgctgaatntgttntgcactaactcctttactcatatgaaattatgtgctgactacatgtaggcttttgcctgcatttgcattatacttagtattaacatgaaatgctcagttgttatttatttatattccattgtagaacacaacacagtgttgtaattacacatgactgtctggttgagtttttctctacataattgcttacaagtcttacaaatatttcaatagtcatcttgattcccatgtgtcttgttggacaactgagattaaccataaacttaattaactatagcatcctaagtgagtccagctacgattagtagaatctatggaagagaaggaaatatgtaaagaaacaatagctcaattntgtagtgtttttagctatgtttaatgccaggttgttgaaaggaaaatgctttagtaaattatcttattnggtcagagttgttgatgac

SEQ ID NO: 9805 - DNA, 457 bp, Oryza sativa
taagcactacttttatgccctagttactgtgccgtcgtagtattctttgggcgaagtgctatgtggcaagaagatcactggccaactcagcaagtgggcagcagagttatcacccttcgatttgcattttgtcgctcgcacggccatcaaatcccaagtcctagccgacttcgtggccgaatggacaccggcgttcgcccccgagcccgagcccgtcgaacagccttgggtaatgcactccgacggctcgtggtcgcacaagggagcgggcgccgcggccgtactcacttcgccaaggggcgcgcccattcggtatgccgcaaggctgcagtttgacatgaccaacaatacggccgaatacgagctatcgctttgggcctaagaatggcgaaagctctgggggttcggcgctggctcatccgaacagactccaagctggtggcaagtcatgttaaca

SEQ ID NO: 9806 - DNA, 442 bp, Oryza sativa
  unsure (1)..(442): unsure at all n locations
tggagggggcaggtggagcttgnggtggaagaggcggtatccagagctcgaggatggagaggcgtccactggctcttgggggcaaaggagacgatgatcgtggcagccagagcttgaggtagaggcggagggacgggggtgctcgtgggtgggagagatgacatgaccaataccggatccagccactacggtgttgggggcggtcaaatccagtgtccccccgacctcctgacctcgaggaggctggatatggcacccctgtggctcgatgaaggaggtggtggtggcggtggcaaaccgagcttgtaggtggagaggttgccgccggcgcttgggggcggccgaagctcaaggtggaggtggtggcgatgctcgtgagtggagagaaaactcaaccaacgccgaatcgacccaccacgaggttggggccgatcagatctgg

SEQ ID NO: 9807 - DNA, 463 bp, Oryza sativa
tgacttcagcagcgggcgactccactccacatgctttttttgacggcagcgacgaaaccaaatttgacaaaacagctccaactaggaagatcttcagctctggtgtgggggaaaagagagcaagactgagtactacccactgtactcagcaagtcataccggaagaggaggtatgatgcacgatataaccaaaggaggctagaggttcttttgcataaagctagcatttaaaagcagtagttgaaagcagtaaaacagttgtagtaattaatcaatattaaccaaacactgtccaacgctacaccacgttgcaacaggcccaaccaaccacctgaactacaccagttcattaagctaaactaggggtgagactaatcacggtgaatctggttgatcgcccataaccgcgggcacggctattcgaataagtttactctggccagaggtgtacaactgtacccac

SEQ ID NO: 9808 - DNA, 450 bp, Oryza sativa
  unsure (1)..(450): unsure at all n locations
tactcttttatagtaaaagtatggcttcaattttgttttctacatgctttttttagataatagatttttattaatccaggctctatatccacaaaggatatatatagacaaaaagatacaagaacacttagactcacacttcaacaaggagaacacataacaagaaaaagaaaaaaacctacgacctcaacacacaggcatgcttcctgacatcctctcctgaaacgaccagattcagtgggtggaattcatctagtcactgccacccatagtgtgtcatcgttgcgaacctccgctgatgtcatcttcatccatttcaggttagctgacgccacgcgctgccagttagtcaaccaccatacgtcatcgtccagtcaaaactagctgaccagatgtaagccgataggaatccgctttgctntgctagattcttaagccttcgcgcccata

SEQ ID NO: 9809 - DNA, 453 bp, Oryza sativa
  unsure (1)..(453): unsure at all n locations
tttcaccatcaacaaaatttacgtcttttagtcgaacttggatccttatgacgactcatcagatcaaggacaagcaactaatattaatcctatcaagagtggcttgaacgtcgccaagtgcattagagctgtgcttgagccgttgatcgctagccattttggagaatctatactagacgtgctcttctctaggttcgcacgtaatgtcacccagcaccttgagaaaaggaagggaaagcacagcgtcattgtgctgtcgctcagcaaaagaaagaattaatcacaagagcggatggagcatgagaatttagccgttaatttcctcttattttgatttgtaatggtggtaatggcctggtcattgtgtagtttgtgcttgttcaagcctttngtgtgttctggaatgcaccatagtattttgtaggttaataattcttaaatttagaaataata

SEQ ID NO: 9810 - DNA, 408 bp, Oryza sativa
taaaggtaaaatatctctcgaagtgaacaggattgaacaagaatctaaacagtaaactgaatagtgtttttgaatagtaatcaggcgaataaacagtaaactgaatagtattcagccgaataaatagtgttttttgttcgaagcacaagagtggtatcataagtgagtcacaagagtcacaagagtggtatcagagccagtcattatagagaaatcaaattcagaagctaatattggaaaggtaattactaccaaagataatctgaatataaggtgtagattaaatcacattgaagaccatagttagcactctaacaatagtcaattaaatttaattggtgatctgatatataatttttatataaattgggataaaaagcaggaagatctagagcgaaggattgaaga

SEQ ID NO: 9811 - DNA, 452 bp, Oryza sativa
  unsure (1)..(452): unsure at all n locations
tggaagacattttacattttactccttgtgtaaaatattccaacttttttatacactaaacttataaacaaaagcacagagagtactccacaacagattcaagaggtagaaccaacgcatgtttacaccattgggtgaaggccacgccagtatagctagctcaactcagttagtgcctccataagtcagagaggctcactataattttagagcaattnttagttgttactaaatcacgtgcatgtttttatgttttcctgattgcatgtcatccaaatagttacgatggatttaaaaaaattgacaacataaataaatatgtattatcactacacaaacatatatatttaagttcgacatgtacaagttaaatcaatatgtatgggtcaaatgtaaacctgtgtaatgatatatcgcatataatttatgctctcatgtttgcaaaaaaaact

SEQ ID NO: 9812 - DNA, 418 bp, Oryza sativa
tctgttcgttagatgcccaaaatgcctccagcttcttgtggaatatccatccatttctgtctaccagtgcggtggctgtggtgctgttcttagaggtataaatctcataatttctgccattcgctgattcagtaatatttacatcttcgcataaaacagttttgatttatattaagtctataatgatgcagcaaagaaccgattcatgtctgtcacacaaactggatccaaacctgatgaacacaacaatatttcaagtagcttgaatgggtcctctcaggacaacgaatcagcttgctcagatggacagaaaattgactcttctagtgctcagcctaatgaagacgctgtggaggaaaacattccctccactaccaacgatgcaaaatcatgtgaagcaggtaatcaagaacaaata

SEQ ID NO: 9813 - DNA, 426 bp, Oryza sativa
tgacacgaaagtcactgcatgctgccgcatgcacatcatatttttctacgccggtcactacgctgctgtcgagcgacgcccacgggaccagacctccctttcccctagcttccagcacacacaacaaccatagatgttcatttggctaagttgtcatgacacaacaagagagagggagggagagagtgagagagatgggatgaaactagtggataggaatgaatagattaccgctcatcgactaaaacaaatctgagccatcggattgaatctgaggcctggatgaccaagacgcgtgcgggtgtgggcatctgatttttgcctaacataggatgcccgggcgggagccttctatgagacgaaaagaatacgagagtgtctaaagaaccttcgtgattttttttggggcaaacactttcagacgta

SEQ ID NO: 9814 - DNA, 467 bp, Oryza sativa
  unsure (1)..(467): unsure at all n locations
tccattgggatcgatgtgagttgcggggcaaactttttattggtcgagtggatgtccctagtttcctcctagcattttatttaaattagtacagattacacggctagcattattatatatattttttcacattatatcatactccctccatctatttttgatagtcatattttcaaatctgaaaattttatttttgataggcatatttcaatccaacaacctatcatcttaatgattttctcaaatttaatgcgtgactctccattcaaccacacataattggctatatgggctttgagaaatgtaaatattaatgaatcgcttgtttacgaggaatgactagtagtatgtttaaatggatgataagtagaattacttatccttggtctgtgtgtcaagatgaaatatgactatcaaaagtagatggagggagtatatgttttcacattntattattaaaatatatt

SEQ ID NO: 9815 - DNA, 451 bp, Oryza sativa
tgggcgctagaccttcgggggacgaggggccatccaagccttaggccctctcgttcgccttcctcatgctcaactactagggcggcactcaccacatggggggtcgcggccaagtagagtagcaatggttcctccggtcccgaggctaccaagatgagggggaagtgaggtaagctttcagctgattgagagcttgctcagcttcctccgtccatacaaacggcccggagcgcttgaggagcttgaataggggcagcgccctctcacccagcctcgatataaaccgactcagggcagccatgcatccagtgacgcactgcacatccctaagcttgctggggggcgcatcctctctatcgcacgtattttctcaggatttgcttctatgcctcgggaagagactagaaaaccgagaagtttgcctgccggcacaccgaacacacacttatcg

SEQ ID NO: 9816 - DNA, 458 bp, Oryza sativa
  unsure (1)..(458): unsure at all n locations
tggtgtcgagctcgcctccagtatattaaagtacatgctgtctattgctggcaacatcaccgaaggcaatgcatctgcgaggatgaagtacttgagtagcactcttaattgctccatggacaaggtcgagtatatggtcggcaaaatgccaactattataacactttctgaggaaaagcttcgcagtaagattgagttcttgagtagcacccttaattgctgcgtggacaagatcggtcatatggtttgcaaagagccatttattctagcaatttctgaggagaaacttcgcatcaatacaaagttcttgagtagcgctcttggatgctccattgacaatatctgtgttatggtctacaaaatgccaagtattctaggactctctgtgaacaatctttgcagaaagatagagtttttggtcaccaaagtcgggttggagcctgattacattntgagta

SEQ ID NO: 9817 - DNA, 458 bp, Oryza sativa
  unsure (1)..(458): unsure at all n locations
ntggtttctcgggcaaagctgngctggttgctttcttttctaaatgcaagaagagatttgctctcggtgtatgccgatgacgcggtgctgttcttcaagccaacaaccactgaagccaacactatcaagagattgctgactctttttggtgaggcaacgggactcaaaaccaacttctgcaagagcgctattacaccgattcagtgcagcaatgaacaacgagttctggttgaatccatcctctcttgccgagttgaagacttccccatcgtctacctaggcctcccgctgggaacaaggaaaccaacgaaagcagagctccaaccgatctatccatggtgattgtgtgttcttatcatccagtaactcctggccaatctgctgaggaaatgccaagtattgatgttcccaacaaagaaaacaaggacaaagacatgtttatcttgcatgtgatcata

SEQ ID NO: 9818 - DNA, 443 bp, Oryza sativa
tgaacctagcattgacatgaaagataatcttggattatcaccgcttcatctatctattcttcttggtcagtatatttccgaattcctcttagctattgcaaaatgtaatcccatcacaacccaacacatactttcttgctctatatattgtcaggcaaatatgctgcgatgcaaaaattgatagactttggggctgacattcatatccattctctttatggaggaccaattcacgcagcagtagcactggatgatgaaattgctcttgaagctcttatgagaaagaccaatacacgtcttttgctatgatgtgttttcacataatatgaatctagtgttttcacataatgtgtctttattaataggtggatgatattattgatggaggtataacacccttagcatgtgcggcatacaatggttcagttacaagcatgaaaacg

SEQ ID NO: 9819 - DNA, 451 bp, Oryza sativa
tgctagctagtagctgcatgctctagctagctatgatatagagagagagagagctttggatgccacacgctgcgtctccctctctacttataagaagagatccgagagaaggagaagaaggggacgacgcgcgtgtaggagacgacgacgaaacttacatgcgccatattaggttggcccccacctaggtacagtaattagggtatttgttccggagacggctaattaactagattattaattaaaacaatatgatgataaaatatgtactatatatatatggactaattaattaatgactatatcctccggaaaatacgaccagatatatactcctattgcgtaatagaccgaacgggtgtacaagaaactgatttggtgcatctattgatctaccgcgccgtggtcttaatttccagcttattcatcgggtttttttaatgaatcattt

SEQ ID NO: 9820 - DNA, 444 bp, Oryza sativa
  unsure (1)..(444): unsure at all n locations
tcttgacagttggatcaagggctacaaccctattcttttattccgaattctatcncccaacaacgcctcctgctatggtccagacaagtcctctccagatcttgcaagaagctgtttgcccagtatccaacatcatgtgtgctcacatatttgtggagcttctcatgtctcagcaccttctccccttcaggcatctctaaagcagagtccattgcatcagccacagcatcgatgttccaagggtttacccgaatcgcaccacttagggaaggtgaacagccgatgaactctgacacaacaagcatgctcttcttccgtgccgatgggccaagacctaagatcccgcctagttntntattgcgctgcctagcaattacatactcataccggataagagtcatgccatctttcactgcggtgccaggctgcactcagcgacaacat

SEQ ID NO: 9821 - DNA, 455 bp, Oryza sativa
tacgccatcggtaagcaatgcgtgatctatttcagtttttcttttccctttttttctgatctgtgtgagtgtgatgaactgatgagttgcatgcaaatgtatgtaatctcgtgtagattgcggggcgaagtgcgggtaccggtgcagcaagtcggggcggccgaagatgtgcctgagagcatgcggcacctgctgccagcgctgcggctgcgtgccgccgggcacctccggcaacgagaacgtctgcccctgctacgccaacatgaccacccacaacggccgccacaagtgcccttgatcatctcgaccaatatatcaccgctcgatcaccgcgccgccgctttgctatccaaccgaccggtgatgatacatggcggcaaccttgtgatgatcctagctagctagatgtgctacctacttcgtgcctgcatgcatgtagcttgcatatgcatgct

SEQ ID NO: 9822 - DNA, 322 bp, Oryza sativa
attaaaacaaatgtttttatataattataccgagatttgcggccatagttaagccttagaataaagactgatctacatgaatataataattcaggtcttacaagcaaattctcagtttatgacaaacactaactttgaacattaacaaagtcagaatcaaaatcaccaaatacaattaaaaaccttaggttctattaaaaatacatgcaaagattttatctacagaatgatagaatattctgtaaacaatatagttactatgtaatatagttattgttgattaatattattttgacaaagctgatgaggttgttactaaagc

SEQ ID NO: 9823 - DNA, 420 bp, Oryza sativa
tgtccctgttaaaagctactcctactatctgctaatcttctaatcctccctgcctgccttcccggcccagctgctgcgcgcggctactgattttctatctccatctggtacagaccaaggaggagaatgaaggtggattctaaacactaatcaaagtttgatttgttatttttgttacaacttatagaagttgaatttgaacttgcatatttgtggggtgatatattacatatgaatctatcttgtcaaatttttttgaatttttttcatacacatttagttgacatacaacaaatgggtgtatctacctaggtgattaaaagtgtttccggaggagaatacatcaattctcacaccaacttttctggtggcgcttcccaggaagatcgccacgagctgatctctctctctctctctctc

SEQ ID NO: 9824 - DNA, 463 bp, Oryza sativa
  unsure (1)..(463): unsure at all n locations
tctatttatcacttatctttccatcagtcgccttctatgcaaaaagagacgcattaattggtcgccccctagccatgaccatcaggcccaatcgcgtcagacgagtcattcacatcgtgcanatataaaataaattatntctttatcattctacatatcgccgatgaatattatcatgtcatgtgcttttgataaattggtaatatcaaacttcagcgaccccaccaatacccggtgtaacgcacaggtattnttgctagtaagaaataacgaagganacacacatcataccgtaacacagcataacttacaaagtctagtggcaatctatctatagcaacgtgatggcgcggaatagccaccttatcnttcttaaaaagtanacatatgcccacatattnttnttagttatacataccttacatgtgccggcgcacgcgcgccgtatacagtggtacattac

SEQ ID NO: 9825 - DNA, 399 bp, Oryza sativa
taccatcatagaagaactaaaatctctctaaatacaatttgtttagtgctttttcttcttgcggggaaagcaaaatcaatccccaatgacacaaaccgcacaaatttcataaagtgcatgcagttttctaattttcatcttacctgcaggaattttctcaaaacatataatagtttttttgcctaaatacttgcttgcatatgggtttgtctaaatttagaaatagggatatgacgcgtgggcctgggtgcatgtgatttcaccataggattgctaggcaaaactcctcctttttatattagtatagatatattttgaccacctccatccatatgcttcttctttgttctagacagctcttcctgctcttcctgtctttctccttggctggtgaagcac

SEQ ID NO: 9826 - DNA, 410 bp, Oryza sativa
gaacactcgagcttgcgtcgcgcttgagcctaggcagacgagctcgcgttatctctgttggttgacaggcctactccactaactgtgacaagagacagaccagcatcaccatccttatcgcaagatctatcgaagccgccaggatcctagatttatgagggattttggctgaatgaaatcttttctttcctagtttgattcacctatgagtaatgtttatcacttgtgagggaatgaagcctgtaattatgttctattcgaacgaccattttgtgatacatattaacaatgttcttagcatcagttacttactctattgaacacatcagtaaacatattactacatggttgctccgaaatcatgggctatataaagaggaacatggtcagtggactactcgctgaccatg

SEQ ID NO: 9827 - DNA, 499 bp, Oryza sativa
  unsure (1)..(499): unsure at all n locations
catgcaagcttaatgcacgcgtnaatctctccaagaagtcggtgaactctgtttgctgtatctgaacagcaatacagcataattagtggccgtagtaataaaagtactccgtactacgtttggatatgcatgtgatttttctttgttgaccgctggagccttcttacaacttttaagcgatcgcaaaagaaaaatgtgttaattatatgcgcatgtgttcttactagagtggagttctcggttcatcaaacctatacctacgtgatcatgctaataaagaaagattgataaatgataacaacgaatacttcttgttaaaaagtgtatatactatacaataccgtactttgtagaaggagaaaatgtactgactggaactactacataaataaaacggaaaatataagaacaaagcctgttgatntagtcctgcatataacgttggacctagtagaagtataaatcactatgataaactcattatcacctaactattaca

SEQ ID NO: 9828 - DNA, 408 bp, Oryza sativa
  unsure (1)..(408): unsure at all n locations
ttgaaantacgcttaaaaggctgaagattttccaatagagctgnatgatttttctcaactccaaagcgagatgaatgtgaagtgctaatccaaccttgcacagtcttgcattttaagttttctggcaaaggtatgtgccaacattgcagagcaacagccacaccagcaggttggatgctagcatgcaatgcaccacaaacttcactagccagtctttgaggattctgcaacctcttggcgaagacatcagctactcttgaaagcttgcttaacccaacaacccttccaccagagggcacatagccaacatggaattgtatgctgaatggaagtaagcatgactcacagtatgagaaaagatcaatatcacgaacaacaacttggcctctcatttctccagcaaaacca

SEQ ID NO: 9829 - DNA, 403 bp, Oryza sativa
tgtgccataactcgaattaatctaatgcattgtgttgttgtctttacacgtctgaaccaacttggaatagaatgtccaaacatgtaaagatagagaaggaccttatttgatacaatatcattggagagtcgcacaaatatatcaaaagtcttgaaaagggatggataactcaaaatccattcaaatatgtctttggttgctatgtcatccattccaacaaatgaagcagctgctaatgtaaaaccaccactacttctcattgaaacctcaaaatgttcctccaacgtttttggcgtataatcctcgtcacgccattttaactccttggtgtaggcctgaactaacccgtttagctgcatttattgagtatatacacataaagtcattttaaaaaacaacagtt

SEQ ID NO: 9830 - DNA, 400 bp, Oryza sativa
ttctctatagaaaacacatactacaataaataagagtttattttatgagcatgagagaacttcatgttgaagaaactatgagtgtgtgataggcaaggtggccattctaacataacaaatggttccatttcaaaacctaagacaatatattggacaataaaactaaatactagactctctttcttgaaagcaacccatagtatttgacaaacactttgatttaacaatggaaagtgaacattttgtgtacacttttagaaagcatgtgcttaattactcaataggtgttataatacattaatactatggatgttaatataattaaaacaatatttaggaccatggtagtatgatacacttaaaaatatgatgatatccaaatattgcatttataaacaag

SEQ ID NO: 9831 - DNA, 312 bp, Oryza sativa
  unsure (1)..(312): unsure at all n locations
tagattattataaactagaatggtataatctgtagtagaataagcgactagttggttcttttctagattattagagtctagaatatcgngtttgcaagtctaaaaagggagtaaggtggcatggtgggtaaattttcacccaataatctagaaaaagcttacctaaatgagcttattagaatataataagctgggctccagatataataaactactttaataangtgtctggttctttcagcttactcccaataatctggattataataatcccaaacctgaaaaaacagagccttacgcaagttgtgatat

SEQ ID NO: 9832 - DNA, 394 bp, Oryza sativa
ttatgtacatagctatcctatattatgcgctttttgtttgatagctgtcctagaatacatgtacgtacatagtgcggacctatttggcatagcttctgctccaccccttatagagctggagctcagacaaacagtttcagctacataaaaaatgggagtggagctaggtggagctctctcacaaaatgaactttagttgtggagctgggtttaggtagctccataactccactccagacctaactcctagagctaaatttaggagttggagctgtaccaaacagaccctatatggatacatgtttattccagtaaatagccttgcttctcgcttgatattatactctgatacgatatttgcccatgtatatttggcacatgaatgaataaataa

SEQ ID NO: 9833 - DNA, 139 bp, Oryza sativa
cgcgcgactttgcgacggctgccccgcgacgaagacggccatacccctgggacccgagtcgcggctcagcaaacgtcggttgcccagaagaacacccctccattgcgccaaaacacgatcagaggctgcggccgcgcag

SEQ ID NO: 9834 - DNA, 395 bp, Oryza sativa
  unsure (1)..(395): unsure at all n locations
tnccactcataatttaattcgtccacaatattatatgttttataactctaccccttggacgaatttgaattatgcacatgcctcatcaaaatctcctcccaaaaacccagtgggaaaaaatggtaggagaaaagagtacatggcactctgaatattgtgttgcacctgttgcctcgttaaaaaccttttgtgagaaaaacccaatgggaaaaaaaaactcaccaagggaaaaagagtacaacagttggtcaagtcttcaagacttgtttgtgattcttcaggatcacaatcatgggctattctcttaattgtttgctccccctgatccttgcaattcactaagtcgtctcatgccaatgccacgaacatatttgttaaaatttgatgctggcaga

SEQ ID NO: 9835 - DNA, 458 bp, Oryza sativa
  unsure (1)..(458): unsure at all n locations
acactacactgattntctgtggatgggtctttgangcaaaggtgaacctttctaaggttgtagaaaataactgcatcgtgtacacatgtgtatatatggatgaatagtccatatggttgtatttagtttacatttaaatataactnattgggcattttttgaatgagaatgcatgacatttatatgaaaaccagtgcaacgtatggtactacactagcanaagcgtataataagacgtatgaatatatttgagaggaacaaacagaactttcaaaataacaagaacacttccttgacgccggcctagctgtctaaatgtngtatacgaatcatcatgtacattccaagacatatgatacgacgaattataataaaaattttgagaagtgctctataaatcattntagacacacggatgtatttgctaatcataatagaattatgccacataacaatgt

SEQ ID NO: 9836 - DNA, 394 bp, Oryza sativa
  unsure (1)..(394): unsure at all n locations
tcaagaactgggtttgactgaaatnatatcttttattttgtaatcagccaacggaatttgttttatttgaaaaataaattactatgcagacaaagagaaggctaatgaattgcctctagaacttgctgntctacagttcttccttctactcctgatcgcccacctaagtgtgccagatatctcataagcatctttgttgtttcggtcttgccagcaccactttcaccactgaccaatatagagttgcttttcccttcatttatcattgctctggttgctcgcattaataggtcatatcagggaaatgtaagtatataaaaagtacaatctgctgacaggatcatatatatggcaatatcaatattatacaacagttcacctgtaagcaacatct

SEQ ID NO: 9837 - DNA, 446 bp, Oryza sativa
  unsure (1)..(446): unsure at all n locations
agcttcagagtcatgcatacatcgccgtcttaccgaaatggattgtatatagtcaaactggtggccatcctcatggagacccgactctagaaaggcatccttctcagcctaagccgttggacctgaaagatgctccaggagagaacaaaagctcgcctgaagagaatgcatccttctcgttgttccaattcaacctgccaatagctccccctgccccaccatcatccanagatgacacgagtggagagtcagctacaagaacgccgttggctcaagttcaagttcagccttgctcgagggagcagactgatgtcaaagaatacaatctgtgttgctcgaanaatggcagcatgtctcatctatatcgagataaaagcaacacacgcgggagatctcgtactgttgtgctgttngtggtgcactatacttggtgagtgatttgtatt

SEQ ID NO: 9838 - DNA, 392 bp, Oryza sativa
tcgctttgaggcgtgagttacagacttacattttatactgtgcacatcgagagcaagtgttgccatctcaaagagaaataaaaggaggtgtttacacttcacagtgtcaggtaaggtatatctcaatcagaacattgctatgcttttcattttcttagctacaatctccctgttcttttccgagtgttactacatgataagaatatgcagctaatagcaaagttacaaaaagaaagaaaagttacaagcttcaattttgtactacctacagtaagcagagacctgtacatcatgaattgattatatgagtgttagtactaatcaaatgacactgccaaaatgtactgacacccacagtcacaagcttcaatctgtgagttctgaaccctggt

SEQ ID NO: 9839 - DNA, 310 bp, Oryza sativa
  unsure (1)..(310): unsure at all n locations
tcaatataatgtcatanttggtgcagtgatatgttagagaagatagacatacagtgatcgtactgagccagaagttttaccacttacctacattacagcaagtaacaacacttanaaggctttaccaatattatatactagatgaaaccccacacattgctacaacgaatttatatgacaataatagaaataacacatggtaaatagctctttaactacataactntatataccttatataactttcatctttaatcgaccattgaaggaaaaaaaggataaacaaattgggatgaatttgttataacaa

SEQ ID NO: 9840 - DNA, 397 bp, Oryza sativa
ctccagcttgaacacattcagaacgccttgttttagtcttaaattttcaaccagcattgtcctgtggtgatcattgaagaagaagacctgatctccgttactagaagcgccctagtagtaaagagggtactaaagaagataaaagctaccatgtttcataggcttgctacagcaatttctcccatattcattgttcagaaaaacctgtcttaaattgcgctgggctgctaacttgctgactttgcgaaactgcagactctaaatctctccgggtaactagttgacccaatttgctagatcctggtacttagtcgtttgttgattcacttacatggcatgctgactcagagactgctgctactgagctcttcactttagatatgaattcattctgact

SEQ ID NO: 9841 - DNA, 371 bp, Oryza sativa
tggataggaccgtagatcacctgatcggtttacctttttgtgtgagagggtccttatcaattaataaattctgctagttgagcctagcaattccatcatgtggtgattcgcatctcatctttgtcgatggaatatggaattggcgacagattgcggcgctgtgccttgtcgctggacattctcaaagatcttcttcttctcctcctgctgctgtgttcagagagctgaatgaattacgggggcgtctgttcatctggtgaagagctactggtactggggcttccaaaggccgatttaacagcagtgcagccaaataaccttttgagatcatggatgctctcagagtctcagtcgtttttgcttacatgtaa

SEQ ID NO: 9842 - DNA, 117 bp, Oryza sativa
gggcccaaaaagagaaaaaggcacaaaagaaaacgaaaagcaaaagcagaaggcagaaaatgacaccaaagacgaaaacaagaaaaaaaaagaaaagaccaaaaaagaaagggaaaa

SEQ ID NO: 9843 - DNA, 402 bp, Oryza sativa
  unsure (1)..(402): unsure at all n locations
tctctggctcagcatattagagcacccgcaaaggntatctataggctctctacaagacatccatatcagcatatttttctacttagaagagattaaatgaagagagagagcaaagctatttactaatctggagatagtctatagagaaaaacgaggcaatggattagggcatccgcaatggttatctatagactctctacaagagatcagcatattttcctacttggaagagattaaatgaagagagagagagcaaagctatctactaacctggagatagtctatagagaaaaacaaggcaatggattagagaggtatagatacccatgtagacataccattgaagtggtttactattaatctagtctattactgagatgtacatgttttatagatagcacc

SEQ ID NO: 9844 - DNA, 369 bp, Oryza sativa
  unsure (1)..(369): unsure at all n locations
cccccctctccccccnccccagcaggggatgtactctgacaccaaggacgagcgcacaacaaaaaagganaacagaaacaatttaaatttaccgtgacacggacgcgagacacgacaaagcaggtcatgaataaacccgtctacaaaagcctaaataagtctaagacaacattggagctaactcccgccaggagtaaacctacagcgtcggcacactcgcagcgccggacagaggaatcttggtcacctcaattgccattaagagaaccgaccctgaacaaggcaggcaggcaaaacaaaaatgactctgaaaaacgagcaaaaacaaaaactcggcaaagaggacgaaagaggacaagaacacaacag

SEQ ID NO: 9845 - DNA, 396 bp, Oryza sativa
tcccactcctaaatggcggtgagaaatctgaggtgactacagtttatgatatggcctctcgtcttgggagctttacatattttttgcttgctgcagcaaagacggaagcagactgcctttttatagttatgtatgtctcatctcttcatttataattattataagtgaaacatcttattaatgacaaaatataatttacatgtaaagcttttatatgcgtgtcctttattgattttgaaaaaatgcgggaaaacaaactacatcaaagaaaacctgaaatcaactctaaaattatgtttcaaaattcgaatttttacttatccttataacctgaaggctaagtgaagaaaacctgaaatcatctctaaatttttttaaaactcacattttcactta

SEQ ID NO: 9846 - DNA, 402 bp, Oryza sativa
ttaatgattttgctaattctgtgacttctgccttttgttgaattagctcagcttctcttttggagagctggacagcaagaatatcaacctgcaaaatattattactctaatcaaactgccaaaattaaggaatgcacctccacaggtaactggatttttataaataataattaacagtaagggaattgaaaggacttcaaattttaaattaggctatgtggagcataatattttataaacaaatacagttaaatataaatgcaggtcaagatgaaagataaacctaaagaaaattatgctttacgtacagaatacaaggaaaccaaccatagatatagagtcctcaagttcagccttagttttgcctgtcacacggcctctcagtgactctaatacagtctt

SEQ ID NO: 9847 - DNA, 506 bp, Oryza sativa
  unsure (1)..(506): unsure at all n locations
gagctaatgggtgtgtgagaatagtcccctatgtattattctttaacactagcacanaactaaaccttcttcttggtaatgaaaggagactgtccttctaccctcttattcaaaagaaaaaaaaaacagactttttcataagtaacagttcttggtacaaagagcggactnttcttccctgaaaacttttaagccccgtttagttcacgagacgaatagtttcatagagtcagatcggatatacaaacacacattcaaagtattaaacgtagactaataacagaacaatntacagattccgtctgaaactgcgagatgaattattaagcctaataatccgcatatcaaatcttactgtacacccattatcaaatatggacaattggcttaaatattgtctcgtaattaccacaatctgtgtaatagtcttttctatcttaaacttatacatatgtcacatagagtgacagggaaattttattacactaacagtttactattgacac

SEQ ID NO: 9848 - DNA, 402 bp, Oryza sativa
tgaagccctcatgcattcgctggtagtcaagacatgttttttctatcagccttagctgccatacagtagtaatcaccaagctgccctttgtaggcaagcagagtaccggtgacatccacagtgatcaaccgcagcttcgaaatgagcgacatgttttgacgatgatcttcttctgagcagccaaaaaataaaacgatgaaaattctacagtggcggatctaacatggggaaccatcaaactgttactactactagtattaaggttgagggcagatctctagaacagaagctataggctaacgcaaatttggagaagaaagacagaaagtgcgtgggtagagaggtgtgccgtgtgcgtaacggatgcgggcagaatgagcacaactagcgacggatggggat

SEQ ID NO: 9849 - DNA, 399 bp, Oryza sativa
  unsure (1)..(399): unsure at all n locations
cttactgatagctttagctttcacagctatctacccagtagatatgtcagcgccaatgaagttgacgctgaagtctcctgacgtggcgaatttgtgccaccttggacaatatcttaacaccaaanaccttggcgctgagacgttatatctcagcgccaaacgccaaacccggtggcgctgaagtcgcggcttatttttggaatagtttttgacaccgtctattcttataataacgttgtacaaggggtcaattgcaaatttttgtccaggacgtggtggtgtaaaggataaatctcactgggtcatccattaaagaacatatagatactngcgttaaacaagaatccattggtgccaggtgacaccacacctaacacgaagaatattatntaaattata

SEQ ID NO: 9850 - DNA, 398 bp, Oryza sativa
tgcagactgatcacacagacacagaaggctttgtatttttaatccacagcatattttatttcgagttctcatgtaaaagaacaaatttatccagagatctcccattctcccctactttaataacgcgtaaaagaccagtaggatgatgatcaccatgacggcgaagcatgcgcaggttccaaccgcagaatcctacaaccacgagtagatcaacacaggtcgatcaattcatccatcgtttgatcaaccccccccccccctcatcgtttgatcaaaaaaataacctaactatagatacctacagatgcgtccctccgtcccaaaaatagacaaatcatgggtttctgtatccaatatttgaccgttcgtcttatttgaaaaaattatgaaaaaaattt

SEQ ID NO: 9851 - DNA, 428 bp, Oryza sativa
  unsure (1)..(428): unsure at all n locations
atatgatgatctctatacagatggatcttatatgaatcgtatgatgaagtaccacatgagtggatatatatgaaaggaatccaaatctgccgaatcgctcatgttatgatcttctacatcctaggtctccgcgttccgtcatctggcttatgttcttcatgtagcattcagatcgaatgactctatngaaatacgtcgatacttctacatattatgggtaacgtaagagacatccctattntcccccgagggtctaantaccactgcnntacttcaattcgctctgaccatanataaatggaaaacccgcctctctcttaaacaagagccttcggtctgtgcggcttaacaatttgcttctcatataccatatcttaagcaataattttataggaatactgaactcatacttgctgcgtactcaacag

SEQ ID NO: 9852 - DNA, 389 bp, Oryza sativa
  unsure (1)..(389): unsure at all n locations
ntggctcagggatcctccgtccgatcccgcctccttttatgcatggtcctccttttatactctaaggggataccacatgtgctgcgagtgctacctagggagaagggaaaatattctctatatcaattacatgtcttgtgccttagcccagaagctatctgcacatcggttgctgcgcanggcccatcaaatcatgcagggcacccttgtcattcgccatttaatggatgaggacttccgggttctcattcacaccagaaaacgggaactcgggtcagttcagagtggttggaccagctctgaccggggtaagaggctgtgaagcccctcatcattattatgggacgggacggagcacgccgctcgccgcatgacacactgacagggcg

SEQ ID NO: 9853 - DNA, 459 bp, Oryza sativa
  unsure (1)..(459): unsure at all n locations
tgcagctttctaaggtcatctcanattaatatactcctttttgttaatatcacgacgaagctcgtaatattatttgtccttgatgannaatactcanagcaatccanatctcatgagcagttngaagatgagcaacacgatcataattcgaacgagaaatcccactcaaaagaatatagcgagctctgctatnttgctcaaaagcagtgttttcaacagcagtattaatagcttcaggaatcacataaggatgagaaactttcttccacatatcataatcttcagccataatataagattgcactctactacaccaatgagaaaaatcggttccattgaaaacatgatgcttagttganaacctagctggagtagccatggcanaaactctagatcgatatatatccaaaaaagaaaacaaggctctgataccactcgtaggatcgaatcacaagaact

SEQ ID NO: 9854 - DNA, 392 bp, Oryza sativa
tgtccttcaaagtgtcaaacgacttctcctgtgtcttttcccaatggaagaccacccctttcttcatcaactcattcaatggtgcagcaaaggtactgaaatctttgacgaaacggcgatagaatcctgcaagaccaagaaaactcctcacctgtgtgatggattaaggaaccggccaactctctatggcttcaattttcgactcatccacctcaattccctgtggagtaacaacatatccaagaaaagaatctcgttccgtgcaaaagatgcacttttcaatgttagcaaacaaacgtgcatcgcgtagagcattaaaaacagcacgtaaatgatccatgtgttcatccaaagacttgctgtaaatcaatatgtcgtcaaagtaaactacc

SEQ ID NO: 9855 - DNA, 373 bp, Oryza sativa
  unsure (1)..(373): unsure at all n locations
agcttcaagtggtcagaagaatagggaacctgctggagnttgtgactgcnaaagatatggatgattttctagaaccaacctttggaacttgcagagcattcattatccggggcatcagcagtgacaaaattgtggccctttccaaagagcccgcactcctttgtgatagtgccttcagcatgagcattgctgtcgatcaacaatcatgcgtcatggatatatgcgaacttggtgggcacatggngcattttctcgacctangtgggaagtcagatccacatataagcgaattggcatcagactgcttggtgctgtactcanacagcacctcgggaggtacggtgggcttgctgccaatcttctaaactgagcg

SEQ ID NO: 9856 - DNA, 388 bp, Oryza sativa
tgtattattctctggaattcattgaccttattgcttattcttgcttggtaatgaaaagccaagatgaaaaacactataatggaattgaattcactttttatcctattcctttggttggtttatgggagatgtgatcatgggagttggctgacttctcagcatgattgggaaaacctaagtacctaactgctgaaattgtagaacacttaacttaaaactgagctatttttccattcttcctatttctattatgtcattgtattataagccgtcttcagtaggtttgtggtgcattcaagtatttaatgttgctatggtgtgtcgatttctgaaatggttggcaaatataaatctgtactcaactactttatctgatctcctgggttct

SEQ ID NO: 9857 - DNA, 415 bp, Oryza sativa
  unsure (1)..(415): unsure at all n locations
tcagtaagagatgccaatgctacaccaccaacaatcggaagaagtgaaagtatcacccatactgtaagcaactgccatgccattcaattatngaaagaaaacccaggtagttctctcagatatacataatatattgcagcaatcaacattatataggacactacaagttacctcgccaaggaaaatggcagagaggagaacagaanagaaaggttcccatagctttgatggtatgtgtgaatgacacagcaacctttctccatgctcatgttagtgaaaagatngcccatagtatggaccacagctagaggaaggatggctaagagctgannaggaanacacaagagcaacagatactccttggtaatacaacccatttaaacaatgaaagtgtgtcanacaatatcaaagatct

SEQ ID NO: 9858 - DNA, 387 bp, Oryza sativa
  unsure (1)..(387): unsure at all n locations
tatagaanacacataagatgccatggcccaaacctattcatcttgtaaacagcattgaggtatacccttttaggtatataaagtgttggaaatgaatttgtccagcataatttaactgaaggtacaatatgcaaaacttttttttttttttgtatttgtagaacgggcaaggaatattgtagttatttaattattctaattttgtttgtacgttccctttatatgttgtaaccaactgcacacttatatgtctgttggtccttgatgtctctggtttgaaatatagccaagcaagatatatatgatatactaggagacaactcattttctatctggacaaataactctgtcatcaagaataagttttagaaaaccccaaatttcttg

SEQ ID NO: 9859 - DNA, 346 bp, Oryza sativa
  unsure (1)..(346): unsure at all n locations
aatcaccatgaacggtntcctaccagtaatctttacacgagcagaggccatccctgaaatgatgaaacctcgtggcgtcccgcacgatgatctccctgtccgtgaccttggagatggccttgatcgcggcgtggcagtcgttgcacacccgcatgttcttcatgacccgcagcgtcgtcttctccggcgtgctgatgaggccgaacgcgatggcgagcttctcgctgtggcggctcancagctcctccttgagctcgtcgtcgacgtcgtgcaggacggactgcaggtcgggcacgaacccggcctcctagatctcctcccacatcctcgccgccatcgcgtacac

SEQ ID NO: 9860 - DNA, 388 bp, Oryza sativa
tatcagaaacaaatcagtctactgagtacaacatcatttcacaatcctttcacgagcaagtgacaggttaacaagaagcgtatttctcacggtggtcgtcagctcccaacaaccaagcaacaaagaaccgtgcaggttgttggatgaaatgccattgttcagttaactaagtacggcaagggatttctgatcaaggtacagttgccactcatcgccattgccttcttcttgaagctgacgtccaccttcagagcaaacattctttggcccgttgtagttcagtatgtctgagttagcatctgcgcgcttccaattggaagggagcttcatataattgtcatacaaagccaatgttattgccaacctaatttgatccctgaaaaatgga

SEQ ID NO: 9861 - DNA, 556 bp, Oryza sativa
  unsure (1)..(556): unsure at all n locations
tgtctcttacactaccgtagtacctgtatcttcttcaagttcataggactccctacatatgaatgcatatggcacaaatttaatcgtcgcgagaatcacagttngcggcgtcttatgaaacgcacagtaccataaagcttcaaaattaaaactcaccaggtaacttcaattgcgtcattgaagaaaggcgtgcaagttccccagctaatacgaaccacagacgggaatccaaatatcggatgtttgtgatcttctaaccactcngttagtggaaagatctgcaccattaattgaaagtctttaacanaacagtctttatgactatatacattgataatagatcacttacaatgatgaatacattacctcctggataaccagacccagtagtcatgttcatattctgagctcgttcatcaaatacccagtttctcaaagctctgtctcttgtaacctgcactaacatatcaagaggtcacaactctattattaggttacactcagacaaagtaatgtttgctgataaaatgctacatacatcatgtctagttacaca

SEQ ID NO: 9862 - DNA, 401 bp, Oryza sativa
taggcacacgtatcaacttaaacttgattttagatgtttttattttatcaagaggcacattcctccatttcgttctagctccacccctgatgcccaccaccagatcgagttgacgggattcagggcagccaaccaagatgtgatctatactctcatcctgttaatcgcatagaacacatcggacggagtggggcagcccacgacgacgaagacgatcagcagtctaacacctattcattgtgaccaaccaaaagaaagtgagaaagcgaggaggggccagagactttcaagttggcgcctcttggaaacggttccttcctatgaagatggcatggtacgccgaaccggaggaatacgttcctgtcggactccatttccatgagaaaatgcagctatattta

SEQ ID NO: 9863 - DNA, 327 bp, Oryza sativa
aatatcttaacatatagttgtttctgagtattagccgatacatgctagatctatctgatcggctatgctatgaacatatataggctagctgttaatatatatctcgatctaagtgatgtatactgtcctcgcatggcaacagatctatcccaatcacttgattcaagatatatcgacatcaggattatatattgttaatatctacagccgatcgagtagatctagttctttattacctatatataaccgccgatctgattatatatgacatcggctcaaagataaatgatatgtcatcggcacttagccggatcagctatcgttata

SEQ ID NO: 9864 - DNA, 380 bp, Oryza sativa
tcaacttctaaagctcctaggaagaccaaagggacccttgatatgcttgtggagaaacatgaaaagcaaagtagcgagagagctcgcaacaaggggaaaatacagagatcacctcctagggagcgatttggtcactcgccaagacggtcgcaatcacctccatatcatcaagcacaagacataccatgggggccctatccaaggctgacgccgggaaatccaaaggcccataaaacgaccctgggggaaaagcagggaaggctcacatgaagaatcctgggaacccgccaagaaaaaaggtcaagatggggaccgccgtacaaacaacgtcccaacctaaacggggaacgcaacagcattcaaggctggacgctacaacc

SEQ ID NO: 9865 - DNA, 340 bp, Oryza sativa
  unsure (1)..(340): unsure at all n locations
tcgtctctacttctagcttggtctgcgcgacgcgcttcggctcgcacttgatccatcccgcaattagttttgtcccacctcgctgattttgcgacagagcgacctctttataaactctggttgattctttgtgtgtgcctccccggagacacccacaccgactagatacagcggtaagatccccaccgtggccacgggttggcggacaccttctgctgtanaaanntaaaatggagcagtcataaggtcccctcctcgtacggngcacggcaagcgcctgccggttaagctgcatccatataaatacgttaagatgtcaaatacggcatacatacagtcg

SEQ ID NO: 9866 - DNA, 373 bp, Oryza sativa
  unsure (1)..(373): unsure at all n locations
aactcaagccttgcaactatcaaacatgtgtaaacgctagcctggattatacattaaggctgcgccgnngacatgcggaccccacatgtgaacctaaaggaccgcgggagaccggggacacagagacggtccacgggtcaacggaggcggaccccgtgtgtcaaccgacgcgagtggccgacaaacggactccactagacaccacacggcctgcacacgtggaaaccacgcggctaccgagcgggcacactaacgcggacactacacggtcaccacccgcacgcgtgaacgactaccgacaccggtacacgggtaccggggcccgacaactgcaccaaaaacacgggccatacccaaaggactaagaccgagc

SEQ ID NO: 9867 - DNA, 426 bp, Oryza sativa
  unsure (1)..(426): unsure at all n locations
cattatctgacngatctgagcaatcatattgaatagcctaatagcacgcaagctcttgtgagtgatatggtgtgcgcgtgatggatgttctgcattcatgtagatgtctgaatagaacgacccgtctggaactttcgagttgctctgctccactggacaactgagaagattggctgtagctcacttgaaaaaatagactgctgctcacttgcttactgatctgcgtcgacgtgaaagaaaccatcatagcatggttgtcttatgaaggatacctaacattctttctgaaacaagctcatgttgtggggctacctcttaattctgataaaactcatggtgctggcgacctcttattgtgaggactgtagtcgaatctagctactatctataaatacatgcttatgctgagtgtgatactgatcacat

SEQ ID NO: 9868 - DNA, 356 bp, Oryza sativa
  unsure (1)..(356): unsure at all n locations
accgaagcccggacaccgcaacccccgacacagcgcctgatcactttaaagncnccaccaagaacagcagcgcggcggagaccaagccctcacagacgtacgcaacggccagaacaacgcgcccgaacacccaggagccacagcgcacgccgacgcaaccggctggagccaccatgaccaagacacacactgggcagggggcgagcagcccccggaaccggaagcacagcttagcaagaacacaagcaccgagcccgcactcccagcagagcgcaacggtgggctcgacaacccgccccaggccagacctgaagagggacgacgagcccctgaacccctggaagagaggcccaaag

SEQ ID NO: 9869 - DNA, 393 bp, Oryza sativa
ttggcttcccaaccttgcatgcaaacttgttctgaattatgctgaataggaaacacatagcgtcgatttagatgcaaaggactacttcttggacatgtaacaagcaacagaaaattgtctgtcaacttgcattagccaattgtgggaattaaaaaaaaaagcaaaagaaacaagcggcaactgatgacatcataccaaattgaccggtaccataagaatatgcacaacgaaagcagtttgagacatgatggactgattttccagatgcatttgcaggacattaacagcaatgttttgatcggccatacctttttggaactcttacagtaaatttaaatcaacagcttttcggagtcatcaagaatatttaagatctcactgacatgccttatt

SEQ ID NO: 9870 - DNA, 369 bp, Oryza sativa
  unsure (1)..(369): unsure at all n locations
taattntgcaatggtgaaggcattgataaaattatatattggactaaaggcgatatatcaaatatcggccatcattcattggcaaaacacaaccgattatgataagaaataaaagcactaaaagcgatataatctatatcgaccatcatatatcggcagaacacaaccgattatgataagaaaaaaaccattaaaggtgatataccttatatcggccatctcatggcgatgtcaacacttaacccgatcatgaatngatccanacacttggataatatctcttcaagtattttccattatatgctcgtccataaacttcaccatcaagtcctttgaacataataagccctttagacacaactntgtata

SEQ ID NO: 9871 - DNA, 396 bp, Oryza sativa
tccattactgagtagttcagattcataggctttaattttatgtaggggcaactccaattaacagttaacattaccgcccataaaattcatgaataacagctgcatcgaatcattgatggatctcgctgtccatctcttgttttgttattagtcgggagtagtaagcaatttttacaactactactgcaaaactgggccatgataaataaattttagatgctactcaaaacgacactctccaaatataatgtaatcctcacatgaagaatcttggtagccgtttaagaaaaaagttcaggatgtggacgccgttccaaacaacgtcccaacctatacgtggagcgcaacagcattcaagcctggacgctacaaccaatagcgtccttcttattttga

SEQ ID NO: 9872 - DNA, 393 bp, Oryza sativa
aactcaagcttgcacatcgaataaaacttacagaaggaagttctgctaatacctattacgctaaaaaaagaaaaagaaaaacaaagagcattaacaaaaggatataaagggaatacatgttcagaaataaaacttcaacagcacttcaccttaagaaaaactaaagctgtcacaactcttctcacaaagaatatggcacgaaaatccttaatatgctgatatttgaaaagtattttgatcaaagcctgcaccctaagaataactttaccatctgctacggcagcaccgataacttcatctacatgctcacctacaaaaacagctggtgggaaaaatgatatcattaaaaagaaactgagctagactcacaagtcaaataatcaaaaatttaaa

SEQ ID NO: 9873 - DNA, 144 bp, Oryza sativa
atactctggaagatgttctaatctttggcatttgacggccagccagttttttcctgtgcatggtatgctttgggaggtagtagggcgtgccctcgtcccacatttggtggtgtcatcgccctcgctgtcatcaagcaccagctt

SEQ ID NO: 9874 - DNA, 382 bp, Oryza sativa
  unsure (1)..(382): unsure at all n locations
ctgttggttgaaattaattttgaaaaancaagtcgccattaatttggtttcggagantaatgacaaatccaattccatgaaactaatattgttgtaagcatttctttgtctattctcatatggatatgaaagtggagtgtgtgagaagtgattccccgacttcatatgagttgggatagaaatgttcattgatggtggaactaaatcacaaggatgaaatgcatggagatcaagctatatgtatcacactttctcttcatgtacatattggtatgttcatatataatatttccacgtggatgacatatgcatatgagactaatgttttatttgagtcttatctcttatttagtctatttacattgagaacgcggagatgatg

SEQ ID NO: 9875 - DNA, 509 bp, Oryza sativa
  unsure (1)..(509): unsure at all n locations
acttatttgcatacttactacaccaatactataacttctcaacacttaagtacacaagtctctccatgcagtntagtttaaggtgatggtttctaatcaaatatatctatacccaagaattgatgactaaagtgaaataaataaataaataactcttaagtaaataaaaaaaaactctgcanaattaagttgatctggcgacttataattctccaaatgaaatagtattaccggtacagaggaaaaattactgaaactctgaggtgaataaatgaaatcanggcncaatantgaagaanataaatatgaaaagtgagcatacaggcaggctatgtngttccatgcttctncattttcaagatctatctgcacagaacgagtaaaagcgtccacagctttctcaagatctttatcctgtacgcacaanacanaacagtagaataatttcagtctttcaagtcttaatttatttgaaaaactntcatagtgtcatctaccatatatgtata

SEQ ID NO: 9876 - DNA, 388 bp, Oryza sativa
tgaatgctcctttgagttcataccattgttcgccattatcttctacttgcccaccattaacccactgatgatctacagcaagacaaacatttacatggtaacgtccatgtcctccagacccagcacgtacccaagcagaaactctgtaagtggtgtgcagcctaagcttgtcagttatcaactgggaagggcccatccacacatcagtgcggtttgtggcaagaatataagaacctcttatatgttgcttagctgaggggtccttcaagatggcagaaagcatatggggtgattcagtatggatactcaatcgacatgaccccatgggactccacccagaaagcccatgactgaaagcactgttatgtattacattagctccatatga

SEQ ID NO: 9877 - DNA, 474 bp, Oryza sativa
  unsure (1)..(474): unsure at all n locations
agctngaaggatacatgagatgaatcatgaatatgcatgatatctatagaagtgtcacagtagacgtgagtcctctcatgcaacattgtataanatggttcattgagactagttctcgaatgttcaatggaatcaaatacatgaactgcggtaaagaaagaatgagccagangttttttttttggaagtacagtttgcaacaaaactcaatggcctctgcatatggctnttaccaattggntatctgtacgggtttggtgtctccattcagaaagaagtanaccacaagaatanattctatcangtctagaagagaatccaatatanagggaataacagcaagtgagcatatgaatntgtaaaaaaaatgcatctgannaacgtatcccaggtgtacatgtgtaaatgaacaatgtaaatatggaagcaagcatgcatcttttggttgagtcgtctagtaactacaatgaacat

SEQ ID NO: 9878 - DNA, 384 bp, Oryza sativa
  unsure (1)..(384): unsure at all n locations
ntgcaaacaggaatgcttcgttgtggattggtagaatatgatgatgctggtatggctagattcatgggtgggctgaaccgagaaattcaggacattctagcctacaaagaatataattcaattaatcgtttgtttcatcttgcttgtaaagctgaaagggaagtacagggacgaagagctagcttcaggactaacatttctgcaggttgtgctagctcttggacatcttccaacgctgctgcaccgtcaactcgagcagcagcaccatcgtcctcaagcaacaagctgcgtccctctacaacaaactctacaccacgcccgagtgaaccaacaagaggggttgctgctacaccttccaagagctcatcatcagtagcttcatca

SEQ ID NO: 9879 - DNA, 285 bp, Oryza sativa
  unsure (1)..(285): unsure at all n locations
tcactttgctgtctaaacctgcgtgactggttcattgaagctgtctatngctattggtgagagaaatggcgtattagttgtgtttctctgctgcctgcctttggtgaggatgtaccttttgtcaccctaaggattacatgtcacctttttaatacaatatcccgtgccataatgatcatgcatatattgccgtcaaaaaccatataaccagtgtaatgtgcaaaaactacaattgtaatgctatctaattactgatttatgttttaatggaaaactttttccttt

SEQ ID NO: 9880 - DNA, 400 bp, Oryza sativa
tgtatagctagttgagatgttctatcaacatttttcctcttggttaattgcaggaatttaattccaagctctcagattttggtttagcaaaagcaggtcctactggggataagacccatgtttccacacaggtcatgggtactcacggatatgcagctccggagtacattgcgacaggttaaattttaattctttgctttgaataaatcatgggaagtcttttctgttatatagcatcggtttaaactaggatcagacatatgactgccaggtgctactgaagctttgaattatctaaaaatattgctaatgaagcttggtgtcattgctttacatttcccaagctcactggaatttatcttgctgcataaagcatcttatgcatattgccaaatgccca

SEQ ID NO: 9881 - DNA, 400 bp, Oryza sativa
tgcccgtgcgtacgactatcagtacggtgctgaagattatggtgttcgcttccgggaattcctgcttccctgtaggagggagcctgatgtcggatcccaaaactaacgattcagaaaccgacatgtttgatatgcaacagtatttaagaaaatcttgaattatatttctaactaaagtaccatatgagtcccgatgctcaaatccgtgagcacggctattcgaatagttttaaggatattcatactgcagtagatgtacgctttacccgcagtccacgacttgccaataatgattagcttagtcatggcccagtattaggttattaacaattatggcacctgttccatgaactctagtccccatgcgctttgaatgtaacgttatcagcagcgagaggag

SEQ ID NO: 9882 - DNA, 349 bp, Oryza sativa
acctccaagcccacaggggtgagcccatgccaaactgcacaaagccaagcaaacgaccgcaccgagaaaaaaaaaacacccacacccaccacgacgacgccgtccaacaatgaacttagcaaaacgcgaacaccgaagcaaccaaatctaatacaccaccggctaaattcaccactgcaatcagagcgaagacaaaccgctcgctgaacccaggaaaacacacacaacacacgaaatgagatacctgcacacgcccacaagaaccgaaagaagaaaagccgcccatctgcctccacaaccgaacacaacacaaccctttctcaggcatacaaaaaacaacaaatccgcc

SEQ ID NO: 9883 - DNA, 337 bp, Oryza sativa
  unsure (1)..(337): unsure at all n locations
tgacactatgcacatctatggggtttcatttgtgctcttgcatgannaattgtgttatcatgttcagatgttccagatgtattggcttctgaaccagtagaggcagaatgcataagtgccaccaacaacacaatntttgatcacatacgcaagaaatccagagaatttcccaatctaatgctgtcgaaatccatggatagttcttatgaacctctgatactgaagaanatgaagacatcgggcgatcagtttggactagatcagagcagtctgcatgcatatgaagtcacgcctatggtctttgatcgtactgaagctagagtctctccaacaatac

SEQ ID NO: 9884 - DNA, 402 bp, Oryza sativa
taccaccaaaacaacaattccagaacccagctattgtttgttttcaactcaagttatgttcggtaggaggggttgcaacattactgtggctacaactacagccagacatgacacaaacaactgatgttggcttacagttgcagccacatagctacagtaaaaaagagcagctgaacatactctacatgtctaatgaaagaacatctattgatccaaatttcttcatctttcagatttaatcttcagttagcttttatccaacttgcttgcaccttatccctttttcaaaccctttcacttttgtaagagagagatcattttatataccatctgtaaaggagatttcacaagtatatatgctttccaagacataatcatttcttccagtccatggaccctact

SEQ ID NO: 9885 - DNA, 534 bp, Oryza sativa
  unsure (1)..(534): unsure at all n locations
tgcagcttaggagattatgccactgctaagcatggatgtttttctattctcaagccaccatcgntagccttcaagaagtctatcagctgagtcaaatatgtcctccaagtgattctccgcgaatgcaattcggccatcatacgataactcgtcaacaccaccagcatataaatatgctagatgtatctctagccagcgcaagcctgatttaccaagcggacgaccttctgcanactccaaaactccacggcaaagatctgaacccaagtgggtcaggtaaagatgcattggataagcacggcctctaaaatcaaagttgtgtggatagtagaaaccatctttatccttcattntgcgagctacctgttaccaacatgagtattcattagatgaagcaatgaagtgagtaaatgatggttacccgttatagtctcttacagcaagtcttagttctacatcacatctctgggagtgctntcactatttccttcttgctgtctcaagccatctcattcttcacttgcttcattctgg

SEQ ID NO: 9886 - DNA, 408 bp, Oryza sativa
gaactataaaactcagcttgtgttggagaagggataagagctattttgattgtgacaaattattggacagcctactgcagctcctattacagcagacaaaacaaatgtgaagcctctctccaggaacatagttcgctttgaaattgttcatttgattttcaatccattggtggaacattacctatctgttgccgggtatgaggattgtcaagtactaacattaaatagccgtggtgaggtaactgatcggcttgcaattgaacttgctctgcaaggagcatatattcgttgcgtggagtgggttccaggttctcaagtacaactcatggtagtaacaaacaagtttgtgaagatatatgatctctcgcaggacaacattagcccgttgcattattttactgtggctgg

SEQ ID NO: 9887 - DNA, 357 bp, Oryza sativa
  unsure (1)..(357): unsure at all n locations
cagctccgtcggtcgaacttttttgtgtaagttgccgaagtgcctgtggcatacttgcgcatgtgctcgagtgcttcgactcttancccctccaagagttcgagcgacacctcgcgctcctcttcgcccctagagaacgtcacccttggtgagttagcccctagctctgttgaggtcattgcctcatcgccataaagaagcatgaacgggctgaacttggttggtctgtggaggtcatccgannggcccaaagacagataacatttcctctggccattgcccttcgctgccccctcaagccttttctttagtggctttaggatcttaccatttgtacgtttggccgcccatntgact

SEQ ID NO: 9888 - DNA, 397 bp, Oryza sativa
tttaatgtagttgtttgataaccgcatgactaattttgtggtatatacttttatgataaatttgatattaattgtgtagtttcatgacacaatcttaaattcgtagctagattagtgtatgggtacttttgtcacaatatactctaaggcatgatcctagagtatgattaattaagctttagctaaaataaacttaaaaaatagattaatatgatatttataaacaactttcttttttttttgaaaaaacacatcatttagcattttggaaagtgtaccatgaaaaatagagagtagaagttgggaagaggtgacaaagaacacaccctaataagtttatagaaaatgtaaaatcaaataagtgcattttaaaatataccgagtattctatgataaa

SEQ ID NO: 9889 - DNA, 398 bp, Oryza sativa
  unsure (1)..(398): unsure at all n locations
atctttaagaaagagtgtctagtgtcatataaagactctatctnttccttntatctttaagaaaagttctttcttggtcgacaaggactatcaaccctcgggtataaatatgtacacccggagtctatgtaatctatcactacaatcaatacaatttggcgcatcgccaccctttntacttctactnttagttttacgttccggcggaccctgcactcgacgcggggctgatcgtctccatctccgggaaaggaaagccaatgtccgaggctaagcatcttctcgagaggcaccagcaactcctcacaaccatcaagggcggaacctcaaagaacagcatgaccacgtggaatataataaggcccctacttacatgaagcaagcctgattgcaatacc

SEQ ID NO: 9890 - DNA, 394 bp, Oryza sativa
tggccattgggccaaagactgtcgacagcctttactttttcaggcccacgtcgcacgggtggaggaggaagagccggctctgctcctagctcacgcaagcatcgagctacctccagcggtaccggccgcagcggctttcctccaccttgatgagccgaaggtactcgtctccctctgcgacggctccagcaacgacaaggctgatgggtggtacctcgacaccggcgccacccatcacatgaccggccgacgggagttcttcaccgagttcgactccagcgttcgaggctccgtcaagttcggggacgcctccggcggggagatcaagggtgttggcttccggaccttcaccgtcaagtccggtgagcacaggctggtcaccggaagttactac

SEQ ID NO: 9891 - DNA, 150 bp, Oryza sativa
aaccgaatatagtatgtatttctactataggcgacttgataactcccatcggctgattccgagatgctgcagccgatatgattctaagccgatgatgtctttgccgattactcaaatttactgttaacaccttgcaacgggaggagggag

SEQ ID NO: 9892 - DNA, 394 bp, Oryza sativa
  unsure (1)..(394): unsure at all n locations
ttctaaccttcgcgtntctaaatagccgccttcaaaatatatgtattcttgacgactagtttcaaccaccaagacaaggagtaaacttggcagctattttttactggcaaagaaatcagctggccgccaagaaaattctggactatatagtgattgccagacatgcatgctgattgggtataggactcatcaattgtgcatgcattattagccaaaaggaaacaagttccaaataaaatttggggggataatttatttttgaatgctaaaaatatctttttcctgcgtacagtgcagatggagtacttaatttatataaccaaaactaatacaagatcgatcgagccactaattaattactagaacacagtaaatagccttgtgtattaatgct

SEQ ID NO: 9893 - DNA, 560 bp, Oryza sativa
  unsure (1)..(560): unsure at all n locations
gctagacaagcagctggacactcgggctgagacaagagcatgattatagcatgataagagcaacaatggatntatggtcacaagagatgaaaggagcagcgtctacagcggctgatgccttgtgctcctggntctatntgcccttaattntgcatccattagtgttcagcggcagcggcagcagcagcaagctacggcaactccacgggccatcacagaacgcgttgtattgttcaataaattaactgcaagacaacaaatgacttgacctgcttagtttgtttgtaccanatggtcaatgaattagttaatccagcctgtctttgttttttttttgttctttccacaaacctgactctttcttcaatgcatgcctaacaaggttgatctcatcttgttcgctgccatttggtaattactagaaatttggaacacgacaactgctgaactcgcttcgtcttaaaatattactntctctgtcctaaaatatannatattttacctaacaaatatgggatatgtatntctaagtatgaatctggatatatatatatatatct

SEQ ID NO: 9894 - DNA, 397 bp, Oryza sativa
tgcatgttaacttgagatgaatgctggacttctaattgcagcacatgattttctaggaaaaattccaagcgaattccctgaattctaccatagccaaaccatataacaattatgcgaagtgagcatagctcaactggttaggtttcttgtggtggaaccagcccacccgggttcaaatcctatatttgacacgggtgctcgcatttacggctaattattctttcagtggtaggcgacgtacccatcgacagcgagacgcctgtggtgacttcgtcaatctcaagacatgccggctcagtctttcggaggtgctcataagggtagggtgtgtgtgcgtgttcaaaacatgccggctcagtctttcggaggtgctcataagggtaaggtgtgtgtgcct

SEQ ID NO: 9895 - DNA, 427 bp, Oryza sativa
  unsure (1)..(427): unsure at all n locations
agtatgtgctgaactgcaagaatttgaactccatcaatanggttatgtggaatactatgggactatcaattnnntgttggtgtcatatcctgtaacttaaaagttagtttttttgttttacctcanaaaattctatcaagcttacattgcatttgtgttattgctcatcttgtaaatactaaatctcaccattgcagaatattcatataaaatattagcacaaccatttanngcatganggtacatcgctgataacatgactttgataaatatcctaaaagaagtatatttacatatccttggtcagtcatataactctaggcgacttcaatcttacagcatctctaagacttcaatcttatagcacctgtcatatacaccatcagtcaacctacatttagaaacattngtcaattaagcacataat

SEQ ID NO: 9896 - DNA, 387 bp, Oryza sativa
tgatcagttatctgagggcccgttcaagtccaatattgatcggcttgatgcccgtaagattgatctcatggcacaacttcaagaatgcaacgccgagctggatatggagcacaagaagctagccgatctcccgcaagctatcgaagaacaaaaggcaaggctgaaatcggctatcaagaatgttgctgatatgaccaagtccttgaaagtcatccctggaaccgatgctcaagatgcccaagccatagaagaagtagaacaaatcaggcaaagggccatatcggctatccagcgacatttgtctcagtgaacattcatgtaataggatttaggaaaatttttgtgatcggctaagatattctgatattgtatttaacttgtcttgat

SEQ ID NO: 9897 - DNA, 476 bp, Oryza sativa
  unsure (1)..(476): unsure at all n locations
agctaacatacaaccatgccacatcatcatccatttattttttattactatttcaacctcatacaagtaatatcatctacaatctatntaattctacaaatcaacatgcaaacatattcaatcatcacccctcagatcatttccacaatattnttacagatatatgtatcatctttatagtaatatttaacataaacttatcaatatgttccacattatagcgcgagaatcaattgtgtgtttcatgataaatactgataagccttgatatnttatttgttttccttctaccttagcttgatagtcacaaacaaaatatcgaaaagtacttaataatcctcgcagcaagacacacagggaatcacctagtatatcaattaaaaactatggatgttcataaatactatatgtcggcatgcagaacacggatgtatntagtatagaaaaacactcagcacagtgtaatagaagctaca

SEQ ID NO: 9898 - DNA, 320 bp, Oryza sativa
tgggcggatttagtgacgattgttatatatcagtttttatcgtcaatataactaaaaataaaggagaactagctatgcttgccatgcatatttatcttagaataatttatttccacttgtacttaaagtattatttgtttgcagagattagcacataaatgaagaataaatgaagaaaaactcactcctaagcaagctcaaggataaaggggcccacatgtcaggtgcaaccatcctagataccgccataactatcataaacgccatgaggacttacctgttaacccctctaccaaatttggaggtctactgggcccgcc

SEQ ID NO: 9899 - DNA, 500 bp, Oryza sativa
  unsure (1)..(500): unsure at all n locations
agcttntcttactgaagggtggagaaagatagagcaagaatgagttcatcctctgntctcagcaagtcacaccggcagatgcacgaataatgcaaagtggtacaaggagtaaataatataaggtgtaagctttgcataacagcagcatntataagtcacttatttgcccacagccattgtataaagacgatcctagagctacacagtattattaaacaaggtcgtgaaccctcacgaacctgccttaacccaaagcctacgatgaatcagaccgaacttgctactctgaccctgagtccagctcgtcccaaccaacccagcgaaccattcacatntagttgaagcacatctaaaattaaacactgactggacattgtcggttgccaaaccgagcgcggtattcaataatatacttgatcaagtgacatttaccacaaaacatctctactgcaccactcacaacacacgttaaacgaacggaaagttcaccactacaaaca

SEQ ID NO: 9900 - DNA, 399 bp, Oryza sativa
tagactaaagcagataactaaacatactcaagatcattatcatgctatgtgtgtgtgatatgtggtgaaatgatatatgatgaataaagaaaatgcttctcctttgtgcttactttcttctcccaaaaatccttcttttattcattaggagaggccatggctactttttttttcaatatcatgctcatgcttgatggagcataactttttttttcataaccatgcctttccctcctccttcttctttttttttcaaaatgattttctcttttaggaggagaaagcacttgaaagcatggagaatttattttggtggtaacatggaaatggaatggaatattgctcagttcccagtgtaggagtttagcatgtgcataaatgtgggtgtatgatcttgat

SEQ ID NO: 9901 - DNA, 482 bp, Oryza sativa
  unsure (1)..(482): unsure at all n locations
cagtgtgatgaagcccatgatctatgcatagcanngagtgagctggatgggagtgggacacacaagctgctataggagtagtgagggtgaggcataagtacatcgaattgaattgaattgatggttctaattntttgcgaaagggtggtgactggattgtgatngaattgatggatggnggtgggcaatgcaagaccaaatggcgcctcccctgaataacgagctcagattaataatgcaatgcaagtcataagtcgttgcgcacgagtacacctgttgaagatttctgagtgaagagtcattgtgtgatgagtatangactatactanattatgacattatgtctatgtctattgagaaaaaatganggcgtctgctacataagagatggatttcggataaccagatatagaatgttaattcggatgctatatgcgtagagagggagttatgtgacctatcgtagtgcatttacagtcaca

SEQ ID NO: 9902 - DNA, 400 bp, Oryza sativa
tgcaccatgccttttcaaaaattctgatccaccaaattttatgttatcctcaattatgttgattgtgacctacgtcattaaaaattctcgtcagaaaaaatgaaatatccccaaatcttcaaacagggcatttgatacaattatattttaacttgtaatatatttgaagtcaaaatacaagcagttttatttttaaaccgcaatgcagcccctttgaagcaagaggggagacctttaacataaagaaccacctgcatggatcgatgtatgaaacaaaatcttgttctggtatcaaaattgtgaatggtccatcaatggttgtaaagcatgtgggaaaactagcagcaatccaatcaatgtcgtgtgatagtagaagatgacatacgaagaacaagtaaca

SEQ ID NO: 9903 - DNA, 388 bp, Oryza sativa
  unsure (1)..(388): unsure at all n locations
gcttcttctcgtgcttcacatcgtcaagcggtcaagcgaataattttgtttttgatcatacactcgagtttaanaattaggattctacttcattttctatatacttaagtggatattccgatgctgattctggtgggtgtagaatagataggaaaagtactagtggaacatgtcattttcttggtacatcattaatagcatggtcttctaagaaacaatctagtgttgctcaatcaactgctgaatctgaatatgttgctgctgctagatgtagtcacagatttttgactttattactttgaaagaataatgagcttactttgtagaaagacctctctttcgtgataatacaagtgctattaacacngctaagaatactgttcaacac

SEQ ID NO: 9904 - DNA, 401 bp, Oryza sativa
tgagcgagatcacccgccaagactcaagcccgacattattcgcttaacatatttttgcacataatattaccaagaagaactacattgttcacacaaacatattctctccgatttcgaatgcatgctgtgcgggacatggtatccgagtatctatggttgggcctttgggtcgcataacatgaaatgggccatgtaggcctaagtccatgtagtgcgtgtgtggctcgataaggcaattgatgttattccatgtaattaggtggcaatacctggattataagggataacctactaaccttagccgatcgcccccatgtctatataggcggagccggaaaccctaatgcggggattttcttaagcgctacgatatattcacatgttgtgttgtgcatatactg

SEQ ID NO: 9905 - DNA, 562 bp, Oryza sativa
  unsure (1)..(562): unsure at all n locations
gcagctaaacacctttatttgctgaacataagtagacagtattatctatttagtacaaagcaagtgcattaggcttgtgcaaacattgaacgtaatgaatatgtgcagtccaatgtgcattactactaanatgctggcagtaaatgtgcacattggtaccaagttatcaaatataatcaggagtacatgttacaatgggccacacatctgacagaatgaaagaaagaatagttgaacattgtanacataagataaactgcatatgttatattctttgtagatgaagcacatttttgtcattctctctatatacatcagaaagaagggtgtgtacagctagtgaatatgtattaacatgttcctaaatgacttgtacaagatctttccttaattactgatacactgcatatagaaatttgttatgcagagaacanaacctatgagcattactcatgtacattgactgctacatngcataagctaatagaatgctacattngtgtaagctatatccttcacaataaacacatcgtgaatctgtaaatgcttttgaatgtacatg

SEQ ID NO: 9906 - DNA, 398 bp, Oryza sativa
tagggatgtgcagagcgtcaccggctgcatggccgctctaagttggttcatatcgaagctgggagagaaggcgctacccctatttaagctcctcaaatgctccgggccgtttacctggacggaggaggctgagcaggccttcactcagttgaaggcgtacctcagttctcccccagtcctggtcgccccggagccagatgagccgttgctactctacctggcggcaaccccgcaagtggtcagcgcggcgttggtcgtggagcgcgacaaggacaaccctcactccgcgcatccccaccctgtgtcgactcaacccgggagtgagcaaggaggagaggcccccgagccgaacggtggcccaaggcccccgacggccggagctggccctccgcccactt

SEQ ID NO: 9907 - DNA, 392 bp, Oryza sativa
  unsure (1)..(392): unsure at all n locations
cattgcaacagaggtgactcctataaccatcctcctttcttatatttcttatgcactgtatgttatctaactattggtaaatattattttcccttctgatcttgaaatccaatttcattaatgtccacaaacgatggtttagttgagcaccctcactgccagcataacttttgatcagagttttctttagttctaagctctgtcttacaaaaatcattanggcatcaaagaaagatggtacgacagtgcacgcattgcatttgcggtctttctagtcatacttgttactggtatgctattcttcgcctgttcatctctatgctaatagatcttctctaagcagttcaatagttgagatattaataggtgaatacaccatcattatactctac

SEQ ID NO: 9908 - DNA, 401 bp, Oryza sativa
tcaaatctggcatggttccttccaatattcttcgaatatatcttttccaatccagttcgtctctaacgagtagcttgggtagtaagaggttgagatgggccgagatgaggtccacaacatgacgacctcattgaacatgggcctcacattatgtgggccgaggaagcccataaacgggaatgcaagctgcgtgcaaaaaaaaaaataaaaaaaaggaaaatattaaagaaattgcttctttttcgcgcatgcgccctgggcgttggccggccggccgccggcgaggtgtcctcagcgccgggcccgccggccgccgcgctatccggagacactactagtagtcagtatcccgccggcgctgtattccctactggcgtgtcggcgtctgagtcccaattccc

SEQ ID NO: 9909 - DNA, 380 bp, Oryza sativa
tcctgcatcatctcattaacctggatgagtttatctttactttacaaaatgacagatattcatccaagatcttcactttacaaaatgtgtatcgctacttttgacttcagactcgagataacataaataaactctcattgctattcatttctgtatgcattaatttgttttgaaaacagtccttgcacacacgtctgcattttataatcagtactacgtgtaagcaagcgtgtgagttctttatgttgagatgatttgtataataaaagacaccttttctttgcccttttggtccgggtggaaactaagaccaaaataatctgaaaaacgtgtatagatacattcatgcagggacaaaacttgcgaaagaatataattga

SEQ ID NO: 9910 - DNA, 336 bp, Oryza sativa
  unsure (1)..(336): unsure at all n locations
ggtgcgatttcttgggatttatggccaannaatgcatctttattntttttttgtagggtgaggaggtggtgttctttgatgttcggaagattcttctgacgaaccgcctactgcnggttgttcggaatcgaatcttgcggtggtgattaagagcaaagagagagatctccatgctaattcaatcgcaattggatgttattggtttgatgcaaacgacgttaaacctggacgatattgtcgcatccagttgaacctgtagtacacttgngctgttcttgattaatccccatctcctttctcctcccaatctcgtctcctcttgtacccaatcataca

SEQ ID NO: 9911 - DNA, 396 bp, Oryza sativa
  unsure (1)..(396): unsure at all n locations
ntctaaagacgagactcaacgtcttctgtttgtgttataaaagcattgcgctgttcttggctattcccttcaagatctcagagggattaatcccgcgctttgtattcatcgtatccctattgatcctgagagtactccctctagggaacctcaacgacggctcaataatgcgatgcgaaaagttgtaaagaaagatgtcctaaaactcctgcatgccgagattatttatcccgtaccatatagtgtgtgggttagcccggtccaggttgtgccaaagaagggaggaatgacggtcgttgcaaatgctcgaaatgaacttatcccgcaacgaactgtaactggatggaggatgtgtagactacagaaaacttaataaggctaaaaaaaggatcattt

SEQ ID NO: 9912 - DNA, 404 bp, Oryza sativa
  unsure (1)..(404): unsure at all n locations
atgaaaatggtgcatgaggaaacatatagaanatgcttctccttagcacttactttctcctcccaaaaatccttcttttattgantaagagagagcatggctatantttttcttcaacatcatatgtgtcgatgtttgatgtcgcgattccggtatttgcatagtatggagatcgctggtactangatatacgcgagattgtagtaaaaagatggagatgacggatttttacacgctaggcctctgaatggtaggtaataccctacatcctgttggccgaaccagtattgctcttttcaccataatcacaccagacaatatttggggtagcctatctaactagtgtcgacatggtggtctgaaggtttgactcgtaatcgacaataaagtagcattcctcctcg

SEQ ID NO: 9913 - DNA, 352 bp, Oryza sativa
acgagagtaccgtcttcgtgcttgagtcggtaggaacctggtcgggtgactttagagatgataaatggcccctcccataaaggagataacttgtgccgatcccgtgtagtttgaattttcctcaaaaccaggtcgccgactagaaaggcacgggatcgaacattgcgattatgataacgccgcaacccttgtaaatatcgagccgaccgaatcaaagctgcttcgcggacttcttccaatcggtgcaagtcatccactcggtcctcttcgtagcgttcttcacggaaatttcgaaagcgcaaagattcgaattcgacttcactcggcaacattgcttctgccccatagacaa

SEQ ID NO: 9914 - DNA, 514 bp, Oryza sativa
  unsure (1)..(514): unsure at all n locations
gcttctcgctctcctcgccgtgagagtgagcgcgtaagctgtgctctcatcgctgctgctgctgcgngagcatccgcgcatgatcgatcggcgcacgagcagtgagagtttgagaagctctattatgaaggatcgatgccgcgggcgggagggaagaagaagtcctcgtgagcgtcgtgggagaggcggccgcacttcttcaaagtgctcgtcggcgactctaagcagcgcctggtgagtgcacgagtgccgagtagccagctcttgtctggcatatgtgcacttagcttacacttgttgccttcgtgcgacatatggcgatcacaattttggatcgggacgatggctagccaatactttgcgcagagagaattcgtcacgctagcatgcatgcatgcatnttctgcagagcgagctttgcatgcgttgcgtantctcgaaacaatctggtatatgcaccatgcaagtctcgagataatgtcatttgtgatatatatatgcatcatgcatgcat

SEQ ID NO: 9915 - DNA, 409 bp, Oryza sativa
  unsure (1)..(409): unsure at all n locations
gacactcanaatactcaagcttgagtttatttgggtactatagnaaaccatatgtctttttgtctctttgacgcacaatggcgntgaagacacattgccttggggagctagtttatgtgataaactcgtcagttaggctcaaaatcaaggggagaatgttggttgattttatcggctaatgccggttagttaagataaggttaaaatcccaccggtttttctatcctaacaagaaacaaactaagagataaatctgttttgtgtgatcggtacaaaatagattcgaattttagattgagataaacccccgagccccaccagtgtcgctatataaagaaagagaaggatggaggctgcgtgacgactcaactctctccaaccctaaaccctaaatcaatcgcccgatcga

SEQ ID NO: 9916 - DNA, 410 bp, Oryza sativa
  unsure (1)..(410): unsure at all n locations
agcactgagctgcagctagtctaaaattcccgaaaatagcctttatgattatataggttataatccggcaaaggggggattattcagagcaggctcaatggacaatggagatggaatagctcgtggatggttaggacatcctatctttagagataaagaaaggcgcgaactntntgtacgccgtatgcctactntntttgaaacatttccggttggtttggtagatgaagagggaattgtgagagcggacgttccttttataagagcagaatccanatatagtgttgaacaagtaggcgtaacggtggagttctatggtggcgaacttaatggagtaagttattctgatcctgctactgtaaaaaaatatgcgaggcgttcccaattaagggaaatttttgaattagatc

SEQ ID NO: 9917 - DNA, 395 bp, Oryza sativa
tggtttgatcaagctgctgagtattggaaacaagctatagcgcttactccgggaaattatattgaagcacagaactggttgaagattacgaagcgctttgaatttgaataagaccactctcctttttcataaaatgggggtttggttgttgatccattaatcaaataaattaggtcggaagatcgaatcaagaatttcattatatctctttcctctgccttctattttatattatatttcataaggataaacgatagggtctagaatagaagtaataaagcgaataaaaaggggcaatataaatattgctaatatatcaggaccatcttattaataattctaatgagttatcttggaatttggaatcgaataaaaaaatctatattatgctcaag

SEQ ID NO: 9918 - DNA, 477 bp, Oryza sativa
  unsure (1)..(477): unsure at all n locations
gcttggtgtatcgaatttagtagcagttgatgtcttttattaattagtactagcgcttttatgataggaaagttctagaactacntaaatttagtagtatgataatattggtgacatcatatntagtttgttatcttactaanatttaataaggttaaaagcgattataaaatgaacaagcccatagtatcttcctacgtttatagaanacctaactcaacacctaagttatagggtttatttatgattaanaagagagtgctagaatngtggtatgaagtagacttttttactcctattnttcgtaatgagaacaatactctttntcataactagaannaaaatatccatgcgttgcaacgggtaanaagctatttaatcttatcactgntgtacagtttagctaaggtgaaattcactctggannatcgttnnggatattatttacanaatcataagctacaattaggagtcctt

SEQ ID NO: 9919 - DNA, 387 bp, Oryza sativa
  unsure (1)..(387): unsure at all n locations
tgtctacgagcggnagngttgtgttctgttcaatttttttggtttgctccttcttatgttttagaaggattataaggactacaaggtctatatagaaggaaaaagataaactatactgtgatgagtccattgacagtgagtttgagaaatgcaaggggtcaaggagattccaatacaatgaactcgtagtggcgacggataattttgctgcagagagaaagcttggagaagggggtttcggtgcagtataccatggtttcttgaaggatcaaaacattgaaattgccataaaacgagttgcaaaagggtcaacacaggggaggaaggagtacatctctgaggtcaagatcatcagctgactaaggcatcggaatcttgtgcaacttg

SEQ ID NO: 9920 - DNA, 502 bp, Oryza sativa
  unsure (1)..(502): unsure at all n locations
taaaccacaatgcttcggccaaccgggtatgccattaccgaagataatcagaaatcttccgcttaattaattagatcaagctcttgttagatgcctcggcctgcccattagcttgtgcataatatggtgaagaattcaacaatttgatacccacgctatcggcaaactgaacaaactcatcggacacgaagaatgaaccttgatcagatgtaatagtttgaggaataccanatcggtagatttatatgtcttgaacaaattgaattgcatccctagaatcaactntcttcanaggaatggcctccgcccacttggtgaaataatcagtcgccaccaatataaactttatgcctttacttgatggtgggttatcataccgatcatatcaattccccaacctctgaataggcacggnttaataataagaatcatagccgacgtctgcactcgtgaattgttcaaacttctgacaatcttgacacccttatatatctgaacaatc

SEQ ID NO: 9921 - DNA, 390 bp, Oryza sativa
tcgcgcttttgtagtaaggccgattggttcacatgattgcgctggatcatcacggaccaacctgtccgttgtacgctcgtagtcgtataataaactcaacagatcacggacgaaccgctcgtgatagtcggacgtccaaagagtgatcgatgatcatacatggcaaagaaagtttactgatacaatcacggagtgtttatgttcgtcttcttttccacaatgcacaatctcgactccgcccttatcattggggtgaatccactagagataagccgccgcaagtgagatatcatattgtaagttttcttttagatgattgcagggaaacatcacgaagtcatggctttcactcgcaatttgttcgtgttatgcttaccgatcaagattagg

SEQ ID NO: 9922 - DNA, 435 bp, Oryza sativa
  unsure (1)..(435): unsure at all n locations
gctcatcacagaaacgaccaagcagctccgacttcccatggcgaacatcagccaaagcaatcgtatcaccgcttcctgcttgttgttggcaccaacacacctagagagagactgcaacgtgttatcgttaccgagcttcatcacaccccatcaacaaagcagccgaaggttatgtttcgcccncggtcgcccgtgcgtggacgacanggggccgnctgcgccgtctgatctgatttccagtgattccagtttctctgttcaacctttggttcttcttatataattngtgagcattaaaaagatatcatacgccatgctaaatatngccactttattatgacgccatactatctacttatagatcttaaggcatgcaattacctgttgatgtttgaaatgcctaaaatgaaatccatgactgcatcatgatctgaa

SEQ ID NO: 9923 - DNA, 403 bp, Oryza sativa
  unsure (1)..(403): unsure at all n locations
tgacatgcatagagccacatcatcaagaaaanattagtttttgtatctttttaaagcttngatctcaatcatttatgtgtcgtgcatttgcaacccaggctgtgttcgggagggcaagtttccaaccttgcctcctgacacggaaaacaaagcacgcgattatattgagattaattaagcattagtctaaaaaacttgaaaaatggattaatatgatttttttaaagcaactttcatatagaaaacttttgcaaaaagtaaaccgtttagtagttcgaaaagcgtgtctgcggaaacaatgaaagtgagttatgaaagaggggaaaagaacacagccatatatgtagttattattataaatctcaatattggaaaaatcatttctatgtttggaacataacaa

SEQ ID NO: 9924 - DNA, 540 bp, Oryza sativa
  unsure (1)..(540): unsure at all n locations
cgctcttagcacgagctgcagcttcagtcattaattaagattctttgtttatctgtgaagtcttaatgtatttgaccttgatgaccattactcanagcaatccatatctcatgagcagtntgaagatgagcaacacaatcataatccgaacgagaaatcccactcataagaatattgcgagctctgcaatttagttcaaactcaggtcttgcagcagtagtattaataacttcaggaatcacataatgatgagaaacttttctccaaatatcttaattctcagccataatataagaatgcattctattacaccaatgagaaaaatccgttcctcgaanacatggtgcttagttganaacttattagaagtatgcatggcananactcaagatcggtaaagatcgaanagagcanacgtggctctgataccacttgtaagatcgaatcacaagaactaaaccaacccagagggggtgaatgggtggatacccaaaaccacaactttagcggctgaccgaatatacgccgctaccgctgata

SEQ ID NO: 9925 - DNA, 455 bp, Oryza sativa
  unsure (1)..(455): unsure at all n locations
catgcaagctaataaantcgtntcgtagcttacatgcagaatctcgttttatgtggttttgttattagtctacgtataatacttcatatgtgcgtccgtatacgtaccaacaagatttgaggaggaactaaacactgcccatatatttaaatacaaaaggtcaaacgttggacacaaacccataactacgcttaatatgcgatagatggagtgccacccatatgtctgagacttacgataattatatttccaggtactacatacttcctctgtaccataagaaacgacaattgaataggatgtgactcatctcaacactgtgaatgtggatatattcatgttcagattcgaccactataggatatgccacatttgtgaatagaatattttatgtaacgacgatagacatcatcgtgcatggccgttaatgttatcatcgatctgctgttcatact

SEQ ID NO: 9926 - DNA, 332 bp, Oryza sativa
taatctgcgcgccatgcgcagggcacaaagccagcattctttgtggtgcacgagtgtatgacagagcgagctcaagctcacagagctgaagaatcatacacaacgccatcttggactcaagcaatgcgaagtttaggccaatacagattctcgggccccaactaaacgggaggaacgccccaggatccctggatgccttggaaatcccctcagcgaacctccctggagtaaactggtgcacagaactgccccatatgcctgggtcactgtggaggatcaacaaggggagctcgaagaccacgccaacaaggtgagcgacggccgcaaactca

SEQ ID NO: 9927 - DNA, 397 bp, Oryza sativa
  unsure (1)..(397): unsure at all n locations
tgccgactgctgcttgatttggggatatttttaatccttgtactcctttggtttccctttnttttatgtatgtgattaattgctattggaaaactacgatttcagttggaactgtcaagcaatctcgccgaaatttgcgtcttctcgtttagcacttgacttactagtgaattatcagacccaaatcactttttcccttctcaggcagcggcggcaaaccaaacaagcaaaagttcaggacgcctggccaggtaacattcaataacttctcagaagcctgtcaggcatgcaaaaatttcagtcatggtgctcagggcaccaaccaaacaggctcctagttcggcctccgccgcacgccgttagtggcgccgtcaacatcaccactcttttcaaaaat

SEQ ID NO: 9928 - DNA, 323 bp, Oryza sativa
  unsure (1)..(323): unsure at all n locations
gatgtgacgganaagtcggaagtttgtgtgtgtacgacaagtctgatgtgatggaaaagatggacagttgaataataagtttggatctaaactcgggccaataagacatataatcagaacagaacttacattctgaatattggaatgcagagatgatactggactggactgaacgagtgacctgtactcctcgtaagttgacctctcanattctgagcgatcgtctgcatcgaaccatatatatagaaacctcaagtatgctatatcacacanaatgtatatgcagaatatagccacaatttcaagatgcttagtacagatgt

SEQ ID NO: 9929 - DNA, 399 bp, Oryza sativa
tcgtgctagttatagttggaaaataacacgcacctttttgtcttttacccaattcccttctctataatccgctaaggatcgtgtgcaaacagaacttactggtatccgttggcgggcgaccagtccggcaacgccgtgggtaaggtatcttctctcctccaaggatcggcctgatgaattccttccccttatctggatttcccaaatcattgtatgtggcataatcatatattctgtcagataattttcgaacacctgtgccatctccttttaggtctttaagttccttctcccttagttctctaagcccgggaggtgtttcagaaagtaaatatggctgcatgaaaccattcatatattatcagaaatctgaattacgtaatctttaagtgaatattc

SEQ ID NO: 9930 - DNA, 425 bp, Oryza sativa
  unsure (1)..(425): unsure at all n locations
agcatctccgtctccctgacagagtgcttgcttctctgacaggactggagccgttcctcgctctagcccatgttagagaccatcttctctatgaggtccacagctcctctaaccgtcttagagaagaaggctcctgcagctgccacgtccaggtgatcgcgggacgtgggagtgagccccgtgtacaagctctggagtattagccactgatccatcccgtgatgaggacaggcagccacatactcctggagttgntcccacgcttctgggattgactcctccctcgtatcttgaaatccagaaattctcctacaatgngcattggttctgcccatcgggaagaacctcgacaaaaatgccgcagagcatntgtcccacgagttaatagtagcacgattaggaccataccactcgttcctcttccc

SEQ ID NO: 9931 - DNA, 404 bp, Oryza sativa
ggacactaaaaactaagctgggcaaagttgccgaaagactagttttttttatttgttagagataagagttgtgtccgacaaggacatattttgtaatctcgggtataaatagaccccgagccccatgtaataaaaaaaacagacgttcaaatacaatctcggcgcatcaccaccctttttactttcgttttgtttcgacgagttcttactttcgggttgagctgcatcggtttcgatcttcaactagaggtacgacttgttatggcggcttgcgttctcgggattagtgcttccatcattatgatactctaatgttgtctacgtaagttgtcgagttatcatatattctacataatctttagcaatatcggtatctaacctacagtcggctaacatctatcact

SEQ ID NO: 9932 - DNA, 476 bp, Oryza sativa
  unsure (1)..(476): unsure at all n locations
tgcagcttcgctactgcaagaagagacttgccaccacctcgtcttctattatcttcgaagcctcgtgtggagggagacgctgtgcctgatcatgccgaacctgtcatccatgtcttaagtgatgatgaagaagaggaagacccacaagaaagagagccagctactccagaggaagaagatccatcgcttcgttccgacgcaagggcgggatagtcgcttagttagatcgttgacgtagttcgctgtgttagattgcttggcttaagttgctcgtgaaagtgtgggtactaacatgacctactcagtgcagcggtagtgcatgcattgaagaatcggcgtcattatcttttcggaaccatacgaagatctatacggatcataanagtgtgaagtacatgtttactcaaccttgattgaacatgcgtcaacgaacatggttagagttgatcaatgattatgatatgtgaattcattat

SEQ ID NO: 9933 - DNA, 346 bp, Oryza sativa
  unsure (1)..(346): unsure at all n locations
tgctctntctcggcttctgtgaccttcccggtatctttatggaggatcccgaagttctcacgtgccgctagcccgtagcagttagaccatcttccaatgacagtcctgggcgccgtgggcctaccactagcgtcaacctgtcttataacttgcactgtggtcggccatatattttgtgaccggggatttctactagacctacttgcacttgtcccacccgacatcgacgtatgttgttcctgcggcaattctgcagcacaaacagaaagcaacatatgctaaggggtgctagccaaaatttatgtggtcatgtggggaaaatttatcctataaattaccatgaatt

SEQ ID NO: 9934 - DNA, 348 bp, Oryza sativa
  unsure (1)..(348): unsure at all n locations
tgttctgatagttaaagatgctaatactaaatataatttcggagataagggttgattggcatttgaacatataacatgggtaagtattgtttcttcaatctccattntattaaattggtaactctctctggtaactgtagtgtgtctccaagtttcagtatttcgtaaatacagtcttcatcaatctgacaagatattctggttgataacgtatagtgnntttgtagtaacttgntgctttgttacacctttatgaacattnttangtcagcctttgtaccagttcgactggatctccacgtacaaaatgatgctcaccagttcactactctctccggccctaaatat

SEQ ID NO: 9935 - DNA, 397 bp, Oryza sativa
tctaagttcgaatcgaacttaaaacatcatatattcttcgcctcggtgtcgagtctctcctctggcggcgatagagtaaggggagagaaataataagggaaataaaagggaaattgtaaaaaacaaagaacgtggcttatgtttctagtggattttgctcctagcctacatgtaagttcgatttcgcaggtaaatgggcaaagcaggcatgggtagtgattacccatacccatgcccatttacccatcgggcatagcttttgacccaataagatactcatgggtataaaatggagaacaaacccaaccctaatggggtttttacccacgggtaaacggtcaaacgggcacaattgccatcactattcactcacaagcccaattgcagtgtccagtct

SEQ ID NO: 9936 - DNA, 218 bp, Oryza sativa
ccctccccccgaagggtgtgctgtgacgcaccaacacgagagcacgcccgagggccccgaacttttcgtaaccgacacgggggcgccctgcaacgagaggtccaggcgcacagaaaggcaggcaccgcagcaccgacaagagcccaaaccccgagaacaccacgagacagaaccgaccagaccaaccggaccatcgcagcaggaaacccccaaaaacg

SEQ ID NO: 9937 - DNA, 392 bp, Oryza sativa
taagtttctctcaaggtaccaatctgataggtcactttgagcacctttacatacacaaacgcatcgacgttgcatccctcttaatagtacggcattcctatactcaaatgtaaataggaagataattataccaataggaatgccttctttccatttccttcctttggcataagggatgccaacgccaaaaccgtttcaccgtatattcttcaaatgattgatgcggttacttatagcttcaaatagtctcgcacggtccatcatgacaaagctgtcactcgcccttcaccaccggatttggttcttcggcgccaagccccttgcttgcccttcaccttcgcatggtccatcgcgaccgagcatcgctagcccttcaccgttttgccataata

SEQ ID NO: 9938 - DNA, 234 bp, Oryza sativa
  unsure (1)..(234): unsure at all n locations
gaacgaatgcaacctanatggtctaggtacacattataaaaanaaatgcgcagaccttcacccagacggcatgcaatggtacaaacgagcacatcgcaaccagattaactagaaattggcaggtgtgaacatgtgggattatccaaatagcatacagggaggagaacgaagaaagggaagaggtttgggcggcacaccctagtatgcccatccatccatccgtaccggagcggg

SEQ ID NO: 9939 - DNA, 395 bp, Oryza sativa
  unsure (1)..(395): unsure at all n locations
ntcttaatttgaaagctcacctaattaattaactaccaccgatcgatgtatccccagccttcttaattagtgcatcaaatgtggctatgtaggcgatgaaaggtcgacaaataacgtaacacccaattaatgcaactttcacacacatgaatgtgtgtaggtatgcatgtgtgggctacttaactactccatttcaactctacgtatggtactccctccgtttcatattataaggctttctagcattaatatctagatttattaacaactatataaatgtggctaatgctagaaagtctaataatgtgaaacggaggaagtatatagtactagtagtacctactactatcacatatgaatacattgtgtataaaacatctcaattcatttagaca

SEQ ID NO: 9940 - DNA, 356 bp, Oryza sativa
  unsure (1)..(356): unsure at all n locations
agcaagccgaatctactaaaggaaaaagagtggtcattggcgagccaagacctaagatgatagtgccaaagaagccggagattggcgtttggaaagagaataagagtgaagcttcaacttctaaagccnctaagaagaccaaagtgacttttgatatgctnttggagaagtatgagaagcaaggtggtgagaaggctcacaacanaggaaaaagaccaagatcaccttctanggagtgattgggtcattaccgagacgatcgcattcacctccatatcatcatctacaagacatgtcatggngttcttattcaatagccgcaccgngttatccttatccttattatataccatggg

SEQ ID NO: 9941 - DNA, 382 bp, Oryza sativa
tccgtccttcatttatgaagaaatagtctcttgggttgtctcaaatatggatcagcatggaggacaactaagctaagtttgtaaactgcttaagcgggaaggtagcattcaagataaacaaaacgaaacatcctcgcaaaatatgaaaaaggataaacgaaatgagcatgtgcaagattatctagtgtacgttaccgattgacctggtagctgttctctcgtccatagctttctcgagctgggtcatatgtcagttatgtctaatccagttggatcagttttatagtagttaccattaaccgtggtttagccaggtccaaataaatccaatatttatcgggcaaaactccctggtcctgcaattgtaactgccaactcactt

SEQ ID NO: 9942 - DNA, 491 bp, Oryza sativa
  unsure (1)..(491): unsure at all n locations
tcatgtacgtntgtatgttactgaaagaacatcagtagncgttgtatcgtacaatctcatacatacggacagtagcagctagcagttgtatgttataaacatgtggaagttattatttttttaataatagatctaatctaatggtgtaaaataacgggtccacaaanttaagtgaaaatcaacggtaagattagatagtgccatgcggcgacttaagaatatntgtaagagtgccacgtggcggctttagagcgtntgtatgaagtttaatggactttagtctataatagataatagatagatagaagatagatagatagaagatagatagatacaccatccattgaatacatagtgtctacatatagtgtctatatgacatgacaagtatggaaactaatagtttattggttgggatggcctaatagtcgctgactgacgctcgccgaagcacgggccaccacgcgttgatcgcatcactcgccgcgtcg

SEQ ID NO: 9943 - DNA, 388 bp, Oryza sativa
tcgatttactagccgagctgtgcttctgcttcctgctcgatcgatcgattccatgcgcgacccgtcgctagatctgaggatcaggtaggttggtttgctgttggtgtggacgagtggatgatgatcttgttgatttctgtgcaagtggagggggtgcctgtgcgagccaacccggattttctttttcagcctttgatctcgtcaaaactcagaaatttcgatgataacgtagtaataccgctttttagtttcacttttaagtaaacctaaatgtacggcacatcgtataagatctgcaatccttagctttgaaaacaagcgagaactgtattctgtagcccaatgcaatatcagatcagttaaatttgcagggagaatgagctgcgta

SEQ ID NO: 9944 - DNA, 536 bp, Oryza sativa
  unsure (1)..(536): unsure at all n locations
gctgcagcttatcatgccacagcatanatgacagaatcattatctatctagttgctgcgtggctttggtaaatgaanacacatgtcaataattgagaacaaccatgttggagtcatatcacctaacagaaagcacttgtctctatcacatgattcacgccttgtgcatanttttatagtgtgtctatgcaagcgtgtgaactactggtgggtatgccatgggagtatgatagagatgctctacattgtggtaaaactaattcatgcactttcacatataatgggtacgagttagagttgctaccaatgagctctgctgatatttcgaaagatgattatgagagagttaagattattaacaatgagctctaccacctgctagtctaaaattatatgtataaaacctatgctgggaacatctcattgcaatattctctgattagcacaacattggtctccctatccctacttcaattgacctaaggcccatggctatttgcatcaccacacctcttaccatatggagtacacaccgcc

SEQ ID NO: 9945 - DNA, 399 bp, Oryza sativa
  unsure (1)..(399): unsure at all n locations
ggggtaattccgtttggtaccacgtaccgntctgtctctaaaaattatacacaccacgcggcatactggtatgttttttatgatatcatagctattaagtccggatcgatgaataaactaaacaagctctctgttagctggtcaagtggttagatagtcggcaataaaatatttgctaccaacagaagcgatgagacggtgggttaactagcgcgcatctctcagcccctgcgacctgacgatgaatcccaatgggtaggcatatgcgccttgagaattgaattggggcctcgaccagccagaccaacaaagaggctccggttattgttgaccggtggtccaatccaatccccttcaagtcttgaagtgagtaccctagaacagagcgatgcttttcta

SEQ ID NO: 9946 - DNA, 403 bp, Oryza sativa
  unsure (1)..(403): unsure at all n locations
ctatcaacaggactattcagtagatcccaaacagacaacaacttcatagaccttggtaatgactgaagcgaactgacattgggtgaaacttggaacagcagcaaagatcgaagatgtggtgcatggtctgcaagttgtgcataatcccctctctgaattataaacggcgtgcttctccaataagatgtgtactcttcgagtggtaaccgacatgcaaaaatctgttcatgacgctctgaaagagcanaacactgaggatatcgtgcatttggacttcatgaacatgtccagcctcatttctcttcaccagcaacagaagacatcagttcacaaagtcagtcaagtaatgctctgccacttcctcaagtgttctatgctcagcgtcttcaataaatccttcagc

SEQ ID NO: 9947 - DNA, 388 bp, Oryza sativa
  unsure (1)..(388): unsure at all n locations
tcatgacanttaaatgtgtgtgcctgcaccgacgagttaatcctttaagacagctgcccggcatcgatccacatataagtgggggtgtgcacttcctgtacatgagcaaatgcgcaagtcacaacgccgttgtacttacgtagagcccccttagcgaagagcgcagcaacatcactagcgagttattacggcttctcttctttggtgaaatctttatttaaaaggtttgtgcacaaagcacttgattaccatggaaattatggacaacaagaaaatattacatgtggatttttatcacaggggaagacaatttcagaggtgggaatcaagcagtgcctagtactactgagtgaagtgacaaaagaaactatgctttgaatttacactc

SEQ ID NO: 9948 - DNA, 421 bp, Oryza sativa
  unsure (1)..(421): unsure at all n locations
agctagaatcctcttaacctntntaagtttggtcaatctaattaattcgttgtacctctaatatcattntgtgaggaggaatagatatgatcagttgggaaacgattaaatgaaaatgactaattataaatactacgacctgcctgcagctagcaatctaactaagtattgtgtgtactcgtacgtgtacagctcgatccttaattactcgctgacgtggcacaactagaacacatacatcgtactaattactaatccacaaaccaacagtgtcttaataataaatttgttagttatgctgtgtcttgacgggatgacagctactactgatgatgatgatgataaagctcttactttctgtcaaaccgaactttatgcgtgcaacttcaaccgtgcgaactatgataatagataattatca

SEQ ID NO: 9949 - DNA, 240 bp, Oryza sativa
  unsure (1)..(240): unsure at all n locations
gctggtgttctcgttnggaggagagttctcgtcatattccttgcgtacatgannatgtcgagtatgcttctttttntgatgaaagcactctgtgcgtggctaatgacggatcccatgtgaagctgttagcggaaggcgagtgttntggagagcagcttggcgacaccatgaatgagggctaatggtctgtagtcgcctatggactccgcccctctcctttttggtatgagcaccacattg

SEQ ID NO: 9950 - DNA, 399 bp, Oryza sativa
tgtattgcctccccgtagctagctggcgccgccccgatcgctgtttccgctttttgtgagctcgcctccgtcgccgcccatgctcgatagcgtccgcacgtcgccggcctctctcatagtgtctccatctaatccgacgctacaaacggactccggtagccgcgtagatgctctagtccggaggaatcgcactcctatcgcgccgtcgccgttaccctcttttctcgccgccggtcgccgccgccgaaatccaccgccgtcgaactcccttcggcgaatccgagccgttggctcgtctcctcttgtcccgtgcaacctcccggtgtgctcgccttcacccgcattgccgtagatcgccccgccgctcggcgtcactgttcgccgtccgtttcggccggc

SEQ ID NO: 9951 - DNA, 499 bp, Oryza sativa
  unsure (1)..(499): unsure at all n locations
gctagtattattctctggaattcattgaccttatggctgatgcttgttagttaatgaacagcctagatgaaaaacactataatgcgagttgaattcactttctatcctattccttcggctggtctatgggagatgagatcatgggagtcggctgacttcttagcatgattgagagaacctaagtacctaactgctcgaaatgttgaacacttaacttatgactgagctattantccattcttactatttctattatgtcattgtattatcaacccgcttcagtaagtctgtggtgcactcaagtatcttatgtcgctatggcgtgtcgattcttaaatggttggcacatatgaatctgtactcaactactctatctgatctcctggcttctctggtctctctaagatgctctttgtatgcaacccgattcacaaagacacatatatctttgatctgaacagcttcatttccttgttacattatcacatcacactctagt

SEQ ID NO: 9952 - DNA, 371 bp, Oryza sativa
  unsure (1)..(371): unsure at all n locations
tcgtgcagcacagagcgagaaggtcggttcagagccttcttcttttgaagatcaagaagagccttgccgaagttgacctacacccaatctttcccagaagagtagttccgttagctttctacatcgtgtgttagttgcttgcgtgtaagggtatggtttgtcatcattggtggggatgcgaccatactatgttgtttgcttaagccacttgaacaataaaagactactcacaacatattattagggcagtgggctagtaccttatctttatcaaccactctctttcacctctcttccgttctggcagcggatggttagtgncatagatcatatcatttaaagtcaccaatcaatggttcagttgaaagcta

SEQ ID NO: 9953 - DNA, 417 bp, Oryza sativa
  unsure (1)..(417): unsure at all n locations
atgtaggtcagtctgtatatcacctccatattcatcttctagggggacgtcagatgaactggcctccttgataagttgtatattcccaaagaggtgctctgttatgaanatgtaaccggtaacattctctttatctccatctgatgtgatgagcagtttcctttatggtatgtgctctgtaactgctatatactggtcttaaagttttccgttncctgttgcgaaacatanccatgtcaacagattgatctctgaagcagtggctaatntctattgacagccgcaagagcatccttcttctctctgaatgaatgttatccctganagaatgcagaaatagtttcgcgtgtgttctgaccattcctgctagataactgacttttcgcatgtatgccagagtgctttgacactctacct

SEQ ID NO: 9954 - DNA, 395 bp, Oryza sativa
  unsure (1)..(395): unsure at all n locations
tctcaacagtttttcttgttcattagtagcatctgctatgtattgtgccataatatcgtagctcttgccgctctcgacaaattctctgtcagaaacgtacgtcaaagttgtgtcggtgtcattgtaagtactacgatttgtcaatccgcagtcgacgtttaaaaaccctgcacagacacacatccctgtaataacagcctaaaacagacaccagatactgaccgatgctcatgtcgtgtgtttcaactgtttcaagntaaggttcatgcgagttcatcatacaatcatgcagctagatatttggtcgctaagtatacggggagtgcttacatatttattcttgggaggaagtatatgagagtgtttaattagctttcaagtattatgcactgatt

SEQ ID NO: 9955 - DNA, 201 bp, Oryza sativa
catatctattagagataatcaataagaatcgcatcaccacgtatgaatattgatgacatctaacaattattaacaacaacttgtcggtgacatggagcctggggtatcgtgaccagaagcctgagtagccgcggtcacccacgtggcctgaccccctcggaggagtctggcccgaaagtgacatggtcacccctttctctg

SEQ ID NO: 9956 - DNA, 394 bp, Oryza sativa
  unsure (1)..(394): unsure at all n locations
tatcagcngtcctaaaacaaacaaacaaacttacaattaccaactccacaggcagcaaactttctatccaaagctgaactgaaagccttcaggaaagccgcccccggggaatcctcctcctccatggaatccaccatcgtaatggaatgagtattgctggccacctcccccaaaaggattgaaaccaccacgctctcctcctcccatattcatctcatcaagatcctctcctcgggcgtatcttacacgtttatcttcgtccccaagaacctgcaaattgccgattgcgcattgttaaaaaacacgcgtggcatctgcagcatgtcgatctgattcgaaacaagcatgcctatagctaaatatgggtgaccagaatctatgttattgggacact

SEQ ID NO: 9957 - DNA, 346 bp, Oryza sativa
  unsure (1)..(346): unsure at all n locations
agctgaagacaagaccttcaattcatagtaanagttgtatattctgatacatatgcacnatcgaaagagtgatctcttggtattctctagtgagatatcacattctacagtagaaatgatcaacgtgcgtaagaccataaaatgcgtctaagacattagttatgctattgctatgagagggcataattaattatcatgactcatggagcaatatcataaatttctggcaataatacattcccagtccacaatataacttatagtcgctacattagtacataataatagcactagacactattcgacacactcaaactnaattgactacttcctccgcttcacaatg

SEQ ID NO: 9958 - DNA, 394 bp, Oryza sativa
  unsure (1)..(394): unsure at all n locations
caatnactcagcttgtcttgaaattnttataatatcgaaatgaaacccactaccacgcttatgtgtaccgaanagncttgccatatatttgacatggggcgtttaagttgttgtatctatctcaaccattcaatcatgactaagcattcaatttagtaagaaaatattctcttgtttcgctaacaaaaagcatgtacggagttatctgtgtcactaatttttgtggactcacttattaaactactgcattcatgtcattgtgtactcaaaaaatgtcattttccactagtcaacgaaattgattgacgtggcataaacaataacatgaccattatatgttgaaagccaatataaaaatttttcacatatatgtgtgaccccgaactaaatcatg

SEQ ID NO: 9959 - DNA, 422 bp, Oryza sativa
  unsure (1)..(422): unsure at all n locations
tcccatatatgcaatcaatgtgttgggggtacatntatatctgttggtttttctcttcagttctgtaacagttactagcatagtcatgaacgtagacactgcggctgtattagcaaaataagtttatcatcattggagattcctacaaatatgattaactctattggagctaaaggaacatattcaggtgggctgctctgctttagccctctgtagtctcctaaatagtactagtaacaatctagtatggtaatgctacttaagttcttctatctttgacattgaactattgctgtgcgctgaacttatntgcagttctcatctttcagtatgagtctgacactctcggcatcatatntacaccttcaggagatgtatcttgcgttggcaccataccttctgacgtgaaagctgaagccacc

SEQ ID NO: 9960 - DNA, 385 bp, Oryza sativa
  unsure (1)..(385): unsure at all n locations
tgacatgcaatctgggattgctctatattgcggcnatttttgcaacccatcagacagtatttaacattttcacagcctatacttaacccaagacccagtacccaggtgaagactgaaccgcccaatctatctactagaaaaggtcacttgctcacttaggtataaagaaagtaaacttgctcacttgctcaccttcttggccagatgataccggcatctacaatattcctcctcttgtttcaaccattctggccgaaatgacaagagatacttgcacagagctaggagcccagtattatacttcctgaagtcgattgatttcaactagaatttcatattgttagtacaggacagaagtcagatatcaatgagctcatgtgtgatt

SEQ ID NO: 9961 - DNA, 474 bp, Oryza sativa
  unsure (1)..(474): unsure at all n locations
cgaagctcgcaagaatgagctcttggcccaacttcaagaatgcaatgccgaactggatctggaacacaaaaagctagccgatctcccgcgagtctgtgaagaacanaaggcgaagctgagatcggccatcanaaatgtcgctgatatgaccaagtccttgaaaatcatccctggaaccgacgctcaagatgcccaagctattgaagaagtagaacacattaggcanagagctatatcgcgtatccagcantatttgtctcggtgactctctgtgtaatagatctttataatttttgaatcggctagacactctggactctattgcttgacaacctttggccgataatatactttaaattgctaaaatttcattttcgatatatggcccctaattacacgtcaaacattgcaaatataaacactaaagcattacctatcgcatcgtcatcgaacccaccgatcattgaaacacta

SEQ ID NO: 9962 - DNA, 379 bp, Oryza sativa
  unsure (1)..(379): unsure at all n locations
accttctaagggttagggttacaaaagattttactatgttgcccttatgaaagggacatttacatgggtacgcagtgtcatttgcacatatgggtctttaatgggctgataggctgggcctggtctatggcgaacgggcctaaaaggccgggggcggcctgttgggccttcttgatgccgaactcgtcatggcgaagtctttgtagttcgcccgaaatgcctttactttcggagtaccgacgcggcttttcagccttcgccatcttcgcttatggctttcgccataaggcttcgcctgaatggtcttgatgtctttagcttanatcctggctggtactatggtttcggcaggtccggccgaagggcttcatggcatgcc

SEQ ID NO: 9963 - DNA, 280 bp, Oryza sativa
  unsure (1)..(280): unsure at all n locations
ttgccatgacaaagctaatgagtgatgcacatcatggatttgtgtttaagcgtacatctactcgcagtgagaatatcctcaatactattcgaatagccgagctcgcggctatcgagcattgcgactcactatggcatctnggatagacatctaattccaacatttattaaatacagctgcagttaacatagtacaagtatgtgactgctacatactgagcccttctgcatataaacctagctctacacacatgctaccatatcatgcattcatcgttgat

SEQ ID NO: 9964 - DNA, 460 bp, Oryza sativa
  unsure (1)..(460): unsure at all n locations
ctagtcagggtagtttgctaagcactaagcagagctaatttttgtagtaatttgctaagccgttttggttaaaaaaacactcaattagnttattagtattaattaagagtgaactattaaaagcttccgtaatggagtttctttggattcttagaanactattctaatgattntttttaaaaaaaaaacctgcatggtttatcggcatgaaaaagatgaccgttataatgagcggccaatacgacttccttataataacactggtaggctgcgttcgaggtgatgtangcccctcacacaaacaaagcatgcatttatcatattaataagtatttatattttaaaaatagataatatgatntttaaagcaacttcgatagaacctttttaaacaccgttagtaattaaaagcggcgaagaaaatgcgganggagtgtgaagtgtgaagacacactaatat

SEQ ID NO: 9965 - DNA, 402 bp, Oryza sativa
tacctaagagagtgcaaaatgaaggaatgactcttatatgtgacacacaatgtttcttcatcagagctcttggaattcattgggcacatgagaaatggtgatatttcttatatttcccaatttgatgttcagattcttctgcttgagtatgtaaagcaaaaaaatcttcgtgatcctcgcagaaaaagtcaaattatttgtgatgcgaggcttgccaatttgtttaggaaaccacatgttggccactttgagatgttaaagcttttggaaatgcattttcatgcgaaggagacggtaaatggtgatggccaaaaaggcattgactcagattcagctcaaatagacagtggaggatatagtgatatgccaagtaaattatgctctgataagaggaggaagatt

SEQ ID NO: 9966 - DNA, 446 bp, Oryza sativa
  unsure (1)..(446): unsure at all n locations
gatgatgaagatcgctagctcaagtatcggcattgctgctagctttctgctaggttctgtttctatggctnttcttcactagatagctttggtctgtgttgcactcaaagttccatggagttgcttgcatatataagcttcttggaagactagccttgtctggattccagttctcatattcttgcttgttaaaaataattgtgatgctttccttttcaataantaccaagtttgtcaattttnntatctgtctcgcacctatcatgcatgtttcctgtgaaagatcatattgattgcgtgcccactcgatgtacaccactggaatcgggatcgggggataaagatctgcattaccatatactatatcatctgtcgactataacggtaagtcttatacttctttcttttaagatgcttctgttactccttataacctntcggttaca

SEQ ID NO: 9967 - DNA, 385 bp, Oryza sativa
tattgcaaccaagacttttaaaggcaagcaatcctacttggcatattggattctactggtaattaattactgaagccacacagtcagtcggactggagtgctcgatgtggtctccgccagtagaaccacccgaaccctccacgcacacagagcacacagaccttcgtcttccatggcgcgtgcagtgagctaggtggccaaacgaaggcgtcacatcgtcgcctgcaaccaaaatctctccacttgtccgcttgtttaatttactcgcttcacatgggggcaccgcaaaacggtaggcccaggccggccggccaaggtccaaaataaacccaaaaggagcgacgccgatccattaaaaaagttcggtagccataggctctcaact

SEQ ID NO: 9968 - DNA, 483 bp, Oryza sativa
  unsure (1)..(483): unsure at all n locations
tacattctttttaccaccgagtatatgtgaacctacatatctagcaacaatgcaaccatcatgagccttcctaagcatataatgagaatcaaacatacatgtcttatgaggcttacctccggngcaatcactcaccaaatgcccaacctcacgacacttggagcaatacttaccacttctcttgacaaaatgagtggcatggtgagaaggtttcttacccttcttaggaatgaatccaagtccctccttgttaaagatgcaccggtgctcactcaaaatcttgtcaagagtgttcttacnctcgaagcatctctccacactcttgttgagcttagccacttgctccttanactcattgttctcaacaacaagtgaggcatcacatatagaaacacacgagctataactagagcaagggctatgcatatccataagatcatcacaagaagtagaaatgctagatgatgcaacatgagcaatatg

SEQ ID NO: 9969 - DNA, 370 bp, Oryza sativa
  unsure (1)..(370): unsure at all n locations
tgtcaccaacactaccgaatgcaccaatcagcccgtcttcttcattcncctgtgtttccgccggcgctggcgcaccagcagatgacgccgccgcacgagcaacagcagtggcaggaccatcattttcatcaccatgtgctgtcccctcccaaccagccaggacataaggaaaccgaagaacaaaatctacgggcggcattacattccgaggggcacgggacttcttaccccgaaaaggaaaagccatattcttaccaacagaggctctaacatgcgtgccctcaacagctccaaaacaaccctactctgcggtgcaacaacatcaaaaaccacggacaatatatcaacgcgcaccataagataaaacgag

SEQ ID NO: 9970 - DNA, 243 bp, Oryza sativa
  unsure (1)..(243): unsure at all n locations
tcactgcacgcagatctgctgatgatcatcatatatcacagccgaagtgttcagctctcgccgaactttataagagagagagagagagcagtggatacatcgaaccaggantaaaagaactcgtggagtcagctaacgggcacatacctgcagagatctcgctgntcagtcttggaactgcaggagatcagtcagcctcggcgcatcgagcaggccaattccgagtgcttttatagcgaattc

SEQ ID NO: 9971 - DNA, 398 bp, Oryza sativa
tggcgcacacgaaagagtgcgagagctcagaagatcctctccttagtcccctacctggcgcgccagatgacggagcgtggggctcctcaccgggagaccgcgcatgcccccctttgccggttcggccggggactcatggtgagattctaagctctctgtatgtggaaggtttctcgagacaggaaacacacaagacacgggcgatgtatacaggttcgggccgctgagaagcgtaataccctactcctgtgttttgggagatctgtgtatgaaggagctacaaagtatgagccagcctttcccttggtctgggttcccaatgtggaaaagtccattcctttcatctaagtgggcgagggccttcctttatattgtcgcgaccgggaaaatcgtctttt

SEQ ID NO: 9972 - DNA, 67 bp, Oryza sativa
aactcggtgttaaaacacattggagacaagagaaccttccccatggcctccccttatcacgcccgcc

SEQ ID NO: 9973 - DNA, 377 bp, Oryza sativa
  unsure (1)..(377): unsure at all n locations
nccagaacaatcnncaggncnnccggacatattttggtgttcataactggtcgcactctctcaaaagcaacactcttcactggaagcacaaaagttcagaaaaacaacctcctgcgcactagcactagagtcgaaaaggcgagtgctatgaattaccgaatatagcaaaacacactcatacggccctatggaccatatcaaacctgtcagtttcacacgcatttttcctccatgtgtgcagcctcgcacgaatcagagaaaaactcgcatgtgactcatcatggagtaaaaaggcagagggcaacaacccaaaacaaaataaagctccaatgtactcattcatgacgcagccttcggggtatttagaatcataggca

SEQ ID NO: 9974 - DNA, 304 bp, Oryza sativa
  unsure (1)..(304): unsure at all n locations
cactatatctgaaagtaaagtttcttgggtgcgcgcttttacaaccaagtcatcgacataagcctcaacattacgtcctaattggctacccaaagaaattcgagtagtacgttgaanagtaagacctgcattctttaacccgaagggcatngatgtataacaataggttcctacggaggtaatgaacgcagttttctcctcatcctccctagccatgcgaatctgatggtaaccagagtatgcatctagataacacaaaaagtcgcaccccgcagtggagtcgacgatctgatctatgcgaggc

SEQ ID NO: 9975 - DNA, 396 bp, Oryza sativa
ttaacatgagtaatttctatcattataacttatcgtataacatacgaatttacctagggagtagctatatttatctacttgtctatttcaattctaactagggagtagctatatttatagcgtcacatttttcataaaaaaatagtcaaaatcgtttttacactgtaaatatattcacttacattataattacaccgtatttacattaatataactacaggataagtataatgtaactatggtgtaattacttggtaatttctcagtttcacttttcaccgttttctttcttctcttttacctttctgtctccaactaaattcaatggatgatgtgacatgagtttctttgggcaataaaaatgagatattcacatgagtaacaacaaactaaccg

SEQ ID NO: 9976 - DNA, 454 bp, Oryza sativa
  unsure (1)..(454): unsure at all n locations
tgtgtagataanaaacgttccactgcatatattcagccatactctgtgagaaccgctacacctgctgtaaaaattcttacaaacaaaactcctacccgttacatcagcgtttgtatgagttttgtaagagtaacctttccttgatatatntagtacacgtttgagtatatcttcagctttgtaaatttgcaggtgaattacgttagtcacactcaacagaaagacatatgttggtggctttgaacacttctagtgcgaggcaaagacgtcctttatctttttggatcttcagattcaaacctcgatccattgcttctgtaaccgcgttnttttactaaagcaatttcaactcttttaactttccttcgttgaatatatcgctatagctaacaaagaacactgcatgaccacggaacatttggtcgatgtgtatggacggtagtaccctgtcatg

SEQ ID NO: 9977 - DNA, 380 bp, Oryza sativa
cactcgactcgaaactcggcatgatagacgcattttccatatttgacccaacgatcccaacggctcagcatgcctgaccatgccctcatgggggaagaacgtgatgagccactctctgaatctcgcatcagcccaactatcgatgtcatcacggagacaccgacctaagttaattggagtgcacaacctcccgcgtccagttgtgcgcagactaaatcccaacggctcgtatgcccatggcgaaacccaggggacgaaatataaaaggcaaaagtagcaacactggagcaaaaagacatggaggagagacaagattgccacgccatagcggaaactagaaaacattatacttgcatgaacagatgtaccacaaacgcccc

SEQ ID NO: 9978 - DNA, 515 bp, Oryza sativa
  unsure (1)..(515): unsure at all n locations
gcatcaagctagtgacctngtggagttcactgtgaccaaagggtatgtatgtttgtttggagagcaagtatgggtcccctacgatagtcaatgatggagtacagctgcacgagaggtatattacagtgtttattgcgtcaaatagcattgaatttccttaccattcgcttgttagctgtatgctatactttcacacaaaanaaaagtttgtcttgaatagtacaacagtctgcacatttgctcacacagtttatgcgcaagtgtacttctggttactatagctaggtgcattgctgcacaccatgttctatcataattaccctttgtggggtctaatatatagatcctctgacaagatgaactaaagtttgatagctgggcattgacttaactatagtgatggtgcaccactctgtctaatcatgatatacagaattttcacatttattttctatcgaacaagcactgacgttctggatatctggtacctagtccaaattgaacaatttaagtac

SEQ ID NO: 9979 - DNA, 395 bp, Oryza sativa
ctcaacccttaactcatcgcgagttcctcacccacccatacacatgtacaccatttaaagggaggaacaaggcaagaatagtcaagagagaccaaccaaataacgatcgacctaacgatcgagctagcagcggtagagagcaaaaactgcacaacacacatcacctcactttggtcggaagcgctagcagctatcagctttcactacaacctgcgtccaacttatttttctgaaagcgaaagaagaccatcttgttcaaatgatcagagcaagtctgtttgcaagctctcttcctccaaccagtctttctcactctctctttctttcactcctttctcactgttacacacttacaccccacatgaaatgaagcttgcaaagacttcgatctccat

SEQ ID NO: 9980 - DNA, 431 bp, Oryza sativa
  unsure (1)..(431): unsure at all n locations
agctntccaggctcctanacactgcagttntcacataaactttttattttaagttccttagaatacttaatttaaaacanactatcaaccttgcaatagttaattcactcgttagtggccttgaacaatttcacanaatgagataatctactatccattcataacanaggagctgtgcaacttcatttcatagcaagtgctcctctcaagacagaaatgtcagatttttcatccncatccagagattagcagagtaccaaccttcttcttcatcatcatcacccncgccgcagcctgaaagacagcangcagaatctgaagctcatgggcaagaatcaaattggtactccgtcccagaataaatacgccgaatntggacatatgctatacaccgtataaaaaatgaacttattctgggatagaggtagtac

SEQ ID NO: 9981 - DNA, 392 bp, Oryza sativa
  unsure (1)..(392): unsure at all n locations
ccgacntnctcgcagnaggggtttcattgatggctccttcttctgnaccacaatggcactagaacctccctcaacccttttgccccggttgttctttgccctcgccttctcctcaacacccaaagagccaatgagatcagaaacactaaactcttgtttgtgctttagagaagtggcacagtctgacccagaaggtggcaacttggcaataatgccacccgccacaaacttgtctggcaactcacagttgttgttctaaattccttaaccagcatctgaatctcatgagcttgtcctactacagaacggtcatcaaccatcctgtagtcataaaactgctccatgacatatagctcactgtcggcgtcggagactcccaacttggcctccac

SEQ ID NO: 9982 - DNA, 302 bp, Oryza sativa
  unsure (1)..(302): unsure at all n locations
catcgatatgagggctggctcagcagcttcacagacaaaacgcttatcttgtgaagatntcagaaatagctgcactaactgagaaccaaattggcagacaagatgttttgagaaatagcgtagttagtacaggaaaaagaactagtgtaattgtgaatggaagtttgagaactgagaaacacacaccagtgggatcaatgagtcaaccattaggtcaccgtatgccttgaaaatatcagcgcaggtcatgagtgcggntntacagacagcactccttggattcttgacagatttcacaataa

SEQ ID NO: 9983 - DNA, 387 bp, Oryza sativa
  unsure (1)..(387): unsure at all n locations
gtgtactaaaaaaaagctcnnttatctttacgcaactaataatggactatctaaaagaaagtgaaatagactgaaatgatccgaagaaataaaccagggaggggaaacaagaattagaacactctataacttcactccaaactctctcgtaaaggtagattgaggagttggaaccctacgctaaagatagtttttggtgatagttttctagttgtagatttaaaaaatatttaccgagttagaaaaaagtccacgtctcaccgtgtgttttcaatgattatacacgtatttagagacatccacgtccggattttcagagattatacctgcattaatttagaggcatccacgtctgtatggtcccgcctttaattttagagaccataa

SEQ ID NO: 9984 - DNA, 506 bp, Oryza sativa
  unsure (1)..(506): unsure at all n locations
agcttcngagggatcctacgcgtactaccaggagggtgatgattactatggcgcncaataagtcttaattacagtcgttgcctgtggcaatggcgtgccgctgcctaaactccgctgccttatctactctgcttttggaatgtattccggaccgctcggtctgatgatctaagactatgcctgcgggcttatgatgtaataatccgcactagactntcgtgtatgtgcatttggtatttcagctatgaactcgtgtgtaccagactacttgatccagggaaatggtactgttcacacgatagattcctgttataaaaacgggggtccacagagctggtatcagagccatacgactgtatgataagacaaaaaaggcgctccaccccttttctagttggccaagggagaaaatcctatntagtaatacttctcaaaaataaaaaaaacgttatggttacaaaactctatacaatnttcatcttactcttaactattttcttcacaaa

SEQ ID NO: 9985 - DNA, 390 bp, Oryza sativa
  unsure (1)..(390): unsure at all n locations
tcaccttggtgctaccattnttctacacctatttatgtgactgtcgngcatcatcttcgtatggcaccttgccattcatatgattttgatgctaggcaacaccttaactggggttatggttccaaatcattacgaactgactcagtatgaaatgtcaccttcaactgtcaatgaattccatgtatatgtcatgtatgagctccataatcccgtatctattgcgctaaagggagcagaaacttaaactggtgtaacttcttttcccagcaaacgaggctgttggagctgctgaaactcggcatggagaatggtcagtaacaagattgcgtcctgctgcacatggcactgctagcattgagagcttgagcttgggtattggaccaagggggg

SEQ ID NO: 9986 - DNA, 169 bp, Oryza sativa
tttcttcatgatactaatagataaccctctaaattttgataaaatatattggaacatgatagttataacttataagaccctctctgggagggtttagtaattgatttttttaggaatctccattgtattccttttcacacgtgttattgggaaaagttttgtgcttctc

SEQ ID NO: 9987 - DNA, 295 bp, Oryza sativa
  unsure (1)..(295): unsure at all n locations
cacctaaattcccgtgacttgctgagtattttattactcacccctgctctatataaagatatataggtcctccatcctgaagttgaagatgaagtanagtgaagattataggttttcgcctgtgttccaaccgtcgcctgtggtgttgggtgttagaccagtggttcccctgctgctgctgtttgtggtggtttcctcatccatggcgtcgggtgcattctcacgctggtctgagctgcaacctatggtaaggtaataagtcttctattattttaaggattgaattattcatatt

SEQ ID NO: 9988 - DNA, 376 bp, Oryza sativa
  unsure (1)..(376): unsure at all n locations
gaactgaagcgagtcatgaaaccggcggagtaaatcttacggaaactttatggngggnngagagaaagttgggaacaaaaacggaaggaaataaaaagcagaggcttgagatataacaaaggattgatggatgccgaattcnaagaaaaagacgaactcgaaggagatgatgtctctaacctggcgacggagaaagaccatggggtgatgagctgatcctcggtggccctgtcctcgccgtacgtgttcttcacgccggcagcggccatctctttcgatcctcttttcttctcttctcctcaaaattcaaaaacccaacgatcgaacgaaacgatcgatcctcttctcttagaaataaaaaggaaacgatcgatct

SEQ ID NO: 9989 - DNA, 169 bp, Oryza sativa
agcttctcaccgtttcttcctcaccgccggcaacaccgccgacctctcgccgccgtgtctgctcggtgagaaccgtcgtctcctcccctttctgtttttccccttcccatactctgtcgcaccgccgccgcgccgttggccgttgccggcgagccgcctgctcgggtac

SEQ ID NO: 9990 - DNA, 328 bp, Oryza sativa
gcataggaaccacatcacaatcaacagaatctgcatattattcaatggaaaatgaaaccctacagacctgtgttacctttgctcttccggaatcgtttaaccactgaatatggtaaggatgtggatgtgtacgtgttgtcaagccaagcttattgaccaaatcagaactcaccaaattattgcagctacctgcatcaatgatcacacgtgcacgatggttgttgatgacaaagaaaatctgaaacaaattatggcgttgcaacctctcaggctactgtacctgcgtgctgagcacccgctgcacaatgatggtcctgtaatccgatgt

SEQ ID NO: 9991 - DNA, 327 bp, Oryza sativa
actcccttggacgtgacgagtcaccttgtgtaactgcattaatacatcctcaatgtcctgagctgtgagcatggtgatgcgtcaatcttgagcacagagttgcgaccgctatcgcaaagccccgaaaaggaggtgctgcagctggtggcaggagcctactaagcttgggatatctgaatcccgaaacctgagggcccatatagagaggcttgttaggcacctgaatccattggggcaagcctgaaagaaagacatgaagcgtcgcccgtatcgtgacatctgtttcttcgtgcagtgcacctcggacacctcattcaaaatggcaaa

SEQ ID NO: 9992 - DNA, 171 bp, Oryza sativa
tcaagcttgcacaactagtgcatccctgtcactgtttggctagcttaaccttcctgacatctatcctctggattgaacggcaggagatacctaagctagctagcaatctctatcgatctgtttgtttacatgttcagttaaaggttactgagaaatgcctagagtttttcc

SEQ ID NO: 9993 - DNA, 409 bp, Oryza sativa
cacgaatcttcgagaaaacccgcgatcgacgaaaatttggttaccgcaactatacgcaaacaatcaaaaacctaaacaaaagaccaaaagaaagatcctatttagactaaataatagtgccattaaatagatctcaattttacaaaattattggaactggaacggagtcaatcggagctaccgattgagagatatgaatttcggaagcttaatcggaatttctggaataagagagatgatttatggaatttatagaaataatattctcaagaatattattgacagtcactgacgtgcgggaccaaaggaatggtttatggaattttggaataaggaattgatttatgggacaaaggaaaaaggatttattaaatcccttgaaaaagaaaaggaaagagggatgtcattt

SEQ ID NO: 9994 - DNA, 168 bp, Oryza sativa
tctagctttttctgttctggaagcctgcttcgggttggtgctttataacattgtggagctgaacctttttgcattttgcccctttcaaaaacttctttctataaatagatctttggaataactactttctggaatgtgtccttgggggaaccacaatttttgagatgg

SEQ ID NO: 9995 - DNA, 430 bp, Oryza sativa
  unsure (1)..(430): unsure at all n locations
ttggagaagaagtcttaggtggagtcttggcttatactccagttgagcgcctgtgaagatggagccgtatgcccgctagtccgctgctgtttattntgattgtcaagccttaagtgcctttgtaataatgtaaatattatcgatataataaagatgtgtcttttatatcatgtttgtatggtgtaccccggcttttcctgtgacggggattaatacactagcgttcgggaaaaggcaattttctcggtcgcgacacctgacctccacatccgccatatcatttactccctcgccccccaccacgtcttcctcaatcaattcttccttcctactacacctctccgacagttcgtgacagctaatgggtgattctatgagtggactctcattaaggtctataagttctttcttccctatcctaccatctttc

SEQ ID NO: 9996 - DNA, 166 bp, Oryza sativa
agcttctgcggatcattatatatatatttgttcggtcagcctaggtaattacatccggtagtaatttgagttctaatttgtgtttatgccctatttctgcttatcattgcttagatgaaaatgtgaaactagtgcttgttgtaggaactagttacacatgagtatg

SEQ ID NO: 9997 - DNA, 300 bp, Oryza sativa
tgcaaaggggtacactgagtaattatatagggatatagttttgcagtatacaacaattaaaagtcacttaattgcccaaagccattttgttaagacgatactatagctactcagtattattaaactaagccgtgaacccttacgaaccttgcttaacccaaagcctactatgattctgaccgaactggcaacccgacccttggtcccagcttcgtccaagccaacccaggccaaccatatccacattttatttgtttagcagaatctaataattaaaacactgacttgggtacattgctt

SEQ ID NO: 9998 - DNA, 170 bp, Oryza sativa
ttagcttcacagactaaacttgttgtgcgcattcacatgatagaaacaaatgcgctgttctgttcataacaaaccacacaaagctgtatctaattatgcacatgtatagcgaagggacaagaccaatcctgatctgaatttaaaccatcctaagtttgtgaggggagtaa

SEQ ID NO: 9999 - DNA, 407 bp, Oryza sativa
tcattggcgaagatgatgcagaactggtaaaacttttgcctaaataaaggatgattcatcaggaaaagggaaacagacgataatgcagcagttaaacatcccatacttttcccacaattttgcctagttggcagcacaaacagtaatttcaacatactaaataacttgtcggcttgtggacatttaaaaggccagcctaaccaagcaagaaaaaaaggcacaaaattactgtaaattggtgcattgtgaacagaaatgctgacataaaacatgacaccttttatttgataatagtatattcacaaatcaaatataataaaattgcagtgagtgagttaaactatattatggaatgctataaaattgcagtgagtgagttaaactaaatgacagaatacttaattacc

SEQ ID NO: 10000 - DNA, 172 bp, Oryza sativa
tttttaatcttcatctccgacctttgattaagcttgtatattgcaagggtgagtaccaaccgtactcagcaagccaccacagcaacaatgtatatgacaggggtatttaaaggatggctatggttcttttgcgcaaagcaagttttgtaattcttttcacaagcctaagacc

SEQ ID NO: 10001 - DNA, 364 bp, Oryza sativa
  unsure (1)..(364): unsure at all n locations
tcatgtacataaatacgtaatatttaggatgatttttntatgattttgacctttctcttaaaagntttatttaagatttttttaaagttgattgtatatatatgtggtgtaaagacaccttcggagcaaataaattctaaactcaaaccaatcaaaaccatggaatcaagtaaatatatggattaaaaattatagcaattaacttgaacttatctaactgttgattccttctgaaattgatcgctgtaaaataggaatagagaatatgagaggagggtatggcgtagatggacagattgacggacggacgtacgtacgtaagaggtggtgggggtatgggtggggtggaattaaatataatcta

SEQ ID NO: 10002 - DNA, 167 bp, Oryza sativa
ttagcttgaacccaagtcctacagtgatggatataagcgcaattgaaattcctggggagttatacatttgtgtattgataagaccgttcacaatttcttgaagctcgatctcccccccagatgaaccatatagccaagagaaaccatgaaccagaatagaagagctt

SEQ ID NO: 10003 - DNA, 378 bp, Oryza sativa
ttccccagccccttttcatcaatggactcctgacgtctactaaggagtgtggttcgttcgacaaattcctacctctatatctatctctgaggtgtttgggttttgcaaaactccatagatatgcagaagagaaatgctatccccactccgaccaagacagaacttttaccaaaagtttattgtgatctttttgttcaaataacaattaaggtgaagcagggtcaggaacaacgaatctctttatgataaacagatccattttgcaagctcgttattacgggtagttcctacaaagaatcggactaatgacgtatacaatgcttgaattatcgacgtagatgctacatagtgggttctcatccttcagagactaccagt

SEQ ID NO: 10004 - DNA, 170 bp, Oryza sativa
tgctttggttcaacattcacgaggtaattacttaatattgcagcacgttatatttccttgcaacgattggcagtgagttcttgttacagtcacaacgcatgaattttaaattacagtacattattgaactgtaattccttacttaatatatgcaaataatttgcagtaaa

SEQ ID NO: 10005 - DNA, 403 bp, Oryza sativa
  unsure (1)..(403): unsure at all n locations
atatggtatattacctttcgttttaagtactgaggaaaanntacaaaataactatcacaaaactacataatctagacgtataacaaactataattttagcactaaattcttcataaagctatagatttaaagtcgagtatcacaaactatatatttaatattgaaagtatcataaaactacaaatttgagagtataaatccctaggactatgattagcactatcattatattggagctataaacgttgtagttttgtgataaatttgatacgtaatatttattttttgacactccatctcaaatatatagttcttgaagagatttcatgttaaatctgtagttttttttataattcggttaaatgttttgtgaaatttactcataaatataaatatatgacat

SEQ ID NO: 10006 - DNA, 203 bp, Oryza sativa
ccgcggagattctatagagtacccctgcgcgcgtgttctcgttagggatgcatttatgcaccttggtaatactgcatgttgcatgtttagttacaatagtccgaaggggagcctaggcttaccgagcgactaaccaatttacctacgaagacaactgcttagaactgaaaaccattttgttttgtgaaggaaagttcataact

SEQ ID NO: 10007 - DNA, 272 bp, Oryza sativa
aactattggcatgcgaggatatcctgaaccgaccacatacttaactaaggtgtcccattccaccttgtggttgcacttttgcatgctccgaagaatttaccacaagaaacagtccttatatgccaatacggacagtggcacacaggcacaacccccgcatcgagagtgatcacaattcattttatttttaaacacaccgacaccacacgttgggttttcaaggcttgtgaaacccatttcccaatatttggacgatcaacagtagatggggg

SEQ ID NO: 10008 - DNA, 168 bp, Oryza sativa
agcttatggagtctactttcagatggttttggtcccatgtcaaaattccaaccaagctgccggaaatctgcaaaacaagccacgtacctcatccagtccgaatctgatttgggttttgggccttgtaattgtcatgggcttagcccaatggggtgtgcgccttagggc

SEQ ID NO: 10009 - DNA, 324 bp, Oryza sativa
  unsure (1)..(324): unsure at all n locations
agccgacttcgtcgccgagtggactgagtgccaagtatacacacctacttataagatggagtattggactatgcattttgacgggtcaaaaaggctttcaagcaccggaacgggagttgttctaatttccccgactggagaaaggttgaactacgtattgtgatacatttttctgcgtcacataacgtggcggaatatgaggtgcttcttcacggactaaggattgcggtctccttgggaattcngcgtctgatagtccgtggagattctcagttggttgttaatcaagtcatgaaagagtggtcctgcctcgatgataacatg

SEQ ID NO: 10010 - DNA, 170 bp, Oryza sativa
tattcttttaaaatcatttctaataattccttttaaacaacaatttataatttaaggattttaaacgataaaagcacttaacaattataattagatcattattgatcaaataattactgaactgttctttgtatcatttaggaattgagctccgctgcactgcacagtgt

SEQ ID NO: 10011 - DNA, 431 bp, Oryza sativa
  unsure (1)..(431): unsure at all n locations
atctcttacgctccaggaatggatcagtcagaacattatcaccggcttttctctaccgccgncgactggtgtttccgcctgcacggctggcctattatgccgccgctgttgggcgtctacgttgtcaccgaccggcttgccttcgccgctgccgactggtgtttacgcctgcacggctggcctttatgccgccgttgttgggcgtctacgtatttaccgaccggcttgcctttgccgctgctgactggtgttttcgcctgcacggctggcctttattgccgccgtgttgggcgtctacgtcttcaccgaccggccgcctcgttcgccgccgactggtgctttcgcctgcacggcttggctattatgccgccgttgttggcgtttacgtcttcaccgacccgcttgtcttctccgctgctgactggtggttc

SEQ ID NO: 10012 - DNA, 158 bp, Oryza sativa
tttcttgcatcacgaggcttttggaaagcctatgcagggctaccatatcccgtctattggcgttccaaaccaacgtcaggttaggctccaaaacatcccgtgcaacttaccccggggggactccaaaaccccacgggacataatccacatggatggtc

SEQ ID NO: 10013 - DNA, 382 bp, Oryza sativa
accacaaccttgggaatacaaagagggctacacatcttatcaacacttattatggaatcagtatatgaactaagccatgttagatccattccaatgcgttttagtgacttgtaacgtttctttcacctacaagggtagaatataaggggccaccacagtaaaatgcaagttgatggtgccaggtgagacaaccttgcaggttttgaggggggagggctatattgcaatttaccctacaggcctgattggaaagctagtatttggcccaatacaagtgtaaaatacaagcccaaaaagatttatggactgggccataaaagatgcgcttggatgggtggaaatcacataacttacactggtttgggccattcacgaagaaaaa

SEQ ID NO: 10014 - DNA, 170 bp, Oryza sativa
tttgcttaaggctgtgtttgacacattgagttggggctaatccttgatgcatacaaaatggggtgactcattagcacatgattaattaagtattagctattttttaaaaaataaatggattaataggatttttaaaagcaacttccctattttttttgaaaaaaatgcac

SEQ ID NO: 10015 - DNA, 356 bp, Oryza sativa
acccgtgattagtcattaaaaataaaatattgattatcaatatataccacaaggattaatttaaccatggaagggaaaaacagactcggactaattcgggcaggatatccatccggtggcttacgccgcctttaacatcaaacacccggtgggtgatgttcgcacgacatctgcccaactagttggctcggattcgccgactcgaccttccggtgacatgtctatgtgaattaaatccccgccggcggcagttccgagtgcaatcagaacaattgatccgatgttctggttgctggtcgtctcatcttatccgggtatataaacagaaattacagttgattatccccattaaaaat

SEQ ID NO: 10016 - DNA, 431 bp, Oryza sativa
  unsure (1)..(431): unsure at all n locations
ctccagcttgagaattattgttggggcttgcgagatccatattgcttgtgtgctagtagctgctgtgccattttcagaaatatccgaagctacttcggatatatccgaaaatcccagcttccgcatttgtttgagttttttaaattagcctattgaccccatctaggcctaagtgaccctttcactgctcanaggtgatgccctatcagtatcgggttagtaaaacctagcactgacaggccattcccacccacaaccacttctcaccccatattaaacaagaacaggcacatataataccccatcagtgccggtttgtgtacaaaaccggcacatataaggggggccacacgagtggtagtttttctatacaaaccgacaccgatacccccaacataatgccgactagctaaaaacaagcactgatgaac

SEQ ID NO: 10017 - DNA, 167 bp, Oryza sativa
agcttaggataaaatttgataaacattttaacaaactgttaattatttagcatgctatcaatttaatatggttattattattgcatataaaaacatgcttatggaactatttatggctatatgctaagaattgttggcaccgcttgtgagcgggtggtacacatgat

SEQ ID NO: 10018 - DNA, 420 bp, Oryza sativa
tttgtaatcggctaagaaactcaggcactttatttaacttgtcttaataatcctttgtgccgattaatataacttctcatttttgctcaaaaaattttgcaactttgctaaaaaattgttgcaacttttgcatatatgtgcccccctaattttacaatgtcaaaggcattgataaaattataaattaaactcagggcaatacagtaatatcggccattgtacattggcaaaacacaaccgattacaatatgaaaaacagctaagggtgatataactatatcggccattgtacagcggcaaaccaagaccgattataatatgaaaaatagctaagggcgatataactatatcggccatctcaaggtgatgtgaatacatcggctatcatgtattggcaacaccagtcgatcatgcattaac

SEQ ID NO: 10019 - DNA, 172 bp, Oryza sativa
ttcttagctttgagcgacaacgccaattcgtggatactttatccggactcaaaccacatgcgtgctcgaaccgaacgatcgagccctaatactccatcagcagactggtgagtagggtcacactgcatgctcgagcggacgagaaggtgggatcgcaacatgaacatgggct

SEQ ID NO: 10020 - DNA, 399 bp, Oryza sativa
ctagattccacggagaagctcgacacgctggcactgttttttcttttggataacacaagacacgatctttcggggaaccaatacgtaagactaactggctgactaagaacccccatacagatgtgaaacagggaaaccaaaataatttcttcttgcgaaagcaaacctaaactatcgagaactacttctatgtaccaaaatgagaagctttagagaagcttttttctggatactaggtaacacgactttgaataaagaactacaacattcttctttgcataacagaagaacttatgaaaatcctattataatgagaagtgcaacgaaaaagcttaacaatccacaaagcgccaaagcatttaaaacgagaatattgttgtactagaaaacaaacatcgt

SEQ ID NO: 10021 - DNA, 171 bp, Oryza sativa
tttatcttcgatcgattcgctcaattaattcacatgacaaaaggacacaaaccacatgcgtgcaccaaccgatcgatcgatccatcatcgatcataggtttattggtttctaagctttcaatccatgctcgatcggtcgatcgtgttgcagtgcaacatgtacgtgtgctg

SEQ ID NO: 10022 - DNA, 397 bp, Oryza sativa
actccagctggcatagccggaaatactcaactgttgagcactcatatggcaagagaagttcagcaagggggatcttgtatggctggcaccgcaaaacaactggctcaccaagctccggcctaagtgagcgtttctgcctaactgtttgtgagtcctcctctgcataatctccttcatagtctgcagaccctccactttcataaaatgggtaatacaagacttgaacccagagggagcatctctcaaagtgcgaaactccaacagttacactactttggactggatcctgcagaatggaaaggcattttccacataaggtggattaaaataagagttggttgatctaatatgtgaaatatgcgtgtgaaattttatactcgacgataattattttaat

SEQ ID NO: 10023 - DNA, 167 bp, Oryza sativa
agctttcaccaacaggggggcctctgacgatgacaaattggcctgttgtatattaagcatacttagaatacgtgtactatgactccctcctttattgctcctgattgagggtgagtacgatactatagctttccgcgccataaacggagcggtctattaacacgtga

SEQ ID NO: 10024 - DNA, 276 bp, Oryza sativa
aaaaatcatgtggaacactggaagccgagcgacatcccaactcgattttgttggatcagcgcaaggattgaggacacaagtggcacgtgccattccagaagtgtagatgacatgacagctgaaggtatcgatacgagcgagcaataacatgtctgatgctgcactccaccaaacgtgtgagaccgtccttaacaagacgatgcgatgacgtgtgtacattatgactggacagacatgctgacatcgcagacatggatctattctatccatacatat

SEQ ID NO: 10025 - DNA, 165 bp, Oryza sativa
agctttctcatcatgaacatgtttaactccttgatcacagtctacgtcctgatagtgcttgtgctcttcttgtaaggccatgacccgatctggtttagcatttacaccatcttccttctaatagtacaaagacaacaagagagagtaacattcacaaattttgca

SEQ ID NO: 10026 - DNA, 412 bp, Oryza sativa
acagcttgacatctgccaatttaaacaattctttccacaatgctcttgtaaagatcctatccctgtcagagataataacttggggcattccaaacacatcatatacatgctgaataaaagcctgagccactgagtaagctgtgaaaggatgtgtcaaaggaatgaatttggcaaattttgtgaacttatcaacaacaaccaatatggtgtcatatcccccagattttggtagcccttccacaaaatccattgtcacagtgtgccaagcttgcaggggtactggcaatggttgcaacaggccaagagttctacaatgctccaccttagcctgctgacaaacttcacattgagagacatactaatggactgatttctttattcctggccaaacaaacatattctttatcctctg

SEQ ID NO: 10027 - DNA, 170 bp, Oryza sativa
ttttcttgacttggtgcgaagaggctggtttaacgatgtctgcactgttaaaccaagggaaggagcttctttggcatatacccatggacaattcagggcatagtgtccttgctctctacaatcgtgacaaaaggggacatcctcttctggtattggaagctcatcgacct

SEQ ID NO: 10028 - DNA, 413 bp, Oryza sativa
  unsure (1)..(413): unsure at all n locations
gacatcatcctanggatggattggttggctaancttttatgacaaattttttgtgccgaaaaatgcatcaccttgccaggacctggaggaaagcaagtccgctttacctctaacacccctaccgcaagtcggtctattctaacctgcttacaagtcaccaccttggagtccgcgcctatagtctgtgaatatcccgacgtatttccggaagaattaacgggtatgccaccaaacagagaggatgagtttgtcataaaactggtgccaggcaccgcaccaatcgcaaaaagaccctaccgaatggcagctaatgagttagcacaagttaaaagacacaccggagaattggagagcaatggttatgtgtgacctatctcatccccttgtggagccccatgcttctggtaataaaa

SEQ ID NO: 10029 - DNA, 179 bp, Oryza sativa
gcgcgtgcgcgctccggttcagacataccttctttgcctaatggaggggaactgtggccatccgctacttacacagcatatgtagtatcggcctggttataggacaccggctaaatttacaaaatctcattggattatagaaagcattcattcactaggacctctatgcaccacttaga

SEQ ID NO: 10030 - DNA, 377 bp, Oryza sativa
  unsure (1)..(377): unsure at all n locations
agatctcccgacgtggctgatccccacgggnnggtttatccgggttattaatgncgcgcgggtaaagtgtaccccctctgcaaaggttaacaaactgttcgaacagccgtgcccatggtcatgggcggatgtgaggtgattcctagcgtaattttgtttgactactgccttgtgaaattgctgttgtgaaaaggggaatccatgtttggaaaatctgcagctgatgggatcagctatgcccgggtggccgtttgaaagttgttggcccgggtggccgtttgaaagttgatggccacgtgccaatcttgaacaattctaaagactgatacattgcacatactccgaccggacgagacgcactgtctcatccctgtcgt

SEQ ID NO: 10031 - DNA, 171 bp, Oryza sativa
tttttcttgatacctaggtatcagtccgtacctgcacataacactgatgagaggaggatagcgtcgacatcgacgaagagcgcttgacactaagtaatcttgtaccaggcctgatacttgtggataccaggcctaatactgaggtatcacgacgactgatgcctgatggag

SEQ ID NO: 10032 - DNA, 169 bp, Oryza sativa
tagcttgccaacggctgtcgggttcgccttcttccttaggacaagatgtccaggcaacagctccgtcggtcgaacttttttgttgtaagttgccgaagtgcctatggcatagttgcgcatgtgttcgagtgcttcgactcttacttcctccaagagttcgagcgacacc

SEQ ID NO: 10033 - DNA, 450 bp, Oryza sativa
acactttcgaatactcacgcttcttcgacaggatctgtagtaaagcaagaattcaatattctcccaccttgctaggatgcatatgaatgcgacggcaagcgaggagcacattgctacggtgtcagagatcaagaatgcttgaaacgctaacttctttgccatgacaggaagtccctcgctttcagaatcgttgctgtatcccccacgcagggtgaaggctgcggcaaaggttatcgtcgccatgagaatagccactagcgaagtgttgcttgtgtatgtttgagtgagtgacttaacattccttgctaattcatcagttagtcgttttcttgcgaactgacggtgaagcgtggttgcagcttcacgatcagctttagtcataagcatggacacttcattctgcagtatacaagtaaagggtaattagaaccataccattacaaattcttt

SEQ ID NO: 10034 - DNA, 168 bp, Oryza sativa
agctttatgaattatatgagagcgatcagtatgcgacctgttttttttttgttcatttccatatgaaattgcttttctgtcccaattgtaccccggtcatataaaaaccccgaatcaaattagcattctgttttctttctacattaacccagaggatcgagatgagac

SEQ ID NO: 10035 - DNA, 436 bp, Oryza sativa
  unsure (1)..(436): unsure at all n locations
atgaaccatccatccatctgatcagntagcagtatatttgtttccataatttgattgggtacaatgagtggtggatgcttctgccttctggtcattgtgactgcacagtagagggaaagaaacaaacaactgccccaatctaatccagccagttggatcctggattttattagctgtcaatactattttatgtatggtacactgcactcatggttttgttttggttcttgccaactggtgactactcataactggatggaatttggtcgtgtaacatttcttttattagaaaagtttgtcatgtcaatatgtccaattctatcacaaatcatataatacttgcatttcaatgcaagacaatttgatatttttcttccatgtatcaatcttagaacttataatatgaccaaagagagctgacatagaaatcatattt

SEQ ID NO: 10036 - DNA, 168 bp, Oryza sativa
agcttgaaaattttgcagggagaggaccttctcagccagctccgacatttgtcggcaatgttatagccttcctactgaatctggttagtattgctcgaccatatttcgcatacataagatggatcgaacacatgtatatagtaaaaatacttcttttggtttgattat

SEQ ID NO: 10037 - DNA, 417 bp, Oryza sativa
cttcaacaattcttcaattatgatgggatgtctatgccaaatttatagcgaatttactctggtgattatatacaaatcggaggtgcctaaaaggttagcaacttcatcctccaatgtttttttggtcatattacatttggagctatgttttgcacacttttttatctccaaaaatttgttgtaagttgatgagagagaaaatttgtgtgggaaaagaaagaatatatagaaattttgtttatttgctaaataagggtttataaaatagttgagtaggaaaatatagagaaagttaatcttaaataaaagaaaacaaactaaattgaaaattaaaagaatttaacacttaaaaaataataaataagaattatttggtggaatattttattaattttggatgaataatgatatgtcatt

SEQ ID NO: 10038 - DNA, 169 bp, Oryza sativa
agcttgttaaaatttattttcattccctaatgcaagtgactgtaaccatctggagctcaaatagcattctgcaacatgcattctaagtaagcatgtgcagaattgacaaaataacattgtattagagaaagcatacatgcaacaggagcactatccacaattcagaaca

SEQ ID NO: 10039 - DNA, 170 bp, Oryza sativa
tctagcttctaatataattctttcctacagacatggatgtatcttgcagtgcccgtttgtttgtatgtaggggagaggacactgaggttcttcaggtctggcagttattctgtccgtctgttgaaggtggcacacatgcatcacaaaattgtattacactatttacatac

SEQ ID NO: 10040 - DNA, 421 bp, Oryza sativa
ctggatgaacatgtaggttctcttcaacatttctaccaaccaccaagagcgacgtctatagctttggtgttgtcttattggagttgatcacagggaagccgtctattctacgtgaaccagggcccattagcatcatccagtgggcacggcaacgtttggcacgaggtaacatcgaaggtgtggtggatgcacacatgcatggtgaccatgatgtgaatggtgtgtggaaggccgcagacattgcccttaaatgcaccgcacagacatcgacacaacgacccactatgaccgatgtggtagctcagctgcaggagtgcctagagctcgaggataggcgatgtggcatggaagatacatataacaacttctatgccggcaacaacaatgatcccaactcaagttataacatgtactacacgga

SEQ ID NO: 10041 - DNA, 169 bp, Oryza sativa
tttttctttcacataaaatataagcaacattagttgcttgatcctcccttcaccttagcctcaaaccctttagaaatcatataactaatataagcccgataacctatataccttataaaggagatatttataccctaaaccctagcccttctagccgtttattgttctt

SEQ ID NO: 10042 - DNA, 392 bp, Oryza sativa
  unsure (1)..(392): unsure at all n locations
tcagggnggtggtgatctttcacgaaatgtttcgtctttttataaaaacacgcgaatattacggaagtagctaatatcaaatactaattattagaaggggtggcttcgaacccaggtcccactaccttgtcgagctaatatcaaatgctaattatagaaggggtggggcttcgaaccaaggtcgtctagcccagtaccttctcgagctaccggaagacctcaaattcgtctttttagcatttggcacttggaagtgacataaatggcgccgcttttgagcacttcttgctgagaagagcttcttgtctacaagaaaatcatgcatattgtagtttgcatgatataagattcttttttttagattggcaactttggggggtaagacttaaacg

SEQ ID NO: 10043 - DNA, 168 bp, Oryza sativa
agcttgtcgagtttgatttgatcactaacctttctatgtggaattgtggatatatactgaccatatatatatagcaaggaaagtgacacaagaatgtgaaagccacattaagggttgatgttggcaggaatcagctgcactagtaactatatcaactcattatcagtc

SEQ ID NO: 10044 - DNA, 285 bp, Oryza sativa
atagagaataaaaaggcgccaaaagggatacgtattattcatggtggcaccagtattccacctagcagaatatatcttttcaaggtgaatagttctgcatttcccatgtagagagaagttataacattgctttcagatcgacgccaattattaaagagtgaccactctgatgtcagtactcactgcgcaataatgcgttattcttctcaccatcagggaagagaaatatcatttctacattatgaatttgtgctcgcacaaagtatcattatcatgttcagctta

SEQ ID NO: 10045 - DNA, 167 bp, Oryza sativa
agcttcatgaaagatctcaaaggattgtattggtgcgggtgttgttccccgtgttctggaggaaggaaaactttttattccttaagggatgtcgttttgtttattcaaatgctatccaaatggttataaaagatttaaaagttttcacaacatttatggagtatatg

SEQ ID NO: 10046 - DNA, 385 bp, Oryza sativa
  unsure (1)..(385): unsure at all n locations
tccttgagttgatgacatctgtgctgctcagctagagtttgattggntgccaccatgttggagtcaatgtgctctgatagcttctcctcgcataccagcttcagcctctcaacattgtaccgatctgccgcgacaagtagttactgagccatcaccacgtcttgcgacgtatcaggcagcaagtcagtgtatacgaaatgtaggaatgatctgaaaacgccagcttccatatcttcaattttgatattgctcctacggggcttcgctctcgtagcaccaaagaacattgcctcgaagacggatgatcgagcagcgagcacgcacttatgtgccgagaatctctcctggccaacgtcgaacgtcacgtctgctccatccatgttct

SEQ ID NO: 10047 - DNA, 165 bp, Oryza sativa
agcttattttgtttttatatgaagaaactttaaagtttatgtagtatataaatttattatgtggaacttttatatttattattttgttatagtatattatttatgataaaaataatatttattttagaattattacaattgtatatgtgtagcgtataaataata

SEQ ID NO: 10048 - DNA, 393 bp, Oryza sativa
  unsure (1)..(393): unsure at all n locations
tcgtggtgcctactacaattnggcatccactacattgatccatctgtggagcgcttacctgtaggtgtgtaacacactgtgaagcttcgtggtgcctactacaatttgacatccactacactgatccatctgtggagcgcttacctgtgcatctcccactttcatctgtggaacatccactacactgatccatctgtggagcgcttaatccatctgtggagcgcttacctgtgcatctcccactttcatctgtggaacatgatccatctgtggagcgcttaatccatctgtggagcagccactacactgatccatctgtggagcgcttaatccatctgtggagcgcttacctgtacatcttccactttcatctgtggagcagccaagcatgtg

SEQ ID NO: 10049 - DNA, 170 bp, Oryza sativa
ttgcttgccaaccgctactgggttcgccctcttccttaggacaagatgactaggcatcagttccgtgggtcgaacttttttgttgtaagttgccgaagtgcttgtggcgtacttgtgcatgtgctcaagcgcttcgactcttactccttccaagagttcgagcgatactt

SEQ ID NO: 10050 - DNA, 378 bp, Oryza sativa
tttattataaacggactctccttgagaaattaaagcaactaagacaaggtgacaaaaccctgcgggagtactttcataactttaaaaattgcatcacttatagtggcttaaaaaaaagcaatgagaacaaaatgactagatcttttagagggcttaattctgatattcaagctgggcttattaacgtgacatatattcatataggccacttgttcatgcttgcttgcagagttgagagcaatattttaaagaacccaagggagaaacgagctatgcttgtgccttctattactgacattttgaagggagctcacaatattcaccctgaagagaagtgcaatatgatcgagatgccatctactgttggaattaatatat

SEQ ID NO: 10051 - DNA, 157 bp, Oryza sativa
ttttcttgcatagcctccccgaagctagctaggcgccgccccgaccgttgccgccgctcgctgtgtgctcaacgccgacaccgcccgtgctcggtagcgcccacacgacgacggccattctcgtaacgtcaccgtccaaaactgacgctagaaacgg

SEQ ID NO: 10052 - DNA, 435 bp, Oryza sativa
gtaattcagtccatgtatttgctgaatacgaacttaattgttctcttgaaaaacagggtagttaactatatatttaacgaactaaactgtatcggccgatcatatatattctccttttgcagaaatctgtcctccagtggtttgagtgctgacatatcatccgcttttgggaatctcaaggctcttcaatacttgtacgttctgagctcagcatgttaacattttttttatgcttatttgtgatattttattgttatatttggaataacctgctccatatcttgtttttatgcttcttgatccacatcttgcagggatctatcaaacaacagtttgaccggctcaattccggatgtcctctcacaattacctttcttgagagttttgtatagttggcaatgcaacttttgcaaattatattatatatacctgctt

SEQ ID NO: 10053 - DNA, 168 bp, Oryza sativa
tgcttaatatctctagtaagaagttcgcttgttcgtatcacgggcagatcattcagattcgcagaacttatttgataaagatggaatgtcgccgtcacagcagaccaatttttatacgaccaaatgtaagtaagtccacttcttttcttaaacatgtcgctctgatgt

SEQ ID NO: 10054 - DNA, 331 bp, Oryza sativa
tcaaacccccttttagcgccgtagtacggcacatgtttagatttattagacggctcctgtatatttaaaacatcagcttttcgattataaaatgtggtaacagcttgggtttcttggctgactgacctaatcagccacaaggtggccgttctataccaacttgagcaacaacaacggtgttatatctacccggtttgatcccctggccttttggatgtacgtccgaacatatatcaaattggttatgcatgggctggtgataccccatttattttttttttcgaaaaaaatgacagtcccaattctttcatctactaccataaacgttttc

SEQ ID NO: 10055 - DNA, 171 bp, Oryza sativa
tcaagctttacctttaaacatgtctttaacttgtgtttaatctgtgcttaaccgaataaacatgttttcataaattgcgaactgtcaatatgatctttactaaaattaaataattctagagtacttttgaccttttttgaaagattccacaaatagaattgctgatgagag

SEQ ID NO: 10056 - DNA, 383 bp, Oryza sativa
  unsure (1)..(383): unsure at all n locations
tttgatacgccatcaactaactatgctataaacttgcaatattttgcttttgcctttatctcttataatattcgttgcaacgaacgggcctttagctagtgcgcaaataataaagcgtgtctgggttgttggcgtctccatttgcatctctatttaagtactctctatctgngtcttctgtctaatcctcttacttgagtttcttctgtgctgtgacttgtatgacgaatttgtaattaatttttttcttaaattttacaggattcaatgtgttcaagctctatggtggaggaacagaagcttccatcacttggtatgtagcacttgagtgttgattatcacagctacacgatgcattgagcttttatatcaacacgcaacac

SEQ ID NO: 10057 - DNA, 167 bp, Oryza sativa
agcttctactctacgcctcgatcaatctggacaagcattcaatccatgaaagatcattaggttaaacggatgcgattaggtatttaagagaggagaggaggagacctgttgatggtcggggcaatggcggcgcgcggccgggcggacgtcgccgccggtgatggggc

SEQ ID NO: 10058 - DNA, 429 bp, Oryza sativa
  unsure (1)..(429): unsure at all n locations
ntntccatacctcggcttctctctcatggtctaagggtctattatgtacagcttcaactcctaaatttagctccaggagttgggcttggagtgtagttgtgagaacgttccatctagctccactcccattttaagtggagctaaaacagtttgattgggctccagctctatgataagtggagctggagctggagctgtgccaaagaaggcctaagcagttgtggaaggtgctcaattgattgttgatgataattatgaaggtaaaatcagaagccattttcctaaacatgtggatgacagagttctaaacaaaaatgtcgcacattntgtaccagttaggtgctgctccaaatctctaataccgattntagggtccaggccctggttacctattgggccacgtggcgctactaggatccaggaatacct

SEQ ID NO: 10059 - DNA, 170 bp, Oryza sativa
tttagcttctttatagctattttgctatgtgaattttcaatgatgtagccaactttaggttacactcatcatattttacaaagcagtcggtatatcacttggatcatattattcagggattcacaccgcatatgctacatattaatattaagtcgcttggttgactacaa

SEQ ID NO: 10060 - DNA, 392 bp, Oryza sativa
gagagattttatgcatgaagatcgatttgctaatgagagtactgggtcaaggttttctgatttttcggcctcaagcactggtgacattagaaatgatgtgctttctcctagctctcaagatacagggtacagcagtccttctatccaccattcaaggaatgtgtcttctgaaaatcctccatcccatcggcatccgaatgcaacttctcaaattgattttaatggagtccgacgatcacaggttaatgttctccccattcatgttatatgtttccagctaatgctcattgacttaaaaccaacttctgaggtagagtggtttgaaataaaataccatctttctatgtgcaaagacacgttcttcatgaagtttggatcatttgaggtagctc

SEQ ID NO: 10061 - DNA, 169 bp, Oryza sativa
tttttcttggggggttttgttgacggtcgttatcgatcagtttcgaccgtcaatattacccaatgtatgaagactagctatgcttgcaatgcataattccaaataaaatatctactatgctactaacatgcatgtaggagaagcacatataaatagaggagaatcgata

SEQ ID NO: 10062 - DNA, 195 bp, Oryza sativa
gctcatctggaatattgtcatggatttcgctgaatctatcctggatggatccgcaacttgtcaccagagttttcagggagcctttcagtccttttgacatatctaaaaggggtgacttgaggtcatcggcttaaggaactaaagcttggcttgtgggttcttcttcatgccagaattgactaatatcaaaagaaa

SEQ ID NO: 10063 - DNA, 167 bp, Oryza sativa
agctttggaacctgattggaaagtttttggttaaatgttgaagaaattaggaatcgatgctactcggtggctgacggctcgcatttagatttcctatttagattttcagccctattgtttcgcttattcatatgttaaattcaaatcgtttattaataaataaaaaa

SEQ ID NO: 10064 - DNA, 433 bp, Oryza sativa
tgaatcaacaatcagaattcatgattttaaatgatttattatgcaacatcttaacaagcacataggttgaagaataaacacgaaacacatatatctattgcatttatcactctttctcaaataacctttagcacaaaataaccaagagaatttttcaactttttcttttcttgagcctttttctcatatttttctcttttattccgggtacgtccctgtcgtcaagactgtttccagggattcggcacccattattttgctcatatcgaatacgtccttgtcgtcaagactgtttccaaggattcagtattcatttttttcatatttttattctctttttcacaatgagcaattaaagctatttaaggaataacaagtcaataaagcatatatatagagcatttataaatcaaaccatatgctagcatcaaca

SEQ ID NO: 10065 - DNA, 166 bp, Oryza sativa
agcttgctctggaaccaaacagctactggaggtactcagtctgaaactgcaagacggcggtctgctctgggtcttcacaaggatgtcaaggttggtcgtctgtcagaccagtgtgccatttctagccaagactaaaccagaagccagtgccatcccaaacagagca

SEQ ID NO: 10066 - DNA, 346 bp, Oryza sativa
tatttccctttcctttccaaagcctaacataagacctttctaggaataagactcaaagatcgcatgagaagcatatagcatttaccctaccgagtaacatgggacacactttcacggaacaaatgctgcacaatggttctagcccctggaaccttggaatgacttattgaaccctcgagcaaagacaaaaataatgtgaggaattcatggctgtcctgctggacaccattatctaattccaaggtttttataaaaggtgccgaatcaatgaaagccattctgctggagtgtagctgagcgaataaccgagcaagctgatccagcacagggtgcatcttcaagatgt

SEQ ID NO: 10067 - DNA, 425 bp, Oryza sativa
cggtatatctaaataaagcgatatactcatatattgttcttattcgatatgaaaagcatgattaaagtaattaaacatagcaaaacagtcatatcatgtaagatcggctgaaacttcgattatacatctattggccatcaagaaacaagttagtttttatgattctaagcacgacttagtagatcaaatttaactgatgcaacacttagtataaaagagaagcataaagtctaaacaactaagattttaactgattttcatggtggtgatacctcagctaatctaaaccgacaaaaacaatttagccgatgctaacaaaaccctataaaagggctcggctgatatagggtaagtgaaccattgagttagattaaccatgatatttgatagtcagcaagtttataggatagataagacatctaaac

SEQ ID NO: 10068 - DNA, 172 bp, Oryza sativa
tcttgcttagtgttccaggctcgaggggcttggcgcagcccatacatcgctttgtcaagcctatacaccttgtcctctgctccttccacttcaaatcccggcggctggacaacatacacttcctctgtgagctccccatttagaaaagccgattttacatccatgtggtgcg

SEQ ID NO: 10069 - DNA, 191 bp, Oryza sativa
  unsure (1)..(191): unsure at all n locations
agcttactcctggttgatggtaccaaccaggactaaagatctattaccaaccatgtattaaaagtcgacataaaccgggtggttgcacgcggatcggatcgatacaatctccttctctcctttntaactcatctcatgacacagccacatccttatctctttctctccctcctcccttgctatactgctct

SEQ ID NO: 10070 - DNA, 172 bp, Oryza sativa
tttttcttgctcttcttctaaggacggcacaagttcaaataagaggatcgagggatatttaatatcacgtttcttgtgagaaattcactaagtgttgccccccctccattttggttgaactgtcactgaaaatatttgttcaaatgttcatcacactgttcctttacactgt

SEQ ID NO: 10071 - DNA, 422 bp, Oryza sativa
gctttatagcaatcaatgatgtgtagtgggtaccaattattctgaagaattgattcagaatcctctttaggtctttgtctaggtttttgattgtttgcgtatagtcgtggctaccggattttcgtcgatcgtggttttctcaaagattcgtaaagctccgcaaagaccttgagcaaggcaagtcaccctttgatcaattgctcctataattgaaaaatcattattattttgtttgtaactggcattattataatcacacacttaatttgcttggccttgggttgcgtgccaaaccgacggacctacccagtagtcgcactaatatctataggttggaataccctgatttcttgtcgctgcacccttatggtacttcggtatccgtgctctctgagcgcgtataccacatatttcacatacac

SEQ ID NO: 10072 - DNA, 168 bp, Oryza sativa
agcttgaaggagccagggataaagtcgctaatgccactactccacttatccaggccatgttcttcaataataccagttcgagtacacttgatgctgccgaaatcttcgacaagctgagagtctctccagatacttacttcaagaacatcaaagaagctggaagtatgg

SEQ ID NO: 10073 - DNA, 439 bp, Oryza sativa
tgtcattaatacaccatgcccgattcaaaaatgaatgtatttaaattggagggaactaatcacatagtaatttaaagttttacggactatttaaacagccgcacaacaattttaagcattaataaaatattgtccatttctaaaaaacgaaaagaatctgtcaaggttatggataccatatacctaatagtagtcgactaaatctcggcaggacccaccacataccacgtcttatacggacactgacctcggatatggatggagttccggataaggaaagacaaccagagttctacatggaaacgataaggactactcggattgtatccatattggtttccctagttcatcagagatatgcctggatcggctctatccggtacctacagaggccggccgtaaggatctagcgctatctctgatctcgccgagcacaaac

SEQ ID NO: 10074 - DNA, 172 bp, Oryza sativa
tgtttgctttgcaaacaggaatgcttcgttgtggattggtagaaaatgatgatgctggtatggctagattcatgggtgggctgaaccgagaaattcaggacattctagcctacaaagaatataattcaattaatcgtttgtttcatcttgcttgtaaagctgaaagggaagt

SEQ ID NO: 10075 - DNA, 438 bp, Oryza sativa
tggaagagaggcaaggttggtttgcaaatcttttattttaagacatcttgtaatcactaagtgacttatttctttctaagtttgggccgaaaagagacttgcgtctcgattcgactttaagagatgtttttcaacagctcatttggtaatgtaccgacctcccgggtcagatcattacttctcggctccctgagccattccacttgattaatcggctcccagagcctttttcattttctcggactcccagagtccagctgcccagtagcacaacaatccgctccactcgggaagcctagactatgatgcccatagacatcccgaatcacacagattcgtttcttgaccactcaggtcatccatctgccacataggctgattctggtaacgattcccacaccacaacaacttttcacaaagcacaggcaaacaaatcta

SEQ ID NO: 10076 - DNA, 170 bp, Oryza sativa
tttttcttaaagaaaacatgtgagtagagtcgtaggatgccgtcgggatcaaatgtcagacgatagtaaatttccatatcaggggaggcattggaaggctggttggcttggaacagtttctttgtataggagtttttcctgtcgaacatccatatggtaccattaggatc

SEQ ID NO: 10077 - DNA, 436 bp, Oryza sativa
tgtcgaacacatgaggaccaacaaggtaaccagaagattgtcatgactttaacaagagctgtgagtccgcgactatcacaccggagcttataagtatgtcaagtagataagagaattcctttttctcctcaacttcaaatgcttcaagagactggtcagaagaatcattgtcattgtcgctggacaaggatacttcttgctcatatcggagctcacagccatatatttgtttatcgatgcctgaggccaacataaaagattcaacaatcaatttagtgctctgaaagttcattgatcagaggcaatgaacatttcataactagtaaaacattcaactgggtagaaaattcctttgtaagagtatgttaattacaaactaaattagttaaactaaaatccttctcagtgtatgctaattacaaactagttaaaataa

SEQ ID NO: 10078 - DNA, 173 bp, Oryza sativa
ttttctagctttccattcggaagatgacacccagtaagtacaatcgtcaccatctgaagtaaatattattgaacttctttatagtgtggttcaatgcatataatctgcttctaacatgctattgttagaaaaactatggttattgaaaaatattagcacaatgagttaaaagg

SEQ ID NO: 10079 - DNA, 385 bp, Oryza sativa
  unsure (1)..(385): unsure at all n locations
cttccggaccttcaatactcagcttaccggccatgcgggagattatctgccttcattttagatcagcatggcctataaccccggtggcgtctcatccccatctcgatctgaaaagttagaaggacgccgaaacgatcttatctgcctgtcgcgaactccttcccaagcagattcgggccccgcctgtccatcaacagagcccgaacccatcacacataaatgaatgaatgatgttgatactgtacttgccagtggcagactgctgtacggatactgaggagctgaattccctgaacgccgtgacttgaagggctctcgggacgaacatccactgtatcgagccaccgtccggttgaactctcggtgtcgcccacagacntatctg

SEQ ID NO: 10080 - DNA, 173 bp, Oryza sativa
ttttaagcttgcagttgggacggtccttacccaattttatgagagcaccaatacatgcctcagacagttggtgattagtcccaggaacaaaactaacaagaagatcaacaacttcactagtggcagcaatctctgcattgtactcctcatccagtagcctatttagagcacga

SEQ ID NO: 10081 - DNA, 436 bp, Oryza sativa
  unsure (1)..(436): unsure at all n locations
ggacacaaaatataagctatttgcagttgtgatagaatattacactgaatggaaccgnattcatatggtatgtttctgtgtactcaccggtagatgcttgagcaactcctgctgtacatatcatatacaaatgctctaccatcctcacaaccaattataacctctggatcggcataactgtggaaagtggaaacaaatgagcattgggggttaaagctaacaaaatctttatcataaaacgtttggacagcacacgaccctacgcaataatcctgtgcctctgagattacatgctttcatgagcaattcagtaatttcagtagtatatgtaacatctaacttttcatttgttcgaaacaaaaggcatgtcatgttacaaacttaaagcatgttcctcacctcatacataagccaccgttgaatgacgctccacgag

SEQ ID NO: 10082 - DNA, 166 bp, Oryza sativa
agcttcgtcacttttgtgagaaatagttctgtcacgcaagaattgtactttgttttatattttgttcagaccagtgacgattgactcagttcgtttctcgctttggtgtgtgaatttcaaaatgagcttgctgcccgaagcatggaccgacaaggcgtagaggcgg

SEQ ID NO: 10083 - DNA, 416 bp, Oryza sativa
  unsure (1)..(416): unsure at all n locations
tggaaggtgcacactanctattaagctaacatatatatgcacaaaatttccatctcttccttccctcaagtaagctgatttcttttttttttctgaaatcctaagcaagcatctcctttcttcttccttataaagagtgagcactgaattatattggttgcatctattaggtcaagcagtagaaaagatgcagcacatggtttgtaattgagtgcagactacactgagccaagataagcatttagtgtcagaaaactccatatgaggtctacaacgattccaacattttgatcatactataaaccatttacatttgttaaattgtgacaacgaaaagggaaaaaaaagagaagaacgtggccatgcatgcacggtaacaaactgggaagcattatcggagaactgacacacatatg

SEQ ID NO: 10084 - DNA, 169 bp, Oryza sativa
tctagcttgttcgccatgccctcatcttctcagcatccctcctgctacggcttgtttggtaactcgagggaagcggattgggagtttacacgagggaattgatgatgagattaagatgggaatttgatttttaatcccaatatcttgtttggtagagatgatggtaatt

SEQ ID NO: 10085 - DNA, 414 bp, Oryza sativa
  unsure (1)..(414): unsure at all n locations
ntgccgatatgtgagacccctgcaccggtgtcccccgtctgtcagccttcgtgcgccgaagaccgccacgcccaccggcagctactcctcacacctaggtcgcctcctccaccgccggccgcgcctctctgcgccaagccgacctcctccaccggacgcgcctcttgcgccaatccggcctccctccatcgggtgcgcctctcgcgccaagccggcctccatctccgccgcccgtgcctctcgcgccgagccggcctccgctgccatcggctgcgcttctctgcgccaagccggtctccgaccctttcaccaaacgatgccgcgcagaccagaagcagccgtctcccacgccctcggctaggcgtccgaagccgccatgccttcagtgaccgcagacacggtcaccaccaccgc

SEQ ID NO: 10086 - DNA, 166 bp, Oryza sativa
agcttcggataaaatttcacccgactaacagttttttttttcacaggactgattattcagagatattgtactgcacgtcgcgacgacagctagaacccacttccacaatcttcatccgtaaaaaatgatagaaactcgtccatgctcaatgcacatatataattca

SEQ ID NO: 10087 - DNA, 317 bp, Oryza sativa
tagttcttgagcatctgaatttctttttttccccgcctgctcttccctacagatggtctacaccaggactggcaaccgcacgacaggcgagggcagcaacggcgaagaacgcgctgatggcgtgcaccccaacagcgattccggcaatggtccgccaccactttccgagaatccgacgcttgcccaagttatggcacatcagactcagatgatggcagccatgatgcagcagatgcagcaacagcaccagcagatgcaccagaggatgatgcagcacgccgaacagcagcaccagcagtttggtccctcttcccctc

SEQ ID NO: 10088 - DNA, 166 bp, Oryza sativa
taagctttaaatgtttttttccaataatcatctatcaaatttgtgattcgattacaccattaattcattttaattaaatctgtataataagatatcacatgactatattctgatcgaaatattttatttttatttttttttgcaataaatgttttttaagtttttc

SEQ ID NO: 10089 - DNA, 417 bp, Oryza sativa
  unsure (1)..(417): unsure at all n locations
tatggataagatgggcccacaagacaggtgcaactcgttgaaaccgctntacttgccacaactgcctaaaggactcacctatcagccactgtacccaagggaaggtcggttggagccgacccatgggttcggccgaaccaggggcaagccagctaggtccccccttccacgtggacgtccagaattgcttctcaatgacggtgacaagggtaaaatggacaattcgcatgggggtaaccgtcataccgaccctataaaaggaggagctcacttcacttctcaacacactcaagcaagttgtcacgcccgtaatttctatccaaaactccaaacgcttacatgtgtgtaaaccctcgttcaggaatcagccgacgcacacaataacanattgataatatagtgcanatattaatctaa

SEQ ID NO: 10090 - DNA, 433 bp, Oryza sativa
  unsure (1)..(433): unsure at all n locations
tggctggtgtctcaccggccgcatcgancagntatgtttttttgctgaacaacatacatagaatggccatacacaagtcttgaatcagaatagaaaatgtaaggtgattttcttatacatcattcctttattatatcttggcacaaaatctctatgtatttctccctgtacgtgtttgtatttcgcaggattttagagtcttctttgccgtagtaccagacttcaggttagagtcttatttcaaagtttatttcaccttggctaatatatgttgcattgttgattgacagctgtctgcctatgttttgtcctccagagcttccaggatagcggaattattggtttatattctgcattntcccatataagctctcctatcgatggctnttcattttattgctgacattctacatttctactgccacacttacac

SEQ ID NO: 10091 - DNA, 171 bp, Oryza sativa
ttttcttcatcttatacttaatataaaattgaataaaagaagtagattaattaaatgcaggagtggcacaataattattgcatcacagtacaaagtcctccagcatcactgcttatttaccggattattccaatagatcatttgctctacaatccgacttattttaagcta

SEQ ID NO: 10092 - DNA, 170 bp, Oryza sativa
ttttcttgcaaaaagtcctgtctgttcagagttatcttcttgtgctgatcttccactcggtgcttcacttgtccctgtcagcataacttggtcctagaatcatcacaaggcaactttgttagggtcataaattatttaaaactggaaatttggaatgagggaaatatctc

SEQ ID NO: 10093 - DNA, 325 bp, Oryza sativa
tgacagattatatgactatgaattcgaaccgagctaagtaagccgcgaatttcgagctcagcgatatctacccttgagccagtgacagcgatgatggcgacttactggattatgattcgtgattaaagcccgtgagggggagggattgggcatacaaagatggctggagcggcgacaatgacggtccaaatggaggggcatcacctggagatggattctatcactcgagtggatgtccacctatatattatatgtcacataaatatctagaagttaaaaaaattgtcaagatagaactttatatagaatatcactccacaaacat

SEQ ID NO: 10094 - DNA, 169 bp, Oryza sativa
tagcttaatcaagcaatcaatctgcatgcctcttgatttacaagtcactcatcatcaaggaatataataatctactaattaacacgccgtcgccatatgtgtcactcaggcaggcagaggcgacgccgacagccgcctcggacgagcaccagcaccagcagacgacctg

SEQ ID NO: 10095 - DNA, 439 bp, Oryza sativa
  unsure (1)..(439): unsure at all n locations
tatcananattgtatgcttccatgcatgataaagcaactggtccacatttaacccaattcagaagagatgaagattatggtgagttacccagcaatttaattacccttgtttgaagagatatcattgacagatacagcatttcagttaagtttgttaaccagacggtggtgtttgttgcacatttgtgagtagaatctgtatagttttataccacataaaagatgaaatgtgcaatccattattagtcaattctgatgctcaattatttttataatgcatacgagttataatagccactgataagatacctgtggggattcaggtttctgctcatcaaattgttttcatgaaaaagagaagtagacaatctacgaagaatgataaagatagatgttattatacggcgataagtcgtcattggatccatcttagttctat

SEQ ID NO: 10096 - DNA, 171 bp, Oryza sativa
tttcttgacctacgtttgttatatcctgtcgttttgttctaatgcaatgaaatctcttatgtttacctaaggtaattggtgtttacgattggtcagggaacaatccaattattccagaactatggttgcttccacattttcttcccattcatccaggtatatccacagtat

SEQ ID NO: 10097 - DNA, 338 bp, Oryza sativa
tcaaactcagcttaggatatatgagagagatacgaaggctacgtttacatgatgtctgtgagatctgcataactccagtgtaggtccaaagctcgtcttcgagtgtgttagcgtgccagttgatttgatcctgccatcaacaagaaatagagacaaagaaaccgcggttaaacctataaacgatagtcgatctggtgagtgccgatgacatatcatttatctttgagccaatatcatatgtaaatcaatcgggcggtataaataaataataaagaactaaacctactcgatcggctgtagatatcaccattatataagtttatatggatatatactta

SEQ ID NO: 10098 - DNA, 170 bp, Oryza sativa
tttagcttgttgctttcatctataataaggatttgcaaaacatgtaactattttgatgacgtgatgcaagtagtatttctacaaaatggatttggcattgaacgtactgttttaacctaactgttatggagtttcaagttaaaaccttgccacaaaagttggcccgccag

SEQ ID NO: 10099 - DNA, 293 bp, Oryza sativa
atcgatccgactgagtttggtgacaacaaccttgctggttgggtgaagcagatggttcacgagaacagaagccgcgagaatcttggacctacattgactgctatgaaatcacgggaagcacagctctattcagacctgaagattgcatgcgagtgcttggatgatcgacccgaccggaggccaaccatgattcaagtcatggcaatgtttatagagctgcagcttgactcggacagtgatatcctcgaaggcttttcgatcaatccgccactatagatgagtcaggagagaaa

SEQ ID NO: 10100 - DNA, 166 bp, Oryza sativa
agcttgcatgttttccctacttaatcctgatttgagaattatcacattacaagctcactagtatctgttagtagatagccaagaatgagcacacaccttgcaagatattttgctttctctgcctcctcccaatctgcagcacgagcctctctgtcgatttctacag

SEQ ID NO: 10101 - DNA, 431 bp, Oryza sativa
  unsure (1)..(431): unsure at all n locations
tagcaacaaanaaccactgtntcatcataacaaacattttgagctacagactgcacacaactactaaacacagatggcattcaatggacatagtgttatatcccagtaaaagcagtagtaataccttctcctctgcaagttctgtaagaacaacaatatactggttaaggagttgaagccttgtgtaacaataaggtggatttagcagattttctgcagctgttgattcatgggaagtagacaatggggtgcatccattgctttttatagcaacccctctactgactgaatttctgttttggttccaagcagaccgtttaacagtggacctatcatagctggcaggttgtgcacctgtaccatccttcattgacttttcaagtgaagacaaacattccgtggaagtagagttcgcctgaacaagtacatat

SEQ ID NO: 10102 - DNA, 167 bp, Oryza sativa
agcttgccaaatgcgctccctgtgacagccacagagcacggactgcctctcaagcaggttgctacgtaccctattggctttgcccatctactgcagtagtgcgtcgtctgaaggaagggctaagctctagctagacggacaagcaatcgagagtacgagacaacgag

SEQ ID NO: 10103 - DNA, 421 bp, Oryza sativa
  unsure (1)..(421): unsure at all n locations
tattttaactcctcccaaatgtcccttataagttcatttctgaataatcattgcatcgaagtttatgaagataagaaataattgtattgtgagttgataagctaaggataattgtattgaaaatgaataaagtagaaacattttagttttttttttgtgtgtttgtattaatgcgtgtggcatagatgaaaaatgaacaggcatggtgaagagtgctctcaccatagtgatagacgacgacgacgacgacgactcaatccccaattcacaaaaaggcccacgaacccaacagcccaagcccacctcattccattccattcctctctaccttctncctctncctcctcctcctactcctcccgccgccgncgcacgcggaaccctataaaaccctatcagcggcgagcaccggggagcgggc

SEQ ID NO: 10104 - DNA, 167 bp, Oryza sativa
agcttctgataaactgagattttcggctaacccatcactaactcttcgatatatttcttgctgaaagtatccctgatcccactgataacgagtaggcccaaacaattcaattggggtagttgctgacccataccacatagttccggcaactacgaaagctgcaaaaa

SEQ ID NO: 10105 - DNA, 428 bp, Oryza sativa
cagcttttatcattctggcatcgagctattttgccgcaagatcttccctacaatatcgtcaccgcagtagagtttaaccaccaaattccggatggattggtgtggttcctctacgcctaagacaccagaatatcgaaccatgaacgaagaaaagcatgagagaaatattggctagtaattgtgaagccccaattcttgactggaagggacaccaaaggcctcttgcctccctctctatctatccaagagatggaagggcagagcttttttttggttttttcatcttttcatcacagagttgaacaatgaagatagatggcaagtgcctgatccaattgatcaggtcgtgtaagaacaagggtcaaatcgttcgttcgttaggatgcctcagctgcatacatcactgcacttccacttgacacctattt

SEQ ID NO: 10106 - DNA, 168 bp, Oryza sativa
agcttgagtacgtgtttcacaacccaatacacactgcgtgtggatttgctaattggtgggcagttgcgcgtgtccctccccacgtgactagacatatggcgcgcacgaagaaagggtggcggacagcgcgctgctcatgggagagagcaagcgagttttttttttgtg

SEQ ID NO: 10107 - DNA, 270 bp, Oryza sativa
ggacctatgaaactcaacttaggctgcctgatgaggcaagtgttacatctcccatctctgtctattcggcgtaagtttttctcaagcgtggcccctaggacacgaaccaaacagccccaaagtccccgcgatccattcatggttgcgaatgataactagaagactattttggttttgcaatggcgtcaagccatcaactagggtgacaaataaagaactattttgattttagagttttaatatactacctccgttttttaatagatgacg

SEQ ID NO: 10108 - DNA, 168 bp, Oryza sativa
ttagcttcccggtttagctcgcttttatcttttccgctgcatttgtaatcttttctatttttgtaagacgtggatctgtatgtcaacaattgtcgtttgtgtaccctggctggtcctggacagggatttaatgcacattcagcttacaaattctggtttgagaatttc

SEQ ID NO: 10109 - DNA, 423 bp, Oryza sativa
  unsure (1)..(423): unsure at all n locations
tgctaagattggtccatggggtggaaatggaggatgttctgtagacatatctgtacccccaaatagcctgaagaacgtgacgatccgtaatggagcagccattgatgctattgcctttacatacgttggcacggacgggaatgaacatcttgcaagtccttgggggggtggtggtggaaatccaactacggtacatataaaatattgtgtttttagtttcacaaaaggctctgttttcaatcgtgaatttggatttatacttaaaaatagtctttcagggacgaaggtagcagttaatttacattgttgagaaaaaaatgtaaaccccgtagctagctactctcctagttatataattcttgacgttttaaacaacgatatggtctccaaaaaatatttntaactataatnttcctgtataat

SEQ ID NO: 10110 - DNA, 168 bp, Oryza sativa
tcaagcttgtgctcttgctagctagctaacccaaacccgaacgcacaggtacgtaccaagatggcaagaaatgatgcataccaaataactagaaggccaagaaaggtctacttacggcaaacccgagcatggcgacacgcccgacgaacagctcgttctccttggtga

SEQ ID NO: 10111 - DNA, 399 bp, Oryza sativa
  unsure (1)..(399): unsure at all n locations
ntatgcatgtttgaattctgaatgccgatggggtgttcaggcaagttggtagtgtttagttgtttactatactttagtgctggtgtaaggatgttaggatgagatataactaacttactgatttacaaagctgttgctccatttcaattttggtcttactataacatggagttttggcctgagtattctgttcatcacattactaagattttgattttacagctcacgctagtcatgttctcactttcttacaacactggctagtcatgttctcactttattacaagactggaaggctgaataatttaatattatgtgcctcagagtttatcttggcatcttgcaatctactgttctcaattgcattagctcggagaattgataagatatactcactat

SEQ ID NO: 10112 - DNA, 172 bp, Oryza sativa
tctttcttgcaataccatcaactatgtcctcttgtttaatgagaacatatccatcctctgaatcatcactaatgttcatacccttgtcaatgtcgtcccatatgtctgccgcacttatgatatcccatgatatagtttcatctactgttacaagagcaattgtggaacactt

SEQ ID NO: 10113 - DNA, 163 bp, Oryza sativa
tgcttgtacagttatacgtgagttctcgtggccgtgcacctaccgtatacgtatacttatatgtatgccggatggttttccatgggtttaattaaagcagcggcaagctgggactaacaccgaagctgcatatatgggctcaacccaattggtggtgaaattg

SEQ ID NO: 10114 - DNA, 440 bp, Oryza sativa
taattaatccatcattagtaaatgtttactgtagcacctcattgtgaattcatggagcaattaggcttaaaagattcgtctcgcaaattagtcgcaatctgttcaattagttatttttttagcctatatttaatacttcaaggaggtgttcaaatgttcgatataacagggtgtaaaatttttgtgtggaaactaaatagggcctaacaaatatatattgaagccgcatcaataacccacatagataagtggcacaaacactgggtcaaggtggacaaagataaaaaaccaggtggtattatacttatggttcacttattttgtttcgttttgatatttgaggggtgtaaaattttcgatttcatagttgaggggtatttcttgaacctaatagttgatgagaggagtactatattactcctcacaattaatgcaacata

SEQ ID NO: 10115 - DNA, 169 bp, Oryza sativa
ttttctttaaatcgaaccttatgtgatttgctttctgaacagacaccttctaacagtatagttccattcggtggtaaagttattattcttggaggtgattttcgacagatattaccagttataagaaaaggttcgcgtgcctccatagttgatgcatccattacgaatt

SEQ ID NO: 10116 - DNA, 393 bp, Oryza sativa
  unsure (1)..(393): unsure at all n locations
ccctgccgancgaccgtattgaaaccacaagtatatgtttatatgttcgttagattcttcatcccagaaaaaatggatgcacatgcgcaaagcaacgcgcacggttgccagctcatataccgggcaagtgccagagtccattgtgcatacattcgtacgacgctcattccaggcaagatgtgggccataactcactcgatggatcggcacgcaatattcaggaaactattttaaactctcatacaggatccgattctctggataattacagcttaatcaaatacccgcatatctcttacaaaataacaagataaatcacttcacacagagcggtggagcccacactaccggcggtaaccccaagtgactagaagcattatccagaaacaacag

SEQ ID NO: 10117 - DNA, 169 bp, Oryza sativa
ttgcttcctctcccacctccctctgtcactctctggtcaagcggcggcagcagcagcagcttcttgcgtttacggtgggggaagggaaccagatggacttgcttgcgcctctttttcctgtttcgttgggtgggtgtttatttagttttcttcacactagtttgtgtcg

SEQ ID NO: 10118 - DNA, 262 bp, Oryza sativa
tcgcatttatttagtttacaacaacagatgaatcaaatttataccttattgcgtacaacagaagattacatgtacaatttttttaagatggtgcataatatatttcttatattagccttcttattggtgaccgacacaagtaatatggccttatattttctttattattgcccttgtgccgaacagataacagtgatgagctatttaggtcaaaatcgtttttttttgggagaggggaggggggaggatagaatatctgtta

SEQ ID NO: 10119 - DNA, 171 bp, Oryza sativa
ttttcttgtgacagatcttaagttcgaatcccacattccacatattgtttggtttattatatatctttagcaccggtcccttcaactggtactaaaaatcaagaactttagtctcgggtgctacaaccggaattattatggtgtgagaactggtactaaagatcatatctc

SEQ ID NO: 10120 - DNA, 449 bp, Oryza sativa
actccgcttggacacgcgaacaaggtgatccggagaaccacatttctagcaacgattctggccacctctgttcttgaacctaacattattcacagcttgagaaaatttgttagataacaaaaccaagtcctcctcctcgaactgatcgagttgctcatcggacatggcatcaaataaagcaagcacagaagacttcgatgaagaagcaccaacatccacagaagtcgaggaagaaaccaaagcacttgacttataatcaattttacgagaaagaatattcatctcatgtgttttcagttttgtgtaaagcgaatccaaagtcaaagtagacatatcaacagactcctgaattgatgtaattttcatctcccaaatagacatgtcaagaccattcaaaaagtgacgagaaacctcagattgtgagtaattaacatcataagaagaatcaa

SEQ ID NO: 10121 - DNA, 167 bp, Oryza sativa
agcttagtttctgcaatgtcttcagacctcctagccattgtggtacagaacctgaaaatcggttgtaatctagtccaagaattatcaggttgggaagatttgcaatgcctgaaggaaaactccctgacaattgattctgtcccaagaaaagatactgtagctgaact

SEQ ID NO: 10122 - DNA, 441 bp, Oryza sativa
  unsure (1)..(441): unsure at all n locations
aaaactcagcttgggaaacctgcaatgcttgaatatttaacatttctctcaataatcttcattgcataataccaactgagatttttagaatcatgtcaatagtacaaatcgacttatctttcaataacctacaccgaaaattttctactgacattggcaatgcgaaacaactaatatctttagaactttcatcaaataagctatctggagatatacccaatgctttgggtaattgtgaaagccttgaatatatcatgttaggtataaacagttttagcggtagcatacccatttcattaggtaacataagtaacctaaaagttctcaacttatctcacaataatgtaacttggtcaataccagcgtctcttagcaatctacaatatcttgagcaacttgatctgtcattcaaccatcttaacggngaggtcccagtagaag

SEQ ID NO: 10123 - DNA, 168 bp, Oryza sativa
agcttctcctataaaagcctcccaaaaacctaggaatactactcgcaccatagaagccagcgtgagcacagggcaagtgtattgttacattttaatagtattcagatctagcaagtagctagtaataagctagctagattagccaaaatttcttgtggtactagtagg

SEQ ID NO: 10124 - DNA, 437 bp, Oryza sativa
actcagcttaattcggatagtgacccatataggagtcctacgggccttggaggcccattcatggatccttaaaaatttaagggggtgtgagcagcggattcattggatcacgtgagaaaccctatcagccactcccatccatgagcaaaaccctagctgcgctgcgcgcaggtgcttgcaggtctgcacatagcgttctatccctgtacgtgtggatactactaaaggcgccgctgtcttgcgatgcttatcggcgtaagaacacggagaggagaacgcacaacgaggagaaggttaagctattgcgatcgactacttcctctacatcgatgcacgctacgtccccgacatttcttttgcttcttagcgcttaattccatcgcacaacgcgttgagtggtgacgatctatgatctaatacttgcatagttcctggtt

SEQ ID NO: 10125 - DNA, 171 bp, Oryza sativa
tctaagcttgtacagctagttcacacacagcagcataacttgcaaagccaacaacagaaaacggcaccatagtttgtttggtacgtccaggtaattagctacttaggtatacaacagaactgtattgtacctgggggcttctggagtatatccaatgaggtaataagatat

SEQ ID NO: 10126 - DNA, 429 bp, Oryza sativa
  unsure (1)..(429): unsure at all n locations
ggacctataaaactcagcttcactattaaacagcagaatattatgcctgatattatttgcctaagtctataatgtcctgaaagcaatttgcctaaggactacaagtccagtactacataacctgaaagtccatggtatagaaaaatatgagcagagacttttgtacatatgcaaaatgtaggtgtcattcagagtcagagtaggcatcgatctctattgacaaacaatatgcttacatgtcggcactactcagacagcacaattagtaaaagtctagcagcaaataacctgaaggtaactttcattaattagttagttggctgaatatctctgaatattgattactcccttatgtaattagtcagataaagagagacacntcatcgttcttagaatcttaataattattgggtatttggtcatcgacga

SEQ ID NO: 10127 - DNA, 161 bp, Oryza sativa
tagctttcccaaaactctgtctttcattcggaaatcatgtctatcctctgcacataataactttgagtccttggatgaacctgtcgaggatataaacacactcgtgcgcttgaattcgacacccttggaatacttcttatgggaagtgcttcatctgtata

SEQ ID NO: 10128 - DNA, 168 bp, Oryza sativa
ttttttgcttctcgatgggcgcggaggcggaacgccgggacttgatggcagcggcatggggggtgaggacagcgcgggacgcggcggcggcggcggcgagagcagcgccgggcttggggctgggccggacgccgcggaagagcgaagggagaggcttcgacgaggaag

SEQ ID NO: 10129 - DNA, 284 bp, Oryza sativa
tcttgatcagcagcaccagagattgtataagattattttattgagaaagagaagatgccagatggagatggagaataaagcgaggaggcgagcgagcgagggatataacggatgaatatatgcgatgtggaatggaagagcagcaactgcatgagacctcccgctttttgtttggcgctttggcgtgggcagaaaccgataccttgcatctgcatgcgctgcgctgtgggtgccactgcacttgcatctgcggctcactgccccacatgtactaccactttctg

SEQ ID NO: 10130 - DNA, 169 bp, Oryza sativa
tcaagcttggcaacaggaaatgtcgacaaaagggtgaaaagaatgcagcaaagtaacttgcagtggcccagtggggtgaagcaaaattgttatagtcaggtattttagcaattactccttagaaaactaattcatatgtccactaagccttaataagacaatagtcaca

SEQ ID NO: 10131 - DNA, 405 bp, Oryza sativa
tgacagagtcaatatggatggatgagtccgcctctttactgacctccaatgcgatggaagttggatcaatggtagtgctcaatgttgccacatctctagtggaatccttgctcacgggtgaatccaaacttggtgtcgggacatgcctccaacactcgatcgatcatggccatcatcttgatgcacaggtcttgaatgatcttgtctgagttctccaccgccttgtccatttcaatgtcggccttcatggcctcgatgagagaagacgaactcgttgtggccgctgatgtggttggggctgtagatggactcaacggttgggaacacatgttctggtgtggtaggagtgctctcggcattagactttgtggtggcacatcttggtaccagagtcaaacacttggt

SEQ ID NO: 10132 - DNA, 168 bp, Oryza sativa
tctagcttgttggttcattccatacttgaggatctctgtgaatggcaaatgtgtttacaagaagcattgtcccacgggtaatatgaaaaccagcaattgaacaatcagtagacgcttcatgaggcacaagaagtggcgctggcgggtataagcggagtgtctccatga

SEQ ID NO: 10133 - DNA, 397 bp, Oryza sativa
  unsure (1)..(397): unsure at all n locations
tatccaatattttattctccatattaccaaaatagaggaaaacctatgatgcttacaacgcataaatatgttagaataataatattccactagtattaggtatactaacctcttgcagggaatgacacttaagtggaagagaatcgacatcaacacagacgattaatcaatcagacgatggcgagaactacacttatgtatgaatgggccaagaactcagaaataacatgtcgcgaccgagaaaaatacattttcccgaacgctagtgtattaatccccatcccaggaaaagccgaggttcaccaaacaaacatgatacataaggcacatccttattattatcgataatatntacattattacaaaggcacttaacgcctgacaatcaaaattaaac

SEQ ID NO: 10134 - DNA, 435 bp, Oryza sativa
  unsure (1)..(435): unsure at all n locations
ctttaatgattgcggtataaagaattcttgttgtgattcgagtgcattatggcgatggtatcctatcgattgatcgacgaaatggacacgtacgtgtcgaattgcttctttaatttgctcactgggtccacctgtcaacatgtaatctgttcctcatttctttgcggctccgtttacccttgcggataattgatttcttttcattgcatccaatatatgcaaacattaattattgcacatgtacacgtacgtacacctgagccctcgataaataaatggagggcagtgacaagacatatatgctccctatgtgctaanatataaaggtnttttatttgatgttacaatatatactggctagatttgcattattaaaaagtgaatccattatattttggaacagaaggtgtatatctcttcaacatacatggcttg

SEQ ID NO: 10135 - DNA, 175 bp, Oryza sativa
gtgtttttctccaagaagatgtgacaatggaggtgccatggccagatttgcatagtagatggtgcatgtgacatctaggggcatttttttatagacaattcaaaagtaagagattgttggacatgttcaagaagttatgcaagcagaatcaataaagaaaatttgatgctatatg

SEQ ID NO: 10136 - DNA, 440 bp, Oryza sativa
ccttcaaactcacctgtggaatgggtcagccattaccgaagactctattcgaccaaactttggtatgtacccttttttttttcattctgatttaattgccaaattgatgttgcgtgacattgtcatatcatctgcttagttataaggggacattctgatttaattgtcaaattgccaaattggtattgtgcgacactgtcatttcatctgcttagttgtaaggggaccagcagattcctaccatctcctaatcttaatttgttctacgggatataagttgagatatttgcataattgttgcaacttaatcccataggctgaatactcttatttcttgtaaaactttggtaacaaacaatagttgatgccaagctgttcagatatctatgccattctactaacgtgtaccattcaacatcttccttttttttatccttgct

SEQ ID NO: 10137 - DNA, 166 bp, Oryza sativa
ttttcttgtgccattgatgcagacccgtcgcttagggagagcttgccaaggcaggtgcgcgcgccggcggtgttcaggtgcgtgcgcatgacttgcatcaaccacggcgaggaactattacccgtaccatgcgaccgtgaccatcaacgggcacgtgttcaagggg

SEQ ID NO: 10138 - DNA, 171 bp, Oryza sativa
tttttcttcaacgttgcgaccgatctgagttggaaaacatctctggatcatgcgttgataagttgctactgcattctttaatccgaaaggcatggtgatgtagcagtatgccccgaagggcgtgatgaatgaagtctttaagcagtcggattcctttagtcggatctgatg

SEQ ID NO: 10139 - DNA, 433 bp, Oryza sativa
tggaagaggcaaaagagaagacaaagatggtgagaagaccaacaacaacatgccgaagggttcatgccaagggaggaagatgaaggagaatctcatgaaggcttttgaacaagccgaagggttcatcccaaatgatgtaaatggtgagagtggagatgatgataagggaaagaacatctctggtgtttgcttcatggcgcgtggtgaatcggatatagagtatgaagatcatgaggtaagtgcttttgaggaagttactaatatcttaagtgcaaaaaataagaagtgtgagaagatgtatagaaaacaggaatttatcattgaatctcttaattctgaaattgctagattaaaatctcttattcctaatgatgatgattggaaaaattgtgaggttctaatgaatgagatttcaaaattagagatgttatgc

SEQ ID NO: 10140 - DNA, 173 bp, Oryza sativa
ttttctatcttgatcgggtctatctgtctaagagcaggtagttcgcatcttcacagacatggctaatttaccgagtattctctcccagacagagcccatattgtcaatccttttgagcgggtcgtaacttacccaacaaggaatttcactaccttaggaccggtatagtcacg

SEQ ID NO: 10141 - DNA, 335 bp, Oryza sativa
tcaggagacctcttttgctgttatctcatagcttgttttgctagggcacaaacatcatatggggaatgatactgtgaacaatgaactaaatcaccacgggtgctcgccactacaataagggtgatggtcccagccggacacttggcaagcctctaatctattgccgaacagacagcgagcgggccaaggagaaaggttatgcacctactgtggaaaggatccatgttatagttgatatgcagaataacgcgtgcctagaactcgaagataagaagatgggtcctctccccccacacagacatctgataaactacactcctgtggaaacgaaaggt

SEQ ID NO: 10142 - DNA, 168 bp, Oryza sativa
tagcttgcggtgtgagagattgctacgtactggtgcgggaaccagcgagcgagtagaattatctctcgaacaccaatggaagtttgcggtgtgagagattgctacgtactggttggagaaccagcgagcgagtagaattatctctcgaacaccaatggaagtttgcgg

SEQ ID NO: 10143 - DNA, 424 bp, Oryza sativa
ctcagcttcatcatttatgaaatggtggttatggtgacatttgaaagacagagaccttaaaagggctgagctctctgaaattttagtagtgtgggagttttggaaacatataaacgactgtttttaacagtgtcaatccatgtgtgaccactgttcttcaagcagtggttaatgagtgtatcctttggtcgatggtggtaactaataagctcaaggtgttcttagataggtcgctatagctctgacgggataaggtcagtttcaggttctttagtttgtaaaggcctagctaggcctgtggggtcttggtgaggggaggaggctccctcccaattaccttggtttctctttcttttaatgaaatgatacacaactctcttgcatattcaagaaaagaaaattcgtattataataattatatatt

SEQ ID NO: 10144 - DNA, 160 bp, Oryza sativa
tagcttgcggtgagagatattaatccgtactggaccataatgccaccgacaacaggaatagtgtctagaacgcctctgaaaaattgcggagtgggagattgttttctcctgtttggttaaccatggagattactcagaatatctatataaacaccattgg

SEQ ID NO: 10145 - DNA, 428 bp, Oryza sativa
  unsure (1)..(428): unsure at all n locations
tatctaacgttaaaaagagatgagttatattaagcaatcatactggttaagaacaatacacggggtaacacattttcgagataaatcagcagccaggagcttaaaaaaaactatgaatcctgagtatggcgtatgaataaattgaactaataaaacctttgatgcgacccgtggttatgaaaggcttttaacgaaaccattgatgttcttatatgaactcatgaaaatatgttgtatgatagtcaatttgggagttggtgaatgataagagttttaatgggaaataattatctaaccttatgcatgttatcttcatattagcttcacttttgatctacattgctaccacaggagcagcaggatattatgcacagtgtaactacactcttgaaatcagnagtaagatttcttattccactataagcgac

SEQ ID NO: 10146 - DNA, 169 bp, Oryza sativa
ttagcttcggagagatgatgagcagcagcagcagcagcagcggagcggtgcggtgcggtgcgtcctgcgcaggtgggttggatggatggatggatggatgcgcgtgtgggtgtgtgtccctgcggttgggtcccaggcgtcatgaattttttacaatttgatccttttg

SEQ ID NO: 10147 - DNA, 415 bp, Oryza sativa
  unsure (1)..(415): unsure at all n locations
ctttagtgacacctganatgagataaacctttgatgcatggttaatcgagtattaattattacagatttgaaaaatagataacttttattgttttacatgaaacacagtttagctgttcgggatgtgtccttacaaagaacgagaaagtagtcaatcataaaatcagtttagaactcaccactagagcaagtactatagacctcaatgctcttgcccccaagatgcccgatcacatgagatggagaagagaggagtcacctcttatgtatggggtaacatatatacatacttcttagtgcaagtttaataataaagccaattactagtagttccaaaaattaaaacatcatctatatccaacctaaaaacactcatacagtagtaagcttgtaacatatattgcatattaatatc

SEQ ID NO: 10148 - DNA, 176 bp, Oryza sativa
cgcgttctctcttatactctaacccttgataactctggaccagcattcgatccagcaaagatcattaggttacagggatgctaatacgcattgcagagaggagaggaagaaacctcgcgatggtcggtagcaatggaggctctcggccgggcggaccccgccgccggagatggggc

SEQ ID NO: 10149 - DNA, 431 bp, Oryza sativa
  unsure (1)..(431): unsure at all n locations
ttntccatacctcggcttctctctcatggtctaagggtctattaggtacagcttcaactcctaaatttagctccaggagttgggcttggagtgtagttgtgagaacgttccatctagctccactcccattttaggtggagctaaaacaagttgattgggctccagctctacgataagtggagctggagctggagctgtgccaaagaatgcctaagcagttgtggaaggtgctcaattgattgttgatgataattatgaaggtaaaatcagaagccattttcctaaacatgtggatgacagagttctaaacaaaaatgtcgcacattttgtaccagttaggtgctgctccaaatctctaataccgattatagggtccanggccctggttacctattgtgccacgtggcgctactaagatccaggaatacctt

SEQ ID NO: 10150 - DNA, 167 bp, Oryza sativa
agcttcttaattgttggtaccaaaaaaagagcagcggatttagtagcatcagctgcaataagggctcgttgtcattatgttaataaaaagtggttcagtggtatgttaacgaattggtcgattactaaaactagactttctcaatttagagacttaagagcagaaga

SEQ ID NO: 10151 - DNA, 380 bp, Oryza sativa
tggtttgatcaagctgctgagtattggaaacaagctatatcgcttactccgggaaattatattgaagcacagaactggttgaagattacgaagcgctttgaatttgaataagaccactctcctttttcataaaatgggggtttggttggtgatccattaatcaaataaattaggtcggaagatcgaatcaagaatttcattatatctctttcctctgccttctattttatattatatttcataaggataaacgatagggtctagaatataagtaataaagcgaattaaaaggggcaatataaatattgctaatatatcacgaccatcttattaataattctaatgagttatcttggaatttggaatcgaataaaaaatct

SEQ ID NO: 10152 - DNA, 169 bp, Oryza sativa
tcaagcttgcaattgcatttgggctcattggaggccctccaaatgtagcaatcagaatcgtaaagaatcttcgcttttgtgcagattgccacaagtttgccaagttagtgtcccagatctatcattgggagattgtggttcgggatagagccagattccatcattttac

SEQ ID NO: 10153 - DNA, 427 bp, Oryza sativa
  unsure (1)..(427): unsure at all n locations
ttcagtgacggccataggancattttccttcattaatttcaangaanactctgtgaacagacatgatgaagcagcgaagcgagtctattcaggggagcgttggtccgccaaagttgctagttagatgatggtgcaaaaaagcaaggcgaacaaacacactgtcaagtgtttcgattagcaaaatatgacatatgacgtcacagaaaggggtggtataacgcgtggtggtgttagattcggtgcaagagccttcaaagntgaaggtgaggggaactcatgttcttgccaaaggccattgctctagcatatgccttgctcacatctcattcacgtttatctgattcatgcagatgatgaggaatctctccaccgaatgccgtatcacttctctttaagagccgttgtgaacacatgggcaagtcgcttt

SEQ ID NO: 10154 - DNA, 166 bp, Oryza sativa
agcttgcacaataacttgacaccacatgtatatggaccttaacaaaaaccatgtggcatctatgaacaagcttaacaaccaaactgacgattaataaatgattagaacttacactactaccaacatagctcttgatggggacaaaacctggatgcgcaggcggcca

SEQ ID NO: 10155 - DNA, 300 bp, Oryza sativa
  unsure (1)..(300): unsure at all n locations
ttaggcctataaaactcagcttacatatcacatatcgcgatcatatccgccacgactccgcggcggcaatggatgtggctgtgacacaagacgcgcgactggaaggcttacgaggacgcccgggtnttcttcgacgcctcccagcccccgaacttacggattggatacgcacgcgccgccgtacccgaccactgctggcgcgagacccccctccgatacctctcctacagtggccgctacctactcatcgtcgccgtcctcttcgacggaccagtttgtacaataatctcacatgggcgt

SEQ ID NO: 10156 - DNA, 397 bp, Oryza sativa
agcttcgcaaccccccgaaccgaattaccgtttctaattagggtaggaagcaccagcttgaatatattgacctcgtaggcagatttaaaatcgtactactccatattttaatgtataacaccgccgactctttattcaacgtttgaccattcgtcttatttaaaaaatttatacaattatcatctattttattgtgactcgattcatcattaaatgttcttttagtatgatataaatactctcatatttacatgaaaattttgaataaaacaaatggtcaaacgttggtcgaaaagataacggcgttatacattaaaatacggtagtagtaccacgtgaaaacaccatctgcttctggatggagtaaccgagatggttctccatgctaattagatat

SEQ ID NO: 10157 - DNA, 403 bp, Oryza sativa
agcttgttagttaacacaattactacttgtctgatttaacctcagaggctttatacaattgtgacttcacaaaaggcacttgataaaatcttgaaagagaaccttgccctgctccatgtttcttacggatggatagaaacttcaattagaaccatgacctgacattttcttctctctgggaggtatcttcagtaaactcttcatcgtgtcatatgcggtaaaaccaatagccacagagggtaccacctataaaaagaaacaatatttttataagggtcaatctggctaactcaacacatttatgtaagttgcaactaaataatctcttgtgaatacacatcattcaacaagtaaggttttcggctgaaactgagctggacaaatagctaaaacaagaatattg

SEQ ID NO: 10158 - DNA, 399 bp, Oryza sativa
tctcgggttttttgtctctgcccgaggcatcgaggccattctctagaagatacgagctatagagcggatgcgccccccccagcaagcttatggatgtgcaatgcgtcaccggttgcatggccgccctaagtcggttcatatcgaggctgggagagaaggcgctacccttatttaagctcctcaaacgctccgggccgtttacttggacggagaaagctgaacgtgccctcactcagttgaaggcgtatctcagctttcccccagttctggtcgccccggagccaaatgaacccttgctactctacttagcggcgacccctcaagtggttagtgcggcgttggttgtggagcgcaatgaggacaatcctcattccgcgcacccccaccctgtgctggctt

SEQ ID NO: 10159 - DNA, 408 bp, Oryza sativa
agcttcaggaaggcacagattcctgaagggtttatggttcaatagaagagagagttccgtgcgctccagcaaggaaccatgtcagttacagagtacttgcatgagttcaaccgccttgcgcgctacgctcctgaggacgtgcgcaccgatgctgagaagcaagagaagtttttgtttgggctcgacgatgaattgaccaaccagctaatctccggagtctatgaggactttgagaagcttgtggacaaggctatccgccaggaagagcaacgcaacaaaatggaccgaaaaagaaaggcagctcagatcagctttcctcaggggaacaatcagaagcctcgcttcatgacgggacagctaagtgggccttccaccctgatcgtctgtcagcaccgtccctatcacccg

SEQ ID NO: 10160 - DNA, 398 bp, Oryza sativa
  unsure (1)..(398): unsure at all n locations
tcggcgaanataacatcggccgagcttcctccgtcaaccagaatttgccggacttcgaagcccgctacttcggccaagatcaccaaggggtcttgatgcgggaacaacactccttcggcatcttccggcccgaaagagatttgctgattcaagtaccgtggagccccttcgtcggccgaagcaatgttgtgcaccattcgcagctacatcttcttctgcagttttgacggctaagctggcgagtcagcccttgtaatcacttggattactctgcgcttcatgtcttggcgctattcggccgggggtacttgttcttgagcagcctcgcgaggtgcttcgacagctgctccttgttgaggccttggatcttgagcgttgccacgctgtcgaatgtttca

SEQ ID NO: 10161 - DNA, 408 bp, Oryza sativa
agcttgcaaatcaaggacgtccggtatctcttgtgatgtcgcagcttcgggtagatgcatcaccagcggcttgaattagcagcgtcgagtccagggacaagtagcactgcgtcggcttgaacagacgccggcatcgatgaggcttctgtgacgcgtatatgaatcggccaccgcgacttccccggcgacgacgatacgtgcagatggatccccatgcatggatgtgtgcgtgctgtagatgaaagaaaatgaaacaatcttgctagcttttaccttgactagccatcaagctcctctcctgcgcttgctgatgatcggatcaccgcgcgcgccctctcctgccggacgccgggactccggccgaagtcgctcgccgccgccggtgcgtgtcgtcgatggatggatcgc

SEQ ID NO: 10162 - DNA, 401 bp, Oryza sativa
tctgccttctaccagacaagatggaacgaaaccactaaagttgttatcagataagtacaggaattggagtttcttcatactacaaatggaaatgggtacatagccttttagtttgtttttggacaagttaatataggctactttgttaagatacctaccaaatgtacgtagtatggaagagaacccattgtttgagtaatccaatacaactacaccataaggcaatgatatggctggtatgggtatttctccttgaagtctattgaaactgagatttagatggcttagatgtgtaaatgtaacaagagagggagagttctccaggctagtaaatgcattgttcgagaggtccaatgatccaagggtgtccttccaaatctcccatatccatcctggtataa

SEQ ID NO: 10163 - DNA, 391 bp, Oryza sativa
agcttcctcctgtgcacaaacattctacaacaaaagatgccttttcctactagatatggagcatttgtgttaacaagaaccttccttaggtactgagagtgagacattcactatgtacctttattttctttttctttctctaaagagacaaagggatagaaaaaaaacacttatgcttattccttagcatttggatttatgttgtatataatactatttaggacttgtgatgctaaattagtgggcattagtatcttatcaagacaccaagatgagaaattgggtggttataaaaagggtactaagtaatatttatatatttcggttctctctccactgccaaggattgaatctattctccctgcctaaatacatgccatgctcatggaaa

SEQ ID NO: 10164 - DNA, 407 bp, Oryza sativa
tgttgccgctgcctgttaaatgcatcgaatagctaagcactgacatatcactaatgcttatttttggttctaccatgattatggtttcatttcctctctgcgccacatagctactactattatttagctcgaaattaattaaatcttcctagctccaaatgcgtttagaagaattaattatactcagctctatatgtgcaaggttcatcgtcaaaattcaaatctgcaacccacaagtagccacgcaccatatggccaaatgtccccatgtccaaatcgttgaatatgcatccaacaacccctctacacgtgggtgcacatgcatgaagattgaagcctatccactaatgactagtccacgtaccggcccgctctgaaacttcgttatttacacacgttgctcgatg

SEQ ID NO: 10165 - DNA, 386 bp, Oryza sativa
gagctggcagcatgcaagcttgatcagaataccaactttatgtgtgttttaatgaacagggctatagcacctacacaaagggtgcaaccctcctcttaatcaccgtgatgggaacggaaccaacattttgttgaacacgaggctagaggccaagattgctgattttggtttgtccaaggttttcatttctgagaacggtacccatgtatctacgaacaaacttgttggcacacctggatatgtggatccagagtatgttgtctttcttgaagccctttttttaaaagtcttttgttagagaaatactaattgtaagacttattgggactgaccaaatgcgtaggtaccaatcaacaatgcaaccaacgactaagagtgaagtctat

SEQ ID NO: 10166 - DNA, 394 bp, Oryza sativa
  unsure (1)..(394): unsure at all n locations
tgctacttccactagcgcacaaatgggcgaattttttttttcctctcttcacgcaaatctcggtacaatattccaacgatcaaaattcataagttttgaggggaaaacatcggcgtaattttttttagcaattccgatcaatgaatcaacgcaatgcccatcaagccatgaacatcgaaaataatgagtgaatgacaacgttgtaccgaccgcgccgatgtgcaatcctggtccaacaatgccctccgagcctcccctcaacatattttgctctacaaaagttctctactaactcggaagagcaccactcatcccacatcgatcgacgccaaactagctagctactagcaaatngaagccaagatgaagaaaaccatggtgctctaccctggcc

SEQ ID NO: 10167 - DNA, 407 bp, Oryza sativa
  unsure (1)..(407): unsure at all n locations
agcttcccgtgcacactatgggcacacaatctagcaaatgncacagaaaattctagaaaaaattggacacatacttccaatagtattacacctatatgtgaaatcttatcttcaaattcattatattttagctgtaacgaaaaagacaaaattctgacagatttttacccttaaaactatcagattttttacttttttgttacggctaaaatataatgaatttgaatatgaggctttatagatatgtgtaatactattaggagtacatgtccaattttttgtagaatttttcgtgacatttgctagttggtgtgcacgggaagcttgtgtgcatatgggatgtttccattttctataacttaaattaaggtggtggctattagctcatttgctgtagtaagtttacc

SEQ ID NO: 10168 - DNA, 398 bp, Oryza sativa
tattaattttcatggcatttgttggattgttgagtttctattttctttaataatataataatttctgaacatattctggaaagttcagttactggatgcatctacgagtatgagctaagttcagggctatatgatttgaattgttgtcattagacattctggttgtgaccacagtatcatatgacaagtatattgtcttgtttttgcttattaagatattttctgattgtttcctacctcttgctgcaattatttatttgcatggtatagaagtaaatcgaagttgcacagttcccactcccttatcagcaccatgtgacaaactgcagcaatgctaatctggattgtttcagttacaggaggatgaatccagtgaccaagtgttcatgaagcagatg

SEQ ID NO: 10169 - DNA, 405 bp, Oryza sativa
agcttgtggtttctgaagaatcctgttttatctatgcgatgcaagattcctgacgagcgacctagctgtaaacagtcagtcttttttctctgaaagttcattatattcctatgcatccttcttggaagcaaaattgagaatttttagtacttatcttctcttttcccgtagtgttttcttttctcaccaaccctcatgacttttcgatcgaagtaaaattcgtcgggcgactttagattctctcccggtaatgtttgatgtttccatcacgtgtaaacctgacactgatatatctacaaaatcttgaattcagttcctcaaatccaatattctttgcatcttagaatttttattgctcccccatgtgtcatcacatcgagattctagggcatacatctcacctgg

SEQ ID NO: 10170 - DNA, 395 bp, Oryza sativa
tctcgtccttgccttaccaggaacccggtttgttttatttcgtcccggcgttctcaactattggcatgcgaggtttccctgaaccgactagttacttaaccagggtgtcccattccaacttgtggttgcactttgattatgctcgatgagtttcccacaggaatcggtccttatatgcgaatacgggacaacgccacataggcacggttcccgcatcgcgagttttcgcaattcattttattttcaaacacaccgacacctcatgtcgggttttcgaggcttcataaacccatttcccaagttttcaacaatcaacggtgtatgtgggatatttggtatgcgtgcttacagagcacggatactgaagtaccacaatggtggagcgacaaggaatc

SEQ ID NO: 10171 - DNA, 405 bp, Oryza sativa
  unsure (1)..(405): unsure at all n locations
agctntaagcctttcatgcaccattaagatatactgcacctcttttttctcatccttagttctagctcaaacatacttctctntcatgggacagaagcagatgggcatacaaataatctcacattctgctgcaatggcagttcgacacggcacagctaggcgcaggcaactgttgaaataacgaaatgtatctagactcaacaaggcaagaacgagaagacagcctagatggctacatacacatccagttccaagatctaggatgagatcatatcaacttatccctgctactgtaaaagcagagtcattctcctctccaccatcgtacctccccacttaataaataaataaattaaataaaacaccaaacccaaaaactagtgtttccacgcgaaaatcgatcca

SEQ ID NO: 10172 - DNA, 390 bp, Oryza sativa
tatctcctacgcttcaagaatggatcagtcagaactttttcatcggcttgccgtcgttgccgccgactggtgttcttgcttaaacggttggttggtcacatcaccattgttgggcgtctacgtcttcaccgaccggccgcctcgtctgccgccgactggtgcccttgcctatacggttggttggtcacaccaccgttgttgggcgtctacatcttcaccgaccggccgcctcgttcgccgccgactggtgtttccgcctgcacggttggttggtcacaccaccgttgttgggcgtctacgtcttcaccgaccggcttgccttcgtcgccaccgactggtgtctccgcctgcacggctggcctattatgccgccgctgtctggcatctacg

SEQ ID NO: 10173 - DNA, 404 bp, Oryza sativa
tggaaagtagaagtcacagctgtgtctacagtttatgttggaagtacaataatcatgcttgctccttttggtgtctaaggtactaccgcgttcaactttacaaggcaagatttaacttagcatggtcttctagattggactttgaccataaatttcatttgaatatgttcttactaactagaaaatcacgatcgtgtgaaagcaaaatacatttgagtagctgcatcaatttggatcactaaacctaattgttgatcataacttgcaaagtttgaaagtagaaataactgctcgccttataaatttgaatggaatagttaattagcatgtgtaaatctttcaatttcagtagtgcacagaactgcatacacttgtcaattcttgtatcaggaaaaaaattataa

SEQ ID NO: 10174 - DNA, 397 bp, Oryza sativa
agcttggcccactcagctgcatggtctgccacgctctgctacatcaaagcagcaaatgcaccccgtgctcccacaagttctgcaagtgcgtagtatcatatttcaatactagctttctactagtaattccttccgtccgtcaatagtatataccttctgaacactggatttccttgtcagggcatgcatattgcgctttaaggactgtccattgtgtggtgctgacatccaagggatcgagcccgatgatgagcttcaaggccttgtcgaccgcttcattgatggccatgcccgaatcaagagatcacatgctgcaagcgatggggaagccgcaagtgacaacaagaccaaggtcatttacgaggatgtctccatggagagaggggcttttctggtc

SEQ ID NO: 10175 - DNA, 386 bp, Oryza sativa
taggcaattgcgacaacgtaacttacaaggtaagtttgtaatcacttgtagtataactgcgaagaactgaaactttaatcagattcatcccctgaatccgatgaatcctgcaacctgtatttcccacccaatctcccggcctgcttccttcacacgagatgggccttaccgtgcggagagaatgatgatgggccgtggcccactatgcccatcagaaggcgcccccctgctcctaaaaccctaataatcgagagcagagcaatccccctcgcctccaacccaaacccaaacaagagagagagagagagagacggtggttggccggtggcgaggcgatgagggcgatcaccggcgccgtcctctcctccaagccctgctcgctcgcc

SEQ ID NO: 10176 - DNA, 177 bp, Oryza sativa
tgctcgctggcttataactgattatactggtgacagcttagtattaaatttcggactatttctgattaacttagtatatcacgcgaacatcctagggtgtatgtacccatttactgtctatactagctcacacaacttgcttattctgcttctgataagatataaatatgattctgt

SEQ ID NO: 10177 - DNA, 406 bp, Oryza sativa
agcttgcagctcctactcgatcaagatcagtatcttatctgtcgtgtcctcgacgaccagttgcgcagtctccttgtagagacagggaacaacggttttggtggcactgaggccggagtaaggagcaagcaaacaagagtgccctcaaccggatcgggtcccggctttccctacaagaaactggcccagagcagcgctgctccctatagcagaattgccagatggctggactacccgggaggggagccggaggcgggacgattgaattgtcacccatcgagtattcgagggcgggatatgtagaggatacccagcttgcagctcctactcgatcaggatcagtactttagccgtcgtgtccttgacgaccagttgcgcagtctccttgcagagacggtgaacaaca

SEQ ID NO: 10178 - DNA, 389 bp, Oryza sativa
tcttcatccacaccagccgcgacagggagaggagtaaagttgctccctgatgtctgcactgggaggaaagaatgcggcgccggggaagtcaatggcggccgcggatgcgtctacaaatggctgctccggcagatccgatgtgaagcggcggcggtgtctacagcgagagccgaaaggaggcggcgacgcgggcggatgcggtggaaggcaccggcgcaagaggatgcggtgggaggcgccgtctccggtggatgcggtgggaggcgccggctcgcgacgggacaaggagagcggcgcgggaggcaccgacgcgcgacggggagagacggcgcctgcgcctctcgggtggagcgtggtggatttccaccggtctgggtggtggatcaata

SEQ ID NO: 10179 - DNA, 405 bp, Oryza sativa
agcttctccattgactccacggtgtgcgctatttttttttggggaagcgacccgcccgacgtctaccaggatgaggaggaggagccttccgcgctgggagtgtgtccacgcgtagcacgagcgcttgtatgacaaagtaacggccgcggaggaggagcgcggccgccgtcttcgactctgtgggcgtggggagattcccgcgccttcgacgaggtagcacgaccgccgcttggtgccgatgacggtggcggcgtgagcgtcccgttcttatgaagatgcggcagcggcggcggcggctacagtggcgtctgatgaggggtacagtcgacggcggtggcggaagatatccgcgcctccgacgacatctgctcgccctcaacccttccaaaaaccagcgaacgctgc

SEQ ID NO: 10180 - DNA, 324 bp, Oryza sativa
agcttgacctactgcagcgtcggggccctgtgtgattctgttatctccaatacacaagagaatactacgcggagagatacagagaaagaataccttctaatagattgcaattgatgaacgactcctgcaaatatattttgccgaaatccagaacttactgttagaccccaactaatcaacatccgatttctcacacagcccatagctgttggaaaagaagataggcatgggatagctgctgaagttcaaggccacccgcttgaagccattaagaagctgacttgatcttgttgctgtatggatcagagctcgccaacgcccttt

SEQ ID NO: 10181 - DNA, 386 bp, Oryza sativa
tccactgcagatgttgttgagcacgagattacgaacctttttgctacagcactccggatccagagattcacccggcgggcatcgttcttgctctcctcgtcctcctcgtcgtcgtcctcgtcgctgtcaaaccagaacttgagctcgcacatgtcgagaggcgcgcacccgcggaggagcaggaggtggtcgacgaacaccctgatctcccgcacgcgcgccgtgtcttcctcgtcgctcccaatcctcagccccgtggcggacttccagaggtcgcgccagcggtgggcgagcacgcacgtctgcacagcgtcccgcgccggcaggaacgacagcatgtggtggagcacctcgtccgggagcgcgccgacgcggtcttcgcctcc

SEQ ID NO: 10182 - DNA, 407 bp, Oryza sativa
agcttggcaaagagtttatcttgacatctctcatgttttaagcaatctctttatggctcattttcgtaattatgaagatctgtcctgggtttggcaaaagcaaccgtggtcttttggcagagatgtttttctgcttgaatgggtttctttggatgagaaaattaaacctatgtcagcttacactttcaagcatcttatggttaatgtgcgtatctatggcattcccccaagtcttagaaatgttaagaatgtcaagttggctgctgaaaacataggtcaaatctcaaaagctgaaccaatagatccagatagtttgctgaggaatcagaaatttgtttgtgttaaaatcaggattgatgtggaaaaaccagttcctgatcatgttatcttggagctttctgataaat

SEQ ID NO: 10183 - DNA, 397 bp, Oryza sativa
ttaatagttattggacattttatatctgattttatagttgatgggcaacgtatgatactcgaccaacagttaatggatccaaagtgaacgtttcccttataagagggcctaataaggtctatacatgcgcttcagctttttatgcggccgaagggctttgggcctagtgggaggatttttctttgccaactctgtgacagtgagtatgattttcatacttaaaccgcaatactagatacaacgggttcctcaactattaaaaccggtgcaatattggtcccaggacagtttggatgacggtttttagctgtcgtggcacccacgtggctaatttgaattggtcttcatctaacgtggcattgacgtggtacatgaagcaaaatttaatagtttaata

SEQ ID NO: 10184 - DNA, 396 bp, Oryza sativa
agcttgtatttggtttccagctgcttcatgttgactttatcagcactatcttctgactggatcataacctccttggctttggtagtttgattattatagccagcatcacttaaggctttggttacagaatcaacaacatcaaatcctaatgaatttgccataaatacagcattctgcagtacaaaaggtttgatcaatgtaaaaggctccactgatacggaaatattttaaattggtccaaatatgtgacaagaatgaggaaaatataattttacatatacatatatagatatatatggtagtaatgtaaaatatattattactaggcaccacagacttccgaaaacaggctgtgttaataactcatgtttgtcttacaaatattgaaagctaact

SEQ ID NO: 10185 - DNA, 402 bp, Oryza sativa
  unsure (1)..(402): unsure at all n locations
tgctagtgtcctagctaacgctagactgccagaacataattatcgatttaacganagcactccctcttccatggattgactacttgcttctgtggcaactccttcaattgacatgtatagtgctgaaatttgatttttactgggtctacttgattccctatttcccttatggaaggggcccttttttgataatatgttttccagtgccatctctacttctctcattgaaggccgttctcctcctttcaatttagtacacagtgcagctacttcatggacttctccatcttcctcctccttgacttgaggatctattatgttaataagggttccttctgagagcagcaaaataaaatgtgaaacaaggccatcaccatcgaacgtgtcaacaacaggtttctt

SEQ ID NO: 10186 - DNA, 401 bp, Oryza sativa
agcttgcctcttccttgcgcgtttttcgttgtcagaccaagtaggcggcgttaagtcctgctctcaaccagtgctctagcgttgtgagctctctttgctcctgtgcggagtctagccgctgtatgacgtcaagcgccatgtggaattggattttcgcctcagtgcagattcccctggaccactctcgcagactttttccggtaatttgcagcttatgatttaaccgatgcatgggttctgtgtgagtcgtctgcttgctccaagccgccgcaacaacgtccttgaatcctggtatccttgtctaaaaattctcgaacttgaagggacgtggtttccgtggccctgaagtattggaaaggagtagcggacagtggtcagaagggcctgatggtagagcattt

SEQ ID NO: 10187 - DNA, 401 bp, Oryza sativa
  unsure (1)..(401): unsure at all n locations
tcccatctaacgtcctatgttccaaagaaaattggttgtgtaaatgttctagctgaccaatgagtgaaacatcaaattatatatggtgaaacaaaaaatcagcaactgaaacatttaaaaattntatgaaacatgataaagatacacgttgaaacatatcgctatcacatatgaaacaactagtgttaacggattaaaacatatgtttttctttcatcaaaatataatcatgtgatatcttgttgtaaagatttaattacaacgaatacaccgatgtgttcggatcatagattggataattagtttatgagaaaagttgttttgaagcccgctaaaatgcatgcatgcatgaggtggagagaggagagagagtagtgagatgtacttccacgaaatttgtg

SEQ ID NO: 10188 - DNA, 421 bp, Oryza sativa
  unsure (1)..(421): unsure at all n locations
gacctgctagcctgcaagcttcaattgcgctgntgctgttatttttttttattcacaaancgcacactttncagggtacggatgaaatgattttctctttggcctacgtggagggatcttaatcgcatatattgaaaccgggctcacgcaccatctgctaaataaagcccccgcattagaaacagttgagcatgccatttcaagattactgctaccaattctgctctacaagcacatgtgatatatttatagagaaaaacatagcatcggtagggtattaataaactaatcagcatgacaacttggacatgaaggattattatatcacctctgagaaaaacttctgggcatggcttcgaatttggacagcaatctttgtgccaatgtgcttctataaacaacttggacaaatcagacatac

SEQ ID NO: 10189 - DNA, 403 bp, Oryza sativa
  unsure (1)..(403): unsure at all n locations
agcttganatctcgataaatatacataattgtgcacgcaccaatcagtgtctntttttaccctggttctagcttctggagagcgctcacgggtttggagggccgggaaactcttgccagtgtcatgttcaagccaaccagcactgatatgttgttccattatagtgatgcataggagtatttctcagggattaaaaaacctagataaaaatatcaaaaataatttatgcttgctaattaagaaaaaaagtaattttataatatttaagaaagtatagggagaaaccatatttttgttaagtgtaaaacttgttaccgagatatctcaagatatcaaaattntagtatctacaggtacttaatctctttaagaccataaactttctcttaaaaatgttgcatca

SEQ ID NO: 10190 - DNA, 399 bp, Oryza sativa
  unsure (1)..(399): unsure at all n locations
ttaanaaaaaagaaagtcaggaacataacttaagactgtgttcgggaggaactcacctctcgcgcacgtaaaacggagcgaagcattttcttatgattaattaagtatttattaattgtttttgaaaaatgattttttaaaagcaacttttgtgtagaaatctttaaaaaaacacatcgtttaaccgtttgaaaagcgtgcatgcagaacacaagggagatgtgttggaaaaagtgggaaaagaacacagcctagtactaacttaatagcctagtactaacttagggtgtgtttagttcacgctaaaattggaagcttgattgaaattagaacgatgtgacagaaaagttggaagtttatgtgtgtaggaaagttttgatgtgatgtaaaagttggaag

SEQ ID NO: 10191 - DNA, 403 bp, Oryza sativa
agcttcactctaaattctggagtggtatactgatgaaacccaaaaaactatagatttcttacatgaatgtgcataagtgtagtaagtggtggtacataagtgtataaagccaagatggtttatagtagttctagtacataagtgcataaatcaataccaccaccagtgttaatgcaatagtatcttttgacatcacagttcagagataacggagcaaaattaggcttgagtctccctcagatctgatctgattatatatgtaattaaggagctaattaaaataaaaatgcttactctttcaagagtttgttttgtgagacatctattaaactttcttaagatacaacctatataatattgagacattcaagtttataattctcagccgagttattgagaatta

SEQ ID NO: 10192 - DNA, 397 bp, Oryza sativa
tatgtgactctttcacaatggcactacttaagtgccatatgggtagtaaggccctaaaggagtacctaggctatcaaagggacaacttcaaccatgagggtcttgggtatgttcctccaccaaaaggaaaggtggacaagagtgtgatgatcaagaggccccaaggtcttagcaattttattaaggccaaaagtatccttcctaatgattatgcttcacattgttcttttgatgcatcttatgttcttaggaagaatgctagtggtcgtgttgttgctaagtatgtaggcccgaggggcaaaaatgtttccattaagagagttctttgggtgcctaaggcacttgtcactaacatgagaggacccaagcaagtgtgggtacctaaaactagaaattg

SEQ ID NO: 10193 - DNA, 401 bp, Oryza sativa
agcttaggatttctgcacgaattctagatttgcacattcgatttactcagctcaagtggatgtgctcagcatgaatatcatcattctaatttatgtaaccctaaccaatgacttttatgcagaatttctcttctcatttttgcgatacttgctaactgctttgttgattgaagccaacgtccatattgtcatttgctgtatgactattatttattccatgattttgtttagtgaaaatagctaatagttatgtttagctttccttttatcactgctcgattaggatttgggactcattagaagcatagttacaaaaaccagatcaaagcacctagaccgggccaggggaaagggagatagcaggtggactcttaagcaattgcagtgagatgaaatcttga

SEQ ID NO: 10194 - DNA, 384 bp, Oryza sativa
agcttgccgtgcacactctgtgcacacaatttatgtattgtctcagacatatctatagaaaattggacacatacttgcgatggtattacaccgttatgtgaaagattatctgcaaactcattatatcatacctgaaacggataagacaaaattgtgacagattcttaccctgaaaactatcagaatttgtactttcttgatacggctccaacataatgaatatgaatatgaggctctatagatatgtgtgatactattatgagtacatgtccaattttttcgagaatatttcgagacatttgctacctggtgtgcacgggaagctagcgtgcatatggcatgtatccatttgctataacttagattcacgaggaggctattagc

SEQ ID NO: 10195 - DNA, 399 bp, Oryza sativa
tgcattaaccacctaagttcccctggcttgctgagtacatttgtactcaccctcgctctatataaacatagttctgccagctctgaagatgaagctcaagtgaagtaaagattaaggtttctgcctagttccctgctgctgcctgtggtgttgggtgttaaaccgctggttccgctgctgccgctgctggtggagtttgcctcgtccgtgtcgtcggttgcattctcggactgtctgaactgctacctaagctaaggtaaataagtcctctatttattttaaggattgcaatgattcatatttgtcaccgtgggtaccagcgctatatcctgcgactggtactgagatcgcggtttcctaggaagcggctcgcgctgtttttcctatgacacactccta

SEQ ID NO: 10196 - DNA, 409 bp, Oryza sativa
  unsure (1)..(409): unsure at all n locations
agcttggcgaaaatttaaactctgtgaaatgtatatgttgttaattgtctaaaagaataggtttatgctcaaaatttaactatttaanttgctggcttgtcgggtgttttgggttatgcaacaggggggtaattcttaatttggacctggcaaagggcgccaaactaacaataatacaagatcacaattaagacggagaaaaagtgctttaagtaactttacctaaaaaaacgttttaaacccaataaagcgtgggaagaaggtggagttgcgagttcatgattctaccttaaatcttaacacccacaaaatagggctttatgtgtatctctgttctctagttagtttactagacaaaagttatacttttctctactgctgtaaagagtagagtcgtcattctcttctc

SEQ ID NO: 10197 - DNA, 405 bp, Oryza sativa
ttaagcatgacttacatttttttgcaaagttacactaattttttttattaaacacatgatcaaaagacatgtcttaagtcaataacgtcgtccattttaaaatggagagagtagtaagttatataatccctccaaataaaacggtatctaatcagagttacataaacacatctcctattaggaagttgtaaaacagtgatacagcaaggttgggcaagccacagtagcctgccgaaatcttcaatcttcgaactgctctgatacagagttcttaaatacactatacatgatattttccagatgaacacaaggtattattgatggcaatcaacaagcaccgagcatataattgatatgtatcagattcagatcaatattaccagccaccaaacggcagatccactt

SEQ ID NO: 10198 - DNA, 406 bp, Oryza sativa
agcttaggactaattaaacccacgtggggctttgtttcacctataataacataaccaaatgggctatccttcagttcttcgcgcatgggaaatgcttcttctttcaagttaagactttttacctttgcccatattaatatagatgttaatgaatctaggcgccgtcccccccccccctccacacacacacacacacatatatatatatatatatgaatgtgagcaatgctagaaagtctaatattatgaaacggaggaagtattaattttccctacaggtacatctatcaacatcttaagattattgaaattctgtgggtgaaaatgaaatacaaacgtgtgccccaatcttggagtgccttacaacttctagctagcgcatggatctttattctttacttgccct

SEQ ID NO: 10199 - DNA, 399 bp, Oryza sativa
tactggccgtcttagttatatcatgattattcggagacttctcccggtctatcgagcgcccgatcatgagggggtaaaatcatgcgcgacgtcagcgctcgattcatgtgcaaaactactttaaactgatttttctcttaaattacttatacaaatcatgatccgattgcaccattaaattcattgtaattaaatcttcaaaacaagaccatacatggatatattccgatgaaaaaaaatttagcttattatataattatttttaaatgttgcacgatgttccaccaggtatatcgaaattgtttcactaaggtggtgtttggttggagggactaaagtggggctaaactttaatccctctcacagaaacataagtccctaccatatggacttgtactt

SEQ ID NO: 10200 - DNA, 388 bp, Oryza sativa
  unsure (1)..(388): unsure at all n locations
agcttgtaaaagacttggagattcaaagggtctttttttgatcggngtcaggtgagccctgttttcttggcagtgccactctccattttctgtttctctaacacagtaaaatagctcgatcttcttatattgntattcatccagggttgtaaatacatagtatttctcttgtttgaatatcacctcaacaggtgcatcttgagctactctactgcccatttgacatgaaggaggagactccaaatccttttaaacagcagntttctatgacatccttggagaggacaatgacgagcatgggaaatgggtcagggagcaatggttttaacaggttgtcttcctgaagaaaaaagaaatcattatgcggngagttttgtcagtaaccgtg

SEQ ID NO: 10201 - DNA, 401 bp, Oryza sativa
ttggattgagtgggttgtaactttatgaaaaagctttgtttttattgggttgtaactttatgaaaagtataaatttatcttcttggtatttatggcagaatcagatcatattgttacaatcacaaatttaaaatatcaccaatttccaccttttggttttgatcgtgttgtgaacatgtagtttacagtcatgcacacgtctcctggagcatacaaatgtttgcattgtcactatatggagatgtagcattaagaaattccaacaattcatgtacaaattctgacgggcgaacacttcagacttcggagcgagacaaaagaaagactattaatcagagtttgaaggaatctcttatgagaaccccctaatcctttttccatagtagttattgcaacggata

SEQ ID NO: 10202 - DNA, 363 bp, Oryza sativa
agcttgtttgatgggcaaacccatcaaatatatttttgcaagcagtgactatgctggcccagagtcttatgtcaccaatttgatctttgtattggtgatagagtactgtagcaattaactgagctcacccacacaattgtttgtttccttgcatgcatgggtttctgacaatgcagtaactgctaaaaggcacatttgtatctgccacagaaaaagtcagcaaactgcaaagtgtatctgatgatcaaaaagataatagtttttttcccatttttaaatgtagcctttttttacccccatttttaaatatcctaaattcctacctttaaaaaatggattttagaaagaatgagtatttttaat

SEQ ID NO: 10203 - DNA, 397 bp, Oryza sativa
  unsure (1)..(397): unsure at all n locations
tgactaccgagctntaattttaagtaaaataatatatacttctgaaccaatgttcccttgcgggtctgcatgaatgagttcaagaactgatcccgggcttgctgcaacattgcttcaaaatccttcttctgctcaggtgtgaatttctccggatcgatgggcacgacgtttccttcattgacgtcagtcaaccccaacttttgaatcttttatttaacagtgcttgggctatccgaggatggcgacaacggtggcttctcggccatgaggaagaattgcttgttgacttctaatcagtcccaccagtgtacgatcgagatgtcgactagagggggggtgaataggcgatttaaaactaaataacacctaatccaatctaacctatattgctaggctt

SEQ ID NO: 10204 - DNA, 395 bp, Oryza sativa
ttcctttctttttataaataacagagaagcactttcatggtatatggcctttcacaaatttaaaagatttatgtatatataaacgcattgacaatctattgagtcttacgattacaaactgtcattctatatttatccttcttatcgcgatacatttaatttaattaagagtgtattgcaggtaggatcatactttattaccccagtttcggtaccatcgaatgttttcagagtgggctagattttggtaccaaactgtgcacattgcacaagtggtcacaagccactgaccatatcaagggctcttcccttttgagagcaagctatcaccccatcaccaccggtctaccgccccctgctgtggtgctggcggggagcttcgaatctataggtca

SEQ ID NO: 10205 - DNA, 403 bp, Oryza sativa
agcttgcctccatctcctcccactttggtatctctacgctatagccgcctgaccccaagtggtgatggtacttcttcttggcggcattttctttgtttctttccatcatcgcctgcccttgttgacctgccttatatgcaacgaactcgtcccagtgatcccttagctttgggaatgtgtcgaagttccgtgtctgccccttcaagatatatttctggtatagatctcccttgaagctctgaaactgttctgccattttctttagagtccaccttttcactttgtcctctgtacccgcgggaaaggtgaatgtctcgagcattgctgtccacagcatctctttcttccaatctggggcaaaactctcatgatctccacatgcccttgttctgcgccagtacac

SEQ ID NO: 10206 - DNA, 396 bp, Oryza sativa
tgcctttcttgattttggtatgatgagtgagaccccttagttgctagagtagccatcataggccatgttgttcacatggtcaatagggactatgaagcgatggctcgtgattattatgctctcgattttttggaacctgatgtagatgtctccccaattgtccctgctcttaagagtttctttgatgatgctctgaactcaacagtaagtgagctaaacttcaaaaccatagttgatggcttaggcgctgttctctaccagtacccatttaatggtatgttttcctgttgtcagatgctagttctcacttgtatgctaattctgctcatgtaatgatacaacttgtctatttattcttaactagtaccggcatactacgcattgatactgcgatcg

SEQ ID NO: 10207 - DNA, 399 bp, Oryza sativa
agcttaataaggcatacaaatgcttatttatttatgcacagacactaccctcaagggctccagcatgccagaaaacatcttctgttaatcttgcaagctctattgcagtggcataatgtgcattcgcatcagcaggtgatccagccaacaagcaataatctccaattatcttttgcgcacgacccagccttctttttttagccttaatcacctagaaaatgtggaagcatattatctcatataatcaataaatgttgtactattatgtcatcaacatacactagtcaaaatactcggaacacctaaagtacgaacctcctctgagccaagactggattgtgaatccaaaggagtctttagaatagttcccgttgattctgcacgtaagacccatttctc

SEQ ID NO: 10208 - DNA, 395 bp, Oryza sativa
ttgagatctggatcaagaaaggacattggcccatgatctatttctcaaaaggacaaatccgctttcttaaaagtattatttcttaaatttctccacaagttcttcaacaacaaagacatttcatgggtcacgtatagaaaatacagacctaaaaacaaatgatagagcctcttctttataagagagaagagggggaactttttggtggatattttagaacagtcgctatggttcaaggaaatagctaatcctcaagtgggtaatggacaatcaattctatgcttggatgatacataagccaaaaaaatgaattggattgcatatgtgcacaatggtagccatatatagtattatcagggctcctggacccactaaattgatactttgctgaaaaa

SEQ ID NO: 10209 - DNA, 237 bp, Oryza sativa
ggacttaacacgagctcactgaaacatatatttttttttttgggaatgacatgacttggtttatccattataccgggaccagttacacggtcctgttaaaatatcatggaactacagcaggccttcctttgaatgtatcttatgacctaactcctaacaaacatcccatcaaatatcggaaaattctttttgcacattacatatcttacttaaaaatttgtttacattgtagactcc

SEQ ID NO: 10210 - DNA, 398 bp, Oryza sativa
tacaaatcattaagttaatatgagaaaactgcgtttatttatttttatactagttgtgagcaaaataaaattgtattagaaatatagttgtaatacaaatataattctaccaacttgtttggtagcacgtttcagcactgtatagcaacctataactagttatttcactgcaactagttatgggctctgatatttgaagcaacatttttttcttataactagaaaaaaatatccgtgcattgcaatgggtgaagattattttagttttattattattgttatacggtttagctaaggtgaaaatcattgtgagaattcgcttggattttttttttgaaaaccacgagttgtagtaaggagttcgactcttatcgtaagttagcatgtgagttttttta

SEQ ID NO: 10211 - DNA, 321 bp, Oryza sativa
agctttcgggaagctacgcgaggttttgatgctgctctgcttctcgaagcttccggaaggcgaagcgagacttctctgtggtgctgctaacaatgaacatggggctatttgaaattaaaaacggcgtgtgcattggacagaagagtcactggcagtggggcccacaaatggggtggtgactggtgagtggaaaaaaccggacgaaaataccggaccgggccaccggttgaaccgaataaaccggactgggcccgtgaaagcgtgtgattataatgcctgttattttatctcccttgacctgatattaaatttgtaaatttt

SEQ ID NO: 10212 - DNA, 403 bp, Oryza sativa
taatctaaacatttaaacctccattccatacggatattctataaaatagattgaatggaactaacttaaggtcgtagatattatataatattatcctataaacttgttaagaagtttgagttaagacaaactcaaaaataatagggagcaggtttttcgttcatgatctcataaatatttcctttttttttaccaaataaccattatatacctgcaggaatttcccatttgacgccctgatgcggatcctgctattgtcacggtcgctgcgcacgatcacgaacgtctctgacggccccggagtggccgccgtcgcgacgaccacgccattgccgtcgacgcccacgaagtgcacggcgctgtcgtcgatcgccttgagggtgaacgtgttctcgtcgaccct

SEQ ID NO: 10213 - DNA, 380 bp, Oryza sativa
  unsure (1)..(380): unsure at all n locations
agctttaccactcgntttggagcggtaactgatttgtactacgcccggatctgattgcagtgtattcgattgcaggccacccaaaacaaacaaacaaatgtaatggggttcaattaaggaaaaagtacaccgaaagtccctcaacttatcatcgagttacaaaatcatcccccaaccgcaaaaaccagatataggacatccatccacttagaatcgttcactttaggtccttcggtggttttgaccccggttttgtctgacgtggtggctatcagcgacccacgtgggccccacatgtcaggatgtcacttcatcacctcttttatttcccttcctctcccttcatcctctntctctcaatgttctcactgggcaagcgg

SEQ ID NO: 10214 - DNA, 391 bp, Oryza sativa
tgacaggaacaccaagaaattataaactatttatacgctctgcacaacactagtgagactagtaacaacaatgttacgaccaacctagaaagtgcagaaacctgaccaaattcagccaaagtagatagcaaacagtctgtacctatagccctacagaacaatttccctgtaacactacaacacagcagcccactgatttctgtaataataaattgtctctgttgtatttcatcaagaaagtatccaatagaaatccaatccatgcgttattctgtatcaatacacagactatgtacgatacgacatgagaaatcaccactttgctatatagccatattaccatgttttttttaaaaaaaaatgattcagcgtgtcatctttctctaactat

SEQ ID NO: 10215 - DNA, 420 bp, Oryza sativa
gatactctagagagacctgccgctgcctcctcgcacttcagttttcttattttctttgccaacatctcaacccggttggatttacgtcctccgattttttttaaaacacactcttaatatgaatctagacagacgttcttattcacattcatagctagagcttcattgcttcttaatgacggagagagtatattagtaccatcgattatgtacttacgcagatcaacaataaaaaacaaattgaacaatatgctataacatgtgtactacgtaaaaccattatctcttaaagaaagaacaagtgtactacgtatatccttattgaagtaaactttacacagccttgactaatactttcaaaggtcttcttatgagaaacatgcatatacgactttcctattataaaacctatatctttcg

SEQ ID NO: 10216 - DNA, 391 bp, Oryza sativa
  unsure (1)..(391): unsure at all n locations
tagagcatgcccagcagatcatctatctggtcttccattatgtgntnggggtatggaggcgagaaaataatactccagcagagtcttcatcagacacaccatttttagatgtcctccaaaccaagcactccacaagtcaattttagcggttttctctcatcacgctatcctccaactactcagctgtgtgggtctacggtaaagaggaggtgtataccggaactcgcggtgaagatcgcgggagtaaaggcgataggcgaaatatttggcagggtcgcagggagattgccaaagtgccgcaccggcctcaacccacaccacttgtggcttctccgctctcactgctggatttctttaggcaaatgatgaggcccgtaacaactagattcat

SEQ ID NO: 10217 - DNA, 385 bp, Oryza sativa
  unsure (1)..(385): unsure at all n locations
agctngctgtttcctgacctcccagntacttcggttctgtaccggcactatcagctgctggtcttcatcatcctatggatgtcaagccagggtcttctgctggattacaggtttgcttctcatttcagcctagatatggttctctgcgttttgacctccttccaagcactgatttcttttttaattgcagcatgctgcattgctacctccagtacggccaaagcgctgtgctacgcattgtttcatcgctcagcagatcaggtacaaccagcaagtgacagcaaagatgcagaacttctggacaccggcgacggcagcagcggcagccgccgccgccagtagatcggcggcgccattctttggtccacgaccattcaacatgggt

SEQ ID NO: 10218 - DNA, 393 bp, Oryza sativa
tcccatatggattaagccactcgtgcattattttgttgaaccactctcactctgccactgtaagcactggtgcaccaccgcaaactcgcagcagtaaatatatgagtttactcacaagtcacaagctggatactatagttacgtgtgcctattatactgttaccaactgacaactggtactctaggggcaaaagggcagtaaccatgattaaaaaaattaaactagattagctctacagatactgaatttctctaatcgcactctgcttaaagtactataaatataaaaccaaacaagtggcatctattggcataacaggaagcatccaagaacccccaaaatgtggtacaagtctctagtcattgccagtaaattgaacgtatactggacgt

SEQ ID NO: 10219 - DNA, 427 bp, Oryza sativa
ggaccttaagcacctgagctgcagcttgccttatggtgaccggtggcttttctttattcgaggtggctctgataccactttgtcacgcccagaaacttatcccaaatttccagactattttgtgtattaaatccctgtccaggaccagccagggtacacaaaacgacaagtaatatacagttccaaacgtaaataaagcgtaaaatacttacagaagaggcacttattcctcacaccgaaacaaaagcagcagcagcggaaaaaggcgatcctagcggagcttcagctccactccacaggcaaaactcaactggggtctgagccttggtcctctaattccatcttcagctcataagcactatacttctgaaaagggggaataatagcaaggctgagtacaaccaccgttctcagcaagccacaccaa

SEQ ID NO: 10220 - DNA, 398 bp, Oryza sativa
tgatcgaacaaggaagcaaaacagagcaggctatagactgttgcttgcatgatctattgttggtacaagactccagcaccatacgttggtattacatgaccctattagcattccgactacctgcccatagttttcaagtttcctcctagtgaagaatgctaatccttgagtttacttacctttcgaatctctggcaggatcacttgatttagtgctgttccaacagcagctgatgcaaaagcagttgctgtaataaatctagggaggcttgggtcgatgaatgcagaagcagcatctccagaggcaagaagagcaagagcaccgaccaacaaatatggattaaagacgaatggtccctcgttctttgatggagctcttagcaatcttgagacttgtct

SEQ ID NO: 10221 - DNA, 415 bp, Oryza sativa
  unsure (1)..(415): unsure at all n locations
tgcagcatgaagcttgcgtctgtcgcaccaaanccgttctttattcatgatctgattaacctgcatcacacgcgtatcctaattttatcaagaatcctcgcagactgaaaaaaaggaaaaaaatttgaccagaaaagaagaataacaggaagttgtacacgcccaaagatctgtgacgttacagagaaataaccgtgataatctcaaatccaacggcaaaatcttggatgggggaaggaaaagcgaagtgcggtgcaacgtggaaagcaacacgtaacctctccacccccgtgcttaacacgggcgcccatccctcccgtcggatccgcctccctcccgtgtttgcgccatgggcgagaccccgcgtaccccggcgccggataggccgccgcctcccgtgccggtgcgcgttccc

SEQ ID NO: 10222 - DNA, 396 bp, Oryza sativa
tcatgacaaggaatacatcagttccatgacattagactcatgtgcgtggatgtagcaaaaaccgatgatttacatgacaaataaagatgtactatggtaaacctttttgtgaagtttgttttcctagagatgaataaataggaattgtttctatgattgatgattttttggaaaattaacttagaaatgtaattcatgttttattccctttgtactaagaacttatccataattatcttttacctcccgatttcttggatgtaattattttctaatacatatctcttctttctataaagctaagacccaaagctgcctcctcaattcgccacatcatcaacattatattagttggtcgatcaaatatgtacatcagatatacgcagatatacgcca

SEQ ID NO: 10223 - DNA, 404 bp, Oryza sativa
  unsure (1)..(404): unsure at all n locations
agcttgtagaaggtgagcaattcgttttctttctcctatgagagagagccaggccattttctgtcaggaggtgttggataaagtttttccgctttctcgcactagctttgatttggaagaaccgagtgttagcatcacctgcctttatccaagtctgcctggatctttgacgtagtcagaccctatctaaagccgcaagacctagaagtttttgttttagaaatcgtctgaacgtgagttcttcaggggatagattgcgctcctcctgtgctaggtcaagcctaaaaatcagctcacttgcaatctctgttctcaattttgttccgcgaaccctgctcttgttccatattcgcaaggctnttgctgtccttgaaagttttgtgtggaggcgcttgattgcatct

SEQ ID NO: 10224 - DNA, 382 bp, Oryza sativa
gcctgctcccttgcgtgtagctatggagcaggtagaggcaggcaagcggtagtgggtggcgcacacagcgcagggcagggcagaagctcctaattctcggccgaagctcctaactcacccttgcccgtgaggggctgttggcggtatgtcatgagaccctccgacctgacctgccgaaaccatgtaaccagcgaggattcaagcccaagacgtcaagttcatctgtgcgaagcccccatggcgaagactatgaagcaaagatggcgaaggccgaagagtcgcgctggtgtcccacaagaccaaaggcatcttgggtgaaaagtaaatggcgaagggtgtatgccgaacgaagaagacttcgccataacaagtccaacttcat

SEQ ID NO: 10225 - DNA, 232 bp, Oryza sativa
agcttataaaactaagaactaaccaaacccctcgtgaggtcatacacaagcggaaacccaccctagtttatccccgtgtcgccgaagcgagcctcccacacgggccatcacgagcccgcggcttgtgactccccccgacccaacccgttccattccgttccgttccaacggaacggattccattcccgcgccccgctacataaaccccccttcgcctcggcgtcggcggctt

SEQ ID NO: 10226 - DNA, 407 bp, Oryza sativa
  unsure (1)..(407): unsure at all n locations
tatttacctgcaaagacccattagttgtagtaaatatcctataatatcacgtcaaggcggttcagccatgaccaagccagactactcttcgtaacactatactcatgactctaattcacatcaaggcaacatgagacaagctacggtttgtcacaataaggtactaggttttccaatgcatcatgtagatcagacataacagaagcccattacatgtgcagtgcctatgtaggtggtgcacaagggagtaggcaaaggctcccattaggcatgctacaaaatgggtgataggtgctccattttttctttgtctattgttctgcaatttttttatgcacttgngcattgctttattatttaattcaatccaaaactacgcatcatcaagtatgcaactcaactataaa

SEQ ID NO: 10227 - DNA, 407 bp, Oryza sativa
agcttcgcgtagtcgagcggctgttctgttctttccatggcgaagctccagccgagcacgtaatggcgcgtgtggaacggccccgtcgacgacgagagcccgacgtacgccgtgccgttcaccaccggcgagaggtcgacggcgacggagatgaggggcctcctcggcttggccacctcgacgggcgccagcgtcacgttcaccaccgcggcgcggccgtcgtagtccacccagacctgcatggcggcgccgctgaagagcgtcaggttcttgaacgcgccgccggtggcgtcgtcgtattagccggcgggctcggcggcgacggacaccaggccgttcacgtcgacgccgacgtggttgctgttgatgtcccggaactccgggttgaggatggtgtcgagctcgac

SEQ ID NO: 10228 - DNA, 399 bp, Oryza sativa
ttccaaaacacctccacaaagtaacagacggcatttttattctaactaacacaccccagttctgatatttcacagtccagcacaacattccttcagtcttcttgtcagcaactccagttcatcagtctccacacctttgaaaagtggtgtttacatccaaatttgacacctatgaacgaaataggggaaaattgtcaaagtttggaaagtaccgggtttccttcacagggccagtcagactgcaggtatgtgggcggttagactgtcagggtccgagtccgagttattttcgtcgggtctcgggtttccttgctcggaaaggctatatttcgtgtttcctttggtttctatcctgagttggatgtggagaaaggcctgtatagggcaaaaccaacccct

SEQ ID NO: 10229 - DNA, 400 bp, Oryza sativa
  unsure (1)..(400): unsure at all n locations
agcttcttctatgaatgatagcattttgctgtcttatcacaacatcacagaaccaatcaaggatgcagtcactagaacaatgccagctatatctctccagaatcaaaatgagcagccatgtttgcggttttcagctcgctacttatcatggtgtaatcgaaagtttgcagcaatcatgtaattcataaatataatcatgtctgtaaacagtgagcttgctatgtttagagatgattcatgtcgaggatacaatgtaccgatgttaagcaccgtccctttttgtttaaggcagtgcctcgtattcatgtaatgagggagaaatgtgtaatacagacaagtnccatgaggattcatttgaaagatgcggatatgtgatcatgtgtataattgtttacttgac

SEQ ID NO: 10230 - DNA, 401 bp, Oryza sativa
  unsure (1)..(401): unsure at all n locations
agcttcagctgcctctatctccgtttctgtttattaagctcagngactgatttgcttcaaacaagttcactttccacaatatttcaagtcacaaaagataaatgaggacaaatttaggtcactcaccaaaggtaccaagatagatgtctttggtgtctctactttctccaatcctaccaatccgtgcttgccatctaccatcctttcgcctgtttagtccaagggattaagttgcaaaattgaaatagaatattcagaatactttgtttaacatgattcacaaatcgttttctttcaactggagcaaaagggataagtaaataatgatttaattcatttgaccagataattatgggcttattctagcaatgcagagaatagcaccttgttacacccctata

SEQ ID NO: 10231 - DNA, 400 bp, Oryza sativa
agcttacatgccacagagattacttcctgcttctagaatactggctccatatccgtcacatagtcagataaatcatccagactgatgttattggtccgcttgtagccgaaatatatggcctggtatcagtactttccgttcgtcacaatgcggcagtttaacttatcgattgtataatattcctgaatatagcacgacgcgttgtacatcattgcccattgcatatattgctatcgacatcccctcggctttagtactgcacagagatttccttaggtcatatacatgctcatgataatgactcgcataccatgcgacatgtcatctttatacctccaacgtgcgtgcacggaaccagggctattttatatgttctacctaacttaagagctatactagt

SEQ ID NO: 10232 - DNA, 340 bp, Oryza sativa
actatagaaacctcagctttcgtcgcaagcaccatcatatgagccctaggtgttttattttttcaaacccgacaacgtcgttccgcatcgatgtcgaatctactaccattactgaacgggatagatggcgaggaggcagacaatgtagcggctgtgagctgaagcatgcagacgaaggtgtactcgttcttaacattgcgcagcgcgtcgacatggacgagacacacgacttgcttcgcgcctaagcgcacgcggtcactaccacggatgatttgccagacatgctaacctgattgcgaatcgccgatgcgcgtgtcttaatcaacgcattgccagccga

SEQ ID NO: 10233 - DNA, 404 bp, Oryza sativa
agcttccatcaaactgggataagttcttgtatttataaaactgtatgccatacccgccagaaaggcaaaaacattaacgataatgatgttattggtccgcatgatgccaaacaataaggccatatatcatcacatcccgagcatgatataaaggcggcgaccaaagcgatccggattattaattctgccaaaagtaaagacacttaatccaccaatgcccaccgatgagataactttcgagacacccgtggcattagtctgccaaagtgtcttcaacgatgccatattcatgctcattataaagacacccataccatgcaccaagtaatttatatacatcccaagtgcggcaaggaaatagtgatttttcatacgttctacttaacgaaagtgctttaataagt

SEQ ID NO: 10234 - DNA, 401 bp, Oryza sativa
ttcgccacagccacattcattctgggctttagggttgttatttttgaatatccgattaagtccttcacgaacgaaatcgacttccgcgccatcaataaacggcatcgcttgcagcgggacaaacagcttcgcgccgtcgtgttcaaacagcagatcgtctttgttcggctcgcttacactgtcgagcacatagccaaagcccgcgcagtccgtttgcttcacgcctaagcgcacgccgaccatacccggctgctttgccaccagctcacggatgtgtatcgccgctgcgggtgtcagcgttaagccttgccaggcgaaatcttgtgggttaaaggttcctgaatgcatgttcatcgatttacctcacttcatcgctttcagcgtataaccacatgttagtg

SEQ ID NO: 10235 - DNA, 403 bp, Oryza sativa
agcttctaaaattcatatttatttcttctcttttctccaaattgagccattcaagttgcaaaattcatctaaaattgagctctacatgttagtttactttttatgtactgttttcttggtgtttatttgagtttttcctcgttttgcgtaccagcatgtagaatccctcgtttcggaagtctgcggtcgcgaggaaaagagttcggaagattgtttgaagaagcaaggcaagtcacacattccccttgagcattttgaccctaccttacaaatgttttccgtttgcaaataaatatgcatcgttttgctaattacatgggaatagggttcacgtatatgcttgcttgtgccatattatttgatatctgtccttgtcacgaccgaaaataacacaacgggcgtt

SEQ ID NO: 10236 - DNA, 390 bp, Oryza sativa
tgatttgcttgcagattatggggttagtctcacaatttacgttgcagatttgaagccatatttgggcgcagaagatgaacttgagtcgaggacgattcaaatgcaagaaagggaggatgatgaggacatcaacaccaacggtacatccacgcttccacaagtacaacttcatggtcctattacccgcgatcatgcacgtcaactcaactatcaggaacaatggagattatcaaatggggagaggaatcgcacgggatggattcggactgcagcacagcacaaacttctgacggccgccacgacctcatgcgaactccgatttgggcgtgcaagtacttcatggaaagcttgtcaagtctactttcaaatggatccagcctcatttccata

SEQ ID NO: 10237 - DNA, 397 bp, Oryza sativa
  unsure (1)..(397): unsure at all n locations
agctntgtattccaacttctattagtgaacttatgcagcttattggtgcctatctgaatgtgaggctgtgagcccaagtctacaaacctttgttcattatgtcaccgaattaactttgttactagcaatccacaggctgccagcttcagtttcatcgatagggcagagttgtggaatctagatccattagcttctaagatcgcaatgctaacttgaccaatctaccatttcgtgtacgcattatttgcctcatgatagctaattgtaacataagatcccgcagtgcctcctaaacctaccatagcaagccaacaggaatgatatgcatagctagctctttattttttctgtaaggtataacttgggatcagtcatctttatcttttatggagaaaaa

SEQ ID NO: 10238 - DNA, 390 bp, Oryza sativa
tgagcaatgatggcttcaagctgtcacgatagttgttctcataaaaagaagcattcccctgggtctcagtcagatgattaacagattgtttttgtccaaacgatctgcttctggtaccactttcacttgcattttccattgcagaaactatagcattgctcctttttccggttgcatgcttttttgaagcacctagatctcctagaaagctattttgctggactccagtctctctaactagcttcattacacttttttcttttatttcacttctagagcttttgaactggcttgtcacatcaactttccctcctgaaatagcaaaaatcaagttatcactctttaatatgagatcaattatcgagggagcaaaacctgaactagacctga

SEQ ID NO: 10239 - DNA, 408 bp, Oryza sativa
  unsure (1)..(408): unsure at all n locations
agcttctcatgagaaatggtgagncnctcatgattagtctttagctcctcatacaagacctccaaagaagcatgatccttctttagatccttgaacttgacaatctccttctcactataagcatagagctcctcaaacatactcacaagctcatcataggaaacatcatcacaatcatcatcactcccaccatcactaagagatattaccttagaggagccctttgccatgagacaaagtggagcaaagagtgatggagcctccttgatggcaacaacggccatcttcttcttcttggagcttgcatcatcaccaccttcttcctcggacccggatgaggtggagctctcctcatttgagtctcattccccgatgaaggcctcaatcttcttgccttccttcttgagc

SEQ ID NO: 10240 - DNA, 375 bp, Oryza sativa
tcagggagctaggagacacccctctcgagctccctggtctctcttccatttcgggttcctaaccttatgaagaaactctccaaggacccgataaccaaatggaccaaggccatcggggattggttcacagggattttcaaaattccaatggctccttgtgaaacccttcgagtcctttaagcaccggtggttaacccgcttcagggcgcgcgccctttccgggaacccggggagttgccgccgtctaatggttggcccttgatcaaaaaggccgcagaggaaaaaacagccagaagcacgattgcctgcatgctcgaccggtgtgaaatattagtgcgaagcgttgacctcgtagtggcgcaccttgttatatat

SEQ ID NO: 10241 - DNA, 403 bp, Oryza sativa
agctttgatagtatcaagcctggttacctttatattatgaaacaaaatttcttaagtactccaaataaaacaatctttgaaaagatacagcacagtgggaactatgagcaccacattattgtccttccaagtgttttggcatttcatgacgtaatacttgcaaacagatttatatagaatctctggtcctagatttatagtcatacttattaaaatagaactctattcactttaaaaaacattaacaaggtaatgtacaaactatatatattatattctattgaagatatatttaattttgatataaaaataaccactcggacacttatcattagtttaaaatattagtcgcaacacatatgcatttctagaataaaattgacgtcacaatttttatagtgca

SEQ ID NO: 10242 - DNA, 428 bp, Oryza sativa
  unsure (1)..(428): unsure at all n locations
acactatannaaatactcaagccttggcccgcaggttacacccgaaccacacacttgattcggagtttttttttttatgcggggcggagcggagactctcaaaagtttccgctagatctgagagtaacatttcctggttgcgcgtctttacaaccaagtcatcgacataagcctcaacattacgtcctaattggttacccaaagaaattcgagtagtacgttgaaaagtaggacctgcattctttaacccgaagggcattgtcgtataacaataggttcctatgggggtaatgaacgcagttttttcctcatcctccctagccatgcgaatctgatggtaaccagagtatgcatctagaaaacacaaaaggtcgcaccccgcagtggagtcgacaatctgatctatgcgaggcagggggtaaggatcc

SEQ ID NO: 10243 - DNA, 407 bp, Oryza sativa
agcttgatgtaaatatccttacttcgaagtctgttgtcatcgaccccaggctaccagcactctttgaggaagcggatagactactgggaatcgatggcccaagggatgagcttgtcgaatggcttaccaagggcaatggttttgcacaaaatcgccaggttatctcaattgttggatttggaggcttaggaaaaacaacactcgcctgtcaggtgtaccaaatgataaaaagccaattcgattgcacagcttttgtatctgtatcacggaatcctaatatcaataagatcttgagagacatactttcagaagttctttatacaagcaacccgatgtcagattatcagaaggatcacttctggaggatcaaggaaaatcttaatcaaccattggaagatcaccaactc

SEQ ID NO: 10244 - DNA, 328 bp, Oryza sativa
attggataagaggcactggaatttctagatcacgggaattccgctcattcatggcgacctgtctacgacgttctgctgcacctattggcacatatatttgtgctatgggcaagcgctgaaacgctattactcattggcatcttatagaaacaacgacaatatactgctactccctgaagacctcctcgatgcgaggcgtcgttcaatctttatcataccttcgccgccatccctataaagactggaaaagctcttatcaacatcttatgggactccgaatgataccacttgaatttaagtctctgccttgccacctcaaaagtatgta

SEQ ID NO: 10245 - DNA, 407 bp, Oryza sativa
agcttgctccagctgcggccccgcacccgatccgttacatgacttcggtgccggttcgcccggttacacctcaagtacagtatccgaagcccactcgcacgccacaagcaatgatggaggcagcttcggccttgaaagcccagtttcaagcctttctgcagcagcaggagccgcgccacctccgacggcggcgccatctctcccaccttcggcaccgactacttcgacagaccaagagggggcgaaggcagcggccgcggtggaaacgctccagatcagggacgtaatcctttcgtctcaaatattgggggcgtctcaagctgccgcctcttcgcaacaagctacaacttcgacaacaatcaccatctcgcaagccaacgccaaacttgaagctcaagccgaagctg

SEQ ID NO: 10246 - DNA, 403 bp, Oryza sativa
gttggtgagcctaaaaccccgcaaagctattaaaaactttctgtcttcgtaaactaagtagaaaaatcaaacaaggcaatgatagaccaagtaagcaaattgaattgataaaaaatcacactccattattattatggtagcccccgactgacaacctcaagaagaaagcttgatgttgacagtcaagatagggaaatacatggataaacttaagcgtaaaaacgacgaagatgttcgatattccaagaattgtcaacaagtgtaccatcttcgcgcttgagtcggtaggaacctggccgggtgacttcagagatgataaatggcccttcccatagaggagataacttgtgccgatctcgtatagtttgaatttatctcaaaaccaggtggtctactaggaaag

SEQ ID NO: 10247 - DNA, 387 bp, Oryza sativa
  unsure (1)..(387): unsure at all n locations
agctttataaatcagaatgctagagctgatttatttcttatncatccataaaattgcattaacattctcataaagtaattatatgtactggtgaaactcgtgaaagatttagcacttctcatcagcaaactgatctaaatggtcatgacactatctggaagtagtggcatcaaaccaatactaacctttccgctggtccaatgagtaatgggctcatcatctattagagacataatttccagaatggcagttaatggaaaccacattatgacataaataattcccacaatagtaaacactagaaagaatttaccctaatttcacaagagcacgattgcatggctgcatggtggtagtgcctagatgaactatatgctaaaaaaagct

SEQ ID NO: 10248 - DNA, 404 bp, Oryza sativa
  unsure (1)..(404): unsure at all n locations
tatgcctcatatacaaaacaatttgatgacaggaacatctttttctttacaaaacaattcgatgacaagaacaatgatattaatgacgtaacagttcctgtattaccaataatctactcgaaagagtagaattcaagtttcttaagtatacagtgtggtgaatgttataataaagaattactttgttgttctgacgatgttcagagtatagtatctgtagccgagtcttctcagaacaatctgttaggtgaagataagtgcttagtttgaataaattgagaaactacgtatttaactggtgctaaaattgacttagccatttgccgatgttatttatgggattatgcatgttttgtgctactntatcacggagaaactcttgtaatatttgacaatttgtagtt

SEQ ID NO: 10249 - DNA, 372 bp, Oryza sativa
  unsure (1)..(372): unsure at all n locations
ggataattaacacgagcgccgcatgcagctttcatgacaggcgaactatattttatacangcccaccacaagccgacgagaggggtcccatacctactacaggttaggtctcacaccatactgtgccaagaaacccaagggttcttcccgacaccaccccggcgaatccacatgtttctcagcatcaaggctcccctgataagctagatactcagtcaggggtgttccattccacccatgtgggcgcactcgtcatatggctggatgaaattacaaggcacccgtccttaaatgctagagcggcaaaccgtacactcggtgcgttccccggcccgcggacttggtaattcatttaatacgcaagcacccacc

SEQ ID NO: 10250 - DNA, 351 bp, Oryza sativa
ccttgatggttcctttagccatcacgcgtccactgctcgcatccccaaaagtgacggtctcatcaccggatgcacgagtgagagaagaaaaccacttggcttcaccggtcatgtggcgtgagcaaccggagtccacaagccaagaattacttctccccactccaaaatcctcaggatgctccgatgagtcatccttatcctcaagtgccatgagacacaggttgatgaagtcctcgttgttggcgagacagcacatcccggagaagaccttgtcccccttttcttgatcatcgtcgtcggagtcgatgtcgctaagctgcacctcctcaagagccgccaagaccttgtgga

SEQ ID NO: 10251 - DNA, 406 bp, Oryza sativa
  unsure (1)..(406): unsure at all n locations
agctngcacttgattctagcagttttgttggtactgcatttcttgatgtttatgcaaagcgtaatatgataaaggatgcctgctgggttttcgagaatatgcctgagaaaacttcagttacatggagttcattatttgcaggatttgtgcagaatggtctccatgaagaggtattgtgtttatttcagagtacacaaagggaaggaatgcaattgactgaattcactgtttcatctatcctcagcacatgtgcaagcttagcattgataattgaaggaacacaggtgcatgcagttattgttaagcatggttttcataggaacctctttgtagcaacatctcttgtggatgtctatgcaaagtgtggtcagattgaataatcatatgaagtatttgctgatatggg

SEQ ID NO: 10252 - DNA, 399 bp, Oryza sativa
  unsure (1)..(399): unsure at all n locations
tgtcccaacttgactcacattagtataacaacagcatttatatgcatagaaaccatgtagaagcaaatccccgaaggaaacatccaaatctaacaagacaacccgaaatcgacaacgatcaggatcttgccggtcagactgtcgggtcggccggtctgactggcggcacacgaccggtctgaccgccagggtcaatcgaaaactcccacttcacaaaatcaaccgtcttattaaatctccaaaataacattagcaaaccaccaatattttcatcataaaatataaatcaacttcttgattttacagttaatattttttttatttctttctaactagctactcacaagcttnttttttaaatctcgagcttgtcccgataggaccaaagtgtgtactact

SEQ ID NO: 10253 - DNA, 398 bp, Oryza sativa
  unsure (1)..(398): unsure at all n locations
agctngcaatgatggaagccactttcttgttttataacaggaaacaagaaaccgagaacttgtgccttctaaagcaactctgcatctgccatatattcgatatcatctaatgagcagttcagcaatcaatcaaccctactttagttttctacacccctggtttgaaaatagcatttttgatgacatggtgatgtgctactagtttcattatactagaatctattttctcaccagcctaatttctctcagcatatatatgtataattattcctgaatagtgaacactaaacttctcaacaactgcagagtaatcactagctcatttttgcagattaagtacaacaaatcaggttgccaaacagctaaagttgatataccaacttcagaaaatgagatca

SEQ ID NO: 10254 - DNA, 378 bp, Oryza sativa
tttatcacaaaacctgtttcttgatgcacttctttgtgttttgtttgcacttgttttgaaaagaatccatatcaccatgcttatcagaaggtgagacttgagagccttcaaaacacgctattacatacgagtcatttagggatgtgttaccaatctcgtttgaagttgccgaagattctggcgagcgagcgctggaggtctttgaaaaatatgctaatggaaaatgaagaacatgacctaagttgcaatatataaaagaaaatccattagattagcacgtatccctccgtatttgttgaccacctatcggattctgtaatttctactgcatcattatattcagacagtagggttttttttttcgaaaacatatttaga

SEQ ID NO: 10255 - DNA, 399 bp, Oryza sativa
agcttctatacttttctccctcttgttattatccattgccctacctggcaacactataatcattcctaatttcttcttcttatgctaaactgtattacctttttttcccaataagataatacatgtacaagatttttggataaatggttaaaaatcagctccaacagatcaccttttatattaaaaatttaaagtttccttcttcatatttgtcgttctcgacttgtaggggtgtccgagggctctcaatcccttccatcctgttgctttcccactgttcgcgacttcttaccatgcagtgcgaaaatgttcccacaaggtagtttaatgtagcactgcattgtcaaatcatagcgcaattaggcttaaaagattcgtctcgcaatttacacacaaact

SEQ ID NO: 10256 - DNA, 398 bp, Oryza sativa
tggcctgcataaacttgggcaccaaaaggctgatgcatatgtccaaatactaatggatgctgtgagttaccctaagccacccttcttcctctctccccaaacacccctccaaattttgggaaaaaaatgggaaactatctttatatcttgttgaactagaaaagattatttgctctcgaatgcatttttcccaaactattgttgtgaatgactactgggtttcgtatatttactatttatccatggttatgccaggcggatgtcgatggaaatggatctttagactacggggagtttgttgctctatctgttcacctgagaaagattggcaacgatgagcatctgcacaaggcatttgcatactttgatcggaaccagagtggatatattgaaatcga

SEQ ID NO: 10257 - DNA, 111 bp, Oryza sativa
  unsure (1)..(111): unsure at all n locations
tgctcgggcagctggaggaggaagaagacatatatatagtggtgggactttagccccngncggtagcaccaaccggggctgaagatcaccgggatccttaacatcggttgg

SEQ ID NO: 10258 - DNA, 398 bp, Oryza sativa
  unsure (1)..(398): unsure at all n locations
agcttcagatactctaacgtcgcgatatctaccgttntggtataagatggttgcactcgttcaaagttgatcagcttcttcgaatttcttctaatgatgattaattagcatccaatggtttgagttttgctgacttcagcagatcattcgtcaaaacaacgacatatacctgaaaccgacatagacgtgcttcaaaaatacctgcatttcagtctattcttgccccgacatagacgtccttcaaaaatacccgcatttcagtctattcttgccgaggtgaagtataaacaataaaaaaaggaaactatcaactcagagaatccaaagtcaggatgcatattttctactattctagaaggaaactggagagaaatctgatggccttatagacgtttagc

SEQ ID NO: 10259 - DNA, 391 bp, Oryza sativa
tttatacaagccaagccgagctgcactttttgctcgtttcatttatcaagccgagccaagctaagcctgttcttgatcaagctttcacgagccgagccgagcttagctcggtttggctcgtttccacccctaccttcaaccactccgatttcccatactcacaatccagatccacccttatagcaatcccctaatctaattaaatggcaatcaagcatgcctgcatgtatactaagtgtcccttctatcttagccatataaacatatcgatattaaaagttgcttagggctgttcagattgatgttattttcaagcatactgttttttttacaaaattatataaaaaaacaagtgtctaaatttaatttttttgttaaacttagataaata

SEQ ID NO: 10260 - DNA, 406 bp, Oryza sativa
agcttgacattacggaccactgggtctagttccagggggtaccgccccgggtggaccactcggtcaggatgatccgagcggtcaaacttgattgcaatctctgaccatcgaagatattggggcgtgtcgggctgaacagcattgatctcccgttcggtcaacttttgcttccttttagactcataagccagggggccgccgaagatatggttgagctccttgcggtggtcttgaaatcctaccggggtgtcgccgtcgtccttcttcctcgacgtgctttgttcttcgtcggagttcttccgtgtagtcttggtgtattgctccgcgaattgcttgtagacgaaacaatctttggccacgtggttggagttaggatggtgcgggcattgggagttcatgatcttgt

SEQ ID NO: 10261 - DNA, 402 bp, Oryza sativa
tagtcactaggcaaagttgcagtttacttcatgaagtgtatatgaagtacctcagatgagttcttttctcctttggaagaaaggccttcacaaacaaaaaagagaagtcagaataacatcactattccaacaatgttgcatagcaaagaccaacaaatgaaaaggagcggagatggataaatgaagtaggcaagtagaacattcaaaaggaacaatgactatgagacatgtgggtgtctttgtgagagagaattcaacaattacagaaagtaggggtgggcgtccaggttcttcggttcgatttttaccgcttggtggatttttggcttttaagaaacaccaaccgatctcatcagggaaaaaccaaactacttcgatttggttttgttgtttttactaaag

SEQ ID NO: 10262 - DNA, 141 bp, Oryza sativa
accttaagcaccgcagctgcaagctaagtttcgttaagcctttttttttttgggatgaaaagatggagggctgaggggttaattcacacccattgtgtggataatacactacattcttccttggccttgtcatcaacatat

SEQ ID NO: 10263 - DNA, 395 bp, Oryza sativa
  unsure (1)..(395): unsure at all n locations
tgcccgcaggtacaccanacacacacttatcggggttcatttttatgcgggcggagcggagattctcaaaagtttccgctagatctgaaagtaaagtttcttggttgcacgtttttacaaccaagtcatcgacatacgcctcaacattacgtcctatttggctacccaaagaaattcgagtagtacgctgaaaagtacgacctgcattctttaacccgaagggcattgatgtataacaataggttcctacgggggtaatgaacgcagttttttcctcatcctccctagccatgcgaatctgatggtaaccagagtatgcatctagaaaacacaaaaggtcgcaccccgcagtggagtcgacgatctgatctatgcgaggcagggggtaaggatcc

SEQ ID NO: 10264 - DNA, 404 bp, Oryza sativa
  unsure (1)..(404): unsure at all n locations
agcttaccatttgcaagttgccaattgtcctaagctatctcttttagatggngtaagtttaaccgtgtaaagtacagtatggagagtccttatctgagcaagctgtgacgggaattgattccgatgggcaatgggtaaacttaccaaagttgatagagagataaggtagaatgggtaaactacatatagttaaatttatttagccacctatggctatcgatcaaattgctcagcttgctcagctaaggacgagagcaatcacttgattgaaggcagccacgctactgacaaaccaaaatttagcttgctggctatagactactgcctgtaagccaacaaccccccataacttacagacttatatctaagttacagtgtcagtgtcatatatgcaggaagctcca

SEQ ID NO: 10265 - DNA, 402 bp, Oryza sativa
cagctaatacctagcatagactgatcaaggtttattaccagtgttctcattaattatcgacgggtctatccagcatccattgtgatcccaatgatagcttcccgccattgagtcgtcatggttttctgagaacgtccaccttccctcctcttaggaagtggctccatcagcataaaatcatcatgcaataacccatcctacacaagttaagaatttatagtctagccaagtgtaatacacgtcccggtgctcattaaccgcgagcacggctactcgaatagatttggtttactcacactgcagtggatgtacactttacccgcactccgcgacttcccaacatatgagcctcgttccaacacatgagatgtgtcacggtaaaactatttgacaacctctgat

SEQ ID NO: 10266 - DNA, 389 bp, Oryza sativa
  unsure (1)..(389): unsure at all n locations
agcttgtgtaattctccacaacatgatagtggaatacgatggagaaatggcagaagatcctattgacttgaatgctgccccaggaacatcaattgttcttccaccagaagttcatgcagggagtaatgatcacccaagcttcagcgatgtgcggcgaagaaatgcttctatccgagccaaaccaatccatagccagcttaaaaatgacttaattgagcatatttggcaacggtttcaaactaggcaaaataattcagtataatgtaagctctagtgtacaatttcattgtaattntatcttagactgactgtatttatcactttcacttactgtacatgtttttctctctaccaggggcgaacagattcgatgtcttttacttgttttt

SEQ ID NO: 10267 - DNA, 369 bp, Oryza sativa
  unsure (1)..(369): unsure at all n locations
tatttgattaggaaaaacttntactttggncctattctattttctatatatagccaaatgatctgcttatcttgaggaaatggttcacattttatttgattacaaaaaaaatgttttattctaggggtttttcattctttgttggtctcttgcacgcaaagaatatacgtgtatttttctgaagcaataagcaatcaaaattatccaagtatgaagggggaaaaagcgtaaaagcgatagctaaagaacacaccagatacgaagctgtcacaggagttggaagaaggataaggatcaaaagatttctcccaactgcgaccgggctactgctaaccaacaaacacctgcttttgccaccacttattaatt

SEQ ID NO: 10268 - DNA, 401 bp, Oryza sativa
agcttgctttatgcaaaagaacctggagcccttcctttttataccctctatcatatgcattgttgttgtggtggcttgctgagtacggctggtactcacccttgctatttatatatcttttaagagagtgttgaagagaagcccttgtcggtacgcttgcgtatccaacaagatgatcggagtgtggtcttgttctaggtctcgttccccagttgactgcctgtggcatgttaaccgggcccttatattattttgtcttccgctgttgttctctgatagttgttggcctacctggccctaatgtaagtatttaactcttttagcctgaattcattcgtgatatgttgtgatccaactatgtatgtgtgtaccaattactgatctagggattggtacggata

SEQ ID NO: 10269 - DNA, 416 bp, Oryza sativa
  unsure (1)..(416): unsure at all n locations
atactaagcttttgcagaanagcagcatttataagtcactnagnngcccaaagttattttataaagacgaccctagagctgcacagtattattaaacaaggccgtgaaccctcacgaacctgccttaacccaaggcctacgatgattcagaccgaactggcaacccgaccctgggtcccagctcgtcccaagccaacccaggccaaccattccatattttagttgttgagcaaattttaagaattaaaacactgacttgggtacattgctaggcttgcccatatccgaaggctcggctattcgaatagatttactctgatcagaggtgtacatctttacccacaagacacatctttactccgcattccatggccttggaacccgtcgtaaagatgtgacatagattccaacccatc

SEQ ID NO: 10270 - DNA, 403 bp, Oryza sativa
  unsure (1)..(403): unsure at all n locations
agcttcnagtatttgcattaattttattcatcttctcaatacagcttgaaggcttatatttatattctcccgttcttttctcatggccatatgacgctcgcgtgatgcgcatttgtttgctccctccgtggtaaaagcccaacctttcttccatctacatgaatgatttctcgctaggtgtgggggctaagatttctagccctattctagccttaagttgagtgtctggagccgtcgaagcccgggaccccctgtgctggctcttacgtagcggctagctttggtcccaccggttggctactgtgccctgcctgtctcaactgtggacggggatcgctggctctagagtgtttccgctctcacacacgggcgaaagtagtcctccgtgtaaatagaagagata

SEQ ID NO: 10271 - DNA, 358 bp, Oryza sativa
gcaccccgaaggggatttttttttattaataaacttgcagctttacttcttgttaccaagatacagatattgatctctgaccagatgcttttattatacatgatttagaaaggatcagttcttggctaacgcctaatgatcttgacgaatttgcattcgcagcgactctgttagaatgctcagaatggatggcacggatttgtcttccccaaggtgcaatgttcagcatctacaggaaatttggcggtggtggagataaaatggctcgatacttattgcttcatttgttcattctgtagactccaagcatgaggggcgggacattcttgctggtaaataaatcacagatgaattcccc

SEQ ID NO: 10272 - DNA, 407 bp, Oryza sativa
agcttcagctccactcccacaggcagcacatctgggatctaagccaaaggtcttctccttctggatcctttttcttcaactgaggtttgatgattattgcaagaatgagcatatgacatactcaacaagccacacagtatatatgcaagtgcataagaataccaaaggatggcataatatatggttcatttgtgaaagcagcatttagcaaagagttgagaatttgtaaaacagtagagtaattaatcatcaatattaatcagcactgaacagcacacccatgctgcataggcccaaccaaacctgaacaaccaaccctggtcgtacagatcaaacctccaaaccaggaattatccattccaaaccaggagtcaaattaattatcacattattatcattaatgagta

SEQ ID NO: 10273 - DNA, 396 bp, Oryza sativa
tgggcattgtcatttgcaggggccaagtagcgcagggttgtattgtatgaatctgaatggcgctcttgctggcttacttcaccgttttcgtgttagcagcatctgttcctgccaccggccagcaaggtataccttttcgttcttcctttttccatcgattgcccaagtcaaccctctcaagttttattgcacgcgtgtttcagttagcaagacattcaaaattattttcggtgactactgtttctttcatctatggtggggctccggaatctccgaaatatgaaaccatgtcgattttgggtaaacttaagaaaacctctccaaacctgcccgaggcctgccgccatcatcgcgcggtcaccggcgacggatccagacgcccgaggctgagagatc

SEQ ID NO: 10274 - DNA, 378 bp, Oryza sativa
agcttgcgactatcatgcgtaacactctgttttaccagaagaaagcaagcattgggtgatgccaaaacatctacttcctccggttcaggttattagactttctaacgttacctacatttatatagatgtcaatgaatgtattatatgtctacagtcattaacctttatatcaatatgggcaaagctagaaagtcttagaacctgacacggaagtaggatcaatagctatcgtattactcctctgttgattataattcccgctggtcatctatatctcgagggactactgatctagtatcacagcttgatccagattaatctagacttacatctgagatcaatacttaccatgcccaaggctgctgtgctatcatgcga

SEQ ID NO: 10275 - DNA, 400 bp, Oryza sativa
tcttgaaggactgttcctaattgaggatggatgtgtttgtttgcctatactagaactatcactttcagaatgggcatcaagctgagagtcctcgagggcaataccacgtgcaacaattctagagctgtttaaatcacagtgagcagaaattatgcaatcagtttcattgggcaagatagccgatctaaataggaatgaatgaccaaaactattattgtcaaacctgatgcgttcagcaagatagggaacggtagtttggtacaaaatgaatagaatccgtctatcaggtgtatgcggaagtccgtgcgaggttgcaacctgtttacaacatggacaacatcagcattgatagagcgaattttgactcctatgttttctgtgaatggcagcttcaagccta

SEQ ID NO: 10276 - DNA, 398 bp, Oryza sativa
agcttgtttatctcgtcctcattgttgactatcttcagagttcagactgttcggtctcttctcccgatctccgtttgatttggaacgtgacgcacgcgaaggggatgactcaacggtttacatacacaggtgattagttttgcgttgcaagctctcacagtcacagacgagattttatatagttcgaggcattacgtatttacgtatacgattacgtatttacgtagttcatctcataaataaatggatatttaatgggattgtgtccctacttcggcccatgtattccaaacaactgtagtgtacatgtcgatgttccatccctagctctaaagaataaatgtttcatcgtaggtttcattgagtaataaattttggcgtggcccatattcacggaa

SEQ ID NO: 10277 - DNA, 398 bp, Oryza sativa
tactgattagcgtggttaccatctgccaataccgtatgttattgttagctagccatacagatatttaggatgttataaaaattggaagcagtgaacagacagacaaaaataaatgcaagaaaaggcagcactacatacacaaaagctgcatagtacagcaaacgggaaaaaggatagtatacaacagcacggcaaaaaatagtgctatagttggtacttaggtgccaaggtcctgcaattagaacagagaacatattagggtttgtcctaatatatctttcggtctgtagtatgatgcacataaagccaaattgtttaataataccatcaatctagctgcatccaacacttcttgataaaccatattcctagtctttgaactacagacctcatcctca

SEQ ID NO: 10278 - DNA, 311 bp, Oryza sativa
tgcttgttcgacattgtaatcttgtcaactgcttgcattgaagataatccatatattagtatcataaatatgtgaagctgtctagtacatagtataaagacttacatcctctgcgttagtcctgtaccgtccattaaccctaatgaaatcgcacgcataatacccgcaaaggaccgttcctcgcggttgcttgtgacacttcagtacatatcatagaaaaaattatctaaaatttgcaattattgaaacaattggaatacatttagggagtggagtattaccggccaataagtacgtactaacagcttctt

SEQ ID NO: 10279 - DNA, 406 bp, Oryza sativa
  unsure (1)..(406): unsure at all n locations
tgagctcgatctccccttgagctggcatgccactttattctttcagcccaccttctcccaatcaccatcagccaacccatgtcactagagttgctatctagatgaagatggaattgaggagctcatgaagtagcagagagagatggaactgttatcgagatgaagatgggattgaggagttcatgaagcagcagagagagactttctcgctgacatgtagactactggtccaaggtaaaagatttagtaatagtttatgatttaaagtaataaaagatgtgttaacactaatctctttattaggtgactcagttctttcttctccttcaagatgagggggaagtctttgatggtgggtgtngaaattataagcacatagtgatttaatttattccataaataaatc

SEQ ID NO: 10280 - DNA, 398 bp, Oryza sativa
agcttgaaccgctaattcattagatggtgctcttgagtcaactacacaaaccggccacatgtgatagcagagtgggttatgtgtcaattggaacaagaacaactgcttctagggggcccagtgccaatggatgctttcaagttttcaattgtatttattacctattgattggactgttaggaataagaactaacctagtgatcatgagtatctttgttcttactgggcactgttctggtagcctttgactaatacagagaacagccattttcatttattagaactaaacagttattttctaactggtcttgaaatgttgcaggaactcagtatgtctctggaaaggaaattgagaaattagataattgcgcagctgctcttcttatgggttgcagtag

SEQ ID NO: 10281 - DNA, 387 bp, Oryza sativa
ttacaaagtgaacaatcagtttagaagttgaatgatatttttatatagattcaacattgtaatcattaaccaagatggcctaattgttttttaccacaccatgtagtaaatatcgaaatgctgaccccttacacttgaaaatgcactaatatgacagatacagaagttagcatacgatttacaaacaggttaagccactaaatcattttcacatctaaatctgacgggagaacggccaaagcaaccgttatgaacctaaattatttgatacagtcgaaaatgagttccacttgattcttggtctcgtcaatcatcaaccgagtacaatgcttcgaccagccaatacaaaaggcattgcagatatatgtaccctggcctcgtcaatca

SEQ ID NO: 10282 - DNA, 394 bp, Oryza sativa
agcttaacaattgtgcctcttgttttcagtcttccaagaatagttggcatagcaacatgacatagcaaataagtgctaatatttggcttgtaaatgcagaattgcttgtcaccttccaagactgatctgatggttggaataaaaacattcttccatgctgaaattatattcttgcttgcacttggcttgatcccttgcattctccatttgctggtaccatcttctagtataactagaattcccttgcagtcccaagtatcctgaacattgttgccatccaagtggcttatatcactaataagcctgctttcaataacctcaaaatattgtgccatcatataagaggtgaatggaattttggatgccggtagcaagtcatctcttttatcatcac

SEQ ID NO: 10283 - DNA, 396 bp, Oryza sativa
taaatgccctaatacctgctcatcatgtataatttcagataaaaaaaggaagtcaactaatacgactatccatcttcagggatttcttgagggtttcagacgcttttattgatttgatggggatagataaaagaactccctgtgttttttacaaactcacatttgaaaattttgactaatactccctccgttccaaaatataaggcacaaccacccttaatactaagaccaaaaaataattattatcacctccaaatttgtatcatcctaataaataaaatgcatgcacccaatagaattagagatcttaagggtagagtattttaaaaagtcataatttaatagagaagatatattaattaattacatgtatgtatgcacgatttatattatggg

SEQ ID NO: 10284 - DNA, 409 bp, Oryza sativa
  unsure (1)..(409): unsure at all n locations
agcttntcatatgccatatagctggatctgtttctaactatcatgatcagctcttatttgttactagtttgtactgttacaaaattctaacttctccttgaataaatatacagattgggcaatatatttcatcgaatggtggagttgtcacggcagaagaactagcaccgtatcttgatgtgccaccaatttcagaacaatccaaggtatataacttctgttctaaaatgcttattagaattcttcttgttgttattggttttttttgtacttttccattcattactaaataaattaaatactgtgatgaattttccatgtaaattatggattgttcgttggcgtgaagcctcatctcatcatatgcatatgatattctgaactacaggatgatgaatcatttattctt

SEQ ID NO: 10285 - DNA, 381 bp, Oryza sativa
gcttagagaagttgattcacacaatgaagcacttattcgtttcgttgtacagcaactaataaactagtacctcacaaaactctgaatcatagataatccttaccatcaattggcgaacctgattagcaagctgtaagcaaagcacactactaatactcaataatctcagagaaaacaaagagctactactagtctactacaaattgaacactcacaaaggttaatggccaaccaataaacaatccgtccacacaaacaactgctaactataagatcaaagctgctatgaataatggattaaaagtttaaagaaaaagatggaggcggcaatgctaagagcagaggaggcacaagtacaacagcgcataccatgatgacgcg

SEQ ID NO: 10286 - DNA, 404 bp, Oryza sativa
agctggttattacgttgtggtttaaatgaatgctataaagctaaagaattgaggttgttatttgggcttaacaaaaaaattcacgacatgcttgattgtcaaagatatacatctctttctcatttgttacagcttgcttgcaatgctgaaagtaaaatagaggaggacatgaataagcaacatgctatgtctttgtcttctattactaaccatttgcaggaagtgcataatcatgaaaaggaggagagagacatgaaagagccgctagtcccattgatcacactcaaagtcgaggcacctccattatctgaagagggcatcaaaggtaaacttaatggtgctgaaattaataaaggtgagtgtgttgttaatgaattgaattcgtccactttttatgctataac

SEQ ID NO: 10287 - DNA, 326 bp, Oryza sativa
  unsure (1)..(326): unsure at all n locations
tctaagcttagccacaagcaaaaaagaataatgagggtggttgtcttttcatgattcaccacaagtcaaatgagagcacttaaagctttttgggaaggctgancacttaaaaagtgcaaaacggttggtgttggtggaggcagcaataaatgcatttggggtggctgatgtgggatgagggctgctggtgtggggacaattggggggtggagtgatttccgggaatatggggatggggcacggataaataataatgatgggaaggttgcggacaatctgagcaaatcaaacttaagatactactgaaccacctaccatcagcatca

SEQ ID NO: 10288 - DNA, 363 bp, Oryza sativa
agctttacataatttcctctccaaaattggctttgttcatcatgtgccttgccctcacactcaccaacaaaatgggtctgctgaacgcatatatacacatattgtagaagtaggtctctccttattatctcatgccacaatgccattaaaattttgggatgaatcctttctagcagcaacctatttgattaatagggttcctagcagagctatacaaaatatcaagcctttggaaaaattattccaacataaacctgattattcctctttgcgtatttttgggtgtgcttgttggcccaatatacgtccctataataagcacaatttcgaattcatgtctaaacggtgtgtttaccttggttt

SEQ ID NO: 10289 - DNA, 417 bp, Oryza sativa
  unsure (1)..(417): unsure at all n locations
ctatancaaactcaagcttatatttaaacctaaagcatcaagggctaaaaagacatttgtttatcatcgttacagaaaaatgatggaaaatgtaacggtaggggcatggaagggatcaaattgataatttcacgggtacagaagggatcgggtaaattttaggagtatgaaagggattgagtgagttttcaggggtacacagggaatttactctatttctttctcgctaatcggtgaacgtatacggtccctcttgtgccgactaagtcaaaccgaccaaatctttcaatgctgaccaaagatttcaagctatcaatcctcctggctcctacctgataccacggtacccccgacaatcccgttccatcaccacacgggatgaggtcgccatattagagtaatgccctgaaatgagct

SEQ ID NO: 10290 - DNA, 404 bp, Oryza sativa
  unsure (1)..(404): unsure at all n locations
agcttaaaaaaaatcaaaactggttcaacgttcagtttagtggagcctataccgctatagcaattaccttggacagcccagatagaccaccagtagtccctttgaagagcttctggatatcaagcagcatttcataggactggaaacatttcaattctccatatgattgtgatagttgatgcagatcacattgcagattatatcctttggtttacaatggggcaaaaataagtacttgtttaacaggatgcataagaaagaaatgttgttttcaggaaaacaagagtgtatgggaagatatgggtnttttaatcaaaatagtacgctacctagctttagtatgtgtgaagaacacataattcgcctgaagcagctatccaacacttttgggtcatcttcataca

SEQ ID NO: 10291 - DNA, 400 bp, Oryza sativa
tggtgggcccaccatataccaagtcttaaacggaattgttctttttatatagaaggagtttcggataaggaaagaaagtagagttctatatggaaacgacaatgactactcggatcgtatccatacttgtctccctagatctacttgtacaaggggacatctatgggtataaatacaaaaccccctatgacgagaggggacgacagacacgcaagctagaacaaaccaatatgccgccagacatcgacatgagagattagcctagacagacttaatttggtgtctgcggaggccgacaagagggatctagcgccatctctgatctcgacgagttcatattaaaggaggaagagtactaccccattgtcgactacgtgttggagttcatgctgtcatgtcg

SEQ ID NO: 10292 - DNA, 380 bp, Oryza sativa
tatgcagataacacgtcttactcacagttgatcttcctgaaaagatacagggtcttcttcacttgcctacactggaagccgatgcaagagcgcccgctgtcctattggatattgggcatactctgggtctgttgcaccttccacgtgtactacttgatctgctacctctctgacacaggaacatctgaaccaacattcccacatgggctggaaagctcaccactatccgtatgttaaacatcgcttgcgtgcacaatgctcaggatgaccttgacactctcaaaggactgggatctaccactgccctttcgctgcttgagagaacagcgcctcgcgcaagaatcgattctgcgaatgacgtgttcagagctctcaagaac

SEQ ID NO: 10293 - DNA, 404 bp, Oryza sativa
  unsure (1)..(404): unsure at all n locations
agcttggagggagacacttctcctctcccttatataactngtatcacattgcatatttccctttccaattgcatatatgctctccaatggcatcttataaaactcgaaaacaacataaaaatttgcacaatataaaataccataaagataggataggtttgagtcatgctaagtaatacaagctagttctctgttttataccacatacacattttgcacaatcttgatcttaagtatgtttagtcatctgcattagtctaagtttttgacctagtaataaatgtgaatgcaagtatgccatgtttgatccctaccgagctccacatatcaaacctgagagtatgaataaaaaaagctaaactggtgaggaattcatattgatacacttggagagactgagtgat

SEQ ID NO: 10294 - DNA, 405 bp, Oryza sativa
aacatagaaactcagcttgccgccgtgccgtctccgccggcatcgccgttgttgtcggccggaaaccgccgctgtacgctcgccagtgccgtccgcacctcggccgccgctcgcttaccgtgcgccgtcgccgtaccgctctccccacacaccgctgcctactgccaccttcattcgccgctagccgccgctagtcctaccgtcacgccactccgtcgccaccatcagcctcgcgaggtcgaggactgcctcgtctgtcacaccctgattttcgttacaggatttataaattatttaataaattattatcagaatttatattaaatgttcattaatttactagtgaagttaaatgtgggaaataaaaatataaagcatggatgtatttaatttttattaaattct

SEQ ID NO: 10295 - DNA, 402 bp, Oryza sativa
agctttgtacttttgttagaatactcttctatatacatttatggtattgaaatactttccaagtatatgaatatctactttacattatgttcttgttatactggatatacggctagcttatctgggagatgctttggtgtgggtataatgtttgcttatgcaattactctatgtcatgacgatgatattagagtaggatctggtcgtttagacgtgttgtctagattacgggatatcattatttggggttatatgctgcggatgaaaggtgggccgctgatggtgacagctcagtacgggtattcctccgcgtctgtatataatcctaagttaatttcctggggagggtattcctccgtatttagccccgattatatggtcataacgggctgtcgtacggaa

SEQ ID NO: 10296 - DNA, 391 bp, Oryza sativa
tggagtggaccgctggttccatggatatttactcctcattccgaggaggttttttcacgtaaatcaccgtgtcttgtgtgcatgtgtttattgttgtttcgctgctgatttgctagttaaaactatcctcaaagttcatggaaagatgaggggttgattgtgtgaaatacgtttgtcggtttgcgaattgtagtttgcagattgaaagtgtattggttcagcccgaacaattattatactcattatttggaattttcattagttttgtcaaatattttaaattaggatatatgcagccttttgaaattaggaacttatcctatcaaatagggaacttatcccttaaataacccacaaattcgctcctatgaagatttgacattaggacatt

SEQ ID NO: 10297 - DNA, 398 bp, Oryza sativa
  unsure (1)..(398): unsure at all n locations
agctntcccttgccaaaagcattccaagcctcatgtgtgtatgggcatactgagtgtaaacctcattgtaaagtactttatcaacctcattgtcagcatatgttagttgcctcttagctgctgtgtaatagtttatagcttgaaaatattccgacttagcagacttaaaggattgcatatatgcatcttgaggaaaatcatacttctgaaattcatctatccttgacacaaattgctctgctaaagctcttctaccatgacctaagttacagttgattaatataacattagtgtggtcagcaacctcttgaaatgctttaatagcatcagcaaaagcaatttcagcattacccagatttctactttcaagcctatggcagcccagttcattgaatgcc

SEQ ID NO: 10298 - DNA, 399 bp, Oryza sativa
tatcttccatcaccacatgaccatgtgggatatgttgtttgcacttttagctgatgagcatgaggtcaacaatagtgccttctggtgttagagatggatgcatggactcaacatgtgggaaataaaaatgagagtgacgatgagaaaggagaccatggttaggccaagggttgctctggagcatcatacacagcatagtgcgagggaatgagccggtatggatgagcagcctgagttggagtcggcatagtaggagctgttgagagccatagtcatgcctgtttaatggggacacacactgtgaatgtattagtgtcactactgagcaagaaagaaataatgtatctatattatgagaaaatgatagctctcttagctaacaagcgtgaaaaagttaac

SEQ ID NO: 10299 - DNA, 354 bp, Oryza sativa
  unsure (1)..(354): unsure at all n locations
agcttcacaaggtggnggactatacgacctgtgttctaagcctcatgtgctgactcatttatttgattagccaatgaaccacttcatcaataatagctcacaaaaccatctaggaagttaaattataccggttttaataatagagggggttaggatatctggcacaattgttgaggggcacgaatcaaatagagggactcaaagtaagacttattccattcatggatagcgatccaacgggaccgctatcgtcggtagccggaataagttcaccttgtgttcctttatangactcccattcttatcttctatccttgattctaaaaatgtgctctacatgttctataacttact

SEQ ID NO: 10300 - DNA, 403 bp, Oryza sativa
  unsure (1)..(403): unsure at all n locations
taaggctagtaatggctggtcggacaagagttttacttttctccttgagctgntaaaggatctgttgccagaggggaacaatttacctcagacgacatatgaagcgaagcaagtattatgtccgttgggcctggaggtcagaagaattcatgcatgtccgaacgactgcattttgtattacaaggaatacgctgagttggatgtctgccctatctgtgggggatcaagatacaaacgagcaaagagtgaaggtgaaggaagtaagtcaaagaggggaggcccagcaaaggtggtgtggtatctcccaattgcggagcgcatgaagagaatgtttgcgaacaaggaacaagctaagcttgtgcactggcatgccgaagaacggaaagtcgatactatgctgagg

SEQ ID NO: 10301 - DNA, 396 bp, Oryza sativa
  unsure (1)..(396): unsure at all n locations
agcttataagctcgatgcactcaatatctgtacggaagaccaatgaagcaaaatatattggcgaagcaggcagccgcactgatgcaattgtgacactggcagaggactctgagccttgtattaataaagtcgatgctgggactactaatgccagtgaagacagttctactacatcagttgttcacactggtaagggacatgccaatgtgtacccatttctcttcattttttattatctaattttataatggggggagaatgcgcatgacacaccctgngatcacttatatttaattttattatttattatttaaatctaaccttcttttattactgaagttacagctatcttatatggttacactttgcactttgcggagaccaactaaacactca

SEQ ID NO: 10302 - DNA, 399 bp, Oryza sativa
tgtgaagatttctcataccaacatgggctattctccgatgccaaagccaccccgtgttggacttagccactaagcatgtctcatgtttggctttacttgaggaaaaatccacaagataaaattttcccatgagaacacccttaaagactaccgaggaatcattccttctatagacggtcacttcaacatcggtaaaaagacaattgtaacccatggaacataattgaaaaacggaccctttcggaggtgagattcgaccttcacaaacttctcccggccaaccacaagtagatcggtggctcgggagcaacacctaaccgcctaggagtcctcaacctccaagagtaacaaatgatgcaacgaactcccggagatgatgcaagtgctcacaaatcttta

SEQ ID NO: 10303 - DNA, 384 bp, Oryza sativa
tccctttgtggctccatcggttctcggcgatgagctattgcttgttgccatctgactatctattagatctgttgtgcaaggcagatggcgataacaggcagatagggatgccagtactccctccattcgcaattgatggtcacattgtgtttgtgcaacagtactaaggaaaaaaataaattgagagacagttaactgtcagaaaaccataacgcccgaatgtcggttggatggcccacgcatgcacgctagcagcgcatgccaaatgacaaactaatcacccactaattactgtgcattcaaatcatatgcttgcatccaaccagtaatctctcctcgctgaattcttgaatgcatgcacatgagaaaataggaattccgctg

SEQ ID NO: 10304 - DNA, 374 bp, Oryza sativa
  unsure (1)..(374): unsure at all n locations
agctngatagaaagcattgtgcccctgatggaagtgatcttacttgtgtgatttgntcatccggagctagggaaactctgcaacatttgttcttccattgcactttcagttcgcaatgctaggcgcaatttggtttagtttgggacttatatttattctttgaagatatgttacaacatgcaagaggttcttattgatcatctcattttgtggagaagattttatatgcggcttggaatatttggaagcagcgaagtaattggctatatttttgataatgtgccatcctcagtctcctcttggatgacattctttaagaatgatctgtcgcttcttgttttttttttaaatgcagatgagagatcaacatttat

SEQ ID NO: 10305 - DNA, 390 bp, Oryza sativa
tgccgaccgctactggggacaccttctttcttatgacgagatgaccaagcatcacctccgggggtcgaactcttttgttgtaagctgccgaatcgcttgtggcgaacttgtgcatgtgcttgagcgcttctacccttacaccttccaagagttcgagcgatacctcacgcccctcttggtccccagaaaacataacccttggtgagttagcccctatctctgctggggtcattgccttatcgccataaagaagcataaatgggctaaacttggttggtcttgtgggggttgtccgaagggcccaaagaaccgataacaattcttctggccatttgcctttcgccgacccctcaagatttttctttaatgctcttaggatcctggcatttg

SEQ ID NO: 10306 - DNA, 410 bp, Oryza sativa
  unsure (1)..(410): unsure at all n locations
agctttaacgcaacctttctctgaaatggagattaatgaggctgtttttcagatggagcataataaagcaccggggccggatggttttccggcagagttttaccaagttttttggaatgttattaaaaatgacttgttggagctttttaatgatttccataggggtactctacctttgttttctcttaattttggcacaattattctgctgcctaagtgtgttgacgctattaagattcaacaatatagacctatatgtttactaaatgtgagttttaagattnttaccaaagttgcaacgaatagaataatgggagttgctcanaaagttattagtcccactcaaacggcctttattccaggtagaaatattatggaaggagtggttattttatatgagactatgcatg

SEQ ID NO: 10307 - DNA, 396 bp, Oryza sativa
tgccaataaattgaaccattagaaccgctgtataatcataattgataaagttaataaaaattcattcttggttttgggctgaaagcccattcttttctttctttttagccccacccagtccactacccccctctctctccctctctctctctcctctcgagcttagcccacaagtgaggccacaaaccccgctcacacatcgacagtcgtctttaacctcggaagatggtcatatgagccaatcctcccctcaaatccagccaaatctttcttgatctcccaaaattgtcccctcaaattcatccaaatctttcttgatctcccaaaattggttaagggctattaatccactcgatctgctctttctgtttttcccacaatcgaatggcggcgcta

SEQ ID NO: 10308 - DNA, 375 bp, Oryza sativa
tcagcttcagaggatatgccacccgaaaatattcatacattgacatgcacgcacggctgttgggcatttttgtatgccaacaactcataaagaacatagatcaaagagatgtttatgtcttgatagccgttgcaccatcctactactattgattgttgctagaggaatgcacataaatatttgtgtggacacaagtgaaaaatgcatagagatcttccggctagctctataagatgatgggctatacgccttgggttcaaagactcatttttgtaaatatctgatataagattattccctaatattcacgtctttttatttgtgtggacacatataacacaaccgacacagcaagggacagatcctctatcccca

SEQ ID NO: 10309 - DNA, 92 bp, Oryza sativa
agcttattttatcttaaataatacttcctctgtttcacaatgtaagtcattctagcattacccacattcatatggatactaactgttctccc

SEQ ID NO: 10310 - DNA, 400 bp, Oryza sativa
tgcctgatgcagttgaaattttgcttcgtagtttcgatgtgcttgataaactgcccgagagtacactcttccctcaatgcctacggcagctagctagatctttttgctaatgtcattaaagaagacccgatgccaatcgtagagaagcttccctgtcttgtgattctttctttgagtgggtataaaggcctgacaatgtcctgctctgcccaagggttccctcggctacagcacttggttcttgattcctggatttttcacgacctggtactttcacaagcttagttacaaaaatacccctacagaacatattgcacaatgagtgctttttgcggcgctatactggatgtcaccactgtcctacacagactgtgtctgcattatatggcgctgaccccct

SEQ ID NO: 10311 - DNA, 398 bp, Oryza sativa
  unsure (1)..(398): unsure at all n locations
ttgcacattgctatttgatttctcccccataacttgaaaaatgagttcatcaaccttcaggaccataaagcactctttaacaacttcattgcctgcagatgctgaagccacaaccctaaagccaccttccagtatatctgaactttctgaacctcctttcaaaatacccatgacaacttggggcccttcgctttgcctgaacttttcagtgcttccaacatctacagattgaattgttacctcaaatgtcagggagagagcagagattgcttcttcttatcgataatattatgaaaatgaatgcaagacactgcaacggacatggaagtacagtactcttgacaagtntatgttgcatgtgcgctgacagatcaaggaatgggaccagtccattattt

SEQ ID NO: 10312 - DNA, 401 bp, Oryza sativa
agctttgatatgcacttattatccttatgtctacaacgatggaaaaagtgggtgcatggatcttacttatttcttgcatataaataactcttgctgcaaatgttgttgttcggaactcctttctgtcataaatttaaaaactttgaacaaatcttcttctaaatgacaactacttatgactaggaagtataaatattctgctctattttgtctgaaactatgctacaagttgtgccaaacctcacctactgcgttcgttcatgcagatcagctgagcttttaagtagcaccgtataatgagcatacaattaacatatgattaatctattattatgaacttgacaaattagcttatttgaatattaacagacaacatctatctatatatatatatatcatat

SEQ ID NO: 10313 - DNA, 397 bp, Oryza sativa
  unsure (1)..(397): unsure at all n locations
ttgtttgaaagcacatttaggcctnaactttttgttttatgcgtaacaaanaaaataccattgcggaagattaattaagtattaaatattacaaatttaaaattttgatttatttggttttcgaaagaaacttctatatattatttttttaaaaaacacacgcactatttagcacttttagatgtgtgagccttaaggattgcatgcattgttggtcttccattttactccattgattagtggtccaaattgacaactacggtagtagtatgaatatgaatagccttttgaagtaataattttttttgctataatattgcaatgaacaatcttatgcggctagtttggaccgttcaatttgggtccaacgaataaataatatcatcattgctcaagt

SEQ ID NO: 10314 - DNA, 402 bp, Oryza sativa
agcttgataaaaacaacatgtagggtgtggactttgcaaccgcgttatcgttgtcgagcttgccgccaaagcgacacaacagctccgactttaccagcaaccgcttgttatattgataagttaattgatggtaaaatttctatagcaaatactagttatattaaaatttgttcggactcaaaattctttctgactccatcactgcgagtagcgtggcggatccaccccgcgcgtgactgcctctgtgtttgtatgtcagtatgtgttatccttagcctttggttggttcagcgagacgggcacgctggcctcctcctccggtttgcttgcaaacttctatcgtgacacaacacacaagaacggctgctacttgactttgctttgcagcgatatttttgactc

SEQ ID NO: 10315 - DNA, 396 bp, Oryza sativa
ttttaaggctgaaatggaaagagggaattacagattggtttgttccttcaagaatacacgagcaattgatactcgttgtttctccccaccgcttaactgcaaaggaagtaaaatcacagattttgagacattattgctaggaccaacaggttctgactattctggatttggcatgtcataaaacactgcatctcacctttaatcctcgctctcccacaactgtgttgtacttgtcaggaaagttcataattgtatcatgaatagcagcccggcgggcaacgtcataaacctgtacgcaaataaactttatcttgaacaaggtcaaatgaccctactccctccgtcccataatataagggatttatggggggagtactataacttcataatgtaaat

SEQ ID NO: 10316 - DNA, 398 bp, Oryza sativa
  unsure (1)..(398): unsure at all n locations
agcttctccacttcatcaaaatctttaatattttcaccaatatcgttctttgtagaccgatattcttgtaccctcttttgtaacaactctagattagcttctctactcattgtacaaattgacatggcctagccgtgctaaactagccggctttacagagataggtacaaatttgccatcggaaatactaatgaaatcatacctagaaagatccatccccgataagcattgaatattcccatgacgccactcaaaagtagcatcggccattgcaacctcggccgatgtatccgcttgaacaatctcaacatcatcgccgtcccattaaattaaacattgatgcaaggtagaaggcacacaacaattggcatggatccaacaacgacccanaataacat

SEQ ID NO: 10317 - DNA, 400 bp, Oryza sativa
tatcactgtacttccctatcttgactgtcaacatcaagttttcttcttgaagttgtcagtcgggggctatcatcataataacggagtgtgattttttatcaattcaatttgcttccttggtctatcattgccttgtttgatttttttctacttagtttgcgaggactgaaagtttttaatagcttctttgggttttaggctcaacaaagcttgataaaagcttttaagaaatcaaagacttggctagaattatcaagcacagcataaatacaccagtattgtacaagttatgcctccatttgctacatttatgctcagtcagaatcagtcctttcatcatcagagttattactactcggctgaaggtcggtgttgcggaattgatctacgacgtcacttg

SEQ ID NO: 10318 - DNA, 399 bp, Oryza sativa
agcttcaaattcatatgaagcatctgaactcataaccagcatagggatgggaaagaaatacagaaagagggccatagttcagtcataacaaatactaatgtgggtataaaaatataaataaatcgacattatgttataacagaggacaactatttcatgaatgatgaatttattgcccgttatccacgtaaagcatcaccataaataaactatttgatgaatgaactggtcagagagaaaacaaattaaaaaacagaaccagaaaatagggatatcaagtgaaagcacaatatttcagttgtaaggataagcacatacattcagtaggcctgacattgtgacaacaacaaaagcaagtcaaagactcaattgtaagcagctagcctcccaatctgaaac

SEQ ID NO: 10319 - DNA, 402 bp, Oryza sativa
tgtttgcttcatcatttgctgccgcttttgcttccgcttattcatgagcatgaagctcaaatgaagtgcgggatttttcagcaagtgaactagcttcagctagcattgattttgctgatgtttcactctgcaaagcactggatctctctttctcagcatgataaaacatagcagatataacctcatactgctctagagtatccaaaaatttctgcatatatagtaaaaagatatggaataaagtgagttttatttgaaatacttacagtttgtatttatacggttgaaaagaatacctttagtgaagatagtgtagctggcaagttagttaccaaaagatcctgatgctcctgaacattggaagcaatccagttagattaaaaaaacatagaagttaactaa

SEQ ID NO: 10320 - DNA, 389 bp, Oryza sativa
agcttataagaagcttatagcttactattatacttgctcttaacccgcttggactttaatactggatatagcgttggcgtgtctatgttaaaaaaaaaagaagaaaggccaaagaaatgcgaataattaactggctaaactgtttgggtggccactgtccacatgcccacatcatcttcaactgggcctacataggctttacatggtgcatatatctcggcccattaacttgttagcccatctcggcccaataagcccaacacaagcgctacaaaatccccatcgcttcattctccgccgttatcccccctcccgccgccgccgccgacgctgcaaaccctggctcgcggctcggaccaacggcagccatggtgagctcctggaaccct

SEQ ID NO: 10321 - DNA, 397 bp, Oryza sativa
tgctgactggtgagctctgagaaagttgttttaggtattccacaattggggctcaagacacgtcctatatgatccaacaaccctacaccagaattctgcatcagctgggagcaaggttctaaaaacgtgaagcggtgtggagcggtcactacaacttgtagtgcttaatcggaaagcgaccttgtaagtggttttaagggtttttttaatctaaaatgtgaagtatatacacacacatatattgaacatacatatgcatttttatacactaatacaatacaatattaccatctaacccatctttctgtgtgaacaatgaacataggtttataggatgaaagtcatacaaaagtacatgggccatttgatacgtgaacgtcaagatggataggatcaa

SEQ ID NO: 10322 - DNA, 399 bp, Oryza sativa
agctttcgatcatcacatgatgaatcatctatatgctatatggaaggaaatggtcaatggttacaaaacaacaatcagatgttacaggtttctcagttgattatcaaccatctagaggatttctgtccattcaaatttgttctaacatatgcattagaaaggggtcgacaaagtgctgtactgctatataggcaatataaatccattcagggagataaaatacctcaattttatccatggaacgaagaatgtcttgctcgtcaaacagcatatcctccacagaaactttgctgactttgacataatcggaaaggagcagcctgtagatggcctttgtggcatgggtcatgaacacgcgccccttgaatgtcgtctgctaataaaaccaaagcaacttga

SEQ ID NO: 10323 - DNA, 390 bp, Oryza sativa
  unsure (1)..(390): unsure at all n locations
tgaatccacagattatgttggattgtgggtggagttataaaaaaacatccctgaaatagatgtggaggactgtcatttaaactaccttttcattgacacatgcactctcaccgaagtctaaccaccaactacaatctaacttggaaattccgagattactcacaacatagaagaacatatagctagtcagtcagataacattagcactacatagagggcacagcacctccaggagcccaggacctaatcaaactagaaccgaacttgtgcaccatggaatcgtatgcccgttctcacaacaatttcgcagctcatagctgggcactaccacgcggatcagatttaactatggagagaaccacggngggagagattccaagcatgaggcga

SEQ ID NO: 10324 - DNA, 378 bp, Oryza sativa
agcttatccaaaataatctgagttcaagattaaatcatcgagaccacggcatagtaacttaatttatctaataattaagcaagctttgtatttatgaaagtttgagtcatgtctgatgaggactttatgtttttccttttatctttaggaaaagttgtttaatgtccgatcaggactagtatccgcccatgggtataaatatgtacacctagggtcctagtaatctatctctcgaccaatacaacttcgggacatcgccatccttttcattgtcgtcttctcgacgagttcttatttcaagttgggctgcatcggcttcgatctccaatgagggataaggcttgctctggctatttgtatcgggtggggatagggcct

SEQ ID NO: 10325 - DNA, 393 bp, Oryza sativa
tcgatacgcttatacacaggctgacggccttcacagtcaattccacgaatgtatacacccttttcagaacccagcagtcgatgttcttcatcaaaccaaaacggcaggatgctgaaacaaacaaggtcttcatggctatccttacaagcatattggtctacgtccttcaactgcgggaactcgtcgtcgtcgtcatcaaacaacgccatttgcttgattaccagaaatatcacgtccctgaaaagaaaaagaaaactcctactagattagcatgatttcaagaaaaaatgccaaaataatagtcaaaccagaggaactgagtaaaaattagagcaccagcacaaaaggcaaagcggcttatatactggttcactgaaccaacacccaaagcag

SEQ ID NO: 10326 - DNA, 179 bp, Oryza sativa
ttttgcttagccataaggctgaatatgtcctcaaaatcatgaaacaatcaagaaatgcattttttttcaccacagagtaaaaaacggatgagaaattgacctaacctttggagaacatcacgtgtagggttaccacttctagtgtaatcataaggtccattatcggttgctgaaggctg

SEQ ID NO: 10327 - DNA, 195 bp, Oryza sativa
tctttctttgcgccccgttctggttatggagatgtccgaactgcccaatgcttttcgtctattctcaggtccccattaacactggcttcatatttccgccgtgtcgttagggtcgttattgaacctgcaaccttgcagttgtagcgtattaagactccttccttggcttaattagcgatcacagatatacccgcc

SEQ ID NO: 10328 - DNA, 150 bp, Oryza sativa
tctttcttctgctcacctttggatgttccatagcattaatggtagctaatgtgagtgacagtcgacgaggctttgacacggtgggagtacattggttggcatggtcaattctggaaggaacggtaacgggatggatcttcaattagaact

SEQ ID NO: 10329 - DNA, 432 bp, Oryza sativa
  unsure (1)..(432): unsure at all n locations
agcttcattaaacatattccatgactgctgagactcttgtctcaccttgctttatataaataatcacgtttgagatggatcccgctgacgaggagttcttccaagaacaagtcggctatgatgagtattaaggttncgatctatatcccaagtcgcgcctgtgatgaatggtccaagtcttggcttccactttcctcttttgtaatgcagttgtgagctcggggtctgtccgcagcccaacatgactgtaatcctactctataataaagagacatctgctgctgtgggattctgtcttcctgtgataccatcactattttttgggactggtatcggttaacaagttgatttggagcgtcacgggttggtcccgttcagggctagttaaggctagttcggtgtgtgacaggacacgaccacacacatgcgtac

SEQ ID NO: 10330 - DNA, 94 bp, Oryza sativa
gcattttttgtctttaaggaacttaagggacccttcttaactttatgaaagtttagcagtagggattttgtgaagggtttcaattaaactttta

SEQ ID NO: 10331 - DNA, 426 bp, Oryza sativa
tataaggaggaacttgaattgaaccatgacatgccattctatttaccacaacgcttcggctaaacaagtatgccactgccgaggataatcagaaattttcctcttaagctcttgttatatgcctcggcctgcccattatcttgtgcataatatggtgaagaattcaacaatttgatacccacgctatcggcaaactaaacaaactcatgggacacgaaaatcgaaccttgatcggttgtaatggtttgaggaataccacattgataaattatatgttcttgaacaaattgtatagcatccccagaatcaaatttcttcaaaggaatcgcctctacccatttggtgaaataatcagtcgccatcgatataaacttatgtcctttactcgatggcggatttaccataccagtcatatcaatcccccaa

SEQ ID NO: 10332 - DNA, 175 bp, Oryza sativa
tttttttttgatgagcttacgcaaagcagagaagggcatcggcgcggggttcctagaggatgctgccacctccatccccttgcgtcacggccgtgctgccctactggtcctctggcacagcatctaaggtcatctgccaccacaaccaggttgcatctccaccgaatgtgacccc

SEQ ID NO: 10333 - DNA, 454 bp, Oryza sativa
  unsure (1)..(454): unsure at all n locations
taagcttgcatggatgacaacttcttgataagatgaagctctcatggatgctctatctgctaaccagcgcatgattaacatgataacacaaaaggattatatgattgcagccaccaagagggacatactggaggatcttggagcaaggcacgttatgatcagtcaattcgaacatgacattgaattgatgcgtctcaccattcaacaataccgaaagttgtttgagaacacttctgctgcatatctagagtataggaacaggatgtcacgtgatgagggtgatggttcatctctggaagttattggcatagctgatgagacggagcaatcttgtaggatgcagcaactggacatttatcagaggcttaataagtttcaaaaagcttggctcacgacatattcagatcttgttgngcatttgacaagagtagcataatgcatgacatacctcagt

SEQ ID NO: 10334 - DNA, 181 bp, Oryza sativa
tttaagcttctcgggatcttggtctctagcccgaggcattgaggccaaccccgagaagatacgagctatagagcggatgcgcccccccagcaaacttagggatgtgcagtgcgtcactggttgcatggccgccctaagtcgttttatatcgaggctgggagagaaggcgctacccttattt

SEQ ID NO: 10335 - DNA, 415 bp, Oryza sativa
ctttggatcttccagcttttcctctggagaggagattttcttcaccgggaacgaatctccaatctatgtgctggcttaccactggcaatcgatgtgctcagtgcccttctggcaaaaaaagaccatagtcaatggagcagcatcatttccgaactagaaagccatggtgaccttggagcatccacccgaatattagaaacaagcataaatgagttgcccacaaatatgggccacaaaaattgtctgttggattccagcatgtttccaaagagctcaacagttagtcacaatacattggtcagattatggattgctgaagggttataaaacgtcaacaagacagacgcggcagcagttcggagaaatactcagtgacttgttgacttcatgtctaatggtgaagacagtataagat

SEQ ID NO: 10336 - DNA, 184 bp, Oryza sativa
ttctttcttggtcaaaattgtgttggttcaaagagagttccaccttagaattgagtgggcaccctcactggcttggccggctgccttggccctatcaaagtcacaaacaatttttctaagagcaagaattttcattacaatataaaacttccatatttcagtaattttatacaaacgaaaacag

SEQ ID NO: 10337 - DNA, 372 bp, Oryza sativa
tcagcatccatgggcctatagcacgcaaggagcacttgctgatttactctatctttctttgttctatattggaggcaggcaatcagctcatctgcctgttgctattatgcatacctttttgccgcacctatttcgtttttatgtcagactaatcccaatttattatttctgcggattcatttttcctttgttatccaatccttctaaccggcagcaatacattaggtaatgcacttctgtgaattatgatgtattcctggttgctgaatattctcttctactgcttcttttcctaggagcaattctctgcttctttaacaggatataactatctctgcgcagttataggtacttatgttgctgaatgaaatg

SEQ ID NO: 10338 - DNA, 79 bp, Oryza sativa
tttatccttaaaagcggggcaaaaatgaaagcgaagtaattggtacctttctatggggttctgagtacagcaatgattt

SEQ ID NO: 10339 - DNA, 345 bp, Oryza sativa
aagatggagccgtatgcccgctaatccgctgctgattattattgttgacacgcctgaaaagcccttggcataatgtaaacattatcgatgtaataaagatgagtcttttatatcaatgctgtaaggtgtaccccggcttttcctgggacggcgattaatacactagcgatcgggagaaggcaattttcccgagggcgacaagctggtatcagagccatctcgactgtacgataagccaagcggataaaacgcaatgacatatgttataaataaaattatgtgcgagaggcccttttctctttccctatgctattccaaaagggtactcccgtgtccttcttcgga

SEQ ID NO: 10340 - DNA, 176 bp, Oryza sativa
ttcaagcttggttatgtaggtgttgtaaatcgtagccaagaggtaccttctaagacaataccatgaaccttcattagattgactatcatcttgaatttcttcttcgagttccatagtctcacatgatatgacaatgttttttctgcaatttagaaaattatatggtttgctcatgc

SEQ ID NO: 10341 - DNA, 332 bp, Oryza sativa
  unsure (1)..(332): unsure at all n locations
gaaacccaaatatcacaaagctgcaaaagaaaaaaaaatggacagatcatcaaaatccgagcggatcaccgacgaacccatcgagaacacgagcagggaggaaaccctcgggtcggatcagaggccacgaaatctggaatcaagcatcccccagagagaacccaaaccaacccaagctcatatcaatcttggaacacctctgacccccaggatctcgatgatgaggtgggagatgaaatcccccacaacacaccacggagcacgcagacatgcattnttcacccccaacgatttgacttgatccaccgccaaatcacaaatctcaccaaccc

SEQ ID NO: 10342 - DNA, 188 bp, Oryza sativa
tttttaatcttggatgtcactgctacccttggattatggttaacccctgcttagaatatgattatcacaagtaatatcttaaattattatgtcaaagttctctgtcacgaccggtaaataaccccaacgggcgttccttacgtgcgtgcattattccttgacccaggaggcaaggtacaccaaaagtc

SEQ ID NO: 10343 - DNA, 70 bp, Oryza sativa
gggacccgggggatccacataaagtcccacccagcaggtcttttctttgccttcatctctgcaaatgggc

SEQ ID NO: 10344 - DNA, 180 bp, Oryza sativa
tttttcttttccttagacctaaaagcttaaagcatgtttcactttccatttttacccaaatgggatgcgtatgtttgtgtatactctatgcattcaaaatttaggtcatctttaaaacataggatagagaaaacacaacggaacggaaaaaacgtaggaattgaagtattatatgtttat

SEQ ID NO: 10345 - DNA, 308 bp, Oryza sativa
cttggatagccacggcagtgcttgaatctggaggggtatgtctttttacattagagcacattgcctcatgagcaacatgattacgcaatgacgcctgatcgacaaccatttgtggcggactgggtgatttgatgactgaactatatctgattcttatcactgagcgacgtgaactaacttgtatatcactcgatttaattccgcaacgatatatggcgcaatgcatattatgaacgacgagagtgtgacatcaaatgctttaggggtctataatgaaagttagcatgacatgctatagtgttctgttc

SEQ ID NO: 10346 - DNA, 460 bp, Oryza sativa
  unsure (1)..(460): unsure at all n locations
tctctagaagaaatagcttcggcgtgaatagtanaagcttgcattgattgctactacgcataataatattctcgatcgaagggacagaggcgacgagtgtcgagaagggaaggattttcaatcatttagccgctccatagacttttaagcttagtatggagttggctggattagatcctcgttgtccttgaagaagaaggcggaagacttaaaccctttatttcctaatttttggttcggctctcctaaagaattgacttccaaaagccacatattatacaatttctttattcggatagcgagtcaacaaacgaatccctttcattaaatgatatggaaatcgttgtttcacttctcgataacggtagaactcaagactctatttcccttgcgaagggggccttggatataacttgtaaaatatatcagacataaccaagacaatataaaactgaagata

SEQ ID NO: 10347 - DNA, 202 bp, Oryza sativa
tttttctttcgcgttgcgaggagtttggagctcccgcgccgtcaccttcatccggttccccctcgtgcaccttactctcaaatatcgcattctgcgccgtggttcgtcgttcgcttgctacccttaccaccgctcggtgttggagggccgtgactcggcgccgctttttccgttcttccttcatctccaccaatcgttcctc

SEQ ID NO: 10348 - DNA, 448 bp, Oryza sativa
actataaaactcaagcttgttgaactcctgaatgacgaagatgaaattatgtttttacgtaaaacgaggtggtagtaacttgtgattaattgagttttaattattacaaacttaaaaaatagattaatataatattttaaaataataactttcatatataaaatttttacataccgcttaacaatttaaagtatgccacagaaaactaaaactttatctcccgttctcgaacagggcgaataagccaacaatgtgattttatcgactaccaagaaagcacgagaagcgaccgtagcggtgggattggatctctttccacggctctagtcgtttctttccttcacgatatatttaaccattatcgaacggctacgggtctttctctgttttattagtgtttttctgaatcatatggccaatatttattcaatgacgtggcacatggtag

SEQ ID NO: 10349 - DNA, 174 bp, Oryza sativa
tatcttgtactgaccaaactccaatgcaccacgattaatgttccatgcagcccttagctttttgacatgcaaacactttgactcaacaagccagccagaagaaacaaaactggtctgactagtactccgtcttgcatccgatcaaagaaaaaaattccttctcgatccaccagc

SEQ ID NO: 10350 - DNA, 173 bp, Oryza sativa
agcttgtccttgttctcccatccttgcgacgaagcggcttagcgaagccatgcatcccatcaaccgctgaacttccttgagccttgtgggcaacttcatgttctcgattgccttgaccttctcggggttggcctcgatcccttgtcctgagacaaggaagccgagtagcctcc

SEQ ID NO: 10351 - DNA, 454 bp, Oryza sativa
  unsure (1)..(454): unsure at all n locations
ntatcattcttagccaattacatcaagataatataattttctcttatactacttttggcattaacataactagaatgcacatacaacctattattattacataaagagaaatattatgccgcagcagactataacacaagctatttcttcctaacaccccacagcagcaacacttgggctgcaaaacaaaaaaggctgtcctaacgatgcctccgagaaagaaaatgacactcaaacgtgctgccattgccatgaccgaacctgtaaaggccaaaacatatgtttctccttcattagagagcaaatctttgactctaggcagtgccttcaacatggaagggaaacaccattggcaggaacaaccagctaagggctgtcctangataagatgatttgtagaggcatgatatattntcatatgcttataatatcctttcatattatcttttcatta

SEQ ID NO: 10352 - DNA, 179 bp, Oryza sativa
  unsure (1)..(179): unsure at all n locations
tttttcttgnagaaacatataaataaataggttgaatgaagggatataaagattacatatatttaaaacatcatgacttttaacatcctttctcttatacatatttacagtgctagaatcatccataaaacttatagatgcacgtaactagttatttataaacataaatgcatgaagaa

SEQ ID NO: 10353 - DNA, 411 bp, Oryza sativa
tctagaggaaagtacatatgccaagggcctcttctcttgaccagtgctgactcgaaggcactatcagtaaaagtcaccaaactgatgaagcagaacgagaggcttagcagcgagttggcatcaggaagaaaccaaagaagaggaagccatggtccgaggggagctaagagggaaagccacacgaaacgatatgaaccagctcgcagaggagacattaatgctctggaggccatgctgaaggagaatgaccaaagacacgcagaacttcatacgaaaattgaggagtcaaaacacaaggaagccttcctggagaaagaacttgccaatatgtggactgtactggcaaacttgaagaaaccaggggaattgaccaagaagaatttgactccaaaaccatggatcatgggcctg

SEQ ID NO: 10354 - DNA, 179 bp, Oryza sativa
tctagctttgcaaaattattatgaagctacgcgactagaaattgatccctatgatcgaagttatatactctataacataggccttatacacacaagcaatggagagcatacaaaggctttggaatattatttccgggcactagaacgaaaccccttcttaccacaagcttttaataata

SEQ ID NO: 10355 - DNA, 439 bp, Oryza sativa
  unsure (1)..(439): unsure at all n locations
tggtgtgatcaagctgctgagtattggaaactatctatatctcttactccgggaaattatattgaagcacagaactggttgaagattacgaaccgctctgaatttgaataagaccactctcctttttcagaaaatgggggtttggttgttgatccattaatcaaataaattaggtcggaagatcgaatcaggaatttcattatatctctttcctctgccttctattgtatattatatttcataaggataaacgatagggtctagaatagaagtaatatagcgaataaaaaggggcagtataaatattgctaatatatcaggaccatcttattaataattctaatggagtatcttggaatttggaatcgaataanaaaatctatattatgctcaaggagagtagatatagatagggacttatactcttaataaaatagac

SEQ ID NO: 10356 - DNA, 176 bp, Oryza sativa
tttcaagcttcccaactagattgcacgagcatggattggtcaggcgatgtgtggatgcatatcaagcgttcatgctacaggagattaattggccaatcaatatatgcgagctgcatatacgcattgataaatgccaacgtatatacacaagcttctttatacctgtatttatttta

SEQ ID NO: 10357 - DNA, 440 bp, Oryza sativa
taatccgatggtaagtgacattcagattgttcactttcagatattaatgactctttggcggctctattgggcgttcacagaatctaccacctcataacgcgacccgtttcgggtgcgtagggaagtttattaagaacgagattggcgagattcactatatgatgagcgctattaagtgattttagatgggttgggagacatggtaattctggtaagatggggatggggaattgaggaaagaactccctccttttcaatacctgagtaagggcaggtaattgcgaaggaattcctgctttattttgtttaagcaaatctcaaccatccatttttattaatgacctaatccccaactaaactccctatcaatttacatcacctctaccaaacaagatattgtggatataaatcaaattcccatattaatctcatcatcaatt

SEQ ID NO: 10358 - DNA, 172 bp, Oryza sativa
tcatgcttcgctatggcgcttcggttggcctatgtcatgcttctccggtccttcaaatttgttgttctcacgatgatcaaggaattgtttaggtccaaacagcagctgatcacaagtagccatatcaaacataggtttatctatgcctttctgatctgaacaaatgatgggt

SEQ ID NO: 10359 - DNA, 401 bp, Oryza sativa
tttcatagagtccaagaacgtcaattccgagaccctgttcatgagatatcgcccgtttactaacggccggttgagctgataagtgacctgcggtctaaccgctgccattacggcggtctgatcgaagtatgatgtccggtctaaccaccactcccatggcggattgactgctcatcctgattttgaaagaggtctcgtcttggcgatccaaagccgctagagccgcagccggtcagaccgagcccctggcggtctgactgagccgtggacagtctgactgtccgctacactgcggtcaaaccggccacggagagtaagctcaattatttgcctattttctagaccgtacaaagtagtctggtctgaccggccacactatggcggtctgaccgagataacat

SEQ ID NO: 10360 - DNA, 213 bp, Oryza sativa
ctggtaccccggatcctttatagttgatctggaggtttttttgcttgatctagaacaattctttttctgccagttgtgctgacacctgtaaacactttgtttgtggcgagacgaaggaactccaattggatcagtctgggccatgtaatcgatacagaactcaatggcttcctcggacatgttaccttcaatgatgctcccctctggttatgc

SEQ ID NO: 10361 - DNA, 296 bp, Oryza sativa
tatacgatgcataagctatacatgatgcgatatgttacaaatgcgtgcacaagaaagacaactccccctcaaatcacgccatatgggtggatcacccctaactcactccgcgagaactctgaacgagagcgatcaagtggtttttaaacacgtctgccaatttgctatcagattcaacaaactctagcacaatggtacctttctcaacattgtctcagagaaagtggtcccgtatctcaatgtgcttcggcctggagtgtgaactggattctttgcatattgatcgcactatatta

SEQ ID NO: 10362 - DNA, 175 bp, Oryza sativa
agctttcctcggctcgtttccacccctagccgtcagtgtatttcactcatcaattaaattaggcggttgatactgagtacgaatagccacgagtcagtccgcgtactttactatactttagccattccacatcagtccgtgccgctctctgcccattctcttctccacggcaaac

SEQ ID NO: 10363 - DNA, 374 bp, Oryza sativa
  unsure (1)..(374): unsure at all n locations
tctcagtgaaaggcctgatctccagagtttcattgattgctgtcaaatatccatttttgccaccattcctagtgatttcctctgtccactgacgaggcatatcttcaaccgtccggtgacaatcgagacaggtcagacgttctagcggcatgctntnnntcagtggttcgataaaggcatcagaatgtgcccaattacaggtcaagaacttgaaagcctgtcgattccagacataaaccgtgtgttaaaacgcttgatcgataactggaagttcgaacactgcaaaactctgaactctgaaantacatgtcctgataagggagtaactgcaacattcgtagagaatgtcctttcttctgaatgcgagacgtctg

SEQ ID NO: 10364 - DNA, 169 bp, Oryza sativa
agcttctgctttgtgcttttgagcagctctcagatctcaagattaactttcataagagtgaattattttgttttggtgatgctcgatccatggaagaccaatataccgaactctttggttgttcttctggcgaattcccattatgctacttaggcattcctatccatta

SEQ ID NO: 10365 - DNA, 390 bp, Oryza sativa
ctgcagctcgcctctacaaggtttcaactctctagaggtttcgttccactggagacagacagagaaaaagagatcagttcaaacaactgacatggcatgatttggctgttatttcatcaatataaccacatgtaaaggttcagcggtagttgctaaacttgagcaatgctgtttatgctgaaaatggtgccaataactagcaaattcataaggaaaataaacaatggaaatatatagaacgaaatgaacctcacaatcggttgggaaaatatttggttgctcagcttctgccctcctttcaagtatttgcaagacctattaacacatcgaacgatgcttaataggaaacacgtagactgcactctttatattaccaaatggatgtaatat

SEQ ID NO: 10366 - DNA, 180 bp, Oryza sativa
tcttgctttatcgttccatgattggtagcttgctttaccttaccgcatctaggccggatatcatgtttagtgtttgcatgtatgcacggtttcaagccgctcctaaggagtgtcacttagtggccgtgaaaaggattctaagatatttaaagcattcctctactattagcttgtggtacc

SEQ ID NO: 10367 - DNA, 395 bp, Oryza sativa
  unsure (1)..(395): unsure at all n locations
tctgcattagattaccaaatatgttttatatagggcatctcaccttacctatatggccttcttttttacctatagtaattatttaaccttttgtggaataaaattgtgaactgtatgtctaacattgaatgtaaatatttgtcttgcctattatttgaagtatttttggcgaatgtattcttattatccactaagcctcaatcaaccttgtaggttgatagtgttggaattaatgaatgggccttagcccactcgaagattaattctttggaaaatcacaaaagcccacctcatgggatggcatgcatgtggagtttagtaccaccttgcttattctaggagagggggacctccttnaaagggaggatgtcctcctagccacttgaagcatgtgt

SEQ ID NO: 10368 - DNA, 178 bp, Oryza sativa
ttgcttgaactgaaatgcccattgatcaactgatacagcatttgtggccaaacatagacaactcttcttgatacgacatgcagcagatacaccaaccaaggacttgccagcaccacaaggtaacacaataatgcctgaccttgctctgcctgtaaaatcataaaaaaaatattcaatg

SEQ ID NO: 10369 - DNA, 441 bp, Oryza sativa
  unsure (1)..(441): unsure at all n locations
tgtgggtgtgctcacatatactgaactgattgaatcttgtcctttttgctacaataactaaaatgtgcatgacaagatttgcgacccttgtatttaggcaattaactgccctttcgactcatcaatggtcaagtgacatactgacatatactagatatntgataaatgaaagcaaatacaataccctcattccattaaaaagtaataaaataaaataaaataaaatcaacaccataccctcacagcccactagtccacagagaacatctcgccagttgcatcattggtcattatcaacatcgtttctatttggttgaaaattattacactagcttgcattacagcattggtgaatcatctttgatggcagtatcgatcatcatttacagattaacataaagcaacttgcagtaataagtaagatcacaacanagttgacta

SEQ ID NO: 10370 - DNA, 176 bp, Oryza sativa
tctaagcttgttcatagcacctggttgaatagcaaaatgacactacatcctctggcttgatcctttcatgtcttagacaggaaatggcatggttacaaggaatcccagtgagctgccacctcctacagtcacatctctttacattaagttcaacaatgtattgagatcctatgtcg

SEQ ID NO: 10371 - DNA, 403 bp, Oryza sativa
  unsure (1)..(403): unsure at all n locations
tgagtactatctctattccaaaataattggttatttacttttattcaaactttatggtgaaataaatgatcataaagaagtattacttgtcccatcaatcacttataattcaaaaattcacttctctgtgtacactcaaccatcattccacattgaactatacatcacataataaaaggtactataatctttnttctaaaaccttagcctatgccaaataacccaaaacgataattaatatgggactgagagagtaacatatgtagcagaaaccaatagctccccagcgatcgatgtagaatgtaatatatacgtacgtgtactgcggccactctgttgaaatggaatggtttgctaggctgctanctagtactctctctggttataaataatgcatgatgca

SEQ ID NO: 10372 - DNA, 173 bp, Oryza sativa
ttatcttgaatcaacaatcaaaattcatgatttcatacgatttataatgcaacatcttaacaagcacataggttgaagaataaacactaaacacatatacctattgcatttatcactctttctcaaataacctttagcacaaaataaccaagagaattttttgaactttttct

SEQ ID NO: 10373 - DNA, 441 bp, Oryza sativa
  unsure (1)..(441): unsure at all n locations
tatcctgttcctccacagaaaaatgctcatcaaacaattgcctctactcaagttcttctctatggacatgattagtcaatgcagcccggatagacttgcacattccttgaagctttgtggcaagctcgttgtactttctagtccaatcaatctcatcagaggaattaaaatcgtttttctctgcttcactgacttcaatgtgggggtgggtcaacctctcatgtagctgcgaaagctcagcgagggcatcagatatatctccaaataatagttcttcttgcttgtggtcaagagtgtacgagtgactgacattgtgcaatgtctctcttgattctaaagcaggaaaaacaatttcatcctcagcattactgtgtgccctggaaagaccccacaatanacggaatccttcaatgaactggcgaagacaagactcattaccat

SEQ ID NO: 10374 - DNA, 173 bp, Oryza sativa
agcttcaaaaccactagtatctattcgtttgtaagatgcagcacggtgttctgggcaactgtttagactttagttagtttcaatcaagctgccttgtgttattttcagtgctggctgataatgttgactataacctcatttttgttcttattgtagcccccaattgtcaacac

SEQ ID NO: 10375 - DNA, 334 bp, Oryza sativa
  unsure (1)..(334): unsure at all n locations
tgtcctgtcacggacccacgactgtgcatgcaaaaggtgttgtaatattntattgatgaatcttggttggtgcaaacgaaccgataatacaacatttgcttatatgcgatagatcacgatatgagataccgttttatttaaataatatctaccttagccatgtaattatgaaccatctaatctcaatttagtttactcaggcttaggctactaaccaaacaacatttgctcaggctagcctcatcaagcaagttttgacaggatagctaatgccttttacgcatgtaactttcttaggcacatcactcatgtagccaaccagacatgcccaaat

SEQ ID NO: 10376 - DNA, 175 bp, Oryza sativa
agcttagtttagtagtctcaagctagtggagtaggaatagaatataaatcggagtccgggagtcttcggaagagttcgagtatgattggtcgacgtttgccgcgcgcgtacgtggaagccgtggtagagttgggcggtggaggagaagggcacggcatggcaacgacctggcgtg

SEQ ID NO: 10377 - DNA, 432 bp, Oryza sativa
tcaggctttcatatatcagattctcatatgtttgggttgcatatatattcaactcttgattttgattctagaaaccaccagtcagtattttacacgcttattccgggttcgaggacattgcctttttttagaggatctgatcacctgaatgtgaaaacatgaagtggggttcttccttgtttgttatctcgcgtgtagaatgtggtcgtgatgataatgatgatcatgaatttcttactcattggtgagtcaacggatctgcatatacttatttatgtagtagattcaatttcaatgtagaacttagctctggaaaacatgaagcatctcttgtaagattatgcatgctttactgatggttgacttccttaacattctaacagatcaatgggctcaaacatagataatgatagtgctcaatgacagaccaat

SEQ ID NO: 10378 - DNA, 174 bp, Oryza sativa
tcaagcttcaaaccgtcatcgtcaccgatatctcctgtatctccgcaaaaatctccgcttcgggagctacactttgtggttacaacaatgaccaggttcgccgttccaatctaccaattattagattggtctcagatttaactactaattaaatcaatctatgtcttgcatgca

SEQ ID NO: 10379 - DNA, 346 bp, Oryza sativa
gcattttataagccccggaggcggcgaggatgtctggacgaggcggtaacggctggcaaattgaggcttcaaccacgtggggatgtggcggcggttcatcgcttgttttcggggggcaagtaggggaaatggcgaatgacgtggagggaacccgggtcgacatgctcggatgcgcaagcgtgtgtgggagggcgatgatttgtcgggacgtggggaggagggaagcatccatggcggtctggccggaataggggatgaccccgattggtgggccccacctgtccgtggctctagagaggagggaggtgaggtgtacttgagatggataggccaagctgggccgtcg

SEQ ID NO: 10380 - DNA, 151 bp, Oryza sativa
tctagcttcaaagcctacccgcaagcgtatttgaccggagctggggagtattttccaactttacccctacacttggaggcaattgcaaagagcatctcaggcggtgaggctggccacgaagaagatcagttttatgctactgtaactggat

SEQ ID NO: 10381 - DNA, 334 bp, Oryza sativa
acatgtatctctctgttgactacaaaacaatagcgaacaagcgatgctccatatactactactactactagaagccataggactgtggaatgactacaaagaaacgctcatggactatccttgtggctgaagccaaagaaagaagactaatcatagacgaacaatgcacaccaactttacactggtccccaagcccacatgggccagcaggaaaccactgtgcactctcccactcccacgtcactgccccaactacctatactgcgtataaatctcaccgtccacatgtacccgagaccttgaaccatacatgcatctatccagccacccactc

SEQ ID NO: 10382 - DNA, 430 bp, Oryza sativa
ctcagcttatcgtgagttattattcgttcttgagcaattgggagtttgggactaacataattagctgcattatgaagggtcctctttttttcctcttaaagtcagaatcatgcacctggtatgcatatgcatatgatagaaaataaaacagaaggggaaaggcacaaaggcactccaggatgttctatccagagaatagcagaattgccacttggattatcaccaccaatttctcttctgctctttcacaggaaaatgtgtgacctgtgtgagccgtaagcccgtgacacgctatgtcactagcgtacgtagttagtctgtggcccttcaaaattttattttgtacagaggacgccaagatgaagcctgcatatcaccttgatagagaaactataagtaagaatccctcttttctttatttctcaatgat

SEQ ID NO: 10383 - DNA, 174 bp, Oryza sativa
agctttagccctaactgtggcagatatggccaaggaagaacctatgatggtagctgcaacctatttctggtccactgctatgaatgcttttcttttctctcaaggacccatgaccccaactctcttggatattaaaatgataacaggcctagatatcacttcatcggctaactt

SEQ ID NO: 10384 - DNA, 414 bp, Oryza sativa
tcagcagcagcttcggctgggccaagcctggcctctttatactagactttttcttcggccatagcaagctgcctctccctttcggcggccctattgttcaccccctccaagtcggtgcagagagatttattttcccccacaagggacttgttctctgcgctcgccttcttcagggcgtccggcacgactcggggtttgtcctctttatggtgaaggtcctcttccgccttccgaaggcgaagacggtacacgtccagccgctccaaggcagaccgcttcgcgctcatgtgcgccacgagaacctgggtatgggaagccgaagcccttctgttcatcatgagcgaagaaagcgaataactagatgggtgaaagtgaaaagtcagaccagcacgtacagctcttgcggtgcgcaat

SEQ ID NO: 10385 - DNA, 175 bp, Oryza sativa
ttttcaagcttcggcgagtttcagcaaaaactacaaaaccgaacaggcagataagctcaacggagcgcgtcgtgagctcaatgcactagtggaaatcaacttttcttttttttcttttatttttttgatttttttcttttttcagaacacgaaaataggcacacctccaagttac

SEQ ID NO: 10386 - DNA, 431 bp, Oryza sativa
tggacctgttagtctgaaccatttggttgctctatcctttaacctggtggtcctaaaaatcggcataaggaaacaaagatctttgattatttgttagagtataagccaaacgaatttttacaaggccagttcataccggcgctagaggagtttaagtgacgagcatattgtaagtggcacaattcatattctcatgccactaatgatagctacatattcagaagacaagttcaactggccattgatgaatgacgggtggagtttgtggctatgcaaggagatgaagaaccttctcctaaacacaccattgaattgctagagaaaaagaaccgcgatgataaggagaagagcgcattgaagacttcaatgctcgggggacaagatgacaagccaaagatggtcccattgatacagagagaaggttaaacgac

SEQ ID NO: 10387 - DNA, 180 bp, Oryza sativa
tcaagcttcgtaaacctgcaaatgcttcaactactagtcatttccagtaataatcttcatgtcagcataccaaaagagatatttagtattccatcaataattgcaattgatttatctttcaacaacctagatgggcaacttcctactgagattggaaatgctaaacaactcgtatctttg

SEQ ID NO: 10388 - DNA, 382 bp, Oryza sativa
tggaggtctcccgacgtggctgatccccacgggctgtgtgatcctgtttagtaatgtcgggtgggtaaagagtaccccctctacagaggttaacaaactgttcgaacagccgtgcccacggtcatgggcggatgtgaggtgattcctagcgtagttttgtttgactactgccttgtgagattgctgttgttgaaaggggttcgatgtttgataaatctgctgctgatgggatcagctatgcccaggtggacgtttgaaagtcgttggcccgcgtggccgtttgataatcgttagcctggcgccaatcttaaacaattttaaagactgatacattgttcatactcctaccggactaaactcactgtctcatccgtggctgttg

SEQ ID NO: 10389 - DNA, 178 bp, Oryza sativa
tttagctttagtatgtgcggaggcaatccattaggggtcaacgaatttaagaattcaggaggatagtagttgtgaggatcatcctcggcacgatcgaagctgtggtataacatttcctcccctcgaaaacgatcgatcatcttcatgtttatttgatcaacatactcatttcgtgttg

SEQ ID NO: 10390 - DNA, 399 bp, Oryza sativa
ttgcatgtttaatatgtaatcttcactaataatgaagccttttcatctaatgtttgcagacgaacactgcttactacaggggcatatctcatgctctttacgccatctgcagagacgagggtgtcaaggggctctacaagggccttggtgccactttgctggtaagaatgttcgacactgccattctctcccatctttttgagcattctacctttcgttatccaattgatatttatctaatatacagggagtatgtcccaacataacaataagcttctgtgtctatgagacattgcgatctcattgtgaaatatagaggtaagttgcacaagatacaagtgggctctttattcatatgcatgccacttctcgcatttgttctaactgtatttattacct

SEQ ID NO: 10391 - DNA, 176 bp, Oryza sativa
tttttctttagatgtatagaaatactatattaaaaaaaagtttataaactttaggtctataaaatttgaattcaaattcaaatttgaattcaaatttgaattcaaattcaaattaaatttgaatcgggtatgtaaacttttgacttataaactttggatctataaactttaggtgt

SEQ ID NO: 10392 - DNA, 352 bp, Oryza sativa
ataaaatagctttcatatagaaactttgcctatgaacttgacttatatttaatacccaacaagatggaacccggttgatgattaatgagctaacaaagacacaggaacacttgagaatatattggatatcttgtttactgacgcttgggctcttttgtaaaagattgtagacatgcattttcagggtggattaaaagctttgcatttgtctagtctgtgtttgagctgatgaagcagtctatggtattcgacatagaaagctgatgaagtcgcaactatgaaagtgtgccacactgtataaatgctattgtaacctgccatgtaataaactgtatacaaatcctggtgataa

SEQ ID NO: 10393 - DNA, 175 bp, Oryza sativa
ttttgcttgcaagttatgcttcctggacttgtggataggataccaggactttgttacctcggaagttgtccttgtcggctcgtggttcttgtcggaaggacaaggtttagccgcactagcaaccttctcgagttcgtatgacatcgatgttccgttctccactacggcgggagga

SEQ ID NO: 10394 - DNA, 434 bp, Oryza sativa
taatccttttaagtggaaatacagaattagccacttgctgattttcagattcagcttctacaatttcagcaggggtcaaaggtagcaaaataaatttcttcccattatgcacaaaagtgtatttattactcctaccatggtgtgtagcatcattatcatgttcccaaagacagcccaacaaaagtgaacaagcttgcataggaaccacatcgcaatcaacagaatctgcatatgagccaatggaaaacaaaaccctacaaacctgtgttacctttgctcttccggaatcgtctaaccactgaatatggtaagggtgtggatgtgtacgtgtagacaagccaagcttctggaccaaattagaactcaacaagttgttgcagctacctccatcaatgatcacacgtgcacgatgtgtgtcgatgacaacaaaaatc

SEQ ID NO: 10395 - DNA, 179 bp, Oryza sativa
caggcatgcttttcttgcaaaccacaacgagccgtggctagtactctatctgacatgatccgtgcgtctatcggttgagtgatcctagatcagttagagaaagacgttaccggacagagactcccttgctttattcagtcatgaccgcatgattttagatttggttgattttttttaat

SEQ ID NO: 10396 - DNA, 417 bp, Oryza sativa
  unsure (1)..(417): unsure at all n locations
tgctagatctntttgattcaatgcctttattacttgtatcaaaatatcattccttcgggatatatgaaaaggttggttgagggcatagatgtatgcctaaacccacccaagttcaagtcctcatcgaggcgaattcggatgcctatttcttcttaattaattaaaaatgtcacctagttcctcctaggttggttaaagctcttttgttgtgatttgtaaaaagaaacattgctcaaattttatcggttctggtcttcaggtcaacagtgagcacccactgggtaaggcagtcgtggagcatgccaagaagttccattcggaagagagccatgtctggactgaagcaagggatttcatttcagtgacagggcacggtgtcaatgcaaaaataagtggcatggctgttatggtgggaaa

SEQ ID NO: 10397 - DNA, 176 bp, Oryza sativa
tctagcttctttccttctaatcccttgcatgtacccttaagtggcacagggtaatccactttttctttttattatcttgtcattttagtacacatgaggtcatttttacttatgaatggactttaatatttgaaaataggagtgctccaccgagtggtcattataatccaattggt

SEQ ID NO: 10398 - DNA, 261 bp, Oryza sativa
tttctcaaccatgaggccctattgtttaggaatcccgcactcgtacaaccggccggcacacacagaggcaattacgtagagggacctaaagcgaaaaggagactccacgagggcaaaaagcaaaggccaccagagcgcaggctcgaccgccgctcgcgagaaacactgcaagaaacaccacaccagagtccagcaggcggaagacaatgcacatctgactggggcataaaccagacaacaacaaccctctttcgaacaaat

SEQ ID NO: 10399 - DNA, 178 bp, Oryza sativa
tcaagctttggacctgcactggagttaagtagatctcccaggcctcatgttttacatcaacaccgaccatgatgttgacgatggttgcataccacgggtcagagactgagactttcaacagcatgtcggcttgcagatagtcatttatcggtagttcctgtatgctagtgacttgcat

SEQ ID NO: 10400 - DNA, 420 bp, Oryza sativa
tcctagaagattcacacaaaatcatgatagactgcgttcttctttcaagcgtacaaaggcgagtactttcgagaatgctctgcaagacaccatccttgctaattaaagccaacagaactcattaaggcataatcaacctgccttgcagctcacgaaagtatatgcatctatacttggagagggtatatatattggaactctcctctagtatattaatgggttgttcttcccaggatctaattcacgagatcgccgatcacatagattgtgttaccaccactatataactcacatggggctcaaacccatctacttcgacgcattgtctatcacatttcgagataatcccttcccgaaaggatctgccaggattctccctgtttggatgtaatcaacaatataacttcggaagttcttaat

SEQ ID NO: 10401 - DNA, 176 bp, Oryza sativa
tttttagcttatgtggagaaagacacagtaaaaattatgtgttggctctaatgaaagagctagttctccacatgctccaagatagatgtattaaatatacaagtgagagagaggagaaaaaaggcaaccttatagctaatctattataaatattagccaagatgggtttatactta

SEQ ID NO: 10402 - DNA, 375 bp, Oryza sativa
aaagttatgagtctggtcattcaaatgcactttttgttattcaagtgataatgcacagctgaacaaaaaaaagaagtgattgtgcgtagtttactgaaatcacaacaatcgtgcaagattaatggataacaggttggtaagctgcaaatattattacaagattaattagaaaagtaagcctgataaaggaacaccaatgccaatgatcaatctacacaaatataaacagcaatagacctcaatcaaagaatttctgtgtgttctgatttaagaaaatatccccatacttgcgatgagatacacatatccctgtaattatgacaaaataacatattcacagcataacaaaacagaaagatgcaatatggattcagt

SEQ ID NO: 10403 - DNA, 174 bp, Oryza sativa
tcaagctttgaccccacatgtcatcagctgttagggataaggatatattctggaataaaaataaatgaattaggaacagtagcttttcgtaatttctcggattaattcgaaattgaatatttaaactagtataacttgctcattttaactcggatttgagtgaaacttgaacct

SEQ ID NO: 10404 - DNA, 423 bp, Oryza sativa
taattataacaatccgcataaccccatataacagcattttaacttcggatgaacatatcttgggcataccaactccgaatcgacccgttcaagtctcttaatggttgatataacctaaagaaccctgtgcttggattttatgtattgctatggctcctttataagcttgtagctttgcttgtgtgcttcgcgtaactatcgtcgttccggaggttcccaaagcgtggttcgtggtcgacgccgaaggttcggaaagccgttctctctgagcaaggcaagtcacatcatccttgaacatgttgaatcccagcttataaaattattttgatttaaattattgcattatcgccttatttaaattcccgcgtgatcactggtttatttagccatgcctaattacctttggtataaccctaatattat

SEQ ID NO: 10405 - DNA, 442 bp, Oryza sativa
  unsure (1)..(442): unsure at all n locations
taaaaaaaagttatgtgaaaaaaaaaactagatgcgttccatacatcgctagactaaccaaatcacctactaatcatgctgcttactctctccgtcccaatatattaaaactaggacacaatatattaaaacctatgacaggatgggtccggagtgagtacaagttaagcaactcaaatcacacttacttttgttcaccagatttttttttacaaagaaatatctaaagaggggaatattcgctctatgtccttgagaagaagcgaatattcgggctggaatggtaagcaagaaacaaaggggcgcttttttacactatgcccccccccgggcccacctncacggaactcaaatcccgagctgaaaaccgcaccctaaaacccaccccacgaatccgcacccggcaagtccttcaaaccaagagacatatctacccaaaaaa

SEQ ID NO: 10406 - DNA, 182 bp, Oryza sativa
gttttttgctctggacctacacggaaggttgttttgccaatcttttatttgaaatccattttgaaaccactaagtgatttatttcttttcaggtttgggtcgaaaagagacttgcgtctcgattcaactttaatagatgcttttcaacaactcccgggtcagatcattacttctcggctccc

SEQ ID NO: 10407 - DNA, 397 bp, Oryza sativa
  unsure (1)..(397): unsure at all n locations
gatttacagaccgaattgctagaaaagaagatctgtatgacgaatggaggtgcaagaaaaagaggctgttattaccctcatgaagttgtgcacttcctgaagaaggatggcttctctgctgatacaaccatctacttgacggagacatggtggcacaaaagcctggatactctgaaggaggcatttccaaacacttataccaaggcaagaaaactctttcaccaattttttagtttgtatgaatcatcatccatcttctccccccaacaaaatttactgaatgcttcactgaaaagctattcatagagaaacacacttaaagttcagactgaatttgatcgttggcttgtgattccaacttgtgacatacatncagtttttttaataagtataaacc

SEQ ID NO: 10408 - DNA, 176 bp, Oryza sativa
tctttcaagcttgcaaagatagtgaggcaccttaaattcctcatatccaggaggttgtcgcatatacacatcctcctcaagatatccatgtaaaaaggcattctggacatccaactgttgcaggctccagccctgtgaaacagctaaagacaaaacaagtctaatagttgttgcct

SEQ ID NO: 10409 - DNA, 407 bp, Oryza sativa
  unsure (1)..(407): unsure at all n locations
atgcgtgcgtgctcccgctttcctctgtgttttgttcgnagcatgaggcaaagtatatctccaagactcttaacacaacgagcatttttctcatacacaaatgaaaaaacgcgaactaatttgctgtagaactcttgggcaagctcatcatatactaatatattgatgatatatcaaaatatattggcactatcttaatttcgaatatgctcgtagatatagtattgtacaattggtgttcatagagttgagtatgcaagcgttacgagagtctgcatttataatgtgtttgaaaaaaaaatatagagatgaatagacggataactatataagaaactatattaatgtgactaccattaatctaacatagcccagaacatctcattgtccgtatgtctgacatatat

SEQ ID NO: 10410 - DNA, 408 bp, Oryza sativa
ctagacaccaaagcctacatctctaaggaactcctcatgttgcttgttataataacaagatgagtcaaccaccgtactcaacatgacacacccacgaatgcaaaataaatgcaagggagtacaaggcgaatataacatacagggttagggcagcagcgaacagcatctaaagacatttagttgctcaaggccatcttggagacacgaccctagaactatccaatattattaatcaacgccgggaacccacacgaacctgccttaacccaaggcctatgatgattcagaccgaactggcaacccgaccctgcgtcccagctcggactatgccaacccaggccaaccattccatattttaagtgctaagcaggctttaagaaataatacactaacttgggcacattgctc

SEQ ID NO: 10411 - DNA, 177 bp, Oryza sativa
tcttgcttgggttacacttgctccaatacaggtgcgtggtgggtaactaataacggaattgcttgggactgcaggatggaccgaatccgttcagggcacgctataagcaggatcgttctcttgtctatgacgcggaacttgtgtgccatcataatattcagatgcaatgcaacaggt

SEQ ID NO: 10412 - DNA, 429 bp, Oryza sativa
  unsure (1)..(429): unsure at all n locations
ctcaagcctaattattctatcattagccataattgctacagtaacttacattctctaatgacagattaattaagctcaataaatctgtcttgcggtttccagatgggctatgaaataagttttttcatttgtggccgaaaaccccttccgacatccggttcaatgtcccatgtgacacccaataattttctttttacgaactaatcaaggtctcatcaggacattgacgctagttggtgtatcttgaaccgaacgaattaattctccgccgacccaccaccagaattactccacctacgccccctctccctgttctatccctaaatggttacatggaagatgtctctgctacctanggttggagcatcttatatcagactgcaaagcgtgtcctctctgctacccgcgctggtactcagggcatctgga

SEQ ID NO: 10413 - DNA, 174 bp, Oryza sativa
tttttcttgtgtaccaggaagtttcagatctacgttacgtgcacacaagaagtgtaccaggtttcacgatttatctagggttacatcaatttcttactagcaaattcaagtttaattcccatggcgagtttgaagtatgatctatcggtcctggaccgagacataagattctca

SEQ ID NO: 10414 - DNA, 339 bp, Oryza sativa
ataccccggcaaaggagaccgtgtcatctttgacgtgtagggttcacgacaaggtcattcaagacgatctgtaggttaattgtacctcatcggtgggtttctcgtgagaaccggttatagtgaactgtgtcgggtacaccttgagcctaacacacatgagagtgagatgttatcctctttcctatagcgagataaattgactcccgttaatgatcatttttctataagtcattgagcgacatatgactggagaatctctgggaacaaatgtgttcaggcattctcttgaaccttagatgaagcatgagggcatgaagactttagaagttcaaacggatc

SEQ ID NO: 10415 - DNA, 172 bp, Oryza sativa
ttagctttacttttttgactgaatactctactatgggagtgcccaaatatgaatacaattttctttgccctgtagaatttattaacggagggttgtcagttttcaaaaccagttatatcagttatcaaaaccggcaacaaactaaccggttttggatcagttttgacctaag

SEQ ID NO: 10416 - DNA, 385 bp, Oryza sativa
  unsure (1)..(385): unsure at all n locations
tggaggtcgnccgacgtggctgaatctcacaggacggttgatttttgttantcatgtcagctgggcaaactgtactccctttgctgaggtgatcaaactgtgcggacaaccgtgaccatgtccattgtcgcttgtaacgagagccatagctcctctctgccagactactgaccggaaatggccgtagtgctaagggtcctgctgtttggataatctccaggtgatggtatcagccaagcccgtgtggccacctgaagaggggatgcctagggggccgcgtcatagttgtgcgtctgcatcccatcatcgaaactcttaagacctgctgcttggcatactccaacagaagatacgcgctgattatacgtgtcgttaggaaccactc

SEQ ID NO: 10417 - DNA, 175 bp, Oryza sativa
ttttcttctggatttgggcaatgtttttacaaaaatttttattcatcatgctccatacatgcacaacgacaaactggtacgatcatctctcccatacactccctgctggttgggggagctcccagaaaaactaaatttgtaagttcagctagaagattagaatgctcttgttcca

SEQ ID NO: 10418 - DNA, 401 bp, Oryza sativa
  unsure (1)..(401): unsure at all n locations
atagaaaacataactgtttttttatcacataaacaagtgtactataaatatagccaagaatggatttaatgaatttggtgtgttactacgtatttctatgagcttgctgaagaaatctgacttagaacaaaagactaaaacatcttacaacctagaaagtagaaagagtacttattagcatattctttccaaaatcaaaatttaacaccgccgcaaattttgaacatgatattctgtcaaaatattgtatttccaatttttttttcatggccaaattcaaaataacattgaaggtactaacaagtaaatgagaacgagatagtaaatatattattatgggcgtgaataaaanagttgaacacagggttaccctactgtttgttggggttaccgctaccccg

SEQ ID NO: 10419 - DNA, 157 bp, Oryza sativa
caagacagggtagattaggtctttaggactcaaagcatcataaaattgaagtgcccaatcagctagacatgaacaggtaaaataaatttgcagaccatgagctagaaggttcagaaaggacttactcttcagtggccaatgaaaattgaaacaattc

SEQ ID NO: 10420 - DNA, 283 bp, Oryza sativa
aatttcaacatcttacaactaacagccttgtttggttggagggagttggtgacggggaatgacagtctatgatatctgggagattaagtatggagatcagttggaagactaaagaattcgagggggtttgggatggcgaaataaaaagccaattcccaccaaagtcttacctgagggaggcctgataattcgcgagacttggagggaatacgatatgaaaccatccaacgaatgtggtgtgaaaatggaacttccatgaccaaacccaccatcaactccatct

SEQ ID NO: 10421 - DNA, 178 bp, Oryza sativa
ttcaagcttagaagaattctggttctaccatagcataaccatttgttttggctaccaatgactgtttataaagattatcatcgattagggaaaaaggaaacaaaagtatgcaaataaatgataataaatcaactctctagttgagtagctaggctcataggtgcaaactgctgaaagc

SEQ ID NO: 10422 - DNA, 445 bp, Oryza sativa
  unsure (1)..(445): unsure at all n locations
ttgataggggttataagggaaaactntacgtataatatctattatgactaaatcaacatgccaaaacactacctaaaagtgaacagagggagcagtaggtataataaatgtgtataccttatctggagtatgttgcaatatcttagtgccaccaaataggatatgattcttatctcgctttacagatagtggttcctcaggaccacgaccagcaactgagacctataagaatagaagattactcagaaccagaagtccagaactgaatattttgaacaaatatactagggatagcacatttgaaagcaggacaaaacaaaagttggatgccacagttgggtaacacaattcaatgcgtctctgaagcattattctttaattctatttgtttctgataagaagaactgggggggtccactggaccaattaattagagaaataccac

SEQ ID NO: 10423 - DNA, 176 bp, Oryza sativa
ttttaagctttcgttgcatgatagattgcccttgcaatcttgcaaaagttctctgttgcttccagatcatctaatgatggacgttcactgccatttgaaagtggaaatgatttgatgaactgcaaagcagcctcacaccaatagaatgttaagtaccggtattttgatccaaaaga

SEQ ID NO: 10424 - DNA, 435 bp, Oryza sativa
cttgactgtgtgcatctaaatttatgcagatcatctttttgtgcagttgtatcacctttaattacctacagtaattgactaaatttaataaaagcttcaattatcttaaaaaataattaagcaagctatctcgctctctgcattgtgctacatagctaggtgaaatcaatcataagtaaattatatcagcattttaggctcaaatcaacaattaaagtacgggtacactttaattactcaatcagaaaagaaccgagatctgcctagctttgtcgtggtattggtgaactaattattaatatgaattatatatcgtcatgtcatctcctgccatctctgttcactttagctagcacgtgcgaacatatgctccttgaatgcagccatatgcagcatgcatgtacttgcattggcgtgggtctctattcgatgaca

SEQ ID NO: 10425 - DNA, 174 bp, Oryza sativa
tctagcttggccggcccatcagctctgtagaaccacgccaattcttattttgtcgccagagtttttttttctaataaaaggtatcaccgaatataacactccaaatcttatttttcctgtcttggttcttcccttctacgttgtaaaagaagcagtcaactgaaaatccaattt

SEQ ID NO: 10426 - DNA, 172 bp, Oryza sativa
agcttagctttcaaactctccattaattcatgcaacaaagccctacaaatatgtgttaacgcaggcacaacattattcagtatacatactcgctcgatctcgtagtagacatcgctacacacacatatatatacatacattaataactaatcatccgtcgatcgacgccggc

SEQ ID NO: 10427 - DNA, 357 bp, Oryza sativa
  unsure (1)..(357): unsure at all n locations
gcaacttcatccttcaatggtntttttgtcatactacnattgcacctatggtttgcacactttttttgtcttcaaaatgtaattgtaagttgatgagagaaaaatgtgtgtggggaagaaagaatatatagaaatttaattcatttgctaaacaaggttttataaaatagttgagaaagaaaactctagtgaaagttaatcttanataatagaaaacaaactataatgaaaattaaaagaagtaaaacacattaaaattagtttattacttaacaaatagtttttaagaaatatttggcgtataatttatgatttttgtatgaataaagaactatctataatattgcatgactgtca

SEQ ID NO: 10428 - DNA, 87 bp, Oryza sativa
ccgggtgggaaggtggggaaataagagggggaaggcgggtacttgaggggcacagggggaaaaaattgttgatctagcaacccactc

SEQ ID NO: 10429 - DNA, 430 bp, Oryza sativa
tacaatccgttcaaaaccaacttcccactcagatccctcaatccgttcaaaaccaacttcccactcagatcccacaatccggtcaaaaccaacttcctactcagatcccacaatccgttcaaaatcaaacttccactcagatcccacaatctgttcaaaacaaacttttcacccaaattccacaatccactcaacccttgcaaactactcaaaacctatcttccattcatacccaacaactcatacaaccacagttttacaaccagacccatgttcctcaaaaccaaatcccccaaacccaaaccaacgtaccacaaatgcaaatcccacatattcaaatccctcaagtacaacacgccaagccaatataccttacatacaagcatcacatgatcagacaatgcaaaacccaaaccaacaacatcaaaac

SEQ ID NO: 10430 - DNA, 169 bp, Oryza sativa
agcttgccgttcgccttgggaacgacgaccgggttcgccagccactccggatggatgacctcacggatgaatccggcctccagaagtcgcgccacctcctcgcggatgaaagcttgacgttccggggcctgccgccgcactttctgccggaccggccttgcgcccggcc

SEQ ID NO: 10431 - DNA, 406 bp, Oryza sativa
gcgccctggtttctatttcgaatttttcttattccttttcactaaactacaaaccaggcaggttggttagttttattgctcacaaggtgtatcacattgtgagtctaaaggaattctataaagggttttaccggttcgtgttacttaaatcctatgtggcatgggtgcataacttcatctattaatgttgagttcgggagtaaggattaattggggaccctctcgctcccaacacgtaaaacggagtaatagttagtgtatgatttattaagtattagctaaaataagctaaaaatagattaatatgattgttaaagcaactttactatagaatattttttgtacaaatatgcatcgtggagtagtctgggaagcgtgtgcgtggaatataatatatgtgagttgg

SEQ ID NO: 10432 - DNA, 175 bp, Oryza sativa
ttcttgcaaggtgtgcttgctagtcctgtggatgggacaccaagcttttgtcgccccggaagttgtccttgtcggctcgtacttcttgtgggaaggataagatttgaccacattaggatctttctcaggcttggatgttgtcgattctccgttctccacttctgcgggaggatct

SEQ ID NO: 10433 - DNA, 399 bp, Oryza sativa
tggcatccttgtactcacttgtgccctcatggatctcctccaacttgttccaaatctcatatgcggtctcaaggttgctcactctatcgaactcctcttggctcaaagagttgaacaaagcattcatggcttgagcattgagttggagattgcggtgatcaatctctgtcaagggcgtgccagtgatagcaaagcctacatccacaaaactccaaatatggaagctcatagctttgaggtgagtagacattttaattttccaagtagagtagttagtgctatggagcatgggtgtcttccctacatgtttcacctcgttcgacatcttctctctaggcggtgaagcccaaacaagagagaccaagctctgatatcacttgtaggatcgagatgtcgact

SEQ ID NO: 10434 - DNA, 173 bp, Oryza sativa
tagcttatttacttctgagaagcatgctaactttcaagcttatcattccctcatgaattttgtcactgccatgtagattgggcctctgtcaacgattccccccaagcaaagaaatctagatgcagtcaataagtatgtacataaaaaatctaacctaccccaagaactattcg

SEQ ID NO: 10435 - DNA, 445 bp, Oryza sativa
  unsure (1)..(445): unsure at all n locations
cctatanatactaagcttgtgaccagctagaatagcatgctagaatctgaggttattctttgtgagtcggcgttaaaggacggggtgtgaagatggccaaagccagtatgcaaacatttggttagttgtcccatcttgatatatagtttttgcacgtttcgtgcttgataaattgcttgaacagaaaccagggaaggttaccctgtaagccaaataagattaaagccaatggctctcaatttaattagaaatttctgtttgctggatgtaactaatagactgtaactagagataaaattaaaagtgaccaatacatgttgctcaaattaacttttcagctcacaatagacgatgcattgaagtggatatcaaattttcaattaattctgattatctattccataaattacaagcacgcacaccagaatattccagcaatatcttt

SEQ ID NO: 10436 - DNA, 444 bp, Oryza sativa
tggccagctcagagtaagaggcaagtatcactaaagtcttatttctatcaatggttttacaaatgagcttgcatcctactaaataaactaataaataaaaagcttaaattcatcactggacaaccctaagagaatagattaactataatttagattaaggaaggtaatgtccaaaaagtccaacaaatttagatttctgaacccactgccaccccaccccccggcacaaataaaaaaggaaaataaataaaggcaaggacatgtatgatccatgctcagtagtcactagaaaactttcaattggttatgtgcactcaaacttagccaacaagaatggaaaacatgcatgctacattcttgatacaagccaaagggcagagatttgtgcatggacctggctcgggacatgtgtgcatataaaaacaaacaacaccatgtgcaggt

SEQ ID NO: 10437 - DNA, 85 bp, Oryza sativa
attttttttctcgtaagcacttcagacttgaaggggaattagtaatgtgttaagatttatttcatttcaaaggttggtatgtgag

SEQ ID NO: 10438 - DNA, 174 bp, Oryza sativa
agcttgtcaagttgtcgccctcgagaatgaggaagctgatggcgacaaagtagagctcgacgtacatgacgaggctgatagccatccggccatagccgccgaaggcggtggccaatgtctaggtagctccatattcagcgattggcgcgcatgcagtggtcgatgagtttgccg

SEQ ID NO: 10439 - DNA, 376 bp, Oryza sativa
aaaacgtacgattttgataggaatggtagggtaaaacagaggataacaaaacgcaggaaaaacacaggaatgacccgttgattgaaccacaagaaaaacacaagaattggatgagagagatagactcaaaggaaagttagcaagaaggtgaagctcttgctaaatttcctccaaaatctctataggattgtccattccataagaatttcaaaggattggataggattcaatcctttgtttcaaagggcttcataggaaattctcctataagaatgagatcctctaaaattcctatgtttttcccccaaatcaaaggggccctagtttgttgaaaccagcatctcatgaatgaactaatgacaaacgcacgaatatg

SEQ ID NO: 10440 - DNA, 173 bp, Oryza sativa
agcttataggacccaggtcccagcatatgcatacctctgctccaagcctccaatgctatataaaagcctccagctgcaaactcttccaacagaacagcacaagaaacacaacgacacagtagctcatcaaagttgaaacaaactagcagaggaaatccggctccagtttgtgg

SEQ ID NO: 10441 - DNA, 435 bp, Oryza sativa
  unsure (1)..(435): unsure at all n locations
tactaaagacctaggagtatgacttatacgctccactctatgtgtagtctacagacggtctagtaccagataagactttgagtgaaacttgcttgcacaagacttgcaattcaaggcgtagtccattgttcaagttgtgagtaagtgtagcttggagttctaggtggatgttcaaccttaattggtctccatcgaaccgctggtatataaacagtacattggaaaaggcaaatctcagtgggattttgagatttggtgggggattgntggaattaatgaatgggccttagcccactcgaagattaattctttggaaaatcacaaaagcccacctcatgggatggcatgcatgtggagtttagtaccaccttgcttattctangagagggggacctccttaaaatggaggatgcnctcctagtcgcttgaagcatg

SEQ ID NO: 10442 - DNA, 176 bp, Oryza sativa
tttctagcttgcatcatcaatagctgtaccctctgtaagttagagatgattccccccccctcattctttgatgtaatgttgcatctaccaatccatttagcctaggaagctattgctggtgaacctgtccagtatcggtggatgtatcccattgaaaggtttttgcgaaggttgaa

SEQ ID NO: 10443 - DNA, 432 bp, Oryza sativa
  unsure (1)..(432): unsure at all n locations
tcctncttacgagccactcggtccgcgagctgtataatctctgcggtagtctggggctctttggaaacgatcttttcgagcatgcggttgtgccgcacaccccccctgaacgcgtagatcaccgcgtgtgcagggatgcatggtatggtattgcagacttggcagaaccgctgaatgtacgagcgaagcgactcatcatcccctcgctgtacggcgtgcaagtccgcttcttcgcctgggcgcggatatgtgccttgaaagttcatggtgaactgttggcacaaatcttcccatgagtggaccgacgcgggtggcaggttcattatccaaccccgcgcctgtcccttcagggccatgggaaagaaattagccataaccctgtcgtcaccctcagcgggctcaatcccggtcgtatagacctggagaaactcg

SEQ ID NO: 10444 - DNA, 175 bp, Oryza sativa
tcaagcttgtgcaagctgactttaaagccatgaatgcaaataggtcaaattgaacagaacatgctccccagaactgcacaaacacgttttttaaaattttaatgcagatatcacatctatacaacataattcttaccctgcaaatgaaatacgctctccaggcttagctccttct

SEQ ID NO: 10445 - DNA, 402 bp, Oryza sativa
ttggaagtgtggaaataaattgggccgaccgctgatctttgctctacattgccaatataaatacagagccttcgaaaaacaaacataataaaaaaaagccgagcaaaatggatggatcgatccacaacaatgcaacaaccatgtggacctcatgtgccgcaatctccatgatggcctggtagcaacgttgcctccccatcaccatggatgcagctttatttccccatcagattgcggtatcgacgcggagataatcatcatcatggtgccatgacacgtaccttttgtaggggggactcctgttttttcaaaccaaagtcccaagatgcaacaatgtccaatccttttctatcggtcgtagggcatatgtgcatttgtgcaaaaatggagtacgcaccactg

SEQ ID NO: 10446 - DNA, 172 bp, Oryza sativa
ttctatcttgtcgagctcttctcgtatgggttgttttcgatctggtgcaaatctccgcagtttttgctttactggcttggcatcgggtcgcaccatgagtttgtgctcaatcacctccctgggtacccccggcatgtcggacggctgccaagcgaacacgtcagcattgtcg

SEQ ID NO: 10447 - DNA, 172 bp, Oryza sativa
agcttcaacaaggagaaggccgacaggatggttagaactcatctatcgcataataagctgcatagttatgtactgttgctgtgtgcctgtgtgattggtttcagccacggcttacacttgttgacctttaaactggcagcttgctgtggagtcctacgagaaggagaggcag

SEQ ID NO: 10448 - DNA, 426 bp, Oryza sativa
ttctttcagatcttctctcctcaattagacaattctctctgtcaatagtaattcgacaatccatatgatcaaccaacgagcttaccgatactaagtttacaggaaaagagggagcatataaaactgacgacaatgtaattgatggagtacatttgactgttcccactcccctcacatgtctgaaagttccggcggcagtttgaattgtttctttaaatgatgactgaaatggagtatatgatgtaaactcactcgacattcctgtaacatgtctagatgctccggagtctaatatccaagttgagttaggtacctgcataggatgtgcgagattaacaaagttgccaagcactgttagtttctccttcactttctgaattcttccccttatttcttcaacttcttcagccaatttctcatgtattt

SEQ ID NO: 10449 - DNA, 167 bp, Oryza sativa
agcttggtcaacccgtataggcacatcgccaagaacaccaccaccaaccacatggtgatcgtctcgtaggggaagccgtcgtcgttgtcgccgccgtctaagcccggccggaagttgagcatgccgtagtcgtcgtcgtcgccgtcgccggcaccatccgaattcct

SEQ ID NO: 10450 - DNA, 177 bp, Oryza sativa
ttagcttgccgttttacttgatgaccgggactatgttggaaacccactcagcatatcggcacggcctaataaaaccagcataatataaatgagtaatttcagccttgatagcatcatacatatcggctttacatctccttgggggttgctgatatggtttgtatcctggtttaatag

SEQ ID NO: 10451 - DNA, 436 bp, Oryza sativa
  unsure (1)..(436): unsure at all n locations
nttaggaaatatacaaaaatcctccaagccttattcgactttttactgtgcacattttaattgttggaggctttcacatggattttacttattctttgcataatttcgaggatgcattttagagtcgttttgggacgtgacacattagtacacattcgggacaacttatgactcactattatttaatgatggcttaatgatagttcacgatggtcaatcgtgattagttaattaattaatgtgccaactaaaacctggtaatggtgggttgtgagcacatggttttgatggtcgtgctcatgacaattaaagaccggttcacgagtttcggttgtgaaacattaaccgtgccaaccacaagccagcatgggcaacggctttatctttngtatagcatggttcattgcggggcaccagactgagaagtggcggagat

SEQ ID NO: 10452 - DNA, 62 bp, Oryza sativa
atcctctagagatctaccctgcagagcagtgtcttttctcttaattcacattcttcgtgcat

SEQ ID NO: 10453 - DNA, 174 bp, Oryza sativa
tttcttatataagtattcccgaataatgtattagaatcagagagggagctgaaagtgcaaagccatggcacactttgctttggccaaagtgcatgctcggaatcctctccagtctcttggtgaaattatgcttcttttcttttcttcttcttgttctttggacgggttaatggt

SEQ ID NO: 10454 - DNA, 263 bp, Oryza sativa
  unsure (1)..(263): unsure at all n locations
ctanntacaatgataagtgtgccaaccatccgaagcgctatgtttctactagaaactaagagttcaagcccaagagctgaaaaattcagagagggaaagaacttactaaccgggaaggggaactagttaacccaatatagctcttggtcatgaatgctacataaatgggaactccggatcggatggatcggacgttctctttgaataactacctatgcaacgaaaaaaaaagactcctgctcttccatgatagaatgtatgga

SEQ ID NO: 10455 - DNA, 227 bp, Oryza sativa
tttgtcttgtaagatatcccccctagaagttgatgtgtctggccgccacaacttggtcccggtttcatttcattctgggtttcgcccgaacaaaaagtgggaatttgcgcggcttttccttttttgaggatcaggctgtggcattagtatgtataggggtcgccttgcgactaggtattggcattttcagttttaaacagggtggttcttatctggattgggtggaa

SEQ ID NO: 10456 - DNA, 175 bp, Oryza sativa
tcaagctttacctataaattaatttttttcccggcttatgttgagatacttatattgggccctatacagattttgataccccttcaatctaggctggtacatttttatacggaataagttcactttaggtctctcatttttgttgcctagtttgatttttgtccctgaaccgaaa

SEQ ID NO: 10457 - DNA, 370 bp, Oryza sativa
gacctataaatactaagctttatccacctcccaacgaattctagaatacattctattattgcttcctactaaacataatctgcagcatgttacctatcttccgcacgccatggcaaaggtgaggtcttgataatggtcaatggtgtactattgaaaggtgcaactacgagtggaatatcatcaaccaagacatcacaatgccatggataacagaaacgtgcagatggcaaggtgcaccctacttcaaatgagatcaaccacccctagtcctgttctgattgtgccaaaccatactctatgctctcccacataggcacaagtgatggtgctgaagcaagtccatgtctatacatgggatccatgccagcat

SEQ ID NO: 10458 - DNA, 173 bp, Oryza sativa
tcaagcttgtttgtttctatacttagagaaaatttctttgagaaaaaactcctcttcgcattcgttgcaaagcgtcgaaggggggttatttagtctcttttattactatgaatagtaatgggccctgtgggcttttccttctccgtattcgggctttttacttttcggcatcg

SEQ ID NO: 10459 - DNA, 438 bp, Oryza sativa
  unsure (1)..(438): unsure at all n locations
tgcatctttgaaataaccatgaaactcatgcttcatttgtgaccatgtagaaattgaattaggagcaagtaaactataccacgtagatgcaaagtttgacaaagaaagaggaaacaacttcaacttaagcaaatcatcactaccggccttaccacattgatcaataaagcgaccgatatgctccattgtagtcatagcattctcacctgtgaatttcgtgaacttgggcacctcaaatccttgcgggtatgggaccgaatctacgtgttcaggatacggtctttgatatgtatgcatagctactttggattctatctcactactatcccgcaagacattgtcatcatcttttccaacatccacatgaccgatttgtgactcggtcttaagtgataatgctatttcactctcgcttgtgatatatnctgatccggcact

SEQ ID NO: 10460 - DNA, 179 bp, Oryza sativa
tctgcttgagctgatttataagaggctctattgcactctattgcatgctaagatttggggagagagggtagatacaagatggtggatggatgttccgggctcagtccgtatatccacattctgtatatgcttttagctttgctaatttactctggattattatgggaaattatcttttt

SEQ ID NO: 10461 - DNA, 174 bp, Oryza sativa
tttctagctttaattgaaaagatgaagatagaagagagggtcgtaaagtacgtgatacgctcctaactaataaactgtcgggttgtcatcattggtgggaccaagatttaattcttgctaacacgggggttattttatccatcccataataccaaactactacctacgtcattt

SEQ ID NO: 10462 - DNA, 171 bp, Oryza sativa
agcttcgaggggtcggcccctcggctcgcgttcgcccccagctccgacgaggagggcgaccccagcggtgaggacgacgggggcgacgaggccagcgacccgggcgcattggaatgagcccccaggcccccgccaatctccaattatttctttttctttcttctttttgta

SEQ ID NO: 10463 - DNA, 438 bp, Oryza sativa
ctcaagcttgaggatgtcatcatgccccaattaatgtctctactataagatgtccgaagatgagctgtccctcactgggagatatagacaagcaagagagcaagtatgaggcgttccgttacggaaatgcttcctagcatacgtctgacacaacaaaaaaaatttgaacaggcaaactactacttccgtatccactccacacatccatacatggtataataatgatcttcaaaataattttccttttaatctacttatccaatctgtgatatgatcataccattatatttggtataattaaatctttataataagatatcacatcattacattccgatgaaagaaaaacatatgtttcaatcccgttacgttaatgtttcagacacgggagcaatatgttcattgtgagtttcattatgtttcatagaactgattttt

SEQ ID NO: 10464 - DNA, 169 bp, Oryza sativa
agcttaatatttaatttaattagtcgtaggtatatatttcacgtggcatcacactgaccgagggggggaacttggatgaattcgattatataaatatttatacagtatactgctcttgcaacgtggagtaaggacacatatatagctccaacttctaagtttggtgttg

SEQ ID NO: 10465 - DNA, 381 bp, Oryza sativa
taccatagcttaagtgtaagtaacaaaattaacttctttctttagtaagcaaagccactactagtaccttgcaccacttattgagacaatggcctgtgagaacacagggttataaaaagaaacttatcacaaatgtgacataaaccaaacacggtactaactcaatcaaagctggcctagattggtgacgcatagcaaagtatggcatcatgtgaccatgaactaaacaacccctaaacgcgtaattatgctatgggtcttgaaatgcctctagtaagagagaatttgtttttatcatctgagagaacagctacccgattattacatgtcacctaaatatttaagaaaaaaatcattcataatatctttacctggtacaaa

SEQ ID NO: 10466 - DNA, 174 bp, Oryza sativa
tgcttccgagtagaatttgatgaatattttgaggatggtatcatttcagaaattgagattgggctaggggcttgtggagagttgaggtatccatcttatccagcaaaacatgggtggaaataccctggcattggagaatttcaggtaaaacttcacccttcacactctgttctt

SEQ ID NO: 10467 - DNA, 427 bp, Oryza sativa
ttgagctcattaagccttttgttactcgacgcctattttcttcatatgtgcgcaccaaattaaagcagcagcacgcaaaggaggaagaacccacctggaactggaaggaggagatcggcgcgtcggcggcggaaacaatctgatgaggaggaagaggaaggggacggctcggcggcataaaaagacctcacgaaagagtttagggtttcgtccaatgggcttaatgggctatgcccttttgagggactttgttgggctgtgctagtaacaagcccagcccattttccccaactaaccacttctgccttgtctctcctttcttgcaaaacagatctttgttctactgcaatactagatgtcaaaaatgtggcgtgtattaacctctatgaccgtgcccatgctggctctaagattcttactgcgtgct

SEQ ID NO: 10468 - DNA, 177 bp, Oryza sativa
tcttgcttagaatcagagtgacaatctgtttggggaggtggagattttgtgagaagctgtttctgctagaagctcccctaaacaggctctaaggctgtgttgggtattgtgtgttgggaactaatcctctaagcacgcaaaacaaagcaactcattagcgcgcgcatgattatttaa

SEQ ID NO: 10469 - DNA, 303 bp, Oryza sativa
tatagaaactcagcttgatcagcacaactgatctaagacgaaggatggtctttttctctttggtttgctcaaacaaaatacaaacgcaaacgctcacaggacaaatgagcatacctgcagagagggaggccactctcaggaaggatgggagacggaccgggctcatacagatgactcctcccatacctactatgggaaatgtgtgtaaaaatagattcatcggctgcgtatagattccaacaaatatcggcttaaaaaatacatacaaaatttggacctatgcatggagctgtaaatgagaac

SEQ ID NO: 10470 - DNA, 446 bp, Oryza sativa
  unsure (1)..(446): unsure at all n locations
tgtatggtgngaataaataactttccaaagtattgggcatacttcatgcgcacactgctttaacagatgtgctcgagtccctaaaagacacatggtttcactacacctgaaaatatatggcatatgtggtataaaatccgagtaaataaactcataaggagttatcaatcgtctgaaaaatgaccaaaatatataatcagcctaagccataatattggtcaataaaaatacacacttacgtggcaaaaagcaatgatgttgtatccaatcaattgcttgataaacccaaacagcgccatgactatataaaacagtcagcggtgcagctatatatagctttactgttcgacaccttttaagatgcattgtaccaactccctaaaagttgagtaactcgcgtataaaacgattttaggtattggacactagatcaccgcactttgcct

SEQ ID NO: 10471 - DNA, 174 bp, Oryza sativa
ttttcttagcttgatgattattactttttgcaactaggatgtactgtgatgtcgatggagagtcaatattttgatctgttctgccattgagttaccaagtgcttcatatccagttctttttcagggttggatcatttcaaccctttcctctggttggaacaacccattgatgcg

SEQ ID NO: 10472 - DNA, 394 bp, Oryza sativa
gaacagttataattttgagaactacagatacaaagatatcaaggttgcaatgctaagcgggaggcaagacgtttggaacataccataggtgagcaaatatttcatcccattgcagattgcacactcttggtaccacaacataaaagatatgcttctattaagatttcgcattgcctaacttgatgattctgcaaactcaatccactctcacatacctcaaagatgtatcattcaatgcaccaaagtgccattgttctctactatagcgaagagatcaacatatcctgcagaacactttggtctttaacatctattgtagatgctattctagtctcacaaatgcatctataaacactttgatatttgagcagcattcaaggtgctttctatatac

SEQ ID NO: 10473 - DNA, 440 bp, Oryza sativa
  unsure (1)..(440): unsure at all n locations
ctcagaatggaacaaacattatcctgcgatgggcaagacatatcttgtcctgtntggcggagtgcttaggggagacaaacgagaatactcgctggactccaagattactactttgatctcttagaaaggagagaaagagacccagccctacaagtaaacatatataatgctccctctcttagaacaagatgaccaggcaatatccgacccatcctataaattcctaggtcttcaaagctgagataaatcttcaaagattccggaacctacccacatacaaccatgaatagaaatctctccaaaccattatagatcatggtcttgtgaatgccatatatgcaacacctcagcagatccttcaatctgattacgaaacgctcggaaagatgtatgcaagagactaggacatggaagatacaggattatcttctcctcaaacc

SEQ ID NO: 10474 - DNA, 170 bp, Oryza sativa
tttctttgccatgcggatgtattgtccggcagccgaagaaccaagtttcctgagtctagcagcactgcataagctcggtcacctttggtgttgatgttggccatcgtcgttcaaaaggtgtggccttttaaatctgacaatacaaagttagaactattgctgatggcgag

SEQ ID NO: 10475 - DNA, 372 bp, Oryza sativa
  unsure (1)..(372): unsure at all n locations
ttttggtttcaagagaatgtcgaggacaactgtatttattcaaagtttaagaacgggagaattattttcctaactctgcatgcggatgacattctactggctaatagtgatgtcagtctactgcaggaaacaaagaaattcttgtcctcaaactctgacatgaaagaccttggtgaggctccatatgttttgggcatagagattcaccgagatagaacaaagtatgcattgcgactctctcataagacatatatagaaaaggcgttgaagaaattcaacatgtacagatgcagtgctacacctgctcctataatgaaaggcgagaaagtatgggcatcgcantgtcccagaaatcaggatgagctcaatgaa

SEQ ID NO: 10476 - DNA, 127 bp, Oryza sativa
  unsure (1)..(127): unsure at all n locations
tgcctttcttggcttgtaanattttttacttttcgggcttgcccttcttcccataattaaacccctgtttctttgatttcttttccattcattaatttatttttttttttattcccacgggtgtttc

SEQ ID NO: 10477 - DNA, 409 bp, Oryza sativa
  unsure (1)..(409): unsure at all n locations
tgggagaggcaaaagagaagacanagatggtgtgtatacctcaacaacaagtcgaagggttcatccctagggaggaagctggagaatctcacgaaggcttttcaacaagtttgcgccgccttcgagccactaagtgatgtagatggtaagagtggagatgatgacaagggaaagaacatctccggtgtttgcttcatggcgcgtggtgaatcggatacagagtatgaagataatgaggtaagtgcttttgaggaagctattaatattttgagtgtaaaaaataagaagtgtaagaagatgtatagaacacaggaatttatcattgaatctcttaaatctgaaattgataggttaaaatctcttattcctactgatgatgattgctcanattgtgaggttttaatgaatg

SEQ ID NO: 10478 - DNA, 432 bp, Oryza sativa
  unsure (1)..(432): unsure at all n locations
catgcaagcttgactgcctgtagatttagggttttctccacatttaacactgcagatataaagccatatttgggagaaaaagatgagttatagtcgatgacgactcaaatgcgagaaggggaagatgatgatgacatccctttcaatgatacaaccatgcctattgctcaacaaggactaatgactatagctcgagctcgtgaacttaattatcangtaaagacattcctagctgatgatacaacttcttctcaaaattgggtgctactaaagtagtgttgtgatccacttgttgttaggaatatgggagaagaaccagatcgctagcagtactaacaacgctgttttgatgaaatcgattgcccctcatttcggagggtaacggggcgaaagagtacttgttagaaaatctcgctgctactttaacttggg

SEQ ID NO: 10479 - DNA, 301 bp, Oryza sativa
  unsure (1)..(301): unsure at all n locations
tctttaattntcaagaaaaaagtgtttaaacaccagcagacagcgccgcgcgccatgtcgattgcttaacgttcaccgncggccgcaccaataccggcaccggcgccaccgccgaaaccaacgccgacgccgacaccaacgcctatgccgaagccaccgcccccaccaaggccgccgccgtgctcgaggccacctccggcaccaccacccaagccgcctccggtgccaccgcctccgccaagaccgccgccgccgccttgaccagcacctccgccagctccaccaccgaaacctncaccat

SEQ ID NO: 10480 - DNA, 413 bp, Oryza sativa
  unsure (1)..(413): unsure at all n locations
tctctagatttctgatgtcacacactagctggtgacattccagaaaagcagaactgcacaggaaagcgaaagcgagcactttcaaagttgcagattgtagatacgccatatgagcacaactatataacttaataagcacattacagcacacacatggccaaggcagttatttgaatcagtctccaacatacttcaaatcatagaccacaccatacagcaaacatagtataaacattgtcatagagagtacagctgatagcagcttggaatattctagcattactttggtagcatccctctacaaaacatagcagacatcaccagctcttcatcttggccatacacattcaacctgacaagaannaccatatcccatttacaacatatgtaatctgtacatgagaatgtatcta

SEQ ID NO: 10481 - DNA, 425 bp, Oryza sativa
tcttcgctgcacctcgttgcccgcgtgccctcttctgtccaacggagggttgactaccactagcctcctcctcctggttcccctccacatccctttccacgtgcccctgctggttcccctccgcatccctctccacgttcccttcctcgttcaagtactggtttggatcctcgttcccctcttcttcattccagtactggctgcttccctccgcgattgtatcgtacaatatctgttcctcatcgcggtcagccatctgttgatacaagaaacatctactaagtcacgagacatttatgttttaacaatctaagtcatgtatgctaagtgtaaatgtcgtacattaaaaccctacacaaccttacgtgctaagtctaattataaatcgtgatataagctaagtctaggtgacgtatattatacaa

SEQ ID NO: 10482 - DNA, 425 bp, Oryza sativa
  unsure (1)..(425): unsure at all n locations
tgcaagcttgcaagagagcgaattatntgaattgtcccaagctagccaagtgagaatgagtatcctcttagaaacgcccagcggttttccggctagctccataaggtggcggactagtcgatctgggttcgaagctccatcccttctaattatttaatattagttcctccctaatattcgcgtattttaaagcgagtatcctctcgttgtagtggtgtagttgtgggtctacaaggtttaaattctagttagttgcgtgttcatattgttagtccaacctcattgttaattgtttgctgagtacattactagcaaaaatgttcatgctttgctttggattaaaaaatattataacatatgctagtaaaatatgctatcacatatcgcatantatcacttggtcatttattttaatataaaatatt

SEQ ID NO: 10483 - DNA, 366 bp, Oryza sativa
ctcagctgagataaaagcaagagttcaaactactctattatgacatatccagattgtgaagaaaataacttccgtatatcataacaatacacaatgatgttttaaagaaaaataaaacatgaattgtttgcatattttcaagcctgagaaccatatttctctatctcagattccctgggggtgttacacactccttcactggaactgcagaggaccgtgataagcttctttcctttgaagatgtttataggtcatctccctccctccccttgatgttacatatttgcacgtggtgcaccttgataattatagaacttaagagtaccacaacacttctatttgtagacaaagattatttcaatttct

SEQ ID NO: 10484 - DNA, 358 bp, Oryza sativa
aggctgcaagcttcccaacccaaagcgcatcagactgtcatgtgacatgacaagagagagagagtcaaggagtcacttgcacagctcagcggaaggctgcgtagtcatctcgtttgatcgagctgagcacgagaggagaagaagcaagcacgcgacgcaaccatcgccgcgcctccgcgacccctgactgcgcgaggaggcgagctcgggccggagctgagggagctcgccatggcgaccggcaacctggccagcgtggtggtggcggtggaccggagcgaggagagcatgaacgcgctgcggtgggcgctcgacaacctccgtcttcgccccgacggcgcgctcgtcgtgctccacg

SEQ ID NO: 10485 - DNA, 426 bp, Oryza sativa
  unsure (1)..(426): unsure at all n locations
tactagtgatccacttttaggccggncggaccacggtgaccactgatttcacagntgaaaacaatgtggtagtgtagctggtaaagcaggatctttttttcaccggcagatggattgtctcttgcgaggcaggttactacaagccctggcattcccatgcgcctatgggcctctctgcaacttttgccgctgcaacactagtgtaggattctgcagtgtattcccaattcccatatataccagcagattattatatggagtacagtatactggttatccatcttgaggtatggtcaggtctgattggatgcctctggctaaatatttgatgctcttgttttgtacaaacattgagatcattgagtcaggaatgtctcttaacattatgtngtactatatcaagtacagtagtatgatcctgtactg

SEQ ID NO: 10486 - DNA, 294 bp, Oryza sativa
gcttgtaggaagctgttagtgtataacttgggccagccagagatactgtaatttctcaacttaatgagcaagataggggtgttaagcaggagccagctggtgacactgcagtgccacaacctgacgtggacgctaaggtcgtaaaggaggagtcaccaagaacggaacctaatggggaagctacgaacatgaaagagacaccaaagaactctgcagtgtgtaattctccagaaacaaaggaatttggagatattacagcaatgggttcagatccttccgcaactaatatgagcg

SEQ ID NO: 10487 - DNA, 420 bp, Oryza sativa
  unsure (1)..(420): unsure at all n locations
ngattggattcgattatttatttattgagattggcatagtacagagcacaaaacaaattacctgatgggcccttaaaacttactaccctaaaaaaggagttatggtaggcattagccaattaacaaaatttgggggacaaaatttagtacacttaacacctgctctcattttgtttattattcatttcaaactttctgagcttaatgctatgtaaccttggaattacactaaataattctatattacaaatccaataagttcttaaatcaatggcttcaatataaattctccgaacaaccttatacaggattcagcgatgcgtgtacctgcagagcaatttcttactttaagggcatatggtgcacctccagtcatagtagcacttgcagcacaaggtgcttttcgtggattcatggata

SEQ ID NO: 10488 - DNA, 53 bp, Oryza sativa
tgctcgggctggaggaggaagaagatatatataaaggtgtgggactttagtcc

SEQ ID NO: 10489 - DNA, 283 bp, Oryza sativa
  unsure (1)..(283): unsure at all n locations
tgacgattcctgacgctattatggcgtcgctcaatgatacaaacaggattccaaacanaaggggaattcgtagtcactttttcctgtcgcgtaaaaaaaaagctttacgccgagagcaaatagaggttgggatacatctatctcttctgagcaacctcttttggattcttaagaccaccctttgcagaggataccgcctgctttgggttctttaatatattaatccccttcgaaggatttttaggatcgttcacgctatatttagnctattttggcttttact

SEQ ID NO: 10490 - DNA, 314 bp, Oryza sativa
ggatacatcaatgccagtggaccctgcgaactgcaccccttacgtgaacgggtatccttgtgaaaccgatccttacatttgcagccctgagtgcatcccttatcgtggctatactatggcctctctaggtgtcaatgccgacgaccacatgccactgcaatttccatcaacgctgcacggcagtatgaaacatgctcactgtgatgtagtgtatcagactcgttatcttaccccttctaatagtgaagtgacgaccaaattaactagtgtaacaatttgttcaacatatttttaaaaggttgcattttattttc

SEQ ID NO: 10491 - DNA, 377 bp, Oryza sativa
tagcttgtcttcatccagagtcatttgcttatttttaaaatttaggcatgtcatacaaacaaatattcgggcatataaaaaattccaaatgaaacgatattttactaagatgttgtagatctcatcgaggtctataatttttatatagaacttcgtttgaaaaaacaataaaagaaatcattcaaatagctgagaacttatatataatgcacatttagacatgtaaatggttccaaataaaacagtagtcaaccttgatgatgtatgatctcatcaagatttacaattaacatttgggcagaaaaccaactgtaatgatgaggcaacagttatgaaccattaattttgtggtagtgagtggattgctactacaaact

SEQ ID NO: 10492 - DNA, 393 bp, Oryza sativa
  unsure (1)..(393): unsure at all n locations
tanaaatctcttgacaatattcttcttgacctatactatgtatattggcctgtaaaccaagaacctacgagctaaatctttctattgtaaagaaattctgtgatttggtaggtctatagcagtagatcctaaacacatctaaattgctgcactgatgacatgttaattttagatgaagatgtgaccatttctgttctgatactagtcattttaatgtgaaaccagaaatgcgacaggacaaaagagcagattgaaatgctgacattgaagttgatatttgttgatgaggagctagcttctggccggtggaaaactaagttgtctaaatctcatggaagagtagtttatttgtctctcaaggatgaaaaagcatggtatttaaaatctttcata

SEQ ID NO: 10493 - DNA, 436 bp, Oryza sativa
  unsure (1)..(436): unsure at all n locations
tgcaagcttatacaaatagataagtcaaggactttcagtgcccttcgcacgctngctaggtcctcccttcttcctacgcctaatctgctcagtgggatatgtcaaattatcaggggggtgcctatctctagctgtctgctgtggtgtcacgtctggcccctgaccggcctccgtctcctgcgtcggctgtgtgacctgaggtgctgcgtgccagtaatccatccctacttcctcctgnggaggatcagtggaaaagaagtcctcaatgaatgctgtgcgaggggagtaagcaggcactccgtgatgcgtcgacgccgaaccgtactcatcgtctgtttgtacaagagggagaaaccaaaaaatatggcgtagttagtaccatacatataattagaaacctaagcgtgttattgttaaaatgactacatgtgtgctg

SEQ ID NO: 10494 - DNA, 438 bp, Oryza sativa
  unsure (1)..(438): unsure at all n locations
tcagcctaaagaaatccaagaaataaactagtagccataatctagaaaaacgagtttctccggattgtcaccatcttctaagaatctctagctcccaaaacatgtagttgaggaacataaatacagagcacgtcaagactggaacaaacatgaacatccagattaagcaccaagtataactgggtatatatcgatctgttatctgtatgacttaaggcacggtacaacgacaaggtaacatcatagcgaactagctatgccataagtttctccttttggagtgacgaacagctacatatatcaaccatgttcctgaaggtaaccgagactatatatataagcggccactacagttctcagaagtatccagcattntgggctgtcctgatgatctgaaagagagctgcacaaagaanagagtagaanacacaatgactt

SEQ ID NO: 10495 - DNA, 417 bp, Oryza sativa
  unsure (1)..(417): unsure at all n locations
agcttctgttctgtcgattattaggatgaatgagttcgataaaggtctcgataccgntaattattttaacaactcacttaaaaaagtttaaagataattattttttactccatgatgctcttccgagacaattgatctgaatggacggactaaaaaaagtagatagaattatttctgctgtaaatgtgtaattgaaaagacgtgatatggctacatctagcctctagaaacaaagcaaggggtcagattggtccaaattcactggttggaggtgacatggctaggtttattatggtggaagctgcacactggttccgatccagtctaagatnttgcactagcacgagtaaaaaaggcacatgcacacttgccgctgttgtgatgtgcacttgcctttgcattacaacactatataat

SEQ ID NO: 10496 - DNA, 434 bp, Oryza sativa
  unsure (1)..(434): unsure at all n locations
tggatntgtgccaaatggggtgcccaaagaattccgtatactctcccattcttgcattattcttgcctgttcacaagctaataggctggctatagtaattattgcaagtggcaaacctccacacttttttaagatttcggctgaaacttcttcatactgtgaggggcaaccatccttggatcgaattactcttttaaagaacaatctttttgagtcctcactattgaggggcttcattctgtgaatgtattgatggttgctacatgcccaacaagccacatcttcaacacgggtggttactatcactctgctaccattagcattttctggaaaagcacagctaataatatcccatgcttctcgtttccacaagtcatcaactacgataagatacctgtcaaaatattttttgcaaatgttatatttacatgtaa

SEQ ID NO: 10497 - DNA, 410 bp, Oryza sativa
  unsure (1)..(410): unsure at all n locations
gcttagacagtggcatttgaagtntgtctggacaattaagaaattttggtttcaagagaatgtcgaggacaactgtatttattcaaagtttaagaatgggagattcatttttctaattctgtatgtggatgacattctactggctagtagtggtgtcagtctactgcaggaaacaaagaaattcttgttctcaaactttaacatgaaagacctccgggaggcttcatatgttttgggcatagagaatcaccgagataaaacaaagtatgcattaggactttctcaaaaggcatatatagaaaaggtgttgaagaaattcaacaagtacagatgccatgcgacacctgctcctatagtgaaaggcgaaaagtatggggcatcgccatgtccccgaaattagtatgagctca

SEQ ID NO: 10498 - DNA, 423 bp, Oryza sativa
tgtttctgccggggtcgtttccaatggtgaggccttctctccaagcaaggctacagtgccgagaccagacggtggtctttgcggccttcttcgacgtatggcttcggtttctgagcagcactttgctgccggaaatacttcggcttttcgacgtcgagatcccaaactcagcccctccgccctggtttgagtcgccatcttcgactgggcttgccggacagctgggttcgagccgaccgtcaagatgttcggtgcgattttctacgccatcatcaatttgaagatggtggttaccccagctggcaccccgaggaccatctttggaagtgcgaacttcaacgttcgcccggagctctcctacaagtggccagtgaacgcgtccaagcctaagtgggatcggcactggatgtcgaagtggctcta

SEQ ID NO: 10499 - DNA, 386 bp, Oryza sativa
agcttgcgtcagttatcagaatggcgttttcagaatattcatatcccggcgctatccgtgaacttgtcggcgctgcactttcgcagtaatcaactgcctaatcaggtgtctgatgcaatgcacgcctggggtattgacggccaccagctgacggtagaaatcacggaaagcatgatgatggaacacgataccgaaatctttaagcgcattcagatcctgcgtgatatgggcgtgggcttatcggtagatgattttggtacgggcttttccggattattccgcttagtcagtcttccggtaacggaaatcaaaattgacaaaagttttgtcgatcgttgtctgaccgaaaaacgcatccttgccttacttgaagccattaccagcat

SEQ ID NO: 10500 - DNA, 340 bp, Oryza sativa
ctgcagctggtacaccgtgtggccctttttcctaatcaaggtatggggtgatgcttctatgatggggggcggaaggaccatgatacacgcaactttccatctttatgaacatgtatgtatgttgatgaacaagttgtgcattggacatacctaacgacgtcgccgtggatgcataccctccatatctgctggcgaatgctgacgttcgaatattactgtctctaatacttgaccgtagatctacggaacgaatatatatcctggagaattcagaggcaccgttaagctgggagctcacatcatctgctcgaggaagacggttcttgtcttagtatgcgac

SEQ ID NO: 10501 - DNA, 402 bp, Oryza sativa
tcggatgtgcatcgactacaccgaccttaacgaggcatgtcctatggatccttaccccctgcctcgcatagatcagattgtcgactccactgcggggtgcgaccttctgtgttttctagatgcatactctggctaccatcacattcgcatggctagggaggatgaagaaaaaactgcgttcattacccccatatgaacctattggtatacgacaatgcccttcgggttaaagaatgcaggtcctacttttcaacgcactactcgaatttctttgggtaaccaattaagacgtaatgctgaggcttatgtcgatgacttggatgtaaagacgcgcaaccaggaaatgttactctcagatctagcggaaacttttgagagactacgctctcgccgcataaaact

SEQ ID NO: 10502 - DNA, 361 bp, Oryza sativa
  unsure (1)..(361): unsure at all n locations
tgcaaagcttcaaccgcctaaagatattaaaaagtatgaagtttgatgtccagtaaaagaaagctatcacaggaccatctctgatgaactgcaaattcacaaacaaaacctgttaaaaaaaagtatctcgtgaatatacaaggaaatgtgcattatatgaatagttttcaacctttccatctagtatcaaaagctcgccatcaacccaacgagggttntggaaacctggatctgcaattctcctttcccctttgtacctagcaacctatatacaatatagcagtcaagttcactattgaaaagaaaaaataactaacactacgagagagaaaaaagtccactccaattctctagggatgat

SEQ ID NO: 10503 - DNA, 390 bp, Oryza sativa
  unsure (1)..(390): unsure at all n locations
tatgtctaagaaccatgngtcatattgatggatggattatacaaggagaattgggttgtgggtctgtaaaataagtcctactacatggtaaaatagttctgcaatgctgtagaaaatagatgtgtgctgctttttattttttgtgccgtggtccattttttatacatttcaggaaaatcttctgctgtcaggaaattaaattttaaaagcagtttattttcacggagtggtcttggttgaggtcagattaatgtagaatttcacctggggagcaatgtattacacaaagtttaccaaagcatagtcaataaaatattatgcctcatgttcaaagctcttcagttcagagctcttcctgaatgatctttgcagggaaatcagatcggaaag

SEQ ID NO: 10504 - DNA, 312 bp, Oryza sativa
ataccgggcactattctaacaactcacttgaaaaagtttaaagaccatcccttttttctcccttaggctcgtacgagacagctgaccttaatggacggactagaaaaaagtttgattgctattactacggtggaagaaaggccgcatggaataatatgggttcatagacacaccttatttatcccataggaacagatggctcgagctaccggcagggcgctgctcttaatctgactgatggctccagataagtggagacgtacttgagatagataaattatgtatttcgctatttcaatacctaaactcaag

SEQ ID NO: 10505 - DNA, 411 bp, Oryza sativa
tctttgtgctcctgaaaatgcagggatcatgctggacatgcatttacatgaagcaatcaacaacaaggtgagtactaatatatgagcaattccaagttgttcttcctgtcagaaacaaaatgctcaaagattgctcatttctttgcatctttgttccagcaggagatcatgcgtgactcaaaggccgagcaatcactaaatacagctcgtttgatgaacaagcactgcacatccgatgggcattgcaactcaggtacaatggagcagacgattcccagttcttctgttgttgcgaaggatagcgaagtggtcagtgcgattgctcggtctgtaccaaggttccatgaagattactaccggccaagtggtcatgaacctaatcaccattaagcacagctagctagctacata

SEQ ID NO: 10506 - DNA, 398 bp, Oryza sativa
  unsure (1)..(398): unsure at all n locations
tgcaagcttggattcacgtcggtgaggtacttccagacgtcttcggcgacggggaagtggaggccggtcttcttctcctcctcgtgaacccaaccgcggcagcggcgaccgaaggcgacgaccacagcgacggcgcacggctgctggagcggcggccggaggtggagagagaaggcgagcgcggggagagcgattccggcgacgacgacggacgggacttgaggggataggtagaggacgactagggggtcctttatataggcacgggagctcgggatcaagcgcacaacgacgggaaaaactcgggagagtttaggatcttcgccggaaaaaggaaagattgaaccgcgatattgganaggatttccatagaaacatttgggggattcttggggaaa

SEQ ID NO: 10507 - DNA, 399 bp, Oryza sativa
  unsure (1)..(399): unsure at all n locations
ttccatgaagtacttgcacgcccaaatcggagttcgtatgaagtcgtggcggccgtcagaagttggcgctgccctgcagtccgaatccaccccgcgcgaatcctcttccctttggatcctctccatcgttcctgagtaaaacacgagtgcacgcgtctccggggtataaagacgaggaatatgaactcaagaaagaactcacctgataatttagttgacgtgcacgagcgcgggtaataggaccatcatgctgtatatggggggacgtggatgtatcgatggtgttgatgtcctcatcattcctgcatgttagtgacttgcaatctcgacaaatgatctgctatagaattctctacttcctttntattcttaatttccaaatcgaattcttggagtaag

SEQ ID NO: 10508 - DNA, 427 bp, Oryza sativa
ctgcaagcttgattcaagacctatgattcttattctcctatatatgacgctagatatattagatcacttcaatcttatgaaggatctcgaacttgaatattgttatgaatgcagcagaatttcagtaggacgggaggacaatgatcatatctttacctctgaagcttcgtccatactgttgtttagctttccaagcatacaaccttgataaacttcactatgagagagggttttatgttgtgctcggcaatgtaaaaatagagctattattctggctgactcataacacaggaataaatctcttatatatatgcgggggcagaggcaaacctacggaaatttgggcttgagcttggctttaggcttattattagtagctctattaaaatattatgaaaatccagagatataaaatagttagacatga

SEQ ID NO: 10509 - DNA, 411 bp, Oryza sativa
  unsure (1)..(411): unsure at all n locations
tcaaatattgatattnttttgtgggtgtgatggaagaatcatatttgaaaagatcagtttgtgtttacttgattttcaatgtgcctcaactggtgagtgcattgtctactttggctccatgaagttcattcgcaataacgtccacatcaaaaatcaattgaagtaggtgctttcctttttatttaaagtagaatatacagtttgactattacttcataagctctgtttttttctccaacaaaagttggatgaagattaaaattttcgtggcacgcttttcaaactgctaaacggtacgttttgtgtgaaaactttctatatgaaagttgctctaaaatatcatattaatatatttttcaagtttgtaataattaaaactcaatcaatcatacattaatgccaatctcgttt

SEQ ID NO: 10510 - DNA, 383 bp, Oryza sativa
agtttagctctttacttttataattattaaaacctaagggatacttcctccatttacttttgatagtcatatttcatcttgacacacagaccaagggataagaattctacttatcatccatttaaacatgctactggtcattcctcgtaaacaagcgattcattaatatttacatttctcgatgcccatgcaaccaatcttgtgtggaagaatgaagagtcatgcattaaatccgagaaagtcattaagatgataggttgctggattgaaatatgcctatcaaaaataaatttttcatatctgaaaatataactatcaaaagttgatgaagggagtattaatcaaacgttaatggctttcttatttatgtgtcgaactttatc

SEQ ID NO: 10511 - DNA, 424 bp, Oryza sativa
  unsure (1)..(424): unsure at all n locations
tggaaaagccgtgctgttcggntagntcattttagactaactaacattccacctaacaacggactcgcgatctcgatagaaagaaagtatgcaaaaagaagaaaaaaagtacggtttttttggacaccaacgcacgtcgaccaggttgatttgccgtcgcttttccccaaacatgcagatcatgcaggtcgcagatgagtttacaaggtttgaaaagttgaaacccgaaggtttgagagactattgtttgctaaaccaccatatctatctcgctgaccacagaacatcaactggtcaaaccaaataacacctgcacgcaaaaccacattattattagcctaccaactccatcatacgatcaatttaatcactccatttccagtttgagcttataaactagcaatctgcactgagcgtacgtacg

SEQ ID NO: 10512 - DNA, 392 bp, Oryza sativa
  unsure (1)..(392): unsure at all n locations
tgctcacagtnggagagagaatcaacaccttcagcagaaggaaaagtctgtgcttttgaagaagggatgcaacagctggaagaaagaatggaagaacgaatggagagacgacttgctgagaacatggcagaatctaaagctatgaagcatacttctcctgaacaaaggcattacttgaacaagccaactgatgagcactcatgctcatccgcctctaacaatataaaagatcatagttcattttgcataacctcaattgtactggtattattattcaagaactataaacttctatctctttctccttgattatagatacaaccaagaattgttgaagcattgcaactaaatcagaagatgcctgctatgaacgtaacttcaatgacatttac

SEQ ID NO: 10513 - DNA, 411 bp, Oryza sativa
tctaccgcagcagcggcgggtgcatcggcgctcccatgggcatatcctgcggaggaggcggcgacggcgtttccggcgagcagatctagtgatctcccccttcgccccaaccttctcccgcagatctggcgatggcgacgacttctccgttggatctaacggcggcggcggcgacccgcggacggatccggtagatttcttgtttgtgttgtttgtattgttctgtttatgcgatgatgatgtcgtgattgattttgggggcgaagcgggggaactcgcgcttgatgaatcggctagattccaaacagtccatcaccaatcatctaatggacaatggtccaaaacgttgaacaaacctgaataatagcacaagagccagaatatatacatatactgctgataattataaag

SEQ ID NO: 10514 - DNA, 412 bp, Oryza sativa
  unsure (1)..(412): unsure at all n locations
agcttgngaaccctggagaatcatttaatttcagccaatgccagaacaaggtgacagttactgaaggtgctggtctgaccggtaatgtttcagcgagtgaggagttcattcgtgagtatgtgaaagcttaggccttagagttgtcggacctttacagaatagagtttgtattcgctcaaaattgtcatctaagcggagactgattttcctgatggaagaaggaaaaccttcatcatctcatctgcatctgcttcattccattcatgcgtgtgagaaatttcaacattttcttgaaaggaaagcatcggacattcagttgaacttaacttttcgttgctaactcttaacagacacattgctcttgcctttggcatgcatgaccgncttaatattatattatggtgtattatgc

SEQ ID NO: 10515 - DNA, 255 bp, Oryza sativa
attatattctatatagcacatggaagttaaatgtgtgatttcgccgtgcatgtctatgatatatattatctggttacacacacacggatccgctgttccaatatatttcgatgccgtgcttattttattctttactgatttcaattccggtccgacagaaatctaactgttgaagtggcttgcctatcttcggacctcttacatccgttgataataacacacaaaggggattatgtgagacttggggtacacgcg

SEQ ID NO: 10516 - DNA, 435 bp, Oryza sativa
gcagcatgcagcttacatacaagatgtcacatcatcattcactggttattacaacactcacgctgtgtttggtaccgagaggttggaactcttccttctaacacgtaaaacgaaggggttcattaacacgtgattaattaagtattatctttttttcttaaaaatgatttaatatgatttttttaaagcaacttatgtattaagtttttttacaaaaaacccaccgtttatcagtttgggaagcgtgcgcgcggaaaacgaaagaggtgtgggtgggagctcaagctgcccaacaccaccttaaacatcatgcaagcatgttatattatctataattttataatatttaaatttatagcttatcaatgcgaattattaaatcactcacataatattcgatatgtctatcatctcttttataatatctataaccta

SEQ ID NO: 10517 - DNA, 430 bp, Oryza sativa
  unsure (1)..(430): unsure at all n locations
tggttgcttataacactgcatacatatgtggatacgttttagtaagaagtgacaatcgtgatgtatataccgaataaatgctgacataccggccatcatccccttatgtacagnttctctctacttgtattctttacatacccgccgcgtttcttataatggctgtgtgctctacaaagataaaagtaattatttatgataaatcgacttattacaaatgatctttacgtaatgttggggggtttctttcgaacttacaagttaagcaagcataggaactccatgtacgcgtccttgtcatagtctgccggatcaagaactaggacggtttggtccgttggatagacgaggaatagtatatagtggtggctgcgaanacagattatgaaattacgtaagatatattttcatgtgcggttattaatctatg

SEQ ID NO: 10518 - DNA, 412 bp, Oryza sativa
gcatgcaagctcctgatggaatacacggatagctctttctggacatacaacaaaatgccaggacttgaccctggtgtcgtcacccataaactggcgattgaccctcaatatatgacaataaagcagcccgctaggtgcttgaggccggaatttcaggaccaaaccattgcagaagttgatagactcattaacgtgggttttatcaaggagatacaatattctcgttggctagccaacatcattccagttgagaagatgaatggacaagttcgagtctgtgtagactatcgcgacttgaaccgtgcctgctcaaaagatgacttacctttgcttaacacggagttgggggtcgcttcaacaacacggtatggagcactatgcttcattgatggatcatcaggctataaccaat

SEQ ID NO: 10519 - DNA, 436 bp, Oryza sativa
tataacccataatggatgggcttgaaatgtagcccatgtatgttatatgttaatctattatcatcgcactatggcatttaatcaacaagttagatttttttttaacttgaagacttctagaaaatgctttaattagaatagagatatagcagaaagttagacagagatatctacatcagtgaaaaggggatcccaagatcccaccaggatgagccacatcatcaaataaatatgaaccgttggatgcatgatttgaatgaagagaaccgttggatcaaaagagagaaaaataagttaaaaaaaaaaccaaatagtgtcttgggatgttctagtcccttcaagcacattccataaaatgtgtgataacaaatatatgagaatgaaaaatatcttcaaaattatccttaataatcaccaatgagtattcaaagtaatt

SEQ ID NO: 10520 - DNA, 432 bp, Oryza sativa
  unsure (1)..(432): unsure at all n locations
agctngtatactagctgttcttggggttcttgttactaagagtggagctgctgattttcaaaaacaaccagcttgcgttcctttctcctgtggacatcttgaaggtatcaggtaccctttccgtttacaaggtgatccacttggctgtggtgatgaagcttatgagctagtctgtagagatggcagagctataattcacatcaacacaggaaaatattttgtgaaagacatctcctataacgagtctaaattttgggttgttgatgctaatttagacaacagcagttgccctcttccactgtggaataatcttccctacttcaatgacatgggcactaagctgtacacttctgcagttcggtgggctacatttctaaattgctcacgggcgataaacaatggcatgtacatgcctgttgcttgcttgagtgg

SEQ ID NO: 10521 - DNA, 407 bp, Oryza sativa
  unsure (1)..(407): unsure at all n locations
tggccaggaggttatggctctgtatacaagggtgtgctgctcccgggtgatctccatgtggctgtcaagatgctgaatggcaactccaactgtaatggagaagaattcatcagtgaagttgccaccatatgcatgattcaccatgttaatgtcgtgcgtcttgtggggttttgctccgaggaaatgagaagggccctagtttatgaacacatgcctagaggatctctagacaagtatatttacttgtctgagagaagtttctcatgggacaagatcaatgagattgctctaggcattgctagggggatcaactacttgcaccaagggtgtgatatgtagattctacactttgatatcaagccacacaacatccttcttgatgataactntgttccgaaagttgctga

SEQ ID NO: 10522 - DNA, 406 bp, Oryza sativa
  unsure (1)..(406): unsure at all n locations
agcttagatatcatgctccacaaacgaggagcgccattgtaacagagtttttgaaagattaaactacattttgttgaagttttaaattccatttccatttttgtttttgagaggctagcttatgtggcccaaaagagatgataagctcattgaagccggcattgaggccagtggaaattgaatgtcngaagttgtccccctcataaatcgacccggccttacaaatggtaagcatattcgggacctattgatcgcgatttatcattgcagaagtaccaaagtcactgctcagtccttacacgaggacttcgatataaacaatgggaggtggcagatgaggaccacanacccagtcgatgcgggagtaaataatagagaagatgtgtgccacctgcccacttgcatt

SEQ ID NO: 10523 - DNA, 392 bp, Oryza sativa
  unsure (1)..(392): unsure at all n locations
ntaccttgtggattnttcctgaagtaaagccaaacatgagacatgcttattggcgaaatccaacacggggtggctttggcatcgaaggctagcccatattggtatgaagaatcttcacaagcttctaaagcacgatcacatccttggactaacaaatgttcaatttgagaaagatagggtgggtagcgcgtgtcaagtcgggaaacaaattggagcgcatcacccggtcaagaatgtgatgaccactacgagaccattggagcttcttcacatggacctctttgggccaattgcttatctaagcattagagggaacaaatatggtcttgttattggtgatgacttttcacgcttcacgtgggtgttcttcttgcatgacaagagtgagacac

SEQ ID NO: 10524 - DNA, 380 bp, Oryza sativa
  unsure (1)..(380): unsure at all n locations
catgcaagctttatagctggcccgctgactnttttatatagtcatggtgctgtttgnngttttaagcaattgattggatacaatatcattgctntttgccacgtaagtgtgcatttttattgaccaatattatggcttaggctgattatatattgtggtcattttttaggcgggtggagaatctttatgagtttaattactcggattttataccacatatgccatatatttccaggtgtggtgggaccatgtgtcttctaaggacttaagcccatctgntaaagcaatgtgcgcatggcgtatgcccaatactttggaaatttctntaattacaacatacaagcctttttataactattttgctatgtgaaatttcaatg

SEQ ID NO: 10525 - DNA, 356 bp, Oryza sativa
tatattcaaacctaaagcattaagggcaaaatagaaatttacaactaaacgtaatagtgaaacgaagggaaatgtaacggtaggggcatgaaagggatcaagttgaaattttaggggtatagaagggatcgggtaaatttcagaggcatgaaagggatcgagtgagttttcaagggtacacagggaatttactcttctattatttatacatgcgttgtatatattaggatagttagatttactgtgattagaaaaaaaaattgggttggaccacccatatactagatcctagatgcatcactagttgaaaattcctccatgtatctttttaacttgaaattaacacatacaaatta

SEQ ID NO: 10526 - DNA, 100 bp, Oryza sativa
ctgacccgatggcccccacaacccgggggcaaccgacgcccccccgccaaaaaacacccgcccccgcgggcgcgcggtagcccccccccccggggcgggc

SEQ ID NO: 10527 - DNA, 361 bp, Oryza sativa
  unsure (1)..(361): unsure at all n locations
gacactatagaaactcagctaggaataagtcacttttganncctttttgatttttatctanccgcgaccctagaatacagaaccggatatcttgatcccccacctcttataaccggtgcaatttgactttctcagcggatttgaagggcggtttctctgacgtggcgcctacgtggcagtattgactcggtcttttttcacatggcgttggcgggcgcttaagtggctttaaaataaaaaaatatgtgtgggacccatttgtcatttactaaaagaatgggtgggacccactgacatgtggggccacaaatcatgctctctttatacttccccctctcttcttttacttacctccggaaac

SEQ ID NO: 10528 - DNA, 418 bp, Oryza sativa
tgtgcctgtttggagagatcatcataaattattaaagtatgccgttcgcggtacataaaatactcagccagggctgctcccgtataaggagcgaggtattgtaatgtagcaggggaatccgccatttcagctactacaatagtgtattccatggccccctcttcatggaaagtagttactacttgagctacggaggatgctctttgaccgatagctacataaacacatattacatcttgccctttttgattgagaattgtatctgtagctactgctgttttgccggtttgtctgtccccaataattaactctcgctgaccgcgcccaataggaatcatcgaatcgatagcaataagccccgtttgaaggggttcatatacagaacgcctggaaattatacccggagcaggagattcaa

SEQ ID NO: 10529 - DNA, 423 bp, Oryza sativa
  unsure (1)..(423): unsure at all n locations
gccagcttatataagttaataatgtttatgattatttaaatagtatatagattgataatccaaatgtaaaaagtaagtaatgtggcttgacgagaaaagaaaaggatggagatattactaccaaggctttgcctagtagttatatatattaaaaaaaagaagagtcatgtacagaanaacaaaaaacaaaacaaaacctgataaactacaagctctgtaaccagctaagaatgaaagaggtgagagaaccattcattctgcagacatgcagacgaatctcatttgagagtccattatgttgcttccaaatgcaccaacaagcaaaactgacaatgtcacagcttgaatttccgttttaggatttataaattatttaataaattattaatagaatttatattanatgggtcattaattacaagt

SEQ ID NO: 10530 - DNA, 406 bp, Oryza sativa
tggacagagcccgagccagccgtcctgtacctgtgctttcgccgcttcctccaccaaatccgccgcatcccgtgctccgtttgcgaaattagttgaggggaaatattcctcttatcctcctctatcttttcccccaagaatcggactttatcccgaagaaatcaacgcggaatcgagctcgattcgtgtttatctctccaactaaccctcggattttccggcttcgattcctctcggttggagtctgatctcttcaatccaagcctataaatagcatcccctagtcgttctctttcgtttgccccatctcccgagctctctcgtgccccgtagtgccgccgccgcgccacccaaaccgccgccgtcgccggccggcgaacagccgcctcgcgccgtcgttttagcc

SEQ ID NO: 10531 - DNA, 365 bp, Oryza sativa
  unsure (1)..(365): unsure at all n locations
atccttagagtcacctgcggatgcaagctggagaatattggtttataaattattatcatcaaacaattggnttggggtctggctagtgtatttcttcccagccattctttataattgccttgttcaagatgcttcaatccccttttgcttctgcaggatgaaaaaatggattccatggaagccaaacaggttggccacttggcattcacttagaaacgtttgagtgttattcctcgccttttaggttcactattttctttttgcatagaacaatgcggtagtgcattctaaaggtaccgggtttagcctgggcaatgatattctgagttggaaatactcctgactcgatgtgtgtaacctcatgt

SEQ ID NO: 10532 - DNA, 409 bp, Oryza sativa
cgcagcctagtgtgcaaagtgaagagcccaatggagtttattctttgaatcctaaaaaatgctttcctcctagcctttcgtaccacgtggggacacgtactaagccagccagaggcgagaagagtaagaatcaaaagagaaaagcaccgatgcgaactgaagaagaagtacgtaagatgactattaccagcacagaatggcctccaccaggaatgacaaggcgtcggagaagaaataccttccgaggggcaccacaggtgacagagcatcttttagctaatggaggtagagtgtctgatagtgaagattcagatcaagtctcctcagatgatgaagatgaaatggaacgtaaggcatgctctcggtgtggagaaatcggtcatgtcgacagctcgtgggcactatatgc

SEQ ID NO: 10533 - DNA, 198 bp, Oryza sativa
aagggaattttatcgaatttaaaccttatagaaaattgtcctattggaccatttgattcaaaggattgaagttttccaaatcatatgaaattcctatggaaggacacattgtatgtggatttgggaggaattataccaagagctccaacctcttggaaaatttcttgagcctatctcttttatgagagccgtgagttt

SEQ ID NO: 10534 - DNA, 344 bp, Oryza sativa
tgccaccaccgcgcggcgtttcgtccattgctcagctctgtgaaaaaacgaggatggcgggcggcaagggcggcgcggttgctgctctagtggtggtggcgctcctgtgcgtgatgtccggtggctgcgtggagagccgccgtgtggcgaggatgggcctcgacatcggcttgggtagcgggcagggtattgggctagggattggacttgggcttggggtcagagcgggtacgggaggtgtctctgcttctgggtctgggtcaggttccggctcggtggctggggctgggtctacctccgggtcaagatctgggtcggtctcgattggaggggctagttcttct

SEQ ID NO: 10535 - DNA, 372 bp, Oryza sativa
  unsure (1)..(372): unsure at all n locations
agcttaataagtcatatgaaagatggcatctgcctcaataaactaacagacacaaaatacaatagatatttcaatctcaatagcttatactaaaaatcatttggatcataagctgggggcgtgggcccttcatcttcttcatcaattgctttatcttcttcttcttcttcttcttgttcgtcttactcttcttcatcttcattgacatcttcatcggaattatcttcaacctgcatttgcttttctaggaattctaagtcttttgcattgcgtatctcatccaaaatatgtggagtcatatttgctaagctagccacaaggacaagtaataaaagtgcctttcaatncatctttttgatagaaagatacatc

SEQ ID NO: 10536 - DNA, 427 bp, Oryza sativa
accttagaaactcaagcttgcattgccctttccgggagactccacttgttttttgacggataatatgcttgtcagagtaggtgcgacgtaaccaatcagccatttctatatcagctgccacaaggccatcctgaaagatttttgatacccattccgttagataagacactacataacactaattcaatcaacagtaccgaaaaacaacaatagggaattacagctacaagtaatgcaaatccatgtaagaatgaacttagtcaggggcatgaagcaacaaaggcactagacaaaacaaaaatttcagcaccaggaggtttatcaaatctagcaactataaacacacattcaatctttctacgtatgagctaggttaaataagaatccatatacgtaagtctgcttccaggtagaaaataaccagaag

SEQ ID NO: 10537 - DNA, 392 bp, Oryza sativa
  unsure (1)..(392): unsure at all n locations
agctctttcattccggttataaacaacgctcgcacatgtgccaatatcggcattaattgacaaaagttcgccgcgcgagccacgaagtgagtttttgccacgaacgcacccaatacactctaatatgtccaaaaatcatgttnttggtgcttttctaactttttcattccgctatataacgtcgcacctacgtgtgccaatatcggcattaattgacaaaagttcgccgcacgagtcacggagtgagtttttgtcacgaacacacgcaataccctccaatatgtcaaaaaatcaagtttttctccttttagaactttttcattccggttaaaaaacaacgcacgcacgtgtgccaatatcggcattaattgacaaaagttcgccgcgcgagt

SEQ ID NO: 10538 - DNA, 411 bp, Oryza sativa
  unsure (1)..(411): unsure at all n locations
cgtagaattttntttaaagttctatgcgaatttgttttatacttctcgccacaaaaacagaattntgcaagaggaatttggcgattttaaatttgccgaacccggcaagagaatcggatgtaacttttttttagatgtccggggatatattataagcctaatttcgagtccgtatgaaaaagatatgactgttttaaggaaggtcactcgaatcagggttctatttcctttctagtggcggcaggatacaaggcaactaacaaaagctatcggcaacagatcaaacacaaatagaaagtgatttggtgggtgactgcgacggtggtgaccgtggtgatgactgcaaaattgattgaagtggcgatgtgcggtggtggcaagaacttgaaactctaatcgcctaacactaag

SEQ ID NO: 10539 - DNA, 408 bp, Oryza sativa
  unsure (1)..(408): unsure at all n locations
agcttgccgcaggtacaccaaacacacacttatcggggttcagttntatgcgggcggagcggagattctcaaaagtttccgctagatctgaaagtaaggtctcttggttgcgcgtttttacaaccaagtcatcgacatacgcctcaacattacgtcctatttgactacccaaagaaattcgagtagtacgctgaaaagtaggacctgcattttttaacccgaaaggcattgatgtataacaataggttcctacgggggtaatgaacgcagttttttcctcatcctccctagccatgcgaatctgatggtaaccagagtatgcatctagaaaacacaaaaggtcgcaccccgcagtggagtcgacgatctgatctatgcgaggcacggggtaaggatccttatgacatg

SEQ ID NO: 10540 - DNA, 425 bp, Oryza sativa
  unsure (1)..(425): unsure at all n locations
ntatatagctgtcccgctgactnntttatatataatttttgtgctgtntgagtttttaagcaattgattggatacaatatcattgcttttcgccacgtaagtgtgcatttttattgaccaatattatggcttaggctgattatatattgtggtctttttctaggcggttggtaaatcctttatgagtttatttactcggattttacaccacatatgccatatatttccaggtgtggtgaaaccatgtgtcttctagggacttaaacacatctgttaaagcagtgtgcgcatggcgtatgcccaatactttggaaatttctttattcacaatatacaagcttctttatagctattttgctatatcactcatcatantttacaaagcagntggtatatcactcggatcatgttatttggaggattca

SEQ ID NO: 10541 - DNA, 391 bp, Oryza sativa
agcttgacggcggcggcggcggcaagtttacttgcctttcctcggccaacatatctggggagttcagtcttcactcttcagtgtaagctgcaggtttgaatacactgatgctagtgatgaaaatgcagcgtgcaggtcgttgggataaggaagggatgggatatgttgagtgtcgacgttgtcgctgcttatcggtgtcagtgggacaccggacacatactcctgcggctgcttgaatactgttcatttaacgattccgaagggatgcagtaactgaaggcctgctgcctgcatgcctacagggctgaggtgaggaccaaatgaaatattgtgcacattgaccacggtagccggagctgacgcaagtaaaatctttcagcttgaatgggct

SEQ ID NO: 10542 - DNA, 423 bp, Oryza sativa
tgcatatgatgctggaatgatgtggagagacgaggatgtacaaactacaaactgaaactggtatggagtcccttttttgctctccagtcatgcatgctggatgtggtgttagctcagcagctgattgcctaatctgctgctaatgcatgtctacctatctgttctagcttgtttctcctctctttttttcccgggctcttggcttctctctgtggtgttttggcttgatgaagccggcttaaagggaagttataggtctcccgtttcacctggctggggactcactagctgaaatattaatcaattcacatcggccagtgcagtacatatataaacagtactgcaaaaggaaaaataatactttaatttcctgaaatgccgagtaaccatgaggagtactgtatatattggtggtgtgtatgc

SEQ ID NO: 10543 - DNA, 430 bp, Oryza sativa
  unsure (1)..(430): unsure at all n locations
agcttagtaggcttatagctcactattatacttgctcttagtgagtgtttggcaaatgggaaagggaaatgatttcccacccatctttaaatactaaccattcattctccctcttccatttaatcctaaccctttattcattttccaatcccaatcccaccccctattttccattatccaaacacatccttatatcttctacttctcgagaggaatatatatgcagctactagctatagctagacattcgtgtccggacgtataggaaggtattcccagcatcattcatccgtgccgtgtgcagcatactgttttcttaagcccaaaccaccaatagcgtttcacgatgatcgatncaatttttatatattgatgacangttggtatanagaaagaagcaacgaatcgatccaaatttacatatgttaat

SEQ ID NO: 10544 - DNA, 435 bp, Oryza sativa
gcctcttaaacctcagctggtgtccagttggaacaaatcggaaagatgttgatgtggagctgcaaagcgatggcaatgtaatgaacagcttccaggagctggagactctgtacatcgagtcctttgaacagataacaggtaagaaggtctggacaatcggcccaatgtgcctctgtgacagagacagcaacatgatggctgctagaggaaacaaggcatcagtggatgaggcaaagtgcttgcaatggcttgattcaaagaagcctggttcagtgatctttgtcagctttggcagcctcgccagcaccgcacctcagcagcttgttgagctgggactggggcttgaagcttccaaggagcctttcatctgggtgatcaaagcaggaaataagtttccagaagttgaggaatggcttgcagatgggttcgaggaac

SEQ ID NO: 10545 - DNA, 326 bp, Oryza sativa
  unsure (1)..(326): unsure at all n locations
caagcttgngttaaactggtcggngcatgtaactcaatatagtatcagagctagaaatctcaagttcgaatcctgactaacgcataattaaataaaaattgcagcacacttctattgcacgctaaaggcttgagggggccttgtgtgaggggtttgttagacaaatgtatatccagattcatagtaataggatgtgtcacattcaatgctagattggtttttttataggacagagtgagtagattgttgttgcatcaacaagccgagaaaatatatataattctagcttccttaggcactgtcaggggctcaaagtttatgagtga

SEQ ID NO: 10546 - DNA, 427 bp, Oryza sativa
tgagccgagatcaacacttgtgagcatccggttgaaccatgtttattccgaggtcttgtccatcctttgtcaagactttattctcatcacaagcttgacttcattcttgccaacatgacgatgtccttggcttggtgaccactaacccatggtgtcattcattagcctcatcgtagtgggacctattccttttcacacctcaaaggagaacattagtctcaacaaatcggttgtcatccttcacttgatgaccaaccggttacatatgaaagatatgtatatgtttggtgagtattcattaatatcacaagtgtcatatactcgtatgcaatctcaagtgcaaagatccgatataaataataggtgaacaacatggatctagaacatgcacaataaatgtataggaattgctccccctaaatatatg

SEQ ID NO: 10547 - DNA, 393 bp, Oryza sativa
  unsure (1)..(393): unsure at all n locations
tgaatcaacttagtatgcagtcctgcattggatccaatccaaatcttattctggaatctaataatcccttgtgtcaatgaatacccttgagaattaggagaatgcacagccaactcagctagtagctgctgagcttgaggatccactgtataagaattgatcatctcctgaatccagatcggttggaccacagaaaaagcacaaaattgagaggaggaaggcattctagataaagcatcagcaacaatattattaacccctctcttgtattgaaaagaatattgcaaacccatcaatttagtcattgccttttgctgtaattcagtccccaatatttgatcatccaaatgacacaagattntgtgatatgttttaatgataaatggacctctc

SEQ ID NO: 10548 - DNA, 423 bp, Oryza sativa
  unsure (1)..(423): unsure at all n locations
ggctgcaagcttctatattatgtattttatcaaacatggcaganaaatattctggatcaccttctactgttaggcgtggagagtcagtgggcccctgtagctctccgctgtatggtgagttacatataaaccattaatagttttattcagttctattacttaatctgtactattgagcatttttgtgcttttttcacaactgaccattatttttctaggccttgcgatgcattggtaatttggtgttaagaaatcctcagaatcttgattctcttgcgagcaagcaagttggggaagatcctcatgttcagcctgcactcagtgcaatcttttctataatcttgcgaacctccttagcacaaaaattgttgctgctgatatgtctcaagtgttctgtgaggggttttcattctcgtatttctt

SEQ ID NO: 10549 - DNA, 366 bp, Oryza sativa
  unsure (1)..(366): unsure at all n locations
tcccttgtccagcctaatggctgagcaagctaatgctcacgacctctctccgagtgtgagcggcgacgacggngagccaaacccgcgccgtcgagctcgtactcccccacctcctccacgccaaagtcccaagcggggggggggcgctcgagagagtcaaaaaatccgcagcatcgccagtcgcgggtggtgcaggagaacggcgagatggggagcgtcgcctcctcgtctacggcgacggcagcacgcctcagggcgcgcttcaggctgttggcgcgctcctacgtcacccgcctgtcgtccctgacccggagtctccagcccagcgatggctggacgacgtggccaacttggtcatgacggcac

SEQ ID NO: 10550 - DNA, 426 bp, Oryza sativa
tttacttcacaagaatatatacgatttaggattggtcatggattatgtgtatataaaacttgtcgtgcacttttttttccacgcaatctcaatgttctctagcccttcaatattatatattatcaattcgcttttttaaaatttaagttggcaatataatgagaatgggtggctctaggaagaacttgagctccatccaagtcatcagctgcacctagtatgatgttcaatcttgtgactgaattcttggatgcaccacaccttattactttgttttatttagtggccacaatgtgctagaaaccaatataaggcttagatttgtctacttaagaataaatatgtttatgcataatttgtctcctatgatgtgtcgcacagataagcatgatttttgttgtcataatattcagagatatatatagg

SEQ ID NO: 10551 - DNA, 376 bp, Oryza sativa
  unsure (1)..(376): unsure at all n locations
tgcaagctctgccagaagctaacagcatatttgtaatgattntgatcaaggatgttgtcgcatggaattcaatgatggcaagctactctgagaatgggatggccaatgaatcactggtactattcaaccggatgaggatgcaaggtatatcacctgatgccatctctgtggtgaatgccttgtcagcttgcgtatgcttggcagatctgcatattggtaaaggttttcatacttatgcgataaaatatgcatttatgtccaatatctatgtcaatactgctctgctgaacctgtacagcaagtgtgctgatctcccatctgctcagagggttttcaatgatatgactgaccgtaattctgtcacttggtctgcaat

SEQ ID NO: 10552 - DNA, 420 bp, Oryza sativa
tgcgtcgaacagagagtttcagcgggttagtagtagatatttcgcacaaatttcatatagaagtagaacagagcaatttctgtgctgccgaacaggagcagtagaacagagattaatttactattaccagcaagcagtagaacagaatgaatgaaaaacaatttcagtgttcctcctgtgatttacatatacactcaaaaacgagaaacatggtgtactcgccgagacgctagaatttgctcggcgagtcaaaatacaacaatatgctactacgaggtcccaagctgttgccaacaatatccaacacaattacaagtttacaactggattaacagcatgaccaaagggtaaacaataatcactaagctaagcctacagcaacacaatcaccaagaagaaaagaaaattaacgtggttact

SEQ ID NO: 10553 - DNA, 416 bp, Oryza sativa
  unsure (1)..(416): unsure at all n locations
tagtgctgcatcagttaagtctaatctactaagtcgtgtttagaaccataatctctagcctgcttttggattgccaataagggtttcatcggggtttcagccgatgagttatctggacgttgcatcggcttacaaggattacatacatattggatttaggcgattgcaacaaaaattttactgtttaatctaatcttgtggatttaatgacattagacctctagtcgatgtatgctttaaccatcggatcagtacttatcctgtcatattatgattagccgattggttatattattgttatatcatattatcatcagccgattgcctttatattggtatttacatcaagtgtcagaatatacattggacatatggccgatagctcaaaaccctcttgctatcggntggtatcggca

SEQ ID NO: 10554 - DNA, 418 bp, Oryza sativa
  unsure (1)..(418): unsure at all n locations
agcttttggaaatgcattntcatgcgaaggagacggtgaatggtgatggccaaaaaggcattgactcanattcagctcaaatagacagtggaggatatagtgatatgccaagtaaattatgctctgataagaggaggaagattcataagaagattgagagagaatcaccagctaatctagaggattatgcagcgattgacatgcacaatatcaatttgatttacttgcgccgcagcttgctagaggatcttattgatgataatggcacgttctctgacaaaattactggtgctttcgtgaggataaggactccttgtgttggccaaaagcaagatatttaccgcctggggaaagttcttggtgagatttttnttactatactgacgggagctactaatttccatgaaaccagagtttg

SEQ ID NO: 10555 - DNA, 400 bp, Oryza sativa
  unsure (1)..(400): unsure at all n locations
tggtcatgcacatctggntgaggaaatctctgttggttanggtaacaataacaagattgtcaagatcactggcatcaagaacatgggaagaacagcaactgttcttgtccggggatccaaccagatggtgatcgacgaagctcagcgcagcctccacgacgcattctgtgtgatcaggtgcttggtgaacaagaggtttctgatcgctggtggtggtgctcctgagatcgagatgtcgatgcagctggctgcttgggcgaaggagctgagagggatggagagttactgcgtcagggagttcgccgaggcgctcgaggtcatcccttacacgttggcagagaatgcagggctcgatcccatctccactgtcaccgagctccggaatcgccatgccaagggc

SEQ ID NO: 10556 - DNA, 406 bp, Oryza sativa
  unsure (1)..(406): unsure at all n locations
agcttctcaacactttcgtggtttggttcttcaattggatcttgaatttcctggttctttgaaaagaattcgaagtgataatggtggtgagtttaaaaatacttcttttgaacaattttgcaacgaaagaggtcttgaacatgaattttcttctcctcgtgttcctcgacaaaatggtgttgttgaaaggaaaaatcatgttttggttgagatggctagaacgatgttggatgaatataaaactcctagaaaattttgggctaaggctattaacgctacttgttatatttcanatcgagttttcttgaaatctaaacttggaaaacttcttatgaacttcgatttggacatcaacccanagtttcacatttgcgtgtttttggtgcaagtgctttgtcttgaatct

SEQ ID NO: 10557 - DNA, 414 bp, Oryza sativa
tggccgaactgctatgccccgatcgagtaggtgatcgtatgacaccccggatccttcttcttttccgagagcttgtggagtatgacgttgctgcattgctccgtcagcttaaccacctccgttgttgggagcagtctcttgttgttgagtatatccttaaggtagcgggcatatgttggcacttgcatagcatccaacaatggcacgttgatgtggatcttctggattacttcaacaaaatgagcgaattgctcgtccactgacggtttcctacttcgttgaggaaacggcagcaatcgtgtgtcacaatactcctgcggcacggctttctctggctgaatctccttgtcagctgagtcattggatggcacttccttggctatcccattggttcctacatggttaggatatggc

SEQ ID NO: 10558 - DNA, 428 bp, Oryza sativa
tctcttactgaagggggaaaagattgagcaagaatgtgtactaccacagttctttcaagccacaccggcggatgcataattaatgcaagggaggtacaagggaataataatatagggattaagttttgcagtaaacagcatttaaaagtcacttagttgcccaaagccattttgtaaagacgatcctggagctacacagtattattaaacaaggccgtgaaccctcacgaacctgccttaacccaaggcctacgatgatttggaccgaactggcaacccgacctgggtcccagctcgtcccaagccaacccaggccaaccattccacattttagttgttgagcaaattttaagaattataacactgactcgggtacattgctaggcttgcccatatccgagggctcggctattcgaatagatttactc

SEQ ID NO: 10559 - DNA, 419 bp, Oryza sativa
  unsure (1)..(419): unsure at all n locations
agctgtcgacaagggtttttctggccaatcgccctcaaagatgcatgcagcatagtccagcggtgtgaagcctgtcaatttcacagtaaacacacaaagctacccacacaagcgctctagactatccctcttacttggccgttctcgtgctgggggctaaatatactcgggccattcccacgaggacagggcggctacaagttcctattcgtggcgatcgacaaattcacaaaatggagcgaggcgatacccacggnggaaatcaaggccgacaacgccatcaaatttatcaaagggatattttgcagatacggactaccacatcgcatcatcaccgacaacggctcccagttcatcagcgccgatttccaagattactgcatcgggctgggagtcagaaatgcctcgcttcggtctct

SEQ ID NO: 10560 - DNA, 423 bp, Oryza sativa
  unsure (1)..(423): unsure at all n locations
ngaggctggagaatggactntcatgtcctcactaactttctgctttcaactacaaaatttgtggttggacagaaacaatctccaaggaataataccatcatctatttccaacctttctgaaagcctaaaggtattgatcctaatacagaacaaattgactggtagcataccttccgagatagaaaaactcagtagcctcagtgtccttcaaatggatagaaattttctttctggccaaattcctgacacactagtaaatcttcaaaacttgtcaatcctaagtttgtccaacaacaagctttctggagagatcccacgatcaattggaaaattagagcagcttactaaactctatcttcaggataatgatttaacagggaaaataccttctagtttagccagatgcacaaatttggcaaaact

SEQ ID NO: 10561 - DNA, 455 bp, Oryza sativa
  unsure (1)..(455): unsure at all n locations
tcctctgagtcacctgcggcatcaagcttctaacgctgtctcctcctccctaagaagttgatagaagctggcgagcatgagctggaaaagctggcaaacctcctcattgagccattgtctctccttgcctcttccgccctaaggggaggcgatgaggcatangaggtaggcaagataggttcccgccgacacgagctcttccgctaagtcggcaacgaagaagggggggattggtgatgccgccattgccttgttgttgatgccaccaaagatgcaacaaggcatcagaaaaaaggggaggaaaaagagaaaacatcttacactaacacgtggagcccattgccttttttgttttttcccttgctaaatttgtcataatagtggagaaagctacaaatcacatctgacacatgcatacatgcaaggctgcgtctgtgtctgtagcatgcacgtag

SEQ ID NO: 10562 - DNA, 416 bp, Oryza sativa
  unsure (1)..(416): unsure at all n locations
taattaatcttgtggctctagctaggcctgancaggtttacaggatctcttgggggatggggattaataaagcaagcagaaatccaagagagcaaggctgtatttagttcacttcaaacttccaaaaattccatcacatcaaatgtttggacacatgcatagagtattaaatgtggatgaaaaaaaaaacaattttacagtttgcatgtaaattacgagacgaatcttttaaagctaattacgccatgatttgacaatgtggtgctacagtaaacattttctaatgatggattaattaggcttaatagattcatctcgcagtttacaggcgaaatctataatttattttgttattagtctacgtttaatatttcaaatgtgtgtccgtataaaaaattntgaaaaggaattaaaca

SEQ ID NO: 10563 - DNA, 249 bp, Oryza sativa
  unsure (1)..(249): unsure at all n locations
agcttatttcctcaagatccaatatgagacattctccatgttgcctcatgagagtgtgaatgacatgtatgggaggctcaatgtcattgtgaatgatctcaatgtgcttggggcaaactacaccgatcttganggtgcccaaaagatgcttatagccctaccggagaaatatgagacccttgtcaccatgcctattaacttcgacatgtcaaaaatgacaccccccaacctttttgggaagaacaacac

SEQ ID NO: 10564 - DNA, 417 bp, Oryza sativa
tcttccataaaattctaacaagcacggtcaaatcaatcttgaatttgtgtgccaaatatgcaaattaaagtacctcgcgaaaaatctgtctctgcttaaccatctcctcgggaacagggtagcaacttgctccaaatgaaccgcaaatctttaatatttttgctttagcctgatccccagaaaagaaaactacgaaaacagttttctctacctggcaaagtaaaattgaatgttgaaactattgagaaactttaaggcttcaaggtattggatgaaattgtcacatgcaaggttggatttcagtactgcaataagcattaattttgttcataaatccagctttcaaggacaaaaaaacaataagcatataattggagacaaacaatagatttcatttaacacgagaatcaccaagag

SEQ ID NO: 10565 - DNA, 426 bp, Oryza sativa
  unsure (1)..(426): unsure at all n locations
tgcaagcttgacaaaacatccatctactcctgtagaattacagaacaaattgttcaataacaaaaaatggcatgcaaatcatataataacacccaaaataaaataattacctatgaagggcctgcaaccatacttgaagccttctatttgtgcattgagacatatgaagagtcccttgaatctaggattgctaccaagtgggtatggatcataagtagacacaatgcatcgcctaccagggttcttatctagtatagtctgcaagtaatccctgatccttaggtactgtttcttatggttccctaacaccacctcaactgaattcctccttgccctataagccatgatctttgatatgtcaactccatattttctcataactgcatccatcatagaagtgattnttcagtttgggtcacttctaat

SEQ ID NO: 10566 - DNA, 430 bp, Oryza sativa
  unsure (1)..(430): unsure at all n locations
gacacataaaactcagcttaaaaagttaatgccggcngcacaatatcttttctgcaggcatngcccctgaatcttgcagtatgccctcgcaaaaaatccaccaaagtcctgtaaaattatttggggtaaactactttgataaatctgtcatagttgataaacgaatcaagtgagagagagagagagatttacctgaatccaccggagctacacgtccaatagctgactctccaaagtcagggtccaaaacttcctcaaatgcttcgttattgtcatcaagaggcacagccctaatcttaaagctagctggcatcaagccttgcccagggctgtaacaatcaacagtcttctcccagctcttgccatcagacatatgaaaaaaatcagcaaataaaattcctaaatgaattaactgccatgttgagacaat

SEQ ID NO: 10567 - DNA, 380 bp, Oryza sativa
  unsure (1)..(380): unsure at all n locations
acacaaatcccggatgggatcctttcgcctaacgacacttcaaggcgaagaagtcgaccattcctggaacgccggctttcttaaacgcttctatgtctaaaatgggtggcacccaaatcgccaacttggaaaaatatacataccgtcatgtaagcccttcggcactatgtaagcttttcggccaggaaaaaaaagagaaaaaaaaagagaaaaaaaaactggatgtaaggctattatccaccatggaggcccgaaccagtataaaatctctgtgtcctccgccctctttttatttttcgtgtgaatggataatttgtggaaaaaccccaagcaaacgcctgatcagcgaanaaggccangggggcgaaacgaaatcgccg

SEQ ID NO: 10568 - DNA, 383 bp, Oryza sativa
tctactaggaccttacgccatctatcgcacacaaactcttctatacatacatgtgttgaccttctcctaattaattaataatagtcccaattaatttaatcggttattgatgaagcatacctgtgcaggtagccgcaactgcgaggatatattgactagatagattttgtgggactaatttattggtttgattttatgtagtgataaatttaattaaattagtttggcttcttcttgctctgttgggccacagctgcgaggattcaacgcggggccggagaacggaacgaacgcagcgagtttgcggccgaggcacgacgcacgcgcgttatagcttcaactgtggtgtcgccacgtaggagtcattaagagggtcactacgt

SEQ ID NO: 10569 - DNA, 434 bp, Oryza sativa
ggctgcaagcttgctggagagggggatcgaaccggtcaccgctaaatggccggatcgatcgaagttcgggtactatgctcacggtggaacgctcaacccagttgatggctccctggtcttcagcaatcagatacgcgaggctgcgcgtcgactaacggacgcagtggaagcctcttctcagggcacgttccgacccgacagagagaaggacgagctgtcactcgccctgcagactccagagcatccaggacgaacacgagggaaaggggtgattccttggaagattggattcaaggaggacatccacacgtacaggagtcggatgagaagcaagagagataccgaggcgaagattgtagatcttgagtacagggtatcgagctacgagctcagcatgcaagagtaggtggcaaggaagggtgatgaacgcatgg

SEQ ID NO: 10570 - DNA, 419 bp, Oryza sativa
taagttcattgattatttattactagcttatgtattttatacatgtgaagaagtagagaagctaggagaaacactgccggccgcaaagtagttttttaatatagtattttatcgtttcatattataagtcattttaactttttctaaattatattttttactaaatttataaaaagtatagcaatatttttaacacaaaacaaataaactatcaaaatatattcgatgttgggtgtaatgaaactaatttgatgctatataagtattgctatattttttttaaacttgattaaatttttaagaagtttgacttaaaaaaaagttaacatgacttataataaaaaacgaatggagtgttagaatctctatctccagctatactgatgtgatctaacatatcgagaaagctaaaatagtcg

SEQ ID NO: 10571 - DNA, 414 bp, Oryza sativa
tgcaagctcgtagaaaatgggttgacttcgaccaaaggtaaaaccacttataatctaaaacataccaaagttaaaaccacttataatctaagggagtacttaataccagtttaccggaaatcgcaacacttcaccattaccgtttcttatcagtcactaatatttcacattcaagaaccagcgaccaggggttatcggccaaaaaattctggcatgattattatacatttttttttacaaatccagacaaatacatcgcaaatatattgcaaatatgttaaacgatgaaaatgcaatcaaaggaatgagaaaggcaaaggaaaaggaaagaacaagaaagcaagaagaaagaacaagatatagctgcaatggaataatgaatattgggaaaattttttttttgttctcgcagat

SEQ ID NO: 10572 - DNA, 420 bp, Oryza sativa
  unsure (1)..(420): unsure at all n locations
tgccttgttagccctaaacaagactactatgccaatatatgtgtaatgccacttagatttgtagttggttgaaagggtcaattcgacctagagggggtgaatagacaattaaaatttttaagtaaaaacgaaagcaatacttttcggaagttatgaaaattctgaaaatcatagataaagcgatatacacaagttaaactagatctagctaggcacaagtatggaaggaatgcaccatctaaactactagcagcacaaaataacaaagctagaggagtaagagagggatatcaccgggattcttgcaagttaatgtgttcccgaagttcgaattcgtgagaggattctactcaccgttgtggagctcacaaagagccgggtcctttntcaaccctatcctcaaggttgcacaaatgcaca

SEQ ID NO: 10573 - DNA, 405 bp, Oryza sativa
tgcaagctttctctatattgcacagaaagatcgcttgcctcttcgacgcatccccgatgccttgtcaaacgaagctctactcgaaatcatgacggggaccatactttcttgataaggacttcctttgactcttccccttctccttgccctcatcatctttgataatcactgatagatttagtacacttgatgcataattctgcttaattaacctccactgccaacgacggttcttttatcagatctgatctggcctgaatccacctggtgtctatctgactcgccttgtatattcataaatgcatcatcaaaagcaaggttcgtgcgcacccacgccagtagtagccacagctgcagtattattgtccattcaacatttcactggcattagtgcagttcaattac

SEQ ID NO: 10574 - DNA, 358 bp, Oryza sativa
  unsure (1)..(358): unsure at all n locations
tttgcttatgtataccatttaacaaactatataatgatttgtatcttacgaaaatgcaactgactggcttatattagatattnttcccatcaggtggtgtgtcaagaagatattactagccaggtgccaagtgaggaatatgatgaccatacaagatattctcaaatacctttagtggagtcttttggtacaattagaagaaattctgttacctacactacatgatttgggaatgaagttatatttccaatagcttgaaggaacgtccattttattttctaaagaggtgatatgagtctttcctgcggatctttgtgcttctgatggtccatggctgaaggaatctttggctcttttt

SEQ ID NO: 10575 - DNA, 378 bp, Oryza sativa
  unsure (1)..(378): unsure at all n locations
taaatttagccacgttaattaagaacttcanggcaggcgactaaatggatgtagtcatgaaaacaccaataagcaatatgcgggagcccgccgcgaggcttcccgggcaagctagtcgcgccaaatgtgtaccgcagcgtacgtgtcgatcgcctatgctgaggcctacggcgacaaggatgcgtcccccagtatgcaatcgcgagagcaagcggcacatatgcggcagccgatctgtcttacgtggagacgaactggtttgagtgcacctatatatatgatcggtcttacgtggagacatcgccgtgtttatagtactaaagttatttaaatttctaactttttcatcacatcaaaattttctacacacataaactt

SEQ ID NO: 10576 - DNA, 417 bp, Oryza sativa
  unsure (1)..(417): unsure at all n locations
ttaacagagagaacaggtgtgcatacagatcattntttctcttatgttcaagggaatacgtgcctgctacatttttcactcgaatatcaagtgctggaaagataacctgcaatcaaaaaaacagatcttatgccccccaaacgttcaatatagttatatatcatgaattatgagaaaggtctggaactgtttcacaaatatatcaatctataggtttgggggagaattagctagaagtcaaactagtaagtgttatgttctaaacaatcaacacgacgctggtgcagtcctttatgtatagaagagttttgcagtgcagaaccgaaaagcttactactggcacaacatanatgcaaagagaactaaaataccctaccttacctatgaaataccacagcaactgtcgtgaactccagc

SEQ ID NO: 10577 - DNA, 421 bp, Oryza sativa
  unsure (1)..(421): unsure at all n locations
agcttgagctttcgaatttaattctggcctttggtttggcttttggtttaaaagaactaagcttctgtctattatatcgattccctatgtacatggattggcaacaacgacatggtatggttgatattatacaccctactacagaaacggtttttacatgcgggtgaaagagatttttgcatgcggttagcacaaccgcatgcgccaaaaggtacgtcaaaatcggttttttcacatgcaaaaaccggccgcatgcaaaaataaatttggcgaanaaaataaaaaacaaaaaacccacaaaccctatcacgctgcccaccgtcggagcgccggatccgnctgcccaccacccgtcatcgtngccggggtcagatcagccgccctcacctccagtagtcatcgctgcccccggatcgactgt

SEQ ID NO: 10578 - DNA, 405 bp, Oryza sativa
  unsure (1)..(405): unsure at all n locations
ntatgtcctcttgcaggctcctaattcaaataaaatagctcttgacggtagcattgttggctcgagaatcaaagtacggtggcctgctgatgaaatgtaagtgtgataatcatcaaatatgtttcttatttgaagagatgttctaaaacatgcatctatattataattagtgctcaatggtttgttgtttattcatttgacttgtttatataaaacttttggcgacttaaacctggtgtatggagctatgtaccaatgttttaccatttgctatattgttcaattgttaatgctggttcttattgaacttccattgctttagtcctctggttttataacgaactctcatgagttatactggagttatgtgtgtatgttttaggcttttcttattaattttgaatt

SEQ ID NO: 10579 - DNA, 432 bp, Oryza sativa
  unsure (1)..(432): unsure at all n locations
gcttcagtccaagaattatagctcaagtttctggtgaagcaaatgtatcattaacaggatgaaaaaatatctacgttggagaaaagcaaaagggaatttctttgtctttggctccacaatgttcagaaaatgtggataggcaagccgggaagtacttcactagttgatacattgctctttttatcttctagaggaaagtggccactccaactntatttgctattaacctgagcaatgcaaaccagtctatagagctatttgagacttaactntgataattcaaggttttatatattcccgtagtgcanaagataccgataacaaaaccaactgttgatatccagatactttaaatatcanagaagataatgaacaaacttgaaaatcgactttcagtaggtttaatgatacttacaagcttaccaagtctgt

SEQ ID NO: 10580 - DNA, 430 bp, Oryza sativa
  unsure (1)..(430): unsure at all n locations
tctgcccaacgtgccggngctactcgtgtatgaacattattatctattctttcctgccggcgctgctgccgctgccgtaattccccacagtcaccggctcaccgctgccgcaattacccatccgccgatctaactgccgtcatcaccgagccggacagggtggggactatcctttgttcggcgactcccttcgtggctaaggccgcgaaatcggcgtttacacctgcgactgaactgtggccggtcacggccatggcggccgctcgccgggcgcttcggcatctacacggctttcgggtggtggtgctgtttggttgtgggggacgctacgcatgggccgtgaaggccattggtcccaaggtccgaagaaatgggctcggtccatcacaaaaggaggcccagtattcaaaaccgaaaaatgttgatgggc

SEQ ID NO: 10581 - DNA, 433 bp, Oryza sativa
  unsure (1)..(433): unsure at all n locations
gcagctgcagcttattatacatttgaccttcttttgtagtatttttcacaatttcatcccatgaatcaatgtgattgtcttctaaatttaagagtcgcagtgtatcgaaaccttgaacaatatnttcaactggagtctagataagcggacacatgatagtttatagttagttcttcaaagctgtttcttaatgtacacaaagttgaagaaggaaaaccttgcactgcaagaattggaaggactacctattcaaatttccaaatggatcattttccagttagccaggggaaaacttttatgaggagtttctgttttactttggatgaataacagtaaatgaagcagtatgcataaaatgcatggcaaaaaaatgtacaagaagaaacgctaaccatcattgctnttatcctgttcgtcattagatggagttcac

SEQ ID NO: 10582 - DNA, 427 bp, Oryza sativa
taataattcgtctcgtggtttattgatggattctgtatttattttttttattagtgtccaaacaccccatgcgacatcctatataattcctgatgtgacacgtaaaactttacccctcagttgctctttgtacatcctctggttttggccttatactgggcactgcactaggtagaaagaactagctgatgctacctaagtactacattgcaggcttgcagctgatgaggaaataaccgatgaatttggtggtgtttgaatctcctaaagattaaagattaagtgtttcacgtaaaatgagaggataataacgtgtgattaattaagttttaattattataaacttaaaaatggattaatctgatattttagaacaattttcatataaaaagttttcgcacgaatcacaccgtttagcagtttgaaa

SEQ ID NO: 10583 - DNA, 386 bp, Oryza sativa
ctatgcttaggatttctgaaattggatgggcacgctttgtgttctatgtgagagtggaggatagttattcactgcaagatattttctttttgtgatgcggaggctcccttccttgttctagaagatgctatgcttgtgcttattccggattggcaaaatgtgtggaccatctgaagttaaatgggtgcggttccacaggagatgctattctgatggttagggatatataggtgggaaaaattaaattgataggagttttgtgagcatggacatgtatgcttattttcttgccatgtaatatgtgtgggacgctcctggttgctagtgttgaattaagacgctgttctaatacttgctacgtgggtggtttgagttatatctgattt

SEQ ID NO: 10584 - DNA, 417 bp, Oryza sativa
  unsure (1)..(417): unsure at all n locations
tgttntgccattgttgtgttcttggtgttcggagatgttcttgctctttgccttgaggggagaggcaaaggcattagcaatggcgccagcggtggccggcggcggagggaggaggaacaatgagggggtgaacgggaacgcggcggcgccggcgtgcgtgtgcgggttcccggtgtgcgcgtgcgcgggggcggcggcggtggcgtctgcggcgtcgtcggcggacatggacatcgtggcggcggggcagatcggcgccgtcaacgacgagagctgggtcgccgtctacctcagcgacagcgacgacgcccccgccgtcggcgacgtccagggcgccctcgacgaccgccccgtcttccgtaccgagaagatcaagggcgtcctccttcacccctaccgggtcagtctctcactccc

SEQ ID NO: 10585 - DNA, 433 bp, Oryza sativa
  unsure (1)..(433): unsure at all n locations
agcttaatcttgcacgaagtgtcatggtatatgattgattggcgtatcagcaagctataacacacagatgaattgtccaatccaggaagaacttattccaacccttttccactactctttgttaccgaccatatagccataatgttattctacagtacgtatggtatgtcccatagacatatataatgacctgaaaagatgccaaaacctggcgcttctagtggacttgtcgtcattgatgatcttagagcatcccaagagcatgactacttgtcatcaaagtgttttccttcttaaactttaatttataaataaactatctagaatgataagtattatagagtcaatagagtatttaactcacgagacgttntacggtgtttgcatntaanaataataaagatctaacactccacaatataatgtattaagt

SEQ ID NO: 10586 - DNA, 421 bp, Oryza sativa
tgctgaattaccgatcgaggtggttggagttggatttgtgaacgctctaaaaggcctatgtttatgtgaggatttgatccttctatgtggcatgaggtatccctaggtcggcttgggaaaggctttgtcgtgaacctctgacaccggccagtgtttggagtaagttcgtgtcttgtgggtaaagtgtacccctctgcagaggttaactaactgttcgaacagccgtgcccacggtcatgggcggatgtgaggtggttcccgttgcgtagatttgtttgcctgtgctttgtgaaaagttgttgtggtgtgggaatcgtaaccagaatcagcctatgtggcagatggacgacctgagtggtcaaaaacgaatctgtgtgattcgggatgtctgcgggcatcatacattaggctttccgagtgg

SEQ ID NO: 10587 - DNA, 375 bp, Oryza sativa
cataactttttaaatgagatcacccacctttaagaccatagagcactcttttacaacttcattgcctgcatatgctgaagccacaacccttaagccacctttcagtatatctgtaccttctgaacctcctttcaaaatacccatgacaacttggggcccttctgcttgcctgatcttttaagtgctttcaacatttacagattgaattgttacctcaaatgtcagggagagagcagagattgcttcttcctatcgataatattatgaacatgaatgcaagacactggtacggacatggaagtacagtactctcgacaagtttatgtcgcatgtgcgctgacagatcaaggaatgggaccagtccattattttgac

SEQ ID NO: 10588 - DNA, 379 bp, Oryza sativa
tcgttgccttacgatggacgcgatctttcagaatttacttgcgcttacagcgagacgagagagaaaaaagggggacttactttgtgtcgttgttacgccgccggggacaacttggcggccgccaactttgggggcggaggtggtttgaaaggagcccaacgggcgccgaataacaataacacaaacggccaggtggataagaaacccaacaaaccatttggcggccgacaggcgccgccacattgtgggcccgttttttgttttttcgcgttacaccccgagaccgcggggtctggggccccttttaattcatatcccagggcacactctttttttttgtcggcggggttgggttgttgttttgttgatccccttctct

SEQ ID NO: 10589 - DNA, 353 bp, Oryza sativa
  unsure (1)..(353): unsure at all n locations
gcacccgggatactctgagtcacctgcggcgcaagcttctacgaatttttttgtgtcattnggctgaggggaaaaaacatanggcgagaattgtgggaccgatatggcgatcgaacatgcaactggctagacattgttacacaggaaagtatgattatagaaatggacgtttcagatttggttacgtcaccataagtaaagttttctctcagatataaccgtgagatctaagacgtttattttttaatccaattataattttcagatttgcactacatttttttttccttatgattagcctactacacatacactatgggtagtcgtcatcggacattggtgccggtgggact

SEQ ID NO: 10590 - DNA, 421 bp, Oryza sativa
tatcgagctagcaacaagcttagaaggttgttgttgtttgatacaccaaaaaatcagcgtgatgcgtctattatgttataacttgagtatctggttgtttaattggcttttaattctttgtataaggttgatgaataaaatagtccgtaggcttgttgggttgatgatgttgcttgatattagaaccgatgctgatgaccgtagtgttcttgttattgaaacaagttataaaagttagttgatatagtagaacaacgactaaccttctcgatcttttcagtcatagatcacctaagacatgccagatgacgacatacgaacacatgatatttgctaacaaggttcagcccaagcctatatttctggggttctgattatgggcgctcctccccaaccaatatattacctagccactacgagt

SEQ ID NO: 10591 - DNA, 418 bp, Oryza sativa
  unsure (1)..(418): unsure at all n locations
gcaagcttcacgaatcttcgttataacccgttatcgacgaanatccgataaccgcaactatacgcaaacaatcgaaaacctaaacataagaccaaaagaaagatcctatttagactaattattagtgccattaaatagatctcaattttacggaattactggaagtggaacggagtcaatcggatgagcggttgagaagatatgaattttggaagtttaattggagtttctggaataggagaaatggcttatggaattttatagaaataatattctcaagaatattattgacagtcactgacgcgtggggccaaaggaaatggtttatggaattttggaataaagaattgatttatgggacacaggaaaaaggatttattatatccctggaaaaaaaaaagatggagggatgtatatt

SEQ ID NO: 10592 - DNA, 423 bp, Oryza sativa
tcttaatggtgaaggcctatggcaaaaccttttgcgcttcaagtacttaaaaggtaaacccctctcccacatgtcacacaaaccaggaacatcccaattttgggctggcctaatgaaagtaaaagatcaattttttcagtatggatcttttaaacctggtaatggaatggaaataagattttgggaagacacatggttgggcttgcaaccactcaaatatcaatatccttctttgtacaatgtggttcgaaagagacattctactttggtagaggttatgagcacaacaccgttgaatgtttcattccgacgatcaattgtaggaccaaagttagttgagtggaatgatttgatttctcgactagctaacataaccctgtcaaatgaaaaggattgctttatttggtcgctatataaaaatgg

SEQ ID NO: 10593 - DNA, 369 bp, Oryza sativa
tccatgccctgcacgttaatgaaagcattgattatctacattttgtacacaagaataacccttgaagtgctacagatgatctgcagttggaagagggtaaacctggtgcatgtactggacgtgcggcacctgatgtcccatcatggcctttacctgaattaagaactgggctttgttgtgatgaaatactcaatgaaagaaactccttgtctttaggtgtcactcttggtgcagaattgagaccttctgcacctgcacatttggaatttcccaatgccaaactaggaacaaaagattcaccgccctttggcctgataccgggaggtgtcactcttggtgcagaattgagaccttctgcacctgcacatt

SEQ ID NO: 10594 - DNA, 421 bp, Oryza sativa
taccacccctgtccatatcagctccatactttatgtctcgtcggttggatgatacttcaaagtaaccattcacatgcacagataatcctgtctttactggcaaaggaagaaaacagaatgcgcggccttgtctgagaataacttcctgcaaattcagtgattactaattaccatagagtaaccacagcaaatgctaaggtgtaaaaaacacactgaaatgatgcaccacgttctgaagaacgtctgatatagcatgaagtccattagataacataaatcaaacacacattttttaagtcaaaggtattataatcaattaagttatgcagtgtacaaagtttgttcaaccagaaaaaaaaatcacatcaataaccatggtcatattgttaatgattattttaaaaatattcagcatcagata

SEQ ID NO: 10595 - DNA, 375 bp, Oryza sativa
  unsure (1)..(375): unsure at all n locations
tttctattttacaaagtacttcttacaattccgncagaatgcaaaattatattacacttttccctaagacatatgtcacaagataccgagactaccagggaggccaacaccattccatggactggaagaccttcgtctccagcggcaccatcgacttcgccaagtgatctatctccgtaggatttcttcgagaacgagaaaacccttcgtggaggaactcgaggtgcagctgcagacgatgatctcgtatgcaagccaatacatgccccccggcatatcggctcgattgacggcactcctgcttcatggcctcgtcgatacgcttgccgatgccttcgagcttggcgcaggcactgttcaaccacgagatgtatc

SEQ ID NO: 10596 - DNA, 417 bp, Oryza sativa
tatggagcagagggcccacaagacagacatatccgttatgaaaaccgccactacatccataaccgtcaatgggacccacatgtcagtgtctctgccgaaggggaggtcggttggagccaatcatggttcgaccctggtcaagccggctcggctcccccttacacgtgcacgtccaggataagttatgacggttgtgagagcaaaatggacattacgcatagctacaaccgtcataccaaccctataaaaggaggagctcatttcacttctcgacacaccgaagcaagctcaaattcctcttcatactttagtattagtatcttagtgctaagtggagtagaatagaatagtattcggagtcttcggaagagtttcgttatggctctagcaggtcttatattcttttctggaatactt

SEQ ID NO: 10597 - DNA, 410 bp, Oryza sativa
tcttcgtattcctggaatataaaaacatatataagattatgactgggaaatgatgtatcacaaaacgaaaaacttggatttttttttcttttctgaccttgagtgccatgtgggcacatcctttgcgatagtgacctttagtccactctggcttgagctttatgccatcattagcatccagcaaagcctcctgcgctgcaccacttctcagatggcaaaggctcctgtttgaatacagtgtggcatctgcaggatcaagtttcattgcctgcatcataccaaactgtgataagcctcctgcgctgcaccactttcttgtttacacagccatagtacctagacaatagaagtgatgattgtatgtagagactgtcatgcttctgtgatgcacagacatgtcactgggatgc

SEQ ID NO: 10598 - DNA, 403 bp, Oryza sativa
  unsure (1)..(403): unsure at all n locations
agcttctaatacccagacttgctggccttttataaattggagagaagccaagtgattgcttggcggcccattttacctcaagaagagataaacctgaatcttctagataaattgcagctgtgtatgttgactcatgcagtcttagcctttggtttagcttttttgaacctagagtacaagaaaactccagctagagcaacgccagttcctgaatgcagaanaaaggacaaaattcagtacgggtaaattgaaaagcgagctgttatgatcagttgaatntggttgtgaggttaccaagggcattaataagtgaaatcggagttctgaagaagagaaccgatgagacgatgaccacaactcgtttgacacagttgggcacagaatgggtcacaagtgatactct

SEQ ID NO: 10599 - DNA, 418 bp, Oryza sativa
  unsure (1)..(418): unsure at all n locations
tgttcactgcactagtataaacaagtgaatctaatcttctccatcaaaaccatcaaagtttcatattcactactcctcttagcaaattttttttgttcaaaagcttcaccagaactgcatgagttcgagaaacattttatcctaccactatctctacaatgatgctctccccatctctaaattaaataccacggccaaattcacaaaaatcaaacactacaaaaaaaaatctaacaattgatctaagcacataaatcaataagcaatcctcgctgaaaacaacccctacgaaattcgcagagcatcacagatctacgcgaatcacaagcgaccaatcaagaagcttggggggaagcanagganaaaaaagagcccagatctcccaacacccaccanagttgaagccgagggagctcat

SEQ ID NO: 10600 - DNA, 184 bp, Oryza sativa
agcttatgatgtgaagtgatcaccgcatattctcaagtttgtacttgcattttccctaccatccagtgccacattctcaagcgactcaccaggcttttgactagctaagagcaggtgatttgcgacttggcattgcaggcatggctgtcatgggttggcactctgcttgtgaaccaaaaccaac

SEQ ID NO: 10601 - DNA, 406 bp, Oryza sativa
tgccatgcccaatttgttgaaagtagcttttatatattcagaattggatcgcaaggcctctaccgtaatctatttgctctatacaaccttcttaaggtggccactctcttacatgtgtccattctctgaaatctatggtatattggtacaataatggctagtgctagcttatgaaaaagaggttttatcagaactaaaaaccagttaacattgataatacttgcagaaaatatctccaagtttttttttctaatttccaaatagtctaactttgtctagcatgaagctttggaactctcttctatggtgtgttacactacaaaagttggtacagctgcattttaaagagaggtcgcattcagtaaagatcagaatatcgaagagcatgacacggcgggagcatgta

SEQ ID NO: 10602 - DNA, 392 bp, Oryza sativa
agctacaaaattgttaacacctttctgtcgggcacctttttatgtgcatcataataattccaaagaattattaaatcgcgttaaaaaggattttaacagcattgggccataccattgtgaacacaaattgccaaagcaaaaagtgcctaagtccctaggaatcacaacaggccacgctgactatagtattgggctgaagtactgtacaagcccatgcccattagtactcccaataccctaatatcaccgaagcgaaaaacgtctcttcgtcttccccgccgagactctcgccattttccccatttcctgctacagtacaaactgctggccaagctagggttcagcaatccgctccaatccatcctcaaaaactccacaaaacttctccccgc

SEQ ID NO: 10603 - DNA, 380 bp, Oryza sativa
tgaatgtcctgctggcctgagaaccctagaaaaccttgtctaagtaacaattcgtgaagagcctgcattcttgctattgaggcccaatctgcaagcccatgtgatgtaaagccatgagccatgtacatccgagttgtgagagatagcgaggggcccaacaatcagcccaaatcaggttcctcttgggagaataccctatcccactgctttatgccacgtacatagaatgctgcgctgccaccgtgcaagctgctacagtcgtgcactgttaagaacatgacaaatgacgcaacgcacctgcggcacgcaaggcactaacgctatgcactggttgagcccccaaactgagctcctgccagcgcagctcgcacatcaccatg

SEQ ID NO: 10604 - DNA, 256 bp, Oryza sativa
gatcctctaaggcacctgcagcatgcaagctgatgttcagctatgagctgtactctacacactgagctaataacctgaagtgagcatgcaaagcattgccctagccattaacctgagctgtcttgtgttgggttaagcccactaaaacgaaccgccaggttgaatcctagccgcacgcttctccatccaacggctgtcttggaccaagtgggggggtgggtcctctgtgctctgtactgggggcttttttcgggag

SEQ ID NO: 10605 - DNA, 427 bp, Oryza sativa
tactcggcatgtttctctcatcctttcaatttgctcaggggtcttgatctacacagcagtgagtaaaaaaaatcagacatatatttgcataatatatatggtaataacagatatgtccataactctacctctactcttttctgcaaatcgctatctggttcaatcttgggggttccctaaaaatgtttgacaatgtcagcctgtcaggggatatgtaccagagcagcttagaagataacaacagactgtggtccaacttaatgagcctctttcttgttttacaaagctatcagttcaaatggtattcttaacaagacatgatgaaaaggtcacgagggaacacaaacacaaaaacaaattaatacttacatcaagcgcccaatcaggcttctcaattttatctggtaccacacacatctttgatatt

SEQ ID NO: 10606 - DNA, 423 bp, Oryza sativa
catgcaaggctgcatttgtacctgacattcgtctatgagaccgatccaatgtttcactgcctaaactctctcatatatgagaacgcccaatgcttcactgccttcttcatatccttcttatgagcatatgtagcaccctcaattaccttggtatccttggaatcccagggaacatgatgctcctttgagataacaagtcctcaaaagtccctcgtttgtccaatcagtgggcattacatcaccttcctcgtcggatgatgcatcaccctccgcttgctcgttatacgaattcttcctcttcatttcatcaacgattgtattgtttctcttcccctcattcgccacgcccatggcctgctccaccactgtgtattctctcatcttcccctgatgggtcacaaaatccccttatgcttggacctc

SEQ ID NO: 10607 - DNA, 421 bp, Oryza sativa
  unsure (1)..(421): unsure at all n locations
aggtgtgtgtngaagtgagtgagatgatgnccttattaggggtaggtatgatagctggcgaaggggaaatgtccgatgttccccgcaaccgccatcagggagtgatttgggacatccatgccaaaacctgggatcaacgatgatcaccaaggttcggccgaacctgggctgggcccccctggcctggcctttggcctggctcatcctctgatcctcctctatccattcttcggtgttttgggctgattttctggtgtttctacgaagttcacaacccatccttgtatggatacatatttctcctcactttagtctagatttcctcccaacatcggggtttatcacctgcatacaaatatacaccaacactgtgtaatatgtgagaataagcacctatcactatgttggatgttttattatc

SEQ ID NO: 10608 - DNA, 385 bp, Oryza sativa
  unsure (1)..(385): unsure at all n locations
cagtgcagcatattttatttctaacttaagatntccgtctttatattaattaaccgtgacatcccaattgaggttcataaagatattcagattaccattaaaaaaatctttctaattgcagggccggcgcggatgatgaatcaccagctgggtttcgtcgtcacgcttctttctgtcagcgcgactgtcctcccggttggcgtcggtgtggcccacgcccaagtcagctatgtcccactcgtcgggctcgtcggtgtcctcgccggcgcaagcctcatcatcgccggcgtcaaatccaacgcgacggcggccgccggcaatccgtcagtattcagcctcccggccgccggtgcaatagcttccttctacctgcgccgccgncgtg

SEQ ID NO: 10609 - DNA, 391 bp, Oryza sativa
  unsure (1)..(391): unsure at all n locations
tactcaagacctangagtatgacttatacgctccacctctggggtagtctacagacggtctagtaccagataagactctgagtgaaacttgcttgcacaagacttgcaattcaaggcgttgtccattgttcaagttgtgagtaagtgtagcttgaagttctaggtggatgttcaatcttaatcggtctccatcgaaccgctggtatataaacaatacattggaaaaggcaaatctcagtgggattttgagatttggtgggggattgttggaattaatagatgggctaaggcccattcgaagattaattctttggaaaatcacaaaagcccacctcatgggaaggcatgcatgtggagtttagtaccaccttgcttattctaggagaggggg

SEQ ID NO: 10610 - DNA, 428 bp, Oryza sativa
  unsure (1)..(428): unsure at all n locations
tcctagaagattcacccaaaatctccatagactgcgaccaatagtcttgctcacaaaggtgagttctttcaagaatgctctgcaggacaatatcttcgctagttaaagccaacagaactcattaaggtatagccaacctgccttgcagctcacgagagtacacgcatcttcacttagagagggtatagattggtactctcctctagtttactaatgtttgttcttcccaggctttaattcacgggatttccgatcacatagattgggttaccaccataatataactcacatgggtctcaaacccatctcctttgatgcattgtctatcacattntgtgatagtcccttcgtgaagggatttgccaggtttctggctgtttggatgtaatccaacgttataacttcggagtttctcaatttccggatag

SEQ ID NO: 10611 - DNA, 399 bp, Oryza sativa
agctggtagctagtcactatggatataattataaacaaggatatatctcaaacgaaaatctatgtaagatgttaataagagcaagtttaatagtatagccaactattggctctaaattatatatagtcaacttaatagccaattaacacaatagttatctatatatctatactacacaatcaatatttggttcctcctgtgacggagcgtggggctcctcaccgggagaccgcgcgggcccccttttgccggttcggccgggggcgctgtatgaggttcttcaccctcgatctgtggaatgtacgcgagagagaaaatgcacaagacgcgtgcgatgtagacaggttcgggccgctgagaagcgtaataccctactcctgtgttctggtggatttgtgt

SEQ ID NO: 10612 - DNA, 413 bp, Oryza sativa
  unsure (1)..(413): unsure at all n locations
tgaagaaagatatgagatcaagttgaaatactccaattcatggtctggtatgaagaaggctatggagcagatccatggtacatatgaagaaagcttccagcttcttttcaactggaaggttgcactgcagaacaagtcaccaggtacaattgtagagatagagttgcagaaagtaggcaagaagatgtgctttaagagaatttttgttgcattgaaaccttgcatagatggatttttggctggatgtagaccttacttaggtgtagatgcaactaggttaactggtaaatatactggacagctagcttcagccactgctatagatggacataactggntgtattatgtagcatatgttgtgtttgactcgacaatagatgataaccgactctggttcatgcaacaactaaata

SEQ ID NO: 10613 - DNA, 430 bp, Oryza sativa
ggatgcaagcttgacaatctcaaccctctagagattgatagcacataaaaaagataatgtacttacaagttcgttaatttggttaattttgacaaacttgctgggattggtccttcaaatgaatttccttggaaagccctacaagttcatactttaagataaaatgtggagatatgcctgtctattttaatataataaaaaaagaagctctccatgtcaactattctagataaaaactctacgcattaacatgccatagggccagcttattggcatgcatgtgtgcacgtctgtttagtcaggacagagaagagaaacatatacaaaaaatttatattgcacagtttccatctgttactgcataatatacactgaataatgtattattaacaacttaatatagctgatcttacatatcttccaaactact

SEQ ID NO: 10614 - DNA, 354 bp, Oryza sativa
tattttcattggggtttcatatgctaaatggcaaatattttggtctgtttgcaggaaagcgtcacataatgaattcacagggaaattaccggattacttggggagcttgactgaattggaagatctgtaagatttactatattaaattggtaaagcgttatacagtgtcttattttagagacggggaaattgtcaagcataaattttctgtatatgtccttttccattgaactcgggcaatagcatttttcacctttcaattgtcactgaatagaaatgcagatatctgcataccattaaatttgtctacatggcatggtgatacatagagcttgcattctcttatactaattt

SEQ ID NO: 10615 - DNA, 451 bp, Oryza sativa
  unsure (1)..(451): unsure at all n locations
atcctctgagtcacctgcggctgcaagcttctcaacaagatggatttgatattctacttatatgtcaaccgccaaattcaccggatttgaacatcttagatttgggctttnttcgtgctatacaatctattcagtataagaaagttacgaaaacactagcagatcatgttaaagccgttgaagaggtactgccttttctcttttttccatttaaattcacaacaatttggttggagctaatgttgttcacatgaaacaggctttctaggactatctagttcacaagtccaatagaattttcttgacacttcaacttgttatgaaagagacaatgaaagtacaaggaggaaacaactacagaatgccacatatgaagaaagggacccttgaaagacagggttgccttcctttgcagatcatgtgtgagccatcagtggtagaaaccgctatg

SEQ ID NO: 10616 - DNA, 411 bp, Oryza sativa
tgtatgccgtgaatcagggcaatctcttgttttgtatctcttgtacagaactgatttgaagctctggaatagttttgccattttcttcatggtccatactttgcatctacgacgatctgcctcagggatcgtgaatgtctacagcatggtggtccacaacatgttcttctttgtgtcagagagaaagctatcttcatcccctcgtgacctagttcgactgccagtacactatgctgatggggacgttgtctctcacgacccaaccacaatgattcacaaacgtttcgtcctatacccgccagggctactggttcgccgtctgcggcaatctcagtaactatgtgccttttctcaagctttttcacgggagctatattcccgcgtggcctattctgtccgggcgacagttga

SEQ ID NO: 10617 - DNA, 351 bp, Oryza sativa
gggatccctagaggcaccagcggctgcaagcttatcgtcgaaggtataatacctttcaccatctaagccccttaatgaccgctcacagataaggaggtgggggtgcatagacatacattaggattgcctagaagcatccaccctttagagagtgcgtaatagcttactgatctagcgcccttgcgctgaagattaacagggctaagcgatctgtccatgctgtgggatgtcaaattgcatcggatagggagcgttcctccttacatggaagcaactcgccaaagtgggggtcgacgaatcccgagcgacaatgtctgcttgagtaccaaaacagtggtgagaatccaatgc

SEQ ID NO: 10618 - DNA, 313 bp, Oryza sativa
atgaatgactatgagaagtttaacatgtttgttgggaaaaaattaacatacaagtggaaagggaaatatgttggtgtttatcgatgtctactagtgttatagggcagttgccacaaaccattagcgagtccacccggacggttttccctcttccaagctcactttaggaatatggcatcaccgtcctactcctagctgaggccccgctaaccttcttcaaaacattagcaagtgatgcttatcactacaaacctcattgctagtatctccctttggcaacttgtctttgtcctcccaacgttaattggtatct

SEQ ID NO: 10619 - DNA, 403 bp, Oryza sativa
tgctgacgccccgaaagcttctgttgtgattccgaattatgacgtgtttaaatccaaccagaatagttcgtaccaaaatttgaatttgcgtcttagtaatttgaaagttttcaattagctgttgtgaagaagcggaattaactgacggagtgaaatcatcaggagaagcaaatggctgcattcccccgctacatattgcgacctgtgtgcaatgattgtactattaattcgctttggctcagccacgctgtcagctcgcaatcagataatgtaaccaattgctaaataacaaattccagagaaagaatgtgaatggcgtacgctaccatggcggaatcaaccaacgtcgcctcaacaacatttaattaaaacaatcagaatataccaaaccaaaattgatcga

SEQ ID NO: 10620 - DNA, 389 bp, Oryza sativa
agctcgcctcatctttagtatgcaacgcatgaattcaaaggagataccgtcttggattgaaagttgagaaaacgaacaggcgggatgggaatttctcattgtgggattctagaaattttagaccggactaaatcctgtcttctgcgggtaagtgatctgtccaaatcacatgagctgtctacattatgttgcttcatgttcaaaccacataggattttccaggacaaattttactaatatgcaggaatgcttttgttcttggtagaataatatctcaagaatggatgggtagctagatcaatattactgctttgtctgatggttttgtttatcagattcattttaatacactgcatacgaatggtaaaaattggtaaaaatagtgggaa

SEQ ID NO: 10621 - DNA, 411 bp, Oryza sativa
  unsure (1)..(411): unsure at all n locations
tgagaagcattggacccagcagtacatttcttggagatggcatgaggctcanagccaggtggaccagcccaagctgttggctgtgactcagaacaattggcaactttgttcgacgcagaagagcaatctttctcagcaaccaaatcgactgatttagatccaggcaacctttccttctgagatgtttgagcagcagaagcatcggttgcagatgtagtggtgacttggcccaggttctcagctgttgtattgtatgcggattcatcgtaatagtgcggccaataggacgtaggtattccgacagccgcctttgcgggatcatgcattgtgaagtgggagtagaaatgcgccatgtaactgctcatagcatctggatgaacaccagctatcctaacctccaacacatgccca

SEQ ID NO: 10622 - DNA, 357 bp, Oryza sativa
tgtgggtgaccgggcgccgccctgggcgcctctgagagcgccaacctcggcgcgttttctcgcccaccgcagctggacacctccgcgtgccttgtgcaacttgcgggcgcctggtgagggacaagaattcccctttctcccgtcaccctgagaggccttccactggtcccgagtgagatggagcttcccgccaatggtgataggccccgagagagggtgtggctcatcaccgtcgacgaccttgaggcgacccaacgcctcctcgatcgacatcgtggagaggtccaacagagactcgatcgagcgagcaatctgcctgtacttctctgggacgcagcggaaaagcttcttgatagc

SEQ ID NO: 10623 - DNA, 414 bp, Oryza sativa
tgtcaatttcatagtaaacacactatgatgccatcatatgcgctctagactatccctctcacttggtcattctcatgctggaggctcgatatactgggaccattcccacgaggtcaaggcggctacaaattcttgtttgtcgctatcgataaattcaccaagtggatcaaggcggagccaacaagagagaccaaagccgaccatgcgatcaagttcatgaaagggatatttctatcgatatgggtgcctcatcgtatcctcacagacaacggctcccaatttacaagtggtgctttccaagattactgcatcgagtttggagtcaagatttgctttgcctcagtctcacatccacagagtaatggacaagttgaacgggctaattgtatcgtgctccacggatcataacacgtg

SEQ ID NO: 10624 - DNA, 408 bp, Oryza sativa
  unsure (1)..(408): unsure at all n locations
agcttatgtttacaattattntaattctttaaccaatgtttattatcttccttttggtttgattcttctttcatttcccagatctgttcccaatcatctcatctgtatgcaaataacattgcaagcaagggtattcagatacacacagagcttggtgaattgcaagtgcatatgcaagatgaatacaaagaatttttaaaggggaacgtatntggtgttgacacctactctggttccttaatgcacattgctcgggtaagtcttgattggggatacagggggcctgagatcgaagatatggttgaaactagtagacttactcttgtattttccatcgatatcagnggcatatgtgtaaaatttggcttcaagcatttggaatctgttgtgcttaatttgatgaccttt

SEQ ID NO: 10625 - DNA, 423 bp, Oryza sativa
tgacttcagcagcgggcgactccactccacaggcattctcttgactttatcttatcgaaccaacctctctgagacggctccaactgagaagaacttcaactctggtgtgggggaaaagagagcaagactgagtactacccactgtactcagcaagtcataccggaagatgaggtatgatgcacgatataaccaaaggaagctaggggctcttttgcataaagcaggcatttcaaagcagtagttgaaagcagtaaaacagctgtagtatacccaagttatcaatggcataaggtaaccaatatgtggctgatgaatacgacccatcccacattacattgtaaaagaatgcaacatctaatagaaatgcaggatgttggtaaattgtgtacaatatgatcatacgtattgatgacttgccttgc

SEQ ID NO: 10626 - DNA, 84 bp, Oryza sativa
  unsure (1)..(84): unsure at all n locations
gcagctgcagcttagaggaaaaatcacaaatctacatggtatcagttttgggtcaccggngacctcgccgacgtgaaccctaat

SEQ ID NO: 10627 - DNA, 427 bp, Oryza sativa
  unsure (1)..(427): unsure at all n locations
ntgcctagctgccagcagaagcgagtttcctcacagaatggcaaggaaagtcggcccaaccgatactacaagtgtaggcccatctaaaaagcccatccgaattctgtaaacagaaacacaggatagcgtgccatcatcttctaaaacaacttttcccgaacttatgtaacaaatcgaatcctgtctatatatcttatataattggaactaaaagcttaacatgcatagaattacatcacacccacaaaataggagtcattggatcatttccatgtttcatcacaaccatccaatatatattaagtatttgcatttactatttctcattagttactagataactcgatattcattataccagttagtatagcgatcattgttattaaaaaagcatccaagaagtcatgtcatttgtcatcaacacata

SEQ ID NO: 10628 - DNA, 158 bp, Oryza sativa
aaggaaaaaaaaatgaaatttttcctttgggtattaattaataagaaggtccatacgaaaaataacatccaactggaactcttttttctattaaatgcgtcggaacgaggctaaacatggatattgataccaatatttgtgcagaacagaggattgaa

SEQ ID NO: 10629 - DNA, 215 bp, Oryza sativa
tgcgcccaggaagcgaagggttcctatttcgtccgactctcttctctctactatgatgactacgtcttatgtcttgactactaggaggaaggtcttctcatatttttttctcttcttctttccccttgtctttcttccctttctttcctttcttcccctccttttcctttctccttttttctttaattctacttctcctttttttctcttttctc

SEQ ID NO: 10630 - DNA, 157 bp, Oryza sativa
aaaaattagaaagttcatgatgaatatatgccaattggaaaatgtcattacatgggagaatgatatgaaccttgtgttccacattaatggcacaaaacatgatatgccaaaaaatggactttacttcttgtacagggtaaagtccattttttccctt

SEQ ID NO: 10631 - DNA, 426 bp, Oryza sativa
tttaccagagctgtggcaaaattaaggctgagatcgtttgttggctttggggttggggcgtgtgggagggaggggctaaacatcccctttcttaacttggggagtgtttaacttacgttaaaattagaagtttgattaaaattggaacgttgtgtgtgtaggaaaattttgatgccatgtaaaagttaaaagtttgaagaaaaagttgggaactaaaccatgccttgttactctcttgcgttatttataggcacgcctaccaaactgttaaatagtgtatttttctcttaaaaaaattcttcatattaattcatttttttaaaaaaatatgactaatacttaattaattgtatgctaatgagctgctttattttgagtgtacgagggattagttactgtctccaaccaactaacgcggtaatcatt

SEQ ID NO: 10632 - DNA, 420 bp, Oryza sativa
ttgctatagtaagcaatagggtgtattaactggttgatcacagcactaactccataagcacaggcatctgtctccaaaacaaagggaagactgaaattaggtaatgctagcaccggggtagaactcatggctagtttgagctgttgaaaagcttgttgagcagcatctgaccagaggaatgctttcttttttaataacactgtcaaaggtttggctataatgctgtaattcggaacaaatttgcgatagtaacctgtgaggcccacaaaacctctcaactcagttgcagtttgtggaacaggccaagctaacatcgctgcaggtttggcaggatcagtactgacacctttaacagaaattatgtggcccaaatactcttattgagcacaagcaaaagagcacttagacattttggcatat

SEQ ID NO: 10633 - DNA, 365 bp, Oryza sativa
  unsure (1)..(365): unsure at all n locations
agctngctcaagcttatcgttggcaagttatggacatcactaaatgatgttgtgactaanacagaggaagaaacaccgacgatcgngttcaaaatttacatttaataaagacagccttcaatgaaggttcagctagtacaaaattcttcgactgccaaatcgaatttgttcacaccttgtcttgcatataagcagaataaaagacacccaaggcaccaagcgaaagaactagaagaagaccagagggcaccagtttccgggtattgtacagccttatacctgaaagagaaggaatatgttttaacttcccaacatcacaattcaacttcatggaaatggaacacaagagagtgaaatgtaccaaa

SEQ ID NO: 10634 - DNA, 435 bp, Oryza sativa
ctatgaatactcagcttacaaagcgaggttgagtccgcgccgaataggcgtgtttatgacatcctcacaaaggcgctcggaaccaaagaacatcctggccgaactcggggaattggtagcgatgtgccctggaagcatggactccctcagtacagctcccaatacaggaaacggaaagtctccaaggaagagagggacgctcgtttgaaggccgaacttaaggttgaggtcattcaagaactagaagctagcatgaatgcaagggtggaagaaagggttaacaaggtgctcgccgacatgaatataccccgagtcacaacacctgctgtgcaaccaactcctcgtgtacaacacgacgcgagtccgtcacagcataggagtagttgtgcatccacaaaggtgccggcccctggtctcccgatcgcaccactagct

SEQ ID NO: 10635 - DNA, 391 bp, Oryza sativa
ggatgcaagcttaccggccgatccacattcgctagctagctgctaaccgctcgttcgcacgaagtataacctaaaaccttgttcgttcggtcgtaccgtgtcgttttaaaccctggagtcattctgagccgccaggtccggtcgccggttcagttgaccatttgagtggtcctgtgccacggtaggttgtctcgttgagtcgttgacccatgaggctcgccgagagggcctcggtgtctctatttgctatgagaaacctacaaaaccattttgatcttccttcaatgatatctattactccatgtcttctcgatgttatcgagaacgaccaagtgagcacgatggcgttgacaaagaagtcgcggacttgctgacgacaacgtgagttcat

SEQ ID NO: 10636 - DNA, 400 bp, Oryza sativa
tgcgaacttcttgtcggtgggcagccacattatcgtctagatatgaacaatccttcataacttgattaacaactaagtgagaatcaccacgaactgctaggcgccgtatccctaaagacacagcaatcctaaatccatgaagtaatgcttcatactcagctacattatgggacgctgaaaaatgaatccacaacacatagctaagctgctctccagtcggggaaattaatacaaccccagcccagtgcctgaaattcttttcgacccgtcgaaatgcatagtccagtactccaagttttctgcaggtgtgtcttcctggcactcagaccactcagcgaaaaaatccgctgaggcttgagatttgatcgaagtacgtggcttgaatgatatgtccaaagac

SEQ ID NO: 10637 - DNA, 424 bp, Oryza sativa
tgcaagcttcggttagaatgcagtagtttaatgtttgtcgcaggaatttcacaggaatcagttaatttcgtacgagaatcgggaaaaattcccgcatttcagaagggccttatgcccttatccttcgttcccagaaggcctcacctttgcttccaagctaaatcatgcgtaaactactgagagcttcactccatgtcaaatgcccagcatttatattgaaagcaacccatgatcccctctagtgaaacaaaatccatattgacagcaagcatttcatggcgctactgctaagcaacaactaactcaaacaattcatcatcaaaacgccggaattaatcgctgagtgccccccccccccatctctacgacactacccaatcaaaccgcgaggcctgaacctactacagcgaggtgaaatcccggg

SEQ ID NO: 10638 - DNA, 422 bp, Oryza sativa
tgagtagagtaaaagaatgtgctgacatgcttgtcatagtgattggaccagaaaactgtagctcacacatgttgcctgagccgctccaatggcgtattaccagctcattttcacttggtgagtttgtggtcggtcgtcagaaggagcgagatgaactagtgaaccaattgttagaacaggtaggcatacctaagtcaagaagcgaaggagcaagaccaacatcatcagaggtaataaccatagtcggtactggtggaattggaaaaactactttagctcaacttatttacaatgataaaagaatagaggataattatgatttgagggcatggatatgtgtctcacatgtctttgataaggtcagaatcaccaaagaaattctaacatctattgataagaccattgacctaacaaatttcaat

SEQ ID NO: 10639 - DNA, 430 bp, Oryza sativa
gacacttaaatctaagctgctcccagctcgtgaggctagtgcctctgtttctgctgttcaccagcacacacagcactgctccacgttcaaggcaagtctcgccaaaatggcctccagctcgagctcctgtagtctgccgccaccgatgatctcgagctttatgggcgaggaatcgtccccaggtgatgccacaagttggagcaagctgagctcgaggccatgactgaattgagctggaggacgactactccgcgacgatgtttaagctccttctatcctcatcaatgctttcatccagaaagcgcgtgctgaagccaaatagtcacctgctcacgtgctctctctctatcaactcaacactataaccgacgtggctttcttatcaccagggcgcgattgttttatgcacctgctctaaggcgataccttt

SEQ ID NO: 10640 - DNA, 423 bp, Oryza sativa
agcttaggaagataaggaggttactcgttaatgttgcttctcactatgtcacaactacctgcaaaagaaaatcgtacctcagtacctcacttatgagaaaaaaatgtactccctccttccacaaatgttagacttattctatattttgtttttttccaaataaggtggtcatatttgtagatttcatgtatctaagacttaaatgaagagataaattaaatgtttaatcgaaacctaatgagccattttaatactcattggttgcatgcatgcatgcataggctccttgatctttgttacatgtaagatgagttctttgttacatgtaagatgagttaatttcttcttggttttggtgacaaaagtaatatgtctaactcttgtggatggagggagtatatgcatacaagaggcaacaaaatt

SEQ ID NO: 10641 - DNA, 362 bp, Oryza sativa
tgttcgacattctaatcttggctactgcattcattgttattaatcaatatattagtatcataaatatcaagagctgtctagtacatagtatagagacttacatcctccgcgttagtcctgtaccgtccattaaccctaaggaattcgcacgcataatacccgcaaaggaccgttcctcgcggttgcttgtgacactgaaggacatatcatataaaaaagtagttataaattgcaattagtgaaactattggaatacattaagggagtggagtattaccggccaatatgtacgtactaacagcttctcccgtgttcgggtctgttcttcaaccttgaacttgtagtattggtatgtactcgat

SEQ ID NO: 10642 - DNA, 415 bp, Oryza sativa
  unsure (1)..(415): unsure at all n locations
agcntgtgataaggtagctcttgcatgatagccaacattcttaattattcactacctctcttctccacctaagcttataagaagcttatagctcactattatacttgctcttagcgtgtgcaaggtgttagcgccaagtgcattggcgctgaggccctgccacgtcgcgcctcgcccgccacgctggcatgatgttagcaccagtcccgttggcgcagataagaacaacctcagcgcctggcgctgagccgatggcctatttttggatatagtttttggtaaggactagtttcgaaataagttttctacaaggaccaatttgtcaaaaaaacgggtgagtgctatacagcttcggcgattatacatctgggctgagtactctggctcctatcggatggcctaatcaatcaaagaa

SEQ ID NO: 10643 - DNA, 369 bp, Oryza sativa
  unsure (1)..(369): unsure at all n locations
tatagatgtacagttcaatacatggattcctacctgtttatattcgatttcgctagaaatctgtcgggtgatttgtttccagcgatttcacggatatttcggccacacgatgtgtgcaccaagccaacaagatttgtgcacatgttgataaggtcgtggttcgatgctccgacccctttttttttttcacggtacggattttctatttgcacgcctgcctgtttctttcttctctctctcgcaaactccgcccggaatcactcttcatttctcgaacgttctcctctctaactaaagatacgggcctatttaactaaanatagatatggtaatttaagtgacataacatgtgagtgcactgtaatttta

SEQ ID NO: 10644 - DNA, 408 bp, Oryza sativa
tcaaaagtattttcatcttgctttagcttcacaaaaccgcactatgacgatcctgagagcagcccgaattcttgaaacccttcattagaattccatccacttacaattgaatccttcgccaccccaattcaacagatgcggtatctctcgaccttagttcctttgctcgccgacaccgtccaaaggaagcatagaaaaaccaacgtcatttgtctttgcacgaacaactcccagcacacacacatttgatccaatgacactcaggccccaaatccagtgttgcgctccaaccatcgctattactagcacctctccaacgatcacttcatatgctcttcaccttgctcactaggacactgaaatctggccataaggtccaattgagccatcccagttgtagcatgcacc

SEQ ID NO: 10645 - DNA, 414 bp, Oryza sativa
  unsure (1)..(414): unsure at all n locations
gcttatatgcttgttacagaacagtgctaattattgttaccagactttatgtattaagcaaacctaggttatgtatcacgcatatactcataaaatgaaaggacaattaaatatcaccgaatgacccacaatatgctgaacactaatgatcaaataaaagtatatgatgtgatgttaaaggataaatccatataattgcatacctattacctatgcagaatgagccattaggtcttattatagacccatcaagaatacagcaccatcattatcaaaggaatatcatttctcaattcacctctatcttatatacttgcaactgagataacaggctgtaaataatagttcctaagaccgtgcccccnctttgaaaaactaaatatgctggtccaatgattatatttactgaaacca

SEQ ID NO: 10646 - DNA, 420 bp, Oryza sativa
agaacatatgacatttctctattcagattcaagtgtacactatgtttgaagatgacatgcctcttgttggtgtgctgatgatctggggagatggggatttagctcgggcttttcgagaaggtgacaaggaccgtgatcgatgatgtgtgccacgagctgaacgagatggtgaacgcgcgctcctgtgacataagatgtattaaaatcaaatcccacagtatatctttaacaatacagaacaatcagcggataagcttattaacaatttgactcaggagcacatataaaacagggttctgagagctatcctgctacctcattgtagattgcctgccaactggcgtagagactgcacgaagaaaagcaagttcaaaatcaatgacagtgttctctctaaacattcaaaatgccgtgacttac

SEQ ID NO: 10647 - DNA, 460 bp, Oryza sativa
  unsure (1)..(460): unsure at all n locations
gtcaccagangcctgcagcttagcaagtgtgcacataatgtgtctttttttatgccgatgaaaaatatagctacccatatcaatggcatcaactaaacaactgcaaaacaaccacctaaagttgggatttggcaagttgaaggcatcatccaaccataacatagttctccctccgaaaagaaataatactaacatcgtactaactccatcccaaaatataataacttttagtacgaatctagacatgcacttgtccaaattcatagctaaaagatattactcccttcatcccaatatatagaaatatagtatcagatttgatattttaaaacactacgaaactaatcatgtttcatatttatattcgtactactttaaaatgtataatgcacttttagtaacttttagctacgactctatacatgcactttgtctaaattgatagctaacaattattact

SEQ ID NO: 10648 - DNA, 383 bp, Oryza sativa
aatgggaggatgctgatctttgtatgattgggattactgtataatcactcggaggcattgtatatgatgagttcatgatttgcatccttatattaaagtaacatatgccaccctgtagagcatataaaataggagtgatagcattaaacgataaagtgatttgttaatcatcataacaagaaccccagaccttaattgtgtgcaatgataaattacaactgaatacaggctctctatgaatctctgcccttgagcgtgttcctgaaactgactgaaatttatataaagaatatcttaggacgaacctactaagtgtatacaatgtgatcggactatatgaagatgctctattgcaaaaactacctggtatctcccaaaatggg

SEQ ID NO: 10649 - DNA, 456 bp, Oryza sativa
  unsure (1)..(456): unsure at all n locations
agcttttcagaggatatggggatgaacgcttatcatctaagccggctcagtcgcatgggaagaaagactgtgaacgcaaaagattcttctttttgttcgatgaacctggntatgatgcctagccctgtgcccctgtctgaagtctgaaccattttcttttcattctgatatatctgattgctagctttacgtcaacactaattgcttgattcctggccctattggaaacttgtgctttaccacaacgtttaaatgagctgtccacagttcagtttagctacctacaaatttctttgtatgtattgatgagcatacatgtttcttctgtatttttctccctcctgatcaatccaagcatagcaatggagcttgtctagtccatgcaacattattgtcctgaacagaatactaatatccgagataaacacagtcggaggaatcatgaggtctatgtga

SEQ ID NO: 10650 - DNA, 402 bp, Oryza sativa
  unsure (1)..(402): unsure at all n locations
tttctaacgcgccagaggatgataggaacctttctgacatccaatatagcctctacaatgacataagtgtgattgatcatggtgaaaaggtctgaataattaccctgactacttttatgaactgtgtggaatttaagtaatcatatatcctggactttagacataagcatatccgaaccgcaaatgctgccttttgtcttacaaatatgctttaagaagtacaggttaaactgttaaagaacgtatgctagctatgccttctggctttatcatttatatgccgctacaactgtttggttatgtcatgttcttatatggggtaatttttatttcctttatttatggcagtggataacttttnaattatgattagctattattatgccaccctatgttgttgat

SEQ ID NO: 10651 - DNA, 407 bp, Oryza sativa
agcttcgtcgacaatagcgtcaaccccggcatcaaccaatgagttcctacttcaacaatgctggtctggactcaagtcggcgagatcgtcttcccggtttacaccacagtgccgatctcgactggtccatcgatgaccggaaacgagaacaccgcggttacaaccctgggcgactccatgtcgaaggatcctcccgcagaagtggagaacggaacatcgacgacatccgagtctgagaaggatcctagtgcggccaaatcttgtccttccgacaagaatcacgagccgacaaggacaacttccgaggcgacaaggttctggtgtcctattcacaaaaccaagaaacacaccttgcaagcttgctgtgttttctcgacgtacaagctgagatccgtgcctgaaagagc

SEQ ID NO: 10652 - DNA, 423 bp, Oryza sativa
  unsure (1)..(423): unsure at all n locations
agcttgctcaacggagtgaacgacgggacacgctccttgacaggttccatgaacgcactaatcccagtgctctgctgccgccgcttcactgcctcccctccgcccgcacccgtcgctgctctgtgccgcactcgccgattctgcccgccctattttttcataactattttaattgacatacaaacaatgaggcggcatccctcgagggatcaaattccaccctcaattcaatggatcacttagtttattggaaatctggttcgatggaaagcaatctactgcatctgagcatcccgcttatacatccatnattgaatgttgcgtgcttaatttggtgcacctgcttaagggatgtctggatcaagaaccacatcggatgtagtggattaaacatagattatttataaaactaattacataaat

SEQ ID NO: 10653 - DNA, 321 bp, Oryza sativa
  unsure (1)..(321): unsure at all n locations
cgtacctggtcctctacccctcgaaggagttctggtgcacccggttacggaagactcacacctgccttaagtcataatgatgtttagattctctacatgggggatgctaccggagtggacccccactgtttacacccgcctcgcantcctaccaatggctgccccaccgtagagcccctaccttacacaataagagaccactttggtttgatactgtctccgctcaattttctatttcgctaggtttatacccattccataaaagcggttgtacggaggtcgtttcatgcttaactctatgctctggcctaaattgacggg

SEQ ID NO: 10654 - DNA, 372 bp, Oryza sativa
aaactcagcttaggtgagtagtgagatgtactgtagaaatgaattgtttcaaagatgaagtggtaattatgtccactatataagatgagtaaggcttctacataaacttgatagtggggtttagatttattcctacattacgaaaaactccctataaaagtgttaacacctaaattagacaccaaacattgaaaataagataacacagccatatatagaaaagacccggcttgccatatgaagctggtttgagccctgccatatggttgattaaaccgatggtgtgggcccaatttgaccgacggtatgtggccggtcataccagcagattcgacttccagcccaatttgtgggttattagttccttatttt

SEQ ID NO: 10655 - DNA, 410 bp, Oryza sativa
  unsure (1)..(410): unsure at all n locations
catgcaagctntcatgcctgggacggtctttaatttcttgaatttgttaccaacagcatcactagtataattacttcatggatctatcttttaattatcatttactccctctgtttcataatgtatatcattttagtattttccacattcatgctgatgttaataaatctagatagatacattctagcatttcccacattcatactgatattaataatgaatgcataaatgtggaaaatattagaatgacttacattgtgaaacggaggaagaatgtcttaagaatgtcctagagagttatattttcacgtgtgtgcgcgccaacgcatgttattaataaaagtatagctgagacatgacatgcgaaatatcacacgtgcttatatacatcgagtcgccttcaatataaa

SEQ ID NO: 10656 - DNA, 387 bp, Oryza sativa
tgggagcgtttagagtcctagattcagagtcatggctggatttacaactggcgttaccttttgttgacctgttgaccagcagtgatctggggaagatgcaaaaatgaaagctgttgaaacaacaatattcagttaggaaccaaacccaagaccccaagacaccggggccgtcgatctccccaagaccccaagacccctatagtgtgcattgatctaatatctgccattattgctctaatttcagaggtgtatctaacattgatggtgagcttctcgaattaatttctacacattgtatttactgggtctaacattgtatttactgtgtggtataaaacaaccatggcatttaacgacgcccaaacaacatattgaatttatttgaca

SEQ ID NO: 10657 - DNA, 365 bp, Oryza sativa
  unsure (1)..(365): unsure at all n locations
ngggtgcggcacttcacaaggtattcgatgtgcccgtctatcagatcgacgagcaggttaagatttgggtgagagatgttatggagctgtcctacgacatcgaggattctatcgataccttcatggtgagtgccggtaaggatgggcaccccgttgccaagttgttcagcttcaaggggatgattgacaggactaacaacttattcaagaaggttgtggctcaccatcagattgcaagggagataaaggacatcaagaaacttcttgaggatgccagtaagcgccgcgagaggtacaagattgatgatgctgtcattgcacgaagatcggagagtattgatcctcggctaggtgctattgtacaa

SEQ ID NO: 10658 - DNA, 381 bp, Oryza sativa
cttggtggaggggcgcatccgctctatatctcatatcttctcagaggtggcctcaatgcctcgggcagagaccaagaacccgagaagcttgcccgcaggctcgccgaacacgcacttatcggggttcaactttatgcaggcggagcggagactttccaaagattccgctatatccgagagtaaggtctcttggttgcgcgtcttcacaaccaagtcatcaacataagcctcaacattgcgtgctatctggctacccaaagaaattcgagtagcacgttgaaaagtaggacctgcattctttaacccgaaaggcattgttcgataacaataagttcctatggaggtaatgaatgcagtttttcctcatccttcctagccatg

SEQ ID NO: 10659 - DNA, 404 bp, Oryza sativa
tgggctgcggatctaaaacaaggtcgaggcaaaggttgtgctattggagcttgtgctacggatcttgcagtcacgtacataacaggctcctcagtgctctcactgccttgaacaccgctttcaactgccacagcggatcttggttgagagcttttgatgcacgtgatctcctctttccggttatcctaaaatcggagcgaattatagcccaattgaaagaggaaatcgagaggaaaataataagagaagagtgaggaatcgatttttgcaatcaattggaaaataaacatatcgacgtggtggcttctctagggtttgggcggtttggccccgcggcggcgggaggcgtgctctgcgcacatgcagcatgcatcaatccgccgccgctccgcgcgcgtgcaaca

SEQ ID NO: 10660 - DNA, 436 bp, Oryza sativa
agcttggtctcctctatttgcctccatctagcgaatgaaagaaacattttccatttggaacattgaagaaggaaatgttaaaaatcgcatggcttcaaacgaagccaacccacctccatcgaccatggcaagcacaatcaaattgaatcgattttgctccactgacatgtagtcataaactgactcaaaaacaccacaaacatatccaagtcacaaaacaatatcatgagaatcacatgtggataatctgttcagcattatgctatttttcaacttgaataatctttctagcctaagtaccttaaaattatagcatgttggatagggtgtgaatgtgtgtatctttcatgtaatcgaaaatttccaatacttttaccttatgtactttggctgacgttttagctttggttcggttctccataatgacctcatgatg

SEQ ID NO: 10661 - DNA, 288 bp, Oryza sativa
tatccaacaacgaagacatgttattgtcatatcaatgtatggaaaacccccattcgatgcttcaggctaaatttgtgtacatgcatcttaatctaacattttttttagacaatgatcttaaactaacatataaatcaggaaaagaaatatatagatatcatctttgcttccattaattgcttgaagtcacaaagaggtgcacctacctaggattcaaagactgataacagctggcagctataccgtacgcaccagtactgctgtactggtagtacagaactaacttac

SEQ ID NO: 10662 - DNA, 337 bp, Oryza sativa
agcttcaaaagcctcaagtatcctcttttatagcagcatatgcaggtagaaacttgaagcaacaccaattgtgggtgatggagaagttggaatacttgcgacaatcactaaaaattaaatatatgccatgggtccggaaaaaaaattgattggtaattacatgaaatttgccgtgcagcttgttatcaaagcaattccgatatctgaaagcgattacctaaaaatatcatggcccgttacacccaacatccacttttacaaagaaggtccttcccgttatttgagtcacttaattgggcatgaaggccacggatccatcttcatattataaaggaac

SEQ ID NO: 10663 - DNA, 362 bp, Oryza sativa
ttcgtctcggcagctcttggctccgtcttctatcctctcctcttcccctactctcctctcttctctctctccgcctccaccagtctccccctctccctctccaaaccctccatagctataggcagcagctgggggtgctggcggcgttgaggcattcttgaatccggcgtggtcgcttccccagatccatcttttttggatcgtttcttcgggcgatttggaggagcaaagaaagccctcccaaatcgcagaaaggagccgcctttgcgaagctcctgctgccttctctgctcgttgttcctggcctgggatcacatatccccgcaaggaaaaaaaaggagccgcctttgcatttattcttt

SEQ ID NO: 10664 - DNA, 362 bp, Oryza sativa
agcttcaagcccatcaatattatatcattatatataagattagacaagataaatagatgagtgtttccatcgaattggtgacaacgacaacagatgacacaactttcccgaccgttttcatccccactatagttcgattcccatgaaaatgctccaaaaatatcctcctttgaaacacaggatattcacagaaaatagttcaattcccgtgaaaatgctccaacaaaatcctccactccaaaagaggcctaagtgggctcagatttgcctttgatcaatcatacagacccgacccctatatatcttgctccacaatctactcatactaatgtaagtggaccttccttgttatcataacagaa

SEQ ID NO: 10665 - DNA, 402 bp, Oryza sativa
gaccttaaaactcagcttgggtaagctgctatgctgagatctacctcttttttttttggtatctctcccatccatgtaagcttatagtaagctcatagcttactattatacttgctctcatagaatctgtgcttagtccaaattggtcaagctccgtataaacagagcaattattaatatgtattactaaatactaacatacaaatatgtcacatcaacctattaatcgtctaagacacaacaatataaatatagataatttactacattaaaaactcaacgtataaacatgctaaatcaattattcctcacattctttctataatattttaactcaagcttaattactgagttcggattaccgaaacaatagataatctttaagtaatatatataataaag

SEQ ID NO: 10666 - DNA, 357 bp, Oryza sativa
ctgcctccatctcctcccacttcggcatcgcgacggtatttccgtctgacccttatggtgatggtacttcttcttggcggcattttctttgtttctttccatcatcgcctgcccttgttgacctgtcttgtaagcaacgaactcgtcccagtgatcccttagcttcgggaatacgtccaagttcggtgtctgccccttcaggatgtatttccggtatagatctcccttgaaggcctggaactgagtctgcatttccttaagagatcattgtttcactatgttctctgtaccacaaaggagcgtgaacgtcttgagcattgtgtgccacagcatttctttctctgattccgggacaaa

SEQ ID NO: 10667 - DNA, 389 bp, Oryza sativa
  unsure (1)..(389): unsure at all n locations
ctgcaagcttgtttaagagatagggggatttttttatttaagataaanggaacgaaaatcatgtgtatagttgaaaacagggataagaatgcaaacgcccttattataatnttagaaatgaaaatttatttgatgaaagataatatcattagtttgacatttgaatgtacttcacatggctataactaattttgttgctacaaacactgtatgagaaaaaggacaccctcttaagctcgatcacctcttatattttgggataagggagtatatattacctcttcacattatttatacacttctcatccaggtggaacaagtagaacaaattccacagcttctgggaaagcattatttctttgtgggataacagtctgtattgtaactac

SEQ ID NO: 10668 - DNA, 331 bp, Oryza sativa
cataactgctatgattgtattacaactacggcaccattcttctactggcatcttaatctgacagaattctctaaaaaaacacatttgccgttggataactaatgccagagaagatcaaagtagaattataaaaggtcttccagcatatgcacaatgaccttcgcataatctaatcatcatcttttggggcacaattatgatcttcgcttctatgacacagaaagagcctcttaaaagcacttttataccgaataacttgctttacatgatatatgtggaattccacctgttggacattctaacacagggcccaagaatggctaaccctccc

SEQ ID NO: 10669 - DNA, 391 bp, Oryza sativa
gctttctattttgagagatgaattcctttagagattgttgtagaagggaagtaatccgatgcgcgttcaaatccaacaagaacgtctaatgaaatgacggaagatgcatattattctctcggagctggggctaagaacgatcctcttatccaactttctgtctgtcccaaaaccgaaccttgcttctgcttctacttgaccggtgcttgcttattactggcattagttagtagcctagctagcgcccttctgtgctattaagcatatcttgcaaacctactgaatgttgaatctcgattgatgtcagaaaccaaccgtagaaagagaggtcgaagcacctgatcactcgttcagctcgtttttcgctcgtgcctgtatggaatgcataagt

SEQ ID NO: 10670 - DNA, 404 bp, Oryza sativa
  unsure (1)..(404): unsure at all n locations
cgcgatatccagtgaatacccgccatggccattaatttctgaacaggaaggatacccagattaagaatatggctagcagaaagcagcctccaagatggtcgagtgtatcacttctctcactaccgaaaggaaactgggccgaggcgaacaagacaagccgcttaacaagcaggaaaacaagtaggcgaaagaagaggtttaagttaatgagagcttgagaatctagttatttagtcaactttctcttcataagggaataaggcgggtgggtgaaaagcctataacaacatcaaaatggaaaaacaagagtctcatggacccagaaaaaggatttnttgacatggtttgtttcttactaggatgctttgaatattccacttctttctatcctttcccaggcccgg

SEQ ID NO: 10671 - DNA, 342 bp, Oryza sativa
  unsure (1)..(342): unsure at all n locations
tgcagctngggagaggcaagaaagaagatgatgtgagatgtaaagaagatgacgcggacaagaagaagaacatgaaggagaaggagaagaagaagcattgtctgcagtggttaattcaagaaatcataaaagctttcgatgaatcggaagatgaagatgagagcacaggtaaacaagttggtaatctagcttttattgctcgtaatgcaagttctgatgttgatgaatcatatgatgatattgaagaaaagcttagttatgatcaactagaatatgctgcttacaaatttgctaagaaactttaaacatgttctattgtgctngatgagaaggatcatacta

SEQ ID NO: 10672 - DNA, 390 bp, Oryza sativa
  unsure (1)..(390): unsure at all n locations
agcttggctaagcaatcctagaccaatcatctagtcaaatttttatcccagaatatcaatgaattaaggtaaacaaaggctgagtatgggtagaaaccatcccacatgacattataaaagtaatgcaattttgagagaaaagcaggggtttttgcaaataggctcaatatgatcaatgatatctgtatgacttgccttgctcttcaattgacgggacctcggcgaccacttcaaaataaaccggagcgtcagaagtgccggagtctaaacgacaaacaaggtacacaataaatacatgctaaaaagctactgaaacaacaaaagaaaccaattntaatggattcttgacatttaacgaattcactgcgatttgaatgggtaaaacggagc

SEQ ID NO: 10673 - DNA, 411 bp, Oryza sativa
  unsure (1)..(411): unsure at all n locations
ttctttntcttccgccatcgatttgatccgaatgagctgatttgattcgagggatggctggggagagatgtggaattgaagcggtgagtcgcggggaggattttggtgaactttttggaagtggattggagcggaatggtgaaccctagtttcgccggcgcagttctgtactatagcacggaatggggaaaatggcgagagttccggcggggaagacgaagcgccgcttagacttcgggattttttgttaagggtttcgggggtgctaatgggcctaggcctgataagtacttcagcccaatattattaacagtgtggcccgttgtgctccttatggacttaagcatttttgctttggcaatttatgctcgcaatggtgtgtgccaatgcttgataaatcctttttaatgc

SEQ ID NO: 10674 - DNA, 443 bp, Oryza sativa
agcttgacaccatatgtactcgttagcatgatccaataagcacaaggagttccatcgacatctgttacgtaagattgatttgattccctactgtaccaaaatttgatgtggtcaaaattttagcaagagaaactactaaaccaaaacatatggtgcacgcatgagcgcatgcatggctctgaggagctccgtcgtcagtgtcaagttttgcactgtccttagcgcaaatgagcctacagctcgatctacagccatgctgatatcgttgatcggaacatcgaaactacacttcacctaccgttccaacaattgatggccaccaactccttcagagctctaatcaacgtgacgatgtccggatgcgtagcgcgtcgtctcgagaagttaatgcacttcaactccgtgatgctcgtgggcatcaagagcccagcgcaccggaacgt

SEQ ID NO: 10675 - DNA, 102 bp, Oryza sativa
attctactgggcatatacgtagggtgcaaatcacaatggctatacgagcaagcgctagattgggcatgcgatactggtgggacagactactgagctggtgct

SEQ ID NO: 10676 - DNA, 407 bp, Oryza sativa
  unsure (1)..(407): unsure at all n locations
agctntgccaccgccgtgccgtttcccgtcccgggggcgcttatcttgcaggctcaggcgcagcagcagcagcagcaggcgaggaagtcgaggcggtgctggtcgccggagcttcaccggcagttcgtcgccgccttgcagcagctcggtggcccccaaggtatattacatgggcgaccatcattttcaccttccataatttgcaaagatcaccggaaatcctcatatcttgttgttccaccatgactgcagttgctactccaaagcaaatcacggaggtgatgaaagttgatgggctcaccaacgacgaagtgaatagccatcttcaggtgagcatacaccccctcatttattgcagcaaccatttctcgaaacagattaggtctcgcttcctgattcattcagtt

SEQ ID NO: 10677 - DNA, 356 bp, Oryza sativa
tgcactgctgcacctatatattctgtacatttcaagctgtaacgattgggctcgagcggcagaatccaatgatagtgggagccgaccctagtaaaaagacatgatatttacatagatattacaacggactgatcaatacttgcagtcggcaatgcatcaaacaccataagtttctttgatgttaatgaaagtacacatgatatcgacatattgtaattagtgtatatttttcacaggagatgaattagtgcaagccgctattaactgacagtcagattatacgtttagattattgaggattcacaatttaatgttcataatttaacggatgagatgtaacacctatatataaatat

SEQ ID NO: 10678 - DNA, 400 bp, Oryza sativa
  unsure (1)..(400): unsure at all n locations
agcttccaagtttagctcgttttatcttttccgctgcatnntgaatcctttatattattgcaagacgtggatctgtatgtcaacaattatcgtctgtataccctggctggtcctggacagggatttaatgcacattcagcttataaattcttgtttgtgaatttctgggcatgacacctgtgctccccccttctcccacgtagccggcgccctccccttctcccgcctcgccccggagacctcctccccgcccgccggccggctgccaagagaggagaaaagtgaaaagtgagagacggagagagaaagaaagaggggaaagagaggcgcgctgatgtggacaccctaacatgtggtgcccttgtgggttccacgctgactcagctgccacgtcagacaa

SEQ ID NO: 10679 - DNA, 358 bp, Oryza sativa
ttccatagagtccaagaacgcctaattccgagacccttgtcaagatatatcggcgctttactaaccgggcgggtgagctgaaaagtgacctgcggtctgaccgcgggccttatgccggtctgacccggtctgttagccggtctgaccggcgtggtaagggcggtctgaccggccccactagtctggtgcactggtctggtttttggtggcgatacagagcctgcagagccgaaccggtcagaccgagcctgggacggtctgaccgggcactacactgcggtcagaccggccaagttgaatgggctcaatgattgccctggaacggctagttttctaccgcacccgtacaaagattact

SEQ ID NO: 10680 - DNA, 316 bp, Oryza sativa
ttatggagaatttcgggggtttttccacttttaatatgtagatatacaaagtttgtatgtgtggatatacaaagattgtgtacctatgtgtacaaagggtatatacacggatatatttttatacgcgtaaaatgtgtgcctatttaagaaaaaatatattttatatatacaggctgggcatactgtttatatattcatattaacctttaatgaaacctggttatttggcgaagatattatacaaatgttttattggcaccattgcctttagagattaactttacacaattacctctcacgggacaaatattatata

SEQ ID NO: 10681 - DNA, 342 bp, Oryza sativa
  unsure (1)..(342): unsure at all n locations
nttcaccatcaacaaaatttacgtctttgagtcgaactgggatccttatgacgactcatcagatcaaggacaagcaactaatattaatcctatcaagagtggcttgaacgtcgccaagtgcattaaagctgtgcttgagccggtgatcgctagccattttggagaatctatactagacgtgctcttctctatgttcgcacgtaatgtcacccagcaccttgagaaaaggaagggaaagcacagcgtcattgtgctgtcgctcagcaaaagaaagaattaatcacaagagcggatggagcatgagaatttagccgttaatttcctcttattttgatttgaatg

SEQ ID NO: 10682 - DNA, 349 bp, Oryza sativa
agcttggaggtcttctgacgtggctgatccccacgggctgggtgatccgggttagtaatgtcgtgtgggtaaagtgtaccccctctgcagaggttaacaaactgttcgaacagccgtgcccacggtcatgggcggatgtgaggtgattcctagcgtagttttgtttgactaccgcttgtgaatttgctgttgagaaaacgggttcgatgtttgaaaaatcatcagctgacaggatcagctaggcccgggtggccgttgaaaagttgatggcccgggtggacgtttgataagctgttggccgggtgccaatcttgtttcaaatctaaagactgatacattgcacatactc

SEQ ID NO: 10683 - DNA, 378 bp, Oryza sativa
  unsure (1)..(378): unsure at all n locations
tgcgtacctgttaatttatttttggtatctgtactttgtttaagggagtgtttggctaattctcgcacttgcgggtttttgcctactcattntttaaccaggaaattaaccagagtagaataaaggaacgagtccattttataactcctttggtttgtggtaatatagaaaactaattctgaactttataattgaatatacttcaactntcgactctcnaaaccatgaagttttttacttgtgcctgaatatagagctgttttggttgatgtggtgtaaaccaaaaactaattttgagttttaaaactatttaaagagtagaaaaaagtatttctcgctaagttttttttttggtacaggtgaaatacctacagttgg

SEQ ID NO: 10684 - DNA, 401 bp, Oryza sativa
  unsure (1)..(401): unsure at all n locations
agcttatccagaatagaccgatttcaaagataatgcggcatggaaagctatctattaattaggaatagtttggtagtttctttttatctttaagaaagtgcgtttagtgtcctataaggactttatcttttccttttacctttaggaaattgtttctttcttgtccgataaggacttgtatcaacccatgggtataaatatgtacacccagggtctatgtaatctatcgctacgatcaatacaattcgacgcatcgccaccttttaccttttctactttattttatcgtctggcgggacttggcacctgacgcggngctgcatcagtgttcgatcttcggctaaggggtaagttcaatgtttcgacggcccaggcaattgtatcgtctacgtcgaccgcgt

SEQ ID NO: 10685 - DNA, 276 bp, Oryza sativa
gacctataaaactcagcttcttagtagattaattccttaaccgaatatagtattaatccgacaacgggcgatttgataactctcatcggccgagtccaggactctgaaaccgacactgactctacgccgatggggaacttcggcttaccaaattttggccgtaacacatgccccccaatttttgagtatgaagtctcatgcttcaaaattatctttgtccgatcttggtacctccaaaatgattttctttgtttttccaatcggtttcatgaccga

SEQ ID NO: 10686 - DNA, 341 bp, Oryza sativa
  unsure (1)..(341): unsure at all n locations
agcttcttgacagccacgatggctggttatcgtaacctggctgtggatcgcaaacttgacacctgctatagcgaatacacccgttacctgcttacttgccgccagctcatgatgtccacctgcatgcacctgacgaatgagcgtatttctgccaccaccactgcgagcttcggaccgagagacttgttgcagtatacctctctagctaaccggatgaggcacgcaatctcagagcggtagaggccgatgccctcaaactcggatactctggcatgcagaatactgtccacacngacgcacaacatcctaggtgctgatgcgacagctgatgatatgtctga

SEQ ID NO: 10687 - DNA, 386 bp, Oryza sativa
taccatgtgcgcggcggcagtatactctatttgcctgtcttgtgctgccggtcatccaatgtatccatgaggcccatgctgaattatggactaccagctatgtgaatcctgacatgctgtcttggccttgaacacatctacgagtatctatctctattgtggggaagaggcctgacaacttacactacatgtgcaacaaaaccaacaaacaggggccaatgcacatctgtacgcgcccatgaggagtggcacatagacaagctatatatgtgtactcatgccatagacatacgtttcaaacatatgattatccaatcactttgtactagtggcgctaactattgacaagtctttgacatacactgatatagaaatatatttgtgaa

SEQ ID NO: 10688 - DNA, 425 bp, Oryza sativa
  unsure (1)..(425): unsure at all n locations
agccttattgcagtaatcggcgactatatgttagtatatcgttaagtatcagagatgcacttgatagttgttgagcccaacaaaattgaaagggcatctaggcccctaatgaccttgatgattgattacaatgcgattagagaggtctaacttttttattcaagcctatgtgaaggtcgttatgtcctcgacgtctngtaatgcgatgtataccccattgaatgcgatgccacgatgctattcagcaatgatcaaatgatatattgtatcttttaccttgcattgagtcataagacagccgtactattaagggggatgatgcatagacatataaagggtgatgcatgtgctcaaaatctatctttcttcgaagcatttctctcttgggtcttggacacttntggaagttccgatagctatttttg

SEQ ID NO: 10689 - DNA, 356 bp, Oryza sativa
gctttgacgatccctcatcgatggtggcagtgcactcaactattcttttcgccaatactctggatgacatgcagatcccttgtacggaattgaaaccgagtaacgcgccctttcacgaagtcatccccgggctgtcttctactccactcggccagagcactttgccggttactttcggtactcgggagaactcttgcacagagaatatttgcttcgaagttgctgatttcgagacagcgtaccatgccatactcggacgcccggcgttagccaagttcatggctgtcccacactacacctacatgatgatgaagatgccaggtccccgaggagtcatattcctgcggagcgacatc

SEQ ID NO: 10690 - DNA, 437 bp, Oryza sativa
  unsure (1)..(437): unsure at all n locations
agcttctcagccattggccatagataatctaatggttgatgcaaataatttatgtcatgccgatccaaggctttaaaggccattctgaccaattaagatgactcgagcattaagtatgtcgaattccatctcgttgatacatcaagcgatggtcgtctgttagtttttattcccacttgagcaatcatctcttcaaacctttgaccacgtgattgcgaactccgaacatatttaacactntctcttatactgttaatggcgttgctcatggtttttagcccatcttggacaattatattgaatatatgggcagcacagcggtaatgcatcaacactccatcacaaagcaacattgtcgtaccaacaagaatggttttcagatgagtcatcattgtatcattcacactngcattgtctaaagtaacactgattaactt

SEQ ID NO: 10691 - DNA, 412 bp, Oryza sativa
  unsure (1)..(412): unsure at all n locations
agcttgccatattctctctnnttttggtacccatacgctgttttgttgcttcattgtttatgcacaattttgattaattcttgtttgatgtttcatattaactgaattcagtagctttttttaatcatcgcatacataccttgcttgagtacaatgaatgcagttcgagtgttcacacttcatgactttctttgtaacttcaagttaatcacagtcaatttacaatgcaagatttttaagaacaatatacaatacaattgattcgtctgtgttaagattttcttcttagctacgtaagtatggattttcagtctgttctatattaatattgcaggctctcaaacatggaaacacaagatagcgcaccttgacagaggagagaaaagctaagaagacggtatgttctgatctc

SEQ ID NO: 10692 - DNA, 432 bp, Oryza sativa
  unsure (1)..(432): unsure at all n locations
actcagcttacaaaactggcaggcgcttcggtctccaaaggctctttcgttgaaactaccactgctggggttttcagctaaaagctatagatgaactgatcagtgtgcaatcgggcttgaatattcgggtccactctccgaaaaggttatgctggatgaccctgccgatgtcacgttgctgtgtgaaccattccttgtggattttggttggagttccatctctctttgcctctctggggctgcaggtctctgcccctcatcagctaatctcttcaggatgttcattatcgtgggaacgaatttcgtcgaaagtgataggacggctggaagctgcaacattgcaggcataaaaacaagtatcaggagagaaactctntaggaagcttgaaatatatactaatggcaatgtggctccaatacttacaaatccat

SEQ ID NO: 10693 - DNA, 465 bp, Oryza sativa
  unsure (1)..(465): unsure at all n locations
agcttagatccctcaaacaaaagtgcttcataaccaaaatcctcaaggacaaaacttcaattcattccctcaagtcattccccaataccaagtattttgcactcaacccaatcaaacaatacaagaacaacaaaaccaaacattctaacaataccaattccaacagcaaatgccctaccaaaatacttcacaatattttggccaattccaaaatcagataagcaattttccatcaacccaacacctccaatttcatccaactcgtgctacagataccaaaaaccctctaagccaaagtttacaaatggcaccatggccagcatatntcaagttatccaacatcagcaaatacaaaggcgacgctgatccaaacgattatntgaaggtgtatgaaacagcagttgtaagccaactacctctgaaaataaatatcacattacgtgcctatattntttgaaatctctc

SEQ ID NO: 10694 - DNA, 418 bp, Oryza sativa
  unsure (1)..(418): unsure at all n locations
tcaaaccatgcggagtatacgatagttntcttctaagctttagtagttcctatgatagtagtacttcacatgaatgaaaattaaaattctgattttctttttcatcccttctagattcaaaacttatagtgccaactattgaaaaccggatcttaccaacttaccatatgaattagatttcttgaatttacagtactgaatatttgtttcttgtgcagggatttggggttagcaggtctatcaggtcctctgattccacagctgggaggactgagttaccttcagtacctgtaagaacttgaactaaactttctgtacagctcacaagccatgtcactgaaaatggatttggatttctgcagtgaactgtatgggaatgagctgaatggatcaataccagcagcactgggcaacctga

SEQ ID NO: 10695 - DNA, 448 bp, Oryza sativa
agcttggcaattataggactcattgtttatctccacatgcacttaaatgttcacaaggtacatgattgacacacttgacgaaatgaaaattagttgcatgacagatgcatcacatggattaagtgttaaggatatcacatggattaagtgttaaggatattaagaactcccatgtaggtcctgttgatatccttaacattaagaattcgcatgtaggtcttgttatactgtcatattcagtctagcagttaggttgcttgttcaggctattttctagtcctcttgcgacccctcccccctctggaggtggctgcagttttctcaggagagctatgaagatcgccgccaccagtctcagagggttcatcattaacgcttgcatctttgtcactttgcttctcaaaaagctctgtcttatcaggggagttctcatcctcctcccttggag

SEQ ID NO: 10696 - DNA, 418 bp, Oryza sativa
tggacgcctttctagtattcatgcacggagccttcattatgtacttaactaagacccagttactctgagttgccgttaattatttagagaaatcttttttaattatttgcatttcaatagcaatactccctccattccataatataaggcacaaccactttttttagatgttccgtaatataaggcatgcatgcatatagaccattaactatgacctcttctccattaaattattacttttttaaatcctccactctcatgttctctaattctattggatgtatgtattggatttattaggatgatccaaactacaagatgataataattattttcttggtctttgggttaagggtgtgtcggtgacatgggaccgggagtattatgacttagagacttgaggcagacacgatcaccc

SEQ ID NO: 10697 - DNA, 444 bp, Oryza sativa
  unsure (1)..(444): unsure at all n locations
agcttgtgccagctggtatatagttgcgtttcttcctctccaacctctccttcgccaccagcctcagttgggccttacaacgattgttacacggcccattcggcccctttgtattttctattctccatccggatacgcctgcctctcttgacaacgccttcttgcttcccaccttcctcctgtacttcgtccttcgccttgtcgcctccttgatcatcttctgggtcctcctcctcctcaacagcttgatgatgagatgcttggtgcgctctgacatcctcccttccttgggaaccggcttgcccccaagccggtgcgtgtgggaagcggctcctcagctcctccttgtcctcccaggttgcatcctccaccgaagaacctgaccaatgtgttaatatttgagttacaatngtattacctctcttggcaattctgtgatccaag

SEQ ID NO: 10698 - DNA, 368 bp, Oryza sativa
  unsure (1)..(368): unsure at all n locations
tttacacagaatataccgtttatcaatttgaatagcgtgttaacaaaaactaagataaaatctttatcttaaccagcaaagaacagggccattgtacagttaggaaaaatacaacaggcaggtctcacgactctcgtcattgtatagagacgacacaaaaaaaaggagggggaaaaatgaagtgattcccacggtttatctggagggcgtgatgccccttccactaagagaaaccacttgacggctggcagggcangaatgggatgtgatgaggaggaccgagggcgacactgccggttggtgtcagtgtcattgctccgcgaaagcttaatcggaacccaaaattgcatggaccgagagggagaata

SEQ ID NO: 10699 - DNA, 451 bp, Oryza sativa
  unsure (1)..(451): unsure at all n locations
agcttggaaggccactggacactaaataattgccatgtgaattgcagaactctctttactcttttatgtctttctgcagttttaattattgacaagtgacaaatacacaactgcattctagagtctagccaagctaggagggtgtctctctgcgagttacaatactcaaagctatttggcaaattcaatatataattagaacaaatactgtatgtagatgttggattgagctaaattatcagcattgttgaaaaatcatactgtgatatttgtccatgttttacattattttgtatttcgcagacttatttcatatttacactgcccagtgaataaataatccagtttatggttaagaaaagattcttatattcatatatagtaaacagttaaattatcataaatttggtttgactaatggaaatttcacaaaggtgtantcacttttgtc

SEQ ID NO: 10700 - DNA, 397 bp, Oryza sativa
tgtgtaaccatgcatcgagctactactagacaggcctggtttgagcttgactactgatgagctcaacatgtaaatagaactatatatgtatatttcaaggataattatctaggaaagtaattaatttctagtttatcacaataaagaaagaggagaaaaagaataagataaatatatgatgccaatagaagctacttatggtgtggatacataaaaatagcatatttgatctcctagtttgttaaataaacaataaaaccatatattgttaggctcattagaagcttgatcctagctcaacaaagctcacgacctttggcataagctcaagcttggcttatctaaagctcaagccgagctggagttgagcctttcttttttggcagcttgaatatat

SEQ ID NO: 10701 - DNA, 415 bp, Oryza sativa
agctttcacgagccgagccgagcttggctcggcttggctcggttccacccctactcacgccctgacggaaaacacgggcagatagttaatcagttgccacgtactccctccctcccataaaaaaacgaatctagtactagatgagacacattctagaactataaatctgaacatatgtgcagattcgtaggattataatatgtcaaatccggtactatatgttcaaattcgtcacatccggtactaggttggttttttatgggactgagggattatgaccttatcttgtcgcttatgtttatgcatattagcgagaattaaatttggagttgatatagagagtttttttcatcgagattatttttcaacctttgatcttagatcgttaggaacacgctatataaaattttattct

SEQ ID NO: 10702 - DNA, 395 bp, Oryza sativa
  unsure (1)..(395): unsure at all n locations
tcctcgganaggaccgctgtctctggtgccggcctgctgacaccctgggctccactcgggcacgaagcccccattccttttctggaagaggaggccggccgggacgcatgcagctacacatagatctctccaagattccaaattaacctacctatctcgggtaaatatacgggggaaactgaaatcgtctaaaatcatacttctacatgttaatgagatcacggtgaatagctgtgcagcaaatctaatataaattcgacttcctttgtgagatataaaactaacaaatttcaaaccagaaaaatagtcttgacgagttgtttgaaaattattatttttntatcttacaaatagaagttgaatcttgtgttacttcctcagtttcgcattataaa

SEQ ID NO: 10703 - DNA, 441 bp, Oryza sativa
  unsure (1)..(441): unsure at all n locations
agncttagctcggtacacaggattcttgttcctgatcaagacgaatcaggagaacaaaatgaagctctttcgcgtgccaacctatgatgtggatgtcatctggcacactcaccaactgcattctgctacctactgccatgatatgctgaagctcattggacgagttctggagcatgatgacaccgatgactatcgatcagaaggaaagaagctctatactggattttcagggactaccaaacagtttgagaatgcctttggtgcaagatactggaaggctggtgctatgtaccgtggcaacttgccgtctcctgtgacatccaatcctcagatgtttattatggaggtggatggtgaacttagtgttggcaaagctgagtcgcaattaccattttgaaaaacagtatagaggttgaactctacacacattattatctgatc

SEQ ID NO: 10704 - DNA, 370 bp, Oryza sativa
  unsure (1)..(370): unsure at all n locations
ngttgtatatgctctgccaggagtgacaatcactgatcatttcatgagcacactgaacagcatcttgaaaggccttcttggacatcaaaatggtttctgggagcagtttgggctttgaagccagcaggtacatacagtaccatgataagcaatttgacactgtgtatgccttttgaagctcacctgtaagagctttttcatccaccagaaacgatgataatcttgacattgttgttaagttgattttatggtcattggcaagcttgatctcacataggcttgttgcgatgtgccagaccagaataacacgggagcatgttggtacctctgcaggcatgccaaccaataacgctctgctctgtcactgaca

SEQ ID NO: 10705 - DNA, 378 bp, Oryza sativa
cgctcggccagttgttagaagacccctgtttgatgttgctcgaatatttgtgtgatattatcttcacttttgcatggtctaaaaattctagccacccactgaaccctgtaaaaacagaactgcaccctttagctttaaaatttcttgtaggtcttataacttgcttaaaaattcctaacattttgaggggggtagataacctatacagaaacttagttgtgcaaaaatttcctttttagcagccacctaaataggctttttacccctgttgttgctgtggtttgctcctgtccacaacctgaaaactaagtcttcttgttcttccttgatcctccctttcacttaagggttctaatctaggtaatcttgtactaatct

SEQ ID NO: 10706 - DNA, 408 bp, Oryza sativa
tgggctctttttcgtccacctacacattgtgagaaatttcactatgagtagagattaatgcgttaattttggaaagaacatcacatgggctatcatctacttctctcttttcttctggggtatctctcacactaatattttggatatactcaacctcacatttagtggaatcacatagcttactcttttcagcactctcactcaatttggctatgtggctctctttgtcacatgggttttctcgcatctcatcatgcaatgaccatgggccaacaatggcgcatttgccatcaacaatgatctgttgtgctgcatgcactgccgcaacatcactacatgtcacattagccgaagggaaagtcccatgcttgactatatactctttcttctttgatagcacatattcca

SEQ ID NO: 10707 - DNA, 202 bp, Oryza sativa
agcatagggatgtgctctgtcttcaccagttgcatggacgccctaatcttgttcatatcgaggctaggatagaatgcactatccctatttaagctcctctaacgctccgggccatttacctggactgaggaggctgagcgggccttcactcatttgaaggcgtactctatttcttcctcattcgggtcgctcctgagccata

SEQ ID NO: 10708 - DNA, 394 bp, Oryza sativa
  unsure (1)..(394): unsure at all n locations
ntgcttggtgttttttcatctgcctcttcatcaaagtatttcttgatatcaaaagagaacagatatgagattctaaaggtaaagtcgaagatgattgaataccaaaacatgttatacagcncgatctgagattctaaagggtaaacttactaggatggcaggagcagctggatgttcttcttcctcgatgttatggctgcctgcagccgatagagtacgatcacttggcatcggctgcacaagaggtgaatgacgaggacgaggaggctcgcaaagataagtgttaattaacaccggttttgatatgagcaataagatttacatagggaacttttatggtgggctggttaggtggtgtgggccgattctttttaccgaggatttttttttgaaa

SEQ ID NO: 10709 - DNA, 450 bp, Oryza sativa
ctgcaagctttggcatatggggtgtgagtgtgtatatgttctttgcaaatatcgggtaaaaagtcctgtgcccacaggcttactctaacctcaccggacaagaagaagaagaaaacaaattgacgacgacgacaatagacataccataacccatgatatgggtttggaagtacaaaatttggacaatgcgattgcaagatccaaacaggaacttcaatcaaattgatctaaacaaaacgaaatcgtgatgacgatatcgtagttttgtttgctagcactgacgattgacgaacaacttgcctattggttcttaagattaaacaaaaaaaaaagggggccacctatttgggggttggaaggtagcactagctgggcaaagcttggagagcatcatcacgcgaagctacacgccaatacatgatgatcgatcagaggacttcgttggatcac

SEQ ID NO: 10710 - DNA, 390 bp, Oryza sativa
tacacacgtaagctggtcctctggtcccagatcgatcgtataaaaccaggggctcgcatggctaataatctgcgcctccgatcgataaagctatcccgccttttcgagttttgctacccatgcgccccgccgccctcgccctctctttccctattctttatccgccgtcgccgagccgcctagcggccgccgtctcgcctccgcacgcgcgtcgccagcgacgagaagacgacgacccgtgccgtgcgccacccgcggcttggacggccgcgcgctatggcctttgggcgccaaacgatgccgtgagctggcggggcgtacatcgcggtgaagctgggggtatactccctcaaagaaaaaaaaaaccctaaaattaaatgtgacacatgc

SEQ ID NO: 10711 - DNA, 376 bp, Oryza sativa
  unsure (1)..(376): unsure at all n locations
agctttgccgcgacgcgtctcatgtgatgtgacgatgctcatgacttaggcagccgcggagggcgggttaagtgtacatccactgcagtgtgagcagaccatatctattcgaatacccgtgctcgcggttattgagcaccaagacgtgtattacacttggctagactctaaatccttaacttgagagggatgggatattgcatgatgatttttatgctagtggaaccaacttctgagaggcgggagagtggacatcctcataaaatcatgacgattcaatggcgggaagctattcttgggatcacaatggatggtggacagaaccgtcattatataaatatgaacactggtactaacattngatcaacctatgcta

SEQ ID NO: 10712 - DNA, 408 bp, Oryza sativa
ccggcgttaggcataatgggttggggtatctttatttaagagggactgacaaagcactatgtagtgctttgttagctagcacaagtgaagaggaggctaaattgattctaaaacattgtcaattgggacatatgtcctttgatactatgtctaaggtatttcctgatgagatgagtaaggtggacaaaatcaaattaatgtgtgatgcatgcgagtatggaaaacatacacgaaccacatacataagcagaggacttcgaagcattttgccatttgtgttggttcactctgatgtatggacttctcctattgcttcggtaagtggagcaaagtaccttgtcacctttattgattgccactcacgaatgacttggatatatctcatgagacacaagagtgaagtattga

SEQ ID NO: 10713 - DNA, 457 bp, Oryza sativa
  unsure (1)..(457): unsure at all n locations
agcttctgctatgcgtttaacataagctgcacaatgcatgcatgatccccgttatcttcctctacgaccagacgaccaccgattcctccctgctggcctgaccaccgtcacttaagttaaagaattcgctctaaaaaaaatttggaatctataatctcttgctttcaactttttttttaggagatcttgctttcgacttgaaatcccgtatgtctaaattagctcatgggccccctctctcctacgtacacagtacattgattcaaatgcgtacctgattnttccgttcaaaaaaaaaatgcgtacctgatttattattactaggattaagtccactttaagccccttaaatataggtccacgctaagtctgaattctctttccagcccgggcctgcttcagtaagtaacccgtgtgcgtgctagcccaacgggccaaccatatgtgatgggccata

SEQ ID NO: 10714 - DNA, 334 bp, Oryza sativa
atataaatttaaactttcttatattgagttgaaagttttcgaatcaaagttgaaaagattcaaatctaagttaaaagtggttaagagaattaagcactcccgtgacgatttttttttcggaaaaaaaaagagagaaacacgaacgggagtttggcttttcttcgtacgtgatgccgaaaacaagtgggcccaccgcttctctacgcgcgcgcgacttatgtaaagggcacgtacgcgctaattagccatccccgaaataatatgctatggaaatctgcattctgcgagcactcgaactcgagtactcgacggctcgatgccatcaaattgatat

SEQ ID NO: 10715 - DNA, 445 bp, Oryza sativa
  unsure (1)..(445): unsure at all n locations
agcttgacacatgaacgagataagcttgttttggagcctactacagcttggatggaccatatatatgcatgcatcgatcatacagtccacaactttacagaaaataaacttctttctgttaattcacagctaaaatataatctttcgactattacataggattaatatatagcaaaaaagaaaagtgtatacaatatactccatctgtcctaaaatataaggaattttgaagggatataatatttattagtactataaatctagataagctctttatccagattcatagtactagaaaatgttacatccctttaaaatcccttatattaattatgagacggagggagtataattatatatatacataaaatgaactactgatcanaagttgatcatgaattcgcatatagcactatctgtgtcgacattatatgcaagaatcttt

SEQ ID NO: 10716 - DNA, 379 bp, Oryza sativa
tgttgtgtcctatttactgaaatggttatagttatattgcaggaatattccgcattatctgtactctgaattagttagctgatatatatttactcctatctcacacttgttataaattcatctcctctgtcctgttctctgtatgatacattttatgcatcttgacaggaaggtaaatattggtgattaaccttataaaaattgcatttttaacaggagattcaaagccccttcctggagacgatggatacgcatggctggaggagtgtgaaccaccagacaattttcatcttgtcgggtcaacttatatgggtccaagaattgtggacaattgaacttacgaggattccttggtttcttgcaacgcatgatgtaactt

SEQ ID NO: 10717 - DNA, 429 bp, Oryza sativa
agcttcaaccatccagtttgtattggaatgatgttcaagtttcattttgagagtgaagatgttaatgagaggtttgcatttttcagttgaactatctttttttgtttttgcataatactttcttgggtcttactatctgtgttgtaggcgttctggaatgattgccggtgttagtgaagtagaccccatcagatggcctggttcaaagtggagaagccttctggtatgcatttgagctgcttttttattaagcttgttgactacggaacattaacttttggctacctgccaagtctttgaaacatatattatggcaccacatatagtcaatttcagttactgttttgtctatcggattaaatgtgaggttatttcacacattaaaataaattcatcaagttagctgaagtgctgaactcttgaatatgg

SEQ ID NO: 10718 - DNA, 392 bp, Oryza sativa
  unsure (1)..(392): unsure at all n locations
tcatactaggcttcctcatctactctataatacttttcttatagntaataccggagtagattgtcttcatccttcagntatctttctacactttaataatttagattactaatggtactatttgtggcataccactttatatcatgttcaagatgcatttatttaatttgtctgattccaaagttcggatgaattgcaatatagtctttgtttatataattatatttacaaatgttaacccccaaaagttatttcatttatgcatacctttaatgatgtgtaatcatgtgaccttctcatgaatgaaacataactatagattatcaaaacaacaatgtgttttatagtctatctatttgacagaagtagcaagtttccttggtatgggacat

SEQ ID NO: 10719 - DNA, 451 bp, Oryza sativa
  unsure (1)..(451): unsure at all n locations
agcttgctggagtggacatggcagggctatgcattggtggaggtgcaaagtgaccagtgggccttggtcccattgggggaggcattgagctatccatcaacataggcttgccgagctccctctcaccgtgcgcaaagtggcacttatccccccatttgcatccctctgcagtgttatacttgttgcacaggcgagtcttaacagtgggtgttggtggcccatcaggaacagcatttcccattggcattcttcctggaggcggcgcaatagctggaccaccaagattggtcatctttgcaacagcttggtagccaccagggaagtggtggaggaagtggcaaccctcaccaaaggggcaaccagaggtactgcacaataagaatatcatgagttgcaagcaaaagatgctgcanataatgtcctaatngaagaactacaccaaaagaattca

SEQ ID NO: 10720 - DNA, 408 bp, Oryza sativa
  unsure (1)..(408): unsure at all n locations
tgtgaaaaaatgtacaaggaacatggccatttggngttcttctgcacacatggtactgaaaagcattcatttgacagtgggagtggatttcaagactttaatggtccttacactccattaactagattttgctcatcttatgggcccagtataccgagaattgtagaaaaggagaatgatgtggagcctacttattcactactcaaagaatggctataccaagatagaattgggtttgacttggaattcgttcaagaaattgtagaatctcttcctagatctagggcttgttcaaattaccagttcttgtgcaacagggctgaattcgtctcttctttgacagttgcaagtggttcacttaaagttgtacataaaaatggtcagagtaatggagacgtcatgtcatat

SEQ ID NO: 10721 - DNA, 371 bp, Oryza sativa
  unsure (1)..(371): unsure at all n locations
agcttaagatatcatgaaatcagataaggtagaatggttgcatcggcactgtcttcctagtcaaaatctaaattttcagcaagcttttcttttgggggtgcaatgggcagccaaaaggttaaatcataacaaaggaaaaaatgatatatccaggtcctattgcacacaataaatgcccttttgtatcaaaatattaataggtgcgcactcttttgttggatgacttcgacacaacaagagcaaggtataaaccattcgaaatataaagcctaatgagagaaaactngagtattcggtgactggtgcagcacaatactaactatttatgagaattaacactcgggcacatatgggataatggtatacctacc

SEQ ID NO: 10722 - DNA, 405 bp, Oryza sativa
tgaagtggcgaatggttgctgggatctgagaggagattgagcaaactcggtagaggttgaacgcacccggcccaagaaagaaaatcgaggacgatagcgaccgcacagcttagtagtaccattaggcaggcagattagcgccaattattactctattattattattattattattattattattattattattattattattattattagcgatttcattatctggtggttaatgctcttgtttcttagtctaatcacaatgtatggaatcacaggctcacagccaaccaacccaccctccccctggaggcttggggacagatttacaccaacctttgtactttccgccatcttctcttttattttttttattcgtcttcggctgctggcatctcaaaataatac

SEQ ID NO: 10723 - DNA, 341 bp, Oryza sativa
agctcggccatggcttagcccatcaagccttctggatggcttgcgggctgggacgtcatcgccagccataatggcgctggccctgagcacatcagcgccagggcacctggcgctgaggttggacttagccggctcggccatggcccagcccagcaagccttctggatggcttgcgggctgtgacatcagcgccagacgtggtggcgctggtcctaagcacatcagcgccagcgcgctgaggatggacttattcggctcaaccatggcccagcccagcaagccttctggattgcttgcgggattggatttaactctagccataatggtgtggacatggcacc

SEQ ID NO: 10724 - DNA, 311 bp, Oryza sativa
tatctcttacgctccaggaatggatcagtcagaacatcaccgaccggttcgccttcgtcgccgccgactggtgtcctcgcctgcacggctggcctttatgccgccgttgttgggcgtctacgtcttcaccgaccggcttgccttcgccgctgccgattggtgcttccgcctgcacagctggcctattatgccgccgttgttgggcgcctacgtcttcaccgaccggcttgccttcgtcgccggcgactggtgtcctcgcctgcacggctggcctattatgtccgcgttgttgggcgtctacgtcttcaccg

SEQ ID NO: 10725 - DNA, 375 bp, Oryza sativa
catgcaagcttgtattggttatcattgtagggtactcgcaggttgatgtgctcaaacacgctccagaggcatggcgatgccctgaccgacaccgatgcacatggtgcacaatgcgtaacgaccgttacgccgatgcagctcatggctggcagccagtgccaggcgggcaccactcattcccaacggatggcctaaggcgatagcgcctccgttggggttaacatgtggggcatcatcaggcagccccaattcgcgtagtacacccaacgcctgggccgcgaacgcttcgttcagttcaatcacgtccatatcgtgaatactcagccctgcgcgttccagcacccggcgagttgcggcaccagaccaagccccatc

SEQ ID NO: 10726 - DNA, 370 bp, Oryza sativa
ttccagcccgtagttagcaatgaccggaccgacaccgtcatcgacaaacagacccgcagccgcagaaagcacaaaatacccatgcaccacccgctcaccgaaaatagattcggcagcagcaatcttatccatatgtgcatagaaatgatcgccgctgaggcaagcaaagttaacaatatcggcctctgtcattgtgcggcggggagtcaacaggctgtcgcctggttgtagctcctcaaaatatttgcggaacggatgaatacgatcttcttcgactttcgcaccgcgcacccactgtttactgatagcggcaagcatcgtcggactaccctgaacagcgggtcgctgcatgtaatgtttcaccgctcgt

SEQ ID NO: 10727 - DNA, 445 bp, Oryza sativa
agctcgggaaatatgcctgcgataatatggtgggttataatcagcaaaagaacagaccctaatatataatgttttttaaagaattatatatgatatatagaataaatgactttgttgttattcatttatttatattatattatagagtcagggtatttatttacaacttacaagagtgtcaatacttatttgagcaagctaaagaaggactatgcaagggaataaaacgcacgtaaaattacctactacatttaggaaaaggcaagattctggttttgagagaactctttataatgtgcggttggtgggggcctaaattatcagattagccagctacctaaataccgaactgattgaagaaagtgccctcgtggctaccttacttaatcagatcttgatacaggtaggttcttgataatggtacctctaatctacgatatattag

SEQ ID NO: 10728 - DNA, 388 bp, Oryza sativa
  unsure (1)..(388): unsure at all n locations
ngcagaaacgtgtaatggtagcattgagatgctcaattctgatggaggtgccactaggtcagaccaaagagctcgttggctctcctgattatattaagtaccttgttagaattgccaacagtaaaatggaggctaacaagaagcgaatgggtggattcctggatcttttgcaggctaaggtatcatttgactttgcataccggtaggcattacatacctcatatttgcacctttctggcattgctgctcatctctaactgggcaataaccatgtgatatcatgcaaagttgaagcatgtatttcctggatatcgatttgatggataaagagaattataatatcctttttccaggtagtttagctattggtcatcacacttctttgtga

SEQ ID NO: 10729 - DNA, 444 bp, Oryza sativa
  unsure (1)..(444): unsure at all n locations
agcttgagaantttggtccaaagttattttaaaccctgcaagaacaatgtcaacgagatatcgtgaagcataaaagttggctagtcatgtcagttacaatgcaatgatcaactttcatatacaattaacgtttcaaagtacttaatcaaggttcttagtagcaagcttaatagtgatacaggacaaaccatctgcggatctgccagattgcagactgcatccttttattctgtcatatatagatatcaattaacccacttgtgtgagtcatcgcaatttgattgattgaaaattacaatcactctgcanagtagattgatgtctaacacagaatatataagtcattaattgccacaaatggcactgagagttcgtaacttaattgcaaggggtgatataatctttgcattagttnttatatcttcatgtgatatacagcagttc

SEQ ID NO: 10730 - DNA, 363 bp, Oryza sativa
  unsure (1)..(363): unsure at all n locations
tnctgcctctccgctctccatgtgcgtgccaccaaattttcctggagaccgatctcagccgtccatcccaagatcggacgccctccatcccatgcccaccatccttatattattctccgctcctctccaccaccccttctcttcccttccctcccccccaaatacatccgctttcaccccccagcccccgaattccatcgcagatcagatcaggtgagctctcccgcccctcccttctccggcgatccatccgccgcccgatgattctactggatccgccgtttcttcgcgttcgatatcgttggttgatgcgtgggggcgaaaattcagcgccatttgtttcgagatatgatctggttttcc

SEQ ID NO: 10731 - DNA, 439 bp, Oryza sativa
  unsure (1)..(439): unsure at all n locations
agcttagcttgccgctgccatttaatatgccgtcaccgatgctgatgatgcggatctctggcgaaagattttcacacacatctctgtaccaaaccaaagcatcaattctttttgttctgaattggctcattttttttaaccgcaaaaaaggagaagaaaatagtaattcgtattttttccctttttttttggctaaaagaaacactctatctctgattcgctgataaaaaaggggagagctcgtgccgttgtgcgtgtgtagcatttgtgttgacgacgacgaggtcggccggtggcgacgaacgggtcaatccgagccgtccaatccccgcacgcgtctttacttcgccttcgtctttcctctttcctttcacgagccgcgcggcgcacagagcgttngctgcaccttcnttttctctctctctctctctctctttct

SEQ ID NO: 10732 - DNA, 395 bp, Oryza sativa
  unsure (1)..(395): unsure at all n locations
ngctacagnntgctttangcaaagtcatagcaatcttgagaaatggttggttgaaaagctgactgctcaaggagagacttttcttgaggaatatatgagttcttccacatgtcaccacaaattcaggcagaatgtacttttctatatggtcttcattccagcttggctctgtagtctgtacttttaatatgcatgctaacagctagtacttccaagaatgtgtgaaattcttgaaggaaattatgagcaacacaacttatgaggctgcagaaggtgctgtccaacaacctcaagtgatgattttggatatttgccgagaatcttgccctctaattataaaggttgcaatatctttctattattnttcagctatcattgggtgatgtgcttgtgca

SEQ ID NO: 10733 - DNA, 423 bp, Oryza sativa
agcttagcacaactcatcaggagacaaaatatcaacttattaagcgcataaaatgattcataaacaagtatcagtatgttcactaaagatttgtatgcgttcatgcatgtgctatgcactaagcatgatcataatttatgaactcctgacacgacgccagccagatcagcagaaaatgaaacaaattaaggggattgcagctacaccattaaacacaacttgaaaaaaaaccttcaagtagaaaatatacaagaaaaggtttggcagtgctgaatcggtgaagcctacgtaatgaatttgcacatttcttacacagatatgaaaccaacaactagtgcacacgatcgaatcacacacatttctcactgtatatttttgaccagtatgaacttaacaagttatctgcagggtgcacatttgcct

SEQ ID NO: 10734 - DNA, 423 bp, Oryza sativa
  unsure (1)..(423): unsure at all n locations
gggtgttattatgaaagccgcattcttggggctcaccatggattaatttctacctatgcattggagatattggtgttatatattttccatctcttccatggaacattggatggtccactagctgtaagttctgacttccaactattctgcagcattagtaaagttcttgtttctgacaccctacatacgttgccataaattactctatgttttctgcaggttctctataggtttctggactactatagcaaatttgactgggacaataagggtataagcttgtatggccctatttccttgtcttccctgcctgagctagntagtaagtggatgtggtctgatatgttacctcttttttttgtgaattggaagatttctttttttcattggtcatgcaaactctatttttntttcacagctgac

SEQ ID NO: 10735 - DNA, 411 bp, Oryza sativa
  unsure (1)..(411): unsure at all n locations
agctttgatgtcagtcagcacggtcttattgttgtctaccatcatgaattggtggtatcttttcaagctcataattctactaaagtattgtatgaatatgaccagaaattggttgttaaagagcttccaaactcaatcttcccccgtttgagaaccatgaacaattcaaacatcanagtacacgtattaagttttgtagtcctttccaaggccaagacttagataaattggatgcgcttttagttttgagtcctttggaaatagcctgattgagaaacgcccaggggtcttctggctaactccacaaagtggtgggctagccggcctgtgttcgaagcctcaccccttctatttatttgatattagggcctttcctaatattcacgtttntgaattagcctgactaaatta

SEQ ID NO: 10736 - DNA, 389 bp, Oryza sativa
tgtatgatccggcagagacagtgcagaagttaccctgtgtatgacaaaccatagctgaagcattcaaaactaacacaaatgaaatgcattcacatcatagcctcttaaaactgagcctaattcagagataatactgttatattatttccaaacccattcttctaactcgctcgctacaacctggatctatcgattggacaaacagagctataaatggaatccaagaatatggtattttaatttaaagaaagcataagcatgaaactgcactcacttggtcagcttcatatccgccggtgggaaggattaacttgcagacataccagtcttgttacaaaaagttgaaacacaattaacaacaatactccagtgtataaatatatttatta

SEQ ID NO: 10737 - DNA, 431 bp, Oryza sativa
  unsure (1)..(431): unsure at all n locations
aacttgaatttncacccgattttcttactccatccaagcatgaatgaacggtgtggtcggntcaagttgcgttatcggcccgccactggaagtaactcggactttgtcaatccattgtacgaattgacatttccttacatcctcttatgtacatccattttgggatagttaagttaatgatagtactgaggagtgatgaaaagaatagttgtaattaccacgaaatcatcgtcgacaatgtttggacacatgaaacacctttgtcctcgagttcggtgccttacggaccttatgacctgacaacggtcaccacaacgacactctggacgctcacgccacgtggggagtcctaggggagttacctgtcattctatagcctcagcagcaattcgacattcatgctcatcctttctgcctaggtagtccgatct

SEQ ID NO: 10738 - DNA, 389 bp, Oryza sativa
tctgagtgatttgggtcaaccttctacacagcatttttcataccaagtgatccatcatatttccttaggttcatcatttctgaggctcgtttgaacaaagtagagggatcattatcttggccttctgaaaaaatgaagggaaaaatgatacttagtctaccaggaggcataaaggaaacatccattttgtgtagacgtagtgctaattggagtgaaaagaaacttaaggcattgctgatccatgaaatcaatatgttaaatagcaaatttaggatgcagtggtcccgttaaatttaggatccaagggtggctctaagatccaaatatcttgtgttagaaacgatccaatggtatcgcagatggatgcacaacactgctgtggtggaatg

SEQ ID NO: 10739 - DNA, 429 bp, Oryza sativa
agcttgcaatagtaaagggtggagcaactccatcgcttgatgtaagtctcaacatagtgctcaagtagcatattgatagaatgcggtccttattgcttgtaaaaagtcactctcttcatcatttttgctatttgttgatacttgtgattagctgtgcacatatgcatgtgataattacttggttgtaccaatgagccattgttaaactcttggtcatctgattaacaaaccaaactgccatgttgagtgtaaagttgaaatatgggttccaagtggctaacatttgatgagatttcatttttcttgtccagttgtatatatagttgcatcatttatatacagctcatgtttggtgatgtactgtcctaccaatgcctttcaaccaaggaaatatggcctctggttcaatcctttggggtttacacttaa

SEQ ID NO: 10740 - DNA, 347 bp, Oryza sativa
  unsure (1)..(347): unsure at all n locations
actatgaaactcagcttgagcttgactgcttgactccgacagacatgatctgagcctgtcctctagtgtgacaactaanagaattggagagactgggaggagaattttgaaaaaccgtttgacaaagaaatgccgaagggcgagaggagacattttgcaaatagggttttcagaaaacttgtccttagggtttgaccatttggctcaacctacagtcgagttggctctgataccactttgtcacgcccagaaatttagcccagagttccagactattttgtgtattaaatccctgtccaggaccagccagggtacacaaaacgacaagtaataaacagttccaaacg

SEQ ID NO: 10741 - DNA, 371 bp, Oryza sativa
  unsure (1)..(371): unsure at all n locations
agcttctcccgccgccgtcgccggtggcggcttgagctctcgctgttggaattntggcctcgattggaagaacatgtgcatagataggatcggatcgtcgccgcgtcgtcgtatcatcgctttgatgttaccccccgtttctgatttgattcttccaacatttgggttcctgatttgattggattgctactgattcgaatttggtgcgaatgaaattatgaaaaatcatcttgatgtttattctttttccccctttcctttttgagaggtggtaataatatttacatctttatattacctgaaaaaaatgttgccacggatgggtgggacccacgtggacacgtggccaaacggcagccaagaatttgata

SEQ ID NO: 10742 - DNA, 396 bp, Oryza sativa
tcagccgagctggctcataactcatgaagaagtcacctctgctgtaaagtatccctgagagagtaagatgttgttgtattttgttcaaaatatgataatttcttcataacattcttttctcagccaaaatcacaacacttcaccattcaattttctcgcctaactctatttctcgaccaatcatcattttcttccatttaattctaaatattttcttagtactcacattcaaccctaaaaatctttatattctggaatggagggagtaccactatacatatattttaaggatcgaatctctcaataaataaaagcaactaatttctatttaatcatatacatacataaataaggagaaaacaaaacaatataaatatgtggcaccgatacaaacta

SEQ ID NO: 10743 - DNA, 451 bp, Oryza sativa
  unsure (1)..(451): unsure at all n locations
agctcgcatatcatgagagnatgaagcttcttttctggtatcttggattaaacattgcatcttgttgaacaaaatgtcagcataatacatgggaacataaacatctctgaaatatcgcttcaggtctttccaagattgtggtattctgttatacctacaaagatgtttccaatcattagaagcatgtttaattaaaacactagaggcacacataaccttttgtttctccgacaagacatgcttttgaaattcactatcaaccgctagctcccaattaatgtaagcacgaggatcatagtttcccacgaaataatgcagtgcagatttgatcttacctagaacatcatcacttacctcataataggcatgttgatcccttctcatgtctcgacgaaaatgtcgatgctgagcacagctatccccatatatgttgctatccttgccattgtta

SEQ ID NO: 10744 - DNA, 337 bp, Oryza sativa
tggatttgaaggtagcaaaactcttatattacctgttctattcaattgctactggaggtgaggtacaccccaaaatattgtttggtagaagtaacacatgcatcttcctaaaccatttttttgtaaaataccatttcttcttggtttctgtatatctggactttagtattacatatatacataagtacatgctcaaaattggagaagtaatgaagtggaacatcattggttatgcccttgctgtgccaaatgccactgggttaaatgttcccctgaagttttatacttcattttttaagggatacatgaatgcattcacctagtctaagattttttg

SEQ ID NO: 10745 - DNA, 349 bp, Oryza sativa
agcttgcatgatacacctaagtatccgcgtcttgctgagcacgaaagcactcacccttgctctatgtataaacatatatatagtgcctccgccctgacaagatgatgaagagaagtaaaaaatatggtttcttcctgggtcccagccattgactgaggagttgtgtgtgataccgctggtttctactgcagatgttgttgcagtgtgcctgtggtaatctcggagtatctgagctgctgcctatattacgagataagcctctacttatttagggattgctatgattcattctgcaccaggggtccagactatgtctggactggttcgacatcgtgataccagaagcgct

SEQ ID NO: 10746 - DNA, 340 bp, Oryza sativa
tctcatagcgaggatgagtcctgtccgaagaggcgctattatgacattctctcgaaggtgctcggaaccaaagaacatcctggccgaacttggggaattggtagcgatgtgccctgaaagcatggactccctctgcacagatccctatgcaggaaacagagagtctcctacgaagagagggacgctcgtttgaatgccgaacttaatgttgaggtcattcaagaactaaaagctagcatgaatgcatgggtggaagaaagggctaacaaggacctcgacgacatgaatatacgctgagtcacaacacctgatgtgcaaccaactcctcgtgtactacacg

SEQ ID NO: 10747 - DNA, 318 bp, Oryza sativa
ccttctcgacccggatccttaagacacctgcagcatgcaagctaggggacgtgccctctgtcttgtaaaggacaactggcgcatttgagccacggaacagagtgcctggtggcgacttactctacacagcccactacagtatgatagaaactggctcttttgtggccggagagccgatcgtgacatacaggatgagactcgctttctatataacaacctatgttgcatgctccctttgctgattacgcccacccgaaccctgctgtctaaattccaaaaacaccattattgagctctggactctgcacatatcatgac

SEQ ID NO: 10748 - DNA, 211 bp, Oryza sativa
gcttctaatacatatctattcttggggagacatggtactttctgagaagctcacatggccctgtgatcagtcatttgccgggattatgtatatcgttcgtaagacagatttctgcattagaaactcatacgagtgctccttatataacattgcacgagggagtgaaatccatcctatgagtctcactttctatggttggcattcgaggata

SEQ ID NO: 10749 - DNA, 447 bp, Oryza sativa
  unsure (1)..(447): unsure at all n locations
agcttgttggatgtccttaagtctgatatgtcatttgattaagctggtgagaattggacacaggcaaacagatgtgctgttagctagctaactctagctagctacactccataggattgcaattgtgctattgaggggcatggtgtccggttggtgtcatgcatgagtggtcatgcttttggtatagattcataagttgcaacatcaaattatagatttcccccaaccgatcgaagtagctaaaatttctataaataattntaaattaattacaaaatcctcgatcatattatatatgggtttttatttgctaaaaatggggttcatatcctctaccataatgtcactaccattacagaacattattgacgtgtgtagcaatagaagcataggacccatatacttgtgactgtaatgatagtggtattatgatagaggatcctcatt

SEQ ID NO: 10750 - DNA, 305 bp, Oryza sativa
  unsure (1)..(305): unsure at all n locations
actattaatactcagcttcntcacaacttttttctccgcgtgtctctggacccaaagagaagcccatatagcccagtggtcatttaatatcaggcattatgtaaaccgtaaataaggatgatttataccttagaaaatagaacaagcgaacctgcctaaagataccactagggagtaaaatccaacctataggtcttacttttctttgataggtcatttcgtacctacacattcacccgggcagtaagaaccacaggaattccagacatgctggttaggaaagtcgattaattttggccccagca

SEQ ID NO: 10751 - DNA, 383 bp, Oryza sativa
taaaactcagcttaaagcaattccacacttgtcgataactgacaataaatttacttcattggatctttcattccaatggtaatcaccatccactaaaaatgcagatacatcacttagcactagattgaaattcagatacatatcctgctcttctgaagcacgggaatcccatatctcctgaagcaacaaataaaatcagtggcacattacccccaaccatgggcatataaaatccaactttcagagagtgcacgtgacctccgtccgaagaattaaattccctaggtcaagcaaaagcttggtttcatgtatgtcatctgggcggaactttgtcggaacagtaattttgggggcagcaatatccagattcagtgaaaatctac

SEQ ID NO: 10752 - DNA, 335 bp, Oryza sativa
ccggcacggttgccagagaattctatatgtgatcgtgttgcggatatgccatattgacatttatatggcccccgaatatctttagcaacgccaaatctcttttagcaatatattttggtccatcgtcgcaagaattcttctcattaaacttagtcctattaatatactctatccatccgcatactggatagaggtaaatcttcccccgaggcttccgacactcatttaaacaacgtgagagcttagagtatcctctcaacttctctgttaaaaagattagcgccacgagcttataattaatcttcattgtaccggctgaactaccatacttgtgc

SEQ ID NO: 10753 - DNA, 369 bp, Oryza sativa
gcttccatacaattctttccgccttgagtccgaaggagtttattatgtttgattttttgaggaggccaaagagatatgggatactttgcaattggctcatgagggatcacccgccgttcgtgaggacaagaatgaattgttggaaagaaggcttggaagatttgtgatggatgacaaggagacacctcaagagatgtatgataggatgatgatccttgtcaacaagattaaaggatttgggagtgaggacatgacaaatcactttgtgggcaagagacttctccgtgcatttggtccaagagatcccactcttgtatcaatgatacgtgagaggaaagactttcagaggttcaccccaagtgacatttt

SEQ ID NO: 10754 - DNA, 350 bp, Oryza sativa
agcttaatggtcctgtttattcattattatggagcctttattttgctcgctaatttaccacagcatctgtactcaacaggactacagagtaatgtctttgatagctgaatatttagacaacgctagcgcacagattcatggtgcgcataaatatttttcaaccagccctgaatacaccggttaattaaccggcctttcatataacgaagccttcttttttttttttgaaggattaacaaccaccattagagcgcatcagagatgggaggagaatcaagtgccactgggcgtgccattttatttgataaaaactaaataacgaacacatataaaatacggataccctgtat

SEQ ID NO: 10755 - DNA, 437 bp, Oryza sativa
  unsure (1)..(437): unsure at all n locations
gacctatgaaactcagcttgacttctttatgccaagtgcgatagctttatagtggcctcaataaccccgngttctcgccgttcagccagtcttaacttggctttctccagtttgaattggtgttgctcaaggtaaacggttggagtaaggatatcggctaactcatctgggattaaagcttgaatctcgtgtagccgagccctgattgagccacagtcaaccaccaagctgtctagcgatgatgcttctagccgatctaaaatgcttcctagagttttcttcacatcatcagataaaggagccaaggctttgcttgtggtatcttcttctccttcatcaaggtagtctctgatgtcaaaagagaaaagatcggttaatacctgcagcgacaatttagaagcagattagaggttaaacaattatagccgatctgaatg

SEQ ID NO: 10756 - DNA, 398 bp, Oryza sativa
agcttggagagtgtgtgaagtgaagaggcgatgtctttatatatgggcaggcatgacggtcatagaacgccaaaagttcattttgcccaacaaccgccattcatgagcttatccataccgtccacgcgaaacccttgatcggacggctgcaagggtggttcggccaaacccatggctggcccaacaggcttcaactgtggcctgttgctcctccatttctacgaggggaaggcccatttgaagatgttttctcgtagtttctggcccactcattatatggataggaatatctcttcacttaagtctatattccatccaactatggagggttattatctgcattcaaatatacaccaacactttgtggaatatgttagaattaaaccctattactatgt

SEQ ID NO: 10757 - DNA, 409 bp, Oryza sativa
  unsure (1)..(409): unsure at all n locations
tgggggggaggcaactctcctcccactgaggtaacttgtatcacattgcatatttcctttccagttgcatatttgctttccaattgcatcctataaacttgaaaacaatataaaaatttgcaaaatagaaaataccaaaaagataggataggtttgagtcatgctaagtaagacaagctagttctctttgttgaaatgatgaatagttgctgcgttttatatatcttatatatgggttcataggtaagngctctctccaagggtaaatataagtagccaacaattatctgggaacctgaggtgaatgagctgcacttgctaatctgagtctaaagagctgtagatatgagataggaaaaagagctgctatgaatctgatcctagtttgacttgaatcccgatgtttggt

SEQ ID NO: 10758 - DNA, 364 bp, Oryza sativa
gaacacttctctcgcacatatcttgaatacgttggagagaatgggcctagatggtcatgatggatcggctatgcgcaaccacaatggccatgatgctaatagcagcatcgcacctagggaaaaactggagtacgctgctgacactgagcatgatgaggaggtacttggtccgtcacaaagactactgctccggcagcgccatggcatgggcgctccaccacggcgggaggtacgtgataatgatgattctctaggcaagatcaagtttaccattccttgctttgatggaaaatatgaccctgatgcatatcttacttgggagttagccactgatcacagatttgcttgccatgattttcctgag

SEQ ID NO: 10759 - DNA, 380 bp, Oryza sativa
  unsure (1)..(380): unsure at all n locations
tatgagcacccagnngaagttgtcttcttccatggatatccttgggaagctaccacatctgggcattctacgactgtggaagaattcttttcttcagagcaaaaaaatactcttcgattttcagcacggcactttcccaagccttgtggtgatggagcttaacgatcaagaaggcctcaaatcattaaacttcttgcaaggagcgatgccaaggcttgagttgctgcagataaataattgcatgcacatagacaacaatgggagttttggtgtggcatctcttccaagcctgaaagaagttatgctcatgggtgaccacaacgaggaactaatgaagaacctgcgtgaccagcttgctctaaacctaaacccacccgttc

SEQ ID NO: 10760 - DNA, 421 bp, Oryza sativa
  unsure (1)..(421): unsure at all n locations
agcttatcggcagatactccctgactcttgatttcctgacatattcacaagctggaaaataagattacaggttatgaaaattaacgtcactacaccacatgaaaagtttgagttcacgaatatatgtatcctgcacactcaaaaaacagtagcataaaaatatgttaactcgcaacaccaaacctctacaaactactactccccctattccatattgtaaggtgttcgagtctcgtcataagtcaaaattccctaactttgaccaagtttatagaaaaatatagttaacatctacataccaaataaatatgttataaatacatatttcactgtggagttaatgaanntaattgatgttgaagatgttagtacatctttctacaaacttagtcaaagctaaagaagttggacttacgacaac

SEQ ID NO: 10761 - DNA, 376 bp, Oryza sativa
tagaatctcacccagggcccccggtcgaaccggcaaatgggggcctgcgcggtctcccggtgaggagccccacgctccgtcaaagtacattctaaacataaacattaatctttcgttcatcatagtttaacaacttataaattatctaagaacggagagaataataatagatagtccacatagattagcctaaataactggaaatggattctaatcccttgaggatgtcccgccgtgtatcttttatttcaaattcaatgcaaataggtgcgaaagaaattaacaatgtaagagtatagaggcatctatcgctccatcaaaaatcaagtttaaatttgacctatacattaaaaaaagaccaattccagtattaata

SEQ ID NO: 10762 - DNA, 454 bp, Oryza sativa
  unsure (1)..(454): unsure at all n locations
agctntatcatcctaaaccaatagttatattatcaagagtcctgaaaaaccacttctatggcaagagcaaataataacattagtcgtttcaaagaaaacttcaattttagaaccctaatcaagccaatcttttatatgctagtctaagcattacctaatcatcacatattaaataaaaaagggcataaatattagaagcattaggtagaagattcaaagtgagctgcaataaaaactggatgcatccaatgtagaacatgagaagcatctgaaggacaagtcagttacatttggtaaatatcataggcattactgaatgcannatagaaaacaatgtaacatcattttttttatatcaagttaaattctggtgcacatcgtggggatgtcatgataattaaatatggtcagaagtaatggctattatgtcataataattaaatttttttataga

SEQ ID NO: 10763 - DNA, 366 bp, Oryza sativa
tgtccccggcaagccggctcatgctgcgcgcgtccagctcctggaagagcctagccagcgcctcaaatgccgcggcggccacggcgtctgcggagtccagcgcgagctccgccaggcgtccccaccacgtggtggcgtgcgccatgagcgacgggttggaggagcacatgagcgcgaggtcgtcccgcgggaggagcgaagagagcgaggtcaccgccgcgaggcggagcgactcggcgggggaggagagcgcggcggcgatgtctgcgtgggccgaggagaggagcgaccggaggaggtgggaagggagcgaggggaactaggcgatggacgatgcggcgacctccgggtccgggaaggagaggt

SEQ ID NO: 10764 - DNA, 359 bp, Oryza sativa
agctggcttacagaatatgcgttttgatgatttctcatccgagatccaaaagtctcaacacgctatcaacgcaatttttttaaaaaaattcatgttgtggcagtgtgcacgcacagatggagaagatgtccacctgtagtgcccgctttctgcctgcctgcccgcctactcgggcattaatttgtcccagctctaacgacacctgtgctcgtttcaatccacaaaaacgtgcccgtgccatgtgccaaccgtagtacaaaacaaggatatcaaccacagaaacatgcccgtgccaacctcgtcccggacaaaatggattcaacacaaaaacgtgcccgtgccagacgccgcgccgcaca

SEQ ID NO: 10765 - DNA, 301 bp, Oryza sativa
  unsure (1)..(301): unsure at all n locations
tnttctcatttattttagagatttctacacgatcgatttttatgaaatatttcctggaagaattggcacagatgctaagaacaaagcacataatttcttcaggtctactatgggacattagagaatccatacctgagaagttgcctccttttaagaatttcaggccctgtgagctcggccaatgcaccagacaggacaagcaggtcaaacaatctcctgggaaatcggtcatgattcgacattctcagactggcaggttctttgaataacacggatgaaagagtacatgaattcacaattt

SEQ ID NO: 10766 - DNA, 433 bp, Oryza sativa
  unsure (1)..(433): unsure at all n locations
agcttgagatgacgagggtcctgatccgtcggataacgcacttcgttcgggtctatcaccccacagccgaagtcgtcaagtagtttgttgttggggaatatatctcttgaacccatcccatcgaaaaccttgaagcaccaaaatcccctacctggcacgccactgtcgatgtttgaggtcacgactagattatttgcatggtatggggatcattggtaccagggtatatacgagattgagttaaaagagatggagaaggattttatacaggttcggacccctttttataggtaatagcattacttctgttgggcgaagccggtgttcctctatactcatcaaaatcacacaagtacaatatttgggataacgtatctagtcgtcgntgacttggtggcatagataaccaacacgtagtcgacgacaggatagt

SEQ ID NO: 10767 - DNA, 403 bp, Oryza sativa
  unsure (1)..(403): unsure at all n locations
tcggatgtgcatcgactacacctttcttaacaaggcttgttctaaggacccttacccccttcctcgcatagatcagattgtcgactccacagcggggtgcgaccttttgtgttttctaaatgcatactctggttaccatcagattcgcatggctagggaggatgaagaaaggcttgcccagccgtcggcgcgacctgaccccttatgggagacggacgcgcctgaccggcccccgaggcccgtcggagtccaggcctcgggacccgaggggagcgctcccagctcccttagattgattgcttggatcgttgagatccaagcatacctcacagataagactctacccgaggaccgcgaaggaagngaacgcgtccagcgcatcttcaaacgctacgtgttgata

SEQ ID NO: 10768 - DNA, 226 bp, Oryza sativa
  unsure (1)..(226): unsure at all n locations
agctntacaccaatcagtntattcatccttcattaatttatgaccaagtagtaagcagtattacatggcaccaaaaccgcccaattattttaaaaacaaaatgaaacaaaaaagaaatttaaaaatctaatcgatttacttatgccaatatacaccaacaacaaatggaatgcacgttagctctctctctctctctctctaattctatagctatgtgtatagacac

SEQ ID NO: 10769 - DNA, 404 bp, Oryza sativa
  unsure (1)..(404): unsure at all n locations
ntacatgtaaatttatttttattcttaataagccgttttggcttatctattatatactaaaagtccattaatcttcctacaaacgcttctaagccgccacttggcgctctaataaattagagaaatcaaaaaaattctgagaaaaaagaaaagcatctatccattgatttttacttaaaatagtgggtccactagtagataccgtcagattaactatattgatcttaaaacgtacaattccacaccatccgtaggtacgtacgtacgtacggttccatctccttccctcctttttcttttcatatatatataatcgagataacaggtaatatagttaaattgtatataatcataacttatatgattatattatgatatatttctttgcaaaataaaagttacac

SEQ ID NO: 10770 - DNA, 313 bp, Oryza sativa
agcttatcacctttcttgcttacacgttcttgctgctgtcggagattgtggcatatctcccaatgtgtacgtctcaaattatttcatgaaagaagcaatctttcatacatggagtgaggatatatatgggttcgggatcttaagatcttacacaacgctgagcgcccaagtttgtatattccagatccatctatgttaatggtgacaaaggggcgacgccaaactagacgcatcagaaatgatatggatgagtcagaagcatgtgggaggactttactctggagcaagtgtgatctgcgcggccatacttaca

SEQ ID NO: 10771 - DNA, 300 bp, Oryza sativa
acattgcggaccacaatagacgtggagcactgctgggcctacttgagctgtacatctcacgcgctgaggtaagacatgttgtgcaccaattaaaccgacagcttacgggaagattaaacaactgtttgcgacagcgtataacctttagtgagaccaccacttgatggcttactagcgatgctctaatggttattagataaatactgtataatatatgaacactcatagatcttaaaataattgctttctaaccatggaatgatggatatactatgtggaggagtactgagatgttctttg

SEQ ID NO: 10772 - DNA, 422 bp, Oryza sativa
  unsure (1)..(422): unsure at all n locations
gcagcttgatattttaattttcagtcgnacgtacgtatgtacacggagnattttggggggattcttattccggcccacaatatacgtgaggaaattattagtttttttaagtaatacatctaatctaatgatataaaatatcggatccaccaatttaagtgaaaatcgacggtgagattaaacagtgtcatgtgacggcgtataagtatttgtaagatcaccacgtgatggcttaggagaggatctataaagcttaatagaattttactatataatagattaatattcttaatataaaaaatttttgcttcctataaatggaagaaaggatagacgaggtggtggtggtggggattgttttttttttgcaanaataattaaaatcctatcggacttggccgatctaactattataatctact

SEQ ID NO: 10773 - DNA, 421 bp, Oryza sativa
tgcaggatgatgcaaccaaactggccagaagcctgctttcgtcaaggagctgctctaatgttactgaaggtgggacataaatgctctgatcatcttttgaagattttgtaacagatcgtttcgtatgttctaatctttatgcattcaggattacaaaaatgcatgcagctcatttcttgatggtctcaagttggagccagagaatgttaagatgaataatgcattaaggctgtgtttagttcagcgcaaagtatgaattttggttgaaattagagatgatgtgactgaaaagttgtgtgtgtatgataggttgatgtgatagaaaatgactgaagtttggatccaaactttggatctaaacacagcctaagggaaccttagtcccttcagctacactgaaatggccctttattaaacatac

SEQ ID NO: 10774 - DNA, 427 bp, Oryza sativa
tcaattccttgaatcaaagggccaaataagaaaattttctatagatttgaatcatatgaaaatcctacataaatcatttgattcaaaggggccctaaggctattcattatttgtgcattggagtaaatggacattgatgcatgcatccatgcacacaagtatttataacctacatgcaatattttgatttgctattggctagaaaatagtggggatgatgcatgcatcgagtttgttgctatagtacatacagtatgaaagagttattagtttttcttggtcttgatatacctataaaatatgtagatcaatttgaaatgaagggagtatagttttgaaaatcgtgctaacgaaaatcaaggaaaaaagagaaatatatataagaaaagaatgggcttaaatgaatcttccgatttgcattcctcat

SEQ ID NO: 10775 - DNA, 330 bp, Oryza sativa
agcttcatcttttattttccagtcggacgtacgtacgtacacggagtattttgtttggtttcttattccggcccacaatatacgtgaggaaattattagtttttttaagtaatacatctaatctaatgatataaaatatcggatccaccaatttaagtgaaaatcgacggtgagattaaacagtgtcatgtgacggcgtataagtatttgtaagatcaccacgtgatggcttaagagtgtttctataaagtctaatagatttttactatataatagattaatatttttaatataaaattttttgcttcctataaatggaagaaaggagag

SEQ ID NO: 10776 - DNA, 343 bp, Oryza sativa
gcctgcaggatgatgccacccaactggcccgaagcctgcttcgtcaggggcttttctaatggtactggaggggggacctaaatgctctgatcatcttttgaagaatttggaaccgaaccgttccgatggtctaatccttatgccttcaggaataccaaaatgcctgccgctcatttcttggtgggctcaagttggagccacagaatggttagatgaataatgccttaaggctgtggttagttcagcgcaaaggatgaattttggttgaaattaaagatgatgtgactgaaaacgtgtgtgtgtatgatacgttgatgtgatacaaaatgactgaagtttggat

SEQ ID NO: 10777 - DNA, 442 bp, Oryza sativa
  unsure (1)..(442): unsure at all n locations
gcagcttgtgcaatgaaccccacatgcatattcatgctaccagctgcgcagcgtgtgattgatctacttacgctatctcnactaaaaggcaggcagggaagcaagaaaggcatgacaattgacttgctttgatctgaggccattgcgttgagcacttgactatctatgccaatggatggcacagtactacgtacagcttggcgctggcgatatatgaaaaatctaatgctcaagagattgctgtaaatgttactagtaatagttgagagctattgctaatgtgataaatgttatatcagtactagctaaaaaacggtgtactaataaactgtanactggagttctaactggatgctcactgtgaagtactactacagtataattcagaagcggctgaactcttacgcacaagctatagtggagctcatcacaataacatctc

SEQ ID NO: 10778 - DNA, 351 bp, Oryza sativa
tcaagctgcttgtgaacttgtcgttgaagtagaatgggtcattttttgatatatctttgctcatgggttccttgcggagaacattcttccccttgacacaagcaagagattgaaggcatctctttagatccgaggcaggtatcgcagtatcttgttcgatgtctttgtaggttaacccatcggtagaattaaacagcatgagaacacacatctgataagtggatacatttagttcatgcttctgacctttcccaaatgtggcttttatgtcagctgttcccatgtttgtttgccatgtcaatcttcggccactgtgagttccaaggtagtattgcccgaacttatcacata

SEQ ID NO: 10779 - DNA, 420 bp, Oryza sativa
  unsure (1)..(420): unsure at all n locations
agcttcacctttattcggctttcatacactaatttctagactttntggcacaatcatcttaggtctagattctcctatcacaacttccttcccctttgtagatatagctcgctcccgccaaattaacacattcttatcattgaaatcaatagtattcacaggaaaaaaaaatcataatctagcttcatcttagaaccttcagtaaatttcaatcatccttcttctatggccgaggaaacacattgcattcattagtagaatgagaataagaatcatgccatttgcaaaaaaaacgactcttcaactcctctaaagatggtatgacatggcctctgggtaatctaatttgctttttgtgttgcaaaagataataaaacatcttatcacacttggccacatcaaaactattcttaatctcac

SEQ ID NO: 10780 - DNA, 397 bp, Oryza sativa
  unsure (1)..(397): unsure at all n locations
tatttatttctcttcatttctacacaataagacggtctttacccacgatgagaatggatcagttattaaatcttggatggaaatttcttttacctatntccctgggcaatctcttattaacaacttctttccaacttgtttcactataaaataagataatacaataacaataagaatattttcaacacaaaagtcctctcaaacaagagaaagaaacatacctttttcatagatatttcgaatatgttccctatggtaactgggttcatgagttatggtcaacaaacaatacgcgcagcaaggtacattggtcaaagtttcataattaccttatcccacacaaatcgtttacctataacgattcactacccctatgaaaaatcaattacatcggagc

SEQ ID NO: 10781 - DNA, 432 bp, Oryza sativa
  unsure (1)..(432): unsure at all n locations
agcttgccgagttcgacgagagattntgaattcgatattgcttctgaccagagccaattggaccaggagtttacccggtagaggctgaaaaggcgcttgagtaataatgcatcattttgcatctgaagatttttgatccccaggccaccgaattcctttgattgacagtgtacaaacgataatggaaattatctgagccatcaatcgctttaagcgactccaagagcttatagaattttatgaaagtaatatatatcgttctaatttgaaacaatcctcttcagattaatagcctgngtaaatcttccatgagaaggtcgtccttcttctgttttctttttttggcggtggctgggtcacactgcaagaatcaagatgctgtaaattattggtgagtgaagctgtanggacaaaaaggcgcatctttttttt

SEQ ID NO: 10782 - DNA, 375 bp, Oryza sativa
  unsure (1)..(375): unsure at all n locations
agcttaaagatagaggggcccacatgttatgtgtaaacgtcatgaaaaccgctataattgccacaaccgcaatgaggacccacctgtcagccccctaaccaaagctggaggcctgggctgtgctatgttcggtcgaaccatgctgaaccctggcagcgatggctcaactcggactccacgtggacgctccagatgcactcccaatgacggttgcggngcatttccgataattccaaccgctataaccgtcattaggaggctatataaaggggtcacttcattcacttcaacacacactcaagcaagacttgatctctctctcaactttagattagtgctcttgtgtaagtggagtagtatataatagctttcgga

SEQ ID NO: 10783 - DNA, 414 bp, Oryza sativa
  unsure (1)..(414): unsure at all n locations
tgcaagaccaatgcgaantccagttacctcatgtgtctgggatcatgaaggcaagcgaattgttggtgggataagcgatggttcaattcaagtatattatttttgcataataatatcaaactttccctatcactttttatgcccctatcagatgctttcattaaaatgctttatgatatgaatgatatctcttttgcagctctggactgtcaagactggatggggaagcaggccagatatacatgttgagaaaacacatacggaggatattacaggggtcaagttctccacagatggacaaatactcctgtcaagaagtatggatagtactctgaaggtaattnttctggcctgttgngtgtatgttttgacagtattttgcatattacctgcttgaacatgatcngtagtcat

SEQ ID NO: 10784 - DNA, 360 bp, Oryza sativa
agctggcttcatcttcatcccacctccactcttcttgctaccgccacctgagctccccggagcatctgcaacacgcacgatcgagacggcataaactgcgttaggattgcacatttgtacacggtgatcacgagcaaaaccaaacacgatcgattaattacctgccggcggatgtggctgtttgggcgcgaaaggcggaggcggtcttactcttgtgcatcctgttcttgcgacgctccctggcctccagctccaccctgtcgcggacaccacctgccacctgaaacatgggttcaccagttctcctgctgctgacgatcatctcacatggaatatcgtggaccgtagcctcgatcgcgc

SEQ ID NO: 10785 - DNA, 368 bp, Oryza sativa
  unsure (1)..(368): unsure at all n locations
tgctgatggtctgatggaacaattgccatgtgcagctcatttntagatcatgcgtaagttgtaatatattatctgtattgccggtatgaaccaaacacgattgatctcgacctgaatgagtacaagtattatttctgcttcccctatttctagatatcttgtaggaatcgaatcatttgatgatatctgagatgtacaatgccaggtactggttcaagattttgtcagaccatttgcctgaccttgtggacaaggtatggtgtacttcttgcaataacctcgtataacttacgagataagacaccagagttttctttgacaatatggcttactgatattatttttttcatgctccccttcctccatat

SEQ ID NO: 10786 - DNA, 117 bp, Oryza sativa
aaggtttacccaaacggtctccttttggaaaggctagccaaaaaacttgaaaaaaaaataactagtccatctacttggacccaaggggcgggtttttccaaaaatcttaccaccttc

SEQ ID NO: 10787 - DNA, 323 bp, Oryza sativa
tcaagctgacccgaggtacaccacatactcttttatcaggggtcagctttatgcgggcggagcggtagtcttgagaagtttccagcatatctgaatgataagagtcttggttgcgcgtatatacaacctagtcatcgacctacaccacatcatttcttactacgtgagcacacaaagagattcaattatcacgctgataaactggacctgtgctctctaaccacaaggggcctgtgggatgacgataggctcctacggaggtgacgagcgcagatttttcctgatcgcctctatatctgctaatccgatggaaacacgaatgt

SEQ ID NO: 10788 - DNA, 290 bp, Oryza sativa
tgttgcgatcatatatttagaggccgagcccccacagatgggaagagatatcgctacaacgtgagggttatacattccaagcagactgcgaatacaccacgaggaagccctacagataactggccacatgatacaacccactgccccgattaacatgactaattcgcgagcttctccattatactgaacataaagcagagtgaccacccttcctgatggactcaacttattcataaaatcgaagctactcgcgtctgtatttcatactggtgcatatgatggcatcaggg

SEQ ID NO: 10789 - DNA, 438 bp, Oryza sativa
agcttcagactctgtctatacatatgtgtgtgctgggcatctaacaatatgcctcccatttcacatcttctacaaatatcataagcagagcatcgcctcactgtgaagtctacacttattccaaagtgtaacactaaaaaagttgtgtaacacttaaaaagttgcatcgttcatttacaccctctacaaaatagtgctctgatgaaaaggtttcaggaagattaaacataatactctgatggaaacatgtacaaaggtaactgcatgtgtgccaatatgtcagtactaaacgctgacagaaactgacagaagaatgcatagcatatattttctgtgcattgaaaaaaaatgaatgatgttctcaaagtaatggtcattgcttggtttgttatggcaattgatacccagtatctactatctccaataaaatttcactga

SEQ ID NO: 10790 - DNA, 374 bp, Oryza sativa
taggatacctttgacatgtatgtaatgattctcttttgttgccaagggaaaggtcttcttgggctgattcagttcatattatgtacacaagaaacataatagtgcagatccaactcaaagcctttcagaccatactataaatgccctaaatgccctactggtctttatttatcagtgcttataagcttctctagatgcaggtatccctcccagtgcatatgaagtggaacatatctatgtaagttttggtttgcctcaatacgaatcaattacttcttttgaacatcatacgaagtcattggaacctatttaaaactggaattttaacaaagaatgttctatgctgtagccatgggacttttttttattataca

SEQ ID NO: 10791 - DNA, 215 bp, Oryza sativa
gctcatgacaatgcgaacgaagaagaactattgatttttcttttatagcaacgaacgggaccaccgtctttcctgttgctagcatcattcataactcgagctattatgatagcgaccaaagctcaaatcttctccacgcattgttcgagatgatcatcggatgtggcatttaaagcagcatgcaaagtaggcctagatgaagaatgcatcactct

SEQ ID NO: 10792 - DNA, 400 bp, Oryza sativa
  unsure (1)..(400): unsure at all n locations
gttagattctaagaagctgtagttatagaatttagatagacattataaaatccagcttttttacattctcaaaagatccttataccaaccagctgtttcccagaattttaagcttccctaatcatgcctatatatatgttgtgtagaatactacctctcccccaatcatgcaagatcatccatagggccataattaattttctcttataaatacatacgctcgcaaccatgggtttgttgttgggtgctatgctacttctcctttgctgacatgcatgcatattgtactgcgattggaaggcatcangaatagaagcctgccgcttatctgacaatggttaggcaaattagaaccgaagcttgctacatcctctcgtccccatgggccactggcgagcac

SEQ ID NO: 10793 - DNA, 356 bp, Oryza sativa
  unsure (1)..(356): unsure at all n locations
gcttgcggnggaagaatacacataactttcagtctattgagattttttcatgccgaaattaattgtgtagaaaaaattgcggtttatcattggaggagtaactatctttgttgtccagaatgttatgttatttcaaatctccgtgcaactgcatatctttttaaaaaacaaatccaaacttagagcatacccatatacccaatatagctcccaatgcaaatattttgagcctccaagtaagaattaggctccaacaatttctctaaacaggtgcctaaaattggatcccccaactccgggtaaatcacttcacaaggtagcgctcccaatctgccgtcccaaatattgtttgattc

SEQ ID NO: 10794 - DNA, 402 bp, Oryza sativa
  unsure (1)..(402): unsure at all n locations
tcaccgactcagcagagcattctacaagggnttccagttcggattaggaggttatgaaagtatgaaacaacacacacgctattcttgtgaagtgtgcctatttaaaaaaggaaaaaaaaacacctatactgttggagggtccacggatgttgaactctttgaagaaacccaagtacgtggctttcttgtgtgtccggctgatggaacccaaaaagttagtttgtatcttcacagagtgttgataaaggagtaacaccaacgtttgtctttgatcttctgctttcttgaattcagacttcgtcctttactaaatagcactccattctacattcaggggtagttattcctgcnnaaataacgagagagagagagagagagagtcaatgataaccatattaatat

SEQ ID NO: 10795 - DNA, 426 bp, Oryza sativa
  unsure (1)..(426): unsure at all n locations
agcttgactcctgcggcggtggatgaggacgccacatgaggtgcctttgctcgagagaagctgctccggccgacggtctggccttcggcggcggcggccatggagttggcggcgaagtttcaccgggcacaaatcgagctccacttcacagcggcggcttatactatgagaaggaagggagaagaccgcatcgaagacgccgcggcggcggcgagagcgctcgagaacgaggcggaaacccacggcggcgggaggggtccaaggcgaagcgactgcggtgcctcactacgaagaccacatgggctatttgcttgngctatttcttgtttgggccaagcccactaattaatttcacaatatattagttcaccgatcactcctcccgcccataaaanaccaacataaatgagatgtgatattcctact

SEQ ID NO: 10796 - DNA, 430 bp, Oryza sativa
  unsure (1)..(430): unsure at all n locations
agcttgccggtaatcttatggacgagcgagtgattttcgagagacgagcctccgcccccggccgaactcacaaatggggggtctcacgattccccgctattgaggatcttccctcgacagattcttaacatgatcttcaagctcttggaaattttcctttgtgtctatcttacttctaaatcatatgttttctttgtgctccatccaaacagtttcttgtgttttcatttcttaagattcgaggtgtgataacatttgaatcatgcgtatttcctatttgtgtgttttgagaattctgagttccaaaggaactctaaataataattactaccgccttccaaatacaagagattntgctcatgtaattatataagcaaaatccttaatattctcggacataggtagtatttacaaacagagcaatggtaat

SEQ ID NO: 10797 - DNA, 409 bp, Oryza sativa
  unsure (1)..(409): unsure at all n locations
aatttctcatacccggaacaaatagttntcaggtgaaagcgaaagcttctgtccatttccaaataccatgtcaacatctggaaatacctctgataattgggagacgttcctgaaggttaagtgataagataagaacattgatgatgaaaacaaagggggtagaaattgttatcatggtgcaagagttaccttccagcacctgcaaagcagatgtctttataatttggatctgggccacggattttcttcagagaatttactttatttgtcacctatccattaaaaacataattattccagcatacttttncaggagtgtccattttaaagatttccatcttcaggaatgacaatgaagagctgaataaaacaaaatgaaaagaatctgcaatgcgacaaccaagatagc

SEQ ID NO: 10798 - DNA, 371 bp, Oryza sativa
agcttgcaagttgtgcttcctgtacttgtggataagacaccaggacttgatgacctcggaaaggagagaggtggccaaccacaagccagcgtgggcaacggctttaccctttgtatagcatgattcattgcggggcaccagactgagaagcggcgagaagtccatgggggtcgctggggagtccatgcctctggttgtagagggggtgtatatgatccacgaacagtgcactgcggtgagttgtgttgtgcagggggtattgtcacagcctctattcgggtactttctagtatcgcgacgcatggtagacatgatgttgaggctgtgtctttgtggtacagtagtacacctctggccagagaaaactattc

SEQ ID NO: 10799 - DNA, 410 bp, Oryza sativa
  unsure (1)..(410): unsure at all n locations
actataaaactaagcttgaatcgatatttgttaacatttctatccgggctttcaagaaactaaaaactgaaccctgtagctagcaacaccaaaaacgaagtagatgcggatgcggatggacgacacaccttgtagccagcaatattacgatatggggtcgtttctggagcttcctgtaagcctccttgatctcctgaggcgttgaattaaccgtcactcccagcacttggtagtagtcctccctggcttntcccctttagagctgcagcacctgatgatgctctttggtctgtacttaattggtctaatcagatcatactgaactgatccattcctgagctgcatgcgataatattgagtggagtacagaagctgaagaatctaccatctgtgccttcagtatttggtac

SEQ ID NO: 10800 - DNA, 405 bp, Oryza sativa
agctgaaagcgtgcacacaaacacactgtttattgtatgtctggcctagaagcagttagatacaacaagatccaatcatgcttctatactccttttaatcaatagctttaccatcttcatcaggatccaacacagctgtagaaccaattggtgttgaatttggcttgcaattctccatcttgaaccgtctcaaaagatcattcgtgtacttcatttgatgcacaaatgtaccttgaggtgtctgcttaatttacaatcccaaaaagtacgataactcacccatcatgctcatctcaaatttcctgcgcatagtcttagcaaactccacaaccaaagtgtgagttgaacaacccaagatgatatcagtcacataaatctgaacaaacagttgattatcaccatgct

SEQ ID NO: 10801 - DNA, 385 bp, Oryza sativa
  unsure (1)..(385): unsure at all n locations
tgacttttctaagntggntnttcttattcagacagcttcttgctcaactcaaacgggatagttctggtggagaaggttcaaccctaattatgcagtattgcttcaggtacccttttatttttcgtacaagttgatccttgcttttgttatcactgcatgaaccatcggatacttgtttcaacttgtatgaaatgcgtgcattatgtgagatagaagatcactatcatcggttttcataggagggtggacctttttatatctttaatacttggaaagaagcttcttgctcaaattacttagtattgtcttatgcgaagaaggctgctgaattgttcttttatatgctattggatgccttattaggctcatgataactattatgatg

SEQ ID NO: 10802 - DNA, 307 bp, Oryza sativa
agcttcacgaatctccgagaaaaccacgattgacgaatatccggtgaccgcaactatacgcatacaatctataacctacacaagacccagaagaaagatcctatgtagcctaaataatagtgccattaaatagatctcaattttacggaattactggaagtggaacggagtcaatcggatgagcggccgggaatatatggattttcaaagtgtattggatttactaatcaaaggaaaaaggatttaataatttattataccctctgtggaaagaaattggagggatgagatttagactccctcgggc

SEQ ID NO: 10803 - DNA, 390 bp, Oryza sativa
  unsure (1)..(390): unsure at all n locations
ntgtgttctatgagtttccggtgttgtgaattccatgctatgccatctgcttaagatactggcaactctttcaagggatatacgccgagcaaaaccagatgctggtttccctctttttgagagtgagtccttgaaatggcctggattcgtggaatttgatgatgtcaatgggaaggttttaacttattctgctcaagacaggtacacactaacttctgtaatgattataaagtatgtttattctgaaactgtactgatgccattgcattctgcaaacagtacttacaaggtgtttgacttgaaaaactacactctgctgtattctatatcagataagaatgttcaagaaataaagataagggaccccctctctgacaccacctttttttt

SEQ ID NO: 10804 - DNA, 385 bp, Oryza sativa
agcttggaagaacaatcctatcttgtcttatgtacctccagacatcaaggtgttggtagttctttcaatgttagaaatgattggacgtcatatacaaatcgattgaagctgggctctttcaaaaaatgaaatgggggttaactgattgtctgagaaccacagttttttaatatatttaccacgaaccgctaagctttcttctcattgtaaacccccgaatattttcttcaacctcaatttgatgtattcagtaatcttggaaaaaaaaacacttataggtgttcatcaatttgtgggagattacaggaatgagcattgatgcgactactgtcttgttgaaatgctattgctaaccttatatgatcaaatctttacagggactgtg

SEQ ID NO: 10805 - DNA, 386 bp, Oryza sativa
  unsure (1)..(386): unsure at all n locations
tggacggttgcgganggtctcgtcataaaatcttgatcttgaagccatcttggccaaaccttttgcaccaaatcctactacttggcgcactactgtcgatgggttatatcgcaactacgatattcagaagtatcacggaacgatggtgctaaggtctatatgaaactgtatcaagccaagaaggacaaagatttatattggttcagacccctcgtaagataatagccctaattttgtttacatgcgattatggatgagaattccaaaaaaaaattacaatgggaataaactaactaccctaatccgtcgtctaggatccgccgagaacagcttagcgagatctagtagacaaacacggcttcagctttcttcggtgtatctcaatg

SEQ ID NO: 10806 - DNA, 232 bp, Oryza sativa
tttcaataaaaccttaacttatctgcggttgatactggatgttgaaaataccgtgtttctatcaaactgcactcatggagatatggaactcactattaacatctgccagcaacatatatggtcgcaattggatgcattccattgtatttggcttcatatatgtcggaactactgaaaattgatgagctcttcccatacctttttctctcgacccacgttggtctcacaccct

SEQ ID NO: 10807 - DNA, 337 bp, Oryza sativa
ttcgtactggaacctcttggcgccacaatgtttacagtcaggctcacgctttagaacattagtgctttgtgggacgttgctatacacacagtctaatggatcaggaatctaagaggtcggtgctagtgagtcgtcctcatacgattggtccatatcgttaatctcatcatcgcctgggatcgtttacagggaagtagtttagattcaaatatctactgaagtgaaagacagtctcaggtataacgacgatggtacctagcctaacatacaagttatattcattcgcggtgtcatcatccatgaaggaatccatatcatctatattgtgatgaaaagt

SEQ ID NO: 10808 - DNA, 341 bp, Oryza sativa
  unsure (1)..(341): unsure at all n locations
ttagggcggcttcttgggaaatgctgtctcttttgctggtgtgcgttgngtagacttgtagtcttgtagtacacctcttttttctttttctctcttcagtttcagaattcagagtttctctttctcttgtttgtctggtttggtctgccctgttgaccaccaccctgtcctcctcctttcttcagataaagataaaatggcagcttcctttccttccctttccaattcctccctctccctgccataattatttttctgtatatataattgcaaccatattgtggtagggactntagaccctattggatgaatccataagataatcttatttttgttatagc

SEQ ID NO: 10809 - DNA, 343 bp, Oryza sativa
  unsure (1)..(343): unsure at all n locations
agcttgtgtgcaccgtacgccgcggcggcgacagctgcacccgctccaagcatcggagccatgtgccctcctccaccatggctacctccataacctgaaaaaaaaaaacaacaaccaccatgaaatcttggcgatgaattcgtcacgacgatcgaacagaatctcttttgaaagatgaatcgtaagaacagaacaagatctgcagcacagaatcgaacagaaagctagaatcagttgacgatcgagtacataccctggtatggcgcagcatagccagccggaggaggatatgcggtgggcggcggagggtattanccctgctgatgagggtacngataggcat

SEQ ID NO: 10810 - DNA, 367 bp, Oryza sativa
  unsure (1)..(367): unsure at all n locations
tggcgcacacgaaagaggacgagggcttcaaaagacactcgcgccccctacctggcgcgccagatgacggaacgtggggctcctcaccgggagaccgcgcaggccctcctttgccggttcggccgggggcgctaagtgaggttcttcgccctcgatctgaggaacgtcagcgagaaaagaaatgcgcaagacacgggcgacgtagacaggttcgggccgctgagaagcgtaacaccctactcctgtgttctggtggatctgtgtgtgaaggaatccaaagggcggagagcgagagagagttcaggctctatgaaccattcgccagagtcccaactncccctcctttctttttccccctcttcttttc

SEQ ID NO: 10811 - DNA, 284 bp, Oryza sativa
tagctttagatcctctagatattatcatgttttaacacatgccgcaagattcactccataagaacaatgagaaacacagcgccctccacaaacacgcatgacgactacgacggcttgctactgtggcggcgaacgtcgtcgtcgacaaccacgatcctacgatgcccactgtgtctacgtattcgaaccacgtcgtgcggcggtctgggaattgatcttcggtagagctcgacgatcttgtctatcagtgcccggacctcctccctgttctgcacggtggactt

SEQ ID NO: 10812 - DNA, 275 bp, Oryza sativa
  unsure (1)..(275): unsure at all n locations
agggacaaggccatgtcacttggcccattatgaacccatacgagcaaaagacactgtatacccataaagatgtccctattaaaagggcaaccatgtaaatttccctgtaaagcctaaaccgccatgtaacagggggatttgaaaaaaatttactaagcaatacaattgtctntacttccaaccactgttaaaagaaccacgtccttcgacgtgacgcagttgttgattcgacaacaatatgtatactagaagtataggaatatattcttttctat

SEQ ID NO: 10813 - DNA, 434 bp, Oryza sativa
aaccgcccgcatgcaagcttgatgattaaacaagtgagatagttagttgtgagcactgcaaaaaggactagcgcgatcacataatgtttcaaaaccacattgactcaatcggtactggtttaacagtctgataaaatacaaattcccaccattactatactaatgacacaataaaccatttgaaggatgcacccatgctttatttgcacaatagaagaagcagttcaagtatagccctcaagcagaagacatatttgtctgtaatagaatgacaatcatgcaataattacttttccctccagctcttttttgtaaatactgtacattatacctctccaaaaccatatacagatcgccaaaatgctaatggccaattaataaggacaatgaaccttataaatgcggagcgaacaaaaaaaaactgtacgagtctt

SEQ ID NO: 10814 - DNA, 428 bp, Oryza sativa
  unsure (1)..(428): unsure at all n locations
attcttcatctgttcttggccctgtgttttcatattgaccattactctgntcttatcttcacagaaatagtagtctcctactctccttttcctcacaagctagctaatgttctaaagttgcctgaaaatgacgtgtctgagctttcctcatgtggttttcaattaacagagaaagtcataagcagccctgcaggacatctgaccagattatctttgacttcactgaatttcagaatcaaacgtagcagattccttacagtttcgtgtttacacgaccaagacaatcttcactacttatccgattttttatcctcatgaaaagaattaatctttatatgataatattgggcctgtttgatttggagccaacttttggccaaaaactctagtagtgtcaaaaacttaccttgacaagttgtggtattacc

SEQ ID NO: 10815 - DNA, 389 bp, Oryza sativa
  unsure (1)..(389): unsure at all n locations
tntataaattgtaagaggtgtcatccatgtgaaacagtaagtactaatttattatacggaaaataacatgaaaaaaaccatgtgaaagttggagctcaggagctggaaacaaattaaaacaagaggtatagtaaacatgcatgtcaccagaggtatttcactgcaacctcaaacttggtgcctggctctctcaactttgagccattccagaatctcgatctcagcatttatgctatgggtgagcacttccagcttcttgaggcttgtcaagttctcaatgccggcaaggatcggtctcccagtcccatcattgtcatagaaaaacactctgaaggtctcgattntttccatggttgacttctcaaatcggatagctctcggcataatgt

SEQ ID NO: 10816 - DNA, 430 bp, Oryza sativa
  unsure (1)..(430): unsure at all n locations
agcttagtggctaatngcacacctgcattttcagttatctgaacatgacaacatacttgtgtgtggattctgaatttctgagactgaaattggcattggtgcaagcagcggagaacaggtgggcttgaacacgagcaacaagaggtctcagaagtaagagcccaatctaaaacggcccaagataacgacccactaacggcccaatataaagcagcccaagccgccagccgccggccgaaacacccaccgtcgccgacttctcgtgcgcaaacagtgcggttgctcgcgcactacgccggcgagccgcgggcggcggcggcggctgggagtacnggagacgccggaatactagcctcgcatcctcctccctcgagttcgctgcgggaccgcgccatcctcgtcggagccccgggcccagtggacacgagct

SEQ ID NO: 10817 - DNA, 412 bp, Oryza sativa
  unsure (1)..(412): unsure at all n locations
tgtagacacctcgccactcctccacacactngtttagtgtcgcgttacaccttcatgtgcgacattcatcatcagctccctttccaaccgccaacaagacttgatgctaaggggcaaggagcttattgggtcggaggtatatgttccctgccgtggaacatgttgtgctccttcatggtgtcactaatggctttctcgttcaacatgtccttcggctccactaaatgcatgtgttgctacttggattggtttttggtgcctcctcgaatcttgcatatgaaatgtgccaacaagcatctctttccatgtccccgagcaggacctcgctgatgctctagtggngctcctcatccttggattcctagagttatggctctcgtggaaccaccagatagccgccctcatcactcgt

SEQ ID NO: 10818 - DNA, 388 bp, Oryza sativa
  unsure (1)..(388): unsure at all n locations
tggagtaaaactgggtgcaatgcttctggcactggattggctaaagtattcctatagattcaattaactagcttagtcaagtattcctatggattcaattagctagcttactcaatgatatgattggctagagaggattcctatggattcaattagctatcttaatcaataataggactggctagagaggattccgatggattcaattacgaagtttaatttaaaggtaaaactctatccaatgcttctggcactggattggttagagagtattcctatgaattcaattaactagcttagtcaattataggattggctagagagtangaatggctataaaggattcctatggattcaattagctatgttaatccataataggactggc

SEQ ID NO: 10819 - DNA, 277 bp, Oryza sativa
tatctcttacgctccacgaatggatcaggctttatattttcccggcttgccgtcatcgtcgccgactggtgtcttcgcctataccgttgtttggtcacaccaccgttgttgggcgtctacgtttttaccgaccgggcgtctcgtccgccgccgactggtgtttccgcctacacggctggcctattatgccgcgcgtgttgggcgtctacgttttcaccgaccggccgcctcgttcgccgccgactggtgtttccgcctgcacgggtggcctattatg

SEQ ID NO: 10820 - DNA, 426 bp, Oryza sativa
agcttgagcatggagtgcatgttgtgtcatgaacacctggcagagtctgtgatatgatcaagagaaggaccttgcgtacaagagccattaagctcctaattctggttagtttatttctcatgttgttttatggaacctttttttggtttgatcaaatggttggagaataacattcttcaattacaggatgaagccgatgagatgttgggcagaggctttaaggatcagatatatgatgtctacagatatctacccccagagctccaggtcaatcacagattaaaactgtactagactgatagtttgtcttgtgtttcaatgttcacccctcagtgaattgattcttttaaatttagctcctcactagtctataacatctaacatctactccctcgtcccagaatatagctacctttagcattaaaa

SEQ ID NO: 10821 - DNA, 346 bp, Oryza sativa
  unsure (1)..(346): unsure at all n locations
ttattaaaactcagtcaaatacaccaagatgatacattttaactgagcccactcccggcctctgcataagatgcacacagccacacacaaagaaagacctatgtatacccccctcacgaaacaaaaaatattagtggctatcaatccgtagactagatcaccaaccatgctcttgggtaaaaaattctagtgccacctggtccaaactttgcggtaccaccacaatagtatcccgaagacccggtttgtagaggatagccaaggtgcgaagccatcgggtgactaaagtaatagcctgcanaggagaagacaccatcttgttatcaaaaattaccccatttctact

SEQ ID NO: 10822 - DNA, 431 bp, Oryza sativa
  unsure (1)..(431): unsure at all n locations
agcttatacacaacaccacttctagctatgatccatgagaccatataatggtcgaaatgagcaagaccgatctctcttgaaaaaggcagagacaatgactccaagtgtagtatgctggaagtggttcaattcgttcacagaagaaaaaattgctacattaataatgggtcaatattttgtctctttctagtcatacatgtataaaatgatgtttgtcgaggcttcttgaacaaagatttaataacatattactagtacagacaagttgtgtacattattttagagggaatatccttgttacaagcgtngattgcaattgcctcgattgagaatagtttggccatatactaccatatttgaactgtctgacatatttattcagaataaacgttcgatccgtagctgcgttcaaaataacaaggtacttcgta

SEQ ID NO: 10823 - DNA, 388 bp, Oryza sativa
  unsure (1)..(388): unsure at all n locations
tatgcctgacggtactattgaaaagtacaaggctctgtttgttgctaanggctatactcagaaagaaggcgaagatttctttgacacttactcacctgttgctagattgaccacaattcgtgtgctactttccctagcaacctcacatggtcttctcgttcatcaaatggacgttaagacagcttttcttaatggagagctggatgaggagatctatatgtatcaacctgatgggtttgtagttgaaggtcaagaaagcaaagtgtgcaaattgttgaagtctttgtatggtctgaaacaagctcctaagcaatggcatgagaaatttgacaaaacattgacatctgcaggctttgcagtcaatgaggtagataaatgtgtgtactat

SEQ ID NO: 10824 - DNA, 431 bp, Oryza sativa
  unsure (1)..(431): unsure at all n locations
agcttaaccggtctcattgtgatagattgttattcaccacagaatgaaccgacaacgaataattagaaatttggtcgtcaatagcataccgccatgaggatcatgtttatgggtttcaagttttatgaccaaacccaactgcagaagagtaaaagaccaaatcaatggatttggcaagcagttttaaaatcataacactaaccctgcaggtacaaacaaacaaaacaggaactagaatagcataaataactcacaagtacacaaaatagccagaagaatcacaatcattcaggtccttgatccactttttacttcttggtcagattatagaaaactcattgaattgtgattcttatattcatataatgcaaaanagtacactgccaataaatctaaatgaataacaaattataagtgcaatggaacttgaa

SEQ ID NO: 10825 - DNA, 298 bp, Oryza sativa
ggaccttaaaactcagcttctaacgttcagtggagtgctaaaagatttggcgggcggctcctggaggaagtcgtcttcgaactctgctcctcctcgagcgcctagagcaccgccctcttttactggatggcgtcttcctccacgttgaagaggtgaacgatcccatgctggtgcatgccccttgataattctacaacgatgattgtgacgatgatgtgacaaggcgcaacaccttcgactgctgggctaaatgggtcaacaacgcaggtctgtggccatcggaccggggaggcagcac

SEQ ID NO: 10826 - DNA, 435 bp, Oryza sativa
agcttggtaggatgcaaaataaaacctgcttggttgtgattgttaagacaatatactttgtgacaactgacaacattcagtaggttgactccttaaagtaaggtgatcaataccatgcaactgttcaaacaagaaaataaaaagacagaagtagagaactagcataccttgtacagatccagtcacctcgcttcatttcaatattttgtcctggaggcctagagcccaatgtattttgcctagctgttgattcggcgtaactggaggtttgaggaaatccactaaaacttacaaactcagccaagatatttctcacagctgaatcagtcagttccttatctttcaaatagctgaccggagaaccgtatgcgtaacttaataagtaccgaacaatatcgatggtttccgctctctctgactgagtcacctggtaaa

SEQ ID NO: 10827 - DNA, 410 bp, Oryza sativa
  unsure (1)..(410): unsure at all n locations
tggcgagatcgtcacgaccatccccaccatcgtgtagtcctctgttcatgtccctggtcttcttaatgagctgtcttaactgtaggaagggactatgctgcacgtttatgtacaggaacgaacttttaattacatggagtgatggagtgagcactaattctgtttgtagaaacaaactngaatttaaactctacatggagtgagcactagttctgttatgtagaaacaaactttgaattaaactctagtaaggaggaatagttagcacgagcttgttcgtattataatcacatagcaaactntgatgtaagggattggatatcactttggctacaaataaatntactacttgaaactttggttagaactaagccaagcatatgctactacacttctgtagctcttaatgg

SEQ ID NO: 10828 - DNA, 384 bp, Oryza sativa
tcatttgagacatgcgaatcttgtttacttggcaaaaagacaaaagcacctttcgcgggtcaaagtgaaagggcaagtgaactattgaaactagtacatactgatgtatgtggaccaatgagctcaactgccagaggtggttttgggaacttcattacctttaccgatgactttagtagatataggtatgtctacttaatgaggtataagcctgagtcctttgaaaagttcaaggaatttcagaatgaggtacaaaatcatttgtgtaagacaatcaagtatatactatctgatcgtggtggagagtacttgagccttgaatttggcatcattaaaggagtgggaattgtccacaaccactccgcaggaacgcctagtggaatg

SEQ ID NO: 10829 - DNA, 344 bp, Oryza sativa
  unsure (1)..(344): unsure at all n locations
gaccttgaaactcaagcttccaaccccttactggntttctctaccaaaaaagtgatagctctgccattgagggtgctagcctctgcccagatgatagatcatttgatacttctcttagtttcttgccacgntatgagtggctagaactaacggattcttgcaatggactggttctatgcaaatatgggcgcaatacttcttctccatccgttgcgaactttgtggtgtgcaacccagcaacacgtcagtggatggagttacctgaaactcttctggaaccagaaggtcacagttatgcaaccaaattagctttcgatccatcatggtccccgtacttctatgtc

SEQ ID NO: 10830 - DNA, 407 bp, Oryza sativa
  unsure (1)..(407): unsure at all n locations
aacttgtgactagtaacgtgttttgttatgcaaatctgngagttgagtgattttaaggaacatatactctttgagcaagtttatagccaatttagtaaaaatctcacatcttatttacattcttacggggatatttctgtgacagacattatattggattatagaaggaatcaaagagatgctagccatgacctttcttctcaggaggtgatgcttcccttntaccagtgacattttctgctttatgaactacagactgagggggagatgcagcagtagctttccttcctacttcaactaccaactgcactaaaggatccaagctagaaaaaatntcttccttggagatatcatgatctatatacctggattgaactgagttcatattaatgctaccacacctaaca

SEQ ID NO: 10831 - DNA, 383 bp, Oryza sativa
  unsure (1)..(383): unsure at all n locations
gaactatnaatactaagcgtttgtttaatgttggcagcgccaatttttttttatattttcttgtgaatatatggtgtcgaaatgtaggcaaattcccagtgaagttgggtagaacagaaaaccaaacagaccataggtccttaaatttacaccctcaaccggtcaacattattacacctattttttatagaacacaaagcaaggtacccacctaggagtataatgctcatgttgcaaacaaacaattaagatgctaaaagaatggatagaagccacgaaattcatagaaaccaatttacctttctttatagaccctgacctttggcctggccgtcagattggcagctgggcacccggattcgacggcggggtcttatgataca

SEQ ID NO: 10832 - DNA, 433 bp, Oryza sativa
  unsure (1)..(433): unsure at all n locations
agcttatccagactcttagtgtaactaatcattctgatcacatatgggctcactggattaccttctgcaagcctgcacgcaaataaggactttgaggtattaaacctctcaactcttgcttggtcctcaaacatgttacgtagtcccgtgattattgtatgagcatccaatgcctcatattgcctttgaagctcaggagacatagtagcaagcatgagacagcttatatcaagataatcattgcatcgcttttcatgctccctatgttgagcagcaagaacattgttgggcaagttagctggaaaaggctctgtaagcacaaactctttgtgctcttgcctgagaacaattctcangttgcgataccaatccatgaagtttattccattcaacttctctttctcaagaatagatcgcaagttaaaactggatg

SEQ ID NO: 10833 - DNA, 327 bp, Oryza sativa
ttttcacacagagaagatctactttgccctccattttccaatgaaataagcgacgatagtgcaagcattgcagatgcacagtgtggctggaggcaactcttgactgtatcatcaaccgaagagagatgcgcaagaacagaaagtcgggaccgctgtttcttctgggaactcgttaagataattgatgctgaagaattcccttctgacttcaagcatgcagctattgttgcagtgcaaggcaacagtgcactactagggcatgaggattggatagcctgcatttctgattactggtttgcttgactccttattcaatatgaccacaca

SEQ ID NO: 10834 - DNA, 252 bp, Oryza sativa
tcggttgcgaaataagatgacgggaaaaattcctcttatcctcctacatcgtttccgccaagaatccgactttatcccgaaaaaatccacgcggaatcgagctcgatacgcgtaaactctccaactaaccctcggattatccggcttcgagtcctctcggaaggaggcagatctcttccatacaagcctatagagagcatcccctagtccgtctctttcggttgccccatttcccgagctctctcgtgcccc

SEQ ID NO: 10835 - DNA, 362 bp, Oryza sativa
gcactatttatgggtaaaaagcatagttcaagtcttgtaccattgcagcagctggagatgagcctcaagatgcaccggtcaagtgcagcctccatgttgaatgcttcatcatctaatgcaatcgtgtgcagacccaaagcagccatttcttctattttcttttgaatctgagataaacagcaacgattaaaaacaatatcacagatacttgccttcaaaactgaaagaaacacagtgcacctgtgagagatgcagtttcctcatcatgaattcagtttccaaactattggcaccaaggtcagatgatgcaagaggaaatgacagctcaagtattgtcaaaacaggtttgggcatcacctgat

SEQ ID NO: 10836 - DNA, 407 bp, Oryza sativa
  unsure (1)..(407): unsure at all n locations
agcntgagcaaatgatttgtagaccttccctattcttaagaagattcgctgatcttccaaatacaagaacacttacaaaattaagagtgtttctgccataacttcaaccgtcgctgccttctgtgtgtcgctgagtcatgtaggtagtattgcactgcttaatgattctcatgaatataatcagcgtatttgtcaacccagagaaaacccagcgtattatggtgagatcatgagtttaactgtagaatgatcttagcttggaacttgtaagaaaatcattcactgtggtctgcatatctaaaatcaggggcagctatgctcaattacagaactttgtgggtgatttatttgggcactaagaaactcgtgtttatgtagtccatttcatcctcctaagagggacattt

SEQ ID NO: 10837 - DNA, 371 bp, Oryza sativa
  unsure (1)..(371): unsure at all n locations
tccncacttgaactttcattaatcatagagcaaaaattttctattaaaaatcatggagcaaaaagatgtaagattatatttgatctagaccagagaggggagaatagcatgttttttcatttgtctaccgcatagtgatcctgtcttttcactctatcagtccatactgtaattatattttggaacggagagagtaaaacccacgtagctgccctgtactaaacacaatctttgcatcttgctccaaagaaaaaaaaatactacttcacacaatcaaaagctaacgcaacatggcaaagttggtacttggtacacatgttggtttcaaagtacaggcaagctctccacggaaagcaaaagcatggcaatgt

SEQ ID NO: 10838 - DNA, 440 bp, Oryza sativa
tgcaagcttgaggcggcgggccgggcaactttctgtttctatcgacccatggtataacaagattgtgttggctgattggtattgggagaaggtatctggagtaagaacaagaggattttgtgctttgaggatctgatttgatatgtaatatgtgatatttttcccccacagtgggggatttaccgctaaaccctagcatttttatatagggacgagaaagatcgcacacgggatgcaaaaggcccacaaaacgtgtggtctatggacagtatcggctggtatacaggctccatgtttgctttatgcatcttgttgctcggccgggccgccgattgcatgagcgcccgcttcattctctctcttcctttgtatctcatccagctcagattgtgatgacatgtatggggtaatagaatgcttgatagcccttattatacttg

SEQ ID NO: 10839 - DNA, 396 bp, Oryza sativa
tcgtgggttatgcgggacacatgctccttgtcgttttttgggcgcaacgactttgagagcttaagctaaagctcttcttctatctcctaatcaatttcaaatcctaattgtcggatgctcacgccgagtcggttcacgagaaccctaacctgcaacgccggtcactctcactttccggctcagatttgccacacagatgatttgacagtctcgccaattcgccgtacgtgtttcgctttcgagctagccgcgtcgtcgggttcatgcaccgccccacgcatcgaccgatcgatcgatcggtcgcgtaccgacggggacacggggtccatccacgtagatcgtagacgcatccccacacaccgcggggcacgtgcaccacggcacgtactacgcgcg

SEQ ID NO: 10840 - DNA, 412 bp, Oryza sativa
ttaagtgacgcggctgcagctaacgcgaatgaagacttggattttattttctcgctgatggtggcacccactattgacatggccaagatcgagtggttgatcagtcactgctatctggctttttacagctgtggacttcgccactggttatccaggacggcagaatggttatttttatattcttcccactaacactctgattggcggtcactctgaatccgcagcagcgtgatagactaaaagcggaggtgatttgtattgaagcagatctcttagaggcgataaactactggtagacaactgattccaagatcagtggtgctgtcatcgaattgctctcgcttggcgataattctgaaaaaacatatcttacctagatattggaagagctcgaagagcgcattatactgta

SEQ ID NO: 10841 - DNA, 71 bp, Oryza sativa
ctattgaaaacgtgcaccccaagccatactctgtgaacaatattaattatgccaggtgagcatctttctta

SEQ ID NO: 10842 - DNA, 401 bp, Oryza sativa
tttaacggaagttatggcaatctctttgacatggaaaagtgaaggttcaccgccacaacacctgcagttttcggctgtggccttcgacacaggttatgcaggacgcaagaattgaccttctaagagcagttaaaataacactcatagcgccggcgatactgactccacgtaagtttgaggagtaagctggagggtgaatggaaaagagagagaagctcggtgactaatttacagcccggttgtacactgctcccaatattgctgctgctctcagccaattgcaacattcaagtgaagaatttaaaaaaacaaatcaaacctagccatgggaagtgcgtagagatgtatatataggttctgtttgtggagagattctagttgctacagcttcttccagaact

SEQ ID NO: 10843 - DNA, 391 bp, Oryza sativa
  unsure (1)..(391): unsure at all n locations
actcacttcgccacttaaaccagttgctgttttgcagggatgacatgattggcattgagcacttggaaaaggattctgatggccaggctcttatgaaagcacggcgatctgctggatcaatgagtgccttttctggatcggggggaatggtctacatggagtacaagcgcttcttctttccgcttatatttcgtttttacgtccattatatgatttcattattctatttactcaattctaacttgtgagctcttttcatacaacactggtaaggggaaggctggagcttccaagaaaccgaaggacccttcaaagaggcattacctgcttaagaagcgttatcaatgatcttgataaccggcgtgnttcctttctttgctatctcatctgc

SEQ ID NO: 10844 - DNA, 420 bp, Oryza sativa
  unsure (1)..(420): unsure at all n locations
agcttagtgtaacttacaatagaaccagtatcgattccctcataatttccagnaggtccgtttaccattaatgcccatgatgcactaagatcattntgtcctcgcacttttggctcatagacattgattgcaacttgtgttccatatatttcatcatatgttgtacacccagctctctacatagaagatagagtcatgtttattattagtaataaaaacaaaaattctggatagaagaaaaacttcacacacaacacaagtaacactaaggtgagatttcttgattcctaattgttttagggataaatntattacttgctactaaaattgtactcattcacttagtttgccacttatactgtcctaatgacagtacgtggngggttcaagacacgcatgtcagtaagaaagtctgtgtgt

SEQ ID NO: 10845 - DNA, 411 bp, Oryza sativa
  unsure (1)..(411): unsure at all n locations
tttaaccaagctcttacaagatcttaccaatgcaagtggaatggtgacatacaccgactcaaccaagcaccccaatgaaggttggatgtatcgatgccttggcaaacacttgcggtacagctgtaatcaaatatgtggagctctgggtaggcttaaatatgtagcaaaggaatagcaaatgctcaaatcagataatgcaaagttgaataattgttcaaagttaagtaccgtgctggtcctaggctagaacgtactagagacgcgagcctagacacaaacgataccacaagatagcactatgaacaactcatgcacaactctgatatatgaagttcagctcaaacatnaacaagatttctcttttctttctttcttctttcttcctttctttttttttccttttctttctgg

SEQ ID NO: 10846 - DNA, 437 bp, Oryza sativa
  unsure (1)..(437): unsure at all n locations
agcttggcaatctgatagnttggtgcttgatcatatcttccttctgcaacgggtgtgtgcatgtaactactttcggtccatcatactccttaagatttatgattgcatttttatatttacaatgaatcacctctgctggagaacaaagaatattttgtggtaacatcataaagaaatgagttaaatatgttattagaagcacacgatgatgtatgaaaaacaacaaataggaagagattgaaaactaaaagcaaaaggaagagggctaaacgtacagaggtaagtaaaaacagcaatcgatgatgatatgccatagagagaaacctgttatttagttgctcatgatccatgcatgtcttanaagataccgtatatctcaacaganaatataagagatggagtagtttaatctgtgtgaagcgagagaacaacgtaat

SEQ ID NO: 10847 - DNA, 359 bp, Oryza sativa
actaagcttctacaaatgttgttgctttaaaacactacatactctttcggtgaattacaacgtacggacaacggcaaacaaatcaatggtgagcattgcaacgtacggacaacggcaaacaaaatcaatggtgagcagtgagctaccgaatcgactatgcatcacatggcctgcaacccggacaactgaacaagatctgcaatgactacccaaaaacagcatttgccataacttcacgcagatgtaaattctcatgggtcagaaatccacctcgactgcctctgaataccagaataataacagcgtaattgtaaactgactagtagcacatagaaatgaacggagcattttaaacatta

SEQ ID NO: 10848 - DNA, 430 bp, Oryza sativa
  unsure (1)..(430): unsure at all n locations
agcttncctggatctgggaagtttctcttttttggtattgggatcgtttgatcgattgccttgatcgctacttatgggcgtgcgctcaaaggatacaaacagggattcgcaaacaaaaaggggaattcgtagtcactttttcctgtcgcgtaaaaaaaaggctatacgcgagagcaatagaggttgggatacatctatctcttctgagcaacctcttttggattcttaagaccacccttgcagtaggataccgtctgctttggggtctttattatattatctccttcgagggatttttaggatcgttcaggctatatttagtctatattggctattactgtctccttttctcatggaagtgggtaaggacctcagaagatagaggagagcgccaggcgcagatttccggaatacttctacggggaatgct

SEQ ID NO: 10849 - DNA, 398 bp, Oryza sativa
  unsure (1)..(398): unsure at all n locations
agcttcatactttgtccgttggagatattattttctgtgggtggttctagtgagctcctggttgtgaaaaaaatatcaaaaaaaaaataataaaaaaaaaagttgtgcctctcttctcagcactagagagagcncaanaaaaaaaaaaaaaaaaaaaaggaggatacagcgagcacaccacaccattcccccctttgtcaccaccttccaccaccggttcttgttttcgttgctgtttgggtttgtgttttgtggcgccctttgtggttaggctcgcgtctctacttcgactagcctaggaccagcactgtacactatacccttgagcgattattcaatttgctttggctaacgcggtttctagttttctcttgagcattgctttcagcccaccaaca

SEQ ID NO: 10850 - DNA, 373 bp, Oryza sativa
taaatgcaaagatccaatataaataataggtgaacaatatggatctacaacatgcacaataaatgtataggatttgctccccctaaatatatgcatacaaataaatatacaagagatgcaagtgtatgcataattagagaatgatcaatgggggtttatcctatacacatagagaaggcatatgtagtaatgatgtagaccagcataaaacacatacattcatgatttccatgttcttaatgtaaatgagattaaataagatacaactcgaataaacgttagtctcacacttatataacaataacatggaaatcatatatatgaacctatcaaaaagtaggagataagaagtggacataacgtttatctcatg

SEQ ID NO: 10851 - DNA, 413 bp, Oryza sativa
gtgttgataaatgcttccaaattgaactctagatctgactctgcttgttttgtaatggatgatgacaatttcaagtacaagaaaatcttggacaattttttcgtggagcaaattttcagtgccatacttttcaaagtgaatgcatggatggtctttttggcatggaataaatgtggagctggataggtgtttgcagaaaacatcactacatggtaaaagttgtccagtctgtgaattctccagatcatagaaactcaggacctacacaagtgtaattggttcagaatatttagtcacctccaaatacctgttatgttaagaaaaataaagcagtagataattactctggatgcactgtttgtagggcaatctttacaagatatagaattaacccacagaagattagatgtggg

SEQ ID NO: 10852 - DNA, 390 bp, Oryza sativa
actcagcttgcaaaaatgagatcaccactacgatgaatcacgatgaatcacaaggaaaccttcataggtgcaacgaccacatctcagttgtaggacacaatgactaggagctgtgagaaaaccgtatggtaggggaaaaggaacaatgagtttagctaggtcttacattttcaccaaccccccaaaactaatgaaaataaaaaccaccttgattttaatatgcacttaatttgttaaacatgttctaaacaaactaagtctactattttttatataatgataaagattatagatatttggttatactgatgaattaaatattatatagtatataacttagagaaattatcaaagtgatgttgatgaagaatatttgtcgaggaaacgtac

SEQ ID NO: 10853 - DNA, 426 bp, Oryza sativa
agcttgcgtcagtgtaaccatttataactagctcttcctatcctccatagactaggaacatatccttagttcttctcaagtacttcaggatattctttacagctatccagtgactctcacctggatctgattagtatcggcttgttgcactaagtgcatatgaaacatctggacgtgtacatagcatagcatacatgatggatccaattgccaaagcatatggaatcacactcatcttgcttcgctcatcagtcatttgaggacaccgattcttgccaagattaatgccatgtgacatcgataaaaaacctttcttagaatcttgcatgttgaacctcttcaacaccttgtcaatgtatgtactctggcttaatccaattagcctctttgatctatctctatagatccttatgcccagaatatatg

SEQ ID NO: 10854 - DNA, 387 bp, Oryza sativa
tactacacatccatgccttttttttgctgttagacatgcatgtctttttccccttcttataaagttttctggtcaattacttatccaatctactattcgattacatcattgtattcgttgcaattaaatcttcagaaaagatcttacatgattatattacgatgaaaaatatttatatttgtaaattgcttttattatatacgtaaggtacttttatcatatatataaaaattacttttagatttgactaagttacttcttatacattcataatgctctaagttgttatttttattattgtttttagtcaattctataatttatggactttaaatttaatttttaggcagaccatatttttctccttacaacgaatttacttctaat

SEQ ID NO: 10855 - DNA, 438 bp, Oryza sativa
  unsure (1)..(438): unsure at all n locations
agcttgtcttcatccagagtcattngcaaatttttaaaatttaggcatgtaatacaaacaaatatttgggcatataaaaaattccaaatgaaacgatattttactaagatgttgtagatctcatcgaggtctataatttttatatagaacttcgtttgaaaaaacaataaaagaaatcattcaaatagctgagaacttatatataatgcacatttagacatgtaaatggttccaaataaaacagtagtcaaccttgatgatgtatgatctcatcaagatttacaattaacatttgggcagaaaaccaactgtaatgatgaggcaacagttatgaccattaatttctgtggtagtgagtggattgctactacaaactgttaaaattgtttgcttaagtgctgctaaattctttctattttgatataagtgaaagttcta

SEQ ID NO: 10856 - DNA, 382 bp, Oryza sativa
taagcccggagagagcaagaaaatcaatataaatttatagagagaaatgtgagacgaagtattgttgtttgtgtggttaagcgatggcttacgggtaattaaaccaagggaaagggagataaaagagagcggaaaccgcatggtcacatggatttgttttcttccctaactttgggacttttgtgctgtctggtgcttgctttttcgtgaaattcagagtacgcagtacgtatggcccggcccccccgtgctgttaatctgtcgggctgcctggccctggccctggccatctccatggccaagcatatgcaatgcactgctgcagtgcagattcttcagatttcggagtaacctcagctgttaccaaagcgtagctttagct

SEQ ID NO: 10857 - DNA, 422 bp, Oryza sativa
gcttaacctccgcggtcgaccgcttattctgtgtcttgcgccgcgcaaccgacaatttgttggtcatcatctcgtgcgcccaggctttcatttgttctggcttcatctggaaaacgcctttgttgcacaagctggacagatgcataccttgcacatagtaatgctacagaatatctatatacacattgaacttaaagcgctaattatattaaaaaaatattacttgcagtaggacattatgaacttgactaattagaattataccgttactaacaggatcattatattctttgcagacatatatactcagcagtttatgagctcaaatttatgatctctgactacgttgtgtacaggggtggagaccattactgctcacgtgaattaaagtaggctggcctgagtaacatcacgacaactac

SEQ ID NO: 10858 - DNA, 405 bp, Oryza sativa
  unsure (1)..(405): unsure at all n locations
tgtgcgtggcctgaaggttcttcttctcaagagatgcttcgttcaataactggggtggttcttgatgataaataagaacaacgttctgaacgccccaaggacaaggcatangtttcatcganggtgatgaggatcgttcaagtttatgaagatgggcaatatgttctgaagaaactaacgatgataaaaacatcaccttctcgaacggctcatgcttgggatgagccttgattatgctggaataattcagggtgttctcacaatcttcataaagatcatcgctgaattggaatggaatttccggaggatgaattttttcttcttccggctccatcaactggaatgaggattccgcagntgagtcgggttccgactccacgtgaagaggatcctcataggtaatct

SEQ ID NO: 10859 - DNA, 432 bp, Oryza sativa
agcttacgttttatacacaatactcgatctgtcttttatatagtaaacatagtattgaattagacacatcttactacactacgaatctggataaactctacatttttttaagtattatgatgatttactgatatgttgttatattttaggatagatggagtataattatagaggaggggaaaaaatcatgatcaaaatatgtcatccttaacagagaatctcaaagttttgataaaatttatgattctttcgatcgagatgcaggacatttataagactgtctcaggatttcattcaaaattctctaaaattcctacatttcaaatggggccttaacgggcttaggccctgtttggctaatgggataaggaaatgattacccacccaacaaaatatatctttaaaatctagccattcattctctctcttaca

SEQ ID NO: 10860 - DNA, 400 bp, Oryza sativa
  unsure (1)..(400): unsure at all n locations
ggggaacagttcatcacttacctctctgaatatgccattctctgtcttattccaaaaagggcgtctcccacagagcaaaatataagttatgactcctatgctccaaacatctgactcanggccagaccgtcgttttaaaacttctggtgctacataataggcactgccaactatatcgtgaaactttttccctacagtaatgaaagaaaacaatgaatgaactgcagacttgtatgtcctactcaaatcagaagcaacaattggaagcacatagcaaagatgcacataagcaaaagctcttgaaataaatacctggttttatgaagtctgacagaccataatctgttgcctttaaaggtgagtcctccttggttgatttgaaaaggaagttctgggaagg

SEQ ID NO: 10861 - DNA, 428 bp, Oryza sativa
gcttgattctaaaaggtttccttactgtacttattcttgaggagccttgctttatatgtttatttttttccttttattttttctattttgcaactaaccgattatttaatatgctgcttccaaaatgtatatatgcaagttgattttgtccttgtgttcactgcaattagacaagctatatgtgtgcctatatatgtttttttcttgcatttctacactatatattactctaaatatacgacgttcttaacttttaaacataatatttagctatacgttttatttaaatttattgtaaacataaaaaaatcacgccagatataaaggatctttaataatgcatattaataaagataaaaaaataatgtttaaagtaaactgaatgataaaataagttaaagcaaaatacatgaaacttacttcatagc

SEQ ID NO: 10862 - DNA, 374 bp, Oryza sativa
tgcgatccagatgtatatcccttccttgatgcctgaacataaattaattatcattatgaacaagcatatcatcattgttattttgatataaacaacaatgtcagtactaacagcatcgaacgtagatggcatttgcacttcatggtccacatctgaatcaagggaatcaatctcatcctcttcttcctctggcacacgggagggaggattggcaaggatgtagaccaccctcagcttgaactcctcgaccaccttgcctgcctctttactgaactacaaaccgcaacatttaacatttagtacatcactcataaatcaatcagcatctatgaactcgattgagactgcaggattttaccatgtcactgtgaatg

SEQ ID NO: 10863 - DNA, 428 bp, Oryza sativa
  unsure (1)..(428): unsure at all n locations
gctttggtctaataaggacttctctatttattgaaaaatcaaccacaccgaaattcggcaatatcaaattttgatatgatactaaattttggtagcattggataagttggtttagagctaaggctctgttcgctatccggcacgtaaaacgatgttcgcattaacgtgtgattaattaaatattagctattttttaaagaatagattaatatgattttttaaacaacttttgtatagaaactttttgcaaaaaaacacaccgtttagtagtttgaaaagcgtacgcacgaaaatgagggtggggagttggaaaccctgtggaacgaacgtagccttaaatttcggtggaattnttggggcactcctaccgatcnggtgcccgatcgaatttgagaataatcgggcgctgacatcaacgcccgagttac

SEQ ID NO: 10864 - DNA, 402 bp, Oryza sativa
  unsure (1)..(402): unsure at all n locations
tggaactcacctcagccctgaattgcttctcaccttgacggtcaccaccaagcttttttactgcaataggtgtcgagccacctagaaaccctttgaatacagcaccaaagccgtcttctcctaatttctcagagaaatttttagttgcatgttgcagaacactgtatttgaaagacacaattccatttcccccttgaacattattagtaggagcagtaaattgcttccttttgtacctccagattacagtagctgaaaacaaacccaaagcaacaacactggaagcaaccgcagcaccaataatctttccttgtccattattattatggctccaacttgcgtctttggcggcaatacgtaggtagagaatntctccatcactagtagtacctttattatact

SEQ ID NO: 10865 - DNA, 367 bp, Oryza sativa
  unsure (1)..(367): unsure at all n locations
tgctttaatgggggcttttcattaaattggagctgcctaattacctgcgaatgtagagctactattgatgcgaagagttccgtccaaaanaaaaactatcaatgcaatgataggtgattcggtccaaatgttatccatgctcaaagtgtaaaattatgacattaacatatgggaaattttatcatccttacaaaaaagagtaccgaaaggtacataaattttggtacatgaggcattaaaattttagtacattcagatattttttttaagtacgggaatttatttttcttaacatacggctaaatttgtgaaagtcatagtttttacaggaatttttttattttcacaaaaattgttgactttcata

SEQ ID NO: 10866 - DNA, 424 bp, Oryza sativa
  unsure (1)..(424): unsure at all n locations
agcttggtaaactgaattctgagttccatatattcataatattttccacaattctctcgagatctttcagggcatcacatattctttcttttctgtatcaaggaagcatgtgcacactctttctcatgcggcttctgggtatcataaagttcttgaggaaaaccgttagctatacaaccaaatacaagatcttagaggtacccttttttgttccttatgatataagtaatggaggattgtacaatgtacatgcatctttcatggggcaacacaacatgctaatacatcttgtttcttctttgccagggaatattagagtatattgtcgagtacgacctttcttacctggaaaggtaagttcctcaagcagtgtcgctggacttgaagatagaactatcactgtcatgactccatcanaacatgg

SEQ ID NO: 10867 - DNA, 432 bp, Oryza sativa
  unsure (1)..(432): unsure at all n locations
agctnttctcgcgaatacgcaaaagattattcttctatatattagaaaaaaaaagttacagttacacaactcaatcagctagaccggcctataccaagagaaaaaagaaaaagcaaaataaaaaactgaagcttataaaaactacggcggttaaagcaaaactccaaacaacgggaaggggctgagccgcactacactcctaacaagtctccaaaagtgacaacaccagctagcgactacacagactaccttccgagtggatggattccagaatcactgttgaagcttcccagagttagaatcattaatgaaaagctaataatgaacttatgcagatctataaccaacaataaagtttttgaagtaaatttgtgtgtacatttgattcgtttattataaaccggcttggctaanataatatcttcttaaaat

SEQ ID NO: 10868 - DNA, 394 bp, Oryza sativa
tctccacaccatcattaagcaagatcggcctactatgttagcacataagtcaacattctgatactagaagcatgttactatcgaactgtaaatgccttaattctgaataagtcatgccagcagacagtagtgcttgtgaattgtacagcataccggttttcagggtttctgacgacaagattacggatcataaggcaggcttgcttctgagtttgagcagaagaagggaacttttgcattgcctgtatagccaaagtgccataccctgctcccattgcacgagctgcattttctggtgaccgcagtgtaaggatagtcaccatagacattacctacacattcatttagcttggtaaagttagcgcacatagatgcttcagtatttctcatttat

SEQ ID NO: 10869 - DNA, 407 bp, Oryza sativa
aactcaccgatgagctattcttatcttcaatcatctcaaggacatctgtattttctaaccactgcaatgtatcgccatagtttgagtatatggtctcattagcaccaatcaatcgtattaacacctgaaggatcccaagggcagcattagccaaatgcaagcgcagagcaaatatgaattattgatagcctgcttacctccattattgatgtgatgccaatcaggtcaacgagttggacaactatttctggatgttcctataaaaggacagattaggtgtcatgaatccactgaatgatcaacccacaaaatataaaatttcacagggctaacaacatacaagtgttagtgcataacagattatcttaagcagatatcttaaagaaaatgggtcattgtggatgatt

SEQ ID NO: 10870 - DNA, 381 bp, Oryza sativa
  unsure (1)..(381): unsure at all n locations
tgcatcatctgtgtgaataaatatttatctcttcgttttcaattaaagatatttatatcgggattttgatacattcatatttgagtcgaattttaagtcccttcacttttggaaatacaaaaggagtcgaataaggaatcaattttaaaaactcgcacgttaacttgggacgagagtcggactcctaattatctatgtgaattcccacgataaatttcgacctagttaaaccgtataacaatgataaaattaaaataacacattttttctagttactaataatgaggaaacatgaacggaagggtaactganataaaatcggagaacgctaatgatttccgcgacttattcggattaggaacaaattactactcccatacc

SEQ ID NO: 10871 - DNA, 359 bp, Oryza sativa
  unsure (1)..(359): unsure at all n locations
cgcggtacataaaatactcagccacggcttgctccgtataaggagcgaggtattgtaatgtaacangggaatccgccatttcagctactacaataatgtattccatggccccctcttcatggaaaagagttactacttgagctacggaggatgctctttgaccgatagctacataaacacatattacatcttgccctttttgattgagaattgtatctgtagctactgctgttttgccgggttgtctgtccccaataattaactctcgctgaccgcgcccaatangaatcatcgaatcgatagcaataaagccccgttttgaaggggttcatatacagaacgcctgggaaatatacccg

SEQ ID NO: 10872 - DNA, 355 bp, Oryza sativa
  unsure (1)..(355): unsure at all n locations
acatattngcaacgggtccgccagggtacagatacccaataatgttctccgtgatgacattcaggcctggagtctgtatataatgaagaaggctgaactggttagatctgtatgacataatatgcacaatgtgttaaatccacatacctganttgttgtcgctttgattatccctattgggagggtgaagaaaaaggcaatggagcatgcaaacataacaccccaccagggcaattggagttcctcattgtagtattcacacgcaaatatggtcgatccgatgttagcaataaagatgcatatgaaccaccactcagggacctgtttatatctcctcataagtttcgagtgtatg

SEQ ID NO: 10873 - DNA, 288 bp, Oryza sativa
  unsure (1)..(288): unsure at all n locations
caggggctgtctcttaaggctttaatctgaattntgggttaactaaaaaaaattaagggttaggtgttctctttggtctataatttggacaaacatgcttatggtctgataaggtcatttcaaataaccatctggcatggntgtacgttntgtctatttatgtctgattcaaggctgactatagtgatttttttggnggggtatggaatgagatatcttgttntatcaatattagcaaaattcanaattatgtgatcaacgaacaattcatttaactgtattctctac

SEQ ID NO: 10874 - DNA, 398 bp, Oryza sativa
caatctaacaaaagctaaatcaagaagggtttcgataactaaactggctagcggagccgattctagataactacccgtctcgtgggcaaaacggaaggttttcaggacaaacctacaaagaggtctcgcactctcgcagcggcggtggaaaatttacggcgcaaattgacaaagatggacaaactaagagaaaactaaaagcaatatgaaaaacgattcgattgattgattatagattggttgttacaatgaaccagccttatcccttatataggggttggtcttgccctctacaggcccttatccacatctaactcgggatagaatccaaaggaaacccgaaacatgccttcccgagtaaggaaacttctagacccggcgaaacagtcctggactcg

SEQ ID NO: 10875 - DNA, 381 bp, Oryza sativa
tcaaacggtgccacctgtagactggcctggtagctgttgttgtacgaaaattccgtatatggcaagcttttgtcccaagctccaccaaaatcaagagcgcaagctctcaacatatcttccaagatttgattgactcgctcggtctgaccatcagtttgcgggtgataggccgtgctgaaatttaaacgggtccccaattcttcctgcagcttctgccagaattttgaggtgaactgactccctcggtcagatacaatctttttgggtactccatgtagacacatgattctcgagagatagagctccgccaaccttttgcccgtatacgtggtatgtactggtatgaagtgagcaaccttagtgagtcgatccacgactacc

SEQ ID NO: 10876 - DNA, 313 bp, Oryza sativa
cgcgcatcatcagaaggctcacttgctagtaaatcggcatgctgaactgatttctttgcaataagaccaatgatttcaacggggattaacatttgcttgacaacgatccgttacttcggtaatacatgtacatcactaataacacttgtgtcatcaaagactgagactctctctgagagattatgatttgcgacagacattctctgggttagaacaaagataatatgaagaaagcagttctactcatccaatatagtgacagggctattatggactgacatcatgcacaaaatatgtggaagactctctgata

SEQ ID NO: 10877 - DNA, 287 bp, Oryza sativa
aacccaaccatggtacagaaggccaactggaaatggaaaatgtgtgtccacttcaccgacctcaacaaggcgtgtgccaaggatcagtttactcttcctcaaatagaccaactggtggactcaacagccggatgcgagttgttgagcttactcgacgcttactccggttactaccaaataatgcatggctaaagaagacgagttgaagacaacattcatcacgccattctgagtattctgctacgttaagatgccgttcggactaataaccgcatgaaacactttct

SEQ ID NO: 10878 - DNA, 387 bp, Oryza sativa
tactaagcttggacatcatcctagggatggattggttggccaagcttatttttcatattgattgtgccgaaaagtacatcaccttgcaaggacctggaggaaagcaagtccgctttacctctaacacccctaccgcaagtcggtctctcctaacctgtgttcaagtcacctccttggagtcggtgcccatagtctgtgaatatcccgacgtattttcggaagaattaacgagtatgccaccagaccgagagattgagttcgccataaaactggcaccaggcactgcaccaattgcaaaaagaccataccgaatggcagcttatgagttagcacaagttaaaagaccaatcgaagaggtggagagtgaaggttatgtgcgacctagct

SEQ ID NO: 10879 - DNA, 371 bp, Oryza sativa
  unsure (1)..(371): unsure at all n locations
gagttctgtcttataccccatntgagcgcctgtgaagatggagcgcgtagcccactaatccgctgctggttatccatgttagacaagcctgaagtgcctttgaataatgtaaatattatcgatataataaagatgagtcctttatatcatgtttgggtggggtaccccggcttttcctgggacggggattaatacactggcgttcgggaaaaaggcatttttcccgcgcgcgacaatttcctaaaaaccgttctctatataatagaacccctctgacatattagctctgtaaaaaatattgcttactactattatgaatgaacactactggataattcattagaacgaaaactattttacaaacggaatgt

SEQ ID NO: 10880 - DNA, 394 bp, Oryza sativa
  unsure (1)..(394): unsure at all n locations
tcttctgattgctggttgaagcggatgacgggctttttcttggtatctcccttcggaggacgattgccctctgcttggcctggagtaagtcggggaaagacacaacttcttccatggacgacaattctttgctggggctgtctgtgcagagaatggttagtgctgaaggtattattgccatgatttattgcagagttacgtggagcaagaggagcattggtgctgcggatgatatcatcgatgttgttgttggagctgactagctgacgagacaatcgtatggtcgttcgttggatttctgcggtcttggtcaacaacacactgagttggcaatccttgggcacatggtttgttccttcgcacagaanacatgtcaccttgcgagtgggacact

SEQ ID NO: 10881 - DNA, 436 bp, Oryza sativa
agcttcaaaatatcttcaaaaaagaggggatgtcatgccaaaatttctattgaatttattttggtgattacatacaaatcggaggtgcctaaaaggtttgcaacttcatcctccaatgttttttttgtcatgctacatttgcacctatgttttgcatactttttttgtctccaaaatttaattgtaagttgatgagagagaaaatgtgtgtggggaagaaagaatatatagaaatttagttcatttgctaaacaaggttttataaaatagttgagaaggaaaactctagtgaaagttaatattaaataatagaaaacaaactaaaataaaaattaaaagaagtaaaacacattaaaattagtttaaaactttacaaatagtttttaagaattatttggtgtaataatttatgattttcgtatgaataaagatatct

SEQ ID NO: 10882 - DNA, 358 bp, Oryza sativa
tcgagttgcttgtcggaggccgaggatgagctcgggacaactatggctccggctggtggaagaggcgccgttgaaacaatgacctcactggtgggagattgggagctcacatcttcacgggccctggtgctttgcccggggccagatgagtgtggctgcattcaaaacattatggggttacaaaaagataggagacgttaggccgagaacaaaaaggcaagcttaggcatctacccaactttttgcttcttcaacagcagtcccctcttggtcacgcccgacttcatgctggacgtagtctgtagaagaaaagggttatcgcggttgttagataagccatgggtaaaaacctcacctc

SEQ ID NO: 10883 - DNA, 432 bp, Oryza sativa
agcttgcttcttgatggagtcaaattccaatccttctgcattgtcattgaaaagctactaagagtcacctttgagtctgccctgaaagtgtcaacatatttctctactagccagttagcagtgcacctttgcagaacccactcttttttgcacttgtgttgtgccacatatgtcttcacaacaaaggacttcactctactgttcatatatgcatacaaattccaagggcacccttctgcacagtgtgcccttatccttcccctgtcatttctaggcaatttgatatcaactctgttcttcagactatattttgtgattgtcttcctaatcacttcaacagaagggaataccattccatccttgaacactggagttgtgatgtcctctaaattgaaagacttaaacctcagagttatatcaccttcatcatct

SEQ ID NO: 10884 - DNA, 62 bp, Oryza sativa
ctcagcttatctacaataacccctaaaaacttaaaaatgtcccttttcacggcgcaatatcg

SEQ ID NO: 10885 - DNA, 369 bp, Oryza sativa
ttagtttacctcaaaaccaaacactgagctgcatataacaagatgctctggtgaagctaaccagcgggtgaaacctttgttatgttaacccccgccgagttagtccatacttgtatcctttgtgcagaatgaggaggcgactgtctcgtctatttaagaagggacccggctctccgttaagtcatcatgacgagtctagcactcattcatctgcagacatctcgatggaggatgctgacgttccgtaacgtctcttgagcgacgcccacctctaccttgtcggtgatcaggaaaaacatgcctactacatgctgaaagaccgtgagtattctcaagctagtggagtaagaacaaaatagacatcagagt

SEQ ID NO: 10886 - DNA, 402 bp, Oryza sativa
  unsure (1)..(402): unsure at all n locations
ntagcagccaccgcgctactgttattttatgatgacttatctaagagcaccaagtgacctactctcttgacatacccactgaacacaggcgccgctggacaccatgccgtacgaaagaaacgataactgtagtagaccatgtggtataatgaccagaccaacaaattaagctagtctagtcatccttgttatgaaatatttaggtgatctcatccaactatatggatagagcagcaaccaactctgggacacgacggttggtcgtgccccacatctcttctcgcctcacggcgattctagtaacggacgcgatggttcccaaaccatcgcgtcttctattaccgcctctctcccccctatatattgtaaccattggtatcaataaagaatcgctcacttcat

SEQ ID NO: 10887 - DNA, 399 bp, Oryza sativa
  unsure (1)..(399): unsure at all n locations
actcaagcttgctgagactaaaggaagtcattattggtttttatttcattttctaaactangcatgacctgaaatggattatacataagaggtcagaaaataatataatatcaagcacagagtttggatcatttagctaaaagtatagcaaaatggtaaaactgtgatagtgtgatagtgtcaagtattcaattattatgaggcatataagccatgttatattcaaaatgatgcatgtgctactggcctaaattttcatgaaagactttcttcagcttcagctgaatcatgtggggtcacggaaactacctgatggccaactgatacatcgccattacaatgttctggtgcaagttcaatgccttcagataaatataaatcattttatggtatccctga

SEQ ID NO: 10888 - DNA, 401 bp, Oryza sativa
  unsure (1)..(401): unsure at all n locations
gacctataaaactcagctttgaagaaatctgctctggggatgactttcttttattactcgcagccggntcatgggatagttggagttttatatggaacagtgacatctacacaactaagaggttctacaaactcaacttcaatgcataccagcctccaagaccttttgtttggttgtggaaaattaagtgtgtcatgaaaatcaaagtgtttgcctggttactattcagagataggctcaacacccatgatatgttggatagaaggcattgtgaaaaagaggatgatgatctcacttgtgtgctgtgcaatggagggcacagggaaacaagactccacctcttcttcacatgttcttttagtgtcagatgttggcagcatcttggaattgtcttgaaccct

SEQ ID NO: 10889 - DNA, 430 bp, Oryza sativa
  unsure (1)..(430): unsure at all n locations
agctttggacggtgcgttcgaggatttttttttcatttgatctgcagattcttcgntcatcgccagctacgattccgtactaaatatactacttcatccgtcccaaaataagtatagccatggtttttcgcgtccagctctgatcgtttgtcttatttaaaattttttttaaaaaaattaaaaacataagttacgactaaagtactattcatattctatcatctcataacaataaaaatgctagttataaaaaaaattcaaataagacggacgatcaaagttgggcgcggaaactcatggctacacttattatgggacggaggtagtaaaagatttttaattagataagatatactgtatcttacgtggggtttggatctaaggacttaatgtatttagacactaatttagagtattaaatataggctac

SEQ ID NO: 10890 - DNA, 375 bp, Oryza sativa
  unsure (1)..(375): unsure at all n locations
tgtcgttgggtagttagaacgtgacagtaaaatccatctgttatagaaaatggaagtacgggggcactggaattgggaagatggagtagaagtgatgaaatcaaaatcacgttgcaatgaagagagggagcaacgtgcatccaacatgcaatgccgaccaggcgcagggcaacaagaagaatcatgtgatccggctagaagaaatgtgtcgaatgacgcatagacatttcctaatattatcaaatgataaatgaaataagatggattcatgtaacacccccaacctatttgaaggctatagtggtgtgtggtttatgccaaagtggtcttgaggtggttgtcgtantgatgggttaattctacctttgaaagtta

SEQ ID NO: 10891 - DNA, 434 bp, Oryza sativa
  unsure (1)..(434): unsure at all n locations
agctntatctccaaaatcggatttaaattcttttaagtcatgatataattttttttaaaaaaatacttcattagagcaagtttaatagtatagccaactactaacttcaaatcatttatagtcaatttcataaccaattcaaacaataattacctatagatatatattgcactagtaatacctggtcccacatatcatacacacattgcgtcttgtagcctgtgatgcagctggttataaatctgtagcctagagctattctctctccttatttattttcttgatatgtgtttatagctggcttatatagtatgcacttagttgagtccacttagttttaggctntgataatttttggcttcgaaactgcttagctcgatcgtctttaagggcacccgcaatgggtatctataggctctctataagatatccat

SEQ ID NO: 10892 - DNA, 352 bp, Oryza sativa
  unsure (1)..(352): unsure at all n locations
tctataacgcagcatggcagcgaatcaagcccttcattcagtacttgttgactgaatttgacaaccactctgcccagcttgtaagacttaacagagcatacatagtgctcattcacngacccggtcaactaaactccccatattgttatagacccatctcactgcctaactgccatctcaaactactgtctaaagtccttgctaactgcctacaatccgttcttggcagactcatagactgggagcaaacaggctctattaaaaggataagcatctcagacacttttctatatgcaacagaaactctccagtgatgtcacaaatgtaagcttgctacngctgacttgaaaat

SEQ ID NO: 10893 - DNA, 427 bp, Oryza sativa
  unsure (1)..(427): unsure at all n locations
gcttttcatttactcgcaagatccgttcttatattgtccttaattgtgcatttagtagtcatttcatgacttgcatgtcaactgatgcaaaacaatagtgctaaccaaatgattgattctaatttctcgttcctttttagccatattttcataaatatcattaactataactgcatgcaaatatttttcatagcaattctactgatatcaatttattatataaaaacataagccagtgagttaaagagtactttaaggtacgttttgacttttatttatgaacacagagagtaataatcatcattaatctgatccttaattgtgcattntaagcatatcatgacttacatgttaactgatgcaaacaacattgctaaccaagtgtgactgattctgatgtgtctgcaaaaataccactgcagctaac

SEQ ID NO: 10894 - DNA, 294 bp, Oryza sativa
attttgaaaatgcataaaccacatacctatctgttattaaaaacggggagattcctttggtcttaatgttctgaagcattggaagaagtgatggatctttatcgatgtacctgtcagtttcaaactacaaaaattagtgccatggataacatgcgaaatatattcaagtagcaaatcaatgacagatcgagcccatgtcataagtgtgctctataggggcaatgaagagaatttcaatatttgtgctttccacgtaacttagttaacagatcaggagaaaattgattagtctat

SEQ ID NO: 10895 - DNA, 425 bp, Oryza sativa
agcttgcattaaacacctaaattcccgtttttgctgagtacgaaagtactcacccttgctctatataaatatatatatatagttcctccgccctgaagagaagataaagtgaagtgaagattagggtttcgtcctggttcccagccgtcgcctgtggtgttgggtgttagaccgttggttccgctgctgctgctgctgctgttggtgtttcctcatccgcgtcgtcggttgtattctcgggctgtctgagctgcaacctaagttaaggtaaataagtcctctatttattttaaggattgctatgattcatatttgtcaccgtgggtaccagcactatgtcctgtgactggtaccgagatcgcggtttcgtatgaagcggttcgcgccatttttcctacgacacgctcctgtcatgtgccgttgta

SEQ ID NO: 10896 - DNA, 343 bp, Oryza sativa
tcactgcagccagtcacacaaatttgatatgagtttattacacaaattcgcaagacctgatactacacggtgaaccactcacggtttgcaagctaactgacaattttatgtctgtttgtctcaagcacactgcctgaccgaagtcattcatttcaagtgttgatcctacttgcacaggcatttggagaaactaatggtggtagcagagagccattattctcatatgactgtcaaaaaggttctgagttcattggaatccttatcatgtgactctagagaatcgtagaaagaaaacatgtcaaaagcttttgcaatcaacaaaactagtctatagaatatctag

SEQ ID NO: 10897 - DNA, 392 bp, Oryza sativa
ttattgctatctctagaggtaacccacattgatgtaatgaaagtgaaggacccacaacaatgacagaacgccccgagtaatcgacccgtttcccaagcagagtttcgcgaaacctcccctctttaccttcaattacatctgaaagtgatttgtatactttattgtgaccatccctcgttggttgcccgcgggacccactatcaagaagtgtatccacggcttcttgtaccaatttttcctggcacattactaaatctgctggcgctaattcacttctttttaataaataggcaagattggtgttccgacggataactctcttataaagttcattaatatccgaagtcactactttatccccagacctataaacaatgggtcttaattcggga

SEQ ID NO: 10898 - DNA, 341 bp, Oryza sativa
  unsure (1)..(341): unsure at all n locations
tcctggttttgtggataggacacctatgttcttgtttnctcgaagntatccttgtcggctcgtgattcttgtcggaaggacaagatttggccatactaagaacttgctcgggctcagatggcgtcgatggtccggtctccacttctatgggaaggaccttcgacatggagtcgcctagggttttaaccatgacggtctcgctttcggcattggtggaccagtcgagatcagcaccctggtgtaaatcgagaaaacaatttcgccgacttgggttcacaccagcattgttgaagtataaactccttggttgatgcccgtgttgacgctgttgtcgatgaagc

SEQ ID NO: 10899 - DNA, 350 bp, Oryza sativa
ggcacgtgagatctgctccaggagtttttgtggtcctcgaaacagggacccgccgccacctgatgtaagcaacctaagacaagtacccaggttcgcactttcttaagtttggcaggatacctcctgagattcatctagaacttttccataatcgctcgacccatgacacggttgtcgaagaaagaagataaatgtgtgtggagcccgtaatgcgagaaggccgtccaatctctcaatgaagagctttgtttctcgtcggtgttatcttgccggattctcccaaggactttatggtgtattgtgatgcttacgcctaagagtgacgtgcgtgctcaagcacgatggtcatg

SEQ ID NO: 10900 - DNA, 396 bp, Oryza sativa
tgacttcagcagcgggcgactccactccacaggcaattcttgttttgttgcgacgaaaccaactttgacaaaacagctccaactaggaagatctctagctctggtgtgggggaaaagagagcaagactgagtactacccactgtactcagcaagtcataccggaagaggaggtatgatgcatgatataaccaaaggaggctagaggttcttttgcataaagctagcatttaaaagcagtagttgaaagcagtaaaacagctgtagtaattaatcaatattaaccaatcactgtccaacgctacaccacattgcaacaggcccaaccaaccacctgaactacaccagttcattaagctaaactagggatgagactaatcacggcgaatctggttgat

SEQ ID NO: 10901 - DNA, 391 bp, Oryza sativa
attcttgactgacatttcatattcacaaaccttgcatccaccaatctaatctggcttaactgtttttaaaggaattaccaccgttgctctaagaaaaaccaaagttcacttggcaacaaactatatggagccacttatacttcactgggcgttgtcaaaagagaatggagagtggcaggtaaaaacaaacatgtttgcaactcctaaagctatgaactcatcatctgaaatagacaatgtgggcctgtactgatggggtgctttgtaactgtgaaggcacctccctcaagcatattgccatctggttcatcattgctagacaaggcatgtgaaacttcattcagtgaatatgaattgaatggtctgcattgtcaggtatggataattttat

SEQ ID NO: 10902 - DNA, 78 bp, Oryza sativa
tccaataaaccgcgccccctattggtttttttagtggcaagtgtctttacaccgggaggcgcgacaatcttctcaaaa

SEQ ID NO: 10903 - DNA, 339 bp, Oryza sativa
ttatcccttcaatattatttacctacctatctctcttattattttctcaaagaataagggtattttagtcattcttactctctattattttcaccttgggatggtatgaatgaaatttttttttttggaccgaaggagtaagggctgcttgtctgagcctgcatggcgagaaacaagcttacttaatgatggatgtgacacagtcagatgagagtagtaggttggacatatagcaggatttacaatatttatgaccatcaagacttaaacccctataaaccgaccaattcattgctatcgagcccgtgtatctttggtgttacctttatttggcgcctt

SEQ ID NO: 10904 - DNA, 345 bp, Oryza sativa
  unsure (1)..(345): unsure at all n locations
gttcgaccggctgtatgtgacccatagatgccttcatgtatatcaaggaagaggtgtctgccgtcgttcgacgagacgcatttgagaagtaccccgtttggcgcttatttgtatagatcgttgctgaccacactttagatttttgctttacaggttattttctcggcctatgtatcgttctttggccactcctagctgttgatgaatttcatanatgggatgtgccaggcatctgagatctctatatcggcaacggcgcgctctgtctttgtgggcttcgcgccaatgactggggcggccgggctaacttctacgctaaccttctttactgatggcttcgtcaga

SEQ ID NO: 10905 - DNA, 404 bp, Oryza sativa
tctagaacatgaacacaacgacttggttattcaacctatctgttcaccatccaaaataccaatccaacgaacacaagcccattgatcatcggactcgatctaatcattacactactattttaaatgtctgccatgtttccaaatgcaactttagccatggataaacgtcttgtattataagagcatgacgttatgagaagcagaccagtgtttattaacttctcatttctaattaattttctagattatacttcctcaattttaaaatacagtaacttaagatgagattagatcattctataactatgagggcatgttcactttaatgacaatttcaaccttatcaaattttggcattaccaacaattttgcacatgatttcttatataggtaccaaaatttgg

SEQ ID NO: 10906 - DNA, 336 bp, Oryza sativa
tccaccaaacttattatggcttaacagttattaagggaattaccactcggtgttctaggaaaaaccaaatgttacttggcaacaaactatatggaccacctatacctcactgggcgttggcaaaaaaaaaaggaaagcggctggtaaaaacaaacatgtttggcaactctaaagctatgaactcatcatctgaaatacacaatgtgggcctgtactgatggggtgctctgaaactgtgaaggcaccttccccaaacatattgccatctgggtcatcattgctcgacaagggatgcgaaacttcattcagtgaacatgaattgaatggtctgcattg

SEQ ID NO: 10907 - DNA, 120 bp, Oryza sativa
  unsure (1)..(120): unsure at all n locations
accttnnaactcagctggactcttggctgataaaaaccgttttttgttgttcccacgcacaaagtttgcttgtcccccacgaatgtcatccgccatgtataatgacattgtacaggggga

SEQ ID NO: 10908 - DNA, 435 bp, Oryza sativa
agcttgtctctctgcttcctcaagttattgtatatctctgtgcttctttgcaagtgcggactctaatttgtttgagtcactttcgtagaactcaaaatagctattcaagttattaattttgtctttaagcttctggatttcttcttggagtaaacctccctggagtacttgcaaggcaggtaagttggatataaattcatcaaacagcagaagggtgattaaaaaatcacatgactggtcaagttgagagcaaaaaatacagcttaacataatacataatgtattaaccaagctaaaatataatacaacataacctgctttcggtttgataaaagcacacactcaagatcatcaatttccttttgaagccacttatctctggcagctttggttgcaaattgggttgccctcccctgctgttggtacaatatactt

SEQ ID NO: 10909 - DNA, 330 bp, Oryza sativa
tcaccaaggtcttcttctcagttcatgtgagctatctttttgttcagtttttttacacttaatccaatctctgcctctggctttgcatcacgactgaacaagaccaaagaatcaatggggaggaatggagtggtggcagctactgctgctgcctgcatcttgctgctcatcctgctgacgtcaggccagctgcagctggcgtcagcggagtccgagatcggcagatgctacgatgactgcttgcctgactgcgagcaaggcagttctcgagctggctgcaagctcttctgcttcacctgctgcgtcttgaagccgattcacaactgtacc

SEQ ID NO: 10910 - DNA, 436 bp, Oryza sativa
agctttgaaagagggtttctgaaaccattcctccttgctcctaagccattgaatcttggtgacctaatcacatcattgtactctcctaacatgtccagtgagaattggaaatccatgtcctccccttgttcgatgacaggtgagtatggttcccactcagctaattttctcctagcttccatgcagacaacctccagcttgctcggttcctcctccaaccctctgaactccctggtcatcatctcacctatctctgccaagcaaagaccagaagcagcagcctccttaaggaagattgtgcacagcaccaggacacgaaggcaggcctcgcggattataggaagctccctacgcagcattgccacatccctcattggatcaagattcttaatgtactcgagctcctcttcagagaatgggattgatgactgagccc

SEQ ID NO: 10911 - DNA, 355 bp, Oryza sativa
  unsure (1)..(355): unsure at all n locations
actcagcttgcattaacacctaagttcccgtgacttgctgagtactaaagtactcacccttgctctatataaatatataaatatatatagttcctccgccctgaagagaagataaagtgaagtgaagattanggtttcgtcctggttcccagccgtcgcctgtggtgttgggtattagaccgttggttccgctgctgctgttgttggtgttcgcctcgtccgtgtcgtcggttgtattctcgggctgtctgagctgcaacctaagttaaggtaaataagtcctctattttatttaaagatngctatgattcatatttgtcaccgtgggtaccagcactatgtnctgngactggta

SEQ ID NO: 10912 - DNA, 422 bp, Oryza sativa
  unsure (1)..(422): unsure at all n locations
agcttgttgtgtcatatacagttttttatgcatgattcctactctgagtaacacatagtgtaatattttccaaggccggtacgcttcaaagttcctgttaagctctttttaattgtttaaaataaaatttcggccatcttatcactgcagcatgttaatgtgaaatgtattaccaaggcaaaataaacatattcttatgctataagaatgaattcttcacaattgagaagcaatcccaatggacttagaactttctttgaagttccaggaaacgcagcatgctatcaggtattgcagtctgaattatacattctgcacttgagcctaaagaatggctagctgattgtaactgacaatagaaactgaagcatatcctaatgttntaaaaacacatgatgaactcttaacccagaatgaatgat

SEQ ID NO: 10913 - DNA, 348 bp, Oryza sativa
  unsure (1)..(348): unsure at all n locations
actcagctggtgtagtagattttggacttgactgatgctcttccagaaagcgaaacggctctgcaaaattaatgcgcataatatgttttgggctgtgtttagttcagtgcaaagtttggattttggttgaaattggagatgatgtgactgaaaagttatgtgtgtatgacaagttgatgtgatgaaaaaggactgaagtttggatccaaactttggatctaaacacagccttggtcagaagagctatgagaagcaggctgacaccaatcccatgaccatgggcactgggtataaggcctgcttggggagcttctggcagctagagagaattttcttaanactaccact

SEQ ID NO: 10914 - DNA, 428 bp, Oryza sativa
agcttcatcacaaatgcatggaataatattttgtcgaaagaactcgaatttaatcaattgaatacctagggtgtctccgatctggaacctcatcttctcggcccaatcgttggacgactccgcattggcggccgggacgcttcagccattgccgccgccgaccttgagctgagtaactccagccatggcaaccacaagagcaaagcatgcaagcccaaggccatagctgtaaccactagtacctttcaccattgatcactgcaacaaaaaccaaaaccagctagttttttttttactacttagctataggtaattaactagtagtaattgatcaagctcagtgaagcttttcacttcttgtggtggatgagaagaggccaaactaggtagcccggtatttgtacgcctcaatggctgggagcttacaa

SEQ ID NO: 10915 - DNA, 399 bp, Oryza sativa
  unsure (1)..(399): unsure at all n locations
ggacctataaaactaagcttgctcgattttctttntaaaacctccttggcttctctatatccttgagnaaaaaatgcatgcttctcacatattttgaacacttctccggagtagaacaaacagtgctccaggggaacaggccttttgttggttctgatgaacaaatggcagcaaaatggtatgatgcaaactgtaataggaagtagtttaaaataattctgcacttacaaaggtaaagacactataatccactcaactgatgtatagtaatagataataatacgctgtattattcagttgtaagaaaataaggtgatttggtcttatattcttgaaatgacccccatccagtactcagagttggctcaattaatccctaacccttccacttactgagat

SEQ ID NO: 10916 - DNA, 430 bp, Oryza sativa
  unsure (1)..(430): unsure at all n locations
agcttcgaactntaataacttcagatcgatcttcataaagttcagacttcagagagagaccatgtcaaacaagcaagcaggtaggcattggctggcaagcaagcatacgcagaggtagccacgcgtacgatcgaattctatgcctgattaatgcaaaaagatattcagagatcaagcgtatgccatgctagcttgtttactgagaaaatccaacaaatatcattcatttgcaaattttagaaaatatcataatacgaaccaacttatcttaggccatgtttttttagcttagaattattataatctagattattgagtcagattactataagctaaattgttataatctgtagtagaataagcgattagttgtttcttttctagcttattagagcctaaattattgggtttgcaagtctaaacaggaaat

SEQ ID NO: 10917 - DNA, 394 bp, Oryza sativa
tcttgaataatcatgaaactcatgctccattcgtgaccatgtagaaattgaactaggagcaagtaaactatacatgtagatgcaaagtttgacaaggaaaggggaaacaacttcaacttaagcaaatcatcactaccggctttaccacattgttcaataaattggccgatatgttccattgttgttatagcatcctcacctgtgaatttcgtgaagttgggcacttcatatccttgcgggtatggaaccgaatctacatgttcaggatacggcctttaatatatatgcatggctactttggattctatttcactactatcccgcaagacattgtcatcatcttttccaacatccacatgaccgatttgtgactcggtcttatgtgacaatgcta

SEQ ID NO: 10918 - DNA, 434 bp, Oryza sativa
  unsure (1)..(434): unsure at all n locations
catgcaagcttagcttgntccttggtcgcaaacattttctttatgcgctccgcaattgggagataccacaccacctttgctgggcctcccctctttgacttacttccttcaccttcactctttgctcgtttgtatcttgatgccccacagatagggcagacatccaagtcagcgtattccttgtaatacaaaatgcagtcgttcggacatgcatgaattcttctgacctccaggcccaacggacataatacttgcttcgcttcatatgtcgtctgaggtaaattgttcccctctggcaacagatcctttaacagctcaaggagttctgtaaaactcttgtccgaccagccattactagccttaagcttcatgagttccaacacgcatgacaacttgctgtgcttcgacttgcattcatcatacaacggcatctg

SEQ ID NO: 10919 - DNA, 395 bp, Oryza sativa
  unsure (1)..(395): unsure at all n locations
actagctggtacttattacttacctttactctgatttctaactttattcaaattaatccaaaaacttgtgctattaattggataaaggtcttaactccctcctttcacttgtctttaaatgccgcggtacaagcctgagtacctgtttggtgttgagggttttggccacgagttgcgtatgatgtcctttgtcattggattcgggactgcccctttttatacccagattcctcatgatcgtcatgaagagaagtgccgagtcaaagtcaccttgaacagcaatagtgaagaggtcccctcagtaatgtttgaagctggaggaagaaactacatccatgcatgtcangaggtggcaaggatcgccatatgagagctccgtgatcgctacagtgatc

SEQ ID NO: 10920 - DNA, 365 bp, Oryza sativa
ttgacccctgactctgtagtatgatttttcactcagcatcactatataaacagatttccatgaatacgacgtggagtatgggcataaagtaataaactgtcaccatgatactttgcatataactcgtatcatattctcatatcttcagacctcagaacatgtcatttgatattgtcggcgaatggataccggcaactataattagtaggacctgcgcatgcccaaatccacaaacctattatctataagtgtaccatcactaatcacatgagaataaatgggattattggctaacatactgatcaagatattcatttaatgattcttacgtcttcattgagctcaatgaacatggtgattgcctg

SEQ ID NO: 10921 - DNA, 398 bp, Oryza sativa
taaagcgctggtcttgctctactggaatgccgcattgttctcttaatactccacatgtcccaaaatataagcatctattttttcacaggaattaaggaagtaggtggaactgaatgctgtgattggttgagaagagaaaatatgtggaggaattaaataagagatggttgcgattggttgagataagagggtaggtgtagaaatagctacattttgggacaaatttaaactctggaaatagctttattttgggacagtgggtatcatataagttcttgcaagtgacttgagcaagaatatgcaagttgcatggggtctctgaatggtattgtgccgtaactgtatatgttctgagattgtcaatggatccagcaatgggggtttcacttttcatgtat

SEQ ID NO: 10922 - DNA, 438 bp, Oryza sativa
agcttagcagagggtggactctcagataatctctactcaaggctgagttcgtctttctcaaatctggctgctatgggtgacagtttccctaatgggtgtagagacccgcatctaagggacgagagcaaaatctgcacctgcgaatccatcagcatggcgccccgacatcatgagggcctagggccaagaaactaatctcaatggaggaggatatctcctcaagttacaagagaaaaacccacaatatcaggctggcccaaatacttggagtataaaatggatctaaactaatccccacataccttactagctcaaggatcgatgtgtatgtccatgcacaacaactccctcttccagtcccgagtgacgccaccctcattttcatcgcacgaaacgtgcagctgctgctccgccgccttcctcggctcccttgactac

SEQ ID NO: 10923 - DNA, 400 bp, Oryza sativa
  unsure (1)..(400): unsure at all n locations
tcgggtcttggtgttcgtttggttggatttttttttatgttttgaattttttttcctttctccgattatgaggatgcaaagaacgcgatcggatttatggacgacgggtgcgatgggcgcaacggacgaaaacacggaacgaacgtgtactgactacggatggatgaagtaaaacgaactcttcaactacgcacgggacgcggacgaacgagaangttattaatttttaattaagtgttattattattaagttattattataagatttagcatagcagcaacaacatcataaatcagttatacccgtaaagctacgatttttctcttttttttgaattnttttcggctcctcggagaggtttacacgtggttggtaactttgcaaaaatttatattactc

SEQ ID NO: 10924 - DNA, 438 bp, Oryza sativa
  unsure (1)..(438): unsure at all n locations
agcttcatgagttccaacatgcatgacaatttgctttgcttcgacttacatccatcatacaaaggcatctgacaatctttcaccaacttactaaacttctcaaaatctctgtcattatcatctgtgtcttcaacgtcatgcaacatttcagacagacagttagtgtccaaatctatggtctctcggcctaagggagaaggaaccttctcgagctgcggcagcgttcactacatcctgatcagcacttcttcatctgcgacctcaggggtctcttgctctccatgcttgctctaatatgtatatttctccatganacctctccttatcaaatgagaatgcacatcgtcaatatcagggaacatctgttcgttcttgcagtcgttacatggacacaagatctgcatggccatcctattntttgtcactgtccgcanatct

SEQ ID NO: 10925 - DNA, 412 bp, Oryza sativa
  unsure (1)..(412): unsure at all n locations
gtgtgagttctggttgtccgaagtcaaattctaggttctcgtgatatctgctaaaggagttgctgtggacccccaaacagtgatcgccgtcaccgattggaagcaacccaagacagtcactcagattcgcaagttcttgggtttggcaggatattaccggagattcattgagaacttctccaaaatcgctcgacccatgacacagttgttgaaaaaagaaaagaaatttgtgtggagcccgcaatgcgagaaggcgtttcaaactctcaaggaanagctggtttcctcgccagtgttaatcttgccggatactcgcaaggatttcatggtgtattgtgatgcttcgcgccaaagattggggtgcgtgctcatgcangaccgtcatgtggtaacctatgcctcacgtcagcta

SEQ ID NO: 10926 - DNA, 389 bp, Oryza sativa
atggactggaaatgattctgtgatcaaatgcctctaacaagctggggtgacctcgggaccgctatgacttaaatcgttggtgaatgggacctcccttttatatcatgtaacttaactgctgttgcgagttctctgaaatgcttgtcacttttttttaattccctcctgaatcctgaatgatggtcatcagaatgtcataaaggaagtggttgattctctcagttggcaagtctaaaacctgattgaagattctgtcttgaacaagagcctccacaacctggcgttacaaacataagcatatatattaaacgcaagagtgactgatacacacgagagatcatgtcacatgctcatcttcactacattcagagctaattatatatatatgg

SEQ ID NO: 10927 - DNA, 396 bp, Oryza sativa
  unsure (1)..(396): unsure at all n locations
tancacatgatgattatttaatcatatcatgctcctttttttacattgaaactatgcctctacacgaacgtgtgtcatcaggctaatggagctaccatttctctgagattttgtcagagcccatttttagttgttagtaagggtcaaaactgacgaatcctcctgaaccaacgatatgataagagttcatagatagatatttgatggatatagagttggatgtgaatggtagcatgcggatacaaagcaaatattgcaaatcctgctttaatctaacaaaagctcattttgccctaagaaatagtattatttagataaacatgcatatatataaaggatccttggaacgacgtgactatttaatgggggcaagcttatcacatgatgatatttaat

SEQ ID NO: 10928 - DNA, 292 bp, Oryza sativa
tctggctattaccttcttcgtgctactaagtattggtttatcctatgcgacgatgggggtggtagctaaataccccgccggccgcggtggcggtggtggtgggggaagtggtggtggccaaacaggacgatatgtgccttattatggaccttactatgctggacggggtgggggccgaagccgctcccgtgatgcagtcgtggcggtgccgcggacggggcggaaggcggtattattgaccatatggaccctactatggacccttctaccgaccatactatggaacttatgc

SEQ ID NO: 10929 - DNA, 429 bp, Oryza sativa
  unsure (1)..(429): unsure at all n locations
agcntaactaagtataccattcagcgtgtttatttctcttgtggccttctctagaaagcatcagtctttctcctaatcttcacaggtagtccacccttcatcctcagcgtcaccgagagcacgtgctccggcacgccgccgccggcgacgtccttgaccacgtcgacctcgaactcctcaagcacgtttgcaactatggacttcatctgcacgtacgccatctccttcccgaggcacatcctcggccccgcgtggaacaccgtgaaccggaacgggctcgccggctggaacgcgccgtcgtcgccgagccaccgctccggcctgtactccaagcagtcctcgccccagatggcggcgagacgccccatggcgtacgcgctgtacgtcacggaccagaccgcgcggatgagcgtgccgtcgggagcgtgt

SEQ ID NO: 10930 - DNA, 409 bp, Oryza sativa
  unsure (1)..(409): unsure at all n locations
gaactataaaactaagcttgtatatttggcatatatttcaatataaaatcatgctgaatatcacacgttgtctgctgaaatgcatattatttctagtgattaactgagtggtaaccacatgagctaacaatttatatgcaaagcagtagcaaaccatccgtagacaatagcaagaacaatacctctgtataagccatatcatgaaaggagaagacacaataaagaattatggaggacatcaagggccaattgctcaataagctcttcttgcagtccaaactaccattttggtcagccttttcttctggatcaatcaaatggctctccaaagcttcaacagtttgagatctatntgcatcagctttatgcttgtgtaatgtctcctaaaatacatttcaagatactttac

SEQ ID NO: 10931 - DNA, 455 bp, Oryza sativa
gatcttaagtcacctgaggcatgcaaacttggatgggtcaacccgattcatacttatctgatcagaagaaggcattttaaaggttactgattgtgtgtcatggaccttgccgaatccatgttgtgccacagccagtttgtgcttatttttttgcctgaaactcataacaatgtcagatatacacaacttcactttctttcccaaaagaaagctccacagcatgaactacagctggaaaaaactcccatacctttagctacttaatacgcttaagatcttcatcagataagattttaccagcttcatcgcacgaagctccagccttcttggctcctgccaacttcttcagagctcgaatgctcgcatctgcagcattaagttgccctatataatcactcaactgtctcttatttgacttgcgactgttgtttttgactatcatcctggtcactgtc

SEQ ID NO: 10932 - DNA, 383 bp, Oryza sativa
  unsure (1)..(383): unsure at all n locations
gacctatgaaactcagctatgttgaaccagagtcaccgaggatgatagctctgtgtgangaaagngatggattgtcatccctctgcttaatggataaacggaaccgggaagttgtatttgtccgctttttcatgaaagacatctcaaggagagttcttcgatcccaggcttgataacggttacaaaccatttgtcaagaacagctgcacttatattctgacaggcgaacagttgaagtttaagcactttcaccccaatgccagaatggctcttaataatatggtcaattttactgacagcatagcttttcatgtcatccaaactgagttgtctcttaatcaaacctatcggtttgttatttaatataacgattggatagcgtc

SEQ ID NO: 10933 - DNA, 353 bp, Oryza sativa
  unsure (1)..(353): unsure at all n locations
gaaacatcttggaacactgtgacttataaactgtaattagggtgccattgaatcaataaggtattgcacatgctgcaaactttggctgtgtacatctgatctgggcgtaaagtacaagcttgcaggctgggttgttcttttatctaaaagacatgctgcaagcaagcattggcctatttacacttcataatctttcttgtatgcatcttacaggagcaccgtgtggattttgagccattcattgaggacgaggaaccgtttgagaaatattgtgactctatgcttgaggatgggacttgngcttgtcatatggagttgcaagcagcttctattctcaagagaaaaaacatatg

SEQ ID NO: 10934 - DNA, 415 bp, Oryza sativa
cagcttggtcagactcacttgcatggcagcttcttgagtaactgtcacaatgccgatatgtctcatggcagggtaacagacgcgcttaataatgcaaacccagcatttgtctgaagatttaaaattgatgtgtttcggacaccaggaatctcatggaactgcataagttggcagtcctagctgttcccctggcagaacagtctcgaattgcgccatctttgtgtgtccctggttgtaatcaaccaaaagccccacaggccaagttgctctgaacgaaatcctttgcgactcaaatctaaccttagctttctgtatttgcaagacgtcgtatagcccaagccgagtttaatactggtaatgttcagagactcgataaagaatgatacacacaagtggggtgtgttattatacgatg

SEQ ID NO: 10935 - DNA, 390 bp, Oryza sativa
tcagcgacaaatcaatccaggaacaaaccaagagtattctgttatacgaacaacatggggacgggtcccatctgatgtcaagtccgcgcggcaattaatcgtggactgcacgctttcactccacagcaccctgcacctgacgatggctggcctgatctctgagcctcagtggatcgatgctcccatcgcaagaatccaacatctctgtccgatccgcgggaatggaatatggaattccatgatccatgcctccccctcgcctttcggttccaggcaggccaactgcagctttcaatccgacggcctccaaaaatttattatcctgtcacttgcatcgcgcaggcgcagccaccatcctcatatctttacaagcgtctcttaaacaatatt

SEQ ID NO: 10936 - DNA, 373 bp, Oryza sativa
atctttatcttttctctgtagactatcttcgaacatatcacttggttcataactgggaatggctctcacgaacaagcagctcggattcactttctttacattcaatttacttcccattattatcttcagggtgttctcagttagcattcaacgtattcctttacacttttaaccttgatgtgttctttcccattggatcatctcccaaaacttggcattaccttggaaccggtgcttgcacttttcacttcgtgtagcatctgataccgaggtgaagatttcactccttgccttcatagaaacaattttacctacgtcatcttgcttacttaatgacaaggtggctgttgttgggcaattacaattaggggtc

SEQ ID NO: 10937 - DNA, 358 bp, Oryza sativa
tggatatcaggttcaagctaccagtgcttggacagctattaacaagatgtacaccacttgaataattgggtgtttaattaacaatgctggtaccccatcaaggatttataggcactactacaaaaaaggatatgtgtcggttgccaaccacatatgggtgccgaaattggcaacaggaacctttttgagttctctcaaatgtgccggtttaaggtcctaggaatgaaaaaaaaaagagaccggctcgatgcatgcatcgaataagtccccttcaccccaaccagatctgattacacttttaattacatttaatccaagaaaatgcaagaacactaataacacaagaacatcaacaaca

SEQ ID NO: 10938 - DNA, 431 bp, Oryza sativa
agcttcactactaaacttgacatttggtataatagaaccgcttcagtaattaaaatgtgatgcctataacatcttattgctttaccttgatcccaaaattggttaatttggactaatttgccaattcttaaagtgtgaagacaggttgggttgtactgcactaatttctttattgttgttccaagcataactgtcttgttgaaaagcataacatgtgaagtggcagacttgttgcagagacatgcatctgtgtatccctcaaaaaaagacatgcatctgtgtatgatgagaagtagagatggagcagggcttcttgtgtactgcaatcctgaatttacagcattcactgcaatcaccattgcttatcatctccctggttccatgccctctcttttttgtactgttaaattctgatgatcaaatggcaattg

SEQ ID NO: 10939 - DNA, 399 bp, Oryza sativa
  unsure (1)..(399): unsure at all n locations
tgggttattctggtttcttgtatctcatactgaggctattatttgtttcttattaccaagattctattntccatgtacacgcaaaattgtcatgcaattgcaatccttcctttcatcttaagcatttcttgttgcagattcatgaagatctatctagggtgaagcgcttcgatgctgaaggagctntggaatatgggattattgaccgtattattaagccttctcgcatcaagaaagagggatccactgctcaaaagaaggatctacgtaatctgggacttggctagtagatgctattgtatcagttatacgtgttagattgtattgttctcccctcattactcctgctttgaaatcctactgctttatttcatcaacaggagttcatgttgagatatg

SEQ ID NO: 10940 - DNA, 369 bp, Oryza sativa
atatgtgttctaggccattggaagactccttgctccccttatcacctgaggcatatgctgatcttcaataacctttggccaattggcatggttattctgttcaagaacaaaatgtgcattgcattgctccagatcaactatgtatcttccgggtatttaaccgatcgatgttagcttgagttgcacttgggccggctctcaattcatacagcttaactttttcttcattgatagataatctgttggcttggatggttgtctcgagatctcatctctcacgccgatcgggaatcctcctttgagcttgtttaagcctatcttggatggattttattaaatctatctcggatggatccgcaacttgttact

SEQ ID NO: 10941 - DNA, 346 bp, Oryza sativa
agtctgaattacatatatattttttttattttagaattatatataggtgttcttaaaatttaataattccacacttgggaaataatagatatatgattctatttgggtattgagtactccatccatttcacaatgtaagactttctaacattgcccacatacatatatatatattaatgaatctaaacacatacatatgtatagattaattaacatctaaataaatgtatgtgggcaatactagaaagtcttacattgcgaaacggagggagtatgaattatactatttgaattgataccctgcactttgccgtgagatatatggatgaatggatgttatacatta

SEQ ID NO: 10942 - DNA, 388 bp, Oryza sativa
gcttatcgaaattctcaactgcaatgttctcttctttgctaagagaatcacttcttgcatattcttcagccaaccaccgtctgattacaactctctttctcagaggacgattgcttgggaatataccaagatacagcacgcatctgagagcatagccggataaactgtcatagttgtcaagaagcaccttcctgagttctgaaaagctgggatggccatcctgctctttcaaatgagcaccgatgctgcggcacaagttcgcacacaactctcctgtgggctcacacgaactcttcagataatcagatacactgaccatagcaagaggaaggccatcccatttgcctaataatggtactgaaccagtcatcaactcaggtgatcttat

SEQ ID NO: 10943 - DNA, 407 bp, Oryza sativa
  unsure (1)..(407): unsure at all n locations
tactaagcttgcgatcatgaataaaataattggggattctgcttgtacgtaatatgtgatttggcagtctgaggtagatggtggaccactgatctcctctcgtggccctgggttcgtgcacaccaccttcgcaccgacttaccatgcatgccggcgtatgcggaggagcctaagtgccggctacggtgagcttacacgaagggcattggtgggttcccaaagggtggtggcatctccatccccacatgtcgccgccttgcttgctggccccggttgtcggtcacagcctccatgtcatcagccactgtgaccaggttgcaactccaccactctttcacctaacgtgacccactaaaaagctcagttngatggcgatgaaggtgctttggtgttgtagctgtcaatct

SEQ ID NO: 10944 - DNA, 434 bp, Oryza sativa
agctttcatcaagtccaagatcacccaaatcttatggcatgaaggcgctatgttcttttgaagtcagtgctatctccggaggccgaactaaattccaaaactcattgggcattaatatcttgtagatcctctattcatcggatgtattttttggcaatgatttatatttctcatgcttggttgtatgcatatacttgatggtcatatcatcctccccttcttgtctggaaaccgtcctcggtttcttgttgcaattgtcgtcataggagagatcacatgaagaaatagcaaacgagcaaacattgagtagcatcatttgttcctcataaatcctatgtacatcaataggaaaccaactcacttcatttaataaacatgtcttataatgatagagaaacttgaccatagaatctaatggtgcataacactctcct

SEQ ID NO: 10945 - DNA, 378 bp, Oryza sativa
aatctaacttctgattgctccccaactaaaacagtttttgacctaccgcgccccatgccacgaaaatgcctgaaaactgaaaacctgatgattgccccaaatgggcccactaaagctaccattttatcctaaattgccttccattcctatagctgttctctgacaatgaaccatggagtaagaatgtaccgtttcctttacaaataaactactagtatttgtattgagatgagaaacaatatacatgaagcacacggggtgaagggctgggtgtatttaaatgagatataatgtgcaatataattaattatatctttaggctgacttctaagctagatcattaacacatgattgattgaggattaaatatttcatact

SEQ ID NO: 10946 - DNA, 438 bp, Oryza sativa
  unsure (1)..(438): unsure at all n locations
agcttcttccgctgtcgatcttctacaatgcaaatgttgcatttgcgctggcaagcctaaaaggggttaacattcctatgtatattgcaattaaaaggctcactccccttgctgtactggtggctgggtgtttacggggaaaggggaaaccaccaacacaggtgagtgcattttttttagtcattttatttcttttctccactaggttttacagagttatggttttactttacacatgccaatgcctacccaagatgttacttttggattgtgaaagtcaatttagtggcattacaaggtgaattgtcctaataaagttaggtaggatatttcgatagaagtcccaattcaagattttggccttctaagatggcgtcatcatcaattcatactccccttccncgcacaaaaaaataaataaatcatactcccctagtt

SEQ ID NO: 10947 - DNA, 410 bp, Oryza sativa
  unsure (1)..(410): unsure at all n locations
tctgtatgcatggaatgaacatggattcatatactgtatgcgatatcaccttagnccaatacttcatctgattntgcaggatttgagaatcttgcatttccttgcaatcagtttggtgcacaagaacctgggtcaaacccgcagattaagcagtttgcttgtacaaggtttaaagctgaatttcctatttttgacaaggtatgttaactccattgtaagaagcgattggctcaatatttcctgccaattaatagtatatgaatgcatgatgcatttctgtgcttgtacgtgcaatggcaggttgatgtcaacgggcctaacacagcccctatttataaagttcttaagtcgagtgctggaagatttttgggtgatcttgtgaaatggaattttgagaagtttttgtggac

SEQ ID NO: 10948 - DNA, 414 bp, Oryza sativa
  unsure (1)..(414): unsure at all n locations
gattcatgattatacttcaatacatgctngttatattatagatgggttcatcttctttttattgcaacacatgacatgatatgctatatgtatgctcagctcttaaatattaatgaacataattcctatgcttgatgaaatcattgtcaaaagggggagaagcaatgagttttgaaagaaaaggtgaaattttaggggaagcacatgagcttttgagaagagcatgcttttggttcaattgggaatttctttcttttcaaaagtgaatgaggttttcatttggattttcgagcacgatgtgtacatttatacgaaatgtgctttttaccacttttgtttttatttttccaaacaccaaaacattttgatgggtttgccaatgtgttcatcaagggggagattgttaaatcaaag

SEQ ID NO: 10949 - DNA, 364 bp, Oryza sativa
ttgaaaattggtggctccttgaggaagactttttcactgttgccaaaaatagctggaacgattgtaatggttcttttgtcagcaaaaccaaggtcttaaaccaaaatctctccacctggagcaaaaagaagaaacctattcaggatcaaatcgtaagcactgaagaagatattaaacaaattcaagcttcccaagataggcacaatctagtggataaagaaaaggagttaattgccaaatatgaccttctcttggagaaactctctgaatttcacagacaaagggccaagaaagactggattaaagatggggacagaaatacttccttctttcagcaagctgccatcaaaagaagaaggaaaaa

SEQ ID NO: 10950 - DNA, 430 bp, Oryza sativa
agcttgtacagtttgggaaggggtttttttatagataagaagaatctacttcaaccgatatgcccttatgcacggccatacataacatataaatcacacgtggaaggggtgggcaattagctagagcagcaggtgctgtagcgaaactgattgcaaaagaaggtaaatcggccactttaagattaccatctggggaggtccgtttggtatcccaaaactgcttatcaacagtcggacaagtgggtaatgttggggtgaaccaaaaaagtttgggtagagccgggtctaagtgttggctaggtaaacgccccgtagtaagaggggtagttatgaaccctgtggaccacccccatgggggcggtgaagggaaagcccccattggtagaaaaaaacccacaaccccttcgggttatcctgcgcttggaagaaa

SEQ ID NO: 10951 - DNA, 280 bp, Oryza sativa
atcgtgctgttgctggatcatgttgttgatgttggcaaattgagcatcaacagtctgttgccactcttgcgtctgggctatgtgttctgtgagggtatattggatctctcccctctgcacatcaagggtatacattctcctggtgatttcaccctagtcccaacgagaggaacttgagcgccattcacttggagatgggagcataccacttgatctgggggggtgggtgtccccccattctatgtcatgaagcgcatgccaccgtgtctcactggcactt

SEQ ID NO: 10952 - DNA, 428 bp, Oryza sativa
  unsure (1)..(428): unsure at all n locations
cgatcggctaattcgttggacataaagccagaaaattctgaatctgaatctgaatctgaataccggacgatgcgaatgcatgcaggtcatcgacgagtacgacgagcagtcagaggtggcagaccggcttcgcatcaaggtaaccgatcaaataatcatatctgactggaacaatcgatcgatcgatcgagtgagttcttgctgtggtggatcgatctgatcattgcgcaaatggtttgtgagttgatccgttgagcatgtacgcaggtggtgccgctgttccatttctacaagaacggngtgctgctggaggcgttcgcgacgcgggacaaggagaggatcatcgccgccatccataagtacaccgctccatcgtcgccgcctgctgagtaagctagctaccatcaaatgttgttccatcaaatggg

SEQ ID NO: 10953 - DNA, 400 bp, Oryza sativa
tgactcggatgtgtgaccattttcagatcacttatatctgactaatctcggctaggattggcagaaagatgcacctagacaagacttttattactctagcagtgtattactgttaagaaataatagggcaacaaacgataaaaaacaatagatcaatcacagaagacacgagatttaatgtggaaaaccctctcaaagcaggagagaaaataccactggtgccagccagtaaaatatcttcactatatcgggatgaggttacaacgccgcacgacggcttacaaaaggtgtgtgtatagtggaaccctaaaaggtacacccccgggcgttcccaggtacacaacccaatgggtcagctttagcctccgctccactacgacagaagctggcctttattaag

SEQ ID NO: 10954 - DNA, 433 bp, Oryza sativa
agcttataaaagaggaaaggaaagttactttagccatacccgaactcttccgaaggcttctggagttttgactcctattctatttctattccaccagctaaatactactaaactaaacttgagagaaatgatagagctattgcttgaggtgtgtgtgtgaagtgagaaaagtagctctttttataagcaggtaatgacggttgtgacggttggaatgatcagtaataccctccaaccgccattggggatcaatcccagccgtccatccaaaccctgcatccatcggcgccacgggaggttcagccgaaccaccaggttcggccgaacttggggctggcccaatctagcccaatttcggctggtggcctcgtctattgctccactccacagacttgtgaattctggcccaattcatcgcgtcaattctgagttc

SEQ ID NO: 10955 - DNA, 325 bp, Oryza sativa
tctacacagctaatcacttacagaaatagtgggatcttctctagtctgcaagctgaagcttcttgtcttcccactaatctgggacctgcaaagctgttcaacatatggcaaacaagcatggaatataataaagggaccatacagatcaggttcaggtctccaactttcaactgcacagcatgaaacgcataagtcccacaatccaacccactgccaatttttatagtatatcagattcttctcccaggaaccatgccaatgtagagaatagatacttctggcggccactctatgtaaaaagtaaactaaagcacgccatatattc

SEQ ID NO: 10956 - DNA, 402 bp, Oryza sativa
tgattgtttacactctatgcttattttcatagtttgttctgcatcaaccctagtcatgcttagaatcatagaaactacatgttttttgattgctaatagggatagaatcggggttttggccgatcttatctgatatgactgtttagctctatttaaattctttaatcatgcttttcatgttatatctgcccattatacaagtgtatctcactatttaaatatatcaagcaagctcttgatatatttactcagattgatattcttgtataaagttggattactaaccgatacggtatctattttaattctaagtattgtaccaccggctatgatataaacagatataatctctatccataaaaatacatgttgattacatctacagccaatgaaacatgtttt

SEQ ID NO: 10957 - DNA, 425 bp, Oryza sativa
  unsure (1)..(425): unsure at all n locations
cagcttatgccattntcaatccaatcgtggatattatgcctgtcatacctgtacgtctttttctattagcctttgtttggcaagctgctgtaagttttcgatgaaatctttactactctgtctgccaaattgaatcatgtattcattctaaaaaaattcgaaaaatggataatagccgagaagtcttatattatgaaccttcgattctaaaattcaaattcttctacattgaatgtatagctgcagcaataaatatggatcagcctttctactccctgcatctacgttgagcaggtatctttaggtaaccgcacaatacctaacctaatttattgataagagtgcttattatagatcaattcttgcaatccttttcagaaattgatttatgcattttaggtgtcagaatatacacaacccatcct

SEQ ID NO: 10958 - DNA, 312 bp, Oryza sativa
attaaaacaaatacaggtttaactaagtatattaggcataacaaggcgttcgttcttgtagagtaaataattggaatttgattgagttatttttctaagggaaaaaggaaaaggaggattcaaaatccttttttcttcggactttcccaaacacaaaatacctccttgtattcgcactctcaaatgagagtggaagaaattcgactttcatataatatcttaatagaatttcatgtaatgatcaatgcattttttggattctatattattcgcatgtctagaatcctaccaagagaataccccccattttta

SEQ ID NO: 10959 - DNA, 424 bp, Oryza sativa
  unsure (1)..(424): unsure at all n locations
agctngcttcaatcctactaacactgtatcagtttaccttttatgatttgtatataggtacttcatagtaattgatgacatatggagtaaatcagcatggcaagttatccaatgtgcttttccatataacagcaatgcgagcaggataatgacaaccactcgcattcaagacggtgcacaatcttgctgctttacacatgaaaattatatttatgatattaaacctcttggtagtgacgactcaagaaaattatttttgaaaaggattttcggctatgaagataatcaccctacagaactcaaagaagtaactgatgaaatcctaagaaaatgtagtggtttaccgctggccataattaatatagctagcctattatcaaccaaaccagttaccaagcacgagtggaaatagtgtggaatctat

SEQ ID NO: 10960 - DNA, 352 bp, Oryza sativa
  unsure (1)..(352): unsure at all n locations
ctcagcttctcagaacaacaatggccgggggtggagagagaatttttactggctttaatttgctccctgaatgggcctggctggagcacggtgatcccgccaagacgcatattgaaccgagaaagaccatgtgagttgcagatgctttcaggaagtgacggggccaggataaaattatagtggaggctcctcagcattttatgcattccaacaatcttacataaaggctattttaacctcactgccatagagatatggagttaaattatagagggggtcttaataagagctcttatgatctattacgggtagggggggagntttctcaatactaaaccaagagaaatgaggg

SEQ ID NO: 10961 - DNA, 347 bp, Oryza sativa
agcttaggagactgcaaagcaatatgagcttttgttccttattcaatgcaaccatttgggccatctctgttactagcacctggcatgattcatagctcgaactacccagtcatcaacctccttcctgttctgctcatggaagcggtcgagaagatcatcagatgtcgccttaaaaacaacctccaaggacggcttcaatgagtgaaccttcatcctccaatgtggaagacgaactgacttgcgcactctacttcacataatatgtgaaccagagcaccatccacgtgctagacattgatatcggatacgcgtcaagctacagatacaacttcgaatgatgaaaacta

SEQ ID NO: 10962 - DNA, 303 bp, Oryza sativa
tacgcccggtggtcgacgcaccatctaagcttggatcgcacgatgcttctcatattcgccgtaaccagatgggctgctaagcattgatagccaaatcgctgccctaaatggtaccatacaaatgagcattgaccgtaaaaacttcataagaacatgatgttcctgacttttaactaagagtgaacactatgattatatcttgacttatcaaaatgacatgcctatatgctttaccactacgaagctgaattacgagacaaacctaactatatgttagattggcgacaataaatgataattttc

SEQ ID NO: 10963 - DNA, 400 bp, Oryza sativa
  unsure (1)..(400): unsure at all n locations
agcttgctctgcctaccagcaatcagaatttataatttgttcaaaatattcagaaaaacatctcaagccagacagcagagatgaaattgaacactgaatgcatccatattgtttcttacaggcaccaaaacaccattcatattaaatcaaaggtaaagttagacagtaaaacccaaattattagagcagaanaaagaaaacacgccattaaaaagatcattctttttatgaaatttggtaaattagccacatatacaaaatttatcaccagaagatcattctaatactggactcggaagtaatcatcgcgaagatactatcaacaggcacctttccatcaaggatattaaagggattggagcgaagggagagtacagtaaaacataattccaaaatctac

SEQ ID NO: 10964 - DNA, 387 bp, Oryza sativa
tgtgacttgatcgaagttcgtggcttgaacgatatgttcttattcatcaactctaaggcccacttcgcgatccgtccatttgcttcgcgattgtgaagtatatccccgagtggaaacgatgtgactaccgtgaccgggtgactttgaaagtagtgagataatttcctgacggtaattaaggcaccatatagtaactcttgaacctgaggatatcttgtcttggagtcggctaaaacctcgctaacgaaatagattggacggtagactttttgaacatggccttcctcttcacgctcgacaaccaggaccgcactcataacctgggaggtcgccgacacatataatagtagcggctcttgcggatgtggcgaggccaaaactggtgga

SEQ ID NO: 10965 - DNA, 434 bp, Oryza sativa
  unsure (1)..(434): unsure at all n locations
agctcgatatatttttttaaaagtacatctatatgtttaaaattaatattaaaccagcagtagtcttaatttcccactntgtttctttatcacctccccttattaattcattaagaaaagtacgcccatgtgattgcaattaatattaaaccagtcatatatgtaatttcctactgtgttttttaacactttatcaccaactttgcagtttttttcatagataacataaggaatatctttcaaatgtcatggtgaaattcatgtgaaaccggcaatatatataattttctactatgtgttttcaaatttcatggggaaactcatgttaaatcggcatatatatattgtgctactatgttgctctacacattatcatcattgttataaaaaaaaactagcattttatcatcgataacacaaagaatagttctttt

SEQ ID NO: 10966 - DNA, 407 bp, Oryza sativa
  unsure (1)..(407): unsure at all n locations
ctcaagcttgtgaatccattatattggggatcagatcagntactctgtctattttcacacaattattttgatcacagccagcaaggctataaatgattgacatgcctaatgcaaggaggagatcatcgtctgtcaatggctgctccttgggaatcgaccagtactccagtatcctctgccaaattctaggtatgtatctttggtcgttgatgtgtgttgatcgggttggtgtttccagcaggttattggtgtccccaatcggctctcgtctctgcccttggttaccagctatatcatgtcttttatcttggctatctgctatatcaacaaaatgatcttgatcatcatctgcatccaggagtgggtgtgctctttttggcttccatcagcatccagaagcgtagata

SEQ ID NO: 10967 - DNA, 391 bp, Oryza sativa
cttcgtgaagcatgtgaaaggatcgagggttctgtttatcgaatcgggggccatgctggcgttgaatccacacagaatcgaaaaacaccgtacacatgatctagcgatgtgctgcctgccacacgaaatctgatcactatctcggcttcttttgtgtgttcggtgaggaaacattttacgaaaaaaggtaaaaacttttgacatgatagatcagtatgagataactacatcattgtacaaacatgtgagttcaaattcaacctatatagtactatttacagatacattctttatttctttactagccgacataaattcgaactcgacgtttgtagatcacacattgattgatgaggctaatttgttttcaatctgtactgactctcaagcg

SEQ ID NO: 10968 - DNA, 405 bp, Oryza sativa
  unsure (1)..(405): unsure at all n locations
actcagcttatacattaaaacaggtgggaaataggattttcatacctggtggttggttgacataaacttcctcctatataaaaccatttagaaaagcatttttctcatccatttgatacaatttaaaaccttttgaagcagcaaaagtcaacaaaagtctaattgcctcaattctagcaacaggagcaaaagtttcatcaaaattcaaaccctccacctgngtaaaaccttgagcaacaagtctagctttatttctcacaatcaaaccatcctcattttgtttatttttgaaaacccacttggttccaataatattatgtccagaaggtggttcaactaaagtctatactttgtttctctcanaattttcaagttcttcatgcatggcattaatccacgattcat

SEQ ID NO: 10969 - DNA, 399 bp, Oryza sativa
agcttctcatacataaataaattgtttattgctgtctgcaaggatataaggccattcaatttcagggtgtccaaaacaaagctgaacataggaaagaaatagattcatgaatccttttaagagaacagccagaaccattaaagtgaaactaatatgctatttttcagtgtacagcagttgaaacagaacacttgcccaactaaaagaacagaacacttgcgaaaggtttcttactttaacatccgtcccaccagtaggcatgaactcctcgtaaatgtaagatccttcacgcctcactctcctgacatcaggatgaaattcactagatcgggtaccaacctacatttaatcagaaatataacaaaaagcttatttttgtattcagatacaagaaatata

SEQ ID NO: 10970 - DNA, 401 bp, Oryza sativa
  unsure (1)..(401): unsure at all n locations
gacctataaaactcagctatatggacagataattagcttgtttatatattcttttgaagagcttatattatactacatccgccccataatctaagggattttggtatacatttgcatagccaaaatatgccatctcatagcatgtaagatatgatgaaatgtgtaccttctcaatcaagtctaacacatcttgattatcaacaaactctatgtaactccagnttatctcctctctggngtattcttcttgttccattntgaacacatgctgcaggacaaacatctcacgttagacacaaaccagcaatctctatagcaaagccctctctcaagaacaaattcaagatgtacctggctaaaatggttgtgcagcttttcatttgtataattgatgcacaact

SEQ ID NO: 10971 - DNA, 424 bp, Oryza sativa
ttcactccataaccatgcaagcattgtctatggaacctagacccaccagctcgtataaactgcttacaagtagcaatactgactggtggccactaacacattacttatgatgcagcagtatttatgatttgtaagttagcatcacatacttcattactccaataacctagcatttcgacaaaataggtctctggggtaatactctattcagaactcagcactaattagacgtagaaaataaaaagcagcaacatatggtaactagaaaaaggattgacacatacttcaatattgagaagagcattcaaaccatcctctagtgagttcaatatagatgaatcctgtaaaagagatggaagtacaatcattgatttggaataagaaaaattgccatattttagaagaaaaatctcggcatgatcgc

SEQ ID NO: 10972 - DNA, 390 bp, Oryza sativa
  unsure (1)..(390): unsure at all n locations
tttanggtaggaaatatactttagtatcctacaataatttcacgatatacggagatatcatacatctaacagtatacgagaaggtatcatttgagatactaatgtttttcgatgacatgttacgttgttgtaatatactcctcatggttatagctgcctaaacatgattcaatatcttgtgtgtactccctccctccgtttcataaacatgattcaattttcgggatggagggtgcactcgcggtggacaggattaaaccctcacaggggacgtacatccacttttaggtacaggctggatgcgcttgctgtgcacacgcatgcatgccagtcacttcagcttgctggcacatagaaaacctgattagtagtttcaagatccactggcac

SEQ ID NO: 10973 - DNA, 430 bp, Oryza sativa
agcttgctggctggccatcatcggcgactgttttatggtgattaaatccggccaagctgaattgaaggggaaaatcataggaaaaatgatgagcgatgagtggggaatcgattcttgtaatccattggaggaggaaacgcatggatagacagattcgacatggcgacggagctatggttcggcctatcgaaggaaaaacacggtgacgaaagaaaaaaaaagaaaaaccggaaaccctttaccgcgtgtaagaaaaaaaccataatgcaaaaaacccgggaggaagaaaacggcaacaaaataaactggacggaccattaaaaaactgtttgaaaaaaaccgcgtaaagaaaacggcgacaaaaaaaatcctagtaggtatatatacattaaaactgactcacacacggatgagtaggtatatatgcatt

SEQ ID NO: 10974 - DNA, 377 bp, Oryza sativa
tttgcgatgggtggggaggagaaaaatgggaggggttttgtggtttggaaagaaaaaattaacgggaaatgtgattataccctgggggctaatgtgggaatctggttggcccgtttcgtcaactggcgtggtggaattctggaatggaataaccgaatattagtagcacatatagtccaattgttgtggcggtttgaacttggaaaaagaaaagagaatagaattctctccaattcggctagctaatagctgatgtgctattttggctgctaatggctgattagcagcttgtcttatactagtacaaggcactcgatcagcatacgattagttagatgttaactagctattataatttttaaaataaatttatttaa

SEQ ID NO: 10975 - DNA, 434 bp, Oryza sativa
  unsure (1)..(434): unsure at all n locations
agctngcaattttcacccgacgttcgttctctattcaagcatgaatgaactgtatggtcggttcaagttgcgttatcggcccgccacttgaagtaactctgactgtgtcaatccattgtacgaattgacatttccttacatcctcctatgtacatccattttgggatagttgagttaatgatagtactgaggagtgatgaaaagaatagttgtaattaccacgaaatcatcgtcgacaatgtttggacacacgaaacacctttgtcctcgagttcggtgccttacggaccttatgacctgacagcggtcaccacaacgacactccggacgctcacgccacgtggggagtcctaggggatttacgtgccattctaaagcctcagcagcaattcgacgttcatgctcatccttccgccttaagtagtccgatcttg

SEQ ID NO: 10976 - DNA, 298 bp, Oryza sativa
tggaatgtatctggccggggctgacgtgccatcttattagtcctcacgccggctccgactaaggacgagtgcctggaggctctcatcattccgacgggaccgggcgaggcgtgtgtcatgccgcctgttgccccttaacccgcgatctgaccggtctgtgaccagtcacacactgcgacctgtcgcggaccggataagcctgcgctatgctgcattaaatgcagcgtgaggcgctcgttcaacccgcaataaacgcggttaggtgagcgccgctgtgctcacctaacccacacacgtg

SEQ ID NO: 10977 - DNA, 427 bp, Oryza sativa
  unsure (1)..(427): unsure at all n locations
gctggcgttcaaaccttcgtccatgtgtatgttacttggattgatgactctatgcaggagatgcaggtatggcactcatgatagaggcaaactagagctgaagtaatgtctatcactatctgaaaccttccatgcatagacaatttgtcaataacacatttcttagttatgtatcaccttttctttntttacttatttaccagctaaaagttttaacttagtacaacagctagcacaccgcagcttttaattagttcggtttggtttattttacggattaagctagatgtgtttttgtgcttaatgtactctagtatgtttctttttctggattggctatttgtcaattgactggtttttttgatatatattgttcagtgaacaaaaactgcacaatgaataggttagacttgcaaggtaagatatc

SEQ ID NO: 10978 - DNA, 331 bp, Oryza sativa
  unsure (1)..(331): unsure at all n locations
acactatanaaaacntcaacttgatcgntcttgctgagatgtaatccaacaacttggtttacttcaccttcattttatacatgcgatggatgacgtanactatcacccttggttacgtcaaggggagctgggatgtcctcatcaatttgctaagagtagtatgtgggatgaattgtcccaggaatgcaagccagcaaaaaacaatgaaaaaaaagaaaatcgggactaagatgccacgtggagctattatctttagttcccgttggtaacaccaactgggacttaaaaacacacatatttagtcctggtttcggtgtctcgggttgcaacc

SEQ ID NO: 10979 - DNA, 429 bp, Oryza sativa
  unsure (1)..(429): unsure at all n locations
agcttaaagcagatacttattttacacatgttgtataccgagttcgattcatctttctttgtctttgtatagatttgtttatttttagtacatatctaacacctgtgttgtaatgataccatgcgtaacctaaaacggctgttgttttacttcatttgtttttctttgatgtttttgaactaaccaacgtcaaataaaagaaatggagggaatacttattttactgggagcacttgtggtttccttgacatataatagctaatgcatatgtttatagaagaattggtatgttttgatggcatgatgccctggcacattttttctgttttcaaatatgtttaaacattctctagcaattattactcctgatctgaagtaactttgtgcattcattnttcgctgctagcatcagtngtcctacacaagatg

SEQ ID NO: 10980 - DNA, 411 bp, Oryza sativa
tcctcatatccattgccaaaatttgctactgccttgagccatcaccggcttgattacctcccagctccagttctgttcaagatcttttggtagatggagcatctttcaaaatctcttaactcatttagattttctttcagatttgagaacggtgagagtatgaaaatatagaattcagaacataatttagaactcgaaagctaaaaacacagctattttagattttcactagttaattcctatcaactgtttcttagaattctaaactctattccatattccctccatcataaaataaaccaacatcgtgcgggatatgacacattcctagtcaagattcataatactaggatgtgtcatatccggtacgagattgatttattttatgatgaatgaaggagtggagttgaa

SEQ ID NO: 10981 - DNA, 396 bp, Oryza sativa
tgcggcatgcagcttaggagagtttggtagcagttatcttgtgtgccacgggtagttagttgattaattatctgcatgtttccggtttttttctgaataaacgcatgagctcacgtgttgtgtgatagccatcgtgtggagtctgttatgagggtatccgagtttagctcgttgcccgcgtcttgtgctgggagctcggatcacgtcgtgtggttgtggggatggacgcaactagagcatggcgtgagaagtggtcttggtggttagttgtttccgttgtattcgttcctttatatatggaagtaaacagaaaagcagctgagttaagcgctgcacaaaaattgctctgtttcctctgttctgcgaatatgcaagtttagccacagtacgcgtgcg

SEQ ID NO: 10982 - DNA, 387 bp, Oryza sativa
  unsure (1)..(387): unsure at all n locations
taagttaatctgagtatatagtatataatgcccagtgttcttgactcatacatgtcttgccttatgtgtcaattctatgttacacttaaacttttatatcaattctatatatgtactgctatccaccaatcattgagacaagaatattattatatactaaaataccattgaacatcatacaaacgctgctaagccgtcacatgacctaatatttttaaacattagattagatgtattaaagtaatccctccatattaatctcccgtacacgtaccatggaaaaataagtactattcatccaaaaaaaaccttgaaaaacataggtacgcacgtatgattaaaaaatattaatctttccatcctaatccttanatttaaaactaaaac

SEQ ID NO: 10983 - DNA, 264 bp, Oryza sativa
aaaaggattttaaagtattgggcacttgatcacgcgcactttggcctaagcaaaaagtgcctaagtccctaaaagaacgggacaagccacacctggaaatatgggctgcagacatattaggcctaggccaaaaaatatgccttcgacaccctttaaaggatgacgcatgttacatgcttccgagtataaatctttcgggtaatatagaccaagtgtagctcatatgaatagcttctgatctgaatgatattccttatgggatac

SEQ ID NO: 10984 - DNA, 298 bp, Oryza sativa
acactgctataccgatttggatccacaatccactctatatatccaaagaaagctgagctgtacctgcatccaaggtcgagacgtacgtcgagggacgccgcattctgcaccgagaaatgagcatatatcagacgggatgaccggactccggtggaggatagtagtagcatgccatgcactcaagcccgagagggacccactcccgattgcgggcacccgggcgttccacggccggtgctttcgccgatcgcaacgctccaactatcaagtttggacatgcgtgtgactgactccaaca

SEQ ID NO: 10985 - DNA, 329 bp, Oryza sativa
  unsure (1)..(329): unsure at all n locations
nggactaattcgcgagacgaatctttcgagtctaattacgccatgattttgacaatatgatgctacaataaacttttgataattatggataaataggcctaanaaaattcaatttcgcggataacttctcattaatgaaataagtttttttataagtcatatttaatactctaaaataacggcccaatatcccatgtgacattggcctaacaggtttaaccccgtctaaacacccccttagtccacgagagtgaagcacaagaactccagtgctttaacactgtgctttcctgtgccctttcctctctgtatcaagacagtccatgtgc

SEQ ID NO: 10986 - DNA, 410 bp, Oryza sativa
agcatgctagcttacattgtgaaacataaacaatactctcattattgtccctctggtaacacatctacgtggagctaagtgtcctactattaatttttctggcgtcacttcgtgtatttctgcgacgctgactcttgaagtataaatctcacaactgcgggaggtatagaactatacataggtcatgataaaatgaactaccttttctacagttgtttaaaatagcgggagttgaatgcggaatcctacactgatccgagagcatgtttgcagaactaaacaacctttaggccaaatatttgcttttataactatatagcgtctaaactatctgagatgcgtgatgaaccaaacacaagctatatgttgcgactatagtctcctccaagcataatcctgagatcgattct

SEQ ID NO: 10987 - DNA, 465 bp, Oryza sativa
  unsure (1)..(465): unsure at all n locations
ctacggacactctagcattcgaaagatctagatccttattcagaaagaatcaaggtctttatgcaatattccgtgatatcatacataactgtntgactgaagaggaatttgacgttctttggcaggatatgattcaagaattcaatctgcaagagataaattntctagcacacatgtggcatatcaganaaaggtttattccagtatatttcanaacagatttctgtcctttcattcaatcaacagcattaagtgaaggaactaactcgagattcaagaaaaatgttggcccccaatatagcatcagaagtttcttgacagaatatgaaagggttatggacactattcaaaatttagaatagcatgacgatcatgaatcaagaacanaaaggccgactagttnttggtcaaactactccattgagtaccaagcagtgagatatataacaacaaaatattcaaaag

SEQ ID NO: 10988 - DNA, 402 bp, Oryza sativa
tttgttaataatagatatctgatgtatatagaatggtttactgcagacaagtttgctataagttcactgctttgtccatggatatatatgatcttggacttggagcacacattatgtgccttactttatgaaacttgcttgtgctagtacttatatttgccatcataataaaatgtgacagtaacctactttatctcaggctttcgatgaggctatctcagagctggacactctgagtgaggaatcctacagcgacagcactttgatcatgcagcttctgcgtgataacctgacgctgtggacttccgatatctcagtattatcttcgccgctagcatatatatttgcacttgcatcatattgtctatggaatcatcttaaatgcggtaattccatgtgtgc

SEQ ID NO: 10989 - DNA, 402 bp, Oryza sativa
  unsure (1)..(402): unsure at all n locations
atcttaagtnacctgcngcatgcaagctngaagaagactgtttgaacttacgcttgtggcgatattcttgacagttttacccatgggtaaactctaaaactatagaaagttccagtagaaagagaaagcggtctaagaaccatataaaactggagcacgtgaggctctctgatagtgaccaacaatgtcttatatatgcgcgaggtggagggagcacgcgcatatgagggggcacaaaaaacgaaaaggcacgactcaaatgccaaaatgagtaaagggattagctcccgtctatacccctatttgtccgtgaccttgggtcacgacaacaataattagaaaataatatttaattaatcactactaatgatactaatattaatcatgtaagtccctggtcgg

SEQ ID NO: 10990 - DNA, 446 bp, Oryza sativa
  unsure (1)..(446): unsure at all n locations
cacggacctatgaaactaagctattgaacatgaatgacgtcccagtgtcatttaacatgaatgagttgacagcattgctntactagcatttttttatttggtggaataagatatatttcaatattgaaatgcaaatgctaacacattagatattccaatgaaaaataaaaaactataaccatagaaatcgtctcacctgagccaacctctcgtcacgcctggcaatcttcctctcacgactggccttgctcttggcacgcttagcctcaaactggtcagagagtgtcttctctcttgccttctcagccttagacttgtggatactttccatgagaacacgcttgttcttgaacatgttacccttgaccttcatgtacatgtcatgatacatgtgcttgtcaatcttcttggcctcacgatacttgcgcagcaaacgcctgagcaca

SEQ ID NO: 10991 - DNA, 434 bp, Oryza sativa
  unsure (1)..(434): unsure at all n locations
taaccctangttggataccaatgatctatggttctttctaaccacaaaaaaatcatacccggaggagttgggtattacgcggcataaccncccctacctgtataaactccttttgtctcatcgtcttgggggggcctgatcccctcaagaagacttggtttcgctctcgaaacctcaaatttcacccgctgcccccgaccgaactaaaaaaaaagggggcctcacggtttcctggtagaggagttaaccctccgacacttatagtagagacacatttctaggaaatactaacataacaataggtgtggcaaactatggcatacacaactttcaatcaanaagcaagaacgttatagactntaagtacacaaatgatctaaaccacaactgtgtatcctagcacaatacaccagatgtatataataagtagtgga

SEQ ID NO: 10992 - DNA, 434 bp, Oryza sativa
  unsure (1)..(434): unsure at all n locations
tgcaccgagttngatatctnttatcaccatcataagttgccacaattcatagaaaggacggatattntgagttacatttggctggtatcaaagtataggtatatttgttaacaaaaaacaatatatgcatccttgttatcaaattaagttgtgtcacagaattattgcatgataaatcgcttctatgaaaccgtactggcatgtagaccttggctgatatgaacatctangtatggggcctgtcaatggctaccaaggactgnggttttgtctttgtttttctaaaatgtgacttccaagaatttatatctatatacaggtggnggatctttgcacctttctaggagagattactaatngcttgataccaagatgtangtcaatggaaagtacaactccagctagtatgtgagcacgatattctatccccagtg

SEQ ID NO: 10993 - DNA, 327 bp, Oryza sativa
  unsure (1)..(327): unsure at all n locations
attctccagcctccaccgccttccncatcgagccgtgcgggcttctccagcgtagatcaaggtgggcggntagggcaccatcgacagcccaacaagctcccttcacctatccncaacctccatccctcaccaagaaaatctgcattcaccacctccactcccctgctggcacccatctcccttcaccactcgatggcgacagcgagatccacaagacggtgaccacgagctgtggatgggctgagggtttgagaaggccaccattgggctactgcggcggacgggtcgaggccaccgccaccttctcgagctcatactcatcgtcca

SEQ ID NO: 10994 - DNA, 453 bp, Oryza sativa
agcttcataatttcttcacaaaagaggggaggtcatgtccaaacttctagtgaatttatgttggtgattatatacaaatcggaggtgcctaaaaggttagcaacttcatcctccaatgttttttttgtcatattacatttggagctatgttttgcacacttttttgtgtccaaaatttatttgtaagttgatgagagagacaaattgtgtggggaagaaagaatatatagaaatttattttatttgctaaagaaggttttataaaatacttgagaatgaaaatatagtgaaagttaatcttaaataatagaaaacacactaacatgaaaattataagacgtacaacacattaatattagtttaaaactttagaaatagtaaataagaattatttggcggaatattctataacttttgtatgaataatgatatgtcattattgtatgactgttg

SEQ ID NO: 10995 - DNA, 399 bp, Oryza sativa
tcactgttcttgtgtcagctagctcgcttcaatcttgatcctttgttatacacagcaataaccaacatacaacgtttatatagaaaaattgatgccagatttgtcttgttaaaaaccgatcttttgctgcccaacgaaccctaccacgcaaaaccatattgtgacgatctcaataagtagcccaaactcaagcaaatcctcatccgcattctatccgtctggaaaaccaatcaatcaacacttgtcggccctctcgagctcccttccgtaggtggccaaccctaattaagaagaagggcgaccacctaccgccgccatgccatccctctaccattgcagccatctggtcactccgtcgtgcccactccaatctattgccacttcatctgttcctgatgc

SEQ ID NO: 10996 - DNA, 451 bp, Oryza sativa
gtcacctgcggcatgcagctttcctattggagaggacccttgtggctgtgaacacttctcttgcaggtatcttgaatacgttggagagaatgagccaagatggtcatgatggatcggctatgcgcaaccacaatggccatgatgcttatagcagcatcgcagcaagggaagaactggagtacgctgctgacactgagcatgatgaggaggtacttggtcgtccacaaagacaacagcgccggcagcgccatggcatgggcgctccaccacggcgggaggtacgtgataatgatgattctttatgcaagatcaagtttaccattccttgctttgatggaaaatatgaccctgatgcatatcttacttgggagttagccattgatcagaaatttgcttgccatgattttcctgagaataaacgtgttagggctgctactagtgagttcactga

SEQ ID NO: 10997 - DNA, 443 bp, Oryza sativa
  unsure (1)..(443): unsure at all n locations
ngcttcttgctatgacccatggtggngatcaaatccctggttgcagtaaaatgctagccagtcagcttgctgttgttgcatcatggtattgaagcttgcgatctgtgcatcaacagactgctgccactctcgtgactgtaccacatgatcctccaaggtgtgctggatgttccccgcttgcagttcaagtgcatcgatcctccgggtgagttctcctagatcccctccaaaggagactgagcgacacatccgagaggatggaggtagaccacttgaactggaggagcatgagtatgcccagtgcagctcctatggcacatgccactggctattgctggcactctgctaagatgaacctncggtgtcatattgcgagaattgggtccaacagggggcattcgtgggtcggtcccaactgtccccgtacatctgcactggtggta

SEQ ID NO: 10998 - DNA, 347 bp, Oryza sativa
  unsure (1)..(347): unsure at all n locations
tcaatggattaataattcactaatcacccagattaactatattaatgtacacgtacaacangtacagctacaatcacctgcactgctgctgatcgctcgctcgctcgtgcatcgggatgcacgctaattacaaaacttcccgatgattagcggcggcgattagcgatcagcaagggagcaaacagaagcaacaagttccggattaagggactaatggcagattaattatctggagctagtaggagcaggcgaccctgagcatggagcggccgcggagcatgccgcggtacagcgcctcccgggtcgccggcatcgccgtcgccgccgtcgccgccgcgttcctgcac

SEQ ID NO: 10999 - DNA, 447 bp, Oryza sativa
catgcaagcttaattaatcatatggacagctgtatcgtgtgcctgtcatagcaatatgcacggacaggagtcgattggcacgggacaaagaaaatctgactaatgaaaatgtgtcgacacaattctagcgattccgtgaataaatcccttcgaaagcccacacgttgtttcagtggagcgatgcccagtctaaatcgagcatgtgttgtattaatttttacacttgattcccgacattgcattagtttatctacaggaaattcccaaccccgtggactacaactaattcaggatatgaccatatcactcatgcgtacagaataaacaagataactagatgacattatcccattgttacagggtaaattgatccacatataaatttgattctatatactggtgtagcttcctaactctctagtaatcgattttgctacccatccctac

SEQ ID NO: 11000 - DNA, 417 bp, Oryza sativa
  unsure (1)..(417): unsure at all n locations
ntntcttgaanacccatttgcatcctacaggctttggacccatatagacgctcaacgacttcccaagtaccattagacataattgagtctatctcactacgtactgcttccttccagtagtcagcgtcaggagatgaatattgtcacgtcctggtaaattcatcccgaaataaaaaaaacattctctataaggaataatagaattaattaaaattcgaaaagaaattggcaaacattaaaatgcgcacaagaaanattcgaatgtggccggagaatatttgttaaattctccttggtctaaaatgagctctcannatttacttgaattttcagagcaccgaanataattattaagcaacanacacaattatcaccagttattttaaattgtactgtaattatttacttagtcaattt

SEQ ID NO: 11001 - DNA, 418 bp, Oryza sativa
  unsure (1)..(418): unsure at all n locations
tgcggcatgcnagcttatctattacgctctatgaatggattattcataacatcaccctccgctcgttgtcattttccctgactggcggacctccctatactgttgggtggtcacaaccgctgttgtgggcgtgatacacctcaccaaccggacgccttggtcaccgccgactggttatctacgttatacggtcacgtggtcacaacgcccgatgttgggcatctacaaaattcaccgaccggcttgccttctccgtcgccaactagggtctacgcttgcacggatggcctactatgccgctgttgttgggcgtctacaccttctccaaccggacggcttgtcctgcgccgactggtgtttacgatgcacgactgacctattattgctgcggtgttggacgtctacaatttcaccgacc

SEQ ID NO: 11002 - DNA, 459 bp, Oryza sativa
  unsure (1)..(459): unsure at all n locations
ngatcatgtggacgccttcatggttgtagagcatcatacactcctggtcattcgagaccttgacagcaacttcactgtcaccgactttaatgccagccacttacccagcaccgtaatgttcctcttctagggagactccttcagtcatgttctccacactagcgactgtcacttgcccctcttccacctcctcactgactacgtattcctcaaccgcaccttcgtcgccacctactctctccacttccccaccaagcaaggagaaaggaccggttgcagcaaagagaagaggaagggtccggtcgccaccgttgagcatctatctgctgaccgccacccttctcccgtcagtcaccgctcactgacatcgagcttctncgcactgatcgccctggaggcatagattgacatatgaagagagggaagatatgtggaagaagattgggccgctgacatgtg

SEQ ID NO: 11003 - DNA, 459 bp, Oryza sativa
ggatcatgtggacgccttcatggatgtagagcaacatacactcctggtcattcgagaccttgacagcaacttcactgtcaccgcctttaaagccagccacttccccagcaccgtaatgttcctcttctagggagactccttcggtcatgtcctccacactagcgactgtcacttgcccctcttccacctcctcactgactacgtcttcctcaaccgcaccttcgtcgccacctactctctccacttccccaccaagcaaggggaaaggaccggtagcagcaaagagaagaggaagggtccggtcgccaccgttgagcatctatctgctgaccgccacccttctcccgtcagtcaccgctcacttgcatcgagcttcttcgcactgatcgccctggaggcatagaatgacatacgaagagagggaagatatgtggaagaagattgtgccgctgacatgtg

SEQ ID NO: 11004 - DNA, 360 bp, Oryza sativa
  unsure (1)..(360): unsure at all n locations
ggatgggagaggatgggggatcggtgcggttgttgcgcggaagggtttttgcggagtttggaagatggattggagcatatcgatgaaccctagctttgccggcgcatctttgcactgtagcgggaaatggggaaagtggcaagagtctcggcggtgaagacgaagagacgtnttatttctctgtggtggtattagggtatcgggagtactaatgggcttgtgcctataatagtacttcagcccaattctattatcaacgtggcccatcgtgatcttgtcccgatcgagataaatacattttcccgaacgctagtgtattaatgcccgtaccaggaaaagcctgggtacaccacacagaca

SEQ ID NO: 11005 - DNA, 388 bp, Oryza sativa
  unsure (1)..(388): unsure at all n locations
gcatgcagcttgcccgcggtacgccaacacncacttatttttgttaactatatgcgggcggaggggagactttcaaaagtctccgctagatccgagagtaacgtctcttggttgcgcgtcttttcaaccaagtcattcgacataagcgctaacattacgtcctatgtgcttacccaaagaaagtaaaagtagtacgtttgacatgaaagacctgcattttttaacccgaagggcattcgtcgataacaataagttcctatggaggtaatgaatgcagattattcctcatcctccctagccatgcgaatctgatggtaaccagagtatgcatctataaaacacataatgtcgcacgccgcggtggagtcgaccatctgatctatgcgag

SEQ ID NO: 11006 - DNA, 493 bp, Oryza sativa
  unsure (1)..(493): unsure at all n locations
cttgcttgcatgcggngcacagctnttactggggnactattaactgttgatgctagngntacggggttacctagacatggacatgtatccgaatccgactcgggtttagttgtccgacttggctggagcaagtggagtgggggtggtgttaggatactggtgattgctacagtcctaatatactccctatggaccatgctaacatgacanatataacctctcgactgttgggatcaaatggcgtgaattgaccaaattggatgattgggtttaagtcctcatgtgagggtggtctccacaaatagatttgtggggttttgtttatggtcttttaataaatattgggaggacttgtttaaggctatttgcccaccctttcaaattgaacagcgcagattaacccgactgggctattattagtgagaatgtgagatcctcacatcacgacagtctccgcagatagatctgtgagaatttgtagatatatttatta

SEQ ID NO: 11007 - DNA, 417 bp, Oryza sativa
  unsure (1)..(417): unsure at all n locations
ttcatcctttctcttcactgtacatgctgtccctgcatgcatggcttggcgatactatcttgctatcattgctcgccggactccattcccgttccattccacggtatggagtgccatgggtgtgaactcaatagctagttggcgtgagcatggcattgtccggacaagcatgcatgagagtagttaaagaaattgaatcaactccgattgttaacttgatagcttccctgctgtgaggccaaaaaatctaccatgttgntcgcttctggaacggaatcattcaggaaactggcagcccctccgtgtgcgtgaggcactaatggatttcgcggactaataaccagcggaatgatcgcgcgctacctctatcatatcgatcgtctctcatgacgaccagcaaagaaacgacatgatacg

SEQ ID NO: 11008 - DNA, 468 bp, Oryza sativa
  unsure (1)..(468): unsure at all n locations
ctcagcttctcctccatgcttagcctatgcggtgaataanacatttcgttcaatctgtggagtctatctggtcatagtnttatttatgattgatttcatgggtgtgttgcccctatgttagcacttattctcttatgtgcataagttgctttgtgcattgcaaattggctgttcattttaagtaatttgtcgatgaataatgtaatgcatcctccaaggtgtcgctcctaactgtgttgacatacaggcttcctgatccagctgcaagaaaatttctctgtttcgaggattcaatangcttgcagacggagcaccagaagccagattctactagcactggtgcaaaacagaacagctcaagtgatgataactcaagctcaacagatggcccacccgtcctaactattatggctggtatcattgtgttccttctaatcttgtgggttatcggatcgctcttcacctgga

SEQ ID NO: 11009 - DNA, 494 bp, Oryza sativa
  unsure (1)..(494): unsure at all n locations
ntntgngctcattntcccacatatcanaatgggcctttntatgaagtctaatgggccttgaaagcacctccagtgtactaaaacctctagactccatcgatcggccacggaataagttcacttgacgtccctcaatggtaataacatttaataaatgtgtatcccttaactatataaaaccggaaaaaaaaaatcctgagaaagtatagatgtttcgctaacatgtcctcctagtcgcaaaacataaagaaaaaaagtggtgttaacaatcctaggccttgtttagttcctaaaacaaaaacttttcattcatcacatcgaatgttttgacacaagcatgcagtattaaatgtggatgaaaaaaccaattacacagtttatgtattaaatatgagacaaatcttttaagcataattgcgccatgatttgacaatatggtggtacaataaacattactaataacggagtaattaggtctaataaattcggctcga

SEQ ID NO: 11010 - DNA, 218 bp, Oryza sativa
ctgctctggaggacttattacacttggaggaacccagccagcaagtgaatgagtggatgcatctattgcgggagctttcttaccacattgaggactgcatggatgacttcggcgacaccttggtcaggatgatgctcatcatgggcttactatcaagattattgcttggatcaagacgatgaaagtatccatcatacatgctggcaactaggaagctg

SEQ ID NO: 11011 - DNA, 441 bp, Oryza sativa
agcttgataattggacaagattatatagattttttgaattggaccttgaaaagaattgccttgaaaccgcctacagattgatagatgtaattagtcattcaaatcatcatttaattattgatacattaaactagtagtgataaaagaacagatcaattctttgcttaaaaaaggaaaaccatctcatgaagctaaaatacaacttctttcatggtgaaaacataaatattgtacaagatattcaaagctgaataatgttgttcaaaattagaaaccatctattcctgaatagtgacagaagagagatgcattatttagcaatgctcaaccaatagagacccctataaggtgagtcagcgcaatcaagtaaaaagatacactagaaacaaaataagaacaatctctctttcacgaatcacactaagccaagtagcatttaac

SEQ ID NO: 11012 - DNA, 479 bp, Oryza sativa
  unsure (1)..(479): unsure at all n locations
tgaagttatcgngaaatcaatatatggcattactatgcatgtttntatttaattctgcaacaatactaggaggtttcgctgtacgtctgtttattataactatngaggtcaaatgtacctggctttgatgtgctgtttaggcgtacccttttgctctttgcttgcacatgttttcacactttcttctatggttttgctctttgtttgcatgcattactgctaatctcatttctttgctcatttgcatttattcctatctttggcgatctctcacaggtattcagatgctgcagcaacttttctaagacttggttcagctgctgataagtgtaatgccatcaacagccagtgcaaggtaatatttanattgtttatactgagaatgtgcctgcttaatttcattaggggttgtacttgatgaccanagctagctactagctagaaatactatgcaatgcaatctgagaatttncttttac

SEQ ID NO: 11013 - DNA, 306 bp, Oryza sativa
ttggggctatcacttgggcttattactcttggagatcttctcctacatggataggtgtcgcccgcgagcttctaaaaacatgtggatgttcccggaaagtttgtgaaggctttcctcacctccacaaggaaacgaggtaagtgattaaggattcttgtgcttgagttttagaaggtctcctagttagagcaacttgcacttgtggtcttttctaaaaggatttgtgagtaggatcttggtgatcactcacattctacaaaatgacctacgagtgttgaattgaaagccttggacttttctgggttc

SEQ ID NO: 11014 - DNA, 397 bp, Oryza sativa
  unsure (1)..(397): unsure at all n locations
tgtgaccagngcaatgtcaaaggaggatgaggtttagctcatctgggatgtcgatgatgatgatgaggatgacgacaatggtgatcacaaggaaggtgccaacaccgtagtgaataagatagaagagcaaattgaggagcctgttagccacaaaacagaggatgataaacaaggagcggatacacctgatgtttcagaggacaagaagactactctggcagctgagaaggatggcaatggcgaatccaaggatgaagtagcagcaccaaagtctagcaatgacatggtgcgagaagagaaaatcgactcgtctaaggagagtgaattctcagcggcatctcctccatctgcacaggaggaagatcttatctgggaggagatcgaagatgttggtgat

SEQ ID NO: 11015 - DNA, 446 bp, Oryza sativa
cagctttatattattatcaagaaaactatgtttatttgtaaatttcataaccaattgaaaacaactcattttagagtaattcaaattactgtgtactcttcaaatcatgaactttactgttattgcatataaacttgcactcacagtacaatttttgtctctaaaattcatctaagaaaaatcacatataaaacatgcacaggattataaatgcatacaaaattcattttaactcattttagagcaaacactagttctacatatacaccaaaatgttctctaaaaacaaagtataataaaacatatacacactttacattatatgcctctaatactaatatctgtaaaataacttggtctgcataagctgaactttagaagttaatataacattcatcttacatcctctttgagtaaacttaagttctgtacaatcataaagatgt

SEQ ID NO: 11016 - DNA, 419 bp, Oryza sativa
  unsure (1)..(419): unsure at all n locations
tcaggaagagatgggttctaagttgaatntcagtatcgcttatcatccgcagacagacggacaatttggaagggtaaatcagattttggaagacatgttgagagcttgtgcttagacttcggtggaagttgggataagaatctgccttacgcggaattctcatacaacaacagttatcaagctagtcttcaaatggctccttatgaagcattgtatggacggaagtgccatactccgcttttgtgggatcaaacgggagaatgtcaggtttttgggactgatattctgagggaagcagaagagaaggtaaagatcattcaagagagaatgcatatagcccagtctcgtcataagagctatgctgacaatcaccgcagggattttaagtttgaggaacgagatcatgtgtaccttcgtgt

SEQ ID NO: 11017 - DNA, 436 bp, Oryza sativa
  unsure (1)..(436): unsure at all n locations
agcttgacatttgngacatcatcctgcattattattgccacaacatatacgagattagcagcatttatgataaatgaaagcattctcaaccaaacttctaatcatgctataattgaagaatgtaaggtggttgtgattctcgtacaaagatgtggtactaattggacaggactctaatgattctttatgtgaacacgattcctgaggaattttgagagtgaaactttcatgctcattagtggagttatcatccgccagagatgatgtctcaaacttgtccatggcttgcaggttctccttctcaagagatgcatcgtgcatgaacaatgttgtttcttgacaaatgtcaagaacaatatttgtatggccagagggacaaagttcangctcgataagaggttgtgatggtggatcttttgagtgcaattcaatggtc

SEQ ID NO: 11018 - DNA, 452 bp, Oryza sativa
taatatgtacagatgccacatcatcatccactacaattattatatgtcaacatcgcaagcatgctatattatctatattttgataattatcaacatgtagagcttctaatatgcaagcatgtctaatgatcatctaccctataatatcctatatacctatatagtgtatgcttagtaaagtctactattctcttttctcattaagccatatcacatcaattgcttatagtcgttagatgattaatgtatagtgcagatcatctctctcctcttcttgtcattaagacatatcacgtcaatgttctcttgtgtttagcccttagatgattaatctatagtcaaaactatctcatttattcttctctcataaagccacatcaccttacttttacatttgaatcatcattcgatatacctattatatctaaattatcataaaccacatcaactta

SEQ ID NO: 11019 - DNA, 269 bp, Oryza sativa
  unsure (1)..(269): unsure at all n locations
acgaggagcacnaaaaagaaggaacattattgaacagatagaccgggggagaacggaagaaccagaaaacaacccacagagcaccaaaaaaaggaaggacgcaagcaaaaagaaacaacgaggccagagcacaaagcgggacaaaccgaacaaaagaaccgaaaagcaaagaaagccgcaagggaaaccggaaaccaagccacggaaaaaagaagacaagacacaaaaaagaaagaacgcgagaaccaggaagccaagacaacaacgcc

SEQ ID NO: 11020 - DNA, 249 bp, Oryza sativa
  unsure (1)..(249): unsure at all n locations
aactnaagctntcatgacaaggcatcntgatagccgacacatgttatccatatgccaacgagaggggacccagaccaacaacacgtgatgtcccagaccatactgtgccaggaagcccatgggttctccccgacaccaccccggcgaattcacatgtctctcggcattaaggcttccctgataagctagttactcagtcaagggtgtcccatttcacccatgtggtcatacttgtcttatgttcggatg

SEQ ID NO: 11021 - DNA, 220 bp, Oryza sativa
tagagtccaaatgaataagctcgacagttttacgctgctgcgagttgtgcatatgttattgtgattgattgttcagctcgatcgctccgagctagacaatgactaaatcgcagcccgtcctatccgggatctagtaactcttagtagaactccacgtgtcattgttttttagctgtgacgacaagttcaagccatacgttattacaaactatttgatata

SEQ ID NO: 11022 - DNA, 391 bp, Oryza sativa
acctatgatactaagcttgctcagcgtctgcctggcctttacggttaccatgatgcttatatcaggatggctggagtgatcttttagagcaatttccaccctatctgggttgccgtcaccatgaagcataaatgatcgcaagctcggaagacgctcaattccagaaatggatttcatctccctgaaactccaaacaattatgttcaacttatgagtcttgctgaaactgatatcggcaatgtcttcgcctgggatgagaagaaccttgagatgctggaactgtgtttcccctagggcgagctatgtttggacatatgacctgcaccggagccggagataccgcattgctctgagattgcaacaactagcatatcttgctctactacatgag

SEQ ID NO: 11023 - DNA, 380 bp, Oryza sativa
cttaccaatgtgggagggtccgtatctagtggtggcgtccttcgccgggctccatacggatggccacgggcgactgcactgagctgcctaacccgtggaacatccaacaccctcgtcgcttctacccctgaggggggggtcgggtgtcatgattcgggctctggccaaccccgcacctcctcgggcgtgtatggttggccggtggctgccacacatgcacattcttagtacttttttttcagtacttcaataaaagcagcttcaaattcctaaaggctgtatctgtgctgttttctccttttgaaaaatcttgacttgaaataggtcattcgtgctcaatcctgccctctggggctcgggtcggctaaaatcgtcaaaca

SEQ ID NO: 11024 - DNA, 473 bp, Oryza sativa
  unsure (1)..(473): unsure at all n locations
ctgcagcatgcaagcttganngccacactgcacaacttgctagaatattatattatgatgacccattgattctgcaaagagttaaatcacaggtcaataacgaagctaatgctttttcaagtcaattatattttttcaggctatagcaaaatcatgtaagaactgtatgaaacaaaagtgtaaagataaatacgttcatgtcatgaatgaattcgtttatatgaaatgaaatattctgcaatggaaagtgaagcagcttctcttccataatattagtaagttagtgagaaagaatacatgtataagaaatcaaattgtgacaatgtttctcagaatgttaaatcaacttcgtcctgtgtctatagataaatatggacaggagcttgctggcctaaatgcacgagatctctggaatatagagaacccactcaaaatgagcgtatgtgatgtcactagtcacatctcagatgaac

SEQ ID NO: 11025 - DNA, 500 bp, Oryza sativa
  unsure (1)..(500): unsure at all n locations
actccgcttncttcacactangatattctgctcagatctctctcaccctctctccgaactcgattaaccaggagaaggcaagttgccttttcgcgggattcaattccgaagaatagatcccaatccttccctgngaatttacaaccaagccaagagaattttggggcgaaagggctctgataccagaaattgtcagcgtcaccagatggactcaacacaactaaggaaaatgaaaagganaagtggaagaactcgaacaactcangaagaacagagatgtgtttaggcaatcttttactaggataatcttgctccaacccaacagggttgagccgccgccgccattcgccaccagattgccaaaagtcccttacaatttagaaacctcagttcttatactctctctcgctaccaactcccttccttcccctctcacaagacagatgccagctcatgccagcgatacagggtacatggcccattcccgcccaacatattta

SEQ ID NO: 11026 - DNA, 202 bp, Oryza sativa
aaaagaaacaaccgccagcgagggagcgagacccacgacggcagagcaccgaaaacagacaaagcccaacaaaaaaacacaacgaacaacccgaacgcgaagaagacacaacaaaaaagagccagggcagaaacaagccagccaccacaaacaaaaaaaaagaaaaccacgaaaacacgccccgagaaaaaaccaaaaacac

SEQ ID NO: 11027 - DNA, 452 bp, Oryza sativa
  unsure (1)..(452): unsure at all n locations
tatatcacgatcaacgaatttaataatcaaacanaaatgcttttttatatattcatctttngcccatattagaatcgaactcagctgtagaattattgacgtttgttacgtgacaagacgatttgcctgacgtgcttggtatggcgccctggatgtaatattattgcttatgaagttctttccttcggtccttttagctcaatacaggggttcttttttatatctcttccttgatcatgaagcctaactcaatcgtctaaccaatcagtgattattcccaaaacaagagttgagctctcatggttcactgatgctttgccatcatgatggtaacatcatggcaagcaagaatccaatcattctagagggcagtagacgagctgcgacatcaaacgactgaccaaatgcagcaagccgatcaaaattgccctgctcacacaatggttgaagaa

SEQ ID NO: 11028 - DNA, 399 bp, Oryza sativa
  unsure (1)..(399): unsure at all n locations
actcgaccactccggacactggcctagctgtagctagcttgctgacgctcacgtctagtagtactggtcggctgctggccgagaggggcactgctgccgacgtgacatacgaagcttcttttatcgatgatatatataggtagaccgtccctcttatttaataaattaataaaaaaataaaaaaattagtcacatgaaatattattcatattttatcatctaataacaacaaatatactaatcataaaaaaattgtctaataagacgaacggtcaaacattgaacataaacaatacaaaactacacttattttagaacgatagtactgctactcctcgtcctgaaataaataaactgatataaaataagatactccctccatntcaaaatgtttgacac

SEQ ID NO: 11029 - DNA, 325 bp, Oryza sativa
  unsure (1)..(325): unsure at all n locations
acactatgatactaagcttagcaagaagccgcaggagacggcgttcctctccgccgtgagcatgctcactatcttctcgacgaggaggcggtggttcttggtggcccgctcggcattggtcgcgccgccgccgccgncgccggaggttcggtctgccgcgtggtggttcttggcggcgatcggcagccaccgacgcgcgtangctntgagcgtgtcgccaatggccttcgcgtgcacggtgccggtcgccttgacggccaccatgacgcgccagtagaggtcaaccccgagctcggagatgtcacgcgcccaccacggcggcgac

SEQ ID NO: 11030 - DNA, 263 bp, Oryza sativa
gacctaagccgtggcaattatatgtagcctgacgacattaatccgctatccaatgtacattatttccttgccaaagcagaactatgttcctatattcttgggattggaaagatgaagtatatactgtggctgcaagaattccatgttaagaaagagcgcactgggtctgaacttagagaatagcggtatttggtagagcttgtatgagcactgtcttaaagctatcttgaacatatagccacaacggaagacgcaaatggtgc

SEQ ID NO: 11031 - DNA, 373 bp, Oryza sativa
tgtggcatatgcttggcatgaagcaccacgttgtgattggttataatcaggatgcatgcactacgcgcttgatctgacctgcaccactcctctctcgacagagctccattaatcctggctatctcgggcatgacgcagaagatgacgcttgatcgaccagaacccactgtgacgcgctcatgcaccctcagaccattgctggagctcagatctctgtcactgctcagtctagaactctgtctatttcataccatagtaccctgacttaccatataccgcacgttcatgcttctctcgctccagacatagacatgtcctgagcccaactgatattgacagaacgacatggcttacactgcagatcttcttttga

SEQ ID NO: 11032 - DNA, 432 bp, Oryza sativa
agcttattgatccatcattaagtgctaagaaacatgagcgagctcagattatgcaatgtcttaaggtggcgatgttgtgcgttcgggatcgcgctgaacatcggcctaccatgtctgaagttggtactatgctttctagcatcaagacaccgaaagacagataggtacaagcactgtttctgtccaagttatgcttggattgcacatgaacatactgaatggcatttgctctctttctgttgttaattaggacgctctatctctttgcagacctacttatctactggttgggaacggacttggatgcatggttgtttatgctgttaaaacagatgtctactgtcatgtgtcaatgtgtgtaccgttaatcccagagatgacagacatatgtagctactggtaagcttgattgttactctgatgctcatgtgt

SEQ ID NO: 11033 - DNA, 465 bp, Oryza sativa
  unsure (1)..(465): unsure at all n locations
tgtggcaatttgaatggcatgatgaagcacggtgtaattgatgataaagaagttgaggtgagaactcctttgttcagacaggcagaatcctctgctcgacagactcgcatcaatctggactccttcgggttctcctcagatgatgactttgaaacgttggagtcccattgtgatcgttcagtcagtacccagaagaaggtatgatctcgaaacgctaaactgcacaatagaatctcgaattaatctataagctacctaccctgatttaccaatattggacttccatgcttttccactntcaaatatgtgcttttctgctgctaatctcatattcattgatctttatgtttcanactccatattttcttttgaaggtgaacagaggaaacaatagatgtgagtcatccacttcaacttcanacagagaaactctaagttatcagcagctgtatagcctagatgaca

SEQ ID NO: 11034 - DNA, 377 bp, Oryza sativa
tatggccgacatcaaatatattccacaccaagttcaaaaatatgatactgcatgggcataataaatcttgaccagaattaactaaattaaattgacatccagttccaccccaactcacatcatttattttcataagtttacatatgacaaaataatacatatccacagaaattattatggctaagcgggtgacagatctaaataaattgaaacgcaaagacgactgcgtactgcccttacatttggaacttcttgatgaccggactgcattcatatcgacaggaagagtgtctttatttacgtgagtacatcatggtatgaagtacaagttaaaatattacatattattgcacactatactatgaatttggagctga

SEQ ID NO: 11035 - DNA, 484 bp, Oryza sativa
tattacgtgacctatgaatactcagcttattgaaattaaatctactattaatttgacagtcaatagatgggctgtactgtgttggacaatgctatttttatgggtaaagccgcaaatgtgtaactgttgtggcatttttcaaggatcatgtgcatcatcaagttgcagcctatattggtgaccacattgaccaatcagcagtttttgtttctcatgattgttaagtagatgcaatctggaactgccagaagcgtcgaaagttgaaacttctcagcttaaaagctagactattcatcttccgcttgagattttggaaattgatacatccacatataggattcctcgagatctccgcagaattgagtaattttgagcagaagattgagttctctctgtacaaagttcgtctaaggaaggtaaaaattaaataacttgacgcagtaactgtatgttctgttatttgagaatactctgcattcataat

SEQ ID NO: 11036 - DNA, 487 bp, Oryza sativa
  unsure (1)..(487): unsure at all n locations
atctgaaatgaatntccttgggaattctaagcgtgcagcgagcactcatgataaggggaaggcgatcaaatgaaaaatgaaggatgaggtcattcgcaagcaactactactcatcctaatcatacgcatatcatttcttcatatataattggtgcgcaataaaggtcattnttgtgctataaagctcaaattctgtgaagccaagtcatccacgaaaaattaaccgtcggatcatttgaggaagttattctcaaccattcgattatctccaatatgcttcttgttatggtccattcatttgattaggtccattggaaattcttattcttctcagcccatcaaagaccaggcaacgaggtatggagttgttcgatctccccatgtggngctacaagtggtcactaaggacgtaccaatactctgttgcttcatctncatattagaagatcggtcgacatctactanggcaatcagcgggtataactat

SEQ ID NO: 11037 - DNA, 410 bp, Oryza sativa
  unsure (1)..(410): unsure at all n locations
tgactacccaatcacaagcacaccgactaggggtataccctattaagttctcatcctagaagaagcaatcggaacccgcatcactcanagactaagactaaacctgcaaacaaaaggttatatcaacagcaagagtcagtacattaaacaagttaatgtactggcaagcacaagtcaatcctactatactacatgtaaagcatatattcaaaggaaggcaatatgtagttcaatttcagcataaagcaaagtttgttttgcaattcttttgtaaaggagttgatgcttcaattaacaaagacaangtttaaagttcattattaacttcttcataattccatcataaacaatctcttattgcatacttaacaatagtcataatgtacaccacatacacaactcaacacatt

SEQ ID NO: 11038 - DNA, 302 bp, Oryza sativa
tgcagcttgcttacaggcaactcctagatatgttcaaactggtaatagacaaccaccgaatataacagcacaatgattgaagatgatgctcattctctaagtgtacttgctaacaaccctagatctgtagctcaagagatctaaaaccctctcatagacaaattttttgctggagcaataaggaggagaagggtacatacaccaaggagcctatgggagctagctgaaagatgtgacagccaacacctcacaagatgggatactgcctcattctcgctactagccaatactcacaaaatttc

SEQ ID NO: 11039 - DNA, 375 bp, Oryza sativa
ggagattaatattgcattattcctcctagtggattctggtgactaatgacaaatgtggctaagggtctaatgagctcattgagtagctctcaggtgcattactccaatgtgtggaatatggatgcttggagaccccctcaataatacaaaatcacagcggaccggaactccagagtgcatatgataacttatcttttgaaatcgagttcttaggacaaaccgtactattaagaggtgttacaggtgatgctctgagatatatcaagtgctcttagtgtgaaccaagtgtcaagattccctatgaatccttttatgcgaatactccatctgcccatatatgcaagtccggaactgtctgtcttacagatccggaag

SEQ ID NO: 11040 - DNA, 464 bp, Oryza sativa
  unsure (1)..(464): unsure at all n locations
tctctgtgaaattctagcgatttattactttgttttgttggttcatgtatgctttgtgtggtgccatcgccaatgccattttttcaatttttttccccacacagcgtttgtctgcaagattcgaacggaggaaggtggtgaaatccgccgacctgacctgcctaccatgggagacgccaacgagaacccggcccagcaaggagatgccaacgagagcccggcccgtcaaggccttccacctcgccacctcatcatcccctacgccatcgccgctgccatggcgatccggcccattcgccttgccagccaggaccggcttctcggcggtggtggcggggcggnagcccagcagccttcgacccaacacgccatcccggcctagaagcgcctgcccagccgcaatccctggagccgcatcgtcccgtcacttctccctgacggcgagagctaccacatcattgaca

SEQ ID NO: 11041 - DNA, 403 bp, Oryza sativa
  unsure (1)..(403): unsure at all n locations
tacgggtattcatatttacgactaattattttttcatcggtagatgatgtaccgatcgataacgagatatttgtggtaactttattaaattcaagatatgttggttgagttatattgtgtttctcanacaacaaataaatatgttgatgagttgaaaaatataactgcgtggagataagagagagtcagaaacagcccatcgttgctacaatcaatcagcatcaagtatcatatctgaaaagggcaagaagaaaaatgaagaatctatgataatgcgaaagcgacgctgctgctgctgtagcttcgtcgtccaatgctcatgagtcaccctggagaactgagaagtgcacatcgatcaccctgtttcttaattttctcaacctctgctattcttttgttgtag

SEQ ID NO: 11042 - DNA, 455 bp, Oryza sativa
agctctctaggactcgctgggatctaccgttctttttgtgacagaatctagcaccattgcgagcccattacatgagcttaccaagaaaaatgtcacattcacttgggctgcagcacaaaggaatgcattcgacactctgaaagataagttaacacacgctcctttactccaacttcctgatttcaacaaacttttgagcttgaatgtgatgctagtgggattggattgggtggtgtgttgttacaagaaggcaaacctgtagcatatttcagcgagaaattgagtgggcctagcttgaattattctacttatgataaggaagtggttgctctagtgcgaacattggaaacatggcagcattatttatggccccaagaattctgtatacactctgatcatgaatctttgaaacacattcgaagtcaagcgaaacttaaccggtagcatgctaaatg

SEQ ID NO: 11043 - DNA, 504 bp, Oryza sativa
  unsure (1)..(504): unsure at all n locations
tgggggagagatgtctctccncccactaaggtaacttgtattatattgtatatttccctttcaaattacatgtttaaatttttgcattgcatttataaacctgaaaacaacataaaaatttgcaaaactaanaataccaaaaagataggttagatttaatatgctaggtaagacatgcttagttcttcatgttgaaatgatgaatagttgctctgttttatatctctcatatatgggttcatggttaagtactctctcaaaatttgaataagggtagcctacaattatccaggaacctgaggtaagtgagctgcactttgctgatctgagtctacgttgctgcgagatatgagatatgtaataagagttgctataataatcatgttctaagtttgacttgaattccggatgtttaattttcaaaatgataactttgacagttcctcacttgatatgaattcctaccacagcccaaatattcatattgattaagccatatacatt

SEQ ID NO: 11044 - DNA, 359 bp, Oryza sativa
  unsure (1)..(359): unsure at all n locations
gaccatgaaactcagcttgaatcaatactttntcaagatttcctcgtagggccggtatcgttattcactggtgtgatctcaaatagccatgagcacttgggagcaggtcaaacaaaatgagtctgattcataaagcggaaacaaaaaagaacactgtattttacttgtttgccactgaaaatttcgcagggcctcacatgtcagttagacagcaggcggtgaatgataaattggtaaatgttatgggcatatatgacatttattatacactggctacatactatggntgtgtttaaattttttggcgtgtcacatcggatataccgatacacattntgagtattaaacgtatactaata

SEQ ID NO: 11045 - DNA, 473 bp, Oryza sativa
  unsure (1)..(473): unsure at all n locations
tgcattgcnatgtgccccaaggtgctggatgtttttatattttcttgagaaatacagcatgacacgcatacttaggacatgtcttacagactttttgttatttgcttagtgattaactgctaaatatacagaatgatatattccatatactaatacttaagtacataaaacatggcaggctggagcagtggagagttaatgctgactctatataatggatcagagcagatgtgctcgaccctaaataaatgttacctgaagcatcctgagttctgtctttgtgatctcccaccaatttataaacatcctgcatggctgcatagtgccattttgttagcatgtgctcacagctttcctccaatacctagctcaggcttcttgcctttctgataccttgaagaacttctagtagcttttggtatcactttgggcattgatgccttctgtgcatacatncattatcctactgctat

SEQ ID NO: 11046 - DNA, 210 bp, Oryza sativa
gggaggggaggacgcaaaacccatccaacctacaactccaaaaagacaaaccgaaggggaatagaccccccaatctaaataaaaagcaagaattaacacaataggggaaaaaaactcctaaaaaaggcgaaagtcaaagttggccaactttgaaaccggaattaataaagaataaggccagtcacacataaaagacaataaaaaccccct

SEQ ID NO: 11047 - DNA, 456 bp, Oryza sativa
  unsure (1)..(456): unsure at all n locations
tcttccanaagtttgaagtaaactgactgcctcaatcagactctatcttcttagggacgccatgcaaacacacaatccttgccatatacaattccgccaatcgacttccagaataagttgtctttaccggaatgaaatgagccactttggtaagtctgtcgactattacccaaatagagtcatggcctgatgacgttctgggtaaaccagtgataaaatccataccaatttcttcccacttccattcaggaatcttcaaaggctgcagcaaaccggcaggtttctgatgttctgccttgactcgctgacaaacatcacatactgctacgtattctgcgatttaacgcttcatacttgcccaccanaatctttccttgagatcctggtacatcttagtactaccagggtgaatggagataaagtatcatgagcttctttcaggattgcatcttttaa

SEQ ID NO: 11048 - DNA, 447 bp, Oryza sativa
  unsure (1)..(447): unsure at all n locations
tatntgntgttcaagttcatatatagatggattctgccatgctacctttaatcatgtttgatatgataatctgcattttctttaaacttaatgtgtaacagttctgttttttttcctcggctctcttaattgttacttcattatgataaatagatgaacttgccagaacaaagctggtcaattcaatgttgatatctgtgcttgtcaagcatgaacgaaaggcaaatgcttgctctatttgcagaanaagaactgttaaaccgacaaggaatattgttatacgcattagtagatgcatcaaccaacttgtaacctgccaaanaagatactagctntaaattaagtcaaatgctcagggggcaggggtactcaaggaaagattgcagagaggcaaaaccataanatctgaagctgtgaggagtgctgaaggtcaacctttgagaaatg

SEQ ID NO: 11049 - DNA, 352 bp, Oryza sativa
tctgaggtcctatggatgacacctgcatggtgtttcatatttaggctcactggagaacgacgacttggcggtggtgcttgcttctccaatcttgatggatcttgtggcgttttgcagagggggacgatgcgaccttcacggcgcagtggcttgcctctggccagacgggttgtgccaggaaatgatgacgccgaagcggcggcgaatatctgtgcgcgctccaaagtgccgtgtgcacgaccacattcccgtcgatcggcagcacgaaacgagagggtgtcaaaaggttatttactcactatggtgaggtgaacaaggaacggtatagagataatggcgatcgcggcttgac

SEQ ID NO: 11050 - DNA, 448 bp, Oryza sativa
  unsure (1)..(448): unsure at all n locations
ngacaatcaanacagagtgaagtagttagctgtgtgctatgcanaatggacattatgtgcatcattataatgtctcanaaacacattgacttagtccttatcatttaccagttgggaaattatacaaattccaagcaataataatatactagttatacaaaataaacccttttaaggaagcattaatgctttgtttgcatagtaaaggaagcagtgcaagtatattgcaagcagaagaaatttgctagtaggatcaacaatagaacatgcacaagtactcctccagttcttttatataagttgttntagacagtaaacttctctcctgaaccatctacattttgtcctaacttctaacagccaattaatgtggaacctaatacatgcagcacacagaanaaacatacgagcaatttaggacgatatgctcacatattcatggttcatg

SEQ ID NO: 11051 - DNA, 431 bp, Oryza sativa
  unsure (1)..(431): unsure at all n locations
agcttgtctagctnttcctctttcccacctaaacgaatgaaatggatgctctgactcccgcactcgggagaaggggagctacttaaactgacaactctatgctatcttttagattaggcccggaaaactcttagctacttttaggctgggatccagcgagagaagattgagctacgccctgtactacgttacttccggattcacttatgggtgtactgctaaactttcaagctcggagttatggatgtactgctaaacagccaaggtcggagcttttttcaataagagttgaaagcaaattggtaatataaatgctattacttaattaaccatttttggatgcaacacatgaaacaaagaagtagtagttatcaatgaatgctntgacatgagaatcccatacccttttgttcctttgcattgaaggatct

SEQ ID NO: 11052 - DNA, 402 bp, Oryza sativa
  unsure (1)..(402): unsure at all n locations
tncttngcttcctccactcaaatctagagcctatctngtgagattgtgagattagatgagagtgtatgagtgttttggagatggcttaaagattaggtttgattgagcactttggatatcttgtgggctgtcacttaggcttattactcttggagatcttctcctagacgattaggtgtcgcccgtgagcttccaaagatcttgtggatgtcccgganaagtttgtgaaggttttcctcacctccgcaaggaaacgaggtaagtgagtaaagattcttgtactgagttttcagaggttgtcctangtagagcaacttgcacttgtagtcttttcttaaagaaattttgagttggatcttggtggtcactcaattctagaaaatgacctataagtgttgagtt

SEQ ID NO: 11053 - DNA, 499 bp, Oryza sativa
  unsure (1)..(499): unsure at all n locations
tgacgatccatgatcggactcgccaacaatcgacattaaacataagacattggaaagtcaggcattaacccgtgattagtcatcaagaataaaatattgataatcaatatagaccagaaggattaaattaaccagggaagggaaaaacagactcggactaatccggtcagtatatccatccggtggcttacgcggccttcaacatcagacacccggtgggtgaggttcgcacgacatctgcccagctagttggctcggtttcgacgactcgacctcccggtgacatgtctatgtgaattaaatcccggtcgccggcagtcccgagtgcaatcaacaacaattgatccgatgttctggttgctggtcgtctcgatctcagccggtgtatanaaacaagagattaacagtagattaatccacaattaaaaaatcaatctaatgaaagttagattggaacgacanaccaggtcagagatttgagtcatcgagattgatctca

SEQ ID NO: 11054 - DNA, 418 bp, Oryza sativa
  unsure (1)..(418): unsure at all n locations
gtccgtcagtctagtcctccagccatccgcaggattccggtgcttgtagagggtggtcactggcacgcgcaaacctgagtcctcacggctcagaggtagtggcccctggatctggcttgggcctcttgcccggaggtcgtgtgctcttgcgagcagtgctaagggtgcgagggcctccaaggaaggtgatgcggngaacangggtctcatcctctataggatcagtgatgtctggctcgatctctggctcggtgtcggttccctctgtctcggagtcgacctggatcggagtctccaaactggaacccagctgtggagaaagtgtatggatcagtggagtgtgcaccaactccggaacacgtggctgtgccgctgtcgggtccactatgtanggcgttgactcggtagctatcatact

SEQ ID NO: 11055 - DNA, 422 bp, Oryza sativa
  unsure (1)..(422): unsure at all n locations
agcttctaagactaaaaaaactaggtcttttattttgtgacttctagcttatttcctagattctacaactatggcttcttaaaatctaaatcaaaagctagattgtntgaatgagtttctgattttgaaagaagctgcagcaaacatacccttactaatacatccttgaatgcaagctgttgcgaccaggagatcacaaagcagtaaagtagcatcaaaagcacgaacaaaatgcttagtgtgtaggaccacaccacgaatgaatgggttacaacttgcagtcacgatttacattcagaacggcacagcgatattatataatatacctctggatatctggagctggaagcaaaatagatggatgcttgatccacggatcacatgtacataaaccagtcgatagttcaagagaaagtactcaa

SEQ ID NO: 11056 - DNA, 404 bp, Oryza sativa
  unsure (1)..(404): unsure at all n locations
cctttgagtngtcaganatggatcaggtcatgttgagcatgataacaaatacggccccgggaccggatggtttcccagtgggtttctataagaaactctggcctgaatttatggggttgatcaaagagatgcttgatgatcttcaaaaaggaattttagacagtgataggataaattacggngtgatttctctgctctcaaaaattaaggatgctaatacaataaagcaatatagacccatttgtcttcagaatgtgattctgaaaattttaactaaagccttaaccatgaggataactggtgtgattgtngggattatcaactggacacaaactgcgttcattcctgggagatatatcttggatgggtgtgtaattctccatgagggtttgcatgagctacat

SEQ ID NO: 11057 - DNA, 477 bp, Oryza sativa
  unsure (1)..(477): unsure at all n locations
cttagagncacctgcggcatgcaagcttgtacacgtggcgccaatgtgccaattctatcttttcataaacaataaaaagtattcaggcccacctgtcatctcttaaccttaaccaaatcttttcccatgcccagcgccctctctctctctctctctctcgagcgactggcggcggaggtgtaccatgttccggcggcctacaacgcaagtggacctcactccatcggtcgacggcggaggtggacctcgctctatgcggcgatgggcggtggacggctgcgcgtgccatgacgggcggtggacgatggcacacggaagccggcgctgctgggtgggcgaggggagcgcgaccaggaccgccgatgctagtgcggcggtgggaacatcaaagatattattctcttctcggactcttccacactgtcccggtcgaagacgatgaaactatggctcttcctaatctctctctctctctct

SEQ ID NO: 11058 - DNA, 288 bp, Oryza sativa
  unsure (1)..(288): unsure at all n locations
tgttctgactcgtgactctacaagtttgtntgcagctatgtcactatggcttgatgttgntttataatcagcgattatctgatgccaactttaatggggacggcttttctgtattatctgctttacctgttacaagttatgtcttgaacatatgatataatgggtcatagtgagtctacagtactattacatgtttgcactagacgcaaaaacaacaaaatgttaattggatggaaaataaattcttaaatcangtctctanaatagttttgccctttatagcataaa

SEQ ID NO: 11059 - DNA, 388 bp, Oryza sativa
  unsure (1)..(388): unsure at all n locations
ggggaggatcttcaaggagtagcatgggctgggttattcctatattctgtgggtcttgtagcttggaggagttcttgtttctcgatgtctattggtccatgtcttcacgtcctgtggtaggttcttcttgttagaagttagtaagttgaaagttagtaaactactatactaggcatcaatagtagcatgacaatgctgcattgttggatttcttcatcattngatcaatccttcgttccttaatatttattatgaatcttgccgtcgagggttgaggatacaccctctgcagttntactatccaatgatacttcaaattccttgtacaagggcgaatataccttgatatatagtaattcttgtccatattttcccacaagttattgaa

SEQ ID NO: 11060 - DNA, 446 bp, Oryza sativa
  unsure (1)..(446): unsure at all n locations
cataaattaaaantaatcgagtttctctgctattgtgcaaatctcacgagtgaatcaaactatactaatcaatctgtcttggactcttggtggtctcgtaaaggatggcggcagctaaaacgaaagtcaaggcagactggtggtttccctttccccggatcccgggtggacaatcgaacggcagcgcgtgcagcctctgggcatcgagacagactcacagacgtcgtcctcgcgtcccgggcatgttggtgaacagacgacgcccatggtgaggtggatggcggcgatgtctcccgatcgagcgtcgtctgcgccttgatcgtttcgcagtttcagtatattggaacggcccatgcagtaactagcctagacgccgttttgcaaagcgtccacaactggacgctgttcgtctcagtgtccacatctggacgcaactataacagcgt

SEQ ID NO: 11061 - DNA, 398 bp, Oryza sativa
  unsure (1)..(398): unsure at all n locations
tggaggtctcccgacgtggctgatccccacggtctgtgtgtttcgggttagtaatgtcgggtgggtaaagtgtacccctctgcagaggttaacanactgttcgaacagccatgcccacggtcatgggcggatgtgaggtgattcctagcgtagttntgtttgacaactgcttgtgaaattactgttgtgacaaggggttcgatgtttgataaatcagcagctgacgggatcagctaggcccgggtggccgtttgaaaagttgttggcctgtgtggccgtttgaaaagctgttggccgggtgccaaccttgttntaagatctaaagatngatacattgcacatactccgacccgtcgggacgcactatctcaaccgtgtcgtttgagaagcactcacct

SEQ ID NO: 11062 - DNA, 454 bp, Oryza sativa
  unsure (1)..(454): unsure at all n locations
agcttgtactaaagttgaaaccatatcagtcactactggcgtacctgcacgtatcttacgccggacaggcgcggcgtcacgcttcggtggttggtgatgatgacttggtgacgtactcgccggctgccagagcggcggcgcgcggcggcaacggttctactgtagattattatatagatgactgacttcacgcacgtcggatgattaagttccatatatatgcatggcagaaaattctagatgaggactgaagaacagctggtctatatacgtatagctatatatgctgtctttgtggagtactgaattaaccaaccattaattaattcaactggaagatacagaagcccaatataccgaagcctcacgactacttaacanaaataaaattaaagaatcagagcctttgatttcacgtgacagatgtagtactcctccaataaaataagatatt

SEQ ID NO: 11063 - DNA, 397 bp, Oryza sativa
  unsure (1)..(397): unsure at all n locations
tcaactcttgaccagaggtctcccaattntgactcaacttctttntgtttacttatttgattnttgctcagttnttgtccttgctttcataaggtccatgtgtcatatggaatgagacctactttttttgcatccaggtatcaatatctgagcagtgctgcggttcagggcaaaagtgaagggattactgcagattcctcgaggaaccctattgatagcagcgcagtagatcgacttgaaggcaaacttgcagttcttcagttccaaatgcaaatcaagtaagaatagttcatggcttcacggcttgaaaatctgccaggcagtactgaatcaccaaatgatgccttcctcatgataacattctagctgatgtggagactgctagatgtcccatgga

SEQ ID NO: 11064 - DNA, 433 bp, Oryza sativa
  unsure (1)..(433): unsure at all n locations
tagctgccctgcacacaccagcaggangccttgtcatgtatcttatatntattccgagcgctcgggttatggtgtatctaatatgtatactagattaaattctattcatcttgtatctatatatgcatagatttaagtagtatttcaacttctaagaaatgtcatctgcatatcattgaaaactttatctcaagagatactaaaggagagagaaagatactttccaattggagattatgcacaaagacaatttctattaagtttatattgctcaaatatatcatggagtgtgagtttaccggcttatcttatcgcttaagtcagaagaattcacacggcgcctccaaatttcatgggacgcgcctgagtttattacgagactgttatatatgtaattttgtcaagaaagaatatggaatatatctatttggtt

SEQ ID NO: 11065 - DNA, 448 bp, Oryza sativa
agcttgaaacaaaagctaattaaatgatttttttaatgattgaactgtattggactttgtaatgtcccctgcaactcataaagtaaaaatacttgatctggctacctttatgtaaaattaattcagacacttacagtgacaggtcactgaagctccaaaatcaaaggctctaaactaaacatcgtattttttttcacattatagaaaactaatgtatgtatgtaagttttctgctactaaacggaaatctcaccatccaggattgtatatttcactggactagcaggatcatctgggaaggtcatgtcaagaacagacattggactatcagtttcttgttcacagcttagatttatctcagcttcaatttcttgactgggacgaggaacacacaaagtaccttctcttgacttcagaacatcggatgaatgaatttgtttgtcatctg

SEQ ID NO: 11066 - DNA, 413 bp, Oryza sativa
  unsure (1)..(413): unsure at all n locations
tcattgggcatgtactcaanaactaaagcctttaactcgttaccctgcggattgacactggagcaacaggtgatgatctntataagacaacgatgtcgtactcttctcaaagcctcacattcaacctcagaactcttggcagatcctgattgtcgaaggttgaacacttttacagccacaattgcaccttcatcttctaaagtacatctatagacggaaccataacttcctttgccagcaaattagcttctgaaaattcattacttcctctggctaatgcataatatgaaactctatgatagtggtcatcagtacctgggattggtgctcgactattttgtctccgttaagcttcctgcagaactgagatagaacagttgctgaaactaacagcacgattgatacctgtattg

SEQ ID NO: 11067 - DNA, 397 bp, Oryza sativa
  unsure (1)..(397): unsure at all n locations
ttcatatgtacacggttaggttgtggcagtttgttatattattctggtctgatcatgaaagtttctttaacctgcaaattgagcttgactatgtgtaaaaatcctcaaatggggttgagaattttgcaactggtgcagaaagtgtaatgcatggaggtttgaagaagctctagttaattatcacacggttgattactgcaaagtgcaaacaccaccaaacagttgggcacctaaatgtttctttacagatggcccagcttattctaatcacaggcctcgggatcggtgctgacggtcacatgcttgttggtgaggaaaaacataataatatattagtgtactactgtagtatcacanaagaaaaccatacatacagagagacacccaacatcttcct

SEQ ID NO: 11068 - DNA, 329 bp, Oryza sativa
agcttggtcacattacacgtactttcttgtttaataagacaattgaccacttttctagctcttacgtgcctcgctcagatgatatggttttcgctcaaccgaagttgtcttctcctatctatcaaagatcttgtcatgtaaagctgtgtttagttcccaaaaaagttaatagttcggaaaaagttgcgagtttgaaaaaaaaagttgggagtttatgtgggaaggaaattgattaatatcgggcgaccggcgggaggtgtgaaatatcggtaagtactcatacttcatgcgcgcgcttccctctctcattggacccaactctttacctt

SEQ ID NO: 11069 - DNA, 358 bp, Oryza sativa
ttacgtgacctatgaaactcaagcttgacaatgggtcttttgataattatagtgcatatggttttaagaaagtatgaaatgactagtactgaatttagatcctccactatatattatccaactagtagtttagaactacatgaaattaaacatattaggctttgggttataaaaaaaaaatcaccccttcccatttcgaatacccaacctcaaaatcctgggtatgccccacctctaacccacaagccacaggcgtagggtgccggccggtggccaccacacgcacgcccagccccagccctgtgatcgaatcaactatggttgtgatttgtgcatgtgaacaacttggtagtttaat

SEQ ID NO: 11070 - DNA, 422 bp, Oryza sativa
  unsure (1)..(422): unsure at all n locations
tcattgagaganagtaatacaacatataaatatatataatatgaacacacgaattgagaaaaacaaaaaaaaagaattaaattactcttgatattcactatctgacaagctacaaatagcattgtaatatctgtgtgcattgtctgatacaacaaaacgacgccttggacaaacaaatgggtcacttctgtgcttggcaggatgtataatcctccttggcccatacagaggcactttaccaccagaagagctaagtccagaattgttaatacaaggaatcgacgcatgagatgagtntgtcagctgcttagttgtattgcaaatgtcatttggtgagttctgggaaaaaataacgcanacagttaagtgactataaagcagctanatactagagcaaaagagaaagatatgttggaaagtta

SEQ ID NO: 11071 - DNA, 484 bp, Oryza sativa
  unsure (1)..(484): unsure at all n locations
tataagaactaattagtgcatgaaactcaataggctttcaagctaagatgcgttgagtttgagatcttgtggtagggtttcaaaatgcgatgataattgataagttatcatggttatcggtcttattgaaccgaccatttacgaaagcctctccgtaaactagccaagttaaagaaaatcaaacaaaaattcaatattttggcaaaaaaaaagtccaaattaaccgctcgattatcgatgaaaccgccaggggttattgactacgtaccggttgcattntanaacctttcccggtgaatcatgtatgtaagtatgaggttcagatgctttcaaaaataaaaactagttaattgattgtttttttaaaaccttgctacataattntttttcagcagcaactagctacttcctcagtcccanaaaaataaataaaccttatattggatgtgagttaatctagtaccacgaatctggataacctcat

SEQ ID NO: 11072 - DNA, 474 bp, Oryza sativa
  unsure (1)..(474): unsure at all n locations
tgatctatgcttgcatcacccanaactagaagaatgaacttgtgcactctttctcaatgatagagctccatttcctacaaccgtgccatgctgcccaagctcgaggtccatcttggcctatgtcctcatggcccgtggattntacctctacatctgagtgccgatttgagtagtgggaacttaaggatatagtatatcgattcatgtctaactctacatttttttacaaaaagaaagagttttgcttgccagtatgttttaacaatatgcacaataaaatagaataactcagattgttatgtaccaatttaagtgagcgtgcatttcagaagcttagcaagctctcgctttcgcacaacagtctaacaaatgaaggcgttgctgctctagttatcaaccgaactacactttcagagctgtaccttggcggaaaccagttacttacaacacgntggatattcaatttgacgtctc

SEQ ID NO: 11073 - DNA, 424 bp, Oryza sativa
  unsure (1)..(424): unsure at all n locations
tgcaagctttgatgaagtcttaaccggggggaattatttatggcctcgntatattccagntatgccagatactccctctaacttaaacattttagaaatttataaaaaaatataacaacatttatatcattaaattagtttcattacgcctagcattaaacatatattccgataggttcttccaagaaagtattggcaatgtttctataactttgattaaaaaaaaagttgcagagaaaattgcgtcgtcgccccacaacacctgggctccatctctctagtgggccgggctgagagcaccaggcttcaaccgggggaacaagttcacttagactcctttaagtagtggtcgaatctgattcatatctctgaaccacaataccggatatctcaacctcttaattatcacaaccgatgcaatttg

SEQ ID NO: 11074 - DNA, 392 bp, Oryza sativa
  unsure (1)..(392): unsure at all n locations
tctaccaacctgaagcctaaccaccagacacaccatcaacgttctgcttttccttctccatctgcttgagtgctntgcaccagctcactcatcaagcanaactgaggcggagcgtttgaaatagagtattggaccgattgttactgcagattatttacatgattacaagaatataaattaaatattttgataaattaacttataataagtgctttaaactcttcgagacgtggagcaaatgattcgttttgacaatccggtgagtaatccgtctcatatgatcccaaacgagttgcactgttgcagaggaggcgagtatgtgatgaacacttgagtgctcacattnttttttgaaggaaagcanaagctttgccttgaatatattaatagag

SEQ ID NO: 11075 - DNA, 451 bp, Oryza sativa
cgcatgcagcttgttgttattccgactcggattattctgtttgtcaagtggatagaaagagcacatctagtagttgccaaatgcttggcagattccttgtgtcataagtatccaagaaacaaaactccgtagccctctctaccgcccgggcggaatatgttttcgcgggtagttgatgggccccattgctttggatgcgacaaacattgttggactatggtatatacttcaccaaaaccccactcctatgtgacaatgatagcgccacaaagatagccaataacccggtccaatattctacaaccaagcatattgatattcgccatcacttcctaagataccatgatgccaagtgtgacatagtcattagccccataagaaccgatgatcaactactcgacatatttaccacgcctcttgatgaaaccccgtcttgctagatgacgaatga

SEQ ID NO: 11076 - DNA, 445 bp, Oryza sativa
  unsure (1)..(445): unsure at all n locations
ntctaggaacatgtcaatcctgaagatagatggtgagcggtgttgcttgattggttctgaagaacttgtcaaatagacttgaaatagcttttttttttttaaaaaaaaatcgattagcacatgacccactttgtaattattgatagttgtagaccaaatataatacctcagcccattagggggggcgccaatgtagcccatgttgcatagtgtggtcagattagtctcataaaacagcatatggacccatgtgtgcacctccggttaatctntttacatgaatcaagcacagaaagcatangttagatgttgtgtatatgttcaacttacactgtaatttatttctcaacttatccaattattaatgcttgaactaatgatgtacaggnntgtggntggttatgtggtacctatgatcccatgtctcctttattgtcttactatg

SEQ ID NO: 11077 - DNA, 436 bp, Oryza sativa
agctggctagctgcatgctcctctaatttattgctagtgcagccttcttcttcctgcgcctcctttgcctttctcacccactcttcctctccccttcggagcgacacatccatctacaggtgaggaccgtctcacacccagcggaaagcttcgccgccacctcctccatgagcccttcaacttcactcggggcgtatggaaagtacaggggtgagcagcatggcacgcgtcggcgaatgtggtggcatgcttcagtgtaggcggcaatgcgggcagcatgcttcaacgaaggcagcgaagccagcgacatgggaaagaagcagctatgaagggagtcgagctcgaggcggaccttgcgacctgccgtcgtcactctcggcaaggggttgctggatccgaagaggtacaccgagtgtccccaccgaagccagtcacg

SEQ ID NO: 11078 - DNA, 395 bp, Oryza sativa
  unsure (1)..(395): unsure at all n locations
aactcaagcttgttggcttgaataagctcctanggcatggtatgatatgcttaagatctttntgcttgcgaaaggttntacaatgcgaaaggttgacaaaactctttttgttcttaagcatggttataatcaacttttcgttcagatttatgtggatgatatcatttttgtttgttcgactcacgccttggttgtagattctgctgagactatgcgcagggaatttgagatgagcatgatgggtgagttatcgtactttttgggagtgcaaattaaacaaacacactcaggtgcttttgtgcatcaaacgaagtataccaaggatcttctgagaccgttcaatgtatagaactgcaagccaatttcaacaccaattggtctacagctgtgttgat

SEQ ID NO: 11079 - DNA, 369 bp, Oryza sativa
  unsure (1)..(369): unsure at all n locations
aactttgtgtgcttaatgagtccatgttgttttcttgtctgcacgntctaaggggctgataaatacagcagcttgcttgcatgtcgagctatagatgcttactgggcattaactagctctattagctcgatggaaagaagagattacttggtatcaatgtatgccaatagctagccatgcaagcccatgggctcgtgacatatttgtcccagccttgtacatgatccagcccatgatgaggccagcttctctcacaaatcggtccgctgcatgcatgcatgcatcacatgttaaaataagtctacttcatgtccctcagctttccatcgggtgtaagtcatatctctgaactacattacaagagattta

SEQ ID NO: 11080 - DNA, 396 bp, Oryza sativa
  unsure (1)..(396): unsure at all n locations
tggtgngtctgaagttcatgagagcaacatctttcctatctctgtatacaaattgacacctgaacagaagaatgatcttgaggcgatgatgtagcaaacacagaaccaattattgaactcattcatggagacccgccaaggaacaattgntcggaggaacaagatgaaattagttgctgatgttcctggacaagttcttccaacgatggagaagtacaacaggtctcagatggtacagctcaatctggtgataaaggtattgcagatggctcangtgataaaggtgatggttctcacggagttcaaggtgaggatcttaacccagacggcaacacggcacagctacagtttaacaacttccaagatcggattgactatgccgtgcaacatgctttg

SEQ ID NO: 11081 - DNA, 430 bp, Oryza sativa
  unsure (1)..(430): unsure at all n locations
gagcaattctcaatgttttattgaattcacagaacagggcgaggatggctctgactgacttgccctactttttcttcactttgggaactgngcgcaattagattggtttctgctgctttttctcctcccccgacgtgtggtgtggagaccggctgctgctcctcctggtttttctcgcgtgcgtaggcagcacgacgaaaacgaaacgaatcgacgagacgagcgacgacacgcgcctgccgtcgccgatgatgaacgtgcgccggtggataatctcgccgaattgcagaacgatggtgggatagttgttgatcgaatctccaatgatctgataccacttggtataaatatagatgcacaacggagacacgaatctttacgttggaaacccttgctggaaaaaccaccggcgccgatcgcaatgatcact

SEQ ID NO: 11082 - DNA, 363 bp, Oryza sativa
  unsure (1)..(363): unsure at all n locations
nntgccttgtatggctcatatattnggcactatatattctttcatgaaaagcctgcgtttacttttgccaacgagatgggactaaacatgctagaaacatctctcgtcgctctccaagatctctcactggacaagatatttgatgaagccggtaggaaggccctatacaacgagatcccgaaattgatggaacaggtagagagccacttgcaaaatccccattttcttttccccatgtaataacagcaatgtcctaaccgctaaacacaaaccaagtagagatgcaagaactcaccgtagccacagagtaatctttcgatttcgattcaatctgttcttgttcagggttacgtgtacctgcct

SEQ ID NO: 11083 - DNA, 373 bp, Oryza sativa
cctgaagcatgcatgcttatgagtaccgatgccgataattttattctttattactccctccggtagagtgggagtgcaggcacagagtgtccgcctcctactttgtccgagcggtatatttgaaaattctttagcaaaatttaagaacattaggcacaagtcgatattattcgtattatatcatcccataacaccagagattctttatttatacggaccattaaagttggacatggtaacttatgatcgcacttatgggacggaaggagtacaacgggaggagaaagattgttactcgcctgaggcaatccttggggaagcagatgtcatcgcaaactcgtggatgggctgcttttctatcgctaactgggcc

SEQ ID NO: 11084 - DNA, 395 bp, Oryza sativa
  unsure (1)..(395): unsure at all n locations
tcacagnttntgttcaacactgaagtgcaccaatccagcgattgcaatatttcattctcgtcagaaatgcagatgattcaaacatcatgcagccatcaagccatggatccactgggcactggctcttaaaatgggtgcccttatgtttgtaatgggtttagctataaaacaaatgtttattggttttatgttagtgagacagttgacatgaactgattcatgtggtttactgtatgcagatcaacattcatgcatgctgtaagttcacttttaagttaggaataattctctgtggtccataccgctgcttagcctctactaaggtaaccaccatgtacttgtacttaactatagagctcaaatanacatcanantagtactactgtccaatggat

SEQ ID NO: 11085 - DNA, 457 bp, Oryza sativa
  unsure (1)..(457): unsure at all n locations
agcttataaagggtgggaggntntcagaatcttnttcgtatataacnggcttaaaatatattttaaaatgaatnttcagctctttagttagttgatttatccgtttgtaccctttaatatcatcacaaatgagatgatctattatctattatctattcagaacaatcaaactgggtaataccaaggctgtgtttagatccaaagtttggatccaaacttcagtccttttccatcacatcaacctgtcatacacacacaacttttcagtcacatcatcttcaattttaaccaaaatccaaactttgcgctgaactaaacacagcccaagatgtgagaaaagtctcctcatcaaagtttccaaataggcancggatgtagcagcagtgtgatagtgccaatgtggcccattggcatttcatttgtcctccatggctggaagagagagagagagagagag

SEQ ID NO: 11086 - DNA, 430 bp, Oryza sativa
  unsure (1)..(430): unsure at all n locations
ntagacaatntanaaacatggttgggaaaattatgattntttaacctggtgcgtggttgacatanacttcctcctgtataaaaccatttagaaaagcacttttcacatccatttgatacaatttaaaaccttttgaagcaacaaaagccaacaaaagtctaattgcctcaatgctagcaacaggagcaaaagtttcatcaaaatccaaaccctcaacttgagtaaaatcttgagcaacaagtctagctntatttctcacaatcaaaccatcctcattntgtttatttttgaanacccacttggttccaataatattatgtccaacaggtggttcaactaaagtccacactttgtttctctcaaaattttcaagttcttcatgcatggcgttaatccacgaatcatcagttaatgcatgtgacacatcttt

SEQ ID NO: 11087 - DNA, 432 bp, Oryza sativa
  unsure (1)..(432): unsure at all n locations
tattgctgcacgcacctcgccgtgcttcaccctgctgccactgacatggcggggcccggagaccgcggngtccacctgcagtgacatacacgaatttgaaagggtacggcgagctatgataacggtagtctcaaagaaaagggtgaaaatgaagcgccatatcgatatgagccaggtcgtccactcagaatcccatcccttccatggattggtcatttggtcatccaactccctattggctcatgaccccaatcttaaaatttaagggggatgtttggtgatgcctaactttgccataactaagtttagagntaagttaatagtatagcccactactggctccaattcatctatagctaatctaatagctaatttataccaatagtacttactatactattaatatatggtcccacatgtcatacacatatt

SEQ ID NO: 11088 - DNA, 358 bp, Oryza sativa
  unsure (1)..(358): unsure at all n locations
ntccnctcgctcgacggctggtggttttcttgtgtacccgacctcccacaagggataccgatgtctggatctctctacccaccgcatcatcatttcgcgccacgtcgtgttggacgaatcgcaatttccttttgcggccactccccctgctgcctcgtcttttgactttttgctgcaaggactctctccagcagacgctccctccttggaggttgagcagccgcgaccactcacggtggctccctccacggaggttgagcaaccgtatctacccctccccagccgtcgcttgtcggccggcacagtcaccgtggccagcgaggccccatcggctggtgcccccttggtttggaccttc

SEQ ID NO: 11089 - DNA, 332 bp, Oryza sativa
  unsure (1)..(332): unsure at all n locations
tcccgaaccgatcaaatatgccttctagaatgaatnggntgctgcttgtagntcggcataagatatcctctcatttgtctcattgagaaataggttctcattatcaacaacattcagtttcatctttctcttaatgaagcagtatgcagtcatgcaacacatagaggaaattaaagttccaacaatgcaaaagattaagacatgaagtcgatgcactgaagcctggtcagaatcttcatatgagcatgaagggaattgcatgtatggagggccaccacataacattttatttcctaagagtaacactatagtgacattacgaanaatccctg

SEQ ID NO: 11090 - DNA, 379 bp, Oryza sativa
  unsure (1)..(379): unsure at all n locations
gcttgccgttcgcctttgaacgacgaccgggttcgccagccactcctgatggttgacctctcacggangaatccggcctccagaagtcgcgccacctcctcgcggatgaaggcttgacgttccggngcctgccgacgcactttctgccggaccggccttgcgcccggccgcacggcgagacggtgctcaatcacctccctgtggaccccgggcatgtccgccggtcttcaagcgaagacgtcggcgtttgcccgcaggaaggagacgagcgcgtcttcctatatgtcgtccagaagaccaccgattcgtgtggtcttggacgggccatcgcccagggcaacctccttgaccgggaacctcgtggacgtgaccatccgct

SEQ ID NO: 11091 - DNA, 487 bp, Oryza sativa
  unsure (1)..(487): unsure at all n locations
aactaagcttattaaaaataatttctccataacaatcnttcgagcttttattntattttcnttnggttatgagaacatggcacaattagatgttgacaaatatcaaatttcagagtgatgttccttttaagtattgtcacaaaagaaaacctatgtacatgccaaactggagttttgggctgtagccagtagatgtcatttggctngatcactcaaatttctattgtgatagactcctatttttttaagctaaagtgttgacaggtgatagtttgagttaagttctgtatagatatgacatgtcttggaaagaaataaatagacatacctcatccctgtcataactgtcaccactgtgcggatcaaatagcacatctnctgtggcaagctcaaagcatatgcatgcaaaggaccacaagtcagcagatgtagaatacttggatccagtatcacctcagggatctgtatgccttgtttgatatacttg

SEQ ID NO: 11092 - DNA, 315 bp, Oryza sativa
atatcctcttcgccaagaccctgtacgacatgcagatccctctgacccagttgataccgataacgcgcccttccatgtgagcattccaaggttattcgctactccactctgacaaatcactctatcagtcaccctttgtacattggaaaacctccccacagaaaacgtctgcttcgaagtcgctgatttcgatacaagcgtaatacccctactcggacgcccgaccttagccaagtttatggacatcccgcactacacctacatgacgatgaagatgcatgggtcttgaggagtcatatccctacggagcgacat

SEQ ID NO: 11093 - DNA, 355 bp, Oryza sativa
  unsure (1)..(355): unsure at all n locations
acaaccgaccgngctaanacacaancccaaacgtttgagtgttttttactcccccgctctaagacataataagtgttactcttaatattcgctccaaactatcgctataacaattagtcgatatatcggaacaacgactaaccatcccgatcgtttcagtcatatgatcacccaaggcatccagatgacgacataagaacacacgatatttgttaacgaagttcagccgaagcctacattcccggtgctctgattatggccgctcctcccaaccaacatagctcctaactgctacaagaccatggcctcgccgccatcatctccctacgtgtctaccctactttgtagtcgccat

SEQ ID NO: 11094 - DNA, 231 bp, Oryza sativa
cactgtgtaaccctagctcgcataccattgatttatggactttctaagctcagaagagtcatacacacaggagtagggtattacgcttcatagcggcccgaacatgtatatatctcttctgtctcgtcgtcttggaggagcttccgagatcaagaacacacacaagattgctcaccaaattctggaatattacccgctgcccccggacgaactcacgaaaggggggggggg

SEQ ID NO: 11095 - DNA, 347 bp, Oryza sativa
  unsure (1)..(347): unsure at all n locations
ctcaagctntagctcggtcagaggattcttgtacctgatcaagacgatttattgagttcataatgaagctctttcgcgtgccaacctatgatgtggatgtcatctggcacactcaccaactgcatcctgctacctactgccatgatatgctgaagctcattggacgagttctggagcatgatgacaccgatgacgatcgatcagaaggaaagaagctcgatactggattttcagggactaccaaacagtttgagaatgcctttggtgcaagatactggaaggctggtgctatgtaccgtggcaacttgccgtctcctgtgacatccaatcctcagatgtttattagt

SEQ ID NO: 11096 - DNA, 478 bp, Oryza sativa
  unsure (1)..(478): unsure at all n locations
gacctataaaactcagcttcttcagagcgtaggcaacgagtcgttgctccgcagatatctctaccgacagagaaaccagtcgtaccagcgccaccaaccttcaagactatggccagcaagactccgcgagttcgctgctccctctgctgacaatgtggccattgggccgcaggtcaacatangggacgtggatttcgacttgaagtccagccttatcacgatggcgcaggctagcccgttctgtggcaagcctaatgaggatgccaatgctcatctgcaatagttcctggagatttgtagcacgtacaccatcaagggcgtcagccccgacgccgtcaggctacggctatntccgttcttcctcctcgggagagcgatgcagtggttctataccaaccgtgctgctatcaacacctatgacaaatagcccatgngcattctcttgaattcttcccgatgggcaaaccaatgctcttcg

SEQ ID NO: 11097 - DNA, 406 bp, Oryza sativa
aacacactaatagcgggctttattattcttgttttgcggggaaacagcaacctttattatccgaagaatgaagtactaagctccaaatacagagtcaatcattccatatttacaaaagttatgccccccaaatcacaggaatatggcttgattagatgaagccgccaaaatgtaatcacaagcacacaattaattatgctgcaaaaatgaaagctctcgatcaaattgagatacccaatcccagtctcaacaagctaacacgaatccctaatggcataaaacataaccagatatgttatgaggcaagaagtatataataatcctgagatcccatgaactcttcgcattaagaacattataagaacataataatgaagctctcgacacattgagataccccatccag

SEQ ID NO: 11098 - DNA, 453 bp, Oryza sativa
  unsure (1)..(453): unsure at all n locations
tanggtaatggatgaaacatttaaagcagccgctgctccaatcgcttgagcgagcaacacctcatctgatccatccatcaacgaagatggaacatgctaccacaactaccaccagatgcaccaaatagcatcacgatatattcctcatgtaatgcttttattatttaaactaatgtaattgccgttttttttcatatagtcttactcatgctaatgacttggtcacattggagaaaagcgttgttggtcgagccatatggctcgataagacctactgatatgttcaattgtctcttctattntgtattgcaatttacaaattggatgtttatatatagttgctccgattaaagggctttgcatatgtatattcgtacatacccgcacatatatatacattatngaatgttgtaaatattgaattaacattntgacactatacattgtatttgt

SEQ ID NO: 11099 - DNA, 337 bp, Oryza sativa
  unsure (1)..(337): unsure at all n locations
tgtcanaatcatgaaaaaatagatggcacagttatattcatttctagtnncgccaaacagtcattttgtcgccgaagtttccatgtattttgcttacacttttcaagtttggctcattggctggttgccatggttgccttgttgagttgagcctcacctctcgtctcgcttgcagagttgcaggacaactcagcacgggagttttgccctgtgccagctttcgctttcgggcccgctcggcctctcccggagcccgggaagaacgagggtttctttttttttctcattcaccgccgtatcaacggccgtcgccgacgtgggcgtgataagatgaatg

SEQ ID NO: 11100 - DNA, 450 bp, Oryza sativa
agcttgtatatagaggtgatttaagacctatcatctttcacattccacattcatttcgtttattctgtgttagacgtcaatctacttactgcagattgatcacaatttggagtaaaatgtattgccacattctgcactgaccactgagagctgtaggattcatataatctttgctccctttatatatctttgctataaggataattgcaaaaattgttcttgcactccgcatgtgatgctgatgtgcagcagcactggagctatcacatgctaagtgaatgccgtcggctacagataggcatcaattatatatctgaagctctgaactgaatgccctagaattaccatatatggaatgatcatcatatgaacattgcagtgttgctccagcgattttgctgtaggacttgtaaggactattctcaccccaatagctatccaatgagatga

SEQ ID NO: 11101 - DNA, 396 bp, Oryza sativa
  unsure (1)..(396): unsure at all n locations
tcaagatgattgccacgcatggatagagtcctaataaggattttgtatctattaattacgatatgttatgaaattcccttagagataaatatgggcaaaagtttgccgcaaagacttatggtattctagagtttgttagagataagagtcgtgtccgatatggacatatcntgtaattctcgggtataaatagacaccgagccctatgtaattattaacacacacattcaatacaatgtctgcgcatcgccacccttttgctttagttttatttcgacgagatcttgctttctggttgagctgcattggtttcgatcttcagcaagagggtaaacttgttatgacggcttgtgttctcgggattaatgcttccatctttatgatactctaatcttg

SEQ ID NO: 11102 - DNA, 447 bp, Oryza sativa
  unsure (1)..(447): unsure at all n locations
cgataagtcgattcaaggagaatatgtttgagatangacgttctctcgaacagtgagggggaagtgtgaaatgtgaggactcttaaatatacgtttgatattaccaaataccaccgtctataaaaatattcctattttcacatgagggtcttctaaggaaatacctacgaaaaggttgtcctacgatcgatgattgaatcttgagagaatcccttatatgccactagaatatggccagttcccttatataccattctaaataggcttctctcttatatgccactggttcaagtattttcacccttttatgccacttccaacactatagtgttagttgactgttaatcacatgttagttattttcgtaaatgaccaatatgccctcttcactaataaaatgtgtaacttatcaaacataactattattttaatcatttaaaggaacaa

SEQ ID NO: 11103 - DNA, 286 bp, Oryza sativa
ttcactttattttacctctttcttctttttatggatatagcccttggatcacggcctattaaatggttttgcagagttaattgtataccaaagctgagaaaaccatttctctccctatcagaatgtatgtacttggtgaccctaaatgcgactaccatctaagatattactgccattgaaatattcatcttcctatttctcttttgggcattcagattttgatatatgaaagcatgagggtgggtattattcagactactgtgtattactgtcgcctgaaatgttt

SEQ ID NO: 11104 - DNA, 331 bp, Oryza sativa
  unsure (1)..(331): unsure at all n locations
tggagtgctgtggnggtggtggtggtggtggtggaacattgtgttgcggcggagtctggatgtggtggaggaaagcagccatcatgttggcctgctgagcgaggatttgggtgaggatggggttggtatctggtggcggtggtggtggcggatggggaagtggacgtgggctgccatggttgttgtggntgctgccttcggggtgactgtcctcaccggtagcagcgcttctcctgtgtgtcaccatctgaagattccacacagaaccagcagacagaatgagctgacgatttatactaaccacccacgactaccataattcttgaatcta

SEQ ID NO: 11105 - DNA, 371 bp, Oryza sativa
ataaggcgactgggatgctgcttgagctgttttagactgtagttctgaacctcgtagagtctgcagatactctccgggacaaggttgctgatgccatgaatgtgctggagttggaggctaccgccaccgacgtcgccgccgccgtcgcttcaggctccggcgactgtgacgccgacgcgccgtcctcctacagcgccgtctgagcggtgttggtggccggatgaattatcataataagatgaacttttgaagtcgtgtgttctggacttgggaactgcttagatgactgctcacgttatgactctagcaacttgcgtttgcagattatttggagtatcggctatggatgcggactctttatgttaattttt

SEQ ID NO: 11106 - DNA, 486 bp, Oryza sativa
  unsure (1)..(486): unsure at all n locations
actaagcttagggtgttggtgatctttcacgaaaggtttcgnctntttataaataaactcgaatattanggaagtagctaatatcaaatactaattattagaaggggtggcttcgaacccaggtcccactaccttgtcgagctaatatcaaatgctaattattagaaggggtggggcttcgaaccaaggtcgtctagcccagtaccttctcgagctaccggaagacctcaatttcgtctttttagcatttggcacttgaagtgacataaatggcgccgcttttgtgcacttcttgctgagaagagcttcttgtctacaagtagatcatgcatattgtagtttgcatcgatatagattctttntttttagattggcactntggggnggtagtactcaacggaaaccagtaatcgccggtagaaaaaaaatgttttgggatgaaagagaagtacataatctgtgaccaagttcattcataactgtctc

SEQ ID NO: 11107 - DNA, 458 bp, Oryza sativa
  unsure (1)..(458): unsure at all n locations
aactcagctaagttaatcctacgtatacttcggcactggcacctgttgtccttttgtcactctactacgnacccggacagggaggacttaagtgctcttgagggccgtcaccacctctacacccacctcatacgtactgtgggatacgcagcaaccactggagattaatttcctagacaccacgtctacgcaattaataactactctagtgccgatcaaacactacagcaatcactataaataaatggactatagtgaacaatgatcccgtatgctaattangaactaaccaagaattaattctcactaagcaaatcttaattactcagaatgatatttctattaaagtagagtaaataacaagatacataagtatgaggagattaccgacaactccgagattcctgcgattccttctaccttcctctctccctattctaatatacatagagacacta

SEQ ID NO: 11108 - DNA, 493 bp, Oryza sativa
  unsure (1)..(493): unsure at all n locations
aactcagctatagaagttctaattctananatcagatagggcatttatttttatggngtaacttaatgcttactacaacttaacaaaattcataactcaaggtatcacaatgtatagtaattcagcagtgtatgaaaatgaattaatgaaacatagcgctcacaatttccacgcagatgtccacagacaagcaggatttccacaccacaatgtaagcattaactttacctcagattctagacgctgtctttcctcatttgcttttttcttggcaatctgcttcatgttttccacctgatttcacagtatcaatgaattgatcatctgtggagcaacagtgtatcttacccaaaacaaccccactaacaaaatgacataattcaaaatgagaaagaaccttgcgctgcgccatgtccttggcctattgcctagccctccattcatcaagcttctgatcaatactgtcataatctgcattgctctgtgaaacatc

SEQ ID NO: 11109 - DNA, 503 bp, Oryza sativa
  unsure (1)..(503): unsure at all n locations
tcactgtgatttcgaggatatcatagngnntcttgattcattgattacttttagatatgggctttccctattcaagggagaaatgctngtagtaaggtgtaattagcctgcatttgcttcacgggacatgagtttggaaatttactgataagtgcatagtgcagtatgggcatttatctgccttccttttattgttcatgatctttgtttggatgatcaatccattgacctattatttttttcctggtaggagaaccatactgttctgatgtgtcttgctgtttgatgcttgatttaatatttttggaattgaaaacaaaaaacatgtcatgggtctgatgtgtcttgctgtttgatgcttgatttaatatttttggattngaaaacaaanagcatgtcatgggtcagctacattctatttcagcttgtggctgagcttatgacgtacatgcanaacgatgcanatcattagtgcgtgattaattaagtaggagtataaaata

SEQ ID NO: 11110 - DNA, 338 bp, Oryza sativa
tcctttagtagatcaatttccttattcgaatatagcacgaatccgacaactgacgacttgacaactctcatcggctaatctcaggacttcaaagccgatgttgactctaagccgatgactactctgggcttaccaaatttcactgttaacacgtgcgtaccgcttcattccttcggtggtcttttctctcgactcctaagcgctgcgccgccgcctgttcatcttctttccaggaaaaacgctgctatcacgccatggtttagctatctagttgaaaatagtggttacaagagacttagtagcacccgaggtcctgggttcgaactcccatgggaatg

SEQ ID NO: 11111 - DNA, 318 bp, Oryza sativa
agcggaagactacccttttgtgtgggcgtacagtggaagcaagaagcaaagggcaatggtctgaacaaaatgaagagagggcctgcagcgcgcggatggagaacatgatgacaccatcaatattacaaaaaactctgtcaattctttccagaagaagcgcttcccgctcagtgctccatgtgaatttcctagtttggagcttgagccttctccaattcctaactacgaggataaatggactctctcgatggtttatgattatacgatagagggcatgtgactaaacctattgtgaagggacatcctgaacatgctcac

SEQ ID NO: 11112 - DNA, 460 bp, Oryza sativa
  unsure (1)..(460): unsure at all n locations
tnnctttgtcatatgctntcttatttatttctatatattatttccatcttttggaaaccctgaaattattagtctatcccagtgaactagcaattagtatctgttgctgntttttggtttctgtaacctattgctaactgttgtacctgtatttttgtagcttgaaataaggttgcagttgtagcacttgttttcttacgctaaaaatttccagaacattgttatgttctgaatatgccatattttactttctgattttttttaccatgggtttgtcagcgtggctttgattgtatttggagcatttatcgctggagctcgagacctgtcgnttgatgctcgtnggtatgctattgtctttgtggcaacattacaacagctgtttaccttgctactataaaccgtataggtaacatttcattttcagttttgccacatacaatcccattctaaactacat

SEQ ID NO: 11113 - DNA, 379 bp, Oryza sativa
  unsure (1)..(379): unsure at all n locations
ggcttgattctgtacgttggtagaagagaatttgatattttacagaacagttctcanagaatcaagacatgatttttcacctatntgtgaggccctgaaggagataactcatgtgaacaagatcataggtccggggatatgtattaaaagattcacaccagtcatgatataccccaatcaaacctctgttgaaaatgataggcaaggcttctggatgatcaaaaggtacaacgttcataacccacaaaggtttgtggatgagtgacgccgcacatctggtagaagaaagaaaaccaggtaattntatctcaccatcaaacaaactatatagctagactgctcatncgtataagagaaagaaggatccttganacatact

SEQ ID NO: 11114 - DNA, 423 bp, Oryza sativa
ctaccaaaaaaaaccctacgcaaatttatcattaccaagtgtactatgatcgcaaactatattaaattgtaccatttagtattttttgccatactctatcacagctgattatttcataaacttgcactcactaaaggtacaccatactttaccaaggtataaaagcaaacattacctgtattttttgacctcacaaaacattgacattgctaatatttggcgctatcaataaatggaattctctttctaggtgaacactgaattcagacccacccgtgtttcataaatgtcagctttctttttcaagtgaacacttgattaagactaacggcgaatacatgttatgtgataagggcttactatcgactctcatcaatagcatttccttattctaagtaaaaccatcactaacatcaggcctaa

SEQ ID NO: 11115 - DNA, 438 bp, Oryza sativa
  unsure (1)..(438): unsure at all n locations
tatcttgtccaattgcaccagatatttccttttatcaaaatggatattattcgcggcgaaaatggggtaccacttggtaattttcagatggcaagtagttttctcatgataataacagtagaacagacaagttgaactaataaatatgttttagtactatgagtgtattgtgtgaaagaaagaaagaaagaaaatgtttatgagggtgatgactgataaagactattcatggttccaaatataatnggttttccactattgttgtgtatatgtatcgcatatggaagttttattaattttgaaagaaccatatggaagtaggctagactaaaaatatgctgagaatttcacggactaatattgactctganagtcaacttttttcttgtcctcttttcccctctttttttcttgtcgtatgctttggtttttgtctat

SEQ ID NO: 11116 - DNA, 414 bp, Oryza sativa
  unsure (1)..(414): unsure at all n locations
tgtatcggcagccttatcctgagtggntngagagagttcctctccccaatcggttcaaagttccggacttctccaaattttcgggacaagatggtgtgtcaacttatgagcacattagccgatttttagctcagtgtggtgaagcatcggctgtggacgctctgagggttaggttgttccggttatctttgtctagattggcttttacttggttttcttctttgccgtatgggtcgatcaatagttgggcccgattggagaagcaattccacagctatttctacagtgnggttcatgagatgaagttatctgacttgactgtgattaagcagtggcatgatgaacctgtgcacgagtatattcagagaatcagggagatgaggaacaagtgcttcaacttgagttaactgatgc

SEQ ID NO: 11117 - DNA, 422 bp, Oryza sativa
  unsure (1)..(422): unsure at all n locations
tcttggccnctgttcaaccgctgctcgatcgattaattacttattaattaactcgacatgctctacgactaatatatagctaagctaattagacactaaattagactttggtacgtgttgattcggcaaaattaagaaatcaagcacattttttctctgatcgagctcgatcgatcgggcgaacgaaccaacacaaacacgtttccagcaaccggacggcgcgacagggacccaatcaacacaaatccatttcggatctgatgcatcattntaattggacgccatgattcaattctctctctctctctctccattccgaataatttaatttccatcttttatttttttggtgggtttggcaaagtgtccgggcgaactgtgtaaataattaagtgtggtcttctctccccgtgtaaaatggt

SEQ ID NO: 11118 - DNA, 407 bp, Oryza sativa
  unsure (1)..(407): unsure at all n locations
agcttagtaaagtaaactcttagattctattcttaaacaataatacaattgccctgttactatacgataatcaagacaagatgtttaacgaaactagatccatcatgactattttattacattgttactacgaaaagtactcgtgttactacatattgactattgcgttactacgcattttcagcgagacgagaactaaaaaaagtaaatctcaacctttagagagcaatatctctcatgttatatattanttttgtaatccgtctgcaccataatgttcgtaaaaaagtgcataacaaaactagatccatcatgactatcttttgatgtcgttactgcgagaaaattatcctgctactgcacgatgaccgttctgatactacggaatttctgcaagatgatgacag

SEQ ID NO: 11119 - DNA, 396 bp, Oryza sativa
  unsure (1)..(396): unsure at all n locations
ntatctaactcatatactcatcaacgagatttttgtgttgtcttanaagaaaaggaaatcttgtctagacgaaactaaatagtgttgatctatgcaaaatgaatagacatgcttcttctagtctatatcctcctcatactattatctatatattacagaaattgccctctgggtataatgccaaaacatagaaactaatctttatctgctggaatctttggcttaatagaaatgaatatggttctgataaatctccatctatatcttatatgcatgtacttttcaggacaacgtactgactttggttcttggacacaactacaaagatgtaatgaggatagtaaactcacacatactacatgcggtaatctataggcaaccagntatacatatatt

SEQ ID NO: 11120 - DNA, 445 bp, Oryza sativa
  unsure (1)..(445): unsure at all n locations
agcttcgatgctgntataatgtgtgaacttctctaattatatgacagttttataagcgagaagtactntgccatgaagcacagggtggatccaaggctgtgcgaggctcaccaccggtggatagctccactgtagattgctttcgcatgcttctgcacaagctctagaaaattcctatgtccgccattgtgaagcaatggccatccatatgtaaagccccatctggacacttggactgagaatgttccgcacagttgctcttggattggtagtgccagattgccgatttggtaagcttactactgtccaaaattgagtaagctcctatcaaagataacaatgtgttaataacgtcagaactactattaaaaggttgtcaacctaccagatctataataaacagtatattggggatcctataagctcgctaaaccggggtgtacat

SEQ ID NO: 11121 - DNA, 438 bp, Oryza sativa
agcttcaggagctggagcatgctttacttgatgatagtgatgacatcttgtatgagatttcccaggcaggtagcattaacgatgaatgggctgatccaatgaagaatgtcatactccctaactcaccaaaagaatcggaatcaagcatcagttgtgctggtagcaacaatggagaaccacggaccccaaagcagttgctctttgactgtgcaatggcattatctgattataatgtagatgaagcacaggcaatcataacggacctccggcagatggtctcaatccaaggggacccttctcagaggattgcagcctatctagtggaaggtcttgcagcaagaatagtagcttcagggaaaggcatatacaatgccttgtcgtgcaaagagcccccgactctttatcagctctcggcaatgcacatcctctttgaaatct

SEQ ID NO: 11122 - DNA, 445 bp, Oryza sativa
  unsure (1)..(445): unsure at all n locations
agctngcaagcggaatataaagtataatggtgcttctgctatgagtaagatcgagcctcatttgactgatgctcgagtttatatgctcacacatccaaaagagtttgatgtggtaagcctttctcttctggtagttacgaggatatctttatagcattgtttttggtagcaacattttactatataaaaatggtagattttcatgcttctaccctttaatcgatttgtttcccctattgacaaactgttgattgtgccaaacagtcaattgtatgttattaagttgaaagaaatgaattttaatcattagaaagtgatgaatactacagttactccatttgtatctttctatgtcaacttacacctgcctcattttcaggttgatattgacccctatggagcaccttctatatttcttgattcggctgtacaggctgttgctgat

SEQ ID NO: 11123 - DNA, 392 bp, Oryza sativa
tctcgggttcttggtctctgcccgaggcattgaggctctccccgagaagatacgagctatagaacggatgcgccccccccagcaagcttagggatgtgcaatgcgtcaccggttgcatggccgccctaagtctgtccatatcgaggctgggagagaaggcgctacctttatttaagctcctcaaacgctccgggccgtttacctgaacggaggaacctgaccgtgccctcactcagttgaaggcgtatcttagctctcccccatttctggtcgccccggacccaggtgaacccttgctactctacttagcggagaccccgcaggtagttagtgcggcgttagttgtggagcgcgatgaggacaacccttattccgcgcatccacaccctgtg

SEQ ID NO: 11124 - DNA, 78 bp, Oryza sativa
agcttgtagatttaaggcacttagagagtgcatacatggattctattatgtaactcaatctgagtttgaaggtatgtt

SEQ ID NO: 11125 - DNA, 412 bp, Oryza sativa
tgtgaatagcaacttctgctccattattcaggacgaaacgggctctccattgttcagaatgaaacggctttctccatccttttgtcttttcttaaattttgacatgcttcagttgtattgcgttcaaccagttgcataaagtatgtacattcccagtattcctgtgcaaactgactttctgttgagatacaggtaatcttcaaacagccagcaatagcacctcaaagctgtttcaggtgctatttaccacaagaaaaaaattaattggattctattcgtatctacattctacagagtctaagaccatagttatgtaagtctcatagtgatgttgcagtcttccaaaaatcaaaccccaagtgaaatgcgaagcataaaaagaccaattcttattttagtaaaatagctaatg

SEQ ID NO: 11126 - DNA, 443 bp, Oryza sativa
  unsure (1)..(443): unsure at all n locations
agcttaataagatactctgccagaattgtgtgttaggattagctcttaagagttcacctagtatatttgcaccaagaaatgatccattcatctcagtagctaactgcatgcccagagatgctagctttggatgctcatcaggattcatgcttccaaaagaaagtgccttgaagtagtaccagtactcttcttcagacagcctcttcatcctgatgggttgggttgtcccaaacttagtaacatcatctgttctaccaatgattacaaccttaatttcagtactgggcatattctgcaaatatgattggaatttggtccatgctgcctcattcacatcacaaatgaactcaataacaaacaaataccttcctggagaagccttggagttaagcaacagctctcccatcttcagatcatcttctttaaagaanaatatatgggag

SEQ ID NO: 11127 - DNA, 414 bp, Oryza sativa
  unsure (1)..(414): unsure at all n locations
ntatctaactcatatactcatcaacgagttatttgttgttctataaaagaaaaggaaatcttgtcaagacgaaactaaatagtgttgatctatgcaaaatgaatagtcatgctaaactgcattgaactataatatcaatgaaattataccaaattcatagttgaacatgcaaagcagcatgacatcatatcagatatcatattttgctgatggcactcataanatcaaataatagaatctgcattataaatgcttaccccgatattcagctggaagtacaacagaagggaagactagcagcttggcaaaactaacatcagtttctagaacaatatcataatcaatgacatgcttcactaggtcatcaaattctttatttgacctggcaaagtagcaagaatattagaaacttaa

SEQ ID NO: 11128 - DNA, 447 bp, Oryza sativa
  unsure (1)..(447): unsure at all n locations
agctntaaattatagaaatgcataatgtttggagagacgtgagtgccactcatggaatctgaagagaaggctataatgtcttggcctactctattntataaggtcatatgagctaaaaagctattcaaggttcaaaactggagaatcgttggcttctaaacccgcaagtatgtgccgtatgtcccctgtcatatattatttgctatatttttgtcaaggacatgttatttcctcatgtggtattcttgggtagtgtttggtggaagatgtccccacaataagaccttgttcttgtgttttttttccaatgggcgaaacgacgaggcgaaacaattgctcccctcaaaaacataaaanaataccgaacaatgcaatgtcttgttctttctttagatgacaaaaaattgccacagtcatagaactaatcatacaagattgcaaaatatt

SEQ ID NO: 11129 - DNA, 348 bp, Oryza sativa
  unsure (1)..(348): unsure at all n locations
ntaccatatgtacccacttgtgacctgtgagctctccatattgaggaagcaagcacgctctcgtacacatgcaaagtgggttgaattatgacgagattgaatgggatttgacgaggagatctcatcgcatcattctttgtggcgtcttaattctttcttgggtgctttgctgcttctttcactcaacaaaagcttcaggatcttgttctctctatggggcccagctgaggttgaatgacaacgagttggggtataaattgctgctgctgtcangaaggcgcaaaatttgggatcatttggatattcgtgcacgggcaaaacaaatgccttccggattcgctgacatat

SEQ ID NO: 11130 - DNA, 439 bp, Oryza sativa
agcttgtcatatgattgcagcttcatacttacctcgttgatccacagtagggcgagacccccaccgcaaccatatgttcccaccccaatgccattcgggaaactgaggctactccgcaatccttgcaccttgttggagaagcatcgagtttctgagagaaagaccaccacatgtacttcttgaactgcctcgagctgccctacgccctggcaattcaaacgtaagagtttcattgtgcccggtggggactgcttcctgccgtcgctgccgatgatgcgattgtcagagattcagatattttctgtttctttggcgacacctccgaaatagatgcttccacctctccacctgtcttgcctagttgactcactcgctccgacaccagaccccttggaactagggctgtcatattggccacttgattgttggagctgacacc

SEQ ID NO: 11131 - DNA, 413 bp, Oryza sativa
  unsure (1)..(413): unsure at all n locations
tatctcgatcgagtcggnttcaaaccactctgacgatattctatctacttcaacttcaccagatcaagatgatggggcttactcgccaatcctgatgaaactccccgacgatttggctgccgtcttcactacaagggcgtcttcttcccgtaggcctaggcggaagtcgacctcaacaccgatctcgcctagcttcaaggaagtcggcgtcatactccagccacttggcacgatttcgatggaccaactcgaaggctacctcagctcccccggcgtcgactcacgaccaacagagatcgtggaatacgacgaattctgctactgctacgacgaccgcgacctcgatgactttgacgagagctttgaagacaactacacccctctctacgtcggcgtcttcatggccaacaacc

SEQ ID NO: 11132 - DNA, 443 bp, Oryza sativa
  unsure (1)..(443): unsure at all n locations
agactngttcctcgacagatgctacttttaataaattatagattcgagatctccttatggtatctaatatatttgcttgagtgagacatattcacatcgttatgggttcctcgcttagttgaattattaagcgctctagtactaggactctggataaagaaggaagttcctaacttcctatgcgaggctagagtagtaatcaataacttacgcatggtgtctaggttagcggatacattcatttgttgagtggtccacggaaagtgaggtaggtgctatgtggtgacagctttgtccgtcctttacattcctccatgttcagatacatcatagagtcatatgccgaactcagattgacagactaggggagagccagtgcccaaagcaatcgatagggtttnaccttttactctcttctagcaaaataacccataggaattctc

SEQ ID NO: 11133 - DNA, 278 bp, Oryza sativa
tgagccagctcgctaagctcgcaagctatgtggcagatttgtattcggcaagcacggggaggaggggaggatcttgaccttggaggaaaatagctcgagctcgccggcgaccacagggaggagcttgactggggatgggatgaactagtacgcggtcccctggcacttggaggagacgaactcgagctcgccggacaggatcgctgctgggggcaagcgcccgcggctgcgggcgctggattgctggcggagaggcgcatatcaatgacggtgggcgc

SEQ ID NO: 11134 - DNA, 433 bp, Oryza sativa
agcttcaataatattttggcttgccaattatggtgtacaacaccatggccagaatcttgtttgagagagtagtgctgatgagtgtgaattctctcaccacttttcctactgatctaaaccctcttttgaccgctgatttggcctgctggacagtgttcatgggtccccattgttctctgcctacagtgataacactgtttcaactaattagagaagcacaaggaggaatggaggaagaggaggcagcttttgtgtgagattacttactaacagtctatgtgcaataaataaagtttaaaattgacagctcaatctcttgaaaattggatggttaattttaatttgaatatttgtaaccgtcaaatcattgatgcacgatgatgcgcccgtcttcctttttgcaattgatagctttggagacactgaattcttc

SEQ ID NO: 11135 - DNA, 380 bp, Oryza sativa
tgcttaacaactaaaatgtggaatggttgtcctgtgttggcttgggacgagctgggacccagggtcgggttgccagttcggtctgaatcatcgtaggccttgggttaaggcaggttcgtgtgggttcacggccttgattaataatattgtatagttctaagatcgtgtttacaaaatagccctgagcaactaaatgtcttaaaatgctgtttactgcaaccctaaccctttatattataattcccttgtactccctttgcatttattctgcatttgtgggtgtgtcttgttgagtacggtggttgtactcagtcttgcttaattttcccaagcccagatgaggagttccctgaagatgaaggcttcggtgtctagctcgt

SEQ ID NO: 11136 - DNA, 440 bp, Oryza sativa
  unsure (1)..(440): unsure at all n locations
agcttncatttgattntgatgctctacatgttaattgagctgctcttttgtccccttcaaataataatcttctctttcctatcatacaaatatcaatgctattgtataataaagttaatgtaaaataactttacctgtcccaaggcgtatggcaaaggtgaatacatgtgagctgctcgttccctgtaaaacacagtgcgttcaacagacacaactggctgaacggaagaagaattctgcactcccataaataaaactgacgcatacatggagcccatggcattgaacaagtcctgttgattgctcctgcaagagtggagtatcctcagtgaattgtgacagatataatctcaaggtagcctctctaaatcagtggaaaatgttgcatatacanttttacttgtttntattgaccgtatacctttttctgccaacacccc

SEQ ID NO: 11137 - DNA, 406 bp, Oryza sativa
ttaaaaggtcaaagttaatcggcctcttattatattatttcccttaattgttcagctaaaactggtcgcaataaatgcaatgactgtgtttatccgaaccaatatgtatcgtgactcgatagaaaatgggaggtcatacatgggagcactattctatggaatgatgatgattgtgtacagtgctttggcagaaatgggaccagctattgcgaagctcccagttttgttcaagcaaagagatctattatactacccatcatggacatattccttgccatcttggatcattaagatccctatctccttcctcaacacaacagtttgggtcttcctaacatactacgtcattggatctgatccaaatgtactgaggtaaggaaaacaaaatattaccataaataaattc

SEQ ID NO: 11138 - DNA, 440 bp, Oryza sativa
agcttaaagaaaatataacagttatatattgctatttgagaacgaaaagattgttttgtagcgagacttgtattatttaatcgatttattgtgaatgttctcgaatgatgtcagtaacaatatatactttctaagtaatacaatacagtgacacgtaatgctcaccaacaagcaagcaatgacttcttaatttatacatgtgtatctagattcacctttagaattaaattttttttatgacagagcaggtatatataatcagttgaactcaaataagaaataattgttcagcagtttgccgcatataagtcacggaccaataggtcagcaaagaagcatgatggataaataacagctttatattgctattggacccctacaagtttgttttgtagtgagactcgtattatctaatcaatttattttatatattctcgagt

SEQ ID NO: 11139 - DNA, 347 bp, Oryza sativa
  unsure (1)..(347): unsure at all n locations
tcttcgctacacctcgttgcccgcgtgccctcttctgttcaacggagggttgactaccactagcctactcctcctggatcccctccacattcctttccacgtgcccctgctggttcccctccgcatncctcttcacgttcccttcctcgttcaagtactcggttggaacctcgttcccctcttcttcattccagtactggctgcttccctccgcgaattgtatcgtacaataactgttcctcatcgcggtcagccatctgtcgatacaagaaacatctgctaagtcacgaaacatttatgtttcaacaatctaagtcatgaatgctaagtgtaattgcgtacattaa

SEQ ID NO: 11140 - DNA, 437 bp, Oryza sativa
  unsure (1)..(437): unsure at all n locations
agcttcattcaggtacttagtacatattctattcaacctaccaaaaacagtactatcatcagaagtgtatatggaacagctcatatacaacgaactgactaagctcctgaattctcactatattggtatattatatcgaagntctaaacagaatggactagggctgctactgctttgcaaaagtataatcagtaaaagtgtaaaggatattctttcatgctcaaggggatgatgctcataagatccacagttaggagcctaattatgcactatgatgacatgcaagtgaaacattgttatagaagagtttgtagagtgtaagcaatacccttctttatatttggcttcgattgactgatgtgctgccttgataccatagctcaaaagcattttcataatgccataaagtaatgttagagcttgaaaagatataccaa

SEQ ID NO: 11141 - DNA, 373 bp, Oryza sativa
  unsure (1)..(373): unsure at all n locations
tgaaggctagcgtcgtagctgcccaaagcgagggatgataagagtgttatgaagctgncatcattgtcccccacgtcgagctccaccagatccaacgagcctgaagcgtgctgccactacccaaagctcaaccgtgggaagcgagggacggggagaggcgatggaggtcaccattcctgtgccgccgacggtggatccgtcactcctgaggccattggaggtggatcgactgctctcgaggccagcgacattgtccagtcagctcgcggcagcggctcttccctgtcaaagagccgtagccataaacgttattgccgtcacagtcctcacacaagtgcaatggcnntcgcgccgcacccgtcggcggtcacaa

SEQ ID NO: 11142 - DNA, 446 bp, Oryza sativa
agcttcatgaagaaagaagtcccaggattgtttctcctctattcttcgccataatcccacaaaagcttgtactgctcaacctcatctccatgtatggtcttcattgcaatccttctagctctagctaatttgctcctagatggtgacaagttccactgcagctgtactgtctttgcaaaactagttatgctcattttctcatcacccctaaatgcttctatatactttccagccaaccatttggatgtgcacctcttgagaatccactctttttgacacgtatgtctctcatcataagtcttcaccacaaaagctttatctctactgtcttctgaagtattaagataccatgggcaaccttcttcacaatgagcttttattctcctcctatcatttctaagcatcttgatctcaaccctattccttacactgtactcagtaattgc

SEQ ID NO: 11143 - DNA, 406 bp, Oryza sativa
  unsure (1)..(406): unsure at all n locations
ntcccttttgataatgcgccattggaccatgaaactgatatatgataagtgaggacctttagtgtcagaaatggttaaaaagacctcaaaacataacctctggttaatagatcatggttcacctgaggaggtgttctaaatgaatggcagaaaacgcattcatcttcaaataagttgattggcgtttgcagtctcttcaatctagtagcacgtcccatgtcttttgacatgccatcgttgccatgttttccaggcatgttgttttctctatcaaaatgttgtcgagtgttgcttaaattagaaagaggcaatgaaacttcatttgcatctaccgcagctttctcatttgaacctctgcagccaatgctgtcttattctataatagaaaaatgtatacagtcaaact

SEQ ID NO: 11144 - DNA, 447 bp, Oryza sativa
  unsure (1)..(447): unsure at all n locations
agcttgtatgcaagacaactcagaagaatatactatcgacggaccacatcaacgatgtattattctccatcggcaccacttggacgccccacggctccaccaatacaaacaggaggctctgtcatctactacgccgcacgccgggtatcttcgtcactcacccggcaagcacgcttcgccgacctcgccacgggcaccaccctctccgcctgggcgctacgccacacgccgggggcttcgtcactcacccggctagcacacttcgccgacctcgccacgggctcgagggcttcacctacctctccgcctgggcgctacaccgcacgccgggggcttcgtcactcacccggctagcacgctttgccgacctttccatgggctcggnggcttcacctacctctccgcctgagcgctacgccgcacgctgggaggcttcgtccttcaccc

SEQ ID NO: 11145 - DNA, 369 bp, Oryza sativa
tccagcgaatggtgtcttcttctagatttagctcgactgtgtgtacttcatcccagagctggaagaattgtgccatggcttcattggagagtgcaccttgcagatctctgacccatctgttgttggttaaagcttgtgccactgtcagctgtgagcggccaacataagtggacaataccggccatcgccaagcaatgcttccaccatttagccaattggctgtccaaaactttgtgtctttgccgtttccaacacaaaattcagcagctgagttaaagattttctccacgtcttctccaagtttatatcctgacttggcccacggtcgatttttttgctcaagacttttggctaaccattttagtctta

SEQ ID NO: 11146 - DNA, 445 bp, Oryza sativa
  unsure (1)..(445): unsure at all n locations
gcttatcagcgctatactaatgcttatattgttaacagnaggaattgactaatgcaaatgtcaaagtgaattttcaagcataaattactcaccaggatggaaagagcaaaatataagataacaaaatatgcagcatgtactgtgtacccgaaatacccaacatcaaatgcagcaattggttcaacctacagtctctactctctagccagaatataaaaaagtgacatgctgtaatactgcaagagccgatgctattggtttgtgtcttagttcgcaaactaacacatgttatccatcagccttaacgacttggcaagcgttgaatgcccttgaaaaaagacataacaattctgcctgattaaggaaacacaagattttgtgccttccatgtgttngagtatggtaatccaaagaatcataacagcaatttgtgttgtatgcttct

SEQ ID NO: 11147 - DNA, 402 bp, Oryza sativa
  unsure (1)..(402): unsure at all n locations
ntacccataggagctcgtgcttggggaagatattgtctatatgtttcattagaagagtaatgttttggtattcaaggtcaatgactcccagaactcctcctttattcttgggtttgcataccatgtcccaagctgccagggactgaggttaattaattattagttaaaataactttaaaataaattaatactataatttttcagaatattttttataattattttgagaaagcacacttactatttagtactatgagtcttaatgggcgcatgaaaaacgaggaaatagaaaattttaaaagggcctctcgaacgtaaggggcatcacaaattaatccccaccatccgagctctatataaactgcagaaacctcctaccaaattccaaagcaactgaagcta

SEQ ID NO: 11148 - DNA, 443 bp, Oryza sativa
agcttcctttagtagagtgatttccttaaccgaatatagcaggaatctgactactaacgacttgacaattctcatcggctaatctcaggacttcgaagccgatgctgactctcagccgatgactactccgggcttaccaaatttcactgttaacacgcgcgtgccgccgccgcctcatgctgcgcgccccctccgccgcgaaatcgccgccgccgcctcttttcggagagagagagagttggggaaaagatttttttttagtgttacagccggcggctatatgttttccgattcgggataaatccaaaccgtctattacatcaaacggctgagatcgatctcgccacgggccgcgctgtgcattatgggccgcatgcgttaaggtcccaagctggccgggctgatgctataatgtgtacttggccattttctcttttcgattt

SEQ ID NO: 11149 - DNA, 374 bp, Oryza sativa
  unsure (1)..(374): unsure at all n locations
nttcaacagctcaaactagccatgagttctaccccggtgctagcattacctaatttcagtcttccctttgttttggagacagatgcctgtgcttatggagttagtgctgtgctcagccagttgaatcaccctattgcttactatagcaaagctttgggaccagctaatcagaaattttctatctatgaaaaagagtttttggctataatgatggctgttgacaaatggagatgttatttgtagcgctgcccttttactattcgcactgatcacaaaagtctatgtcacttgaatgatcaagttcttggaactgatttgcaatagaaggctatgactaaattgatgggttttcaatatacttttcaatacaaaaa

SEQ ID NO: 11150 - DNA, 437 bp, Oryza sativa
agctggttcttcttgttctgttacactgttggagcttgttatcttaattcccaatttatataatcaccaacaatcaagttgttatcggagcttcaatagcagagctctgtacttaatttatctaatcaccatataagctcaccgtatgtatgatgctgatataatagccaatctactgtactagttgtctttggtatcaactgcaaaatgacatggaaaatattagagccaacaaccggctatactattgaccttgctcttaagtttggaaaattttgtagcccttgctacgttttgatctgtttctgaatatcttaaagccgcccgttgatctttctaccttaattttgtcatgggcgtcgtgattttcgttcaaagcatacatgcacattgtgaataaacgtcggccgaatccgactcaccttgcatggcaacaa

SEQ ID NO: 11151 - DNA, 376 bp, Oryza sativa
tgcttcacagggcaaaggcaagagagaatgatgagctgtagcctctttttttcttgtcgctagtatgggggcatgtggaggtatgtagtggttacatacttgcatgtgtacgctgcaggttgtagggctgagagcctgagatctttcttcctaactttccaggaaaaatggtgtattacagctcagcagctggctcttgcagttcatttgaaataacaggaggcggcgactgctgttaggtattttgctgcaagagagagtagctgtaggctagtgtagaagcagcaaatgtattttctacagaaggaatggtttttgttctatcactgtctagtgtgttgcgtctaactcttgttacttggaacgtctgacgtct

SEQ ID NO: 11152 - DNA, 447 bp, Oryza sativa
  unsure (1)..(447): unsure at all n locations
acctgcggcatgcaagcttatgtgttgtagaagtgcactactgttaaaatgatctctgctgggtcgacccaaaaccacaatagtctcggttccaaaaaaaaccgggactaaaaatgatctttagccccggttgaaaaccccacagccattatatgatctttaatcccgattgttttaccaaccgggactaaagatggtctttagtcccggttcattccgtgtcagaggcatgtcagggggcgaggatctttactcccggttggtgacatcaaccgggagtaaagatcgtcactttactcccgattggtattaccaaccgagactaaagatcatgtagatctttactctcggntggtattaccaaccgggagtaaaatttaacacattgtatataatctctattccttatcctcttctccacaatcgcaaccacttagatccttccct

SEQ ID NO: 11153 - DNA, 387 bp, Oryza sativa
tgccaccgctggtggtttctaccacgaaactcagttctttatcgacccccacacccaaaaaaaaaaaactctagtactgcacgtgcggctcctctgctgctccgcgacaagccgtgccgcggccgtgcaagcgcagctcgtggtgatcgtggcgcgtggcgaggccacccacatgtgcggtgccggtgcgtgcggactcgcgcgacaaatccgctggagacgccgctagagcttactactccccgtgccgagcgagccatcgaccgcgacgcgacgccttgaccgcgcgcgggagccgccacccgaatggttccccggattgcattgcattgcaccgcggcccagaaaccgcagaattatccgtgatgtctccagatgctactagaa

SEQ ID NO: 11154 - DNA, 441 bp, Oryza sativa
agcttgtgcagcacctgcatcacctcttctgcgctgatccttccgtcgccgtcctggtcgaacacgaagaacgcccggcgcatgtcccccagcggcacgccgctcttgtgcacctccatgaactcttcgaagtccatgtagccgttcttcttgaagtcggcgacgcagatcatccgcctcgcctcggccgcggcgtcggctttcccgaacttctccaggagccccttcagatccttcctggtgatccggtcgtgctcgccggcgatcttgttgaacactttcttcatctcgtcgtcgtcaggcttgtagatcctcgtcaagtcggagaactgccggtccccgccggacagcagccggccggttggccggcctgcggccttggacttgagcttctcaagattgtacttgaaggtcaaaaggctcagatgagacattttggat

SEQ ID NO: 11155 - DNA, 388 bp, Oryza sativa
  unsure (1)..(388): unsure at all n locations
tcttatttggaccggacgggggcctgacccacgcagacgtaaacgccaggagggccaacccgccgctggctcgctttatatcccgcgtgagctccacaccgagcgaagcggaggtccggaggaggaagcggcgagagaagctcagctaggcagggcgacgggcagaaacgcgaccacggcaacaaaccccgccgcgcgcgcccaccgtgccggttacatgggagtagaggcgggcggcggctgcngtgggagggcggtagtcaccggattctacgtctggggctgggagttcctcaccgccctcctgctcttctcggccaccacctcctactagctatacacacccatctcaccataacacacatacatagatagatagatagataga

SEQ ID NO: 11156 - DNA, 431 bp, Oryza sativa
agcttgcatatatctgctttcttctcttgtcaaattaagaatctgaagtgttatacagattactgccaaaatcaactaatgttttggtgaataaaatcaatgtgtttgttatcaaaatttcttatgcattaccaatgtttggtaacaaattaaatacaatcatacatttgtcaattttatcgaacaacaaaatgacacaatctgaacagtcgctgaaatactgaaagtctgaaaacatatttgcaggaaatcttgcatgcatggccgacctgtatctgaattaaattagtctgaaagcgaccgcaactactacctctggctttaacttgtgacaattttgcaagtctccgtaaggctgtgtttagtctccgtaagcctccgacttatgcgggttccttcctctaaatgaccgcgccttgcgacaccgtgcc

SEQ ID NO: 11157 - DNA, 364 bp, Oryza sativa
cgagattcagtactagctgatccatataaaacatatgtgtgcaccaaaaaagaacaactcttacaaacgtaataatgtagtactactaagtactttggctgatgtcccggtgccttgccttatctcaccatctttctcgcttgatctctagttttttctatgcagcggacgtgcctatcagattatatgatctcatctcccagcatggattacataattatcatattttgattgaacgattgtgaactcacagacgcctccaacactaattaagcccaggtgtacgtgtacgttctccaaagctaaatgagcgtgttaaacgtgtccagttacgtatactgatcactgatcacaactagtcagt

SEQ ID NO: 11158 - DNA, 363 bp, Oryza sativa
cttgcatattacctatactgtgggatgagattgtaattaaaaaattattgtatagcccatcgtcatcattattctctatgtatatagcataccttgattccagcatatatactgcaatgtctcgcattatattttttacttctcacaaagtagggagctggtgtgggaagtagttgatatgtggatccatgtcattctaacttctttcttttaataaaaataaggagttggtatcggggactaatataaatatttagagatatataacggcctatgtgcataaaattaagttctaataggattatacaatatagataccaagatttatgattccatgagtgccatctgtctgagataaataca

SEQ ID NO: 11159 - DNA, 389 bp, Oryza sativa
tgcggtgaccacgtcgacagtagcaaattgttggcttgaattggtttggatactggtttagggcttgaactaatctagcacacgaagccctcgccgccgccgcgatgtaacggtttccctcgttgtcgtcgtcactgccgccgccaccgtcgctgcgccgctatcgccagcaccgcagccgcctctcaattaggaacatgtcaagaaagatggaaggagatatgcatacgtttgttctgtttgtcgagttaaaaaggaaatgtgattggaacaaaaaaaaaaagctatttggggttttctataaaatgagataggtctttcatatcaaagctgatgtggcaattttgctaaggtggaatagcaacgttacaatttttttacatggctac

SEQ ID NO: 11160 - DNA, 442 bp, Oryza sativa
agcttagatcaccagctggaatcggcaggtacttttgggtcaacaattgggtcagatataggatcagtgggtatctcactagccgattcacgaaggattgcattaaacattgcaacatctaaacggcctacacattgctccatcacctgataattcacaaaacacatgaatataacatttatattaatattttcagtaagaaatgtttttcttttctttttgtcaagctaaggatgtcaaagaataccaattttgccaatactggtaaacagccacattcatgtccaccagcacggagggggcatattctgttgaatgcatcgtgaaatgcagccttccacaggttaacagaaaaggtgccttgctgctgatcacccaaagaaggacctaacactctcccagtctttggggttgacgatccttccaccggagtttgcatgtg

SEQ ID NO: 11161 - DNA, 421 bp, Oryza sativa
  unsure (1)..(421): unsure at all n locations
agaaactcaagcttatcggccgttttcgatgatagaggctagccgatgattcttaaatgacgagatcaatctagattatgcggtatatatgataactcggtggtttacgtaagcaggattagagtgtcatgaatatgtaagcactaatcccgagaacgcaagccgccataacaagctttacctcttcgtcggagatcgaacccgatgcagcccaactcgaaagcaaaaactcgaaacaataaaaatagaaaagggtggtgatgcgctgaagtatattgaactgtcgtcctttgattatttggtgtcgggtcatatttatacccaaagtacataatatgtccttactggacacagctctttatatcntaacacaattanaatacgaatgagtccttcaggtggacccctaccaaaatatctc

SEQ ID NO: 11162 - DNA, 448 bp, Oryza sativa
agcttccgtgctcttcaacctcctccaagaattctacacacccaacttcaaaagcatcaagcaacaacaacacgggaaagggaagccaagaacaggaggaaaaaaatgatcacggccaggtaaaatcttagcaaatttcggattccgaaacgccttataattcgagaagagaacgaggcgccgttctacttgatcaatacgtaaggaagacgggcagattgcatcaggaacagcaaaaagaataagaagagggcatttggtttatacaaattcagaaactgacacctccgcaacacaccaactgcaaaacaggagccaaaaaaaaaaacaaagcagagaagagaaacgaattcatggcgtctaacttctcgcgcacgcattggtcgcgccaggaaccgtcaagatcaacgtgctccgatgggagagaggcgaacggagaccaaccatg

SEQ ID NO: 11163 - DNA, 426 bp, Oryza sativa
tctttcaggaaaaaaggatttagcagtctgggaggacattcttttgttgtattgctcctgcaaatttttgagaggaggaaatgctgaaattttgcaacctgcaaaccgcaatcaaattgtgtggccagttctttaccaaccagcttgtatacatttgtacagtgcagagttcggcccgtactaatcattagtacatgtgtatccaactgctactacctctatcccataataagtgcagccatgagttttcacgcctaactttgaagaatgtataaatcagtagcggagtagcccgattaaagtactactcccttctgtctatcaatgcataaatcatgcgtaaatcagtactagcagtattatgtagtactatcagttgctgagttgcaacaagcccaagtactgtaagtagacctcagttttaac

SEQ ID NO: 11164 - DNA, 438 bp, Oryza sativa
agcttgagatgacaattatgcaattttgtttattatggttggagattcactaatagacttcaataatgtgttctccttattttagtttcgttacttaatttgttcattgggtgttttcaatgatttattgaactacactcttatttgagtactactatgtaataattggctgtaactctcttgagcaaaggccgggatgttatattccattatctaaaaaaaataaaaatgatatttagttagctataatatgatagggacagtagaaatgcaaactaagaattgaccaatgtcgagaatgtaaacgtctcgctccagtgatcacttggaattagtgccaggctgctatgggagcaattatagtggtgatagattcattcaacttgcaccagtttgatttctgctcatcttcctggacacttcccatcaatctcatgc

SEQ ID NO: 11165 - DNA, 408 bp, Oryza sativa
tgtcttcagcacccgtgagcaaaggaaattccagatgactcctaagcctattatccaatggtagttggttcaccaccaaacttattaagatgaaatgcggaggatggctttctggtaggtggtttaccgtttcatctaaccatgcaaaccaagtgagcacaaagagaacacaaataagtgaataacaattggtcagttgtggtgttgggtggtggtgtatatatatgaatgcatctcctgcaaccaagtaccaacttagcattgagatagcacaccatggggaattattcttttttctaataagagagaaaaatagaacaagatgcatgtgtttaaaagtggctcttaattactgggtacacacttcagtaactactccacagaaacggctattactatcgacccatc

SEQ ID NO: 11166 - DNA, 448 bp, Oryza sativa
  unsure (1)..(448): unsure at all n locations
agcttaaaggggagaatgaaactttgnaagagactaatctttctctatatgcttcttatttgtgtccatatagattcactctggccatgtgttcttaaaatgattgcgtccacaatctaataagacaaagcaaaatttgtgctacacagactcgaaaatttagctctaggagttgggtctgaagcggagttgtggagtagccaaaatccagctccacatctctagttcattttgtaaaagtgttccacctagctctgctcccattttaagtgagctccagctccaggtgtcatgggctttgggccgggcatcctagacccattggataggattagggtttgttaggattagataaggtttgttaggattagattaaggagtcctccatctatataaggagggatcctatcctatgtcaattaggcattagatcaagatttatcttagt

SEQ ID NO: 11167 - DNA, 411 bp, Oryza sativa
tattgtgatccgttgtacgacgggacgaacgagcctacagtgtttacactgtttgaatctgactctgatttatcaagagaaccgtctcacatgtacaaattaatggttagttaccacagttcacgttcgcctcgttggccctagctagttgcaccacgaggaaataaacatgtactagtacctggacgagtgaatgcgtcatgggaaatcttaactaaaactgctttggttctacgatagtaggtagatgcgtccaatgcaatcgttgcaacaacagctagctacattttgctccatagattggcacttccgagtacattaacattaccatattgttgtgactgtcacgttttcgattgtttctcgcgtgacgcactaacttggctcactagctagtttagctggtagtgg

SEQ ID NO: 11168 - DNA, 440 bp, Oryza sativa
  unsure (1)..(440): unsure at all n locations
agcttgtgaagcttttgcagatggcttgtagttggaccctgcaaatgaagatatagcgaaagctttaaggtaactattctgtattnttcatcccgtgagcatcttgtgatctccctggtgcccttgtgcatgcgtagttatcgttattagaaaatttcttgcgtgccatttgaatgcttctcttgctataaagttgaaagaaggatctgtgtagagatttctccgtttctgtagtacaattcttttttttttcaccctgcagggatgcccaggaggccatgaaggaccaaatggagcacagaggttgattcagccttaccttgcgcctctattttgttgctagctactccctccgttctataaaaagtataaatctaagacatgcgacatattctaatactatgaatntaatataaattaggatatgtcacatctgttac

SEQ ID NO: 11169 - DNA, 424 bp, Oryza sativa
tgtagcgcagcatctaaagacaagtgaaaggagggagtttagacatttattcaattaatagcacaagtttttagattaatttgaataaagttagaaaatcaaagtaaaaagtaagtaaataaagtaaaccaagcttgcaagataagttgaaacaaggtcacaaattttgtacttttgaacaacaggttccaaaagaaaataaaagaaagttataaaatcaacatgctaaatttatttcattgcagcaaaataaaacaatgttgtaaaacatttgctgttaaatgagccattagtacagtaatagatgtacagtactaacaacactagaataaattttgaatgagaaccactaaaagagattatgaagtgcatgtgctattacgttggtttaattaaaaagagaaagggaggagagcagttctac

SEQ ID NO: 11170 - DNA, 422 bp, Oryza sativa
  unsure (1)..(422): unsure at all n locations
ccggaccaaagcgcctgagcagcagcttgatgtcatatactncttttattctgatcttacccgcaatatactcatgtgagaatctcgattgaagaatcgaacacacgcccaacgattttgcaattacctccctatatttctatttgcattcgggatttgtggagaagagggaccaaaaactgacctgtatctgtggtcggcgtagtacgggaggttggagagcaacatctcattgacatcgaacaatccgatgctgcgccgtcactcgtagcccgtgctatgcggtcgccttccgtgcaacgacctcaacgttggaacagtatgccaggtctgagaggaactcccgcatgtagccggcgcacttctcagacacggactttcacgtcgctgggttgttttctcaccctgtgtaacggattaat

SEQ ID NO: 11171 - DNA, 376 bp, Oryza sativa
  unsure (1)..(376): unsure at all n locations
actataaatactaagcttaacattgctggcgatctaagcngaantttatctctttttatgcgtcgataaattgctcatgcgttcttcaatccaaagggcatggtgatgtagcaatatgccccaaagggcgtaataaacgaagtcttcaagcagtcggattcttttactcggatctgatgatatcccgagtagcaatccaaaaagctgattaactcgcagccggccgttgagtcaactacctgttcaatgcgaagtaacccacaaagatctttgggacacaacttgttgagggcgggataatcgacacacatgcgccattgccccgtctttttcaaaccaggctgggttagcagcagtcggataaggaacttttatg

SEQ ID NO: 11172 - DNA, 404 bp, Oryza sativa
  unsure (1)..(404): unsure at all n locations
cagctggggactttgggctcgcacggcttgtagaccatgactgatgctcacaaactacagtgatagctgggaccatgggttacatggctccagagtgtgtcactactgtgaaagcaagcaaagagactgatgtctacagctttggcattcttgctctggagatagcttgcggaaggaggcccgttgtgccaaaggaagataatgacaggatcagtttgggtcaatgggtttgggatctttatggaagaaatgagatacttaatgcaattgatggaacgcttgatggtgaatttgaagagcgggaagatatttccttgatggttgttggactttgggtgcacacncagattataatatccggccttaattcgccggtcataagcgtcctgaagtttgagcccatt

SEQ ID NO: 11173 - DNA, 443 bp, Oryza sativa
  unsure (1)..(443): unsure at all n locations
agcttcaacaacgctagaagggcagttattaactatctcgagtagccggtgtgaaaaacacacaaagaaacgaagcaattaaaccagctagtactcatgtttcctcgcttcgatcgatcgatcatggcgccgcggcgaagccggcgaccatctatggctttgcctccacctccacaggcgggagcttggggaacttgaggaatggattcttcttgatcaatggcagcagcttcttgaacagctcggggtcagcctccgcgtcgtcctgcatcgccaccttcttctcctccgccggcgggtggtagatcggcggcgacggcgtcngcagcggctgcttgtacaccggcgtcgggtgagagtacgccggcgtcaggtaggagtacaccggcggcgccgggtgcgtgtacgactgcggcggcttgtggtacgccgcccgcgctggc

SEQ ID NO: 11174 - DNA, 392 bp, Oryza sativa
  unsure (1)..(392): unsure at all n locations
tcaggtccatcctatgtcagagtcgngcatgcaggcttatatgctagctggaatgtactaggttgcttangtggattccatcgaaggaagggattttttttcccattatatagataagatgcgcaccgtcaccacatgcacacacatcatactcacacactcatgactatgttcttttttaacatacggcaaaagagacggagacaaacaacaacaatttacttaaacttctgcaggctactatttctgcaaataatttgttatatatttatcgataaactttttaaaaaaatttgacatatgtaattgttatgtagtgtagctacattgtaacttgtatgtaattacaatgtaacttttacatcattntaaaatggtagattctgttcaag

SEQ ID NO: 11175 - DNA, 223 bp, Oryza sativa
  unsure (1)..(223): unsure at all n locations
cctgcctgcatgcatgcaagcttagctcgttgagggcccagttattttttatatnggcacacatactgtntccgaacacaaacgtgtactacacgcatctttaatctccccgtctgtgctgtaccacaccagctccctttggccgaaagatctacggtgggatgagctcggagaggtctgagagaaccagacattataacccacggacgacctaggaggacgg

SEQ ID NO: 11176 - DNA, 409 bp, Oryza sativa
  unsure (1)..(409): unsure at all n locations
tcttgtttggtcatactagactcctcccctttctatttatggccggccaatcactagcgagcataggtcaaactggggtacgttgcttagatatcacgagtgaatgagtgattattggcgattgtttgatgaaagaaaagtagaaaacatggggtcctactaatactgtcttctaaactctattcatcttaaaaaaacgttcaccttttacgggtagtattgtagccgagaaagccccggaaaataggggttgcatctgctaattaagcagcacgctttctctagattgcttttaataattatcattacaaactgcatttgtttgtaggctaaaaagatattcggntagccaaaatttgtaaggtgtgatcatatataaaaagatctaaagttgcaaaattcgatccac

SEQ ID NO: 11177 - DNA, 437 bp, Oryza sativa
  unsure (1)..(437): unsure at all n locations
agctttggatgactatctttctcggttatataaattttgagtgatcttagatctgtngattcttcttacgatgctaattatccacaatctgagatttctcgtcactttttgaatggtcttgacatgtctatttgggagatgaaagttacatctattcaggagtctgttaacatgtctactttgactttggattcgctttacacaaaatagaaaactcatgagatgaatattcttgctcgtaaagttgattctaagtcaagtgctttggtttcttcctcgacttctttggatgttggtggttcttcatcgaagtcttctgttcttgctttatttaatgccatgtccgatgaacaacttgaacaattataggaggaggacttggttttgttatctaacaaatnttctcgacctatgaaaaatgttatgaataggaaaag

SEQ ID NO: 11178 - DNA, 407 bp, Oryza sativa
ttagaaaacgacctgatctcacaccaaacgctatgtctttctcgtctatataagtagccgttgctagaagctgccatgtatatagtcctaaccaacagtcaggaacagcaacaaaagtaagccaagaatctctctgcctcccaccaacaaccacacacactcacagctttggtcatggaggtcacccccaaccacacgcagaccgtctccggctgggccgccatggacgagtccggcaagatcgtgcccttcgtcttcaagagaaggtataaagaaatgagcaagaagtgattgatatttggatagatttagatgtagcttgttgttgagaatgagatttattgcatgggtgggtgcacggagaacggggtggacgacatgacgatcaacgtgaagtactgcgggat

SEQ ID NO: 11179 - DNA, 440 bp, Oryza sativa
agcttcgcagaaccctcattttctgcggttgtgcactcaatatcctcttcgccaagaccttggatgatatgcagattcctcgctccgagctaaaaccaagcaatgcgccttttcacggagtaattccaggattatccgcaactccactcggccagatcaccctcccggtcacttttggcactcgggaaaacttccgcacagagaatatcagctttgaagtcgccgatttcgagacaacataccatgccatactcggacgcccggcgttagccaagtttatggccgtcccgcactacacttacatgatgacgaagatgcctggtccccgaggagtcctatccctacggagcgacatcaagcaagccgtcacatgcgacaaggagagttgcgacatggcccaaacccgcgagatggcgtcagcccgagaggatatccgactg

SEQ ID NO: 11180 - DNA, 374 bp, Oryza sativa
  unsure (1)..(374): unsure at all n locations
tcatcggctagcctctattatcgaaaacggcctatatgcttaggcttcgatatcaagctagattatgcggtatatctaccatctcgaacgagctttcatcggtttgtttagatctcatgtttctctttcacacttaatgctgcatcgattaggttcgatctactaagtactgtcctgaaacatttcatcaatccttttctttgattgctaatagagatagtatcggngtttcagctgatcatacctgatttagtcgttntacttccttatntggctctagatcatctaaatccaccccttatgccaagataccatccttctgaagtatattaagctagttcatcatgcctgctagatcgatttagcttcatata

SEQ ID NO: 11181 - DNA, 441 bp, Oryza sativa
  unsure (1)..(441): unsure at all n locations
agcttatagaaggatagttgctctntaccaagatcctggcttcatggtgtcattaatttatgttttgtcatataattggttcgtgagttatatatttcacgtgaactgcggtaggttattcccatattgatttatatacatgcataattgcattagcttattttgagttcttgttgatagtgtatctcaggattagcagaatgtcagtatactattgctgttcttatcagcttttattcaaggggaactggatctttctcatgctgtttcaatgttttcaatcgatgtactgatcttcttttttattttcatattgttaatttagacacaggtgactatttttaacaacggtgcaccaaacatgacaataattcttagagttgctgaagagacctgcaatattagcattcaccgagcaattgcgagggagataagtcaagt

SEQ ID NO: 11182 - DNA, 169 bp, Oryza sativa
  unsure (1)..(169): unsure at all n locations
tctgcccacatcagagacgatggctgcgccgaagcatatgtcgttcttggcactcggaggggaggagacggtggcggcgagcatgatcatggggaagtcatctgatctccacggctgggtgacagtgtcggngaggaaaaagcctttcttcgtgcgcatgttgaaagca

SEQ ID NO: 11183 - DNA, 444 bp, Oryza sativa
  unsure (1)..(444): unsure at all n locations
agcttcanaagatcgaccttagcaacaactaactccaagggagcataccttctgcttttggggatcttactgagcttcgaacacttatactcactagcaacaggctttctggtgacataccacaatcattgggaagcaacctttcactaacttatgtcgatcttgggaggaatgctctcgcagggagaattccacaatcattggcaagcagtacatctttgcagtttcttattctcacgagcaatacccttagtggagaactcccaaaggctctcttaaacagttcatcgcttatttttcttgacctccaacagaataactttgttggttctataccacctgttacggcaatatcgccgaaaatgtactatcttgatttaagattcaaccatctcacaggaacaataccttcctcacttggaaatctttcctacctaacttatc

SEQ ID NO: 11184 - DNA, 416 bp, Oryza sativa
tcttcttgaacacccacttgcaccccacagggttacacccatattgtctctctgtcacctcccaagtcccgttagcgataatggaatccatttcactacggacagcctccttccagtagtctgcatcacgagatgcatatgcttctgaaattgacttaggagtgtcatccacgaggtacacagtgaaatcatcaccaaaagacttagcccgcctttatctcttactccttcgaggagcttcactgacatcctcctcagagacaagttcatgtgtatgttcagtttgttctggtggtgtgattgaactgggaattatttcagagggttgggtcgaaccactatgtatatccttcattgggaaaaagctctcacagaatgtagcatcatgacactccataattgtaccaacatgcatg

SEQ ID NO: 11185 - DNA, 450 bp, Oryza sativa
agcttgcatggtcttgcaagatgccagggttcttttccacccagcaagtgcatccaggcgaatgtttttcggctatctcgcgaagtgaataccagggtgcagatcccctggagttggcttccaactccaaccggtgaatttggaccaatctgaccccttactttgtttctatgggctagatgtagccatgtcacctctttctaattacacatttacaacagatataatcctatttacttttatttttttgtgttgtccgtccattcagatcaatactctcggaagagcattatagatcatggagtaaaaaataattatctttaaacttttttaactgagttgttatgaaattaacggtattgagacctgtatcgaactcattcatcctaataatcgacagaacaagaaacttctatcggtgcaatatttttgttttggttgttcttatct

SEQ ID NO: 11186 - DNA, 412 bp, Oryza sativa
ttgcaaggggcgaagataagatacattgaaatggaaaagcttgcttatgccctactgatggcttcgtgcaaacttaaacactactttcaggcccacaaagtcactatgccatcgcagtatcctttgggcgaagtgctccggggcaaggaaattactggccggctcagcaaatgggcagcggagttatctcccttcaacctgcatttcacacaaatccctcacagcaaatcatagaagtttcacacaaatcacagatgaaagaatcacaaatcaattcatccaacacatatccgtcaaagcaaatcacagaagttccacataaatcactgatgaaagaatcaaaaatcacatatccctcaagcaattcatagaaacaatcaccattgcgggagccggatccattgcgggactc

SEQ ID NO: 11187 - DNA, 450 bp, Oryza sativa
  unsure (1)..(450): unsure at all n locations
agcttgacagcttcaaaccatccctgcatgtttataactatgattaagtatacaaacttggcacatagcagaatgaaaaagtatgatgcttcaattaggaattccatcttacaggtattaacaaaagatcgatcaaatcaaaccattgtatatatgttcacccccatgataggcaaggaacccacgtgcttattgtttcaaaacaaaatatgcatgattttatgaacatgacaaaggaattacctgaaaacaccagcaaatgcaagtgcagtgtattctcataagctgagactgcatgcgacatctacagagtcaattacattttggtctcaatcacgtgcacgcagtgcttctacagctgcaaggctggtacttcctccatttcgcaatgtaagactntttagcattgcccatgttcatttagatattaatgaatctagacatatgtat

SEQ ID NO: 11188 - DNA, 395 bp, Oryza sativa
  unsure (1)..(395): unsure at all n locations
ttaccaatggtaattggtggagattttaatattattattatatccattggaaaagaacaacgagcgatacaatgatagatggcccttcttatttaatgctgtcatagacagtcttaatttgagggagatcttgctctcaggacgcaaatttacttgggccaactctatgccgaacccaacttatgaaaagttggatagagttttggtgagtaccgagtgggaaacaaaaaatccgttagtgacagttcatgctctttgtagagacctttcggatcacacacccttggtgctagacacaggaaaagggacacatagaaattctcaacctttgtttaaatttgaattgggatggttattaagggatgactntcaaaatcttttgtgtagaaattggt

SEQ ID NO: 11189 - DNA, 397 bp, Oryza sativa
  unsure (1)..(397): unsure at all n locations
agcttcctaaatcctaaataatcattctatttctaccatgcttgattgaggatgtctttcttatattaattntttatatgcattttcttaatgcagaatgagaaagcgaagtaccatcaggaataccttgactctataaagatactggaggagaaatggaaaatacaccaacaatcacctaagaaactggtacatctttattttaggcactgactagttcatcagtcctcttattattttctcattgttggcctggattaatgtctgacttaaaaaaatcacttacattaactttaataatttagtttctcatttgggagagaaggggaaagatccacaagttgtttgtatattctaacttaaagcgattgatgtgcaccaataatgggtaaacatg

SEQ ID NO: 11190 - DNA, 390 bp, Oryza sativa
  unsure (1)..(390): unsure at all n locations
tgcagttatagcaattaccttaataagaaagaaataatacaacttgtcaatcaactgttgttccatctgttaggcatcaaattaaataaatatttcctaacgaacagttatgcaagtgaaggtaaagaaacatgcatttaatgaatataggccacaaggaatccaccagtttcaaaataacaaatgtaaaacgtgaggtaacatataaatccagttagcgcgaacctgaatctgcaatgtacatacttttgaagtaatcagtggccgtataatttacacatacataaacgtggtggcctaatccaaatgatgcaaacgacatagaatgcaatatataatattgtagacatacatagccaatgtttctcanaactacatgagtatagagat

SEQ ID NO: 11191 - DNA, 445 bp, Oryza sativa
  unsure (1)..(445): unsure at all n locations
agcttcaacactccgaactgtccttgctctatgcacctttgctctacaacacttncacacgaagataatggaagacgaggccatactaaaaggagaaccacctcttactactgaactagccgtgcagtttagattgcagaagaagctgcttctcctggatgtgatacagaatcttagtcgcagaatcaagatgctagctctagacaaatccaccgtgtaggatttttcacgttttggaattgctttctcggacaatcaattaccctattgtactgattctggagatgacaataaagccccaaattttgtcctgttttcttcattgtccagatgccagagtccaatatggcacggatggttaacaatcagattgaattgatcgcaaattataatcaagtattcgttgccagttgcatgtgctctaaaatctaaattatatgttttt

SEQ ID NO: 11192 - DNA, 357 bp, Oryza sativa
  unsure (1)..(357): unsure at all n locations
tccagcgtgatgtagggtcaacagcaacatcacctttattaccaccataccttatttganaagcagaaggagcaaagcgtttcaggttgcacttcatggccacttcattagcaaaagcagatgatatctttccaatcccatcagagaacacatgctgtgtaccattttttatatctgagatttcttccacctcatacttctgaacctttaatgtttcggttgaggaactaaaagactgaccaagtcttgcagcatattttgctacatttctgatgttacggaaatcccccatccatgtcctaatgtcgctagcagctaatccctggcgagaagcaaacatccatgcagagttatctc

SEQ ID NO: 11193 - DNA, 444 bp, Oryza sativa
agcttagtcggatcatattaatctttattaaaacatgaggtttatttgtaaaccgtgtgatttgtaaaattatatgcacaatatttgttggatctttctaaatataggccagtgatctatttgtaatttttttttctcaaaggaaagttgcatagatagagtaagagggtatatttgcaaaatattttttttaatgaaaagtgtacattgtaaagttatatccataaccttactatttttcttagtaggttaaggaagcttctagacaaagtgaatctaatgaatcagatttcttcttgctattttgtcttcatgtggatccagtgtctattatttttgttgattatgtggctcattctagttgattcttgggattcaccattcacttatatagatacggtgtacagtgctatacagtaatatattatattataatcaatggat

SEQ ID NO: 11194 - DNA, 413 bp, Oryza sativa
  unsure (1)..(413): unsure at all n locations
ntgatcacccaacagacacaatactgagtgggcagagttttgtgatcaataagatcaccggtgaataccaggatcgtgtttcttggaaagatccagaagatcctgcaccaggtcctttctccaaccatgtagatctaattagattgaaccaatatgtctctctctggaatcaatctaaagtttattggcagtctgggaactggacaggacaagcattcacatcgatccctggaatgccactaaatactgaatacaattatgttttcattaataatagtcaccagctcaagtttatatacaccacaaaggatgtatccataatcacaagaatagttcttaccgttaacggtcaactccaatgccatacatggtccaacaaatcagaggaatggatagtacaatggtctctacct

SEQ ID NO: 11195 - DNA, 439 bp, Oryza sativa
  unsure (1)..(439): unsure at all n locations
agctntacatgaggatgttcgnggttttttctctgacgttggagacttgaatgcttccgtggggagattgcacactatagcgggtacattggattctcgagtccaactgttggagagctcccaagcatttgtgtatcatcgttgtcgtgatgctcctcatccttccacttcggcgtgtcctccttctcctccacaagagtaaagacctttttggtgcttgatgccaaaagggggagaaaagagtgctttatgttttgtgggttgggactagtagtagtgaggatagtgccctcatttctaataggctaaggtgttttgagctatattttgtatgggtatgggctattactctatattgnngtgtctttgtcgcnttgttaaactctatgtcatttggacccttcgtggtcttgtaatagcctatgtttatttgtgagcc

SEQ ID NO: 11196 - DNA, 379 bp, Oryza sativa
  unsure (1)..(379): unsure at all n locations
tctacattatactgcanaagtaacctcatttatcagttctataaagggtagaatttcctaatattgttgggtgaactcaatatgtgatgaactgtctggtggatatgtttctggaatgatcgacaatacaagatgcctcatttccatacaaactagaaggcatgattattatagtggtgttgtacttgcaccaactgaacaaaggttatcggttcaaaccaaatcgaaacatcaatcagcacacaagcactttttatgacactttgtcaccttcatttgtccattatttcatcctgtgattgtaccacctcctctgccccttccctcaatgttagtcagcactgaccaggattagatgaaatcttcttattttcttgat

SEQ ID NO: 11197 - DNA, 416 bp, Oryza sativa
  unsure (1)..(416): unsure at all n locations
agctntcgtgtagatgtgatattgatctgacctctatagattatcttcaaacatatcacttgttccataactgggaatagctctcacggacaagcaactcggattcactttctttacatttggttcacttcccactattctcttcatgtagtcctcagttagcattcaacgtattcctttacacctttgaccttgatgtgttctttcccgatttctcttatcaatcacctttcgacctacttctttgcctggtaataaacatctttttcgatatcttctatcaatcaccttttgacctttgtcaactaagtactcttcactccgagagttgtggatgcttctggtgacgatgtggtacttgagcctgctgcctttcagagaaaccttcaagtggttcgtcaaaagctagactggcg

SEQ ID NO: 11198 - DNA, 420 bp, Oryza sativa
  unsure (1)..(420): unsure at all n locations
gagatttaagttgagatatttttaacgtaatttctttttcaacattggcttttaagtcactaaaaacacatatataaaaattttacctacaaattcatttttattttctaataagccgttttggcttattagaaaataagccaaacaatggggacctttctttacagatggggcggtatggtctatatgttagtgagagaagtggattggattaattgatgatcaattattgatcccttgttttttaatgcaaggctgatttggattttacagaaatatttcattttaaggatggtccggttccacatataactaaaccaaataccctcaaaagtggactcgtcctgtcatgttccttcagaccaaaggacatctcanaactacattaaccatccgttacagtgtttatatgaacatacc

SEQ ID NO: 11199 - DNA, 385 bp, Oryza sativa
tgcccgcaggtacaccaaacacacacttatcggggtttagttttatgcgggcggagcggagactctcaaaagtttccgctagatctgagagtaacatttcctggttgcgcatctttacaaccaagtcatcgacataagcctcaacattacgtcctaattggctacccaaagaaattcgagtagtacgttgaaaagtaggacctgcattctttaacccgaagggcattgtcgtataacaataggttcctatgggggtaatgaacgcagttttttcctcatcctccctagccatgcgaatctgatggtaaccagagtatgcatctagaaaacacaaaaggtcgcaccccgcagtggagtcgacaatctgatctatgcgaggcagggg

SEQ ID NO: 11200 - DNA, 435 bp, Oryza sativa
agcttttgtcgcagtacagtcttgcgtggtccatttgcaggtaacataatgagcaatgagatttcatttatcaaaaaaattagatattaccccgattggttgttggttggtttaaataattatctctggtgttgaactgaagtttaagatttacttagagtgtacaccatttatgaacagaacagtttagtgctaaataccttgcccatataatagattatacaagcctcgcagtatttttgtcaaattcaataaatttggaaatttgcttcttcaaattatgtagatttgttctgtaagtatttttttttgtttcatatgttttatttgcttaatacttcagtttgggatcaacagttcatagcatgccagccttttattttattactggataaatactgaacctgctcgtcgctaagttatttttatttttca

SEQ ID NO: 11201 - DNA, 389 bp, Oryza sativa
tatttagaatcgtaatactaacatgtatcaaatctatctagatgaaaccccgcgcttcgctgcgggcacatttgaacatgtaaatatgtatattagtatgaacaattagattatattaattgaacctaaaaacaaaatatattccgagcaagttaagctacttctcgctatgtcaggacagctatatagcaattctctttatccttcccaactgctcaaataaattaaagtgataggacatataagtattggctgcaagtatgacgaatctttttttaagaaactaaaacagcagtaaatgcataggacagggattatttcttcaagtttagagaaaccaatcgacaaaacttgcatagtgcttctgcttggttcaaatattatgtata

SEQ ID NO: 11202 - DNA, 432 bp, Oryza sativa
  unsure (1)..(432): unsure at all n locations
agcttcctggagctttgtcacatccacatatcccanaagcttaaagctgaaactgactactgatgaggtaacgaatatgctaacctgttgtccaagcagacttgtggggataggatatattacatcatttacaactcagccaaatgattcgagtgaactttctatgaaattttacagctcgacttgctactaactnatagttcagattcttaaacaaaacaacgagatagatcttcacatttgcaacatccaatggaaagacttgctactaactttcagttcagattcttagaccaaacaacaagatcttcacatttgcaacatccaatggatagatttgctactaacttttagttcagattcttaaaacaacaagatcgatcttcaaatttgaaacatctatggataaaggctgaaaaaagatattaataa

SEQ ID NO: 11203 - DNA, 399 bp, Oryza sativa
tgttagattgtggagtagctcatgatccaactattttctatggttcatggaattacccctagcctctgcttgatgagtttgtggtgcggaggcacactcttgtaggtggtgtgtgtgtgcatatgcatcatccatgaaacctaaaaaaaaactagttattggcatgcatggcatgtgtcagagtcaagatatttgaggtgttcacttagtggatgaaggatatttggatatttgaggtgtccagtggggatggtggagatataaaaacacctagtaattattaattacttcggtgaggctctgttgtgtaattttgcaagtatatataccttgggtgttgtggaaaacattgggagaaccaaaccacatgtacatgtacataacatgtagtataagtta

SEQ ID NO: 11204 - DNA, 440 bp, Oryza sativa
  unsure (1)..(440): unsure at all n locations
agctttgtgaaagagaaggtaacaaatgcttaatacctggaggccttgagcttatcaagaagtatatctacacaggtatcatcaggaaatatctgaaaaaacataaaacanactcagaatatacataaccagtacaaattcctaanaaggcaaattcctgttgtgtcattattaataaacatggcatggtttggacagtgaaactgaactaagcttgcttttcttgcccacggttatgcaagagtgaaacaaaaaatcatcattatctcctaagcaatggtcacatggactcacgttattattcacatcttgttctgtgatttcaattgtgacaaccagtaatccgcaggcaatgcataaggcattacattttgctttctcaaatatgcaggaggactgcgcatcattgcatttaagacagaaaaatatatacaagcata

SEQ ID NO: 11205 - DNA, 368 bp, Oryza sativa
tgggctcttcacgagacaataaccctatgttctattggtattggtaagcttgttgttttatcgatatatgcagagtaaaagttgcattgcttaaacgtgcatctataaaaaccttcaacttcatagtattgcagttacagtttttcctaatttgcattttttggttgtgtcttcagtaggcaactattttttttttaaatgtcaataacatttttatggctaggatttccccaagatttttacgacgcttatatgatagacctatccctcccttagctttagccgatccccctccccctccggcatgaggaccggggaccgacctcatctcctcgatctctaccgtccttcctactaccccgaacact

SEQ ID NO: 11206 - DNA, 480 bp, Oryza sativa
  unsure (1)..(480): unsure at all n locations
tacccgcgatcctcagagtcacctgcggcatcaagctttacaacctccaggggggaactttgttagcattaacagggccatgataacactgctgccgaagaaagactcaccacgctcgatgaatgacttcagacccattagtctgatccactccgtggcgaagcttatatccaaaactttggcaatgagactggcagcacggcttggtgatttggtctcgcatgcccaaagtgctttcatcaagaagagatgcatacaagataacttcctctatgtgcgcaacatggcccggtccttgcacatgcaacggaaaccatccctcttcttcaagttggacataacaaaggcatttgattcggtatcttgngaataccttgtcgaaatgctgcagtgcagaggctttagtcagcactggagaaattggattgtgcttctcctatcgactgcatcatccagaattttactcaatgggatagcggg

SEQ ID NO: 11207 - DNA, 338 bp, Oryza sativa
ttaggctatctctaaagtagatggtgtcatagatgttttattattctctctccgcctcataatataaagaattttgagtggacgtgacacattctactacaatgaatctagatatacagcccacattaattgtattagcatgtatcacggagagagtatccactttctctctctattaagatacactttgcatctgtagcttgtgttgaattttcttttacatatatgcatgtctgcaaattcttggacgtaattgaggtgacacaaaacttatgaagatgttgcagaatataaaaaaaattcatcagtcttctggtacatgataacaaaactgtgcc

SEQ ID NO: 11208 - DNA, 449 bp, Oryza sativa
agcttagatgcacgggttgcagcatctgaacattctatctgtccatagcaagtggttatgtgaataactcatagtggctaaatatcgccatttaattgcaagaagacattgcagaatgcttcaaataactggcagggcgttgacattgagattattttttacttcttttttaccgataatgccggaagactccaccttcggtttagagcccatatcaagaacatgtgtttcattaactgatatagttcagtttctagctagaggaattctcaaaagtttgtgattccacatgtaccaaaatcttctttgacacacaaaaaaatttagagaaattagacaatatactgtcaacaaagacttcgttctaaaaacgccatcgacaacttccttcttacataatatcaggcactataatatgccatcgttccgtttttttttcatttttgcta

SEQ ID NO: 11209 - DNA, 409 bp, Oryza sativa
ttcaccactgtcaacttggctaacaacgcgtacaaggatgaaccgttcgttctcgccaaacaagttgttcaagtgttctacatagttgacccgtgtaacaagaaactacatgttgttcgtgaagggaaaaggagaattgttggattggacaatattgcagacgaggatgattacaaccagcacgtccacggcataggtcaagaaatacctctagaagaggaggaggaagaagatgaagttcaatatgcacgtgtcgaccatgaggaaggattatttttgtaatttatgtacgtagtttatgtctacatgtctgttatctgtatgactctaatatgttcgcaatgatcaatagtatattgcttatgaaatattcaaattaaataattaagtgaaacacccactataagtg

SEQ ID NO: 11210 - DNA, 431 bp, Oryza sativa
agcttaccaccaaaatcaagaaggcaagtttattgcagctagggtgtgagcttcaagtttatctctaaaaccaagtttaaatccctttaaataatcctgtatgtaatagtccgtcctctagaaccatgcaaatcaatccacttgatgggtgggtccacttgctacacataccaccccacttaaactttcatatttgtttcatgataaaaggttaaaccataaataatatggttggaggaacaaatccttataagttggttccacaattttttaattagtaatgtgatatcaaacatattgacaccgttctcatgggccacacaaggcacatcctaattgggataagatgtcacaatgtaaattttcgtaaaaaaatatcaaaaactattaatgagccctagctactattttcttcaggtagataatactta

SEQ ID NO: 11211 - DNA, 401 bp, Oryza sativa
tgctccaagatgtaaatctttccgacagcatagatgatatctcttgttattggaatgagtcacggtcttactcatccaagagtgcatatctcttccaattcgaaggatccttcacaccaattgacttctcctcgctatggaagacgccggctgagccgaaaattcagttctttggatggcttgtccttcatcagaaaaccttaaccgcacaaagcttacttcacagacattggccgtgtaattggatttgccgtctatgcacatgtgccttctaagacaccaatcatttgttcagcgtttgcagcttcgtcagagaagtatggaactttgttcgctcctggcaagctttgccccctgttattgctgatcccaccgccggaaccttcgtgtggtgggctgca

SEQ ID NO: 11212 - DNA, 444 bp, Oryza sativa
gcttcaagaagatgttacacagaccgtgtcttgttctatttacatagcagatggcgcatgcgacattatgtggctaattcttatagacaattcaagagtaagagattgatggactctgttcaagaagatatgcaagcagaatcaacaaagaaagtttgatgccatatgggagcaactggatcgttgaccactacacacatggaagaggttaggaaaaaacccatagttgccagacaggaggagccggagggacttgaacccatttctaatgaagcaccaagtattactcggcgcacgaagcgtggaagggccaccaagtgcttcacggagtgggtagaatttgagccaagggagaaatggtcgttgttgtatatacagatggttctaggtatggtgtgatgacaacaaatcttgctgaagtgtataattgggttatgaagaata

SEQ ID NO: 11213 - DNA, 363 bp, Oryza sativa
actcaagctagctgatttcgatatgctaatagcaagaagaacagtttttgtcatttattatcttacagactgccagcgcagagagaaaaaaaacattgtgcgtaggaatgagacagacgactacaaactggcaattccaggtgaggcaatgtaagcagactgctgcccatcgactcaatatcgagaacctcgggggagtacttgatgccacaacgaatccatgtcttcacatgtagatcatttcgataacttcgatcatccgcccattcatatgtacaacgtagccggaactcattctacgagacggcattgctatggaacaagagaaagttggcggtgaaattctcaaatctgctccattct

SEQ ID NO: 11214 - DNA, 322 bp, Oryza sativa
taagagccgcttctaatccgccctcgacttttacattcttttatccttaatccgctatccatgcctgtccctgagaagagatcaaaacaagccttgattgttaaacattccgattcattacatgaatacaaagcttcctctatcttctatacacgagcagcaattgatagatggactccatactctctaccattttttaacctacacaagttgaaccctcctcctcctgaccgaccaacgcacccgactggcgaccaaactcttggctaacttccggcatttgctgagcatatgttactgacatctcttttcatcacgatgc

SEQ ID NO: 11215 - DNA, 441 bp, Oryza sativa
agcttatactatataaattataaattatcttcattttagccatgtacaaaagttagagattttattgaagagtcattcaatctataagctgtgggtcaagtatagacatgtcctataatatcgacatatttagaatacggtaattaccatattataagaaacggtaatttccgcgagaatacggtaaatacggaaacgatcggtataacagcaaaaccatttccgttttcatttccatattttttaccatttccatttttgtttcggtcgattaccatttccatatggctcggccggtagaaagtcaaaaacgaacgccggtcggccggtaattaccgttaccgttttcacccctaattgggagaaagaaacacgcatgggttacacacctcttttcttccatctcatatatcctgcttctatattttgatgaatcgcaag

SEQ ID NO: 11216 - DNA, 382 bp, Oryza sativa
tttgtgaaaagacatgtgtggaaaacccattatttacttgtacttcatgatagaacatttccctgcgaggaatataatggcaactcaaatatgcccggaagttaaccttagaattgaggaagttgacttcctagccaaaccgatagtcctagactcgcaaagcttggacatcatcctacggatggattggttggctaagcacaaagggcagatagattgtgccgaaaagtccatcaccttgcaaggacctgtaggaaagcaagtccgctttaccttctacacccctaccgggagtcggtctatcctaacctgtttacaaatcacctccttggagtcggtgcccatagtctgtgaatatcccaacgtatttccagaataatta

SEQ ID NO: 11217 - DNA, 418 bp, Oryza sativa
agcttctctcttgatgatgcgtttttgtttttatttagacgattttatgcaagagcggttttgtaccacaaaaatatgattttcgatgtcatagcgctgcaagaatgatgtgaataaactcatagtatttctttttatagtgctgtcgttataaacaaaaaaaatatcatgttaacagtaattaaatgttgattccagctaattgcttggatgttatcagcctagagaaccttaggtgggcatcctaattttaaggtatagtagcacaactactagctattataggcgggctatcaataggtagaataataaaaacaaagcacaaacagtgtaccatatactccctccgtctcataaaaaaaccaacctagtactggatgtgacatatcttagtactacaaatctaaacataggctgt

SEQ ID NO: 11218 - DNA, 159 bp, Oryza sativa
tgtggtgacagccatggatggatgccagtgtaacgtgttagttcatgtgagggcgtcgttcatgatgtgctgcaacttaggagtacacgtgatcttctttttttctacgagtacttttaaggcagaaacatgtgacatgaagtttgttcatcttgagcc

SEQ ID NO: 11219 - DNA, 409 bp, Oryza sativa
  unsure (1)..(409): unsure at all n locations
agcttangttgtgttatgagacgttctttttattatttccagtttcttacttgaagcaggtggctccgttggactcttgtatgtgcctatgtggagttggagttgctctgttgctagggtgcaatgatgctaggcaataatggcatgttgctagccgtgtgcatgaattggcatctctgtggctttggttattgttagtcgtgggaagatgaagttacttgatcctttgcgatgggcttgacaatgatgccctttcgttgtgaagccagagctgctatagtgctgttggtggcaagcccttatcaatgatgatactcttttgaaatgttggaggtattgtgttgcttaagtggggaactcggcaacgttgccccgcgtgtggactctgtcattgttatttgtttggtgg

SEQ ID NO: 11220 - DNA, 445 bp, Oryza sativa
agcttggatggcctaattatcggtatgcttctaattcttcagcaagaaagcacgttttattaatttttcactcgcactagctacaaagtaatatttgtatatattctcaaattattttggttcattaattaattgtatttactattgtgaaaaaatatgacaggagaggaagaagtgaaaccaaactggcatgtgcgtcggcacataattgaagggatagcagaaggtctactctatatacatgactatgcacatgcatgtatagtccacagagacctgaaacctagcaacatactgctagatcatgaaatgaatcccaaaatttcagattttggtattgctaggatttgcctctccagtgtgacagaatcaaatacgacaacagcaataggaacattgtaagtatatctaccctttaattatatgtgaggcactctcctatcat

SEQ ID NO: 11221 - DNA, 367 bp, Oryza sativa
tgacttggtgcgaagaggctggtttagctatgtctgtttgttaaaccaagggaaggagcttctttggcatatacccatggacaattcacggcatagtgtccttgctctctacaatcgtgacaaaaggggacatcctcttctggtattggaagctcatcgacctgtgtggcaaatgctcgatcaaacacatactgattttggtcttgacttccaaccaatggtagctgtggactaagcaacatgcttggaatggaccaacggtgtgccctttgtaactctcttgaggctagcggcggattgagttgaaaacttgagttactggaggcctacccgctgacaatctttcctttttctttgtaaacaactg

SEQ ID NO: 11222 - DNA, 444 bp, Oryza sativa
agctttattaaaactcagccaaatacactatgatgatacatttcaatgagtccactcccgacctctgcataagatgcacacagccacacacaaagaaagacctatgaagacccctctcacaaaacagaaatattagtggctatcaatccgtagactatatcgccaaccatgctcctgggtaaaaaactcctgtgtcaccggatccaaatgtcgcgataccaccacaatagtatcctgaagacccggtttgtaaaggatagcctaggtgtgaagccaccgggtgactaaagtaataacctgtaaaggagaagacaccatcttgtgataaaaaattaccctatttttgcttagccaaatggaccaacaaagagctgttgcacccatcaaaactagatttctcatgtctttaggaacacatgtaagccaacactcaaacatatgagg

SEQ ID NO: 11223 - DNA, 408 bp, Oryza sativa
tagtcctcatagaacttaccatccgatcaattctctgcttctgggggatcaggaaaaataaagcaagactgagagcaaccaccgtactcaacaagtcataccaaagggaaggtataatgcaaggatattcaaatgaatggctcataggatatttgtagtaaaaagcagcatttataaatcataagttgaaagcagtcaagcagtagatataattaagcagtattaaccatcatcactatacaacactaaatccacgttgaaacaggcccaaccaaaccaactgaactacaccagttcattaagtcaaattattaaggtgagactagtcacggtgagctggttgaccacccaataaccacgggtacggctattcgaataagtttactctgatcagaggtacaactttac

SEQ ID NO: 11224 - DNA, 440 bp, Oryza sativa
agcttgcaatcctcagatgcaaggacgatttgaggcgcattatacttagtactagattactagtacgacgtgagattaacttgagataatccagcatatgcacgtgaagaaattaaatgaatcagatgcattgagtacctcttccagtcaagaagcttgtacgattgtaccaactattttatactcctaaaatataggagtaataagttttagttctaattctagaaaaaaaaacttattttattttgagacataggtagtactagattattttatctttggaattgaccaatccattttatctcaaaatatagtttttttttgtttttcaacgaaattaaagaaaagataaaaagtaaatagtcggttggaagtcactgaggttgtggagatatggagtattttgaatattttatgactatatatagaccacccttgat

SEQ ID NO: 11225 - DNA, 397 bp, Oryza sativa
  unsure (1)..(397): unsure at all n locations
tgtgcgtactgacctttatacccttctctntggccatgtgttctactactcgcttttggatgttggaatgtcaggtcactacgctttacttccttgttccaaaaataaatttattttttatccatttcacgtatatttaatataacaagaaaaaaaaatattcttactttattgaatcacaatataattattcttttttatatgctttcaatacaaactgattacttaaaatgaacttatttttaagagaaatgagaggttaaaaataaacttattatgtaatggagggagtcacttttttctaatcttctgcattttggtttagccgccatttagaaaaattggctctcatgttgaggcctttaanaaattgaaaattttgaatgaagtaagaaaa

SEQ ID NO: 11226 - DNA, 448 bp, Oryza sativa
agctttttgtcccagtcacgtaatgaattcttctgacgcttgatccggtcctcccctgccttcctcctaaacatatcaatgacatacaataatcaattgcttggcacagtagagagcacacagacaaaggaaaacgggcaagaatgccatactcattttcaaaatatagcttctccttctccagcctacgctgacgagcttctacctcctctaaatccctgtcagcctgagatttcttacggtttgcctcagcaagcttcgcatctgcagcatgaagcttaccctcgatctccaaccttttttcctccaaactagcctcaagggattgagcatcagttatctttttctcagacataaacttaacctcggctatctctccacgaatttcacgcagtgccttttcgagctgcaaagttcagaaatatgaagtgataagaaacaagaatga

SEQ ID NO: 11227 - DNA, 416 bp, Oryza sativa
gcgacctaagaaactaagctgtgtgattagggtgctgtctgaaagccaaaaaatccttaatcagcattgtaattaagggattgttctgaatctgtcacgggcaaacattggccctccctttccggcacattgaccttccatcaacggactgtgacattctagttgcgaaattagatttggaatgtgtttgctttcattggatgatacgtcttcgtcgacatggacgcataacccaccgtatttctcagacccgagttacgttcaagtttccctgtgaggctgttgtcagttgctgaaacaaccgttcttctgtgaagcgacgatggaaaaacatgttatcgtgccgatttaatccagtagtgagattaaaaacctttttcgatacttgcatcgatctgacttccaagatgggtggt

SEQ ID NO: 11228 - DNA, 438 bp, Oryza sativa
agctttcatctcttcgtcgacatcagaacattttgtagtcgggacagacctgacgcggccgccgggtcctccgccgcattattttggtagcactgtcgtcacccggcgctggatggagtccggccctcacggctagctgcaccggttgcttcacatctccgtccagaccctaccgtatactactatactacaaatctacaatacaccgatatatgccttgatgatctacgggaggataagcctcggaagtgtacgttgtccggatccaagacgttccgtgtgtatcagtatcaccaattgagatggacggagatatatcgccaaataaagcatagcaaacaggagaggtgcacagcagctgtatataagcgtgtatgagtaggacaatattgctgcgagtgaatgaatgacgatatatcttcttatctctcacgctct

SEQ ID NO: 11229 - DNA, 401 bp, Oryza sativa
  unsure (1)..(401): unsure at all n locations
tgtacagatagaagaaaatggcatgcacaagaataatgttgtttctatatgaactgaaaagagaacttaaattccagctctctaaatgctttctggcaaagtcatgtcagggagaacctanaaaaaaatgtctcttaaatttcggatttgtctacatgttcttgagttggtcatgaacaaacaagagatcgtgaatctacaaacgttctcagcaaaaaacaaacgcactaaaataaggcatgtgttacacgttcccgcatcaaaaatatacccatatcctaaacggttgaaccatagccatccaactacgtactaccaattattctacaaatggtctcaaaatctcacaagatatcaaacaagatcacggccattccacgctactactggttgtacacata

SEQ ID NO: 11230 - DNA, 449 bp, Oryza sativa
  unsure (1)..(449): unsure at all n locations
agctntagntattgtgcttgatattatgtctattgttgactgtggcaaanaaaaaaaattccatgttatattgctagaataactttcatagatgtaaattttgatgaaactatcatcgaacaacatattttagatagttgcaagggctttccgttgtcacgattgatatggcactgtgtcatgtggtacgttgtggtctgcgcggtggagatgtacctgaggtatctgaatctccagattccagaatgtaggcagcttattccgctgcaagtgcaagccactactccgtagacctcaatatctcaaatcaatcaaatctgctttgcatttgagcaaagcagctttgtagatttcaacagtgctttgtagaatcaggccttcttcactaaatctcctgatttcagtttcctgaaattgactgactgactattactcgcttcacattatat

SEQ ID NO: 11231 - DNA, 412 bp, Oryza sativa
tactggccgtcttagttatatcatgtttattcggatatattcccggtcgatcgagcgcccgatcaggagggggtaaaatcaggcgcgacgtcagcgctcgattcatgtgcaaaactactttaaactgatttttctcttagattacttatacaaatcatgatccgattgcaccattaaattcattgtaattaaatcttcaaaacaagaccatacatggatatattccgatgaaaaaaaatttagcttattatataattatttttaaatgttgcacgatgttccaccaagtatatcgaaattgtttcactaaggtggtgtttggttggagggactaaagtgcggctaaactctagtccctctcacagaaacataagtccctaccataaggacttgtacttttgtgagagggact

SEQ ID NO: 11232 - DNA, 313 bp, Oryza sativa
acaagcaaaataactggccaacaaccttcacatatgagatataacaaaaatagggaaaaaaagcatgagtgcgtacttagggccgcacgggccatgattacatgtctctagctagagagccgccacttgaaatagctccaagcccataaaagaaaaaaaaggagaatgcctcacaaaggaaacatgcatggcaaaaatgaaagcaatgacctgttcactagcaaccgagcacgcgaacatgcgcacacaagtaattacagcgagagacagccatgcgggcgggacggaaagggggagaggatggagaacgccc

SEQ ID NO: 11233 - DNA, 387 bp, Oryza sativa
  unsure (1)..(387): unsure at all n locations
nttcaaatgcaatctaaatacatgcccgcgcaatacaagtttttctttcatggcaatataagtttttcgaagtagtacttttgaaaaacttgcaggtgtcatcggttgatattccacctatgtaagtttttcaaacacagtctaaaatacatagcgctaccttcctagttaagatgaaaagttgcatgcaattgtacatgcactgtttggtttctgaaaatgtatgtgttgtgctgcacggagacaggcaatgcaaccggacggattaaacgcaaggctttttctttcatggcaatgcagcagcaaacactgcgagtgtattacatcaccaagatgtttctttgtcccccctggcttttgtgcgtgctagcgtagtaccaccacttt

SEQ ID NO: 11234 - DNA, 449 bp, Oryza sativa
  unsure (1)..(449): unsure at all n locations
agctntcagagtcatgcccagaatatgtattgtatgcgttgatgaaatagttacctgaatcaaattgtgctgatcgatcagtcgagatttctgaaccttgacttggaaacatgtccggatgcatgcatgtgaaataatgacaaaatatgggctgggacgaggagatggaacagtgtacgtgctggcaataattaatgatcaagtgtcgtcttcaaaccatgcacatgtgatggtgcaggctaagctgtagcctttcttacccatatatgcatgcatgctgcctaaaagtgtggcatgatggcggctaacattctaattaagaattaggagttgggtgctaaccttcattcgtggtatatctatctaattttggagagctggatatataaatatatacgaagatgtatgtcagtcgtcacctcctctaactccggccagacgacgacggg

SEQ ID NO: 11235 - DNA, 435 bp, Oryza sativa
  unsure (1)..(435): unsure at all n locations
actcaagctntggtgtgtgtgtgtgagagagagagaatgacagatgataggggtattgataggcggagaagcgccttgggagtgtggagatgctaagcatccaaacaacatcttctctcttgtgttgccatgtgtccatgcttatgacagtttctaccggtataaacgctcacaactgtcattgggataaggataaccgtcgcctggtaaagatgggctggactgggccagttggggtttcggccgatccctggacggctctgctggcccagcccttcctcatggagtctaatatgtgggcctcatttctaaagtttggctcaaatgattgcatattattgggtttatgagctcaaaactctattggcttggatatggaacgtatattctcattcttcatgtatatttcttatcaactttggtgggttacatcat

SEQ ID NO: 11236 - DNA, 448 bp, Oryza sativa
  unsure (1)..(448): unsure at all n locations
agcttntgcttcgctcactgatgtgcctctaagccccgcccaaacctcggaagcagccaccgctcatcctggccgtccgatccagatcgtacggcccccaatcccgcaccccccttcaccgccatccaccgccacttagctgtgccccaccactcctccccttcccccaattcgcaaaaagaaaaaatcaaaacgccccccaaaaaaaaagaaaggggaaaaaaacacaacgaatagaggaaaccctagcttcccgtggcggcaggggaggcgcttgattacccccgctagatcggccctgggaaggggcttttgacgcagatcggttctaccctcggcgccggatcgattccgccgcccaatttggcgctgatccgcgggtgggtcgcatccgccgcacgatacaatcgaggtgagctgtttttaattntttttatcttcccctaaa

SEQ ID NO: 11237 - DNA, 407 bp, Oryza sativa
tctgaatggtctctagtgatcaatgctctgagcactatctatgtgcttaggtcctttgcagccatggcattgtcgtcatttggcacaacgtgcagaccgaacattctgctgaaaggaaaagcgcctgtacttcagatgaagggtttatggcatccttatgcttttgcagaaagtgtaaatgggttggtaccaaatgatctatctcttggtcagaatttatctggccaaaatcgctttgcattgttgttgactggtccaaatatgggcgggaaatctacaataatgcgtgccacctgcctagctattgtgcttgcccaggtttgtataacatcattaaattatgctcctatacttggctacttataggcttccctaatcgagtgataattgaaagtgcttctgatctg

SEQ ID NO: 11238 - DNA, 445 bp, Oryza sativa
  unsure (1)..(445): unsure at all n locations
ncaagcttccaacaagtactcatgggctctgtaactccttctagatcagcggctaggtccgcttgaaatagatgctgtcagaaggcccgaatctgaatccaaaacatgtacaacttgatctcttgtcttctataggccaaaagtgacgtggtgaggtagaagtatacttggagaaggtcttggtttggtccccaatcaacttcttcagtcatccatgcattccttacgctcggtctcttttctttcccccaagcaagtacctctgcgaacgaaaacacatgaaacacaatgtgtagcaacgtttgttcaaatatataacaagtaaatctaatatagaacatatgcaccttcggttgactcatatataaggtagtcatggctatatccgagctagttgtgtactcatcaccttcggcccaggcatcaagagcactcgatatgtgta

SEQ ID NO: 11239 - DNA, 366 bp, Oryza sativa
tacacacgcaccattgctacaacttccaaactttggttttacttttgagctacaatgtgatgctagtggagctggcattggaggtgtgttgatgcaagatggtaagcctgttgcatactttaacgagacagagcatggacctgttttgaattattccacgtatgataaggaattgtatgctcttgtacgttctttttagaaacgtggcgtcattatttgtggcctaaagaatttgttattcactccgatcacgaatcgcttaaatatcttcgctctcaaaataatttgaatcgtagacatgcaaaatgggttgaaattattgaatcttttccttatattatcaaacacaacaaagggaaagataat

SEQ ID NO: 11240 - DNA, 443 bp, Oryza sativa
agcttctggctcggtacaagaaaatatttattatgataccatcaaccacatgcatggaaggccatcctttgatctcttactctcagctggcaagggcaacagacagtttctcagcgaccaatttgttgggatcaggatcatttggttctgtgtataaaggagaattatataaacaatctggtcaaagtaaagatattattgctgtcaaagtgctaaaactccaaactcctggagcgctcaagagtttcacagctgaatgtgaagcactgcgaaatctacgacaccggaatcttgtcaagataattacagcttgctcaagcattgataacagcggcaatgacttcaaagcaattgtgtttgacttcatgcctagtggtaatttaaaaggctggttgcatcctgccacaaacaacccaaagtacttaaatcttcttcagagagtt

SEQ ID NO: 11241 - DNA, 350 bp, Oryza sativa
tacataacactgcttaaatctgatctatagaacatagctttcttgattttacatgacggatgccactgagagagactctatgatgtcgtgcagctcactgaggacatctccggttcgcgttatactctgaggccattcctgagagcaagacaactccagtctaagcagtgatacaatgcactcactgatttcattgcctggagaaataaccgagagctgaacccaacttttataattctaagcgagcttactgtctacaacgtccatcagtctaccatgtataccccgttcaacatactgacggacgctcaatccacgtgcgaatgtacgatcggatggtcgctttccgc

SEQ ID NO: 11242 - DNA, 439 bp, Oryza sativa
agcttaactatactctggttattgtttctgttttatacctctgatatcttgcgctatgaaggccaaatctatttgttatatataaaatatctatctattatatactaaaagttcattaaactctttataatcactcttaaactgccatatggcacttctacaaacgctccaaaactaccacgtggcactgtcaaatccaacgtcgattttcacttaaattacctaatatgatatattttattttaagaaactaattccttaatctctatatgtatacggtagaactataactgccataactgcaagtactatatacgtacgtacgacttaaaaacaaagaagtacagacgtacgcaaagacgtacctgctgttcgtctgaagaaaaatatataaacctacgcacagacgtactatgaataaagatcaataaagcacaaa

SEQ ID NO: 11243 - DNA, 366 bp, Oryza sativa
atggaccgaattgtaccccctcgcccatattacatatataataatcagccttgaatttgtgtcgcgcacaaagaatgttgatcaaattactttcttgcccttcagttatactacagcaaaaaaaaaatagtaggttaattattaaggggagcggttccatttgggaagcaggtgtggaagagaaaaacacatagccgtttttatgcgttctaaaatgatttacatttagaaaagaatcaatgatgccagtatgaattgctcagagcataacctaagagagttaacaaaaattttgaaaaaggatatagcttaatccaaaccattttcttgtgtccttgtggcgctctacattatcggatttctccg

SEQ ID NO: 11244 - DNA, 395 bp, Oryza sativa
agcttgtcatggagatgtgttccgccctccaacctactctgatttactctgcgtttatgttggtactggtgtccaattcttcggcatgctgctggttacgatgatttttgcagttctgggtttcctttctccatcaaatcggggaggattgatgaccgcgatgcttcttgtctgggtcttgatggggttgcttgctggttatgcttcttcacgcctctacaagatgttcaagggttcagagtggaagagaataactatgcgcacagccttcttatttccagggattgcttttgttatcttcttcatattgaatgctcttatttggggggagaagtcatctggtgccgtccctttcaccactatgttcgccttggtcctcctttggttggtatctc

SEQ ID NO: 11245 - DNA, 245 bp, Oryza sativa
tcaaccaaatatactgctgtacgctggagaggttattttttttgcgcaaatgctatgggatcgtccttaatgtgagcccaatcctgcttgctcaatctgtgttttgggtataaaggaagttttgtacaaacagtacactagtaaacttgacgcaaaaatactaaactagtagccaagttctttgcgtttttcacaaatttaccataccaaagatgtgttacagacaatttagcatacttcgctca

SEQ ID NO: 11246 - DNA, 439 bp, Oryza sativa
  unsure (1)..(439): unsure at all n locations
gcttattacaagtgcacaccactaactgtttctgtagaagtggactaagtgtggtacttgattctctctgccaaatcttccaaatactattttcaaaacaaaactaagcacagtagtacttaaaaaaaagcatcttgactaagggcaacactttccaaataatcacagaactcagacatactaaaatatattttagaactggaaattccaaatttacaacgaacctaccatgaaggcatgtgtgatatgaacacagaattcaacagcaattcctattgacataacaaggtttacaatagaaattgcattgagctgaatgccaaggatagccatcattccctgccaataatatgtaggaattntgctgagcgatcatatggaagaaaattgaaactgacgttagtattttctaatggagattgcacagaaataatgacat

SEQ ID NO: 11247 - DNA, 389 bp, Oryza sativa
  unsure (1)..(389): unsure at all n locations
tggcgtgccgggtctcgccctcgccggtgtttttgttatgttgccgcggtcggcgtcgcgcatgacccagatgaaccgctgcttgctgccgcgcagagtcgctgcgagctccgcgacctgctcaactcgaagagagcacgtcgngccgaacgacacgtttagcacagaatccgggggctgcctgtcgagccagtcaaggcactcgtgtcgccgcctgccctgctccgacgagcccgtgttgagcagtgggttcaacggaccgattgcgaagagcttcttgccgccggcagccagagtctcagccaaatcgtcgatgaaatcgccctcgagtgctcggctcgcgttcgcgaggatgccggcgccggacaaaatcgatttcgacgctcggg

SEQ ID NO: 11248 - DNA, 438 bp, Oryza sativa
agcttaacatgcaaagatgtctcatcatctttcactaatccactaattaacaagataccacatcgtcattcactaacaatcatcacatttaaacatcatacaaacatgtgatattatgtataaatttatagtttctataatgtaagagcgtttaaaacacaagcatattacaagcatgttaaattatcatccgacataatttaaataatatttcaatatatatctttattatgtcttatgacatactatatgcttatataggtcatcctcacttagttagtgcttaaatgattaatttatggtctaaattatctttctcctttttttttctctaattaagacatatcacatcaattgtttttagcctttagatgattaatctacggtccaaactatctccctacttttctccaccttactttttaggttgaatcacca

SEQ ID NO: 11249 - DNA, 387 bp, Oryza sativa
tatcagataatcaggaagttccctgcaaaaagatataattacgaagcatatagatcaatattttcctcataagtcactagtagtcaccttccacatttggcaaaatccttcctgattttcctcatcgatcctactgcttaacttgtgttcacgatttcggatgctgtggattgttttgagagcattctgcttatatttctgtatttgtgacagcgaaagcccaaattttaagccgtttgcttggttagagctaggatgatacggtagcattggaaactgtaatcctaaaaattcgagagaacaaggtgttcatctttttgccctttgctgcagtgcagattcacctcaattacagtagttctatgaattccttagaataataatatg

SEQ ID NO: 11250 - DNA, 457 bp, Oryza sativa
cctgcggcatgcaagcttgaaaccacctgtatcgcctccgctgtgagatcaccattgcttccgtcgtatttgctagatctaagttgtgttgttgaggccataagggagcagtatgtttatgtgtttggtagcacaacgagggagcggaggaactctagcatcgaccgcgcggtggagttggtgctgccgaaatgacgctgtggggagagattgagagagaagaggagctggacaactggcgttcgacgacagcaaccaagcagcgtccgatgatgctctagcagtagatgaagaaagaggacatagcaactgatatgtagggtccactagcttgatatgtaagtatggaagcatgaggtggaggctgacatgtggggccagcgccacatgtgcgcctacgtaggaccaaaaccacattcaaatcgatttagagagtaatttatccggattacaaagt

SEQ ID NO: 11251 - DNA, 407 bp, Oryza sativa
ttctagaagattcacccaaaatcttcatagactgcgatcaacagtttagctcacaaaggtgagttctttcaagaatgctttgcaggacaacatcttctctaataaagccgacagaactcattaaggcatagccaacctgccttgcagctcacaagagtatatgcatcttcacttggagagggtatatatattggtactctcctctactttattcatggtttggtcttcccaggatctaattcacgggatctccgatcacatagactgggttaccaccatagtataactcacatgggtctcaaacccatctccttcgatgcattgtctatcacatttcgtgatagtcccttcgtgaaaggatctgccaaggttctctctgtttggatgaaatccacgttataactccg

SEQ ID NO: 11252 - DNA, 436 bp, Oryza sativa
agcttaattaatctgtcattaacatgtgttattacttatggctaatcatggactaattaggctcacaagattcgtctcgcgatttccatgcaaattatgcaattagtttttttatttatattgctctatgcatgtgtctaaaattcgatttgacgtttttggcaaaaaattttggtagctaaataaaatttgaattcttaaacttgatttgaagttgattttaagatattctcgatatttttagcattggtttttaagccgctacaaacaaatatataaaagttctacctacaaattaaattttattctttaataaattgctttgggttattaagaaatatggataaccgatgagtctcttatattaagggagtactgtactaagcgggataggaacaaaaacggtctttcatattattactattttttatatgat

SEQ ID NO: 11253 - DNA, 409 bp, Oryza sativa
tgtggatggatctggtgagccattctttgtcctcaattgtgacgttttatgtgaatacccttttgctgagctcataaaatttcacaagagccatggtggtgaggcaacgattatggtcaccaaggtagatcctttctttgaccactctcttgaattgtaaacttgtgtactgtgtatactgactattatttcaatataggtggacgaaccatcaaaatatggtgctgtggttatggaggaggtcactggaatggtggaaaaatttgctgagaaaccaaaaatatttgtaggcaacaagatcaatgcgggaatttacttgttgaatccatctgtcctggaccgcatcgagctgaagccaacttcaattgagaaagaggtctttcctctgatcgcatctgatgcaaagctc

SEQ ID NO: 11254 - DNA, 439 bp, Oryza sativa
gcatgtcagcttgccatgacaaggctaatgtggttggcacatcatggattgcgggtaaagcgtacatctactgcagtatgaatatcctcaaaactattcgaatagccgtgctcgcggttatcgggcattgggactcactatggcatcttggatagaaatctaattcgaaattttattaaatactgctgcatttaaaatattacaggttttctacttctacattcttagcctttctgcaaataaacctagctctacacagatgttaccatttcatgcattcattgttgattaatataatagcttgctgagtatgttgtactcacccttgcttcaacccctctttttcagagtctatttggagtttttgctgaagctgggagttcaattacataagttagttttattctaacttaattcgcaaaatatagattagacagat

SEQ ID NO: 11255 - DNA, 231 bp, Oryza sativa
tgggacaacgcgaacaaaggtgatccggagaaccacatttctgcttcgattcggtccacctcttttcttgaacctaacattattcacagcttgagaaaatttgttagataacaaaaccaagtcctccttctcgaactgttcgaggtgctcatctggcatgggcatcaaataaagcagcacagaagacttcgatgaaaaagcaccaacatcccaagaagtcgaaggagaaac

SEQ ID NO: 11256 - DNA, 437 bp, Oryza sativa
  unsure (1)..(437): unsure at all n locations
agcttcaagaattntagtgttctttgtgttattttgagcaaggagagggtgcttggtgcaaacgtggttggtatgagtttggtggttgtggcgtccttgtgtttggtgacgaattgttatgtcgtgttgactctcatgtgtcagctaaattgtgctgccttagatcagcgattgccgattggtactactagttgttttgcaggcttattggtgctcaatttgcatcgctccttgagggaaatggccaaggcgtggtctgccatttcgtaggcttcgctacgatatgctgtgcggatttggtagtggatcctagaggaaatgctagctattggtttgatctggtgggataataaactaataagaggagttgaactgcctcgagtgagtgggtgcatttctctgagatggatcacatggtgagcacgttgttagagagc

SEQ ID NO: 11257 - DNA, 420 bp, Oryza sativa
ttggattgctgcgagtgatttgatttttcataagaacatataaaactttgcgtgtgctaactagttgtaaaatcgcaacaggaattcaattccagacatgataaatgctcttcgtaacaactacattattcgtctcaaaataaaccaatatcatattaagttataatatattatagtacaataaatctggatatactctatatttgtattagtatgtgtcacatcgtagtacgatgttgacttgttttgggacgaatggagtactaggcaggtcagcaacatatacatggcagattggcaggcaaatcatctcatgttgctggtcagctggtgcctaataaggtgaaaatataaaaacaacataattcaaaagttttatttgcaaaaaaaaaaagaaaaatcacactggccaactatgtc

SEQ ID NO: 11258 - DNA, 448 bp, Oryza sativa
  unsure (1)..(448): unsure at all n locations
agctngatcagctgtttgagggcccaatcaaatctaatattgatcggctcaaggctcgcaagattgagctcttggcacaacttgaagaatgcaacgccgagctggacatggaacataaaaagctagccgatctcccaaagtctgtcgaagagcagaaagcaagactcaaatcggctatcaagaatgttgctgatctgaccaagtctttgaaaatcatccctggaaccgatgctcaagacgcccaagctattgaagaagtagaacaaattaggcaaagggctatatcggctatccagcactatttgtctcggtgaccttttgtgtaataggtcttagaaatttttgtaatcggctaagatattctagtactttactgtcttgacaatcttttgtgctgattaatttaacttctaaatttactcaaaaactttcatttcttgcatatatg

SEQ ID NO: 11259 - DNA, 385 bp, Oryza sativa
tatctggagtgagatctatgagacagtgtgagccaaatatgggctgtatctatgctccttatatcatgaagatgattgaggcaaagactgggatttgttatttcaaggacaaccagcacaggtcttttcgtcctcatgctcccactacttcagctacttcttctgccagggcgactcgtgcttctacctcagctgctccttcgtcctctgctgctccacagcgctctgagtcttcctcccccataaagaaagctctccgggctatcttttgcatgtgttctaagacagcaaagaaggtgaagaagatagagagacgtcacaaggaaagattggattgcagcacgcaaggaggtctctgatatttctgatgatgaggaagttcgtg

SEQ ID NO: 11260 - DNA, 412 bp, Oryza sativa
agcattatgaagatgagactcaactccttttttctgcgctagagcaacattgcgctgtgcatggctattccctccaggatctcagagggagtaaccccatactttgcactcatcgtatccctatcggcacgagagtactccctccagggaacctcaacgacggcttaataatgacgtgagagaacgtgtaaagaaagatgtcctaacactcctgcatgccgggattatttattctgttccatacagagagcgggtcagcccaccccaacgcatgccgaacaagagaggactgaccgacgttgctaatgctcaatatgaacttattccgcaacaaacactaatcggatggaagatgtgcatacactacacgaagcttcaccatgcaacgaacaaagaccaatttaccctaccc

SEQ ID NO: 11261 - DNA, 405 bp, Oryza sativa
tggatgaacttgagagcaaactttggagagagaatattatatgtgttgaaacggggtggagttctctctctcggccggctggcttttatagggtacccacaacggtcagaaatgacatgtgggacccactagccgtaaccctgccaaaagtggcaggtaaccgctgcctggccggttgggtttcaacggtcagtgtggacgtggcacaataaatttttgttgaaaattatattttggattgctctgaaaaattcatttgaagaatttcctcgaaattcaaaaattctaaatgcaattttgaaattcaaacaagcgattgatgcacaaatttaaatcgttgaaaacaaatatatggatacataccaatttttcggttggcgaaggtcgcgtcattttgggttcgac

SEQ ID NO: 11262 - DNA, 421 bp, Oryza sativa
  unsure (1)..(421): unsure at all n locations
agctngcatctntgtcagctcctgagaaggtgctctcctccattttctcttcccttgctgctgaacaagcaaggaatagtggttcgacttctggagatctttctgcaggacctccaggctttgagagcaataagaagcctaggcttgacaaccccattcatgctagtgacatgagtgctcccccattctttgggcaactgccgcaggtgcaaccacagattggagcaacagctgctcttggaggcacacagccaccaacccaagcaaaccaagcagctggttcatttccaccacctccacctccattaccacttatgccacaatttgttcaaaatactggaggaatgtttggaatgggaccttttgggatggtgagtggctctgcgccaccttcacccccattgcccaacattatgtcagc

SEQ ID NO: 11263 - DNA, 398 bp, Oryza sativa
  unsure (1)..(398): unsure at all n locations
tgngtattttgtctgtatgatcacctgctttgcttttcttgttcccaaatgtactctgaaaataagaactatgttatttctcttcatatcaaatgtataaatggttaccctgttaaaagagattaatgaactgtcatgtggttcttattttcctgatgattgccagcggcaaactgcagattcaggtagcttaaatgcttaatgcatgcagaattgcagatagctcattagaatagagctgtaatacagatttcgctgctatcagaatataggaggaaagtaatgccgttcaagagtttgcccgtgaattctgagcttttcttggaccttatttctgttcaacaatagcgtccccgaacggtgtgctctattgtaagcctagggtacgataactgatg

SEQ ID NO: 11264 - DNA, 444 bp, Oryza sativa
agcttcggcttcatacaactgcaggtacattcaccatccgccttcaagacacattcctgcacggcttgcttgcgatagataccacgcctgctcctatcaacacacattatttcataccgatgcacttgtgtgccttgagcaacaactctatgtctccgtgcctttttgattttatcttccatgtactttgtcactacgttgccaaacactatgttgttatcggccatggacggaccaattttcttgtatcgatccctaaagtaggcttgcatgccgtgaaggatgaattcaacaatagcaaccaatggaagtacccgaactcctcgcattacccagttgtacacctctgccaaattggttgtcattatgccataccgagatccatcggtgtcgaacaatagagcccacttctccttatgctcattctcaatccactgagagaaa

SEQ ID NO: 11265 - DNA, 406 bp, Oryza sativa
acacatagaatactaagcttcaattggtgatattaacacatacagaattatattctttgttctaactgacacaagccatttctttttctttcatgaagctgctcgatcatatcacctttgtggacacccccggtgtcctgcttggtgaaaagcaccggacgcatcgcatctatgaattcacccgcataacttcatggtttgctgctaagtgtgaacttattcttcttctgtttgatcctcataagcttgatatcagtgatgagttcaaacgtgtgatcgcatctttacctgtgcctgaagaccaaatacctgtagcgctgaattacgcaaaccaggtgacactcaccatggagagggtttccttgaatcaaaccggagaggtcacctattctgtttaaaaggctat

SEQ ID NO: 11266 - DNA, 400 bp, Oryza sativa
taaaggagattcataacactgttaacatatctgccattttctatccatacgaattccagcaatccctggtcttttaagaagctgctaccaattgattcctcccaagatgcatccaaacttaacaccagtaaacccaagctaccatctccaaatcatataactctcagcaatctccaatctttgcaagaagttagctacatagtgatttcttgcaatacatcaatattgatcaaattgcaatcgatgatcaaccaacttcatatgacaccagctcatgaacagagccgtatttaacatgtccacagaacaatggtatgatagttgcatgactctagaatgaacttccacaatgtgaacaaattggaatgtcgcgcaagacttgaaagtgaatataatcgaa

SEQ ID NO: 11267 - DNA, 440 bp, Oryza sativa
agcttcatctacgcacctattaatgacataatctaagccaaagatatagcatgcttcaccagtagtcatcatggagaaccatatatgcttttggattttcttttaaaccgacgtgatcgtcatcaatcgacctgtaataaaagtaaaattgaactgtagtctcttgttgggagctgttgggcttgcatagactgtctatgatagacataccgtagtgatcagcatatataattaaagtctaactccaggtgttttgattaaaaatcaatgttagcaacagatattttttaatgtaccgctctcgaataatatgattgatctgatttctttctacgattacaattcctgcgatataggttactcctgtttctacatgtttgaaggggcattgtttagttttttcctaagtcatacataatacgaaatagaaatacattatt

SEQ ID NO: 11268 - DNA, 376 bp, Oryza sativa
ttcttgctcaatgatgtgctacattatcaaatcatatttattgccagagaaagaggtttagataaacaaatgccattagatcaaaagggtacatgcataatgcattaatgaaaaaacacaaacggacaagcatattggaggtttctagtgtcttctcttacacacatgatacaaatagagagagggggcacatacaatgaagaaaaaaaacaggaggcttaaataaattcactcttgtcttcttgaaagataagttaaactaatacaaaagtttttaaacgggatcaaaagtcacacaaagcacgactatgtggctagttgattatgaagcttatttcgtcgaaatttatttctaacatttgcaattaagtcgctt

SEQ ID NO: 11269 - DNA, 440 bp, Oryza sativa
  unsure (1)..(440): unsure at all n locations
agcttcataccaaaactgcccatagagcctagcttgggtgaaagaggtcattgctcattggatactcaacgtggacatcgaggccaccgtgaagaggtcaggcagccccccggcgtggctagttagcagcctccatctccatggccaacanagtggcagcattttcagcatgcaagaacgacaattcgagatgagacgggaaaacagcaatgttagtgaccggttggcgttttgttccatcatttttttctttagctgccctgttcgtttcttctagaagcataggataaaattttagatactcgtggcacgtttttcaaactactaaacggtgtatttcgtctgagaactttctatataaaagtgtctctgaaatatcagattattccattcttcaaggttataataattaaaactcaattaatcacacgttattacca

SEQ ID NO: 11270 - DNA, 438 bp, Oryza sativa
agcttgtcaaaggttgtcacacatcatgttatgcaagtttaattaagttaatgttaatgatatgctctaaagataatcatagagatgattataccgcatactatatctacatattatcatgtgttgttactcgaaatagataactcattattggctaatgaatatgtgattcgttcgtaagactatttatgttgtatgttattatttctacaggatccttgatcaaatatcatatatgaaacaaataaagttcaataatcagcacatagattgattaattatcgtgtctcatggatcatgattgtaacatcccacgtcttaactatagtcttagttatgctaatgacttgatcacaccagctgagagcggtgttgattgagccacgatgttggctagtacctataaatatattgattttttggtctattttggatatt

SEQ ID NO: 11271 - DNA, 395 bp, Oryza sativa
tgtcttgaatcaacctcatgatgtaagtggcataatatattccctgagtaaaggtccccttggagatggcaatctcttgcatcatgagagacacaatgtcgaactgacggtcctgaatgatggcatcgatgacgtgccaaaccacccccctaatatcatcattgttaccaaggcgagggaggatggtagctctcacaatcctgttaaccacactgtggatagtcctcaggccggcaaccttcccatgtgtgtaccgtacttcatcttcataaaactgagagagatagtctatggagagtggattatgggtgtgctcctcatgcaagtcatctccaaagttcaagcaaatattgaggagccaccggaattgcctcctgtatatagaacactgaagg

SEQ ID NO: 11272 - DNA, 449 bp, Oryza sativa
agcttgataaattaaagttacaaaaaataatgcatgtatgatctacaaagataaatgcatgcagccaattttctcatgtttataaataagttttacagtcacatgctttttttttctttttggctttgttcttgacgggaacataatctaaaatcttgaagcatgcgtgttcacaaaacaaaacgttgtatattctaacagcctatacacatgtaagcaaccatcacaaggtatgctcaagagcccagctattctttaacttaatgaattcacaatatggaaaagttttaagctatttgatgcaccataaattgaacactacaatcagattaaataacacttcaatgccgattcgatgtaattcattacaattggacaatttatctacttagcataacaagcttatttatcttggtgatcaaaagatgtttattatctactactatcag

SEQ ID NO: 11273 - DNA, 410 bp, Oryza sativa
  unsure (1)..(410): unsure at all n locations
ttcgtgccttcgggctggcccgacacggcccanatcttattgggccgttattgcagccggtgggtgggcatggcctaacccgacgtgtaggtcgagccgtgccggcccgacaaatctcatgcccaagcctagtcgtgccctggttgggccgggcttggcggcccatttggccatgcatacccttttcacctatctacattctacagtcactttacaatatctcaattgatttggtttgtgatttttatttaagaatataggaatataggaacttaaattgaaagtacttgattcattagattttctattggattatgtgcgtgtgttctaatatctgcacttagcttttttttaccacctacgttaggaatgtggttgctacccctttgaatcgacattatctttntttt

SEQ ID NO: 11274 - DNA, 344 bp, Oryza sativa
  unsure (1)..(344): unsure at all n locations
tccggttaattntttcgtccgtcattaaagggcgggcccacgcgattttcgtcagtaatgcgaatcgcgacgcgtgacggcgattttgacgctccacaaataaaaagagaaacggaaaaaaaaagagagaaagctagcaagcagcccaactaaagcagcagcaggccggcccaacaaaaagcaaacgcagcctagcagtcagcccacatagcaaagcagcagcccagtacagtactgtgcgatactgtagcaaacgtgaataagttcactttagctcccttagtttatcaccgaatatgaaatccatcccttaaataaaaataccaggaaacttattctttaac

SEQ ID NO: 11275 - DNA, 450 bp, Oryza sativa
  unsure (1)..(450): unsure at all n locations
agcttcatactntgtccgtttgagataagattntctgtggttggttctagtgtgctcctggttgtgaaaaaaatatcaaaaaaaaagttgtgcctctctcctcagcactagagagagcaagcaaagaaaaaaaagaggatccagcgagcacaccacatgtacaggaggttctaaatccgagcagatgtaaactctatgcacaaaatatattccaagatcattatattcaccaaagatgtgaaatataacattggttggatatggcaaatcagacttagcaaataatttctccttgaaattatcgagctcacaaaaatcatcaaactgaacatagcccaaagtatttaaagaagatctcaattcacgctcctctacttcattagcaatgtgaacaacatgcttaaaatcagtgcagtatgaattaacagtaggaatagcatgttcattcac

SEQ ID NO: 11276 - DNA, 393 bp, Oryza sativa
  unsure (1)..(393): unsure at all n locations
tgggaactccatgcttgtcaagtatgaggagatcaagtgttgatggagattaaacactgaatctaatacattgtccaacgcgtaagccagtaagctcaacacatattttccaacctttgcagatatagaatgactggcctctcttatcgagcctaacattcactggtttgttatggcgtgtgaccaaggctaaatattttccatggtattcattgcagctggctacaatctcaagtgggagagcctataaaaaattcccccatcagtaacagataggatattacgttgatgcacgcttggaaggtatttgtgtggacttacagaaccttcttaatctaacttngtgaatctcagcatagcagatggtcgagccatctagagaagctggaatat

SEQ ID NO: 11277 - DNA, 439 bp, Oryza sativa
  unsure (1)..(439): unsure at all n locations
agcttaattccacacataggagtagggtgttacgcttcctagcggcccgaacctgtataatcccttgtctcttactcgcttgcgaaccacctcgttagctagatccccggcggagataggctcttgatcatcgcaccttatcccctggccgaactcacaaaggggggtctcacgttctcccgctagagaggattactcctcgacagccatccatttattattgcagaaataagatgattagatactactagaaccacaaccgcaatacgagatccgccgatttatgcaatggtttggtggttgcatctggttacatattgactcgtagcagcatgacgatgcaaagcagttgcttcccttgcagcangtgcatgaatcacactctcttgtaacggataagggaaaatagccggcgcttcacttgtcgtgttcatggact

SEQ ID NO: 11278 - DNA, 359 bp, Oryza sativa
tcgaccgcaggaggaggggatgtcacggcggcagcatctgtagcatggagttcaaagcagaagccagtggcccagcctgtgaatcggcctagaagggagaagcagcccaacttccgtttccctgcaagtgtgtggacccagtagtaattggctaggcaactgtcagtgagtgagagagactgtgtagttcgatgctatataagccggcacgattgagaggaaggggatcaaatcatgtaatcaaacaaactcaaattcaattccatctctgtcctgttcaattctgttatgatcttctccttcttcttctttctcaagccatctctttcaatctctttccttctctactcgaccgaatc

SEQ ID NO: 11279 - DNA, 371 bp, Oryza sativa
  unsure (1)..(371): unsure at all n locations
tgctgtagactttgactcaaggtatatgagcttatcttatttgttttaaacaatggtctattgctatacagcgacgcaatgattcattgatcatgattggtcgatttagaagtaacttggataagtaaatgacatgttggacagacaagttggtgataatggttgataatatgtcaaggattgagtgtgacatgatgctcgtgggaattactgtggctcggntgcctttgaaataagtggacgtgtctactagtgtctggttattcttggaaacattaaatgagttcacatgtgttatagtggtcaaattatgcttgggaaatggacttttatatcatgctttatctctttcttttaatagattctactag

SEQ ID NO: 11280 - DNA, 437 bp, Oryza sativa
agcttgtcgaatattgagagtcttgtatttgtgtaccctcgactctctggttagtggggaaacaactgaacatagagtcgagatctgtagcttcttgtcgtcgagtactcattgcttgagtaaagatgcatgttgaagatgtccgggtagaaatattgaagattgtaacacctcttgttgtaataaaataacacggcatcatatttggtgacgcatgccgagatgtcgaagctcttgtagacgtcgtggttggtgaagtagcaaaacttgcgaagcagcggcaatagagtttgtcggtgccgaagataatgaagatgaagtcgctccaccatgatgacaaagttgcatatccgtgatgaagtgaatacaagtcggtggcaacataaacaaaccggtagcgaatacgcgtagttgtgaagataaaaacaccagtcggc

SEQ ID NO: 11281 - DNA, 405 bp, Oryza sativa
  unsure (1)..(405): unsure at all n locations
tttcatgcttctgcactnggnggccattctgggattgttgctacttatcatcggattaagaaattatttgcttggcctggtctcaagttggatgttgaaaattttgtgaagcaatgtcaggtttgccaacaggccaaacatgaacactgtcagcttcctggactgttagctcctctcccaattccaaaagaggcctggcaggacatctccatggattttattgaaggtttaccgcgctctgatggttataatgcaattttggtggtggtggatcgttttactaagtatgcgaatttcattcctttgcgtcatccattcactgcatcacaagtggctcatttggtggacaaaactgtatttaaaactcatggcatccctcgttctattgtgtctgatcgcgatcat

SEQ ID NO: 11282 - DNA, 330 bp, Oryza sativa
ataaatatggcaggagaacttggtgtggtagcgagaaaacatgcttcacttgaaggaaagaaaatgctgttattcaactcattcaatctgagatgatggggtgatgactccaaactcccagatacgaagaaaaatgtggagtaatattgcggtaatcggccagaaatcaaaacttgactggcgtaataatatagaagacgactcgaagtacaatgtctgctaatgaagcgaagatgaacataataactcccagagatgactcgctgattgattgattgctccatcctgacaaagaacatgataaattttgagtcttgtatttgtgtagcc

SEQ ID NO: 11283 - DNA, 445 bp, Oryza sativa
agctttccaagttctaaacgaggggatatttgtcaaagctttcttcaacttttcttatagaaccttttgaaatattgtcaactttctaatatttaatccattcatttttttctctctctcgaataattgtcataaactcaatttcattttttttttgactgaaaaaggtagagaggccaacaggcagtatgaaaaagaagaggtcctccagatttcataacagcataccatttcattaaacaatatatattatgggatctgtgtatttgtttacatttggtacaaagatgatactttcatacagattgtacatgatttttttctctgatacaggttatacaggacttttctctgagtaactttagtccatcagttatgtaggcacaggagacgatgaatatgcaaaaggaatgagtcgctcccagatttttcaccacctacggcg

SEQ ID NO: 11284 - DNA, 333 bp, Oryza sativa
  unsure (1)..(333): unsure at all n locations
taatgcattntaatgaagccaccagcctgtgtgcggttattaactaaaaacttcactacctaaaaagggttattctgtgcatcacccaggtgctatagccctctaaatatggtatagataaaaaagaaatcccatgtatttgttctttatgcatacaacactacagattaagcccttcaaatggataaccaataaactaaacaagttgattgaaaagcaccagcctgccagctggagttaaaccattcagccagggtgctaaatctacagcaaatttggtggtaacccgataaaggttccactattaaaatttattgaggtacctcgagttca

SEQ ID NO: 11285 - DNA, 445 bp, Oryza sativa
agcttatcaacccattcagattgggtactactaaagattgcacaagctgaatgcctgaataccagacttgaaggaagtttgtgccaaatatgactttttcaagcagagcaccgctttttattaccttcccagaagctagctgatttgcgcacaagtttcaattatgccaaaagggtcctgtgaccgaatttaagctgtggagcaattaaaagtagaaggccgtagggttgaaattcttgttgaatagaaaaaaacaagagaaacagttgcttgtagctagcccagaagatctatttctaaaaggggatattgtgtacatgttcttaactatttgtaatttcgtcgtggtgtagtgtgaaacgtatgtactagtatattcttttttctatcctcacaatgttgtatcagcttctcattcttactccagatttatgtatgcattaca

SEQ ID NO: 11286 - DNA, 394 bp, Oryza sativa
  unsure (1)..(394): unsure at all n locations
tcacattgttgtcgctctgcgacgacagcagctggctttatgtgttggcagcagcacgcacggcagtgggcgccgacgacagcgacacgagcgcgccggcggactcgtacacgacggcactgttgggcgcggagaggagggagatgataatcttgatataccttcccttgtcagcgcggttgggcgagcggcagaccttgcggatgagatcgacggcagccatctggaggagatcaggccactcggcgacgcgctcggcgttggtgagcangtacgcgacagggcgctcctgcgcgcatgcgcatagcatgaggaacccgttcctgtcgcggacgcgttctgcttctcggtgagcgcgcgctcgacgaacctcggcgcgtcgggaggaactggt

SEQ ID NO: 11287 - DNA, 431 bp, Oryza sativa
  unsure (1)..(431): unsure at all n locations
agctntactctactgcatgaagaagattattaatgtaacacaattctatatgacactatgcacatctattgtgtttcatttgtgctcttgcatgaaaatttgtgttatcatgttcagatgttccagatgtattggcttctgaaccagtagaggcagaatgcataagtgccaccaacaacacaatttttgatcacatacgcaagaaatccagagatttccccaatctaatgttgtcgaaatccatggatagttcttatgaacctttgatactgaagaaaatgaagacatcgggcgatcagtttggactatatcagagcagtctgcatgcatatgaagtcacgcctatggtctttgatcgtactgaggctagagtctctccaaacaatacagatgagaggtgccgcaacatcctgaccagaactgcagaaact

SEQ ID NO: 11288 - DNA, 416 bp, Oryza sativa
  unsure (1)..(416): unsure at all n locations
taccaccaaaacaacaattccagattccagctattgtgtgttntcaactcaggttatgttcggtaggaggggttgcaacattactgtggctacaactacagccagacatgacacaaacaactgatgttggcttacagttgcagccacatagctacagtaaaaaagagcagctgaacatactctacatgtctaatgaaagaacatctattgatccaaatttcttcatctttcagatttaatcttcagttagcttttatccaacttgcttgcaccttatccctttttcaaaccctttcacttttgtaagagagagatcattttatataccatctgtaaaggagatttacaagtatatatgctttccaagacataatcatttcttccagtccatggaccctactccctccgtctcataa

SEQ ID NO: 11289 - DNA, 437 bp, Oryza sativa
agcttgacttctactacttgaaaataatattattttcgtgtgtttttcttagagaaattatttttttgtgtgtgtttttctttaggggaaagagaactttggttgggaaatgacggtggacaaaatggattaaccttgcagtcaaaagttcagggtggacacttcaagatctccaagcagtaaacagttttttttgtttttttttttgcttttttggtctaattaagaatctgattccctcaaaataattaagcatttgttcgttgcttttaaaaggtagattatgtatacacgcgtaatcaaccaagtggttcttcctcctttcttttcaaactgcgaatgatgcttctataattatctacactcttctttgtgacttttgccattatcttgcattactctttttttccggagaactcaatgctctaataatacaa

SEQ ID NO: 11290 - DNA, 399 bp, Oryza sativa
  unsure (1)..(399): unsure at all n locations
tgcattaaacacctaagttcccgtgacttgctgagttttaaagcactcatccttgctctatataaatatatatatagntcctccgccctgaagctgaagatgaagtgaagtgaagattagggtttcgtcctggttcccagccatcgcctgtggtgttgggtgttagttcgttggttccgctgctgctgctgttgctggtgttttctcgtcagtgtcttcggatgtattctcaggctgtcctgagctgcaacctaagttaaggtaaataagtcctctatttattttaaggatcttgcaatgaatcatatttgtcaccgtgggtaccagcactatgtcctgggactggtactgtgatcgcggattcgtacgaagcggttcgcgccggtttttctgcgacac

SEQ ID NO: 11291 - DNA, 432 bp, Oryza sativa
  unsure (1)..(432): unsure at all n locations
agctttgtaattttgctcacttgctgtttaactaatgatatatgcagctctacattgcgtacttatgggaaaagcagcatgaagatcctcaaaaaacaacagctgcacaccaagatatgctcaccagaatccttggaaggcaagtattttgcatccttaaccacagtacttaattacaaaatattgtcaagcatgaacacaaatcgatctagttagcttctacttgtagctagctttgatcttagtcgtctaatcagatataaccaataatttgcagcaaagaggcagcacttgagtcgattatttacagctataagcatgccttctctgggttcgccgccatgctcactgaatcacaggcacaaacaattgcaggtatatatcatancgttaattgttntttttttgtattaatcaacacagatttgatat

SEQ ID NO: 11292 - DNA, 403 bp, Oryza sativa
tagctatactcttgtccatgcatgactcagatgatattcatatggctgcaagtgatggcttcatgcatagatgtacacatggatttggaattaaatactgacactttcccattaccaatgctttccaggcaaaaaaaaactaatcttctagtgaaacttgttaattaagactcgcccactgaaataagggaacccgccatataaggcaattcccaagtgatacttattcatgaacaggaaagcaccattaatagtaactctaccatcagaattcaaattctagtttgcataaacattgttgtggtgtgtatttctagttggtgtagaggctggaagtaataatttcatgatgtagaaaaatgacttcgatatcaatgtgttgcccaatacctaattaaatcat

SEQ ID NO: 11293 - DNA, 122 bp, Oryza sativa
ctttctgcgaagagtatggaattatttatgagagggacgcctcctattcaccccagtcaaatggggtagccgaaagaaagaaccgcactctaactgagatggtgaatgccatgttagacact

SEQ ID NO: 11294 - DNA, 344 bp, Oryza sativa
tattgttgaaaaagccaacgagtacgccaaagctgaatactccgtctccgcatcaaagcagtcgggtcccagttggaagccaaacaagggtaccccggctacgggaggaggtggaagtaacaaccataaggaccgcaagcgtaagcctgaaaaacttgttgcaaccgccactcactcttctcgacagcgttcgcgcgtcaacacgttcgacaagatcatgaactcccaatgcccgcatcatcctaactccaaccacgtggccaaagattgtttcgtctacaagcagttcgcggagcaatacaccaagactacacggaaaaactccgacgaagaacaaagcacgt

SEQ ID NO: 11295 - DNA, 477 bp, Oryza sativa
  unsure (1)..(477): unsure at all n locations
catgttgaaaataccaggtaaactgtcgataaattatcatcaacttgtcacattatacaagcaagcaagcacccaacatcgactntattctggtaagnttctcaattataactatagaatctagaaaggcgcagccaatgctccaactctatcgcggngaatgaggcgcaactctgagccatgctnntagaaacacatgtcctgacgaaagaaagcagctcacatcagcgagtagaacagagaatgtgtaaacttaagttaaaaaatcatggactgatatgcttaaataatcttttatgtactgcacctaattgaaaataagatactgacgactgcatttaggctatcataacccacaaaggcatgcatgtggtaagatctgcatgtgttgttgtgccagcatataactaagagttttacatgctgtcactgaatctgtctcatgcagcaacaatgcatcaggctatacatgatctt

SEQ ID NO: 11296 - DNA, 422 bp, Oryza sativa
  unsure (1)..(422): unsure at all n locations
tagttggtatagtggtttagcccaagaggctatttggcgccgaaagtgttttttgtctttgttgtgttcagggtgaaggattggttcatgctacaagaaggaatttgtctcaaggtggagtttgttgagttgtgatccaaattcatttgcacttaataaaggccagcttctgccgtagtggagcggaggcccgtcgccgggaggcttgggcgaaacggatcgtcatcccttttagggttctaccatatatatacctcttgtaagccgtcgtgcggcgttgtaacctcaccccagatatagtgaagatattttgctggctagcgcccgtggttttttctctcctgttttgggagggttttccacgttaaatctcgtgtcttctgtgattgatctattgttctttatcngttggtcgcatatcg

SEQ ID NO: 11297 - DNA, 209 bp, Oryza sativa
ctggagcctgagcaacacgtcgagagagcatgacttgctctccaccgccgtcttatctgcaacgtcgtcgttgccgctcatcatgtcccgttcgatgtgagtcttccgttcttggatgatctcctctatgatgcgctccactctggtgcggttcgcgagaacgttccgtggccctgtcgcgaccatcgacgctagcttggaggacggga

SEQ ID NO: 11298 - DNA, 412 bp, Oryza sativa
ctcagctctgcgagtctaggactatcggtttggctaggaagtcgactttctcaattctaaagttaacttccgggcatatttgagttgcccttatattccttccagaggaatggactatcattggtacacgcaaattttgggttttccaaccatttcttttcacaaaagcttgcgatatgaaggaatgggaagctcccgaatcaaacaagactattgcgggtacggagttgacagagaacatacccatcacaacgtctggagcatcctgagcggtttcagcttgaatgtgattcacacgtcctcgaccaaagtgggtggaagcacgagaaccttgtccactttgctgagagctaagacgaaactgagctgccgctggagtaggaagtttggcgggcttgcattaacatgccct

SEQ ID NO: 11299 - DNA, 302 bp, Oryza sativa
cttcatggagaacctttgttactgaacgaaacgctctttgcttcttcacagtgtcctatttcttgactggacagagacttttgacaaagaatgttctgaaaaaactgcctctgtcatccacaaagctgagtgtgatccgtaatggtccctgctgaagaagcagaaagtggccctttcaccatgtgggaagatcgtttgcagcccgcttatatatattgcaggtgctataacaacacgttctggatacgatcatcctctttagtcaatccttgacagaatttatctattgcgttatacaatat

SEQ ID NO: 11300 - DNA, 405 bp, Oryza sativa
accttaaaactcagctaccaccaaacacaattccagaacccagctattgcgtgttttcaactcaaggtatggtcgggaggagggggtgcaacattactgtggcttcaactacagccagacatgacacaaacaactgatgttggcttacagttgcagccacatagctacagtaaaaaaaagcagctgaacatactctacatggttaatgaaagaacatctattgatccaaatttcttcatctttcagaattaatcttcagttagcttttatacaacttgcttgcaccttatacctttttcaaaccctttcacttttggaagagagagatcattttatataccatcctgtaaggagatatcacaagtatatatgcctttccagaccataataattttttcaatccat

SEQ ID NO: 11301 - DNA, 326 bp, Oryza sativa
ttatacttttattagaatacttttctaaatacatttctggtattgaaatactttccgagtatatgagtaccaactttacattatgttcatgttatactgaatatactgctagcttatctgggagatgctttggttcgggtatagtgtttgcttatgcaattactctatgtcatgacgatgatattagagtagtatctggtagtttagacgtggtgtctagattacaggatatcattatttggggttatatattgcggatgaaaagtgggtcgctgatggtgacagctcaatacgggtattcctccgcgcctatatataattctaag

SEQ ID NO: 11302 - DNA, 390 bp, Oryza sativa
  unsure (1)..(390): unsure at all n locations
ccagcttatacttntattagaacaccatgctaatttcttttcttggtttgaaatactttccgagcatatgagtaccaactctacgttactgccccgttattctgaagatacagctaacttctttgggagaagccttggttcccgtataaagtttgcttatgcaattactctattgtctgacgatgatattacagtaacactttggaaaatagacgaggtgtctaaattcaagagatcattattctgggttatatattgcggatgataggtgggtcgctgattgtgacagctcaataccggtattcctccccgcctatatattattctaagataatttcctggggaggggattcctccgcatttaccccggttggatgtcatgacggctat

SEQ ID NO: 11303 - DNA, 462 bp, Oryza sativa
  unsure (1)..(462): unsure at all n locations
ctcgtgtgtggaacaatctcttcttcttgnntgcgtgcattgcaactacttgctgctgggaatngaaagccagcacttgaactatgagttggccagccagttctaccgaaacaacacgccttgaaagctgaatgaagccgccatcatcgataggcattnttccatcttgggtgtnttgagaatcaagtagcacgatntcttgatgaattgcactggccgtacgggaaacaatgctttcttggagatgatccgggcatgacgagccaccaacaagctggacgctgatgatagtggcctcaattgatcgatcaagcactgagaatgtgaactcgacctcactccgcttgccgatgcaatgcctcgttgggcctggaagatagccagaatccaccactccaaaagtaacaatttgatcttggcaggatatcatgcnggtggtgtattgactntgcttgactgacc

SEQ ID NO: 11304 - DNA, 429 bp, Oryza sativa
  unsure (1)..(429): unsure at all n locations
tgtattctgggtataaatatagaccccagatcattgttattgaagacaacaaatcccatacaactttggtgcatcgccacccatttgttcttcttttcggcgacttctctcaacaagaggtaagtctcgatggcttgtgctatcggagctattatgtcgctttagatgttttatcatgacccatctgctatcatatgtcttagttaatctagtcttagtatctcgctntagccctatcagctagttctcactttagggttctcgccgatatcggctaaattgtcttactatattagattagctaaggcatccaccatcctgaaaagcgtttaattacttgattggttagactctaggttctttatatactttgcgatgcatcatccctagtcttggtttgacccctaaaactaacctgaattatcatat

SEQ ID NO: 11305 - DNA, 202 bp, Oryza sativa
  unsure (1)..(202): unsure at all n locations
gcgtcaccctatgatagtagagacgacgcagctagctagctggttctccttggagctaaaggtggagatgcgcagcgatggcggcagaggaacgtaagagaggagagtggtcagtggcctatacgagtactatcannattgcgaagtgngaggaggaatgatacgacatgggcaaatgtacaaatagagggggcgatgctgc

SEQ ID NO: 11306 - DNA, 393 bp, Oryza sativa
  unsure (1)..(393): unsure at all n locations
tcagcaatccagcttgaagctgctgtcaccaactcaccatacatattaccgaacggattcctctagccaagtttttgattttttttatgaattctggcaccattccaattacagaacgggttcctctaaccaaattttgaattttatcatgcacagcaaaatgattcctctcgccaagttttgatttttcatggatatatgtagagcaaaatgaaggacgccttggctntaattgtctcgcgcacggttcttccgcttcacgtgcgcgctcgctccgttttcgcgcggagtccgcctgaatttgaccacgacgcgagagatctcgcgatacgagatcaatcgcataagtaaaaattttttatcataagtaaccaaaacttttatcttcataac

SEQ ID NO: 11307 - DNA, 257 bp, Oryza sativa
  unsure (1)..(257): unsure at all n locations
gcagcttaccttgctcgatganatccgcgaggctcagaagaatgattctgatatgcatggactcctcaagaatatgaaacagggtatagccgctggtttcacagaggatgaacacagaaccctatggaacggatatcgggtatgcgttccagacgacagggaacttaaacagctgataccttaggaagctcacgaaagcncctattccatccatcctggcagcacgaagatgtacttggacttgaaagagaaatact

SEQ ID NO: 11308 - DNA, 395 bp, Oryza sativa
tcacgtaactagtgtatacaactatcaatctttaccaagttagtacaatattgccatgggtcattcataataaagaataaaaaatatgcaagcatgcctgctgctgatgttctgaatgatgaaagaaagtacatctaaactttatatagaacaataacagaagggaattgttacaaaagcccatggaaatcatacatcaccttggtttgcaaattgaacacaacatatatctttaatcaacgcacagtttatatgtaagcttgctgcagcctgcacaaggttgctcaatcaagattgtattgtagaagggatcttcattggttctatcgtataggacacaatgaatggagctctaaggtgcttgcaactaaccaggtgatcattcaacaagatta

SEQ ID NO: 11309 - DNA, 484 bp, Oryza sativa
  unsure (1)..(484): unsure at all n locations
atatctntagtatagnctctccanagatatcttgactcagacaattaacacataccaatccctcaacatgaaaggagtgcattccttttcattcgctatcttcttactcaaaccaaaacatatacaaacttgaacctttgttgatgatacttctgctgatcacatctgacgatattatttgcgtactattaacagaaataatgtcatgaatactgccatcaacaagaaaccggccaatgatcgattacactttngtcatcctcacgacctgactatactgagtgngctacaatcatatctctgactattcattatanaagacaactttataaccgacctccttgtatccatacataaactgatatgcttataatggtactatcatacaagaacttatctcattactacatgacacggaaatgatctctgctatttcttaatacattcttacatctcatgtatgctacctatgaccattctgcta

SEQ ID NO: 11310 - DNA, 394 bp, Oryza sativa
  unsure (1)..(394): unsure at all n locations
ttaaagaacacaaacactctagatttctgttctcatcttacttcgattagggagttttttcctttaataaacaccgcgcacaagccattgcgctaaaaatggctctgtccgaccaaatggccgccacatatatattccatccgaatataccgaacacaattagtgctactttctccgtttcacaatgtaagtcattctagtatttcccacattcataatgatgatagngcctctcgtttgattntcattaccatgaaaaaacccgtttatatgncacgcgccgaatacttcaggatgtggtaacttgactctaataatacttcctccgcccataacaaaggattataatttttctacactgtttaccactcccttattcaaaaaatttataata

SEQ ID NO: 11311 - DNA, 179 bp, Oryza sativa
  unsure (1)..(179): unsure at all n locations
atcactactgtctangacacgagtagaccagcaactaagggcaagtgacttgngaattttattcagcattactatctgtcattggattgtgtaccactcatataccatatattggccttcctagctccacatattacttctggacagcacaggttcttgatccctgcaatcgctgacta

SEQ ID NO: 11312 - DNA, 364 bp, Oryza sativa
  unsure (1)..(364): unsure at all n locations
tgttcactaagagcaggtacaatagcaggctattagccagctataaatatattttaatgagataaataataagagagaagagcagccgactacagatttgtagccagctgtagcacaggctccaagatgcaatatgtgtatggcaggtgggaccatatattaatattataggaagcaacattgtataaattagctattagattggctatagatgaattggagctagtagtgggctatagtattgaactttctctaagatcacttgtgggagctagcagtaagtctttgtaaaggtcaatcattttactctntgtttgttcctgagctgctttatgattaaggttggctacttctagcttcttat

SEQ ID NO: 11313 - DNA, 387 bp, Oryza sativa
  unsure (1)..(387): unsure at all n locations
atcatacaacggcatctgacaatcgttcaccaacttactatacttctcannaatctctgtcgtgtcctctgcgtcttcaatgtcatgcaacattatagatagacatcgagtgtccaaatctatggtctctccacctataggagaaggtacgaacatgccttctcgagctgcggcggtgttctctacatcctgatccaacacttcttcagctgcgacatcangcacctctttgtcttcattctttgtncaacaggtatatttcttcatgaatctattcattatcaaatgagcatgcacttcattcttgtcttcgatcattctgtcattcttacagtccatacatgggcacaacatgtgcatgctcatnnctacttttctgtcattatc

SEQ ID NO: 11314 - DNA, 444 bp, Oryza sativa
  unsure (1)..(444): unsure at all n locations
caccatcatgattgcatacatagctacagttagcatgactgcatcaatcttctgggtgacagtatgaccatatgtntcacggctacttaagaactctccgacttgaattactgcacgaaagaagggtgcaaccgccatgggtactntgtatggtccctgctcgataactgagaatggaactcangctacacngttgcgatcngtctctactacaatgactacangaacaacctgacgaggataccccaagcatcattccaatggttcagtcagggtttagcccaganaacagctatcatatatgtagagcacaactggtcaggattcangaatgaccatgaagtgtacattattaccaccctntgcatatagctacatacattanggagttgagtaaaatgtaacataagatatctgatataccgcaacgacgccgtgactgcg

SEQ ID NO: 11315 - DNA, 414 bp, Oryza sativa
ttttttcttcaggtatttgagaacattcagcaattgtacttttcaggttctgactgtgtttaattttcttcaaacttccgaaaaaatccggcacataaaatgtttgaacacatgcatggaacattaaatgtggacgaaaaaaaattaattgcacagtttacatgtaaattgcgagacgaatcttttgagcctaattacaccatgatttgataatatggtgctacagtaaatatttgctaataacggattaattaggcttaataaattcgtctcgcagtttacaggcggaatctgtaatttggtttgttattagtctacgtttaatacttcaaatgtgtgttcgtatacgtcaaaaaaatttttggaggagaaactaaacacggcctctgtttggtttggggattggcaattgga

SEQ ID NO: 11316 - DNA, 329 bp, Oryza sativa
  unsure (1)..(329): unsure at all n locations
atacttctcttacatataatggttctcactggatcttgtgctagattatactcnctctgntccataagaaaccaacatagtactagatgtggcatatcctagtactatgaatctggacatacctctgtttatattcgctgtactacaatggtgtatatacagtcctaggttcgttattttntgagacggacggagtactttgcaattatcanggttattaattaattatccaatattctttgcagatagtcaatctagcctccatgtgcgctgtcaaaatgcaccaacacttctgcctgattgnatattacatcatgagagcttgacaa

SEQ ID NO: 11317 - DNA, 376 bp, Oryza sativa
  unsure (1)..(376): unsure at all n locations
ttatgtcaaaagaaaaaatagatgacggaagctggattcngaatgtttttatttgcaagagctcgaagtatctccatctaaaaaccatctgcaaccatctagctcaacttaagtgtatatgtcctcctgctgcagatttgtggacgaaggggagtagatagatatgtgtggttagggtaacagaacaaaagaaactcctgctttgggccaaagaaaaatatatataaattctagagtttgaatcctatgggaaaatctatgacaacactgacaatatcatccaacacttcacacacaatctgtgatctgatctgtttccaatttcaacaacaaatgctgagatgccctgaggaaggaggagagaggagcaagagac

SEQ ID NO: 11318 - DNA, 405 bp, Oryza sativa
gtgacacttagaaactcagcttttattataattgcctcgtttggtagccccattgcccacaggaataataatacttactatgacctacatacctttacatcgggtgaaaaaagaacaaaaagtgtgctgcaaagagcctttttctcattgggtgcttgcatcaatgcttttgggcattgtcgacctggtctatgcatagatggaacttttatgacaagtaaataccgaggtcagatattgacagccattgggtgtgatgggaacaaccaaggtctacctatggcgtttgcatttgtagagagtgagaacactgaaagctggtactggttcctatagagagtgcacattgcagtggtgcgtatgaggcccaacgcttgccttatacatgatacgcatgcgggtatg

SEQ ID NO: 11319 - DNA, 423 bp, Oryza sativa
  unsure (1)..(423): unsure at all n locations
taaactcaagcttgcgagtcactctcatcaactgctgcctcttgcataatagtctctcctttactatcctctttttttacacacttatcatcgtgcattagctccagaggataaggtagagagaaatttttgctatttttaaccttttaaatatttatttttcaaatataatatatatttatttaaaaaaaatctagagcttctaaccacaccacctccagccactcgtacttaccaatgttgttttcacattagtccaactggtgtgcaggggcggcactagaacaaaatgaagagaataagagatgtaccactcgcttaatttactctactttcgattaagtttacgctaatangaatgctttattttgaattgaggcggtgcatatatgggtgaaaatagatgaactatagcttaaaaaa

SEQ ID NO: 11320 - DNA, 423 bp, Oryza sativa
  unsure (1)..(423): unsure at all n locations
gaactataaaactcagcttctcgggtttggtctctgcccgagcattgatgttttcccgagaagatacgagctatagaacggatgcgcccccccagcaaacttagggatgtgcagtgcgtcactggttgcatggctgccctaagtcgttttatatcgaagctgggagagaaggcgctacccttatttaagctcctcaagcgctcggggccgtttacttggacggaggaagctgaacatgcccttactcagttaaaggtgtatctcagctctcccccggntctagtcgccccagagccaaatgagcccctgctactttacttagcggcgaccccccaagtagttagtgcagcgttggttgtggagcgcgatgaggacaatcctcattctgcgcacccccactctgtgccgacttggcccgggagc

SEQ ID NO: 11321 - DNA, 454 bp, Oryza sativa
  unsure (1)..(454): unsure at all n locations
tgaatttcacatataccttcatgtactactctcctagcaactgtagattgatcattatctaagtaatactccatctatttttcggcgatataatatttgagcgcttgccgccgaatctttcgatcaaccttaagtgtaggatctttcanatatctaatcaaaggaattcttcaagctatttctaacttcatggcacaantgtccgaatcacaataatacagcctttaatcaattgaacgtgccccctgctctctcncnagatcgacagaccgggacgcatgctacccggcagaccgtggaccaccggctaccggcgtcatgccggtaaccgccctgtctatacttcgcaattctcaactttgaatcagcatggctaagatatatgttctacatataccagagctggtgatcaatatcgacaaattctctctctaactataaaatatatatcaca

SEQ ID NO: 11322 - DNA, 366 bp, Oryza sativa
tgcaccagctgtctgagagaatttggcaaaggaccttctagatgacatctccacggagaagagcgacgatgagcaatgacaccgctgtccgtcaagatctcggggagaaccaaaacagggtttacactcagtagccccaccaaaagaaaggggacgactcgataatgccccaaagaggaaaaacgcgcttgaaacgcagttgttgctagtctggcaagactgagctaggtttacacccgcctcccgcctcccgccccctagtcgatccacagctaatgctccattgctccaccttcggctatcctccgtcagtgcgtggacactgctgcaccgagacccccgaccagccttcgcatgctttcacgt

SEQ ID NO: 11323 - DNA, 320 bp, Oryza sativa
tgtcatcagatacagctgcgaagtagcttgtttcctcttaagacgagttggatctgcacaaaaagaaaagaatttttggagcccgacataacccctagatccatcattagtgctttccaaaatatgtatcattctgtatgtatatacatgcctgccttatgagtcaatgtcaatctgaatatttttatggatgtgtgttgggataagctcactacttcatgttccgagtcataatcaacactctagaatcttaagagcatgactgtcaactacactctgtcccaaattattcccatggtctaatccatatatcatgcatt

SEQ ID NO: 11324 - DNA, 214 bp, Oryza sativa
  unsure (1)..(214): unsure at all n locations
catcactacctagatgaggcaagttctagacctatacctctaaagccatgaaccttcttctagacgggtaggtatcgcctcggttntggagatggcttgaagattanggttgatngagcactttggatatcttgtgggctgtcacttgngcttattactcttggagatcttctcctagacggctaggtatcgcccgtgagctctcaaagatctt

SEQ ID NO: 11325 - DNA, 304 bp, Oryza sativa
  unsure (1)..(304): unsure at all n locations
agtaaagccatttgggaaaacgtcaaagcatgtcaagtgggataagttggttctcttgggaaatatagttcaaaggcaaagttatcgaccctcgcatcgaatagcagtagtatctagcacccggagaccaggaaagctaatatgatgcagttaatgacaagttgtcaaacatggtatgctggataagcgtgatatcatagtccaaagcattcagtggtaagttagaagtaaatgacaaacatgaaattctcatgatgaacagcatggtatcctaantatgacaaactgatggcgacgcataacg

SEQ ID NO: 11326 - DNA, 350 bp, Oryza sativa
  unsure (1)..(350): unsure at all n locations
atgtggcctatgggccatggcccatcatccttcttggaggaannatagacagcacttctggttcccggacgaagcctggccacatgtcatttactatngcacccctgtcaactttagaatatacagttagctcgttgatatcgtagcttttatggactagtatgtcctggggagataaattttctttcttatggactaatccanaccagagtanagataagaattatcttcctnnctatgaccactgtatataaaggggcaaggtgagaacattgagatttgttatactcaatatatatctataataaaagagaacttcccctatatcngtgctactttacaatggtgtg

SEQ ID NO: 11327 - DNA, 411 bp, Oryza sativa
taaagtaaggtataggaatcggagtaaaaaagtttgttatggaaacgaccaaacaaaccacatacacaaagtttatttctaattcaaccaatgcagagcaagtgtaattggattaagaactaatccattaacttatttaagtaataggaaaattagactccacattctctctcatgggctacaaattcatattaatcaaagtccatatagaaaaacaatttaaaatagttgaatttgtaattaaaaataatgaatattggaagagaagactagagttcatactggtatataatttataactaattgaaatacgtaatcagagaaaaagaaataatagagtccatatagaaatacaattttaaatagctgaaattcaaaattaaatatggaattaaaaactagaatattaaa

SEQ ID NO: 11328 - DNA, 344 bp, Oryza sativa
  unsure (1)..(344): unsure at all n locations
tgccaccgatccgccaccaatccgcgaggttgcaactttcgaggaagccgtggtgtagactatcgagcatgttgagttgtgatccaaattcatttgcatttaataaaggctatcgtcatctcttttatggttccaccatatatatgcctcttgtatgccgccgtgcggcgatgtaatctcacctcagatatagtgaagatattttgctggctgacgcctcgggttntttctctctcctgttttgggagggttttccacgttaaatctcgtgtcttctgtgattgatctattggtctttatcaatttgtcgcttatcgcttcacaacaaggggtatcagaacttg

SEQ ID NO: 11329 - DNA, 385 bp, Oryza sativa
tgaactcaacatcttatcagctcttctgcaagtcacagctggcatgggcttgcttcacctgcttggtgtactcgtcctcgctatcgccttcctcgccctcctcctcatccctgtctccctcgtcgtcgtcgggattcttaccgtcctcctgctcttcttcctcggtccaaccgaaaccggccactggagtcgacgatggaggtggtgtctttgcctcttgtacaatcttcatgatctcgtcgacggtctgatccgagaatgtacgggcactgttgtccttcttgtagtacttcgcttgcgccgcttctgtaagctcccgcggcaagttcttcataaaccaagggtggtttctgatctctcttattggtattctctgcatgacatg

SEQ ID NO: 11330 - DNA, 470 bp, Oryza sativa
  unsure (1)..(470): unsure at all n locations
cacatgatctctgtanagacacnccaatttgattgtatttcatactactatcangtacctgatgtaaccatanatgttctgcagtcttttcttatataagaacaattgtctgtcttttgatagtctcataatatagaatgtaatatgcactctctcacgatgttcgtaacatatataaatattgacattgcaatgctgctntctttcagatacgaagtatgcacacaataatacgcgatgctgccacaacaacacatgatttcatattctatgccgactggtggatcnattgggcaggatgaacatgcaattgacatgtttcttttgtatgaatatcatggtacttgaattcctgggaaataagtgtcgacatggtctggcatcttcattcaggaaaacaggtcatactccactggtagtagattgccagtcccattcagcgtgtccttgattgtcngtgtacaatatct

SEQ ID NO: 11331 - DNA, 385 bp, Oryza sativa
ttataaatctctgtgttggtattgccccaaaacaatggcattaagtattaacattaacacgtatcaacatataagagtactaactgtagctgttcaatcatttgcaggatctgctctaattaatttagcccttggctttaggcttcagaataagaaccagtgcatcgttcaagctttggcattcctctttcgatatctgcgtctttgtgacaacagccaggttttgtccttataatccatatggataatgctctagtattttcagcatctaagctgctagtaaggctcaactgtttccttatgggtttagtggccgagcttttttccttttttaccaaatttaatggctggggttagcctgcagtgctgagcacttgcatcattt

SEQ ID NO: 11332 - DNA, 154 bp, Oryza sativa
  unsure (1)..(154): unsure at all n locations
atcaatacaatataatataaataattaaataaaaagttgtctctcctcagcactagagagagcatagcaanaaaaaggaagaagaggatccagcgagcacaccccacccattccctcttgtcaccaccttgcaccaccgtttcttgggtttcgt

SEQ ID NO: 11333 - DNA, 252 bp, Oryza sativa
ggagtgactggagcattcattccaaacctgggatcaacggtgtcaccaggttcggcgaaccaggctagcccatctgcctagccttggcccatgtcctccccgacctctatgttatttttaggatttttgttgattctcggattttgaaaaatcacaaccaccttgatggatacatattttctacttagtctagattcctccacatgggtttatcctgttacaaatacccacctttggaacgtagataaccct

SEQ ID NO: 11334 - DNA, 177 bp, Oryza sativa
cctatctgccggtctagacggctcactacaccactacgcggggggcaatgttattttttcgggggagctgacctggactaatatggctgaccttgtggtcctttgcatggagagattttgtgtgtgcgatgacaattccagcctatcgtgaggcgggacatgctatcatgtagaatg

SEQ ID NO: 11335 - DNA, 364 bp, Oryza sativa
tggaggatcttgatttgtcagataatgatctgacaggatgtattccacctgagttgggtcatctcagccatttgacattcctgaagctgagccataactccatttcaagaccgattccgggaaatatgggaaacaatttcaagatgcacggagttgatcattcgtcaaggaattcctctaacagcagatctgggtcggatttctgtcaactgctctccctaaagatcctgtacctgtcaaacaacaagctcactggtaagctgcccgactgctggtggaacctgccaaatctgcagttcatcgacttgtccaacaatgcattctcaggtgaaatacctacagtccagacgaactacaactgttc

SEQ ID NO: 11336 - DNA, 335 bp, Oryza sativa
ctaggctccactcaacaccaccagactagccggtcgctgcctgccacttgtcaatcgccagaagcattaacgcagccaagtgaatgtcaatgagttcgcgcccgagccaatacagggctaggcttgcaacgccgatgccgctgatcatatcagcgaatgccctgagggcgccagccttattctatctaggcatgccattcgtggatgacaatgcgttatccatgatgggtattgcttgccgcgaactacattagcaatacatggcgctatgctatgtatagcggataatgagggagtcctccatagttggacatcacgaccaccagccgttgcta

SEQ ID NO: 11337 - DNA, 179 bp, Oryza sativa
  unsure (1)..(179): unsure at all n locations
gtataagatgttagggggggcatcaagcatcctctcaatcgaaagagtggttgggaggtgtgctaaatgggtcggccgaaccaccattgtgtgctctcgccatctgctgacacgtgtaggtncctaatgaagtcccgatggtggttgtgcggtgttcacggcttggataaatgtcacaa

SEQ ID NO: 11338 - DNA, 373 bp, Oryza sativa
  unsure (1)..(373): unsure at all n locations
ttcctcattggagaggtcccttgtggctgtgaacacttctctngcaggtatcttgaatacgttggagagaatgggccaagatggtcatgatggatcggctaggcgcaaccacaatggccatgatgctaatagcagcatcgcagcaagggaagaactggagtacgctgctgacactgagcatgatgaggaggtacttggtcgtccacaaagacaacagcgccggcagcgccatggcatgggcgctccaccacggcgggaggtacgtgataatgatgattctttatgcaagatcaagtttaccattccttgctatgatggaaaatatgaccctgatgcatatcttacttgggagttagccattgatcagaaattt

SEQ ID NO: 11339 - DNA, 290 bp, Oryza sativa
  unsure (1)..(290): unsure at all n locations
atcttgagtcacctgcggcatgcaagcttcgcgtgaagaactgcacggtgcatgcgagagatctcattgtgtcgcgtggttagtgcgtgtgttgccgcggagaaagagattctttattctggtgtactgagtgcatagctgtaactgtactccgtcngtaaaaaaatagaagcaaccatggatttccgtgtccaactttgactgtncgccttatatgaaatatctctatcattcgtattttcattatttgtggatgataaaacatgattaatattttatacatgacttgt

SEQ ID NO: 11340 - DNA, 422 bp, Oryza sativa
ggacacttaaaactaagcttgtgagcaaaacttggaaagcttcttcatgtgatctgcggctaaaccaattgagtcagcaaccagacatcatattggactctcccgcttttgaacccagatgctctatatttgaggacccagttgaatcgaagtgccaaggttttactaatttgaaggacgaacatgaattatctgggttctcaagttctctgtcaccctgtgctggttcatccatgtctgctaagattgaagtcaatgattccattgcaacgcaagcaggatttcttgctcagccaggaaacccaggtaaattgcccatgatgccatgttcactgtccctcttcttgcactttctgtctttgactaaatatatagctggtagatgcatcgcaatttttctagaattactacatttagttact

SEQ ID NO: 11341 - DNA, 499 bp, Oryza sativa
  unsure (1)..(499): unsure at all n locations
tcgcttttatcagactaatcctccgtagattatcaccctatgtagtgcgagaaaganaaatcatcagaacttntatttaaacataanatcctatattgaaccataactttataataccagcgaanacatacaaagttagcanagagagtgttccacaatctggcaagccaagaataagtgcaaatattattgaatggagaatgaacctanacanagtactttctatatgagggtanatccantatatatagatttttctgagatgcacatatataagtcanaaaacagaaaggatgattttgcaactatatataagtgatcgaagggacataataatggaatgttatgacgacctcaataaatcacataatctagtggtctggcacagaaggagagaatnaacatttatagatcagaattgctagacatctgacctatgttcagtagatgcatctacggctccacatgtatacttagagtctaatctgcatagtatgct

SEQ ID NO: 11342 - DNA, 399 bp, Oryza sativa
tgcatctttaaaataatcatgaaactcatgctccatttgtgaccatgtagaaattgaactaagagcaagcaaactataccatgtagatgcaaagtttgacaaagaaaggggaaacaacttcaacttaagcaaatcatcgctaccggccttaccacattgatcaataaagcagccgatatgctccattgtagtcatagcattctcacctgtgaatttcgtgaagttgggcacctcaaatccttgcgggtatgggaccgaatctacatgttcaggatacggcctttgatatgtatgcatggctactttggattctatttcactattatcccgcaagacattgtcatcatcttttccaacatccacatgaaccgattgtgactccgtcttaggtgacaatgc

SEQ ID NO: 11343 - DNA, 401 bp, Oryza sativa
  unsure (1)..(401): unsure at all n locations
ctgaatcgcctctcatggaatacnagtccgtngcgtggatgcacgacagtaagaacacattaatggcttgctcattccgtcatgtagtacgattgtacgaacgtacaaaccggcagctaattgacaagggagaaacatcacctacattatatacacatacataatcacgcggggacagctgtcgctaacatgaacaggctggtgaacaaacatatcatgangttcatgaaagagtggttcttcagtcttcaccgatgtgtatagaactatagctagagactatagacaaagagagacatacatacctatacatatatactctcttcttgtccattgaatgctnacacacgtcggacacacatagttacgtcaaatatcatctcgaacgaactcggcatttt

SEQ ID NO: 11344 - DNA, 278 bp, Oryza sativa
aaccagctccgttctacgcatatgccataagaaatactcggacctgaattcttgcatggcttaacactacctaaaagtgcatgtattctgtttattttgtcgatcccatatttgtgattttgttggtaatgtttgctggcgaattacgactgtggtatttacagggctgcaagggctttaaacacctctaatatgtatcggatcaatctgtcctaagcatcgttatattgtgaagatccacctttcttaataaatcaatcacgcatttcttttttttc

SEQ ID NO: 11345 - DNA, 231 bp, Oryza sativa
  unsure (1)..(231): unsure at all n locations
atgatacaaggagcctctccaacaaccatganaacaattntaagatgtngcatagatggatgacananggacttagccatggagatatcatcacgtggtaagtggtggctcttgctcttgtntatacattatcctctctcttttaatgctctgcttaactttggttnggagaaaattccagggccatcatttggcttattcatggaataagctgaacggcataatggcata

SEQ ID NO: 11346 - DNA, 373 bp, Oryza sativa
tcaggaaggcacagattcctgaggggattatggctcttaataaaagagagttccgtgcattgcaacaaggaaccaagacaggtacagagtacttgcacgagttcaaccgccttgcgcgctacgctcctgaggacgtgcgcactgatgccgagaagcaagagaagaatttgtttggtcttgatgatgagttgaccaaccagctcatcttcagagtctatgaggactttgataagcttgtggacaaggctattcgtcacgaagagcaacgcaataaaatggactgtgaaagaaaggcagctcagttcaagaattctccggggaacaatcagaagctcgcttcatgacaagacagcacggtggacctttcaccatg

SEQ ID NO: 11347 - DNA, 477 bp, Oryza sativa
gcatggcatcgcaacgtcgccttcttcttcggcatcaatgtcgactccgtggctcactgctagcacagatggcgggcggggagtggatctctcaattcttcctcagcgacttgcccgacggtgttgctagctgacacaaccattttctcaatggcagaaatcggcgtacggtctacctgtcctccttcggtacggggttcccttctcttatctctcatctagcataaattgaagaaatatgttctgaatttaggctaatattatcagatgtttgtttgcgaagttcgttcacagattcagatagaacctagcacatttccgaatattggtgcctacagatatctctctctattctttttaacaggtgcctttgataattcaactctgcccaattctcttatggaagagagtcatgtgatgcataggcaaacatgactgtgacttcctgaacctgtgattcctgcacattgtcgttat

SEQ ID NO: 11348 - DNA, 385 bp, Oryza sativa
cagctttgtccaaacagaatatcaaccgataattattggattcactcatttcgtccgaacgggttaccattctgtagtattttccttataacctttactgtactccagtaaagatatttactgaatgtggggacattcctttacagcggataatagtgacatcacccactgaacctgcaataattatgcttttctcccgtgtacaacgcgagtactctccccgtctcccgtgtcccgtccgtggaaaagcaaaagttttgggagtttggactcatcttttcaatccgcaacttttcgaagtgaaaaccgcaaacctctcctgctgctggaccccctctccaactgtcaagtctcaagtgtttgattttttgttttcaatttaaaa

SEQ ID NO: 11349 - DNA, 541 bp, Oryza sativa
  unsure (1)..(541): unsure at all n locations
tgcagcttatctgtaacatcatcatcagaaggacattagtacttttcgtatttattctgattgctatccctcatctgatgaggcatttaataattactctataatgcgagactanatatattaatgatgttcttatgcctattatctanatgatcacatccnctctaatttgtccttgacaactcatagctagnntgcttgttngtgtcaatattcattaccctgtatgtgttcatgtgggacttcagacttcagagtctagacagtagatagacatgcccacttncctgaagnggatcccttcaacctttaagtggggacaataaacaatatgatactgtcataactgcaatcaagtatatgacatatgtgagagtaaccacttgtttgcttgtggctgactctgacgtaggagctagctgatattgattctttagatcttctatactattgtctcatangaaaggatgattactctaatatacactcttggctgccactgactgctcagagaatatattaaatacaaggctctactatt

SEQ ID NO: 11350 - DNA, 372 bp, Oryza sativa
  unsure (1)..(372): unsure at all n locations
agagatcgaaacaacatggcatgttgataataagacaaatggctgatcttgcaggacaaatgtattactggattgttgtcatttttttcaagggaatataatattaagagtaaagtccatcaccggtctctaaacttgtaccgctgtgtcatcccggtctctaaacttgcagatcactcgtttaggtcctccaacttattcagtctataaactaagatttgaatatcatctgggtcaaataggacggtctaaaaactttatatttaaaaataattcataactttttcatgtgaactctaatgaagacaaaatntatatcaaacttgtagccctcgacacgatctacaacattggtagtgaatttttttattt

SEQ ID NO: 11351 - DNA, 255 bp, Oryza sativa
  unsure (1)..(255): unsure at all n locations
cttgctagaactggatgttacaagtatgttctgttatttgtctgtttcgttaatgcttatgtcctagntagcctggatatttgatgaatcatgcacattgangtttgttgatcttttgagcttgctgtttattgatcgnttgactatatgttctgaacaatgcatgttataaagtgagatgttatactttcaagaacggagggaggctgtgaagaagaaagcatttgtcccaccaccacgtttctttaatattga

SEQ ID NO: 11352 - DNA, 376 bp, Oryza sativa
cttttttaaccctctttatcagttaagaggtatatacctctataaagatgggagaaaacattttcactaaattatgatggcaagggaagaaacgaccggttttgatagtgaaagtattagttcaacttgttttcgactcattttcttctttgatttcaacatgttttgcaaactgcataaaaatgtaactatatatgttaacaatagttgatgcaaagctactacttctatgataatggtatttgtagtataatttttttgctgttattgttaagcatatacagtaacaagacaagatatgggtatgtttgttaatgacatactatttgttgtttgatgctcatttatatatgtcaaactccatataataatataa

SEQ ID NO: 11353 - DNA, 187 bp, Oryza sativa
  unsure (1)..(187): unsure at all n locations
agcacgtagtggtgggtgttcacgacgcccgtcgtcgacgagaagccgacgtacatctcctctgccatgaccgtggagaggtcgatggcctgngagagcanatgcttcttgtgcttatgcactngcacgggagacagcgtcacgttgagctgcttggcctggccgtcgtagtccacccacacctgca

SEQ ID NO: 11354 - DNA, 281 bp, Oryza sativa
tttgtattactccatttattaagaaagaaccagaaattttttttcctaaaaaaaattattcattttgaaaccctccttttaatgtctttccctccccttcccgtacttttctctcctgcattctccccttcggcctacaaccgccgtcgtccgtcgccgttgcgcgcgcgccaccccctccctccttcccgtgcgccgacgcctcgtcgttccatctaaatcgcgagggaacgagctgaaccccatctgcgctggtaagcgcgatggcgaacccgctgcac

SEQ ID NO: 11355 - DNA, 365 bp, Oryza sativa
  unsure (1)..(365): unsure at all n locations
tagtaaatgtngaatttggttgcccgaagtaaagttccttggtcatgtcatctcagttggaggagatgccatggatccaagcaatgtggagtccgtgctaaattggaagcaacccaagatggtcttagagattcgtagtttccttggtcttgcggggtactaccgcaggtttattgagaacttctcaaagatcggtagaccaatgactcgactgcttcagaaggatgtgaagtataaatggacggaagagtgtgagcagagttttcaagaattgaagaaaaggctagtgactgtgccagtgttagtcttgcctgatccaacgaaagggttttaggtgtattgtgatgcatttagacatggtttgg

SEQ ID NO: 11356 - DNA, 481 bp, Oryza sativa
  unsure (1)..(481): unsure at all n locations
tcatgaacgtgctaatgaagcctagaggggggggggtgaatatgctgtccctgaatacattaaaacanatcgcagcggtaaaattcaaacagaacccgaacttcctagtaaggaacatcggaacttccggtctgccatgcccggaactatcggtgttctatgacaggaacttccgggtaacacaacataggatgatattcataatttgaaacaggagacttagccatcttcacaagatgggcacatgtgtctaagccgagaataatcacagaacatccacagaacatcacagaaaagacaagagcgaattttnccnaagttcggacttgcgacctactctcattgngagcatcaaagctggtctcattaaccctctgctacttgtgcaaacccaangaatcacagctcaccccacccctagcaatttagatgatgacacaatcactacctacttaaatcgccaaggggtgttactgagctt

SEQ ID NO: 11357 - DNA, 420 bp, Oryza sativa
  unsure (1)..(420): unsure at all n locations
tctgattggcaggagttgcgaggactgacttgcctgttattatgtttctcggatttgggcacttgtcggcgaaatgacccattccttgacaattgaagcaaccgatatcttcccggactcggcattttcttttctcattttgattcctctgtcctggcactggagttaggctganactgtaatcttggcgaggattggtgttgccttgatgcttctctccgctgaaaccggcgggttgggtagccatcttcttcgtcagcagaaaactgaattgacaatcttttggtacatgatcagttccttcacaaaaaaaacaagtgatcctgctcgttggacacctgtcgggtggatggtctttctcacaatgaacgcatgtataggcacacgagctggcaacatgtccgatttctccacaacgag

SEQ ID NO: 11358 - DNA, 473 bp, Oryza sativa
  unsure (1)..(473): unsure at all n locations
tgtgctctngaacgaagatgagtcnctagttcttttctttcgtgagaaatgcaagtggatgataacaatcacaaagttatgactaagaatattgagatatctggtagatcaaagntttggctttggcttcatgtcanaggatatntggcttctnttgtgctcgagttcaaatctatgaacaacaatgtcatcctgagcggaagcagctttgtcgtgaatttgtctanaatatatgcgtattatgtgccgcgcgcaagaatatttcgtatcacatgccggcatgactagaacatcgatcagaattaagagaaatacccgaatattatatgcctgactaccatcaacggacatatggagagctccatgatgctttgcggctattaatgaacaaactgtgtataacagttgagttgcacattgtcgcttattgctcctgtcatgacacctgttgctcaaaacacctctttggtatt

SEQ ID NO: 11359 - DNA, 305 bp, Oryza sativa
cttcaattttcttctaaaattccagccattagtagcatataactatattactcgcgtctccaaaattctacaataaacttagacagcatctccatcgtcctctttgagaagcaaggaccaaagtcttgcccaatgagtccccctgaagattacctgcatgaaataaataagattggagccattaaagattacattattcctattaagccacaaagctcacaaaattgccgcaatacccatataaatttgtcttttaagtctaggttcaacaccattcaaccaatttccaaacatatgagccatgc

SEQ ID NO: 11360 - DNA, 330 bp, Oryza sativa
  unsure (1)..(330): unsure at all n locations
ttcaagtgatctaatgatgtaagatcttcntataatgttacaaatatactaacatcttcaacaatcccaacataatacagctcaattagaagtttcagtgtgcttctcttcttcatagctcttgagtgtttggctgcgtacanatcttctccagagttcccaggaaagaatacctttagttcgcctcgtgtaagacaaggagaagatatctttgtatctttgatgacgtaccgagcaaacctaaattacatcgacacaatagttattatattacacaattgcagatagaagtgacacttttggaagttcaagtctttatcaaagatgact

SEQ ID NO: 11361 - DNA, 387 bp, Oryza sativa
tcgttagcagcaaccctccagctttattcagaaactgatatttttactgccttttcctttctcagagagaaaaatttcatggctagtgtttgctaattcatcttcccctcaatgtatcaaatttcttttgattatttcttcagtatgctctccccagttcaggcttttgaatctgtatttgttggaaaacacaatagaataatagatgtattaacaacattctgtgaattttaaaatcctatgtgcactgctccatttctttggctgtgaacccaagaagtataaatgcgaagaggctgcattcctgcatcgcggatttctttgtgcagttctcggagctcgcaactacacatatctataatctatgcttggtgtgaatacttactc

SEQ ID NO: 11362 - DNA, 226 bp, Oryza sativa
  unsure (1)..(226): unsure at all n locations
atatggaacagagtgctgaacctgatatcccaatgccatacaataatcatcgaaagcatgggatgtatattcggcagcattgtccatacagaatgattgaatcctatgttcanggtagattgccttcaaccttataatttgagacattaatttggcagaggcatggttntgtgtcgatagaagacacacatgagaccatctagtagatgcgtcaatcataaaccat

SEQ ID NO: 11363 - DNA, 408 bp, Oryza sativa
  unsure (1)..(408): unsure at all n locations
tgcagctanagctactatagtattaatgaactatgtctaagtctacatcatataaatctagttataaggcattgtgacatttcatatgttcacattatggatgcctagtattgtgggatgaagattaaactctctataggcaaccattgtgagatgacagtatatattgttcagttagttctacgacgttcacatatgattttctgttattngattcttcttggtgataaaatggcctaacacgcactgggtgacatgttacaacctacaagtggcgatgagacgaaccatgccagatnaacatgcanattacaacaccaagctagggagataactactggatttcacattatgtcctttagacacttatctacagataacccctagaaaacttatttagaatgatcg

SEQ ID NO: 11364 - DNA, 385 bp, Oryza sativa
tgcatgtgctgagatatgtaaaaacgggcctgtagtatgatgcaatgagaaacggaaaccgcgcaggtcgtatgctccacgtacgaagtattcgttcgagaagcacgcttattagctttttttattacacatgtgcccttttctaagtcatattgctaccgattgctgaaaaaatagaagaagtgtatgttataattctggtacgttatccgtgtgtgaatgggtattaaatatatggtgttggcaaatccttgccttttcttatttacaccagagtgagcctgttattcgagacgcgtgcaaattaattgggcccgtgcctttgcacacgcctgttgttgcatgcaacaatcggagcgcgccctgagcttggtttccacacatg

SEQ ID NO: 11365 - DNA, 426 bp, Oryza sativa
  unsure (1)..(426): unsure at all n locations
gtgtgtcagcatgtatgtgntcgacataaattaccattatataaggaccanataccanattagaccactcatccacaatanaacagaatggaatatcaactagatagaacatctaaagatactgtgtgacactgcaactggcttgttccgcctttttacacgcttgcagtattctctagctaacaaattggcctcatgttgatccatgcccaagaagcatatgtcaacctgaatacaaatgttcatgaattcatagatgtacatgaataatgcttntaaaaagttcgatatacacactatacatgtcaggagaaatatagaagcatattgagaactactaattactggatatggtggttgagaattattatcagacctgacagaacagttagtgaactgacacgtgcatatctaacaagaccacac

SEQ ID NO: 11366 - DNA, 373 bp, Oryza sativa
tgccaaccgctactgggtttgccttctttcttaggacgagatgaccaggcatcagctcgtcggttgaacttatctgttgtaagttgccgaagtgcttgtggcatacttgcgcatgtgctcgagtgcgtcgactctgatcccctccaagagttcgagcgacacttcgcgccctttttcgcccctagagaacatcacccttggtgagttagccccttgctctgctggggtcattacctcatcgccataaagaagtatgaacgggctaaacttggttggtcttgtgggggtcgtccgaagggcccagagaaccgacagcatttcctctggccattttcccttcgctgcccccttgagccttttctttagtgcttct

SEQ ID NO: 11367 - DNA, 252 bp, Oryza sativa
agcactgcctattatatatctacccacccaatataaaatgtatcctctgttgagctactatctggacgccaacaggcccacctggtcagccaatataccacacaggggagcgttactcctaccccaacaacacctctgcaggactgataactttctctcttcgtcatgctcccggccccaacacaccccgtgcgcgacgaccgtcgacactctccgtcccacctgtcctgcgcactccggtacaccactaca

SEQ ID NO: 11368 - DNA, 361 bp, Oryza sativa
tcacctagcgcacatcagatctaggtgcactaacagatgcatttagcaatagttgtgcaagctagtacagatatttcagaacatattgatacttgtcactgtgtaccttattcaacgaatcaaacagcatatttctttctcctcactgccactatgcttgtgggtgtgtgaggcggacaactcccagtgtgtgcgacagcaggcgtcgctctcagactctgggctggtgttcttgtcaaagacctcgagggcgatgttagcaaccttcttcactagaatcaaacaacagtagttctcaatacaacttggaagtgtttgactagaacaagggttaataagaatggggatacaagctaataga

SEQ ID NO: 11369 - DNA, 269 bp, Oryza sativa
aagcacggctcgctgtggctttttgtcttgcaccgttttttttattatatctttctgatccaggagattgttacatgaatgtggttactctactgaagcgccttgctaaaaaaagctttcttaagaacttctgaacttatggctacttgaaaatgtatccacacacatcttgtctcgaattgctccaacaagtgtgaaatttggaagcttccacgttcatctcactctacttcctaaatcccaatgctgaatgtatttgcctggcttaa

SEQ ID NO: 11370 - DNA, 313 bp, Oryza sativa
tatctcttacgctccacgaatggatcagtcagaacaccaccaccggctcgcctcgaccgccggcgactggtgtttccgcctgcacggctggcttattatgcccgccgtgttgggcgtctacgtcttcaccgaccggcttgccttcgccgccgccgactggtgtttccgcctgcacggctggcctttatgccgccgttgttgggcgtctacgtcttcaccgaccggcttgccttcgccgccgccgactggtgtttccgcctgcacggctggcctttatgccgccgttgttgggtgtctacgtcttcaccgaccg

SEQ ID NO: 11371 - DNA, 441 bp, Oryza sativa
  unsure (1)..(441): unsure at all n locations
tatcttaaaaatcctttcacgggcactaagtgacactccttatgagcggctngaaaccgtgcacacatgcaaacactaaacatgatatccggcctagatgcggtaagggtaaacaagctaccaatcatagaacgataaagctntanatctacctgtntaacctcctcatcaaagtcgagatagcccgtggttgccatangtgtcttgatgggctttgtcaatctcaagcaaacctcttggatagaccttgatgtacttggttgggtaacgaacgtcccatccttgagttgcttgatttgaagtccaagaaagaagctcaactctccaatcatggacatctcanattccctagacatcatatcatccaaattcttacanaatacctcattagtagaaccgaatatgatgtcatcaacatataattgacacacanagaaatca

SEQ ID NO: 11372 - DNA, 424 bp, Oryza sativa
taaagctctttttcgcttgaggcgtctggggtcttgctagcgtgtttatccgaccgcatcggggttttcgctccgctttttctgagtggggcgtcgttgttgtactttctcccggaactacgaacgtgtggagaacgtcgcgatccgtgatttctgaagtcaaatttatgctgcgttttcgccacaatgtgagtaggttgtgatcagattagtatttgttcgtgtagatttcgcatctaggttgggatttaaatgcaatagaatagtaactgagcggtgatgttgatgcgctatattcctttatgcttaaaccctgagattctttgtttggtagtgtagctgggtatcttattgcttatatggggatttgctctcctctgatgtgcttatgtttgtgggtgcagctgctgatctctttctatgg

SEQ ID NO: 11373 - DNA, 259 bp, Oryza sativa
  unsure (1)..(259): unsure at all n locations
tgcagcttgcgggtctcgaatgctagtgctcacatttcgagtatgcatagtgtttgtgcgtcgaatcacaagttntcgattcgagttaacctgcagccccccaaagatagggaatttccgtganaagcatgcaataagagaaaagcattatagtcagctacactatnatattttacaataaaggctctcaaccataacggttttgaagcagcanaatagcatttgtntcgaacatacgaagcatncttaactattcttt

SEQ ID NO: 11374 - DNA, 376 bp, Oryza sativa
accgatgtgcttgacataaatataaactgaaattctatttatcatctttaaaaaccattactgatgttttgttattgtcgtcatattgttgactcaaagaacaataaaagctcacatgttagacgcacaacactaactacaaggatcggatccatgcacggcatctgtgcatatggtgtggcatccgatggcaacgcatgcaagagcctaatctatcgagaggtgatcgaggagtaaaagcattttacagcttttgtgcagggaatgcgtcgtggtgccaattaagctagcatgcatatgcaatgcagcagcacgagtaaaaacaagttactcctacttttgcagggctactaatactgtacgataatctggatct

SEQ ID NO: 11375 - DNA, 438 bp, Oryza sativa
  unsure (1)..(438): unsure at all n locations
tgacatgctccctactagtctgacttgtgatattgcactttacaacaaggttatgcagaccttgttgaactagtncagcctggccatactttntgttttttttactccgatggagttggaagtatgtggtaatgcacaccttgttaaactagcccagcctatccatacttttgtctnttgtactncgatggaagttgtaagatggggtgatgctcaccatgttgaacaactagtccaacctaaccatacttttgtttttcgtactccgatggagtgtganatatgaatcagacttttgtatatataggaattcacataactagttagcatcagcatatgtattctatattaattcncactaattcataacatgatacttaatgaccattcagacatgcattgatagtaattcacactaacttggacacactacatcat

SEQ ID NO: 11376 - DNA, 384 bp, Oryza sativa
tactatgcctactacatccataatctatttcaaatttcttaaccacccaatcaaccttggatattatggacatctttccaaaccttcatgttagcctaacatttttcctattggaatatcaaatatagaacttataggaatgctttccctctcatgaaagcaaagcatcttacaagggaaaggggagcatcactggttccaataataataggataagcagacaaaaaaacctttagaacagagaaactcttactctttcatattataagctacaacccccatctcggtatatataagcggatcagatgggcagatagattttgctgcgtgaagaactgcatccagcagaaagaaagggggtttataaaatgatgacaaactata

SEQ ID NO: 11377 - DNA, 194 bp, Oryza sativa
  unsure (1)..(194): unsure at all n locations
taagctctgcattcatgcttcctttccanaggagaacaaatgcttngaacatcaaagagaaagacggagaggagtggctatgacaaataatacattctcgctctccccacaatgcggcatgatgaanagaacagaanagaaatgatgaaccctgagttcctctcgacactcaaggcttgttgtggcccgatctt

SEQ ID NO: 11378 - DNA, 413 bp, Oryza sativa
  unsure (1)..(413): unsure at all n locations
tactggtatctttattgtgggtgggagtcttgttctgtatcatgttgaaggaaggcatcacaagtgtccttctttctcttgcggncatcttaagggtgtatcggctccattccgtcnggcagctgatccacctgtgtgcggagcaaatctacgagctggtctgcaggatccaatgctacaatttcattgacatgcacaaccatgtgaagatatcactacacacagacgctttgggcgcgagcaacatagcggagaactggctcttcgcagtgaatatctcttgtcagacaagcgcaagctaggcccaggatgagacgagtggctctgggctatatatgcttacttgtaatctacggagggaagacaaggatatacagctgtattgccagctcactatttttattatgtgtata

SEQ ID NO: 11379 - DNA, 387 bp, Oryza sativa
  unsure (1)..(387): unsure at all n locations
ttatcactcatnctnctncgagatttcagttagcctatatgataaatggnaagaacccaccacatgtggcacaagctcgtcatcacaaaagaatggcctagaaggcaattgcagactatcaacaccaccttcaagcatctcaatgacctcactcattgttggccgatcatgagacttcatctgaatgcaatgtagcccaacaatgcacaacttcttttccaactcatgcatattaaaggcagtgaccacctcacccaactcttgttgaaccagctaattatacacccatgatggataatacgcttggcttgagctcgacatatcctgcttagagttncttcgccctccaaccatcttcaacagaagcatttcaaagctatacatgtc

SEQ ID NO: 11380 - DNA, 450 bp, Oryza sativa
  unsure (1)..(450): unsure at all n locations
gctgtcttaccttacacagcgttataacacaactccttgcttcaatatactatgcaaggtaggctaaagtcactactactaagaacggtggaatggagggtgagagcgcgcctggaagctntgctctgaatggnngtcttcgtgttgtgttntgtatgtccttattctctggtaatgccttaatatcgcaattattttttagggtctctaattctacttctaagtaatttagnctattntcttaccactcgtactctactagataaagncttttcatctgattctaaatctatttattntctcccatctttgttagtttgtnttatacattcagcacaagcttgtttagacatatactancagtcactctattttcttgactanggtaatatatgcanaaagcacatttgatattatagtcacccttttcttctatccaatcatgttcac

SEQ ID NO: 11381 - DNA, 374 bp, Oryza sativa
  unsure (1)..(374): unsure at all n locations
tgcaggcaaggggatatangaggagtacatgcttgagcctcttgtgtgtttgcatgctttgtcccatacgtggtgtcctactactaacaaacacaaacaggagtagtagtagtagtttgcttgtttggttttctttgggcttgtttctctgcaattgctttgcatggtgtaattcctcttccattccctgcatctgcatttaatcagcacaaatgagggcacactagatttagtactccctccgtctctatgtttgacgccattgactttttaaatatatttgaccattcgtcttattaaaaaattcaaagaattattagttcttttcctatcatttgattcattgttaaatatacttttatgtatacgtatac

SEQ ID NO: 11382 - DNA, 70 bp, Oryza sativa
tagagccgcactggcatacacacactctcgaacactaacacgagcacgacggtggagcacacatactcac

SEQ ID NO: 11383 - DNA, 344 bp, Oryza sativa
ttgattcgcctacactgccaatgttggtctaccagtccctgctgccagggctctgactgttggaattaatgaatgggccttaccccactcgcagattaattctttggaaaatcacaaaaagcccaccttatgggatggcatgcatgtggagtttagtaccaccttgcttattctatgagagggggacctccttaaaagggaggatgccctcctagccacttgaaacatgtgtggtggagagaagaggggaaacacacgtgcgcgctcgctcgcctggcctggcatggcatggcaaggcaagctgtgcgcgtgcacaacatacgcgttgaatggtccggaaaatg

SEQ ID NO: 11384 - DNA, 219 bp, Oryza sativa
  unsure (1)..(219): unsure at all n locations
tgttggagagatcatcatanattattaaagtatgccggtacataaaatactcagccagcgccgtataatgagcgaggtattgtaatgtagcangggaatccgccatttcagctactacaatagtgtattccatggccccctctntttcttcttgntcccaattcactactaagcaagtcgaacgaattgatatatattatctctcatatcagatgtgag

SEQ ID NO: 11385 - DNA, 320 bp, Oryza sativa
  unsure (1)..(320): unsure at all n locations
atgataaccacgcaatgaattngaatggtnnttgatgaattanaagcacannagttatagcataaacatgatataataatatttatttaggttatattccctccatttcaaaatatagcaacctaccattccacattagaagcctcattggtgtgnttatgtttatacttataagtcacaatctaaaatttagaaacttatttttactgntttaangaaggtttatttcacaattattggttttagtcactaagaacacgcatagaanatatgtacttataaattttatttttactaataaacaatgaggctatagactg

SEQ ID NO: 11386 - DNA, 399 bp, Oryza sativa
  unsure (1)..(399): unsure at all n locations
ggacctataaaactcaagcttagaagacatcctctggaccttttagaagcgttttgctgagctanatctaaggtgagaaaggccattggaagctgggcgccataatgcaaagaagcctcgcactttcggcaattcaactgctcgcaggccaccaaatcctgttggttcagctggtcgcagaccttcaggcccggctggtacttggcagcggccccctccaccaatgccttcctatcctgatcgatatggacatgcagatcggtaccattacactgcaccctctgcaacatatgatcctnctgcttatgcttcttacagcgaaccatacagtgcctcanagccataccagtacacaccaggctcagtagctcctgcatcatacaacctcgatcagatcaa

SEQ ID NO: 11387 - DNA, 344 bp, Oryza sativa
tagtttactttatttacttaccttttactttgattttttaactttattcaaaataatccaaaaacttgggctattaattggataaatgtcttaactccctcctttcacttggctttagatgccgcgctacaagcctgagtatttgtttggtgttgaaggatttgtccaggagttgcgtacgatgtcctttgccataggatttgggactgcccctttgtatgcccagattcctcatgatcgtgatgaagagaagtgccaagtcaaagtcaccttgaacagtaatagtgaagatatcctatcagtgatgttcgaagctggaggaggaaactacattcatgcatgtc

SEQ ID NO: 11388 - DNA, 380 bp, Oryza sativa
ttagcagacttcatcgcccaatggaccgagtgccaataatacatgcctgcggagaagatggagtattggactatgcataggagcgggggttgttctaatttccccgactagagagaggttgagctatgtattgtggatacatttttctacatctcgcaacgtggcggaatatgaagcgcttcttcacgggctaaagcttgcgatctccttgggaattcggcgtctgatagttcgtggagactctaagttggttgttaatcaagtcatgaaatagtggtcctgccttgatgataacatgactgcctatcggtaggaggtacgcaaattaaaagataaattcgatggccttgagctaacccacgttcttcgatataataatg

SEQ ID NO: 11389 - DNA, 468 bp, Oryza sativa
  unsure (1)..(468): unsure at all n locations
cggggagatggccactcgagtgggtatattggattctcgagtccacatgttggagagnctccaagcttctcatcgtcgtcgtcgtgatgcttctcatacttccacttcggcgtgtcctccttctcctccacaagagtgaagacctctttggtgcttgatgcctacaaggggagaaaagagtgctttatgtcgggttgggactagtagtactgagggtagtcaccctcatatttactatgtgtaaaggaggttggcgctatatttngagtgcgtatcgaccattactctatcatgtgtgtatttggcatctggtaactctctatgtatttggccctctgtggcttgaatagccatgtttattgtgaccctgatgggtctatgtgacttggcttgatcatggtgagtacatgttactggacatctatcttcggtgtctatgtgagtccatataattctattgtggcatgt

SEQ ID NO: 11390 - DNA, 379 bp, Oryza sativa
tagcattcctattgcgcctcattttaaacaatcatttttacaatgttctagcactgatgaagatgtagaatacatgtctagaagtccatattctcaagctggagggtctttgatgtatgccatgggttgctcccggcccgatttatctcatgctatgagtttggttagtaaatacatggctaatcctggtaaaaaacactggaaagctgttcagtggattttcaggtaccttaaaggcacagctgatgcttgcttgaagattggcaggactgataaggcgcctgttggatatgtggattctgattctgctgcacattcggataagaaaaggcactcacaggttatgtgttaaccattagtaagtgtgctatgagttgga

SEQ ID NO: 11391 - DNA, 363 bp, Oryza sativa
  unsure (1)..(363): unsure at all n locations
cactacctgggtgtttggttcatttgagaaggggaccactcttatgtagcatagtaggacctgaaaatgaacgatctgtccttaggaatttggtcttgaatgcctcatttgacctctcgttccgtatgttagcacctcgttgtataatgcaccgcgaaggtggtacctttgaggagctgccagcatatgatcttgccatgcaatctaatgctgcgggggtattggaccatggaactgatantttcatatgggtggtaagttacatcatattcttctccttgaccttacctcgttttgtaataagttatttaggtattccaacacctttatgcctctgttttatacagctccatttttttttgg

SEQ ID NO: 11392 - DNA, 390 bp, Oryza sativa
  unsure (1)..(390): unsure at all n locations
tctattatcgagaataattacagcgttcttggactggaaggacanacgaactaccaatggtattacactggtattatacgaatattacatttgcccgaagtttaagctgattttctatcaaatggtacatatgcagcctctatttttaaatctaaatgacaatgatatgccgggagaaatatatgccaagcctttctatcattagaaatatacacaatgcctttctgccaactgttccaccacccctctcctcaccttgacttatcttccctttactccttatttttaagtagttgagataatattgttaatttatcataataaaactcaaaaaagcaactttagggacccgaacaaataatatccgctcacaccggtatattttttaca

SEQ ID NO: 11393 - DNA, 357 bp, Oryza sativa
  unsure (1)..(357): unsure at all n locations
gtcacctgangatgcagctcagatgttacgatatgttctacctatngctggatatccttgatagatctacgcgctaatgaggctactatgaaatatntactcatgggtggggcaagctcttctattctggttcatggattctcttggctatatggttcatctgagggggagatcgagcttcaataagatgtgaacggtcttatcaatacacanatgtataacttcccacgaatttcaattgcgcttatatccatcactgtaggacttgagttcaagctttcctcaaccccctttcatcaatggactcctgcgtctacgaagagtgtggtcgctcgacaattctaccttatatctatc

SEQ ID NO: 11394 - DNA, 344 bp, Oryza sativa
actaagctttgactgagcatcctgcgttgcttctgttccattgtgttgtacttattctcctgacgaatggccttatccaccaacttctggaaatcagaataatccccagtcattagcgggtaagaaagctcatcattcagtcctgccaagaaattctcttgacgctcttcatctgtgcgcacatcctccggaacataacgggccagacgattgaactcatgcatgtactcggtgacagaacgggatccctgagtgagcgccctgaactccttcttcttgagagacaccactctcgatggtacacgagtcttcctgaaagcagcagtgaactcaagccaagtgat

SEQ ID NO: 11395 - DNA, 494 bp, Oryza sativa
  unsure (1)..(494): unsure at all n locations
tccaacgagcaaccgtgcaagtgccacagcgatctgcttactngcttgtgtttgcaccatcgtgtcctcaagcaaagcaaggagctatcagctatatacgcctgtacgtgtatacgccaagatgctcagtctcgtatatcccatacaggagtccaacaagtatacgtcaggagtaatatattggctgagatcatcanaggaaataccgtttgattcaatcaagcatgccatcactcgctgctgacatatatggctnggatcacaaaccaccgttatcgttntataatttcatacatnatatagaattaattcacagatcactaattactttttggtctattatantatgcatgaccaccggctgcctctgcgctgcgactggtgctctgctatacggtgaatggcacatcatcgntgttggcgttacatcttacagacggctgcttcatcgcgctgactgtgctcaccatacggttagtggccactctatattg

SEQ ID NO: 11396 - DNA, 308 bp, Oryza sativa
ttcttactctggatgtaaggggtatgagtgtcttctctcttcgcgactttgatcagtcgtttgagttatacactctccctagcccccaaccttgtcatcggagaattcttctcggaagataaggctcttggacctttgacctgcctcggttgaacaagcactgatcctagcccccagccgtgaagttggaaagtttatttccgattacacggcttggttaatacgcacggcgagaactcttacacgaccagatcttacatggtctttcgtctctacaggatctgacaaggccttatcggttctgggca

SEQ ID NO: 11397 - DNA, 360 bp, Oryza sativa
  unsure (1)..(360): unsure at all n locations
acccacatgtcatagatacatgagatcctacatgtcatatacagcgagtggcaaatcattaattggcacatcttaagactatcanataattgaatgtcccgttcttctatatctgtctgctcatgaaagaactcatgtttctccatacttgatcaagatgttgtggatggcgagggtccacaagcacgtgaaggagatgtcctgcacatcatctatttgtgccgccggccaattgttatttcttcataggngaggagagatgacactgtgtaccatttcagctcaagagacctcatgtcatgttcggattatcagtgtcagtacaatctgtccatgtgcattcatttctntgatctcatt

SEQ ID NO: 11398 - DNA, 378 bp, Oryza sativa
  unsure (1)..(378): unsure at all n locations
gcttagcgacgacagggaccagacagccccaacttgtactatcatctgtctctcctcatgtcccgttctgcatctgcatgcaatggcatctctcatctctctccctctcatatatactcttcctacccctgcctacctccccctcatctaatcccagccgtccatttttcgatccaatgaaagatagacaaacatagatgagccattgagcactcacatcagacaggagtactatcagctagtagtactatatgggtatagagagcaatgcacaatggaataaagttgcagagggaagaggaagaagacgaaccangaagctgcttggctgctgatcgatcgatggaatgtatcagctcggctctatcatcatcatca

SEQ ID NO: 11399 - DNA, 400 bp, Oryza sativa
  unsure (1)..(400): unsure at all n locations
ctgtttatactcctattattagtttcgtgttctctctcctcctgctcctgtgtgaaagtgagttctctcattttatggtgngatctggccatttgggtgtgattagaagttcttttcattttgtgaatttctaagcatgaattaacatgtacaaatggttngatatgaactctctagttaatacttacatatcactaaattattcaatatataattgctgagaataaccatttagctccatataatanattttntaataaatgctaagagtcgactttgacgcggtatcgtgcgtaaaagcaaataagtctctatgtgtaaaaacaaatattgtcctctgactcgatcactgatacgtggatctgtcacgtgtgtgacttacatgaangtgcctacaaat

SEQ ID NO: 11400 - DNA, 385 bp, Oryza sativa
tgctaaactgcaaaaccctggttagagttcgtcttgttcgaaatcaacttgaaggagatatctccgagatgggccttcatccaaaccttgtctatattgacatgagctcaaataaactatatggacaattatctcatcgctggggtgagtgcgccaaacttaccactctacgtgcatcaaataatcgtattactggagtcataccatcgagcatggggaaattgtctcagttagggagacttgatgtttcatcgaatgaaattgaaggacacattccaccagaaattggtaacgtagtgtctctattcaatttgagccttgccaacaacatgctccaaggaaccataccaaaggaagtaggttctctacaaaatttggagtattt

SEQ ID NO: 11401 - DNA, 367 bp, Oryza sativa
ttcactgttctaaacctctcatctatacgcatctcagttaggaagagtacttggctaactaatatgtgtacatgtgcgtatactgaagtatattcctcggaatacgcatgaatcgtagtggctccgcccatgggtccgaattaagcatgctttcgggccatctcaatctcgcactcttaactccaagtgcacgtaatccatctactcaacactttcgctcctggtctaagcacacgcgtaacttactaatcactgctacactgaatcagtcaggacttggcaacatcagcagtagcagtagatcacacgatcagatggcaatcacaagcagaataagcatatacatggacgaacgacataatcctta

SEQ ID NO: 11402 - DNA, 345 bp, Oryza sativa
tgaagcgaagtgcattaaagctaagaaagcttatgctcttttagtctccctacggcgatgaaacatttgataacaatgtagtgaaccaagatgggtttgatcgcttgaactcgctagagataaataatcctttgtttgagaagcacccctatgatgtgaattgttccccaaattatcgatatgagaaagatagtacttcaagtactttcaggaagtaccctgttggtttaggtaactcttcacttacagaaattgttgttctggagctaggcttatgggaagtccaacattcacgtaatgccttttctacaccaaaaccctctgatgtccataaaaattcatgag

SEQ ID NO: 11403 - DNA, 400 bp, Oryza sativa
  unsure (1)..(400): unsure at all n locations
ctgcagctaagaataataatatgtgcacactgtnttattattcttatattgacacagctcatgccagtgtatagaccagattcgtggcatacatcagagctccatttaaacaagttaatacaaaccttatgtctattgcctctgctgttgcttcagtattaatgtcattgcgaatgtgttatgtatattctcaatttactgtatcaacactaccacatggtttagtccttactcattagcggaatcatgcatgcattatgttaagcaactctatgctaccgcttcatttgcaatgacccactactcggtggcatagttcattaatcatatcatagtaatgacattggcagcactcattgccacgacaagccacttgatgctgctatatacatataacata

SEQ ID NO: 11404 - DNA, 381 bp, Oryza sativa
  unsure (1)..(381): unsure at all n locations
tggagagcatctcaatntccgttgaaacacttcagggtagcatttagctctgagatttcatgagacttccatctattatcctaccaaacttctggctggttcgttagttctatgtgatctggatttggtttgtgtaacactaacatccattgatattctgaatttttcaggcttctatacatctacaggtttctgtaattgataggttaacaagctcttctaatttatttattttttggtgattgttgcttttgctggatcaagcatcatgagtgaatagtcctgatagccgagtttttttttttttttgcaacgcatgaagaaccatatgctctcattntaatattcatttgttcagtcatgaattgtttgtgcaatata

SEQ ID NO: 11405 - DNA, 401 bp, Oryza sativa
  unsure (1)..(401): unsure at all n locations
tactgaacattacctcttgatctggtgttgcactgaattaacctggtgctatccactgtggaacattatttaacattccacattatttcgctaatttcttttcaaaaaaacattatttggctaattctgatgctaaatcctggagaaaacttggaagtgatagaaaacaatcctttaggcagtgttgcctccagtggattgtagaaaatgataaattgctttatatgaattaagtactagtaaaagatcaccactgaagaaaagctagctaattaacttacaatatcctcaatatatccttgatttggatatgtgttaaaatatagaaggttacatatattaataagtgattagcattcttcactanggcagctagaaaaaaaaaacctattgaattgatg

SEQ ID NO: 11406 - DNA, 335 bp, Oryza sativa
  unsure (1)..(335): unsure at all n locations
atatgcactgcgtactgaaacatacccgctntatcgtagtgcccagcaatgaagtcctcttccacctaactagggagctgtattataagaatngcttccgcatctggngggaagaagatgtgccttatgaggggaagaagatgtgccttatgacttgctcatccccactnntgttcattggaactaaaagggctgagacccatttaggctctgtcctggttttttgccatgactttaaaccatgctctttaggaacaatcgtcccgcaaatgtgaaccttcttcctgttcgaatctcatatcactcctttttcncagctctaaccgtgacgatcc

SEQ ID NO: 11407 - DNA, 382 bp, Oryza sativa
ttcattcagcagcagctaatgagagtgatgagagtggtcctgttctttgaaagggtgcgaggagtcctgtccctattgggccaaatcatcaagctaagttaccagattgtacatttggcaagaaagaccgaaatgttgctgaggactctgctgataatctctcatgtctttatctccggagtgataggactgaaaacatcagcaacaatcaagctcctgtgcggtaagtccaacattattgttcaatttcctgtcctttctagtatcctttgatatctcatacagggtaatgtgcagcagctctgttcttcatccaaccgatagtatgccaactgatgccatgccactggttgtgactccaacattggggcctctcattgat

SEQ ID NO: 11408 - DNA, 234 bp, Oryza sativa
tatctcacagggctggatttttctggcaggcaagaccgggaggattaagagtgctggaaagttcttctctcattagcggcgaacgcaattatgtgcccctcaaccaaatctgtggcacatgaaacactaatcgctcaactttgaaatgaatcttttgagggtcccccccaaccggtacaactagacgcgattcccttcgcctgatgacgtgcccccactgcgatcagtcggtcc

SEQ ID NO: 11409 - DNA, 283 bp, Oryza sativa
ctgcagaaacaagtctccaaatgggagtggagttcttgacagctgcaggcgtgcttggagaaagccggagaagcgctacttgcagttcatacaactcttcatgcagcatgctgcacctattattgtgatccatccactctccactcacctgctataattatctttagctcggaagctgacttgcggatggctcagaggagatattagaattaggacacctggtgagggatgggagctgagtaacaaacgaagccgcagccttgggtggtgacaccagcatctg

SEQ ID NO: 11410 - DNA, 296 bp, Oryza sativa
  unsure (1)..(296): unsure at all n locations
tcgacgntgcggccgatctgagttgaaaaacatctctgtatcatgcgtttataagttgctcctgcatttttcaatccaaaaggcatggtgatgtaacaatatgccccaaagggcgtgatgaatgaagtcttcaagcagtcggattccttcagttggatctgatgatatcccgagtagcaatccaaaaaactgagtagctcgcagccggcggttgaatcaactacctggtcaatgtgaggtaacccaaaaggatctttgggacaagacttgttgaggtcggtataatcgacacacat

SEQ ID NO: 11411 - DNA, 459 bp, Oryza sativa
  unsure (1)..(459): unsure at all n locations
agtgtacaacaacagcggtctcggccggagtttcagtanacaggcctgtgtttctgcggcacatggtgatccgagcaaggtgtngagggagataatcggacaactggtatctaacccgccatcggatgcctccgttgtcgacctgtaccagcttattgtaaatctcactgatcagctgaccaacttgaggtatcaacaattcttcttctaattangctgaattaaagtccacatcctctgttcatcttttcatacccgggatcgattatgttccctatggaaaatttatagccttaaaaagtactgagatctaaatttacctatattttggtattaagacaaatttacctgaaaaatatcctctgttttctaggatgtaatacctcctatgctatagttttaatgtgtatgctaagggttgaagaagtcttttgtgtaaacacgctgatactgtctcct

SEQ ID NO: 11412 - DNA, 390 bp, Oryza sativa
  unsure (1)..(390): unsure at all n locations
tcgcagaacccttatcgatggtggcagcgtattaaattttctcttcggcaagaacctaaacgacatgccgatccctcgcaccgagttaaagccgaataatgcgccctcttacggagtcattccaaggctatctgccactccactcggccagatcactctcccggttaccttcggtacccgggaaaactttcgcatggagaacatctgcttcgaagtcgctgatttcgagacggcataccatgctatactcggacgcccggcgttagccaagtttatggccgtcccgcactacacctacatgatgataaaaaagcctggtcctcgaggagtcttantcctacgaagcaacattaaacaagccgtcacatgtgaccaggaaagttgcgagat

SEQ ID NO: 11413 - DNA, 192 bp, Oryza sativa
  unsure (1)..(192): unsure at all n locations
atcttactatggtggtgtactatactatnttacctattgcattgtattatatgtgtaagttcttaactggatatctgtcttggtctcaggtaatangattgtccagtgtgtcaccagaactagcttattnggcaaatgatgctgacttggtcgttctataaggcatggtaagtgggcttgcaacattcacat

SEQ ID NO: 11414 - DNA, 198 bp, Oryza sativa
  unsure (1)..(198): unsure at all n locations
tcttcgtcttcttcctctttgacgtctcgggcgggctctgtgtccatgggaaggaagaagccgccgccgcngcgcaaatagtcgatcgatctcgttggccggcaaggccggggcgggggcgcggcgccgctcaaggaaaaggtagtaatagtagtggcaaggtggaggaagagaagagagagaaagagaggggggggg

SEQ ID NO: 11415 - DNA, 326 bp, Oryza sativa
  unsure (1)..(326): unsure at all n locations
gcacaccatcgccattactccgactaatgagtaatgtgtggtatgttcatcgcctcactgtgcatagagatcgagcagctccagaaactcaagctttctagcacacagtggcactgcacattgctaacaatgagtaatgtgtggtagtgttgtgtttcaatgtccatctgcactgaagataggagggagagccaagatgccaatgaatgttatttcatctaacataatngctttggtaaaaagacgcttggatggaatggattaaggagcaatagggatcttttgatgatatcaatgtcggtgggtttagtggaacataacaagat

SEQ ID NO: 11416 - DNA, 406 bp, Oryza sativa
ttgtagtgcttgtcaagccggcaagcaagttgcatgttctcatcctactaagagtatcatgtgcacatctaaaccattggagctcttgcatatggatttgtttggcccaacaacctataagagcattggtcgtaatagtcattgtcttgtgattgttgatgattattctcgctatacttgggtgttctttttgcatgataagtctattgttgccgagattttcaaaaagtttgcaaaaagggcccaaaatgaatttagttgcactcttgtgaaaattagaagtgacaatggttccgaatttaaaaataccaatatcgaggactattgtgatgatcttggtataaacacgaacttttcgctacctactcacctcaacaaaatggtgtagtggaaaggaaaaatcgta

SEQ ID NO: 11417 - DNA, 250 bp, Oryza sativa
  unsure (1)..(250): unsure at all n locations
gcagctaanggtgactctctcattntctactactccaatacatatatgtcgaatatanatattactttttgcatgcacattgtggatacccttagacccgtcggttactagcaagctaggctctaccagatactcgtcggttactagcaagcttgctctaccagacttactccagttggtcgagaagagaaaaaagagcccaaatatatggatttataaaaaacctgccatttattggccccgatcaaaa

SEQ ID NO: 11418 - DNA, 278 bp, Oryza sativa
  unsure (1)..(278): unsure at all n locations
gcagcttgctgtaacagctggcaantcctccttgatcgcattctttctatcctgtgcganacgacggagccgctgcttgatagtgttagcgtcttctttaacatgtaaagagngctcaatcacctctctaggaataccaggcatatcagatggtttccacgctaaaatacttttattattctgaagaaaggtgatgagcgcgctntcctatntacaatctaactcagcgtctattacagcagtcttagtatgatcagagggatctagggggatcttct

SEQ ID NO: 11419 - DNA, 334 bp, Oryza sativa
ttgcacacacctcactactttccaaacatgagaatgttgggcttgtgaaaacctaaagcacaggcaagagaattgtaaaagaaaaaaaaagaaaagcaaaaggaagcagggatcccttctctaaatcacattcgtctaccattaaaagaagtgcccttttgttacatttcttaagggggagattgttcctttgccttctaatataaaaggactcctcctttgcacaagctctaaagtttgaatcccttgggtgtttttgtacccagcagtacgtaccacgtcatctaactgggttatatatgctcttaattattttcccatgcatgaattaaat

SEQ ID NO: 11420 - DNA, 394 bp, Oryza sativa
  unsure (1)..(394): unsure at all n locations
ctgcagctatctantcatctagatcgccactatctgctggtcttccgggtatgcgtcagagaagagggcgtgtgtacctgcncctcaatcgacctgtgatggggcttatacacatcgaggagtaacgagactcgtgacatcgatctgcgctgcataaagaatatttgaggtgaagtgtggaaacctataccatacaagactgagactatatatatcactccttggctataaccagagcgcagccctcctaaaaaaaatcatatcggcctgggcaatcggtaccacgacaattgaggctactttcgccatcggatgcctactacggagcatgtgcaacttatatcccgctgggtaccgacccacgctactggtcgctcgcccgtcactcatcgat

SEQ ID NO: 11421 - DNA, 365 bp, Oryza sativa
tgcttgaattcctaagagggaaaaagaagttaatgtttttgctcgatgtagtggaactagcccattcctccttggattccatcttacaattggtgagctaaagtttttattgtgtaccaaaacaacaaaatagttaaatattatctaaaaaaacaaattagttaaatgaacaggcgtggtattagaaatataatctattcactgcatgctttaagttcaagtaggggaatagcatatgtatatatgttcacatttattaatttccacttgcagtggggaagaagatccaggattacagctcttggcaattacgatccactcgaccatcgcgattaaaaatgcccagaaatgagagatgcttttgt

SEQ ID NO: 11422 - DNA, 158 bp, Oryza sativa
gaccactgatcagtgaacacaagaatatggttctgcatcagaagcatcacctgtgatatcatatagttgtgaaacatcatgtagctccgaaagaagaaaccctgcatggaagtatgaaagaccaatcgtttctatgagctaccatgtatcatgtcgct

SEQ ID NO: 11423 - DNA, 59 bp, Oryza sativa
ttacgtgcacacaccaaattttgatgctcgctccattttattttagattcctaatgcac

SEQ ID NO: 11424 - DNA, 389 bp, Oryza sativa
tagcaaaaacttttaagaaatcaaaaactttgcaagaatcatcaagcacagcataaatacaccagtattggacaaattgagcctccatgtattacattcaaactcaatccgaatcaatcctttcatcatcagagtcatcattactcggctggaagtcgttgttgcgaaattgctctacaacatcactcgcaattttgtcagccgcagtttgcgcactgctgataagatcaaaggcagcttcttcacttgtcccgtctgcaaatccatcaatggtgtcgatttcaattctcgggtacaaagattttgtcatcgccaaggccatgccagctcccatactttcagctttcttgatattcttgaaatatacttcccgagcaacactcagctta

SEQ ID NO: 11425 - DNA, 442 bp, Oryza sativa
  unsure (1)..(442): unsure at all n locations
gctaggtcatcttatattcatgcctatggtaagtctctctatgttaagggtcatcataaggaactctatgggtcttttaagacccacattgtagacaggggcagagctagaatgaatatggatagaatatgggtaccgcatacncatatggcatgtatatccgattggttatagtagatagcttatatagatagaatatgtttagaacaggactcgtgtattatgttaacttgaatataaggaagtatcccgtagtccgtagggatatgggtnggcattgtaatctttgctcctcccctatataggaggagtccgggctcctgggacatgattttcttcagaatgtagatcanaatacactcagtggaataatcctctacaggagtanggtattactttattgagaagcctgacttgtataacattatctttacccatcact

SEQ ID NO: 11426 - DNA, 342 bp, Oryza sativa
  unsure (1)..(342): unsure at all n locations
gagcttgtgcaaaaaaatggcctggcccattaacagctgatntggcccatgaaaaaccctaacctcaccgttcctctcccactcccttggcatttcctttcctagacccctttttacgccggcagcccatcacaccgagtccaccgcctttcaacgcgcgtgcgcgacaggcgacactgctcgaggcctatggcgcgaccgcgcgaggctccctgcgccacctttcttccctgtgctttcctccccagcactgctcgacgctccctgcgccgacctttcctgactcgatgttgttcatcacctcaccgagacaccaacccaccgacggcagttttcgctgcg

SEQ ID NO: 11427 - DNA, 254 bp, Oryza sativa
tgtaaggggatagattgaatagccaacatcatgctctatctataaaattagtcatgagatgagagcttatcaacaagctaaatagacaagcgcattcgcgtgcgaacaattgcgaagacctcgattctggaagagagaaattcgaagaagccgcgccgccgcgcacttgaacggaacctttctcctttcggccgcgctcctctcgcgctctctctcgagcgcgctaagacggtcctctattggccccgcctttt

SEQ ID NO: 11428 - DNA, 336 bp, Oryza sativa
  unsure (1)..(336): unsure at all n locations
ttctttccagnncaaaaaaaggaggagctattgatccaacaatgtagctttttttttttcgaatgacgtattgaagaaaagaaacgggtttatgtgcacagttgtaagaaatataaaaaatgttctttttgtgaataccataatttaagaaatgcatatttatgctcaccataagaaactataagggatcaatttatcatcatccttacacagctcaaagaaaagaacatctggcgtatgcacaaaacttaggaaaacaaagagaagccagagtgcaaccacggccattatactgtcatagaaggtaacagctgtgttgtgaaacatgaatttcca

SEQ ID NO: 11429 - DNA, 294 bp, Oryza sativa
  unsure (1)..(294): unsure at all n locations
tgngggggtctgctgatagtcattatcaatcaccttctaccatcaatattaccaaaatagaggagaactactgatgcttgcaatgcatatatccgctagaataataaacttccactagtattaggtatactaacctcttgcacggaatgacactaaagtggaggagaatcgacatcaactcatacggtaaatcaatcggacgatgtccagaaccacacttgtgtatgaatgggccaagaactcatgattgacacgatgagttgggccaaaactcacaagtctgcgaagaaaaac

SEQ ID NO: 11430 - DNA, 206 bp, Oryza sativa
  unsure (1)..(206): unsure at all n locations
atcactnggcgttcatccgatgcatcgactatggatatttcatnatcncncttctctttacgcagtatgtttcttactacaactggtgacgctgcattatagaccgtactggtactcttgctaccatcaggatagatctgtctcctctctccgcttccgcccacatatatgggatatattaagaaatgaacgtctttcttcataac

SEQ ID NO: 11431 - DNA, 324 bp, Oryza sativa
  unsure (1)..(324): unsure at all n locations
tttctgactaatgtccgaccggcggcatgtgacccacttattccttcatgtatgtcgaggaggaggtgtctgccctcgtcggacgaaacgcattttaagagtaccctgtttggtgccttcttgtatagatcgttgccgatcataccagagacttttgctttacgggatattttctcggcttctgcgtcggactcgggcaactcttcgctatctatgaatntaatgagtggggtgcgccagtcgtccgtggtctcgagatcggcaatggcgtgctctggctctgtagcccccgagctgatgttgggggcgaccgggctatcttcg

SEQ ID NO: 11432 - DNA, 179 bp, Oryza sativa
actgttgtttgtgcgtgtgctctgatgatggcggctgttcaccctggttcttgtgcggagctattccctgacaggtctcacggctcggcagattctgggacggtttcaactgtggaggcagctatgcttgcgggtgcgttgctttcgaggcactttttagaagcgtacacacattcgtc

SEQ ID NO: 11433 - DNA, 267 bp, Oryza sativa
  unsure (1)..(267): unsure at all n locations
ggaaaaacatggaagtcgctgtgaaatgggagacattgggaagcaaacagccattaccatgcataccgagaagcctgaagaacttcagttaactaactatatatgtctctggatttatgtaagataagccaaaatcgcgaaatggatagccagtgctttgaactgtctctgaaaccttggcgaatgtcatgatccctangtgatatccaattctttgctgctgactgctgagttgcaaccttaatacaacggtagttcaatatgctg

SEQ ID NO: 11434 - DNA, 462 bp, Oryza sativa
  unsure (1)..(462): unsure at all n locations
gcactgagctgcagctctgtgactaaactatatgcttactttattctgttgtcaggcttgattatgaagttcaactgtgctgaactagttntgcaccaactcctttaccaatatgaacatatgtgctgactacatgtaggcttttgcctgcatctgcattgtactaagtatcaacatgagatgctcagttattatntatttatattccatcgtagaacacaacaccgtgtngtaatagcacatgactgtctggttgagtnttactctacataattgcttacaaggtcttacgagtaattccagtagttcatcttgatttccgtgtgtcttgtcggacaactgagaataaccatacacttatataactatagcatcctcagtgagtccagctacgagtagtagaatctaatatataaagagacaatagctcaatcttgtagtgctggcagctatgttaaatgc

SEQ ID NO: 11435 - DNA, 298 bp, Oryza sativa
attgaggtggctaagaatcaattaggactttgaatcttgacttctatataccagcatctaaatcctgcatatggcgggagccactttaagaaccaataaatgaaataaacagtacccacataacgatatgcccatggggatcatagggtaaacaagcaccacataatttaccccgtaaatgccatcgtacggtaatgattccacatttaaaatggaatccaaaacacacacctgaacaggtaattatcccataccgggccttcacacatttttcaacaaaaaaaatatgagtatattt

SEQ ID NO: 11436 - DNA, 354 bp, Oryza sativa
accaacacgagcgacttgataaggcaccatatgttgttgtcagcacaaacctagttactattccattccaccaccccgagagcgctttccttcctaccagacgatccacaccgatgagctcagcctgctgaccgctctctcctggggctttcttgtcatgcggcgcgctctcctagatgctcatctaggcaagcgcggctgctctattcggttcgctttcctcatcacgcgcgatacgtcgctttggtggcgcatacttgctgttaccactgctcatgcacttaacacaccacgtttatctatataccacacgcttttgagttaacacgacagctgtggtatcccacatctgta

SEQ ID NO: 11437 - DNA, 238 bp, Oryza sativa
  unsure (1)..(238): unsure at all n locations
tgcagcttacgcctacatacttgcgacgtttcttatgttctgtccttctgcggagataatgaaatcgagaatcaatccangttcttccctttggcatcttgacacgacagtgacactgttcctctctccctcgctccgcatagtttgtgcatcctaagcaagcaaggatgggagagccacgcgcgcaaaaggagttgcaaatccacaagcaaccgctaccgaggccaacccggagacg

SEQ ID NO: 11438 - DNA, 354 bp, Oryza sativa
tgcccgcggtacaccgaacacgcacttatcggggttcagttttacgcgggcggagcggagactctcaaaagtttccgctagatccgagagtaagggctcttggttgcgcgtctttacaaccaagtcatcgacataagcctcaacattacgtcctatttggctacccaaagaaattcgagtagtacgttgaaaagtaagacttgcattctttaacccgaagggcattggtcgataacaataagatcctatgggggtaatgaatgcacgttttttctcattctccctagccatgcgaatctgatggtaaccagagtatgcatctagaaaacacataaagtcgcaccccgctgtgga

SEQ ID NO: 11439 - DNA, 498 bp, Oryza sativa
  unsure (1)..(498): unsure at all n locations
gcttaacactatcttgagggtaagtgctccactacaatagttctgtgtcaaaacattacaacagttatttctacaggtagcccatgagtccgaggcanaaggcttatcacatatgaggctgcacatatgaggaacatgtgataagtcttctcgtcggaatcatttgtgtaagagtgtgctgaacataactgtctattcaattataaaagatggaacagtggcttacagttgtcatttcacattgattgggtatgaaaataatgagatatacaaatcttttgtgcccatattcatggtttcgcaccaatcagtagaacttgatagctactcttggtatccttttggatgagacactgctaatatttacaacttatgatcgttacaaatgccctgttattcttgatctgatgctatgtatatggtgctggcgctcacatatttttgagaatcaagtggccgcctgacgctgctgcacgtgcgctgctatatgcttgcgcg

SEQ ID NO: 11440 - DNA, 337 bp, Oryza sativa
  unsure (1)..(337): unsure at all n locations
tgcagcatccatgaagatgatcataaaaggatgtatcttgaagacataggtccttacagtacatattcagcaagaatttgaataacaaatgtcaggaccatcttagtagtatgatactcattgttcacagaaaatcaatattattaatggaatccaacaactgtgaaataaccatggaagaatttaagcaatttgaagcaagattgtcatgaagcgcaaatgtacacttcaatcaggccatcaatgaggtggaaacatttaggagctacaaaactagacaacatcatatatctatgtaangtatatatcaatatatgcttagaacataactatgtca

SEQ ID NO: 11441 - DNA, 388 bp, Oryza sativa
  unsure (1)..(388): unsure at all n locations
cgcgaggatctctgcgtgcacaataagtntaggccattaagaatagaatgactgatctacatgatatataatagatttcaagggtctatcacaaagcagaattccatcaagtttatagtgacgaaacactaactcttgaaacattaacaaagttcatgagatcaaaactcaaccaaaaatagcacaattagaagagacctttatgtgttctatctataagaatagcatgcacaagatatttatctagcaggatattgattaggagaatatgtactgggtanaacannataatagtttacattatgttanataattagcttacttggcttgattctcaagtaattatctctctgaccagaaggtctgcatgatgtgtctggtctagctg

SEQ ID NO: 11442 - DNA, 284 bp, Oryza sativa
  unsure (1)..(284): unsure at all n locations
ttcgccgntgcaggtcccgtcgcacgatcacgacctcttcgtcgccgccggctcgtccatggcaccaccgttcgcgaacggaggcgagcaccacggcgccgcggccacgtcgttgatgccggcggggacaggcggctgtgctcgctcatggctactgggcgggcactgagggcggtgatctcgtctgtgatgcggctaccagggaacagcgtggcgagcaagtgccttatcctggctagcgccgttgtcgagcgtgacctgattcagactgtatgttgaaaaag

SEQ ID NO: 11443 - DNA, 421 bp, Oryza sativa
  unsure (1)..(421): unsure at all n locations
agcttcgaatacccgatatcctattagagttaaaacaatcaatgtcaggcacagttttaagtacaagtaaaatcatcggtagactagtcccagttgatacctggggaatgcagagacttgcaatggtcaatccagcaattaaatcacctttgaactttcttaagttgtagcacctgccccactcaaagattgggaacaggaactgcagcgccatcatgaactttgccgatccagattggtccttgtactggcgtaatgggttgtcatggaagaaagtctctctcaatgtgtctctaaactctctcgcaaagttcttttgaggaggacacctgaccttgtacacacgcggttcttcagatgatccatangagggaagctgtgtggnggtgctgacttcatttgctgttgactcatcatgctg

SEQ ID NO: 11444 - DNA, 305 bp, Oryza sativa
actccgctttcactagtctagatacccaatttgattctttgtcagcgctaagctcatacgaaggtagtgctgtcttccgagggcgaactggattccaaaacccattggactttaatatcttggagatcccttgttcactctatgatctctatggccctgatatatatttctcaagtttgggtgtatgcatatattttatggtcacattacataattccttggtttcaagcgtaccttaccactcaattacccgactctcgatctcaaaacccgataccctttgtgctccataatataatccccaa

SEQ ID NO: 11445 - DNA, 418 bp, Oryza sativa
agcttttatcattctggcatcgagctattttgttttatgacctctcctacagtatcgtcaccgcagtagagtataaccaccaaattccggatggattggtgtgggtcctctacgcctaggacaccagaatatctaaccatgtacgaggaaaggcatgagagaaatattggctagtaattgagaagccccaattcttgactgtgaaggacaccaaaagcctctgccctgcctatatatctaattaaaaaacagaagggcagagctttaatttggtttttcatcttttcatcaaagacctgaacaatgaagatagatggcaagtgcctgatcgatttgatcaggtcgtgtatgaacaaggttcaaatcgttcgttcgttaagatagctcaattgcatacattactgcacttccacttgac

SEQ ID NO: 11446 - DNA, 394 bp, Oryza sativa
agcttgttatcagtgtggcctacagctatctatccacactaccttcggtacagcatagctaacgcagtatgaggtaacacccacatactggaaggataagggcgtgtcctctacacctaagacaccagattatactaccatagaacgaggaaaggcttgaggagaaaatcgttttatatacgtgaatctacaacatttgactagaagggacacctcaggcctctgcccttcctatgtatatatacaacagatggaatggactatatctctatacgatgttgatcttttcgtggaacaattgatcaatgaaaattgacgtgaagatcctcatcagaaccatcaccgccagtgtgaacatagttcaaatcgctcagacagtaatgaagacacatct

SEQ ID NO: 11447 - DNA, 366 bp, Oryza sativa
ttaagcactgagctgcagctttgatcttaccaccggactttactgttctgaattgatttcggctacaaacacattttaataagaatctgctgcttaagagaggacagtaaatgtcagctgcagaccttcaacctcttcaaggctgatcccttttgcagcagttctgtttgctttttcaagcttctattgcttctccatttgagccatctggggcttgcgctgttgaaatcaatgttgggatccagtttgacacataataatggaacagatctggaaataccttttgagaacctcactcaagtggagtctggactggcattcctccttaatcttctcgttcttggatgctctggctcggtactgtcc

SEQ ID NO: 11448 - DNA, 411 bp, Oryza sativa
ctggaagaattggaagtcgaagctcttcaccgagtttgtctacccgcccggcaaacatacgccgttcgatgaataccctcaaataaccgaagcggtgtgggaggaattctgctctctcaagaccacccaacagtttatggaatcaagcgaggcacattcgcgtactgcaacagcggaatgagcacccgcatcggttgggcaccgcagggtacattggccaggaggcaatatgggcccaagaagaagcagccgctgcagcagcgaatgtccctgccccgttttcagacattcctgaacaaagagctctcaactgggcgcgggcaaggggtaatgtcaacccggacggctctgtacatttgagaacaaaaggatgccggctctatcagaactggtgattcactattaacctac

SEQ ID NO: 11449 - DNA, 409 bp, Oryza sativa
  unsure (1)..(409): unsure at all n locations
agcttacgtatgccatgatatatgctgatatgtcacatttatgtttaagaaaaaggagtaacaaacaaacccagcttgctagatcgagtggcatccaacatcagacgccatgttcattgctcaaaacaaaaagaaattctgaagaatattcttgggtcaccaacgagtacataatcattgacaactggcaaggatttgacaaggtgacatgacaggtaaatgaacggtcaagcatttggcaatgacaaattttcgttaacaactgtattaatttggctcagaacaaggttcaaatataaaaagagcgaattacactntggaccacctttaaacacatcttttcactttggaccaaataaatttatcattgttgcgatttggaccaccacgaatgatctttntcagcacg

SEQ ID NO: 11450 - DNA, 392 bp, Oryza sativa
ctatagaaactcagcttacaagctaccacagttgcttcttcgatcaattcttgtataatcagcctaccgcgtggcgttcgattaaatctcacctcggaaacctcgtcgccattgtcggtggcgccatcctgaagcactacctctgctgctgctgatgctggcagtgggcgagcagctgaggcgcactgggagaagaagaagaggacgaggaggagaatcacggcaagagcagcatccacccgcggagaaaaacgacgaccaatcgggctcatatctatcgccaatcctatctcaaacttaaactatgctgcaagagaggaaaaaacgaactggctcgagctgtattagtgtaagaagctggaaaaagtgatgagctagctagtatcttggct

SEQ ID NO: 11451 - DNA, 436 bp, Oryza sativa
gatacttaagtcaccgcagcatgcaactgaaactgactctgttttgttttttctctccacaggcatacttgacggcagcgacaaaaccaacttcttcgagacatatccaattgaaaaggacttcaactctggagtgggggaaaagagagcatgactgagtactaccccctgtacttagtaagtcataccggaagaagaggtatgatgcacgatatatccaagggaggcaaaaaggttcttttgcataaagctagcatttaaaagcagtagctgaaagcagtaaaacagttgcagtaattaatcaatattaaccaatcactgtcgaatgctacaccacgttgcaacaggcccaaccaaccacctgaactacaccagttcaaaaactaactacgggtgagaccaatcacgttgaatctggtcgaccgcccataactgc

SEQ ID NO: 11452 - DNA, 407 bp, Oryza sativa
tatatcatctgcatgcaaacatatgagtcaaatgtatctatttgcaaatgtttcggatattatctctaataaaatgagtagttaattctatgaaagacatgtaactggataatggattgactatggaaatatagatcactctaaagctagatgtacttacttctatgcccaggttatagtggaaggtgcacggcttttaaggatctcaattttcttcaaagaggagaatctcttaatgaaatctggcaactcctcgaattgtgggcagtcactaaccttcatgtattgaagagaggaagaagctgatgcacagctatctggagaggtcttaaacttgtgaagtcctgcaagttcaattgattcgagactattcagcccacccattgctgtctctgattccatcaaat

SEQ ID NO: 11453 - DNA, 419 bp, Oryza sativa
agcttgattgacatgagtcaatcgagcggtgccgcacgtcctcccacgctgcattaaatgcggcgcaggacggttgggacgccgcgcattgaaggcacggagcagcgtttctcgccccgcctgctctccccgccacgtggttgccgggcaagggcctcggggtagcacgccccgaaggcccgaggggtgtgacgtgacaccccgaggccctctggccacttcagcgctacccgaggggcggtggaaaacgaggccacgtggtcacgcgacttatattagaaggatacttccctcgactgtgcgtacccccgagcccttttcaccgacagccacatataaaaatggtttttttctaatagcgcattgtgtacgtgcgtatccagttgcgtagctagcgcatgtaaataaatatgtaatgg

SEQ ID NO: 11454 - DNA, 396 bp, Oryza sativa
tctttgcttcccaggcagaagaataagtaatcctccatctctcttctttggcttgatttttgtaggctcttgagctgagacagtgacagttgccttgccagatgtgagcctcacagacgcagtagtagagctgtttgaatggggaactattgcttgaagatctactctagcagatccaccctgagctgttgaaaccttggcctttgcagcaaccctgaccacttcctggctatccattgctgcctgtagtgggaaagtatggcaattaggtaaagttagcgaaagtgaaaatagtgaaaaattgttgccatttaccttgctctttgattggttgctcttggaatgttctgtggtgcttgttgtagtaaggctgacagctttcctcttcctgctttg

SEQ ID NO: 11455 - DNA, 411 bp, Oryza sativa
agcttgataaagcaaaatctttttattctgtcaactggccatatcttctcgaccgcttgagagatcttggttttggccaagtggataaattgggtcacctccattatagcaagcacgtcatccaaggtgatcctaaatggcagggcagggaccggctttcaacatgaccggggtttacgtcaacgcgaccctctctctcccatgttactcatccttgcgatagacccgctgcaaaagctttaatccgccgcccaacaaacatgtattctacagcccttgcacggaagaacaacatggttcaacatagccttatgcgcagatgatggggtggtgttcacaagaccggacaaatatgaactccaagcggtacatgccattctacaaaaattccgacgtgctacaacgatgacc

SEQ ID NO: 11456 - DNA, 367 bp, Oryza sativa
tggaggtctcccgacgtggctgatccccatgtctgggtgatccgggatagtaatgtcgtgtgggtaaagtgtaccccctctacagaggtcaacaaacttgtcgaacagccgtgcccacggtcatgggcggatgtgaggagaatcctagcgtatgtttgtttgactactgcttgtgaaattgcggttgtgaaaaggggttcgatgtttgaaaaaattccgtagctgatggaattagctatgccccggtggccgtttgaaaattgattggccccggtggccgcttgaaaagtgctggcccgggtggccgttaaagagctgttggccggtgccacctttgttcaaaattaagactgatcattgacatact

SEQ ID NO: 11457 - DNA, 411 bp, Oryza sativa
  unsure (1)..(411): unsure at all n locations
agcttatcagccaaaattagaattttcatttttatatttggaactgatcttgtggctttttcatcgtaagttatttttcggcatttacttttagaatgctaagaacacgtatataaaagttttattcacaaattactttttgtttgcaagcatgccgtttggtttcttccacgaaagcgaaacgatggggccacatgtcggtctatatattgaagaagtctccaacatgcaactttgattgctaatttattttctaaaacatttgaaaaacatgatttaatgtaatattataaaagtgcttttgagttaaatctacccataagacattatccaatttaaatatttcaaaaaaaatattcattttgatgttnttgaactttaactcgatacatgtctaagacaacatgttgt

SEQ ID NO: 11458 - DNA, 403 bp, Oryza sativa
tgaccacagcagcaccattaattcaaatgttattctatgttttgactatttgctacagattctgcaagagcctaaggtggataaattactagcgagaatgacctggccaacttttgtgtttattaaattgaagaatattcggcacaaactagcataccggttcacacaattgattattctttggtagtattgcctgaaccatcaatcaacatatatgaccctccgtacacacaaaaagacatttccgcatatgtaaaaggtggactccattctggaacagagaatgggtttcgtgaaaatgcattattgagcaatacaatggttggtttaacttcacgagacctacaaaaaatcaaactaacaccagccttgaaatcaaatacagtgcactggtatctaccta

SEQ ID NO: 11459 - DNA, 406 bp, Oryza sativa
agcttctcgtcaatcacctttaattacatcgacttttcgggaggagcaccgctaagtgtcttacgactattcccaacccaataactaggatggtgtctatagcattaaataggctgccatctacaatgaaaaatgatgtggcaagtgaataaataagaaaagaaaagaaaaccatgtcttgcatgagacatagtttctacacaacattcaagacatcatgtgagataagtagcattaaatttaagtatgaatagtggtgtttgcatgggaagagtagtgtctagtactagtttcttgatgatgtggagtttatgaaaactatgtcgttttgggttaggaatggcctaagagcaagtttaatagtatagcccactactaacttcaaataatctatagccgatgtaat

SEQ ID NO: 11460 - DNA, 336 bp, Oryza sativa
tgaggtacatagtcatttattctcagccatatcataccatctaagttttgtttgatgtctgaagtgtaatggaatgacaacgtccatactgtcatactggaaaagcgggtccttcaactgcaaaatgctgatggctttctgaggttaaaaaacggggtttaaaatgatagctctccttgacatctatgtacactaaaattgactaggataagaactgatcatgactgttggatattgagatcatgttgtgggttctaacagagtaatgcttgtaagtaacgacagttgttcaagaaaacgtatactccctccgtcccataatataagggattttat

SEQ ID NO: 11461 - DNA, 378 bp, Oryza sativa
cacaatgccaggttagtgattctctatctataaactctaaccttcaatgatgcactatctattaggaaactatgtatatctattataatttacattttggtttatctgatcatgctttggccaaggtgttcttgttggacattatagtaaaacaaaattgcatgactatttcggattctgggtcctctgatcacactatggctaagatgttcttgttggacaatagaatgaaacatacatgcgtgtcttatcatcagaatttttctcgctctacagttttgacaccctggtctgcatctagcaggtcatactctacagggggtctagtaagaagctgagtagatttcattcctgtagtgcaatgagtggagcattttt

SEQ ID NO: 11462 - DNA, 399 bp, Oryza sativa
  unsure (1)..(399): unsure at all n locations
ctcagacttgcgtcgtctagcttaataaattgattgcatatatatagtacgatgntaaattaggctttattttatcgccgcgaaggtagatttgcatgtttcttccttgcaaattaaaattaaaaaaggtttatatgtttatggctggcagagagctacaatatatagattgatgtttgtggaggtgcattagcacaagttcttggcttttaggacaaaaatatgagctacacaatttgaaatatttaacgatttattaagtaacattgctcagtttaatgtattgctgtcattttttgtccttatctccacagggccagtagtacactgaagagcattctgctaattgcatgcacatttgtttgggggcagtcattggctacgcttgccgctaggtgt

SEQ ID NO: 11463 - DNA, 385 bp, Oryza sativa
  unsure (1)..(385): unsure at all n locations
agcttagggatgtgcaatgcgtctccgtttgcatggccgccctaagtcggntcatatcgaggctgggagagaaggcgctacccttatttaagctcctcaaacgcttcgggccgtttacctggacggaggaagctgaacgtgccctcgctcagttgaaggcgtatcttaactctcccctagttctggtcgccccggagccaggtgaacccttgctactctacttagcggcgaccccgcatgtagttagtgcggcgttagttgtggagcgcgatgaggacaaccctcattccgcgaatccccaccctgtgttggcttggcccggtagagagcagggaggagaggcttccgagccgaacggtggcccaaggcccccgacgaccggagc

SEQ ID NO: 11464 - DNA, 409 bp, Oryza sativa
  unsure (1)..(409): unsure at all n locations
ggcttgtctagtatttgagccgagctcaaatcaagcttgtatcgaatcaagctcgagcagcttgcgagctccgagcttttttgacaggcatagctctagatcagctgcaatagtaagatagactgcaacttaagctattgtagctgctaagatggatctaactctaacggcaaggattaatttggtcactgtgagaaaatatattgcatcataaaacagtgctcanggtactgtagggtgaacactgctgcaattaatttggaccattatcatataaatgaaatgactaaaaaatatatgcagccctatggtgcggccgcagataagactacacccaatttcaatccttaattagcggctagacggccctatctttccgcttatgtatataattttccaagctactcat

SEQ ID NO: 11465 - DNA, 240 bp, Oryza sativa
  unsure (1)..(240): unsure at all n locations
gaccgcnagctgcaagcgtgggggtttgttgacggtcatttttttattttctaccgtcaatattactaaaacacgagagaactagtgatagtcttcaatgcataaatatgttagaacaataatattccactagaattacgtctactaaccttgttgccgagaatgacaattaacgcgaaggagaattgacatccacaccaacgattaattaatcagacgatgtccaggaccccacttatg

SEQ ID NO: 11466 - DNA, 392 bp, Oryza sativa
ttccgtgaaggacttgcacgcccaaatcggagttcgtatgaagacgcggcggccggcaaaagttggtgctgccctgcaatcctaatccaccccgcgcgaaacctcttccctttggatcctctccatcgttcctgagtaaaacaccagtgcacgcgtcttcggggtataaagacgaggaatatgaactcaagaaagaactcacctgataatttagttgacgtgcacgagcgcgggtaataggaccatcatgctatacatggggggacgcggatgtatcgatggtgttgatgtcctcatccattcatggcaaaaactcactttcggattcgcgccggcgactttttgcaattaatgcccatattggcacacgaaggggcgatgttttgactgga

SEQ ID NO: 11467 - DNA, 426 bp, Oryza sativa
  unsure (1)..(426): unsure at all n locations
gtcacctgcngcatgcagcttgcacagcatgtgtttcaaaagtttagttttttacagtggaagtagagagatttaattataaattaatagatacattttctatttgtttgataaaatcaataacttctcgaagaggtgaaactttttaccgtcattatcattggtatagaacaagttaaaggaaggaaaatatgtggaaggtgtggtgccacaatattaaaactatactttatactcttttgcgcccaaaggttgattccttatagccttaactaccaacaaccatacaataaatggctaattaatcaggtcattggtaaagaaatgttattgtcaaaccatgtctatcttgaaagttaacaatcacaatcacgcgcgtacttattaagaaaacatctcattgttngagcttgcgatgagcatgat

SEQ ID NO: 11468 - DNA, 340 bp, Oryza sativa
  unsure (1)..(340): unsure at all n locations
tagaaaccaataaacctatgatcgatgatggatcgatctatcgggtggggcacgcatgtggtttgagtccttttgtcatgtgaattaattgagcgaatcgatcgaagcttttgctgctacaaggcaagctttactggggatggattctaatagctcgagtggacgtccacccgcttattgcatgtcaantacatggcttccaacaattctttacaaaaactctgatacatagatcaacttgtataacattgcctctttaacatgcaccgtctctttcactcttgttcccttccacactttctatatctctaacccccatcaatcttaaccctactcttct

SEQ ID NO: 11469 - DNA, 416 bp, Oryza sativa
  unsure (1)..(416): unsure at all n locations
agcttctcgtgctcactaactagcaaattttactattagttctacaaaaaattagacatttactcctattagtattacacatatatgcaaagtttcgtattcaaattcattaaattttagcagtaacaaaagatgaaaaatctgacagttttaagggtaaaaatctgtcagaattttatattttttattacggctaaaatataataaatttgaagataaaattttacatatagatgtaatactgtttgaagtatgtgtacaattttttatagaatttttcgtgacatttgctagttattgtgcacggagtgtgcacaaaaagtttgtatgcataggatatgttcctactaaanagacatgaatattaggagatgacctaatatcaaattattagaaggggtgaagctttcaactta

SEQ ID NO: 11470 - DNA, 374 bp, Oryza sativa
tggacaaacacattggtatctgggactttccaggattataaataacacgacatggaaggcatgcatgactaccattacttcaattttggatcataacaaggaatcaaaagattcacacaatttcatacatacaaaatcggaataaaaattgtgtttgctcattttcagaactagtttcacacatacaaaattggaataacatttgtgtttgttcattttcaaaactagttccgaatgtgatacgtgaaaataataagccataagatttatccttgtaaagcaaaacatcggtattctaaaagtgggtctactgggctgttcacaacgaacaagcacacctacttgttatcacgtaatcacctgcttggccctct

SEQ ID NO: 11471 - DNA, 418 bp, Oryza sativa
  unsure (1)..(418): unsure at all n locations
agcttagttaccacgaaccaagaaaattgaacaacttttatgaaaaaaataaaaatnttgttggaatatttttgaacttggtcgatatatgtcgggttgatatatatgtactactttagaagcggagctaccccttttttcccactatcatgggtccttataaaaataacaactccctaaaaacaccatctcaaccaaaaaaaaaaagaaaaacattatcccactcaaattagggtttacacgtgaaaatcaacccacgaggaagaccatccaacaaaaataccatccaccagaaaaaccatatagaaaaatctagttgtacacttgattttccatgagaactacaataagtaaaagactataagaccctttcattcgaaggaaattcataggaattttagaggatttcattcttata

SEQ ID NO: 11472 - DNA, 404 bp, Oryza sativa
tattttaactttgctggttcgatatgcattgaattatatttgtacatctttctgaagatcgatgaccaaactgatgcggtagatgcagcctcgcatggataatggattgcctgcaagagatcgccggcgtttggtaattgggtgcgcgcgttgggtccggtccggtcggtcgcgccagtaaaaccgtcatcacagcgaacgcgtgagccaccttaactcggtgcgcctcaccctcttcaccgcaataaattggatcgcaaattattcttccaatcattttcgggctaactattacacgtacgtaatattgggcattttgggtgcgagtcccgcgttttcaggggaagtccggaaattggcaatcaacaccgttcgcttacgatctgactgtcgtgatggcgtgc

SEQ ID NO: 11473 - DNA, 416 bp, Oryza sativa
  unsure (1)..(416): unsure at all n locations
agctntgtgcttgggcagctcggcattgcagctgtgaactatcttaactccaacatcctcagcattgttgtggtaatgacacgtcgcatgatggggctcgcctgggtggttcccatccaacctaaagcttcttttggttgagttgggaacccatccctccggtacaaaaaacgaagcaggccattaacacatgattaattaattatttgctaattttttttaaaaaatggatcaatataatttttttaagcaactttcgtatataaactttttgcaaaaaacacaccatttaacagtttgaaaagcgtgcgcgcaaaatatgagatgggggagttgggaactccaagaaacgaacagagcctaaatgaagtgcacctagactactgctgctactgttataagactttttagcatta

SEQ ID NO: 11474 - DNA, 325 bp, Oryza sativa
tccatataaacttcctcctcttaaagccatgaataaaaacattctgaacatcaatgttgacgaaacgaccaacctcttaagacaacaaataaaaaaaagggtctaattggagctggcttaaccacacgactaaaggtggccctcatagctataccatatctttagttaaatctctttgctactatacgagccttgaatcgatctaaaggtccctcaaacttgtggttaaacttattaacccatttgcaatctataacattttttttcttaactggtggaacctaatgccatggcctattattcagccaagtactatattctagat

SEQ ID NO: 11475 - DNA, 406 bp, Oryza sativa
ttgccacaatcttgagaagatcagaacaataaatctatttctggtctcccacagcaagcagaggcagggtgcattacccttaatatccccattaactagggctagaagagtcgctatcacctagtcagtgtgaagtgtgactgaactgataatgcggcacaatgatgtcaaggcaatggcacaagaaaatcaaacgatatttatttaaacaactcacagtatataactaattataggtttgctgctttaactataactcaagaaaatcaaccgatgctttaattgtaggttcgctgccaattttattataactaaaacccccctacaattctaacaaaactatgtaagataaacgttagaaaatggaaagctctttcatgaaaaccacttgcatggcctaatgttt

SEQ ID NO: 11476 - DNA, 415 bp, Oryza sativa
  unsure (1)..(415): unsure at all n locations
agctntcatgctgccatgtgaaacatattgtaaagcatattgtaatagcacgtggatgcagcatattgtagaaggattttattgggagtattggtagtaacatcattatagagagcaactatagttaggtttgtgtcctaaatatacctttttaaagtagatgggttagaactaatacatttttcagaatatctacagatatgaacatgattgttcgatataactacactcaattgtgtgatttgttttatcgaaagtaaaacaagcatgaagtgccagaaattttgaggaacaattaccaaatgtgtgaacttttcaaaagagtacatctcatggacacttgtcttttgaacaaaggcacgtattgttactttccctgtttccacgtagagagcggctgacctcttggtatgga

SEQ ID NO: 11477 - DNA, 409 bp, Oryza sativa
tctcaaaactttgcatgtcacccagcccgtgtagctatgatagtagtaaggaggaggggagcgcccgatttttttttttttttttgcaattcatcgggcacctgatccctagtcgcctctggttcgttaaaaacaagagaaattagacaaatattgctttggctattaaccataaaccatgggcatctcccatctgatttattcgacacataatctagcgcatacattactatgcatgcgaaacacatgcataaatatttgtttatatagccgaaggcaccaggtagatttatacaagccaagtccagcatataataatacccgagtttatatatatacattaattaaaagactcttgttatacttcgttgcataacttgataccccatgaagtataaggacgatgctg

SEQ ID NO: 11478 - DNA, 375 bp, Oryza sativa
agcttggctccaataaagaccactttaattgtctttagctccccaccacttgtcaagggccacaagcgtgaacgcggcaaggggaaggtcggggagttggcgccggagccaaaaaggggcaaggctgcgacgtcgatgccggtgagcaaatcggggaaggtcgtgagggcgcctacccaatttgagctaagcatgccattggtggaggacaatgtgttagctgtgatgggtattgcttgccgagagctacataagcaatacatggagctaagcaatgccaagcggaaaatgagggagtcatccatagtatgacatcacgaccaccagccgttcctatcgtcgcctgcctatataactataggttttgatgacctc

SEQ ID NO: 11479 - DNA, 409 bp, Oryza sativa
tgtattattctccataatatgatagttgaaaatgagatatgttgggtttaaaattcctattgatctgaatgtggaccctggagcatcggttgctcttcctcctgaagtaactactgggcacaatccatgctttgatcaagtgctgcgtaagaaagctgcaatacgtgctcgtgcaccacattcccaactaaaaaaagatctggttgaacatatttggcaaaagtttagcaatacccgtcgtacttagttgtggtaggacattaagcatcttgatttcacattttcaattacaattgcaagcatcttaattcacttatcattctatttatttatttcagggacaatggaaaactttggtgctagctttatggtgctttctgctatggttttgaaaggatgtacatgtcta

SEQ ID NO: 11480 - DNA, 407 bp, Oryza sativa
agcttctccaccatctcgctgctagccaagttgttgcagctacctccatcaatgatcatgcggcaacaacgctctttgacgacacactttgtttggaacaacgtgtgtcgctgattttgctccgccttctccatttgtgcgctaaagacacgctgcacaatgaggctctcatagtgatccgcaaatgcagccccaatgtgctcttccggtggctcattatctgcatggtcagccgcaagcaaagcaagtgtatcatcatcgaaatcactagcagaggagtactcaccatcgtttttgactaccaaaactcgcttgctagggcagtcacgctgcacatgcccaaagcccttgcaacggtggcactgaacatctctcattcggcctgtggatgccattgaagaagcact

SEQ ID NO: 11481 - DNA, 406 bp, Oryza sativa
agctttatatggaaggcggtgcataacacctgtttgctggaacgaagtaggagaaagaaaattgttaggaccggatataatacagcagacagaagaaacaatacgactgatacgggaacaactgcaaacagctcaaaatagacaaaaaaaagttatgcagataataggagaagggatcttcactttgatataggtgactgggtatatttaaaagtatcgcctatgaagggaattaagcaattcggacttggaaaaaaattaagtcccagatatgttggaccatttataattgtcaagcaaataggagaagtggcttacaagctaaagctacccgatgctttcactggggtacatgatgtattccacatctccatgcttcgtaaatgccttcggaggccaagtgatc

SEQ ID NO: 11482 - DNA, 417 bp, Oryza sativa
  unsure (1)..(417): unsure at all n locations
tgtaatcatagtcgaagcctatttgtttatactaaattaaatggtcaagcggtagtttagagacgtcgcaacatagtcgttaatctttctcttattagataatccacccgatcacacatagcaattggcttgtaaaattagtaacagtgattgtgtgcttgtgtacctttttgtagcaaagtccaattgggttgattgatcctacatgttttttcatcagatactactcatcctgcatatttattccgcaggatccgaatccagatgtgcatagtagggattcatggctataagcttatctcctacgcttcaggaatagatcagtcagaacatcaccgccggcttgccttcgtcgccgccaactggtgtcctcgcctataccggtggttggcctattatgccgccgntgatgggcat

SEQ ID NO: 11483 - DNA, 407 bp, Oryza sativa
  unsure (1)..(407): unsure at all n locations
agcttggcctcctccagagataccttggtttgttcaagctgcttcgnttgggcccccaatgacactagcagtttcttctctgaatcccttgctgcctcctgttcaccttctaactgctctaatctgtgcacaaggtccaacttatcatcacctccattgcttgtcaccttattctcattctttttcttcttgagccctgctatctcatccagagcacgcgccttctcctttttctcattcttcagctcttcctgcagcttgttcaatttctcctgcatctctgatgcctcggtgattgaattggaggctttgtcaccattggaagttgatctgacgctgtcaacaaaaacattgttcatgttgattcatggattggtggaaatcatcaaaacagtaaatctaaaaac

SEQ ID NO: 11484 - DNA, 409 bp, Oryza sativa
  unsure (1)..(409): unsure at all n locations
tagtttaaaaatggattaaaattattggaggttccacgtatatataaatcagtattaataatgagtcaaccatgctacatgcaacaatataataactaatgagcatatgatttctgaacatgatttatactctcgaggacaataatcagtcagctatcaagagaccagagtccgagaggcatcgcttgctgctgtctaccatcgtgttgtaagccatcaccagccgtggcggaaatcacattatcatgaggctatatgctgagtcggagaggagattaggatggccggaaggggcgtctcttgccgctcgttacatccctgcattgcgttggtgagtggtggcggctacatangtgtgaggtgttacagtgtgagcttgcgatagaggagtctacgttatctgatgaat

SEQ ID NO: 11485 - DNA, 405 bp, Oryza sativa
agcttaacaacccaagtagaaagacttcataatccacaaaaagttttttttagttaattaatcatcatttttcatgtgtccaatcaagactttcctgaagatagggaccgccatgatttagtaagtttggaatattcgttactcttttgcaattggtctaagtaaatagcttgagatttatatattggaaacaagcttcttcaataaacagagtatctgggtgagagaaatgctattttaaaatcttacagcttattttgtactccatctttgcaatagcttattttgtatctgggtgagagagtaatagttttctaccatctttgcaaactttaaaatccagagtagatgtatatagtaacaaattagcaaatgtggtgataaatagcattgacactgttcaca

SEQ ID NO: 11486 - DNA, 400 bp, Oryza sativa
tcacgcttctaaagtcctcatagtctctagagatcattggttgtttaattcatcatcaagaccaacataaacttctcctgcttctcggcatcggtacgcacgtccttatgggcatattccgcgaggcggctgaactcatgcaaatactctataactgttctggttccttgtggcaaggaaaggaactctctcttcttttgcgccacaactccctcgggaacctgggctttattgaaactatgacaaaactctgtccaagtaaccttctgccccagctggacgggtcaccatgtagttcgtccaccaaacaaaagcggcgccttgcagctggtgtgtagaaaagcaaacttcttttgctcgctgaattgcacaagatcaacttcttcccaatggatgaaac

SEQ ID NO: 11487 - DNA, 416 bp, Oryza sativa
  unsure (1)..(416): unsure at all n locations
agcttggagcttctttcaggtaaacatttgttattattttcgcagnggagtctataataattcagacatgcctaaaattactttttttttttgcaaaccagcgaatattaaaagttgcatcaatgtggcaataaaagaacagaataggctgcggtgagacatacagttctttgaatttctgttacacaaaagttattcccttattcatagttcatacaggacgtgaattaacaatcatggcaagctagattagcttattgcttacaaattagtttagattaaattaacaattgtgtttaattctaactcaggacaaaaaaaagtgcatgccatctacccacaaagactgaggcatatgttactaataaaagttataagtaaaagacttcgttgataagtaacaaatgcagacatgt

SEQ ID NO: 11488 - DNA, 397 bp, Oryza sativa
tatccaagaccaactttgttccaagaatatatcttttgtttcaatgcacatgatatagaacatttttacagagaaaaggctaagattttagagtgattgatgcgagccatatctacaaagatcatttatcttctattcatgttcacaacgttacctagatgtatgtctcctttggacagatgcatgcaagtcgagatcaaaaagaagcacatggctggcacctccttggaaatcacctccaggaagcttacggttggcaccttcatggagatcacctccaacctggacattctcctgatcagccgctgctgtttcttcagccactgctccattgagggtaggtatagcatgttcatctccatcatctaatgctatatttagaaataaagccatggat

SEQ ID NO: 11489 - DNA, 418 bp, Oryza sativa
agcttgtgtggtggtggagcatcaagtgctgttatttgtgttattcacaggtggagaacggtgggtgtaaacccagtccagccttggtcggactgacaacgatgtcctgagggagttgttgcgctgtctcacccctcaaggatgattgccgagcgaaagcccagtcttggctcttttaagtcttgacagacgacggcagcagtttttccgtcgcttctcttcttgaagacgttgttttggcatcctataggggcaatctcgcatgtgtccctttgttggtctagtggcggccggtcacgcttagcagcgggcggtccggagatagccttctcctgtgcttgttgatggcgatgtcgccgcgtgggtggtggtatatttggttgtaatcctggaatatttctctgctctattaatacaa

SEQ ID NO: 11490 - DNA, 397 bp, Oryza sativa
tgaacatggtaacgaggtgaacacaaccttagtacattcatatattgccattaatgaaagctgggtacgaagtggctggtgaagattacctggaagtaagactcccacttctgcctgaggacggcatgctccctcttcactttctggaaggatctcgtgcaactgcataacaataatagtagagatctatcatcatacgaaataaaccaatgaattgaacaaaaaaagatagaccgcaagggctaattccagttcactaacaggaggaactttcacccatcagaatatgcatgtgtaactaagtactaacactcataacagtgagggctgacaggtgacacttctacatgccttgactgagccatgccaagtttgacaaggtggcagactggcactt

SEQ ID NO: 11491 - DNA, 403 bp, Oryza sativa
agcttctactgttagtctgtactctgtacaatacttataggggagcagtaattatgcaggacagcatgatcttttgttttgattgaaagcatcacagtgtggaatagagaataagtacctggtgctaggtatccaaaagtacccgcgacaacagtggtaacgtgggcatcattatctacaagcagccttgcaaggccaaaatctgatacgcggggttccaagcttctgtccagaaggatgttactggctctgatgtccctgtgcacaatcacgggtgagcaatcgtggtgcaaatacgccagccctcgagcagagcccagggcaatcttcatacgtgcattccagttcaatggttgatcatcctgagcatctcctgaaatcagggacaaggcgtttttgagca

SEQ ID NO: 11492 - DNA, 352 bp, Oryza sativa
aactcacttgcggagcgatcacggggtggcaccgttttttgtaataggaaccgctccagggcataggggccaactccagcgggaagctttacacgcacgggaacctaagttaacgcagaagggccgaactccccaaggaggctgaaactaacggggctacggagcctcagcctgacgtggggagcacacggcaagcgaccgcactgccgggcggacccgatactacaggaggcactcggcacccccgaaactaaggggggagatgaacgaggagaaaaacagaagaggcctacccggccgtcgggcgcatcaccatggccgaccgaccggaataaacactcggctctacccg

SEQ ID NO: 11493 - DNA, 416 bp, Oryza sativa
agcttgctcactgcctcaaatcctgcggtggcgccaacatctcctatccttacggcgctggggccggctgtttccgccccggcttcaagctcacttgcgaccattccaccaaacccccaaagctcctcttattgggtgttgccaccaacactaacaccaccaccaccaagatcgtggatcaatatagagatgggtatgttcaagcctatgtttctttcaacatagccaccacaccgggtgtgctcggcacctacaacaggacatgggagtccccagggagaatccttagcatcgggccggattattatgctttggtggctgtcggttgcggaattacgtctacttggtcgaccctgatacagaagatatgctgggctattgcttcagcatgtgtactgacatggcgatgatgcaca

SEQ ID NO: 11494 - DNA, 418 bp, Oryza sativa
  unsure (1)..(418): unsure at all n locations
aactataaaactcagctctgaatcgagcattagccgaaggtcaaatttcttgtgatatggggcgaatacccctgtngagaaagcccaaatacgaagggaggatagaaatcttaccttactctatgggcttctcaggtaatcgactcaatccattcccgaaggtagggaacgttccttcgatcattgtagtcggcgaccaactgccgaaacaagaatgtgtactcgccatacaaacaagatggataaccacaaacagaaactgcatcaccaccacacaagatattgagcaatcatgcatgtgtgggtatttgacgactctgcttcttgaagaaaaaaaaggaaacagtgctaagatgcatggcatccttgtttttacacacaaactgatagagcggcattttgcaggaggtcagcaaaa

SEQ ID NO: 11495 - DNA, 413 bp, Oryza sativa
agcttatcataaagggcttcgactatgtgttttattcgttctttgagcaaaaagatatagatcggatagattcgaaccgcaattgcaaaggtaatcactactatgccagcccaaatcatgatcttcaccaacttggatttggttctctcgcgaaaatcgcgagttgcagagatgagaaccatgaaaagcaagatcccgaataagaaaacagaaaccgaggaaaccacaagagtgaagactagtagagtctcgtcttttgtcattctttgctcctttttcactcaatgattcattcgaatttcccgaccaaaaattctatatgtctattcatagggcctcgctgctaagtgctacaagatctagtgcactggaactcgtggttatggacccgaatcctttagtatggaacattg

SEQ ID NO: 11496 - DNA, 409 bp, Oryza sativa
taacaccctcttattgactttttcactattctgaaatattaaaaagatccaaatccaaaatgcaaaggtcgtcttattcaaaacctcaatcatcacatcccctctctcccacttcacacctcggaacgcactgttcttatagagagaaaggggctttcccatcttcttaacccgaaatgaaatggctgaggagagggaggttccttttggggggtacccccgggaagagatccagtggagacggggtgggcctgtagctcagaggattagagcacgtggctacgaaccacggtgtccggggttcgaatccctcctcgcccacagccttccaaaggggaagggcctttactttccccctgagggtaggaaaaccatgatcgggatagcggacgctaagctattgaacctg

SEQ ID NO: 11497 - DNA, 414 bp, Oryza sativa
  unsure (1)..(414): unsure at all n locations
agcttagcctcaggttctgcatgtaaaaattagctaatgtcaaggtacaaacgtgctcattataaattagtttaatagattaatagaatccgctaccttcagggacatgataattaaaaaagatgctattcgtaatgaacgaactaaaagtgcaaagccagtctattttgacataatatgcatgactacatttggatgaagcatcatcgaatcatccataaaagtattatacattgatatattttgttggaacaaatcagcgtacttgtacttcaactacaaagatatatcaattattatacttgaaaacaaataatattgtgcagtaactcattagtaatttaaagtcatcagcacacactacgatgaatcttagatgaacccatganagaaatgcccagccagattgacagg

SEQ ID NO: 11498 - DNA, 413 bp, Oryza sativa
tcaaaatttcttcaaaaaagaggggagggcatgccaatttttctattgaatttattttggtgattacatacaaatcggaggtgcctaaaaggtttacaacttcatcctccaatgtttttttttgtcatactacatttgcacctatgttttgcacactttttttgtctccaaaatttagttgtaagttgatgagagagaaaatgtgtgtggggaagaaagaatatatagaaatttagttcatttgctaaacaaggttttataaaatagttgagaaggaaaactctagtgaaagttaatcttaaataatagaaaacaaactaaaatgaaaattaaaagaagtaaaacacattaaaaatagtttaaaactttacaaatagtttttaagaattatttggtgtaatattttatgattt

SEQ ID NO: 11499 - DNA, 410 bp, Oryza sativa
  unsure (1)..(410): unsure at all n locations
agcttcttataatctgaacaagaaaatgttgtatgactcttttttatgcggaaatccttccatcctgcttttcagattctcagggaatccatggttttctcttgtaaccatagtttgtaaaaaaactttgttttctacttctcctattatgaaattggcagagctcctaccctttactcctaaaaaactttgttttcagattctcagctaattttgttttcttcattctacgcggcacggtgtacttaaaacgtggaaatcatgccttgtctatgatgtaaccctaattcctctgtcatatggctgtaaacggagtactactacattgaacaaaattttcaaaactgttgtaccaacttaatggtgtcgattacaacaagctagcttacattgttaanatacatatatgt

SEQ ID NO: 11500 - DNA, 423 bp, Oryza sativa
tcaccaagaatcacagttagtatacctttcacaggagctctattcaactctatatcagaaatctcaacttgcaagctgtaaaaaccttgcccagggaacccatacccacacagcttaatacccttctttcccaaaagcaatggacagtgagaagagatatggccagtattgtgacaggagtagtaaaagtgagggttatggcacgttgcctgatggtgaccttcacgcccacactcgaagcattttatcctcacctcgatccgccgctctcgcaccacgatctgcctcggcaccttgacgcccttgagatcttgcacctagattccccgttggattttgagcgagaaaatggcgtctaagctcatcctcttcgcgcgcatcacggatcccctaatctccacctctaatacgatacgtcaccct

SEQ ID NO: 11501 - DNA, 401 bp, Oryza sativa
agcttttgaagggaggaagaaagagaggaactagcttcaggggtgtgatccgatcgttctacctccaaactggcatcaaaatagactcaggactagcgggggagactatcattcaaaaatggggccgaacgggtgctgccctggttcggccgccctggtgggcccggctggccgccacctttcttcctattgccactaatttctaagctaagcacaaaaataacaactatacatggttttaagcatgcattagatgagatcaccatggttcataaacaattaattcaataacatccacttcttcctctaaagtttcatttggctcaaggaaaatctttaagtgttgactgtttaccttaaatatgttacctgaatcgtcacggagtgtgattgccccttgc

SEQ ID NO: 11502 - DNA, 409 bp, Oryza sativa
  unsure (1)..(409): unsure at all n locations
cgtagagcaatagcaaccgacttgacagtcaaacggatattgtagcggacaaaatccacaaccagaatgaaaggagaagaactggaataaggggaaaaatggacagggcaaccaaaaagatccaagacttgagaagcaaaagacttgccgaaatcaaagttccaaccccccagcggagaaggagttatcagatcctccttcatcatgaagaagcacagaagagctagtgccaagaatcaagatcgccatggccgacgatcgccaccggaaagaacggagcactcgccatcttccatgtgataattctttntaaaattaaactcaccataccgatctctttgacaaggtgacaacgcagatgcgtcattatattgtaaaatgaaggtggaaatatcaactcaaagctgac

SEQ ID NO: 11503 - DNA, 383 bp, Oryza sativa
agcttgcatcaaacacctaagtttccgtgacttgctgagtacgaaagtactcacccttgctctatataaatatatatatatagctcctccgccctgaagagaagataaagtgaagagaagattagggtttcgtcctggttcccaaccgtcgcctgtggtgttgggtgttagttcgttggttccgctgctgctgctgttgttggtgtttcctcatccgtgtcgtcggttgcattctcgggttgttctgagctgcaacctaagttaaagtaaataagtcctctatttattttaaggattgctatgattcatatctgtcaccgtgggaactagcactatgtcctgggactggtaccgagatcgcggtttcgtaggaaacggttcac

SEQ ID NO: 11504 - DNA, 411 bp, Oryza sativa
tgtccatggtaaggtcactcagaggtgcactctctgtgatggaagcaaccttcatttcccaaacaccatagtaaagacaattcaaaagatggcgagcattatcattatcagaaaactcttttccaacagatctcaacttcgaaacaatttctccaaaacgcttgaaataagaatcaatagactctcctgggtgcatctcaaatctttgatattctttatgaaattgattctgacgaaccaattgaatatcattgtttccctggaaattgcacagagcagtccacatgtcatgaacggacttgtggtgttgaacacgattgaattcaccagaagaaattccaccaatgattgcatttcttgcacgaataataaaatcaacctgagccatatttgcaggcgtgatgtcagcat

SEQ ID NO: 11505 - DNA, 360 bp, Oryza sativa
agctttggcaatacagtgttgatgtttgatatggatctaaatcccttctgaatttgaaggagaaaattcaattggagcatcagctgaggacagcagctcatcggggacaacaacaggagcagcagcggggacagtagctcatgcacagaaacaaacaacccatgaatcgatcagaaaaatcacggaagaacgaccctaagaatcgatcagatcatcgtgcaggaatccggcgacacccgatgctgcgccgtcacagattcagatttcggacacgcatccaaatcgagaaaattgcatatctaccatcgcataaaattggcttcgctagactaccatcgctcaaatgggcttcgctggaat

SEQ ID NO: 11506 - DNA, 402 bp, Oryza sativa
ttggtaagagatacaacagtatggaaatcctccagtgcttctttctgccaacaaaaactcaaaatttgagttgacaaatgatagaatttatggccagaccactgcttgtgcccaagataagttcaggagcaagagatctaagtcagtaacaaaatctggctcatacaaatcccagtgggagatcatgaggagctttggcattgctgatggagagattgtggaatttcaaaatcttcatcattggttaagctactttcctccgctggccatggaagatctcgaggattttgggctaagttgtgattggaggcgttcatttataaccactgatatgaatccattttatgatgcttttgtccaatggcagatgagaaagttgaagaaaatgcacaggatttgtca

SEQ ID NO: 11507 - DNA, 402 bp, Oryza sativa
  unsure (1)..(402): unsure at all n locations
agcttttccaccggcatacgccatctattggtcgctacgagagctgggcttcactgctgtctcctcggatgtacgtcgagatcaatctccgccgctccatcatccgttgatgacaaatctgtagcggcagcggcgccacagcatccggaggcaagcatgacaaaggtgttctcgctgtgtttccgtataaaaccagctgattgaatgcgtactttacgtaatacgttgcttgctgcataggcgatcgaatcaaaagttcagaacgcaagctntgctagctgctcattgaaactggaatcgtgttatgctactacttgggcttggtgcatccatattttccaagttccacaggcagcaagcatgttgaattgcttccaattgctggatatccaatcctaacaa

SEQ ID NO: 11508 - DNA, 416 bp, Oryza sativa
  unsure (1)..(416): unsure at all n locations
agctngacggcgatggtatggggttaattttgtgaaaatataagcggctacgaataagcaaatcgtaatggctttgatctgaatagtcatatttgcaatggcatgcatcaaattaactctttcatcaaattgactgcagtccaatttctttttttcttttttgtccagctcatgttggcccatatgcaattttttccttattggtcatatcatgttggcccagcacatgttcgttctcctctcttttccctgggctgggccaaaatcaaacaaatacaaacgtttgtacacacgtataaactttgtacgtacacatatagagtttatatgtataattttgtatagatacacaaaaataaaaaatatacatatataaacaaatgatacataaatatcagttctatacctatacatat

SEQ ID NO: 11509 - DNA, 330 bp, Oryza sativa
ttgcaatggccgaaggacttaattgcggcagcctctccttatagatctccaaaacagaggcccagaagtcgtcgcacagtagtcggagacccgcgtcgaagaaagcggcgaaaaccacagtacgcccatcgcctggtctctggacctcgtcatcaacgggccaagaagcttgaccttcagtagttaccccggcaaggaccattcccggccaaatcggcatcttcgaacaatgacttgcccaagtagcaagttcagttgtcggtgatgctcctaaggtcttcgcctgttgccctagcacgagcaggtttgcgaagcgccaccacagccgtg

SEQ ID NO: 11510 - DNA, 364 bp, Oryza sativa
agcttggagaatcatcggactgaaagcatgttttattaaccccttttgcctgtatcaaatcaagaacgcctttgttctggccctttacttaaggccagtacaggctgtaagtccgctatggagggtctggaggtactatggttcctataaacttttgtaaaacttatcccttagtcaagctgcatgatgctgtgtaaggtagacggttggagacttggagaagtaatttcttcatatgctcgtcttaatattggagttagtgatgtacactgacatgcatctggctactttataacaatcagacatgggttccaacaacaagcctcttttgtttggatcatgaggcactgtcatcggactaact

SEQ ID NO: 11511 - DNA, 397 bp, Oryza sativa
tatttatgatgccactgttctatgttaacctatcttccactgagtaatgcctttcttttcgcactaactttattctgccagaagctatttttggcctataatcgtatgttaggtctgaattattttgtttcattttttagatttgaagggtttgtttatcatgaggataatggtggggtaaatgctccaatggatgccgactttttattggatccaatctctaatttaaagaaaaaaacattgaaaaagcgccatgtatatgcttcaaaggatgtggactttatatcggaaccatttaatctaaagaaaaaaacatccgagaggaccatgtagatgattcaaaggatgcagacctttcattggaatccatctctaatttaaagaaaatacactgaag

SEQ ID NO: 11512 - DNA, 416 bp, Oryza sativa
agcttcgcccggtagattacacattgctgccggttgtaatcgtcatgtcctatgtggtggttgatgcctacatattggtatcattcaatcagccatggggcacgtatgcatttgacaccaactcaatcaagtggcacaaggttgatgacaagaggctacctttcaccggatgcgccgccccacatggctctgtgttccttggcttatcgaaagacaacggacccatcaatgcttatcgcatcaatgtcacaacttctgacaaggaatatgatccttgcttatccatcgttgtgctcccggtgaaatacatggaacatgaagttgatgcaaggtcatgcttcttttccttggaggatggactcttctgttctttacggttctcgcttgacagcagcagcgtgattcgctccaagaac

SEQ ID NO: 11513 - DNA, 418 bp, Oryza sativa
tacctgctcggtacaaagatcttatctgctcggttcttttatgttacactcgtcagccatgcccaaagggtagatcaccctattgggcatgtttggcttatagcaagtttaatagtatagtcaactactagcttcaaaatatctccagccaattcggacaatagttacttaaaaatatatactacatcattaatatctggtcttatatctcatacatacacatcgtcttggagtttatgctacagttgactacacagtttatgctacagttggctacaaatatgtagctcgctttttctctcatatcttatcttctctatatgtgcttggagctgacttaatagactggtattgtacttgttcttagctccatggaagatatttttctcgagattaaggtggccattggcccatattt

SEQ ID NO: 11514 - DNA, 405 bp, Oryza sativa
agctttggacgatgtgggcgcgggcatctctgattctcgcgcgcgcatcgtcctcagtcccgggagggaactccttcagctccgacgaggagggcgacgccagcagggaggacaaccgtggcgacaaggccagcgacccgggcgcatcggaatgagcctccaggccccacgcaatctccaattcttgctttttctttcttctttttgtatagatcaacttaatctgcaatcaaaaatgatgaaaattttctatggtaactttattttgctgtgcatatgagttgaggatgatttgagccgaggaccttttgcattctagcttgatttaagggctcgtgctcaagacccgaacctcaaatggctccggtcggggctagtgcctgtggagatccacatgtcgagact

SEQ ID NO: 11515 - DNA, 367 bp, Oryza sativa
tgactgtcctgggaggcttacgcccgaacttgccgaccttattttcgtggcgaatccctttggtgaacgcggcgatgataacgtcgtcggtgatgtcggagatcttgttacgttgttcaaaaaatcgccggatgtaatctcgaagggattctccggacttctgaataacgttgtagaggtcgtattgtgtgccgggacgctcgaaggtgccttgaaagttggcgatgaagtggtcgcgtaattcggcccaagatccaattgtaccacggggcaatccatggagccaagatcgggcggaatccgctaaagccactggtaaatagttcgccatggccttgctgtctcctcctgctgcccggattgcgag

SEQ ID NO: 11516 - DNA, 416 bp, Oryza sativa
agctcggattaagggtgacttactccgcaccaatacgagtgtacttcactaggtccacgtgttgaaatgggccaaaatggttcgttaaaaaaaatgggggccaaaatgtccgtctaaaatataaagttctcccaaactataaaccgtggacttagacggttaccattttcttaaaaaaaagggggtaaaaatatacacatgtctcagcagtatatcctcatgtgtagcctccactaactatgacaatatggagctgaagagtgcatcagttattgattatagttaaattgtttgtcaaactccgtagcacatatccatattccattgaatagatctgataaaatattatgttttgttgactctgtactcacccatcataagatgtcgtacaaaaggcacgctacattctacttgac

SEQ ID NO: 11517 - DNA, 385 bp, Oryza sativa
tagatcggtagtacgtccaggactgaacggtatctcttatctctcacccggatcggacttttcccggctgaccagagaccaaaaatgttaactaaactaatcccatgcaaaaaaagaagggtgaagtgagcagatttactacgatagcatggtaattcaattcggactatcttctattttgtccatttcgaaacataacgtattgtatatgcaaaggcggtctaatttgaaaacattctcaccgcgtccccactaatgcaccctccatactatacatagtagctcagatgtgtggttgaacagctcaattcaaactcatcaaccatcttttgtaactggtgtcacgccccgaactagtaccgacccgaactagcccgtgacgctc

SEQ ID NO: 11518 - DNA, 406 bp, Oryza sativa
  unsure (1)..(406): unsure at all n locations
agctttgtcgtgacgcgtctcatgtgttgtgacgaggctcatgtgttgggcagtcgcggagtgcgggtaaagtgtacatccactgcagtgtgagtaaaccaaatctattcgaatagtcgtgctcgcggttattgagcaccgggacatgtattacacttggctagactctaaattcttaacttgtgtgggaggggatattgcatgatgaattttatgctgttggagccacttcctgagaggcgggaaggtggacgtcctcagaaaaccatgacgaatcaatggcgggaagctatccttgggatcacaatggatggtggacagaaccgtcgttgtttaaatacaaactctggtactaaaattngatcagtcaatgctaggtcttaagcttgtgaaaagaattacaaaa

SEQ ID NO: 11519 - DNA, 409 bp, Oryza sativa
  unsure (1)..(409): unsure at all n locations
tgtgaaaatcttcattgtttctttttaaaaaattatcatgtactcaaaggtttntataaatatgtgcctttacattnttatatatcctttttgggatacaggtgttttcagtagaattcccagtgatgcaatattgaagtggaggaatcttgcagaataggtacaattgggatttccattattacgaaagcattactacaatccctcaatccctgtatgtgtgtattagcatacggataaccctgatgagtctaatggacacttaaattaaagtgcatgtactctcaacttcagaagatgttaaatgtagaggtgaggtccatcattggactactcagaagacatcttaactaaacttttgaacgtatgaatgtaattaaaccagtagcactttatcttttaagtacat

SEQ ID NO: 11520 - DNA, 389 bp, Oryza sativa
acaaaaaaattaccttctctagacaatcaaactatcatccacaatagacagaagctgtagtcacaaaacccaaataatagaccgagaagtcatatgttgggcttctcacactccggaaatgggggcggggatcacaatcaaccacgcagtgacacggaggggccccggatatgataaacccctatagtaagagctcattgcaataatatagacctaacaaacctattcaaaatagttcccgctaaccataagccctttccttccttcaagcaaccgaaataaccaggggctatgcaaatgataccaaatatcaattatcgtgttgcaatatttttatgaagcattagctttatccgggtgatgtggggccccggacacccgccaggtcc

SEQ ID NO: 11521 - DNA, 401 bp, Oryza sativa
tcactccacggctatcgacgaaaaatccgcactctgtttttgtgccggatctgtgttggcgcaaactaagttgatgaacacaacggcctgagatatctgcttagctccaatgcaggtccaaaagttggtgagatgcggacgtgccaatcagtttgatcctgcaactgacaagatatacaaatagcagatcaatgagcttatcgactgacgagccgatggagtagttccagttgatgccggtaccaaccgatagcaatagggtttgaagctatcagctatatatccaatgtagattctgatacttgagacaatctaatccagtataaaccaatcggctaacaatgatatgatagaataagcactgatctgaaggtaaagaatacatcggctggagatccgat

SEQ ID NO: 11522 - DNA, 410 bp, Oryza sativa
  unsure (1)..(410): unsure at all n locations
agctntgatcgaacaacaatccttaacctttcttacccacatgatcaaagatcatcatgaggacgctactcgcctaatcacatcaagaataaccggctgaaaatattgaaaaacaaaaccttcctattctaatgccaaaggtcaaattggtggttccatgacgcatcctaacatctaagcagcagcaaaagcacaatcctgtaaggattcatcccctaagagcagcctcagctttgattttcagagataccacgtatacgagacattagtattctgccaatatctaagaactaaacaagagcgcatctcttagcactaacatcagaggcacaattccaattcaaataccttgcctaatcagcaggattaaaccgaataccagctcgtatctgaagctatacctcagccac

SEQ ID NO: 11523 - DNA, 217 bp, Oryza sativa
cttaaaactcagcttcattttggacaggcggtggagcctgcggctggtttagaagtatatcctctagcgcagggaacaggacatagcaaacttcttcagaaatttggatacataagacgcttacttggaatcctctctctttttctcgcttttcagctcaactctgcttgaagctcctggagttgaggatacagacaatctttggtacaacagctgt

SEQ ID NO: 11524 - DNA, 410 bp, Oryza sativa
  unsure (1)..(410): unsure at all n locations
agcttcacgttgaaggtgcccttatgagatatactacttaacaatctgcgacacctctttcctatattcttgacatgtctcttgttccgcagtaacattcgttctaaaagtgcccccccctctcttttttgttccttttaaatattttgtatggattggcagtaggaataaatcattgatctgttatgagccagatgttgacacaatgctttgttttttagattgctgcagtgtttaagataggaaacagtaaggagcttccaccaataccagatcacctctcagaagagggcagagactttataaaacagtgcctgcagcgcaatccatccagccgtccaacagcagtggatcttttgcagcattcatttatacgaaatgcatcttcacttgaanaatcactgtcggat

SEQ ID NO: 11525 - DNA, 412 bp, Oryza sativa
tccatacgttgcaacgaaaacactaaatctatcactatttgtctattggcttatcaaacgtagccagaatttaaaagttaattttggagtatattttagccttttttttcattgttttctaatattcggccatggcttttgacattttagaatagaagtataagtctgatcttaaaattttccggttgtctcatttatttttcgacggcttattagcccgggctcaacctacccatcaccaaaattaccataaacacaacatacttaggatttaatatttgttctgaactctttaagaaaccatattctttattctatagagaatccagcaccaaccacgcgggaaatatctgcccagcatcagccacgctgctgtacccccaaggcccaagtcaaccaccaggcaccggca

SEQ ID NO: 11526 - DNA, 403 bp, Oryza sativa
agcttcttcatggcagctgtaacagagagtttaagcaaaagggagcaggagtttgcatttgccgaactcgttgtcactgcccctgagagcaatattctgtcatctttgtgaagatctacatcttcttgtgaccttacaatttgttaaatcaatgcaagaatatggttatctgcttacatgatcatcaatagttttgagatttttgaattccctaaaaaacaaattgtcagtgatctccatgattagttgtataacatgtagatcaggcacgaacaatatggattgagcaagctggatacttcagtttatttttacagtcacgaacaattatgcaagttccaaagtacaaggcaaatggaacatgccaccaaaccgctatgagtaaaagtatgaaacacagaat

SEQ ID NO: 11527 - DNA, 415 bp, Oryza sativa
taacatatgtaaaaaagcaataagatcttaacataaagggcatatcttgcatatatattaagcatatgaaatataaggctaaatcaggtaagatcagctgaaaccccgatactactctaattcacaaccaagaagcaggctatagattatagtttctaacacgacttatgagatcaaactcaactgatgcagccataagtatgaaaagaaagacaatatctagacaatcaagctattggaagctttatagagtggtagatatcttatataatctaagccaatgtcgatatttaacctgatcggctactccctagcgatagagattacctgattggaggttacatagcgatattgtcagagattatatgagatatatgataactcacccacttacatagaccagattagagattct

SEQ ID NO: 11528 - DNA, 405 bp, Oryza sativa
  unsure (1)..(405): unsure at all n locations
agcttccacacttgnatgattactttgtctaatataattcagntcagtttgggagatggatttttcatttttattttttttgcattatacgtatgtatggaagtatagcaaccagtgaagctaagaaatcccttttaagcaccaattcaatggatttccttttgttgcagagaggaccaaagtacacactagctgggatgaaaaacaataactgagactgctcataatttgttaaccgaataggccacaagtttgaattacgatgctcattanggtgattgtaaggttgctctttttgaaatgtatagggatgctctgaataccatgtccctgtttctaaattgtaatgatgcatttcaaatgtgccatgtctaattcagtttatgtttttcacatgtttaatta

SEQ ID NO: 11529 - DNA, 410 bp, Oryza sativa
  unsure (1)..(410): unsure at all n locations
ntattcctgcatgttggacatgctacaactgattctacatctcttgcttccattgcttgcagccatgcttgacatttgcaaaacccattgggtggatcagtttaaagctaatatactatatactaacactctatttgaataagatatcaagggatctattaacgtacatctattgttactaccctatgcaaattcatgaggagttgcattgaccgcctcacttttctatgtttctgccaccatcgcaatctcgaggtcacaattgctcttggttcccatccatcacaaccatttgttctgaacttagatgcttgtcccctgagaaatccccttctggcttcacttgttgattgctaaaagtatggtacattgactatcctatttgattcctatgaacatcgatgctcact

SEQ ID NO: 11530 - DNA, 402 bp, Oryza sativa
  unsure (1)..(402): unsure at all n locations
agctntataccccttggttgattgtccggtataggtgctaagggcatgccaatctttaatggttacaaatagcaatgcttattggttaaattactcctatttgtcctcatcccacaaagggacacctatattccacaatagttttaagattttctggttttaagtacacatcattattgttaccaggttgctttgagccttgaataataatcgacatcatgatgtacttccgcttcaagcataaccaagggggaaggttgtagatacacatggtcacaggccaaatgctatgaccgctactcatctctccaaatggattcatgccatccatacttaaaccgaaccttatgttctacgcatcctttccgaaattttaaaatgttctgtcgatgtttcgccact

SEQ ID NO: 11531 - DNA, 421 bp, Oryza sativa
actcagcccagcaagtgcgatatctgggtgggcggagacaaaatcttattgttcgtgatatctgctaacagagttgctagggaccccgaaatattgaccgccgccactgattggaagctacccaagacaggtactcaggttcgcagccttttgagcctggcaggatactaccggaagttcatcaagaacttctccataatcgctcgacccatgacacaggtgttgaagaaagaagaaaaatctgtgtggaacctgcaacgcgagaaggcgatcccaacatctaaaggaaaagctggttttctcgccagctctaatcttaccggatactcgcaaggacttcatggtgtactgtgacgcttcacgccaaagatagaagtgcgcgctcatgcaggaaggtcatggggtagcctatacctcacgc

SEQ ID NO: 11532 - DNA, 342 bp, Oryza sativa
agcttggagcggcgcttgcgatcgaagattatgtctgtcatctatagagtacagagggataggaaccaacacatgctcaaaaccaaattaaatatagcaactaatgactaagctactcgccgagcatgatgatgtttatgcatagaacagttttcatgaacccggattaagacactaatgcgactgactaaaccatcacttaatgcataaactagatgcatggaaaatgatgcgcataaaattgccccatcgaacatagacacgacctaatgcatatcacccgataaattcccaactgactgtcaaataaactccaaataaactttaccaaaccctagactg

SEQ ID NO: 11533 - DNA, 344 bp, Oryza sativa
gacacaaaaactacgcttggtttcctctctgtgaaatctcttttctttattcagcgattggccatgatatttccttgtttgctgttgtaacatcaatagaccgaaccgacgcttgcacaccttactgctcatcacaggttgggtgtaccataatcccttttccacatggtaatccttttctaaatattataattaactcaatactgccctacaaaaaagtgatcaccaaaccatgttactacgctccaaactctcactggcgagtgtgcacacaagtttaccgaaaccttcaataaaaagcaaattaatttctaagcaattaccacacatcacactctacatta

SEQ ID NO: 11534 - DNA, 418 bp, Oryza sativa
  unsure (1)..(418): unsure at all n locations
agcttgccacagatggagaatcagatcttgtgcatattgctccttgatcaacactagcagatacatcaatggtgttagctttgtctagagcacttatcttggagaaagaattagatttggaaggagaatcacaagtaaatgattctgcatgtggagcattctcacatacagatggatgagattctgttgtctgatcattnttgtcgcatgactcatgagtaccgtgtgcactcacttggttttgcattccagatttgtccaagctatgttgactatcagtcatgtcaatgcattcctgagctgtatcaccaacctcatgatgcacatcaacattccctaatatgttctgctcttctactgtatgtcctattcctgaatccacagtgctcttgtccacttgcaacccaaccactttatc

SEQ ID NO: 11535 - DNA, 408 bp, Oryza sativa
  unsure (1)..(408): unsure at all n locations
tcagcttgccgattngccaaaagccattgaagattcttatgtcttgttgaaggcctctatcaaacacctaacttagttgacaaaatctctgaagccgatccctggcactgatgccgtcgacgccaagatgatagatgaagtggatcaaattagaccaatggcaatatcagccattcaaagaaatatatctggatgagctatatcttgtaaaattaactttaaacatgcaaacttttgggctgtaatgaattccatgttaatctcctgcctttaaatttcgcttttgaaatccatgttttctatatctctgcccccctaactttgcaatgttgaagacattgataaaattataatttgaactaagggtgatatgncaattatgaaccatcatacatcggctaaacacaa

SEQ ID NO: 11536 - DNA, 416 bp, Oryza sativa
agcttgagcgacctgtccagccaatgtctttgtatacattacatgagcttgcagttgcgaattgcgaggcactaataggttcataagcaacgtccaatggaaaaacatgagaccattattgatgtgcgcctgcctttctccaagtgatcgatggatcaattggaaaggagaaggccgcttttgaccctaacccatatgagatccatggttcctgcaactctgcacgagattgttttcctgttccctacacatatgcatcgacactaactggctacagtttttctgatccatagccttttcttttcagactaacctatttaggagagttcgctataaacttaatctgaaaaaactaggtttttcaggtccatagtttattttattttggattatattgctatagataatcataatat

SEQ ID NO: 11537 - DNA, 387 bp, Oryza sativa
  unsure (1)..(387): unsure at all n locations
tgaccccaaattgagaactcctcaatgccttatttgtctcttgtnacaaaaaagaaatctctcaaggtatgcaccgttctcatcgacatggtcgccgcttggcttagtggtgaacctccaagcaaggggtactcggcttctgtgcccgtcgccatgaactccgtcctggggggggcaatgctcctgaaggcgatcaatgttgccgccgtgattgctgaatgaaggatcttgacagcggccttacctctggtgactaagcttgacaatgggggcctctgctacgctcaagttctctgcgaaccatggttcgacagtaaatgactgcccaagggtgtcccttggcatcttaaaaagtacattcctcccgttcggcaagagcccccggct

SEQ ID NO: 11538 - DNA, 418 bp, Oryza sativa
  unsure (1)..(418): unsure at all n locations
agctngaagacgacactgtagcagggaatctaattatacttgactgggcttctttttctccagcccgattggagggacaagaaatggacttcagaggaggaataaagccagctgaaaggaagggagaatgggccgagaaggagagaggacatttcctgtttcggcccgaaaaggaaaagaggattcaatttacttttccaattaaattaatcactgaaatgatctttgaattgttaaaaatacttccaattctcaaataatttcaagaacaatcctgaaaataattggacactcaaagtacttaacaaggttataatcagaccatttaatgattaatttattatttaaataattgctgaactgctctttgtattattaaaattaagaattgagctccgaaaaatccgagaaaatttca

SEQ ID NO: 11539 - DNA, 399 bp, Oryza sativa
  unsure (1)..(399): unsure at all n locations
tatctcatcgcctttcaaatgtatccggnttcatatctttattcatctcgagtcaacaggaatcgtaaaaacaagacattattgttgctgaaaccaaacttgggccttctaatagactagctaggcccatctcggaagtgtctccctccacctccacgaattagcacttaactctagatctattttcctctgtaaatgtctatgtacaccctctggaacaattgggtttttttagttgaattttggcaagtgccattcaccttgtctctagtgctcgctcgattaatcagcgagtatanatttagagcccccaatagtgggtgtgttgatttgccgggttgattagatctatcacttcaatcgcaactattacttngtacttaatacctatccgcatat

SEQ ID NO: 11540 - DNA, 389 bp, Oryza sativa
  unsure (1)..(389): unsure at all n locations
ccctaagtcacctgagctgcagctctcatnttttctttctctttatagtttttaccgaccatccaaacgtttgggacctaccggtacctgtaatctgaaccatacatggtggctaattccacgggtatggatccttcgtaccggcaggtacagaaatcccatccgcatgcattgaaaaaacggaaaggcaaaattaggatttcgcatggtccgtaatccctgactcctgtaccgcaggcttcttcccaacgccgctccttccgatccccctccaacacgttcttcatggcggcggcgcgaccaatctcgccggccagatcggtggacaacttcgtctcccttgccggacactgccgtaccaccctaccccataccaacttaacttcccc

SEQ ID NO: 11541 - DNA, 407 bp, Oryza sativa
tgtggctttcatttatttcatgaaagatgctacaattttttaatgtagccttacaaggaaaacattacctattctccaagtttgaaaatgcataactgacttcggaacacaattgtcattgccttgattgtagttggttgccgaaagcttctctctctaataataagatacacaaaatcatcacatattttccagaattgtatttgttcccaacaacgttacacaaatgttatatacccagataagacgaaaaaattaacataatcttatacaaaaatcagctgcagcattaccacatattgtcatgaaaaccaggttatatttactgtgctttccactaatatcaaaagcacaaactattgcagacaacctactcaagaaatatgggctacggcgaatctaattat

SEQ ID NO: 11542 - DNA, 412 bp, Oryza sativa
agcttatcactatgatattctatttatattactaacgcgacatggccgatgtaacgccccaaacggatactacgagtgctcgcaccatgcacactgtaccaccagctataacatttaataagttagttagagttatctcaatattcttgtaaatacaccgttaggctttgtgagaaaacaatatattctcgtccatgaatagaacatcacaatgaattccaagaaaccacacaaattatcatggtagttctaaaacgaccgcaaccatctacaaacaataatttgccacaatacgattatgaaactaaataatatgatttagacaccctcccctacatacctctaaaagtttgcccaatcccttctatgccctcgtgttttgtcatttttctattaacccgtaattttagtt

SEQ ID NO: 11543 - DNA, 413 bp, Oryza sativa
tcatgatactcagtgtgtctcccgccatacaaatattagttcctttctatagacaaaatcccaaactctgttggagtgcaaagactcatcatagtcgccgaagctatgaatccgcacatgccagcaagttctcctcccaagagttggccgacccacccctaacaacggcaaccgaacaattcaggatcaaatgataacatgtcgcataactcaattttcgatgattcagaatgactgggtggttacctcagactagatcccctgaaccatatatatgttctccacagtctgaatccattcaagtcctcgggatagaatttagatcgtagtgtgaaattcgttgagaacgatgatctagccacttgcaaccgtagactggacggtcacaatcatgagaaatcgacagcccatct

SEQ ID NO: 11544 - DNA, 400 bp, Oryza sativa
agcttctcttactgaaggggggaaaagatctatctttaatgagcacaaccacagtactcatcaagccacaccggagatgcataattaatgcaaggggggtacaaggggataataatataggggttaagttttgcagtaaacagcatttaaaagtcacttagttgcccaaagccattctataaagacgatcctaaagctacacagtattattaatcaaggccgtgaacccacacgaacctgccttaacccaaggcctacgatgattcataccgaactggcaacccgaccctgggtcccagctcgtcccaagccaacccaggccaaccattccacattttaattgttgagcaaattttaagaattaaaacactgacttgggtacattgcttcgcttgcccat

SEQ ID NO: 11545 - DNA, 415 bp, Oryza sativa
  unsure (1)..(415): unsure at all n locations
tgggtgcccatgctccaaagcatggcctgcgtgctggttcttcttttcctctggggtagnagtgatagtctgatgatagcatgttgcaagtaaagaacaatgctctttaaatgatttttttccttaaatgtttatccgatatacaatctgattacatcatcatcgtattcgttataataaaatctttacaatgagatctaaaataactaatattttgataacaatgttttccaacctgaactatacaatagaaattatgaactataaaacccactatctctagattctcacgaagtaccaaggttaacaaaaccgtgcggttatcatgtgcggtatccttttcaatttttaaaaccacaatatatctcatggtaacccataaccgcacgatttttgtggtaatcgtgcggttact

SEQ ID NO: 11546 - DNA, 403 bp, Oryza sativa
  unsure (1)..(403): unsure at all n locations
agcttaactactttaaaggctcatgcacttgtacagcaatgtntaactacacaagttgatttgttcatttcatcggagagggagtgtccctgcaattgcatatgcagtatagcagctttaacttgtgataaaaatgcaggcggtgttgggtagcttttgctaattccaaggtagaagatctcctgcctgatagtatctcctttccttcttagagcaagtttaatagtatagtcaactactagctccaaatcatctataaccaatgtaatagctaattcatataatagttgcttattatactattaatacttgatcttacttgtcatacataaattacgtcttagagtccgtgctacagctggctacaaaattgtagcctacttctcttctctcttcttttatc

SEQ ID NO: 11547 - DNA, 313 bp, Oryza sativa
  unsure (1)..(313): unsure at all n locations
tggattgatgggagtctagcatagtgacaacacttagcttgtagacagacagggctggttctggaaactgcatctattattcggttgctcgtcctctttgcatccgattccatcatcgccggctcctctcacgctgatccttgtaatcaatcaactcatcaacatggtcttcgcatggagctgctagctgcagagtcacagaacccaattgttgagctcgaaatgccacggngcgtgccctcactcatctcatctattttctttagggcaggctaaaactcccttaataacttgggtggggaaggaattgagt

SEQ ID NO: 11548 - DNA, 407 bp, Oryza sativa
agcttggagaggtgtgggcgcacgttcttgacgtacgccaggcagacgaatgtgcgcagatgtcccatcgccggcttcttgccgaaccaggcttcatagggaatccggctctccaagattttctcttcttctttcttgaattggagcaaagcagatctagttgaaagccagcacacaagcagatcgagtagaaatacggtctctgcgagctcagctttggatcgatatcagcgcatccaccatcaacaactactagcttcgtaagacgtaagttatcctagccctgatcctaatttggttcccgctctctgcgttgcttcgtctgcggtgcgcatatgacagcatatctgttgtgtgttcaccattcgagtttgttctccaatctccatgtatcatatcgttcagta

SEQ ID NO: 11549 - DNA, 400 bp, Oryza sativa
agcttgcaccgggtgtttcagaggtttctgctagggggctgcctagacaacgcctccaaggagataaatgacgaaagcaccgccgccgctgtctgtcaaggtctcaaagagaaccgagactggtttttcacccggcagcctcactaaagggcatgggatggcacgacaatgcccaaaaaaaggagtgatgctctgaaagccatcgttgccggcctggctaaggccgggctaggtttttacctgccgttcgcagcctgcttatccatcgctaacgcaccaatgctccaaccgccgtctaacctccgccggcggatgggcacccgcgcctcctcgcacacaccacaccggcctccgccgccgccccgcactttctcgcgtgccgttctctgcctcggcagtg

SEQ ID NO: 11550 - DNA, 415 bp, Oryza sativa
  unsure (1)..(415): unsure at all n locations
taccggcagggttntttctggcctactgcagtgtccgacgcttactaaattgtgcgcacgtgcgaaggttgccaatttttcgccagacaaattcatctaccagctcaagagttgcagaccatcccactgtcttggccgtttgcggtttgggggctcgacatggttggcccatttaaaaaggcagtcggcggttacacgcacctttttgtggccattgacaaattctccaggtggattgaagctaaaccggttgtcacaatcacagcagataacgctcgagacttcttcatcaacattgtgcatagatttggagtgcccaatcggatcatcactgacaatggcagacaattcaccggcggagtttttaaagacttttgtgaagactttggaatcaagatttgctatgcctcagtgg

SEQ ID NO: 11551 - DNA, 408 bp, Oryza sativa
  unsure (1)..(408): unsure at all n locations
agcttgactctntgattctgtttttatgaatcggacacgtgaaagagcgtggagttagattttgatgtgtgctacgcagcagcctttgaaatcaaaatcaaattaggaaacttaatttactgacaggagacaaacacgtcatgtctgcatagctaaattagaaataataaatatgcacaactgacacgtcctgtacaaaatcatatgtaggggagataaaacaactgggcatccgaactccttcaaccacatttaagttttgctctatcgcataatctttagagacggtatgttttttagaaaaaataaattctactccctccatctacttttgatagtcatattttcaaatctgaaaattctatttttgataggcatatttcaattcaacaacctatcatcttaatg

SEQ ID NO: 11552 - DNA, 421 bp, Oryza sativa
tatatcaacgcatggtcattgtcgatccgattaattactgtttttctttcaaacttaaatccccttctgctgatgacaagagcacagaattaactaaggacattcctagctgctatacatgaacttttctttaatcatttcttcgacactgatcaaaggaagcatgaataaatgaattggcatcaactcatgcaagcttatgtactcaaggtgaagaagaacacgaacacgcaaacgatatatgttacaattgccaggccggcaagtttcacgcgcgaataaacgcatgctagcttctggtaaagtccggagtccaagtttgccaggtaactaaagacacgtagtaccagccgtcggatcacgggctgaagtgaaacgaacacgtgaagaacaaggactctctatggtcttttacaaaccg

SEQ ID NO: 11553 - DNA, 206 bp, Oryza sativa
aaattaacccaaattgctttaattggtcgaatcagttcagaatggtactattcaatcattcctctagccttgcttaaaacacaacagttgaggcacaccactacccaactatgctgcttctgaaatctatgccattctgtacacactaatgattttgaaatttttgaaattattgtaacatgtaccaaaatgccttctgaattttt

SEQ ID NO: 11554 - DNA, 445 bp, Oryza sativa
  unsure (1)..(445): unsure at all n locations
tcccggaccttaagtcacctgcggcatgcagcttangttaatttctctgaatctgatcttatattgtccatgagcaattcagaatttcagactgggtttcttgatatgatcagtgatcgatcactgattcaaaattgtatatatactgattggatgaactatcttcgtctctgttactcgcaatttaaattgcattgggtggtgtggctgcggcgaaatccttccataaggatctgaaccggattgctgagacggtgcaaagctctagccgacgttggtacaagttcatactgagcggtaatgcctattctgaatttcttgcacatcacatctatttattctcctcgcaaaaaaaaaagaatctatttattctgaattcttgcacatcgaattctgctttggtggttccatgctaattacttaattgcagatggattatatttga

SEQ ID NO: 11555 - DNA, 398 bp, Oryza sativa
  unsure (1)..(398): unsure at all n locations
tcggcttttcctcttccttcccccagcgccgtcacacctcactcgaagcgccgccgccgacggcgagcacacgtcttcgacctccaacctaccccctgcgacggaaggagctttacctgcaggctgtcgatgaaatcctcgccgaccactgccttccctgcaggtgctccgcgccatctccaccgggccaagttcctctttcccagcgtggttgcgtcgtcccgaagtctctcttcctctggccagagggtggtgccactcgtttggagacttaagtgggagggccttggcttctttgccccggacagcgatgacctcggccacgacgagtaacgagcatatggctggagatgcagtcctgcaacggcacatccncttcttcaccggcgacaggaaaa

SEQ ID NO: 11556 - DNA, 417 bp, Oryza sativa
agcttgtatatggccataacaaaacagggtaactgctattgttctttacaggcttcttaatctcctagttgcaaagatcttcaagtattaatgcataacaaacaaacatcttcaacaagtttatgtattatatacatttacataaaaaatgtgatataagtgtaaatgtttcttaacaaacaaaaaaatttcttgaaagaaatgcttaccgcttttgttcttagcttttgtataatccttagccttttcaacttctgcaaaagccttcttctgaagaaagcactctttcttctccagcatttctagagtctgcacatgcatattgtattaaaattaggccgcagtgaatggtacatataacatacaaaaaatcagttctatttataactggagcaattatctcgttagtatcaactg

SEQ ID NO: 11557 - DNA, 418 bp, Oryza sativa
  unsure (1)..(418): unsure at all n locations
cagcatgcaagcctcgnangggattaacttacatcctgtactgttcttctgctagatagtggactgatactgacttgttctaaacgagacaccacgctctatgtatcctatcgcttgtccttcgtagttcctgttgtgaacatactagtaacaattagcaagttattctgggtggtggttgccgcatgtctttatgtataacccccgatttgaactctgatgctttttgaaaataagagttctgacatggctgcccgatatatcatactcggtgtgaactttgcatgggcgcctgtggaaaataatttgtgcagcttatacgcatgacgataactggatcagcacccttggttaaataacttcaagattttcgagttaagcctgaacaccatttagctggtattctgccaaaccttat

SEQ ID NO: 11558 - DNA, 181 bp, Oryza sativa
  unsure (1)..(181): unsure at all n locations
tangttcccatgcaacacaaaagaacatggaaacatttttatgattcctactttgttatttttaggcaccatcttattcaatgtattaaaattatcttcacccgttgcaatgtacggatattttgccacttcaaatagaaagcctcgaaattaataactctgagcctagacttggtttggc

SEQ ID NO: 11559 - DNA, 408 bp, Oryza sativa
tatcgtgcaagcatgtcacattatcacccaccatatatttctatttagcatattttaaattctatacaagcatgtcacatcatcacttctagcgattactattctagtcattctaaatcccatacaagtatgacacatcatttataatattatatagatatcaacatacaatatgtcaaatcatctccattacattatttttccaacagttcaactttgattatttgtacaatatttaacatatatacatccatgaatcctggagcaaagcacgggtatcacctagtagtatcatatatgcccattctatcattggatcatgggaaagccaagaacattttccaaaagaccatattgccccttctcataatcataagaaataaacttccatctcaaaatcaaaccctc

SEQ ID NO: 11560 - DNA, 243 bp, Oryza sativa
ttctaggccgacaataacgcgacagcggttgttatgaccccatgacccattttatgcaaatagggaatcaaaaattaaatccttgaaaaagttcatacctcataacaaggttctactaacagttttaaaggagtatcttaaaaaactaccccaagttttttgagggaaaaaatctaaattacctaaatttatttgggcattacattggggaatactgtgaaaatttctttatagaatttttcc

SEQ ID NO: 11561 - DNA, 412 bp, Oryza sativa
agctttcgagagctcggagcgcatgatgagctctgagcgcaagggcagtgcctcaccgctgatgacatgggtcacactctctggcgctcacacctcggccactcccactgcacgaaatgtgactatcaacaaagctcttccctgctgtcgaagttactactgcatgaaaaaaagctagtctaggactgaagtaatagtttttttttttcgtgctgcttaaaaactctggtttctatagaatacacattgggtggcgtgtcttcactgtcatgcatatctatatccaaaagtcagaatctaacttcttggtcatgcatggctcatctaagacgtaatttaggacggtcaaataccactaatatatgtagaacagcttaagatcaaagaaataaagcgggtgctctgaccatat

SEQ ID NO: 11562 - DNA, 396 bp, Oryza sativa
  unsure (1)..(396): unsure at all n locations
tgccaacggctatagggttcgcctttntccttatgactttatgaccaggcaacaactccgtcggtcgaacttttttgttgtaagttgccgaagtgcctgtggcatacttttgcatgtgctcgagtgcttcgactcttaccccctccaagagttcgagcaacaactcgcgcccctcttcgcccctaaagaacgtcacccttggtgagttagcccctagctctgttggggtcattgcctcatcgccatagagaagcatgaacgggctgaacttggttggtcttgtgggggtcgtccgaaggacccaaagaacagatagcatttcctctggccattcgcccttcgctgccccctcaagccttttctttagtgcttctagaattttaccatttatacatt

SEQ ID NO: 11563 - DNA, 410 bp, Oryza sativa
  unsure (1)..(410): unsure at all n locations
agctntagaatagaacaggaaagaccaataacgttatttatctgagaaatatcgatctaatgcaaagttccaaactaagcaaaagataaactgcttggcaacagtatagtcgaccattgtcctcctaggacatgctctaaactggccatacaactcctgttgtcaaaacaactttattagacaaacactacaaacaattggtcaacaaccagaggtggcaatttagcgctagatgcacacgaggaccgagactgggtcaacacccaagtcaagctgttggcgctatagtgaagtgggaatcatgcctattcacagcatctacccttgggcttatccctctagatttgcctcctcttttccggtgtcctcgcaagacatcaggttccaaataatattgagaaaatttggca

SEQ ID NO: 11564 - DNA, 432 bp, Oryza sativa
cctatcaaactcagcttctcgctggggtgttgagcagctgtgctatgacatcttttttcacatcatgcatcgaatcagcgcctggcacataacccactgctttgatctcttttatcaacttagccaaccttgaatatatctcctttgcttgctggggatttgtgctttcagagtacaaagcatggatctcattcctgagttgaatgaaactccctccaggagtattttggaggccattcttctccatagcagttttcacccttgcaacatccttccacatggtagcgtttgcataaatgtttgccaagaggacatgatacactcccttctgtggccctagctcataaattctctgagccgattcttctgccaactccacatttttgtgcaacttgctagcaccctacatcgcaccgtatacactaatggcat

SEQ ID NO: 11565 - DNA, 406 bp, Oryza sativa
  unsure (1)..(406): unsure at all n locations
agctttgagtccgttctgattatcatactccgaacgcctagtgctttcgcctttctcaggcccattaatactgcttcgtattcggctgtggtattggttgtactaaactacaatcttgcagcgtaatgtatcggcactcctcctggcgaggttaggatcatggcaacacccgcccccttgtgagaccacgacccatcggaatgcgtgacccatggttgttcgactggttcgggctttggggcggacgctggtgtccattcggccacgcaatcagcgaggatttgggactngattgcggtgcgagcgacaaagtgtacgtcgaaaggttatagttcggcagcccatttgcttagccgccttgtgatttcttttccttgaagcatttcgcccaaagggtactgcgagg

SEQ ID NO: 11566 - DNA, 410 bp, Oryza sativa
tgtacttctagatgagaacatgtaatctattgatccgtgtattgtaccctaaatgaactacagctttttctactgaaccaaggaggggaggaaatatatgttggtccattatgaagccattcttctgagcttatcaaatactttgaggttagctcattgaaagtgtgaaaaaagttttttactactatgttcattctttcatataataccttgaaacaaaataatctttgcaaatggtacttttcacggaatagaatgtgtcaatcagggttcactttctcgccggtaaccgcgcggtaaccgcggttaccgggcttaccgtggggggtcggtaacgaaaaccggcgataaggtttgggccaaatttgctcacattcacaaatttgaaaaataatcgaaaaaatcaaaaa

SEQ ID NO: 11567 - DNA, 410 bp, Oryza sativa
  unsure (1)..(410): unsure at all n locations
agcttacaagatccatgatgccgaattcctcgatgcgacaagtgatgtgcagcgaagatcttggtattgaaagcagtgctggccatgttgcgatggagatcttattgcgtgagatctcagagccagagtcaaagctccttcatatatgtgagaagagaaggttggcagaagagccacgaccacctctaccaacaacaatgcgaaggaaagggaagcacatcgtgttagattgacacgaggggcgattggtaatgccacaggtacccacaaagctacccttcactttccacgtgtggaagggcagcttagattgttgcttatgcaccatntgatagtgttgatgagcttagagtagntaacaatggaaaataatgatgttatggatgggtgaaagggtaaacatggtgaga

SEQ ID NO: 11568 - DNA, 403 bp, Oryza sativa
tagtcaaacttaaagcaatttgactttgactaaagtttatttgtcttattacttaaaacggatgtagtatgagatattattattattacactttggactactcatatcatgctcttcttttcaggtacatcaatgtggcttcaattaaaccaatttcttgcataccgatgaactcttgaagataagtagaccatataatatatgatgtattggatgtgaagagtggtcaaattcaaaatggtataaaggtaagttacctagttgaaagtagaacgttgagtatgggtgattcgcactattaaagtttcctatatgctagtctcatatgtcgcatattggcgtgcatttaatttaagattataagttttgagcaacaattaataaaactcgtatttacattcac

SEQ ID NO: 11569 - DNA, 407 bp, Oryza sativa
agcttgtggtggctggggctgtgatggatgccgtcgctgaagaagtagccgccgttgcagctcatcgtgctcatcatctgatgacggccgccgtgctgctgctgctgggagatggccggagtcaggccgcagttcatgaactcgtcgccgccgccgtccgactcgaagctgccggtgttggagctcgagtcccccggcggtggggccttgacggtcaccgtcgccggcggcctccaggcctgctgctgctgctgcttcctgtaggtgatgcttctcttgaagattctgcagatggtccagacctcctgcattttttttagtcagaagtgcacaagttagaggtcaatgctattaggaggctgtactcttatcgggtagaaatggcaatcggtagaatactagaaaca

SEQ ID NO: 11570 - DNA, 440 bp, Oryza sativa
cctaagaatactaagcttgccatccttcatgtaattccatagctcatcaacaagattatttgttttttcggcaagcagtctaggtgtatccaagaaaatcttctgcaaaacaaaaaggccgccaaggaacaaaattagattgcctttatcaagcagcactgaataacttcctatattacatcacctagtttcttctaattacaaggcatgaattaggaccaatcttcaagccaaataaaatttacttagctaatactccccatatcgtaacatcacattgtttggaactgaagatgttattttttctataaaatgatccaacataaacaacatcaaattagttcaattaaaatccactatgaaatatgtcttgatagtttatttattttgtattgaagatgttaattatttttctataaatttggtcaaagttaaagaac

SEQ ID NO: 11571 - DNA, 394 bp, Oryza sativa
agcttgtggctggtagtaaaacatctatttttcttttgagatagagttcgatcctcaactatttctcgcgatatcttcttacgaagttttgttagggcatctataacagcctctggtttaggtgggcaacccggcaagtagacgtccacaggaattaacttatcaactccccgaacagtactataggaatccgtactgaacattccaccagtaatagtacaagcttccatagcaatgacgtattttggttcacgcatttgctcatataatctcactaaagagggagccattttcattgttactgtaccggctgttaaaattaggtccgctcgcctaggacttgatcttggtaccaatccataacgatcaaaagcgaatcgtgagcctattaatg

SEQ ID NO: 11572 - DNA, 348 bp, Oryza sativa
  unsure (1)..(348): unsure at all n locations
tccctggatctcgggaagttctctttcacggtattgggatcgtttgatcgatttccttgatcgctacttatgggcgtgcgctcaaaggatacaaacagggattcgcaaacaaaaaggggaattcgtagtcactttttcctgtcgcgtaaaaaaaaagctttacgcgagagcaatagaggttgggatacatctatctcttctgagcaacctctnttggattcttaagaccacccttgcagtaggataccgcctgctttgggttctttattatattatctccttcgagggatatttaggatcgttcaggctatatttagtctattntggcttttactgtctccttttctc

SEQ ID NO: 11573 - DNA, 416 bp, Oryza sativa
  unsure (1)..(416): unsure at all n locations
agctngtaattttatgatgttggcttgctgtatatcgccattttcgggacatgaatcgagcattcaaacgattgggttgaaatgcaattcttttaatgaaaaaatcaacgtaatttttcccctgttgattgtcaacaaagaatctataaaattttctcaagacatgcatgagagagtctgcagctaatttcaaattttcggttgatttgatgctctaacatatgagattatatataagctaatgtcttgttcacgtntattataccagtcataaatcataacagtataaaattgactatagtcaccaattatagtgaccctccccaactattgaaaccagggtaatttaactcacaatacagtattgatagtggtatttactaacgtgacttctacgtggcatcccaaacatcaaa

SEQ ID NO: 11574 - DNA, 373 bp, Oryza sativa
tgttacactatgccttggaccaactcctcttttaaacttttcactaatcccttcacttaacgatgtgctttgaataaatgggaaaaagtcattcttgccatagacaaggatgcaactttgtcttgtatcccaaattgattgcaagtatttcacattgtgcagctcatatttatcaatcatttgtgtcacaagggtttaaactcatgctctcgccaacaattgttaacaaagtcttcaaattcattgtatagatctttctttgtaccgtcagcgaatgtgataccctgactcttcttgcaattctcttgatatgaaataggcaattcctatgcttggtttttcttgaacacttgccctattgcagatctcattg

SEQ ID NO: 11575 - DNA, 413 bp, Oryza sativa
agcttggaataatgaatggagagggatgcctgcattggtgcgtgagtggtattttacgcctgtaataagcactgcttttccatttacgtttgttttgttggatcactccttagatgattcatcaagttgagcctgattcaattggggactggttttggtaatatttacatttgactatagtccagctacaatattccgttctccctaaagtcatctcctctcagtgtgttagtttgctattcactatagtcttgcacaaatgttgctataaaaaaaaattcgtgcatacaatttctgatccataggtgcttttggttgagcattaagatacatgaagctatatccatctttctttattctatggcctgcatggcttttctgttcccgtaccgcttagatgaactacctccact

SEQ ID NO: 11576 - DNA, 268 bp, Oryza sativa
aaactcagctcgcgttcttcttgcttcgttcactatttctcctttttctgaaaaaagccgcccatgcagtgggccctttaaacatgtcatcacccgtctgcatgctgaatcctaacctgaatccaacctgcatctgtctctcgaagatgacttctgatcgggactcgactccatattcccaatgggttcacgcctggaccgaactcacgctgtctctgagagagggatacgtagaacatcggcgagatacgcaagacgaggtgtgcga

SEQ ID NO: 11577 - DNA, 415 bp, Oryza sativa
agcttgtgttttcgtatcttatatagtctttacgcgcatcttttcatacttttagatcccttttatgctttagttgtggactttcacaccttgtgtgatcttgtaatcctctatcatttattttaatggaaatggagggcttatgacctttgataaaaaaaaaaagcacaaaactaacggccagccaaaccactcatccgagactcatgacacacgttgcaagcgtgtgcaagctgattgccagatgtgcaacttaccacatgcattactatctcctaaataatcttgcacttcccatgcatacatatctactccttcaaccgattcacttggttaacttggaccttgccttgcttacaatctttgcttgcccttcagacttattcatgaacccagtttgcttcactcacaccac

SEQ ID NO: 11578 - DNA, 409 bp, Oryza sativa
  unsure (1)..(409): unsure at all n locations
tgcccgcaggtacaccgaacacacacttatcgttgtttatttttatgccggcggagccgagactctcaaaagattccgctagatctgagagtaacatttcctggttgcgcgtctttacaaccaaggcatcgacataagcctcaacattacgtcctaattggctacccaaagaaaatcgagtaatacgttgaaaagtacgacctgcattctttaacccgaagggcattggccgataacaataggttcctatgggggtaatgaacgcagttntatcctcatcctccctagccatgcgaatctgatggtaaccagagtatgcatctaaaatacacaaaaagtcgcaccccgcagtggagtcgacaatctgatctatgcgaagcaggggggaacgatccttaagacatgcctt

SEQ ID NO: 11579 - DNA, 117 bp, Oryza sativa
  unsure (1)..(117): unsure at all n locations
ctcgtcccgngacccttgagtcacctgcggcatgcagcttngagggcagataattttgacttactctctccgtcccaaaaaaaaggcaaactctgggtttccgtgtcaacgtttgac

SEQ ID NO: 11580 - DNA, 403 bp, Oryza sativa
ttcttgacgcctactccagctaccaccagatcagcatgtgtaaagaggacgaggagaagacagtattcatcacgccgttcggtgtattctgttatgttaagatgccatttggactgataaccgcaggaaacactttccaacgcacggtccaaggggcacttaacgatcagcttgggaacaatatcgaggcctacgccgatgacattgttgtcaagaccaagacaagcgactcattgatggaccatctccgggaaacgttcgacaacctccgacgatatcgcctcatgctcaatccagagaagtgcacgttcggagtaccatcgggcaagttgctcgggttccttgtctttggacgagggatcgaagcaaatcccgagaaaatcaagggcatcgagaacatgaa

SEQ ID NO: 11581 - DNA, 414 bp, Oryza sativa
agcttcctttttgattatacagggaaaaatgccttatattccatagggagccacactataaggtcccatggaaccagtgtggcaagactccacatgtatgactggataatacttctctttcttgctgttgttgatgggctgctaaacataattgaaccttttcaccgctttgttggacgtgacatgatgacacacttgcaatgttcactaaagggcaacacaattccattttgggccgttccagtatgttctcgatatgccagataaaattttcttatggcttcatctatcgcttgaggcatgcaattctttcttgacttgcagcttattgcaattgtgctgccctgcgttgtctttggtggaatttactttaaaaagaaaaatgtctatgatttacaccatggcgtactgggt

SEQ ID NO: 11582 - DNA, 408 bp, Oryza sativa
tgcactcatgtgcacgtgaatttgatacacacatctttttcttatgaaaaacgacacttgagctgaaggacttgctcaaggaaactccaataatgcacacggggcccttttttcaaggggccccaactaattgcttcgtacataatacttgaaaaacattaaactcgctatcacttccaaaaaaaaaggtgataggcaactagttaccaacaattgctcccaactgtcaaatctggaaataagagcaagctcatcgaaatttcttgatgccgatcaagaccggatcaagcttatgttttgctccggaaatgtgaaggcaaatttctatgaactgtcagatatcgcaagaaaccttcatccagaatttcattcatttttccagattaatcgtaccaacaatagtaggaa

SEQ ID NO: 11583 - DNA, 408 bp, Oryza sativa
tgcagcatgcaagcttggcagcaagaaattccgtttctcttgactatgagcatgttgggatacgcgtcagctaagatagcataaatcaaaaaattctatcgcgtcaaccaggaaccatgcaagtattagatcatagatcgttaccacttgatagagtatataacttgtgattgacttcctcaatcacctttgtcatggccatgcactgccatcatctataacattgatggacccagagatatttctccatatgaggggcaaatcccatctcgattattcatattccacaacttgtttcatagcatacccgaaaactacttttatatctacccatttacggagtagcgtttagcagtccctaattaagctactacacactgttgagaagcatgaaaatcacaggtctaa

SEQ ID NO: 11584 - DNA, 401 bp, Oryza sativa
agcttctatgagaataagcgtatcatcggtatattgaataataggaaagttattatctcctgaaactggaattggcagagagagtatccccctgagatgagctttgttaattatggcttgtagtaaatcagcacccaacgcaaaaaggagaggagagagaggatctccctgccgaacacctcttttacacttaaaaaactttcctgggactccatttaagagcacttttgtagaagcagaagataagatgttactcatccaaacattccattcatccgggaagcccatagctaacatcacttgaaggatggcaccatgttcaattgtatcaaaggctttctcaaaatcaagttttaataaaacaatctctctttttgactgcttgcactgatgaatgtatt

SEQ ID NO: 11585 - DNA, 369 bp, Oryza sativa
agcttaccaaaagaaaccggattattatatatcttaggcaccgatcggaatacctggagcacatactcaccctatgaggctgctcgaatagactcgtgctccatcaaaggtatctcgaacaggaaaaaggctaaagaaaccggacttatactttttttttttcatgattgaacatactaacgcactctctcacataccattacacacgctacacaagtctcaccacactcacatcccaacgaatgcccctggttaacacacgctatataagacggaaaccatcaacagatccttgatcacactaaatcctgctgaagctcacctcaatgtataaatatcaaggccccacgactcaaccctaaagagggg

SEQ ID NO: 11586 - DNA, 421 bp, Oryza sativa
  unsure (1)..(421): unsure at all n locations
ttatcttcttgttgntgaattaattgatcttcttcggtattctctgtcttcaataagcctatcttatatgcacataccactacatattattccttgtatatccaaaagaccaattgatcatatcgttggaccccacacaatatgaaaaggagacctttatggaattcctcactatttagaatttgtaagtgataaacatttcattaatataaattgtttaggacgatccctaaacttcttgctactgataaaataattgttttcttcaaatagagcacacaattactaccgcaaaagaggccgacccagtacataatccatcccataaacaagtacccatcatgactggctgggcggtactatcaaatctataccaatagaactaattatccaacaatacatactaatttatatctactga

SEQ ID NO: 11587 - DNA, 335 bp, Oryza sativa
caacatcccctccatccgccgtcaggtcaaggcgcacttgatctaaaacagactccacgttcccagcggttaatggcaactgcaccgcagtaaccggatccaggccagcaatggctccaacaaccgcttcaacaacagaatgaattggaacaaacacgggtccaactcataacaatataaaatgtccagtacgtatgctgaattgttcgggctatttcaaatatttaatagagaatatatgccatttcgctcgattacattggaattatgcgtgcatttaaaagcaacagcctcacctaacggcggtcgctggtgattgggggcgggcaccaatc

SEQ ID NO: 11588 - DNA, 362 bp, Oryza sativa
agcttcctccagtcgccagggggctcacacaatcgctgccaccgggaggggatacttcgctggtcactcatgtggtgcacccatctcttgacgatgaatccccgtcaagtcgatgttcgaagaaggcgatgcccaaaggccacggtgaggccccgcttaagaaaaaaggagtgattatatcctatgtataccttttgagaaacacccagggatcttatgaatatcttcacaaggtggggggttagacgactagggttcgaagccttaccccttctatttatttgatattatggccttccctaatatttacctctttgttatggataccttaagtccatcagtataagtattctatttggtat

SEQ ID NO: 11589 - DNA, 413 bp, Oryza sativa
  unsure (1)..(413): unsure at all n locations
tgcattattaacttactgaccttttactagaccatgctatctagcttctgtctgtactgagccaatttctgcaaacaagaaaatgcacatcccaaaaaataacaaagaccatcagatagtcagaaggtaaccacgagtgatttcaaaacgaaggttgttatcattaaaaaaatagctttgtaaacatattatgtatagtaccaactttatcagctgaatctaatataagtacaggttgttgcgtggttcatgcagtctgcttcttcaaactcacaaccaatgtggaccaaaatgacaatcccaactcatacaattatattagaaccagtgttatatatatgtgaataattgagccaatgttatgatgaacttggtgtacgattganataatgaaatcatctaatacgagttca

SEQ ID NO: 11590 - DNA, 409 bp, Oryza sativa
tcatcttggagccatcggtgaacttcaatcgtgcttctctatgtgtcattgaacctgacgtcgaaacacattgcaatcattagtggaatgagaatgagaatcatgccatttacaataagctcgacgtttcaattcttcttgagatggtatgatatggcctttatgcaatctaatttgtgtttcttgtaaaagataatcacaaatcttatcacacttggccacatcaaaactatatttaacctcactttgccgatctttgcgaggagtcggcattaggttataacaaacaaaaagcttgtttttgttagtccatgaccattcagcaacatacatatcatgatcaccctcatcttcactatcactagccttagggtaatcaatcacattaacattatgctttttctcatat

SEQ ID NO: 11591 - DNA, 357 bp, Oryza sativa
agcttagtacttcagcacgtgaatctgttgtgggcgaacaaaactgatgcttctacttattggtgccttgatgtttgtaagtgccacgtcaagggctgttcttaacagtataaatataattacgcggcctcctccgggaggtgagaacgcttccacatttacatggtatcagagcctctctcttctacccaacacaaaccctagatccttttctcgtcatggcgagttcctcttccacatctgcgccggctgcacttggtccaccggtgacagagaagctcaccagggacaactacgttctctggcgtgcacaagttctccctgcgcttcgcggagcgctgctcaccgactacctcg

SEQ ID NO: 11592 - DNA, 419 bp, Oryza sativa
  unsure (1)..(419): unsure at all n locations
gccttcaactacctataagggtggagcgggggaagccccgttttctttttataagaaagttacggttccgaggagagagacgaaaccgattcgaactcgattccaacgatttccaaaacgaattatccgatgtttccaaatgagaaaaggtagatgagatcgagaagatcatttcccctctatcaattcgaccggaaacggaaaggagcggccggatttgaaaggagacggcggcggcgcggcgctagggtttctggcggcggcggcgcgactaagacgatggatccgacaagcgggccccacctgtcagcgaccgaacacgcgcgcgggcggctgcggactgggccggactgggccgacgagagagagaaaagttntgggccgacttttcgcccanagccaaaagaagactttaaaac

SEQ ID NO: 11593 - DNA, 417 bp, Oryza sativa
  unsure (1)..(417): unsure at all n locations
agcttgttacaagcccaaggcgcgaacacttggcgtctctatcctttccattaaattaagtttagaatttaagtgtgtgcttcatatgtatccaaacttatatgaacgttagtgaaactagataatgaatggagataccaaaacgtcttataatatagaacaaaagaataataatatttataaaatatctactattatcgatacctatatgcatgttaaaaaaaatgcttaggataagattttatttaacttttaaaactctaacaaataatgacttctcaaatacttagttttcaaaatataaacaaaaggtatgttcgtggaatagtcttgaaaagtacgataataacagcgtaactttggaatgtttcataaatttctatattctaacatnaaaatcgatggtcaaattaaagt

SEQ ID NO: 11594 - DNA, 398 bp, Oryza sativa
  unsure (1)..(398): unsure at all n locations
tgtgccaccgagctcggcgggagcaactcgttcgtcttctcttttatatgggcttaaaccgctgtagattttccgtatggtacaaattaaaacttcgtttctgtctatacgaattgcgtctccgatatggcttaaaggcaggcccggcccgcagcgctgcctcgaacgccatggcgacgaacagcatggccacaccgctatcagccagccgcgcatgcacacaacaagccgtcctgtcgttgttgcagcaactgctcgccaccgccgccgctgccaccatcttcaccggcgaccgcgacngcggcggcggcggctgcggcagccctgcggccgctgttctgaacgacgggcgtcatgtacgtctcactgatgtcaatcaccagccggatggtctatgt

SEQ ID NO: 11595 - DNA, 363 bp, Oryza sativa
  unsure (1)..(363): unsure at all n locations
caagcaagcttcangacctaagatactacaccgtattttgttatatatatgaaagacaagtgccatgactcgagagcaatgtatcgagtatctgggactccatggctacccccacaagcaggtacttactcaacacgagagggctaaatcccgtgcagaaacgtttcctgatcctaacacagcagaacaaaccggatgaatcaaaagagagaaactctgcttgctctacactgcacccgcaagactatcgaactcccaaacagaaccccgcaatcagctcttagcatcacgaccatctcgctataacagcaacgctagggtcttggaaagctgcaccacaaagtcaagctgcttggaatcccc

SEQ ID NO: 11596 - DNA, 376 bp, Oryza sativa
tgtggttgagacagtgaaaattcagagttgttttatattactgcccaccctccatgaatgagctgtaaacgtctctgaacctgaacatatacaaacacatttgatcagtaaagcaaattaaatctggtttgctgctcaaagctctgctcgatgtgaatggcgagtggttgagataattcttgtccccatcacgctaaaattcatcaagccaccgatcttggcggtggtgacaactggccggcaagttcggcgtcttattaactacagacaggtgagttcggtacgtctggtggcctgtgatgaacaccccctggagacgcctaaccagcaacataagaagataaaagtagctaggctataagccataatatttatt

SEQ ID NO: 11597 - DNA, 412 bp, Oryza sativa
agctttgctcacaaaagaagattatctgtatcttctccaatgaaggtggtgggaacaacccctcaaagatggcctcaattgtattgatctcttcgaaagacaacttcttatactgcggcatagtacatgacaagatcaggtgccttaggaagcatttacttttgagcattggttttgagatcattgctctcttcagcctaattatggaaagccaccttatttgggccaaagactctatctcttccaaaccccaaccttcctgcaattcggtctgacatgttgtgtgcccacctgcaacaaatccaccaatgtcattaagaagatttagtttccccaatccttttggaacatgtgtaacatgtgtaccattgagaccgagacatctcacgtcatcaagctgagtgatactaac

SEQ ID NO: 11598 - DNA, 400 bp, Oryza sativa
ctaacgatgaaaggattttcaccaatgtggtgcttgttgtattgatcaaattgcgaatggagggagtgcggctgtgaaagtcaatgatgatataagaaatttctttcaaacaaaaaaaggtttaaggcagggagacccactttcaccaattctatttaacctagtggcagatatgttagcaattttaattcacagagcgaatgaccaaggaaagtttgaaggggtaatacctcacctaattgacaacgggctctcaattttgcagtatgctgatgacactattctttttatggaacatgaattataagccgcaaaaaaatctcaaacttgtgcttagtacatttgagaaactttcaggcttaaaaatcaaatttataaaaaccaattgttttggtatggc

SEQ ID NO: 11599 - DNA, 403 bp, Oryza sativa
  unsure (1)..(403): unsure at all n locations
agcttcacagaggatttacatccctctatgcatatgcttagctagtattnttgcacctgcaagcatccaggagtgcccttcctcctttttcctttgcaggagcactgtcaaatacaccttgtagagatatttttctaatactatagagatatttttaaaatgcctttacagtgctatagagacattttgtagagtgtctcataaatgccttttgatgaattgtctctatgaaagaagagggattttataatatgtctctatgccaatagagacactttgtaaaggcaataatatgttgcggcaactatagcaaatcaatatgaaaaaaaacaaaaatattattccttatcaatccttgaactcatggacctcttaagttgactatttttatcttcaatgcact

SEQ ID NO: 11600 - DNA, 425 bp, Oryza sativa
ggacctataaaactcagcttgcaggtgtgtttcctggttttgtgaataggacacctttaccttgttgccttggaagttgtccttgaaggctcgtgtttctcatcggaaggacaagatttagccgcactaggatcctcctcgggcttggatgtcgtcgacgttccgttctccgctcctacgggaggatccttcgacatggagtcgtccgaagttgtagccacggcgttctcgcttccggtcaatgatggaccagtcgagaccggcactgtggtataaaccggaaagacgatttcgccgacttgagtccacaccagcattgttgaagtcggaactccttggttgatgctggggttgacgctattgtcgacgaagcttgacgacatagtagtagaaccttgagtaccaagtccccctacctagcgcgc

SEQ ID NO: 11601 - DNA, 404 bp, Oryza sativa
  unsure (1)..(404): unsure at all n locations
agcttacggatgtgcactgctttttcgtttgtttggccgccctaagtcggattatatcgaggctgggagagaaggcactgtccctgtttaagctacctcaacgctccgggccttatacctggacggaagaggctgatcgtgccttcactcaattgaaggcgtacctcagttctctcccagtcctggtcgccccggagccagatgagccgttgctactctacccgggggcaaccccgcatgtggttagcgcggcgttggtcgtggagcgcgactaggacaaccctcacttcgcgcatccccaccctgcatttactctacccgggagagagcanggaggagaggccctcgagccgaacggtgtgccaagggcctagacggtcggagctggcccttcgcctgcttgt

SEQ ID NO: 11602 - DNA, 390 bp, Oryza sativa
ttgtccatagtttaatctgtctatcctttacgatattcatggtcacaccacatgccgggtttcacatcagttacgttgatcttctattcaattttctcttactccatataatatgatcattcagtcaccagttggtattcagattttaaaatgtttgtcgattaagacatgaatcatatttctcaacttatacgtacgcaatgaattgaacaataaaacccaattaagttactaatcttttaaagacaaaatgacggatatctctgccattttttagagacacaaattaagctactaatccaatctgtgcaattagcgctgaagaaacagtagtgaatcttgggctgtgtccaggagtggcgcctgacctttggaggtccatattacacg

SEQ ID NO: 11603 - DNA, 424 bp, Oryza sativa
ttagagtcacctgcagcatcaagcttcagattgtagatattgtttctatcttctaacaactttagctgggccttctgaggcagctcgagcatccttcttcttctggggtgtcttctttttcttgggcgttttcttattcttgggtgacttcttcttcttagcaggccttgatgaactatcatcttgagttttcttcctgccaacaatgatatggatatgttagcaaatgcaacatatgtaaaagaattcaaaataaatagtcaaccatgcagcatattacctcttcttgggggaagcagtatgcacttcatcagtgtcttctggtgcttcaacctctctgcaagtcttggcaaagtgcccaaaaccatggcatctcctgcatcgcacccttcttgcccctggttcaagtgcacccctgatccta

SEQ ID NO: 11604 - DNA, 422 bp, Oryza sativa
tattaaactatacaaatgtatttttcacggcggatttttctattattattaataatcttcgctattaaatctttgtatcatatatattctggaataattaaaaaaaattaacgtttggaacgtcatctacttagggagtaccagctggttcttaacagagatgctctatataatattccctccatccacaaaagttacatctattactcttatcaccaagaccaaagagaaattaaatcattttggaagtaacaaaataaagaagtaaatgcaagcatgcaaccaataagtatttagatgacttcttggattctaatcaaacatttaatttatctcttcatttaagtcttgaatgaataaagattacaaatataaacaacttatttggaaaaactcaaatgtgaaataagtgtaacttttgt

SEQ ID NO: 11605 - DNA, 412 bp, Oryza sativa
agcttgctcctaattgattcttgtcgatcttttgccctttcttattctgacgttaattaattgatatttcagatggccaagtttcagatgacgagcgcgaatagatggtagagtatagtactagcatcgatctaattatgcagatcgccaaatgctgttgctatccatctaaatcggccaagatcgcaatatacaattgtcctctcctcgatcgccggagaccgctgtcgtcaaccgcctcactgagtagccaatatgcagtgccgcggtgtttcatgaagtgcatgcatcagtgcatggcaatcactcctacaaatctcttgtgcatttaacctgctggacgattgatacggaagccattatattgttaatgataattttattcctctctaatcaatggttcgtattgttc

SEQ ID NO: 11606 - DNA, 407 bp, Oryza sativa
tattgctcgaccattattgatgaattgcaaattttctttatcatgttggggtcatgcagttttgcatgctgctgaccttgtccaactacgaccaactgcatatcatgaaacttccccaatgcagttagtacgtgaaaatcctccaagtatttcccatttgtgtaagttcggttgtgctgtatacataccgatctgaccaccacagcgtaccgctatgggcccacacaggaaagtgaggatctatgtgggattcaaatctcggtcgatcataatgtatttagaacccttaacaggtgatctatttactgcctggttcgctgactctatctttgatgaggaacatttcccggcattagggggagacttcaagtaccagaaagaatgccagaaaattgattgggatgccc

SEQ ID NO: 11607 - DNA, 421 bp, Oryza sativa
taacgcttttccttatagcctttacacctccatacttatgccccctttgaattggaggaaaaatggagaaaaaacaaaggaattgaaatcctacactattcatgcctttgattcgtaagaacaagaaaaggaaaaacgtaggaaactttcctattcctacaattctagagcaaaaacgtaggaaagttaacatccactctaacctcttggaaaactttccttaagtctatctctctcatttgattcctgcattttttctgcggtctaatcaaacagtcattcctatatttttcccgcgttttgcaatcctctgttttacacttgcattcctaccaaaatcctgtgtttttcctattcctccgtttttcaatcccgcgattcaaaggggcccttagagtgtggatggtaaggggctttatca

SEQ ID NO: 11608 - DNA, 115 bp, Oryza sativa
ggagaaaacataccaaaagaggcaaaacacaagaccacggaagacaacacaccggacacccaaacacctgaacccccaaaagacgctactgaaccagcacaaggaaaccacccaa

SEQ ID NO: 11609 - DNA, 407 bp, Oryza sativa
agcttccttcatttacttctacattttttatgataaagctttcgaaactgtcaaggtgaaggatgaatctggatatttcagttctactattaatgtactggtacatgcagtgtcgaagccaaaaaaatcttaggctgagctaataagagcttaaatacttttataaattacatagcatttcgtaaattataatgggaattatggtgctagacatagaaatcaagccatagctgccctatttctatatccgccctggccagatccaatcgtgggatgggatgggctgggcagggtatgcaatgcgagaagacgtggactgtctgatggacgtggggagaatgaaatcgttatatcaaaagttaagcttttaagaattactccctacctccgctgtaattatttttctc

SEQ ID NO: 11610 - DNA, 358 bp, Oryza sativa
acctataaaactaagcttgggtacgaacttgaccagtggtatacacctgcggcttagtttccttcagagaatatatgacctgatggaacatacaactgggctccctttggagttgtattaatagggaaggtcacttgaataataaactatctcatccgctggctactcttaaagtatacagcagactgtgtgcaaacatgaccactgatgatgccattctaaaaggaccaacactgtttcactatgaagcataactatttaaagatacaatgactccctgatgattaaagacaccaaggaagttatttcttaccaattgcatatgcttgaaagatataatggtcgcagtaagcttcct

SEQ ID NO: 11611 - DNA, 391 bp, Oryza sativa
agctttagcttcatggcctctctatagttcatcagggagacaaagcgaatatgcagttaggtttgtactactagctaatatcaatgaccttgtccacactacagtcacatgccatgctctataaattatggtgcgaggatctccccatactgaacgtattaatgcataggctaaagaaatcctgatatacagcaaggatgtctttcctgcgcgttctaacctggaagccctgcatatcactgtagctgggcatgggcagcatttctggggggaacacaatttttgctgcagcacggtgtgcaaaaatagaaataagatcagcccggttcaactaattggaccaagcatgcaaaactgccatcttgcaattatgccagtttaactactggaa

SEQ ID NO: 11612 - DNA, 412 bp, Oryza sativa
actaagcttagctcctatatttgctcccaggaatccatccatctttatttattagatctaaccagtgaccaattatatccatcgatatatgcacatcccagcgcctatacatcaccatcaaggatgtgttaaacaagcagcaataataccagcacagattcaaaaaaaaagcgagtgatgatatagtggcagaagccctgcgctacacatcaagatcgatgaaatgcttaccaaatgactaactgatggaagccctcatcccatagaaatccccttgggaagaatgagcgactaggcacagctgtatatagtgcagctggccaatatgggatatatttattcccatttttttgctgcaggaaactcttgaacattaaatttgttgagtggatgtgaatcgctaagattatat

SEQ ID NO: 11613 - DNA, 408 bp, Oryza sativa
  unsure (1)..(408): unsure at all n locations
agcttattatgttcgcaagaagaaagagaagcacatataatgtatgctcgataagagagtgtaagatgtagcatggcctcttgagaaaaataaaagcaccatatctccttttaacattccaatcatagattcctttctctttattaaatctgtacctcgattcacttttatagggcatatttttttcacccatagaacaaaaagatgaatataactaagatacccttcgtgcagtggcgaagccaggatttgctcttgaggggggggtcaatttgagctatatattgagtgaaaatgatcgaaccataaaaaaatgcatcacaatacatggaaaataaaagtattttatgtggatagcaaaagaatatttccgtgactattatttataantggctgcatatattattt

SEQ ID NO: 11614 - DNA, 423 bp, Oryza sativa
tactcgatcgatcgatcgatctgtgtcttaattctagctagtgtggtggcctcgctgatctcataagctagcactatatatatagtggagatcgatcaagatatatctagcagagcagaacaatagcggtgcgactttatgaagagcccatcgatcgcgagccgtttgcaggttcgcacccaaattaataatttactccacacaacaacaacaacaaaatacgtacctcacttatattaccagctaatctgctaattcatgcatcaaagtaaagtttgacaacaaccatgcagcgtctactaattaacctcgcttcaatccttcccccccatacatgcacttttcttatctcaacagtcaacacccaacacttggccacatagctctatcaatcgatttaatttcttcatgactttgctaata

SEQ ID NO: 11615 - DNA, 171 bp, Oryza sativa
ttctgcttctcttttgggtttaatagtagcttgcttcgaacggaatttggaggagttgttcagctgaggctccatgccccccccattaggcccgccccaatggctcatctgctgccgtagcagaaggagaagaagccagcggtcccggtgccttggttgtcgcaacaccgg

SEQ ID NO: 11616 - DNA, 169 bp, Oryza sativa
ttattcttaaccaagtagcggactagaacatgcaataacgataaatgcggctataaagtgcgaaattaagggataagcaaattgaatatacggcggaaacaatacatgcacaacacgatcagcactcaagcacgaatgcagagaaaggatcaaggcttcataccaaaag

SEQ ID NO: 11617 - DNA, 449 bp, Oryza sativa
actcagctaaaaagttggccatcgatggggagaaagagatttttttttttattgataagagaaaaacggtggaattgatcttccggagctttccagctacttcggacctctccatcaagtgggagagagtgcgaagaatatgaaaaaaaaattgctgagggaacgtatgattaaaaatatctttggaagcaaacccgcatcgcacttgacagtggcaatcatggtgttcaaaaataaattgcagaaaggctatcttaaggaaataaaattgtaatcatcctacttttgctataatatgagaaaaaaagtcaaatggtatgctattgtgctttttattaagtccctactattaaattaacaataggtaataacacctactacaaatgtgcatggcataagaggccaattttagaacgatttcataataatacatagagctatcgatttaa

SEQ ID NO: 11618 - DNA, 174 bp, Oryza sativa
tttttcttttcagataaatcaacgatatgttgtctactcactacacgagttttcctggcggtaatgtgccactcaagaaaaatcataatccttgtagtgaatgaatgatccatcctctctctgatgatctataagctagagctagctagcaaaccaatgtacagtatatgctaa

SEQ ID NO: 11619 - DNA, 303 bp, Oryza sativa
gatccaatcggacttccggtatatgaatgggaagtttcgatctcaaccgaaaggttcggcagataacgggataaaacactagctatgaacttgtagcttgaataacaaaatgtatatgaatcaaaaggtgacacataaggtatctaagcaagatataaggtcaccaactaaatcaattaagcatgcaagtagatcgggtaaaaacaagctcaagcacaatatgagagaaggcaagaatgagcaaaccaagagaggagacacgttgatttggttcccgaagttcggatccacggatcctacgtc

SEQ ID NO: 11620 - DNA, 172 bp, Oryza sativa
taattttgaatttgagatgaggaacgtggagatggtgcttgctactgccgagggaaggaggattgacaagaagccacttatccagtcgctggatgttctaagggagttgctttatgatgcagaagacgttatggatgagcttgactactaccggctacaacaacagattgaa

SEQ ID NO: 11621 - DNA, 399 bp, Oryza sativa
  unsure (1)..(399): unsure at all n locations
actttttgccacgactgtccactcgaatttgtgaagtgcccaaccaggaggaatgctttgccttgttctaggtttacaactttacatgttaagccactaactgtctttctattttaaggccccattcatttgcttaatttggaggagcttttcacccgctgcgaaatgagaaagcccattagcacatgattaattaagcattaactattataaacttgaaaaacggatttatttgattttttttaaaaaaaacttttctattacaagtttttgcaataacgcgccatttaatagttttganagtgtgctgatggtaaacaaggaagttgtagtttggagtttaagaaaagaactatgccttgatttacgatcgtaatatgctgatgcatgccttaacat

SEQ ID NO: 11622 - DNA, 109 bp, Oryza sativa
aaaaggagaagccaaaaaaggaaaaagcccaagagggagaagaacgagggggcacccaaaaagcaacggggaggaaaagcaatggacgaccaggggagagaggcgaaca

SEQ ID NO: 11623 - DNA, 170 bp, Oryza sativa
tttttttcttcattgtcattgggtgatccatgagccctccagatggaatctgcatgtcaactgcttgctagagtattgaattattttccagctgacatcaaattatctcttggtctataatgatccgaaccctagttgacactggagctgaacttgtaatggttatatct

SEQ ID NO: 11624 - DNA, 438 bp, Oryza sativa
  unsure (1)..(438): unsure at all n locations
taagcattgcacggcgggtgtgacgatgcgacgatgtttctttttttattagnatgcagacctggaccccggtactatgggaatggaaggctggctagagccaaagggcttgatcggcaaggggatactgcagctctattggctggctggctgcagcagccttgtgcctatggcaccgtacgagttggctgtggcgcagctacagtccagacgtccgaacaggtctaaaggtgtttttcttttttgaataatattttcttaacgaccaacattagacggtgcgatgattcattgaatagagtagaaaaaaattacagcgctaacaccttataagaaaatctatcaccacgcactggcaacacctataaaaacataggagaaggctagcaccagactggctgcggctaatcgcgatcggccgcttctagactaacgaaa

SEQ ID NO: 11625 - DNA, 170 bp, Oryza sativa
tctagcttgcaagataagttaaaacagttggaaccaagatcacaaattttgcacttttgaacaacaggttccaaaagaaataaaagaaagttataaaatcaacatgctaaatttatttcattgcagcaagattaaataaaacaatgttgtaaaacttttgctggtaaatg

SEQ ID NO: 11626 - DNA, 427 bp, Oryza sativa
  unsure (1)..(427): unsure at all n locations
tgttggtacgtatttgacagggaggttctggatgtgtgtattttaaaagaanaaagatctaaccttcgaaaatgaaataatagattcaccaatttaattgaaaatctatggttgaattagagtgtcacttggcgatttatgagcgtttgtaaggtgttacttggcagcttataaatatttataggatgtttaatggacttttagtatataatagtatttttttatgaaacttctaagattttcttcaatttaagaatgccatatagtagcttataggtgtttataaaacgtttaatggattataccaccgcacggcggtagggagggagggaatttttacccttatatattagaacaatgctcatgacatgtcaccgattagtgtcggatcccacacccctatgacattttttgcacactttgataa

SEQ ID NO: 11627 - DNA, 166 bp, Oryza sativa
agcttgtctccttaatcccttgtaaacactttaaaaattcctgagaagtttgaagattcaacgaattgtattggctaattaagccctagtttttattggttgagctctagtcttaatttgtaaattcttggcaacgcaacgcaagctggcctaccaatgaaatata

SEQ ID NO: 11628 - DNA, 421 bp, Oryza sativa
tgaaaggctcaaagccaatttttatattgcagctctttttctcataaaattactctcgacagactccatctaaattgtgcataaattgcctaaacatcaactctccaaatacaattgcatacattgtctcaacatgaactctccagatacaaaaacatagatgcttaaaagaacacaggcaagacaaataaattcatttgagctaaaacctaatgaatttgaggagcggaaactaaatgcttgagacatcaaaatctactcttgcgactgctgctattcatctccatgctaggccaagacaatgtccttcagagctggccggatgccctcctccagtaactgtcggtactccaatgaatcgccacttgtttgtttcatctcgatgatatgataggaagtggtaacctcaaatatctctatg

SEQ ID NO: 11629 - DNA, 172 bp, Oryza sativa
ttgtatgcttcgcattcttgccttaccaggaacccgggttggctccaatcgaccccgccccggcgttccccaactattggcatgcgaggtttccctgaaccgactagttacttagccagggtgtcccattccaccttgtggttgcactttgattatgttcgatgagtttccc

SEQ ID NO: 11630 - DNA, 407 bp, Oryza sativa
  unsure (1)..(407): unsure at all n locations
gcgaactatgatactcagctttaagaagactgtggccgatagtgagaaggatcgtngtgctatatctttgacgtcgacaaaatcatcattccaaaggatcaggatgccacctcttgttcctagcggtcttgttgccggcttgaactggaaggagcgtatgcgtcccccaccgagggagcttgccattctagcatctatattgctcattttagtttcttggagacagacgatgtggggtttagcatcttggagggtctcttttaccgtcgctcttctggctggtctattcaaaccgcagacgttccaagagaggatgtcgatgaccggatatgtcatgagaaacaatctttctcaagggtggagttgtgcacagtgcataaaactatgttgagattgtagggagacat

SEQ ID NO: 11631 - DNA, 461 bp, Oryza sativa
  unsure (1)..(461): unsure at all n locations
ggacttcattcttgccaacatgacgangtcctttgttttttgaccattaacccatggtgtcattcattagcctcatcgtagtgggacctattccttttcacatctcaaaggagaacattagtctcaacaaatcggttctcatccttcacttgatgaccaaccggttgcatatgaaagatatggatatgtttgttgagtattcattaacatcacaagtgtcatatactcgtatgcaagctcaagtgcaaagatccgatataaataatatgtgaacaacatggatctaaaacatgcacaataaatgtataggaattgctccccctaagtatatgcatacaaagaaatatacangagagacaagtgtatgcatatagtaagaagaaccaatgcgggtttatcctatacacatagagaaggcatatgtagtaatgatgaagataaacanaaaacacataccttat

SEQ ID NO: 11632 - DNA, 165 bp, Oryza sativa
agcttgaatcaacaatcaaaattcatgatttcatatatttataatgcaacatctttacaagcacataggttaaagaataaacactaaacacatatacctattgcatttatcactctttctcaaataacctttagcacaaaacaaccaagagaatttttgaacttt

SEQ ID NO: 11633 - DNA, 453 bp, Oryza sativa
ggacctataaaactcagcttaaaaagagaaaggaaagctgctagagccataccctaactcttccgacggtttccggactcctgatttctactctattcctattacactagctagatactactaaactaaacttgagagaaatgagagagctattgcttgaggtgtgtgttgaagtgaatagagtgagctccttatatagaggtagttatgatggttctggaaggagaattgtccgaagtaccccgcaaccgccattaggagaagatctggagtgttcctgccaaaccccacatacaacggtggagaaatgggttcggacgaacctgtggccggcccaaccagcccacaatttggctggtggcctcctggacttctcttctccgcagacttgtgaattatggcccaattcatcgtgccaattctgagttctttgcccattcatacataagtatg

SEQ ID NO: 11634 - DNA, 171 bp, Oryza sativa
tatttcttactaactggtaaaaaatggcctgggtttttccatggtgtttagttaaatggtagaatgtgacaaagttaggtcattagcaaaatgagtgtagctcaatttgttaggtttcttatgacggacccagttacttgggttcaacttctagatttgatacgggtgttc

SEQ ID NO: 11635 - DNA, 453 bp, Oryza sativa
  unsure (1)..(453): unsure at all n locations
aactacgctnacattaatctcttcagttatggttgtgcacttttgtttattttaatgtccctgtgcaccttgattcctttattacattggattattctattgcaatgtttacaacttaagggatccaatctgcattgtgccttgcacacatgtcacaaattagtacgttacatcttcctttaattttgatatgaatatagatgtcccttttcaaaagatgataaaaaactgtatggtcaaaattgatttaagcgatggatgtatttgttttaatttgctgcgagctaattaatactatgaatttcttatagctcaagttctggaagttacaaaattaccagtcaatgtaaggttgtctcggtttagtgtctaaccttggccgttgcaatgtgtgtaaacaatatactactattaccattcacggttatctgaacgtgatatggaatgtacctg

SEQ ID NO: 11636 - DNA, 177 bp, Oryza sativa
gttattcttgatcaagcaaaacaacctggtaatggaagaacggatccgtatccagtaaagccaattcatgagaaagaaggcttattgttgagacttaccacaagattgccctcctcagctcctgacgccaaaacgtccacctgcctcttctcgcgcccttttctgcattctcatgcg

SEQ ID NO: 11637 - DNA, 460 bp, Oryza sativa
  unsure (1)..(460): unsure at all n locations
taccaaggggcgaanggccttcaagcaaagcatgaagccgtttttctatgtagagaatgccttcggctgagggccagggaggcctggcggaccgtggaggcccttcgccacctaatgggccggcccagaaaggccgccctaaggtccatgggtacaaaagacaatgtatacccactgtaatatccctataataaagataaccatgtaaattcccatataacaacctaaccctagaggtatgagcctatactagcattataaatagccccctagggccatataatgggggatccaaaattttttaccagttaatatactactttactgtccaaatacacctaaccaatatccacgttcttcgatgtgaacgtggtgctgttcgacaacagtaatagctaagaccctcggaatcccggagccatatttttttacataatagattgaaaaacggccttacatc

SEQ ID NO: 11638 - DNA, 361 bp, Oryza sativa
taatttgacacacaacgctcctcaatacattttccgaaacataaatataccacccatattggatgaaccactacttacaacatgatccattttaaccctagatgttcattgttcattgccgcagagtacaggccatacatactaaatcacttcaaggatgagggcatacatggtcaagctgattttgaccacaaatattatcaaattccaccataatatagtaaactggtagcaacaaatatgaccactatgccaactgccagagctgcaatatagccccaatatgtgtcctgactatacatgcgatgctagaaactcaagaaagtgaggagataaattctatctcttctgtggcctgagt

SEQ ID NO: 11639 - DNA, 170 bp, Oryza sativa
tattcttgggacttgatcgaagttcgcgacttgaatgatatatccaaagacatcaactctaaggcccactttgcgatccgcccatttgcttcgcgattatgaagtatatccccgagtgggaacgatgtgaccaccgtgaccgagtgtccttggaagtagtgagataattt

SEQ ID NO: 11640 - DNA, 453 bp, Oryza sativa
  unsure (1)..(453): unsure at all n locations
aactaagcttcttatgtatatcgctcaattcttttatgccttaaaataattttgttntaatggtggaacaaacctggccaatatttctttggttacatatggatatgtctacgatggtatgtctatatctggatatcggcagtcccatttgttgtaagtacaacatttattataacaattcatcccgcacattaacatttatgttatccctagattaaatgcaagcattcctaccaattatgttgctacctatgtttagtagaaatattgattataggcatacatatgattttccatgtttacaaagcaggattgttttagtaaaaataaacattagatttgtttttttttcagatgctacttgtggttgggactaaattggagcacattattactgagctagccaatatgttgctgaaaacatacagcgattgaggggagctcgtatatccc

SEQ ID NO: 11641 - DNA, 190 bp, Oryza sativa
  unsure (1)..(190): unsure at all n locations
gactcttgtcaggcatgtcatgcttttaaacaangcacacagcattaaaattgaacagatatcacctaacttatcgagttgcctgcgttgcttttgctaaatgaaaacacatgtcaataattgagaaaaaccattttggagtcatatcacctaacagaaagcacttgtctctatcacatgattcacgcct

SEQ ID NO: 11642 - DNA, 425 bp, Oryza sativa
  unsure (1)..(425): unsure at all n locations
ctaagctntatctgaatgacatcaagtgagtcgtgtgtagacatcgtggttgtctatgcatgccttctgnttgatgatatgcctgagaggtgatcgagtattttcgtgctttctttgtgtgcaggaagctgcccaagtacaatgtcactgccactctgcaggtggattttggtgtcctggtggactggtggtgtgtgtgtggattcttaaggccgaattttgtgtgacatggtttcgattggttcaatgtgcagggaacaggaggaccgaaatgagcaagagcacgaaggtgagaggcgtccgatgggatgtctgcgctctcgggaatggttagtgtgcttcacttctcaatcttctttgtgtcttactattagcgtggtggaatacggcaacaggaagaaagaaagaaaaaaatgcatggacat

SEQ ID NO: 11643 - DNA, 172 bp, Oryza sativa
ttttttttcttaccatattcatatacttgacggtgataaggatggcggaaaaccggtatatatctttgcagcggtaattggacgttccaacacgcaaatcctcttgagaaccaatgttttgggctccagtgagaaatataatgtatctggcctgccctccttcaaagagcat

SEQ ID NO: 11644 - DNA, 398 bp, Oryza sativa
acacaaaaactcagcttttggagctcatcagcactggcatctgcattctttctgtggtctaacaaggtctgcacatcaccttcctggagtttgcttacagcccaagttgggaagaaagaggactttccctcctcccctagatcagcattccttctgcctgatatgagttcgaagagcatcatgccatagctgaagacatctgccttatgagtaatcggcacaccactgatccactcaggcgcaaggtaaccccttgtccctctcattgttgtcaaaacacggctgaaatcccgccctaagagctttgctagaccaaagtcagacactttgggtacagatgacttcatccaaagtatgttatctggcttaacatcacagtgtattatgcaatccctaca

SEQ ID NO: 11645 - DNA, 164 bp, Oryza sativa
cggacccgcgaccctagagccaccgcaggcattattctcaaaaacagggggaaaatatagcgttaccaaaggtaaaagccgcgattaactaaaaacccggcaaaaatttgggtgaacggattgaggcaataccgatgatcaatctaaggctttgccttatacgt

SEQ ID NO: 11646 - DNA, 355 bp, Oryza sativa
tcttacacttttgccggtcttggtgcttggcgcacaccggatttgctacataggcgccgtactatcaagagaggtctatgaagcgagcttgtggatgatctagtgccatattagatcatatgcatgtaggtgcattttgtgggcttgtctaaccaagtgtgatgagttttctcaagtcctaaaccaaaagagaagtgtgcatgtccaatacgagtgagctgcatcttgcgggtatgatcggtggataatccttggagtgtgagccctttatccttgacttaaaatcgtgttcttgaatggatatttcatgggttggatgccctttgaatatctttcatagagtcacgaacgccaa

SEQ ID NO: 11647 - DNA, 173 bp, Oryza sativa
ttttctagcttaagatatcggacaacgatcatggaaacgctaatgggagggggcatggacaactcctgcagcagcttggccacggaagaaattgatccgcttataaatattaccaaagctagatatatgtgtgtgctttgtgggtgccaacctattttggtgtatggtttatt

SEQ ID NO: 11648 - DNA, 441 bp, Oryza sativa
  unsure (1)..(441): unsure at all n locations
tggaagtgtgcattgaagtgagtaaagtgaggtctttatatataggtacgnatgacggntaacgaagaggaaatgtccgaactaccccgcaaccgccataaggagtgatctggagcgtccacgccaaaacctgggatcaacagagggggttcggccgaacctgggctgggcccccctaacctggcctttggcctggctcctatcctggtcctcccctatccaatcctcagtgttttaggctgattttctagtattttgatgaagttcacaacccatccttgtatggatacataattgtcctcactttagtctagatttcctcccaacctcagtgtttatcacctgcatacaaatatacaccaacacttgtagaatatgtgagataagcacctatcactatgttggatgtttattatctgaaatttatgcagatgttggcag

SEQ ID NO: 11649 - DNA, 160 bp, Oryza sativa
ggtttttttctgctgaatttgtattatcaatataaggccaattactttgtcatgagtttatgttcaacgtgaatctagtttgtcatgaatttatgtttaaacagcaatataaggtttggccttttggtttggaactttggatggatgagctcatacaaaa

SEQ ID NO: 11650 - DNA, 436 bp, Oryza sativa
tgccgatgcccacaatccaatcatctccatcacattcttgtttgcgtcctccctgctctctcttttatctcctgatctactgacatgtgagagtagtacaaagtgaaagcttttggtaaaagaaactagcccaaagtgaaaactttgtctttagaatggtccatgttaaaacttgggtaaaaataactagaacaacgtgcaatttacttaataaaaaaggaaagaaaatcagtccttggcgcgcgccactccgtcgacctcgtcttcctcataatcggcggtcggcggcgtctgctccactgtcaggcaatgcaagcatctaccgcatcttcctctcccggattcgctaatccggcgggtgccacgcaacttcttttctaccggcctcttctctcctgcagcgagctattcgtttgcacagtgctctctcaaagct

SEQ ID NO: 11651 - DNA, 174 bp, Oryza sativa
ttttattctcgcgaattcatgaattatgatgaaaacggaatcacaaaaggttattatactcatcaagatttgctttggtctaacaaaaaaaatatctcgagataccaataaggtgccaaaactatggtgttttgccgcactttatagcactgcgttttgtgttttctgttgcac

SEQ ID NO: 11652 - DNA, 458 bp, Oryza sativa
  unsure (1)..(458): unsure at all n locations
gacactatgaaactccgcttatgtggttgttaagggcatgcacgangnanattnnatgntttgtatgnnaagatgacacccactagtgtaagagcaattggatgaaaagtttagcattgtatagaatccgctgtccatcctataagtggacgcatctatatctatacctacttacaaaatacataaggctttcggtggatttttcgtctgtcgactcgaatcctaatcaagcccgttggttgtccgagtctttcctattgaggctagggttttaccgagatctctggattagaaacattgccaaaattcacgtgatttcctttagaatatttggggatttcaatggggaaagtaagaggaggattatgggattccgttttcgcattaatttggtaaggaagcagcgaccacgccggatttaaaatggaggcgatcccgatttacgacaacgtaggaat

SEQ ID NO: 11653 - DNA, 365 bp, Oryza sativa
tggaggtctcccgacgtggctgatccccactgtctgtttatccgggttagtaatgtcgtgtgggtaaagtgtaccccctctgcagaggttaacaaactgttcgaacagccatgcccacggtcatgggcggatgtgaggtgattcctagcgtagttttgtctgactactgccttgtgaaatttgctgttgtggaatgggtttgatgtatggaaaatctgcggctgacgggatcagccaggcccgggtgaccgtttgaaagcttgtggccgggtgccaaccttgatcaattcaaaatactgatacattgcacatactccgaccggacgagacgcactgtctcatccgtgtcgtttgagagcactcac

SEQ ID NO: 11654 - DNA, 169 bp, Oryza sativa
ttttagcttgttatgtcagcaagtgtaccccatcgccaggtaagcctttctaaccagttaaccctctcacaattcttttgctcatataactcagggatcttgtcgatgatgctacacaggttcagaaaggaatcaaacacttcgtaaacgataacgggctgctgaaata

SEQ ID NO: 11655 - DNA, 422 bp, Oryza sativa
tcttcctttcttacgagggtatgtattcgatctaattttttcgtcctgcagtccaatctgaatcatcttcactaatccccttctctgtgtctgtctttagcatgcgcgctaccccagaaatctgtggacgaagtcacaaggtgtaaactgttttgcacatacatgtaaggacaatggcacaagaaatactcacccctccatactgttgtaaagcagagtaattgtgatctctggtcaatgcagtaagttggtcttctttgataccaaagcccaatgcaccatcaactggcggtgctgcaaagtcaatattgtagcaaacattgagtaacagcgagaacaaaacatacaaccctttcatggatgtactctaaattcttatcgctatcatatagcaactgcgcttcacgtaagcattcatagat

SEQ ID NO: 11656 - DNA, 171 bp, Oryza sativa
tattcttgcacctcacttgtagagttcacacgatcaccgttacagcgcagtcatccagaaggacaccatgaggtgtgtatcgtggtagcacgtccagatttcgtctgataggtgctctctcaaatggtatcggcagtgttgtatttgtagatagtgtcatgcctcggcaaa

SEQ ID NO: 11657 - DNA, 356 bp, Oryza sativa
  unsure (1)..(356): unsure at all n locations
tcgagtccagctcaccgtcatcctcttcctcccttctttttttaatcatnctcaccctccccctcagggtcgttctcatctagtggaccaagcacctccacagagttctcaccactcttcagaatatctttcacctcatcaatcccttcgtccgagatgaaattccccgttatgttcagttgcacaaaacctggcttgattgcgattgcctgggcaaagcaccgagctcccaccctctgcagcatattcgtgctaacatcaagctccttcagatcctggtgtccatcttccagtgattttgcaatcaccacagcaccatcatccttcagttcattctctgccaagggtcacttctt

SEQ ID NO: 11658 - DNA, 171 bp, Oryza sativa
tttttttttctagattttctttgaagttttccggcaggttgaaaccagtcatgcactaccctgttttcacaacaaaaagtgaaaacaaccaaggttagcctgcaaaggaaaatgactatacagaggtaaatataaagcattagtttaagtaatctctatcatgaatcttcc

SEQ ID NO: 11659 - DNA, 170 bp, Oryza sativa
tctttctttgcgcaaaggaaatttccattgtcactatcatgttcataaattccatatttattgaccattggattcccatgaagttccagcattatcttgcaaattgacaagaaaagaatagatggtggatgtcttccgcatgcatagtattgtagatagtacaatgtgga

SEQ ID NO: 11660 - DNA, 422 bp, Oryza sativa
  unsure (1)..(422): unsure at all n locations
tccaggcgcgcacgcggtctgggtatgattgggacacggtcactgtacggcaggagagcccacgagtccatgcgggccgtcgagggattccttgcttccgtccacgtcttctcgcatcggttcgccgttcaacgcttcagccgcgtggtcagccagccaccaacaaagactgcccgcgggatggactgcgtggtgatgatgccaaaacggggactcaaccctacactgttctaaattcgacagtaagaatgtcatatatggccctgtttagcccacataaaatttttttcaccctatcacatcgaacgttntaacacctatatgaagtattaaatataggctcaaaaataactaattatacagattgcgactaatttgtgagacgaatcttttaagcctaattgctccatgatttgacaatg

SEQ ID NO: 11661 - DNA, 170 bp, Oryza sativa
taatcttgggcgccagtcggctgactttcggcagtcggttggctttcggcagtcggctggctttcggcagtcggctcagcatctttggataaatttggctctgtggcagccggatcaggttcttttccagttggatctatatcggacggtttcctgcaaagtgtcctttc

SEQ ID NO: 11662 - DNA, 378 bp, Oryza sativa
  unsure (1)..(378): unsure at all n locations
tacctggggttaaatattttttaacaaaatttcaactaccaaggcataccatccccatttcaccatcacattgggcttcattatgctcatttgcggaagatcaattctgaaatatgcgccacgcgaataanacagtaccaatgcctaatatatttttgggcattttgaagtctgagattgacatctctggtgggaattgccttgtcaggtgatgactgtgagcacgaagaaacattcactgacgacgatgaggctgtggatatagacccagaggagcgggcagattagctcctgagatatccgctcctcctgaattaagcaggtagacacgattattcatttcaaaataattatgagttctcgtatcaccagttgcgt

SEQ ID NO: 11663 - DNA, 172 bp, Oryza sativa
tttttttgcctttctcgcaaacatcaacagttcagattatattacagaattgaatatcatatatagttccgatttgtttgcttaagattggaggatggttaactttgaccagtgctagctgtcagctaggcatggctttgtctgacgagcctttttctctgaatgaagtata

SEQ ID NO: 11664 - DNA, 226 bp, Oryza sativa
cattttaattgaccactagaacggctaaggctgaacataaatagcagcgatttatttaaggcggctggaaaaacctctatgaggtaaattactcggattctacaccacatatgcctggtctaaatatggcggatagtcatagcttaggctattagacttattcattaccataatgtttataatactcggggggtaaccattagagaatctcattcggatgcccgtc

SEQ ID NO: 11665 - DNA, 171 bp, Oryza sativa
  unsure (1)..(171): unsure at all n locations
ttatttttctnatatttgaacctaaagcatcaagggcaaaaaggacatttgcaaccaaatgtaacagtgaaatgatggaaaatgtaacggtaggggcatggaagggatcaaattgaaatttcaggggtatagaagggatcagataaatttcaggggtatgaaagagattga

SEQ ID NO: 11666 - DNA, 277 bp, Oryza sativa
  unsure (1)..(277): unsure at all n locations
aaacgacgaagatgttcgatattccaggagttgtcgataggagtaccgtcttcacgcttgagtcaatatgaacttggccgagtgacttctgagaatatgaatggcccttcccataacggggataacttgtgccgatctcgtgtagtttgaattattctcagaaccaggtcgccgactaagaacgctcgtgatcgaacgttgcgattatgataacggcgcaacccttgcaaaattcgagccgactgaattaaggctgcttcgcnggcccttttccagt

SEQ ID NO: 11667 - DNA, 171 bp, Oryza sativa
ttttattcttgccaggcatcgtcatatcatctgtgctcatttgctttgcttcagtttactgcagcaaagttggttctacatattgtgacatcgatctcgttcttggctctgagaatggcacaccgctcatgagtcatgattggcatattcaggaacttaaattgtccataa

SEQ ID NO: 11668 - DNA, 174 bp, Oryza sativa
ttttctaagctttgcctttctcgcaaacatcaacagttcagattatattacagaattgaatatcatatatagttccgatttgtttgcttaagattggaggatggttaactttgaccagtgctagctgtcagctaggcatggctttgtctgacgagcctttttctctgaatgaag

SEQ ID NO: 11669 - DNA, 464 bp, Oryza sativa
  unsure (1)..(464): unsure at all n locations
cgaactataaaactcagcttatatagctgccccgctgactntntaatatagtctttttgttgttcgggattttaagcaattgattggatacaatatcgatgctttttgccacgtaagtgtgcatctttattgaccaatattatggcttacgctgattatatattgtagtcattttttttaggcggttggtaaatcctttatgagtttatttactcggattctacaccacatatgcctgttttaattatggtggatagtcatagcttacgctattagacttattcattaccataatctttataatatttggcgggtaatctttagagtttttattcggatgcctgtcaagtgtgttcattcgtgaaccttttagagtggtaaccactcggattctntttattatggctaaaaaacagaccgctagaatgcctctttatgtgccgcatatgcttttgtcatatgat

SEQ ID NO: 11670 - DNA, 256 bp, Oryza sativa
aaagaaaaggaaaccacaacgaaaaaaggaaaacaaacaagaaaaaaacaggccaggcaacacaagcaaaaatgagctcgaaccacaacccggaacccggggaaccaaaagagacgaccagcaggcttgcaagaccagaaacaggggaaagaaagcaaaaaaccgcacgagaaaaagggacagagaaacacatactaatagacgaggcaccaccaagaggaaagggggaaccaacgaaaaccaagggagacaaaaa

SEQ ID NO: 11671 - DNA, 398 bp, Oryza sativa
tctgttcggtttccagccgatacgatacttggtctttttgtttccgacttggagatcaactcgattttacaccaaattggagtggaatgggtgcgttcgtttccaaaaatctcgccgtgactcacgtagaatatagtatcattttatgcaattttggcattacgtgggtgcgacgattttcaccggaacgaaatatctcaaaaagcaccaaaacaagagttttggaaatattggagtggattgggtgcgttcgtttcgaaaaatctatccgtgactcgcacggcaaactttggtgaattaatgccaatattggcacatgtgggtgcgatgttcttttaccggaacagaaaaaagttcataaagcacccaaacatgaggtttcgatatattggagtgga

SEQ ID NO: 11672 - DNA, 340 bp, Oryza sativa
aaaaaggggggaaaagagggaaagaaaaacaacagaaagaaaaaaaaaaaaaaaagagaaaggagaaaaaaaaaaagagaagaaagaaaaaaagaagaaaagaaagaaaaagagaaaaagaaagaaaaaaaaagaaaagaaagagaaagaaaggaaaagaaaaaaagaagagaaagaaaaaaaaaagaacaggaaagaaaaaaaaaaaaagagagaaagaaaagaaaacacgaaaaaagaaaagaaaaaaagaaaaaacgaataaaaaaaaaaggaaagaaagaagaaaacaacagaaaagaagaaaaacagacagaagagaaaagaaacgaaaaaaaga

SEQ ID NO: 11673 - DNA, 172 bp, Oryza sativa
  unsure (1)..(172): unsure at all n locations
ttgttttttagctncaaaaactcaactcttaacgagcgtgatagggacattatccggatatatcatggcataggaaaacaatgccatacatgggaggatattagcagacagtaagtattatttcttcagctcttatggaccaaggtcctgtacatgttcaactgcctagtca

SEQ ID NO: 11674 - DNA, 454 bp, Oryza sativa
  unsure (1)..(454): unsure at all n locations
ggacctatgaaactcagcttagggggagactctctgaatgatgtaccttgtttttattacatcacattgnactctttttccttgtgtgagttattaccatctgggttttctcatacaaagtttttaatgagacaatgttagatacaagcttatgccttatctcatgttttccccacaggagtttctctagagataaaacaaggcatggattactccttaaaccttacaggtttctgatagagtaatcaccaatcatattattcctatttttttcccacggcgtttcttgaaggaattaaacaagttgatctcaagatggactcgatcacaagggggagtgttacaaaagcatcatgagacatttttgatctcatcaaaggctcatcanagagcaacaatggcacgattcaagtgacttgtaatagccatattatggtgaatttgtgacacataa

SEQ ID NO: 11675 - DNA, 186 bp, Oryza sativa
tttgttttcaagcttatttccccacagttatgccaccaaaaaagatgccataaccggttacacttcattactagtcagccttaatcaattttgagcattattaaaaatcatactcattcaaattgtttttctactgcatagcctcccaattaaatgtatgccagcggaatcatactttccatcata

SEQ ID NO: 11676 - DNA, 164 bp, Oryza sativa
tatattttcagcttagggaggtggagggagaaagaggggagagttagggctatttataccagcaaggtgaggaggaggccaagcatggggttggtgagaggttaaggaccccaatcccaagaagaatatggaggccttcctcattcactttctccctctctcaa

SEQ ID NO: 11677 - DNA, 87 bp, Oryza sativa
aacaaaaactagctctgtgatttacgtgaaaatggctttatttttttttctatccccgagaacataaagttgggcgctgaaattgcg

SEQ ID NO: 11678 - DNA, 108 bp, Oryza sativa
cccgcggcagccaccagagagacgaccagcaggccaggtatatgcaacaaaccccaacccccaaaaaaaggagagaacaaaacaacacaacaggcagcggaaaaaaag

SEQ ID NO: 11679 - DNA, 457 bp, Oryza sativa
  unsure (1)..(457): unsure at all n locations
cttaaaactagcttagctcttcataatttccgatgttaaacttttgtcttcctgtaagtgagagccaatatgcaaaaatgcccctggatttcacgaggagtcaactttgcactccctcacgtagtcacgtatctatgccaggttttaaaaggagtccctatcttctttnttatatctagggggtatttagatccagggtgtaaattttcggtgtgtcatatcggtattatatagggtgtcgcatggggtattcgggcactaacacgaaaaactaattacataatccgtcagtaaacaacgagacgaatttattaaacctaattaatctgtcattagcaaatgtttaccgtagcaccacattgtcanatcatgaagcaatatcgcttaaaatattcgtctcgcaatttagtcgcaatctgcgcaattagttgtgttgtagcttatattaatacttcat

SEQ ID NO: 11680 - DNA, 171 bp, Oryza sativa
ttatttttgcatattgcgaataaagaaatttccaaagtattgggcatacgccatgcgcacactgctttaacagatgtacttaagtccctagaagacacatggtttcaccacacctggaaatatatggcatatgtggtgtaaaatccgagtaaataaacttataaaggattt

SEQ ID NO: 11681 - DNA, 443 bp, Oryza sativa
tgtgccacctttgttcattttgcacacgattattttatgcttacctgttaaggcttagggtcatttcttattttgcctagtaataggttgagatatattcagttatgctatttccccatgtcaaatctacaaattggttatgcaaacaattcgttctgttcctattgaaaggaaaaaaacataaggtaaaactttatcatggtgaataatgtcaagtagcatgaggtcagtcaaaacctgtgcaactgtggttacttgacaagcacaaagcaacaacatattttttcccctgaactctaaagctaattccatatcgggagaactttttcagcttgagatgttccttttgaagcatggcaaaacccaattctcttggaaaaacatagtgagtaaacaaatatgcagaatattcttttttgcgtagacaatatggcactaacatg

SEQ ID NO: 11682 - DNA, 172 bp, Oryza sativa
tttttcttgttaacggatcggcattgctcaattagcgcctaccgttgtgtagaatcctatcattaaactatggccgttccgaggttgggttttggatttcattggtcaaatttatccttcgtcatcaaaagggcattggttcgtgctagttgcaatggattatttcactaac

SEQ ID NO: 11683 - DNA, 403 bp, Oryza sativa
  unsure (1)..(403): unsure at all n locations
taggcctgacggtactattgaaaagtaccacgctccgtnttgntgctatggctatactccaaaaggaggcgaaaaattcttttgacacttaactcacctgttgctagattgaccacaattcgtgtgctactttctctagcagcctcacatggtcttctcgttcatcaaatggacgttaagacagcttttcttaatggagagctggatgaggagatctatatggatcaacctgatgggtttgtagttgaaggtcaagaaggcaaagtgtgcaaattgttgaagtctttgtatggtctgaaacaagctcctaagcaatggcatgagacatttgacaaaacattgacatctgcaggctntgtagtcaatgaggcagataaatgtgtgtattatcgccatggtgggg

SEQ ID NO: 11684 - DNA, 173 bp, Oryza sativa
ttttctttaggcaaataattattggaattcagcttggaaaaccttttgaaaggaggctttcgaagacatgcactgaaaaattggttttgaatgaagttttattttggaaaactttgcaatacattatttggaatcaaaatttcacaaataattttcagagaaaattttctttt

SEQ ID NO: 11685 - DNA, 458 bp, Oryza sativa
  unsure (1)..(458): unsure at all n locations
ttntctttattttcctctatataccatttccaccatatactcacacacacattgcacgatcttgatcttgagtatatttagtctaagtttttgacttagtaataaatgtgaatgcaagtatgccatgtttgatccctaccgagctctacatattaaaaccttagagtaggcatcagaaaggcaacaattggtgaggaattcattttgatacacttagagagactgagtgaatcatttgaggaacttagctttcttttgcaaaatcatttgaaaacttctggaataagagttgaataaagattgggtgactggtgctctaattactgttctatctttcanaacgctcaaggcaaggaaaagcagtgattcgtgggaatcaaggtaagggtaagccaccgtgccaagaatatttaatctgagagagagtacatataccttgcagagatatatagcatagt

SEQ ID NO: 11686 - DNA, 169 bp, Oryza sativa
tctgcttctttctgacgatgcccatctaccaccaagcaaaaagggaaaacaagcaagttttctgtgtctacaaatatcaaaactttaagtaccaatgagttcaaatcgaaacagaaatttaacaaatgactagggagatcacaaattcacagtaataaaataaagcatt

SEQ ID NO: 11687 - DNA, 453 bp, Oryza sativa
  unsure (1)..(453): unsure at all n locations
tgcaagngcatggtgatctgctgcattcgcgcattttattctctagctatctctctgctcttgtgatcctctctctgaggagtgctgaccactggtaagtcaacgcatggtccaacccagaattcacggtcaaactgaaaaatgtggacagaaactacagtgcgagtgacctcagtttactgcactatccctgctacagtgtcgtccatatttcttttattgtcattaatacgatctccacgatgttactgcttgatgcaattcttgcagtttatacacacgaattagaccgttactaacatttacagataagatatctccagcatagatcatgtgtgttcactggtgaagaacgtagtgatacagtggtgtatgtacctgcatcaatcatatcaacaatgagaggaaactagtcgagctcactttgattggttgatccgtggatgcatgatg

SEQ ID NO: 11688 - DNA, 171 bp, Oryza sativa
ttttcatgctttagatcacaccggtgtacgttgagatgataggtacaggcatgtgcccagagcgaaaacgtcggtacgggacggtgggctggttggtctgtccagctttgttcatcacagcgccacagctgcatcggagagaagagagcagtccagcgacaaggaccatct

SEQ ID NO: 11689 - DNA, 397 bp, Oryza sativa
caccctcccactctgcgccaaaccatatgacgacagacctcccccacaaacaggtcatcaggcctctcatgcgcacaccaagaactttcaagaaaacaaaataatggatcgaaaaactagggacggcaccttaatcaactacttctagtagttctcacatataaacacttatgcgattaaaaactgtacaaccataatatataaacaatcataggacaacaattaattccaatacatggaaatcaatacaactttaaccaattataggtgctcgcgagatgacatcaaccaattcaaacatcaaaacttaaccactgaaaaaactaaaatcaaacattttctcttaatatcaggacatactaaacaatctaaagatggttatattttgcaacagacg

SEQ ID NO: 11690 - DNA, 173 bp, Oryza sativa
ttttctagcttaccggcccgtatagtactatcgcaataaggtaggatattaaaagtgggtgccaattcaagctgtgacaactcacacgagaaatggctagttatgagtgacatgaaagaatatctttttctttttagaaaataagataaacccggcctctaaattcaaccgaa

SEQ ID NO: 11691 - DNA, 192 bp, Oryza sativa
tgggattcattagagctaacgaagcatttttaataaacggaactgcatatcatgaataacacaaaatgaaaaaggcttcaaaaacctgatatggctatgggccgatagccggcccaaaaccactctctatctctctacctccccggaccagacagaccagaccgcgccgccgctctcttctatctctcaaac

SEQ ID NO: 11692 - DNA, 173 bp, Oryza sativa
ctatttttcttccaaccgagcgtgcgcgagtacagttcttggaaatggaagtcgctgtgacacagtggctacaagtacgtgtactttctattctattcggtcgatggccatgcatgaacagtgcccagccgcttcgcggtgtagcttagcttagcttccatatcgacgagtac

SEQ ID NO: 11693 - DNA, 403 bp, Oryza sativa
tgaagtggccattgacggtgacccatacgccgactgttgttttcgggtggtgtccggtaggcctacgtgacatttaagacgacggggttgagtgcggagatactcacaatgggaggcaaactggtcggtgtcgctgggcattggtgaggcccaacagtggaagaggttcgacaaagatggggaagcaatgtagttgaggagatggtgggagtagaacatgagcccacgctttgaccgcacaggcatgaccatcatatgttcaattgatttctcaatcattgtgttgtaccgccaccacaagggaccatcatgtggggtccaagcttttcactccaagttattcctataatgcacgaacggcgaaagcagagtattgtcaatccgactacttcttgaaaaaaag

SEQ ID NO: 11694 - DNA, 172 bp, Oryza sativa
ttttatgcttcaggaagagatgggttctaaattgaatttcagtaccgcatatcatccacagacagacggacaaactgaaagggtaaatcatattttggaagacatgttgagagcttgtgttttagacttcggtggaagttgggataagaatctgccttacgcagaattctcg

SEQ ID NO: 11695 - DNA, 469 bp, Oryza sativa
  unsure (1)..(469): unsure at all n locations
ggaccttgaaactaagcttccaatatacttattcctctcaacataaccaatncnattattttttaaaactagatacattgaccttactgagaacctaccattctgatgataatttcatctaaaacaatcagaagaaggattcaactgaatatgcacaatagaaacgcacaattcatggccatataaaaaattgggatataaacatgatacattttattggtgattacatgttttttttaaaaagaaagactcatgtgattgtttttttattttttaaaaataatttattttgtcggtaaaaaaattatatttgttggtgattacatgttgttaagtaataaaatcgcttttttatccgattcgtgtgtccaaactttattcatgctccgttgctacattatcgcgcactactgtgcctggctgctgctactctgctctgtgggacgcccgtgggctgtggctgcttttt

SEQ ID NO: 11696 - DNA, 174 bp, Oryza sativa
ttgttattcaagcttagggatgagcaatgcgtcaccggatgcatggccgccctaagtcggttcatatcgaggctgggagagaaggcgctacccttatttaagctcctcaaacgctccggaccgtttacctggacggaggaagctgaacatgccctcgctcagttgaaggcgtat

SEQ ID NO: 11697 - DNA, 327 bp, Oryza sativa
aaaacgtcaaagtatgtaagtatatttggcatgtaaaaactataccaacaaaattatacttcaatgtattttcatataatgttggttctgctttaattaacaaaatagctagtagtcaaagattatatgtcttgaccttctgacttcataatacgccttataaaaagaaatggaggttactttcttgaaaggatctgaaacctatgccttttcatcctaatctaagcatgacatgtttccaaaatttgaagcatcggctttaatgcaatatgatgtatcccaataaggcaatcttacaaactgaagaaacaaaatactgcatgaatg

SEQ ID NO: 11698 - DNA, 168 bp, Oryza sativa
ttaagcttacaaaagagaagagaaaagctactagagccatacccgaactcttccgaaggcttccggactcctgatttctattctacttctattccaccagctagatactactaaactatacttgagagaaatgagagagctattgcttgaggtgtgtgagtgaagtga

SEQ ID NO: 11699 - DNA, 438 bp, Oryza sativa
  unsure (1)..(438): unsure at all n locations
tggacaagggtttacattggccgatccactggatgaagtatacataggtgatggaactaaaccaaggccgacttttataaacaaaaatatgagagccgattataaggttaagataatcgagctacttaaagagtatgttgattgctttgcatgggtgtaccatgagatgccgggtcttagccgtgagcttgttgagcatcggcttccaattaaaccgggtgttaggccttataagcaaccacctcgtcgttttaatcctttgctatatgaccgagtcaaagaggaaattgatcggttgttgaaggcggngtttattatgccatgtcgctatgcggagtgggtttctagcatagtccccgtggagaagaaagggagtgtaagattatagtttgatacacttagagattaaatatagctactccaagatgaatatatatg

SEQ ID NO: 11700 - DNA, 171 bp, Oryza sativa
ttattcttgattttcttgggtaggcatactcctccggtggttcaagttgggttgtggacagtggttgcactaatcatatgactggagagagaagtatgtttacaagtcttgatgaggagagcggaactcgtgagaatattgtgtttggagatgatggtaaaggaaaggtaa

SEQ ID NO: 11701 - DNA, 353 bp, Oryza sativa
gacacttgaaactaagcttgtcaacattctaatcttgcaactgatgccatggaataaatcattatatcaccatcataaatatcaagagctgtctagtacatagtacagagacttacatcctccgcgttagtcctgtaccgtccattaaccctaaggaattcgcacgcataatacccgcaaaggaccgttcctcgcggttgcttgtgacactgcaggacatatcatagaaaaaagtagttataatttgcaattagtgaaactattggaatacataaagtgagtggagtattaccggccaataggtacgtactagcagcttctcctgtgttcgggtctgatctccacccttgaac

SEQ ID NO: 11702 - DNA, 170 bp, Oryza sativa
tatgcttgcacatacccgaaactatcgtcccatggctcacctcgtccgggtggcaccccttcctggacatttcatcgagcatcttgcgcgcggcatacgacccggtcgttctggcacagcgccctgatgagcaggttgtaagtgtacacgttgggatcgacgccggcctt

SEQ ID NO: 11703 - DNA, 173 bp, Oryza sativa
tttttgtttcgcccaacacgccatgccatggcacgcacgtcgtccccgcgtcagcctacccctgtcagctgaacgcctccacgatgagtcagccctccggcctcatccccgctacgtgcacgggaattggcctcccatgctgccgcgcccttcctaccttgtcccgccgccac

SEQ ID NO: 11704 - DNA, 447 bp, Oryza sativa
tcgtacctataaatactaacttgagcgaaagagcgacttactgtcattctctcattgttgatcatcctcggcaagccatcaacctgttcgctcggatcaactgttacctgccatgactgggagaggggaaagactcgaagcatgcagaattcctccaccatgtcgcggcagctgaggcgagaacaaacctttctcagcaaggcgaactgtgcctccatagcgccgtccacggcgatcctgggtttccgattctgcacaataaccctgcgccggcaccgaagagctttcgccgagtcataactggcttcgaaggggatggtgtgatataaccacctcgccatacaatggcggtcccacttcgacatggcagcgttcaccggccagaagtcggaacattcgtggcgaacgttatagttcacatttccgaacaccgtcttcttcgttcag

SEQ ID NO: 11705 - DNA, 171 bp, Oryza sativa
tatgtttatggcattggcaaatgcagatttccagcttcagatggtgatttcggtcaaacagaggagcgtacagtagctggctgctttgtttgatcatgtaaggttccagctgttgtaatgagaattgaacaagcttatcaaatgataattgtggtccacaactgatacgtt

SEQ ID NO: 11706 - DNA, 453 bp, Oryza sativa
ggatcagctatctgaaggccggatcaaatctaataatgtttctgtttcgaacctcgcaagaatgaactcttggcttcaacttcaagaatgccaatgctggacctggatctaaagcacaagaagctagccgatctcctcatctattaagaacaaaagcaaagctgaaatcagcttcaagaatgtcgctggattgactatatctctgataaccatccctggaaccgatgctcaagatgctcaagccattgaagaagtataacaaattaggcaaagagctatatcagctatccagcgctacttgtctcaatgacgcttttgtataacacttataagctcttcgtaatcggctaaaatatttctgaagtttctcttgacaaccctttgtgccgaataatctaacttccacaattgctcaaaagtttgctaaatatgcatcttgtcgatatatgcgcc

SEQ ID NO: 11707 - DNA, 174 bp, Oryza sativa
tcttttttgatattggcaagacaggtgccaacctaaatcacactttccatggttaagcagcaaataatttgatgatataaggctatttcactacggacagggctaaagagtgtggtaatgtggttatctaataactataaaaaaaatccattttattttatttacaacacaact

SEQ ID NO: 11708 - DNA, 333 bp, Oryza sativa
  unsure (1)..(333): unsure at all n locations
gaaagggaacaaccaacanagaaccggtgttttttctactcaaacgggctaacacagggcaaagcagggagggtacaatcacaaaagcgagacgcgagaaaaagtcttcatagaaagcgaggcccaacaacgacgcccgatatacgtacgacaaaaacatcaaaggtcgcatcatgaaagcaaaacaaagggacgaccccacccgtgaccgccgaaaacagaaaccgatgcgagcaaaaaaaaagctcctaagagaccacaacggagaggacgcgaaaaaggcacaatctacacaatgcgagagcccccggaaccgaacaccagaaaccttac

SEQ ID NO: 11709 - DNA, 169 bp, Oryza sativa
ttagcttcatcaccttccttgctcacacgttcttgctgctgccggtgattgtggcatatctcccaatgtgtacgtctcaaattatttcaggaaagaagcaatctttcatacatggagtgaggagatatatgggttcgggatctcaggatcttacacaacgctgagtgcc

SEQ ID NO: 11710 - DNA, 441 bp, Oryza sativa
gtggatgaactgattaaatttagatatcatacgttttttatacccatggcaaatagaaattgttgttatatttgtatttgacaaaatgataatgccaatatatctattatagtgaacaccatgcctttttttgtcatgctttttttggctttgtacaaccttggtcgatgtagaagctaggagtttatcacttcctatatgtatgaaaaagtgaaactatgtgtgtgtaggtaattttgaaatgaattctaacatgtatatatatgaaacattttgcaattgtagtgcaggtatgcctaagatgggtgtatgagtgtatgagcaaggtgactgcataatcgtgaagagcttcaatgagaggaggttgcgagagaatctacgtatctttgattgggagctcactgatgttgaccaccacaagataagcacccttccggagtc

SEQ ID NO: 11711 - DNA, 173 bp, Oryza sativa
ttgtattgcttgagcaatgatatttttgggaagttgcatttgtcgatgttatttctagaattagagtgcttgtcgatggcatttcatgaattttctcttttagaaaacgatatcatcactcaaaatccacaaaagccactccatatcatcttttggattttaggaattaagaa

SEQ ID NO: 11712 - DNA, 360 bp, Oryza sativa
  unsure (1)..(360): unsure at all n locations
tcttgaaaccccacctaananactaagcttaagagatgtacacagtccgtgcctggcagaattcatattagatggtgcatgcgacattttggagctaatttttatagacaattcaggagtaagagattgatggacctgttcaagaagttatgccagcagaatcaacaaagaaagtttgatgccatatgggagcaactggatcgtttgaccactacacacatggaagaggttaggaaaaaacccatagttgccagacaggaggagccggagggacttgaacccattcctaatgaagcaccaagtattactcggcgcaggaagcgtggaagggccacgaagtgcttcacggagtgggtagaa

SEQ ID NO: 11713 - DNA, 173 bp, Oryza sativa
ttttctagctttaagagttagtgggttataactttatagtaagagaggattgggtagtatattttttctctttaacaaagcaggagtattggttcgattaaatatatactatcaagagatttttctctactactattgtacaagatatactagcttatattcttaatattttt

SEQ ID NO: 11714 - DNA, 341 bp, Oryza sativa
tatcttgaatacgttggagagaatgggccaagaaggtcatgatggatcggctaggcgcaaccacaatggccatgatgctaatagcaacatcgcggcaagggaagaactggagtacgctactgacaccgagcatgatgaggagatacttggtcgtccacaaagacaacagtgccggcagcgccatggcatgggcgctccaccacgacgggaggtacgtgataatgatgattctttatgcacgatcaagtttaccattccttactatgatggaaaatatgaccctgatgcatatcttacttgggagttagctattgatcagaaatatgcttgccatgattttc

SEQ ID NO: 11715 - DNA, 174 bp, Oryza sativa
tcatcttttcttcaaagtatccgaacacaacaagatgtatgttctgttcaacatagaaccaggccatagaaaattgtacataggttgtttctattaattttcaacaaaccactgcagaaacatattgaacagaagtgaagaaaaaggactgctaatgttgggtgaaataagatg

SEQ ID NO: 11716 - DNA, 402 bp, Oryza sativa
tgccaacatctgaactttggactcccatttcagcgttctctgtaactgcctgttcaccgcaaacacggaagctgctgtgtcttatgacatgtatgacatcctcaattggagggttcaaatggggagatgatgttctttccagtgattgaataggaggggatcctttttctagtgcgaagtttttcgttgaaacaaatggtgcaatatctgctactgatgaaagcaattcttgcactgtgaacttatcctcatcattctgtacaatggcattggcagtgctctgtgatatcttactgcagggcacgttgtccttgaaaatactcacctgctcagatatatcagaagatggctccaacgctaagttttcacacacatcatcattactagccatactcttctgga

SEQ ID NO: 11717 - DNA, 173 bp, Oryza sativa
ttattgcttcttcttgaacacccacttgcaccccacaggtttacacccatagggtcgctctgtcacctcccaagtcccgttagcgataatggaatccatttcactacggacagcctccttccagtagtctgcatcaggagatgcatatgcttctgaaattgacttaggagtgt

SEQ ID NO: 11718 - DNA, 420 bp, Oryza sativa
  unsure (1)..(420): unsure at all n locations
actcagctntatagtctnacagttggttggccactgcatccatctgtttttaaaactctaaattcgggtctgtttactttgatgtcattttcaaccatactaatttttggtaaagttgtcaaaaaaaatcaacatttagtttgttacataatttggtcaatgcataagaaatcgtaccaaaatcttgataaagccctttttttnttttctttttcaaatcaaagcttatcggggaggccgattggtggcactagagctgtagaggagaccacatactggtcggtgcagactgcagagttaacgatgacagatggatgcatggagcgggtggagtaatcatcacagatgacctgacctgttagaatatctgtcagctcgatcaacgtggttggagcatgtgccgcattgctctcactgaac

SEQ ID NO: 11719 - DNA, 176 bp, Oryza sativa
ttgcttttctaagcttatcctcttttgtttttggtccatttgtgacggatttagtaacgcgaacgatatatatggtgttgggcggtagctagagggaaatatcaaatcacccctaccacaatctctgtacaatcatgtttcccagtagaggaagttttgtgcttagcctcaacaga

SEQ ID NO: 11720 - DNA, 395 bp, Oryza sativa
tgaacaaataacagcatagtaattgccatgtgtttgttctaatatttggaagtcaacccataattatgattaatacatctatagtatgatgtgagcactaaagtagccatgttaaagcgactacaaaacattttgacatactatgtaccccctcagttccacactataagatgttttggcctctccattcttcatctagattcactaacatccttatcaatttggacacatatgaatcacatacatggatccatgcatgaatctattcaaaacccaaaacatcttataatgagtactttgtagttcagtttcctagttatgtttttttttctactgcgcgtatccatttgtctggatcataagcaatactactggagaagagagcaatatctcta

SEQ ID NO: 11721 - DNA, 174 bp, Oryza sativa
tgtttttcaagcttagacgacgagccccggtccaccagtgaagcttgttctaccatgcaacctcctagaagatagctcggattccactaaattacctctttccttgtggaggtgaggaaaaccttcacaaacttcccgcaactcaccacacacttgggggctcaccgggcgacg

SEQ ID NO: 11722 - DNA, 289 bp, Oryza sativa
cacaccgaacctattttttttttcgccgtacacccggtctgttattcgctattgatacactcatttatatcctgtatatgccaaaaacattagcgttagaaccaagctggaatatgcttgctatgaagacgcttaaaaggcttgatatcaaaaagaagatttccaaccatctgtctgaccacagcggcaacacaaacaacgcattataccacaccacacacctgacaggatacgaatatggggctcacataactcgcctattacgcagtggcaagtgaggcccaccacc

SEQ ID NO: 11723 - DNA, 171 bp, Oryza sativa
tttttttcagtacaatatttgaaatttatgatctttagaaaaataactttgattttttgtttgtctaaatgatttccagaagtgctttatcacttgaaattttgcaaatgaggctaatgatgattaccataccccttatctaatttaattgcagttggtactagctatagt

SEQ ID NO: 11724 - DNA, 171 bp, Oryza sativa
tcatttttggcaacgatgacacactgcaatctctttataggattgttgatgctagctgtgtgtaggagtggttccttggtagctagggttgatgtccttcgtgggtgtcgttcttgtttgttcattttggcgttggggtagcatcgcattaaagtcgaagctgctgtgtca

SEQ ID NO: 11725 - DNA, 171 bp, Oryza sativa
tctttttgctctggatcgagaggtaaaaggcaggtgatagatttgcatggtgaaggtgaaggtgaaggtgaaggagttggaggaaggcaggttgcagaacaaattgaggacaagcagctagtaaagaagatgaatgttttgatagaaattggtagtgaaatttttctgcta

SEQ ID NO: 11726 - DNA, 444 bp, Oryza sativa
ttcggaccttaaaactagctactacggtgtccttcgaaatacgacgaagtacttttctttgttcttaccttacacagcgttataacacaacatcttgcttcaatatactatgcaaggtaggctaaagtcactactactacaaacggcggaatggagggtgagagcgcgcttggaagctctgctctgaatggagactttttttggtgttgaggtctactaaactgggcaggacactccttttataaaggagaggggtggcgaaccctgtgcctcctgcttatcatcttcgctactgtggattcacgagagcacgctaaagatgaggcctttcctgccgagagttctattcttcacagggatatgtcattcactgccgagagtcgccgaaaattatatcttcaagggatatgcattcaccgcacctatatcgtcctttatgtttat

SEQ ID NO: 11727 - DNA, 172 bp, Oryza sativa
tttttttccatgacatgtcatggtggcccacgaccaccaaataaagaggcgtggaagtcatctagctttgaccggtcttgacgtggtcagaggtattactcaccgtgcacacgcaatagggagtgtgcacactacatcctgtcattccttatttatgatgcatgtcgcattg

SEQ ID NO: 11728 - DNA, 303 bp, Oryza sativa
aggtgggatgaatcgatgccttggcaaacacctgttgtacggctgcaatcaaatctgtggagctctgggtaggctcaaatatgtagccaacgaatagcaaatgctcacatcatagaatgcaaagttgaataattgttcaaagtcaagcaccgtgctggttctaggctagaacgtactatagacgcgagcctagacacaaacgataccacaagatagcactaggaacaactcatgcacaactctgatatatgaagttcaactcatacataacaatatattctctgttctttctttcttctttct

SEQ ID NO: 11729 - DNA, 174 bp, Oryza sativa
taatatttgagaattactctgcacattctaacttattcaggggtccgttgccttcatcactgtcccattcaccatcactgaagatgttgtacctgagaaacaattcattccatggacagatcgatctcaattgctcggcaatgtcacaattgagctcacttgatcttggcacaa

SEQ ID NO: 11730 - DNA, 407 bp, Oryza sativa
  unsure (1)..(407): unsure at all n locations
gcttcacattgctggaccatgtcgcatgcatctacgagggcggtagtgntataataacccctgacgaaaagctgtcccgaccaatgtccgactggtggcgtgtgacccacagatgccttcatgtatatcaaggaggaggtgtctgccgtcgtcggacgagacgcatttgagaagtaccccgattggtgctttcttgtatagatcgttgctgaccatacagtagatttttgctttacgagttattttctcggcctctgtatcgtactcgggcagatcctcgctgttgatgaatttgattagtgggatgcgccagtcatctgtggtctcgatatcggcaacggcgcgttctgcctttgtggcctccaagccaatgtccgaggtggccgggctaacttcaccgctaacct

SEQ ID NO: 11731 - DNA, 177 bp, Oryza sativa
ttttctagcttgactgttggttacctttggatttttcttcactactgcacttcaccactttggcttgcaagttattttcagccatatcgaaagcaggatctgtttggctttttgaagtggtgataacagtcttagaatccagttctttactattcgttagcctttcttaaatattct

SEQ ID NO: 11732 - DNA, 250 bp, Oryza sativa
  unsure (1)..(250): unsure at all n locations
agaaacactagataatgtgccacttggagttgtccatttcaatccatatattcaactcaccagtcagcttcaatgcccggtcaaaccttttcaatataactaggatgatagcnccgcgcgagatgtgtatttgtctgacagcgttataccataatacactggaatgaaaataagaaaggcgtttctattttaactcggggtaatggatatcttttttagaaaactcgataactttaatggcaaaaaaggt

SEQ ID NO: 11733 - DNA, 170 bp, Oryza sativa
ttatgcttatcgacttctacaatgattatcttaagaaaggtttcagcattagaagaagcagctatcattacatgggaaatactaaaattataaaaaacatgacattttgttgttctcgtcaaggtaaattctttgtttctttttatagttacattaactttcaattagag

SEQ ID NO: 11734 - DNA, 239 bp, Oryza sativa
acttcagcactactgtgtactcatctcaatatgagaaggaaaagaaaacagattaaaaatgtagattcagttaccaggcataatgcctggttttattttgtttcacttaagtgccttatcagctactttatgtctaaaaggaaccctgaagaagtgatcacaagtaatggcaagttgtcctaaagtgaggagtgaaagcatattatctggcacacacacgtttatgttgataattacaa

SEQ ID NO: 11735 - DNA, 171 bp, Oryza sativa
ttttttgcttcaagaactagttgatcttcatcctctgaccaaaacatttgagaaaatccagattgttatgcatcatccatatccttccctgatgcctccctttccctgttggctctggtggctcagaacgtctctcatgctcctttgggtacgatgaaaccgtgaatacct

SEQ ID NO: 11736 - DNA, 430 bp, Oryza sativa
caaaaataccagctataatgatttcctttctgactgcaacatttttttttttctttgccgtgtcagtcgggggctatcatcataataatggagtgtgattttttatcaatttaatttgcttacttggtttatcattgcctttgttgattttttctacttagtctgcgaagactgaaagtttttaatagcttctttgggttttaagctcaacaaagcttgataaaagcttttaagaaatcaaagacttggctagaactatcaagcacagcataaatacaccagtattgtacaaattaagccttcatttgctacatttacactcagtcagaatcagtcctttcatcatcagagataatattgctcggctgaaggtcgttgtgcggaatgctctaaacatacttgcatcttgtaccgcctctgacatactgat

SEQ ID NO: 11737 - DNA, 173 bp, Oryza sativa
ttttcttgcttaggtgtcgtacagacatgtgaacgtcatcttactttggtcttccggatggatgggaatttgatgatacccggaatacccataaagaaaacagaaaaaggaatgatttgctaggcgttccaatatttcgtcaatgaatggtagcggaaaatgatcctttttcg

SEQ ID NO: 11738 - DNA, 174 bp, Oryza sativa
ttgtattctcgatctgatcagcatattcattttccagatctaggtgactttggtgagaagtatactgtgttaagatgaaaggagtatgtgtggggggatgcgacttgcatatatgtcatgaagaagaacataaaacagatctggatgccatatagctgtaaggtttgtaagatt

SEQ ID NO: 11739 - DNA, 172 bp, Oryza sativa
ttgttgtcagcttcgagagtcagtgggcgccctccgatgtgacggaagacaatctgaaggagatggtggcacacggcgttcttccagcaaaagagatcatcgggtggcgaccggcatttggtgaggcattcccgacccccgatacacacgaaatcgtggtatttgctcattt

SEQ ID NO: 11740 - DNA, 448 bp, Oryza sativa
  unsure (1)..(448): unsure at all n locations
ttggcagattatgtagccgagtggaccaagtgtttttatacacgcctgcagaanaattggaatattggacaatgcattttgacgggtcaaaaaggatttctggcactggagctgcggtagttttgatttcccctactggagaaaggcttagctacgttttgtggatacatttttctgcgtcccataacgtggccgagtatgaagcactacttcatgggcaaaggatcgatgtatctctagggattaagcgccttatagtccgtggggactcacagttggttgtcaatcaagtcatgaaagattggtcttgcctcgacgataacatggctgcatatcgacaagaggtccgcangcttgaagataaatttgacggcctgtaattaactcatgtgcttatgcataacaatgaggcagtcgacaaactatctaatttccgatctaaagagaa

SEQ ID NO: 11741 - DNA, 175 bp, Oryza sativa
ttgttttgcaagcttagtaaacaaaatgtggtaaatctagacaatcttaatacatgaatcatcagaattttattgacatgactataattgactggtgtttaggcttctcgttgcacaccgttttgatggtgcaatgatgcatattagccataataattgatagtataagtttgtg

SEQ ID NO: 11742 - DNA, 365 bp, Oryza sativa
tgtagaggtcttaaacaagaggagctagagaggtgtatctctatgaaagaagaaaaacctcactgcttgagtcatcactagtcaagttgctcaaagttctagtaaaaaggaaagaataaatactaatagtactacttccagtgcaaacacaagggggaaaaatgatagtaacttggtaaatctagcttagctcacacagatgcaagtatttttctcaaccattttgaagagaggaaaaaaaaaaggagtgagaaaaatacacccagaagaaaacaaaacaaatcaccaaggaaacaaactgaataccccttcaaaactcaaaccaaaaaaccccaccaaaccccctcaaaaaaacaaagagaaaa

SEQ ID NO: 11743 - DNA, 172 bp, Oryza sativa
tttttcttgcaacccattaagaaggggaagtggccagtgaaaaacactgttaaccgtgtggcatgtcgattttgctgaactttagtctcttcaacttatagaaattgaagtattgatgaactttgtttatattattcgccgaacgtattatcatatcataatcatcttataa

SEQ ID NO: 11744 - DNA, 380 bp, Oryza sativa
acacaagaaactaagctgtaactctttcttgaacaaaaacagagcttttgtttctaggatgcgatagagttggaatgagctgatacgtaacgtgtgtctagctatataacaaggtgcgtgtggtactgcttagtaactgacaaatcttttcaccaggcttgttagtatccaatgggtaaagaacggcttcacattttcttccaaaattgacggtgtacgagaagttgtagattagcgcagctgtgccaactatagctagttgtgctcaactaccgctatgactacgttaccttgggagttcatactcatgtgaccttactgtttaagaccatacaacgtgtttacacgatacagtgacgaatcagatttatacttcatcg

SEQ ID NO: 11745 - DNA, 172 bp, Oryza sativa
ttattcttgatactctcgctgcacatttttggactatcattagctcaatgactatagaatagataccttgatgaccttcaagcaatgactcaacgattgattcaacagaatgcgtttatataaatttttgtgttcacttcagtattttatgtgcaacattggctatcttgta

SEQ ID NO: 11746 - DNA, 172 bp, Oryza sativa
ttatgcttaacggtggggcaacaactaaaaaggcatgaaccaacaactatgaggatgcagagctggcgttatagaggcttcaacggtgttgaatacgtgatgaaccaccccctggaccaatatgaaagtgcgtgctgactacatggaggctgacgggtgaatttgcaaaata

SEQ ID NO: 11747 - DNA, 173 bp, Oryza sativa
tttttctttactgtttgacaccttttaagatgcattgtaccaactcctaaaaagttgagtaactgcggtataaaaggattttaaggtattgggcacttgatcacgcgcactttggcctaagcaaaaagtgcctaagtccctaaaagaacgtgacaggccacacctgaaaatat

SEQ ID NO: 11748 - DNA, 174 bp, Oryza sativa
tcttttttgatcgattccccctctgaaacaagaagttctggaccgggaggtataagatcaatcacttggcgtccatccgatgcatcgactatggatatttcatatccccccttttctttacgcagtatttttcttactacacctgttgacgttgcattatagaccgtattgtta

SEQ ID NO: 11749 - DNA, 434 bp, Oryza sativa
tactcaagcttcttccgagcatacggctttctagatgtatatgacgatctctattatatggatcttatatgaaccgtatgatgaagtaccacatgagtggatatataggaaaggaatccaaatctgccgaatcgctcatgttatgatcttctacatcctaggtctccgcgctccgtcatctggcttattgtcttcatgtagcattcagaacgaatgactctatgaaattacgtcgatacttctacatattatgggtaacgtaggagacatccctattttcccccggcggtcttaattaccactgcttagctttcaattcgcctctgaccatcaaattacatgtgaataacccgttctcctctcttttgaacaaagggcgctttcggttctgtgcgtgcttaaacaaatttggcttctcatattaccatatctct

SEQ ID NO: 11750 - DNA, 173 bp, Oryza sativa
ttttttagctttttcaaagtcgagtttaaaaattaccccatcattcttctttttatgcatttcatgaattgtttcatgtaaaataaccacaccttccataatgtttcttcctagtaaaaagggtatctgagaaggtctaatgactttttgaactactagagctattctattag

SEQ ID NO: 11751 - DNA, 433 bp, Oryza sativa
atgcagctcgctttctccttttttggaattactctgacaagttaacaacagtccctcattcatttcaaggaacattttccggacgttcattgttacatttagaactgattggttccagtgccaacgagtgttcctttccagcgctggatatatgatcggcataatagtttggcgattttgggagatcaaatcaaacaagtgctcattgttccacaggaatagtgccctctcagcaacctgttaacaaggatgaaaaattgctcttgagtttccatgctactcaacaccgtgtgcaaattataaaaaattgcatatgacaaacaactaataagaatttccattcatcctttgcccatatcgttggatggcgcatacaagtactacgttgatctaaggcctcgtatagccataaaaactcacaccagtgttacct

SEQ ID NO: 11752 - DNA, 173 bp, Oryza sativa
ttttttagcttgtatgttgtgaataaagaaatttccaaagtattgggcatacgccatgcgcacactgctttaacagatgtgcttaagtccctaaaagacacatggtttcaccacacccggaaatatacggcatatgtggtgtaaaatccgagtaaataaactcataaaggatt

SEQ ID NO: 11753 - DNA, 353 bp, Oryza sativa
cacgccgaacacgcacttaacggtgtttatctttatgcgggcggagcggagactttcaaagttccgctagatccaagagtaaggtctcttggatgcgcgtcttcacaaccaagtcatcaacataggcctcaacattgcgccctatctggctacccaaagaaattcgagcagcacgttgaaaagtaagacctgcattctttaacccgaaaggcattgtccgataacaataagttcctatggcggtaatgaatgcagatatttcctcatcctccctagccatgcgaatctgatgataaccagaggatgcatctagaaaacacaaacggacgcaccccgcggcggagtccacaatc

SEQ ID NO: 11754 - DNA, 175 bp, Oryza sativa
ttttctttgcttaggattgtttaatgtgtttcctagtttatctactcaattataaagcgaaacttttataagtcatgggtttaattatactgccaccgaatatttaatagtactagtattttccaatacatccgttaatttgaaacatccctcataattagtttatgtgattgct

SEQ ID NO: 11755 - DNA, 307 bp, Oryza sativa
tacacagagaagtctacatcaatgactaggcatgacgatgagagtggtttttgaagaattagttaccactaccttccacatctttcagagccgagtccctccgtcttgccaatacggccttatctttctccacagcttggatccgttattccagctcaaatatcttggcggcttgcactggaatgcttcttgctggttgatatcacatggatggcaacataagtaagccagacaaagattggatttaccttttgatgaaccgctcaagtcaaagatggaatcttggagctcggcgatccggtctctc

SEQ ID NO: 11756 - DNA, 173 bp, Oryza sativa
tattttgcttgccattcacagcacacattaacccttttatgcgtgacatggggagttggagaaccattagtatgagatcttaagacatgtaaaagctaccgctagacatctatatgacagggaacaaataggtcgcaggtttggtggtatgaagaaaccaaatgccaattaat

SEQ ID NO: 11757 - DNA, 441 bp, Oryza sativa
  unsure (1)..(441): unsure at all n locations
gaaactcagcttctaatgggnggtgggtttttggccctgaccattctatttttggtgacattgatgcctatcaggtcaagttttttgcagagctatgtcaacaaaacgtaagtacattgcgtcatctttaggctattagcaaattatttttgtggtgaatgctatggtctacatttgtgaatatgttgtttcgggtcttctactgaaaacacaatttgatcgtagtacaccagtgacattattctacaggttagtaatatgtactatacgttgttatcatgaccacaaaattatgcataatttcacgtgaagtttaccgcgtgtgggtttcttattgactaatactacttgtaactatgcacgatggagaaagtgatctcgtattcttataactcatgaaccaaattggcttcttgaatggtactggcgtgataaaactgg

SEQ ID NO: 11758 - DNA, 169 bp, Oryza sativa
tcaagcaaaacaagcgcaagggcagacacataaacaagagccagacaacacacgggaacatcacaaacgtggccgaccaaagacgaacgagagacctaacccgggggaacatctgaacaacagcaaagagccaaccatcccgcaggaaacgacacaggaatcccatgca

SEQ ID NO: 11759 - DNA, 173 bp, Oryza sativa
ttcttttaagcttaactgctaaaacctaataaggttgtaatggttaaagtgtgtttctatcaaaaatttaggaaggttgaaagttgcaacaactaaatatgccatatgttgtctaatatggtagctaacatggaagtattaggttcctaacaaaattgcaaccttacggttta

SEQ ID NO: 11760 - DNA, 431 bp, Oryza sativa
  unsure (1)..(431): unsure at all n locations
tctcaagctcggagctctgatagatgcctattattatagtggttntcccaatgccacccattccccacaccgaaatacttgacggatcggattacaatcagaaagcagattgatgacgtcatccttttcttttcctctaccaatgagctgtgtcgtgctgcgagaaagttccttcacagacacagtgttggaatctctgttgaggtgagggggtaaactgctttcaggcaagtccttcgggccatcctcctgtatcacgccatcaaaaggtactgttttgctgtcactagtagtagaggcaccctccatgctggacctggtctctgatttcatcttagtggaatctgaattaactggctgagagaccacctaataaagaanatgccattagacaatagttaactaccttccaaattaagtacatttagttg

SEQ ID NO: 11761 - DNA, 346 bp, Oryza sativa
  unsure (1)..(346): unsure at all n locations
ctttatcattctggcatcgagctattatgccttatgatcttccctacagnatcgtcaccgcagtagagtttaaccaccaaattcgggatggattggtgtgggtcctctacgcctatgacaccagaatatctaaccatgaacgatgaaaggcatgagagaaatattggctagtaattgtgaagccccaattcttgactggaagggacaccaaaggcctctgccctccctctctatctatccaaaaaatggaagggcagagcttttttttggttgtttcatcttttcatcaaagagttgaacaatgaagatagatggcangtgcctgatcgatttgatcaggtcgtgt

SEQ ID NO: 11762 - DNA, 171 bp, Oryza sativa
  unsure (1)..(171): unsure at all n locations
tttgcttccacnacaaccgggatggcacaaaggcctagagctttcaagcgttcaccacgagcccataacaaaataaaggaggagaggcgggggcaatcacggagtgcctgggcctccaagtacagcgccgctgaccaccttgtcccaatcctcgccgccatcatcgccgcc

SEQ ID NO: 11763 - DNA, 327 bp, Oryza sativa
  unsure (1)..(327): unsure at all n locations
aaacagctatgtgggggaaaaactggcgccgtatgtttgaaacaaataggtggagaactgactgtgcaaacatacttttcaaaagtatatgcagtttaattactctattactgangtatgattgttctcactttcattactctattgctgaagtatgatggttctcactagtgttagctcacaccctttatgatttagtntgcactctctgaagaaaaaagagagggtgggcgtcggtcatatccaatgcatgaccagattaatagagctttatgtggatgtttgagcatataaccatgtctgggatttcccatatcctcttttaat

SEQ ID NO: 11764 - DNA, 171 bp, Oryza sativa
tctttcttcccttctccatcgagactcaactgagattgttgtggcagccggctggccactcccgttgccgataccaacttgttgcgtggttcgtggccgacggcgtacacatggcctgacgtgttggtcgcgttgtgcacagctagctctgctccacctttttctttgcgg

SEQ ID NO: 11765 - DNA, 433 bp, Oryza sativa
tcatctctatacagtcatcacccaaatatcctcgttgcacgttgcgtctaatcattgtcaatcaagctttccccatcgtgaacatctgctggtgatgaaatactaatcacctaaagcgatcacacagaatagtcttggcgaaaagtaatttcaagcaatcaatcgtcaacacgttatcccggatcacgtaaaagaagaggaagcgacaaacttgtgaagggcttgtattactaatgagccatacaaaagtttgtcaacgctgtccacttcactaagaagggaatggaacactattacgaaatccatttttcatggcggctatattgggatttcgttggctgaatttagagccgccacaaagcaaaggccagtgaaaatcacgatctagccgtcttaagctagccatcagcaaaaatccattttcgctggtggt

SEQ ID NO: 11766 - DNA, 186 bp, Oryza sativa
ttgacctgcaggcaggtagtttgagggtcggcgcattttaacggatgtggaagaagatggacgtcctagtgccccggccgaagccgccaagaactatgtacgtcacagcggttgggttgtgcgggataacgtgcctgtcagtacggtgtactggcgaagaacaagggcacgaggagatcatgagag

SEQ ID NO: 11767 - DNA, 176 bp, Oryza sativa
ttgctatcaagcttggacaagggattacatcggccgatccattgaaagaagtacatataggtaatggaactaaaccaaggccgacttttgtaaacaaaaatatgagagccgattataaggttaagataatcaatctactcaaagagtatgttgattgctttgcatggaagtatcat

SEQ ID NO: 11768 - DNA, 438 bp, Oryza sativa
tggacttctcttcatgcacaagctgacgaatgtgttatattgtatcttcaatatctttgcgctcccggcgatcgactaaactctgcctggccttctacagcttgaattggtgttgctcaaggtaaaccgctggagtaatggcatcggcataattcatctgggagtagagcttggatatctgtgaaccttgctcggatcgagccacaattggtcaccaagttgtctagcgatgcttctaaccgatgagagatatccttaagcgttctcttcacatcatccgacagaggagctatggctctactagtggtgtcttcctctgtttatcgagaaatccttgatgttaatgaaaacagatcggcaacacctgctaagataatatttggatggttacgatcacacatgactagccatctcaaattgtgtaacacaacttactgg

SEQ ID NO: 11769 - DNA, 174 bp, Oryza sativa
tattttaagcttttaacttagcaaataaagtttagactcaagtcaaagaaaagatcaaaagtgaaattactcaaaggaagaatcgagaagagcatgacttaaaatatttcgcaaaaaattttccctaaaaattttagtccgttacaagggctgccgctattgacaggatcatct

SEQ ID NO: 11770 - DNA, 176 bp, Oryza sativa
ttatgcttatgataaggcacaatggtcatttgtacaactagactatgaggaatgaaagggctcacctcctaaatggtgtaagtaggattgcctccttttattcaaggtgggacatgttggtaattaaagctcaatgaacaaactggtaataattctcaaacgcataaaggtgctta

SEQ ID NO: 11771 - DNA, 174 bp, Oryza sativa
ttttcaagcttgccacattctaaaagatgcagatcaacaacacgcaacaaatctaggcaatgttctgaattatccaactgaaagtaattaagtgtatatagtctcactttagagcatcagagcattttataggacaccaaacggctgatgcttccttatctcaactaaattatt

SEQ ID NO: 11772 - DNA, 357 bp, Oryza sativa
aggggcggattcacctatgtgtggtttgcaagctctcatggatcaatcatattgcttgctatatatactaaacatatattctaccgaaagattggaggtctagttgtttattgagcaattaggcactggatcaattatatactctctccatcccataatataaagttcccacatatttcaagatttcacattcaaaacattttaaccaacgtttagtacaatataaattaaattttacttgctaaaaattatatcatcgaagtcaccattgaaattaccttcatatgattattatttttgtactacaaaccttatagtatattagaaattattagacaaacattagtctttgagacc

SEQ ID NO: 11773 - DNA, 176 bp, Oryza sativa
tattctagcttcagcattggcagccaggggtagacgttccctcaagatttaagccaccttttatcatcgaagcaatggacattgatgagccaagtgcaagtgatttccagagacaattcagtgacaaaagtgcgtctacattgagtacagttactgaatctgatatcatttcttca

SEQ ID NO: 11774 - DNA, 368 bp, Oryza sativa
agatgggcaccacaattcttctcttggattggcaactgccccaggatgcgggaatattggccccctaataacatatgtggctagcgttgcgggtggcggccacaatgggagaaccataagccctgccggaatgtgtatgcctactcgtgcatcccctgtgaatatgtcgggaagtggggctcttaatataccacgaacaaaccacaagggtggtactcatcaacagggtatataccaaacacataaaccccttgtataaacgcacgcgcatatgttctcaagcctgcgttcttcctgaattgaggacgaaacgacctaaaataaataataataaaaccacatactccctatttttaataagacaatgg

SEQ ID NO: 11775 - DNA, 238 bp, Oryza sativa
ccctatagtgagtccgtattaacctctagcagttccacctgcaggtttttcttgcccagaccgcaacgggactcatgtgcgaattacctaacttccctcgcaatgattgccatatactagcctctcacacactgaccacatttccctctcggggctagccattttacccttcacccgaccatccaagcctgtatcttgcgcctctccatcccaggagacgaacacccttgccacacat

SEQ ID NO: 11776 - DNA, 172 bp, Oryza sativa
tttgtcaagcttgggtttgagccctgcatgaccaggaacatcaacaacatgaacaggctttattttgcttttctgcagagaacaagaacagagatcaagccatctgttcaattgcactttagtcagcaaatacatgtttctacataaccagatagtcttcctttcgctgaaa

SEQ ID NO: 11777 - DNA, 439 bp, Oryza sativa
gcacttttcttctgcttttgatatgtgctcttatctattcagacatgtacctcagggtgatttattgattaaattttgtttctacagctattgcagaacttctcgacaatgctgttgatgaggttttgatttaaatatatcaatgctaaactctgtcaacattatttgtgtttcaattctgttgttttacatgtttaacatggaaaaggtgaacaatggagcaacctttgtgaagatagataagataaaatgttctctcattgatgagtattcattggtaatacaaggtatcattcaaatttgtactatctaattgtgttgctgatgtaatatgtttttctctgaaggaattttctgcatgaagttttttcctaagtagaaatattgtgtgtattggttattataactgatattcttaaattctatttcacgatgatgg

SEQ ID NO: 11778 - DNA, 175 bp, Oryza sativa
ttttttgcaagcttccgcgcccagtcctttgcattggtggtatagtgaaggttgaactattgggcagagtacaaaaacaggaagcagatgataggtactacatatggtaagttcttctcaatgtttagcctacttatgttgattggtcaccttatatttgctgctatagttttgt

SEQ ID NO: 11779 - DNA, 384 bp, Oryza sativa
  unsure (1)..(384): unsure at all n locations
ctctgagtgcttcatttctggaaagaatataataaaacaaatcttatacgcactgtagtactatgaaacacgcacaaaataaaaggagagcaaagagctccccagaatctacaaagtggaggaaagtttcatttatcatgaaagcaagtaaagagtgcaaatatgtctaacatataaagtgaagagtacctttgcattagtagagctatgtctgcagcttctggattcctctctgccttctgtaccccatatatttggcaagtaaccacatatgtaaatntcatatcagcctgagcacgtgcctcaggagacagcttaaaatgtatatcatccagaccaagaccagttgtagcactgcagattcaatatctagcaaagggaaac

SEQ ID NO: 11780 - DNA, 291 bp, Oryza sativa
  unsure (1)..(291): unsure at all n locations
tatgcccgtggaaccaattgttgtacggaaacacatgaatctgaaataatcatatagctctaagcttaatctgcgcaccatgcatcgggcgtaaagttaccatactatatggtgcatgagtatacgacggcatgaactcaagactgaagcactgtaagatcatacacaatgccatcttggcctcaagcaatgcgaaattntgacctatgcaaatacgtggcccccaaccgaatgggaagaacgcgcccggattcttggatgccttggagatcccctcaacgaacctatttg

SEQ ID NO: 11781 - DNA, 409 bp, Oryza sativa
tgaaggcgatgctgcattgaacaaatttttccgtgacatctacagtgatgctgatgaagacatgcgacgagcaatgatgaaatcttttgtatgtctttctttagcacaattgatgaaatgtttataactagtgaccttgctgacagaagtgcgtttagtaagtatgaactttgtatacttatacatcaacgatgtgcttgtttgcaggttgaatctaacggtactgttctgtcgaccaattggaaagatgttggctcgaacaaggtagagggaagcccacctgatgggatggagcttaagaaatgggagtactaagatctcggttcgtgcatgctgtaaattcgttatcgtcgtgagtcatcacttggctggagatttcgcgcatcattgtcaagttggattttgtgtg

SEQ ID NO: 11782 - DNA, 453 bp, Oryza sativa
  unsure (1)..(453): unsure at all n locations
cgcagcagcagctgtgaatgaaagatatgagagtggcttatgttattctttacattaaaccactaagaggagatgagggtgggattacacttgtgcaatctcactatgtggacaaagtcttgagtcgctctggttatagtgactgcaaggcagctcctactccttatgatcccagtgtgctattaaggaaaaaccgaaaaatagcaagggatcaattgagatactctcagatcattgggtattgatgtacttagctagtgcaacgaggcctgacatctcatttgctgtgaacaagatgggccggtttgttcatatcccggagatgatcattggcatgctcttganagagtaatgcgctatctaaaagggatattgagctatgataatcactacgtcgggtacccacaagtgcttgacggctatattgaatcaaactggatattcgatgctgat

SEQ ID NO: 11783 - DNA, 425 bp, Oryza sativa
aacttagaaactacgcttacaaggctgccgaggagagaaacttggcaccactattactcctatattcagatctttgtgaaatgaatggggtgttgacgacaggtggaaaacgatatttcatgacattgattgatgatgctactagattttgctatgtgtacttgttgaaaacgaaagacgaggctctagactattttaaaatttataatttataaggcacaagttgaaaatcaacttgacagaaagataaaaaggcttaggtctgatcgtggtggagagtttttctcaaacgtgtttgacttattctgtgaggaacatggcatcatacatgagaggacgcctccctattctcccgagtctaatgggattgctgaaaggaagaaccgcacactgactgacttggtgaatgccatgttggacaccgc

SEQ ID NO: 11784 - DNA, 396 bp, Oryza sativa
gctaatacatatttttgccttactgaggtgatcttttgatatctagtgaacccgcaccaatgctcgaggataaggagaagtggtgagtgccatctaatacaccatgaactggtgtgcttctctgagtacctcagtaccaggaacagctgataagaacatggttataaaactttcagaccaaagatcatttcaaggctccttgttcttttgatctgtgaagaaattataacagtgtcagctgtgacctatttatcaaggaataaactatacattttttttgtgcgtgttggtactatagtagcaagtttaaaaccgaggctgaccaattgtcataatattatatttcctgccataaaatttagcatcacgtattgacataatatgattaactctcta

SEQ ID NO: 11785 - DNA, 413 bp, Oryza sativa
tcacatttcggtggtttgccaacgaagaagtttgatggttagctggtttcacggcaaaaaaagcggaaaagggcaacaagtcttctatcgtggcatgcacaagtaatgtctggttgtagcaagacacatcatacaaggtgatgattttggattagaaaaaccctaaatccctaatatgaatatactacaaatattcctttgcttttcagtggagtttgcttttgttgacagatgggctaataattactgtaatatttctgcagaaaacctgagttggattgggctcatgctaccaggagattggttgagaaggttgtacatttttttcaagttgtataagaaccctttctattgtactgtatcattttacttggactgacgagcttattatccacaccaggtagatgctgaaa

SEQ ID NO: 11786 - DNA, 398 bp, Oryza sativa
ccttcttctgtgggtactcttcagaccggatgggccttgcatcactccctctttccactataatcagcgatatgtcttcagatgaagctggggatgagtggctctcttgtattcgctgcaaatacacactttttgacgttatcatcaaaagaagcagaatcgttcatgataccgaacttttttgaaagtatttcttgggcgaaactttcaaatttcgcatttgcacgtcgtttgcggagcagtcgttcactgtgacgctgagcagaggcaatggcagggattttcaccttaacgcgggaaggcttcctcacgttcacatccggaagtgggagaagtggtggctggatcggcgttgcgatgtcattgatgaactcgtcgatctgtgaatcctttgctgc

SEQ ID NO: 11787 - DNA, 399 bp, Oryza sativa
ctcccctaccgggcaccggatgagccgtgcgtctcctatcttccccggcctatgcccgtcttcaccaccaagcgccttcacatctcttctcccctgccggtagccgcccgtcttcgccattgagggtcgccaccgctcttctcccctgtcggccgtcggtcgcgccacacgcctccggttctcccctagccaccgcctgtcttcgctccggacttggcggactcggacctcggcacggcggcctactcccgtgtctttgtcaccaccgcgttgcctgttgccgtgtagacccccgattttggaaatcagaaatcttctgtgtttatccgtaccaatccctggatcagtagttggtacacacatacatagttggatcacaacatatcacgaatgaattta

SEQ ID NO: 11788 - DNA, 448 bp, Oryza sativa
catgcaagcttctcgggttcttggtctctgcccgatgcattgatgccaaccccgatattattcgagctattgagcggatgcgcccccccagcaaacttatggatgtgcaatgcgtcaccggttgcatggccgccctaagtcgtttcatatcaaggctgggagagaaggcgctacccttgtttaagctcctcaagcgctcggggccgtttacttggacggaggaagctgaacatgccctcactcagttaaaggcatatctcagctctcccccggttctagtcgccccggagccaaatgagcccctgctactttacttagcggcgaccccccaagtagttagtgcagcattggttgtggagcgcgatgaagacaatcctcatttcgtgcacccccactctgtgctaacttggcccgggagcgagcggggaggatatggccccgagtcgga

SEQ ID NO: 11789 - DNA, 415 bp, Oryza sativa
tgactcctgcaacgggtcgactccactctacaggcaatttcttgactgttgtgacgataccaacttctctgagaaggctccaactgagaaggactctagctctggtgtggggaagagagagcaagactgagtactacccactgtactcagcaagtcataccgggagagaaggcacgatgcaagatatatccaaagaaggctaaaggctcatttgcataaagcaggcatttaaaagcagtagttgaaagcagtaaaactggtgtagtaaattaagcaatactgatcatcacagtccaacactacaccacattgcaacaggcccaaccaaccacctgaactacaccagtccattaagccaattattaaggatgagactagtcacggtgaatctggttgatcgcccataaccgcgggc

SEQ ID NO: 11790 - DNA, 438 bp, Oryza sativa
agcattgtgtgactctgctgtttgtcaactcttcttcacattcttgaggtcctgacagcactaatctgatacaattgatatattcacgctgtgcaacagttgcagcttaataaaatgaatgcatcaacgtcggcgcaccaaatgaaccaaagtcaactggatgtccagattgagacagctacagagctcttcagaaatcttgtaatgaattcggatacagaaggtcgctacctcctcctcaatgcgattgccaaccagctgtgctatccaaacaaccacacacactatttttccttcataattctttacttgttttctgaggcacaccaggtatcggatgactacttactatgtggtctcccttctttgttgtatgcaatatacaccctctctgatgggaactatatctgaaatcgcaggaaatatttcatgagcaaa

SEQ ID NO: 11791 - DNA, 443 bp, Oryza sativa
agcttcaaaatttcttcaaaaaagaggggatgtcatgccaaaattaatattgaatttattttggtgattacatacaaatcggaggtgcctaaaaggtttgcaacttcatcctccaatgttttttttttgtcatactacatttacacctatgttttgcacactttttttgtctccaaaatttacttgtaagttgatgagagagaaaatgtgtgtggggaagaaagaatatatagaaatttagttcatttgctaaataaggttttataaaatagttgagaaggaaaactctcgtgaaagttaatcttaaataatagaaaacaaattaaaatgaaaattaaaagaagtaaaacacatctaaaattaaaactctaccaaatagttttaagaaatatttggtgtaatattctatgaaatttggatgaataaagatatttataattatt

SEQ ID NO: 11792 - DNA, 405 bp, Oryza sativa
  unsure (1)..(405): unsure at all n locations
tgtggctaactattacagcagaagctatacgatgactcttctctagtgttntgctatagacttaaaccatctatctaatctatacttgagaactaagttaaaatgagattaacttatatgattgaactcccggcttcagtaagaacatcaaacggactctgaaaaaaatgtggggttgaagcaagggtgagtacaacatactcagtaagctattatattaatcaacaatgaatgcatggaataataatatttgagtagggttagatttacttgcagaatgcagagaatatagaaggaaagtctataatgttttaaatgcaacagtatttaataaagtttgaaattatgtttctaaccaagatatcattgtgagtcccaatgcccgataaccgtgagcacggctat

SEQ ID NO: 11793 - DNA, 406 bp, Oryza sativa
cgctaattccacccactgtctctctttcatactgctgttccaacgctggcacctactccctccgtcctaaataaaaatccaatcttaaggatgtacctgtatatacatgtcatccaggtacaccttctgaatgaggtttctttaggacatggagtagcaggcagcaagcaggtcgctatggtgttgtgacagcctgtgtccatgatgctagcaatgctcctgttgctctgcgccgcgttcctctacaatgcacctttctgtgagttctcacggcgacagaaggctcgcgacacaatctgttgccgctgcctatagacatattggagagatttgctccggttcaacaaaaagtaccttgaggtaccaatacctcacgaaaccaaattctttccgatcgttagatcta

SEQ ID NO: 11794 - DNA, 443 bp, Oryza sativa
atgctagcgttgaagacatgcctttataatcaattctggagcatgcatctaggataggaacttgattacggtgtgtcacatttcttaaagcattacattctgcaataaagctcttttgtgcgcccctcgtctctatgctgaataccttcacaacaaccacatcattgcattgaaataagtctccttgatatacacaactgaaccctcccttgccaatcaaaatggacatggagaacctctcagatgctcttgcaagatcattgcaaaacactttgggaaaatctgtatcagacagtggcaaaaatatagagtgtccctttttgtttcccctcatgagcagtaagaccaattcaaccaataagagtgatacccagatggccaaggtatcactattttgatttcaatgatttgacatgctttcttgaactaaaggtgcaatggat

SEQ ID NO: 11795 - DNA, 400 bp, Oryza sativa
taattgattcaaccaaggcaagctattaacaaagcttttatttattcatttgaatgcgacataagcagtacacaatttttatgcaaacacatgaacaataacaacaacgaattgcttaccaaaatgagcaaatgtgaaactaagaaaccacacataccaggcttgtagaacatggagaggccgaaatcagtggccttgaggggggcgtcctctgcggcgctggcgaagaggaagttctcgggcttgaggtcccggtgcatgacgccgagcgagtggcatcccttgacgacagcgacgatggtgcggatgagctgctcggtggcgcgctcggtgtaacggcccttggcgacgatgcggtctaagagactcgcgccggcgcatagttccatgacgatgtgga

SEQ ID NO: 11796 - DNA, 434 bp, Oryza sativa
agccttgaatattggatggtgtttcattctattctagattggtttattgtgagacagatggagcaaagatttttttgaagtttttcttcttgagttttcttgtttcagccttcctaccctttttgcaaccttgtgtgatataaataagggattcaaccagcttggaaaattttcttgtacacggaaattgtattccattcaaaatccgtttatcaagcatgtgggactactgaattttttgaaccaatcttcgtatcagtctccactgcatgtttgtattcgtgaaacttctccatttgatgcgcctcctccaaagcatcacttcaatctctgaaatttccataacagagttgagaggtttcaaaattcaggttgaaaagtgaaaactagacttttggaaaaacgctaacaagtgtaaattatactctttctat

SEQ ID NO: 11797 - DNA, 400 bp, Oryza sativa
tttgtcccaagcttcaccaaaaacaagagcgcaagctcttaacatatcttccaagatttgattgactcgctcggtctgaccatcagtttgcgggtgataggccgcgctgaaattcaaacgggtccccaattcttcctgcagcttctgccagaactttgaggtgaactgactacctcggtcggatactatcttcttgggtaccccatgcaaacacatgatccttgcgaggtacaattctgccaatctctttcccgtatagggggtatgtactggtataaagtgagccaccttggtgagtcgatccacgactacccagattgaatcatgtcccgatgatgtccggggcacgcctgttataaagtccattccaatctcctcccatttccattccgggatttga

SEQ ID NO: 11798 - DNA, 410 bp, Oryza sativa
agcttcaagttagtacactctacacactttctctgtttctttgagaaattgcacattcgtttcagtagatatatattatatatatttatagggaaatttacttttaattccgtatattatgttgatttgatttgtctaaattgggctacacatatttgtattttcttggatcaagttgattcgtgaggacctctgtctatattatagtaaaatttttcagtccttccgaaagtctcaaggtagtttcctctggtaccaaatattggatggtacaattgctcaaatattatactaaaaattttggtatctcgatacacctactacctgatactacaaaatatggtacatcccttaatgatggtaatatcacttttatatgcatgcgagtccaatgttaaatcaaacatcat

SEQ ID NO: 11799 - DNA, 389 bp, Oryza sativa
tgtcaacggttcagacatgtgcaaatgtttcctgttttctttttgaatcctatcatcaaaccatggtcgttccgaggctgggctctggatctcaatggacaaatttatacttcgtcatcaaaggggcataggttcctgctaattgcaacgcattacttcaccaaatgggccggatccgtgccgctcaagaatatgactcatacggaggtaatttacattattatgaaacatattggccatagattcagaattcctcatacattgactacggatcaaggaacttattttatgtctaaggaagtgaacaattttgccgaatcttatggtattcgaggtatttcttaacgaccttactagaaatataatgtccgaccatggcgcagaaatac

SEQ ID NO: 11800 - DNA, 432 bp, Oryza sativa
  unsure (1)..(432): unsure at all n locations
agcttgattctttggtattatgtaaatgcttatggattgccttggttatagagtctacaaaatgtagcttgaatcaagatatatggtgggaaacatgcatttgcatgtggctatataattagcaatatattaaaccattcattttatttttgcctgaatcatatgtttgatttgtactattatagttgtagcatttgcccatgtatttgatttgtactattatagttgtagcgttagcatgggcaagttacaaaaattgcctgttgatgatatgaagaaatatattgccatgcttgaaaaccctttatctgccttgccttgcatatgctntatcattcacaaccagggaagatgctntatcattcacaaccagngaagatgctgccaggtagtcctttcttgatccatagtagagcttatacaaaatcatat

SEQ ID NO: 11801 - DNA, 384 bp, Oryza sativa
  unsure (1)..(384): unsure at all n locations
ntgaagcgagtccagctagggcagcgtttgtccaccttgttgatagtaagatgaaggtgcaaaaaagtaaagcgaacaaacacactgcaaggcgtttcgataagcataaaaagacatacgacgtcacagagaggggtggtgtaacgcgtggtggtgttagattcggcgcaagagccttcaaagttgaagttgacgggaactcatgttcttgccaaaggccattgctctaccatatgccttgctcacatcttatacacgtttatctgattcatgcaattgatgaggaatatcccaaccgaatgccgtatcagttctcttcaagagccgttgtgaacacatgggcaagtcgctttgagccatacctcgaccccacacagtggctac

SEQ ID NO: 11802 - DNA, 114 bp, Oryza sativa
ccaaacccccctacgaactacactcacgacagtagttagctgattctgttacattctactttcctacactcgaagatgtactaagttttttcgaacagcaccctttttttcaca

SEQ ID NO: 11803 - DNA, 409 bp, Oryza sativa
  unsure (1)..(409): unsure at all n locations
ntacttgagggtgtgtttgttaattttcttggatatgtttggatgtttgtataggatagtcccaagcagtcatcagtgtttttctttacctgcttaaaaattgaagtttaatatctggatagcaaccaaaactttggaacttgattgattttttatgtgaattttcgttctccagctgctcattcagctttcatgttgagcatcataaagctgctgttgatggttcctggatcttaattattgacatggtgtgttttgatgtagctggagcagcaaatccaggcttatgatcccaagcagcaataattgaagcaaaagagtgtagctgcatgtgatctcacatgataaatgtatctttgaagatgtagaccatgttcaatgggcttctggcttatagtgtgtgcgcgtg

SEQ ID NO: 11804 - DNA, 392 bp, Oryza sativa
gtgcgcacaagtgcctgtttatgtttactggagacgatgcactggctaatactctctgatcattgtggatttattcatatagtggccagagagaatgcttgcgagttatatgtgtctggtcaataaaaaaaggtgaaacactcgcctgctagaagttgagagtaaaaatttctgagggttaataatcggctaacttgcaaaaccaatctgccaaacaacttttcatggtccatcgactctacattttaaatttgtagtgcttctcctagatccttcacaaatacaatggggcatactctatatctaagaatggatcctcacaggattccttatcaatatccagatttataacactgttattgcgggtgcccgatgtatctttacttgaccac

SEQ ID NO: 11805 - DNA, 413 bp, Oryza sativa
tgctgatttcctcagggtggtccacacaatactgcatgtgctccttattttttgagctttaaatagtagagacaaacaaatatcagtcaaaagaaagaaagcccacaccatgctcgaatatcacataaaagcaaaatgaacatacccgaattctcggttgaggctgtttgctgcagcagtagctgctttcccaccaccatatcttttggtgaaatcttccttgactctgtcaaggaaagcaatggggatttgtcgcccaactgattcaacagcaactacacagtatgctgcacaaagggggggaaatggaaatgataattaatctcaatgcacatcatgagtttgtgttagaaagtgaaaacatcaaagtaccaaaagatcaaaataatgaaaatagttgttttagggtgacc

SEQ ID NO: 11806 - DNA, 414 bp, Oryza sativa
taagggcaaggccaatatttgtgccaccatgagcaattttatgtcttgtgtcatgcacagtagtaatttcacatcaactactatagagcaaaatattattcttctagacattacagatacacgatgtgcaaattaatttgttttcttcaacattttattaaggtatttaaaactgtctgctgcaatacgcaaggtgtgcccagttttacccactagtacgtctcaatggataatgggtttaattcccgatataccacctccgaaccaccagcttattatttatatttaaaaaaatcattttcgcccacaaaccctcccctgttcatagactggaaatattgcgtggaaaaggacttgatcactataaacaactatagtgataccccgcgctttgcagcagaatatatggatgaa

SEQ ID NO: 11807 - DNA, 454 bp, Oryza sativa
  unsure (1)..(454): unsure at all n locations
catgcaagcttgagcagataaaggtagtgtaaaattttcttcagcctcaatggacagaaaattagagacagatgcattctggttttgagcaagagaacaaagccttggcatagtgtgaaaaagagggggttgatcatcccatacatcataccaaaagaagcaggtatttccacttttcagattacactttgcaatacctctaaagacatccatcagtttgcaaatatctctccaccagaatgagcccttcaagtttgtcggatgagggacagagttaccataataggcagaccaaacaagattgacccatggcaaatccttcttattgtaaaacttgtccaaaaatttgatgagtagagcatgattctggatagtaagggttagcactcccaaaccaccttttctcttaggcttacaaacntttatccaagctgccaaagatcttttattggag

SEQ ID NO: 11808 - DNA, 411 bp, Oryza sativa
taacacttctctcatagggcacaggatttcgaaaacctccagacttattaatgattctatgaagtttcttgacttcatgtgaatattgccatgaatccctgacactgtaataatgagtcttgctgccacacagatgaagaaatagcctccttgcatacctccgaacaaacgttgtatgagcattgctgatataactacaaagaacatcttggtatccatctaactttagatccttggtgttgggaaccttgcaacttttatccttatcagctgatttttccttttctggtcgaaccatgctatatacaagcctgaatgtattctccaacaacaatttgtagtagtccatgaaaagatcagtgggatgggactcggcatatgaatctgagaaaaagggagagaagtttcccg

SEQ ID NO: 11809 - DNA, 413 bp, Oryza sativa
tgctctgaaaatgggtttaggtaatgatacctaataattatatgctatctagtcatgcataataaaataaactcacattctaaacaataatttaagttgtattcgaaaaaaaaattagctttatcttccagtacttggaagggaaaaatacaatgttatatacaacatatgtaataacgctatatgcgactatgaggtcaagcaaagggaagtgaatggatagctaataaatgattgaattagatggataagtagcttctcgatgaaacggttattattttttactaatgtgatttgatagtttaaaattattgatgatgtgacttcttgtatgttttggtttattgtaaatgtttcttcgtgggtaccgattatatagaaaaatggagtaagatatgatgtagcactgagtt

SEQ ID NO: 11810 - DNA, 436 bp, Oryza sativa
  unsure (1)..(436): unsure at all n locations
agcttggagtatctggcatctttcggagtatctgncgggagntctgatgtgccatctgtggacacgcggacttggaatccttgtcggcgcatctcaataaggagaacattcgatgctgtttggatgctatctccaagcctccagagaacctaaagagccttaagctgtacgggtatgcagacgacaagctgccagagtggatcacgctgctgcggaagctcagtaaattgaatctacagatggccatgttgccgtcaggtgatgggctccatttccactcaagcttcgacagtcttgtgatactcaagatttcctgcagccccagtttacaggcacgaacgttcactctggagtaatgcctattcttgagtggctgaagctacgttgctgtaatgtctcatcgctgaggctctctggatataaacactaaccggtc

SEQ ID NO: 11811 - DNA, 402 bp, Oryza sativa
  unsure (1)..(402): unsure at all n locations
nttattgccctgtgctcgtangngtgcccatcagcatttatataagggncatccattacctcctgcaccaaaattgtcattgtttctatttagtctagggagataatcagaactggcgcactcaactagttagcaaattttacctgcaatattgggcagatgaagtggctcggcacagctgcgtttggacttcttaatgtgggagaagcagtaattctgctcagaatgctctcgatctctggcagcacctccgattcaaggctaggcctgtctctacattttaaagctgtacaccgcaccgccaattttgccaagatctctgcctcagcgattggccaatcaatctgagaactgtcaagaacatcggaaattgagtctctttttatcgcttcttctgcacta

SEQ ID NO: 11812 - DNA, 444 bp, Oryza sativa
gcttgctgtggggacttatgcatgaagactcaaccagcgctaattacctccctaactatctctctctgcagttgaccagtcaaaaaatgaggctatcatcaagtatgggactatatgtacggctagtaacttgttccatatttccacatgttaataccattggaccaaactgttttcctcacaactatctacgaactggaaccacgttgcctcacgcatggctgcaggtttgcatgccttccttctttctatactcgtccccctttagtctcacaaatcctagcatatctctcttaatttactacaatcaacagctccttcaatgtacatagagacaacaagacaatcctttgaccaaatagcataatccaaacaatggttaccagaggtaaagtaaagctgaagataagggaatatgtactgccaataacatcataatgaggg

SEQ ID NO: 11813 - DNA, 402 bp, Oryza sativa
  unsure (1)..(402): unsure at all n locations
tgcattanacacctaaattcccgtgacttgctgagtactattgtactcacccttgctctatataaatatatatatagttcctccgccttaaagtgaagatgaagtgaagtgaagattatggtttcgtcctggttcctagccatcgcctgtggtgtttgggtgttagttcgttggttccgccactgctgctgttgttggtgtttcctcgtctgtgtcgtcggttgcattctcgggctgttctgagttgcaacctaagttaaggtaaataagtcctctatttattttaaggattgcaatgattcatatttgtcaccgtgagtaccagcgctatgtcctaggactggtactgagatcgcggtttcgtaagaagcggttcgcgccgtttttcctacaacgcgctcc

SEQ ID NO: 11814 - DNA, 175 bp, Oryza sativa
agcttcagtttgcctttgtccggcgtggttatttgctgatgggattcgactattccagtcgttgtcgaagccgcacctgatgcctgcgcccacagcaacctgttcggcttggagtcggatactacactatttattatcacaaattcacgatccagacgagagggggggggggggg

SEQ ID NO: 11815 - DNA, 408 bp, Oryza sativa
tctggagaaatgacagcgcaaggtaggtctatcttgctgacaccctacgtttgattaagattacaaaaagtgggagaaatttcaagtcaaagagacacagatgcatcatgcatgatgcatcccttatctcttcagttttgggtatatacaaattcaatcttcaagttagaacagattttgaataatgtaatcgattaagggagaacaattgattatccaggacgtcgtattccagtgagttaagcagacaacatctatcttctatggcagtttgattaattgtggtatgaatactatggagacaatactacaacttaaatgtttattcacaaagaaaaaaaaacaacttaatgtgatggaaagatacatctcaaccatcaagaaagacttcttgcagatgaacacgtc

SEQ ID NO: 11816 - DNA, 434 bp, Oryza sativa
agcttgagaaccttgtgaaacttgtaataatttagcgggtttctactagaaaaacaggtcgtacaagacataaataggattgaagaaaaaacaggttttataactaaatcagaacaatagatcgcttatcttggcatgatcagcccagctgcctgtcagaaaggctcgcgtctttgtgagataactgtaacctgtaactttgttaactcaccaagaagctgaagtcattttatccgaaccaaacgagctgcagtagtaactacatcttgtaaaagtgaattcatgagcacttaaaatcttgcattattttcacacagatagccttcattgtaatgacagtatggaagtcccttatgatgcagggtttcattgtaacgatcgaactctacggcagcaacagaaataaactaatgtgcagcatgcaggccaacctg

SEQ ID NO: 11817 - DNA, 399 bp, Oryza sativa
ctgcgcggaccttgcatcctatgctgttccttttatataattcgaacacataggtgttcttctctcgtcaacttatagatttttcctcgatttccgttagcatgtgttttcaaactgataaacgatgggtttcatagaaaaaactttctatatagatgttactttaaaatataaataaacacatatttcaagtttttgataattaaaagtcaattacccatgcactaatagctttctcattttatgtgccttaacttcatattcatcctaatcaatctcaaaaaccacctagcccttcggtaattaaacgagcaaactactcccatcgtcgcgaaatataagggtttttggctggatgtaacatagactacgaatataaacagccgagtccatattcat

SEQ ID NO: 11818 - DNA, 166 bp, Oryza sativa
ctactagatacccgcgcgtgggatcactttacatctactcctacgtgcagttacaacgctcctactctgcttctgcttcctccaaaaatattatggataatccaaagcgtcttatattttggagagaatcccttatatgccactgaaaattggtctgaactcttat

SEQ ID NO: 11819 - DNA, 403 bp, Oryza sativa
  unsure (1)..(403): unsure at all n locations
tctcctgatttggtttcggaacaagttgatttgattcttgatgaactgtcatacgttgatcaagagaggcaagcaggcttcagtgagatctttcagggaaaatgcctcaaagcaatgataatcggatgtggcttggtgttctttcagcaggtggtctcttaagtcatcatatagccatactcgtatgttccatgatgtaaagatgaaactgacggcgtgtttcttatgcacttgctgtatgaatctgtcaggttactggtcaaccaagtgtgctatattatgctgcgacaatccttcaggtactgatgcttttctgtatgaattacgtatttcagctatgtccttttgtggtgctatggntggctctcacaaaatggaagcccctacatgttataaaatgtta

SEQ ID NO: 11820 - DNA, 119 bp, Oryza sativa
cggacaagcacgagctgcactcaaaagaaacgacacatgctttcgtaggacacaaaccactaaaataaaagtttagttttttttttgcattaacagaagccacttttcattgaaagtac

SEQ ID NO: 11821 - DNA, 401 bp, Oryza sativa
tagagcattcagaagagaaactctgatctggatcaatcttctgaacaaagtctcaactccgctctcgagatcaacgatggcgaactccaacgcctgtaattgctcctcctggcatgcaagccttgtcttctgaaatgccttggagacaagtgaccacttgctagaatttgatgttgtgatcttctttgacaagagatgtgaagaggactcaagcattgagatggcgacctctctagcttccgccaacagcttgatcaccctggagccctcctgctcagctgaagcagacttcttgctgatcttcttggactgcttttgcaccttcttggtcagacgaatgaaatactggatgttggcctgaacaactgtagcatcccttctcttgtgaaccaactgcatct

SEQ ID NO: 11822 - DNA, 429 bp, Oryza sativa
  unsure (1)..(429): unsure at all n locations
atgcaagcttgggctgctgggncaaaattgaagattcacaagcagtacaagccccgcctttagcttggagctccccgtgctcctagggcggcgccctcctctcatcctggagctagctcaagctcagcacctcctcctcctcctgggtattatccaaatgctttcatccttccacttcatctttttaccgggagtaaaaagataccaaccgggactaaagatcataaaatgctatgggcttttcaaccggggctaaatatgatttttagtcccggtttttttaatgaaccggaactattgtgaattttggccgaccagacaaagatggtttctccagtagtgaaagacagatagcgtatggagacagtcgatggacagagcaatatattgtgctatcggccgaagtggacggtgacggtgagatgagtg

SEQ ID NO: 11823 - DNA, 411 bp, Oryza sativa
tggatcttcctcgggtactgatgtgaccatggctactacggatacaaccattgctcacataatgcgtgaacaagaagacatcaagatcaaggtctccaagtgctggaatccgattcggccacctgctgcactgttgatttcaaacggccgccgaatctgcatacgacctccgtttttggcccgtgagtacttgatggaaagcctacggagtcctctttccaatggatccagcctcatcgccaaattccatcctagtcatccgcggatgaacaaacaaggtgctgcgtcacctgtcatgggcctttgggcttgtaacttcgtttgggaccctggcccaagtggggcccaagtggggtgcgccccaaccaggtggagcacgaccctagagtgcccttggtcgtcctcctatct

SEQ ID NO: 11824 - DNA, 436 bp, Oryza sativa
  unsure (1)..(436): unsure at all n locations
gcaagcttccgcaatctcactggtcactactgttcccagctgccatccctgatccctgtgtgcgctaaccagaccgcacagcgaccgtccgtccctttcattcccccgcatgcgtgatcccccattctttccgagaaaaaaacccgcgtgatcgcgtgatcgcgtgatccgatccgatctccaattctgcatcatgggctacgactctgacgccgcgcgttgcctctccgatctcggtgagtccgccccttctctattctcccctccatgctccattttttttttattntctagacctttctaatttttagttttgcaacgggtaaagggatatttaatcatgtatactggggggaaaaaaatataacataataataatgataattatgaaataaaattacagcgacctttgtgtaaaagataaaaatatataatc

SEQ ID NO: 11825 - DNA, 402 bp, Oryza sativa
aactggtatgttacaaagatatgtttcttaaaatcttgtgctgctttcgtttaatgcttatgtcctagatagcctggatatttgatgatttatgcacattgagtttgtttgatcttttgagcttgctgttttattgatcgtttgactatatgttctgaacaatgcatgttataaagtgagatgttatactttcaggaagggagggaggctgtgaagaagaaagcatttgtcccaccaccacgtttctttaatattgatgaggccaggtgttctttttcacccctgtcataacatcttgtattattttccttgtttttattattggttgctaactctgctgcaatcaaggagatgcacattcgtgtggaacggaggagggataaagactctggggagtacttt

SEQ ID NO: 11826 - DNA, 442 bp, Oryza sativa
  unsure (1)..(442): unsure at all n locations
gcaagcttgctccgatcgggctgattgcttcatttctgcgcgacgcattaaattctacggcagagggacgtagctntccgcatcgccgttgcttccacatccaacggcacaagttcagtggaagcgttcctgtgctcctcccattcgtctcatgcgcgatgttcagctgctttcggcccatttgcagaccaagcagagaccgaaaaacgtcgcgataaagaaggggaggggaggtaaaggcgagaatggaccgagctcgcgccgtttggcgcgaggagcggacgagcttctctgcagcgcgctcgagcgtgttcgaatgaggagtgattgggcaaaagatgcgaccgctgtgcgccggggtgcctgggcgggacgagtttctctgcaattctatcatgtgccgatgtcttcattgggtctgcctctcttctttcatctcatg

SEQ ID NO: 11827 - DNA, 412 bp, Oryza sativa
tcagtgaaatgctgtcaatagcttacccagaagtctgttctaaattccttgagtcttgaatatttgtacccttaaagggtcacactcatgatgtttacagttacatctagatgttcctgttgcaggttgcttgagtacacagaggatgctctgatgtctttaaccagggcagcagatatacttcgcataacgcatgggactaaatccgagttcatgaaggaacttttgggcaagctagaagaagtaagggctgaagcttcttttaggctctcggctggagatgaacaataattgagtaaccattttattgtgaagctccaggtcatcgtgatggcaaatagaatgtaacaatgttgcaacaatgttcaaataggatagtactaagtagacaatctctaaatttagaatagct

SEQ ID NO: 11828 - DNA, 402 bp, Oryza sativa
gcagctataatcgatctctttgaaaaatttcttgttttttaaacttatgcacgaaactaccgtgtgctttctgcgtccttgaaaaggctttgacactaactaagattatgaatcacttatattgggtttttttaaaaaaaagttacttgaaaaagtgaccctcgataatctttgctgtggaaacttaaaatactaacgaatagagtagttcagtcgtattcaatattattgccacttttctcactctcttttgcttgaattatgtctgttaccaggaccgctccacgattcggacaccttgtgcataatctccttggtcaccgaagcgccggtcgccatgatgatatcctcgaagccgctcgacgccaggactggacccatcgtgctctgcgtggcaatgaa

SEQ ID NO: 11829 - DNA, 415 bp, Oryza sativa
tcttctagtcctgtgggtttattactagtgttatacattagtgtttatgccatattggcacaaaacaaactttaagtttcctatgccatcacgatacaatacacataacctggtttcccttctatagcaactaatttcatcaagaaagaggcagatggatgtctgtgcaaatgtatattcatggatagaaacattgcgcgacatattttgtactttcaaattttcatgcaagattgctgcagaacttgtccctcaattcctactccctcagcctttgtggggttttatcatagtgatcagctttcactattacagcacgtagaaatttaatttttcctgacggcattacttgtttttcacacgaacagggacctcttgctgcaccaactctccagttgctgacaaaagaagattt

SEQ ID NO: 11830 - DNA, 309 bp, Oryza sativa
ttataaaatatgctttttaacgtaaattttttcgaccctccattcaatacatcgacgtagctcattactctatcaaaattgtcaaaaacataagatatttttttgttatgcagtgccatctaatattagaaacatatggacaaattataaaaaaaaattctgataatttttataacgatcgaccctacattatacagacaagccgattatggataccagagtagagaacaggctgttgtactgacattgctgccttaacagttaaatatgccctgtagctattattatagcattaaactatctaaaagt

SEQ ID NO: 11831 - DNA, 414 bp, Oryza sativa
  unsure (1)..(414): unsure at all n locations
tanaagcaagcgtgaataccaaaacgaaaaccttacagcatagaatgaacctcaactgaagtaaggcatggtttaattgaagttgatgaaataacaacggtttcagatatcttaaaatgtggttaagcctggtagcttgctattttctccatttcaaaatataaggtgcattttgtttcattaggataagactttgaccaacgattactctaaaattaaatttattagattcatattcaaaattacttatgattataattttatatcacataaatgatattctaatagagtagttgttggtcaaagtattatcctaacgaatcaaaatacaccatatattttgaaacggagtgagtaccatcttgtgctattcaaatgcttgctagactcaacgagcaccatgaatggcatgct

SEQ ID NO: 11832 - DNA, 362 bp, Oryza sativa
caagctggatttcatgcaactctttctctgattgggccacagtcaactaccaagctgtctagcgatgatgcttctagccgatctaagatactttttagagtcttcttgacatcattcggataaaggggccaatgctttgcttgcggtatcttcttctccttcatcaagataatctctgatatcaaaagagaaaagatcggctaggacctgtggtgataatatgaaaatggttagaaaccaaacaattgtagtcgatttggatgctcgctaggggaaacttactgggatagcaagagcggctggttggtcttcttcctcaatgtggtgacttcccacggccgaaggggtctgatcactcgatg

SEQ ID NO: 11833 - DNA, 411 bp, Oryza sativa
accttagaaactccgcttttcccgatcagtgcaagggatccgtcttggctttacgacctcgtcttcccacccgggcagacgtttcggttcggcagcctcgacttcgtcaccaacaacttcggcaagatctctctccttgactcggagtcggaccagtcgggagagaaccggatttcagtcccgtttggactcccaaacgcggctggaagttacttcaagaccatctcaatcgagtcggctttcaaccactcaggcgagatcacatcttctccaacgtcaccagatcaagatgatggggcttacccaccaatcctgatgaagctccccgacgatttagcggccgtctccatcgcgacagcacctccatcccgtaggcctaggcggaagtcggcttcaacaccgatatcgcct

SEQ ID NO: 11834 - DNA, 425 bp, Oryza sativa
actatagaaactcccgcttgtcacatgaaaaccactactttctcggcccagtctgtttccctgaccccactgagttcatcatcggtgaaaccaataagattcctttcagactatccaatccagatctaggtcattggaagaacacctttaaatcttggccgtctctagaaaaaacttcacccgagaaaagttggattacatggttcaagcgtatgtcagctagcaaacgagttcactggaacgaaatcggaatcggccaagcacttgacctaaccatagcaaactcagccaaagaagaacctctaatggctgctgcttcttacttttggtccaacactatcaatgccttcttattcaaccaagggccgatgaccctaactctcatagtcatcattatgatcacgggtctagatgtcacttcatcg

SEQ ID NO: 11835 - DNA, 437 bp, Oryza sativa
agcttacaaaagaggaaatgtaatctactatatccatacccgaactcttccgaagacttccggactcctgatttctactctattcctatttcactatcttgatactactaaactaaacttgatagaatatgagagagctcttgcttgaggtgtgtgttgaagtgaagagagtgaggggtttatatagcctcccaatgacagttgtgacggttggaatggtcggaaataccttccaaccgtcattgggggctaatctacaccgtccagccgcaaccctgcatccaacggcaccagggagggttcggccgaaccccctggttgagccgaaccaggggccggcccaaccagcccaggttttggctggtggccttctccgttgcttcacttcttataacttgtgaatttggcccaattcatcgtgttaattctgagttctt

SEQ ID NO: 11836 - DNA, 403 bp, Oryza sativa
  unsure (1)..(403): unsure at all n locations
tagctgcgacgntgcccgtgctgaagactattgagactatctggccagctcgggcggtcgtcgtggatggcaactgtaaccaccccaccaccatttctttaatattattcttcatattctactcttctaaaattgttatactcttttttcatgtgtatgtataaattatttttaccgaaatttaaccggtgctcgagttctaggaggggtacttatgtcaatacgggaatatagttcacataaaacgatttagaatgtatatcaagtgctcaacatggcatggatctaatttcaaaagtgttgctgtggcatggttgtaataaagaagtagtaatgtttttttcaacacttgcaaactgtatattataattaacccaaaactatgaaacgttagacttgggcc

SEQ ID NO: 11837 - DNA, 435 bp, Oryza sativa
catgcaagcttgggttactgtatttacttacctcttttctctgattttctaactatactcacatgaatccaaatacttgtgctattaattggataaaagtcttaactccctcctttcacttgtctttagatgccgcgttacaagcctgagtacctgtttggtgttgagggttttgcccaggagttgcgcacgatgtcctttgtcattggatttgggactgtccctttatatgcccagattcctcatgaccgtcatgaatagaagtgccgagtcaaagtcaccttgaacagcaataatgaagaggtcccctcagtgatgcttgaagctggaggaagaaattacatccatgcatgtcaggaagtggcaaggatcgccatatgagagctccgtgatcgctacagtgatcaattggtcgacactgagtatcgctaccat

SEQ ID NO: 11838 - DNA, 440 bp, Oryza sativa
  unsure (1)..(440): unsure at all n locations
agcttgggagaggcaaaagataagacaaagatggtgagaagaccaacaacaacaagccgaagatttcatgccaagggaggaagatagagaatctcaggaaggcttttcaacaagtttgcaccgccttcaagccactaagtgatgtagatggtgaaagtggagatgatgataagggaaagaacatctccgatgtttgcttcatggcgcgtggtgaatctgacacagagtatgaagataatgaggtaagtgcttttgaggaagctattaatattttgagtgaaaaaaattagaagtgtgagaagatgtatagaaaaaaggaatttattattgaatctcttaaatctgaaattgctagattaaaatctcttattcctaatgatgatgattgctcacattgtgaggttctaatgaatgagattcaaanattagagatgttaatg

SEQ ID NO: 11839 - DNA, 405 bp, Oryza sativa
tgtgacttgtgagttgcaattgggcagaggaagaagatgaggctggaccgcccaaggagaggatatttttttgtggagattttatggagcaaacaattaactgaagcatgtatgggagatccgtgacattgtcccttgtgacagagtggcttgtgtgttgttgtggctgtcaaatctccagaggatgaatcctccgtatgctgcaggatctagggcgtcaggcgttgggaaacggtgggttaatacgtgatgtgttcagcaaactcgcccacagttttaggctttcaccttatagcaggctgtgaaattgccagtaccagagacacacatcctacccatgaggcctgtttagatcccacctaaaattttacatcgcatcgaatgtttgaacacatatatgaaaca

SEQ ID NO: 11840 - DNA, 328 bp, Oryza sativa
atgcaagcttgctcgggcagctggaagaagaaaaatacatatatatatgggtgggactttagtcccgggtggtagcaccaaccggggcttaagatcaccgggatctatccccggttggtattaccaaccaggactaaagttaccatctttaatcccggctggtggactaaaaatcccgggggggcctgacaggccctgacagcattcgaaccgagactaaagatgatctttagtcccggttggtaacacataccgggactaaagatcaaatatgtcccgtacccttttgaaccgggactaaagatcatctttagccccgcgttttatt

SEQ ID NO: 11841 - DNA, 408 bp, Oryza sativa
  unsure (1)..(408): unsure at all n locations
ctccgcttanggatctactagaattttgattttctgcccaatgatatgacacacaaaatattccaaggtttcagggttatggataccacatacctaatggtagttgactaaatctcggaaggacccaccacgtaccatgtcttgtacgaaaacaacctgcggatttaggaggagttccggataaggaaagacaaccagagttctacatggaaacgacaaggactactcggattgtatccatattggtttccctagttctacttggacaaggggacacctatgagtataaatacaaggccccctaggaggggaggggacaatacacacccaccatagaagacacggaacaacagaagctacaacatacaagccaacatacgccaagacaagacatctgatatcgacttc

SEQ ID NO: 11842 - DNA, 393 bp, Oryza sativa
  unsure (1)..(393): unsure at all n locations
atcaactttatcatttctcatctgatagttctccattttttgaaagaatatctgtaaaaaaaaaggtacaaatatcacaaggaactggagtgacgatctatttttaagggatcgtggataaaataagggaaatttacggggaaacaaaacaaaaggttacatgtaaaataagaaaacggttttgctaaaaaaatacgacatcatatactatttgatttcagccacttttttcaatgtaattgctacctctctgaatctcatatgtctcctcttttaagttgatttttatatactacttttaaatagcgtgtgtactgcgaaaaaaataccttataagcttcaaagtatatacttccgccattctaaantgatcatcatatatatttatacacc

SEQ ID NO: 11843 - DNA, 395 bp, Oryza sativa
tctaccaacatgtgttgattcacttactgcttattattttattcaggtatcctgtgggacagcagtaactgtggtacttactgttactggaatggtatatactattggaagttctatgcatgggcaacttgggaaccccaaagcagatggtgaatctatttgcagtgttgaaaggccacttaaaactgagtttgtcagagagatatcatccgggtcttcgcatgtagcggtgttgactattagtgggaatgttttcacatggggtaaatgtgctgaaaggcatcttggtttacgcgaatacagtaataagagctcttccacttttatataggcattataaagcacggatgtttaaatgtgagtttgttggttcaattttactgctgcgatctgtt

SEQ ID NO: 11844 - DNA, 452 bp, Oryza sativa
  unsure (1)..(452): unsure at all n locations
gcttacgatgggagtntagcgatttcgattagtggcctggttggaacttttccgagcgaataacgaaataaatttgattattagaaaaaaagaacaacacgaagacaattttcaaacggtacaagtacaatcctcagtcgtcgtatcggacgaagtccttcaccggtgaagcgaacaagggtgacagatccggagtacgtacataaacccaaggtacgtgcacgcaaatcaccaatagaaaatcatgcacataatatacgtatactatatactccctccgtccctttttaagtatagctattacttcgtgaccaactntgatcggncgtcttatttatttntttnttanaaataaaaacatacatcatgtataaagtactatctatggtgttatcatcttataacaataaaaatattaattattataaaaattaaattagatggacgatgaa

SEQ ID NO: 11845 - DNA, 403 bp, Oryza sativa
tatccaatcttttaggtcaacgaatatatatttgcactattgtcatgctctgccttttttgtgttaacgcatctatgcactcagtactttttttttccttccatatacggagagagcttaattcccggtttgctacctaaagttggcatggaatctacaaatcctggatgaagcttgggcattctggctttgctacagtgggcaaaaaggctgaggtcagaaaaaggtattcaaacaaaaggccatccgatggcaaggttacatcatgtatatttgtgtgtgcaaacgagactcatagattaccggacaaaagggatcatttaacaaaattccctcgagctgaaactagaattggttgtcaagttcacatgactattaaaatggacagacatgagggcaatta

SEQ ID NO: 11846 - DNA, 412 bp, Oryza sativa
tgaagatgaacagtaacggggagacaaattagactttctgctgggcttctacttccaaggactgattaaaggagggaaaaaagcagacttcgggaaagagagggaaaggactgcaggctgagaggagactgggccgagagtgagacgacttttcctaattcggcccgaaaaggaaaaggtgaattttaattacttttccaattaaattaatcactgaaatgatccttgaattgttaaaaatacttatattgctcaaataatttcaagaaaaatattgaaaatacttggaccctcaaagtatttaaaaaagttataatcagaccatttaatgattaatttaatatatggataattactgaaatgttctttgtatgattaaaattaagaattgagctccgaacaatccgagaaa

SEQ ID NO: 11847 - DNA, 433 bp, Oryza sativa
  unsure (1)..(433): unsure at all n locations
catgcaagctngaccatatgaacataactctttcagacaaattctgattacgacagnttatatgaaaattgtagctctcaacaagatctataatttggtagttgacaacatttttatttgtgtttttatactcaaattcatgattcaaatctgggtttagaaaggcttaaaagggaaaataccatttgctaacaggattgatgtgtaagtgagttggtaaggaaactgaatacgaggtagaagtctcaagtttgaatccttgccatgacacgaattatatacgacttgcgaaaataggtaatagtggttgtggctctgtagatacatgagtaaggatagtaagagtattaaaaatatttttgtactttttccatagcctaaattttgtccatatcagtgttgggtttagaaattacctgtcacatgattctat

SEQ ID NO: 11848 - DNA, 393 bp, Oryza sativa
  unsure (1)..(393): unsure at all n locations
agcttncaacgatgctgcgatattcagtggtgtcctccggcgaggcggagcttgatctgcttatttgtaggcgagtctccatgggagtggtgtaggcattgcacccatccatcctagtcttggtcagcagccggcgcgcgtaaccaccctgatgcaaagtgattgcggccgtgctctggtgcacctcgatgcccatgtaaaaagtgagctctcccagatcgctcatcttgaacaactgcttcatttcttccttgaacacctcgatctcccgtgtttcaccgccggcgatgatgaggtcgaccacgtatgcgccgacgagcaactgtgatgtgccccgtctgcgcacgtacactgcgtgctcagactcgctatgagtgaacccgtgctgtttga

SEQ ID NO: 11849 - DNA, 374 bp, Oryza sativa
  unsure (1)..(374): unsure at all n locations
ttggtcggtgcacgtggtacagaccagacgatagatgatttttgagaaaatgataccgagacatggtctctttgcctaaatgtgtacagtgtcccacgctcaactttgtggagaaagaaaagagattcgtctagaactaaatccgtcgagagtcactataaaacttgaacgaacagagccccttatggtgtatcgttccagacgagagagaagagctagttaacaatggggatttacataaaaaaaatgatatggctttacaacctacaaggatcgacggtgctntataactattttcactagagcgcagagcgacttatatatatgaagatctctatatcttcgccaacaagacctacaaccacctattttat

SEQ ID NO: 11850 - DNA, 364 bp, Oryza sativa
  unsure (1)..(364): unsure at all n locations
cgacagagcatgcagctttggcttagcaccttatttgatttcataaagtttaccgaggaaaattggtggaaatgtacgtaacaaacccgggattatggtcttactgctataacccagatcacggcctgggctaatgcaaaccctaaattcaccttcaagtatacntattatcncactgctcacgtggtggattcacgccgcaatcaaaaaactcggataattcacttatcctaattaccctactttgtgcttttctccaaccatgtgctacgtatattcgctaagattaaaatcaggcctctactctatatcaatatcaacgcancaggtgaccaaccaaaatacacttaattgcaaggaatat

SEQ ID NO: 11851 - DNA, 358 bp, Oryza sativa
gcccccaatgctctgttacactcgcttcaaagacaaatttggttcctttaattgtcggtgttggaaataattcccaagtcttatgaatgggcatctatttccttcaaagatcaataagggtatgctgattgcacaatagagaagtatccaactcgaatgaccaacgttctatatcattcaaacaccctgatggtttgctctgaacgcgtgaatcttaaaggattttagtgaacgttagatggagtggctcgtattaattttacatgagaactctatacatcttttgtaacacgcttttgtggccttcgctaatactcatgattgctcattctcccaccagtcttaaataagtgatatt

SEQ ID NO: 11852 - DNA, 213 bp, Oryza sativa
  unsure (1)..(213): unsure at all n locations
ctttactctgttattttcaccctctttttcnnnncntccacagagggtgatgatcttgaaccccccaccaaactcaacatacacttataactctcaaaccaacctttttaattgccccgactaaatacgaagagaatatgccagataccaacgtggatcccactcaggctaacgcaacacaatacaattgctagtagatcagaaagacaacct

SEQ ID NO: 11853 - DNA, 443 bp, Oryza sativa
  unsure (1)..(443): unsure at all n locations
catgcaagcnntgctactatggatctatgaatggtctttgagaagttctttcagcactctgtgttgacttgtgaccatacacatatacttttttaacacttatatattgcacaaagattggatttaaaaatctaactatgcacaagcagtggtactgtggtaataccattactaccatatgttctttgttactacaatttcatcacgatgttactgtagaatgtgcagtaacggcttataatattcgcagtatatcgtgttactgcactttcacgataatgtaactaccgaatcatagtaacaagatatgattcgtacagtaacataatgggcttgtgttcataanatttgggcttgtgtcacaaaatttgaacagatatatagagaaagcaaagaatgatctcatatcatatagtgtcatagggtgaattggttatgagagt

SEQ ID NO: 11854 - DNA, 333 bp, Oryza sativa
  unsure (1)..(333): unsure at all n locations
agccggatttggcacttcctacaaaatggatgctatgggttcaagcaagcttatatctgccatctaaagctgtcactgcagagcaaatattatgacttcttataatctctgggctagaagaaaccatacgcaattattggctgctgccaagttgtctatcgaggtactatatttctttactatttgggtgcatttactttgtaacttctgaagattttgcatacttttcccagatattctacaagtcggtttgacctttctcctaatttaagtgtgatcagagttataggaaatctntaacaacatctataaccccagttagttcataaatat

SEQ ID NO: 11855 - DNA, 438 bp, Oryza sativa
agcttggcttaagccccattctaaagtggcaggttaatgtgttgctacctactattcagagcgccaattcagctcagcccatctaagtctgcactttataatggagtcttctaagtagaagtatgcatattttaagaatataatctcttaaaaataattaatttttagttaatcacattaataaaagagaaaagtatatatggtactaatacaagctacttccttgtgtgggtcacatacaaatgatatatttgatgttctagtttattaataaacaataaaaatcatatattgttaggcacgttaagagatcgagctcagctcgataaagttagtaggctttggtataagctcgagctcggttcttatagaactcgagcggagctcgaatccagcctagggcgagccgagctcaagtagcttgtgaacctcatgcca

SEQ ID NO: 11856 - DNA, 404 bp, Oryza sativa
  unsure (1)..(404): unsure at all n locations
tacctaatgaccacaattaagaagattatacatatgtattatgatgtgatgcattgtntggaatcgagccagctattaaggtttgcatccccaagtacacttaaaagctgtgggctccagcacgcctggattggtttgtgctaatgtggatgctacagtctcttctcttattcaggctagtcctttgctggcatcatcacaccgaagattgctaaagcactatctttaagaagatttgtcattcttgctcaaaaggaaagtttccacaagttactcttttagtatgacaaaaaattaatggcgagctattttacttttttttaactagttacggtccgcttttaatctatatgggtcctcatatagaacaatcgcttnttaagtagggcttaacttgagctgct

SEQ ID NO: 11857 - DNA, 422 bp, Oryza sativa
  unsure (1)..(422): unsure at all n locations
gcttcttaattngaaagctcacctaattaattaactaccaccgatcgatgtatccccagccttcttaattagtgcatcaaatgtggctatgtaagcgatgaatggtcgacaaataacgtaacacccaattaatgcaactttcacacacatgaatgtgtgtaggtatgcatgtgtgggctacttaactactccatttcaactctacgtatggtactccctccgtttcatattataaggctttctagcattaatatctagatttattaacaactatataaatgtggctaatgctagaaagtctaataatgtgaaacggaggaagtatatagtactagtagtacctactactatcacatatgaatacatngtgtataaaacatctcaattcatttagacacacatgcaagctaaaccctctagct

SEQ ID NO: 11858 - DNA, 401 bp, Oryza sativa
tggagctgccgtgcgtcctcaattcaaggtgcgttggtttggccatggtgtggatgaggcgacttgggaggatgctgaatctcttcgggtccgttttcctgctgcaccggcttggggacaagccgagtctgaagggggggagaatgttacgctgcctgtagcagatatcgacaaaggcaatccgctgagaagctatcggcgtcctacgcgggctaagaaacctaatgtccgtgtgagtgggccagaatgggtcacagtccaatgatgttctggtatggtgtataaataccagagggctaagagagaagagggtgtcgaaagtgtaaacacaaaacacaaaactattccccaaatcaaaccttcttctctattttgacatttcctcctctgttcctcccgtt

SEQ ID NO: 11859 - DNA, 400 bp, Oryza sativa
  unsure (1)..(400): unsure at all n locations
agctctntatgattctatataacccagctgttccgaacaacgcaatcaattcttatatacgtggcattccttactctacttatatatgacaagacaggaagaacaggatgtgaaggagataaagaaattcgatagaacatcaatgggttcttgccgtggtagctaggatgcaaatcctctacagtactgctgatgcagtaacagtggttgacatgtgggtccgggcccacatgtcagtgtctgctactgcatcactgtggtaactagggttgggagtaaccgggaaccatcttattacacacaaccatcttcctacaaaattctcagctgattatttgtcagggtagtaggcttcagtatgcacatctacccgtcacggntcattngatatattgatctc

SEQ ID NO: 11860 - DNA, 404 bp, Oryza sativa
tcgacgggagagagagaaacggagagagagagagggttcttggatgagaagagaacgagcgctctctctctcgagcgcggcgcacgcgcaacgcacgtgtggagagaggggaggggagggactgctgagagaggagatgggcccaggagagggggatccgacccatccataattaaaaggaggcaaaatagaattttactgggagatctgatgtggatagaaattcgatatggagtttgaatttgaattcaaaatgggaatttggatatttttggagtccggcggatatttctcaaggttttcaagagaggatttgaatttcgaatacttgaatccgaataaggatttcgaggaggaggatttgattttgatgagagggaacaccgggattgaattgagatcca

SEQ ID NO: 11861 - DNA, 407 bp, Oryza sativa
  unsure (1)..(407): unsure at all n locations
tggaagctcatttccgntcttttggattgacatcatggtttcactgtttcttgaaatttgacattttattgaaaaactatatttctttttctgatccttgatgtattcattcatgtggttagcatcaaactattagtccattactgacttttagatttagggctgatatattctggagagtggagagtgcacgccatcttgcatagagttagaggctatagcacagctgaaattccatgcctctatgacaacagtgttcctccatatttttgttctacgagatatgaactgcatacaatttgaagaggtggtggtggagagggatgccattatcaattgaacaattgtaatgctttttcaaagcacttncattgtactactgctggatttggcggccctgtgtacac

SEQ ID NO: 11862 - DNA, 427 bp, Oryza sativa
  unsure (1)..(427): unsure at all n locations
catgcaagcttccatagctatgagctggatcagggtatctggtgtctctagagctatggccatgctgangccagcattgtggaggcacatcgtatttgaaacaaccagaagaagaattggagtcggtgtcaaggccaggcaagaacatcgctgccattgcctccatggactcatccatttgctcgtaggtgaagcagtgatcaccatgagctccaagaaactgcgccatcgcgtcggcctcgatcaacggcaccgctgatgtgtatgatctctccatttcagcaaggtgaaaaggcctcatagcaaagaaaagcactagcttaattagagagatgctgccgctatagtcagctgcaatggctgagttgcttctgccatgcgtgtgatgagagggtatttgtanggtgggtgcaactgggtggcacca

SEQ ID NO: 11863 - DNA, 418 bp, Oryza sativa
actcacgcttgtctaatctggagtcatctactagaaatgggagggcttattggttttcagcttgataagcaataggaaactactctaagagttgaagagaaggaagaacacatggtgctcaccaaaggtaaacatgtggaatagatgaaagaattgactccccatgtggttggggctcaacagacaggagaatgtattcacgctcagatggaatcagttcatatgttggttgaagaagacagaatcaaagccattcatatcctgctcgaccagcagttggctttggccttgcaagaagaggatataaagggacatctcaatgaagataaagggtgtgatgaaaatcaaactgctcttctgattctgaaagatgatgataagatggtttctcaagaggtatcaacagccaaagaggtgc

SEQ ID NO: 11864 - DNA, 441 bp, Oryza sativa
  unsure (1)..(441): unsure at all n locations
caagcttngcgttcttgccttaccaggaacctttgttgtcttctaccgacctctccccggggttccccgagtattggggtgcgaagttatcctgaacccactatntacttatctagggtgtaccattccaccttgtggttgcactttgttatgattgatgagtttcccacaggaatcggtccttatatgcgaatactggacaacgccacgcatgcaccacctccgcatcgagagttttcacaattcattttatttttaaacacaccgacaccacatgtcgggttttcaaggcttctcatacccatttcccaatttttcgacaatcaacggtgtatgtgggatatttggatacgcgctcagagagcacggataccgatgtaccacatgagtggagcgacgaggaatcagggtagtacaacctatangaattagtgcgactac

SEQ ID NO: 11865 - DNA, 394 bp, Oryza sativa
tatagttgaacttaagagattaaaaaatgataactaatggagcctatcttcatatgatagcgaattggtggcatatatcttctttgatgggacccagtgggatccagcttgtttctcattcaaggctataaccattgtagagataaatatagctaaagctatctgcacatgggcccccccctatcgctcattcagcaacccaacattgagcctgccctaagatcagccaacaggacatacgtacgtgcaccgatgcactggtgcgctcacgcactggaaaagcaggccgagtttattactccaaaatcaccacgtttcgcagcaaactgtacacgagaagcttctttctagtgtagcatggggagaaaagctaaccttctgaaagactcggcta

SEQ ID NO: 11866 - DNA, 436 bp, Oryza sativa
  unsure (1)..(436): unsure at all n locations
atgcaagcgttagnggaacaattctctttagctcttgttgaactaacagaacgtaattgctgtggtaatatatgatagaattaagacattggcaaactttgattcaacatttttgtcgaaacaagatttcggcaataataaaaggggtagcgcacgagacctaaaagtggatggatgcggagacaagaatttatataggttcaagccctctcgatgagaggtaataccctactcctgtttggggatttgaatccgtcgggtgtaatattgatctgacaatcaggtgtgctcatgccctctagagggcctcctacccaccttatataggatggtggcatgattacaagatagaaacctcaaccaatactgtaccggtttcctaaatctactctacaatattttataaccaggactttaggccgttccataatataca

SEQ ID NO: 11867 - DNA, 413 bp, Oryza sativa
  unsure (1)..(413): unsure at all n locations
tgccgatgtccatcccgtcatggaaagcgattgctccatcaagctcggcaatgctgaagtatacaacaaggtcgataattcgctacaacgccacagacatcagccctttggtcgcgtggtacctcgcgcaccacctcgccatgtcaccgccatcgccacgaatgcatcgcacagcctccaccctacgcctgtgtcgcatcgctggtggcccctacatgcgctgtcagccgccgnatgctgagtcatctccacgccctgactcctcgaactgccgcttgctgcccccatcccctctatagcgaaccgagttttgaggccctagttctatgcgtgtaccgtggtattcccatgatcagtcgctagcacactcatttacaaagttaataccacatccatacaaatataatatatac

SEQ ID NO: 11868 - DNA, 421 bp, Oryza sativa
  unsure (1)..(421): unsure at all n locations
gacactatnaatactcatgctctctaccttttttattcctttgagaacctcatagattttttatgaactcctctgttatccggtttagatagctgcgatttttctttcagacataacaatttttgaacacagggttgtaacccgatatgaatgaaccctagtacccaaccagcaagggtaattgccatggttcttgttgatgtccaaagtcaacacaataaagagtatgattgtgtgattttgtactttctgatctcaatgtctttgtagtttacagtgacagtcagttcaattacaaactactgcctgtggctgattgctgctttgagttagcacatcatttcaccagctaagaatctctgcatcactgcatttaatgaacagggttatatgtgtctcctttggccttgatacttgatgt

SEQ ID NO: 11869 - DNA, 403 bp, Oryza sativa
tcctcctcgtacttgactaaagatggtaaccacaattctgttcttggattggcagctgctccagtttgtgggaattttggcccgcgaataacttatgtggctagcgttgcgggtgggggcaacattgggagaaccataagctctgccggaatgtctatgcctactgttgcatcccctgtgaatatgtctggaagtggggctcttaatatccgaggatcaaaccaaatgggtggtactcatcaacacggtatatactaaacatataaaccccttgtataaatgcacgcgcatatgttctcaatttgtctttctttctgatttgataatgaaatgatctataatatataatattaaaaatcacatactccctatttttttatatgacattggttggttcaatttt

SEQ ID NO: 11870 - DNA, 390 bp, Oryza sativa
  unsure (1)..(390): unsure at all n locations
ntccccagccccttttcatcaatggactcctgacgtctactaaggagtgtggttcgttcgacaaattcctacctctatatctatctctgaggtgtttgggttttgcaaaactccatagatatgcagaagagaaatgctatccccactccgaccaagacagaacttttaccaaaagtttattgtgatctttttgttcaaataacaattaaagtgaaacagggtcaggaacaacgaatctctttatgataaacagatccattttgcaagctcgttattaccggtagttcctacaaagaatcggactaatgacgtatacaatgcttgaattatcgacgtagatgctacatagtgngttctcatccttcagagactacgagtgtaatacgagca

SEQ ID NO: 11871 - DNA, 393 bp, Oryza sativa
catgcaagcttgatactcccgctgtttatttctggtctatcattatctcaacgagtataaaatggataccttggtgagcttgaagcaacgactcaaccattgattcaacacaatgcgaccatataatttcctgtgttcacttcactattatatgtgcaacaatggatatcttgcatctctaattcgaccttaaatgaagtgcgcgggatagctgttcacttgataaaacagtgctcaatttacattgcacaacctgaatcttttcttcaggaagattgtctccaacatcacagcgacaggtatgagcgccaattttgccatctgcagaatacttaacgtaatgtgcttgttccatgctcactctgatgcgatcaacaagatgacagttctcct

SEQ ID NO: 11872 - DNA, 129 bp, Oryza sativa
gaacaaaaaactcagctttacctcatctgatgacacgcccttttctttttttagggcggggcccatctcgggcatttttcacggctcatcccttgataacgccatcactagataacacaagtgccgctt

SEQ ID NO: 11873 - DNA, 443 bp, Oryza sativa
  unsure (1)..(443): unsure at all n locations
cagcttgtttattacagttgtggtgttatatgatatgcgaagaagctaaagaattgaggtttttatgtgggcttaacaaagaaattcangacatgcttgattgtcaaagatatacatctctttctcatttgttacaacttgcttgcaatgctgaaagtaaaatagaggaggacatgaagaagcaacatgctatgtttttgtcttctattactaaccatttgcaggaagtgcataatcatgaaaaggaggagagagacatgaaagagccgccagtcccattgatcacactcaaagtcgaggcacctccattatctgaagagggcatcaaaggtaaacttaatggtgctgaaattaataaaggtgagtgtgttgttaatgaattgaatttgtccacttttcatgctatagcagagcaaccattagtggaaccaactgctgagatt

SEQ ID NO: 11874 - DNA, 408 bp, Oryza sativa
tatcatgatcacgtataaagatgacgatatcagtgactgtattgaacttttgctgtacagtcgcagaaaacttgagaacaacacaacaatactcacaaaacattgagtcctttgcgtattgtatttgcattctcatgtcattttccattgtactatgacttgcttttaccaacagtaagaaaaagcatgagatcttttactgtgtttacgaggtacctagaggtatttgtaggtggaacaacgtgtacggttaatcaggagaggagcaatgtatggaacaaaattattgtaacatgatggcagtggagtaattaacttgtaaaacatgggcactatacatgaattgaatacaaacatccatctgtcagtatatagttgtgcagatcagtatgccatgagacaaaaaaa

SEQ ID NO: 11875 - DNA, 400 bp, Oryza sativa
ttgatttatttaacttccaatcatgtatttagtgtgtttgtgagctgcgacaatctaaattatgttcctctttcgtttaataaaacttaaacctttcaaggcgtcttgttatgaattatttttatcggatgtcaccgaagtgacgtcttgttatgaattatgaattcacgttccagccaaagataatttttaatagtctgaaactttgccatagacaagttggcgaaattgcagttcatacgatgataatataactgaatatatcggtttcatcggcgttacaaaggaccgaataaccttagacaaacaaataaataataaatcatacatatggctacagaaagctgcttgaacttcgacgtctgccaaggcgccattctgcctgtcaaaacctcgtggg

SEQ ID NO: 11876 - DNA, 404 bp, Oryza sativa
gaactatgatactcagctagagatattcctggataataccatcactgttgtttatgggggaaatcaagcaggcataataatattgccacaatactttatcacatcacgcgcagatggggaggaatgttgtactaccacaccaacctcttgttacgccaccgagggtggagaggcaaaacaatccttccacgctagccactcaactggcgtggacaaaaggctcaattttagaaaatatttattaaaaaaataaaaaacatctaaaataattaaaaaaatccgccgccatcttgctatcaaccttcaacctaaagtctctcgtacaagtacaacggtaccgcatgagtatgcgtcgccatccacatgggctgagttcgaaggagaaaattgatggagaaattgaa

SEQ ID NO: 11877 - DNA, 453 bp, Oryza sativa
  unsure (1)..(453): unsure at all n locations
catgcaagcttgttgntgnatagtataacttgctgtttgcgagtgcattgngttaagcttggtggtgtctcacgttcgaaggagttgttcgataagccgagtacctggagattgctgcatgatgacagctcatctggaatacggccttcaagagagttgatgctcaagttcatgtagctgatttgtcccaagcgtccgagctcacttggaatttttccaaggaatgcgtttcttgataagtcgaggcttgcgatggagctcagattgccgatgcaaggtggtattgaaccactgatgcctttggagctgacgttgagcaccatgactcggagttgggtctgggtgttgttgcatgaaacaccctgccagttgcagatattctgggaagtgttgctccatgagcttaaagatccgtttggatcagagatttgagacttgaagcatagcagggct

SEQ ID NO: 11878 - DNA, 404 bp, Oryza sativa
tgcgacgtgaggtttgcgcaccgatttgcacaaatccgtcatgtttcttatatgcaaagatctaatatacggagtacttaactactactccctccgtcgttttgactttaagattatggacaaacataataatatttacagtactaagttagttccatcaaaccaataattaaatatattttcataataattttgttttgggttaaaaatgttactacctttttctataaacttgatcaaatttaaatagtttgacttttaccaaagtcaaaacaacttataaactgaaacggaggtgtatttccgatggcattttgtaagggaagccatacccataaatgtgattagcaattgctagtaacagatagtagatcgtcaattttcgtgtgcgctgtactgacaac

SEQ ID NO: 11879 - DNA, 455 bp, Oryza sativa
catgcaagctgtggttcctctgctggatttcatgtatatgaaggtgtgaaggcgagatattggagcaaccccgataagaaggtactggagatgctgcatgctgaatccaggtccaagcaggaaatggctctgctgctttgccaaaacctcatcactatttaagctctccactctagatgttcagggttctgcagatatctagcgctggaaagcaaagaatgtaccaagtagtacaatcctaacatgctacattgtgttaaaaacaaaaactatatctgtagaattgaattgtatagcagaatttacataaattatcatcttagttcaaactaaatattaataccaagggatattgtccaaactgatcaaaatgttcattatagtaacgcctgattttcagtacgacttgcctgaacctcacactaactgatcaaaatgtgcattcatgactaaac

SEQ ID NO: 11880 - DNA, 93 bp, Oryza sativa
tgtgaggacggctgcgccggcgatgttatctccggcgttggatattttttcgatcaggcctcggaggagagtacgcacgagttggcattccgt

SEQ ID NO: 11881 - DNA, 395 bp, Oryza sativa
  unsure (1)..(395): unsure at all n locations
ntcttatattgtattgatttctattatatatcttacatttacttgttttaattcttcgncatgtttatttataaaagtatttttttcctataatcaagaagatataccgtagtaacaatcaaacatgcacacagatatatttgtgttgtcttctcctttttgaagtgtttgttgcatctactttaatttaatttgttggaattttcgcatattttaaacaatggaaaattgctcatttgccatgaagattgttcattttgtgaagaaataccacaaactttagggggataactctcttttactctgaatgccatgtaccaaaatcactcatgttttcttttcttactaatattactcctcttaccttgcctcaacgtacaacttctgccaccatc

SEQ ID NO: 11882 - DNA, 446 bp, Oryza sativa
agcttgatggcatcaagtccataaccatgatttccaagtccaacaatcatcacattccgagtgaccacactcttcttgggcatgctttcaaagatcaatttggcaagatccaaacgaccgcatttcacgtacatatctatcaaagctgtttgcaccacaacatcgaacaacaccttcttcttctccaagtatgagtgcagccacctgccttgctccagagctcccagctgtgcacaagctgcaacagccccaactgcagctactctatcaggcttgataccacatcttagcatcctctggaaaaactccaaagcttcatttggctccccgaatctgacatagccatcgatgacaatactccatgagatcacattcctctcatgcatctcctcgaacagaaccctcgcttcatccattctcccatgcctggcataaccatcaatcat

SEQ ID NO: 11883 - DNA, 415 bp, Oryza sativa
tgtatccgaaatgcattttaacacttttacttaaactttattactcattgctgccttccttaaaaaaaagataaaacccaaactgcaatgcgaaacgcacaaatttaacatgaaaccaaaaactctggaacaaagttacaaaattctccatcaaacaaaaggacacctatggaagggtgaagattacactacagtacaagacctcccttgcaaagcaaaacaactggtgctccctccgttttaaaataaatttattttttatccattcgacacatcaataaaaaaaaatagagtactgttattttatcagatccaaatataattattctcactttatttactctaaatgtaattatattttactttcacaaaactctaaaatgattacttttagagtattttatccgttaaaaaa

SEQ ID NO: 11884 - DNA, 449 bp, Oryza sativa
  unsure (1)..(449): unsure at all n locations
catgcaagctttgtacttcatgtacgcttaacggatgcttcattttctatatggcatcnattttctcgggattcgcctcgatgcctctttcggaaacaaggaaacccaacaacttgcctgtgcggacgccgaaaacgcacttctccggattcagccttatgcctgctgtgtgcaagctgtcgaatgtctcctgtaggtcgatcgcatggtcgaaagccttgtggctttttacgacgatgtcgtcgacgtaagcttccacattccgccccaacttcttgccaagcaccttgtacaccagcctggcgaaagttgctcctgcgttccttaagccgaaaggcatcctgaggtgacaaaatgtgtcgaatggagtgataaaggatgttttggngatgtcgagcgggttcatgtggatctgttggtaaccggaatatgcatccaggaaactcatg

SEQ ID NO: 11885 - DNA, 417 bp, Oryza sativa
  unsure (1)..(417): unsure at all n locations
actaagcttgtcctttgctcgtccgangaaggacgaaaggatacaagactggttgttgatcangagttgctactatgctgcatatctcaaagatacaggtgcaaggtatatgtactctctctcagattaaataatctttggcacggtggcttacccttacccctgattcccacgagacactgcttcttcttgccttgggcggttgaaaaacagaacagcaactagagcactaatcacccgatctttattcaactcttattccggaagttttcaaatgattttggaaaaggaaaccaagttcctcgattgattcactcagtccctctaagtgtatcaatttgaattcctcaccaaatgttgctttgttgattcctactctaaggatttgatatgtggagcttggtagggatcaaacat

SEQ ID NO: 11886 - DNA, 425 bp, Oryza sativa
  unsure (1)..(425): unsure at all n locations
gcatgcaactactgactcgttctttattttttaacggaagggatgttatctgtcctttgcgggtacgtgtgcttatggctgcttctgtnggtcatggaattgcagcttggtgctaacgtatgaccggcttctgcatcttatgctgtcaatggttagatgcacgtggctttctgattatatgcatgttccatatgggtttgcagatacacgattgcaacttgtggagtttactgaatgatgtatatgtcactacatttgtacaacaggtgttggttaattgcgcttcgttcgcttataagtaattcttggcaagcagaaaatgttggcatttggaccatcagatcaattgcttcaaagtatcatgtctagcccctgtaatattatattgacactaccctctaataatgcgtaattagactggatgg

SEQ ID NO: 11887 - DNA, 446 bp, Oryza sativa
  unsure (1)..(446): unsure at all n locations
atgcaagctggccgcacttaagtctactgctgcttcatctcctataccagaggctattgtagaggaaagaaagaattatgggagatcaaaagctggtgatgctgacagtgacgaggaatgtgatacttcaggcgaggatgaatctaatgatgatgaggtttataacacagtaacacttttaaaatgagcagccatgacaatttaatgtatattagttttctgtctggtgattgtagagtgcttgctaggaaatcagtaaatgaactcaatgaacaatctagaatatagatctcctaattaaattacttttttcaagtaccccttattaaaattctaaaacatgtcatgcatgttatntggactcatttatgtgtttaccagattactcctttttttttgtcctttgaattggcaaagctggatcggacaatagaatacacaatctg

SEQ ID NO: 11888 - DNA, 402 bp, Oryza sativa
  unsure (1)..(402): unsure at all n locations
tctgagagaatatagagactgcttcgcttgtgagtattatgagatgccaggactctgccgatcaatcgttgaacatcggctacctctcaaaccagggattagaccgcacaagcagcccctgaggagatgcatagccgatatgcttgaacctgtcaaggctgaaatcaaacgtttgtatgatgctggctttatttgtccttgccgatatgctgaatgggtttctagtatagttcatgttatcaagaaaaatggtaaggagagggtatgtattgattttagagatttgaataaagctaccccgaaggacgaatatccgatgctagtggccgatcagttggttgatgctgcttcangacataagatattaagatatggttatatcgcccttagctgttatttata

SEQ ID NO: 11889 - DNA, 437 bp, Oryza sativa
  unsure (1)..(437): unsure at all n locations
agctntaatatgttatgaatcataacaagctttaatagtttatgaaacgtggattatgattaagatggaggcaccggccgattactcttgtgtagttttgaatcgntcagccaaagatgcatcctgtgatatcagcgtttggtaccagcttttatcaccattatgtactaactcaacattcttcagtcctggagcacttgcaccatggattgngaaccctttcagggagtggcaacctcccagcttgagacttactagtgatttccaggagaatctcatgatttcacctccgaccttgtagaagtactccattccaggttaatccacaagagagagatgagttagactatgaaatgcttctggatccaacgagtcaccgacatctgcatgatgtgccggatatctggtatcagcactgacaaatttcgttccaacag

SEQ ID NO: 11890 - DNA, 403 bp, Oryza sativa
  unsure (1)..(403): unsure at all n locations
tcacacaaggaaaccatggcgaatactgtggcagaaactttgcatgtgcattcttcagatggtagtttcagtggcttcgcagctggtggtcttctgtcaatggctgaaaaactaccgttctgtactcaggatcaatatgctaatggtactgttgagggcttgtcagaacaagagttgtgcataaaatgtggcaaagatggtcagttgctgaaatgcagtggctgttttttagccgttcatgatacatgttttggctcatcagtgacatttgatgattctggtcagntctactgtcctgtatgcttctatactaaagcaactgaagcatatcaaaaggcaaagaaaacatattctgaagcaaggaagaacctatcagctttccttggtagaaagcaattggctg

SEQ ID NO: 11891 - DNA, 422 bp, Oryza sativa
  unsure (1)..(422): unsure at all n locations
catgcaagcttgagtacctacacatttattcggactattcattctcatctaagcggacgatttgttctgattgagtgagcagcttaagggtgtgtttacttcgcgaaaagaaaaatttttatgtgtcacatcggacgttttaccggatgtcggaaggggttttcggacacgaatgaaaaaattaatttcataactcgcctggaaatcgcgagacgaatttattaaacctaattaatccgtcattatcatatgtgggttattgtactacttatggcttatgatggactaattatgctcagaaaatccgtctcgtgatttccatacatactgtgcacatagntcttcttttatgtatattaatgctccatgcatgtggcaaagatcgattatgacgttctttagaataaattttgggaataaac

SEQ ID NO: 11892 - DNA, 404 bp, Oryza sativa
tgagggtcggcacatcataacggaagtggttgaagattgatgttctagtgccccggccgaagccgccaagaactatgtacgtcacagcagttggggtgtgcgggataacgtgcctgtcagtacggtgtactggcgaagaacaagggcacgcggagatcatgagagctttggcccaaattcggagaaagagatgctgtggaccacaatgctcgagacattcacccttcctgcgggtacagaggacaaagtgaaaaggtggactctgaagaaaatggcagaacagtttcagagctttaagggagatctgtaccagaagtatatactgaatgggcagacaccgaacttcgacacatttccaaagctaagggatcactgtgacgagtttcgtgcatataagacaggtg

SEQ ID NO: 11893 - DNA, 441 bp, Oryza sativa
catgcaagctttctcatcatgaacatgtttaactccttgatcacagtctacatcctgatagtgcttgtgctcttcttgtaaggccatgacccgatctggtttatcatttacaccatcttccttctaatagtacaaagacaacaagagagagtaacattcacaaattttgcaaattgagaatgaatagttactccctttttgtaatgtcattgaggatgttgtagggaagatctcgttgaacgaagtggtgaattcttggatggtacaccgatgggacttgatcttgcatggtgtaactttgctcttgagtgctcttggcatcaatcccatccacttgtaccggaagcatgttcttcatgttcttcatagtcaattgcggcaggttgacttgagttgattgaggttgatcgagtagtccaccttggtcatcatggacttctt

SEQ ID NO: 11894 - DNA, 405 bp, Oryza sativa
tgttcactagatgcatgtcctcttgtgtcggtgccctatcttatgcaagttggccacattggtgggcttatgggggagagaggttctatcttctctctcaccctctctccctcaatcccaaagaggtggctagagtggagtttgtcatttgttgttagggttaaggtttgggcgatctcggctgtatttcctttgttggcttatcggcggtcggtcatgcttattggtggccggtttggtgctatccttctcccgagtatgtgtgttggtgctgcctgtgtgtgggtggtggctatattttttcttctttttctagggtacgacctcccagcattgtaatcctataattttttcctactgtatcaatatgaacttcacactgtctggtgcgagtcgttcaacaaa

SEQ ID NO: 11895 - DNA, 320 bp, Oryza sativa
cagagcacgagctcactgctattcgttctatcggtggaagggtaaagagcgtcggtctggtactataaaccattttcgtacaactataaagacttgtaaatatagacagcttattatcggattactatagatattattctacgttcaaaaatgtttcttaaactttttttttgtgattgtcaatattaataacatttatactactacctcgttagtataaacgttgattaagcaaagtactactttagttgacaggtgaaaaaaagttacatttaaacccagaaatatataaaatatcatatgatgaaacaatagatata

SEQ ID NO: 11896 - DNA, 402 bp, Oryza sativa
tatgcacacgtatcaacttaaacttgattttagatgtgtgtatattaagcacgaggcacattcctccatttcgttctagctccacccctgatgcccaccaccagatcgagttgacgggattcagggcagccaaccaagatgtgatctatactctcatcctgttaatcgcatagaacacatcggacggagtggggcagcccacgacgacgaagacgatcagcagtctaacacctattcattgtgaccaaccaaaagaaagtgagaaagcgaggaggggccagagactttcaagttggcgcctcttggaaacggttccttcctatgaagatggcatggtacgccgaaccggaggaatacgttcctgtcggactccatttccatgagaaaatgcagctatattta

SEQ ID NO: 11897 - DNA, 400 bp, Oryza sativa
ttcctgacactggtctgaccacacaaacttctttttcttcttgagtagtcgcgtcattggtcgggctatcttatagaacccttcaatgaaccgtcggtagtatccagccaagcctagaaaactccgaatttcagtcacagatttgggtgctttccattccgtgacagcctctactttagcaggatccactgctactccaccggccgagattacgtggcctacaaaagcgacttcttttaaccagaactcacacttgctgaattttgcatataacttatgcttccgaaggttctcgagtacccatcgcaagtgttccgcatgttcttcctcatctttagagtagattagaatatcatcgatgaataccaccacaaatttgttcaacagtccatgaacactt

SEQ ID NO: 11898 - DNA, 446 bp, Oryza sativa
ctgcagctaacagttgaaatacaatgttctgattactacctatacttttgtttaaagagtaaatggtgtattgctggtgcgtccatatgtaacatctacctgatataccctataccaaaaccatatacgatcgatggaacaactatttctcattaactttttccccttaactatcatattacctatgtgttgcaaaaaaaaaagttgaatgtcatcaatccattttactatcacttatatacatacatctctttaatttatgttgatacctttgatctgataagtgaagcctttgacccatgcacttcttttgtatctgtaaaaacggtatggagtacgcgggtgtatggggaaattcaccgcccacgtccaccactagtttctttgaaagaagaatcaatgtatgcgggtattggttcacttcaacagcaaatatttatacttct

SEQ ID NO: 11899 - DNA, 446 bp, Oryza sativa
  unsure (1)..(446): unsure at all n locations
ctcaccaaatgtacacattcccntcctcatntttcttccccccccaccagaggccanatgatacctgttatacgcgaactaacaaactcaagctgaagaaagcatacacaagcgacgaccacaattttctccaatatgccaccacgcaacgactctgcatcttgagcgtgacaactccgcacataaaacacaaaacgggcatattacaagacaaaggatattcttgcggagctatgtggtgcccagccatacgcgtaaactaagataaatccgctctatgggtatcaagtaaatctgccatgaacagtcaactgaaaaaacaaacaaacctcacacaattgacaaaagctgctccaacaagaattagaaaagaacatatctgagccaggccaaaatgcaccaggcagctctcagggaaatgtaaacatacacgaaccctacagatg

SEQ ID NO: 11900 - DNA, 388 bp, Oryza sativa
tgcaagcttcatcacgttccttgctcacacgttcttgctgctgccggtgattgtggcatatcgcccaatgtgtacgtctgaaattatttcaagaaagaatcaatctttcatacatggagtgaggagatatatgagttcaggatctcaggatcttacacaacgctgagtgcccaaattttttatattccagatccatctaagttaagggtgaaaaagggtcgacgccaaactagacgcatcaaaaatgatatggatgagtcagaagcaggtgggaggactttacgctgcagcaagtgtgatctgctcggccatacttacaagaaatgcccgaaaaatgcagaaattccaagcggcgcacatgctagtccatctggacaggcaagtgatg

SEQ ID NO: 11901 - DNA, 400 bp, Oryza sativa
actcaagctcgaccaattgtgtgtaggcccactcaagcccaacaatttttggttttatgctcgcaagactgaactctcaacacaactcgaagaatgtacgctgagctagatatggagcacaaaaagctagccgatctcccaaagtctattgaagaacaaaaagcacgactcaaatcggccatcaagcatgttggtgatctaaccaagtctctgaaagttatccctggaaccgatgctcacgatgcccaagccatagaagaagtagagcagattaggcagaaggctatatcggccatccagcgatacttatctcaataatccttatgtaatacgacctagaattttgtaatcggctgagacattccgacactctagaagattcgctcaaatttcgcactat

SEQ ID NO: 11902 - DNA, 455 bp, Oryza sativa
  unsure (1)..(455): unsure at all n locations
cgcggcatgcaagcttggtgaagaatatggcatcagcaaggattgagaatgcagtatctatctagttttggtcccctgtatcttagagggaatgttttacaacacctttgagcattcataccttcttttatatcatattatgtgtgttcttcgtttcttaggccagaaatctacaagatagaagcagcttgtgtaattccagatttcttgaatcttggtatgggatttgcctctcaagagtaactctgaacatacttgngtgggatagtagtcagttcttgtcgccttatatgaaaaatcatgcatgtatagctcactgtattatataacctgataatgatgatgatgaatcgtaaaaaatggacggaaatccaagaatgcttcgtanatatatgtagctgaaaatatattgactcggataaagctaggataaaacagaaacatagtcttccctc

SEQ ID NO: 11903 - DNA, 433 bp, Oryza sativa
acactatcacaaactcaagcttgtaaaggggctcctcccctactgctcactactaaagtgatgtgttttttctttgatcttccattatttcactctgccattattcacaagctaattaattaattacataagctaagcgccgggagtttgctttggaatcgccggaaaaattggatcctttacagtactaatatattcttctgaatacccaaggagcgcatcttttccattaagagagataaaagttaattacatttgaaagaaaaaacagcatgggactgatacaggacattgacagttaatcctaagtctatctatcgcactgagtttggcaaccaaactccagccgagtgtagtttcaaaatatttcttcaaactctcaatttttctattacatcaaaactttcttacacacacaaactttcaacttttc

SEQ ID NO: 11904 - DNA, 414 bp, Oryza sativa
  unsure (1)..(414): unsure at all n locations
gcaagcttgagtagaagtgtatagcatgcatggaaccctgttgctcaacgggttgagattttgcaatttttttttaagaagaaatgggaattttcaaagctcttcttcgctctatatttattttgtatgtctcgcacacaattaattattcacatagagctttattatgtgaaaagtattgcattttttgtcctctctctgcaagatagataaaattacgatgttttgcacataatttctccttcaagaacaagtacttatatctcatgggttgaagaggtatatatctccttgcgacgcatatatattacaaatggattgatcagagctattctctaaaatatcaaacttgagatgactngcttgaaggaaatgcttatagtgaaatatattaagttgattttttttgacatg

SEQ ID NO: 11905 - DNA, 410 bp, Oryza sativa
  unsure (1)..(410): unsure at all n locations
taaataaagtcttaatacattaaagatagggtaggagatgagaggttatacattgctgntttgatatgcccttactgctagcaatttggccttaagacgcacaacttctaaccgactgcatttccaagtttccactatatacctgtcacagatgacttggcacatgaataattttgtatcgtactctgcagatactatggttagcatagtataagtaatgccttgtcatttaatcaccgaattttggcttatatataattctatttttaatagtatttttttctgtaaaatgtgcgtttgtatctgaattatcatattaccatacttaacagattaaattctctgcgggttacgcttgcgaagtgcacagagaattcagcaagctacacctgaggagatcttttaaagct

SEQ ID NO: 11906 - DNA, 448 bp, Oryza sativa
  unsure (1)..(448): unsure at all n locations
catgcaagcttccttcaaatgctctgttatcatttgccggggccaaaaacagactgtgtactctgaactcatggagacttgggagaccatagnccaacgaattctatatccacaattaacaggataagggcttctcctaaattctattccattgctttctaattcggcaggattctcttgggaaaaatgctactcaactgatgcgacattgtgtacgctcgcttctgcttgttttaaccgacctgctatctgttcactagtctggaatgtattgcgccataccacttttagtttaacagttcttaacgaatgcctgttatgacaattttctttcttgctgtttcctattggaacgcgatgatgtcattattcatgcaatatctgtgtatcaatcagcttacataatatttgcagaacagaataaagagaaatatgtctcgcattattc

SEQ ID NO: 11907 - DNA, 452 bp, Oryza sativa
  unsure (1)..(452): unsure at all n locations
cctgaggcatgcaagcttgaatgttgngaataaagaaatntccaaagtattgggcatacaccatgcacacactgatttaacaaatgtgcttgagtccctaaaagacacatggtttcaccacacctgaaaatatatggcatatgtggtataaaatccgagtaaataaactcataaaggatttaccaaccgcctagaaaatgaccaaaatatataatcagcctaagccataatattggtcaataaaaatgcacacttacgtggcaaaaagtaacgatattgtatccaatcaattgcttgataaacccaaacagcgccttgactatataaaaaagtcagcgggacagctatgaaaaacttcactgttgggcaccttttaaaatgcattgtaccaactcctaaaaagttgagtaactggcggataaaatgatttaagggattgggcacttgatcac

SEQ ID NO: 11908 - DNA, 397 bp, Oryza sativa
  unsure (1)..(397): unsure at all n locations
tgcttgagaggggtatcgaaccggccaccgctaaatgtttggatcgattgaagttctggtactacgctcacggngaaacgcttaacccagttgatggctccctggtcttcagcgatcagatacgcgaggctgcgcgtcgactaacggatgcagtggaagcctcttctcaaggcacgttccgacccgacagagagaaggacgagctgtcactcgccctgcagactctagagcatccaggacgaacacgagggaaaggggtgattccttggaagattggattcaaggaggacatccacacgtacaggagtcggatgaggagcaagagagataccgagacgaagattgcagatcttgagtacagggtatcgagctacgagctcagcatgcaagaggaggt

SEQ ID NO: 11909 - DNA, 437 bp, Oryza sativa
  unsure (1)..(437): unsure at all n locations
agcttaatgacctcgcgttattagttaaaactgcatgaatacctttttgtgcatcatgaataaaaatggaatatactaatatcagcacgcattcattcgtaggttgttcttggctacataagattgatccacgatattaatgccagatccattgatctatagcaattgtagatcagttggcagtggcggagggtaaaattaatcagcggtgagcagcttgatgctctcaggtatgatccactatccagttttgttgctgatgctcaccagagcaacgttgccccacttccttttttacagtcctctcatgttagagaggttgaagtgatagattactttntcttttgcattcctctagaaaaaaagcaatattcagatgaattcgtttgtagtgtgcgtgtttctatgaagagaggtctaatttgtttggaggatta

SEQ ID NO: 11910 - DNA, 378 bp, Oryza sativa
tgatcatgatcctttttcggtgaatacaatttatttctttgataaaaagggggtaattcggccggagcaagcagaatctactaatggaaaaggagtggtcattggcgagccaaggcctaagatgatagtgacaaagaaaccggaagttattgtttggaaggagaataagagtggcgcttcaacttctaaagcccctatgaagaccaaagtgacttttggtatgcttttggagaagtatgagaagcaaggtggtgagagggttcacaacaaggggaaaagaccacgatcacctcctatggagcgatttggtcattcaccaagacggtcgcattcacctccatatcatcatccacaagacatgtcatggggttcttatcg

SEQ ID NO: 11911 - DNA, 458 bp, Oryza sativa
agagcgacctgaggcatgcaagcttttgtgactggtgactttaatgctccagttaatcaagacctcatcagcaatttgttctccgatggcgtccatagtgccattgaagtctgtgctcagttgaggcccaccgttgacatttcagtgcctgctgatgcagactttgtgcgtccagagctgcgacaatcttcgtgaagtttttgccaactccagtggcacctcataaactatgtcagtatctgacggtttcaactctcaaagctatgtatcactatttgagaacctaaatgtaaacttttggagtgtaggattgtcgtttggttgtcactggactagtgctggtgtttggcatgaataaaaatagtggtttaataaatgccgttcccttagagcagcagaggtggctgctccctctaattcaatccatattatcgtaccacgaattaagaggtataacg

SEQ ID NO: 11912 - DNA, 359 bp, Oryza sativa
  unsure (1)..(359): unsure at all n locations
aatgcgatgacagacaaacgagcgagtgttcatcctattgctctngcgccgcgcacagcatccatgtccgaagaacatcaaagccataaagctcaaacattgcacaaagccgctcagtgagccaattttatttcagcattacaatttcagacaaatctcagcataaatttgttaaaaaaatttcagcgttaattaacactcacaatgcttaagcgccgccagctaccaaacatgttcactctggcagatgccacgcggccacagacaggagacagcgcccaaagtaagcaggaaagcttgctgcttccctgttccccacaaaacaacactctgctccacaacttgcaacgacaaaaaca

SEQ ID NO: 11913 - DNA, 428 bp, Oryza sativa
agcttcatagagtggtagatatcttatattatctaaatcaacatcgaaatctaacctaattggctgccctctaccgacagatgttagccgattgtagattatatagcggcattgccggagattatgtaagatatatgatagctcgacgaattacataaacgagatcagagtatcataaagatggaagcactaatcccgagaacacaagttgtcataacaagttttacctcttgttgaagatcgaaaccgatgcagctcaacccgaaagtaagaactcgtcgaaataaaactaaagcaaaaagggtggcgatgcgccgaaattgtattgaacgtgtgtgttcaaagttacatagggctcgggtctatttatacccgagaattacaagatatgtccataacggacacgacttatatctctaacatactct

SEQ ID NO: 11914 - DNA, 359 bp, Oryza sativa
  unsure (1)..(359): unsure at all n locations
tangatttgggagtgggtacgatggaccggcgggttgttgaattatgtgggttggtggcggctggagccgtggcctggagtaatggtggggaaagagcgaagaccgtgattagggatatggtactttggttggtccgttggtgcaaagactgtaccctggtttctgctttttttttttttgaggttcttttcgttattttctttcagcttccttcgctgcttttcattcattgcacctacaggacaacgtctcttttaaattggaattaagtatacatatgttaactaattaaaatatttggatttttttttgttcgtcacaagttggtggggcgccttcttagccctctagtcccaat

SEQ ID NO: 11915 - DNA, 435 bp, Oryza sativa
  unsure (1)..(435): unsure at all n locations
agcttcaatatntcttcaaaaaagaggggatgtcatgccaaaacttctattgaatttatggtggtaattacatacaaatcggaggtgcctaaaaggtttgcaacttcatcctccaatgtttttttttgtcatactacatttgcacctatgttttgcacactttttttgtctccaaaatttagatgtaagttgatgagagagaaaatgtgtgtggggaagaaagaatatatagaaatttagttcatttgctaaacaaggttttataaaatagctgagaaggaaaactctagtgaaagttaatcttaaataatagaaaacacactaaaatgaaaattaaaagaagtaaaacacattaaaattagtttaaaactctacaaatagttgttaagaattatttggcgtaatattttatgatctttgtatgaataaagatat

SEQ ID NO: 11916 - DNA, 449 bp, Oryza sativa
  unsure (1)..(449): unsure at all n locations
gagtcacctgcggcatgcaagctntgcaacgatgacatgctttcattgtgaatgtcggagctgctgccttctgtggggcttggcaacggngactcaccacctggccctgcgcgggctatccacaggtttccctcctcccacgccatcggtgccactagatgtgttgcgctcttcacctgtagcggcggccgggccatggccctcatgggtgcctgtgcgaggagaaaagagaaaaggggcaacaactgcctgatcgtgtgcatgggctgaagcctacgtgccgagccaaactattgggccagtccaaagtgcaaattatgaatacatggtgttaagcctggacggagctagaaaattggctcatcagtatcgtaatgcattattaatgttacttgatttcaagtgtcatcttcatagcctatacaatatagtcatggatgtcattccac

SEQ ID NO: 11917 - DNA, 332 bp, Oryza sativa
gagcctctcattgctatttgattctttcgacgtatgcgtgatagacaatgatattaaccaatggttggcaaaagttggatgttctcctgtcagcactgagtggaggcaccaagtctacttgtagtatttctgccgagtatgatccctaagtggtgagttcccttcacaattccgcgtggcctatccttgaaacctcgattatcacctcctgtacaagtgttagatacttcttgcccgtgtgcatgctatccatacttacgaaagctcaccatcttatgcccgttttgtaaagtgtctggccgaagaaacggtgttgtcttggaattggtctt

SEQ ID NO: 11918 - DNA, 416 bp, Oryza sativa
  unsure (1)..(416): unsure at all n locations
aactcangcttaccatactgatatgtaccgtgcaatacaccccacatatttgcattttttgccctcctctccaacggcggaaggagcatgaacgcgaatgacattgatctacatctagagcatagataaactataaacgtgccacaacgcgaattattaccatactgttaccctgttgcgccacaatattgacggggaccacttgtagtaaagaatcaactaatcagtctgtgagtcactccctatatatatcctacaatatagcagngccgactgataagtacaaatagatacttcttctcccccataatataccaatataaaatcggacgggatatgtgacactctcatgtttcaagacgatgcactatcaaatgtatcatccgatcttatgggaccgacggagttgaaacact

SEQ ID NO: 11919 - DNA, 446 bp, Oryza sativa
gcttcataagcgactccttcacgagcatttaagaaacttcttgcgaagcgacaccttcgcgagcatacaagaaacaattagccctgccattgaatgatatagctggggaagatcttccttgtcgaaaacaagagtaatagttgtcttgcaatacaattggtctccaacatgaatagatactttagtgtactttggtgtgtggccggtctgaccggcaggtccgagtccgactgtgtttcgtcgggtctcgaggtttccttgctcgggaaggcatgtttcgggtttcctttggtttctacccgatacgagaagcttataatgatgttgctagggggtatcctcccgatactagacaaggccaatataattatattgcgccacaaacacaacctattatgccaccaaatctaccgccatatcaacaagtgcctaataatatggaggat

SEQ ID NO: 11920 - DNA, 413 bp, Oryza sativa
tgtttattacgttgtggtttagatgaacgcgaagaagctaaagaattgagggttttatgtgggcttaacaaagaaattctggacatgcttgattgtcaaagatatacatctctttctcatttgttacaacttgcttgcaatgctgaaagtaaaatagaggacgacatgaagaagcaacatgctatgtttttgtcttctattactaaccatttgcaggaagtgcataatcatgaaaaggaggagagagacatgaaagagccttcagttccattgatcacactcaaagtcgaggcacctccattatctgaagagggcatcaaaggtaaacttaatggtgctgaaattaataaaggtgagtgtgttgttaatcaattgaatttgtccactcttcatgctatagcagagcaaccatt

SEQ ID NO: 11921 - DNA, 447 bp, Oryza sativa
  unsure (1)..(447): unsure at all n locations
catgcaagcttctcacctatctatggaatgccttncagttcttcagagcaatttgtaatggaaaccgctcgagacaaggatgcacatacagaagcacatcgagcgggcaacaaactatgcatacacagaaattctaatgaaaacaaaagataatacataaggtattcccaaacaaatatactgaaacgaagatcgaattaatccagatatgttccttgtgatatgtagcatggtcctacaaatgtttcaaatgccaaataccagaatgcttcaatcaattacgattgtttccctttccctttccaattagcaaaaatgagagcaattntcttgtatgctatgtctctgaacgtctccttgcgagctgagggttagcagacagcaaaacatcagtcaacagatagtgacaataatcgatttctaccagctacaagggcatgcaccaca

SEQ ID NO: 11922 - DNA, 430 bp, Oryza sativa
  unsure (1)..(430): unsure at all n locations
agcttaattaacaatcggccggctacttgtttgtattttattcagncgccatggctaggtagctagtggcgtcttgtacaactacaaaaatcctcctagggaccgggttataggtgccggtttatttaaaatcgacacttattaacctttcccacctcccgcggtttaaaaaataaagaaccggcacctttaaacaactataggtgtcggttttaagaaatactattgatccggttttttttaaaaagatccgcggtgccggttaaataaaaaccaatccctataatatattataggtgacgtttttttaaaaaaaccggcagctaataatcgagccgagccggcaacaaaatgagccagtcgagcaggcggtgcccacgcaaggacataagaccacgcgaggagataaggatcgatctcaatccatcca

SEQ ID NO: 11923 - DNA, 411 bp, Oryza sativa
tggtcttatagctggagatgacacagctgatacaaagtttgttctgtttggtcgtatggcatagaggataataggcaaatcagtagagaatttactggatcagcacccggccgatgaagcatatattcctaaacagatcactgatttgctagaaaaacagttcacctggaatgttagtatgactgatacaactatatcaattgggagcatttccttccaagttaacaacattattggaaatggttcacaacctcccctactgcttcagtcaccatcatcatctcaggcggtgtcttcagtccctctcttgactatgtcaccaagtgcttctgaaggaatgtctattgcccagcaaagcttgactgctacaacttctcttggcttcaatagccctactgtgacacctatgca

SEQ ID NO: 11924 - DNA, 344 bp, Oryza sativa
  unsure (1)..(344): unsure at all n locations
gcttgcctctatgaagctattggttcctatttcgncggtctccgacgccgacgacgaggacgatgccgaanaacgtgaccgcgatgatgaatgataagaggaatacgatgtggaggccgtggccgataaggccacgaacgatgcgatcgacgaccgtgttgacaccccttgctacactcctactccaagtgcaggtcacaacgagaccggggtgaagtcgaacagctccctccttcaacgataggatttggagggggncgaagcccttattgcgttctcttcgggcaatgcggcgaaggtatgtccggtcaagattatctctaaacagaaaggactcgtcgaca

SEQ ID NO: 11925 - DNA, 441 bp, Oryza sativa
  unsure (1)..(441): unsure at all n locations
agcttgatgaaatatctttcttcccaaaatttatttntgtacctcgcatgagcagattggcgcatatgggtactgtgattacgaaacantgcaataagatgatttcaagggttggggaaagtggtgacctgccaaagaatttggcaaaagcactatcagtggtgaatctgtataggaagcaagagttgaaatgcatggacatctcacaggcagagttctttccattctcaaagaaagctattttcttgcaaaatgatgtcctgaatgctatttggtcaattcaaaagttgaagaaaggggatcttaaattgctgcgtcccatactatgtcaaggttcaaacgatgagatgctgttcaagactactgtgagaaggtatntgatagattgtttgtttgaatgtgatcagggtgatttaccagatgaggcatcagatgcctcta

SEQ ID NO: 11926 - DNA, 401 bp, Oryza sativa
  unsure (1)..(401): unsure at all n locations
ttaattnagtatgaaatgccaatttccttaattttgtttgatcctatgactgggttgcaaaagaaaatatttgcttgcatataaaccttttgtctttattgtgctctgacgttttaattttggagttataactgagttacagtggtacgtctccctgtttgtccaaaaaaatatcttggttacgggctatagacgttacatttggttgcatcttattgatttttattaaaatcgttggttgattgtaccaaacgatttcttgggttctccgttgaggcttcatttttcatccagaaaattatagtgtacttgtagttggattccttgattttgaaatgttcttcttgcattgagtcttcaaatttcctttttggagattccaattttggtggctgtcacag

SEQ ID NO: 11927 - DNA, 386 bp, Oryza sativa
  unsure (1)..(386): unsure at all n locations
ccgaccccgccccggcgttgccaactattggtgtgcgaggtttccctgaaccgactatttacttaaccatggtgtcccattccaacttgtggttgcactttgattattttccatgagtttcccacaggaatcgtgccttatatgcgaatactggacagtgccacatatgcacaacctccgcatcgcgagttttcacaattcattttattttcatacacaccgacaccacatgtttggttttgaaggcttcacaaacccattctccaagttttcgacaaacaacggcgtatgtgggatatttggtatacacgctcatagagcacgaataccgatgtaccacaatggtgnagcgacaaggaatcatggtagtacgacctacggaaata

SEQ ID NO: 11928 - DNA, 407 bp, Oryza sativa
tcaccggactcaacaaaatattgtcaaggagttctccatcaaatctgaggagcacagactgcaatcctatcgacaagagccgactagacggtctatactcaacccgaatggagccctcaacttgaatactactgcaagtagatttgaagaaagtctccatactccaacttgccttgaacatgcaagaattaggatggcggcgactgaacccctgtcttgtaacgatttggcggaggtacgcaacaccggagatggaagggaaaatgttgccgcagagagcttcaataagcaggagcctgagcaaccaaccaacaagcttgccaccaagagcttcaacaagcagaagcatgtggagattcaaccaactaacaagctggagcagctcattcagcccaccaacgagcatg

SEQ ID NO: 11929 - DNA, 339 bp, Oryza sativa
ccactttgctccggattaaaatcctgtacgtttaaagtcactgtgcttatgctactgacatgtggatccgatggatttagatcgcttttgctactgcatgtggatccgatgaatttagatcctctacgtttaaagttactatgcttttgcatgtggatccgatgaatttagatcctctacatttaaagttactatgctcttgttatgacatgtggatccaatggattaagatcctctatatttaaagttattgacatatgagtcaatggttcatcggatccacatgtcaatgataaagctacatgactttgaagattggtgatcatgatccccttgtta

SEQ ID NO: 11930 - DNA, 387 bp, Oryza sativa
  unsure (1)..(387): unsure at all n locations
tgttcaaacaaagaaacatgaaatttacaatttggttatttgtttctccaataggtaatcgaacattgctatgctactaaaaagtgcccaactaagactagtatatcgtatatattgtgcataagactggctaaccatgaggcacaccaaggatagaaatcctgaatccaccattgcaatggagtatatgactttgtgaagtatgaaggccagaaaagggcatccatcaaagaagtctgagcagcattagaagttcaggtaggcagaaagcccatgtaaacatcttaacatgtatttcactgactatatttatcatctaaaacatacagaaaaagatgataatgtggccagacaaatatagatacgcanattcaacatcacagataa

SEQ ID NO: 11931 - DNA, 447 bp, Oryza sativa
  unsure (1)..(447): unsure at all n locations
gcatgcaaacttgaatgagtactcgtttattctttgtctgngacatgttaagacaaggccggacaggtgtctgctggtgcatcaagnacaacgagttggtgcattccacagcaatagtgcatatactgtactatccacaccaaatggtagtcctctttactccttttatatcaagggtgttcgtcataaacaagttttctggctgacacatttgattcatcatcgcggcatccacaacagaatgtactccatgtctccattattgccataatctggtcccaacaaaactaaatgttgtcacacggaacacggataggcggtcaacgcaagtgtggatggagtcatggagatgtcagacatacatgtggcactattcaaacacaagattcgttctacatggggtactcgtggcaataattctactactcctatactactccagtcaat

SEQ ID NO: 11932 - DNA, 410 bp, Oryza sativa
  unsure (1)..(410): unsure at all n locations
ttactanattgttagagtcgtagttaagaaattcttcttaaattattagtgcatctacaaacagcacatgtactccctccgtactgtaaaaaacaacataatactgaatgcgggacatcctaatacttcgaatctgaacatacatatgttcagatttattgtacctggatatgccacattaaagtttagattcgtttttttaggacggagtgaatactatttaatttttactaccacaaactcttttgtcttattaaaaaagggatagcattcctaactttggaatacgtaaatatgaatttgtacccatcctagactcttagataaatagtttattagcttaaatgtcaaactcggaccaacaattaacttgttgtacagcatgaaaattccttattattagtactata

SEQ ID NO: 11933 - DNA, 312 bp, Oryza sativa
  unsure (1)..(312): unsure at all n locations
acccctccaacctttgccatgaaaaggttccaagagatggggcaatttcgctgggcttccgcggccgacggaaaaaggtaagtcagtagtccatggtatgcggcggcggcgacagaaggcaagcagtcgcgcgcggagatgggccggcggacagcgctgcgcggaggaacccttttttcccctttttttttcaagttcgcttcttttttgggtttttctggtnttcttcctgccttccgtttcgattttttctgttntattttttttctggatcttcttcgctttttcggttttaatacgtatgtatgtaaa

SEQ ID NO: 11934 - DNA, 402 bp, Oryza sativa
tgtaaggaagctggaagtgtagaacttgggccagccagagatactgtaatttcccaacttaatgagcaagataaggctgtaaagcaggagccagctggtgacattgtagtgccacaacctgacgtgcacgctagggtcgtaaaggagtagacaccgagaacggaaactaatggggaagctacgaacatgaaggagacaccaaagaactctgcaatatgtaattctccagagacaaaggattttggaaatattacagcaatgggttcagatcctcccacaactaatatgagcgaagaataagccgtggttgttgaatcaaaatgcaatagccttccagtgtcagtagtgtgttcacctgcagaggtgtgaaacctgaatggctggctgttccagtttaaaaag

SEQ ID NO: 11935 - DNA, 264 bp, Oryza sativa
cgagctgcacttatagggacttctgatgcaaaaaagtccgagatttcccgtcgacaaacgaagaaaacactctataagctctgtaggctaaaaggttgacactgactgatgaaaacacagtaacgacaacgatgataaacatccggaaaaagggctttatatgaataccggcatttcccattttttaaagcaatgttttaaatgaaaccctactacaaggggtgttagaaatgatgataaaccagacatgctggacaaaacaag

SEQ ID NO: 11936 - DNA, 401 bp, Oryza sativa
tgctgcttgatccgccgcgatgaggatgatgggggatcgtcgttgctccgcgttgccaactcccttcacctcggcttctccaccagatcctcagagttcttctcgatctacaccgccacgctgccttgtcaaggtcgccgtcgccataagcagagaatgtggaagaagagagcaacgtccgggtagaaggagggagagtagcgccgaccgacggatgggtgtggaggcgaaggtgaaatggtggcgattgggtgcaaatgaagtggtgaggagccacccacttgccttgtcttcgccgagctcccgccgttttcttctcccataccggcgacctcaccatgtcatgctccacgccgctgagctcatcggcgtgccggccaatggagtagggtcactagtcg

SEQ ID NO: 11937 - DNA, 244 bp, Oryza sativa
tttctttctgaatgggggagaaagatagagcacgaatgaattcaaccacagtactcagcatgccacaccggagatgcattattaatgcaagggagtacaaggggattatattatatgcggttaatgatttgcagtaaacaagcatttaaaagtcagttagttgcccaaagccattttataaagacgatcctagagctacacagtattattaatcaaggccgtgaacccacacgaacctgcctta

SEQ ID NO: 11938 - DNA, 398 bp, Oryza sativa
taaggagctgagggggggtgactttatatgtagatatgattactaccattaacttccaatttactccgcccttatatatgaatttaacttgggcatttcattttgcagtgcaactttgcttatgttatgcttgtatttggacagaaatttcaggtattgttcttcgcctttcttgattttatttaatttgcatacattgccagatttatgtatgcatatttctcaattaaactttctaccattgggagaattagttacttgtactatttccagcaatgggtaatagtaacacactagtacagtagtattacatgagtcacggatataaataaaactatgcacttgaaatcttaaactgattgtgcgtcggaggtaacctacactgtgcatcttttttt

SEQ ID NO: 11939 - DNA, 376 bp, Oryza sativa
  unsure (1)..(376): unsure at all n locations
acatttttgtttgtttggatacaatattcatgccgttatttttacccaaatatattaattagctatgcacgcacacttacccactgataaattaatgattagtcttgttttttcatggagaaagacgatggctaaaggacagacacaatcaacaaacggggtaagaaattaagcccttgctcgccgttatcgataccagcggacccttcgctcgagaagttctatgagtggcagcactccctttttttcatctttggattttaaaatggtgtttgtagttttcaaactgacancttttatgttgcatgactcagtgcacacatcaccccactttgctttgctctcaactgctagtaatgcgtgcaaacatctttcg

SEQ ID NO: 11940 - DNA, 496 bp, Oryza sativa
  unsure (1)..(496): unsure at all n locations
acttacgtcgcgcagcgacatcaccagaaaggatcattggttgaatcttcacaagcatagcttgaaacaaattcagagattccttctcgaagccattggtcgctagcccaattatgattgagttccatgacaaggcgtccttctccttcatttctttgaacacttgcaatgcttccttggcacttccacatttcatatacatgtcaatcagagaattctccataatggtgtcagccttgatgttgtttctcctcacgtactcatgaacccacttaccaagatcaagtgcactcaaatgtgcgcaagaagacactacactggcgatcacaatggcatctgggttcaccttggctctctgcatttgcctgaagatctcaagagcatcagagaagtgattagcttgtgaatatccagatatcatagaactccatgacatcacatcctccttacgaatntgatcgaatattctccttgctgaactatatcttgcctttcg

SEQ ID NO: 11941 - DNA, 376 bp, Oryza sativa
  unsure (1)..(376): unsure at all n locations
agctntcctcattggagaggtaccttgtggctgtgaacacttctcttgcaagtatcttgaatacgttggagaaaatgggccaagaaagtcatgatggatcggctaggcgcaaccacaatggccatgatgctaatagcagcatcgcagcaagggaagaactggagtacgctgctgacactgagcatgatgatgaagtacttggtcgtacacaaagacaacaacgccggcagcgccatggcatgggcgctccaccacggcgggaggtacgtgataatgaagattctttatgcaagatcaagtttaccattctttgtttgaaggaaaaattgaccctgtgcatatcttacatgggagttagccattgatcagaaattgg

SEQ ID NO: 11942 - DNA, 431 bp, Oryza sativa
  unsure (1)..(431): unsure at all n locations
tgaactnttgctcgtcccgagtgatcgatgaaaggaaacaaagacttggttgntgttcacgagttgctactatgctgcatatctcaaagatataggtgcaaggtatatgtactctctctcggattaaataatatttggcaatgcaaggcatatgtactctctctccgattatataatatttggcacggaggcttacccttacccctgattcccacgagacactgcttctccttgccttgggcggctgaaagacataacaacaattatagcaccaatcacccgatctttattcaacttcttattccggaagttctcaaatgattctgtaaaagaaagccaagcttctcatatgattcacttagtctctctaaatgtatcaacctgaattccttaccaaatggtgcctctgtgattcctactctaaggtttat

SEQ ID NO: 11943 - DNA, 416 bp, Oryza sativa
agctttccccagccccttttcatcaatggactcctgacgtctacaaaggagtgtggttcgttcgacaaattcctacctctatatctatctctgaggtgtttgggttttgcaaaactccatatatatgcagaagagaaatgctatccccactccgaccaagacagaacttttaccaaaagtttattgtgatctttttgttcaaataacaattaatgtgaagcagggtcaggaacaacgaatctctttatgataaacagatccattttgcaagctcgttattacgggtagttcctacaaagaatcggactaatgacgtatacaatgcttgaattatcgacgtagatgctacatagtgggtgctcatccttcagagactacgagtgtattatgagcattcgttgacaaaaggatcaccc

SEQ ID NO: 11944 - DNA, 419 bp, Oryza sativa
tgaacccaagtcctacagtgatggatataagcgcaattgaaattcctggggagttatacatttgggtattgataagaccggtcacaatttcttgaagctcgatctcccccccagatgaaccatatagccaagagaaaccatgaaccagaatagaagagcttgccccacccatgagtaaatatttcatagtagcctcattagaccgtagatctctcttggtatatccagacaataggtaggaacataaactgaaacattctggagctacaaagatagttattaaatcgttagcaccacataaaaacattccccctagagtagctgttaatacgaataacagaaactctgttatagccatttctgtacattcaatgtactctacggatagaggaatacataaagttgaacataatataata

SEQ ID NO: 11945 - DNA, 419 bp, Oryza sativa
  unsure (1)..(419): unsure at all n locations
agcttagaatgatgtaaaaacaataaactctatataactntaatatgtggcgaggaaggtaagtacgtgtatttgtttactcaattctgatatggagtatttaatttatccaaattatctatattgctcggagtgttgaatttatcaaattctttgtagtgtttaatttaagtgccaaacgaccatgaaaccttatattacttataatagaaatacacgctacagtttatgtctgaagacccccaaacttgtagagagagttatgcacacatttgcatatacaattcgaaactgaaaacaagcaatcagctttagcattcactttttcaccgggatagcctcaagcaattttcagttagtagtcaggtaataccagcgtaatataatacataaatgtttctcgacaaaatattacacac

SEQ ID NO: 11946 - DNA, 488 bp, Oryza sativa
  unsure (1)..(488): unsure at all n locations
taagggtacgaacaaaaacaaaaacgaagagnccttatgtattctttgtaatcctattaccaatctcttgtttagtgagttcacaataaaaaaaacgattgctttgggtggccttcagttgtaacgggttgggttttagattctacagtcaggaggacgtgtcattccgtgtctggttctactactttntgttgtgccatacatgcatggtggccatggaccaaaatcgtgcacttagtgtccgacgacgatggatcacggattaaggcttttacgtgggcatcatgctgcttcatgcgtgatcgaatcggacacaggcgacgacgtacgaagccatggcaaaaacatcttanactcttataatagataaagataagcatgataataaaaattgccctggctccttagtttctttcacttgtctattccaganaanaatacagtatttagtaaatttgtggtatagaattatagatggctagagatat

SEQ ID NO: 11947 - DNA, 417 bp, Oryza sativa
  unsure (1)..(417): unsure at all n locations
tgctttgaccaaacaactcgcacaaaaagcatctttgtatttttttcaaaacgttctttgtcaaaatcaactcatcaacaacacaagcatgtaaaacatatccaagagcaaaagaagagtccaactttttagatttttcaatctcaaattccaatttcttgcaattaacataattgacatctcgcaaagcattaatttcagaaaataaaacttcacaatattgacaattatcatcattaggaatcaaagatttcaatgtagcaatttcagcatttagaatctcaatagtatgatccttctcatcaagcgcaacagaacatgtttgaagtttcttagcanatttataagcagcatattctaattgatcataactaagcttttctttattatcatcatcagattcatcaacatcagaac

SEQ ID NO: 11948 - DNA, 391 bp, Oryza sativa
tatttaccccggtgtggtagtttaggtgactaattctgtccaatacaatggtattgtgccacgtgggtgggttcccgttgtgtccgccaccactgcgttaagttaaggcatgggcccgccacttaacggttctagggcatataatgggtatggcttatgatggagtaacacgtatcgtgctggtgtaaggctaaatcatgaatattggaaaagctctgttgtgagtaataaatcgggtacttatgtatcgcgtgccatgctctcgcatgattattatttcgcatcatgtgggtaaagtgtacaaactctgcagagttaaaactaatctattatccgtgctcgcggtcatgagcggcgtgtggatatgtgttgagtatagacttgtgtttat

SEQ ID NO: 11949 - DNA, 371 bp, Oryza sativa
ctgcagcttatcgaccgcgcctgtttatttttgggcaaagaacacccgggcgactgtgtttacatggcgctcgacgtcattataaagactagatgtggcacaagaacatagagacctctctgcccaggaaacaagactaatagcagccctcaagcgtaagatccttggcctcgcttccattgagcgggcaaggaaaaagcatgcctccagaagaacacatatctgtgagggagatgcgaacacaaagttttttcatctcaaaatgaatgcgcgaagaagaaagaacaccattcatcggctgaaaaaagacaatggttgcgctgtgacacataaagagaaggaagcaacgatccatgaccattttgcgagca

SEQ ID NO: 11950 - DNA, 424 bp, Oryza sativa
  unsure (1)..(424): unsure at all n locations
ntgccagctgaggacaattcaatggatgctgntgttggcactctggtaatgagttctgtaagtgacgttgaaatggcattgagaggtaagagttgtttcttttctaacaacagtatctcttatctgagtacaaatgctctttataatttctgcaaagctttgcaacatatggaatctctagatatgtgcatgacgcaagatgtctaaaatattccatacaattattatcacgaatatcttaattttactattgtttcttagctacctgaaattgtcactgattttctatccaaaaaaataaatgcactcactgtcactgtgcttgaaatatgcacattattgaacaaggtaatatgatgtgccggatactcttacacttcatactcttcgtcttgtgtttcccattataaaaattggcgttcct

SEQ ID NO: 11951 - DNA, 405 bp, Oryza sativa
agcttcaagcatttgtgaagtgcaataatcactttaaaacaacctctatactcaaatgtggtgagtttgggggcatggagctcaatcttgttaatcgcacaaccttgtacacgcaaaaattccagccgcggcaatggttcagaaacatgcaaattatgtagctgggagcacattaagatttccaaccattctagggcagggcatttcggtaagaagtactggaagttgtccaatacaagcacatgcttcaaagtaagcattgtaagattagcaaagccacaaaagtcaggagttgggccaaaagtaacagtatcaagttgaagaaccttaaagtgggatccatttctgtcattgaaaagatgacatggaaagctgtaactggtttctcgcaatcctatatatgga

SEQ ID NO: 11952 - DNA, 412 bp, Oryza sativa
gatggttgatacactgctgacactacctgcagatagaacagaagagatcaggtagaaaaaccaactcgaaaagtaccatggtaatatcacaaaacttacctgtatgcgcctttggtatatgccagatcatcccactgttgctaacaccgttggaagttccagacttagtgtcatgcattgaagttgaagatgccttaacatcatgctcgttggaacttctgtgatgcttagtctttccagtagagatgaaccgaaaatcatgcaaagttacatctccactttttccaccagttacaatcagcggtgagatagatccacagcctatatttctatcgaacacagaaagagaacgatactcctctgaaagatgaagtccatggtcagcctcagccatatatcctaaattctacac

SEQ ID NO: 11953 - DNA, 380 bp, Oryza sativa
agcttctttactagaacattatataacttgttgattaattaacaccattatttccacggtgaaaaagggtaaaattaaaaaggttttaccatgtatacctaactctgtcgttttcaccatgtgctgtaataatcttcatgtcacacaataagcacactcacacaccactaagtatatctactcagcttccagagattgctggcaactttgacaagccccaccaaaaacctgaagcatacaaattcaagagttccatatatacaaatgcaattgaagattatgtattggttttaaatgaatgcaaacacacagtcctccacattacaacttataattaatgctttattggataacaattttactgttctcgtcaataaaaa

SEQ ID NO: 11954 - DNA, 414 bp, Oryza sativa
catgtcaccacagcacagtctggacctgaccatcggatcataaccttgctccaccatcttagcacgcttatgcacagatcgacgatctatcacctgctgaggaacaggagtaacagcatccgcatcatccaggattggcaatctggaacgaactcgatctgatggagctactggcttattgagttgtgagacatgaatcaccggatgaataatacaggacggaggcacatcaagaccgtaggccactgatcccaccttaccaagcacctgcaatggccatagaaccgaaatgacaacttcctattgttgcaagcgaccacagactgctgcacaataggttggagcttcatatatacccactcaccaacagcaaacgaacgctccgaatgcttgcgcatccgctgatgctccatg

SEQ ID NO: 11955 - DNA, 414 bp, Oryza sativa
gcttgagcttcttcacggtgacgatcatgccggtgcccggcttgacaggcgtcagcgttcgctcattgatccaccccttgaacaccgatccgaacccgccctccccaagcaagctgtccggccggaagttcctcgtggagcccttgagctcgccgaatgtgaacttgcggaggttcgacgactgcaggatctccgtctcgctccggggagtcggcgggaccgaagactacgccgacgccttggtgccgaacgtgctggaatcggccccgttcttgctgctgttcttggaacctgtccctggattgcaaccacgacggtgagctcacagatcactcaacatagaaactctgcttttctttcctaaagaaattctcgtgtgaagcaaaccattcttggaagtaactctgctttcta

SEQ ID NO: 11956 - DNA, 408 bp, Oryza sativa
ctgcactgaacatatagggacatacttttctcaaaatgtataagtctggcatacctcaatcccaagtcgcttatttagggcctcattccacatgttagaagcaaaaagtgggtggaatctggtccacattgacataacaaccattacctggatacataatataagttggactgaacaaagaaactgatagtctaacatgttaaccgaagtgcaaagagcaatggagttataccacgttagcatccagtgggggcggataattgtctgacatcgtatcaatccaactaaatatcatgttatgatatccatagggtgtgccatacatgcttcgtggcaattcccatgcagcagtttcattgtacctggcccgaacatcacggtgcaatggcaaaatgctacctgatgatt

SEQ ID NO: 11957 - DNA, 433 bp, Oryza sativa
  unsure (1)..(433): unsure at all n locations
tcggatgtgcatcgactacaccgaccttaacaaggcatgttctttgatccttaccccctgcctcgcatagatcagatcgtcgactccactgcggggtgcgaccttttgtgttttctagatgcatactctggttaccatcagattcgcatggctagggaggatgaggaaaaaactgcgttcattacccccgtaggaacctattgttatacatcaatgcccttcgggttaaagaatgcaggtcctacttttcagcgtactactcgaatttctttgggtagccaaataggacgtaatgttgaggcgtatgtcgatgacttggttgtaaaaacgtgcaaccaagaaactntactttcagatctagcggaaacttttgagaatctccgctccgcccgcataaaactgaaccccgataagtgtgtgtttggtgtacctg

SEQ ID NO: 11958 - DNA, 408 bp, Oryza sativa
tgcacctactactacccaccctttctctgtattattggtcttcttctatggctcattcgttttataggaaatgttatccatagtctgagtgcagccatggtcgaccaaaaggttgctatctccatctagctagctagctatgtcatgttcttctcgatgcttgaattaagcccttttgcttatgtttatacttatatgtactgcttaattattagctaaaaaataatttacaggcaaaacttttatttgcgtgtccttagcaatttgaaaaaaaatatattctaaaataaactacaataaaaaatccacaaaattaactctaaaaataaggtttagaatttaattttaggttcataaaattaaaatacttccataaagcaattagcttaaatattgtttataaacata

SEQ ID NO: 11959 - DNA, 396 bp, Oryza sativa
agtctagttgccgacagtggttgacccatgtttgtctgaggaaaagtttctagtttgcactgaagaatgcctgccagctcttgactatgctctggggaggtgtgtaaggtcaccatggtacttttggtaaagtttatcttcagacctgtcgcttgcgcaaaggagtttaaaatatctttgagagctctcaattgagaagcttctgcctggcaaatgatgagcgtatcatcagcatattgaagagtggccccaggaagtgtatttactattgggtgcttgatagtgctgcatctcttgatcatctgttggaaggtgtctgccacaagaatgaaaaagtatggggagagtgggtcaccttgacgaaggccttgtgaacaatttatccatctttctgga

SEQ ID NO: 11960 - DNA, 460 bp, Oryza sativa
  unsure (1)..(460): unsure at all n locations
ntgctactgaatgccatggctatgatcactcaagctcactctcactctcactggcactgctgtgtatcacacctagctagttagaagtgtgtgtggggggcttgggttcactggggaggaatggttggatcttataaagatgagttggatatgggttaggagcgatgtgattgcagcctttttttgactctttaattggttgcatgcaatggttgatgttgacggtcgtatatggagactactacgagcttaactattgctgagtcggacatggcaatgtcgatgcactagtttctgcagatattgcgagccagctggctgattggctgcttgctacgagtctgtgactagttatatttgactcggttaattaggacgttatccacaacgactaacagggactgtatactgtgaagcaaacgacaatatgtaccaagcttangatgccattatgcaaaac

SEQ ID NO: 11961 - DNA, 344 bp, Oryza sativa
ttgatcattgatcattacaaatgctcaggacagctgatatgattcgcaatataatgcgccttaaattaatttacaactcataacaaatgctgtaatttgcaagaatgattcacaaattgcattatctgttgtaggaactgtttacttcaaacaagggtggcgatgatccatttaagtaatttcattccaactcggtacatggtgaacatttctttattcagattaaagcatagacacaatacataacatactgtttaataatgcacagtttaatatcacggtttaatattacatcataagtatttttatgatattatacccatccgtatttgttaacgcgggag

SEQ ID NO: 11962 - DNA, 436 bp, Oryza sativa
  unsure (1)..(436): unsure at all n locations
acctataaaactcagctgctgattcaattgtttgagattgtacggtgcgtgcaatgtggtgttgcattgcatactgagagtgaaaaattggtatttggcatcgaccattcggaccgtacacatgatatctggttgagctcatgaatgtacatcctttttgcacgcaaaatatggagatatcgtcgcagattatgatcatatcaaattgcatattagtgtatgggttatattctctgtttactggaagattataatgtgttcttttcctgattctactgataacctatgaggtccaacatatcctccgttgttctcatattggtacggcaataccacattgccactctcaaaagagagaaaaatagaagagatcatgttttgctgaatcatncacggaatgcaatcattagtaaaagaggactagttaaatttgatg

SEQ ID NO: 11963 - DNA, 418 bp, Oryza sativa
tggaatctctattatggctttctttttttgtcaaataaattatcctctaatctgattaaacaaatgtcgctcttatttgacaaatgacaagttaactacctgtaatatgaaaaagaatgcatgtacaacttttatgtgaaacatcagatgggaaaacgttcaatataccaagaaaactatccggtcgttcagcttggacggttctgaaccgttcaacgacgtctagtcgtcgacgcaagcgatcgatgtatgtcagcagtgaccgaagatgcacgagctatcatggctgatgtacattccaattaaccagcacctaatctagcaattaattattcatccacatgttaaatcttctgaaaaacggtgttctgtaatactactccgtaactaatagttgagctaagacaattcactatta

SEQ ID NO: 11964 - DNA, 498 bp, Oryza sativa
  unsure (1)..(498): unsure at all n locations
tcgaccgcaccgggtgaagctccncatctggcgcactgccgttttctctncccgtccggcctcctccctcggtggcaggcatggatcggcgggcggcgcggccggtgagtctcggccggcgcagaatgtggaggacgacaacatcggcatcgacgcttctcccctccctccctcttcttcacctcttctcttgtgggccccacagctgcgattctgacgaagaacggggagccaaaattggcgaggctccaagctatgcctatgtggaggggagtctctgagctggctgcatgagagagaatgacatctacgtgcactgtgaatagcctcagtgcgtgccttccctccaggatacaatgcgaaagaagtatttctgaacggaattgctatacatcttacgacagttgttgaagggaaaatcttttgatgtttgggccattgatccatcctgacattcgtgcatagatagatggggaaaagattaacagggatgacgtg

SEQ ID NO: 11965 - DNA, 417 bp, Oryza sativa
agcttcactccctctatagcattagaatctatatcaattattttcggccaaggaaaccccaccctccttagcaaccaatttatcttacgggccgattgatgaatttcataaatcctttcatgtactactctcctaacaactttagattgatcattatctaagtaatactctatctatttttcggcgatataatatttgaacgcttgccgccgaatcttccgatcaaccttaagtgtaggatctttcaaatatctaatcaaagaaattctccaagctatttctaactcatgggtacaaatgtccgaattcacaattaattcggccttttaatcaattgtaacgtgccccccatcctcctgtctgggatcggtcataccggccacgcaatgccggtcataccaccatgtctgcccggtc

SEQ ID NO: 11966 - DNA, 363 bp, Oryza sativa
  unsure (1)..(363): unsure at all n locations
tataagagaagatctaactttaatttgttgaatctcaatattatattgggctaagataaaattcattaaatactctgcttaattctataattcctagaattttctgggatttatttgagctaaggaaagtattttagtcaatggaattgcatttaagaaataatntatatcgaaaaaagctttacaagtcttcttttggctttgggccgaaagtttgcccaaaacctctcttctcttcctcctcggtccagccggcccagtccgcagccgcgcgcgcgcgttcggtcgctgacaggaggggcccgcttgtctgatccgtctttctcgcgtctgcagcgcctgccgaaaccctagcgcaagccg

SEQ ID NO: 11967 - DNA, 419 bp, Oryza sativa
  unsure (1)..(419): unsure at all n locations
agcttactaactagcatatagttatacctgtttattgactagtacaacatcaccatcttgaaggtgtcgatataccactttgctctcaaattcacacttgggatctttccctggttgagaaatggatcctctagaagcaggtagcatcttatcaatcgcacggcgtttgggaggggcagcttgtagcttgtacatgttgttgttatccctgtaatgggttgcgccaggatgaatgtcagcaccattatttatagcttcttgtagctttctggcattccagggtgtcactttctgcacgtgaaacaatatagaaatgatgtaaaagctgctccaagaaggaaaagtaattaattcacggttcatatggttccatccnctatagtttatgggtataagaaatctggtttccaaagtagata

SEQ ID NO: 11968 - DNA, 476 bp, Oryza sativa
  unsure (1)..(476): unsure at all n locations
tcanagaggtcatttatctcctcctctgtgaatgaaatttccaacttttggaaacaatgcttaattcttgttatctatttcgccattggaatcttcatctgaggagcaaaaaaggttgtttttgatatatgagtgagaagctgtttgtttgcacaaatcagtaaatatttgaaagacgacataaccatttatataatacaactcatgctgataatgtatcattattgaaattcaacagtccatgacaagaaccttatgaaacaacaacaacaacactacatatttatttctggtaaggatttcattgtgtacaggaaaatagaatatatcggtccgacagtccctatgttttcctttcaaactatttcaccattgtatagaagatctctactgaatctcactagcagtgagatccaaaagtaggagataatcangtaattagacaatgattgcatgcagacagctgacaatctcac

SEQ ID NO: 11969 - DNA, 424 bp, Oryza sativa
  unsure (1)..(424): unsure at all n locations
agcttaatgggcctaattgtaactcatgttctctacttatgatgatttgnttagaaagacacatccaatcatttcaaggagtgaacagatagagtgaacctcaaggggaagacaaaagacaagacaatgtgtcaactactgatggacggtcggtctgaatacgccaacacctgtacaccataagaaaggcacgctactactcctactatatgataaaaaaacactacaagagaagatacctcaagactgctacaggtgacgatcagtcgacacatcatgccttatcgctgctaagccttgtctaatgccattccccacaatatacacatagtttctataaactccacattactaaaaaaaactagtactagacactactattcctatacaaacatcaatattctatacttaaatttaatgctac

SEQ ID NO: 11970 - DNA, 422 bp, Oryza sativa
  unsure (1)..(422): unsure at all n locations
tcgtgctccacaaaagaatattctccgaccgatgatgcaccatgacttcattcgtatgagtactctagtgtaatcaagcacctaaaaataatctttgaaatttgcattctttaaatttttggcctattacaacaggtactggtaataaagtcttattcgtatatcagtcggtgatgacccaaactcaaagatattgcttcctaagattcggttctttgctgtttgctttttgattctcttcataggattcgctaacctcgaattcaagagacactnttgtgttaaaaaaattatccaaaccacactctgcatttctgcaaaacgaagctgctggattactggatgccaaactgagaaagagaagcaaattcaagaataagatcaatcaaacacaatgggtcagaaattgcagatcacaatgg

SEQ ID NO: 11971 - DNA, 212 bp, Oryza sativa
gtcctgtttacaacccataaaaagactgttaaccctgtcacatcgaacgtatgaacaccacgtgaagtattaattatatgctaataataactaattgcacatattgtgatttatgtgcgagacgaaacttttaagcctaattgctccatgatttgacaatatggcgctacagtaaacacttactaatgatggattaattaggcttaataaat

SEQ ID NO: 11972 - DNA, 446 bp, Oryza sativa
  unsure (1)..(446): unsure at all n locations
ntgagcttaatgatgatcattggccgattgtaccggctgtttttggtgatgcgcctctctttcttttccacctacttttgattcagaggtctcgaacccaactttggaccgggctgtcgggtggtgactggtgaatgcacctggcggaaatgcgcgtgcaatgttgctgtcactgatggagctagcgaaagggatggtccacgacgcagtcctcggcgtggtggtggtgatgaattggcttgacacataacgctctcatcacgcagaacagaccaatcttgtgttagatttaatcgtgtaattaatccatttaaatcaattaaatcatataaattccaacgctcattatgctaggaatacatgtgaattcattcttctatgggatatcaatgtgatgaagaagttggagaattaatccattcgactcangactcgataacttatat

SEQ ID NO: 11973 - DNA, 469 bp, Oryza sativa
  unsure (1)..(469): unsure at all n locations
taagctcgggtacttctatatttttgtctgaatttctgataattcgtttcgttcgcagctggggtcactgtcgaagtgaaaaattggccgcctttctaccctatcatccatcatgatatagccagtgaaataccaatccatgctcagaagttgcaatacatggcatttggtagttggctaggtaaaatatttcaccttgcatctgcttttctatatgaattattattattatttattatagctacatcggttttttttttggcaggactaattgcttgtctcgtttggaatgtagtagctgtattaattgaatcaattcatagtgacggtacagcctcttcagtatatttatcattntttgttatggattcctttgaataatttgttatggattttgtactttgagatgttgtgctctntctcttcgcaattatctacgcaatatttggatgtcctcttcatacatact

SEQ ID NO: 11974 - DNA, 391 bp, Oryza sativa
acttctacactcgtttgtatttgaatcctttgaacatgtgaatcttgtttacttggcaaaatgacaaatgcacctcttccgagtcaaaatgaatgggcaagagaactattggcactagtatatactgatgtatgtggactaatgagctcaactgccacaagggattttgggtactttattaccttcaccggggactttagtagatatggttatgtctacttaatgaggcaaaaggctgagacctttgaaaaagtcaaggaatttcagaatgaggtacaaaatcatttgggcaagacaatcaagtatctacgatctgatcgtggtggaaagtacttgagccttgaatttgcgtatcatctaaaggagtgtagaattgttccacaacttactc

SEQ ID NO: 11975 - DNA, 441 bp, Oryza sativa
  unsure (1)..(441): unsure at all n locations
tcatgtggttatgtgccaagcagcccagctggtgatgattattatttggcttaccgctctgatatctcagatctagattatgcatgtgatgcaccgtcattcagcctcttcaatgaatctgatcctgaattcattanaactcacgacttggctgctgagatgctctccttgcgtgttttaaatgctcctcagtcggcaatggatgcaaggacaccttctccatcacctcagtcacctgtttctgcaaggatacccactgcaaagacaccttctccagcccccccttcacccactgcaacaaaaacatgaacttcagtagtactctctctagcagcagtaagggaaacatccccagctacatcttcaccgccacgtgctaagggctcgccacctctaggtaaaatcaccacttttttgntccttctctcccttctcacattt

SEQ ID NO: 11976 - DNA, 467 bp, Oryza sativa
cttggctcagggatcctcagtccgatcccccttcctcgctattcatggtcctccttttatactctaaggggataccacatgtgctgcgagtgctacctacggagaagggaaaatattctctatattaattacatatcttgtgccttagcccagaagctatctgcacgtcggttgctgcgcggcgcccatcaaatcatgcaggacgcctttgtcattcgccatttaatggatgagtacttccgggttctcgttcacaccagaaaataggaacccgggtcagttcagagtggttggaccagctctgaccgaggtaagaggctgtgaagcccctcatcataatgatgggacgggacggagcacgccgcttgccgcctgacacactgacagggcggtggtacacagtcgccgtcccatcggtcattcaaccggtcacagaccggtcagatggcagcacgccgcattaaatg

SEQ ID NO: 11977 - DNA, 369 bp, Oryza sativa
  unsure (1)..(369): unsure at all n locations
tttgccctgtcatctgcgggccaacgcctgggattgcaagacttgtacttgtataatctacactctcgaaattcgatttcaatgagagaatcgtggatgcaatacaaaatccctccaatcatgagtgcttcaactcgccgatgcagaaatcttcaatgatctcaaagactctgaanccatgttgagggctgcaggttcagaagtaagaatgtcaataaacagattgaaaagggccgaaagtagcagaaaaatgaagatattagtagaacaagtacatgtatatgctatttgcattaaaaaaaatggcatagtatatgaatggcgagatatatggtccaccaatatcattatttcaatttgtgtcacaac

SEQ ID NO: 11978 - DNA, 425 bp, Oryza sativa
  unsure (1)..(425): unsure at all n locations
catgagttcatacgacttatattgcatcattntaacaagcacataggttgaagaataaacactaaacacatatacctattgcatttatcactatttctcanataacctttagcacaaaataaccaagagaattttttaactttctcttttcttgagcctttttgctcatctttttctcttttattccgggtacgtccctatcgtcaagactggttccagagattcggcacccattttttgctcacatcgaatacgtccttgtcgtcaagactggttccaaggatttggnattcattnttttcatattattattctctttctcacaatgagcaattaaagctatttgagaaataacaagtcaatatagcatatatatatatagcatttagaaatcacaccatatgctagcatcaacatttgcatat

SEQ ID NO: 11979 - DNA, 412 bp, Oryza sativa
agcttggttgtggatagccgctttcttgtcttattactgcatgagtagatgctttctggaattgtgccaatgaagtaatttgaagataaatctaaaattttcagattgggcaaggtggagaagttaaccttggcaagctctcccttcaacttatttttcttgaggttgatagtaactagatttgtgcaatcacccaaggttggtggcagctctccagatatgttgttttcttccatgtgaagttcttctagtctcttcagttgacctatagaatctgggattctgccactgaatctgttcccaccgagatcaagaaaacctagattactgagctgtatcattagtgcatcgtcaattattccttgcaagtggttattatgaaaggagaggtactccaatgaggtggctctga

SEQ ID NO: 11980 - DNA, 407 bp, Oryza sativa
  unsure (1)..(407): unsure at all n locations
aactcaacttggtatcagcgatgagtcaaacgtgtgatggctcttttcttgtcatgaagaccaaatacgcggagtgctgaataaggcagaccaacttgacactcaccaagcagaggttttccttgcaatcaataccggaagtgtgacaccatattctgctttaaaatgcgctatgttgtgcatcagaatcacataatccccttattcatgctgcagcttatgagagagtatggtgcactgatgtggtctctngggaaagtactcaatacccctgaggacgcgcgcgtctatatcgggtaaacttctacatcgtcaattatntaacaccccatctcttgcttctgtttatagtgctagcgtaatcttgattctggcgactgactgactgactgactggatgttgtata

SEQ ID NO: 11981 - DNA, 418 bp, Oryza sativa
agcttaaccacaattcactatcttttctctatccaaggcggcatgaaagggatcaagagctcaagcacgagatccgcacccgaaacaaactcgccgcagcacatgcacgcgacgcgcatcgtccacacaccgccgcagaaacgctcgcaattgagggggaacccaaaaaaaaagagaaaaagaaatctaaaaaagaacccaagaaaacgctaacacaaaacctcaaaccaaacaccaccgcatgaaaagaaaaagaagaagatccccaaaacactgcaacgagccgaaaacccccaagaaacctcggacatctcgccgaagcataacaagaagaaaaaagaagaagaaaaagacgatttccttttttcccggagattagcaacagcgatcaaggtggaggacaaagtactgaccggcg

SEQ ID NO: 11982 - DNA, 474 bp, Oryza sativa
  unsure (1)..(474): unsure at all n locations
tggtgtagctggaatgaactcaagcggaactcgtgtattaagtactgtatttgtgntccatcaaagaaaatacttctttttgtctgttcaaagatgcaaaggacatgtacgtatatataaaggcgatctatacatagtgatgtttggacctagctagagtttactactacctccgtcccaaaataagtacagccgtggatatccgtgcctaacatttgacagtccgtcttttttaaaaaatttatgaaaatttgaaaatatttagtcacacaaagtactattcatgttttatcatctaatagcaataaaaatactaatcataaaaatttttcaaataagacgaacggtcaaacgttgaacgtgaatagtgcanaactacacttattttgggacggatggagtacctaatatggtcatatggatcaagtatagatatattntattatacgtaagttacctgtgtactggaaatac

SEQ ID NO: 11983 - DNA, 459 bp, Oryza sativa
gcacccgcgatcctcttagtcacctgcggcatgcaagcttcgtcggcgatgtgccatcaaccaccattgtgtctggacactactttcaccagctccgccatgattactccttcggtgacattgcggactctgccatataacgacgcccgcttccacggtcttttcctcccgtatcaacacacgggtatttttctagtctctaattatatataagtaggggtgttggcaaataatagaaggagatgcgcctcaacatttgtagaaatgagttgacaattaaggggagcaaagatagataagagagagagagagagagagacgcgatgcatactatcatatgctctccgcgcaaaatctaaaactcatggtaactctgtccatgcattgacatggagggattaggattatgatgcattatgaaacacgcaagaatagtgaaagtgatgacaacccaagctc

SEQ ID NO: 11984 - DNA, 434 bp, Oryza sativa
  unsure (1)..(434): unsure at all n locations
ggagcaacaccatcggtttgtgcccnctgtgacagagcaacgccatgcccttcacaaacatgaaattctcgtgaattgaacgtcctcttatgaaggcggactgagtgtaaggaatgagctctcccatttagcctgccagtctagtcaccataacctttgtagccaacttggagaagctgtgaattagactgatcgggtggtagtccttcaaaagggccgggcgcctccttcttagaaagaagaataatcattgtcgaattaagcatgtccaaattttgaaagtttccttggaaaaacttgtccaaagccctcatcaagtcttgtttgattataccccatcaggtttgaaagaagagaccagtgtaaccatcgggtgcaagagctcaatcccccggcaactcttttattggtcgccacatnttcttcttcccaca

SEQ ID NO: 11985 - DNA, 360 bp, Oryza sativa
tctttttcctgaggtttgttgggtcatttgaaaagagcggaatggataaatatttgagcacaagtttaaggtcgctgagcagctcgttggggatatcaaggagattctcaaggtcaaggtggttggtgactcctatcacaccacaaggctttaagtggatctccaattgtgttggtgatgtgacaaaaaaataagcattaacaaggtggactatggtttactatttcaaaaagcataaacctagggggaggggcggtgttggcaaaattttatgaattctgctcgtcggataagtgggagcaggggttccctttaccctgtagagctcaacgtgtatgggggcttgtggcactgcgaccc

SEQ ID NO: 11986 - DNA, 476 bp, Oryza sativa
  unsure (1)..(476): unsure at all n locations
gacatgatctattacaggttgtgtttgatcagtatgagaaagcttccgctggaggaggacctggtggtgcatatgaagggggttttggcaatccgtttgaggatatttttggtggaggtggcggcggccgtggaatgaatgatgtatgctatcttttgtttaattatttgtcatctggttttattctggaggttctgctcccatttagtttgtattgttttctatcactcatgttgctgagtatatacagaaaaaagatactgttgtctggaaattcattctatctctgtagctctatagntattgaattggttgagttttagcagaaacttgtgtcctacatactgcgacattgcctctntgatactctttccactaagtggtntctgcttctttcattgcattatntaattattttacagcttgataaacacatggcatctcatcattcctcattttatagatgctgatcacat

SEQ ID NO: 11987 - DNA, 407 bp, Oryza sativa
agcttgcgcttattgtaaggacgaagatttgtccatctatcacaaccaaacgttctcaaagcagagtaattaggtttttgatcaacgagccgttctaaaagggcggagtattgaataactttgctatgaaggcgatttatgagatatgttgctgctaggaaagcctcatcccataactttatcggcactgatgcatgagctatgagagctaacccaacctctacaatgtgtctatgcttgcgttctgcggaaccattttgttggtgagcgtaaggacaagagacatgatgtgaaataccaatcttggtaaagaaggagtgtaatttctcatactctcctccccagtcagtatgcatagaaataatctttcggttaaacagactttcaacacgctgctgaaactcatg

SEQ ID NO: 11988 - DNA, 436 bp, Oryza sativa
  unsure (1)..(436): unsure at all n locations
tcctttaacatattaatttcggtaactgaatatagcacgaatctgtctattggcgacatgatagctctcttaggggcgtactatatntcactgttaacacatgcccctaattctggagtatgagaactcatgcttcatacatatcttctgtctgatcttgataacttcaaaattgatcttgcttcgctacttgcaatcggctgtcatgagccgatactttctgcattaaatgagctatactatcacactcgtggcaaaagaatctatctctgatacgtactgacaatcctcgaaatgcaagatctgctagcggctcatcgcttatgctcatactataacatctgctgccgacgtcacaacatcattgaatatattgcatagccgaatccccttcttgctactgaactgatactcaatctgagaactcctctcaatg

SEQ ID NO: 11989 - DNA, 421 bp, Oryza sativa
  unsure (1)..(421): unsure at all n locations
agctttgactttntttctattcaattcttcttatgtttaaccaaatttatagaaaaatatagcagtattttcaacacaaaacaaatatattaatgttacattttaaaaaaactaatttgatgttatagatgttgctaaatttttacataaacttaatcaaacctaaaaaagttttattaaaaaaaattaaaacgacatataatatggaatggatagagcaacaatttttagatgattaaattacgatggacgaatactaatgcttacgttgagaacgctaacacactttgatcattcattatcttctgaaatatttattaattttataaaatgatgggtggtctaagttcaaaattgtaatatttccgaacgacaaatatttgtgaacggatacagtaattaattatatgtctttaaagtc

SEQ ID NO: 11990 - DNA, 482 bp, Oryza sativa
  unsure (1)..(482): unsure at all n locations
taattacttgcagcctgcaggcatgcttagtcaagaagaatagcttgtagtcatatcatcactagctactagccattactatacactactcctgctgatgctatgtatagtactcttagcgcaaggacaatagtagagctcactatttactattagcccattttaaagccaacatatataatagattagctataaggttggctacaatttttnttctcctatctctatctctcacttatacatttattatttttgtcttggagcttgtgttaagctagcttttgcatgagagccaacacttctgattttttgttacctctctaccccaataagcttatagtaagcttatagctacttgctcttaganaacgcataatgtactaatatatatctatcactaattaattaagctcttagaacagntacaatagcagactattagccagctacaaacatattntaataagataaaagatgagaga

SEQ ID NO: 11991 - DNA, 155 bp, Oryza sativa
agcttaatcgagttgctgtgcagcacaatcttatttcttgtgtcagttaccaatctcaataatgggagattgtaaaaaagcccacacatacccatacgttacaatccatgacgaaattctttgaattcaacaacttactgatctctataaactct

SEQ ID NO: 11992 - DNA, 437 bp, Oryza sativa
  unsure (1)..(437): unsure at all n locations
tgcaagttgtctaggatactgcattgtgtctgaagagttctatgaccggtatggtggtgtcccgctatgtgggcagagagtcgggtggcatcgcacgatcttggacgcgtagtttgaggtttggtttgtcatcatctccttcttcagtttctggcagctggtcaaagggccacactggagaatacaatttaaagtatagacaacagacttttatctcttcagaaacggtgccaattctttagccatgtatcaacgagaagaatgatggttttaatttcactttgatttggagcttatcgtatattctgcanaggtacgtaaagagggggattaataataattagtgtcttagcagtgaattatactgatcgatgtttttgttacttgggacctactcctacacggctacacgcctacaccacgttgtggtgaaacac

SEQ ID NO: 11993 - DNA, 426 bp, Oryza sativa
ccggatcttaatcaccgagctgcaactgtgcgcgtgtcaggagaccttctttcttgtggcgcgcacaatcagctggggacttgtggggtagggatgatgcccatgactgtggcaagccattggagctcgttgcatgtgagcgttgtgaatagaccgaaagaatggagaagaagggcacatatgtcattttgtatgggttctctctcatcaattgggtggatattatattttaatgcgttcggggtcctgcagcaaattaccatacttttggagtgttctcgggcaaattcacgtttttgtgatgtcacacagctaattacataccttttgagtgtcctaatgcaatatttaatataaaatgagacgtttgcgaaatacgtacactatgatttattaacatgtataacttgccttggccccggtgct

SEQ ID NO: 11994 - DNA, 354 bp, Oryza sativa
  unsure (1)..(354): unsure at all n locations
atacaccaagaaaaanacaatggttgtaaaatctanggtttgcaagggtgcagtgcggacaggaacgaaactgctcactcctgctatcttgcgtgttaacccggcccatgcccctgtgtgaagaacggngctgaaccagtctccagctcttgcgcttcttggactccgtcacccgagcaagttctccgaggccaactatggtaagggattccagcttcatcggcatagctagtggggcaatgcaacatgcagcgtcgtggctattgtggctgacaaggatacgccgacaaggaggagcagtacatgcagcatcgatgagcaccggctgtcatatcgtgtgtgcgtcgacatatt

SEQ ID NO: 11995 - DNA, 411 bp, Oryza sativa
  unsure (1)..(411): unsure at all n locations
agctnggatatatattcaagtctcaagtattatttaattatttgcacgatactttggggacatatacctgaaaagttgaatctagaatttacagtgctgagcatatagagtgcttctgttagtgtatattccttttcgagaatttcaatgtcaacacaaaacttcaacctagacagctctgaatctgtgccaaaagcagctgtaaacagcaaacaagtagtcaataacgaaatgagatgtacaaaggtccagctaaacagtgcttgagtaacagaacatacagttcttcatcaaaagattacagggctttttacttggtgagatttgatcatccgcttcacaaacagaatcaagccaagcgaatgagggatcaacaagctgcaatgcattgatagcagcagacaaagcatg

SEQ ID NO: 11996 - DNA, 454 bp, Oryza sativa
  unsure (1)..(454): unsure at all n locations
tagctgccgacacgatcatccagccggcagaaaaaaattgattatgaattgcaactttcgtagtatctctccttcaccactggactggagtcgtcaggtcacagcccaacagcttgttacaggcatatgctgagctacatgttctgaaatgacctctgcaaacgggtgaacctcgcagctgcactgcagtgcactcaactgcatctgaattctcttgcaaccactcaaattcagagtaaagaaaattctcatctgcagtgactgctctgactttatatgtgagattagtaattntgcaggccatgccgacatacacattggttgcttatctgatacctgtagaagctaagcagaacatgttcttgctgatgagttgcaggtgaagaggatcttatcctgtcaaatttgctgctggctcttatagaattggatggccatgatatcatcagctaat

SEQ ID NO: 11997 - DNA, 379 bp, Oryza sativa
agcttgacgttacgcctgtgaacgaccatcgggttctccagacactccggatggatgagctctctgatgtaaacgacctccagaactctcgccacctcctcgcggatgaaggcttgaccttccggtgcctgacgccgcactttctgccggaccggacttgcacccggccgctcggtgagactgtgctcaatcaccctactggggaacccaggcattgtcgccgatatacaaccgaagatatctgcgcttggccccatgaaggaaacaagcgcgtcttcctatttgtcgctcataagaccaccgatatctgggggcttggactggccggcatacataggtaaaccttttgccggtaactagtggcacgtgaacatgtcct

SEQ ID NO: 11998 - DNA, 372 bp, Oryza sativa
  unsure (1)..(372): unsure at all n locations
tataatatatgtgcgatgagtacatgatgatctatataaatgaagaanatgtcatatgcactttctaaacttcattattcttttatttgccacaccaatcctatatacctatacaattcatccccactaataggaatttcctgcattgttgtgcagccatgtcacctcaaattagcacagccattagatgaaatagcaatggttcagattgcagtccctctcttccctgcctttaaccacatcccaatatagatgggcaagcccaagccactgcctaagcccaattcgcccattccgattatactgcgtcgttatcactcccgacccccaagcgttcacatctgccggtgccgctaaaatcgtgaccgaccc

SEQ ID NO: 11999 - DNA, 446 bp, Oryza sativa
gatcttatagtgaccgcggcatgcaagcttcataaatagccatatactctgcttcatttgtagataaggcaacagttgcttgcgaacttgccttccaactaacagcacatcctctaatagtgaaaacataacctggtagcgatcttctcctatccaaatctccagcaaaatctgaatccacataaccaacaagtccatctctagatctcccaaactgcaaacaagcactttatgtaccacgtaggtatctgaaaatccattgaacagctttccaatgctctttgccaggattatccatgtatctactgacaacactcaatgcatgtgataagtcaggacgggaacataccatggcatacataagtgaaccaactgcacttgaataaggaactctagacatgtactcaatatcataatctgactaaggacataaatctgaagataat

SEQ ID NO: 12000 - DNA, 411 bp, Oryza sativa
  unsure (1)..(411): unsure at all n locations
gcttaggtacttgnttgcttttttttctctctccttggcataagacagnctggttgattgcgttgtataacataaacttattttcttctaatatattgacgggtaattattttacgcgttcgtaaaaaaaataagtggtgtatcaactagtggctacgtgattctactcgtcaggttttaaattatagttatatgattattaaatattgcgatcatgaatttacccatggtttttgtccctttaaacgtgcgttacgtatcggtgggcatgcgagtatagtgtgcgtatgtagtgtgtattgataggaaatgattttttttaatagaggcagtacttaagtggtgcatactcctgcttggcaagattaactatggtagaagtatttattttatttaaacaaatggagtaac

SEQ ID NO: 12001 - DNA, 463 bp, Oryza sativa
  unsure (1)..(463): unsure at all n locations
ctaactccattggttattaattgtttatatctaatgtctttttattatggaanaaaacttatgacacaataaatgtagtattttatgggggctaactcgatccatatgctcaattgagctgtggtatccacttgataataataattcagaaggcaatagcagggcaccaattttttttattttttttgcgacatgccaaattgtgtgccacaaatacatatgcattttctatatgcctttatccaaaatagatgcatcttgagagtatgccaatttatgacaggctggcaagtaaggactaatgtgttataatgcaaacagaattctgtgatacatcattgttgactactaatgtgtattagcacgttacgttgacacatgagttgtacaaataagtttgcttcattgacatattttgtacacaaccacgtcctaaaacatggaaaaaaggaagtggtatgct

SEQ ID NO: 12002 - DNA, 412 bp, Oryza sativa
agcttgagttgaatttattttgttacaattgatagcactgggaacattagcatttttttttagttcttggttattgcaatttataatgttatacagaactgtgtacctcacaatgcattcattatgacattctatgaaccatttgattgactgttgcttgtaaacaacaggatgatgaggagtctttgatgcaaggagcacgggaagctgaaatgatgatcgtagaggcctatgcagcccttcttcttgcgtttctttcaactgaaaggtttgcaatctgtagttgatggattgttttattaatgtctaactacttgcataatgtcagcactatggcatttaacttatactgtctgttaactgcaacagcatgaaggttcgtggagccatttccagctgccttccaaataac

SEQ ID NO: 12003 - DNA, 481 bp, Oryza sativa
  unsure (1)..(481): unsure at all n locations
ntagcaagatagacggaatcaaaattaaccttggttagttgtttgtgaaagagaactggtggttggacttgtaaccatattcctagaattgcctgaaccagaagatgctccaactgcatggctagccaaagttcggcagaagctcgcatagcgtcgcaagcgtgtgataaaatgtgacgctaaatctagaacagcatcaacgtacccctgcagtccatgttcaaaaaaaaattaaatccacaaaatagtaacatgaaagttcatatgcagaccgcttatgctgaaatgtgtgcacaaattgctaaggcattggaggcagttgatgggctgagcataattcctgcacacctaggagcaaagcttatgatgaaagctatctggaggcttgttgaatcgtagtcggcttggaacatattaacagcanaatactgctgtanatactgtanattcatacatggcatggctaatctgtggcatatca

SEQ ID NO: 12004 - DNA, 400 bp, Oryza sativa
agctgcacatgtatgagcagaccttcttattttctcttgatcctgccagataagctaaaagcatatttcgatgatatagtacaaacaggaacagtcaaaacatccctagctaatatggaaagaatatgataggtgtggttgtgctcatgccaccagctaaggatattgaagtcatcatcgtattggttgacagtgtcactgtcaagataggcaaacaactcagatgcattcatgttagcagtagaataaacagcctgaatcaaagcggtagcagatgttctcctataaaatgcaccaacaccaagtccagatcctgcactggcaccagcatcaccaagtccagaacctgtactggcactatcaccaaatccagaacctggactggcaccagcaccaaatc

SEQ ID NO: 12005 - DNA, 486 bp, Oryza sativa
  unsure (1)..(486): unsure at all n locations
tggtagggatcaaacatggcatacttgcattcacatttattactatgttttaactcagactaaagcagataactaaacatacttaagatcaagattgtgcaaagtgtgtgtgtgatatatggtggaaatggcatatgaaggaaataaagaanatgcttctcctttgtacttacttccttctcccaaaaatctttcttttattgattatgagagggcatgactacatttcttttttatcatgctcatgcttgatagagcataacttctattttttaatttcataaccatgcctttccctcctttttttttcaaaaggactttctttctaggagaagaaagtacatganagcatggagaatttattctgatggtagtatggaaatggaatggataattgcttagttcccagtgcaggagtctagcatgtgcatatatgtgggtgtatgatctcgatcatagagcatgagaagtatctacacacgtcac

SEQ ID NO: 12006 - DNA, 422 bp, Oryza sativa
  unsure (1)..(422): unsure at all n locations
agcttgctgcaccgatcaagaactcgcagtngtgntctcatgagggttaaccaatgcttacttggtcttggagccctgcattgctgcctctgcttccgcttctgcttctggttcttggttcgtgcacctctactactctaaccaaaggagtcgccttgaatgcgaaattggaggaaggagtggtgaggtgagcggttgtggccgctctgctgtgccactattagaagaacatggaggagtggagggtggaattaacttgctgccaaaaaaagaagggaaaaaaacgcagcttttgatcaatatctctgcggtttctgctcacgttttcctctgctgtttttattccgagcgagagagagaagttgaagcgaagggacagacaagcaaaggtcacgagacggatgagctggaatgcgttaatc

SEQ ID NO: 12007 - DNA, 405 bp, Oryza sativa
agcttgctgcaccgatctagaactcgcatcttattgctctcgatggttagccaatgcttactcggtcttggatccctgcattgctgcctctgatttcgcttatgattctggatcttgggtcgtgcacctctactactctaaacaatggagtcgccttgaatgcgaaattggaggaaggagtgtgtgaggtgagcggttgtgggcactctgctgtgccactatgataagaacatggaggagtggagggtggaattaacttgctgccaaaaaaaaaagggaaaaaaacgcaacttttgatcaatatctctgtgggttctgctcacgtattcctctgctgatcttattctgagcgagagagagacattgatgcgaatggacatacaatcaaaggtcaagagacggatg

SEQ ID NO: 12008 - DNA, 422 bp, Oryza sativa
  unsure (1)..(422): unsure at all n locations
tggngctgagcgtcgatgacccaaagaacatacaactgattgttgatctatattgatacatcgaatactatataaaacatacgatgttcaacacaatttgcacaaagaatgcagcgaattaacgttggaagacggtgcaatacctgcacagtaacttagaacataacatcaaggatcatactccaacaatttaaatatccttaattagacaccaaacactacacactacaagatatgtgtggctttttgacgtactaaatatgacacagctcataaaggcactatatcatctaatctatgacattttatttcacgcacttaaactcaatgacaataaaacagtgtgtggacaacaactgtcatgccttaatctaatgtcattcagtgacaatatttactatgtcataagagctatctatgtg

SEQ ID NO: 12009 - DNA, 418 bp, Oryza sativa
  unsure (1)..(418): unsure at all n locations
agcttgacgtggtcatatagaaattgtatctgtcaactnttaaccgaacaataatgcgcagttgtttactattatgaatcatcaatcacgtggacatgtggtggttgccttggatcaattctttgtctatatgtcacgtaagttacgtacgctagatcaattagaataacctcttcgcgttgtttcgtcactgctgctgcacaattagcaaaagtaacaaataggcatgcttgtaaaaagaatgctagtcattgacattgaatccttgagttaatgtgaatatggctggcatgaatctgaaaagaaagaaaagcagacatcagttggaacaatagcgcactgaatttgttacctgttgtatgggcttcataatgggctgattctgtttcagttaggcttggaaatatggaataagtac

SEQ ID NO: 12010 - DNA, 450 bp, Oryza sativa
  unsure (1)..(450): unsure at all n locations
tggtgcaatgcattctaaactggcgaggtggtactaaagaggagaggaatggtgcaggcactttgctgtcgtttctgaatttccgagtttcttggtcacggatttgggaggcagtgcgttctcttggaattttacgcttttctacaagcctgttaagtttacgccgcggttttttttgtaattntatatgttactacattgtcctcttaggtttttgtaattagtccctgaccgatttgacaatgtctttactcaggggaaatatacatcttgctatacataaccagttagatactcagacctaattcactaattaggctgatggtaaaatcttaggccgacgaagaactggacgtactgatgtacagaaggcccaatatttagctcactggatcaggacatgagaaaactgtagcagtttatgatagaccacggagacaaccaatcacg

SEQ ID NO: 12011 - DNA, 423 bp, Oryza sativa
agcttcaattataactgtatttggttcgtgtctcacagtcgcatgccacctggcaaagtcttgactgttagtcatctgcaggcaatatatgaactcagctgccaagaaaaagttcgtaccttggcccatagaaatgaggttttgtgaagattcagcatctcaacatataccaaggtatgtacacactgtgttttctttcaatgcagactgctcataccttctctcctcccctagttggtgataactgataagtttaccacgaaattcttgtgtactttcatattcacgattctaaattccactgtgaaaacatccaattttaattccattgtgcaagaatttatcgcatttcctgctacattgcaatttaatacattgttctgattcattagtgcatctattccattatctaaaaaaatgtat

SEQ ID NO: 12012 - DNA, 471 bp, Oryza sativa
  unsure (1)..(471): unsure at all n locations
tatanctgctccaatggtaacttacagctatatattatgagctccagttttgccaaaanaaaaaaatcatgcttatactggcttaaggccagcttacgaagcttatagttgctacagcttcacccagaatcaaaagctccccaaacagttcagctttggtttagattctgagaagttgtagctgtagcattcagaatataaactagaagctagaagctgggaaacctcagtttttcagattcgctcccccaaacagttcagcttttggtccagattctgagaagttatagttgtagaatccagataataaaaagccaaaagctgggaacctagcttttttaattctgagaagctggctccaaccatctgcctctcatgctcggctctagaactctaaagcttccnannagcctatactgtacgctgatgcttgcgagtgaaactcgatatgacctaatgatcctcctgaat

SEQ ID NO: 12013 - DNA, 418 bp, Oryza sativa
agcttatgactcattcaagagtgcgattgttgttcttcgcacttgtggtgagaaaaagacggccttctttggtgttgccctgaaccagatggggttggcatgtgttcaaagatactcgataaatgaagctgcagaactgtttgaggaagctagagctgttctggagcaagaatatggaccttatcatccagatactttatgagtgtacagcaatcttgctggaacttatgatgccatgggaaggtaagctccgtattgattcttgatcagttttttattttttacggttaatagactcttacatcggtagcaaagctgtgaatatggacatcttcctcatctcgcagtatatcttggacttcggcaaattaactgctagcttttcatctgacttttgttctgttagacatctaattat

SEQ ID NO: 12014 - DNA, 420 bp, Oryza sativa
  unsure (1)..(420): unsure at all n locations
agcttgaaaccagtttcagggcgagtgactcgtctttnttttattattttttttagataagggtattttttttacccggcctctacatccaaccggatacatacggcaattgaaatagggaacttagccctagaaacaaccaatctaaaattcgctccatagaagatttgaactcaggaccttagggtaccactcatgtcactgtaaccactatgctacatgcccttttgtaagagacacgtctactatgcgacaaggcagcatcatttgccaaagatattgtagtataaacagctaggattaggtggatgggttccggcctcctaacaaagatctcaatcgagatcgacagtgcccttcctgggcactactactaacccatctcttgatttctgcgttatatatttgcacttccctttt

SEQ ID NO: 12015 - DNA, 431 bp, Oryza sativa
tcttcctgaagaaagccctacctgatagctcactgtgagaggcatagctgtctcatagacaaccacattggtgaggcatgataccatttcatgcctcttttcagcaggaaagtcgagagcaggatctgcaagaaatgctagtatgatcctgagcaagccaggtttgatcacggttcctttctgaaccatggttagcgaatgatcgagcttcaagtcctcagattcatcccgcgtaacaaccttggatattttctggacaccaacagtgctataaatctcatttagttttgctggagataagagagacaagctagctggtggataccatacaaataaagggtgctcagcctgcatcctgaacaaatccttcagcagcagatcatctggaatgaacacatcctgcttcggaagtagcaagatccgatcttctg

SEQ ID NO: 12016 - DNA, 454 bp, Oryza sativa
  unsure (1)..(454): unsure at all n locations
ttctcgcacccgngatcctctgagtcacctgctgcatgcaagcttatggacttgtcgatattgtatgtgttgaaatgctngacgagcactgcgatactgatccagtgtggtttccagaaatgtttaaagattggtagtggccacatttcttgtaaatttatttcaaccctaaattcgggttttatgcaatttaatggaaatacttcataatgatcaatcattcaggttaagatcgatctaaaccaatccattttttctatatacatacgacatgccaacggttaaacaacttatttgaaacgcatgacagccaatacgaaatgctagaaaatcggccgcgcttaatggatgtcctcagcgtcgaggaacatgtgctaaggtgtatgtgcgactcgttcggatcatgggttcaaacaaataagaacaattttgaagtatccatgatcggtaccaa

SEQ ID NO: 12017 - DNA, 482 bp, Oryza sativa
  unsure (1)..(482): unsure at all n locations
tataaaactcaagctgggctggantaaaacatcgatgtttctttcgagatatagttcgatcctcaactatttctcgcgatatcttcttacgaagatttgttagggcatctataacagcctctggtttaggtgggcaacccggcaagtagacgtccacaggaattaacttatcaactccccgaacagtactatatgaatccgtactgaacattccaccagtaatagtacaagctcccatagcaatgacgtattttggttcaggcatttgctcatataatctcactaaagagggagccattttcattgttactgtaccggctgttaaaattaagtccgcttgcctaggacttgatcttggtaccaatccataacgatcaaagtcgaatcgtgagcctattaatgaagcanattcaatgaaacaacaactggtaccatatagaaggagccataaactagagagtcttgaccaattcgaaagatct

SEQ ID NO: 12018 - DNA, 388 bp, Oryza sativa
gcttatgcttttatgctgacttttcttctattatttgcatcctcaatgtatggatatgataccaatcactattttagatccttccatctgtgacgggccataacaagactggaatttgcgaaccgtcactaggaagtaatctcaatccggccgatatggtcgcacaggcatggtatatcggcataaaaataaagcccgtcacgaatgacacttatctgtgacgggctataattaatgcccgattgagatgagggttccatatctcaatcgggccctaaaagaagctcgtcacagatgaggatcatctgtgacgggctccaactataggcccgattgagataattttattgcccgtcacagatgacactcttttttgacggccttttat

SEQ ID NO: 12019 - DNA, 321 bp, Oryza sativa
atctgtcatgactcgtgctaacttaaagccggctttcagttctaatgccctgtcagatacttcagcacgtgggtcttgtcgcctataagttacacttacctgccaccagcttgattcattcagggggcatgagtctcaattaaagaaagcaatagctcgctccgacgttgctcaatcaacattaccacgcttggatcctgattctgggcatctggctaccctagtagaggttcttcaacagcggctacgtcgtcgtggcgataaaatgactgttaagctttagttcgctggatggaacctgcgcatccaccacttctcgga

SEQ ID NO: 12020 - DNA, 373 bp, Oryza sativa
tcccggatcttaagtcacctgcggcatgcaagcttctcataaccagcttgatgagagagttctccctccatagtggttagccaacccaatcattgtgcgcatgggcgacggtaagcccaagttttgttgtaacttcatcgacctcaacaaggagtgtgccaaagatcacttccctctttctaagataaaccaatcgtgcgaatgaacaacatgctgtgagttgttaagactctcttgacgcctattccggttaccaccagatcagcatggcgaaagatgacgaagagaatacatcattcatcacgccggtcggtgtattctggtacgttaatacgccatttggactgagtaccacaagaaatactttcctact

SEQ ID NO: 12021 - DNA, 370 bp, Oryza sativa
ctatgaggtagcgggtgataactctatagacagataggatattactggttctcttagtctagctacttgagatgcgctcatagcgcagtggcatgattgctggcatgcaccccatacgcccacgtttgattctcctcgagcatgctcacttggaatatttgttgctttcttcttaaagacatcagcaccaagccctttcttggtgtccaacttcttaatctagctacctaacacttcatatgtacatgttctttatctggtagctagactaatccacgtaactataggcaatggtttgcatcacatagatggcaacatcatatgacctattaaccttatctaggtttgacatgagaagtccatatattat

SEQ ID NO: 12022 - DNA, 409 bp, Oryza sativa
agcttcgcagaaccctcatcgtctgtgtctgcgcactcaatatcctcttcgccaagaccttggatgatatgcagattcctcgctctgagctaaaaccaagcaatgcgccttttcacggagtaattccaggattatccgcaactccactcggccagatcactctcccgatcacttttggcactcgggaaaactttcgcacagagaatatcagctttgaagtcgccgatttcgagacagcataccatgccatactcggacgcccggcgttagccaaattcatggccggcccgcactacacttacatgatgatgaagatgcctggcccccgaggagttctatccctaccgagcgacattaagcaagccgtcacatgcgacaaggagaggtgctacatcggccccacccgcga

SEQ ID NO: 12023 - DNA, 242 bp, Oryza sativa
actcgaaccattcataccatggagctagtggagagcagctagaacatccactttgatgatgtcccagcagcaatgtgaaaactggcccgtgaacccgtctggttccggcgctctgtcgcaaggaatttccttgaccgcttgcccaccttttcgtcagtgaaagggtcctccaaatcggataacggctgccccggctgctcaatgaagctcaattcgagcgagaactcacgcggactgactga

SEQ ID NO: 12024 - DNA, 378 bp, Oryza sativa
  unsure (1)..(378): unsure at all n locations
agcttattgtctttactagacactaatatgtgnctgtgtgatcgaaccgtagtatcgtgcgagagtaacaagtattgactctgcattactacttgtggagagtgaaatcccagaaagataatctcttaataacaccatctcttatgtcatgtatggttttttaaaaattgtttgcaccatgatgctagaaaaaaaatgcttttcaaaagttgatccatcgtgactatatttcaactatatttgagcgttgttactgcacgtagaacatagtgcactacaccgtgaccgacgagttactgtacagtttcacgagactatagctgagaatatgtgggtggtgaggggagtagatagtgggtatgactgaactttgaccgg

SEQ ID NO: 12025 - DNA, 415 bp, Oryza sativa
agcttctctacaattgcttttgttctagctgatttttttgccttttgtatttgctaaattagggtcttcgatatcttcttgttcattcattgtttcttctgtttcttattccccattactctcttttgttgtactgccttgattattttgttgcagattttcaggtgcctgttcaatcaacaagtccaaatttccatccaacctgtccatctgatctagcatatacaggtaagtgtctttactctttgatgcttttgaagccatgtcagccattcttctatagaggacattgaacctaagaactgaactgttttcatcactagctggtttctctattcttgctatgcattttctctcctttttcttccacctttcaattatgtacttttcaagaattttgcttatttttagaaat

SEQ ID NO: 12026 - DNA, 455 bp, Oryza sativa
  unsure (1)..(455): unsure at all n locations
ggtcaactagacaatcttggtaagtcctcttctcttgtattatgtatagagntgaactgatttctcatattgatcttcatatgttgctntggcaggtttcataagcatcgactgtggatatatcacgaggccaagctacccagatttcaagacaaatctaacatatgtagccgatgtgggcttcacaaatacagggtttattcacactgttgatgttggcaacctgcagagggatcttgcacaacggtacacaactgtccgctactttcccaatggaactcgcaactgctatacgctcaagcagctaacacgaggtggcaagtatcttgtgagggccacctcttggtatggcaactacgatgctntcaactcacctcctgcctttgatctctatcttgnggccaactactgngtcaaggtgaacattaccaactccagcagagcatatgtccatg

SEQ ID NO: 12027 - DNA, 421 bp, Oryza sativa
agcttatcatatagggcttcgacaaggggttttattcgttctttgagcaaaaagataaagatcggatagattcgaaccgcaattgcaaaggtaatcactactatgccagcccaaatcatgatcttcaccaacttggatttggttctctcgcgaaaatcgcgagttgcagagatgagaaccatgaaaagcaagatcccgaataagaaaacagaaaccgaggaaaccacaagagtgaagactagtagagtctcgtcttttgtcattctttgctcctttttcactcaatgattcattcgaatttcccgaccaaaaattctatatgtctattcatagggcctcgttgctaagtgctacaagatctagtgcactggaactcgtggttatggacccgaatcctttagtatggaacattgtcttttcc

SEQ ID NO: 12028 - DNA, 419 bp, Oryza sativa
agcttgacgtggtcatatgaaatttgtttctgtctacttttaaccgaacaataatgcgcagttgtttactattatgaatcatcaatcacgtggacatgtggtggttgccttggatcaattctttgtctatatgtcacgtaagttacgtacgctagatcaattagaataacctcttcgcgttgtttcgtcactgctgctgcacaattagcaaaagtaacaaatatgcatgcttgtaaaaagaatgctagtcattgacattgaatccttgagttaatgtgaatatggctggcatgaatctgaaaagaaagaaaagcagacatcagttggaacaatagcgcactgaatttgttacctgttttatgggcttcataatgggctgattctgtttcagttaggcttggaaatatggaataagtaca

SEQ ID NO: 12029 - DNA, 460 bp, Oryza sativa
tggtgcaatgcattctagactggcgaggtggtactaaagatgtgttgaatggggcaggcactttgctgtcgtttctgaatttccgagtttcttggtcacggatttgggaggcagtgcgttctcttggaattttacgcttttctacaagcctgttaagtttacgccgtgttcttttttgtaattatatatgttactacattgtcctcttaggtttttgtaattagtccctgaccgatttgacaatgtctttactcaggggaaatatacatcttgctatacataaccagttagatactcagacctaattcactaattaggctgatggtaaaatcttatgccgacgaagaactggacgtactgatgtacagaaggcccaatatttatctcactggatcaggacatgagacaactgtatcagtttatgatagaccacggagacaaccaatcacggaacccagca

SEQ ID NO: 12030 - DNA, 417 bp, Oryza sativa
tgcttcgtccatgccggaggtgcaggaatggctggacgagttcatggcgcgaaccgcgacgcgcgtgtctctggtgcgcgggtgggcgccgcatgtgaccatcctgtcgcaccacgccgtcggtggcttcctcacgcactgcgggtggaactcgctgctggaggccatcgcccgtggcgtgcccgtggcgacgtggccacacttcgccgaccagttcctgaacgagcggctcgccgtggacgtgctcggcgtcggcgtgccgatcggcgtgacggcgccggtgagcatgttgaacgatgagtacttgacagttgatcggggtgacgtcgcgcgggtggtgtcggtgctgatggacggcggcggcgatgaggccgatgagaggaggaggaatgccaaggagtacggtgagcaagctcg

SEQ ID NO: 12031 - DNA, 292 bp, Oryza sativa
agatgcgacatgagtcatacacaaagattgggatcccattcgtggcacgtgccacactctagtaaaaaggttgattgccattgtgatcaggtcaaaaaatcaccttctttctgatgtgtgagtgttctgagtatagtgattcctacaggctgctgaatgtggacgcatattccctctcaacctttatgtttgagtccagttctcttaacggtagcaaccattttggctacataagatactgattgagctccaactctctcaacaaatgctagcattgtggatatacattttc

SEQ ID NO: 12032 - DNA, 413 bp, Oryza sativa
agcttcacatagcgaggttgagtacgttctgttgaggcgcgaatatgacatcctcacaaaggcgctcggaaccaaataacatcctgggcggactatgggaattggtatcgatgtgccctggaagcatggactcccgcagtacatctcccaatacaggaaacggatagtctccaacgaagagagggacgctcgtttgaaggccgaacttaaggttgtggtcattcaagaactagaagctatcatgaacgctatggtggaagaaagggttaacaaggtcctcgccgacatgaatataccccgaggcacaacacctgctgtgcattcaactcctcgtgcacaacacgacacgagtccatcacagcatatgagtagttgtgcatccacagaggtgccggcccctggtctcctgttcg

SEQ ID NO: 12033 - DNA, 398 bp, Oryza sativa
  unsure (1)..(398): unsure at all n locations
tcttctacatggcttcttcaggtaagctcaacaccagttcattttaacttcaganaacaataactgtagatacttaaatcaggacatccacaaagacaatattcattattgtttgtttaaacacccatcatatttttggatcagaanaccgatataaaactaaatgacagagttatgcgcttaaccaagcaaactgtttttgagttcataaacaagatataacaactaanaatgatacatgttcacaaagtagacataaacgatgtatgaaatgattggcactccatctctaccaagctttaaattacattggcgcttttgtgaatgcttcaactgctatttggcagaagactcctcagtccttgacgaagcatcacagacgtactttggtctcttta

SEQ ID NO: 12034 - DNA, 450 bp, Oryza sativa
ctcgtaccgggatcttatatcacctgcagctgcaagcttgattggcggatcagacatcttatttatggggacgaaagctgcagcagcaggttaagcaacgttaaaaaaagatttccataaaaaaaggaaaaaaaagatttctgtatggaaaaaaaaacaagcgctaaaaattttatgaattgctaactagcagcctccgataaaaaaaagtgcgaaaaacgggtttccgccttccgtaaaaaaaaggaaaaaaaatagtgcgaacaaaatgtccgattctaaacaaaaaaatcccatcctccgtgccccccaaaaaaacaagcgcgaaatttttttttctatccgattaaaaaaagtgtgttcccgttttccttaaaaaggaaaaaaagtagtgagaaaaaaagatttatgtccgattcttaaaaaaaataatacgtataaaccggtcct

SEQ ID NO: 12035 - DNA, 488 bp, Oryza sativa
  unsure (1)..(488): unsure at all n locations
tccatctcttagatttctccgttgggttggatgccagcttatcttttcggtcgattctgttccgaacaacaacctaacatctcttgaaactctggacctttcacttaataattncaacaagaggattgcacccaattggttttgggatttaactagtcttaaacttctagatatctcagatagcggcttctatggaccatttccaaacgagataggcaatatgacctctattgtggatattgatttatcatgcaataatcttgtgggaatgataccatttaacctgaagaacctatgtaacttggagaaatttaatgttgctggaaccaacatcaatgggaatataacggaaatattcaatagattgcctagatgctcatggaataagttacaagtgttggttctaccggactgcaacttgactggaagcctaccaacaacactagaacccttgagcaatttagcatgcttgagcttgtaatacaata

SEQ ID NO: 12036 - DNA, 401 bp, Oryza sativa
agcttaatatacttaaatgtcataagttttttacatataaggcggatttaacatgtcagtgatgcatatagatcgaatatggttaaatcagataagatcggctgaaactccgatactaccctaatcggcgaccagaggataggctagagattgatattctaagcatgacttaataaatcaaactcaagtgatgcagcattatgtatgaaaagaagaacaatatctagacaatcaagccgctgggtggttcataaagtggtagatatcttatataatctatgacaacgtcgctatttaacctaatcggctgccttctattaacagatagacgattgtatgttagatgacgatattgccaaagattatgtaagatatatgataactcgacgaattatatagac

SEQ ID NO: 12037 - DNA, 424 bp, Oryza sativa
  unsure (1)..(424): unsure at all n locations
ntaacgtatagactatgaataatgaagagttaacacacgtatttacccattgagaacttttaaaacgaagatgccaagaagattagtggcaattgcttctctatgttgactagagtccagagagagtttagtcgtccnctgcattatcccatctcctcctctgagcaactatatcgagtttcgactaccatctcagcttcggtctcgtattctcgtggatcatcggaaagatgatctctacggaagaggactctgattcttttcaggtaaagagaagagatctcttttatcttgcttcgcgcttgttttgtttgtagctntgtaccaatcttttcgtccaatntcatggatctagaccaaaattttcgtgttcctaattagtttcttttcatgaatggtgtatgatgcanatctaactgccatg

SEQ ID NO: 12038 - DNA, 398 bp, Oryza sativa
agcttgcctgacgagtagacaatgtctctttgtttgtgaatcaaaagctgggttgtcgatgtgtgcattaacaaagacccataaatggctcttgacattatgtgctttcatgtgaacattcttgttcctcttattaacaatgttcatcacatgggtggcaatttggttagtgacatagtccacatgagtgccgccttttatggttgcaattctatttacaaagctaacctgtatcacaaaaaaaaagtgtaaggtgcaagtgtgaaaacatatcctgcaagggactctatgagcataacgcacctgctgaaactgcccttcgctaagactcacacacacctcccaccgatcatttactttctgtgaaatactgaaatggaagacatgcgatagaggaa

SEQ ID NO: 12039 - DNA, 363 bp, Oryza sativa
  unsure (1)..(363): unsure at all n locations
ntccttcagcagctcagccaaccccacaacatatcaagtacttcttcttcggcccgcccggaggggaatacaagtcaaggtgcgcctagttgcttgccttcgaatcaaccaggtctatgggcttcgccgtggagtcaaggaccgcagttcgactctatcaatgttgccaggcttcggagcaaaccaagcaccaaaccaggtcaccatgacatggtcacagccaactttcgacccattcatggcggctcagcaagcatcaccaatcggggccgagcagccgaatgccatggcccaacctcacgcgcaagccgtgatttcgcccttcgccacgccgtacccgcagcaaggtgtcgtgaacagcgc

SEQ ID NO: 12040 - DNA, 447 bp, Oryza sativa
ttctcgtcccgcgatccttttagtgacctgctgcatgcaagcttgcattatacacctatgttcccgtgtcttgctgagtacgaaagtactcacccttgctctatataaatatatatatagttcctccgccctgaagagaagatgaaatgaagtgaagaatatggtttcgccctgattcccaactgtcgcctgtggtgttgggtgttagaccgctggttccgctgctgctgttgttgttggtgttcgcctcctccgtgtcgtcggttgtattctcgggctgtctgagctgcaaccaaggttaatgtaaataagtcctctatttattttaaggatcgctatgattcatatttgttaccgtgggtaccatcaccatgttctgggactggtaccgataccgcggtttcgtatgaagcggattgcgccgtttttccctacgacacgctcctg

SEQ ID NO: 12041 - DNA, 466 bp, Oryza sativa
  unsure (1)..(466): unsure at all n locations
tctaatagtctgctgagggaatcatatgaaccatgtcactgtcggactgtcatctacaacgttaaaataagtgcagtcgtgggtattcgtgtctaacgtttgaccgtctatcttatttaaaaaattatgaaaaattaaaaacaaatagtcatgcttagagtattattcatgttgtatcatctaataacaataaaagtaatactcataanaaaatttcaaataagataaacggttaaacgttggacatgaacagtgtaaaagtgcacttattttgggactgaaggaggaaagagtcctataanaaccaatctaggattagatgtaatgttttctattacaataaatctggttaaaagcctggttaaattcattatactagaaaatatctcttattatcttaattngattntttataggacaaaggaagtatggttgtggagattccattgaaacttcatatgatctc

SEQ ID NO: 12042 - DNA, 399 bp, Oryza sativa
  unsure (1)..(399): unsure at all n locations
agcttagtttggattntagaggtcctgacttttgctagacagtggactgaaactgacttgttttaagagtgacacgangctttatgtatcctttcgtttggcctttgttgttcctgttgtgaacataacaattagcaagtgattcgagatgttggtcgcctggttgccgtatgtctttatgtatagcccctgatttgaactctgatggttctgaaaataaaagcttcgacattgctgtccaatatatcatactcggtgtgaattttgaatgggtgcctgtggaaaatgattcggaatacaaactttgcgtatgagagtaagacgtccaaattgttactgaacccttctagaatttaaccaagcaaggagtcgtttgggcaggtaatgaggatttcacgt

SEQ ID NO: 12043 - DNA, 392 bp, Oryza sativa
  unsure (1)..(392): unsure at all n locations
tgcctcgtatattgatagagatggagaanatacagggcgatagaattatgtacagggctagtctaaaaaagaactaagcccgcaaaaggtgatggttaagtgatatctcccaagattccgaactcttgaagcttataggctcctgctttgacccatgcccgaccttcctcttttatcttggcgaggatggatgccagtggcgatgcagagtttcgaaaaattcttgcatttcgctcacaccatatttcccaggagaccaagatcaccagagtacgcacgggaatgcggnggttgttgagagaatctaccacaaggttccaccattgttctaccgagtcgcaatcgctccatttgatcattnggagggtggtttgagtccacctttgtatttc

SEQ ID NO: 12044 - DNA, 400 bp, Oryza sativa
agactggaagatagatgaacctgtgttctttggtgtcttgaagaaggtcatttaatgcattaaatatttcccctgtgaactacctctgtcaactactgtaatgcagctataaactcttaatccgtgagctgcaggattctgtttattttcttaattgaacgatttgatcgcatttgcatgtatactgcattttattgggtgatattatggagaactgcacaccattagcacctgcattgcttattttataaattacgccagacatctaataacaagtgatatgcattcttttgctccttttctaatctataagtttcaatcagtttattatcataacttttattgagttattttcttctgaaatgctgatgatattgagttattttgttattgaatttta

SEQ ID NO: 12045 - DNA, 421 bp, Oryza sativa
  unsure (1)..(421): unsure at all n locations
ttcatgctacanacttatgtgcatctgtggatacatcagtactgcagtagtcatcattacaaaattctataaatctaaactgtgatagtaagtaatgctcctgacagacatataactgggcaggtaacatataaaatgtaactaatcgatactaccgaggtaccaattatgtggcctcgtcagagtatcattgcaccatggatgtaagtgtttataataattataattattattagagttcaaataaggataattggttaatattatccactacggagtaataaacatttgaataaagaaataaaacacactcaatctgttggttatgtaaaggagtgaaataaaaatgtaaagatgtcttagccatccaagactatgaaaatagcacagctnttacgttaaatgctactacctccgtttc

SEQ ID NO: 12046 - DNA, 412 bp, Oryza sativa
  unsure (1)..(412): unsure at all n locations
agcttatggacttgtcgatattgtatgggttgtaatgctngacgagcactgcgatactgatccagtgtggtttccagaaatgtttaaggattggtagtggccagatttctcgttaatttatttcaaccctaaattcgggttttatgcaatttaatggaaatacttcataatgatcaatcattcaggttaagatcgatctaaaccaatccattgtttctatatacatacgacatgccaacggttaaacaacttattatatacgctagacagccaatacgaaacgctagaaaatcggccgcgcttaatggatgtcctcagcgtcgaggaacatgtgctatggtgtatgtgcgactcgttcggatcatgggctcaaacaaataagacagtctgtgaagtatgcatgatccgtacc

SEQ ID NO: 12047 - DNA, 470 bp, Oryza sativa
  unsure (1)..(470): unsure at all n locations
tcttccaaagcatacggctntctagatgtatatgacgatctctatacagatggatcttatatgaatcgtatgatgaagtaccacatgagtggatatataggaaaggaatccaaatctgccgaatcgctcatgttatgatcttctacatcctaggtctccgcgttccgtcatctggcttatgttcttcatgtagcattcagatcgaatgactctatgaaattacgtcgatacttctacatattatgggtaacgtaggagacatccctattttcccccggnggtcttaattaccactgcttagctttcaattcgcctctgaccatcaaattaaatgtgaataacccgtcctcctctctttgaaacaaggggcgcttccggttctgtgcgtgcttcannacaatttgtcttcttcatattaccatatctctagagtcaataattntctatgaggaactactgaactcaatcac

SEQ ID NO: 12048 - DNA, 417 bp, Oryza sativa
tgcttcggcttatagcacaagctcctcctttttcttgtgcatctgtcacagatcttgtgaatttcatattgatgaatctttcaccacacttgctaccaatctctaatctccagtttgcatatttgaatactgtatcactagcaggttaacactgtatctatttgtactatgcaaatacaagaacagtgtgaagtttaacattttttatgattatttcaccacacttagttactaccaatctccaatctccaattccttagcattgtgtttatctgcacaatgcaaatacaagagactctgaacaatgtgaggtctgaacactctgaaccactgaaagcaatatactactatgctctcttatgcctctcttaatctatctgtttagacttaaagaaaactcgcgtttactaccaatct

SEQ ID NO: 12049 - DNA, 487 bp, Oryza sativa
  unsure (1)..(487): unsure at all n locations
gctctattaggatactctccatcttatcgagcatcttctattnngtatttttttcctattgttacccccaacaatttcttattaatattggacactacattattttttcttaaacttaatatctattaaataattagaaaataattatattttgagacaagatagtatctaaaatctaaccactacctttgttctcttaagagacataactaagcacgcacatcacaattcacactcaaggtgtgttctttgcctctatctttttcaacttctatttttcatgctttttgagcgcacgcttacaaagctgctaaacactgtgtattntanaaaagttctatagaaaaaatgctctgaaaggatcatatactattttaaatatttttaaactaataattaattaattaaacactaacgcatgctctgtttctttgtgcgggagatgattaacccctctgtgaacgtgactaatctctaaccattctaa

SEQ ID NO: 12050 - DNA, 408 bp, Oryza sativa
agcttgtcgtcatcctcctgctgtagtgctgtgtgggtatagcgcggcggcagagagggcagatgcatctgatccggagccagtcgaagatgcatcgctggtggaaggtgtgggagcacggcatcatcctcagcttctcctccgccacgaaatcctgcttgcaaacggcgcactcctcctccctcgcgccggccgccgtcacctcacgcatgccttggatggccttgctcagctcgcctgtatgacgcagccgcctcgtcggagatctgtggcgtggggtgattgatctcctcctcgttgccagatgacattgatgaatacacgtcttcggatgatgatacgtaagcttccggcggcggcggcggattttgttccaccctcatgggaagcctccggtcgccaataacc

SEQ ID NO: 12051 - DNA, 429 bp, Oryza sativa
tgtggacaaggctatccatcaagaagagcaacgcaccaaaatggatcgtttaagaaaggcagctcagttcaagactcctcatgggaacagtcagaagcctcgcttcatgacgggacagctgggtgagccttccaccctgatcgttcgtcagcaccgtccctaccactcgggtaacttcaacaacgactacaacggtggcagtcacaacagtagtgagcagcaccaccacaactcaactccacccccattaatggcaccagctgagtcagaactaccagctatgtcagcccagtcagaacagctcaagaaagagtctgcaggatagccaggaccctgcttcaactatggcaagcacggccactatgctagcaagtgtccgaagcttaagcgtgctggacccaagttcgttcacgcccgcatcaatcatgc

SEQ ID NO: 12052 - DNA, 411 bp, Oryza sativa
agctttaatcgacatgaatctcctgctcttttcttacttgttgctgctattactattatgatgcgttcatacatacacacgcaggttgcttcctggagttatcgcctacatcaacgctgagaagatgaaggtcatcaacacacgcatatgagtacctcttcaattctctctctccttttcttgtaataatcgatcggtagtggcttttatctttataatgaaatataaaaatactttcttttctactctactcatttctttacatatgcatatgcctacactacatatgttaaatttattgcttcatatatgtatttctttcctataggaatgctccgtgggtattcagatgctacgttcgatcagttggacatatgcggccgcgcgcattaactgagaatgctcgcgtgc

SEQ ID NO: 12053 - DNA, 350 bp, Oryza sativa
aatgtgaaacctctcccgccattctctacaacatacaatgcacataataagtatctgtatcatgcaacttctcctgatgcattgagatttcatctgttgccaaatgctatgactaagtatccgcttctggccacttcgaaatgatgcattgagcacgcatctggtacaaaatctactctccaattatctgcgataggttttcaagttccctaaacacatactgagataattcatactcttcagcgatgcggcagccctaaagctctcgcgctatctatctgatacacctgccgccatctcgtgctctttgtaataaagaagaacacacacttgcttatatatggtacgca

SEQ ID NO: 12054 - DNA, 413 bp, Oryza sativa
agcttatcactgtgatacaaaatctaatttttcttgtttttaaaaggcaacagtagttggtggcagtgaatcctattacactctaatctttctaaatattgctaatttcatatttccatccctaaaactcaagtttatcaaggaaaggtccatgattacaaaatcatcacatatacatatcacagaaatgggaatttgcaattataacaatgtaaaaagaaattaagtgctccctataataacaaaagtaacaataatgtgaagtgtgttcactgaaaaaactctttgtttcaaacaatattatcacatgtacgattcatttttttctagtagaaagataacaggcatttagctatcttgagcaaatattattatcagtgttggtgtactcgtgctttgatatgtatacacca

SEQ ID NO: 12055 - DNA, 416 bp, Oryza sativa
  unsure (1)..(416): unsure at all n locations
actaagcttataggaggcgcnaccaagccgcgacgtgagaanaccattttattctccactctcccctcctcaacccagtttcaaacacccaaagaataccgcgatgcacacgcctttcgtggacaagagcccccaccgccgcctcgacggcttgtgcgccggtggctggctgaagcacaggctggctcagatcctagtgcgatctacttgcaccaccaacaccaccaccacgacaacgaccacctcgttcacggtcttcgtcagcctcgacaagaccaatgccgacacgcaccaagaaccgtcgtcgncgccctcgccgtacttcttgacccacttgacctaccagaggcccaagcttgatgcccccggccgttcccgccgacgccgacgcagcgcgtcgctggtccacatctcca

SEQ ID NO: 12056 - DNA, 377 bp, Oryza sativa
ttaccaggctagtcttgcaatggcaccgcttgaaacactgtatggacggaagtgtctcactccactcttctgggatcaaacaggggaacgccaattatttggtacagaagttttaaatgaggcagaaaagaaagtcagagttgtttgagaaagattgagaatcgagcaatctcgacagaaaagctatgcagacaaccgccgaaaggagctcgctttctaaataaaggaccatgtgtaccttcgcgtcactccactcatgggagtacacacacttcaaaccaataaaaagttggcaccaccctttgtgggccataccggatcttgtaaatataggtgatgttcttaccagctgagcttccctcaacaagcttggatcc

SEQ ID NO: 12057 - DNA, 433 bp, Oryza sativa
  unsure (1)..(433): unsure at all n locations
tcacctagcgcanatcagatctatgtgcactaacagatgcatttatcaatagttgtgcaagctagtacagatatttcagaacatattgatacttgtcactgtgtaccttattcaacgaatcaaacagcatatttctttctcctcactgccactatgcttgtgggtgtgtgaggcggacaactcccagtgtgtgcgacagcaggcgtcgctctcagactctgggctggtgttcttgtcaaagacctcgagggcgatgttagcaaccttcttcactagaatcaaacaacagtagttctcaatacaacttggaagtgtttgactagaacaaggtttaataagaatggtgatacaagctaatagaagagactggattgtcctagtagctgtagtagaggtagtagcacgagaggtagtataggaagagaggaagatc

SEQ ID NO: 12058 - DNA, 440 bp, Oryza sativa
atcctcttagtcacctgctgcatgcaagactgtcgagttcttctctcgtatggcttgttttcgatctggtgcaaatctccgtagtttttgctttactggctaagcatcgggtcgcaccatgagtttgtgctcaatcacctccctatgtacccccggcatgtcggacggctgccaagcgaacacgtcagcattgtcacggaggaaggtgatgagcgcgagttcctatttctcgcctagtgatgccccgatcttgatggtcttgtcggggttggcactggagagtggaacgatcttgattgcgccgtccggtttcggcgtcttgtttgttttgctcactttcttgggtggctcaactgtggcaagtgggctgggtgtgtgctcgaccatgtcgaggctccgcttgtcgcattgcactgccagcttaacattcccttgaatag

SEQ ID NO: 12059 - DNA, 461 bp, Oryza sativa
  unsure (1)..(461): unsure at all n locations
tcccgcggaagaagcgtgcgagtntggaggcgcgtggaggagtttaatatggnggtttgagggggtttaacgtttaagtgaagctgttaagcggngtattggaatttgctatgcgcacacggtggctgcagctgtgttggcccgtcaagaaattagaaatgggtttgcttgtttgatccttatctgttcctaagagcaagttcaatagtatagcccactactaactccaattcatatatagccaatcttatagccaattcatataatagttgcttactatactattaatatatggtcccacctgtcatacacacattgcgtcttggagtccgtgctgcagctggctatagatctgtagcccgctgctcttctctctcatcttttatcttattaaaatatatttatagntggctaatagtcggctattgacctgctctagagcaaggtaatatatagttgca

SEQ ID NO: 12060 - DNA, 408 bp, Oryza sativa
agtctgtgggcatgaccacccaatgggtctagttatggaggttaatgtggatgaaagggtggctctagtgcccatagtatacaacaacactcaaatccaacagccagctcatgaaccacaggtagaaaattttttgaaggcattggaggtcttggccaggaatggaagccccatgcacccatacttctatccaatgaccgggctaaatgataggattgagaaactctgcaaagccaaggactttatggctctttcatgcaagctagcagggttccaactgcttttaatgtggcaaatccctcactactctggttctaccaaagaagtccatctttgattccacaccctcagtggtccagaaaaatgatgtttgggttttgtggccaataaagtatgtttcttctcctc

SEQ ID NO: 12061 - DNA, 388 bp, Oryza sativa
  unsure (1)..(388): unsure at all n locations
acctataaaactcagcttgcttcgttcaggcctgataggattaacccctgattttataaatatgcttgaaggtcatcgtgctattgctgcatcatgttgntgaagttggcgaactgagcatcatcagattgttgccattcttgcgttcgagcaatgtgttccgcgaggttgtactgaatctcccccgtctgcatatcaagggtgttcattctcctagtgatctcacccaagtcccaacgagaggaacttgagcgccatttacttggagatggaggcacaccacttgatctgtaatgctggttgtcctcccattggatgtcatgaggcgcacgccaccggtcctcactggcactcgcccatgttgagactccgatgctgtggcgtggag

SEQ ID NO: 12062 - DNA, 316 bp, Oryza sativa
agcttcgatccgatccctcaccctcaccctttgtcacacacacccaactttctccaagctgcaaccaatggcgctcttccctcccctccccttcccatacgctggcccctcgggctttgcttcctcgccgccgacgagatcccctacggcgatatcactgggagggaagatggcggtgcgcgtgcacctcttcatctcctctgcgtgagctgagctaccctcctactactactcacgctgccttgtgaaagcttttgtttttgtttctcgccgcaaaagctttcgcgaatcgtgatcgccccccgcgcgtgggacc

SEQ ID NO: 12063 - DNA, 408 bp, Oryza sativa
  unsure (1)..(408): unsure at all n locations
tactcntatccgagtgtcctgcatcgcaaggcactgaaattttcataaccatacactgatactgtaatgagtgactcattattcttgttgtagaataaactgcggataacttcatctggacttccattcagaaagcatattctcctatttgtctctgataatacatgaagctgctcttagtatgatcataggaagcagaagtgcaccacaatgacacaaacatacctctactataagcagcgcacactccggactgtgataaagcaaaaactatgtcgcgtgctgcaactatctcaataatttgtgaccttttcctcaagtaaggtagtagcaagcttgtttccttatgatcatgggtgtcaaactcctnctgaaagtgacagtaaagtgcatgattaataatacaga

SEQ ID NO: 12064 - DNA, 371 bp, Oryza sativa
aattttaacacaacacaacttatttttaatgaaactaattcggttttgttgatgtatattttctataatcttgatcaaacttaaagaagccttactaaagaaagacaaaataacttataatatgaaacaaatggagtatgtcatgttgaaaagtataaggggtaacatataaaaaccagaatggagtagtgtcactagaattttttgaattggagtatagataatgagacacaaacttttatacggattaagttctttggaataattgttgaaatagattttttctaaaaaaagagaatctcatgggatattaggaaacaatacaaatttaaatattttttaactcgtggtatgggagtatgagacaatgc

SEQ ID NO: 12065 - DNA, 393 bp, Oryza sativa
  unsure (1)..(393): unsure at all n locations
ctgaccacaagtgatacaagtgggatgggtgcttcctttcccacctnctggntgtcatcgatatcttggagacatatcagtgagacactggaatttgtggatctgcaacggatgttcaaggtaatgggcattgataggattgttaccttgaagcaaccctttggtgaagatttgatccggtagttctatgccactgtgtgggtatccggcgagtgtgatgctatgaaatggatgtcggggacccttcggtcctccatcacctggcgtgaattcaaggagctcttgcacatccgtttcaacaatggcgatgatcttcatgacaagcacactcacaacctcttccctattaatcactatgcttagtttaatgaagatggngggaggcacacctat

SEQ ID NO: 12066 - DNA, 360 bp, Oryza sativa
aactccacatccccgcacagtaaacggtattgcccattaacgcttgattaattaagtatgagtctaaaatacttcaaacatagattaatatgatttttaaattaactttctatagaaaacttaaaagaaacgcatcgtttaacagtttgtaaagcgtgcacgcggagaaaaagagatacgagtttgggaaagaaggggaaagaacacagccgaagcagggttcgtgcaacctcctcaaccatagtactaaatttacaattttgcattatctgtgcgaaacaatagcacgattttcttataaaaaagaaaagcgtaacatcatgcttacattctgttacaccacctaccttggaataaaat

SEQ ID NO: 12067 - DNA, 402 bp, Oryza sativa
  unsure (1)..(402): unsure at all n locations
tggtgacctcgctcaaggtgacacaagtcttctcatatatccactctaaataaaacaatcttctagacggatctagcactgcagcaattataagcactacattgtaatctttctcccaatacttgccaaaattgtctcttatattccttcccaactctctcaatgtagcattatctgagtgacactccgcttcttcaagagcgtgattaatgcacaaaacaatgtgtagaaacatatgtaatgtggctttgttatgtgctgataccacctttgntgcatcttcaaaagccctcaagaaagcagaaattgcttcggcattcttccgttcatcatcagtaggtgcctcttctccctcttaacttgcatatgcattgaaaacaactctgtactttacagcatcgt

SEQ ID NO: 12068 - DNA, 426 bp, Oryza sativa
atcttaagcaccgcagctgcaactctcggtctggtcttgcccgtgttttgtgccaaccccgagaagatacgagctatataacggatgcgcccccccagcatgcttatggatgtgcaatgcgtcaccggttgcatggccgccctaagtcggttcatatcgaggctgggagagaaggcgctacccttatttaagctcctcaaacgctccgggccgtttacctggacggaggaagctgaacgtgccctcactcagttgaaggcgtatcttatctctcccccagttctggtcgccccggagccaggtgaacccttgctactctacttagcggtgaccccgcatgtagttagtgcggcgttagttgtggagcgcgatgaagacaaccctcattccgcgcatcctcaccctgtgttggcttggcccgggaga

SEQ ID NO: 12069 - DNA, 496 bp, Oryza sativa
  unsure (1)..(496): unsure at all n locations
ntgtggagcccctgtacactggcatgcttcccttgaacaggtttcttcatgatgtatggagttctttcattgataactttgcttctaatgaacattaactattgttgaaggctcataagcacttgtattatcaactttcacacttggtaaaatttgtttttgtactgaaaataagtgcaatttcagttttgatacccaaagaatggcattttgttttgtcctttctattcaaaggtccattntgtttttgccgctgcagttaccattcatcagtttggcagcactgatttggcatgcattgttaagtacagtanggaaagctttaaggacattagctatataagataaggngaaacattatgttttttattttattatggtaccgaatgtgccatcgtgtataattgagtactaccttccgttcagtttataagactntctagcattgctcacattcatatagatngtaatgaatctaacacacatatatgtctag

SEQ ID NO: 12070 - DNA, 419 bp, Oryza sativa
gcaagcttatgatagctacacactgatacacattcctgtatttaccaagacgacgagcagttgctcatccttagcctgccctgtaggatcaacatctgttgccagtattatcctatacgcctgtttccatggcaaataaaggaattaaaatgatacctgtgtatctcagctacacagttctataaacaaattattctgagataataaaatgcccaccgggtcaagatattctttgcaattccacagatattggtacttcttatcctatctttacagggaacataagcaactgttatgtcgcatattagctaaaactgtaccagagatcaacactcaaactgatgaatataatagtgacaagaagacataagttgtcgtgaatcttgaaggacaaaaactttggcaacagcataaagtat

SEQ ID NO: 12071 - DNA, 483 bp, Oryza sativa
  unsure (1)..(483): unsure at all n locations
tanacttaatgggagtttagctaagcttaattggagtagtcatcgttcgtgcaagatgccggtacggcactacgacctttttggcttagctatagactatagtctctaggtagctagctgccacttttgccttttagaccctgcaattgcacgcttgcactattccctatagtttatccgtactcgtaaaataagtcgtttaaaataatatttaagttaaatcttaaaaatataaattataaataattctcaagttgttaagtttgaaaatgtaaaaattatatgaatagatttgtcttgaaaactattttttaaaagtatacatatatcactttttaataaatatttttataaaaataagaagttaaagttatgttttggagaccgtatcgctgtccacaacgaatttatttacgtgtacagagggaatacattnttcctttctgattggcagctatgataaaagtcacacgggttggtgag

SEQ ID NO: 12072 - DNA, 383 bp, Oryza sativa
  unsure (1)..(383): unsure at all n locations
agcttgagctgaaactatcatactgtggatttttgtttagatatgtcnagctcgataaaatgtaagttgaaacaactaagttttcttactataatatttatcattgtagtgaatatatttcagtacaccacttttatatcagggtagtggttattattatctttttataaaattaattaagagttactcaatagtttgagagctacctcttttgcatgtggatagaaagtacgttttggtatgattctctaaaaggatatgataatattattaagatataactgatactcaaacctatgtggatggatacacttgtatgcgtaccatttgttgttcataagagaatataagcatatcaagttacttatgctaccctcccccct

SEQ ID NO: 12073 - DNA, 408 bp, Oryza sativa
actaagcttctaacgactccgctgttgtaataacttgcatagcatttatactactggaagagggaagtgcttatgggacgtactgcgcaaattgcatgtgttgcaaaatccattttgactaggtctataagttctaaaaaattactagggcatattcaatagtctgcactcatgaaaaatttcaagaccaaagtcaacctcatttgatatatttgaaaaggatgaatacttagtaaacagtgtcaagttttgttcactgaaagtctgatttggaagcccacaattcctggtccatatccccgtggaaaagccactcacaaaaaaggctctggtaattggcttttttgtgtcttgtccaattaagacaaagttgatctctagcaaacaattttcagactttcaagaact

SEQ ID NO: 12074 - DNA, 414 bp, Oryza sativa
agcttcatcggtcttttgcattctgtattgttcattttcacgagtttgtagtaaatatctcaatcccattggtcagcttggggggattgttttgatgtttcctattcaacctttgagaaaattcttgatccctgtttggacacaaggttacctacatgtgtgtcagtagtcactatatctcaattgcacaaactagatagttttcactcacttctcttgaaatcatttccaaagcatagtgttctgtaccaagaaatatagttattgcatatcttcatctgtattattggaggcgcttagtgcagaatcataatgccataatatggtaatggtgagtgcaacatacagttcataagtcaaaatgtacaccaggatagcaaaggaagcagcttatgttacttgagtgatgctatc

SEQ ID NO: 12075 - DNA, 469 bp, Oryza sativa
  unsure (1)..(469): unsure at all n locations
aggccttaaactagctggcggatgtgtccccgacatgattatgggtcatctttgtatcccacggttccagcgatttaatcggagttacatctggtagagnttccaagtggcaggtccctccagtcttccagtcaccacctctgtaagaaatatctaatctagttaaagaaatagtttgactgaatatttgaaagatactatgatgtttgttcacaagtccaacaataaataccatcagcattgtttcatgatgctaacaatatattggcacaattcacataaaacaatgaaacaatgtatggtcaaaagcatctgatatcattcgatacaacatacacaatcaatcaagactgtcaaataatgtttgagcaaggaattaaaaccaagggaaacactcactatttgagtaattagaagtggtgagtcacagacctganatgcacacgagcatatgtaccgaagatgatct

SEQ ID NO: 12076 - DNA, 405 bp, Oryza sativa
cacatgttaagatgattctttctctatgcctctttatgtgtttaattgagtttctcagatataagttatcagctatgctaaaatatttatattttcttgtggtaatggcaacatattgatatgctgagacaaatactcataaacctctgtcagtatcattgactagctcaattattactatatgactgtatgtagtgcagaactgcacacaaatcgacatgttataactcatttgtgttgattgcaactgttggccattgctcaagttttgtgcttacattcaaagatcaaccttttaggcaagaacaatatgaaaaatgagacgctggctgacattctggtccgttcagacagaagcaagtaaagatgatgtttattatggtaagtacgttatttgcccaatat

SEQ ID NO: 12077 - DNA, 435 bp, Oryza sativa
  unsure (1)..(435): unsure at all n locations
gacctataaaactcagctggatacatgtattgtacttctctacaccatatcacccaaggttgttgcatattccaaaattcatgtaagtccaaaaagaaaataatatcagtccaattcaccacaagaatatcatatccagtgctatcattagtttagatgcttccctaccctactcatgcactctttgccgcactctatatcagacaagacagcaagtgatgaccctgaacaaaaacgaggaagagaagcatcaacaatgagaggcatcatatactatatataaccctgatgcaggcaacgttcttcgagcaagcaggacagcgtgcaatttcgtaccaccattcactataccacatctcaactcagtctcaaacaatcaacattgctgttacttncggcaggccacaggcaaagtctctctctataccatgtctc

SEQ ID NO: 12078 - DNA, 441 bp, Oryza sativa
  unsure (1)..(441): unsure at all n locations
ggatcttaagtcacctgcngcatgcaagctttcttcagctccttcatctctcctcgtgatatccatccaccacagtttctatggaagatgaattgtagaaagggaaaaactcacgggcactcacatggcaaatgaaacttatgctccccatggctagctccgttggcgtatttattcagttttgggttcccttttctatgaaggaatttaatgtgttccatataaaataatggtgtttggtgtgacggtttcggaagcaaggggaagaacccagaaactagtggttcatgtggaaaaacacacacgcaccagtgtgcgccccatcccgaaatcccttatattatgggacggagggagtacatgttacttttatttgtggatactttcggttggtaaggtcttaaaacattccacacactacgtgatgttaactagaatagc

SEQ ID NO: 12079 - DNA, 420 bp, Oryza sativa
actcaagtcagcgaatatgttttcccggtttacaccacggtaccaatctcggctggtccatcaatgaccggaaacgagaacgccgtagctataacctcaaacgaccctgtgtcgaaggatcctcccgccatagcggagaacagaacatcgacgtcatacgagtccgagaaggttcctagtgcggccaaaccttgtccttccgacaagaaccatgagctgacaaggagcaacttccgaggtaacaaagtcctggtgtcccatccacaagtccaggaagcacaacttgcaagcttgctgggtttttctcaacgtacaagctgaaattcatgcttcgcaggagcgtggaatccagcgtacttctccaactcgtgatgtctattgtcctattcacaagacgaagaatcacgaagtctcaagctg

SEQ ID NO: 12080 - DNA, 414 bp, Oryza sativa
agcttccactggcttcctgatcagcaatatttaaaattgtgtccttcaaaaaaccaagtctaactgcttcgtccatgatatcgttggtatcaccgtaagctggagcatctagtgattaatggctcattcataaagcaaattctgcttcagcttgtttcagaacacgtgaaaccatgttgtaaaattcaggttcttcttcctttatttggtcaagagtggtggattcatgtgcatctgcctgcagaggagaaatagaagtaaaaccatgaatatgttactcaatttttacccctctcagaaatgcatgtccactaatatttgaagtcaattttccattatcaggtgtctgtcacaagtgcacatgaattacctcattgaacttgagaagattatgtttgacacgccagcatgctt

SEQ ID NO: 12081 - DNA, 446 bp, Oryza sativa
  unsure (1)..(446): unsure at all n locations
tgaggacggctcactacaaacttggtcagattntaaatatgtacttgaaataaactccaattaaatttctttgagtcaggctttgggccatggcccaagtggcctaaggcctagctagttccaccttcttgtcgcacatgacttataaagagtaaatttcacaaaactacatgtattttacacaatttatcaaaaaaaactacatgtttaagagcttgtttcacaaaactacagatttagtgttttcttgtatcacaaaactacaggtattttatacaatctatcacaaaactaaagatttaacaacttgtttcacataactatatatttagtgtattcgtttatcatagaactacacatttagtgtcttcatttatcacaaaactatagatttagtgtctccattatcacaaaactacaggttataaaaatgctaaaacctatag

SEQ ID NO: 12082 - DNA, 412 bp, Oryza sativa
agcttcactccttttcttctttcactattctttttcccctttttctactgcatgctggagtagcatgcaaagtagaggtaacatgcgcgtttatccgctcagataaacggtccctggtgtttcttaccaaagtatgtatattggattactttatagccttcctttgctttgttaatgtttgatgcacaaaagtgccatgttggtttataataagattctccccatgataagaagagaagcatatgattgtttatggattgttgatgactttcatgtaatgcattggagggaaaacgcctctcgaatggtgcctctgtgcatgtctcaatgaaacaatgggcatgtactacccctagttgaacagtaaatgaatccatataatccactaattacctcaagaaaaatactctat

SEQ ID NO: 12083 - DNA, 399 bp, Oryza sativa
agctcgcccaaattcaaaattggccatttggtccttggtggttactacaaatatggctaaatctgtacaccattaaagtagcaaaaagacctgctctgtctgaagcgatttcccatctcttgtgtcatccaaagatgatgaggaaaatgaaattaccaccacaaaatgtatgtcctttggagaggtagcatctacttatcctggttcagaaccatcagttgaacccttcataacctagtttggcaacttctatgatggattcccaaaaaattgctgtggatattatgggtaccccatacccatacgacatggttatctgactagttataggggataacttatatctatgtaatattgtaacagatcatgacttgggtgttaacgttccttgtatattac

SEQ ID NO: 12084 - DNA, 431 bp, Oryza sativa
tagcggtcaccatcgcatcacgcgcgcgtgtggaatcaatcttatttcggccaatctcctgtgaactgttgactttccattttgccaatagatcagctagcttgctcacgatatattccggacacggaaaacgtaaagcatcgtcgtcatgcaagtaattgacattgttaatttggtatctacatattataatcatgtacagttaccctctgttgcatatcaacacaactgtacattaattgtattacctctatcccataatataaggcacgatcagagttggcacggtgtccataactaatatttagcttaataatttctcatatactataaaatttgtatcaacaaaattataatcatataaaagtaaatttaaatctcaatataatgatatagtttttaacagataagattcattccatattatacta

SEQ ID NO: 12085 - DNA, 405 bp, Oryza sativa
agcttgcaactctttatggctgctaccagtggttgaattctcgatggcagcgaccatccaatgctatgtagaaacatttctgcaaatattctctcactgcttgatctctccacaagattaatctcatgagctggccattggttagaagctgtgtatgctgctgcagaaatctcctctgtaagctggttgacagatttgttgaatactgaaatgcaatgctcgggacaaacttcaagtgcagcacggctgttaagcaagtcatgtgatgggttcaagtagttcaaaagcaactcacgggtcttcacaagagtgacatcaggctgtggaggcaagtttctggtcagccacttcatgcccccacgtaacttctcatcatcaaagaacccattggcataaccttccatg

SEQ ID NO: 12086 - DNA, 425 bp, Oryza sativa
  unsure (1)..(425): unsure at all n locations
tctccactcctccgcggatgaccacgcccatctcctctgctctatccagctcctattcaccgccggtgccctcctncatggtatggtcaccgtggttgtctcctctcccacctcacctcgccagcctncttcgctcccgacgcttccctctacccagcgccgccatgtcgctcgtcgtcggccgtcggacctcctcctctccgcaccggacagtcagcccacccaaatgacgacaagaaaaacgagaaagggtagaaagggagagaagaggataagagagagggtaatgccgcggtcaccttgatatgtggggttcacgtgggttccatggtgactcagtcgtcatgtcggacaaaaccacgatcaatgttgtctaaggacctggaatgatctacntctgaagatgagggatcttatacatctgg

SEQ ID NO: 12087 - DNA, 390 bp, Oryza sativa
  unsure (1)..(390): unsure at all n locations
agcttgcccgcaggtacaccgaacacactcttatcggggtttagttntatgcgggcggagcggagactctcaaaagtttccgctagatctgagagtaacatttcctggttgcgcgtctttacaaccaagtcatcgacataagcctcaacattacgtcctaattggttacccaaagaaattcgagtagtacgttgaaaagtaggacctgcattctttaacccgaagggcattgtcgtataacaataggttcctatgggggtaatgaacgcagttttttcctcatcctccctaaccatgcgaatctgatggtaaccagagtatgcatctagaaaacacaaaaggtcgcaccccgcagtggagtcgacaatctgatctatgcgaggcaggggg

SEQ ID NO: 12088 - DNA, 431 bp, Oryza sativa
  unsure (1)..(431): unsure at all n locations
cttcgaccaaagttaataccacttataatctaaaacataccaaagttaaaaccacttataatctaagggagtacttaataccagtttaccggaaatcgcaacactcaccattaccgttttcttatcagtcactaatatttcacattcaagaaccagcgaccaggggttatcggccaaaaaattctggcatgattattatacattnttttttacaaatccagacaaatacatcgcaaatatattgcaaatatgttaaacgatgaaaatgcaatcaaaggaatgagaaaggcaaaggaaaaggaaagaacaaagaaagcaaagaaggaaagaacaaagaanatagctgtcaatgggaataaatgaattattgtggtaaaattttattntntggttctcgcaagattgactcccggctagggggtccagcggta

SEQ ID NO: 12089 - DNA, 383 bp, Oryza sativa
ttttggcttcaagtgatataggttgaatttaaaccaccacatttgtgaaggtgccatctcctcatattaactcatcattttttatgattgtttggatgacaagaatgggtgaaaatcccctgaaggaaaaaaaaacaatttgtacaatagtcaatagtttcagaaaattgtatataaaaaataagatgaactggaaaaggaaaaaataatgatcattttctgctcaccagaaatataggacaggtgaatggcggttcgcggtttaagatggattgtagccgttcaagtttctctgtgcattgtaagagttgacattctagattcgctttattcttccggactgacttaagttctgcatcgtgattcattgtaagttgctcaat

SEQ ID NO: 12090 - DNA, 406 bp, Oryza sativa
agctttgggcatcgctgtgggagatactgtttgcccttgtctacccatgaaaatatggatagctgcccaagtcagcccaagtttatttgggccgagctcactgtgatagttggatcatgtccaggctgcggggatatgcacaacattacttgatattcattctcgctgccaaattttcagattcagtcacagcatcacaatgcactatatcacgaatatttagtgcaatttagtcataaattttgatatacaaaatggtatgggtataactagtctgaaaaaggctgaagattgcacacaaacaacggtaaaagcctaatattagaaaggagattgagcatacctctcctaataacaaatcttgcgaattccgattattacatgacatgccaggagaactgtatac

SEQ ID NO: 12091 - DNA, 434 bp, Oryza sativa
ctgccatcacattgggaacctatttttttcctataaccctgtgaacaataatagactgaaattaaagaaacaaaaggaatacttgccttctgttactgttaaatttcaatccctgctaactggaacgcctacaatggcatgaaaaggattgttccaaactgccgttagccttgtgcgggcacatattgaggcacgtatataataagagttccatatgtgcccaaatctccatagttttctaacacgctaagaaaggaaaattattcttcagtgcgatattatgcatctaaagttgtcaacataatagatacaaatcttaccggagaatcgaactagtaagaaaatgtcactacacgataactctgctgccagtgttagcttccattgacgactaacaatctaacagcaagatgcttcactatagtacctcacta

SEQ ID NO: 12092 - DNA, 406 bp, Oryza sativa
agacttgtcacgctctttattttttcttttgtcttccctttgtcccctcttaatttctctcatgcaagacttgtgatccataattttggtactgctgtcctaatcgtgtccgttaattaatcttctttaaatctgggggctgcaattttgcagtgtattattcgcacgtctaattatgcgatactgggttaaattaatcttcttaacggacagcgattaattgagttcaagaacgagtaaaagtgtaaattgacttgtatgttttactcatcgatacaaagacttcgaagaaatcattttaattatacttgcggtagaacatcctattatatatatccgcgatgtccatagcacacgcactacggaactacaatcctaatattgttatccattttttataaaattg

SEQ ID NO: 12093 - DNA, 300 bp, Oryza sativa
cgctgtatgctgcttggaacatttcgaagcagacgaatagcctacttttttaaaacattgctccctctgctacctgctggagagttccctttacgaatgatctctcccttttcactgatagagcctaaaactccgaaagagatacatctgcatagtgcgtaaactcggtggcaattctcttcccttcatgaagatacaatctcaacggtgggggcttaccctactgtggtgctctataaacaatgaaatcaccagaacatcatgtgtgaaagatatagtatcttgcatctatattagcca

SEQ ID NO: 12094 - DNA, 419 bp, Oryza sativa
agcttctaatgctggggtctggagtggttattgccttgtatcattctcttgttttagcctgaaaatcagctacattaaactgaatgtggaagtaatccacacttttgttctgtctgacaatgcattgcagttggaaatggtacaataagaataaaaggtccatgacaatcactgtcaccactctatcacgatgctgtatgtctgtactttgactcatgtagaaggataaatgttatgttcctacccagataattgcaaatcttgtaaaggaaattgtgggcatcctatctgcattactgtgaagaatctgtatgtttcccgtcaaaaaaaaaaggggaatctgtatgttgagattgtaaggctcttttttcttttagaagaaggtattgtttacccggcctctacatccaaccggatat

SEQ ID NO: 12095 - DNA, 419 bp, Oryza sativa
  unsure (1)..(419): unsure at all n locations
tgccttgcgttctttactgaatggttatgcatctggttatgttttattattacaattctgaggctgaaatgtttcagtagttttactcaatgccctgtgaccaatcctgtatntgatccaatttagtaatttacgcaattgaggttataataagttcacaaatcaattccgagtcaaactatcaattgtttttggtgtttcaggtcttcagactgaagntntagagtagcttcatcaaatttttgagagctttcagagtgattgacgaggtagccatctttgccctccttgcttcaggattgagtatatgagagactgaagatatgaggatctgtcatganaaatattgcagaatacctagtatagaatacatacatagaataaaattctctaaagatctatcaaacgatagctctact

SEQ ID NO: 12096 - DNA, 418 bp, Oryza sativa
agctttaatagatgatgtaggatggctctatatgacatttaatgggccttataatggtttacaattctatatatcctatagattagccgttgatattttttgtttactgttaggatcaatgctcttgagtttttctattgtttaaattcttatagaagctctttatcattattgtgaacatgtatgtttttgcgttagctttaaattaaataatgtttgtattcaactacgtatatttataaagtgatataagataatataatctacaatataatgtcactttatctttattatatgatgttacgcacactcataatagggacggatgcttcgctaccatttttaaggaacatcgatcactcatagttaggtttattctatgtcttatggcgtcgcagatataatttagttatctgta

SEQ ID NO: 12097 - DNA, 439 bp, Oryza sativa
attagattggctgaagcaataacaagaccatcagtctgtttttatttcattcctgttggtgccagtgccagagtaatagagactttgatcagttcaacaagggatcttgggggagacccttcagataaagcatattcacaaaaccttgctccagctgtgggtgacctctttataagtgcaatgcagcgagcacacgcttctttcagtggcaattttgttggaaaatatgaaaggatgagaagctttgtgattttctgtgcgacacggcggtggtcatttgagagtgaagacagcgaagtacccaatccaacaacctgaaacataaggcatacatctacgttgtttgttcaagtctcaaactgaagaagatacagatccaaagggtacttaagttacagaatcaattatcacatgcatatgtaatgaagaagtacgtaat

SEQ ID NO: 12098 - DNA, 288 bp, Oryza sativa
tgccattctggctggacacatgaactccataatatcagtacctttatttgagtgaacttgtggccttttaatgagacttgtcgccgatggctcatcggcgcatcctgatatttataatgctctgatcttcctggggattccatctaaacttttgcatgcgtctggctttatatttctccaaacggtgtgatagccagttgtgcatgacaacagaacataaatttgggttcttgcatatcaaacgctttatttttccccgatctgcatcgaatgccaaatcaccatcac

SEQ ID NO: 12099 - DNA, 433 bp, Oryza sativa
tcgcacccgggatcctcttagtcacctgccgcatgcaagcttatgccgcaatatgtatttagagcctcatggaatcatctaatttcacaaagtaactggtggatgctgatatgtgaagtgttctattaaacgacaaaggtttggtttcaagattttcttcagacaagttcaatatttttcaaagcatggttttttttttcacctgttgcttggtaagtttgttggaagaggttcgatttgtgatatgttattgcgccagatatggtgatgttaatgatgctagggcaggcaacaagtattctctagcgtaattgtcatgattatatttgattgaattgtttgttttgaacttcgctagatatttgttagcgcaacattaatatggtacttccatttggaatgtcagaatctctttatgaactaaagatgcgct

SEQ ID NO: 12100 - DNA, 439 bp, Oryza sativa
tggccattgggccaaagactgtcgacagccacgacgctgtctttccacgtcgcacgggtggaggaggaagagccggctctgctcctggctcacgcaagcatcgaactacctccagcggcaccggccgcagcggctttcctccaccttgatgagccgaaggtactcgtctccctctgcaacggctccagcaacgacaaggctgatgggtggtacctcgacaccggcgccacccatcacatgaccggccgacgggagttcttcaccgagttcgactccagcgtccgaggctccgtcaagttcggggacgcctccggcgtggagatcaagggtgttggctccgtcaccttcaccgccaagtccggtgagcataggctgctcaccggagtctactacatccccacgttgaggaattctatcatcagcgtgggacagctggatg

SEQ ID NO: 12101 - DNA, 489 bp, Oryza sativa
  unsure (1)..(489): unsure at all n locations
tcgcggcccgggggtcttcttaatagaaaggacatttgtttataagcttgtgcctgcttggagagatcatcatacattattaaagtatgccgctcgcggtacataaaatactcagccagggctgctcccgtataaggagcgaggtattgtaatgtagcacgggaatccgccatttcagctactacaatagtgtattccatggccccctcttcatggaaagtagttactacttgagctacggaggatgctctttgaccgatagctacataaacacatattacatcttgccctttttgattgagaattgtatctgtagctactgctgttttgccggtttgtctgtccccaataattaactctcgctgaccgcgcccaatatgaatcatcgaatcgatagcaataagccccgtctgaaggggttcatatacagaacgcctggaaatatacccggagcangagatcaattaagcgagttccgaactacaattc

SEQ ID NO: 12102 - DNA, 416 bp, Oryza sativa
agcttcaactagctagtgcatactcaaagtatatggggtgaattaaaatacttcaaaatgaagattaaggccaggtaaaacaagcttgatcaatctctatgaaaattccttgcgtgaacacaatttgaaacaaaactcagtacactaaaattgatagcttccacccgcaatagttattataagtcaagcgtgtatatcactctatccaactccgtgcatatatgcacttactcgcatatggtcttacgacgaaggcattgttgaatttatcatttcaggtttttattaagcaagctaagagtacagcaaatcttacatagaagcccctgacagatgggcaaattacactttaaccctggaatatgcaagacaggacctagaaagaaacaaaaaaagtaatcgggttattctctttg

SEQ ID NO: 12103 - DNA, 332 bp, Oryza sativa
  unsure (1)..(332): unsure at all n locations
ggattattcccttctctacatgctacatccaatcccctacttttattnaagggaaaagaaactatgcaaaaactacaagtgaagggggcacattgaggagaaaacaagatgcaagagagattcacaatcgcacaagctgatgacgtgcgggccgcgggcgattgtagccgacatacatgtatccgatcaatangaagaagagaggtgtcaccgggccgggcgtctatcggagggcgcgggcgaggccggagaggatgcgggagaggccgaggcggaagcggaagatggcgccctgngagtacggcgcgcagtcgcggaagacggcctcgatc

SEQ ID NO: 12104 - DNA, 418 bp, Oryza sativa
catgctagctttccaacaagtactcatgggccccgttattccttctagatcaacggcttggtccgcttgaagttgatgctatcacgaggcctgaatccgaatccaaaacgtgtaaaactttatctcttgtcttctatggaccaaaagtgacgtggtgaggtagaagtatacttggagaggtcttggtttggtccccaatcaacttcttcaatcattcatttattatttacgctcggtctcttttccttcgcccaagcaagtacctctgcaaacgaaaacacacgaaactcattgtgtagcaacgtttgttcaaatatataacaagtaaatctaatgtagaacatatgcacctttatttgattaatacataagggagtcatggttatatcagagctagttatgtcctcatcatacctcc

SEQ ID NO: 12105 - DNA, 431 bp, Oryza sativa
  unsure (1)..(431): unsure at all n locations
taactcgtaaaatctttggttcatggatatactntaatgcatgcttgntatattatagatgggttcatcttctttttattgcaacacatgacatgatatgctatatgtatgctaagctcttgaacattaaagaacataattcctatgcttgatgaaatcattgtcaaaagggggagaagagatgagtttttgagaagcaaggtgtatttttagagcatgttntttggctaaatagggaatttctttcttttaaaaagggggagaagttttcttggttcaattgggaatttctttcttttaaagattacttttggatttttgagcacgatgtgtacgtttgtatgaagtgtgctttttaccacttttgtttttaattttccaaacaccaaaacatttttgatgaggttgccaatgtgttcatcaaaggggag

SEQ ID NO: 12106 - DNA, 377 bp, Oryza sativa
gaaggcaaatcatgcgctctggtatgtgcaagtaagcgccgcagtcataggagcgcggcttcatgggcatcttaccggtgcaaccaaacgggcgccggcagagatcgctgtcacaaaagatggcgccaccaagaatgagccgaacccaacccatgaagactgggaagccaccgaccaccaagttctggggtaccttctctcgtcgctgacaagaaaggtgctgatgcatgtcgctacatgcgacaacgctgctgaagtgtggagcgccatcgagcatatgttctccacccacacacgagcaagagcgattaacactcgggttgctctcaccaatacaaataaagggaacatgtcaactcctggagattttgcaaaaa

SEQ ID NO: 12107 - DNA, 340 bp, Oryza sativa
  unsure (1)..(340): unsure at all n locations
agcaagtgccaccctctccgattaatctagctcacccaagaatctaccaaagtatctaacgagatcaccccaccgacaacatcttatgagacatcaacaagggagtatccactcgttctcgtattgcaaatttttgtgagcattacacgtttgtgtcttctcttgaacctctaagggtggaagaagctcttaatgatccggattgngggatggcgatgcaagaggagttgaacaacttcacccggaatgaagtgtggactntggtggagcgacctcggcaaaatgtgattggcacaaagtggatctttcgcaacaagcaagacgaggccagngtcgtgat

SEQ ID NO: 12108 - DNA, 388 bp, Oryza sativa
  unsure (1)..(388): unsure at all n locations
tactctgttctttcttcatagcgtctctttgatcttgtgcgattatgtggagtcgctgtttgatatgctttgcgtcagtcttcacatttaatgagtgctcaatcacctctctaggaataccaagtatatcagaaggtttccaagcaaatatatctttactatcttaaagaaagatgatgagtgtgttttcctatttacaatttanctcggcaccaattatggtagtcttggagggattggcttgatcaagtgggatcttctttgtcttggcatcactttctcttgacttcagtatcttcttggcaggcaattcaccttcatgtgatgttgatgcaacgagtcagacctcttgctggtcgagtgccctnccatgagatngggtcatctc

SEQ ID NO: 12109 - DNA, 192 bp, Oryza sativa
gaacaaaacaaaccatcaaaaaacaagaaaaaaagctccccaatgaaaaaaaaaaacccgacaaaccgaagccaaacagcaccccaaaaaaactccaaacggaaattaccccaacaaaacagaaaaaagaaaacttaagaccacaacaaaaacaaaaaaaataaagaaagcaaaccccacacacaaaaaaaa

SEQ ID NO: 12110 - DNA, 345 bp, Oryza sativa
  unsure (1)..(345): unsure at all n locations
ttagatactcaagctggccaagcttgactaaccatntgttccatgatacacatgcatttatctagatgatcaacatatacatatcacgtgcctatctacatgccactcttgcaagactaataacaatatgccagtctggattagtgctaacaatcctttgatgaatgtgtttcatggcatccatttctttactgaacatttgggaggtgagaaaagatatgaccttcgagaaatcatagacaaacactgattaccctatgtgtaaattaacaacttacataattaaggaaacatttttgtatctctatctgaaagatagtatagctcctaattaaggaaacatga

SEQ ID NO: 12111 - DNA, 406 bp, Oryza sativa
  unsure (1)..(406): unsure at all n locations
agcttgtgtaccaggaaatctacatacttctttttgttcacacaggaagggcaccgagggttcgcgtttttgctcagttaccctaatttcttaccagcaaattcaggattaattcccatggcgagtttgaagtatgatctaccgcttttggaccgagacacatgattctcactttggcaagtgaagatgcgagccgttcttgcacagcaagacctccatgatgcgctttctagatttgacaggaggacttatgattggcccaacgatgataagaagagggatcgtaaggctatgacatatattcatcttcatctatctaacaatattttgcacgaggtgcttaaggacgaaacagacgctgggctgtggatgtagctggaacagatatgcatgactaangatctga

SEQ ID NO: 12112 - DNA, 491 bp, Oryza sativa
  unsure (1)..(491): unsure at all n locations
gctatgttgactggcggtatnnnaaatggtatatgctcactaaatatgggtcagtttgtctctaccgttgcangngtatgagtaggatggagcaaacagatcgttctatatatgccgagttaaactggcccgcataccatgtacttgcatgttcagtgctcatagaaagaagcagttgtcttagagtaaagccagagcagttntgtattgcgtctaaggacgttggctacctaaacgttggttctcttggttacgcttggtggttggccaactcatagtggtctcctttggttcctggggtcctcaagtcctatatgcttaggtcgctacatgccacatcctagtgaagcaccgaaccagtggcttcaaataggaatgcaaatgatnggaaatngatctgaatggtagcatctctttgcatacgacgctcagtcggccaggatgtgaccatatttatcatttagattactcagtattagcatgaatatgat

SEQ ID NO: 12113 - DNA, 400 bp, Oryza sativa
ctgcggcatcaacttactttttcaacacagacatttattatctttttccatagcgtgaacccgctaaatgcacatgagcatgttctgcagacccatatgcttgaaagggaaataagcccaaagtcggcgaccgaacaatattgacaagtttatctgcagtgatgaggagatgatattaacacaattgtaagctcggtgttgcgattatctcttttacagcagaatgggctaatacctgccggaggacgtgagacaattgggaaaggaaaatcattcccatgtcattgatctcaaagcatttctcgatatcgagcttagaaagtagcccgcatcctgtggcaatttccgagagaccagcttatgagaccatagggcagccaccaacctccaatgtgttcag

SEQ ID NO: 12114 - DNA, 514 bp, Oryza sativa
  unsure (1)..(514): unsure at all n locations
cacaccaaactcagcttgtctcannggaatacaaccagcctatacagatatgtctgcactacgatattctatggtttatagagcctgactcagcacaggtgattaaagattcttggtccacttcgggtgagaaatcacactctggggacataaatccggctctcgcacaagtcatggcggctctgcgttcctggagcataacaaaggtgaacaatgtgggtatagaacttgctaaggcaaagaagatgcctggggacttgattgctttagatgctgataattcccacattcgttttgccactgaccaaatgaatgaactgttatacaaagaggaaatgctctggcttcagttggctagagtgaattggcacatggaatgagataacaataccacaatttctcatagtacggcggtatggagagcatattagaatacaatcacataactgaaagatctgcatggtactgtgcaccgtacgacaacatctcatggaatcaatggcaactgattatt

SEQ ID NO: 12115 - DNA, 406 bp, Oryza sativa
agctttgtgccagttatcaaggccaaccgtgtctaatttgctctcctagagaatgaaaatcttcatgtcaaaacatatatatgggcatagtaagtcagcacgcataatagctcacatcgccttctgtgtgtcttagaatagaaaccggatatgtaatccatttccgttatctaaaaatgtactcttttaaaaaaagagaaattttatagttcttaagaagatatcatgaggtaccactttttctattataaatttggtacctcatagtaactaggtaccaagagataccaaatgttatactaaatttttttacatcatggtaccttcttatgaacacgaaaattgctcttaaaaaaatcttgtgatgaattgtgaatctgccaccaccctcaccattaactttctg

SEQ ID NO: 12116 - DNA, 504 bp, Oryza sativa
  unsure (1)..(504): unsure at all n locations
cgaccttagaaactcagcttatggacaaaactgagataacagcaatatagagcgttagctgatattttgtggtaaagaaattcataaagcgccaatggtgaaacagcatacctcaacttgccgttgcaaagcctggatataattaattatctcatcaagtactgatgctttcccaataacctggccaagcaagcaaaagttttccaatgaaaatcaattacagaaacagaactggggatgttntagaggtcatgttacaaaaatataatatttaaaccccaacttatgggacaaaatgaggaaaatatgttgagaccttgttgcatccagggacaagatcctggagaaatttcatccgctcacttaatttctcacgacgtgcctgccaaaaatgaacagaattttcagtggtcatatcatagtataaacatgatatctgaccgttgcccccaaaaaaagaaaatcttcagagttcgatttgaaccagaatttcactcctgaatg

SEQ ID NO: 12117 - DNA, 394 bp, Oryza sativa
actgcaagcatgcacgctttctaacgcgcattttgtagcataaagaatctgctatttatatagccaacatatctttggaggaagtcagcgaaaaggacattttttggagattctaaggtaccgaagatgtttcaaattgccaatgctcattggaatctcctttatggaaacacaagaaaacacacgtatatgtcgaagttcactacaccaacagtccattactgaagctaaagatatattgcttattagagacttttcgcagagtagaatacgcaacttcgtgtgctcacataggctcagtaagttggaacaatcaaagtttctataatgcagtatcatcaaatggcaaacattccgaggaactctctgaaaggcactcaattctttatgggga

SEQ ID NO: 12118 - DNA, 358 bp, Oryza sativa
cgacacaaaaactcagctctgagctgatgaggatacttttggccgactcacgaagctctgcatttcttgattaactactaccctccctgccaagcctgaccttgtgttcggcataagcctcactccgacggcaccctcttgacgattcttctcgtcgacaaagatgtcagtggcctgcaagttcagagggatggcaagtggtccaacgttgaggcaactcctcacacattgctgatcaacttaggtgacaccatggaggtaattgccttattggcatccaacatccaaaatacttactctctgaatctgcagacatccagtacttcctccgtttcatattataagactttctagcatt

SEQ ID NO: 12119 - DNA, 401 bp, Oryza sativa
agcttttgagccaatgcataaagtttctttgttctgtaagtggttgcaaacatgatgctaagaattgctagagttacaacatcacgaagctgtaaagcggctaacatgaaaaaactgaaattattttgtgcagaaagaaagagaggactatgaagttatacttgacgatggcaaggtcttgtacaagaaaagcccgcaaatcctcgatacctcttgtgggccaagagatgcaaagcggatctttgttcttagcacatcaaagagcttgtatgatggccaggtaattttcacatatcttgtgtcatattggctaaaactattgccagccttaaaaatgtccgtgcattgtcgaattctgttttcgaatctcaaatgcagaagaagaaaggcaaatgtcaaca

SEQ ID NO: 12120 - DNA, 411 bp, Oryza sativa
  unsure (1)..(411): unsure at all n locations
ntggatgacgatctntctaggtttaacacaattctgagggatcttagatctgttgattcttcttatgacgctaattatacacaatctgaggtttctcgctactntttgaatggtcttgacatgcctatttgggagatgaaagttacagctattcaggagtccgttgacatgtctactttgactttggattcgctttacacacaactcaaaacacatgagatgaatattcttttctcgtaaagttgattctaagtttagtgctttggtttcttcctcgactntnttggatgttggtgctccttcatcgaagtcttctattcttggtttaattaatgccatctccgatgagcaactcgaacagttcgaggaggaggatttggtttcggtactaacaaatcttctcgagctatg

SEQ ID NO: 12121 - DNA, 364 bp, Oryza sativa
  unsure (1)..(364): unsure at all n locations
ggtcattcaactatntattatntataaacacttaataacagaatgtggtttcttggcttaccatgttattgtatgcttcaacaaactgtggatcgcagattatagcttgatngtaacaacgaattgctatatcaagctggccttgctcatagtaaatggtagcaagattacctgcatgaaaatgttccccctacctttgtattacgaggtatactaaggctctactttgaaggtaaagaaaggaccattctcttgtaagcttgctcgtatctcacccatgatgaatatctaaataaatggactccaaggggtaatatttaattattacttacatgccgcttggagaacaacttataggtctatg

SEQ ID NO: 12122 - DNA, 343 bp, Oryza sativa
accccctgcgtcacataaaatagaatgtccacttcacactcgggtgcgaccatttgggctttctagaggcatactcttggaaccatcaaaatctcctggcttgggaagatgaagaaaaaaccgcatttaatacccccataggaacctattggtaatcaacaatgcccctccggctaaagaatgcaggtcctactttgcaacgtactactcgaatttctttgggtacccaaataagacctaatggtgaggcttaagtcgaagacttggttgtcaagacgcgcaacccagagaccttactctcagatctagcggaaacttttgaaagattccgctccgcccgcat

SEQ ID NO: 12123 - DNA, 477 bp, Oryza sativa
  unsure (1)..(477): unsure at all n locations
aactaagctntcatagtccatgacactcnatcagagtggcatgaatgcactttgttttgtttgaatcactgctggcttccgaggtgaacttgattccaaaactcattggactgtaatatcctgtagatcatccattcatccgatgtattctttagcgatgctatatatttatcatgcttgattgtatgcatatacttgatggtcacatcagnttgtgttcccatcttctcctattccttgttcgcgtgtacgcttttgaaactactaaatgatgtattttgtagaagaaaaatctatagaaatgttgttttaaaaaatatattaatctattgatcaagttattttaattaatatttaattaatcatacgttcatgagctgctctgttnttcatgttggatgggaaagttgtaaccaacactaacgaacccatcctaanggtctatttggattatggagttagaagagtgggactgga

SEQ ID NO: 12124 - DNA, 404 bp, Oryza sativa
catgcaaacttctctctcctccctctccgggattggtgcggaatggatcggagatatacgggtttctcctcttcgtaaaggatgccctaactctttcctagaatcgatttcactcctgaactagttcgttctgcgttaaactacgggaatctattccaaatcgaaatgttccgattagtgtacatgcgcccatggtttaagcgcggacctctgtatagaatgcccatattaactcttgcgtaggatgcatttgatgcatatgaagcccttaatgcatttccggatgacatatgggataataaacaacgatatttccattatcttgaaaagatatgggataattaacaagtaacaacgacattttcttttacggacaagttatacgagcgagcaaatgatcaaac

SEQ ID NO: 12125 - DNA, 494 bp, Oryza sativa
  unsure (1)..(494): unsure at all n locations
ntntcttgaanacccatntgcatcctacgggcttgcacccatatggactttcttcgacttcccaagtaccattagacataatcgagtccatttcactgcgtactgcttccttccagtagtcagcgttaggagatgaatatgcctcttctatggttcttgcggtgtcatccacgaggtatacaatgtagtcatctccaaaggattttgcaaccctttgtctcttactcttgcgagtatctacaatgttgtcctcctcaagattttcctcaggcgtttgatcattgtgttctatcggtgcaaagtgctcatggggcatgacagcttctttactagaagtgctaggtgtatatttcataggaaattcattctcaaagaatgtagcatctctggactcaagaaatgtaccaacatgcatgtcgggtactccagagtttactattaagaatctataacccacactgtggatagcataaccaagaaacacacaatcaaca

SEQ ID NO: 12126 - DNA, 403 bp, Oryza sativa
  unsure (1)..(403): unsure at all n locations
agcttgcctaaaaatggtgtggcagctactttagtgctatcagtgatcaaactctgggactagctacgcaactaactcaactactgtcaataataaaaacactatgacccaagaaatgtatattctacaaacatttcaacttgggaacggctataatgtgatgttggattgtctaaagaatggtagtttggatgatcaactagatagatagtaacatgttgatgaacaacctctttcatggagataaactctagcaaggtgtagacacggttatgaatgggacccaagatattcttgcttttgatactaccgatgacttccactcaatgtaggcttaataacgatattcccagccatgagaataccaatggaatgaacgacacactangtggatccttgactg

SEQ ID NO: 12127 - DNA, 430 bp, Oryza sativa
  unsure (1)..(430): unsure at all n locations
cgagcgacgacgacgatgaccaccgacgacaaccgccgagtctgtctcttgtacacggatctggcctctgngacacggatctggccgtcgacgcctcccccacctcccggccactagcgcctccaccctttctttcccgccgatgtggtcggtcaccatggctgccatccctcgcccgccggtcgccagatctgtcgccggtgtgcggtgtgcccctctcgccccctatacttttgcattgatatgatattgttgtctgtgcattgagaaattgttgccatccactctgtgtgaatacttctatatgagatctatcggtttgaattttttgtgcgatgatgaatgtgagcaaagcagctctgagcccgtgacaacgagcaccaccacagcagcgtgcaccattnnnttttgtttgttttcacaccagaga

SEQ ID NO: 12128 - DNA, 364 bp, Oryza sativa
aaaaactcagcttcgcgggacaaaactggcgaggttcgccttacagcgctggtatttcgcgggttcggcgccaagaacgggggccgggtagctctacccttgcgaagccgatggaagtggcggcgcaagtcggcgacgaccacagaagcggaagacagcggctggaattggtggcggcggtggagagagaaggtaagcgtggcggcggctctatggctatggaaataaatcgggaaaaaggaggaaacggaagaggaggccgaggggctgctacttatagccaaaggaggaggagatcggctcggatacaggaagaatcggcgaccgattatctaggggtcgcccggaaaatggagctcgaaac

SEQ ID NO: 12129 - DNA, 384 bp, Oryza sativa
cagcacgcaagcttcagaaaccctaacactgaaatacatactccttttttatctagctagccagccagggctggtggtgtatgaacataaaatgttcttcatgcatcaaaaccacaagtaggtgcgaaggaatttcacagtagacccgtgcaggcgaagaagctccccaatacatgagaaggatggccgatagctatccactagtccaaaaaaacttattgaaaaagaacatatggaacaacaaatctattttgaaactttctcgttcttcagatatatatatcctttctgctataaagaaatcttttcttttctcagctcatatatcagagatgcattaattcaaaaaactttaggaagagaccactaccattatatttacac

SEQ ID NO: 12130 - DNA, 434 bp, Oryza sativa
  unsure (1)..(434): unsure at all n locations
agcttgacacaaaaagtgatcacaactacgatgaatcacaagacaacctccatatgtgctatgatcacatctaacacggtgactaggagctgcatgataatcgtatggcagcggaaaaggaacaatgaattctgctgtcttacgttttcaccatcagggcccaaagcattcaacagaaaaagaaaaaaaacaccttgcttttaatttaataaacatgttttctaaacaaactacggctagctcctttttagatgatgatgaagattatagataattgcttatacagattaattaaatactatatagtatatagcatagagaaattatcaacgtgatgtcaacgaagaatatttgcagaggaaatgtacttcataaacatggcagaggctatctgataatataatccgttntcaaatacagcacacgatacatgc

SEQ ID NO: 12131 - DNA, 490 bp, Oryza sativa
  unsure (1)..(490): unsure at all n locations
taagctntcatgattctcccaacactctatccgttccacgaccgtgctgggcggctcactttattgatacgggactgcangaccccaaatgcacactccacgtctttatttgccacttcttgatactgcgcatatagcttgatattctctgttngnggagcagctattgacttcacaaaggtagcccattctagatatattccatcagcaaagtagtatcctatgttatactcattaccattgacaaaaaactttactctaagagcttcccctttcagcacatcaagaaatagtagggattggttcagcacattgatgtcattatttgaccccgcgacaccgaagaaagcatgccatatgcggaggtcacgagtagcaaccgcttcgaggataattgttggcactccatagtcaccgcgggtaaactgccctctccatgttgttgggcattnttcccacctccaatgcatgcaatcaatacttgctagca

SEQ ID NO: 12132 - DNA, 405 bp, Oryza sativa
agcttcttggcaggatcaatgccggctcttggtggctttggtggcgtcttcatcaaatgactgtgtagctttggatttggaatgagtgaccggcaaagcatctgcagaatgcaacgcacgtcctggcagcggattgggcgtgttgatgtgcacattccagctggcaagtacttgtttaacatgttcctcgcgcatgccgtcaggtcaacagctttgtcatgctccgtcttcataatgtcaaacacgatcctgacagcgacaaaaggtatttggttctctagcaggagcatgtctatggcgaccaggcttcattcccatggtctctcccactggagtgtctcgtactcatgatcgagaagcccaccatccagctttgtccagtattcatgctccgcacctttgttc

SEQ ID NO: 12133 - DNA, 378 bp, Oryza sativa
  unsure (1)..(378): unsure at all n locations
ctaagcttgccgcagtacaccgaacacgcacttatcggggtcagctntatgcgggctgagcttagactttcaaaagtttccgctagatccgagagtaaagtctcttggttgcgcgtcttcacaaccaagtcatcgacataagcctcaacattacgtcctatatggctacccaaagaaattcgagtagtacgttgaaaagtatgaactgcattctttaacccgaagggcattgtcgtataacaataggttcctatgggggtaatgaatgcagttttttcctcatcctccctagccatgcgaatctgatggtaaccagagtatgcatctagaaaacacaaaaggtcgcaccccgcggtggagtcgacaatctgatctatg

SEQ ID NO: 12134 - DNA, 392 bp, Oryza sativa
agctttacaaaaaaaaaagtgctatacaaatctcatctagccacatatactcacgctaattagctcaactataatccaaaataccgccaccaaaacatagttataagcacagttctaaaggaggataatgtacaggatttagcaatgtgctctcactttcgagtacacaactactaaccctatacaccccccagcctctaaaccgtttcattcttacaagtagctataaccctaactcgaatcacattcgaaagaaaagatacaggtctattttttttcacctgaaaagataggtgaacgcaactaccccgacactgaactagagctgttccaagaacccgcaaggagaggagatgagatgagagatcgcgaatctacctctaacccgatgg

SEQ ID NO: 12135 - DNA, 498 bp, Oryza sativa
  unsure (1)..(498): unsure at all n locations
gatgggaagatgagcttgtagcttaattntttctagtttgtatgtctgggatcatcactggtcaagataaatgactataacantggtggcagaatattaaatgagttatcacatagaataattcttcacaacatcaagacataatgagaaaggagttgcattaaatttgaatatgaatcaatagtgtttgcattagaaaaaaatagaatccagtactgattcataatgtggatatggaaatcatggctactttcttttattgcggtggcccttagctacttcctccatgcccatttaattgncacatntcgcaataactccaagatctatgcaagaaacccttcttctttccaaaactaattctcatcgatcaacatgctgtgttaggcatacatgacacatgcacatgtggatatgcanaagcgcaatcgcatacgtgggagacatgcaacgatgtcatttactcatggcacagataacgaacatatgtataacgat

SEQ ID NO: 12136 - DNA, 408 bp, Oryza sativa
gctttggcttcgtctgctgacataaaaacattccttttcatgttttcggatacaacccaaaaagggttgcctgttcttaatgcataaacccttgtgatcatttcgcgaactttgtgtcactcttccacttctagtaaaaattctggtgttcttgcccgataataaacactagcatgttggtgaagcataatcctcgcgtgggggaatgctatacgcttggtgggttctcctccaagcagaatgaaagacgccatggacgcggctattccgaggcatattgtatatatatctggcgtcaccgcttgcatcgcatcaaaaatcgccattcctgagattaaccacccgccggcggagtttataaacaaaagaatatcgctcattccatcttctatactgagatataccatg

SEQ ID NO: 12137 - DNA, 360 bp, Oryza sativa
  unsure (1)..(360): unsure at all n locations
tgtgatntagttnttgatgcagcaagtcagggaaaaagcttcttaattgttggtacctacaaaagagcagcggatttagtagcatcagctgcaataaaggctcgttgtcattatgttaataaaaagtggttcagtggtatgttaacgaattggtcgattactaaaactagactnntctcaattagagacttaagagcagaagaaaagatggaaaaattccaccatctcccacaaagagatgtggcaatcttgaagagaannatatctaccttgcnaagatatctcggccggatcaaatatatgacgagggtgcctgacattgtgatcgtccctcgatcagcaaaagagtatatagctctt

SEQ ID NO: 12138 - DNA, 409 bp, Oryza sativa
agcttcatcaacagctctttatctacggttttatccttgcgttcctcagccggctccctgttgaattacacaaactctctctctcattcgacagcacataacctattgtaatagataatctcccatgaaacatatcagagcattatggaagaaaatatggagcgaatcacatacgttttcgggacgatctttggagctttcttatgacgaaccttgggtgcaaatttaagccctcccttgcgtagcacaaaaggaaaaaaaatatattaaagattacggtaagaaccaattaggccacaccaatcaggaaatataagggaggatttttaacaaccttgcgaggagggaggccgatccgttccttcttcactttgcccttgctatccatcatacaagaaaagaagcacaa

SEQ ID NO: 12139 - DNA, 496 bp, Oryza sativa
  unsure (1)..(496): unsure at all n locations
tctgacttctaatntatnttcgttgattccataactaccgcttctcattttctgaataaganaccgaactatgtaagggagtgtctaattatgtgagaatctactcanagctcccaaacaaacctatagtctcgtatctctcccacattgtgcatggctaggatattgcttgctcgagcaaaagtgggcatcgacatcgagatccatgcgttgttcttgcatgcatgtggcccatgtatgcatggcatgcttaaatatatgtactatgtgtcgaatgtgtgtacctttgcatccatggtttttttttcataaagattgattctctcctcttaatcgtaatgagagttgcgcaattatactgaagataatgtgggggcgttttgacgacatggtacattcttgaggacccacacatatcgtgcttgcgccgatagcgccgctatgttactatgattactagagttccacgcatgatatatatggctcagatgatcac

SEQ ID NO: 12140 - DNA, 365 bp, Oryza sativa
tgcccctgacctccttcacatttgtgtgctgtcctcaatgacctagactttgtccactgctttcctcggtacgttgttgcacgcctgcacccacctctgctgatgacaccctatcagtggtcgtggcccacctcaagcaccttctgaacgattcaaagattcatatgttctctattcagaggcaaatgctggccaacattcaaagattcatctgttcgggaggcatttcttttccaagtgaataaatcttcaactcctcttcatcgttgattgctttactgctttgcatgaaaccggatttggattacaaattcacctcaccatcacaggcataatgcctaccatgtggatttcgattatatatc

SEQ ID NO: 12141 - DNA, 385 bp, Oryza sativa
  unsure (1)..(385): unsure at all n locations
tggagacccncannaaaaaagtacataatctaagcggaccggaactcgttatgtgcatatgatagntnatcttttgaaatcgagnttttaggaaaaaccgtactattaagaggggttccaggtgatgctctaagatatatcaagtgctcttagtgtgaaccaagtgtcaagtttccctatgagtcanttttgcaaatactccatctgtccaaaaatgcaagtctggaacttcctgtcttccaagtccggaagttccggtcttgtgaaaaagattntcccaagtgtagtctggaagttccggncttctacgtccggaacttccctgccagtttcagttcaaatttgtgagtaacggctagatgacgtcacctacctcgtatacata

SEQ ID NO: 12142 - DNA, 397 bp, Oryza sativa
agcttgagggtcggcacatcataactgttgttttagaagatggacgttctaatgccccggccgaaaccgccaataactatgtacgtcacagcggttgggttgtgcgggataacgtgcctgtcagtacggtgttctggcgataaacaagggcacgcggagatcatgacagctttgtcccagattctgagaaagagatgctgtggaccacaatgctcgagacattcacccttcctgcgggtacagaggacaaagggtaaaggtggactctgaataaaatggcagaacagtttcagagcttcaagggagatctgtaccagaagtatatactgaaggggcatacaccgaacttcgacacattcccaaagcttatggatcactgggacgagttcgttgcata

SEQ ID NO: 12143 - DNA, 421 bp, Oryza sativa
  unsure (1)..(421): unsure at all n locations
tcgtgaatntctgatttatacatttatcanaataatcacaagcacttttctttccatccttaacttcggcaggcaagttagcatcaaaaacaggcatagtaacctcttcctcatcaaaaccatgatgagaaccaccactactttcagaacctccagatttaaccatgatgcaaaatctgaaatttagcaaaataactcaacagtaccgtgatgaaccacgctctgataccacttgatgagcacccaacatcgagtaccctaatttatctctctctttcacggaaccaaataaaacagctatcaaattagttcagaaaatatgatgacgataaaccanagcactcagaatctaatccacccgtgctttcacacatgaacaggagaggaggcacacacgtaccaagcaacaaaaccaggtaag

SEQ ID NO: 12144 - DNA, 386 bp, Oryza sativa
tagcttctagctatagatctgcttcactattgttgcacataaaagagccaatatgatactcaatattataaaactaagggctataaagaatatgacctgtttcttctttgcacgcttatctttttcattatcaccacccccacgctttcccttcatctcatttccaagaagccatgcctcttcctcctcctctcgaattaactcttcttgtctcttcaaagcaacatcttcttggtacgcaacttcaattccactgacaaataaagagcacaataggactattaggtagctaacaatttgtctaaaaatctattctgttttaagttagaaaaacgtatatgcattatcttaatgcaaaattcgtacacgcagctttctaaaatttc

SEQ ID NO: 12145 - DNA, 93 bp, Oryza sativa
ttaccaccgatgacatatgtttctcttttacactaaatcagcctgagtcatgggatgatgatgatgatggtgcatgggagcctccaatgatac

SEQ ID NO: 12146 - DNA, 406 bp, Oryza sativa
agcttaacgtagaaaatacttctgttccactattttctgaagtatcggacagtaaagactgagatttaccggatgaatgttgtacaatttactataagctgtgtttaattcgatccaaagcttgaaatatggttaaaattggagacgaagtgactgaaatattatgtgcctatgaaagaattgatgtgatagaaagctataaattaaaaaaaactttaaaactaaacaatgccctaataaaagatgagatattactatactaatactactaaacaccatgggtttgacatgcgtcaagacacttcaagcgaaaaaatgagttatgcttgacaaataaagatggcgaatcaatagtcactggcctcaccaccaaaccaaagatacttcggtaaccagtgagagtaat

SEQ ID NO: 12147 - DNA, 506 bp, Oryza sativa
  unsure (1)..(506): unsure at all n locations
tagcgcacaaaatntagtgcggatcggatggtccacaatctataatattttatttctaaattcttatcgaatgatatgtagcacatactgtaaatttaaatgctggaggtccggatggagcgagtactagcttgattagtangggtggtcccactgcacagttgatgagcctaacccaatgactacgatggtatctatagtattaaataagttgccatctataatgaaaaatgatatggcaagtgaataaatgaggaaagagaacgaaaccatgtcttgcatgagacatggtttctacacaacatctaagacatcatgtggaataagtagcattaaattaaagtatggaatagttgtgtttgcattggaagagtagtgtctagcactagtttcttgatgatgtggagtttatggaaactatgtctagtgtcatgtgttgngaatgacctaccattctcaatccaatgactangatggtgtccatatcattatataaactgtcacct

SEQ ID NO: 12148 - DNA, 391 bp, Oryza sativa
  unsure (1)..(391): unsure at all n locations
agcttagacactagtggtgtgctacgatatattgtataaactcgctgcacgaataatacaaaatgcgtgaacttgtttacaatgataacagaaagctgatggccagaaccctaaacaaccgggctaccagcatctgcgtctatgaatcagagataggcgaatgcactacaattatgtctcatgaggcacaaccgactatagcttgtgcaatatgaacggagatgggactcccactacaattatgtattatgatgactcccactcatctctttacagagagcatatatattcttgtgctatacacagncttatgctttctgagttgggagaaatatcattggctaatacccacacttacttctaatggacaagatctatccttacgaggacc

SEQ ID NO: 12149 - DNA, 386 bp, Oryza sativa
  unsure (1)..(386): unsure at all n locations
taagcgaaagctgcattatattgcatatggccctcctgatcctactctttgtatatctagngctgcaaccttgaatgcgtcgtgtgtatgatgcttcgtgtttcgagaggaagcactgctttgcttctgaacacagctgaggactgtgataattattattttcgaactacatcagctgcttaattagctatctcatcattgttgatgggtatacatcacagcagtctatttatatgtaaagcataaggtagctaactgacaaaaaaaaagatgccactaataattactgagtcgtaccactatcatgacatatatgatccgcttgcatcaccggacgttttataagcgcgtacacctaattaatcgatcaactgctacactagcta

SEQ ID NO: 12150 - DNA, 399 bp, Oryza sativa
agcttggtgctaattctgtagattggtgattctcctagttgaatatgtagttctattatagtttgatcaaagaatgtgttcgttttataaaattttctctaaacaatttgacgcatagtgtgtagtttaccgtgtaaattcactacttggcacaagtttatagaggtgtcctgaacataaatggacgcctttgtaaactgaaggtaaagatcaagatttttctttgctaccttcgtcgcggagttgtgctatccaatgcaatccagctaaacataatcggcaaggcaaccaaaattggtatattggtcacgataagaagataattgaagtacacatgttccttgaatgtcattttgctaacttactttggtatcatatatgtcgtatcaagaagtactc

SEQ ID NO: 12151 - DNA, 440 bp, Oryza sativa
  unsure (1)..(440): unsure at all n locations
ngtggctgtgtgaggaatnggatgttgattagttggggtttatcatttttgtttggaatctggcaagatatttttacaggtgtcggtcatcaattgtaattttctaggagggtttctttctctgttctctcctcgttgtatttctccgcgtattctgttctcctatcctccagggcccctgcgcttgcgtaagtaaagcttgccctgtgtaagatcatttggctcaatatattcaagtggggattctctccccccggtgatttagtcaaaacaaaaaactataaaactcgctaaaataacatatattttcaattattttcctccagtacagcactaacgagccttcaacccttgagagcatancaacttgtggaaggcctcactatcgtgtaatgcaccctacacatactgccgactgagtgtcttacttttgacatgac

SEQ ID NO: 12152 - DNA, 403 bp, Oryza sativa
  unsure (1)..(403): unsure at all n locations
agctttggagaagaagtcttaggtggagtcctgtcttattccccagttgagcgcctgtgaagatggagccgtaggcccgctagtccgctgctgtttatttttgattgtcaggccttaagtgcctttgtaataatgtaaatattatcgatataataaagatgtgccttttgtatcatgtttgtgtggtgtaccccggcttttcctgggacggggattaatacactagcgttcgggaaaaggcaattttctcggtcgggacacctaactaaactatcaactcaattgctctcaaaattgaaaccgggaagcctcacgctccctctctatttatacatgaggtaggcagnctatagccacgaaccaaactcatactagaagttctaatccacataggaagccttct

SEQ ID NO: 12153 - DNA, 381 bp, Oryza sativa
  unsure (1)..(381): unsure at all n locations
ntctcgatatggtggccatggagattggctgttcagtcaaccacctatcatgcttccacaaacaacaggtaccaattataattgagtacaaaatatattatttccagtatgtgtgcgtacggtacaactttgcattcaatgttttgtaggaatgtacagccccaaacaaaggatggaatatgccggcagcacacaatcctacggaaaaccatgtagctacggtggggggtcgtccacagcacatcacgagatatgaccgtcacagcttgatgaaccgccaccaataactcagccaacccaagactacagccacgttgatttcagcggtgttgaggtggtccgtangtctgtccgtgaaagacattcacctgaaagattatc

SEQ ID NO: 12154 - DNA, 415 bp, Oryza sativa
tgcaagcttaagaatcaccaaacatgtgttagatttctatatattcatggctatacggctgcggatgaacattcgatcattataagcaaccctacattacaaattaaaagaggtccatcacctactacaactaaaaacagaaaattctatttagtcttaagatcagaacaggtagtcatgtatctcaccttctgtgagggctttctccaaaaccttccaagatggtggaaaatcaatgcctgcaaaaatccatccaaataccattttatttacatctgcagtggtaaaaaaaggagaagcgctttcaattaaatatagtatggaaggacctgagcaaccagcatttggctgcttctgaccatacagccccagttgacatcactagtatatgtggaatcagagatggcatcaaagc

SEQ ID NO: 12155 - DNA, 404 bp, Oryza sativa
  unsure (1)..(404): unsure at all n locations
agctttcctgacactggtctgaccacacaaacttttttttcttcttgagtagatgtgacgttggtcgggctatcttagagaacccttcaatgaaccgtcggttgtatccacccaagcctagaaaactccgaatttcaggcacagatttgggtgctttccattctgtgacagcctccactttagcaagatccactgcttctccaccgggcgagattacgtggcctagaaaagcgacttcttttaaccagaactcacacttgctgaattttgcatataacttatgcttccgaaggttctcgagtaccaatcgcgagtgttccgcatgttcttcctcatctttggagtacattagaatattatcgatgagataccaccaccaanttgtccaagtagttcatgaacac

SEQ ID NO: 12156 - DNA, 385 bp, Oryza sativa
  unsure (1)..(385): unsure at all n locations
aaactagctgctgcaactcttgtcttattgggacgttccgttcgctgctttcatactaatattatatctatattataccgatctgtgtatttgaggttttcgtaagtctgaagcccctgctgaatgctgaactattattattattattattattattatctatattattattattattattattattattattattgctgctgctgctgctgctgctattactattactattacatcaactgaataattaattacttcgctgtgttgatgctcgatcggccgtacgtggcatatgtgctcatgttattaatattgctggcccgtttattgagatcaagccagaactttattaatacccactagctntatagtaatttcatctttt

SEQ ID NO: 12157 - DNA, 406 bp, Oryza sativa
  unsure (1)..(406): unsure at all n locations
agcttaatcgattactattatatatagggtatccattttcttgacaccttccactaaggaggcggaccgccaaaaaatgttcaaataattctgggtttatcaccatatttgttttctcggaaatataattgaaaatgattgtaaagccggatacaataacaacaatgtcggtgctactaaaatattgcataatactggatacaaaattatcagaacagttttggaatcaacatctgtcaatggcaagcgagtaaaagttatatttacattataaattacacaaaatctacttcgaaaagtctttcgatttatgcttaatgtctgacaccagccatacgtgagagaacgactactacacatctacgaacatgcatgtttnttttcttttaagtcatgcatgccttct

SEQ ID NO: 12158 - DNA, 372 bp, Oryza sativa
gcttctcttactgaagggggggaaagattgagcaacaatgagtacaaccactgttcttattattccacaccggcagatgcatgattaatgcaaagaggtacaatgggtaataatatacgggttaagttttgcagaagacagcatttaaaagtcacttatatgcccatagccattctatatagacgatcctagagttacacagcggtagtatataatgccgtgaaccctcacgaacctgccttaacccaatgcctactatgattcagaccgaactggcaacccgaccctgtgtcccagctcgtaccaagccaacccaggccaaccattccacaatttagatgttaagcaaatttaagaattaaacactaactt

SEQ ID NO: 12159 - DNA, 364 bp, Oryza sativa
agctttgacattgcggcaaaggaatatgattgcaatatggtactgccacaccagcactatggaattagagataatgtgatcactctttttttttttgtccaaattgttaggtgaggccagagaaatcttcaactggtatcaacgcaccaaagaaaatcagattattaaaacattaaaacaccagggacaaaatagaaacagaaagaaacgaagagaagagggaaacattttgaaggcaaatcggggcagcgcgcgagatccccaaattgtaagagatgtttggtcccgtcgtattggtgccagctgctcaccaaaactcccggggccaacgacgtgtcatgccgcagatcgggtcgcccgcgtg

SEQ ID NO: 12160 - DNA, 140 bp, Oryza sativa
ataacccagtgatttccccaaagcttaaagatcgaatgcttactcaatgccctcttacacgaatacgggcatctataaggctatatgctataaaggttaataacaattaattgcctgatcttcagacttttcacggttta

SEQ ID NO: 12161 - DNA, 487 bp, Oryza sativa
  unsure (1)..(487): unsure at all n locations
ctgacaaacagcatttctcagcagacggctattgatattttatttntnctaacaagcccaattgctcaagccgctgcagtaaagcatcaccacatagctctgctatctaacccactctgattatgaattatgtatagaagatcattcctataagaggagatcgcctncgaaccgaaagcatctatgtaacagcaccaaaggaattgcgctgaggggcatttgaacattaagtggtctagatgctcttcctccccacaaagcttacagacagagactttttcgtaacgatggatcattatcttcttcttctgaagaggagagtcgtacaaatcacatggctttgtcttcaccacgactagccatatatgatcttgacgttctgtgacataatatatctgctcagctggtgtggccaaaatatatggatcatcaattcgcacgtgcaagacgtattagcaagggagatctgacttgtcctgtgtactcc

SEQ ID NO: 12162 - DNA, 393 bp, Oryza sativa
tcttataagaatcacattgtttcttataagaatttattaggggcagggttgaggtctttcaaagagagaagagttttctctaaaaattaagttttcttcttctctttggcaatgtatttactagcctccctaagcatgtccaaaacttcatcatatgaaggctcatcaccatcatcatcatcatcatcatcaccattactactttcaatagtaatatcaagagaatctttatttacctcattcttaccatttgccattaagtaatgagatgatgtgaatggtgttgggagctcctcatcatctcttgaggaggtgaagtcttcacccgacatccgtccttatgtgcaaccattctcaacaagtgtgggcatttcataatattctttaagcttt

SEQ ID NO: 12163 - DNA, 424 bp, Oryza sativa
  unsure (1)..(424): unsure at all n locations
tggggcgcaccccacatgggccccacctgggccggagtcccaaatgatgttattatttcatacgcccattacaggtgtcacagcaccttgtttcttcagttgctgccgactgagatggaatttggcaatgaggctcgatgcattggaaagaggactccgagagctctccatcaagtactcacgggctgaaaacggaggtcgtatggagcttcggcgggcgtttgaagtcagcagtgtatcaggtggccgaatcggatnttggcacttggaggacttcaacttgatatcttgctgttcatccatgatgtgagcaacggatgtatccgtagtagccatgagaacatcaccactggtgcgaatgttttgaccggaaagataaagctcaaacagcaccaaaacatgaattgtggacatattggagtgt

SEQ ID NO: 12164 - DNA, 401 bp, Oryza sativa
agcttcatagctttccatgaataaagcttatgattttagtgctaatccacactgatgttgccctgtgctgtgtgtaattggcaactattaatacattttcaatactcttttcaggtcatattccaaaaattcagaatatcttatgatgagattgtcaatgacctatgtccggtaaaatcacattaaccgcacttttcaattttgtcgaacatcttttctgtttttgttccttaagcaaattggtgctaattcatgctttattggtgatatctggagatcttgagcgttcagcagctgtacagaatctgtacacagtactgggatgacaagtacaatacccagagcgtatcatcagatgtgagttccattccgtaaaaataatcaatatacaattatgcatg

SEQ ID NO: 12165 - DNA, 439 bp, Oryza sativa
  unsure (1)..(439): unsure at all n locations
ntccttcagggtaaagtaactagacgccaccaacatganaaatgtcgttctttttatgaacacatgcacacaaaatcatatatccatatgtattttagttaaccaaaagcaactctttaatgaatgaaaggcgaaacaatcatttcaagcaagatgatgatctagcccacttcacctaataaggtcagatgcaccgaatgaacaatcacctaatcgagcccctgaatttcattcagaacactaccaaattcaactctaaactgaccaatttccatccaaaaaaacaaactgaacttgcaggatagtactagtagtactactacccagtaaccatgtcatccaagatccaggaatggtgttgctacaacgatgcatttatcaaatgaaacantaattactgctcatcacaatcaaagagaggagggtattattattacca

SEQ ID NO: 12166 - DNA, 403 bp, Oryza sativa
agctttcttcattctcttgacaaactcaatttaattatcaacttgtaaagcataggttacataaaaaggaatgcgtagatattatcatatcttaatatcttaaaacttttacataggttacataagcagatactatcatatcttaatatcttaaaacttttaagatattaagatatgatagtatctgcttaaagtgcataggttacataaaaaggaatgcatagaacaaaaacaaaagtgaacagattctgtcagggaaaaggcattaagggggagtttggttcatagccacacctttgccataagtttagcaagtacatttgaccctatcatttggttcgttgcaacactgagtcactgatcattaaattgttcttcgtgttgagttgtgaaccaaaatcat

SEQ ID NO: 12167 - DNA, 491 bp, Oryza sativa
  unsure (1)..(491): unsure at all n locations
tactcncaattcatcatcggcaatactttccgaaggcatcaagacacactttctcatgattcaaacaagaaaccatatccgagcacaaattctctccaacttgacacaacatcagcacacaacagtattgcatacgcatagaaatcatttagaagtcataaacatgtgttaatcacaagtatcccaataaacaacctgttgatattttttacgaccacagataaatccgcaagcgcacggagtaccgctatagcactttaccttccggtgaccccaaaaggatatcgaactcagggaacatgtgtaatctacctaaggctaagactatccaacgacaacaactaaaggtaggcaggtgtcacgcctaataattcacgaaccggaatttctaacctgaatgtgcattanacccctgtctaggaccagccagggtacacaaacgataattggtgacatacaaatccacgtcttacaaaaagatgaaagaatac

SEQ ID NO: 12168 - DNA, 355 bp, Oryza sativa
caacatgcgcaggtgcatgtaagtgggaagatataatctcccggtggccacgaacacagccacaccttgctttccttcctccctaccacatttagatcgaatcaagagatacatggaaggatgagaccacccatcaagcaaccaacaacaagccaagaacggatctcgctacctgcccggatccacggcgagcttctccgtggggagaggcaactccagctcctccatgggcggcctccagtacctgcgaagatatctcaactgctacaaaatttcgactccgccctaaagaggtgcgggcctcacttccactgatcctcttaggattccgtgggctacttggtcgccggagcac

SEQ ID NO: 12169 - DNA, 232 bp, Oryza sativa
  unsure (1)..(232): unsure at all n locations
actcagcttattatttctagtttacctggaaacaatagctgctttgtttgtgtctgataggagctcctacgtcaaccatcccgcgtaagctgattggaagtaacagccgaagcagaaagatcattgtatgcttttctggcagcatgcatgcgatagcatgtctgtatcctgagagaagcagcttctctgcggagaatctggntaaattttcttgcaagttcccctttaaata

SEQ ID NO: 12170 - DNA, 397 bp, Oryza sativa
agctttcctagaacaaacattatttcccatattatttttagcaagtgcaaatcacatgggaagtacattcctctcgtcccttttttttaactgaagaaacggctcaccaagaactttattgatgctattgcttcatgaaaggaataagcatataactttgtgtctgaaacaaccattaactatgctaggctgttgagtggttggctgtgaacttgctggggcgttctccttttcactctctcgtggcgctgtctgattacatgttcaatcatgttcccgatacagttgggcaagtggagcgcttgatccaaagggtgcttgttatcacagttttgcgacatctattaacatgtaatgaccgataaccttctgtttttactttactggatagtgatgc

SEQ ID NO: 12171 - DNA, 503 bp, Oryza sativa
  unsure (1)..(503): unsure at all n locations
tgtattccctccatttattaaatatacaaaagtagnttatttgtgttatgtggtacagcagcactataatcatatgagcattgnttgggctctgggcctctgatgacacactgcctgcgagtcttcaaccctgcaaccacagccggaggtcaaatctgcatctgctgaagccgtacgatggtgccagcaaatgttcctgcacaagagctcgccgtcgcaatgcacggtcaatagtaaaaaaaacacaggcagtctatgcagaataaatgacggatgaatgatacgcagaattgagcgagctaacatcaggtatctcctttcttcttcctgagactctgaatgtctctgacagtctaaaactattcacagcccaccaccatcaccacatggcaatggccatggatgtataccaccaaatttcaccataacaaagtagagataacaattagaacaaacagcccgccctaatacccagattacaaaatggaatcaatgaacagccg

SEQ ID NO: 12172 - DNA, 398 bp, Oryza sativa
  unsure (1)..(398): unsure at all n locations
agcttgcattaaacacctaagtttccgtgtcttgctgagtacgaaagtactcacccttgctctataaatatatatatatagttcctccgccctgaagagatggtgaagtgaagtgaagaattggggtttcgccctggttcccagccgtcgcctgtggtgttgggtgttagaccgctggttccgctgctgttgttgatggtgttcgcctcgtccgtgtcgtcggatgtattctcgggctgtctgagctgcaacctaagttaaggtaaataagtcctctatttattttaaggattgttatgattcatatttgtcaccgggggtaccagcactatgttctgngactggtaccgagatcgcggtttcgtaagaagcggttcgcgcctgtttccctacgacac

SEQ ID NO: 12173 - DNA, 470 bp, Oryza sativa
  unsure (1)..(470): unsure at all n locations
ctgctcttntcctggccatatcttnntgcaagaactatgaaaattaatttgtgtttgaggggattactagaggtgtacaatgtctttcttgacctttcattctaaagaacgtactactgcaactgcatcaacaatccctctctaatatagtctatgtttagccctttntattcagcctattcatacgcagtttgggccgggttcccgcagcataccgatcaaacccagggatacccccggtttagacggtttaatttggtttcagccgcttaaggagtttgaacgcgcgcgcgagggtttcttccagcgatagttaaaatcggccatcatgcccatcaatcaacatcacactatcgagcccttatttcattatttgtagtagtatctcttaatgttggaatgctgccattctgtttctatactgacttcgccacaccgaattgtagcctgtgatgttgtaagctatatac

SEQ ID NO: 12174 - DNA, 407 bp, Oryza sativa
agcttgcgcccttccatgttcaggatatggtaatattatctttactggagtcatctttcatggtgcgaatgttctagttatatcatggataaaaggtaaattgactcaagtcctgaacagatatatcaccatatatcatcgttttgtgcaggaacatattgtacttgtttacataatatttcttactactgatgcctatgctctatataactttagcataccaagttgagaagagctacagaacagataaatctgttagaagcaaagctccaacaagctgtcaatgaaaatgcaaagcttaaggtgaaacagactgaagattcaaagctctggcagggattagattcataagtttcctcaacaaagactgtgtgcaatcaactgacagaaactctgcagcaggtagc

SEQ ID NO: 12175 - DNA, 164 bp, Oryza sativa
atggtaagctactcctcttactgcttaatgcggctcagccgaacttgttgtgtgagggttgtcagattgcgtcatgtctttgcattggatttggacttgccctttttatgcccagaattctcatgatcgtcatgaagagaagtgccgagtcaaagtcaccttga

SEQ ID NO: 12176 - DNA, 412 bp, Oryza sativa
tcaagcttggcatccttggactcactgtgaagtctttttgtattattcgccaacttgttccaaaggtgatgtgcggtctcaaggttgctcactctatcaaactcctcttggctgaaggagttgaacaaagcattcatggcttgggcattgaattggaggttgcaatgatcaatctccgccaagggtgtgccggtgatagcaaagcctacatccacaatactccaaatatggaagctcatagctttgatgtgagtagacattttaattatccaagtggagtagtttgtgccattgaacatgggagccttccctacatggatcaactcgttcgacatcttctttctaggcggagaagcccaatcaagagagacctagctctgataccactcgtatgatcaagatgtcgactaga

SEQ ID NO: 12177 - DNA, 453 bp, Oryza sativa
  unsure (1)..(453): unsure at all n locations
ntaccttttcgtcggagatcgaaaccgatgcagtccaactcgaaagcaagaactcttctatacaatgaanatagaacatggtggcgatgcgccgaaaatgttattgaactgatattgtttatttacagggtcccgggtcatatttatacccaaaatacatgatatgttcttgccgaacacgactctatctctattacaactcanaaatacgaacaagtccctcaggcggactcttaccgaanatatctataatgaaactactagaatatcctaattaatagattcaattgctttctctggccacaatccatgcttggcaatacttgcacggcacttgaacttgccgcggtaatgatcccatgattggtctgccaggatcggctacatcggctcctncttgtctgatctggaacagccgatgaaagcggtagccgatacaactcgtagccgatg

SEQ ID NO: 12178 - DNA, 404 bp, Oryza sativa
agctttcctccagtaggattattgccaatattttcttcttgaaaaacctctgaatcctccatcagctaatgcagacagagaaaacattattcattaacaggttttttttgggtaccggttcgggggtattccaggttctctcaaaatggaaactggaaacatagtgtgcaccttgaaggcccttttcttttttgctgcgccagacagtgtattcacaagagcatgaaccagctgctccttcatagatgcatcaccaagctcatatacaatactcatgcctcgggatgccagatcttgtgtaagatcattctgatcaccaagaacgtgggtaagggcttcctataaaaggaatgaacttcataaggtaagcagaaacctagagcatactgttatacgctggaatg

SEQ ID NO: 12179 - DNA, 513 bp, Oryza sativa
  unsure (1)..(513): unsure at all n locations
ngatgctctctgtgagctanatatatcctatgtcctatatatccttaacattttatttcttcttgctaattattaatttcagctgtgcttattttccatctacattgtgctacaaaggctatataatatcaatgttctaaggtgctttcctaatgattgttcgcttgatgtcaaaatacgaagggattactgtgtgaaaacttgcgtttttgtatgtggttgtgtctagtaatgtatgagatactaagttcaaataaatatagtggttttttctggacattgatgagttagtaactgccatcttgtaatgctatcaaaagctccgatgccttttgagttctacagagaataatttgggttgaattgagccttctattatcttttactctggccaataattagttaatcatagttcatgctgctcctttctttttggctaccacgtgattccttntagagtgcagagacttaaatattctctgaatatttaatcttctgtacaacatattggcc

SEQ ID NO: 12180 - DNA, 402 bp, Oryza sativa
agcttatcccaaaaagaccgagttcacacgataatgctttatggacagggatatattaattaggaataggtcgctagtagcctttttatctttatgaaagagtgttcagtgtgctataaagactttatgatttgcttttatcttgaggaaaggatatttattgtcctacaacgactattatctacccatgggtatgaatatgtacacccggggtcattgtaaactaacacacgcgcaataacaatctcggggcatcaccacccttttactttcgttttgatttgacgagctcttgctttcagggtgagctgcattggtttccatcttcaacaagaggtaaaacttgttatggcggcttgtgttctcgggattagtgctatcatctatatgacactctaatct

SEQ ID NO: 12181 - DNA, 183 bp, Oryza sativa
tactcagctagctgaattttgtcacgggtatcgcatcaaatcaaagttataaaacagtttattttctctgcttgagtttctacggatactcgactgacaatatgccgcttgttctgattattaacttaacaatttatattaatcaagccgtatatcatgcttctagatacgtagtatatatac

SEQ ID NO: 12182 - DNA, 294 bp, Oryza sativa
gaccccagatgtacctgaaggcacgccagcttcgtctctgcctgcgacaggaaaagcattgcattttatttagcaagagcccaaagaaagcaaggcgccccgctcaaactacaagctcatggaataagccccctgaagggaaagggattcggcgcaaatctaacaatagcgcgaggaacagcagtatcaaaccaagggaagccgcctgaactcttacaacagaactggtgctgagggactgaggtatgttcaaagccacctggcacacccttctacacccgcaaaaagggggtt

SEQ ID NO: 12183 - DNA, 473 bp, Oryza sativa
  unsure (1)..(473): unsure at all n locations
cactcagcttccacaagatatgtcgacccaatacaacaatgcgaaaagctaccaaacatattatactctgtccctgaaaaaatatcccccgccagttccactaaaccaactcaatcccaacacttccccaactggctctccaaaccaaatggacgagacattgcatcaagccgaaccacacattcttcttcactccaagaccggactctggaaacgctcaagtangaagcatcttactgctgcttgcattctgcaagtcgctctccctgctgcccttcccctgcangaactcgtacgcccttctgtttcacgaaggaaagcaaaatagtaagataaagagtttggttgaaactagaaagtgcatgagaaccatgagttatccgtcaccttttcatactcgtcgtcttcatcatcaccctcgtcatcctcatcttcatcatcgacgacatcttcatcgtcatcatcttcatcat

SEQ ID NO: 12184 - DNA, 369 bp, Oryza sativa
ttgtgacgatgacaccaaaggagtgtgtgttgctcaacttgaataacttaaaaagggttgactctttcatttattttgctccttacatcttggtagtttgtatattaaaaaaaagctatgatttttggtcacaggtggggggtcccattgaggcaacgtacaaggaatggatggacagaggcccttccatcgaccaacttgcttactggatcaacagtttcagagatgctgccttgtccaaagatccgaagattgatcacattgagatggaggagaaacagaaggtattcaatgcatcaactacaaaattaacacaatatcttttctctatacactgattgcaatgctagatcacgaactacgttctgc

SEQ ID NO: 12185 - DNA, 463 bp, Oryza sativa
  unsure (1)..(463): unsure at all n locations
gcattacgtcatcatatatatccacagtgatgctcctttgttattttgaactccttncaggccatgcactacttggctttggacctacattggatcacacattatgtcggttggttgattgtatgcagactaattggatggtaaaagaacgtgtctcagacatcaatacatttcagataccaaaatttccagagagagagggatagagagagagagatatattccagagaaagagcgtcgtcatcacttgggataaaatgtntcagtgatgtgataacagccatcctaaaccctctaactgatgcangtgccccagtggctgagtcagttgcagagtacttttgaagtaacaacctccattgtccatgctctatatggatcggaagaatgaagctcaaagaatganaattgctcactccagtgatcaagcgagctaaacaagaaaaatcccctctgacacata

SEQ ID NO: 12186 - DNA, 405 bp, Oryza sativa
  unsure (1)..(405): unsure at all n locations
tgcggaagcgatgtcgagaggcctcttgtttattcccatgcactcgacggcgttctcgacgagctggtggacggagagggtggcgttgtacggctccaccacggtgtctgagaccttgggcgaggggaagacggagaaggtgagcatcatccggtcggggtactcctcccggatcttggagatgaggagcgtgcccatgccggaccccgtgccgccgccaagcgagtggcaaacctggaaccctgcagcagcagcagcatttgaactcagatttgatttgaggagaggcagatctgagatagttatggtactagttaccttggaggcagtcgcagntctcggcctcctttcgtacgacgtcgaggacagcgtcgatgagctcggcgccctcggtgtagtgtccct

SEQ ID NO: 12187 - DNA, 297 bp, Oryza sativa
tgaaacttccgatactaccctaatcggcaaccagaaagcaggctaaagattgatattctaagcacgacttaatagatcaaactcaactgatgcagcattaagtatgaaaagaaaaacaatatctacacaatccagccgttggaagtttcatagagcggtggatattctatataatctaaaacaacatcaaaatctaacctaatcggctgccctctactaacagatgttagccgattgtagggtagataatgatattgccagagattatgtacgatatatgataactcgacgaattac

SEQ ID NO: 12188 - DNA, 488 bp, Oryza sativa
  unsure (1)..(488): unsure at all n locations
cggatggaggtaagaacatggcagccatgcatgtgctcaatcttgcttgtttatacactcgaatatttatattttgaggggtgagagggtggttntgtatgcactgatttactctactatntttcaccttgataagttgactcatgtagagcctgcccattttactgtatccaaatgaatgcttaagatctgtgaaattaagtttaaaagtttaccctatagatgttaaaaagtatgcaactagaaaaaagatagttaagagtaataaatcagaaggaaaaggataatattttctctcttatatttatattcttaataaattagctcattgatctggatcatctgcctacaataatntaagtaaaatctgccataatgtcttgagtgacttaattttattgctaaccttcgttccttatctttgtcttttgaatgaagctctttttctttcttcagactacangcaatgactggagttattgagcctg

SEQ ID NO: 12189 - DNA, 343 bp, Oryza sativa
gttactactgaggcactccaacatgctgagaaaactcggcatcaccagtgttaaactggtgagtttctacaacagccttgccctgataagatctctttgcaaaaaaatatgcatcatccggatgccatacagctcacatttggacaggtcccaacttatagaatcaatggctaagttgctgtagctgatcctgtttgatacaaaccaaccatcttccatgtattgtgcggatgcagatgcggagcacaaagtgacagattctaactcccactgacctgaaaatgcaccatgtgtggatgaaggctctctgatggaagaaccagaagacctgcaatatgacggc

SEQ ID NO: 12190 - DNA, 372 bp, Oryza sativa
  unsure (1)..(372): unsure at all n locations
ngatgactgttgcgctcgctgactgactgacgaccacgacaggcttgcgtgttatatctatgtccctatgcggctgctccgcgacataagatctcaacacgaattgactctatacatgctatgaacacaattttcgaccgggctcaagcaaaggtccaatccacctcattctatataattcctactctttttaaacaatccatataagatagtgccatacttctattaatatattaaaaaaataatactagttctatctttcccaaagactatacaacatatatactgctacgccacacatctatctatgatactaccgctgaggaaccaaacacatacatgcgcacaacatctgctataaacggatcttct

SEQ ID NO: 12191 - DNA, 396 bp, Oryza sativa
agcttctaccgtacctgcacagtaaggattatcttgttgagccgtacaaggttgtgggtggttctttaacttgggagctatgggtgcttgaattcttagaagacaactgaagtttgaggaattcattttccccctgaaaatgtattgcaggaacaggctcttaagaagactattcattggttgcaacattgatgtccagacaagctttatcacaaagctaaaactagtcttggacgtctcaatcctggaagatatgctaaaagattattcaatttcaaaagaactactaaaattcttccaagactatatgagcatgaaccccgaatcaaatactctggtggacatggacaccatggttctgaaacacggtcattttccttctcaacaaaaacagca

SEQ ID NO: 12192 - DNA, 484 bp, Oryza sativa
  unsure (1)..(484): unsure at all n locations
tagcgacctatgaaactcagcttcctaagttaagaagctgaaataaacacaatggcacacatatatacttatttctaatggactntataccatacagtcaatcaggcaatgattcagaagagaaaaagaatcaagcaatcgcattttggtaatattctgatcatgtntagtgtacacatatctgantcataatttattacgaaatcaagaacaaacaaaacttgaatgaattcagaagaaataaaaataactactggcaaatagtgataccaaataagaaaatttgtgcagatgcacaacctctatgtagtggcaaattgcatcaacatccgaaccatttggatccccaatttcacaaagagcttctattaccatggaactgtacctagcagggaatttgtacatgatcaatttctgaatcaaatgcttgtcgagggacaaaatgaaattgcataatattgattgcacactataaaaaaaagta

SEQ ID NO: 12193 - DNA, 402 bp, Oryza sativa
agcttgaaggatgaccactatctctacgggtctgaccaattccactagtgtgcttcagcgtgtttgtttgaatattggcagggccaaatccacgagtagctgccataacaatagcagcagcttcatctgcagtgacattccgaggaggttccttcttggccccactaatgatcatgtggaactttcccttcccttgtttgtgtttgtcatagagctgcttctctgacggctcagcagagcttctatcatgagaactggcatccttgctagtacttgaccgcttcttgcttttactttctcccttaccatgattactacctttgcgctctgaagggcttcttctgtctttctgctctgaagagcttcttcggtctttgtgctctgaagagacttttctgtctt

SEQ ID NO: 12194 - DNA, 436 bp, Oryza sativa
ggataacagttctacaagcttccctccctgtaaaggttaagattaataattcattaacacatcagcaacagtagcacaaggtgtaacttactgcctgaatatatgaaataatacagttagtaaatatgataactatatccgtttgatatatcttcctaaatatgcaaataattatgcctgccatcaacttgtgtctatccacacttttgtttgcactgtgatgaaaatatatgtttttttttcagtagcaatttaataaaaaatagtatgttccttacaacggagctactaggtatttagtaccttctcaccaagagcaccttgaattaggagggtatcactagacattctagaaactgcttcaccagttgtcatctctgtgtcgaagaatgtaatatcctgcctcagaacggctttcaggtataaagaacggatg

SEQ ID NO: 12195 - DNA, 401 bp, Oryza sativa
  unsure (1)..(401): unsure at all n locations
agcttntaattatgaatatttttttaacttctcgtaccagacaatgcaaagttcacattgattaatcaggaaaaaaaatacatgactacaagtgtggaatgtcgtaatcaggagaacaaagaaaacattaccactacccacacaccgacaacaccaacacagaccccggagaaggctagcaccagaccggccagcgctatgccaacaaaggacgtatagccgggatcttccaaaacccaacccttacaaccgacacagaaccctactctatctatgtctttgggattgagggagagaaggtgacaaagaagagtggaaccgctttccccctatgtcatgcaacgtggcctagtagcgtaagctatgcaccgacacaaggggacaagaatctagagtaagct

SEQ ID NO: 12196 - DNA, 387 bp, Oryza sativa
  unsure (1)..(387): unsure at all n locations
ataagnctactggtcgcgatgatctatgacaaggagctatccatctgtgttctttcctacgatatacttgggctattcgattgatttctttgtcggggttcttcttggatttccgcgattcttctggttggactgctttacactgggctgcataccacgggaggtaccctctatgtcctgatatttctatccttcttttgctgtgtaacatagacgaaataatattacaaattaaacaacccatttactgcatgagttctggcagctgtgatgtgttcagcttatttgtaagtcaagcttgattggaaactgacttatgagaaaccatataagcagctgttagacaacatgaaccgaattttntatgaacacctgctcatctggacg

SEQ ID NO: 12197 - DNA, 406 bp, Oryza sativa
agcttgctagagatcaagagataaccgacttttaattcatttaccaatgttactttagcgaacgcgtaatctttgtctaggtagttaagactaccattgatctccacatcatgactatatatggattattaatgtagtagcatggttgcccaacttgtgtcaaagtaaatgtgccccccccccacaacacacacacacaccttaaaaaaaagtgtgtgctccacattggagtaacaagcaactacaacaatacatgcaggaatatgagcatccactgtttgcccccctggtcccttccatgcagtaacagttgtcgcatcctcgatgcgccatggagagtggcaagattggcaacccaagccaccaccaccttcctgtactcgccgctaacaccgtatcctcgcag

SEQ ID NO: 12198 - DNA, 510 bp, Oryza sativa
  unsure (1)..(510): unsure at all n locations
cctatgatactaagcttcacattgcgaccgatctgagttgaaaaacatcaatgaatcatgcgttgataggttgctcctgcgttcttcaatccaaagggcatggtgatgtagcattaggctccaaagggcgtaataaacgaggtcttcaagcagtcggattcttttagtcggatctaatgatatcccaagtaacagtccaagaagctgagtaactcgcagccggcttgtgagtcaaccacctggtcaatgcgaggtaacccanaagggtctttgggacaagaattgttgaggtcggtataatcgacacacatacgccattgccccgtctttttccgaaccaggactgggttagccagccagtcgggatgaaggacttccttaatgaagcctgctgctaacagcttggttaattccttcttgatcgcatcctttctgtcctgtgcaaaacggcggagtcgttgcttgatgggtttggcgtcttccttaacatgtaaagagtgctcaatcacc

SEQ ID NO: 12199 - DNA, 398 bp, Oryza sativa
  unsure (1)..(398): unsure at all n locations
agcttgtttgtggaaaactgatcaaagcctatgcttctttttgttcaaccttattgaagtggggagggtaaaagttcctacagatacccccagcataagccacattaatgcttataacctttaaatcagacctggcttttggttatttcctgttaccctttatgtccatggtacttcttcttatttcctttaaaccatatagcctccatctgacaagcaaatgccatgacaacaaggacaatattgttcaatacaatcccaattcccaaagatcactgagataaacaccctctcgcgtatcacagccatatttcatcctcacatgagatggaattttcaaagttcaatatgtaagccacagaataatgagataattntcactcttggcacttatctga

SEQ ID NO: 12200 - DNA, 477 bp, Oryza sativa
  unsure (1)..(477): unsure at all n locations
tgcatatacacaacatcacattcaatttgatcatggtaggagcctatattaatagtatttaaccaagcgggttaccttcatcttaccacatgtattaaaccactgaatatgatacggatgtggatgtggatgggtagtcaagccaagcttcttgaccatctcttcacttgctaaattgttgcaactcccgctatcaataatcactttgacggtatggcctttcacaagaactttgctttggaataaattgtggcgttggttttgctcttcacacttctctttagcactaagtgctagcttgacaattangctacgatactgatctagcgactctggatgcaaatggacttcctcgatgtcatcgttatcttggcctcctacatggtcagtggcaactaaagcatattcatcatcacaatcactagtagaagtatactcaccatcatncattacacatagagctcgctgatttggata

SEQ ID NO: 12201 - DNA, 402 bp, Oryza sativa
agcttgctcagcaattgctgcagagacgttctatctatggctggagcatgaaaacaggacggatgacattaccataatcattgggcacatccgggattccgaaaatgttggtgcacaacattcaaatttctttatgcataaaaccacactattaattggcctgcacagatttattgttctttcctaaatatactcatccaggtcctgcagggagccagaaaatgaacggcagcagctctggagcggtgcaaccagagctaactgtatttgtaccgccagaagctagccatctgaacagagatgctgctactgaaatgccgatcgcctcttcaggctctccaacagaacaacacctctcctgcgtggcttcttcttcgactcaccctctgattggagttggga

SEQ ID NO: 12202 - DNA, 484 bp, Oryza sativa
  unsure (1)..(484): unsure at all n locations
ggctttctttccatcgcaganaccgcgacgtggatgggtntttcctncagatttttatctgtcccagtgagcttttctagacctagattccattaattaagcgtttgaggcactttgtggcggttaaatcacaggaggtgtgtaccgatgtgcataaaccaatagtagcttcttcttttttctttttttttccgggtggtgttttcttcttcttctggaggaatgtaatgttttatgatgcactgtatggctgtatcctgcgcgggagcgcanaatctgttactgaagttagtgtaccatgtacctatatatatggtcacattgtattattggtgattgtttcttccaccgtaactggtgatagttctcaaaaagaacattcggaattgtattgccttggttgtggaccaaacatcnnacaataaaagagagaagaaaaacctggtgacttgagtagacgtatcgaatatgatatttaccatcg

SEQ ID NO: 12203 - DNA, 366 bp, Oryza sativa
  unsure (1)..(366): unsure at all n locations
aactaagctgcgcgtgcgggaggtcatctgtgaatccacgcagtgagatatctttattttcttggaagaatgacgcacaccgatcggaagaagaaggagtgagaattanaatgctcctttagcccatacaattccgtaacgaaagtcactgtgacgttgtacaaagtgcctaccgaagggataatagacggggtcatatcctttctctattttgtagtgcggactgtgctacaccatccctgctattggagtagccgattacccttggcccggtgtaagcatgggtgcgagaatgcatagtgtaacgaaaactatctatccttctaatatatcaacgtgcaatctctatgcgcgtaaagtccttgc

SEQ ID NO: 12204 - DNA, 386 bp, Oryza sativa
agcttactgatgcacatgatcaaagggaagaaatattctctacaatgacgagaagcagggagaaacaccaaaactggatgtgctctaagagtctatgggttcacccaaagaagataacaagtcgatagtataggtgcccaatgaagacagcgatttggcaagcgtacaaatagtctcaaatgatatgaatgggcatcatgaacagctgcaagaaataaaactggattgaacaattgcgagaaatcacaaaccaacctcttggtatatcttcaccactatggaattcttatatctgatcttaccatgggtgtcgagagagatatacctgaaaggctgtaaagttcgaacacgatcattgctgtacctattttttgctctgtcccctt

SEQ ID NO: 12205 - DNA, 513 bp, Oryza sativa
  unsure (1)..(513): unsure at all n locations
tcagagcctctctagcttataagtagaagccatgttggcggctagatgaatgtctgtgtctctaccttggtcttcaanagcctatccgaagctaatccatatcaatactccacatggtaatctgaagctccctccagtcaaaaataagtgtcgttttagaacccgtgaagtcaacagaagttaactcttgaaaaaaaaactattgtttagaatatatgttttgggtatacgaaaatgataaaagctctcatgatattacactatgcgactattattggattcatttatgcaaaagaattaagccgttaaagatatgcattattgaccttgaaaattctaaaatgagactactttactaatntgtgactagagggagtagtaagtgggaccaaacttgtgattgtcagtgtcagcccaccgatagaaaatacttgacctctattttctttatgcatggtatctaactaaacatgaagatgcagttgcacactatgtgctgcacagtatattgac

SEQ ID NO: 12206 - DNA, 409 bp, Oryza sativa
  unsure (1)..(409): unsure at all n locations
agcntatatatggtaaacaaatctattccttcttacatgatgattttacaaagcaagcacctggatagatcacaatatactatgcaaaaacaaaactacatctcgccgggtagaacatgggactcatggatctgaaagttgcacagttctatgtttgtaccttgcgaaacatactactgaaagttaaactgtacataagctcttctttcaggttagggaattgcactgccggctgggttgccatggtagtaaaactagtaagcaccacagatgctgctaacttgaagggaaaagaactgcagcagcagaagctcaaggaagctcgaggtgagacgccctataacaaccaatgcttcttcttggttttgcgggttaggagatctgcattgtacataacaggagcacattc

SEQ ID NO: 12207 - DNA, 393 bp, Oryza sativa
agcttgaaccctcgcgtaggtttctctaaactgcagcgagtaaatctcggcgttggagagggtgctcggccgcggcgtggtgctggataaacccatggagcggcgggagtagatgtccgaacgagacacgttggaacggcgcacggtgacgtgtatcctgccgttctccttcacctccgtcttcgtctcgatggcgtccctcctgccgtacaacgacacgacgtccgggtcgaccacaatggaagcgaagttggcggcggtgtccgggaactgctcggagatgagcatccgggcgccgcggtactcgaacatgaagagcatgagcgtgtaccaaatgatgcactgcagcacgacgatctgcaccatgaggctgccggagaactccccgtacat

SEQ ID NO: 12208 - DNA, 492 bp, Oryza sativa
  unsure (1)..(492): unsure at all n locations
tcgccgtatagctatntcttgacgtggagaagaggagaagagaatacttttgtgccatatcccatgaaaacacactgttntagtgctgtttgtacgggtttctcaacaagtgttcatgcccgcgacaggggccgatatcatgacaatactctttccagtgccccacggtattggtcaggtcaaccaagctctatcgatcattagcgacatcatcagttaatcattgacggaatgataacgcacatgcaagacatgcaacccccacaacaatatataaagtcgcagatgttttatataggggagagaacgtgacatccttttaattactctgggggtgaattgaagtggaacaagcaactgctggagagatagtacacctggcacacacgcacaatttgacggcagagactgatgcacaagcggcacacgcacacgcnncaaattagcatgctccagccccggaataacagagcgagcatctacgtcgccaca

SEQ ID NO: 12209 - DNA, 410 bp, Oryza sativa
  unsure (1)..(410): unsure at all n locations
acctgcagcatgcagcttatagaaaatctagcttctaattcttttttagagactcataccgtaaaattcactcgcttggtatatttctctggtgtacctatcacaaacagtttgctgactcataatcctaagtaccacaggcacagatgattgtagttccaaaccatttgagatagcgattaatttcttttgcatatttgtcaacatacgggtaaaaacagtatcaatgatcataacacttacctctatctctatctctatctctggctctggctctatatcctttccttcctctccttggctctgatgaagagagtgtctatcacgatcttcattatgatgtctatcangatcttcattatggtagtagctgtgcttattcctccttgatcttatcccttttttgactg

SEQ ID NO: 12210 - DNA, 503 bp, Oryza sativa
  unsure (1)..(503): unsure at all n locations
actcagcttataaccaacggtatttatcattttgccgagacatatntcttatttatattttggtatattagcatatcatgatataaaaaatattagtataaaatctatatacttataaggaccgtcaaaattctctagtaccaatgcatggatcttgtgaagaagatttttttactcttcatcacactcttttagatcatctgatatagtacacggctaccatgggttctnttagatcatctggcatagtacacggttaccaagggttattagacatatccacggacctaatttacaaaatcgtggaataaattggtcaagtttaagagaaggttaactcaaaatatagaataaaattatacaatttgtcaacgaaattgcaacggcttttatagcaagtagtttttattattttttcggtttagatcccaacctatgtatttcgaatgtgtttatatctcttctatagaagctggtatactttttacactaatatactccct

SEQ ID NO: 12211 - DNA, 332 bp, Oryza sativa
tttgccagcattcgtgccttcaagatgaaacaaaaccctgaaaagggcatcttccgagtaccgtcaaggaagatgctcggatttatggtatctcaaagaagcatataagccaacccggagaaaaacaacgccattctcaacatgaaaccgccaagcctcccaaaaagacagtcaaaagttgacctggtgcatggcggcgctcaacccggtcgtcttaccactcaacgagcgggggatgcccttcttcaagctggtgaagaagactggcatattcacgtgggacccgaagcacaaaaagcccttggagacttcagaaacttctcacactccac

SEQ ID NO: 12212 - DNA, 518 bp, Oryza sativa
  unsure (1)..(518): unsure at all n locations
tgtatgttgtgaataaataaatttccaaagtattgggcatacaccatgctttctctgctntaacagatgtgcttgagcccctataagacacatggtttcaccacacctggaaatatatagcatatgtggtataaaatccgagtaaatgaactcataaggatttatcaatcgtttggaaaatgaccaaaatatataatcagcctaagccataatattggtcaataaatatgcacacttacgtggcaaaaagcaatgatattgtatccaatcaattgctttatgaacccaaacagcgccttgacttatataaaaagtcagcggngagctatataaagcattactggttggcacctcttaaaatgtattgaccaactcctacaaagttgagtaactggcggataaaagggatttaatgtattgggcacataatcacgccgcacatttccaaagcataaagatgcctacagtcctaaaagaacgtgacaagccacacctgaaaatatgagctgcagacatat

SEQ ID NO: 12213 - DNA, 360 bp, Oryza sativa
  unsure (1)..(360): unsure at all n locations
tggagtggactggtggtctcgtggtttttactcctcacactctttatgtttttttcacgtanatcaccatgtcttgtgtgcatgtgtatattgttgctccgcgactgatatgctagctgaaactatcctcgaaattcatggcacgatgagggattgattgtgtgaaatatgtttgccagttggtgaattgtatttgcacatgaagtgatttggatcagccccaacacagtggtactagagtgtgaactgcagtaactcaagctgacaaaccaccacttaaattcggtgctctactcaaccaatccttacacaaactgatcagattggagtgctcaaagtgaggaactaactcaccaagtt

SEQ ID NO: 12214 - DNA, 395 bp, Oryza sativa
agcttaattttaaagttgattttaattttttatgttattactttttaaaaaaaatgggttaaacttataaaacttttgtgtttggagaagattgaaacacctgacaactaatatatgttgaatggaggaagtgtgttgttcgattggcgcacattgaatggagaaatttacagaacgtatgggttttcacttatttaataattttcattagatatatcgtaccttatatatgtactcttgctatatgcatttactccctccgtccaagaaacagtttgttcacgtttataatgtgtcatattatatattaattagggtaatttattttgaaatggagagagtatgtttaggtggatatgccatgcacaatggcgagttgtccagcgagaatcgta

SEQ ID NO: 12215 - DNA, 209 bp, Oryza sativa
ttacacacgagtgtaaaagataaagaccttcctattcctcggaagttcatttgtggttgtgtggatacatagtcattccagtttctcatgatccattgttctatccttatatatctaatacccctgcagcgtaatgatataattattatggatttgacttcctctacagctttttagtgattcaatttttcttcacatgaaattatttg

SEQ ID NO: 12216 - DNA, 409 bp, Oryza sativa
agcttcaactttcttataccagtggacatctcttattttattttaaacacactgcccaaaagcgtgccctctttttgacaactccagagacatgaccatcaattgctggcaacatgggtatggcttccatcaaatactgactgcggcccatctgcacattcacaaataatgagccacaataaacaatatgaaaaacagtaccaccttgaattaaaaataagttgttttgttacagtggacaaatttattactatagcttaatgcccgagcgttgcaccgataacatatgatattgggtgcgtgaaatttgatcaaagtcgcgctgttcttgacaattaatcttctttatattggcgggagatatatttctaaacacatgatccttaatacaatgacataactatatgaa

SEQ ID NO: 12217 - DNA, 374 bp, Oryza sativa
gcttagacggtccactctgaccccgtatactttatgttctctcgacgatcacgctttgccttgaggaagacgccatcttgacgaccgcctccgtcctggtccccatccaccgcggtgccgtcatctgccgcgtactggaccttttcacggttgctcctgctgggcctaacatactccctttcttgagagccggcttgcccccaagccggggcgaatggaaaatgagctagcgagccttcagatcttttgtgcctcccaagtcgcatcagcagctgcaggacctgaccagtgtgtgagcaattgagttacaacagcgttaccgtttttagccactcgctgaaccaagaactggacaggaatttccaacgacccca

SEQ ID NO: 12218 - DNA, 402 bp, Oryza sativa
agcttcgtgaagaccttgagcaaagcaagttaccctctgatcaattgcccctataattggaaaggcattattattttgtttgaaacttgcattattagaatcacacacttaacttgcttggcctctggttgcgtgccaaaccgacggacctacccagtagtcgcactaatttccgtaagtcgtactaccctgattccttgtcgctccacccttgtgggacctcggtattcgtgctctctgagcgcgtataccaaatattccacatacaccgttgtttgtcgaatacttgggaaatgggtttgtgaagccctcaaaacccgacatgtggtgtcggtgtgttggaaaataaaatgaattgtgaaaactcgcgatgcgggggttgcgcctatgtggcactgtccc

SEQ ID NO: 12219 - DNA, 478 bp, Oryza sativa
  unsure (1)..(478): unsure at all n locations
ntagctntgttcacctacctactataccatcacgagctntaataccgggtagcttatcttcccatatttatatatgcgaattcattcatataatatatactccctccgtattttaatgtatgacgcgncgtgacttttgacaaacgtttgacctttcgtcttattcaaaaaatttatgtaattataatttattttattgtgacttgatttatcatcaaatgttctctaagcatgacatacgtatttttatatttgcataaaattttttaataagacgagtggtcaaacgttggttaaaaagtcgacggcgttatatattaaaatatggagagagtataagccaatggatgcatggctntgtcatgtggatgagatttagctctccctcatctcacctcaggcccgtcaactcgtctcaggctactanatagtagtgtagtaccttacacgaacttcacaaatctcacagccatctcct

SEQ ID NO: 12220 - DNA, 276 bp, Oryza sativa
gaaagaattacgaagaaattttaccctacccgatttcctcccttggatcatgacaaaataaaaaattatattccgggccacaaatatatcttttggaaaattatattacaagggataaattcgtcatgtgcttgtttccaaggatattttactgtcgtgtgctattagagatgaaacggcctttatactgattgtttgctctttctatggaggccccatgggaccagagtgcatatatttatacccattgtgtgtgctgaaatttagttgagcttt

SEQ ID NO: 12221 - DNA, 432 bp, Oryza sativa
  unsure (1)..(432): unsure at all n locations
taagatgccgcttaagaataagatctttatgtggtacttgctaaaaggtgttgtgtcttctaangacaatttggcaagatgaaatcggaacggcagtttaagatgttgtttctgtatgaaaaacgagaccattcaacatctttttatagattgtcattatgcgacaattgtttggagagcagctcagttctcatttggtttataccttcctggaaccatatctaatatgtttgatggttggcttttgagggttgacaagaagagtaaactcatacttataggagcatctgccatatgttgggctctgtcggtgagtaggaatgatatggtattngacaaatcgccatctatctcatatttgcaggtaattntcagggcaacatattggctccagtgttgngcaccagctgcaaagtgtgaagatgatggaga

SEQ ID NO: 12222 - DNA, 404 bp, Oryza sativa
  unsure (1)..(404): unsure at all n locations
agctttgttaaaaattgacaaacgattatttttnttaccttcatgttttctatcaatagtactccatgacactgtatttagttagtattacctccatccccaaatatagaacaatgacacttgagttaccaaaatatagaacagtgacacttgagttatgagtacgaatgatttttttccgtacagaaattaacgagttgaggacaaaaactaatgactttatcactggttgcaaattgcatatatgaaaaaaagaagaagagagaatcctaactcaaaacatataaccatcatgtgatgggcattggttagtggtagcaggagtattagttagttcaacatgtgagacaggctcatcattcacacattatgtggcaagggccttttcctgattgcacggctta

SEQ ID NO: 12223 - DNA, 491 bp, Oryza sativa
  unsure (1)..(491): unsure at all n locations
tcataattgctggacgagcatggaaatccatgtcgttgacactgtcttttgtatcattgtagngnaaactataatgctgtaatgttccttgtctgcgntgttcgtttggaagcaacacttcaatctgcaaataaattaatgaagtgagtgagacttatacaaagagcagaataagtaggaggagctaattaattagcacccaccctcaagttntcatcaatcttgtttctgtcaccagactctgcaaccaagctcgctgatgtcagaataattgtacatcccttccattctataaaaaaacccgtgcatgcgaaaaatctcctttctcctgcacacatgcatagntntgattatcgtttattagtgaggaccaaatgcaaatatgaatagcacattatattatntagtgtaaaatcacctttgaatgatagcaagtgcacaacactctgatgtatgtcacaaggaaactntntaatgacttcaccatatac

SEQ ID NO: 12224 - DNA, 332 bp, Oryza sativa
gggggaaaacaatcaaaacatatagccaacactttctacagatcaactccaagtatgtgtagaatcaatatcatacttcaatagtgcatacatctgacttcttgaacagagggtaattaattattttccacatgtgaacaattccagacgtgatggtctggcccacgttcatcctggcagttgctgcattcattattggaagccaagccatgatatcctgcgcatttggaaccatttcgcatttgcagacactcaactgcttccccagagttaagatactccacacatcaaggcaatattcaggacaacctgacattccagaagtgaacttc

SEQ ID NO: 12225 - DNA, 51 bp, Oryza sativa
agcttgctctggcagctggaggatgaataatacatatatatatgggtggga

SEQ ID NO: 12226 - DNA, 479 bp, Oryza sativa
  unsure (1)..(479): unsure at all n locations
ataaaactcagcttctataggttggagctggcttcttttggatttggagcgatatgttctatgagttaccctgnccgacccattataaggaaatacgtgtggatgcacgtatggcacatgtggaccagccacatcaacatattttatttattgtgttggtcaaggatctactccctccatcctataaaactaaacctcctagaacaacgaatctggacaaagggtagtccagattcatagtcctaggaggggtcatatccctactaatatgagttgttntaggacggagggagtatgattcatgacaagcccaatagcaattgcagtcatactactcgagaacaaagtatatcttagtgtgtaaagaacactccagaggaaaagaaagcacatgcatgtggcacccacatacatgcatatttntttgtatacaaactctatagaaggttgaacccgaagtgtgctaattatctatacta

SEQ ID NO: 12227 - DNA, 401 bp, Oryza sativa
agcttagccaattatcaaagcatactttgttagaacacaccacccattgatgttctgggactcactgggttcaaatcttaatgcctatattaaagatggtcatgtgcatatccctagttgtacagagaccataggttataaatgaattaccaaaaacaaatcaaactagtttgcaccctacaaatacaaggtcagctgtgaaatgatacgcagtctagtggttgtagtgacctgaatagcatcccatggttctaggttcaaatctttatagcagtggatttcagattgggttgtttaaggggataagctcctaatttaaaaagaccatatatatacgttgaatatatagaccaggtaaaaaaataccttttataaaaaaaatttaacaaggtcagctatag

SEQ ID NO: 12228 - DNA, 388 bp, Oryza sativa
  unsure (1)..(388): unsure at all n locations
aactcagcttacctgcctttctcntgacggcgcacacacacacacacgtgttctcttttctttctcacaagaccaaacccagagattatcgtccccaatgtcgtctacacaagacgccgtcgcagaggatccacgtgcgatcgcagagcccgacaccaccacacgggctgggaaaattcatgtgccgcacgctctttttttttttcgacgggaccttctgcggccgtgcgcttcctatctgttgctgtagtcgtggccacatgctctttgctgtcgtctacgtcatcgacatatttctttttttccacctttttatttcttcttgaggtcgtcatggtcttttttggcttttgcattatgtcactgtccatgatgtagatctctcttg

SEQ ID NO: 12229 - DNA, 458 bp, Oryza sativa
  unsure (1)..(458): unsure at all n locations
ttcgtctttcttattccttaatgactcttgctcacatcagacttttatctctttactcaatgagaccaaatgtgaagaattctcttgattcttttgtcaacgcgatcccttgagcttctgactttntactttccttggatgacagactgtgttgtccacattagcttcacgatgaaatttatttggagatccagacacattgttacttagctgttaacttgttaaaaccactggcactaatgagcacaagactatctttccttagatacattctcttaggtacgaggtaagagagagaaccgaacggttaatatagtagataggagactcagaatagaatagactgtgttttttactaaactntaactcttattgatgtgaggtaggttgttctttaacacntgactgaacactgatactatatggttatattacaaccctcgatatactccatacgc

SEQ ID NO: 12230 - DNA, 401 bp, Oryza sativa
agcttacctcaactgcctcttaaagatgccttcttaattaccaccggccatgccaagggggtggagagacccacccatttctttctctacgcttatctgaacccggcgccagcgccgtcatctagtccttactctctggtgagctatagtccaattcttcaagcgcacaccatctttatgacctcacaaccctcgtgcatgccttcctttagcaactcatcctcccaattgagccatccccgtacaccccaattggagcatcatcaccagtattattcacaagccatcactgacgaccacactacgtcaacacttacccatatctagagagaagttgtgatctcttaacgaatttaccacagaaataaccaacaattgctcaaaaaaactcccgggtatta

SEQ ID NO: 12231 - DNA, 403 bp, Oryza sativa
  unsure (1)..(403): unsure at all n locations
gctcgctttcatctttcccgctgcattcgagatcacttatatttttgtttattacatggacccagacatgccaactaatgcgtgcgattgtgtacccctgtctggacctggacatggatttaatgcacattcaccttaaaaactctgggtcgtgaattactgggcgcgacgaatgcgctagtgacatgcggaccccacatgttatcctcaaggacctctgtagaccgatattacatagacggtccacgggtcgatggaagcagatcccgtgtgtcaaccgatgcgagaggacgacacacggactccacttgacatnactcgggctgagcacgtggaaaccacgcggctacctgagcgggcacacatacaccggtgctacacgcattctcgaacgactaccgac

SEQ ID NO: 12232 - DNA, 371 bp, Oryza sativa
agcttgagcatttttctgttaaacatatattagtttgagtattacttttatcatttcccagattgtaaaggatggggtccacgttgcattgatagaccaatatgcagaaaggtccctggggttttaaaaatcaacccgcgatcctgtgactgttctctgtgtgaggtatttttacaaagtagtacctaaagttttgtttcttctccacagaggtccctggttcgagctgaaacagggctagccatggctgagctcgatctcaagcttgccagcagcaaacggtggctcgtttgaggtgaggttaaaatatgaaatgaagagcacgctctcgcgattccatttctctacttttctcggattgcggacatctg

SEQ ID NO: 12233 - DNA, 461 bp, Oryza sativa
  unsure (1)..(461): unsure at all n locations
actaagctgaaggcgcngcgggcngatgggttcaagaaccggaaagtgccggtgtctattttttcgttgtcgacgcttgcaatggccgctgccacccggttgggtgctctgccattctttatcctggagctagaagcccagtgggcgggactatgcaatggactcgcggcacgggtgatgatagcggcgagccttgatcttgtgcatgaacggcaaatgtatggcactgggagctgaggtgcgtttgggattttgagcagacggttgttcatctggctttgcagaaagtacttgctgcttcattctcttcagaattctgtgatatcacttatggagtactatctagtacattagcattgtcactaatctacaaatatcagatcatgtacccatgtagttaaacatgaccgagctagtcatggatgtcattaagacccattcacttcatatgttcattaaat

SEQ ID NO: 12234 - DNA, 316 bp, Oryza sativa
gagcttaaagccatgaatcccttttatgtatatctggatctgggtcccacacaaccaacatgtggggggagtagcctctcatgtaaatataatactcgagaaaaattcccgaattttaaaatgtttaaaactcaagaatttaaaatggcataaatatggatttcttctcttgtcaattttgatctccccgaaccgatgactccttacctttaaacactttgccccactaatcattgctcccacgcatccggagtcggcggaggcactttccatacctgccaatgagtgacatgagttcctcattaatggcacaaag

SEQ ID NO: 12235 - DNA, 369 bp, Oryza sativa
  unsure (1)..(369): unsure at all n locations
accagcttctctacatgcagctactcctctgcactcatacttttctctcaagcttgtgctggaccagcgataagnnggcgccactctactctctctctctctctctctatccactcatcatgtactgcgtgttctctatcaccaaccagctgactattgactccttacaggagtgaacggggactggaattagctgaaatgatggagcttatgggggaaggaaaacatcttgcacctgttattgctgcaagggatggagtgctcacattgagctgtcatggcttggggacaggtgagtgcatgcccccaaaagtgtgaagctctggaccattactaccatgtcatcggattgcaaggccctagagatgt

SEQ ID NO: 12236 - DNA, 298 bp, Oryza sativa
agcttatccgatctctctttacagaagcgcttccattggcccaatgcccatcgtataatgctggcggtaatattatacctatacttcctttatattaaggttatttctagctcatttattttatctcataataattttattttagattaaccattgcattcgattttaaaaataagaatttgattgtattggctgtagataaaggtatggataggtgcattggatttgatagattatggacattctaatctttttggtttttattggtatgtgcgggaagagggaaaaatgaacttat

SEQ ID NO: 12237 - DNA, 432 bp, Oryza sativa
  unsure (1)..(432): unsure at all n locations
attaaagaaagttgtcataagttagctattgactgagaagtaaaaacagtacagaagtgaagtatgaacttgatgaacaaaacgtcagttatggtatacaagcaggaaacttatgctctgcacacaagtcctctcgtatacacaccgtgcacaccaactaaaacatatcaccaaaaattctacaaaacattgcacatgtacttctagtagtattgcatctatgtgtaaagctcatcttcaaattcattatatatagggagcaacaaaaaagacaaatttctaacagatttatactctcaaaactgttagaatattttttttttggttacagctaagatataatgaatttgaagntaagactttatacataagtggtatactattggagatacttgacaattttttctagatattttgtgaaattagtagttg

SEQ ID NO: 12238 - DNA, 364 bp, Oryza sativa
tatcaagcacagcataggaacgcggggattggacaaattaagcctccatttgctacatttacactcagacagaatcagacctttcatcatcagaagtattattgctcggctgaaaggccgtgttgcggaattgctctacaacatcacttgcaatattgtcagccgcactctgagcattactgataagaacaagagcggcttcttcgcttgtcccggctgcaaagccatcaatggtatcaatatcaagcctcgggtacaaggagttgggcatcgccaatgccatactagctcccatacatccagctttcttgatattcttgaaatatacaatcggtgcaactctcagcttggcaaaaatattggt

SEQ ID NO: 12239 - DNA, 229 bp, Oryza sativa
ctaagctacaatatcagacttgccaaatactgaaagagaacatctcattggttttctattgttcttacagtcctcatctataaaatgcacagtttaacaagcaactcttacttgaatgtaaaataaccgctgccactctcctagtgacaggagaactcccccaggtgtagctgatattttctccttcagattcatcttttcgtatgaaaaacactaaaaaacttttcct

SEQ ID NO: 12240 - DNA, 398 bp, Oryza sativa
agcttatctcctatgttacaggaatggatttttcataacatcaccaccggcttggcgtggtcgccgccgactggtgtcctcacctatacggttgggtagtcacaccgccgttgttgggcgtctttttcttcactgaccggctgcctcgtccgccgtcgactggtgttttcgcctatatgattgggtggtcacaccgccggtgttgggcgccgttttcttcaccgactggctgcctcgtccgccgtcgactggtgttttcgcctatacgggtggttggtcacaccaccgtttgttgggcgtctacgtcttcaccgaccggcttgccttcgccgccgccgactggtgttttcacctgcacgactggcctattatgccgtcgtttgttgggcgtctacgtc

SEQ ID NO: 12241 - DNA, 346 bp, Oryza sativa
  unsure (1)..(346): unsure at all n locations
tcacacattctgctttatatctggctaaacgaaaaggcgcttcttatattattttatcannataatnactcatgctggatgcgacatttattcatctntagaaccataatagcaagtgctatggttgatgtgactaccatctctaaatttatttatatcattcactgataaattaagagacaactcataccatttggttactcttatacacaaattcgcaatatatcttatacttctcacgcttaatcttggaatttatgtggagggtattactcgatttaagggggggtcaatatctctctttcacatttcttatctaactcatcacatcaattcgatgtgacat

SEQ ID NO: 12242 - DNA, 250 bp, Oryza sativa
ccatgcgtaatcctgggagtgcaatttggatccttattcatgatccttgagaagccctgattacctttgctcggcctacccggcatgctaaaaggatattcacacctgccccggagggaactaccacctttgccctcctggtttaaaataaaggaagtcaaatgtttcatattgggtttcttattgcataaacccgtgtatggttcactaattcaaaattggacttgctgagaaatccttacccactcct

SEQ ID NO: 12243 - DNA, 405 bp, Oryza sativa
  unsure (1)..(405): unsure at all n locations
aactaagctgagcatataccctgagacgattgccatcaattaataanattttttctgacccccccagagagaaggcctaaagcattcacagttttggaacgattttcttagcactaaagaatgtaagagctgtaagaggctgaaatcataaaaaaagcatggaaagggctgcagcctgtaaaacttgaaaagattgctatatttttttagagaaccattaaccatctgaccagggccttttagggaatatttattagttgcacctttgggagagaactgattacaacaatcaattaattgataggataaaggccttgaggaaaaaagatccatctgcttaacttggaaaaaactgctttgcatcaaaaacactgccaatgtctaattgaaatgattattaacttt

SEQ ID NO: 12244 - DNA, 469 bp, Oryza sativa
  unsure (1)..(469): unsure at all n locations
tctcanagccggnttcatcagagaggtactccatccacagtggctattttttctattcatggtacggaaggccaacgggaagtggagaatgtgtgtcgacttcaccgacctcaacaaagcgtgtcccaaggatcattttcctcttcctcaaatagaccaactgtgggactcaacagccggttgcgagttgttgagcttcctcgacgcttactccggttactaccaaataagcatggctaaagaagacgagtagaagacaacattcatcacgccattcggggtattctgctacggtaagatgccgttcggactaataaccgcaggaaacactttctagcgcacggtccaaggtgcacttatcgaccagctcggaaacaatgtcgaggcctacgtcgatgacattgttgtcaagaccaagacaagcgactcattgattgacgatctgtgggaaaccgtcgacaatctctga

SEQ ID NO: 12245 - DNA, 323 bp, Oryza sativa
catggtctggtggactcgcctgggcgtgccctctacaaaagaagctgaatcacgttcataaccagagagatacatttcaccaatccagtcagtcagcatatcatataactcacccgatcttggatgggccttatatactacaaggaaaccatgcattttgctttgcacctcaatccagctacgaccaggctccttctttaaaagcccctgctttatcagacttctctgactataaacatcaacccatttccctgattcacatgaacatttgacagaaggatattcactgaagaatcaactggacccaaatacataacattgct

SEQ ID NO: 12246 - DNA, 316 bp, Oryza sativa
  unsure (1)..(316): unsure at all n locations
tcaacttgcttgaattgngaacgagcttctgccatgtttacatatttcgtgggatcctgtcccgtcgattctgcaatcaacagcagaccaaatgattgtcttaatagtccaacatagcgaacatcctgatagcaacattctaaagctattttttttccaaaacaaagtctcttgagagagacatggagtttttagcccatggatgggcaaacacattttacccacgggcggtcgtgtacatgtcatacttcatagcaacaagcctggacatttctaatgctgatgactaactaanagaagcataaaattttaatca

SEQ ID NO: 12247 - DNA, 402 bp, Oryza sativa
  unsure (1)..(402): unsure at all n locations
agctngaaagggctcttggaacaaagcttgtcttcaagaaataatgttctactattaggccctgaagcatagtgttggagcaaccaaagccaaaatgtttgcgtaacctatgctgggtcttttgataccatgcacgatgtttctgttggtgcatgagtgaatactgaataactattatgttgtcgcaaaccttgtaatgctgccgctctttgtgtgtcatagtccctagtgtgcaagagttgtgctggaccttaaaactgacttgataacctgcgtggtttatgcatgatgtttattaaaatatcaatgatctctttggctgtttacaactgatatattttcgtgcatgctgttcgagtgtggctatcttgtccagttgcgccaatggtgatcagcattcag

SEQ ID NO: 12248 - DNA, 396 bp, Oryza sativa
  unsure (1)..(396): unsure at all n locations
nttcagacattgaanatttcgaagtaaatggataggtccatatacctgtttctacgcttcatcacatggagccgtcacgctgcgcgacaatgaatgtaacattttcaaggtanatggccatcgtttaaaagtcttcctggatccgttagaagttgatcgtgacttaagccctgtttggaggagcttctctcagctttagcttttctcataagctgtttttgtagaagctgccccaaacagtccacagcttctgagaatctgtagttacagattccgaaaaatgaactaagaagccaaaagctggagaagctgggttttaaagcttttccagattcttataagctggctactaaacagctgcttctcagaatctaaagctcccccaaacagaccctt

SEQ ID NO: 12249 - DNA, 381 bp, Oryza sativa
agcttgaaaggaaattgtcaacaacggttattttcactattagtgtggtctgcctgtcggagcttaagttaaaagcaatatgaaaatcctaactaacagctctaagaaattgaaacattacatcaggtaggtataagctaacacttggttctaaacaatatttcaagtgataatctggatacacgatttttttttttttccaagccggccaaaaaaggccaaccaaatttacttaagattgaagaatatatacaaatatacaaagctataacttcaacaaaaagctgtcgaagtaatggaagttgtcaccggagcaactttccaaaagcaaaagattacactaagagactactctcctatatttttgaaaaccccaacttc

SEQ ID NO: 12250 - DNA, 488 bp, Oryza sativa
  unsure (1)..(488): unsure at all n locations
ctcaagctggatatatattcttcgtcattagataaacaagctgaggaagagtctttattgcttctcttcgancaacgctcatacacaactcagcaaacgtggtgaatttgcattcacgcgttcagcttgcagatataaaagatgggtttctataggtaactccatcatattctgcttgagttgaagtatggtgtgattgctcaccccagacgaacttcatgtctccatctgaaatgaagatgcaactatgatactgccattccggtgttataccaagcgtgacatatggtacggtgtaggatatatatntttactatgaatcttttgtccaaagtccaaacctctgtacagatacgatttatgtgcacatgataggaaaatactatatcagatatcgtcaatgcgactgaagcggagatgctgccgatttaccacaaagagcatctgaagatcaaagacgcacatgtatattctactaaccatgtatt

SEQ ID NO: 12251 - DNA, 407 bp, Oryza sativa
agcttagctgacggatacagggctatgactattctgatctatgcatgcggcacgtctcggtccggcgcgacacgatctgatccttccccggccgcttgggagtacttaaacgtacgtactgttcgtgccgatcgacagggtgtgtgggcgtgggtgcatgtttggaggcatcctcttgtcctacctacttaccccgaccgagtacaaattaatgtatacatgcatgtgaggtgttcttgaggctttcttaaaattttattgaaatttcataaaactatacatactttgcacaatttatcaaactacagatttaaaaacttattttataaaactacagatttaatatcttcatttatcataaaaccacaggtttaatgtcttcattaccacaaaactacaggtttagc

SEQ ID NO: 12252 - DNA, 394 bp, Oryza sativa
agcttttgactggtcaatgaggaagcttatatggtttcgttctctacaagcaaagctggcgggggccattcacaaaaaccgcagatgtgacaacgcacacattcaaatgcatcaagtggaggaaaccaagtgatccaaacgagaaagacctgcctgatgttcaagaacctgacaattgtttgcaaacaaacacaacagtacccttagtaaaataagagaaaacacaaccaagggtgttacacaaattgcaaagctgacatggtgataacactgaagaggggcgtttgggacaatacaaagctcaatctagagcacaatcatccactatcttctccagaagaaagacaattcctaaggtctcacaaacctatgacagaccacgagaaacctctga

SEQ ID NO: 12253 - DNA, 456 bp, Oryza sativa
  unsure (1)..(456): unsure at all n locations
ctctcatgatgagcacagaacacagatccattactatttatctgggctatttatttgtgcctgaatctctcagttgccattgcatggaaaaacttagtattntcctcttccagttgcattcatctgctagtacatcttgttttccagtaagatcttctaaactgaaaaagtttcatgagacgcttcttcacaattctctggaattccattcaaaaagagagagagccctcagttcctaattagatctaaaaatataacactatgttgctttatctaacaatggcctgagtgtgactgtgcactctgcatcactgaaataggaccaccttttcttttctgtttgcagccaactggctggaaaagatggattccctgaatttgctatggattcatgacatgatcacatatcaacagaattcaaccagatcttttcgagcttacattgatgctgatatt

SEQ ID NO: 12254 - DNA, 441 bp, Oryza sativa
  unsure (1)..(441): unsure at all n locations
tgaagctgaaagatgagtactgagagagtgagctttaggtattactagtactagacatcaccatctctctctctctctctctgnaccacaaggttaggttagttttggcagtgattcttgtgcttcacagatcgatatatcagtgatcgatgaggagcaatggccggagtcgacgccggacaaaccaactgttngcgtcactgcagcttaattgggggggttacaagctacgagagatcgatcgagctatggagtaaactagtggagtagctatatattaacaccagctgctgctggtagctggtgtgtgtacatgtgtgtgtcggtgtgttccgggcatggagagttacgaatggaatgatgaacgcattattgtggatcgaccganggctacagcgatgcactggtgggacacgtggtcacgcatgcgtggacgtatgt

SEQ ID NO: 12255 - DNA, 381 bp, Oryza sativa
  unsure (1)..(381): unsure at all n locations
gcatgcaaactttctattaagggaggtacctactgatgtattattcacttnattacgatatcctcaggggagaaggagcttccttcagctgtgtccatggctaaacagtatatttcactgacccaccaatccaatttagtaaatactgatgtactgttgtcaatgccatcttgttcttatgcttgcacaaattaatgtaaaatatgtatttcaacattgagaattggatccaatcctccacattttgatataaacaatcttaaagtccttgatgcccagagcaagttttggagcctacaatgagttattaccaaatagtcttcatataatatcatacgaaccaacattctctcaactaatattttaggcactgtgactctt

SEQ ID NO: 12256 - DNA, 335 bp, Oryza sativa
aaatcctaaaacgcgggaggcacataaggcatcaataccagctacaactccactaagaaaaaccgaaaagggcaccaattctaaatatatgatgcagcgcgagcgtctagcaatagataactctgagaaatggccagcaatcacaatatcccgctgcaaaagcatagggccgcattaaacaacttcaaggaacacaataattgcgaaatcggcaacgcacctcgagtatctcgtggaagaggcgcatgttgagcgcgggcgtgccagagacctttatcctgccacctcggcgtcctccacctgtccctgatactcccacgaactccctgagaccc

SEQ ID NO: 12257 - DNA, 385 bp, Oryza sativa
  unsure (1)..(385): unsure at all n locations
tatcaagcgtagcanacctaccaccctgcgggtcccgtcaagaagcctctgttctattacaggcacgccggcactaccgccatatccctcaactntctaccgcatgatacagctgtagaagcaatccccctcaccctctacccccaccatacatacgctgattcttattaagatggtcgctatctactatccatgaagaatcaaatggtctaaatagcatcaccatcaacgatgactaaaggttggggtgcgccgcctgtagacaattatagtaagttaatagatcgtaccttgtcttgtatttataggaaagtgcattatgtatgacaagcacctaacgtgcaaagctaattanggtggcataatagtggagggaaagtcaata

SEQ ID NO: 12258 - DNA, 408 bp, Oryza sativa
gcgagcatgcaagctttcatcattattgctttaattgttgttgttctggggaaacttctgaagagaacggcgggggaaagattgctgctttgctgctggcttcgcggcaaaacttgattgattgcgttggaagaagtccgcttcgtgaaggaatcttgcttgcgggatcaatcgcctccgctcgcttgcttgctttttgggcggctcttggggctgctttattggggtgaaaggttgggggatctcccggccactcgaggtagcgagcgatctccccgcggcttctcctctctgccggcattgcgggggaggcgagctcgccgccgggtctcttgttgattcggtgaggcggcggaacggagcttctcgctgtgctgctgctgcggcggccgccaagtgttccgtgaa

SEQ ID NO: 12259 - DNA, 412 bp, Oryza sativa
  unsure (1)..(412): unsure at all n locations
tgctggggggcgcatccgctctatagctcgtatcttctcggggttggccttgatgcctccggcagagaccataaacccgagaagcttgcccgcaggtacaccgaacacgcacttaatcgggttcagttttatgcgggcggagcggagactctcanaagtttccgcttgatccgagagtaatgtctcttggttgcgcgtctntacaaccaagtcatcgacataagcctcaacattacgtcctatttggctacccacagaaattcgagtagtacgctgaaaagtaggacctgcattctttaacccgaaaggcattgtcgtataacaataagttcctatggggggaatgaatgcagctttttctcatcctcctacccatgcgaactgatggaaccacagatgcatctagaaacac

SEQ ID NO: 12260 - DNA, 61 bp, Oryza sativa
actctgaacccgaacttaaaaaacccaggtgcaacctgcgaaaataacgttaacctattct

SEQ ID NO: 12261 - DNA, 378 bp, Oryza sativa
tcacctgcggcatgcaagcttggagattgttttaagtccaatcttctctatttggcaaagaacttggtcatcggtgaaaactggtgtaagaggtgagtatatttttactattgaacctagggcaatgtattctaagactataagttatagttatacttttttcaaggaaaaaggagtacattgggaaaccttattgcgagataattggagaccggcattatgagggagagggccaactctatctttatgtgtgaggagataaatgagggtggcagggaggctaccctagagctcgccctttgaaaacatgcaccccgtgggcctatgtgaaatgtgaaattcttacctttgctgcatttctgctgggtgtggcttggc

SEQ ID NO: 12262 - DNA, 359 bp, Oryza sativa
cctataggaaagagaacaaaatatattgtgcaaatgcctataactaagccgcaggctataatcggattgccacacatactgagtatgagccgtacatgctattataatgctgaagcgaaacatgtatttataagtctgtatcgaactaaaagctaacactaatagcaagctctataaacaaaattaataccaactctcatatttaatttgaaaattcaaaattgccacacttataagctatgtaaggcaatatattcgtggacaaaagagcgggactgtgggaaccatacatatgaaagctactggcttggctttttcttgataatatgctctcacgcatgacgtcgtcatttatacac

SEQ ID NO: 12263 - DNA, 277 bp, Oryza sativa
caaaaagcaaacccgcacaacagacagaatgcagacacgaaaggaaacatagcatcccaagaaacaccaaacaaagcaggagacgcaccagcaagaagcgtgcggcaaccaaaagacacagtagcagacacccgatatcaaagcaacaggcataaccgcaacaacacatagggcactcaacgttacgacacgtcataaacgcaagccaatgagacagaaagaaaagccacgccttaagaggagcaacaaaccaaaggaataactaccaacacaaaca

SEQ ID NO: 12264 - DNA, 468 bp, Oryza sativa
  unsure (1)..(468): unsure at all n locations
tgagatcaccaacctgattatctaaactagcggcccttgttggcttgatgttatcattcagtgtccctctaagtataagttgcaatgagtgaatagcatccatctcatagtcattccaaggcaagctcttcatcttgacaacctcaaggaatgccttgaaggacagcctatggtgcattcttctgctgacatccttgtctgatggatcatgttttgcaccttcccatctgatttcancagctgtatgtgacctgaaccagaacaagatatccttggaatttattttagctactgccattccacanatcatatcaccaagagcagcagctcctggatatccagcatcatgtaggctatcagtactcatgccagtggaatccctgtggacatctgacagccagaaggcaatatcacgtatctgagactcagttggagcattctgtatgccgcacacttnttccccataca

SEQ ID NO: 12265 - DNA, 289 bp, Oryza sativa
ctgcgacgccgcgcgaacagaggaagttctcctctccttctcgggcgccttcccggacactgtggcgtggcgctactactaccggttcctctcggcggtcttcgacgtggagctctgcttcatcgccttcatgtggtgggtcacggcgaggagccggccggcgacgtctgtacaatgggcggcggaagaagggtacagggtggtcaccgaccatttccgggggttcacctacggcgagctcatgaaggcaaccaataacttcaaggacgtgatcgtgcatggtcggtac

SEQ ID NO: 12266 - DNA, 437 bp, Oryza sativa
  unsure (1)..(437): unsure at all n locations
ncagaagaagttaccccctcgtgacacagcataagacgcgccgcttgatctccattatggaggcatgtaagcctctctcgctggccaccgtataatagccgctgcatgcgtctctcttctccatatatattcccctgtcgtcttcgtagcagctacgctcacactgctagttagctgcttttccgaattgttcatattgtaaggtgttttacatttgtttgtcgttctaaattaaacatttacgatctatgattaagtctattgacataaatatggcagatattttgacacaaaataaataggatgcaaaaatgtactccctccgtcccataatataagaaatttcgagtgtttccttacaacggatgaccactcgtcttatttaattgtctcttgaaagatacaaaatgaaaagttataattctaagtaacgtgga

SEQ ID NO: 12267 - DNA, 453 bp, Oryza sativa
  unsure (1)..(453): unsure at all n locations
cgatgaccctcaacagacatcttttgttcgcaacaagggttcggaagtggagcattttgagagagcctcgggtgaaaaccttgcctagtgctatcctaagttgatgatataaacgcctgtgggcgcccgttcctccttggaggtatcgtcatgctggctctctctcccttcaagtgaaaaccgggttccgttcagaatgggcgttgacagcatttttgatgttgttcccttgttgaaggcttcgctcagaaggtttctgcaccactataagacgtatggtggttctggagacctcgctcgcattatgttgtcaaaagttgcttgcctttggtaagctcggcaacgacgacttttgtgaggtctcaatagntgctttcttctcctttcttgaaaggttttattcggttccattaattatcatgtttgtctggtttggtgcagttccctattaat

SEQ ID NO: 12268 - DNA, 497 bp, Oryza sativa
  unsure (1)..(497): unsure at all n locations
catctattctgtcaccagaggatgctgattcatctggcctatctctgaatctcagcgaacttgatattgaccacccatcaatcttacttaaagagccattgagaagcgtcactaccatcaagaggcttcaaaattctggtggacctaacctagcactcttacctgaggaatatctgttgcataactgtcatgcccttgaagaactaattctgactaatgcttctcatctgccatggttaccacaagcagtgacaaccttgaccttcctgcagtccatgcatataaacaatgcagttaagattcagacacttccagatatgccagcatctcttaccagcctgcacatctatggctgcagctctgagctcaagaagagatgccananacatgtatgcccatgatggggtaagattgacatatcagtgatggcgacattcgttgagatatgatacatgacatggaatgggatttgtacagcagagcatatgtgaacaatg

SEQ ID NO: 12269 - DNA, 408 bp, Oryza sativa
  unsure (1)..(408): unsure at all n locations
agcttgcccgcangcacgccgaacacgcacttattgtgttcagctntatgcgggcggagcggagactttcgaaagtttccgctagatccgagagtaaggtctcttgggtgcgcgtcttcacaaccaagtcatcaacatatgcctcaacattgcgtgctatatggctacccaaagaaattctagtactacgtagaaaagtaggacccgcattctttaacccgaaaggcattgtcgtataacaataagttcctatgggggtaatgaaagcagttttttcctcatcctccctagccatgcgaatctgatgataaccagagtatgcatctagaaaacacaagatgtcgcaccacgccgtggagtcaaaatctgatctatcgtggcatgggtatggtcttatgacatgcttgt

SEQ ID NO: 12270 - DNA, 483 bp, Oryza sativa
  unsure (1)..(483): unsure at all n locations
ggtcgaatnttgagagtcttgtatntgtgtagcccccgactctntggttagttgggaaacaactgaacatagagtcgagaattgtagcttcttgtcgtcgagtactcattgcttgagtaaagatgcatgttgaagatgtccgagtagaaatattgaagattggaacaccacttgttgtaataaaataacacggcatcatatttggtgacgcatgccgagatgtcgaagctcttgtagacgttgtggttggtgaagtagccaaacttgcgaagtagcggcaatagagtttgccggtgccgaagattatgaagatgaagtccgctcaccatgatgataaagttgcatagccatgatgaagtgaatacgagtcgacggcaacatatacaaaccagtagcaaatacgcatagttatgaagataatagcaccagtcggtggcggcataatcagtcggcgactgaagacgatgatgttcatcactagtg

SEQ ID NO: 12271 - DNA, 109 bp, Oryza sativa
gcatgcactataagagtattagcctttttaaaaccgataccgttggggttcatgtgttggctcaacaggggctagactggaatgggctcctccccggagctgttctcct

SEQ ID NO: 12272 - DNA, 466 bp, Oryza sativa
ctcattctagtgagtagtgatattcggtatttagcttcttgcatgatcttctgcttgaaggatattgctctgctgtgaacttgaggtaactggtttttttttttccacgagaatacatcccggtgaggctattcttgacgccttacgagctgaccccttcgtatcggaacataaacaacaagttcagcgtcaagtactacctgaatctggtccttggtgatgaggaagataggaggtacttcaagcagcaagagatcaccatgtatcgccttctagaaacccctcaggctttctagattccatactggagcagcaagatgtttttcgattctcaggttttgtacaagctagcatcgatggtagggcaatggcgtacttacatgtatataaactccagaagagctcggcagttcactagtgctgctcgtccaatcacatttctttggtactgatcttcttggcctct

SEQ ID NO: 12273 - DNA, 438 bp, Oryza sativa
  unsure (1)..(438): unsure at all n locations
ctgcagctttatacttttcctctngtattatccattgccctacctggcaacactataatcattcctaatttcttcttcttatgctaaactgtattacctttttttcccaataagataatacatgtacaagaattttggataaatggttaaaaatcaactccaacagatcaccttttatattaaaaatttaaagtttccttcttcatanttgacggtctcgacttgtangggtgtccgagggctctcaatcccttccatcctgttgctttcccactgttcgcgacttcttaccatgcagtgcgaaaatgttcccacaaggtagtttaatgtagcactgcattgtcaaatcatagcgcaattaggcttaaaagattcgtctcgcaattacacacaaactggggaattagtatttttgtattattatacttcatacatgtg

SEQ ID NO: 12274 - DNA, 495 bp, Oryza sativa
  unsure (1)..(495): unsure at all n locations
tactcagcttatcgnctctcacctccagcccactaacagaagagccagccatncgggctgattatctcacagccacagggcccacagttcaccgctggtctttgtatcggctggcactcccattttggaaattggagtagtttgcatttttgcccgctcgatgaccaaagtatgaaagtacttcattcaaaaaaaaaactactaaggtatgttttttagacggagtggcagacaagtggagagaaacactgtcatagtgcttacacatcgaaagccatttaataanttcactaaattcataaaaaatcatactaaattntaatttatnnttattttggataaataataatctgcctgaaattcacagatttcgtggttatcgatcaaaaggcgatatatggccncgaaccatagagagcaggtcctacctgggaaacttgagagttgggaacacatgtctattcacgcgttagcaacgggagatgttccattggg

SEQ ID NO: 12275 - DNA, 473 bp, Oryza sativa
  unsure (1)..(473): unsure at all n locations
agctnttggtntcgtatcttatatagtctttatgcgcattntatcagacttttagatcccttntatgctttagttgtggactttcagaccttgtgtgatcttgtaatcctctatcatttattttaatggaaatggagggcttaggacctttgataaaaaaaaaaagcacaaaactaacggccagccaaaccactcagccgagactcaggacacacgttgcaagcgtgtgcaagctgtatgcaagatgtgcaacttaccacatgcataactatctcctaaataatcttgcacttcccatgcatacatatctactccttcaaccgattcacttggttaacttggaccttgccttgcttacaatctttgcttgcccttcagacttattcatgaacccagtttgctccactcacaccaccgcatcacacggcacgtcatcggcatatcgcctatgagctggaaccaaactagctatg

SEQ ID NO: 12276 - DNA, 476 bp, Oryza sativa
  unsure (1)..(476): unsure at all n locations
ctcntatagattcctcaaattcaaacactagttgcatatatacaagttgctttggtggaactaaccggtgggtgaaactcttgctattctaacccccgtcgggttagtctgttcttgctccattgtgcagaatgaggagccgattgtctcatctgtccaaggagtccggctcttcatcaagtcatcatgatgagtctagtactcattcatcagctgatgtctcgatggaagacgccgaagctccgcgactactcctgaacgacaccgacctcgaccttgtctgtgatcgggagagaaaagcctactacatgctgagcaaccgggagtatgctcatacacgagaatactctccggagctgctgaaaaagatagatatggatgttgaatttcgtgctatttggaaagctgttggttggcagagatttgctgtggtagatgagcctaggttctcgttgcttactttgcaatttctatgc

SEQ ID NO: 12277 - DNA, 403 bp, Oryza sativa
tcatctttctaagtagcagcagcaccagcaacagcaccaccaaagtcaccaccactggaacggacaacaatagccaatagcaccaaatccttctctgttgatcctacatccaacagctgcgcgtctttcagccgctgtgctccctacagcttgtgctgcaccaaatccttgcgcagctcaaccagcgagcgtgcgccctgctcctccttcacgctgctcgcgtcgagaacctctgcagcagccgtcgccgtctccgccgtcgacactgtcgctccgcctccgctgtccgacgtcgccgctccgtctcatttgtcgacgtcgccgcagaaccgctctggtcacagcgcccgcgccgactatagttcgcgtccgcgatgttcgcggtgacacaactctgatacca

SEQ ID NO: 12278 - DNA, 502 bp, Oryza sativa
  unsure (1)..(502): unsure at all n locations
ntattcactagctcgtcagttaaaatataaaaatggcacacaagaagtggttattgttttgattgacaagtgtcccacataccaatggattgatgggcagatcattatcttctgtgtttcgcagtcattgcagcttctcaaggatgctatttttgattctgagtgtgcaccctgtatcctttttggcatatactagatcagttcatatatataaataagtagcttcccttcacattcaagtaatcaagtttcattgactcacgtaaaaaaaaacggtcaccttgacatttcctagtgttctcacttgacgtgtatggccatttaattggcatgtttgagctgaacaatctgtaagtaaatctaattattcttcatttgtatatgtgcattacatactctgtcaattgttctttccatcaacagaaataagttctgtactgcattagatgaataacctcaatatatttccatcttttattccagtggnttggttgttccgtct

SEQ ID NO: 12279 - DNA, 402 bp, Oryza sativa
  unsure (1)..(402): unsure at all n locations
agctntccactaatcccggccccatatccttatgggcccnccgagatatgttgggtcatgagatagtaccatgccatatactccgaaataatagcccaacagcaatatgtataccgaaggtccctcaacttgtcatcgagttacaaaatcatccccaaaccgcaaaactcagatatatgacaaccctcaacttacaaaaccagtcatttttntcattttaggtcctttatgtttgaaaccgatttcaaccgacgtggcggctgagtcggcgtgggccccacatgttagtgtggccacaacatctatctttttcacctcttctctcccttcatcatctctctcccttctctgctctgcaaggcccgcagtgcttgtgcggtgggcggcggtgatggcggctat

SEQ ID NO: 12280 - DNA, 487 bp, Oryza sativa
  unsure (1)..(487): unsure at all n locations
agatcagctgtctgaaggcccgatcaaatcatatatcgatcggcttgtatctcgtaagattgatctcatggcacagcttcaagaatgcaacgctgagttggatatggagcacaaaaagctagccgatctcccgcaagatattgaagaacagaaggcaaagctaanatcggctatcaagaatgtcgctgatatgaccaagtccttgaaagttatccctggaactgacactcaagatgcccaagccatagaagatgtagaacatattatgcagaatgctatatcggctatcaagcaatacttatcccaataacttttgtgtgatagaacttagatatttttgtaatcggctaagacattctagtactttattatcttgacaaccttgtcgccaattaatatgacttcaaaattcgctcaacaaatgtgagcattttaatatatatgtgcccctctaatttacaatgtcaagagcattgataaattataa

SEQ ID NO: 12281 - DNA, 310 bp, Oryza sativa
ccgcaactattctcatacaatctgaaaccctaacaaaagaccaaagagagatcctatttagactaattagtagtgccattaaatagatctcaattttacggaattactggaagttgaacggagtcaatcggatgagcggttgagaagatatggattttctaagggttaaagaagttctgatcaaaggagaaaggatttaataatctattaaaccctttttggaaagaaaatggacgagggacagaaatcagacttttctcactggcttggcgcggaccgagaggattatcgcggctcggacaaacttatt

SEQ ID NO: 12282 - DNA, 414 bp, Oryza sativa
  unsure (1)..(414): unsure at all n locations
catagatactcagcttgccgactaccgatcgaggtggttggagttgatttgtganaactgatatggcctatatttatgggaggattngatccttctatgtggcatgaggtaatcctgggtcggcttaagaaaggctttgtcacgaacctctgacaccggccattgtctggagtaagttcgtgtcttgtgggtaaagagtacccctctgcagaggttaactaactgttcgaacagccatgcccacggtcatgggcggatgtgaggtggttcccgctgcgtacatttagttgcctgtgctatgtgaaaagatagtgtggattgggaatcgtctccagaatcagcctatgtggcagatggatgacctgagtggtcataaacgaatctgtgtgattcaggatgtctacgggcatcata

SEQ ID NO: 12283 - DNA, 415 bp, Oryza sativa
  unsure (1)..(415): unsure at all n locations
gagacgacacaacaacatacacatattatcattgccgagcttgtcatccaagcgccacagcagcttcgacttcattgcgatgctactccaacgccacaatgaacaaataaaaatgatacccacgaaggacatcagcctaaactactaaagaaccaatcctactcacaactagcatcaataatccaataaagagattgcattgtgtcatcattgccaagcttcgtcgcacccctacagcgaagcagctccgactctactcaacaataaccagataagagtgatgaacacccatcgtagagcaaggaacgaaaccaaggcagtgaaggcctcgtcaaaacaccctangcttgtagagcttcggagacattgcaggaatccaccaatgacccattgcaagcaaagggttcttggtgct

SEQ ID NO: 12284 - DNA, 373 bp, Oryza sativa
  unsure (1)..(373): unsure at all n locations
nnagctttcactaatcccggagcatatcccttgttgtcttccgagatatggggggtcatgagaaagtaccatgccatatactccggaataatagcccaacagcaatatgtataccgaaggtccctcaacttgtcatcgagttacaaaatcatccccaaaccgcaaaactcagatatatgacaaccctcaacttacaaaaccggtcattctcttcattctaggtcctttaggtttgaaaccgatttcaaccgacgtggcggctgagtcagcgtgggccccacatgttagtgtggccacaacatctctctttttcacctcttgtgtgccttcatcatcactctaccttctctgctctgcaaagcccgcaatgctt

SEQ ID NO: 12285 - DNA, 457 bp, Oryza sativa
  unsure (1)..(457): unsure at all n locations
ctgtctgaaggcccgatcaaatcaaatatcgatcggcttgaagctcgtatgattgatctcatggcacagcttcaagaatgcaacgctgagttggatatggagcacaaaaagctagccgatctcccgcaagatattgaagaacagaaggcaaagctaaaatcggctatcaagaatgtcgctgatatgaccaagtccttgaaagttatccctggaactgacactcaagatgcccaagccatagaagatgtagaacatattaggcagaaggctatatcggctatcaagcaatacttatcccaataactnttgtgtaatagaacttagaaattnttgtaatcggctaagacattctagtactttattatcttgacaaccttgtcgccaattaatatgacttcaaaattcgctcacaanatgtgagcattgtaatatatatgtgcccctctatatttacaat

SEQ ID NO: 12286 - DNA, 442 bp, Oryza sativa
  unsure (1)..(442): unsure at all n locations
ctttctacactatgttacccgagtaatctctttgacccatgtaaaccatcttgcacgaattctttatccacatcagaaatggttatacacttcttgagcatggtattnttatttacttctaattgtttaccaatgtacgtgcagtatacacgcataagaattattacaggtggtacatagccaccgacatcataaaagtacatagacatatggccacattgctggtagctgataaactatggtctatatgggaatgggagtaacaaagaaacattcaacaattctatgaagatatttataggatgtgtatgcatcgctcctcttgttgtaaagaaggcacagaatagctaattcataactcgtgcacccaggagtactgagatgctacaccaattatttaggttgtcattatctttttattaatcattctgctatgcttctc

SEQ ID NO: 12287 - DNA, 382 bp, Oryza sativa
aaactcaagcctaactaggggggacactaatcaccgggagactggcgaccgaccaaaccgttgtcttgctatacgaaaccattactgtgatcagaggagtacaactgtacccacaagacacaccctcacaacacggtcccgtgcgccgacatgccaccaccacataccggaaagaggccgtgacatgacccttcgcataaccctctctaaccgatcgcaccacaccttaaggtcagccccatgcccagcaggcaacgggcagcctcctttcgtgccgcggtgaatccggaaaccgatcaaccggacacctcggccgacccaactccatcacgcccaccctcgcctgcgtaccacggctagagaaaagctacactacaagccc

SEQ ID NO: 12288 - DNA, 330 bp, Oryza sativa
tataacacatatgatgtaccacaaatcttaacttaaccagagctggcgtatatcaaatagagagcaccagatccctggtcaaagctaatgaataacaagctttccctaaagtcccacaatttcacacactaaagcagcagaggacgcaaagcaggaagaggtgaacatacctgcccattctgaatgagcgaaactaggagggatttcttgaagcctcaacagcaatagcaatcaaagatgacattgggacagaacagcctgaaaaaagcaaacattgaaacactgaaccataacatcaacacaaaataacatgtgaagctcacattgtga

SEQ ID NO: 12289 - DNA, 434 bp, Oryza sativa
  unsure (1)..(434): unsure at all n locations
aagctttttctgttggagacgtatcctatattatgtttagcaacaagtcttgttatatttttacattacagcggtaacacaagaaaagtatatggtggagaatttactttactttggagagaagtctttgctccaaactatcaaacgatttaatgaggaaagtacctgcnggatatacaagtacattagactagcgacgcacccatgccttgacgacagccaccagacaaatatagttacatactatatgatctagagtttcaatgtatttatacacattgacccacanactaagtatacacatatacaaagaatggtagttcttttacaaaacacattgcaaacatcctcagccatgtacacatactaatatctagcagggtttacaaaaccgcgcggttatcgcagttaccatgcacagtaacattttcagt

SEQ ID NO: 12290 - DNA, 134 bp, Oryza sativa
  unsure (1)..(134): unsure at all n locations
cacgagggggaagagtttggcnanggcgagacggaaagaagccaagcccacaaaggaacacggagccccaccagaccgggaagagcgaccaacgcggggaaaaccgaacacaaaaagacaacgggaggccaaaa

SEQ ID NO: 12291 - DNA, 358 bp, Oryza sativa
  unsure (1)..(358): unsure at all n locations
actcagctacttgtgctgtttatagcgcctctatgatcttgtgcgaataagcggtgtctcttttngatatgcctagcgtcagacttcacatttaatgagtgctcaatcacctctctatgaatacacaatatatcatatagtgctcaagcaaatatatctttactatcttaacgaaagacgatgagtgtgttttcctatgtaccatttagctcggcgccaatcattgangtcttggaaggattggcttgaacaagcgggaccttctttggctcggactactttctcttgacttcaatatcctcatggcaggcaattcaccttcctgtgatgntcacgcaacgagtcagaccttgtgctg

SEQ ID NO: 12292 - DNA, 462 bp, Oryza sativa
  unsure (1)..(462): unsure at all n locations
gcttctctgaccaaagctgtttccagcaagaaataatcacagttttgttgctaccatgacaaccaactttgacagccacaatgtggcactgaatttgtaaggaatcattgataatggtcctatgtagcattatatgaattgtgactntactatcatacttcaaatcacattgatagccaatagacaagccactgcttattgtagccatgcggaaaaacaaggggcatgaatgcatgaaggtcccaactcgaaatgaaggataataaacaactcaccattgaggccagacaggctcctcaacatgagctaatgagcagcacttccatcttcaaattagcagagattgcaatccaagcttgtaaaagcagattaccaattaatcacagcaccaacaaaattacagaatacaaagactataanaaggatggatactntcggctgtatctcaacatgagctaatga

SEQ ID NO: 12293 - DNA, 444 bp, Oryza sativa
  unsure (1)..(444): unsure at all n locations
gctggaagtgtgtgtgtgtgaagtgttttagtgatgtccttttatanggcagttatgacggttgtgagaaggggaaatgtccgaattgtcccgcaaccattattgggagagcatctggagcgtccacgccataccctaggatcaacggtgatcggtgcggtttggccgaacctgggctgggccctcctagcctagccttcggtcggtggactccctagactctcctctgtctatatctcggagttttgggttgatttactgatgttttgatgaagttcacaacccttccttgtatggatacataattctcactatagtctagatttcctcccaacatcagggtttatcatctgcatacaaatatacaccaacacttgtggaatatgtgagattaaacacctatcactatgtttgattgtttattatctaaactttatgcagatg

SEQ ID NO: 12294 - DNA, 515 bp, Oryza sativa
  unsure (1)..(515): unsure at all n locations
gcgacctatgatactcagcttttatcgagctcttacaagttcttaccaatgcagactagaatatggtgtccacaccgactcaaccaaacactcgatggagttggatgtatcgacactttggcacacatggtcacaatctgtatagctgcaggcaaatctgtggagctctgggtaggcttaaatatgtaacaagtatggcaaatggtttaatcagagaattgcaaagtgaataatcgttcaaagtcaagtatcgtgctggtcctangctataacgaactanagacgcgagcctagaaacaaaccataccaccagataacactagaataagctcaagcatcacttnttntttgagaactactcaagcatcactttgatataagagaacaaaatcaaagataagagctctnttnttccttgtttttcttcttccttcctctctcttttttcctttcgtttcttttctttgttttgttggccttttntttctttntttcaccttctgcctttttccttt

SEQ ID NO: 12295 - DNA, 458 bp, Oryza sativa
  unsure (1)..(458): unsure at all n locations
agcttgtcaagtacatcaaggagatactattttatcgtactgagaacaatcctatgctctgcataactaacatgcacatagccaaacactcacacacactntaaagtatcaacttggcataaatattgataacaatttaagatctcgtttggatatgtaaatattagagaccatacctcttaattggtatatccaccattaaccattccaaagagattggccctaattctggttggcggttcctaattaatgttgagtaatgattatgttgcattccttttaggtacggatgaaaatgattcagaatgtttctggtttccggacatgtgtctggaaacagaaagaggtggttgaaatgttttctataatttcagaaacggagacaaattctgattgtttatctcgtaacagaaacaatacgtaagactactatccgctgaatctggaacatcggaact

SEQ ID NO: 12296 - DNA, 456 bp, Oryza sativa
  unsure (1)..(456): unsure at all n locations
tcccagaagacatgatatgcgctgtgtgatattgttggaagaaaccatccttttatgaccagaanagtgtaccanatcagtatgctgccccagatgacgaaatgctgtattcaagtgaagtaactgatgtatagtgctacttggcagttgacagtccaaactacgcaagtatacatagtcactccaaggatgtcaaatccagcaacgtggccatcctgtcggacagcttgaatgaggacagcatggaggtgctcaaagtatattattattgaacagcaaactccgttcagcatccaactgagtatacgagaccagctgaagaataaattattcacgccatcttgatgtaatgaagggacctgaaatatgccaaggactcagcacacataccataccagctctgaagtaaggccaggtgtacattatgactgcacaagcctgcgaggagattatgta

SEQ ID NO: 12297 - DNA, 375 bp, Oryza sativa
  unsure (1)..(375): unsure at all n locations
agcttcaataaaacaataaaatatgaaggtgtatatcattatatcgnagcaagaaatgtctaatgtcaaagtacatatgcccaacctgaagaagctattgtacaccctacccaacttaatctaatctgtagaactgtagatcgattccaaatctaattaaaaaaagcatacccattccattcccatgcatcaactaattaaagattgctagaaggagagaatatatgcaagaagttgggcgatttgggatcgatgccgccaccaataaaaaaaatatatattcgaagcatcagagaagtgattaaaacagcaagtgaacacacaagcaaacgatgtataaaatggcatggaggagacgaggatcagtgctatacc

SEQ ID NO: 12298 - DNA, 491 bp, Oryza sativa
  unsure (1)..(491): unsure at all n locations
ctttgtctgggttngtgaaatgcagaatttgattcctcaaaatttagactttatattctacattcctgtgatcaactgtgaccacatcttttaccactattatggagcataagaaaattgtgcttgtataagttgcacatagtatttttttttaaaatgacctgatgacttctggcatctggagtacatatggacgatgaattgatggcgatgccctataaactatggcatgtgatgtatcaccatcagtagctctgcagtctgacaaatgtgatgtacaattgtacgaagtacacagctatgcctgcatcggttgagaacagatacaantaattcgtgactcatagcatctccattcccatcttttntttcccaactgtatccgatcacattgtctcaaccaactaanatacagtacagaagcaccgtactgtacgtgcataccaacanaacaaggagataagttgcaggtactacatcacatgaatcaa

SEQ ID NO: 12299 - DNA, 426 bp, Oryza sativa
cattcaagtcatccaagaatgcacaattcatggatggcaaacataatggtgagaatattttttccaccttcgtttcttttctccactttgaatagcacttctgatagtatctgttcttttgtaggtcaatgagtgaaacataatttctgtgaataagcgtgagtcatacaataaaagcaaagtatgaaacttatacaatcatgctagtgcaagaataattcggtgcaagagggctggggtcctaaaatgttctcagttgtccttttgtgcactctattacttctatctgatttgtggtgaaataacatctcatcggcatgatgtagatcgatggatgtaccacggaagattactctctctaataagtaatagaatggtagaccacattttcatatacgctcgtagtataatgtgcgctgggatgtg

SEQ ID NO: 12300 - DNA, 454 bp, Oryza sativa
  unsure (1)..(454): unsure at all n locations
actaagcttcaccccacaattagtctactaaatatccgggctcttctatgtcatggtaagagatcaacctattgttgagcacatcttccatatcaagagaaatgattctatcttgttgcttggctttcttcctcatcatcatgtacatgcatgtggctataactccgacaacaataataacactggggagcaagaattttagtatttgccttttattactattattggtgctcttacatggcataaaccncaaacgtggaacaccaccacaaagggcggngttgcccatcaaagaatgcaaggtgatgtttgcaaagatgccaccttctggtatcggaccatgtangttattgaatgaaaggttcaagctatagagatcactaaaaattgctaaatattgtggaattgtccccgacagatcattgtatgaaacatccagtgatttcaagttgat

SEQ ID NO: 12301 - DNA, 338 bp, Oryza sativa
agctcgcaaataccctcccttaattatatattgctcataatattcctcccaataccaaaaatcacatccaataccatcccgctacacacaattgaacacaatgaaacctaattggcagagtaaacaaaaacatattgaatcaatctggactgacctgtggacttgggcaggtgtaaaagatgtgtccgtagatctcggacgtctttgccttacgccaaacgaacgtcttcaactcgcattgctggcattgaatcaaaaggagcgcaagcttccccatccgccgagacgacaccgatgcagtatatcccccatccatggcggcaacaaaaggacctact

SEQ ID NO: 12302 - DNA, 451 bp, Oryza sativa
  unsure (1)..(451): unsure at all n locations
gcgattaccacatcaaacacagattctcatatcaaattgttccccaaaactaggcaaataatattattgctacaagcttggaaattgaaaacctgtgggtagtggcgattaccacatcatacacagattctcaaatcaaattgttccccaaaactatgcaaataatattattgctacaagcttggaatctgaaaacctgtgggtagtggcgattcccacatcanacacagtttctcatatcaaattgttcctatgtgtgtgaatttcacataaatacaaatacatgattacaactatcaagtgatatactntcaagaacccaatttacagaactataaacactattattatattcttatatacacataaacaaactaccagcccagtcataaccaacatctccatttccattgattatgaaagcatttcgagtctttgacaagcttcttcc

SEQ ID NO: 12303 - DNA, 473 bp, Oryza sativa
catgcaagcttgcatatgaaccacatcgcaatcaacttaatctgcatatgagccaatggaaaacgaaaccctacaaacctgtgttacctttgctcttccggaatcgtttaaccactaaatatggtaagggtgtggatgtgtacgtgtagtcaagccaagcttcttgacaaaatcataactcaccaagattgtgcagctacctccatcaatgatcacacgtgcacgacggttgttgatgacgaataaaatctgaaacaaattatggcgttgcaacctgtcatgctgctgtacctgcgtgctgagcacccgctgcacaatgatggttctgtagtccagtgtgtcatcacgaccaaagaattcgccatcctcatactcaacttcttcttcctcctcttcctcttccatgtcagaggtggagatgtaccatcttctgtacaacataagcccgttgataaggcaatcttctgcacatg

SEQ ID NO: 12304 - DNA, 492 bp, Oryza sativa
cgtctcgagtgaggatgaaggaaccagactttttattttatgagttgctctatgtcgcatatctcgaagacagaagtgcaaggtatatgtactctctctcacattaaatattctttggcacggcggcttacccttacccctgtatcccatgagacactgcttattcttgccttgagcgattgaaagatagaacagcaattatagaaccaatcacccaatctttattcaactcttattccggaagttttcaaatgattttgaaaaagaaagccaagcttctcaattgatttactcagtctctcgaagtgtatcacaatggagtactcaacaatttgcctttttgattcctactctaaggctttaatattgagagctcaatacggatcaaacatggcatacttgcattcacatttattactaagtctaaaacttagactaaagcatataactaaacatactcatgatcaagatccgtcatgtgtgtgtgtatat

SEQ ID NO: 12305 - DNA, 377 bp, Oryza sativa
  unsure (1)..(377): unsure at all n locations
gcttcactttttccgagcttcaactttttttcggaactaaacacagccgcttgaaaagtcgatgtactgcaggacgtacattcttcacagagaatcgatggacacggtctagacataatctcagcagcaaattaagcaacgtcagccataacaaggcctgtttgggtaattcattgccgtattcaaccatataccanaaatagtaatgcaaatggaagtaaacatatgtttcgtttgttgcaatttgcaaaagaattggcattgccaaaaacgtcggcaagaataccaagacacatacacttgattgctcaaaaaaaaaacacatactcttgcctttgactagataatttgcaaaatttgacagagccaatctcgtc

SEQ ID NO: 12306 - DNA, 516 bp, Oryza sativa
  unsure (1)..(516): unsure at all n locations
gctaccgattgaataaggataggcaagaaataagatctcatganacaattcatccttgttgctntgctgaacatactttccagccagttaggataatataaagattaatctacttcaaagaagtataaataataacagcgagttgtatatctgtagacaaaaggtgactcgtcaactttttccttgattagtgatagcttgtcgatcttgcataaacatattgcagcctgcaaggaatgtngaagttggtggcaacttgtatgatatcacttcagagagacaagcagccatgcaccggatggccttggaaccgctctagatgttgacttagcatttattggataaaggcacactgttcgagggcaaaatcttccactctcccgtatatnggattgcaaggacttctgcagtgttggaaactgagaactncatcctacctgtgcanaatagtacatactaaagaacaagtataccacgccaaatctaagaatcaactaacatatgccaagcatcatt

SEQ ID NO: 12307 - DNA, 399 bp, Oryza sativa
  unsure (1)..(399): unsure at all n locations
catgcaagctntcacagnctaacaactcaacaatacttattatgtagtagacatattatgaagcaacaaggctgtatgacttccaaaacataaacagcgatgcatgaaatcccacctaatatcgtgcagctcttaactgcatgaaaaactgtgcgatcttacatatgtcacaggaaatgaataagaatagctatcaattacaattacacttacaacagattttgcgaatctggatcgccaaaggcacatattgcacttatttcagagtaatgtggaagaagaatcgcatggagtgacaatattttctattttcaaaccaacatgcagtgaatggctggtcccaaaacacagagaacctcgcagcttaagtaaagcttcagtccatgaggctatacagct

SEQ ID NO: 12308 - DNA, 226 bp, Oryza sativa
cccaaaccacggcaggttcccaacaacagcccggaacaaagccacgcaaccgaaacaggaaaggaagcaagcgggggaatgggcggaccgaaagccggaaaaccggcgagccgaacggccggggcagcgcgagaacggcccgacagagaagaggctaaccggggcgcggagcgagcagaccaccgcagacgacacaccggggacaccggggcgagagacaccccgc

SEQ ID NO: 12309 - DNA, 474 bp, Oryza sativa
agcttcgtgcagaacatgctatgtggcggtgcatgtctatctggcaagctgtgctggagctatggctgctcttttctcgggccacttctctatgtggatctcccaccctctttctcgtgtgcagctccatggtgtggtgcggcagtggaatgtgaccggtgcgatggacggacatcttcgacagcttggtacctggtagctagaaaaatatagcatatgtgcgtcagtggctgtgttggacaagtggtggcttttggtgtgcaagtctttgggtgtgcaggtggcattgcgtggctttcatcgtggacgcggtgggcaaaagccttgcacaccttaccatcgctaacaacggcgacgcccttaggtgtcgtacaccttcttgaaggcgttgctatgtagcaaatgttatcctcagcctcaatggatctctctgggtgaaaatctatatttgcttggatcaggcaatgtcaccct

SEQ ID NO: 12310 - DNA, 471 bp, Oryza sativa
  unsure (1)..(471): unsure at all n locations
ctcaagctntntgtttaatatgcatgttcgttgtttgtggatgaataaaatatgcattgtcttctttattaacatcagaacatgcatgtgtgaaatactatcaaccaatttccttattatctcaataacttaatcatacatatctcctcttaacattttttaaccttctcacgatgtattgccggcattttataacaccacaccaccacggttgaagccctaatgcccaataatattacacatacgtatgctggcgttcaacaggattatagttagatcagatatatgtcgttcgtttcttctctagagcatgtgtacgggacacatcacacgggtgagtgtgggggcgtcatgtataggggtgtgtgatatgtcgttacaatgtcacaagtctctaactacatcacaaaaagctaattctcattatcatgcacagagcttagctttgtctagtcaggtgggggattatcc

SEQ ID NO: 12311 - DNA, 474 bp, Oryza sativa
gcttgaataataaataaacaacaaagtatatgttgtgttcatatgttgtataattgctacccttgtacatttaaccacattaatagtcccggaacatccataaaagaagctagaaaatatactccatgcagcatgtatggaaataagacaactctatcaacagctggttcagcaatacgaggccttcgagaaatcttaaacattctagtctatcaacagctggttcagcaatacaaagccgtagagaaatctgaacattcaaaatcagttgttacgactatgcgggaggggacaattgttgtttataagacacaacaaacgaccagggttgcacttcgggaaacaagcatccagacaatccctaaacatcagtaatccacgatgcagcctacacttaatatcagctccaaagtaatcagcatcgatgcattgtagtaattagatctgacgaaaactgcagccaacgatagcatc

SEQ ID NO: 12312 - DNA, 472 bp, Oryza sativa
  unsure (1)..(472): unsure at all n locations
tcaagtgatagcccaacgagatacaccaagtgctcaagtcatcctattctttattaatctctccaatcctnaccaccaccctcaaattcactctctcactcaataagtgcacaagatttgggtggaggaagcaaacttacattgtgagaggctagaacaagctatggaacacaagaactaaagtggaatggctaaagaatgagctgcggtcgagttggctaaatataacggctatgtgacggcatctaaccgttactcacatatttgaactggagggttgccaggaggttccgggcctgtgtgccaggaactatcgggtaacacttaagaaaattttcaaccttacctcatcgccaggaagttctggacagaacctccgtgtgggactctctgtcccaagtagagccattttcaataacagctcctacatatatttcaacactgtggcactactacgagcactcgtgttatc

SEQ ID NO: 12313 - DNA, 420 bp, Oryza sativa
  unsure (1)..(420): unsure at all n locations
agcttgctgaggtctgctgtctgatcgaatctgtttattctanaaatagatactcttgcctatgtcagtgaatgttctgacacgctgttgaatttaccacgttacttcaactgtcacatacaatctcaacaaaataattgatattaattattaccctgttgaaaccgcanaaagatcaaatatgcggcacaggccaattggcattggtgttcaagggttggcagatactttcatattacttggcatgccatttgattcaccagaggtaactcttcctagttcagtaatatagtagtactagttagtagtccttcctacacttaactgatgtaaaaaatgtgatcccctcttttcaggctcagcaattgaataaagatatcttccaaactatatactttcattctctgaaagctttcgctg

SEQ ID NO: 12314 - DNA, 327 bp, Oryza sativa
  unsure (1)..(327): unsure at all n locations
tatcagcagtagcagagcanaaggatcgctgtgcctgcgaaaaaatcctcatttttntgcatggtcacaaattcttacactgctcttttgctcgaatacattatattgcagatgaattcaatgatcgttctaatccacgaattatcaaaatatcaagtctttctgctactaaccatgataacacaccacctttttcaatggaggaggtatgcgcggactccctcgccatcatcgtcgatgtcgacactgatgacgagtgtcgcgccgctcaccatctcggacgcctcgtcgtcgtccatgctcgccacctctcgtcagcatctgaac

SEQ ID NO: 12315 - DNA, 405 bp, Oryza sativa
  unsure (1)..(405): unsure at all n locations
gatcttaagtcacctgcggcatgcaagcttggagatcaagattaatattactattttttttgnttgtgtgccgtatgactgatgagatgctctgcttcttggaggaaaaaaaattcgttacatgcccaaaataaattaagaaaatatntccttttctttgctcgagggtttttctttgtcgctgcagtagtagatatatattattangagaggtgttgttgagagcatgtgatccaagagtatctgattagatgattcatgcacgtgatgcctgacagcttcatctgttagacaattggattgggagttgattgttcctctgccctgtttatactctggcttttatttgctcatctggcttcttggttcagttattaagcctgagtatatcatctgaacctatag

SEQ ID NO: 12316 - DNA, 379 bp, Oryza sativa
  unsure (1)..(379): unsure at all n locations
caaacaaccataaacctaggaggagaccaaataaagatcctatttacgcccatcaagagagccattagatacatcacaacagaatggagatattggaagtggaacggaagcaatcggacgaacggatcaagggatatgaactttggaagttcaaacgaatatttctgacacaggagatgatgcgtctggaatcttctggatacnggacatggtttaaggaataatataaataatactctcaagaatactattgacatacactgacatgaccgctcgacgcgacgaaatatttggaatctccggattaagacattctctagaacatctttgacgtcctgacacagggagccaccacacggcggggaggaaagacggacta

SEQ ID NO: 12317 - DNA, 440 bp, Oryza sativa
  unsure (1)..(440): unsure at all n locations
ccatagtgaggcaggacaggtgctggatgcctatacataaaccaccatatgttgacttgaaattagctacattgattccaaacgaaagttgtcctagccttggcatatatccagcttcaaacatcagacccgtatgcgtagattggaaagtgaaaggctccaactgttggaatccatggatgtcgctgatggcaatagatctttcattntggtctgggtctaaacatatgtacaaatttgtcaaactgcgtatacttccaaggacctgaagatcatcttgatctatgtccttaatatgaagagccaatcgccggatgctcacaagggagctcttgcatatgttaaccatggaaatctgtctcctctgagacaaaactcttaatgctatttataggtagttacaaagaagagacatcatcgtttgttctcaagtgaacatg

SEQ ID NO: 12318 - DNA, 443 bp, Oryza sativa
  unsure (1)..(443): unsure at all n locations
ctttgcagctctannaactgctatgtgtactacacctgtccttactctccctgacttttccaaaccttttgttctggaaatcgatgcttgtgctactggcattggagctgtgctatctcaagaagggcattctgtggcttttacaggaaagcattgggcattgctaatcagaaattatcaacttatgagaaggaatttttggctattataatggttgtggataagtaaagatcttatttactcactagtccttttgtattaaaactgatcataaagccctctatcattgggatgatcagagtttagatactgacagcacgccgaactagtaatggtggcgactcgcagcacagaattgcagaagaaggccatgactaaactgattggtctgcagtacatacttcagtataagaaggcggtggataataagtctgctgatgctt

SEQ ID NO: 12319 - DNA, 460 bp, Oryza sativa
agcttcatggacaggtgtttattggcactgtcttgtcaatgaattgaattcagtaaaacagactatattctcaagatatatctgtttaccgcaagagaagttttccatgatgtaagcagaataatgcagaacattcaaaaactattgttcaccaaactatgttcacctgaataccttatgatcctctggatactttattttagagaactatcaaactattgttcaccaagcaacatgcaaaaactaacacagattgattagtaatataagtctatcattcaaccttgtggtggatcttggtgattgaggaggtgtttccatcttgacatggccaaggcctgaaatagaagcatataaatatgtctaatgaaccatttgtgtatactattattgaaggcaaaggcaatggactcaatgataatgacttcatgacagccacacgtgcaaccaattcaatagc

SEQ ID NO: 12320 - DNA, 426 bp, Oryza sativa
  unsure (1)..(426): unsure at all n locations
tgggggatcgaatcanatcatgtttctttgtaaggtcggaagctttgattatttatggtttgctgcgatttgtagggtagccgacatgtttctttaacaaagggcctgttaattatgcttaaccaaatctgaatcttacttctgcttatttagtaccataaaaaatatactgaagctctgcatgtgcagatgtgctgatcactgatgaaaatatctgatcataaagtcacacatggccggccggcacgccggcttatgcgatttctgttgttcaaatcttgtttagnttatattttctgtgggttggttgatcgatccgtagctgattaacctgagaaaacatacaagtagcgtgtcatgaactcatgattccattgtcatgtgccccgcgacatatcttgtgatagatcatgtgtgttcagttat

SEQ ID NO: 12321 - DNA, 465 bp, Oryza sativa
  unsure (1)..(465): unsure at all n locations
agctngccaccgccaccataagttcatgtgtgtttatttggctntgctgattaatgaacattntaatgtgtgttatgagctttcctttgattagccttatttggataaggaaatgaatatgacaatagatgagtcttaaacttcacatatctttaaatggtgtctcatgttgatacaaaatacattgtgaactcgctcttttaatcttcattgcttatgtgcatcaggggaaaaaaatacaaattaggaccctaaattttaaaatcatatgtctaatatagataatgaaagcacatctaggcccccattgggtttttggataattgatgacaaaacagtaaaggcgactaatgtgtgtatgaagtgtttgaataggtgtaagtntcataatcaatngcattcggaacccatataagaggcatagaaacaacatcgtgaagacttagatgttttaatctttatatc

SEQ ID NO: 12322 - DNA, 501 bp, Oryza sativa
  unsure (1)..(501): unsure at all n locations
ttaaccaaccttctatataaaatgattgtatgagggaacgtgtcactgctagtggaggtgaagttggaaggcttattgttgttggtggagcagaagtgtgtttcactgcctttctgttacaacttacaacgatatgggtgcaaacatagcttgctatgctatgtaagatagctccattggatacatgtgctctagtttggaaggagtacaaaacaatgcttacaagctgtatcacccttctatcagaatggtccactgagatgctggccacgaggtttatgtctatcaagatccattggagatatcgatgttggagaatatatagttcctgttccctatgtcaagcaagtgaaggtaaaactttgacacttngcaaatagacgcctggaattccttctaagcttccgtttggaataatatatttttgacagcccaacaacatagagacaagaacacatgttcctgctcgatgcctatgttattgtgggagatagctactgc

SEQ ID NO: 12323 - DNA, 365 bp, Oryza sativa
aagcctatcaataaataggaacacattccccaagccccaaaaaaaataatattgaatcaaattggaactaataaccaatcgcaacatggaaggatcgaaaatactcatataaacaacaaatctcgaatatccctcatcgggagacagataatcatcacgtataataagaaccaggagtcctacagtagtaattagcattaacataatagaagaaagcggggcaattaaggatccaaaatctaaagaaaaagcattatggacgggccaagaccatagatattgatagatagaacttccatctatttgcggaatagacatgtgaactgataataccatagctatactcaaaagtaaaacactaggaa

SEQ ID NO: 12324 - DNA, 315 bp, Oryza sativa
  unsure (1)..(315): unsure at all n locations
ttttactacaccctgttgacgttgcattatataccgcaatggtactcttgctaccatcaggatagatatgccccttcctcgggtcccccacatatatgggatatttaagaaatgaacgtatttcttataacaggtccgggaaagattgggaagatatttactatatgtctaaccggaacagggccttcacaagaatatntttttactgggacgatactctgaaaagaagaattctaatttttctttaacttagaaaaaaccgtcggcggcgctatcgaatcctcggcaaaaagaacagaccacattcaacctcct

SEQ ID NO: 12325 - DNA, 450 bp, Oryza sativa
  unsure (1)..(450): unsure at all n locations
agtttcagcatgcaacactttgttctttcagtaacatcactcaagtattctatacaaaaagaaccattatcaattaatatagatataggatcgtcctatcactatcatttcctcctaaagcggcatatcttcttcagttcattctgaaagagaaataagaagtatcaaaagatttgatgatatttttgtgtgataatccagctgattcatgtggccatggatttctctgtggttttgtaagtgggtggcggcgcagagtgtgttctaccacttgtacaaccaagtgtcctacatgtcattggacgagatctcaccactgacattcagcatcggcaacaccatgaagcggatctccgtcattgttcgcctcatcatcatcttccacacgccggtccagcccatcaacgctctcggagccgccattgcgaatctcggaactntcatctactc

SEQ ID NO: 12326 - DNA, 459 bp, Oryza sativa
  unsure (1)..(459): unsure at all n locations
tgaactctggtgggtagagtcatgcacttcccactctaccaccacactactagtgctttcccacactactacaaanaccattnttcgtggcggcttatttgggctttcgcttgcggcatttggcgctgccacaaagcanaggccagtgaaaatgtagcatcttcgctgacggcgataaaccgctaaaggagataacttttcgctggcagctagctaaagacagccgctagagaaaatcatcttcactggcggctgccttatgtgggccgccagcaaaaatagccttcgatggcggctgccttatgtgctcctccagcacaaaatagtcttcgctggcggcttcattatgtgggccgccagtgaaaaattatttccattaaaaaaactaatccccanaatctctttttgccaaaaaaaagaaataaatcagatttcgcacatgacggatcanatcacatc

SEQ ID NO: 12327 - DNA, 437 bp, Oryza sativa
  unsure (1)..(437): unsure at all n locations
agctttggtataacagtctatgaaacaccatgtctgctcaagangatgcgagatgggtagctccacacttaccaataaacacctgacgataattgctttcatgcggaaagcgccttcattcagagaaacctgctctgatataacagaacggcaagcataatggctgacaaaaagccccgggctcacagaaggatcaagacatgttatataagagggaaacaatgtcatacgctctattgatatgacagtcaggtgaaattcaatacatccattccatatgaatattgcttggcaagcggttggcagaatgcctcacagcacgagtaagaaggaaagcttaccttatattcctatatattcaggcgaactccaaggaccatatatatgacattaacacgtctacatctttttcatttcatctacacatgacaaaaaca

SEQ ID NO: 12328 - DNA, 327 bp, Oryza sativa
  unsure (1)..(327): unsure at all n locations
ctcgccggcgaagtgccatcaaccaccacagtgtctggacactacttacatcttcttcgtcatgaatactccttcgntgacagtgcggactccgccatagaacgacgcccgcatccaccgacttctcctcccgtatcaacacacgggtatatttctaatctctaattatagataacgcgcggtgttggccgatcatagacggaaaggcgccccaacactcgtagaaatgagctgcaattaaggggagcaaacatcgattagagagagagagagagatagacgcgatgcatactagcatatgcgctccgcgcaaaatcaaaaactcac

SEQ ID NO: 12329 - DNA, 369 bp, Oryza sativa
  unsure (1)..(369): unsure at all n locations
atctagtcgcgcgtacgtgcaatggttgattgttgcctataatattngatcatgtgcatagtccatatatggaatgngggtaggcaatgcccctgggttcaaggatacaacgcctgtagtattccacgtcgatgatagagtggtcttgtaagccgcccaggacaccaacttgcattatatgtcagccgaatcaattcaacgtgctcttcctactcaaactacgggtgttgtttgtgtcttaaaaaagttaagattcgaagaaaggtagaagtttaaaaaaaaaggtaaaagttcatgtgtgtagaaaattctttgatgtgatataatatgatggaaagttggaaatggagaaactaacacatactccta

SEQ ID NO: 12330 - DNA, 410 bp, Oryza sativa
  unsure (1)..(410): unsure at all n locations
taaagttatttcccgtacataaacgcataggagacaaacacatttgtgatccttggaggagaccacacattcataaacacatgatcatatcacacacatnttggactgtgtccctcacgacacaagcnaagtaccaaaggaggagatcaattgcagcattgaggagaagcagcagaataaacaaacggtgctctagccggagatctggatggacttgacgtcgggcttcttgggctcttccttgggcacggtgacggtgagcacgccattctccatggacgccttgatctgctccggcttggttgtctcggagaggcggaacctgcggaggaacttgccgctgctgcgctccacgcggtgccacttgtccgacttcttctcctgctccctgctgcgctcgccgctgatct

SEQ ID NO: 12331 - DNA, 291 bp, Oryza sativa
cgagcgcacagaggaaaccgcgaattttgcggccatgaacgccaagaaaacaacgaacaaaaaaaaagacaaaccacgaaacggagacaggagagctataacgcagacaaattacgaaacccaggcaacggcgaagaagggaaacgcgggggacaagggaacaacgaggcacaaccccgggcgacccataccacaggaagcaagcgacacattcagaaaagaacaaaaagaactagcgcgaaaacggcaacacagcaagcaccgactgagacaacagacaagacccgcacc

SEQ ID NO: 12332 - DNA, 450 bp, Oryza sativa
  unsure (1)..(450): unsure at all n locations
tgcttaactntaacctatgtaattncttattcatattattcatgtgactagaagccatcaatgcgcatttggttcgacatgaacaattttgagtcaaacgagatcaatcggtttcaatgttcccaatatccccaatttgaaagaaccctaagcccccaaatcttaatcaaatccaaatctaattaagaaaattaagtntgagttctgtcatgggtatggataccacatacccaatagtaatcgattaatcttggtggggcccaccatatcttatacggaatcatacctcgtatatagaagaaattacggataagtaaggacaagtagagttctctatagaaactacaaggactactcggatcgtatcgatactcgtctctctagttctacttggacaaagggacatttataggtatanatacaagaccccctataaggagaggggacaga

SEQ ID NO: 12333 - DNA, 423 bp, Oryza sativa
  unsure (1)..(423): unsure at all n locations
ttcaactgattgagagcttgctcctcctcctccgtccacacaaatggtctatgtgcgttgatgagcttgaatangggcaacgccctctctcccagcgttgatatgaatcgacttatggcgaccatgcatctcgtgacgcactgcacatccctaagtttgctggggggacgcatcctctctatcgtgcgtatttactcgggattagcttctatgcctcatgaggagactataaaaccgaggagtttgcccgtcggcacaccgaacacacacttttcggggttcagattcatgcgcgttgacctaaagctgtcgaaagtctcagccaagtcctataataacatctcctggtggcgcgtctttaccaccaggtcatcgacatacgcctctacattgcgccctatttgattactcacagtaatgcga

SEQ ID NO: 12334 - DNA, 379 bp, Oryza sativa
  unsure (1)..(379): unsure at all n locations
tccactccacaagttctggcatggcaacagatctaactttcttcaggtgtaagaaactcctctgtgtaacaccaccaaaatctggtccgaactgacgaatgccagcaatattgatcaaagtaagttcctctagatatatgaattgcccgaaaggtggaagagtgccccaagagatgccctctagatggagagatctcaatcctttcacacaaatatcatcacataaccaactaggaccagtggaaccaccatgatttcttattccaaatgctctaagattagaaggtggctgaagaccttcaataatctcagatccactattctgctgctctgcaccccanactagttctagtgtctgtagagtccttttcaacatcaa

SEQ ID NO: 12335 - DNA, 511 bp, Oryza sativa
  unsure (1)..(511): unsure at all n locations
ttagcgacacatgatactcagcttggacagttacaagagctctgagattgcgatggttgtggaacgaatggttatatctcaagcagccttgngtgggtttggaaacgccttgtgatggtgtggatagggacctcttcgccgcctcaacaaagataactgtgggcgatgggaatacaacgcgcttctgggactccgcatggattaacggccaaagaccaaaagacctaatgccgttggtctatgagatctccaaaaataggaagaaatccctacggcaagggaaagaagacgactcctatgtgcatgacctgaccctcgatgcgggttcatctatcacaatcaaccttctcgatcagctagtccgcctgtgggaggcggtacggaatgtgcacttatacagcgaggagccggatcagattgttggaaatcacaagcagcggcactatacagcttccttgctaatcatgcccaatgtttgtgggcgccaacacaaacttcaacttcctaatct

SEQ ID NO: 12336 - DNA, 339 bp, Oryza sativa
tccgctcaaggagaactgagttacaagataattcaacaatcgatgagtattataaccttatggctgatgaaagggaagactctggtcagtctatatcaagagcccttgcaaaggttaccaaggataaagaacgagttgctcggcattacaacaagaaagtagtacttaaagattgctcggaaggtgatctcgtatggaagttgattttgcctaatgggactcgggatagcaaattcggcaagagatcgccgaactgaaaagaccggtccataacacaaagttgtattaaagcggctacatggtgcagggactgttgaggcgttatggaagaccactaat

SEQ ID NO: 12337 - DNA, 404 bp, Oryza sativa
  unsure (1)..(404): unsure at all n locations
tgccggttatcttatggacaagcgagtgatgtccataggcgggcctncttctcatgccaaactcacgaaaggggggggtctcacgacctcctcctatcacggggccattcctcgacacgctctagtatgttgtctgttctcttatgtaagctctacttttattagaatactctcctatatacatatatggtattgaaatactttccgagtatatgaatgcttactttacattatgttcatgttatactaaaataccgctacctatctgggagatgctatggtgcggtataatgcttgttatgcaataccccatgcatgacgatgatattggagtatatctgatgattagacgtggcgcagaataccggaatcattcttgggttattgccgcgataaacgtgggc

SEQ ID NO: 12338 - DNA, 221 bp, Oryza sativa
  unsure (1)..(221): unsure at all n locations
tagcgacactatgaaactcagcttttatatttatagtgctgagtagactgccacattagcaccatgttggtttataccggactacaaaccggtaagaggggagggggagtgggtccntcctcctccgtctggacgatgatccacaaactcaagagcgtgatttgatactgcttgagcaacatgaacgcgagcgggtcgctaaggaggtttatgaccggcga

SEQ ID NO: 12339 - DNA, 434 bp, Oryza sativa
  unsure (1)..(434): unsure at all n locations
agctntccccagccactgttcattaatggtctcctgacgtctacgaaggagtgtggttcgttcgacaaattcctacctctatatctatctctgaggtggttgggttctgcaaaactccatagatatgcagaagagaaatgctattcccactccgaccaatacagaacttttaccaaaagtttattgtgatctttctgttcaaataacaattaatgtgaagcacggtcaggaacaacgaatctctttatgataaacagatccattttgcaagctcgttattacgggtagttcctacaaagaatcggacttatgacgtttacaatgcttgaattatcgacgtagatgctacatagtgggttctcatccttcagagactacgagtgtaatatgagcatccgttgacaaaatgatcaccctatgatgatcatctcatg

SEQ ID NO: 12340 - DNA, 488 bp, Oryza sativa
  unsure (1)..(488): unsure at all n locations
tatttatttctcttcatttctatcacaataagatggactttacccaggatgataatggatcagttattaaatcttggatggaaatatcttttacctatttccctgggcaatctcttattaacaacttcttcccaacttgtttcactataaaataagataatacaataacagtaagaatattttcaacacaaaagtcctctcaaacaagagaaagaaacataccttcttcatagatatttcgaatatgttccctatggtaactgggttcatgagttatggtcaacanacaatacgcgcagcaaggtacattggtcaaaagttcataattaccttatcccacacaaatcgtttacctataacgattcactacccctatgagaaatcaattacatcggagcgtttccgggggcgaatccactctgaatatgataaatgtattgcttgtgaagtatgtgttcgcgtatgacctatagatctacctcttgtgg

SEQ ID NO: 12341 - DNA, 428 bp, Oryza sativa
  unsure (1)..(428): unsure at all n locations
tgagcggggtttgttagctcgatgcttcattctttgctgagctctggtgagatgctagtgtatgagatcattcatgtgagccctatcttgaaccaactgtggacatctggtacagtactttggccaagatctgtcaccccaaagtgatctgccttcctggcagataaaacctcatagggagttttgcccaaagcactatggaatgaagtgttgtaccagtattgagcttgggataaccactgagaccacttagtgggacaagagtgaactgcacaccttaagtaagtttctaggcattnggtcaatctttctgtctgcccattggtctgagggtggtaggacgaactcatatttagtttgacatcagccaatctaaacaattcttgccaaagtgcactggggaatactctatccctatcagagatgat

SEQ ID NO: 12342 - DNA, 501 bp, Oryza sativa
  unsure (1)..(501): unsure at all n locations
ggatagctactctagtatgtataactgcagaactactgcaattccagaaacagctgcatcacaatggaggctcacagtaacaacattatctccagtaagtacagttgcctgataacttagttactactccctctagtcataaatattngatggttatgacagtttcggtcaaatcttttaatctttgatattcgattttatattagaacaagtctatctataaaatcttataagttcacaagattatgatagtacctagtacttatcaaggcaattctacatatacanttatttacctttaaaagtaagcatctgagagattattgatggtcaaagttttaagtttgagttaaccttgtccgaacatcaaatatttatgaccggagggagtatttagtttaatttctatggtatctccaccttagattagatgtcacttatctctagtccaatttgttagagattatctcctaacaacaataagaatattgagagatggaa

SEQ ID NO: 12343 - DNA, 474 bp, Oryza sativa
  unsure (1)..(474): unsure at all n locations
ctgcagcttgcgtcttatcagtatcctgacagtctcttgtctgagaattctaaaggccacatattatccgaactgtgatctcattgatgctcgtttcccatcggatacctcacctacattgaaagctgttgaacatggccttgagttacttaagaaaggcttaatttggagaatcggagatggaatttggaaggaccagtggattcctagagaatccagctttggactatcacgccagagtgggagatgccgcctcaggtgggtttatcaactgatcaatcaggagacacacacctggaatacaaatctcatccatcatgtttgctcccagtatgatgccaatgaaaattttgaagattaaattgccgcaagtcacaacagatgatttgctatcttggcactatgagaagacaggattnttctcagtccacagtgcttaccgactagccttgacaatcatatgaatatatctga

SEQ ID NO: 12344 - DNA, 424 bp, Oryza sativa
  unsure (1)..(424): unsure at all n locations
tagcagacttcgtcgccgaatggaccaagtgccaagaagacacgcctgctgttaatatatagcattggactatgcantttgacgggtcaaagaggctttcangcactggagcgcgggttgttctaatttttccgactggagagaggttgagctacgtattgtggatacatttttctgcgtctcacaatgtggcgggatacgaggcacttcttcacgggctaaagattgcgatctccttatgaattcggcatctgatagttcgtggagcctctcagctggttggtaatcaagtcatgaaagagtggtcctgccttgatgataacatgactgcctatcggcaagaggtacgcaaaatataagataaattcgatggcctcgagctaacccacgttcttcgacataataatgaggcagccgacagact

SEQ ID NO: 12345 - DNA, 385 bp, Oryza sativa
  unsure (1)..(385): unsure at all n locations
cttcgtcgccgaatggaccaagtgccaagaagacacagcctgctgtttatatagagcattggactatgcattttgacgggtcaaagatgctttcangcactggagcgngggttgttctaattttcccgactggagagaggttgagctacgtattgtggatacatttttctgcgtctcacaatgtggcgggatacgaggcacttcttcacgggctaagggatgcgatcctcttaagaattctgcatctgatagttcgtggagactctcaattggttgttgatcaagtcatgaaagagtggtcctgccttgatgataacatgactgcctatcggcaggaggtacgcacaatagaagataaattcgatggtctcgagctaacccacgt

SEQ ID NO: 12346 - DNA, 398 bp, Oryza sativa
tgcatgcttgccgacatggtgcgtgcggcagcatgtgttttcgcatatcccacaatgtatgtctatcagcaattgcctccctttctctaaagatacgcagcgttgcagaatacctgaagggcttttcttgtacaactcagctttatgcataacgtaaagtttgctccgccttgaaatccgctcggcttcatctttgtcctgtgggagttcttgagaagtcaaaaatcgtatgaggggctctcgccaatcggcttcaaccaaagctacgtcatgagtgcccgcaatttgggtagtatccttgtgagggtacggcggcgtataaaggtgttcgacaatacatcagagggcgccacctcgcgcttggatccaaagttggcaagtctgtcggcggcttcatt

SEQ ID NO: 12347 - DNA, 163 bp, Oryza sativa
tgaccccacacatgatctatcaatacatcgtatggcatggtcaattccatacatcggcaagtttagttccaaactttgtattggaacttcttacatttttatcacaataaaaattttgtacacatatatactttgtacatttacgtcacatcgattcgatttc

SEQ ID NO: 12348 - DNA, 427 bp, Oryza sativa
  unsure (1)..(427): unsure at all n locations
ntggagtcttggggttgaactgtgacggatgaagtacaatattcatgttatcttgtggatgtccgcttgttatggaaagaagaaattttcgagcgaaggcacgagcatgatattgcttcaaaccttttgaaacaaaacatgaacagaatagctaacaatttgtcagcatagcaagccataatccagaaaccataatattatagaacgaatgggttgtctcttgagcttaaatgtaatataaaagtggcaagagctttgttcaagggcaataacttaacaatgaattgctaacaaaaaatacgactggtcaaaaatgatcagtgatgtccatgatcattngtattttgggttaanaactaataagatggaactaaaactgaacnattatcagttgacatatatagtgcatgcaaagatacagcatttg

SEQ ID NO: 12349 - DNA, 449 bp, Oryza sativa
agcttcactcctattctctatccaaacactattctctgtgatctttggcaccatcatctttggcctaggctctcaaatgatcactcctttccctttagtagattcggcttgctccggccgaatctacaccttcttatcaatgaaattaattgtgttcaccagaaaaagatcactatcaagcttcatcttggaaccatcggtgaatttcaatcgtccttcatctatggccgattgaacttgtcgtcgaaacacattgcaatcattagtagaatgagaatgagaatcatgccatttacaataagctcaacgtttcaattcctcttgagatggtatgacatggcctttaggtaatctaatttgctttcttgaaaagataataaaaatcttatcacatttggcacgtaaaacatacttaatctacttgccatctttcgagagcggcataatta

SEQ ID NO: 12350 - DNA, 498 bp, Oryza sativa
  unsure (1)..(498): unsure at all n locations
tctagtgtgggtgaggtggacattatatggatatatatatatatgttcctttttgattgctaattaataagaaaaactgtgctttgtgtaacaacccaagaaaaaaactgacacatcagatatataattgctccattcagatacggtagttgagtatttttcttttaggaaaactactcatcttttttctctaactataaatgtggaagaacttgtgacaacaacgcaacaacccctctgccataccttgcctgattgataacaccaatatatggaaggtataaattgaagattccacattgaccttccncatctgacaatgcagtattacagaatcaatttttctgaacgaacccctttaggttgcatgtggatcataattggtcccacctgcaaaactcaatctcccgtgtagagattaaagatcgcatgagaatcaaattntgcaagtgagccttctaagaggctngcatgcgaaaataagtttatcttcacatg

SEQ ID NO: 12351 - DNA, 400 bp, Oryza sativa
ttaagtcaccgcagctgcagctcctatttcaatgcatggagttggttctatgctacgcatacatatttcacttcaggtgcaaagtcacgacgttattcatgtttcattctttcagaagtttcacaaggttgtgtttacattattcaagtaccacgcgtagtcatgggagtgcaatgtggatctttattcatgatccttgagaagcgctgatcacgcttggtcggcttaccggaattgcttagaggatattcacacctgcccgggagggaactactactttttgcctcattcgtcttaaattgaaggaagtccaatgtttcatattggttgtcttattgcataaacctgtgtatgttttactacgtcaatattgcatctgactgagattctctactcactc

SEQ ID NO: 12352 - DNA, 425 bp, Oryza sativa
  unsure (1)..(425): unsure at all n locations
ctatctgggttggagatattcgtatgtagtactcatgggaatctggcttttataatatctctntgcaagaatctttgtatgcacaagatctacatggtgcttctggctgggtccggagtatatattgtggaaggaataaattacgatgactatgcagtatgtatggtggttggggaatggaatcatgcctttttgtggatgacgatggtttattatgtggaaaagattgcaatacgttattgatatttatgtggaaagcaaccatgctctcagcacgatctgctgagatcaaaatcttatctgagaataccttcgtattcttatctgttgccatagaatatgcaacttccatgggaagtntatcttgtccatcacgggatttcttctcgcgataatctagtaacgcttgctcatgatgacggata

SEQ ID NO: 12353 - DNA, 244 bp, Oryza sativa
  unsure (1)..(244): unsure at all n locations
gctgtggtggcgctccgatatgaaatggtcgcaaccaaacggtatccacggtgcataacgagagggtgatagcaacagtggcattgttgcatccgggcggtgactatcatcggactgtagtggagatgtgtctattgctgctatgacacggcgcggcagcataataaggctcacgaatggtgtctcanatatggaaaaaggtggaggaggtcctgacggggctttttaatgctactgtgggctt

SEQ ID NO: 12354 - DNA, 411 bp, Oryza sativa
tactacatgctgagctaatcgggagtatgctcacacgcgagaatactctcttaatctgctgacaaagatacgtatggaaacagactttagcgccatctggatagctgtcggttggcagagatatactgtggttgatgaacctggttctcgtctacttactttgccacttttgtgcactttgaaagaaatagaagatggactttccttttgctttttgcataaataatacacacttacgtggataggatcacgtacactgattgagttccacgactcctgtatactaatctccagatatgaatttttacgtttagaaaaataggtcttgggaagatacttgtggtgctccaatttgcacgaaagctaagacgaatgacgtccatagttctacacttacgctcatgcacaaat

SEQ ID NO: 12355 - DNA, 470 bp, Oryza sativa
gtcacctgcagcatgcaagcttcacatggagatggaacacccatcttttatgctgtatacagaatatggatatgctatgaacatgtagtctccctcttctctcacacacacacccatatacgtacacacataaatggagcttttctcatcacagcaatggctagcacttctacctgcgatcattccttgtatccatctgtgtagctatgtggatatcattctatggctaagaccaaagcggttgatgcataaactgaggagccaaagagtgaggggtcccaagccttcttttctctttggaaacataccagagatgaggagaatccagcatatggccaagtcaacacatgaacaataagcagggagtaccgacatgttttcatcagattatgtggagactctcttcccttacttcctccactggagcatggtttatggtacggtaagaaacttgtagtgcataatagctt

SEQ ID NO: 12356 - DNA, 361 bp, Oryza sativa
cattcaccatggtcgtgtttggctcggttaccaaaatattaaccatattctcttataaatatgtattatggtcaatccccccgaggatgtgttcacttttaccctcctagactatacacatccttaagtggtacacctcgactgagagacttgtaccctaatcaggtcggtgctgtatatgctgaagataacagtagtgcttacttaatatcggcactgaataatactctcctgggttcatatttcctagtgtgaaaatgtcacaggtgccagataactctccttgtctttcggcgatgcaaaatacggtattcctctcccctttaagtgcagaaccctgaaacccattggttgcttaggt

SEQ ID NO: 12357 - DNA, 231 bp, Oryza sativa
accagaaagtgtctgaactgaacggactaaaacgagctcactgacaaaggaatcttttgggcggaacaaacgaggaacaccccacgaatgataccaaagaccgacgtaaataagactaatcggaagaaaaacagaaaagctgggggcaagcaaagggaccgagacatgtgacaacagtcacacccaaccaaacaacctggccccgaggaataagcaaactctctaagaagg

SEQ ID NO: 12358 - DNA, 333 bp, Oryza sativa
  unsure (1)..(333): unsure at all n locations
taccagcaaaagaaactgagagccaaccttccaatgttaggagcaagtcataagtcctaacatattctatttgctaccaaatcatgaaacccaactttaaccttttcttttctttcccaaaatatgacactggaactcctacttggaaaaaaaaaaggtgcccattcaccaaaaatgcactcatgccaagtggcatattttccatgacaagagaaaggcatggacccatagaggcccttttctggcctaatatgtngaaacttctggcagaatcagaaaagttccatttcaagtggacataagaacatatctgaatatcctgaaatgacctcc

SEQ ID NO: 12359 - DNA, 440 bp, Oryza sativa
  unsure (1)..(440): unsure at all n locations
agcttcanaagatcgaccttagcaacatcattctccaagggagcataccttctgctnttggggatcttactgagcttngaacacttatactcactagcaacaggctttctggtgacataccacaatcattgggaagcaacctctcactaacttatgtcgatcttgagaggaatgctctcgcagggagaattccacaatcattggcaagcagtacatctttgcagtttcttattctcacgagcaatacccttagtggagaactcccataggctctcttaaacagttcatcgcttaattttcttgacctccaacagaataaactttgttggttctataccacctgttacggcaatatcgccgaaaatgtactatcttgagttagaatcaaccatctcacaggaacaataccttctcacttggaatacttctccctactatct

SEQ ID NO: 12360 - DNA, 458 bp, Oryza sativa
  unsure (1)..(458): unsure at all n locations
tcactccttggccctacaatgagccagatatggagaagacagtggcctactcttttgagagtactgacactgcacatgctcaccgggatgtggcatattaacattatgtcaatgagatggactgcttacagcctcaacatgtaagtacttccaatatcacttctagttagacatttactctcttaattgagatactaaccaacgacatctcttcaacttttgcagattgagtggttaccataccacacaaatgaggcttcaagcctgaccctgaactccatgtgcaatccaaactctgactatntcatgtaccagtgcccattgatatgtttctggcagttgagaccaccttccgaccgtgtcatgcgacgttcgggaagaacaaattggcggagaggcatctaactggattgatacccaagaaaatatcttattttgttgcttcattgtcatgtcaa

SEQ ID NO: 12361 - DNA, 291 bp, Oryza sativa
agcttggatgccaatgccaatctctttctttgttgtggtgttgggcgctcgtcattagcgctctaatgactgtgctaatcacattaattatgctaattaatgaataattaagctgagaagtcttgtaatatgagaagaaagttgccaatatttgaataacttaaacttgatagttctaacaaatgagtttaaagtttctctataattagggagaaagtattatacatttctgtggaagacatctaaatttgtggtacattttgcacattttagtgaaaagatttaataatt

SEQ ID NO: 12362 - DNA, 407 bp, Oryza sativa
  unsure (1)..(407): unsure at all n locations
ctcaagcntatatatgtccatacttaagagccttggtatactctgtgatatgccgtatgtatattaatgggtgccaacttaagttgcgattcatgtaccagactatgtttactgtattcatattagagggagggctaggttattaacacttctaagtcatgaatttgcgagaatattgatgactttgaactttcattacccgatgacaaagatatacatgagcactgaggatttagtacattgaatcttcatgtacctgaagccttgtggggaatacgtgatagaaggctctcgtggataactactaatagatgatgtatgctctgttgagagtctgtactagagtcaaaagatgcaaccaatggtcctctggtaatggcttcatgtaccgtacgttactaaaactc

SEQ ID NO: 12363 - DNA, 361 bp, Oryza sativa
cagcagcatgcaacactgatatggtgaacatatttttaaatctacgccatatcggatcattggcacaattgacggctttcgctggttgcacaattatagaaggaacattgtgtctatattgtgcaatgctatcatgataatgagtcatcctttatcaaccataaatcaagggagttgatgacaattgtattcttaatgcatgaaggaacttcataatgcctctgctctgtcagcgctctcattaggacgacagctaagtgcaaattattgcctcatattgtgcgctcgacaaacaaaagtagctgaacatcactatgttaatcctcgccttgtgcaaactcattgaggactcatttaactg

SEQ ID NO: 12364 - DNA, 395 bp, Oryza sativa
cgacacaaaaactaagctgcttacgcaaagaacctggagcccttcttgaaatacccttatatatctttgttgctgggggcttgctgagtcggacggacttccctgctattatatattttaagagagtgtgaagagaacccttgtggtacgctgcgtatcaacaagatgattggaggcgggttgctcttgtctcgttccccatggactgctgtggatgttaccgcgccctatattattttgcttccgctgtggtcctgatagatgtggcccacctggcttaatggagtattaactcttttagctgaatcattcctgattggtggattcacttgttgtgtgtccacttctgatcaggattggtctgataacacaatattatcgattcaaatcggggt

SEQ ID NO: 12365 - DNA, 273 bp, Oryza sativa
cggacttaagcaccgagcagcagctgaagattaaagaccaaattattatacagagtgggtgatatattgaatctaataaagatggctaagcagtcgaagaaaaaaccgatacatcagataggcgacacatgcacaaaaccaactagtttatcgggctcaatcgagaaagtactatccggggctgatacaagcgaagttgattgaacttactttctcgccggagatcgaaactgatactaaactagaatacaagaactcgtcgaatgctaaact

SEQ ID NO: 12366 - DNA, 508 bp, Oryza sativa
  unsure (1)..(508): unsure at all n locations
cttgtcaccagagaaaatggaagaatcaaccatcaacaaaataataactagtctctcgattntcccccaaccatgactaacagagaacatgggaaccctgtcctgtaatctatctattatctatcttctattatctatctattatctatctatctatctatctatctatctatcttctattatatactaaaagtccattaaactccctacaaacgctctaaaaccgccatgtggcactcctacaaacgctctcaagccgccacgtagcacagtctaatcccaccgtcgattttcacttaaattggtggacccgttattttacaccattagattaaattattattaaatataataccttcctcctctatggacgatacaaacggtaccactgttccccctgcgtacgtacttaagattgataacaaaacaatagttntacctcttattgctggaaggaaagcacggagatataaaaagacagttaaaatacaaacgtccgtgctattgt

SEQ ID NO: 12367 - DNA, 346 bp, Oryza sativa
atgggatggtgactcttattatctctacccttttttcatcgtgctcgagtttgatcattttcttttgagcacagttgtttattctagctcatctctcatttggcatggatcatgggaggaaagaccaccacaattttacagtctctattctgtggatacatcgtcttaaacatagaagtttagcatatacatatggatggattagttttcttcttggctaatcctccagcgtagagaaaaagcaatatttttggtgtctaagtgcacaagactttgctcatgacaatatgaaaagaatctaagatggcaccaccatttggcaaactcaaaatgatagcaagcaatt

SEQ ID NO: 12368 - DNA, 462 bp, Oryza sativa
ttagcgacacataaatctcagcttggggaagtgaggtccggacggtcaataatatcacacgggatgcttatgttatataacaatgcacatggaggtgaaggtttccatatggcatacacgtagtgttgtgtgcgtatggaaagcgtggtcaaatttggattggagtataagtttaggaagattggagtttgttaagtttgtttcttgtatgggaagggtttcgcggggatttcttgtatgagttggatttgtggccaggggttaccacattatatgtataaatagagagggagggtgtggtctcccgggatcggttcttgaaagagttgagtcggaggaaaagttatggtttcaagtttaatcgagatattggtgaggagtgctgatggtgtacttttgtaatactatttgatgcactatagtcgagattgtttgatctacatcttttagtattcatctact

SEQ ID NO: 12369 - DNA, 448 bp, Oryza sativa
caagctaaaggctatgggtaggccagcttactacaccacaactaccgtatcatatgctaggcatgacgcagatcatcacgttggctccccatcaaagaccccacccacagtccacacaatcactctcacacacagacgcgcaccgtagagcatcctaaaacagtgtcaagattgcccacatcgcctgagagataaaaaaacacgacaatcaaattcagatagtaatgctactccctccatagttcatccacgtgtgtagagcatctctaagatcgttatgacattattaagaaggaaaatacaagacttttgatgcctcttattcaagtgcggctgccatcttctgattagacaagaagaaaggctgaagcctgtggttcgacgagaagttattgatatgtgggtgaaaggagatataatactttataaatctcgtgacaaattttaa

SEQ ID NO: 12370 - DNA, 372 bp, Oryza sativa
cataacacaagcatgtagctatttgcatcagaaaccaccgtgacatagccatgagctaaagcaacatactctgaatataccagcaagtgaattaattatcccagagccttcaaagtttacttgacttcttagcgagcaagacttgcatatgtttggaggcttgcatatgtttttcaagctcagtgaagacaagtgtataatatgttgtgctcgtatgcagctgctaagctaaatatcaataggtgtgatacatttccaagactaggcacttaactcccatccccaacaactcaccaagctattggtcttcagagtcgtgaagggcttagtcagtacaattttcatgatggaagcactcaataataacataca

SEQ ID NO: 12371 - DNA, 471 bp, Oryza sativa
ctatgcagaatttggaaacaatattgcgtgaaagtacatccaaatattatcccataatatttggaccaagtgctgtgtaaaatctatggccttcaacttctttcaagataatacatgctctatattatgatggagatttgacacaaatgtgaggtaaaagataaccgaattttcaactacatggactaacggtcttatcggttaccaaagacttattataagccacaacggcttttattattgataaaaaagtaattttttgtctaaaacatctacaatgtgttcttagcaacttataagccaatgctgaaaaagaaactatgttgaaaatatcttaaaatcaacttcatattgagtttgaaaaattacaaaaaaaagactttggttgaattctttctatgcctaccaatgggctaaaattgtcgataagcatacacggtatggtcttgtggtacattgaattattgactg

SEQ ID NO: 12372 - DNA, 438 bp, Oryza sativa
  unsure (1)..(438): unsure at all n locations
agctaggtggagaagattcgccctcttgtttctttnggcaagaagggagaggagcggcctactgtcgaccatcataccgtcttccccaatatcaatatcatactgcaattggagatcttcatctctctgttcaacggcaggcaatggagagatacaacagttggatggagacacatcagcggcggacgagaacttggcgctggccttggagttatattgatctcaaggatgtgctcgtgccattgaataacggtcccatgggcaaccccaacggtcagaatctctgcatcaggtgggagtggatagtgtaaccaacacaatccggcttccctaatgtcactcgaactttggcattgtctactagcagctgcatcccatgcactctggacttccgggtagacttgaatgcttgatcctctcggacaggaattgcaaatc

SEQ ID NO: 12373 - DNA, 426 bp, Oryza sativa
  unsure (1)..(426): unsure at all n locations
tagctcattagggaagggagacatgaatagtcaaatatatatggagctctttcgtgccgcacggaagctacacaatacatatacagatagggtctaacatacagaaatttgatagttcgacactgtcttcggtatcaatttattatgatgggcactcataaaaataacatagtgtactatcagaaatatcaaacatagcttaatttattntgactgaccacagttaatgaaagtggatcagaaatatcaaatagtcgagacccactctgaaaaagaaccaatatatcaagaccttttgctaacggatgggcctgctagaagccactgcaccaagttatatcactatcgtgatatcatctaaatactatttctctctatttaaaatatacgagtcatgctcaaaatatatataataataacatattt

SEQ ID NO: 12374 - DNA, 415 bp, Oryza sativa
  unsure (1)..(415): unsure at all n locations
ctgcttagttcaatattggagttcatataccttctacgctatccattacagncgacagcagctacagctgaattctccatgttgccattactaccgggcttaagttctgttcggaaatatagtccaccattggcggatcttctctgtaacataataatcatgttgcggttggaaaaatgatgcctgctatatcccatgttctgtttatcatgaataacctaacccatgaagattaacaagaattccgaagaacatgagtcggaaattcgaccctacctactgtggcatctgttccaacttccaaccaatcaaatatgcatagagagagataatatttaccccgtgagctgtcttctgggaactttgccgttgtgacgcgtgctgccgggaattacaaagctgctgctgggcatct

SEQ ID NO: 12375 - DNA, 450 bp, Oryza sativa
  unsure (1)..(450): unsure at all n locations
ntcggatcccacctcttaattcagggtagcctcatgtagtacataatactgtgtaactgcattggtgttcctgtgactttcttttaaacaagttctggttgaaaagcgtagaaacagtcttaactggcatgtcttgttttcatgcatatgtgctgtgcagtagattaatccttttacctataacttctcaattgagttttatgttatttgattacaactagtagntgtccatgactgaccttattgcatcttcttcttttggcagaattactagacttccaataagaaggacacaccctatggaatgcagaaagatgtgcttgcatgctatagagctaccttgtgagggaattggcagggtagcaagccatatctctccttccacaactcttcatgacattggaacacaagagaatatacagcgctttgctcatgtgctctcgcactatg

SEQ ID NO: 12376 - DNA, 421 bp, Oryza sativa
atctctatagtcactgcggcatgcaagctcattaaatatattaaaccatttattctctttgacatcaactgatgaacaaacttgtattgacttacccaacatgtggtcatataatctatactacataggtatgcatgcatctattgaacaagtcctgaatttctaatactaatatatagttcagtgccatcacctgccttgtcttgctcacttacaggtgcatacagaacagaaaaaacgatgtctctcttcttcaacctcattccttttcttttcttgctagaagttacaattagctctgaatatcttactaatagtctctcttcttcaatcaacatcctagcataatgagatcacaaccaatggtcttgcagcttgtttacacccacagcagtagtgctcatcttcttctgcaaaatct

SEQ ID NO: 12377 - DNA, 490 bp, Oryza sativa
  unsure (1)..(490): unsure at all n locations
actcagcttgcatacgtacgtcactccatgaagattgaaattttttcttgtcattggccntgagtagnttctaattattttttctgaaaacatcacattatatctttggacacatacatagagcattatatatagataaaataaaaaactaattgcacagtttgtatggaaatcgtgagataaattatctaagcctaattagtttataattagccctcaagtactattgaccttaactcaaccaaaagaggaaggagaataaataggagaaggtgcgggagaatgggagatgacgagaatgacggtgaccaataactatccagtcatttttctgtttataacggaaatctcagagaggtaataaaagtgtaaaatatcaatggagcataagaatcctctcgattatgtcttctttgttaatattacagcacattcatgcgacagttacatttgtgcgctgtatacaagatatttatgttgggatacgtat

SEQ ID NO: 12378 - DNA, 353 bp, Oryza sativa
tagcttcgcgaagcgtgatggaggcgccgcgccttcttctcccgttcctcctactggtggccctcgtcgtctcaccaccggcggtcgccgcggaggagagccgaatgcggatcgagcccctgcccaccagcgcgctgcgccggctgtacgacaccttcaactacagaaagctgcagctcaacaacggcctcggcctcaccccgcagatggggtaaggtcaatcaatcggcccaaagcttctgctcttcgctgcgatccacttccgctgctgctttgaccaccgccatgtgcgtgcgcgagtaaatcatcggcgttcactgcggtgagtgcgtgaattaataatgcctcgtggt

SEQ ID NO: 12379 - DNA, 486 bp, Oryza sativa
  unsure (1)..(486): unsure at all n locations
tccaagtctgagactatngaatctgagcaacaatgatttgaaaggccaaattcctcattcgcttcaaacatttccaaatggctcattcttgtggaatcctggattatgtgggccacctctagctaaatgcttgcttcctgattcaccgacgccttcaccagcatacccttcatcagcaccaactccaatgtcagcgcatcatgagaaaaagtttggcgccggaatcataattgcagttgctggtgggggcttcgcagtactgatgtttgatgtgagtgtgttggttgtgtgtaattcaaagaggaaaggcaagacagagagtggtgtggactacaagggtaaaggcactggtgtcagaagtgagaagccaaaacaggagttcagtattggcgttcagatcgccgagaataacaagttggtcttcttggacggtngctcctataccttcgatttggaggatctactgagagcttctgcagaagtcct

SEQ ID NO: 12380 - DNA, 520 bp, Oryza sativa
  unsure (1)..(520): unsure at all n locations
agcgacctatgatactcagcttcattatatctntaactgcaacatcgctattcctgaagagttcctctgttctccatcgaatgatatcttccacttccttctgtgattctgatttgttaacaaaaagttgatcaagcatcaattttttcttcgcaaggtgcaagatacgctcctcaacactagcacgcacgacaagcctgtaaactaanagtctgtttgactgtccaattctgtgtgctctgttcattgcctgtatatcagcatgtggattgaaatcagaatcatatatgataacagtatctgcagttgccaaattaattccaagcccacatgaccgcgtagatagcaggaatacaaaacgactcttgtcctgattaaaacgagcaattgctgcctggcgttctgccacagatactgaaccatccactctttcaaatgttntcggaccannactccaagtcaggtaatcttcaaagatgtcaagaagctttgtcatctgagaaaaaataagaactcgatg

SEQ ID NO: 12381 - DNA, 306 bp, Oryza sativa
tacttggcgctctctgaataactgctcaattaatagcacagattcagtcaattctttgattccagatcacggatacacatactatataacacactatgcccaacagaagaaactaaaatcgcttggatttttcttgtcagaatcgcgagcaatcgctaagtacatctttcgcaagtacacaccagagtgcctaggactcggagaaagcggaagcctggaagagtctgcaacggtggacgtgtggctggacgtggaagcccaccagctcaaggcctgcgtgagggccatcctgtggcactgcatcat

SEQ ID NO: 12382 - DNA, 443 bp, Oryza sativa
aactccaaactatctgaccactctattgtttccattattgtcacataactttatacagctgttaacactgcatgtttcctctaatcttatgatggtgctccaaaaactaattcttcaaatttggcaggctgagagaccaacattatcaaacgtcaatctggatgtacctatgggcacgttgtgtgcaatagtaagaagcactggggaagagaagacttctcttatttctgcaatgcttgttgaaataccaccagtgtcaagatcgaatacatcggtggtccttcgtggaacagtggcttatgttcctcaagtttcatggatcttcaatgcaactgtgagacacaatatcttcatctatgatgattggtatattgaacctcttatggcttctacaaaataatgttatatctctcaggtccggacatatattgttggtctccctc

SEQ ID NO: 12383 - DNA, 488 bp, Oryza sativa
  unsure (1)..(488): unsure at all n locations
actcacaccatattattgaggcaactttcaaagcatttgctagatcccttcgacaagcaacagaatatgacttgcgccgacgcggcactgtccccaggttcgttttagcttattgcaaatagcggttaagaaattctatgttgtgcccaactacactgttgatgcctgattcaaaaacttcacacctgctaagcatatggtttatctctgacctttgctgatattgagacattaacgtatctctcttgacttgatcgcagctcagaaggtgtngtgtcaaagtcataattgtgcaggtttggaagacaaagagtgcatgctactgttccttgtagattgcaatattcaaaggaaacaaatggtatgtgctctacaggtgctcgagtactacttaccctgtgaatcttcgttggttgcgataacagaacatgaagccattgctaactagatcaccaaaaaagaacacattagcactgtctcatgactat

SEQ ID NO: 12384 - DNA, 479 bp, Oryza sativa
  unsure (1)..(479): unsure at all n locations
atgtaggtgttcttaggagctggttttattgggtgaagtanctggtaccgacagcagaggcctctctgctgatacacttgcttcattaccttcaataacttatcgagcacaagataagcaagacggcgacatggaacagtatgttaatatctccccccttntttagaagtaaccggcactgtactgataaatgaaactaatttgcagatgtgttatctgccgcgtggaatatgaggaaggtgaatcattggntgcacttccttgcaagcattcataccattctgaatgcataaaccaatggctgcaattaaataaggtatataattaacagcatctccagtcttcatatccaccaaccncttgatgaatgaaagcaacggcttatgaaccctacatccctattccttgtcagatattgaatcaatgcntttcttttgccacctgactatgaagatacatcattnggcatggtcaatgca

SEQ ID NO: 12385 - DNA, 444 bp, Oryza sativa
  unsure (1)..(444): unsure at all n locations
agcttcttccaaatattggaagtanactggctgcctcgatcagacactattttcttacgaacgccatgcaaacacacaatcctggccatatacaatttcgccaaccgacttccataataggttgtctttactgcgatgaaatgagccactttggtaagtctgtcgactatcacccaaatagagtcgtggcctgatgatgttctatgtagaccagtgataaaatccataccgatgtcttcccatttccattcaggaatcttcataggctgcaacaaaccggcgggtttccgatgttctgccttgactcgctgacaaacataacatactgctacggactctgcgatttcacgcttcatacttgcccaccaaaatctgtccttgagatactggtacatttttgtactaccagagtgaatggaggataaagtatcatgagcttctttc

SEQ ID NO: 12386 - DNA, 423 bp, Oryza sativa
tgtgcgctggcatgccgaagaacggatagtcgatactatgctgaggcactcttcttattcagtgcagtggaggacaatcgataggatttaccatgaattctcaaatgacccaagaaacatgcgtttcgcaatgtgtacggacggcattaatcctttcggtgatttgagcagtcgtcacagtacatggccagttctgcttgttaactataaccttcctccctggttgtgtttcaaaagaaagtacattatgcttgccatgcttcattcaggaccgagacaacctggcaacgatatcgatgtgttccttgaaccgataatcgatgacttcgaaaggctatggaatgagggcacacgaacatgggacgcatatgcacaagagtatttcaacctccatgcgatgctgttttgtaccatcaacgatta

SEQ ID NO: 12387 - DNA, 372 bp, Oryza sativa
  unsure (1)..(372): unsure at all n locations
acctgctgcatgcangcttgtcccatcttacacagaaagtattcttgcatgatgcaaggtttgcagaggcttagactaattctatgaatgttaatcattgttgtccttatatgtatggatcggatgatgaggatgatgattctgagatagctgcagccgagtgggtatggagcataaaggttataccatgcctatgggtaaagaacttatgaaaagaggagaggtatgactttgatatcactaatgctgacaagattcttgagttgctactccgagagaagcagattcaacttcatgccggtcacacaattccatcggctgaagaatagggcaagaaaaggtattgcatgtggcataattctgggtctcata

SEQ ID NO: 12388 - DNA, 466 bp, Oryza sativa
  unsure (1)..(466): unsure at all n locations
gtattgggcatacaccatttgtcttctgctntaacaaatgagctggagccgctataagacacatggtttcaccacacctggaaatatatagcatatgtggcataaaatccgagcaaatgaactcataaagatttatcaatctgtctggaaaatgaccaaaatatataatcagcctaagccataatattggtcaatataaatgcacacttacgtggcgaaaagcaatgatattgtatccaatcaattgctttatgaacccaaacagcgccttgacttatataataagtcagcggcgagctatataaagcattactgttcggcaccttttaaaatgtattgtaccaactcctcataagctgagtaactgcgcgataaaaggatgttaatgtattgggcacataatcacgcgcactttngccagagctatatatgcctaagtccctaaagaacgtgacggccacacctg

SEQ ID NO: 12389 - DNA, 463 bp, Oryza sativa
  unsure (1)..(463): unsure at all n locations
gcttcgcttcgtgtcactctacccttatatttgtctaacccctgcttatactctgatgaaagcaagtaatatatatgggtatatattagcatggttctctctttcacaatcttctcttgggattaaataaatacggtaccttagaatacttccgggtgaaatgctacaatggtatattcgtgcgcttgcggattacttttgtaaccataaatataccaagactatttctgcgctattgctgggaatgaatacttctagtaatgaccgtaagaaatacaaacagtcagtagaccccgatgatttcctaagcttaccctatatccctctctattgtacagctattaccctagtcaacgaaagcactagaccccggtgattngtttattcaagctcaactgacagcaaggaaagcactattagcaggcagcatatacaaaattattaggtaacacttattattata

SEQ ID NO: 12390 - DNA, 392 bp, Oryza sativa
  unsure (1)..(392): unsure at all n locations
gggaagtgtgtgttgaagtgagtgaagtgaggtccttatttaaattgtgataatgggaaatgtctgaattgccccgcaaccgtcatcanggagtgatctggagcgtccatgccaaaacctggatccaacggcgctcaccacggttcggccgaacctgggctatgcccccctggcctggcctttggcctggcttctctcttgatcctcctctacccattcctcggagttttgggctgattttccgatattttgatgaagtcacaacccatccttgtatgatacgtaattctcctcactttagtctagatttcctcccaaccatggggtttatctcctgcatacaaatatacaccaaacctgtggaaattgtgagattaagcacctatcactat

SEQ ID NO: 12391 - DNA, 465 bp, Oryza sativa
agcttcatccatcctgtgccaaacattatttttgatactgccctattcctttgcaattcttcactactagttcttccaatgatccgttagtgccaagatgctccaaccactcagtgctgctagttattcccttacaattgttaaggtggagagaagatagagtctcgcaaccaacagctaaagagagaagcccccttgacgttatttctggtgtggagttcagctttagggacatcaacatcttgcatttagtcaggcaagctagaccagagtcattgatgtcagagcagatgctcaaggtgagatcattgagcaagggcagtgagaatgaaagcacacggagaccttggttgtcgatctgactcccattgccaggtgcgccaccagagtaattgatctctactttgtgttaatggggaattgtgaaaaagtgctgtaagcctcaatgcaagtccctaccacaca

SEQ ID NO: 12392 - DNA, 377 bp, Oryza sativa
  unsure (1)..(377): unsure at all n locations
tgcattaaacacctaagttcccgtgacttgctgagtacgaaagtactcatccttgctctatataaatatatatagnttctccgccctgaagttgaagatgaggtgaagcgaagattatggtttcgtcctggttcccagccgtcgcctgtggtgttgggtgttagaccgttggttccgctgctgctgccgttgttggtgttcgcctcgctcgtgtcgtcggatgtattctcgggctgtctgagctgcaacctaagctaaagtaaataagacctctatttattttaaagattgctatgattcattcttgtcaccgcgggtaccagcacttatgtctgtgactggtaccgagatcgccgtttttaagaagcggtcacgcc

SEQ ID NO: 12393 - DNA, 346 bp, Oryza sativa
agtagaagtggcttataaacggtctcatcttatctatagatgctatggataaccaagctcttgatgaaagtgcgaatctagtgcacaacgaactatattcacatgagtatgagttaagaatatttgagaagttacagaacgttatccatttttgtcaagtctcctgaatatttaacacatatggacgccgctttctaacggatcgacgggcacatctcacgctgaagttgaatggcacgctataagcccaacaattgctacaaatttcctctctcgaagcaacggataattcattatagcttgctcgatgacttggaatattcacttcatctctcaatgataatgg

SEQ ID NO: 12394 - DNA, 414 bp, Oryza sativa
  unsure (1)..(414): unsure at all n locations
tggaagaaatggaagntgaagctcttcaccgagattggcaacccttcctgttatcatacgccgcttgatgaataccctgcaataaccgaagcggcgtgggaggaattctgctctctcaagaacacccaagagtctatggaatcaaacgaggcacatcgtctactgcaacagcggaatgagcacccgcatcggctgggcaccgcaaagtacatcggcaaggaggctatatgggccccaaaagatgtagccgttgcagcaccaaagtccactgcccgtttcagacattcctgaacaaagagctcgcaactgggcacggccaatgggtaatggcaacccggacggctcctgcacattagagaacacaagagatgctagctgctatcaagaactggtgaggtcactacttaacctaac

SEQ ID NO: 12395 - DNA, 69 bp, Oryza sativa
gtccactaatatacatctatgtaaccgctgatcacctaagatgcgatttggcgtgatgttctttttgct

SEQ ID NO: 12396 - DNA, 400 bp, Oryza sativa
taacaatgaaatgttcatgaccctccagataatactccacagggcatatcttacttacaagcaaagaaatgtttcatcaaaactcagacattatctgttgtatggacgtgacaagccaacgagtaacaaaggtgtcgatcaagagtatagatctcaaatactattctaaagaaaactgatgtacaggtgtacaaggagctcaatcactctctatcaatcttgtcattgaatcgaccagacatcacaaccaaacaataaactatcaaatgcaacccgctaacacaagacacgagagaagaggctacagtcagcaaggcattacaatcgctgacattcgctccatctcacggtcatccacatctatcaagggcaaactggtatcttcagaaaccaatgagac

SEQ ID NO: 12397 - DNA, 356 bp, Oryza sativa
acgcttcatgacaaggcatgtgcaaagccgtctctatcttaccatatgccgacgagaggtgtcccataccaacaacaggctatggcccagaccatactgcgacaagaagcccaggggggggttctcttcaacaccaccccggcgaacccacatgtctctcagcatcatggctcgcctgatatcgcagtatctcaaccaggggtggcccattccacccacggggacgtacttgacctatgttctgatgagattccaatggatcacgcctttagtgcggcaacggcaaaaccgtacacccagtacgctccccggaccgccggtttataaattcattcagcacgcaagcaccgacccac

SEQ ID NO: 12398 - DNA, 346 bp, Oryza sativa
ccaagatactaagcttccctgcccatacactgtccgctgctcctaatgcattccagctctttgccgctatgattaaagatcatcccctgcttctctctctctctctttgggagataagtgattctagctgtacttctcgctttgacgatccgacgaaccacaaggaagagaggggaaggagatgactacaaactatcatccctgcccctgtgtgtagcgatcggattgcatcatggggtttgtttttattcttgtgcaaactaagctgttaaaccgcgtcaccgtgggggcggacagacagcacctagattgtggcttgctcactcactagattgctgacctctga

SEQ ID NO: 12399 - DNA, 406 bp, Oryza sativa
  unsure (1)..(406): unsure at all n locations
tctcatatagccaagcggtcattaaatatcaggcattatgtaaaccgcagataaagttgatttatacataagaaaatagaacaagcgaacctgctgaaagatacgactagggagtaaaatccaacctataggtctcactttctgtgatagtcattcgtacctacacattcaccgtggcagtaagaaccacatgaatcccagacatgctggtaaggaagtcgatttagttctgcccccagcattaaactgtaatcggcctaacaccggaaatactcgcacaacagatattgtgtacagaagatgggaaaanacctttagacaaataatcagctctgctcaaggaaaagaaaagcagtgtgaaccgatctattgtaatagactatataatacggcctcctacctacta

SEQ ID NO: 12400 - DNA, 436 bp, Oryza sativa
  unsure (1)..(436): unsure at all n locations
atccctatatatattaatattaatatatatggtgtttacttttccaccgcgagtgaaccacatcgttcaatactcgcagttgtcattcgacaacagcttaagggatgaaatgagcatatttagaaaacttatccactaccaacaaaatacaattctgcctttcacgccatggtagtccttttatgaaatcgattgagatgacttgctatgcccttgtggcacagaatgcttgtaacagccctaagtacttagcttgatctggattagcctgtaacacacaccacaagctaccaatggtttcttaatcattgttgtcattgttggccaagcaaacaaagccttaatcctttgtaggtaatatganaaccagagtgtccccccactgggctatcatgcaaggcagtgataatttgtttccgaagagaaggaatattac

SEQ ID NO: 12401 - DNA, 461 bp, Oryza sativa
  unsure (1)..(461): unsure at all n locations
ctaagctgatcattcccctctgaacaagaagttctggaccgggaggtataaaatcgatcatctggcgtccatccgatgcatcgactatggatatttcatatacccccttttctttacgcagtatatttcttactacacctgttgacgttgcattatagaccgtattgttactcttgctaccatcaagatagatctgtccccttcctcgggttccccccacatatatgggatatnttaagaaatgaacgtctttcttcatagcagggtgctggggatagaatgggaaaaacgatttactatatttcttaccgggaacagggcctatcacaagaatatttattttattgcgacgataactcttgaaagagagatatcctatcttttctttctactcangagaaatacggtcgggcggcgctaattcgaatccctcgggcatataagaacagcacccacattca

SEQ ID NO: 12402 - DNA, 421 bp, Oryza sativa
  unsure (1)..(421): unsure at all n locations
tctcgggttttgatctctgcccgaggcattgatgccaatcccgagaagatactatctatagagcggatccgcccncccagcaaacttanggatgtgcagtgcgtcactggttgcatggcccgcctaagtcgtatcatatcgaggctgggagagaaggcgctgccctcgtttaagctcctcaagcgctcatggccgtttacttggacggaggaagctgaaaatgcccttgcccagttgaaggcgtatctcagctctccttcagttctggtcgccccggagccaaatgagttcctgctactatacttagcggcgaccccccaagtggttagtgcggcgttagttgtggagcgcgatgaggacaatcctcatcctgcgcacacctactccgtgccgacttggcccgggagcaagcatggaggag

SEQ ID NO: 12403 - DNA, 380 bp, Oryza sativa
  unsure (1)..(380): unsure at all n locations
agcttgggaaaaccaaccatgctctttgtaattgtgcaggttgngctgcaattcacgacgcgcgtctacaggggcacctgactggcgcatcatagatacccgacgctgatattgccgtcacagttgacggcaagactgagataaaggcgaatccggcgtttgaagattgggaagccgtggatcaccaggtcctaggcttcctcctcgcatctctttcaagagatgtgctcatgcaagtcgcatggtgcacaacggcggctgaagcatggacaacaattgatcagatgtactccacccacaccagagcgcgagcaatcatcacatactatgtgctcaccaacaccaagaagggaaacatgtcccttcctgagttcttctgc

SEQ ID NO: 12404 - DNA, 392 bp, Oryza sativa
  unsure (1)..(392): unsure at all n locations
actcagcttgtgaacaataatttctctaacaccagactntacagttanacattgattattgcacaggttaagtatacttgctgagattcttcgatttggtgaccgcgaattctacaaagattggtggaatgcaaaaacaattgatgaggtgaaagacaatacgtttcaagctatcatttgcttcctttctcaatctaaaagaagataggtaaacagctctaacattctgtgtgatgtatgctcctgctacatgtgcggtcgtacttggatgggatctcagtattggagaaaatggaatatggtatgctttctttttatttaaaactgtggtacctttaggcttaagcagctgcctacaaccagacaagacatgtacacccgattatattttt

SEQ ID NO: 12405 - DNA, 292 bp, Oryza sativa
ggacttaagcactgtgctgcactgggaaaagggttctctatttccgaaaatatccaaccttgatgcctcatgttggtgataggccatgtataagatataactcgacaagggatcattccagccgaactcaaaaaattgcaagcttcccaaatttcttcgatgaccacatcgacggcgtcgtcatcaaaaacccgtccaaacgacagagttcaccaacgctctcctcgacaagacaacgaaaattaaaaaaaaaaatagtcattatatgacgagggcggatttcaaaacttac

SEQ ID NO: 12406 - DNA, 398 bp, Oryza sativa
agagcattattttctcttgatcaaatgtatcaggccgcacatgcatcaacagtgcgattcgatcgagaccaataccttctcagcaatccgtatagcttattaggcaggagaccctacatacctaggattagactgtgggcattagcttagcagcacatgttgtaggacttgtcgtcgctcaattcgctagagaggaggtctctcagtgcagttcagaatcaccggtgacgtcgtccccgcccgggcccggcggctatagcaagcgccaggtgggtgccgtccgatcgggggatcgcggtcaggatcgatctcgccttaccctcgtcatgcgcgtctataaagacataggaggaggagtggataagtgtatatataacaaggaagtaataaccccggat

SEQ ID NO: 12407 - DNA, 473 bp, Oryza sativa
  unsure (1)..(473): unsure at all n locations
cacaaaaataagctcttcggaaactcacaacacaacacggactgttttttttgttgtcncgaaggaaaagaagatagaacattctagcggtgaataaagaggaggccctattacgcgcgttggcgcgtgtggggggccactcgcacccaaaccccatccgcggtatccggtgggtggcgggcggaagtgaccggcatgtggccgctacctgcttggctaantggcgacacccggagggtgtaccggtgttaccggcacgtgcgcgtttccgcgacggtgttggcgtgtgtggggtttggtttgccgaccttgtgcggagttgtgttgggtgtgtatcgtttggctaaggcttacgagatgggtgatgcgtgcactgggttcacgcctcttcgcgtgtggagacacggataccgtccgtttttaaggggtttattttgcttttttttattgaaaacttgatatgaatgccgtta

SEQ ID NO: 12408 - DNA, 413 bp, Oryza sativa
  unsure (1)..(413): unsure at all n locations
agcttccatagaactctgttatatagtactgttctgtgatcactngtcactacacacaccaatggaaggagagataaagatagatctcaagcagagacctattgctatgtctaagaaggtataattaaaagcacgcaagcatgcagaggaaggcggctggctaatcttgctccaaaagttcatagatattctgcaagcccgtgagagcacggggtgtctctgtgctatagccgccagcggcgtttgctgctagctttatggacgacggcagctggctgcacatcatcgtgcgcggcggtggcggttgctccagacacctccctgcgacgtcgttgtagatcatgccggagaagtcaacgactggcactgctccttcatcagtatcttcttctctcacacaccgtcctccgcgt

SEQ ID NO: 12409 - DNA, 467 bp, Oryza sativa
  unsure (1)..(467): unsure at all n locations
tagcgaccaaaaactaacttataatcgctttcaaattaatgacaccatgttttatttgcaatagcttaaaatcatctccaaatatcgtatctgccaattagatattctcctaacgtatattaatactcccatgcagtatttaaacgttcgatgctacaaagtgaaagattttgcggtgggatctaaacagggtctaataccgaatgctctttttggttctgttatttcacttaagatagatatttttgtactcctattattttaactctcatatgtataatcttacattaagaatcgntttcatgtagattctacttacaattagacttaactatatagcacttacactcaactacaatatatcgagattataatttatgactgtttttctctgaaatacgaatttaacatgttttttattcttcaaacgaatttatctattaattaaaattgaatacaattaaccc

SEQ ID NO: 12410 - DNA, 385 bp, Oryza sativa
atactattagtcacctgcggcatgcaagcttaactgctgatactgccactcttagattatgttgttacttatatgacagaagagtacactcttgccttctgaatcaaggtgcatacagatacagccaccatgaatcatatgaaggagccaaaagagagtgtgatctgaaagttataccaagaaatcttatgtaataccaggcatgcatgtacctttgctgcctagatgtgaacaaaaaaaatcagtattttcatagataaaattatgcaagattgatataggagcaagtttgaagtgttattaacaagccctcagatccagtaatcttgattattaggttgcatatatctgtcatgctacacaagtgtatatatcaaaataaatg

SEQ ID NO: 12411 - DNA, 341 bp, Oryza sativa
  unsure (1)..(341): unsure at all n locations
cacgcagctgctggattatgtcttttttttttcttatctacgatctctcttgttcttgtgcatatcaatacgtgagcttggagccttggagcatgtctagtagtactaggtattcgcttttgtcttccgctctccgtggacaggatcgcttgacctacgcctgatgatgataattaagacctgcctaagcaacacctgtgacattcgtattatgatattatctgcactgcnggttacttctaaatgatcaccgcaccccctcgtcggtaccaagctgcctcgtgcatgctcatcacaaaaaggcgtgctttgacgtccctcgcgagacacatcgcatgcag

SEQ ID NO: 12412 - DNA, 402 bp, Oryza sativa
agcttctgctctatacaactgcaggttcattcatcatccgccgttaagacacattcctgcacagcttgcttgcgatagataccacacctgctcctatcaacacacattatttcatactgatgcacttgtgtgccttgagcaacaactcgatgtctccgtgcctctatgattttatcttacatgtactttgtcactacgttgccaaacactatgtcgttatctgccatggacggaccatatttcttgtatctgatcctaaaggacgcttgcgtgccgtgaaggactaaatcaacaatagcaaccaatggaagtcccctactccttcattaccagttgtcacctttgcaaaatggtgtcatatggcataccgaaccattgggtcaacaataagaccactttctt

SEQ ID NO: 12413 - DNA, 423 bp, Oryza sativa
  unsure (1)..(423): unsure at all n locations
ngtgcattcttacaccacctgctcgtgattacaagactaccaactattatttctttaattccgagaagcaatcagcattaatcaaagcgaaagggtcacgttacaattatactctctcgagatgcccactttctgtgggcaggaatcttttacccgcgcgctagcttgagagtgaacgcacacgtcggacatgacgacatcgtattatatacatacgacgaataacacatctatcctcgtacacatatacagatgcgggattactattataaacaatcgtgttcataatataaaaggctaaagaggattttatagtctanagctgacgtgcataatatatttactaatggtatatcatatcttatacattattgatacgaatactatactaattgcgtatagtataaactctctgcattctat

SEQ ID NO: 12414 - DNA, 55 bp, Oryza sativa
  unsure (1)..(55): unsure at all n locations
tctgctgcacgttatcgagttgtgttnatactactctcatttccctagaagtggt

SEQ ID NO: 12415 - DNA, 346 bp, Oryza sativa
aatttatataaataataaaagggtgatgatcactacacacattttataaaaacattatatttataataagggaggaattttttttttataaaaaaaaggaggatgagatcaaagaaataaatatataaatcaaggaaaggatagggagaagaatgagaagagagtaaaatagaatgaaaagaaaaagagagtgagaagtgaaagagaggaaaaaagtaagaagaaagaagtgggggtggagtggaagaaggaagaaaaaaaaaaaggagtgggataggagcgaagaatgaaaaaagagatgaaagaaaaggaaaaaggaagggtaggagaagaaagtataaagaag

SEQ ID NO: 12416 - DNA, 331 bp, Oryza sativa
  unsure (1)..(331): unsure at all n locations
attctgtaacttgttgtgtaaagcaatggtcttgagcttctctnnttttacttgatagaaacactgatttctgtctttaagaaggaatgacttttgnggtcttgcattgttagcaaatggtaataaccgtagaatttctgtatgtctgatctgttcactcttcatacctgcattttacctttcaaccttaaatttggtggattgccaatgcagaatcaacgggtctctttttcccctggctttgctggtttgcagcatggtgtgcctgaaagaaatagctatgttttctttttggtattcaaatatctattatttgatcatgtatttattt

SEQ ID NO: 12417 - DNA, 369 bp, Oryza sativa
  unsure (1)..(369): unsure at all n locations
ntggatcattcattggcatatattaagttctcagagatgcatgtaccttttatatatcctgtctgatccatgtgaatcatccttgtaagaattattagtagcctaagatccagcactttggataggatttttacctaacaattctggagagagattggtcggtagccatctactgtgttatctttgcccggttttggaattataacaatatgagctctgttaatcctttcgagctggactgaatttgaacagatccctgtagtgagcttgatgacatcctctttaataacattccaagtcgcatagtagaaacttgtgccaaacccatcaggtccatgtgcactgttagagttattacctctgattgct

SEQ ID NO: 12418 - DNA, 455 bp, Oryza sativa
tattgtcactgggagttgcaatagatcttgcatgatgttatgttgttaaaaccccaataatccagataagaaggattttacaggatggtaggatactacaaactacctttgattctgcaaccctgatggatagcatgcctattcccctttgtgatctttgacttattcttcctttacattacattgttttgcattagattgatgtaatatgtatgatggcttttgctaattcagttatttttggtcatacagtgatgcaatggctgtttctctgatgattcattatgcataatggtattctactgcagctatgcttttgaacttgcctaatgcggtaaaaccaatttgagtacggctcctctaggtgcaagggcacatgcgttggtgagatgttatcctatcactttgatcctattgatgatgcaagctgcaaacagtcatatatcacaacaata

SEQ ID NO: 12419 - DNA, 253 bp, Oryza sativa
tgatatgcatagacttatggctcactgtgcagagggtcgcccttgttatttatatgcttcaaaggacagcagagctaatgctttcatggtgaatacctacaatggagagcacaaatgctagaaggaatggatcttgaaaaggtgcactgccaaatgggtggctggagagtacattgatgcatgtagagcaaatgagaagatgacacttgtggtgtttggcaatacaatgcaactggaatggaatctgacacca

SEQ ID NO: 12420 - DNA, 471 bp, Oryza sativa
  unsure (1)..(471): unsure at all n locations
actgagctgcactcctataataatccttacgatatgcttatttcactgcactgaaatccatcgtaatctagacttgaagctatgctgctctagctgtgattacttcggctaccanatntactgttacagatgcctctaaaactcacatcgagtgaggaagcgcaaggagacacgtacgtgtaataacttggccgatcggctattgtacatatgatatgcatctgataagtcggttggagcgagtcgcatcaaccagagtgacgtctattgcagacttgcagttgaccgtttaccgtggcagacctgtataaatgacaccaatattcaaacacttcgcatactcaatatacaccatattcaatgcattgataatcaatagattacaccttgattacatgtaagtatagatctcttcttatcaacactaatctgtacgacataaaattacacatccactatataatgcacaaa

SEQ ID NO: 12421 - DNA, 343 bp, Oryza sativa
  unsure (1)..(343): unsure at all n locations
gctgcactgacaatggcaaatggaagtgattatgaactggccggtcttgcttatgctgagccacattatgatgcaaagtgtttttatttattngatctggcaatactataatggtggcatatatcgttctactttcattaaattattgtactataaaaatataaccagctatacaatagcatactatcttttccttatacaaattggaggttcctctacgatggaacctcatactacaggcttatattataaaaaactatataagttttgtcaatgtgtttgtacatattacgacttctttgatcctgtggtgtatgtattcgcccattggtcctctatgtgt

SEQ ID NO: 12422 - DNA, 274 bp, Oryza sativa
  unsure (1)..(274): unsure at all n locations
agcacctgagctgcagctgattatgaacaagcccaatcgctaatatgctctgcatacatatgggaacanataacctatcacaatatcgtttgccctccaagatgatatgcaattctaactgaacaataatcacagcatgagaatntgagtgcagcgtgtgttgtcaagctaacagttgatcacacatgacaggtgaagacatgcaggggaaattctcacacacctaccactatactgataatgcctaccattaagcaatcagactggactgtac

SEQ ID NO: 12423 - DNA, 260 bp, Oryza sativa
  unsure (1)..(260): unsure at all n locations
atcctcagtccgatcccacttcctcgctaggcatggtccatcttttatatctctaagggataccacatgtgctgcgagtgctacctatggagaanggaaaatattctctatattcattacatgtcttgtgccttatcccataagctatctgcacgtctgttactgcgcggtgcccatcaaatcatgcaaggcgcccttgtcattcgccatttaatggatgagaacttccgggttctcgttcacaccataaaatgggaacc

SEQ ID NO: 12424 - DNA, 415 bp, Oryza sativa
  unsure (1)..(415): unsure at all n locations
tctatatcttttaccgtgcccactattcagttaatatgtcctcgaacttcatgatatgtnttcacactgccatcattcgacatctccttctgttcagtccgatggaattctaactttaacctaatagctttctcaaacatggctaaatacttaatactcanacaactggtctcgcttggatacaaattattcttcaacaaccaatcagtgccattgtgactctaccactcaatataatctgatgcttcttcggtgcatgatgacctattagaatgctatgcacaatatggctttttagngtgcagacattatggccattgccatatggctaaatactgccaattgagcactatatctatagtgttttataagacacacatttaaaagtttgcatggaatttttcatattatatac

SEQ ID NO: 12425 - DNA, 212 bp, Oryza sativa
  unsure (1)..(212): unsure at all n locations
tctcttactgtgggcgggaaagatagagcatgaatgagtacatcctctgttctcttcatgccacaccggaagatgcatgattaatgcactggggtgcaaggggataataatatgggttaggttttgacgctaacatgcatttantaatcacttagttgtccaaatctatttgttatagacgatcctagagctacacaatattattaatcaat

SEQ ID NO: 12426 - DNA, 452 bp, Oryza sativa
  unsure (1)..(452): unsure at all n locations
ctcagctatgcatcttggttaaccttctcgaatgagcattggtgggctctcgtctcttggcccccatggtcgaccttgtgtgtggcagttcaactttcgtggcttctatccccagaccgacgtcgctgctgcagattccattgacttgctccggtgcagcggtattgacttcacccgtcactcagctgacggcgctgatgctcgccgcttcgctgaacttatcatgtcgntgggcgtggtgatgaactctgatgatcgctgggctacgttccattacggatacgactttggctacttgctctagttgcttaccgcncatacctgcctacacgataaccgattcttcgactcatctgatatattcccgtcggatgactcatcacttgtgcgtgttgcacatgctcatgggggttgacatcttgacgactgttgatgtgacgcttggaattgca

SEQ ID NO: 12427 - DNA, 257 bp, Oryza sativa
cgagctcacttgccgtaaaagagttatatttttttttctcaacgacgcttgcgttctgatgtcattctttttgcgaaatacatacccaaatggcaaagcataccttatgtcacaccggtaaacctattactcgcccagccagccaacaacccagaaggaatgcctactatagtacaaaatatcaaaggagaattatcagggatacaacattctcgctgctcgaaataacccctagctgcttactgtatctgcaccac

SEQ ID NO: 12428 - DNA, 283 bp, Oryza sativa
acactttattctaatctgccggccggatttgaatatgctgaataaccagataatatcacattgtcaccacttattattctcctctccacaacatcaacctgctaaaaccttatccaagctagtgctaatttgctaatgagaccgaccatgcagatcagatgatgcccatgcacatgatcctaactagcatttgacaaactttcttctactagtttatcttatataattggcaaagctcttacgtgatgcaagctagaattaacattatgtaagtataatgatg

SEQ ID NO: 12429 - DNA, 328 bp, Oryza sativa
  unsure (1)..(328): unsure at all n locations
tactaagcttctcggttcttggtctctgcccgaggcatcgatgccaaccccgataatattctatctatatagcggatgcgcccncccagctagcttatggatgtgcaatgcgtcaccggttgcatggccgccctaaatcggttcatatcgaggctgggagagaaggcgctacccttatttaatctcctcatatgctccatgccgtttacttggacggaggaagctgaacatgccctcactcagttgaatgcgtatctcagctctgccccagttctggtcgtcccggagccagatgaacccttgctcctctacttatcggcgaccccgc

SEQ ID NO: 12430 - DNA, 179 bp, Oryza sativa
  unsure (1)..(179): unsure at all n locations
gctcgcaatataggataaagaccaagatcaccacctatggagcgattnggtcattcaccaagacggtcggaatcacctacatatcatcatcctctagacatgtcatggaggccttatccaataccaccgccgggntatccttatccttactacatgccatgaggngaaacaccgncaat

SEQ ID NO: 12431 - DNA, 436 bp, Oryza sativa
  unsure (1)..(436): unsure at all n locations
tcggagcatgtgaagtaccctggaatgcttcattctctacctgtacctgaccatgcgtggcaaattgtctctctggatttcgtggaaggtcttcctaagtcggcttctttcaattgcattcttgtggtggtcgacaaattctctaaatacaagtcatttgttccattgactcatcctttctctgccttggatgtggccgaagcatatatgcaacatatacatcgacttcatggcttgcctcaagtcttgatctctgaccgtgatcgcatcttcactagtacattgtggactactctattcatgttatccggcactcaactccgaatgagttcctcttaccatcctcatactgacggccagactgaacgtgtgaatcaatgccttgagacattcactcgttgntntgtccatgcctgtccttcacagtggagtcgct

SEQ ID NO: 12432 - DNA, 314 bp, Oryza sativa
  unsure (1)..(314): unsure at all n locations
gcgacacttagatactatgctaatagttgganatgaccaacatcgccgtaatgatgagatgagataattcttgttattaacttcaaatgcagatgatagtgagtgatactgtcatggctattatgtgtgtatgtgcatataccaatatcaatggccattatgtgtttatgtgcataccccaatatcaatggctaatatgtgtgtacgtcaatatatacttggttaattntattccctcccaccgaataatacatcattcagaaaactaaatgaattccctaattaatgttctcttattcatgactcgatctata

SEQ ID NO: 12433 - DNA, 175 bp, Oryza sativa
  unsure (1)..(175): unsure at all n locations
tatttgacgccgttgagttttttaaatatgtntaaccgttcgtcttatccaaaaaactttgtggaatgtgtaaaactatatatatacataanagtatatttaacaataaatcanatgataggaagataattaataattacttataatttctgaataagacgacacggtcaacata

SEQ ID NO: 12434 - DNA, 375 bp, Oryza sativa
  unsure (1)..(375): unsure at all n locations
tctctctgtggtgacaaanacgtaaagaatgatcagataaatggctgattcatcattggcaaataataaatagttgaattcccaggagggaaaggcatactctccctattccctaactagtgatatatcttggatatgattacgtgcgtgataactttcagctaatgctgggaaaaactgcggcgaatgcacacaatatcaggtgcatatgagctagtagctaggtatagcagctgaatgatatgatggcaacttttgacgacccctgcctgcttgcgatctgacgcaacacgcatcttgttcgccaccatctctccatatatggctttcaccctctttctttccccaaatgggaccgatccttcgatccaatgg

SEQ ID NO: 12435 - DNA, 140 bp, Oryza sativa
actgagctgcagctctacttgttgatctttacttactgctgcacttgtatttcagcgagcgagcggacgccctggttgggagctgctcaatggtcgcagcgagtgcgccgaatgaaggaaggatcgaagcggagtacacc

SEQ ID NO: 12436 - DNA, 403 bp, Oryza sativa
  unsure (1)..(403): unsure at all n locations
gagacagccacatgaaaccatattaaatgaaagaccacttaacatcttcattcacgacatcgactccaacattacaatctttcaaatgatacaaaacagaatgtggatcaagttaccccaatcttgatgagtcccgtttctcaatgtttactttatgggagaaatttccattgaaaattttccccgtcaacaaactgtacaaatctaagaagtatggcaagtaatactccctctattntatttagcatataagaaatcatacgagtttgcataagattaaataagtctatgaaaccaacagaaaatgccatgatatgaataatgatgaataactatacgccatggtaaatgaaatagacgaaggcatatatttatggctattaactangtttatatatacata

SEQ ID NO: 12437 - DNA, 408 bp, Oryza sativa
  unsure (1)..(408): unsure at all n locations
gcgctgagcatgatgaactgtatctctttgatgtcgttgccggccatgacgctaaatgctcaacacgtttttgttgcattgctgtctgagtttggtaaaaatgttctcccaactgttttggtaatgagctaagctggatgttttctcatagattaatcagctgtgacaatctgtttgtcatgctctctgctatccagatttgtcctagtgtgtattctttgtgacaagcacttggtacactatggccgagttatttccaatatttctcttcgaactttcaacatttctatcacatcataattgtcctacacacaaactttcaacttttccgttacatcattccaatgtcaaccanactgttaattntaacgtgaactatacacatactaatgcttgtgctcactcttt

SEQ ID NO: 12438 - DNA, 164 bp, Oryza sativa
  unsure (1)..(164): unsure at all n locations
tattattcctcaatttcctgaaccttngaatatactcatgcactagctcatcatgctcttgcttgattgacgtgagatcagacagcttcatctcgtgaaccccactatagaaataactatgaaactgcttctcttaatcggnccaactggtaatcgacccatgt

SEQ ID NO: 12439 - DNA, 277 bp, Oryza sativa
tgctggcggtggtgcttctaccttaagctcagactaattacttctgtatactgtacaccttgctctccatactgcaaaccctgccacggttccagttgtccctatcatgagctgctttcttccgctccacacctactgcattcaaggcgcttatcatatacacaacatgcgtcagagtggcactatcttcaccttcatgactgttgtaagttacataatcatgaccatgaagcttgtgtggatgatactagatagctgatgactctaactcctcatc

SEQ ID NO: 12440 - DNA, 251 bp, Oryza sativa
  unsure (1)..(251): unsure at all n locations
agacacatnggttcaccacacctggaaatatatggcatatgtggtggtaaatctgagtaagtaaactcataaaggattaccaaccgcctcgaaaatgaccacaatatataatcagcctaagccataatattggtcaataaaaatgcacacttacgtggcanaaagcaacgatattgtatccaatcaattgcttataaacccaaacagcaccatgactatattataaagtcagcggggcagctatataaagc

SEQ ID NO: 12441 - DNA, 290 bp, Oryza sativa
  unsure (1)..(290): unsure at all n locations
gacatgttatatagatcagatngtgtatgtaattttgtactacagtaatagctagtaatatatcttatattaccctatgttatgtcctaccggctctttttacagtatctacctaatacatgctctatacatgctggacctattacgggcgatagggcaaacttatggttgtaattattttcacatattaatcgatagctgatatgttcctgctatattggctggcgtctgatcgatacgtcatcggcctgtcgtgcgatcggctgtccatcaattgatcctattttcat

SEQ ID NO: 12442 - DNA, 199 bp, Oryza sativa
  unsure (1)..(199): unsure at all n locations
atcgtatganatcatganatttgattggtgattngaacttaagtgtaatatacttcggttcatgattatattntaatgcatgctngctatatttatagatgggtcatcttctttttatngcaacacatgacttgatgtgctatatgtatgctaagctcttgaataattaatgaacataatcctatgcttgatgaaatca

SEQ ID NO: 12443 - DNA, 223 bp, Oryza sativa
tggctgaaaagtctaatgagactgtgaaactcagtcaagggaagccttctatcaaagaaaagaacgagcttagtactattgagggagagtaactctggatgttttttaaaattttgctgaaaaaaagaaaaagaaaacgaaccggactcattggatctcctcagtatcatgttcagtagattacagcgaggttttctatgagcgactgtaaactcttggtatg

SEQ ID NO: 12444 - DNA, 231 bp, Oryza sativa
gctcacttttataatagcagcggtaattctctgtcactgttcacagtcttcgttcttgagagcatgtttaataaatccatacctttccttgctattggacttctactgaccgttaacacgtagcggctaaaaactagacaatttgtgaacaaccttactgaagccgggaacccctcatgcactgaaccattgacgcgataaaaggctcctctccccgcattctacagaaaa

SEQ ID NO: 12445 - DNA, 247 bp, Oryza sativa
cgctgatctcaacgagcgatttatgcccacattatcatatttcttgtattcctccattatcattcagaagttcgttgatgaaatactcatcatagcttgtagtgcaattctcgctattactttggttatataactactttgtgatacatcgacttcgaagaaatcatagctacaaaattctagattggtatgagagtgttaattgctctacactaatcatgtcaacatctctgctgatgaagtgaat

SEQ ID NO: 12446 - DNA, 217 bp, Oryza sativa
  unsure (1)..(217): unsure at all n locations
cctattctaaccatcatatatcttgctatctgataatacgtgagcttgaaacatggtactttatgctgatcctcctcccccaataaaaccccctgaaatttaaatcaatgaactaacgaattagtctacatatgagtcctcaatgatggagcataatacaagactgcacgccattgaacgccacaggtcgcgtgaagtgagtcancaatcttatctg

SEQ ID NO: 12447 - DNA, 278 bp, Oryza sativa
atgctgcttggaaccattggaagcagaggaatagtttaatctttgaaaacattgttccctctgttccctcttggagagttctctttatgaatgatctctcccttttagttcatagagtcaaaaattctgagagagatacattattacagtggttaaacttgttgtaattctttcccctttattaatataaaatcttaacggtgggggcttcccctaccgtagttcttcataataaaaaaaagcactgccggctggtcggaaaccctgttgctgaaatt

SEQ ID NO: 12448 - DNA, 386 bp, Oryza sativa
  unsure (1)..(386): unsure at all n locations
tgaagacattattcagcatgagtgatctctggttgctatcctactatcttggcatggaagtgaaacaaggtgatgatgggatcatgatgactcaagctggttatgcaaggagaatccttgagaaggctggaatggaaggttgtaatccttgtcaagttcctatggaacctatactcaagcttatcaagggagaacctgtggagtgtgtagatgcaacagaattcagaagcttgattgggagtcttcgctacttggtaaataccagaccagaattgtgctattcagttggatacgtcagcacgtttatggagaatcccacttctaaacactgggctgcgatgaatcatgtactgatgtatgtggctggtacacnagaatttggattc

SEQ ID NO: 12449 - DNA, 197 bp, Oryza sativa
acagtgcttgtgtataccttttttaggagcatccttgaagtcaacctgctgtcattgaggtcttttgtgatgatagctcacgagatattctgtacgcttgtacctaatgattagctgttgcgtctgtgctaagtacagtagctgactatcatagatagattaatctgtagatatggtagcacaaaaccactggctga

SEQ ID NO: 12450 - DNA, 307 bp, Oryza sativa
  unsure (1)..(307): unsure at all n locations
atcaatcanggcattgtataaccccactgcctgatactgcaaagatccccatgaccgatccagttcaggaataattagggtgtactaataccatgataaaaacatgctctttttgccgatcagttgttaatattttggacattcacagcatggtggaatgaatcgtggtaaaaatacttagaatgtgtctcaatttctcagctgatttatactagactaacttgttgctctcagataaaaaaaagacaaggaattaagtgagttacataatagaatgccatctatcatcacacctaggaatgcacta

SEQ ID NO: 12451 - DNA, 302 bp, Oryza sativa
taataatagctacaatagcatatgcgtcgctgctacaagactccacaagactatcagctgctatgcattgacacctagcaaatatcatcaaaaaatattgaggactacagcaacgaggacttagtcttactattgtaataatgtggtagactatatgacagtctcatcaccaccactatgtacagggcttacataataagcaacataccaatcgcctatacttaataatatctactataataaattgtatattacgtggaacttccatgtttgcacatatgatagtgttacataaaatatta

SEQ ID NO: 12452 - DNA, 336 bp, Oryza sativa
  unsure (1)..(336): unsure at all n locations
gcggcgcttgcgatcgaacaacatgtctgacatctaaggtangcatgggatangaatcaacgcatgctcaaaaccaaatttaatgaagccacaaatgactcatacaactagccaagcatgatgatttttatgcatagaacattttttttttatgaacccggataaagatacccatgcaacaaactaatcaatgaatcaatgcacaaaatagatgcatagctataatgatacgcataatatctccccatcgtacctagacacgacttatcgcatatcacctaataaattcccgactcactatcaaataaattccggataaaattgttctaataccct

SEQ ID NO: 12453 - DNA, 359 bp, Oryza sativa
gcttatctcccaccgcccatagcacaagctcgcggacctctgcgcctggcttcatgctcataccgctgtggtgggcgtcgctcctatatgaagccgacgctgctgtcggctgctgcggctcgcatctggtcgtgcgcctctgagttcttgcggtgcgaatggctccggctatgtggattgttctcttcttattttacttattcttctttattattattatcaggcccgtgcatgtgcatgtagtgacggtggttctcgactactgggcccacacgcacgcgtggtactcgttcgattggaacgggcccaatatagttgagccctattgcgctgggatctatatgcggtccttaccaact

SEQ ID NO: 12454 - DNA, 240 bp, Oryza sativa
  unsure (1)..(240): unsure at all n locations
gctctaaaatgaaagccaagtattgataatattgggagaagtgcaatatgggtatttctgtagatggctttcttgatcccagggtcaagacanacctagtaaactattatgcagaanagatctatggtgagatagatatgttccagtgcattntanananaanattcatggatgttgtcaaccacttattccaagcttaagtctagtgcaacaacttcaaagaatgcatcagctacaaat

SEQ ID NO: 12455 - DNA, 490 bp, Oryza sativa
  unsure (1)..(490): unsure at all n locations
agcacctcgctcttataccaattgaacgtgcagagatgtatcctagaggggggggatgaataggctntcctgatattttctcaacaaaagcaacggttaaattgacagggcccggaacctcctggtgatgaacaccggaacttcctatcagtgatgagcagcccggaacttccggagttcttcagacaggaacttccgggcaacagagaanaacgaaatatgagaagtataacaggtcctagctagtgaaaatcatgcacagggttgcacaagatgaaaatcacaagataccagtagattcatacacagatcaggcacacgagagacatatgcgattttttccgaattcggatacacggatctactctccgtgaggtgtccaaaagcggtctcgataacccctgcctacttatgatagatccaaaatgtcacagcttaactaacatttagtcgttttagatgatgacacaaatcaatacaattctctaaa

SEQ ID NO: 12456 - DNA, 333 bp, Oryza sativa
tcactcctacgaacaaaaagttaattgcactgttcacatttgtaccgaaggtacggaatgatcttttcgtacctgtaacttctgagcaatgacattctcatcggtatgtcgtgcgatagtcattgaaattgcacacgcatctcctttgccacgatggtacctcttcgatgataaatcggtgaccctaatgctttaaagctgtatattaataataacccacacttattagaattcactaagcaaaattaaactattgccattaatttgataacagagttaatgaccttcatttataaagtaaccttaactgctttgcaatatttcccaaacgca

SEQ ID NO: 12457 - DNA, 512 bp, Oryza sativa
  unsure (1)..(512): unsure at all n locations
tcctcaacttcatcaacatcggcttgtttagctccataatccgcatgtatcgtgaaaaccatgttaaccgacgcagtcacgacactcttccctttagccaatctttntgcttcatcggctttgacttcatcggctatagcagcttggttcttaacacgccactcttgcctcggccgatgattaatctcctgctccacctcatcaaaacgttctctgttccataacacttgaacccttctcttctgatttttcgtgaaaataccagaaggacaccattgagtctttctatcctcatcatctctgtgatcacactcttggtttacttggcccaatctttgatgaacaggaactcttgtttgcctcagctgattacttctgttgtaaatctgctngaactgtctgcacattactgcatcaggaaatcttcatacatggcagctcattcttcttccncanaatctgaaaactacattccaatgtgacaaaacaccatatctcttatataccttctg

SEQ ID NO: 12458 - DNA, 270 bp, Oryza sativa
atcccgtcgaaatggcgctccatacgccgcacctggcgcacgtaatcgttcatctgcgggtcagaacaccggtactccttacagacctggttaatgaccaactgggagtcgcctaacaccaggatgcagcggatccccagcccatctgccactctgagtcccgcaaggagtccctcgtactccgccatattgttggtcgcccgaaagtcgatgcggaccaagtatctgaggatgtcttcgctcggcgaggtcaacgtgacccccgcaccg

SEQ ID NO: 12459 - DNA, 309 bp, Oryza sativa
  unsure (1)..(309): unsure at all n locations
acgaccgcatttcacgtacatatctatcaaagctggtggcaccactacatcgaacaacaccttcttctttncaagatgagtgcagcactgcttgtcaagctccagtggccactgacagccaatgcgtattatagctgaaccattacatcttgaaactcaagctattgctccgattgctagcatgagcaactctgaatactctttagcttctgacaacctgttacatctcagctgctactatatgggtcaaaccatctgagcttgcacatagtgcacaacactgctttcgacataatggcagaacatctt

SEQ ID NO: 12460 - DNA, 297 bp, Oryza sativa
gcttatctatttttccgtctctccttaactactgcgtttcacgattattctttggctctttatgaaacatgatacatattctatggactggaagatagatcctaatatgctactccctccatcccataatataagaagttttagagttggacacggttattaagaaagtagatagaagtgaatggtggagggttgtgattggatgaacagtggacgtaaggtggaaaagtgaatggtggaaggttgtaattggttaagaaaaaatgatgtggataagtgttatatttgggacaatcc

SEQ ID NO: 12461 - DNA, 68 bp, Oryza sativa
ccctaaaccccaggagggggtcctttttttaaccaaagacagcgcataaccactccaacccacactac

SEQ ID NO: 12462 - DNA, 64 bp, Oryza sativa
  unsure (1)..(64): unsure at all n locations
aaaaaaaaaaaaagtggctggcacgaaacaaaaacaanccacgaaagagcaaaaggagattttt

SEQ ID NO: 12463 - DNA, 382 bp, Oryza sativa
  unsure (1)..(382): unsure at all n locations
ttatatactaacttacgtcgccaagctatcgtcaccaagaaatgactcatnttgtctgtatcttcaataacatagcttgaaacaaattcagagattccttctacaaccattgtttgctagcccaattatgattgagttccatgacaaggtgtccttctccttcatttctttgaacacttgcaatgcttccatggcacttccacatttcatatacatgtcaatcagataattctccataatggtgtcaactgtgatgtgtgttctcctcacgactcatgaacccacntaccaagatcaagtgcacccaaatgtgcgcaagaagacactacactggcaatcacaatggcatctcggttcaccatggctctccgcatgtgcctga

SEQ ID NO: 12464 - DNA, 221 bp, Oryza sativa
  unsure (1)..(221): unsure at all n locations
gtgagcataatgtatattacatactcgtccacctgaatttctttgtccanaatcaatgcacggctctgaaaccaacttgtgctactacctattgaaatataactcaataacatggtttgcaaacctaataaattgacaactgcaatgcccgtgatatatatatgctctcacattcacatgagtacaacttaatagaacaaaataatactgattacagcagt

SEQ ID NO: 12465 - DNA, 311 bp, Oryza sativa
  unsure (1)..(311): unsure at all n locations
gcactgagctgcagctgaccaccttggagagctctgaaggtttcttttattaataaacactattagactatgccacagtacgattcgtatatataagagaaaaccactcgagtggtatctacgacacggaggacatactnttactatcaccaagcttatttacagcatggacaaaagaatcatgcaattccggagtccatctcatccgtcgttacttgcaaggcattgctcgtgtggaggagactaggacatgaaaatatcgcactatgggatgaattactgattgaagcagctgtgatgcaacaaattgg

SEQ ID NO: 12466 - DNA, 311 bp, Oryza sativa
tttcgtgtatttaatgctgccgtacaatgacaaggtcggattgtcattattgtgaaacacataggcccgtatgatctgatggctctcacatgatacactaattaatcttactactgtacttgaattatttgtttttcaaaagcaaagctatcgcatatatccggattatgcatactaagccatgcattatgatcgcttgaatatggacagagacaaataacactagtcccataaactaatgggagacaaatgcaacgatgcgttgtcacatctacctgaatgcctcatggccgtgatgcatgcaatgactt

SEQ ID NO: 12467 - DNA, 177 bp, Oryza sativa
tctttcaagaatggtctgcatgacaacatctttgctaattaaaaccaacataactcatttatgcatatcccacctgccttgcaactcacgagaatacatgcatcctcacttatagagggtataaattggtacctctctctaatttacataatggttggtctttccaagttctaattc

SEQ ID NO: 12468 - DNA, 485 bp, Oryza sativa
  unsure (1)..(485): unsure at all n locations
acacttaaatactcaagctaacggctggctatggatatttaccgtctggctttctttatttgtcttgtgaagatcgattatgcacaaagtatgcctctagtacttatctgctgattttgaacagataaagatgtctatgtcagtactaataaatttgagttatgagttaccctgaaatctgaatccctgaatagttaccagatgttatgaagaacgaccggcttacagttgatcagtcatgcccttgtatatatatcatgcaaactttgctgaacttttgaaggttattgactatagactcactatatctatatctatatctatatctatacctaataaaaaatacataagggttccgcatattgtttcgtacgtcatcctgatctcgatactaaaatctattttaatcacgtttatagtgcgatcggacttgtccaatctactatnaaaatcgcggctgatattgaatatgtgttctttcatat

SEQ ID NO: 12469 - DNA, 332 bp, Oryza sativa
ctggcatggtggtaatggccataggcgctaggtgacacactgggtgtctcccttacggtcgcaagagcggttgctaaccctcgtctgctgaatcaaacccaccatatgtgtgtttattgtacaactccatctaatctacactcagtgctgtatactgtctgctatcttcaagctgcagatatgccttcgacggtgaccccccagtccgtgcatgagaagtatggtgtaggcactttgacgtgaaagccgtacgttctatcctgatatccacttataaactgccaactacgccatagtcaatgttatatcttattttttttacgttgacactg

SEQ ID NO: 12470 - DNA, 316 bp, Oryza sativa
gagtctaaaacccatagaagctattaaaaactttcagttctctctgatctatttataaaatcgaacaaggcggtgatataccaagtaagcaaattgaatcgataaaaaatcacactccattattataataatatcccccgactgacaacttcaagaagaatacttgatgttgacagtcaagatagggaagtacaatgataaacttaagcgtataaacgacgaagatgttcaatgttccaagagttgtcgacgagagtaccatcttctcgcttgagtcgataggaacctggccgggtgacgtcagagatgataaatg

SEQ ID NO: 12471 - DNA, 417 bp, Oryza sativa
  unsure (1)..(417): unsure at all n locations
ctgangatgcagcttacctggagaacatcatgcatcacatatctgtatattccaatactctcatctgctcttccaagaaacaatcttgaaaaaaagaagaggagggtgcttaacaaataatctgctctcaaatgggctataaagaagaagaatgtaacctggtcttcacctaagtgtgtggcgatctcggagtgatactacatggaaacgtacatccatacaccgacaacgtggtgcctatcacaacactccgggtgtgactgccggaatacctttcgcacattcaaacacaaacaaaacatcgttgcatagatatcataagtgggtcaacacaagcgtacaccccctgacaacaggtactatttaacaaactaggctaattaaggagaacaagcagtcctacatggcccatgcctg

SEQ ID NO: 12472 - DNA, 427 bp, Oryza sativa
  unsure (1)..(427): unsure at all n locations
ctaagcttgcagataagttganacagttggaaacaaggtcacatattntgtacttttgaacaacatgttccaaaagatataaaagatagttataatatcaacatgctgaatttatttcattgcagcaaaatataacaatgttgtaaaacatttgctggtaaatgagccattagtacagtattagatgtacagtactaacaacactggaataaatgttgaatgagaaccactaaaagagattatgaagtgcatgtgctattagtttgtttaattaaaagagaaagggatgagaacagttctactcttccaatatctctagaaggcttctatgggtaaccatttggcataacctatgtgtaaggaggctctgataccaacttgtcacgcccggaatttctatccatatatccaaacgcttacatgtgtg

SEQ ID NO: 12473 - DNA, 161 bp, Oryza sativa
  unsure (1)..(161): unsure at all n locations
gaacaacacaattatgcanatatatctctacgttctcttggtcaacanacagatcgaatagagacaatccttatggaaggctacaaaacaggaagacctgaggtanagaataatattccctctaattctcagtcttctagttctcagtctggtagtcctat

SEQ ID NO: 12474 - DNA, 361 bp, Oryza sativa
cgatgatcttgtcgacaacaatcaaagtgccttcatccgcagtagatgcatccatgacaatttcatgtgggtcaagcagttggccatataactgcatttgagcaagacgccggcaactctgctgaattatctggacattgctcaagcgtttaactctgtctccttttcataagggatttgggcatatgtggcgtgcctggactgcgatccttttcagaacttcgagcacacaggtgttgctcaatgggacgccggtgagaaaaatctggaacacgcgcggagtgcggcaaggtgaccctctgtcaccacttctcttcgtcattgtcatggacatcttgagttcgatgtttcgggtcgctga

SEQ ID NO: 12475 - DNA, 303 bp, Oryza sativa
ctatgaatcacaaaaaaagaagatcttaacgttgagtgatgattcctactgacacaagtcattcgtttcactcactaaaatttcaatggcaactttattatgcctttattgcccgtgtgttcatgattgttatatagctacatcgattgacgttggttgaccaacaagctagagcgactattacagcggcagacagaatggtcctttggaatttgacagccgaccaaacgatgttggctgctatacggatgcagcgtctttctgcgaggagtatcggcgatgcgtgcctacagtgtagctcac

SEQ ID NO: 12476 - DNA, 520 bp, Oryza sativa
  unsure (1)..(520): unsure at all n locations
tgaatccctttgtgcctatcaagatctggatcctacttatcattcatataggatgagtagtatctgatataaatataatactcgaggaaaattcaaacattctaaaacgtttgtgaatatgtttttcttctcttgtcaattntgatttccccgagcagatgactcattacgtttaaacgctctgtccgactagtcattgcccccaagcaccgggagtcatcctatgcacttcccaaacatgcatatgagtgacatgagttcgtcaataatggaacataagtttcacgaatctgaatntactactcgagtacttttgcaattgttaagagaagaatataaatttatcttatctctatgctttngatttattccgaataatacttatgcaccttgcgttactcggtccattcaacgagccacctggtgctatgaatcggcccataaacaactatccatctgcaaaccaaacggaaagcatangaagatagaactccatactcgatggaacttattgtactcg

SEQ ID NO: 12477 - DNA, 457 bp, Oryza sativa
  unsure (1)..(457): unsure at all n locations
taagagcangtcaatatatttatcttataatcggctgtaacacatgntatanaagataattaacagagaaaagaaaacagagatggactacaactctatagtcgggtgcagtactgattataaaaacgtttgtgtgttaaaggtatgactaggtattgtggtattgatgagtgtagtatatatttataggcaactattatactaaatgagtattaaaatatgtatagataatntaattaggtccttcttgttggcccatatnttttaataagccaaatcaacttattaaggaatacnaatagttagtaggtataaatacatgtcgtcgtagcactaccataatantaaaagaatcatgtgaaatatcttaataacttacaacaagttgcatttaatttgactttcttgttataagcacaatggacttgagctgactactactactctcgctacatat

SEQ ID NO: 12478 - DNA, 424 bp, Oryza sativa
  unsure (1)..(424): unsure at all n locations
gacacttataaactaagcttcctgctaccattgaacacctactcatagcttctgtattttaaagatccttngaagctcctattctgttattaactaaggacatgtggaggtttctctcttgtccctaataataaaacattcttttccaaaatatggaggaagctaaattaatcaaggccaaaaaaactgaattgtccctttacttgttcttgtgattatttctatacctaccatatggaattttacaatttttctggaccaaaatgttctttttcttacttttttggcangaacattcaactgaagttgctgaagcatacaatgtcattcctaatcttgtgagtaatcaagcctatgtcatttgatatatcatggtgcatgatctaattactggcttctatccttctcaaatctgtcgatatct

SEQ ID NO: 12479 - DNA, 318 bp, Oryza sativa
caactctacaactcatatataagctcaaaattaatgtcagaataaaataaaatgggtggtcttgaagggtaaagaatatttcgttttcataaaccagatatcaaagttcaaacaaacttaatacaaattgtgacagtcgaaataattggaaactccaaaattgatatttgaagaatcgatgcaagaaggacatttcaaagtcaagatatccaactataagtacacaatatcctcaacagagaaaccaatatatcgtttgtacaaccagacacagtttaataaatcaatagatgtaaacaatgtactctacctacaaca

SEQ ID NO: 12480 - DNA, 307 bp, Oryza sativa
  unsure (1)..(307): unsure at all n locations
gtcttatgtggagtcctggcttataccccagttgatctcttgttattattgatccgtangcccgctagtccgctgctgtttatttgtgattgtcacgccttaagtgccttcgtaataatgtaaatattatcgatataataaagatgtgtctnttatatcatgtgtgtatggtgtaccccggcttttcctgtgacggngattaatacactatcgttcgggaaaaggaaatattcccggtcgcgacactggagcatacagcgcacgactccaacagactctgcacgaacgcagcgtgcgtaagcccaca

SEQ ID NO: 12481 - DNA, 400 bp, Oryza sativa
  unsure (1)..(400): unsure at all n locations
tgtctacactctcccatcaactatcggtgatgcttctgcttcctcactgttatatgttgaaaaatatgctgatgctggcattgttgacagggaatctattctccccgagagccatggctttatcatgaaggaaacaaatcttgtgaaagatctccgttctgctgtgctagctatctatgcacaggtgttccggaatgagtttgtatcaccaccttgggaattcttttcagatgtaacagtggaaatcaatatctatgtccagtcaggttatattgatggcatcataacttgattttccgataacagtcagaagatacaaaagtaagtgtcattntacttatccaattatccataatggtctattnattcaactcttgcatgtcttagatatgatgaaaat

SEQ ID NO: 12482 - DNA, 282 bp, Oryza sativa
tcgtttgagcttagggtaagaataacgtgtttgattctgttgttttgcccattttccatttcctactatactacagcggctgaaaaatgatttgccctgtgttgaactgatgccagttaatcaattaaaggatggcgtatcactgtattgtacaatattaacaagttgaagtcagtcatgtaatacacaaatagacctatttaagttactatgtgaccaactttcaagtgttgttactactggcaaatgaatacctgtagcgcattaccgatgaactaatga

SEQ ID NO: 12483 - DNA, 439 bp, Oryza sativa
  unsure (1)..(439): unsure at all n locations
gtttcacgtaatgctgctctctgttctctcggaatcccctacatacgcagagatctggatcccctatcatatgatggccanaagatggatcaatatgtgagtgtgtgntttcacatagtagaatgtgtagtcaagttaatcaaaatagaatcatctttgctagctgctatgacactggatagagtaaacaaattataccccaatgcatttgatcattcatgcacagttcaacatcggtcttaattaaaaattaacaaagaattaaacatttcaacaattattggcttataggccatatgcacctagctaatagagtcatcaacctgaataaagagctggtcgatgaacggtatacacatagctcgagctagcttaccatttatctgtatgccacattggactagctataacttatacatacaacattgcattgagatgt

SEQ ID NO: 12484 - DNA, 311 bp, Oryza sativa
  unsure (1)..(311): unsure at all n locations
ctaagctntctaatggcacatggataacgntaacataagatagcggacctctgtttcatacattacacggatgacaagacaggcatctaacatcatcgagaatntgataacacgattaaccgaaggttgcatcacaatatcctccacccactataaatgataaaactcaaccatggccactctggctatcccctgtcttcacgggctcacatatatcgatttcagatcagcacgactcagaaacaatcacgttcaatagtctggaaactgagtattactggcctacggataataaaatgacgcactttgga

SEQ ID NO: 12485 - DNA, 217 bp, Oryza sativa
  unsure (1)..(217): unsure at all n locations
cgattcctataaattgagatagaagcatgttcttcatgcccaanagcggataaagtagatggaacctgttctctaaccttctctttgtagcagatactgcatanagttacctgccttgtaanggctttgtaggaataatcaaacttgctctctctcgttctatctcagagtatccattcattcgatcttgctatccgctctcaattgaatcccttct

SEQ ID NO: 12486 - DNA, 288 bp, Oryza sativa
ctaagcttctgacctttccttacacagtgatgatgtagtcgaattcctatatgtcaataacttgtgtaaaagctcttgtagaggtaagagtacctctgagatctttcgttagcccgaacgaacactcttcctcttattagaatcaaataagtgacaaatgaatggtaacacatggtacctatccgtggtcgggaaatgctgtgtgccctatgtccttgctttgctctaccgaatgatgacgcaaggtttttctaacaacagtgttcgtgtaccatatctttgaatgac

SEQ ID NO: 12487 - DNA, 339 bp, Oryza sativa
  unsure (1)..(339): unsure at all n locations
accttcctattgaaattatctgataatttctgacatggttcgcatgtccaaatgaaagctcgcgctcctcactatggcacaacccatgccaacgtggcttagaatctacaaggtggcgagataatgccaatcgccacctcaccgcactgtgaccgcttcatattcccttatatgcttggacnntttntaattattaaatcaccagattgaatcattatttactgtaattatgatagaaacaacataaaccgaggaatgaattgatcactagccagaaaaactgtcacatcataatctatctcattttactgttgcatgcacatggcaatacacaccttt

SEQ ID NO: 12488 - DNA, 380 bp, Oryza sativa
  unsure (1)..(380): unsure at all n locations
tactaagctgactcaataatatgacctgtaaatgtaatgctnttccatcatttagccatatagtattaatctgtcctggttagatgggactaaaacttttaaaaattttaagtccctatcacatcgaatgtgtagacactaattataaatataaacgtaaactattaataaaacccatccataatcttttactaattcgcgagatgaatctattgagtctaatttattcacgaatagtctatgtggttctcaaaaaaaagtctatgtgatgctacagaaacatttctattatagataattaggctgaaaaaattgctcgaaattagcttcattatggtatagtttgacagagcatattatacctaaatagtgctaatata

SEQ ID NO: 12489 - DNA, 339 bp, Oryza sativa
  unsure (1)..(339): unsure at all n locations
ccgacttcatcgccgagtggactgagtgctaagatatcattcccgtggtgaagatggaatattggaccacgcattntgactggtcaatgatgctttcatgcactggagcgggggttgttctaatttccccgactggagaaagactgagctatgtattgtggatacacttttctgcgtctcacaacgtggcataatacgatgcgctccttcacggactaaagattgcgatctctttgggaattcggcgtctgatagttcgtggtgagtctcanttgtgcgttaatcaagctatgaaagagtggtcctgccctgatgatatcatgaccgcttaccggtatg

SEQ ID NO: 12490 - DNA, 261 bp, Oryza sativa
  unsure (1)..(261): unsure at all n locations
gaagataccaacaacacaccgtacgtaggtgtctcgcagtaatacttgtctacttaggttcaaagtggtagtacanatgctcgtatacatcggtaatatgggcgctcatatntagaactaattacgcgtcgagtgtatgcgatcattaaacacagaaacacatagagcatactttatcaatcacaatatacacgaatctcgaataagatntgatataacctgtccgcattcgttgtcatagcttatatcacattcttatct

SEQ ID NO: 12491 - DNA, 313 bp, Oryza sativa
tgcactctatcttgcacaaaatatgatcatcatctcttttatctcttcccatttgaataaacacgcaacttatcatccaggaagcttattttggagttgttaacgaaaagcatggtgcaagtcctgatttgatgaaataacccattgatggtaaagcttgccaacatgatacatgttactttacatctgcgatacagctggttacttgtatgtttgcctactctatgtacttattaatttctaaattcatcaacatgtataaatgtaactatctgcattggcatgtgtaaataaatttcatgcgcttcaatct

SEQ ID NO: 12492 - DNA, 303 bp, Oryza sativa
tgtctactctacacaccgccacactcgccttcgcctctcgtcttctgtttcgccctatcgccgtgtgccctatcgccgtcgtctccgtcgtcgctccatccgtgcgccgtcgtcgttcccgtcatcgccgtcgctcgggaagaccgtcgtcgtggtcgccatgttgccgccgttctcgttcgtcccttcgtcgccgctgaagaccgtctgagcaccgttcgcgtcgccgacccgatcttttccgccgcttcctcctcgtcgccgtctgcgtacgttggtcttacgccgctcctttggtcaccg

SEQ ID NO: 12493 - DNA, 361 bp, Oryza sativa
ctacaccgtacctaacaaggcatgtgctaaggattctttccctttgcctcgcatagatcagattgtcgactccacagcggggtgcgaccttttgtggtttctagatgcatattctggttaccatcacattcgcatggctatggaagatgaagaaaaaactgcggtcattactcacatatgaacttattgttatacgacaatgcccttctggttaaagaatgcaagtcctactgttcaacgtactactcgaatttctttgtggtaccaattatgacgttattttgatgcttatgtccatgacttggttgtaaaacgcgcaccagatactgtgttcatatttacggaactttgagagcctcgt

SEQ ID NO: 12494 - DNA, 218 bp, Oryza sativa
  unsure (1)..(218): unsure at all n locations
cagtatgggcgcatacactcgttatgtgcatatcanacacattatatacttagcanaatctgagccttcgggcaggtgggctgaccgtactagtatccatgaaagataatcatgaattcaacttctttctcgacacattatcaatgaatgcccaatcatgatatgngcattcgtagctccaatcaagaccagtatatcgcacacagtgcagccacaat

SEQ ID NO: 12495 - DNA, 233 bp, Oryza sativa
acactttattctaagctgtataacaatctaaggaattggtacatgaattcaaggatgtgttttctgtgcgccatgtaccctacctactacgcgctgtctgacctcatgtcagcatgggaaagctcgtcttctgctcctccatgtcatgaaccgtggccaccctaatgatgagactttacatcgtatgtgaccatattaacgccacatactaatacataatcatacagttcttt

SEQ ID NO: 12496 - DNA, 150 bp, Oryza sativa
gctgccgcgaactgtcagcaatgaccggtctatgtatttgtctttctccctaccgttatcaactgctgctgtcctactccctgtgggtgcaggcgttttcatgctcgtccggatgcatcggaggtactccgagttgctggaagattggga

SEQ ID NO: 12497 - DNA, 505 bp, Oryza sativa
  unsure (1)..(505): unsure at all n locations
agcttanacggtgccatctgtagactggcctggtagctgttgttgtactataattccgcatatggcaagcttttgtcccaagctccaccataatcatagagcacaagctctcaacatatcttccaagatttgattgactcgctcggtctgaccatcatgttgcgggtgataggccgtgctgaaatttaaacgggtccccagttcttcctgtagcttctgccagaattttgaggtgaactgactccctcggtcagatacaatctttttgggtactccatgtatgcacatgattctcgaatggtaaagctccgccaacctttggcccgtatatgtggtatgtactggtatgaagtgagcaaccttagtgagtcgatccacgactacccagatcgaatcgtgacccgatgatgtcctgtgcagtcctggtataatgtcatttcatatctctccattccattccnggattgaagaggtggagatacctgtggtcttggtgtctgcttac

SEQ ID NO: 12498 - DNA, 279 bp, Oryza sativa
  unsure (1)..(279): unsure at all n locations
tatgtcgacaacatcatcgtatatagccgcaacgctntcgaccatgcgttcgacctacatgagaccttcgacaacttgctggcagcgggcataaaactgaatcctgagaagtgcgttttcggcgttcgcgcacgcaagttgttgggcttccttgtttccgaaagatgcatcgaggcaaatcccgagaaaatcgatgccattcaacaaatgaagcctccgtcgagcatacatgaagtacataagctcgcgggccgaattacggcactcagtcgattcctc

SEQ ID NO: 12499 - DNA, 397 bp, Oryza sativa
  unsure (1)..(397): unsure at all n locations
gattctgtggannaagctgtaactggtagaaactctctctatctttatctattacattgccacatctaatttattattgttcctacatcatgtatttcaagtctcctttaaatgaagttctgcatgactggcatatatatgtctatgaagcaaacactatcctaacatgatcaaacacgggcaaattacttgtggcaaactctggcgttaattttataatttacccaactacgactcgccttgctggagcacatcaattaaatgcagatcgatggagcatcgtttcccgatatgggaatgcgcgcgcacacatttacacatacaattggtatctacccgatcctgatgcgcgatatatatatgggaccgatcgatcgatgcatgcatgcatgtttgt

SEQ ID NO: 12500 - DNA, 346 bp, Oryza sativa
  unsure (1)..(346): unsure at all n locations
gctaaccatctgtctatatatggtgatctatgctgaaagatattataattcacttctttcacagataccagcaagcaatcattactatctccaggaaacactttgtccgataacataatctggcaaaaactatcatctagtaaaaaaataaagaggtgttccaccactctctattgtggacaattttcccttatttgatactagtttagtcaataaatgtagtcaaatgtagatacaaagccaaagggtacaatcaattcacatgcaaacatatgcatgctcttccaacaaatgcaataaaaatatgtataactcataatggtcaagcattngctacaatagtttc

SEQ ID NO: 12501 - DNA, 307 bp, Oryza sativa
tcgcagaaccctcatcgacggtggcagtgcactcaatatcctcttcttctagtacctggatgatatgcagattcctcgctccgagctaaaaccaagcaatgcgccttttcacggagtaattccaggattatccgcaactccactcgggcagatcacccttccggtcacttttggcactcgggaaaacttccgcacagagaatatcagctttgaaagtgccgatttcgagacagcataccatgccatactcggacgcccggcgttagccaagttcatggccgtcccgcactacacttacatgatgatg

SEQ ID NO: 12502 - DNA, 235 bp, Oryza sativa
  unsure (1)..(235): unsure at all n locations
cgacactccagaaaactcaagcttgcggcagatggggagtgtgtggaggaccgtttgatctacccatcanantttctgttgtcatcacttctgcctgatctgcccgtgggagcgctgatgccaccgccgcacgacaagcttgggcgcggatggtgacgacaatggggtatagaaccgctggattcacccgccggaaaagcctccaccgaattcgactgtcataaacaacaccgtc

SEQ ID NO: 12503 - DNA, 234 bp, Oryza sativa
  unsure (1)..(234): unsure at all n locations
gctgtggtataacattgtgcttctctcgaaaacgatcgatcatcttcatgtttatttgatcaacatactcanttcgngttgacaagatggcccgagatgtgatatagctcgggtcggctagattagcatcaagcatcggaaacacattactctataatattgttgaggtcgctatcattcccggtgcatggcacacatatctcatctgggaagccgatgtaaccatcatcacat

SEQ ID NO: 12504 - DNA, 456 bp, Oryza sativa
  unsure (1)..(456): unsure at all n locations
nggattcatatcatcgtagntnnttttattgttcctatgtgtgcgtactttaaatccatatagacccttctgcaagactgcagctatgcttaacttaatatcaggaacatctataatgtaatatggaaatagctntctgttgcaggctttgccgctccatgcttaacctcttttaccctaaaaaataaacaattttgtacatatattttggaataaatatacctccttcacatataccatatactatatatagtatacgatttgtccgctgcagctatatgtattggtcttcttagtaacattttcttgtacatatatagcattatcgttctgtctatactaaaaggattntatgcttattgcagattccatatggcgcatgtacttatttcacagctatcatttggagattcaaacaaaagaatccatgccaggggtctccaaggcttatggaac

SEQ ID NO: 12505 - DNA, 236 bp, Oryza sativa
  unsure (1)..(236): unsure at all n locations
tcatggatatattcttgcatgtgctaatcaatatatccaactcactataagtttggacaanctaataactaagattgatacctcanataaatcagtcaatgcagtcaactaatacgctaattataaaccttaatcagctaaaatcctaacccatctaaatatgcaccaaactgcatagaagtatataggtcaaataagttattaanatgctagattattcaatatgaataaatata

SEQ ID NO: 12506 - DNA, 303 bp, Oryza sativa
tatctcttacgctccaggaatggatcagtcagaacatcaccaccggcttacctcgaccgccgtcgactagtgtttccgcctgcacggctggcctattatgccgccgatgttgggcgtctacgtcttcaccgaccggcttgccttcgccgccgccgactggtgtttccgcctgcacggctggcctattatgccgccgttgttgggcgtctacgtcttcaccgaccggcttgcctttcccgccgccgactggtgttttcgcctgcaccgctggcctttatgccgccgttgttgggcgtctacgtc

SEQ ID NO: 12507 - DNA, 296 bp, Oryza sativa
  unsure (1)..(296): unsure at all n locations
ntcatagaagctacanaaccaatccttgagcagttcagcccgatagtttgctccggcatcagttggtgtagaagcgtattctccgtatgatgtgcatctccgatgagtacgctcttctccatcatcccctacaatcggctctagtcttgggaactcagcttctgatacggatggccgattgacaaccttcatgactatcatgtttaaccaggtttgtagcagccaccaaggtccacctgctccaactactgagccgactgttatcttatccgatgcattgctcaacatctggtata

SEQ ID NO: 12508 - DNA, 299 bp, Oryza sativa
cgctctctagcactgagtcacttgatatacaattattaacagagtttttctacatgagcggaacttagtagctgttccgtcggcatctttagattcgcgactctaatggccgtgcgctctccgtaaggcacttcgaacgggagtccacctacgctctcggtacggacgctgccccgcgggtgcggagacgcatgcgctacgcttcacgcttcctgtctcactcactccaacgagtctttcaatgagccgaattgtccatactattcgcttcatccgcactctcgggagtgggcatgcaa

SEQ ID NO: 12509 - DNA, 181 bp, Oryza sativa
  unsure (1)..(181): unsure at all n locations
atactttaatgcatgcttgntctgctatagatgggcttatcttctttttaatgcaacacatgacttgatatgctatatgtatgctaagctcttgaacattaatgaacataattcctatgcttgatgaaatcattgtccaaagggggagaagtaatgtgaaaattatttttggaattttgga

SEQ ID NO: 12510 - DNA, 418 bp, Oryza sativa
  unsure (1)..(418): unsure at all n locations
ctatgtcaagatgaagcaatcaattaatcagccaacaagtcaactctgggagtcatcaattntgtcttcgcttcagagcagtaggtcaagattaaatttacatgtctgggagtttggagtcatcaaccaatcaactcatatcagattcaatgagttgaacaacagcatatactttcctccaagtgaagcatctacaacagtttgatggattattgtcactgacatcatcaccagcacatctgcttcatcagctctgacattccgccggtgctaatggatgactaagaccttgccaacttgctattccgccttcacgggtgacctactatgcaaacgctgatgagcgtcttcgtcattatcatcggctattacaccgctattgactggatcaccgacatcgtcatcttcatcaacatct

SEQ ID NO: 12511 - DNA, 173 bp, Oryza sativa
  unsure (1)..(173): unsure at all n locations
ttaggtcagagatggtggctaccaactcatatcacactagcactntacactaatcctcatcatgtgtgaatcaganacctagtagtggtgattatgtntacactggcactaacacttactaccaaccaccaacctaccctgagccacactaagtgtaatgtgtgaccaagctg

SEQ ID NO: 12512 - DNA, 186 bp, Oryza sativa
cgttcgtactctatacaagcatgaatgaactgtattgtctgttcacgttgcgttatcggcccgccacttgaagttactctgactgtgtcaatccattgtaccaaagtgtgttgtcctgagcataagttggtctagcaccctatgaatgaaaagaactctgttgacgagacaaacaccagttgtact

SEQ ID NO: 12513 - DNA, 101 bp, Oryza sativa
tacatgaagccattacgccaaccgactgaataatgaacaattgctacctggtcgtcaactattttggaactgatgtctctgtagtctctactaccacgtta

SEQ ID NO: 12514 - DNA, 460 bp, Oryza sativa
  unsure (1)..(460): unsure at all n locations
cgagcaggcaatgaggcatgagcacagtanagctctgcagnttttactgctttaactcagcactaactntagttttgtagtagtatttagattacttgcatattacctatacgttgggatgagattntaattaaaaaattattatatagcccattgttatcattattttctatgtatatagcataccttgatttcagcatatatttgttaatgtctcgcattattgttttttcttctcacaaaagtgggagttggtggtggaagtagttgatatgtggatccatgtcattntaacttcttctttttaagaaaaataacgagttggtagtggggactaatatatatatgtaaagattttcaacggtctatgttcataaaattgaagtacttaaaggattagaatactaaaataccaaaattaattattccatgaggtgccatctgctctgagatataataa

SEQ ID NO: 12515 - DNA, 64 bp, Oryza sativa
  unsure (1)..(64): unsure at all n locations
cccgccgcttcgtcttcaagagacgaggcatctctgnaagctgatctgacagcctcgcatacat

SEQ ID NO: 12516 - DNA, 156 bp, Oryza sativa
  unsure (1)..(156): unsure at all n locations
ggaatactagtacgagtgtcacaatattatttactaggactnggttggccttcctgccacatatagacataaaatgcttgccagtgaatgatatttatgctgcatttggaattgggtatccaccattatgtatgggattcccattagatgagactt

SEQ ID NO: 12517 - DNA, 307 bp, Oryza sativa
  unsure (1)..(307): unsure at all n locations
tagtttagtagtatctagctggtggaaaaggaatagagtagaaatcatgagtccggaagccttcggaagagnttgggtatggctctagtagctcttctcttctcttttgtaagagttgtacttttattagaatactcttctatatacatttatggtattgaaatactttccgagtatatgaatacctactttacatcatgttcatgttatactgaatatacgcgtagcttatctatgagatgccttggtgcgggtataatgtttgcatatgcaattactctatgtcatgacgatgatattagagtag

SEQ ID NO: 12518 - DNA, 216 bp, Oryza sativa
aagcaccgagctcagcttcatgtttagtacattaaaattgtttattatgttttattcagagatgctatgtactagaagtctataataattgaatatcttcagtatgcaatatgcttacagctctacttaacctgtacaataaacatgtcaataataagctagaagctgtgcttataaataggctattatatcactctcgagtttaatatgtagcta

SEQ ID NO: 12519 - DNA, 362 bp, Oryza sativa
  unsure (1)..(362): unsure at all n locations
ntcttacgacgagaacgatctttcacttcagcttcatccataaggttcttgatcctgcgcgactggcgacgacccttagtatcaactaataaatttgagtcacgaacccaattggcttgccctggaggaggacgagtgaaatctcacatggcacgccaagttgcctcccacgaatcctttctaaagtagggagaaacaaaaatgtttccatcaacacccccttttgcggaagcagcaagaacatgggaacatggccgatgtaacaggtaacgcttgttgcaattgcatttgcaagcgtgatactctggccacaacgtgcattccaatgtgacgtcagtagtcccaatgccgacaccactctt

SEQ ID NO: 12520 - DNA, 139 bp, Oryza sativa
  unsure (1)..(139): unsure at all n locations
acacgaacttatccaagtattccatgaacactttgttcatcaatgtcatgaagaaggcatngagcattggcanaccgaacgacatcaccgtgaattcatacagcccatatcgcgtggtgatgcggcttcggatatcttc

SEQ ID NO: 12521 - DNA, 273 bp, Oryza sativa
  unsure (1)..(273): unsure at all n locations
cttccgggcatatatgagttgcccttatattcctnccaagggaatgtactatcattggtacacgtaaatattgggttttccaaccatttcttttcacaaaagcttgtgatatgaaagaatgggaagctcctgaatcaaacagaactattgcgggtacggagttgacagagaacatacccatcacaacgtctggagcatcctgagccgtctcagcttgaatgtggttcacccggcctcgaccgaagttgttggaagcaccagaaccttgtccac

SEQ ID NO: 12522 - DNA, 412 bp, Oryza sativa
  unsure (1)..(412): unsure at all n locations
tctagtaccagtgggtaccgccccgggtggttcacttttcatgatgatccgagcggncaaacttaattgcgatttctgaccatcgaagatactgtggcgtgtcgcggtgaacagcattgatctctcgttcagtcaacttctggcttcgtttagactcataagctaaggggccgccgaagatatggttgagctccatgcggnggtcttgaaatcctgccggcgcgtcgccgtcgtctttcttcctcgacgtgctatgttcttcgtcagaagtcttccgtgcaggcttggtgtattgatccgccaattgcttgtagacaaaacaatctctggccacctggttggagttatgatggtgcgggcattgggagttcatgatcctgtcgaacgtgttgacgcgccaacgctgtctaga

SEQ ID NO: 12523 - DNA, 250 bp, Oryza sativa
acctctcaagagaatcatcttgtcaccaggcaataccgtagtaatcgtgcgaatcctggtaattgtgttagttgttgtagggtggttagtgtgtacatcatgtgatgacaatgattattcttgctgcatgagaattggaattgtatgattatgtattccttagacatttataatatagactctcagggtttgcttctggttgtatcatgacccccgatgaggaggatgcttactggaccctctattgcca

SEQ ID NO: 12524 - DNA, 171 bp, Oryza sativa
cggaagtgccgcacacctctcttctgggatcagacaggcgagcgtcaactggtccgaacagaggtattaacggaagcagaagataaagtcacgatcatcacggaaaggttgagaattgcccattctctaccgaagaactacgcggataaccgtccaagggagctcactttt

SEQ ID NO: 12525 - DNA, 457 bp, Oryza sativa
  unsure (1)..(457): unsure at all n locations
tattcatggcatggtgtggtgatcagcttcgttgcactgcaccgaatattcataactgctgacctccatcacacaacagtgatgcttaatttcctacgaggaaatacagtttttattgactgaagtttcaggtcaattgtgtgaagaaagattaattcaaaggtgatcgactggctggcagagctttcagattcagttgatgacatcagcaaacaaaagattcaatgcattaattcatctcgacaaagaggattcatctaactactccactgatctggatgcanttccttgatactcctacttatttagcatttgactgctgattgatcattcaagagaagattcgttcagctcatgagttctcacgtttcgccgacttctgtttcgttgatgtctcgatcatcttagctagaacatgtaagctgatgggttggcccacaaacgtcaaagcagtaag

SEQ ID NO: 12526 - DNA, 108 bp, Oryza sativa
acatgcatgtatgtacttaagagaaaactgaatatatattccataatttacatattctgcatacacaacattgtaatgcgcagcaatctgtaagtctctgtactacta

SEQ ID NO: 12527 - DNA, 143 bp, Oryza sativa
  unsure (1)..(143): unsure at all n locations
tagacggactattctggactatctgggtctgttttttctgggantgtaccctacactccacacaacaccggacataaggtaagctgggtgctatgagtgactactcacttattgcgtggctactgccgcttcagtcggaacct

SEQ ID NO: 12528 - DNA, 431 bp, Oryza sativa
  unsure (1)..(431): unsure at all n locations
tgcctcagagagcccttgaattattctggatgatggaagggtggagtgttttttcctatgaaataacatttagcagcgtaatttatgcctgcaccagtataaatggacatgaacatgggaagtccattcatgcaaaaggtatcaaacacaatctcaatacgagaccatttgtgaacacttcactgtttgagttctattcaaaatgtggttgtaccaatgatgctcacaaagttcttgaagaagactctgaggatatgaccacacgttggaatggactgatttcttgtcactcagatactgatggttcaacggcgntttctattctgagagagatgttgcgatctggcgctatgccacacgaggataggttgtcttctttgctcaatgacccatcagtattcgatctgttgcagattcactcgttggtaaca

SEQ ID NO: 12529 - DNA, 327 bp, Oryza sativa
ttgcggggatcctagagtcgccaaccacctcgatctatcacagagctaaatctatatgtgtgttgataactaaaccggctagcggagccgatttctagataactacccgtctcgtgggcaaaacggaagggtttcaggacaaacctacaaagagatgtcgcactctctcagcggcggcggacggtttacggcgcaaactgaccaagatggacaaactaagagaaaactaacagccatatgaaaaaacgaatcgattgattgattgtagattgggttttacaatgaaccggccatgtccattatataaggggtggtcttgccctctac

SEQ ID NO: 12530 - DNA, 453 bp, Oryza sativa
  unsure (1)..(453): unsure at all n locations
tatcagagagaatcagcgattggcatctagccatgtcgtcttgaggcatgatattgttgatactgagaaagaaatgcaaatgatccgtgctcacctacgtgatgttcagacagagactgatatgcatatgagagattngatggagagaatgagattgatggaagcagatatacaagctggtgatgcagtgaagaaggaacttcatcaagtgcatatggaggcaaagagacttattgctgagaggcagatgctcactgctgagatggataaagtaactaaagagctacataagttctctggtgacagtaagaaacttcctgaattactgactgagctagatgggctccgaaaagagcatcagagtctaagggttgtgatattattccttttttacattttccatacactnctgagctttggtggcgaacaggcgctctgattatattgatgttt

SEQ ID NO: 12531 - DNA, 478 bp, Oryza sativa
tgacctgctatgttatatactagtatgtatcgcagaacaattctctatatttatatatcatgcacgaatgagaaatgcctgttcatataaatatcactagatgtgcacgaactcaacttctaatctacatggggtggtgtattaataatatgtacttttgctaccagatgctgatgcaatcaagcattgctcaaatgttatgtggctctgttctaataaatgagcttctgttgaagaattactctcttcgatataattggaggccacagctgcacttgcacatgagggaccatttgaataagctcacgtcagcattctacatttctcagatatctcaagatctcgattcattctagaaccaggtgaagttaggtactattagctatcctacataattcaaatctaaccagcaacccagacatccaaagagaatgcaagcccctaactcttagccaaacgaaaaaattatatatttttt

SEQ ID NO: 12532 - DNA, 55 bp, Oryza sativa
ctgtgatgtaaactccatgggggtttgtcggttttgtgtgacgacatgagatgag

SEQ ID NO: 12533 - DNA, 431 bp, Oryza sativa
  unsure (1)..(431): unsure at all n locations
actaagctaaagcctgaatccctttatgcatatctggatctggatcctgcagaacaaacatatatgatgagtagtatctgatataaatataatactcgagaaaaaatcaagtattttaaaatatttataaatatgtatttctcctcttgtcaattttgatttccccgagcagatgactctgtacgtttaaacactctgcccgactagtcataaccaccaagcatcgggagtcggcctaggcacttcccaaacatgcatatgagtgatatgagttcgtcattaatggaacaaagtttcacggattagaatttactactcacgtacttttgcaattattaagagcagaaaataaattatcttatctctatgctttngatttattccgaataatacttagcaccttgcgttattcggtccatccaacgagcccc

SEQ ID NO: 12534 - DNA, 459 bp, Oryza sativa
  unsure (1)..(459): unsure at all n locations
ntaacttaccgatatgaaggggacgcccnctgcattgtatggaatggtcccaaacatgataggcatgcaacgaggctggagaagatgcaaagttntaccagaggaaaaagcgggctctagcaattgggtataccatggctgtgtgtctgaaccctatgacaaatcagtccaaccaataactccataagctatttttcaagaaaaaagcgtgatctacaagatgtatactcatgcagccatcgaaggaactcacaacaactatcctggagaggatatcaagatagtctgtcacttgagagggagaaaagggaggaggcatcangtagtctgtcacattatgcaacggataaagggcaggaaacacccgacctgaaacacctgtcaattggaagtactccagaactatgaacacattcacctaattttttgaaatatgaaaaagttcaaagtattcatttt

SEQ ID NO: 12535 - DNA, 446 bp, Oryza sativa
  unsure (1)..(446): unsure at all n locations
tatcataaagggcttcgacaggggttntattcgttctttgagcaaaaagataaagatcggatagattcgaaccgcaattgcgaaggtaatcactactatgccagcccaaatcatgatcttcaccaacttggatttggttctctcgcgaaaatcgcgagttgcagagatgagaaccatgaanagcaagatcccgaataagaaaacagaaaccgaggaaaccacaagagtgaagactagtagagtctcggcttttggcattctttgctcctttntcacttcatgattcattcgaatttcccgaccaaaaattctatatgtctattcatatgggcctcgtgctaagtgctacaagatctagtgcactggaactcgtgggtatggacccgaatcctttagtatggaacattgtcttttccaagtaaaaacccccagtatatgaaaagaat

SEQ ID NO: 12536 - DNA, 276 bp, Oryza sativa
tgacttacttgacttaatgatggcacacgagttttaatttaaaattaggttatataacctgagccgctgtttgcaaacaaaatgctatcctatagactacaacacactgaattagccggactttgatggcgggccgatattcaggatcatctctaaaataaactgctataggctcacactgccagcacactgctgtgactgtcacctacaggctcaccagaaaaaaagaaatattaacgccaggtattgctgtgaataatacataataatctaaca

SEQ ID NO: 12537 - DNA, 452 bp, Oryza sativa
  unsure (1)..(452): unsure at all n locations
ntcctgacactgttctgaccacacanacttcttttccttcttgagtagttgtgtcattggtcgggctatcttagagaacccttcaatgaaccgtcggtagtatccagccaagcctagaaaactccgaatttcagtcacagatttgggtgctttccattctgtgacagcctccactttagcaggatccactgctactccaccgggcgagattacgtggcctagaaaagcgacttcttttaaacagaactcacacttggtgaatttgcatataacttatgcttccgaagtttctcgagtaccaatcgcangtgttccgcatgttcttcctcatctttggagtagattagaatatcatcgatgaataccaccacaaatttgtccaagtagtccatgaacactttgntcataagattcataaagtatgccggagcggtggttaaaaccaaacgaca

SEQ ID NO: 12538 - DNA, 299 bp, Oryza sativa
  unsure (1)..(299): unsure at all n locations
tatctcatagctggcgttgntgtcttataatcattatatggaaaatgataatgtgaacattgttctaaatcatcaggtgtgctggctactacagtgatgctgatgctcccagccgcaaacttggcaagcctctaattttttgcagaactgacagtgatagtcccatggagaatgggtatgcacgttctgtggaagggaaccatgttattggtgatatgcagaataacgttgtcatataatttgaagatacgaagttggtttctctccctccaccaaatcatctgagaaactacactcct

SEQ ID NO: 12539 - DNA, 407 bp, Oryza sativa
  unsure (1)..(407): unsure at all n locations
tcctctgaattgtattctccttgatgacatttggttcgttggcactggatggctattgtgcatttgngccttttggtttatcctattatttcatcctttntgtaaggacagatgtagnttttataggtgttgttatgcgtgttttgcatttgatcgttagtcttttgtcctcagaaatgcagtcaatgcacgcgggtcttattcctaacactggtatcagaggcaaggcactctctcctggtgttatgtgccattttctcccccacagctctcacacaaactcaattactcagttatagagccatcaatcaccaggcagtggtggccggtcggcaaactatgtctcgacaaagataaccttgggtgatggcggaatggtatgtggtgcccgcggcatccggggtaca

SEQ ID NO: 12540 - DNA, 239 bp, Oryza sativa
  unsure (1)..(239): unsure at all n locations
tgtgtcttgtctcgctgcaacacgtggatacacaaggttctatggccggccatgataagtatgagatagtcaccgaaaacctctctaagcatgttaggatacagtgtttaatcttccgtcttctttaataaaaacgtacaacgcaacctacaacgttggcctcatttataacgcaacaccacgcccactttataaacctataaaacangtcgctatttgccggccactatctataacga

SEQ ID NO: 12541 - DNA, 418 bp, Oryza sativa
  unsure (1)..(418): unsure at all n locations
tgcagntggcaccaggaagctccatttcttgcagaaatcagcatggaatctgagcctttagcatcaaggtcatcaaggtaagccagtaaggtatcatggtgtatggcctacttggtgctatttgtatgagttgcttcagctgaacccatatcaaagctaggctcctaaaatttgtcatccacatacaaatttcacagagaaaaaaccatgatgtcatccaattccctcttccaacgtctggcaaaatggtgcccgtggttactgagagatgagccgaagaagcctgtcaaggttcttgtcaccggcgccgcangtaatacagaactcggaagctaatcaaacacttaagcagctaaaccaaaaatacgaccagaagtcgagaaaacaaattcactgacgacattttgtgctgtttttt

SEQ ID NO: 12542 - DNA, 195 bp, Oryza sativa
tagcacgcgtcactttgtagcatgcacacaggcacttttttggacgacacgggcataccccactgctcacgctctgcagctacgggagctcaagcaagaccgttccaccgcatgagaaacgaagacgtctctttacgacggccccggcctactggcccttacccccgcgctgccgattcccacagtgcatgcatt

SEQ ID NO: 12543 - DNA, 447 bp, Oryza sativa
tgatcaagctatggtacgaagttcgaagaacacgcgcgacttgaggtttgttgctagctatagtgacttattgggggtcgagttgccagcgagggcctgccgacctgcgcgacggctactacgtgaagcgcatgtgttgtgttggccgccagatagcctcgccttccgtgcagaggtccatccccatggacgatgccggtaggaccagccgctgcggcaacaacacatattggtgcaagcagttaaattattatagggtttataaggaatttggccgactcgtcatgtccatcttggcctccgtctcatctgatcatctccctctccaacaccacatagaattcgagttttactcttccctgcgattcaaaattatggcatctgcgtacgacgcgatgtcgtcatatatccggtgataggactctaccttcaactggatgtccgaca

SEQ ID NO: 12544 - DNA, 242 bp, Oryza sativa
gggtacgaagttgatgagggtctcgagctcggcgctcgaaccgtgacgacatgaaggaagcacgctggggaccgcctgagctcttttttgtctgcattacgatcgacatactgctcgccagagttacacgacgaacacacagtcacgagaggacaatagacatgggcgagcaccgacgagcgccacattacatgcacactgggctaacgtacgctaccggcctggcgttgttacgaaaactt

SEQ ID NO: 12545 - DNA, 103 bp, Oryza sativa
atctatatactgtattgatttacggccttatgaagtttgatacctgatactactgcccggcattgctgtatatatacttctctactaatcaataatatatttg

SEQ ID NO: 12546 - DNA, 432 bp, Oryza sativa
tattgatttgagaaatacgactaaccacgcttcgcatttcaaggtcttgtttccaaaagggcgaatgggcaatctgataattcaagtttcaccaaagatattttttttcttttttgttgaaagatcgaagtttcaccagactgagattaatcagtatagtaacaagaatacgctgtttgcagcaaagattgatcgactacagccatgaattgctattgaataaaggaaattatgatgaatcaacaatgatctattaattaatagaactaacaatcctttcatcaggagctgaggaccatccctagcgaacaatatccctaaaagcaggtacaatagcaggctataagccagctgcacacatattttataaagataaatcaggagagagaagagcagcggactacatattcgtagccagctatagcacgggac

SEQ ID NO: 12547 - DNA, 456 bp, Oryza sativa
ctaaagaagataactagttctggttacagacaaacggtattattttatatcatgttccagcttcaccacctcttatggtttcaagaaacttggtccgaatacctgaagaactttgtgtacgaacgtgctacagtggcataaaaggaacaggacaggtgacaacccgatgacataactgttagcgcccttagataacctcagattgattacccttaacagaacatggactattactctatcactgaacaaaatactatactgacagtgacagggtaccaaactattacagagtaccacggaacattgctcacataacacaagtattacctagcataattgctatgagataccatgtaagcaccatacccaggagactggcattgagagcatagtaacaggctcattataagataggaacactatcattcgatatttggttgcctattattatttatt

SEQ ID NO: 12548 - DNA, 422 bp, Oryza sativa
  unsure (1)..(422): unsure at all n locations
ctaagcttatcgaacaatgtctctgatatctttctaatgtcacaaataactcactgtgtgttattcatggaattgtcaccactgagctaactaatcacgaggagggctaatgaatatgtcatcaaggctctggattactatatgcattcacaagtgaataaatgagttaagtggaaagattagtacctaatgccatgagaagatagtcaataacatgtacctaatgccaactttccttttctcggatccaatcccaagcagtgggaaattgaactatatgccactnttagattggtcaattatccaaatgccctcttaggtttgcactctnttntctcctcttaaaagatgtcttcttaactatttgtcacttntacctacgtggcattccaacatggcaacggaggggtagaaactggtgt

SEQ ID NO: 12549 - DNA, 158 bp, Oryza sativa
  unsure (1)..(158): unsure at all n locations
gtcttcttatcgtcattcgtttctttgtgccccgctgactaacttattttctaatcatgtgcctcttggattcaaanaactcagcaccctgaaggagatggtgacagatacatggctctgatggatggtgattacataacagctccgacacctaaatg

SEQ ID NO: 12550 - DNA, 256 bp, Oryza sativa
aactaagctgacgaaacatcacgagacacgaggtgtcccagtacaggcaactatgcttttcttatgaaagtactaaccatgcattcatcaattttgtttcagatcaactcgcctgtcaagagagccaaagaagacgaattctatgtcaatagagggaaagaacaccgtcagtaccacaaaatcgctatattcattattaaacacaaccattaatgtgcgaggctctggtggggcatactggtcaaaataatatgac

SEQ ID NO: 12551 - DNA, 107 bp, Oryza sativa
cttagcaccgagctgcactgaagctaagaacaaatgggttaccctttctgccatggtctccaaggggaaaggatatctatgatgctttcacaagttgcccgcttcag

SEQ ID NO: 12552 - DNA, 282 bp, Oryza sativa
  unsure (1)..(282): unsure at all n locations
tgactgcatcgaattggagtgattgcagctttattgtagttggtcattaatccactggcttgcccacanatatgtgaaatacccctcattatggtgtcagatacccgagacctcttggcacatgtattcctcatactggtattgggtaacattttcggtgaatatgtttgatgtccctcagtagttgcattactcacaaacttcttatgggttatcccaattccagtattntcctcagaaatcatcttactggattccaagttggaagctgcatgtctatca

SEQ ID NO: 12553 - DNA, 206 bp, Oryza sativa
tttttctatgtccctctgcagacagtacacactagcaggactgattatccatcatagcatgttggacactcttcatatatagcgtctagtcacaatactttgacagacgacaggtcatatcctacatcgtgacacgcatcaggatcttgcttgctggaaacctataatacttggtagactcatatcgtgaatcttagagacactac

SEQ ID NO: 12554 - DNA, 352 bp, Oryza sativa
  unsure (1)..(352): unsure at all n locations
cggacaaaaaanagcatggcaagcttcagccacctgccacctgtattcatctatataanatgacatctaaaattctaagactacagagaaattccaaaaatctaacgtatgctgacacatataacatgaaatcccagctatataatttactttaacttcactaaccatatataactttgaaaaaaaaaatgtgatgaatttcctacaaaatatgattcatacaactaaggaaactatttctctaaccaactaatagtatgtcatataatatgaaaaataggtaataatggtatgataacagaaatgaaanaaattcccagtgtaatcacctcaaaaacatgatccattggac

SEQ ID NO: 12555 - DNA, 451 bp, Oryza sativa
  unsure (1)..(451): unsure at all n locations
tctcaaatgcgatcactacaatgcagacacaaaataggcaatttcaccaggcatgtaagtgtataaacattttctgcaacctaatgtaattcacagaataccatcaacgagacaacgatnaccaggcaacatggataagatgaaattcaaacatcatgctgaaaattcaccctgctttgagtagtgaacatgcttggttcacacaagatgattgcgaacccattccaaatcacaactcacaacacttgattaccaaacttattcacggttcacacatcaagtagccaaccccggatctagatcatgaccagcgtacattgctatgaaggggacatgcttgaagaaacacagaanaaaanaacccagaattttcaggaccgctaaactaggaaaagggaagatcacacaacaatcataatgcacgaaaaaaaaaaaggagcaccacccagag

SEQ ID NO: 12556 - DNA, 310 bp, Oryza sativa
aacgggcctgtctttcgagggtaatggctttttttgccaataggagggtgatggtcggccaataataacattttcttgactggattgtgatttggtctagtaaccagattattgtttagagccaaatagagtacccaatgcctagataaagaaatgcaaatgagctcgttctcatggcgctacgcgggtacgcaacccgtagctacaccggggggcgtgcgggccatcatggtccgctagtctgtgaagtgttgtttgttacagtgacgggctgagaacacctttagcgcgttgaacacctatacacttc

SEQ ID NO: 12557 - DNA, 446 bp, Oryza sativa
  unsure (1)..(446): unsure at all n locations
taagataccaatgcgagatcatactcctggaggtggcatgaccacaactcattttgtccatctgngacagangaaattcaagggttgattnttccagccaacctcattcttctcgaattcaaagacctagatgtcatacttggaatggattggttggcaaggcacagaggagtgattgattgcgccacccgcaccatcaagttgaccaatgcaaaaggagaggtggtaatctttcagtctccaatgccgcagaagccagtgattagtttaaaccacgctgctggtgaaaacaagaggtgccgtggtgaaaacactaagaactggaggatattccatattcagagagtattcacaggtgttttcggatgatctgactaccatgccaccaacaaaggatatctagtttcggattgacttggtacctggaacatgcgaccgattcacaa

SEQ ID NO: 12558 - DNA, 216 bp, Oryza sativa
tcttgtagaactcgcagtatcatatccattgaatctttgtagttgactattaacttgtatcgctggtttatcgtagaagtgacgatatgtatgtttgctataactaatattcatgattatcacctatagtttatatctgctagactatcttatttatcttgagctatggtgagtcatcattagtatatctatattgacatctgctgcttatatcat

SEQ ID NO: 12559 - DNA, 453 bp, Oryza sativa
  unsure (1)..(453): unsure at all n locations
tactcagcttacagggtaccgaacaaattgatacgctttggcttctcttttaatgtgaatagtaatagatcggcttgaatagcctgatcttttcttacccgtgtacaggaagctttggtcaatcaaatatttctgttgccgtgtggaacaaaaaggaaacaatgttgctaatccgggtgctgcttcctgtgtgaacacagnttaacgtctagccgtgatcgaacagaacaattatagcttaagcttgaagacaaaaccaatgtctgcgacaataataattacagagtaggttaattccggctgtttagccgaaactaattcgatgagtcgacgaaacagttattattatattaaacgacacttggtcgtagtatggtcgattatatcgtttctcagcgaagtcaccacaaatcgtgttggccactttttgtgaaaaaggcgacaaagcattga

SEQ ID NO: 12560 - DNA, 455 bp, Oryza sativa
  unsure (1)..(455): unsure at all n locations
ctcgctgtgccccctgttctcttggttccccgtcgacatgtaggaggaaaccatatatggagaacgtccctgaccaagacacggacaccgatggccacatctgagccacttctccataggaggagacaacaatgtgggatgtcagcaaccaggggcttcgatgatcttcttccacggatcctcctctacaacagcttttaccattgatntggtcgccgtgtgtgggaacacccaatataagcttggtgcctcaaaaatacactcgtgatcgttcacgatttcgatcacgcatagattgatatacagaacagctttcgagtatttacacacggttggtcatacaagctaaatatacaactgtttaagggtgagaagatccaactaacatattcttattttgaaatacaagaaaaattcaaaggtactaaanaacatttcccccttttaaaaaaaaa

SEQ ID NO: 12561 - DNA, 172 bp, Oryza sativa
attcaagattggctaccctctcttcttttacaaggctaatctaaaacacatgtcacacactgaaattatggcattgggtgtaaatcttagtaataactcataaggattaccaaccgctagaatatacccaatatataatcagctaagcatacatggtcataaaatgccacta

SEQ ID NO: 12562 - DNA, 479 bp, Oryza sativa
  unsure (1)..(479): unsure at all n locations
cgacactactagaaactcaagcttgctntacagaactcatggacttctttacttatatcgtataattcgcaggaatatttctcgaaatggggagagcaaggcacggtggatctgaaacgcgagctcgacctcctcatcctgacgatcgcgagccgcgtcctcctcggcaaggaggttagggagaccatgttcgccgacgtcgtggcatccttccacgagctcatggacaacagcatgcacctcatcagcctctggcttcccaacctcccgatccctgcggaccgccggcgcgacacggcgtccgctatgctcaaggagctcttctaccgtgccatccagcttcgccgcgggtccggccgcgccgaggacgacgtgctccagcggttcttggagtccaggtacagggacgggcgcgccatgttcgacaacgagatcaccggcatgctcatcgccctggtctgtcgcccgggcagcacaat

SEQ ID NO: 12563 - DNA, 190 bp, Oryza sativa
  unsure (1)..(190): unsure at all n locations
tgagagagattacaacaactaagaagtatgctacatgagactgatattcatgaggagaaagatacagccactaatggtggtgatgataagtgtaagacgtgcctaangaatgaaacaacacaacatgtcatgtttaattgcccggcgtcactacttgctaggtgtgtcactacggatgctctacagctgc

SEQ ID NO: 12564 - DNA, 397 bp, Oryza sativa
  unsure (1)..(397): unsure at all n locations
aaactaagctgctgaaagacagatataatttgtttattggaagaattcgtttctatttttctaagacaaagcaacatcatttcttgactctacaggggatttccctacatatctgcatttatactacttnacacataaacactactctactaatgcaattgttatcgccctcatcacaataaagctgatgtgtaccatatgtgtgtaacaagcacatcagtatcacagaggaaaaaaaccaaattacatatacacactcctcacacggagctctactctaagctggtagtgggaaaagaatttgggtacatcaacttgccgattggaaggtttcgaccaataaaactaattaaattgctgaaacggagacaattttttggaaaccctcccccccccc

SEQ ID NO: 12565 - DNA, 443 bp, Oryza sativa
  unsure (1)..(443): unsure at all n locations
atatcaaattcaactgatgaaaccatacctcccaacccaatgaaggcatattctgaacaaagagccgaaggacatcctccttgcaaatttcaagggctatctgtagaacctgttcctgatttggttcaacttctccatcgccagaaagtgtctgcctcaaagtagatacatttttctcaacatcttcaagagcctaattagaaaacaaatactacgtgagataaccagtgggactgtagaatcgtgttctgtgtttaaagaagagcataaaacaactagaacagtnaaacaaaggaacaaatatgccattgcttatgagtaggctccagatgcaagtgccatatgcaatatactggtatatcaacactgntaaaaagaatctctcaacaagaaagcatantttacaagtaatgtgactcttgaaacttctttgtgattacacg

SEQ ID NO: 12566 - DNA, 326 bp, Oryza sativa
atgctctgccacgaggactgagaatacctactgtctacacgatctgatacccttgacctactgagacgtgtagatatggactatgaagccaaccggcgtctctttacacatcgcagcgaacagtgttgggcgacgctatcaccacgacgccggcacaccggatcgggcgccgcgcgatcgtcatcacgcgcgcgcaaccgcgtcgggataacatgcgcgcgcatgcgccacaattgcggcgagggatggggtacgcacgttctagaactcctgctctagacatcaaagatctgcacgcacttggtgacattgcgcgccttgcggga

SEQ ID NO: 12567 - DNA, 421 bp, Oryza sativa
  unsure (1)..(421): unsure at all n locations
tctcgccgatatccatgaaggtgagtacngagcccactccgcctcacgcaccttggttgtgaaggcctttcgccagggtttctattggccgacggctctcaacgatgcggtcgacttggtccggcggtgcaaggcgtgccagtttcacgccaggcaaacccaccaactggcccaggccctgcagatcatacctctttcgtggcccggtgctgtctgggggctcgatatcctgtgtccgttcatgcgggccccgggcgggttcgagtatctatatgtctgtatcgacaagttcactaaatggcccgaggcttatccggtcgtcaagatcgataagtacttcgcgcttataatcatcaagggcatcactgctcggtttggggtggctaaccgtatcattactgataacggcacccaattcact

SEQ ID NO: 12568 - DNA, 324 bp, Oryza sativa
  unsure (1)..(324): unsure at all n locations
ctaagctttgagcgtnncttggaatgcatgcatcttacagattcaattcaattcctgccctggttataatctgtcattccaagaccaggccttacattctactacaactgccagattaagagcacttgacatagagttaaggagaacctatgttccaacagaaaaaacaaagatcctgctctggaatgcacccacatgctatatatgttaataacacgattaactgataaggagaaaacgaaccaattcttgacagctgattaatgagcaagttgagctcaacgtttcctcttgcgtgtccactgcctcatgatgaactgaacg

SEQ ID NO: 12569 - DNA, 106 bp, Oryza sativa
aacggacctagaacacaatttgtttttctttaacaggatgatgtcagctaacgatggaacaggccacagtgatatgcaaacagagtcgaacttactgataatggtg

SEQ ID NO: 12570 - DNA, 435 bp, Oryza sativa
cttggagaagatgtcttatgtggtgtcacgcctggaatatctatccaaaattcctaacgcttacatgtgtgttaaaccctcgtccaggaatcaaccgaggcacacaatgacaatattgataatagagtacaaataactattaaatattcgcaaaataaaactattacagaggtggatagttcctctcaaagaaaacattttacgcagcggaaaaacaaaactataacaaacgacggaacagctatggcaactccactccacaggcaacttaaccgagaacaagcctaatcctccagatcaataccttcactgagatactcctcttctgatgaatgaatattgctagaatgagcatatgacatactcaacaagccacacagcaaatatgcaagtgcacaggataacaaaggatggcataatatagttcattagcag

SEQ ID NO: 12571 - DNA, 223 bp, Oryza sativa
  unsure (1)..(223): unsure at all n locations
gcacactgatttcttgcannatgntgaatacctcattntcctagtggacgcttcagccatgttcaaaggtacatgaacttcgtgtagcaacactgtctgatcccttcagagtccacctacngaacangtatttatactggatcagatngacagttctatgtgtcatcacctctaggatatgctcacagagtaatcccttcctctcatactgcttgcgacacat

SEQ ID NO: 12572 - DNA, 448 bp, Oryza sativa
  unsure (1)..(448): unsure at all n locations
tcactccttggccctagaatgagccagacatggagaagacagtggcctatctttttgagagtactgccactgcacatgctcaccgggatgtggcatacaagcattatgtcaatgagatggattacttgcagcctcaacatgtaagtgcttccaatatcacttctagttagacatttacttctttaattaagatactaaccaacgacatctcttcaacttttgcagattgagtggntaccataccacacaaatgaggcttcaagcctgaccctgaactcgatgtgcaatcgagactctgactatttcatgtaccagtgcccattgatttgtttctgggcagatgagtaccacctttcgcaccgtgtcatgcgacagttcgggaagaaacaagattggccggttgaggacatctcaactggagttgaattacacaaagtaaataatttct

SEQ ID NO: 12573 - DNA, 228 bp, Oryza sativa
gatgcttactacggctaccaccagattagcatgggcaaagtacacttttgtttcatcttgggaaacacgttgaagcctacgttgaccacattgtcattcagaccaagacaggcgaattactaattgacaacctaatggaaacggttgacaatctccgcagatatcgcatgaaactaaaccccgagaaatgcacggtcggagtaccatcggagaagctactccgctttc

SEQ ID NO: 12574 - DNA, 377 bp, Oryza sativa
  unsure (1)..(377): unsure at all n locations
tacataagctagaccttgaaggatgtcactatcttgtctcgttttctacanagaagagttaaatgaaggagcttcagtacctaaatggtctcaatngctactcactcacagcaatgcctcatgctatgggccaacttacacatcttcacacattgcttggttactttgtccccaacattggtagtagtgcaatgtcagagcttcaatcactgctagacctcaatagactatggctgtatttagatccaaaggttggatctaaacttccgtccttttccatcacatcaacgtgtcatacacacacaactgttcagtcacatcatctctaattttagtcatttttcagactttgcgctgaactaaacacagcctatcac

SEQ ID NO: 12575 - DNA, 271 bp, Oryza sativa
  unsure (1)..(271): unsure at all n locations
ctaattggtctctagtacaaccattttaatttgtacttatcttgaatataagttatatactcttagcttatactaatttatttnttcactttgtcactcatttggctctaggattgctaaagatagagtataagatatttccctatacttattctcatatcatagctctagaacatatcttcatttataattacagcaacaaggctcgacaagcaacccgatgttcctcaacagtggatgatggtgcactcgatagtagctggtaatactt

SEQ ID NO: 12576 - DNA, 442 bp, Oryza sativa
  unsure (1)..(442): unsure at all n locations
ngcgacanagtcttatgattacttacatgcacacagtgataattaaacttatgcacaactcaggagaagcattctcccaactatcctagctatataatctatattctcggcgaattcttatttgaaaatacattatatctaatgccgttgtgattacctcaacaggtagtctgcatgacgcctagctagctagcgtgcacaccgggaagatgcatgaaaaatataatcaatcaatctatatatcccttttccattcagatgaataacacgtacggacaaatagtgaaagttagatacgcacattgacaaatgtatcgctaatttgtcacgttctgattatcactattgagtcagttggcagctggaatatcttgtaatgcatcccatgcatttgtcaatgaagaggtaatccacgcacggatatactgtagcgtggatatat

SEQ ID NO: 12577 - DNA, 368 bp, Oryza sativa
  unsure (1)..(368): unsure at all n locations
gctttcggagaactaanacaatactaacatagtagtatgtgtgtggattagatagctatacttcattacatatttatctgactagtttgagcacacctgtcatacacaaatggttagccacatatgtcatatactataagataaaagtgcactcttatgaaatctccgactaattaaagctgtagcaaagcgattgttttgaccgaataattgcagttttgtgagaaacactaccctcactatatacttgtgctctttgttgtaccgcgtaccaatgagatttcggtttacagattattcttgntagacaacaagtatcgaattattcatctcgcggtggatgccgaagccaaggaattttccagccg

SEQ ID NO: 12578 - DNA, 211 bp, Oryza sativa
tagacggctgcactctatacaatctccattgaatctcatggatgcacctatggtactagactcgagcgtgactactcgctacaattactgtacactatcgggcggctctttcacgtgcgccacccgtggcctctggaccgcgcgcgcgactctctctatagcaccgcacctaagtagttttcttgggtctagaagggaaaaggaagaagga

SEQ ID NO: 12579 - DNA, 469 bp, Oryza sativa
  unsure (1)..(469): unsure at all n locations
ctaagcttatgggtcttntttccgaatcatcgtactgtacttatgagatgantttttgttttgccgacggtacgtattttcccttttatatagggaaggtattatatatacacctaatgattcgtaataggtccaccaatttaaataaaaatcaactatagatatagatatagatataatctaatggtttaaaatgataggtccaccaattaaatgaaaatcaacggtgagattagacagtgccacgtggcggtataggaatgtttatagagtaccacgtggtggctcgagggccttttttgcaagtttaatggactcttagtatataactaggaaggtagtcgcgcattcgcgccggcatgcatcataggatgcgttgcttagataaatgtntaacatatattngttagctttatgccatataatatttaatcgtcctttaaaggcaaatttctataaatacttcttc

SEQ ID NO: 12580 - DNA, 449 bp, Oryza sativa
  unsure (1)..(449): unsure at all n locations
tagcatggacagaagttaaactgcataacanaagcagttgtaacgattcatttcacttatatataaaatgganaaggggaatcatagttaccaccacaagatactgtgcatagacaaattcactaaaccaaaaaccatcgccaattaatgtagtccattaatttccatgctaatccaggtcttccataattatgcctactaacataagatgccacaagcaaattacaggaggcctctcatgtgcatgacagaagagatagattgcttttaccaagtaaactgaatgataattttaccatgacacaacaaaatgcaatacaagaaaccaatctcatcacttaacagcccaaatgagaaaattgtatgccagatggacaccttggtgatctgatcacaatatataacacaccagaaatctagaacgctcaagactcgttgaaattgcgtat

SEQ ID NO: 12581 - DNA, 258 bp, Oryza sativa
tgagattgaatataatataataccgatctatgcttgtcactacagtatgaaagttttacatgatgcggttttctaatcttacgcacatcatatagtactatgtaatggatgaacttttgatgcaaaagggttgatactgctgctcttgtgatatcagcagctaacctacggcaaacataggcatttttcctgcatatttcaatcacttgattaatctctgatgcggtgacctactgtctcctctacctcagcaatacg

SEQ ID NO: 12582 - DNA, 405 bp, Oryza sativa
  unsure (1)..(405): unsure at all n locations
tctatcatgttaagagacatctgcaggttctttttttaatctttctaaatgtcatatttgctgaaaggagacttcagttttgactatctttatctgcacttatttttactgcagaagtaccgcacagctcgctacaagccagacctatcagaaggtttatatcaattgggttcctctctgacttgcattttatttatacatattcttacatacgggaactcatntttcatggcagataactttttttttagaacttcatggcaataaactaagtacaaatttcatgataatggaagggctgtgaatttatttgtaaaagcatattttcatgatgaaatattaaatacttagtgtaagatcccttgttgcaaaatagcacgcatgcaaccatattctagtttatgt

SEQ ID NO: 12583 - DNA, 264 bp, Oryza sativa
  unsure (1)..(264): unsure at all n locations
agcggtcctccgtatctcatgacacacacagacatgcgtcggctcataatcatcagattccttgctcgtgagcgcaggacggcgatggcgtcctcacctgcgcgcgatacaaccgcgcggagctgatcacgccgcgaggtggtatggccaggactcctgcggtgctccgctcacgcgacgnaatgagagctcctttctcaccttattcttcctggcgctaatacacgcggtgccatgcgcatcgcgtggtcgtctttacactcg

SEQ ID NO: 12584 - DNA, 375 bp, Oryza sativa
  unsure (1)..(375): unsure at all n locations
ggaggagggggccatttatagctgnaaaatgatggcgttntggagtgtgttatatattgcaaacaaataaaatactagtggagaggaaaaggagataaaagtcgagacagatgtgtttggaatcttctgcagcatctgctggcaattgggggaatcatgtgggcgcctgattatctatgttcttggnttgattgcctgtgacacctgtggtttctgaacacagtgcttttaatttgtgagtagaaaaatggatagataatatttggacaagttatcccgtgcgggtactcttgtttctatcttgagatggcatcatcaattgtgaataataaatctcttcaattttttatataggatgatgatatatcccaagta

SEQ ID NO: 12585 - DNA, 363 bp, Oryza sativa
cttcgagactaaacaaactaacatagagggatggtttattaaattgtatacaacactaattatttatctgactaggttgagcacacctgtcatacacaaatggttagccacatatgtcatatactataagataaagatgcactcttatgaaattcccgactaattaaagttgtagccaagtgatagttttgaccgaataattgcgagtttgtgaaaaaaattactctaattatatatttgtgttctttgtttgaccgtgtaccaaagaaattcggtttacagattattctttgtagacaacaagtattgaattattcatcggccggtggatgcggaagcgagggaattttctagccgttatct

SEQ ID NO: 12586 - DNA, 322 bp, Oryza sativa
  unsure (1)..(322): unsure at all n locations
ctcaatgctgctctgctgcgtggagcatgctgatgtatggggcagagaatgcatcccggcctggttggagtaactcaatcagcgtctgctacctgctacgggcatttgctcactaccagatggactcgtgcagcacaacgacatcctgatcaccatgatggagccagacatgctgcaccnaccaccctatgacatagaagtgagtgtcttagatggctcgtgatagagcgatgctcgtgtgtacttctgacagtctcaaagccatcctgctagcacttacacacaaaatgtactggagtactgcaaaacaactcgctgacct

SEQ ID NO: 12587 - DNA, 406 bp, Oryza sativa
  unsure (1)..(406): unsure at all n locations
tactcagcttgctgaaggggatcgaaccgccaccgtaaatggtcggatgtttataatctggactatgncatggtggacgctcaactaattgaggtccctatcttcacgatagataccgagctgcggtcgactaacggacgcaaggagcctttctatggcacgtccgaccaacaagagaagacagctggcctcccctgaaactccgacattcagaccaaacgaggaaagggcgattcttaaagaatggattaagatggcttccacgtcacgagtggataggagcaaagaataccagcgaaattgagatttgataaagggttcgagctcagctatcatgcaaagaggggcaagaagtggataaccatggtcgacattattcccagaatcccagccgaaacaatttttt

SEQ ID NO: 12588 - DNA, 441 bp, Oryza sativa
  unsure (1)..(441): unsure at all n locations
tccgctgttctctaataagtctatttggccgcgcggcctatgtaattattaagttgttgtaagtcttaagattctttcatcttagttgtcgttgctatgtgtaatcatgcttaagatgaaagtgtgaatctagtgcacatcctgtgaactagattcacatgagtatgagttatgaatatttgagagggtgtagatctttatccatttttgtcaagtctcctgaatgtgtaacacatctggtcgccgccttcgagtgggttgacgggcacatctcangctgaagttgactggcaggctaanggcccagcaatgtctccaatattcctctctcgaggtgtcggatgtttcattatgcttgtttgatgacttgaaatattcacttcatctctcacatataatggaaggtcccgagagcctatgacaagaagtcatctgatgtga

SEQ ID NO: 12589 - DNA, 412 bp, Oryza sativa
  unsure (1)..(412): unsure at all n locations
tactgagaaatataattattcaaagttggttattgtttatcaaatatcgacaaggactagtgtatatgatagagggatgtcatagtgtacaaccataatcttactaacaaatagtacttctaattaatgcgccattatactataccccatcaatttcttaataccttataatcttgactggtgcttgctatactttgaccactcatatatattaaactgttccattatgataaatgggactcatatgtttatattgaccatgtaacatactactttagcacagagtagattttagtacttaataaatttatctatgaaatagaacatatatgtcattatactaaaatcaatgcaggtccaaggaatatttangatctgtgtatctgtttgagttctacatatcaacacataa

SEQ ID NO: 12590 - DNA, 364 bp, Oryza sativa
gcactgagctgcagcttataaagctacaattgcaataactatgtcgactactttttataaaactatcagcaaagcggaattcgatctacagcttaatgctatttcgcacatgcgctcagccacaagtatacattcaaatggaacaactcagaccctatgcaccttttccttataaggaaccacagttcatgcctttttcataaacaccagcgaatgtctagcaagcaatcataaacaagttaacaaacacacacactctacacaaaagattcggagaaattctttaagttatagaagagaagctatagactctggaagtattctcacaaaaccatggtatacactgcgccaactattaagtgag

SEQ ID NO: 12591 - DNA, 446 bp, Oryza sativa
  unsure (1)..(446): unsure at all n locations
ngctagcaccgggctctctatctcgactacctatcgcctctctcttggctcctcttctggatctaaggccgccaccgcccttggtttctccggctaattgactgtatcaacctcccggcctcaccaccgacctttagctccttccctatcatcgttgacttctgcatccctccatcggccaccagctccctttcaccgcgccactcccgacggtgaccccgataggtatggagacagagaaagagaggaaatanggagaggtggaggaaggagaaaatgaatatatcttacatgtgggtccccctatatgttttttcacatttcactgacatctgggggccatatgttgactcagtcggtcaacctgtcacgtcagcaaaaaccacttcttaaatcaccgaaggagtatatttgcatcaagttttgaagttgggagaatgcattac

SEQ ID NO: 12592 - DNA, 254 bp, Oryza sativa
  unsure (1)..(254): unsure at all n locations
ctaaatacccatcaattaatctagaaatcgtgaaaacgaagaataatccatggatattgatgcctgatctacatgtcacgacgctgntgactctattttagacttactagcaaacacaattaggtcatgttatcaaggagtgttgtccagcaatgcttattgttccaaggggaggatatcctgattctatatcgatgagcacactgtcctcaacacattacaaataactaagaatgtaaagtggatcgtaccat

SEQ ID NO: 12593 - DNA, 381 bp, Oryza sativa
  unsure (1)..(381): unsure at all n locations
atagaaatatctgtaacaccaaattagtttcattaaatttatctatcaagttatttttataggatatcatatcttaaacattactatgtntatctataaatataaaccgaaaacaacttataatatgaaacaaatggtaggtgataaaacatcatatttttatattttattctatcaaagatacattattgattctaataagacatctanggaaaaggatgtgtctgtgataccttcattngatatcaaaatcagtaatacaatcgtgtggactataattacaatatccaatttataatcgtgtgtactaaaattacaatatccaatttatagtgtaagagaaaagtttaagtatctatacttgntcaacgacaccaacag

SEQ ID NO: 12594 - DNA, 336 bp, Oryza sativa
  unsure (1)..(336): unsure at all n locations
actgatgctataatggacttccctatctttattctcaatgtcgaatgctacctcctctacttgcaaaggtcatcaaagctagtggaggtgagttttttttcttaacaaaatcagagggaggtagntgagctcaaattgtggagggggtctaaactctgaaggtcataaagttgaaagatctttttactatatatgtcaaatactttctcctttctcaattgatcatcatataaaaaaatcccaaatttctcaaattgatcatcatataaccacatggatacggattttatctaaacacaattaatgtatcaaggaagaatgtgtgcctgttaaagg

SEQ ID NO: 12595 - DNA, 400 bp, Oryza sativa
  unsure (1)..(400): unsure at all n locations
ttatcgntttgagcttctgtttgctcacttatgtgagggctactcttgccaagttctgaagttttaatcttgtgaatttcttcaacaattgctggcatatctttgggtccatgttcattaacagaatatttccagtacctagcatggatagacaaaaacaaattagacatgaaaaaaatacagagacccaaatgacataacctactatagatntcctgcatgcagaaanaacctgaaatgcgttgctagtattactgcattacttacttggaggaagaaatatttttatcaacatgcttcctggagactaaaccacgcagatttccaagaaaaacatcataacctgcattcacccataaagggattttagcattcactcccatacatctgcaggatatta

SEQ ID NO: 12596 - DNA, 162 bp, Oryza sativa
tgattggtataggttgcttcatcggcaattgcaatgtaagactatcatactttgcaatatgggtgctctaatattgtcatttgacttaattgcagaacagtacacaacactgtaatataacgccaggattgcagcaggcgaatgttccagtctcttattatt

SEQ ID NO: 12597 - DNA, 283 bp, Oryza sativa
agcttcagcactactttcaggccaataaagacatagtgccttcacagtaccccttatgcgaaatactcccaggcaaggaagtcactggccggctcaacaagtgggcggcagagctatccccgtttgacttgcattatgttgcacgctctgctatcaagtctcaagtgttagctgacttcgtagctgaatggacaccagtacttgcccctgaccccgagccggccgaacagatctgggttatgtgctctgacggatcgtggtcgcacaaaggggcaggcgttgc

SEQ ID NO: 12598 - DNA, 431 bp, Oryza sativa
  unsure (1)..(431): unsure at all n locations
tctagattctattcttggctatgcacatacagattccaaaacataagatatgaataccaanatactccataatgtataggaagagaatacgtcgacaaaagtatacaccaatgagtaatgtttacctctagatatggaagagcagacgatatttgtgtccaatttgaagggctcccgtgtgtaaaacacataccaccttctcctgatgcgcatttcacctgcatatccactgatttgctggatatggctgatcttgtcccactcagagcaagaggcccccattgatatgttaccaagcagtggcaaactacagtccagcaccaaactctttggctttacatcttgtagatatcctgggagtgttttcatgctgaagtctagcagatagagcttttgcagcgcaggtatttccttcaatagtttgagctttg

SEQ ID NO: 12599 - DNA, 119 bp, Oryza sativa
aagtattaaatgtagactaataacataacaaactatagattccgctgtaactggagataattattaacctaataatttgcattagcaatgttattgtacatcacattattaatcatgac

SEQ ID NO: 12600 - DNA, 236 bp, Oryza sativa
  unsure (1)..(236): unsure at all n locations
tatatgtgctgtcatgtatctgncngcatctanaanaaaaatacagatgtgttttgtgttatgatgggggtacttccaagctccatgtcaatgctagtcatatctgccataagaagttcctaggtacaagggtgtcatgtctctcattnntctacagctcatngcattgagaactcgattaataagccctaatgaccaatgactaatgcaagtgcttaatatatatacatagcata

SEQ ID NO: 12601 - DNA, 219 bp, Oryza sativa
  unsure (1)..(219): unsure at all n locations
ctaaagaagtattaataagtatgtaggaagatcatacatagaatcatatcttacccattccttcataaagaatctttcgatntcaaaggagccctcaattgtgtcataatctactcaccaatctaactaagtaacctttgtggagtacaatactaaacttctaatgctgatctagtggagtatatttaattacaatacatcngtctggcaggtataaac

SEQ ID NO: 12602 - DNA, 380 bp, Oryza sativa
  unsure (1)..(380): unsure at all n locations
cgcttgctgacagaaattgagaatctgtgttcgaattggaatatgttgtgtgccanacattgaatagggaccctgttttggagattatagagctctgagtactaatttaaaagggagagacaaaaggcataacaaccaacatcattctacctcttaatcgacttcataaatgctattatttcctctggtcaaatatattcgactttggagtctgtatattttcttcgaaatccaagagcgcccaactgagaatattatcaccatatggcattgattgctgaatctaaaggacttccgcgttatattattatctatcagcttctttactagtagaatattcgctccatgtttctaaaaatatatttttgaaaaatattttt

SEQ ID NO: 12603 - DNA, 434 bp, Oryza sativa
  unsure (1)..(434): unsure at all n locations
aacagactacgagaatattcatattntggtcattctgatacactgctttactatatcaaggngaaaagaagcagcaacttgctgattgactggagagccaacattatttttctctctgaagtatctcatgaactgacacccattgcattgctatcatatatatataagaaccaccaaaccagatacattaacattgtctctcacacaaaaataagacatcacaacatataactctgcaatatataggtcaaaacctgacgggatttaactaataattaacacatcacaagcacagttggacatgagagatacaacacatgcatgtgatctttgttagtggtaactgacaccaattgaatttgcagctaaccaaacaataaaatgatccttgaccactacgacagaacatgagtgacttaaaaatgatcaacctg

SEQ ID NO: 12604 - DNA, 466 bp, Oryza sativa
  unsure (1)..(466): unsure at all n locations
gcttcttctgccgctactcctgtactgctcctgtgattcgacgtgttntaccaactgagagtttggtcaaggaatggtgcccactggcaagtccgcaagtggccaatgctctcagacatatcttttcatatagaggtatcggattttgagtgtgaactgcagagctttntttacatatcttttcaaccggattctctgactttgggcagtgaaaagcagacgcgcacagtaatacgaggcttgtgctacagtaatctgaagactgaagttgtcacggcgcgagtgtaccattgctgtagccacaacacgagtggattagactctattcatcggtgctgtagtaaatcgatcttgccattcacccgggatcggatggcttataaactctcaaagtgaagtgatgttacctctgctttctcttaacgaagatccaaatcttttagctgtgaccggtcaccccgaaaaa

SEQ ID NO: 12605 - DNA, 245 bp, Oryza sativa
tgttatatttattttctcgactacatactcaccgtggagggacataatatcattcttttttagagcaccatatgctttatgaactatactgaatgatttagcatgtgatatatgccttaaaatgtctcgaggcaaaaattgagcgtgagacgcgatcatctcctgaaacatttaaagaaaatcacacctacacgccgcgcgctcctcgtgagttttgcgcccctgaagagacacgccttctctca

SEQ ID NO: 12606 - DNA, 135 bp, Oryza sativa
atgatacgtatgatgtgtacgttattggtgataaccgatatcgcatttatatgtgagcagcaactatttaatcaacaacaatctatcgatctcgatacatcgatcactatatgatagaatgatatcatcgactat

SEQ ID NO: 12607 - DNA, 220 bp, Oryza sativa
  unsure (1)..(220): unsure at all n locations
tctgactgcattgaattggagtgattgcagttntattgtagttggtcattaatccactggctgcaccaaaaatctgtagaattgccttgactaccttggcttcttgttgacttggtttgaaaaataatactgcatcatcagcatatattgaatacttggaactgggcgtcttggtgctggttcagataacaagccacttgctttcgcttgagctacaact

SEQ ID NO: 12608 - DNA, 247 bp, Oryza sativa
  unsure (1)..(247): unsure at all n locations
tatattaaagttcatatctctgcgaatctatagcaactggaattacctcacaattgtactacatgtgctcaagttgtgcattttctgtaaacatatatttgttgggtatttcttctatattctccagactttaaanaatggtgccactggtgagtgagagtaatatgcatataagccctgacgctctaggaatatcgccgaagtcttatacatggtaatacatctcataagagtgctcagtttatac

SEQ ID NO: 12609 - DNA, 369 bp, Oryza sativa
ttggcggaattcctcgcggcacaccccgtgccagatgattccccgctgattacataattgcctgatgaggatgttttcacaattgagacagaaccctcttgggagttatgctttgacggagcatcacgcacggagaatgatcgcgacggtactcctccgaaaagagccggtgctggtttggtattcaagacaccacaaggcggggtgatataccattcattctctctactccaagaggaatgttccaataatgaagctgaatacgaggcactaatctttggcctcttaatggccctctccatggaggtacgttctataccggtatatggtgactctcaacttattggtccacacataaatgatatatat

SEQ ID NO: 12610 - DNA, 382 bp, Oryza sativa
agcttgccatctttgcacttcaatttcgcggcacgatttatttgcaactccaagttcataatggtatcaccttcgtaaaatacatgcggggcccttcgcacaagaaaaaagtagggaaagacaaacaatttacccaagaaatagtccttcgagagtaactagctagtgccaactgttgcactggaagaagtaaatatagtttataatgtaaagctaaatatactaaaaataagaattgtctccaaatctagaaaatttgaaaattactacatgagatcaatcaaccatctacacatacacatgtgcaaacaaatcaactttttgcagaagaatatatcatgcgaaccacaaaattatgatgggggatggagggagggggatg

SEQ ID NO: 12611 - DNA, 238 bp, Oryza sativa
tacacacaaacagccggtgtgcacgaactctttatgaagattattgaggcctgcgagaaaggctactgcattcctttgtgcttggcagcaaatgatgaatcaaccacctaccctttttattctatttgcaatattttcggtgaaaggacatcccccacctgataaaaataatattataaataaaccctacacaacatggtaagatataagaataacaaacgaagctaaagcacaaaag

SEQ ID NO: 12612 - DNA, 464 bp, Oryza sativa
cgatcaataactatgtcagcacaaaagccacggtaattcccatgtggagatgcagcatgattctctcatgtaatgctaggtatggaatgcgtataacaacgcaattaacgacacgcgacatgctagcacatggctcacttagtagcttatagctgcagcaaatatagtagattcagccagtaaaatctgaacatgccttcaaactcgtactacgatgtgtccatactccaaactaggttgccatattttgtgacggatggagtatattaccagaagatgggaatgaaacgcggacaattgagcgagacatgcccaacaccatgttcttgtgagatggggtaggcaagggcggcgcggtggagggctcgtcttctttatcgcgccggagagttaacttctgaagtcgatcaactgaagaacaagaaatggggagagaattaacatgtggttaataattgaataag

SEQ ID NO: 12613 - DNA, 421 bp, Oryza sativa
  unsure (1)..(421): unsure at all n locations
agctntagtagaacaattctctntagctctagttgaactaacagaacataattgctgtaataataaatgatagaattaagacattggcaaactttgattcaacatttntaaagtagacattccagaacctgcacattatttggtatagcattctcattggcatgtggttcctcacgggtgtgaacaaacccattcataatatcagtaccatcttgttcagaaacataagcctgaataaaaaatcaaacaaatcacagtattgccaaataaatttactaattgatatttgcgtgcttagttgtatatacctcattggtcacattctcacgtggcaccattgattccacattcatttgacttgttatggaccttttgcctaagctttccccacttagttgctgtaattaaattcattaaaatt

SEQ ID NO: 12614 - DNA, 399 bp, Oryza sativa
  unsure (1)..(399): unsure at all n locations
tcctcagatgagaatntctccctaattggagcaatcataccctgtaaagctaaatcggctaactgggcatcagtcanacttaagctgtagcacttattcctcatctncctgaatctctgaatatactcatgcacaggctcatcatgtctctacttgatcgatgtcagatcggacaaatttatctcgtgaaccccactataaaaatagttgtgaaactacttttctagatcggcccaactgctaattgatccatatggtaaagaagaaaaccaaataaaggccgatccagacaaagataaccggaacaacctaaccctcatggcatccacagccgatgcttcaccacactgggctaanaatcggctaatgtgcgtcgtagtcgatgtactatcttgtcct

SEQ ID NO: 12615 - DNA, 365 bp, Oryza sativa
atgtacaaaagcgtctggaagaactcacaagtggtactaaagctgcgcttagtttcaaagtttggatccaaagtttggatccaaactttagtcctttgttatcatatcaacctgtcatacacacacaacttttcagtcacatcatcttcaatttaaccaaaatccaaactttgcgcttaactaaacacagcctaatgaatattgttcaatcaggttgccaaaatacttctgcatggggtgcaaatagggataagcccattgatgatcccgcattattggagctaacaatcttctcgaatgggaatctttgcattttataccgctcaaccagtggccggctttggactacccaagctaacattatc

SEQ ID NO: 12616 - DNA, 457 bp, Oryza sativa
ctgcacgcatgcaagctttatatgcgtgtcctttattgatattgaataaatgctggtaaacaaactacattcaagaatacctgaaatcaactctaaaattatgtttcaaaattcgaatttttacttatccttataacctgaaggctaagtgaagaaaacctgaaatcatctctaaattttattaaaactcaaattttcacttatccttataaaggcagaaggctaaacgttgcgagccgcatatgaaagctacactgtacagacttcactgttgcaactttaagctaagacaaaagatgaaataaaaccactgcaaggacttgccattagtaaagtctcgaagggaaaaccctcgtgtgggagctgattatctttgatacgaatggcaacgataactaactcgtcttacttgagatgcccacaatggtcacaatcatatgcttcatatgcctgaatg

SEQ ID NO: 12617 - DNA, 263 bp, Oryza sativa
atctcttacgctacatgaatggatcagtcagaacatcaccaccggctcttctctatcgttgtcgactgagtgtttcgcctgcacagcttgactatatgccgtcgttgttgagcgtctacgtcttcaccgaccggcttgtcttcgtcggcaccgactgagtgtcttcgctgcacggctggcctattatgacagcgttgttgggcgcctacgtcttcaacgaccaggcttgcttcgtcgtcagcgactggtgtactcgcctgcac

SEQ ID NO: 12618 - DNA, 373 bp, Oryza sativa
atgcaagcttccttgagcccattgcaattgtgctgctcaactaacgtctaactgggtgccaccatgctggagtcaatgctctcgcatagcttctcctcgcatatcagcttcagtctctcgacgttggaccggtccgctgcgacaagtagatgctgagccatcaccaaatcctcctcctcgcttggttcgtctctgctctgatcttcttgagccatcgtgtccagggaatcggtgtaaatgaaatgcagcaaagacttaaacactccaggctccatattatcgacttgaatgggttcatcggctttcttcttcatggggcccagaagctcgggcttgaagaccgatgaccgagcatcatgaacgcacctatgag

SEQ ID NO: 12619 - DNA, 373 bp, Oryza sativa
  unsure (1)..(373): unsure at all n locations
agctacaaaaatggagtacacctttctgtctgtcacctttttatgtgcatcataataatnccaaagaattattgaatcgcgttaaaaaggatttaacagcatctggccgcatcattgtgagcacatattgcctaagcaaaaagcgcctaagtccctagggatcacaacgggccacgctgaaaacataattgggctgaagtactgtacaggcccaagcccattagtactcccgataccctaaaaacaccaaagtccaaacgtcgtttcgtctttcccgccgagactctcgccattccccactccgtgctatagtacagaaccgcgccgacgaaactatgggtcatcaatctgctccaacccaccctcaaaaact

SEQ ID NO: 12620 - DNA, 286 bp, Oryza sativa
ataacaacctatgcgatgtctactcctggaggtggatgaccaccactattactgtctctttgtgacagatgatattcaaaggtgtgattttacacccgacctcattctattcgaattcaatgacctatatgtcaacttggaatggataggggacaatgctcataggagtgattgattgcgccattcgcaccactcagttgaactatgcacaaggagaggtggtaaccttccagactctagtgccgcagaagccaaggattaattaaaccaagctgctggtgaaaac

SEQ ID NO: 12621 - DNA, 371 bp, Oryza sativa
catgcaacttattgcgggaccaagaatttcagtttgttttatagctaaccatatacatgtagtgcggatagtagcaatatcctcatattatctctaaaagctattttatcttttaccggacccacaagtttaatttgatatgctcaaacctagaaattatctcttggcatgcacgtgttaactagccggttgctttcttcacctaagcgcttgtgcaatcggtcgcttggctctctctcatctcatctcccttatccacgtaagacttatttgacgtggctctggacttattatacctgctcttagtgtatatattacacgggctgtgagatgtgagtactgagtagggtttggccgttatcgatcccgat

SEQ ID NO: 12622 - DNA, 349 bp, Oryza sativa
  unsure (1)..(349): unsure at all n locations
taatgatttgcaagactgcgtctctctaattgaacggttaatgcctgcggtgtgaaagcgatggataaatttgtatacctttactctaccacctctatacttgggggctttatccttccacaccggacatgattgncgatctataattgcatgccatcagactcctagcacccataggtaattggccgacctgcattgatatgaaaggcacaagttttaacaagactatcatgaaaacaatcaggttgaataagttagaaacaagttgatatttaagctattcaatttgcaagcagcataagttgcagtagagacaccaagttataattgaacaaagctagaagttatt

SEQ ID NO: 12623 - DNA, 437 bp, Oryza sativa
  unsure (1)..(437): unsure at all n locations
tgcggcatgcaacgctttgatgtggctcgtaacagcatataacttctttcaactgttctttcatcctctcctcagcaggatgctttgcaggtaactggattntatgtaaccttttgccaaaatcaaatactangattctgtataacttatcattctatttggatggaggaaattttgattacgttgcacacagatattattgtttaaatggtctgcatattatggctgcatgaaatctgttttctcatggaagttttgcaattgaaaatacctatgtatttatctatgggaaaatatatatatctcattcttaaaacatcaattttgctgcaccctataacattactggtcattttatatttattatgcttctgttggtttggctgagactatacgcgtcaaatatatagttcaagtttgcaacagatggctttttt

SEQ ID NO: 12624 - DNA, 416 bp, Oryza sativa
agcttcatcttgtaaattgcagtaatcagcattatattgtgacttattacttccatgttgcaggtcctatgcattactactatctaattttcctcgggcgatgagcatgaactatgcatgagactctaccgaagatatcggattcgaccatacgaatggactaggatgaggatgctactactggccgccaattttgcttggcattatgggggattactctcatattgttttgtgaaattgtttctactacctccgtttcagattataagactttctagcattacccatatttatatagatggtaatgaattgatgccacatatatgtctagattcattaacataaatatgaatgggggcaatgctagaaaagtcttgtatatgaaacggagggaaggatttttttcattatcaaaa

SEQ ID NO: 12625 - DNA, 421 bp, Oryza sativa
  unsure (1)..(421): unsure at all n locations
agcttgttaatggggatcaatggaatcatgattatcaaaaggatagtatgtatccgttgttagccaaggactaatgaatcctgccatgatatgaagttctctagtcccagaaaatggttatgctcttcaagacatgccttctttgcaaagtagttaaccagcttactgcagtgggaaccacagttcacattaattatgctgtgtgtagaaataatttgaagccgcttgctaataccaaactaccaatctctgataaagtttcatctaaatccaaatacataactntgaattcataagcgactttaatgttgaattacaaacaacctattntaaacccagactctagttgtttttcctttgaaccatctaaaggcacagagaggccaccattgggttatttctagaggttcacccacaagaa

SEQ ID NO: 12626 - DNA, 264 bp, Oryza sativa
  unsure (1)..(264): unsure at all n locations
agtctaaccctagctagcataccagagattcagggactttctaagctcatatgaatcataaacacaggagtatggtattacgctccatagcgggccgaacctgtataaagcctctttgtctcatcgtctgggaggagcctncgagatcaagatctcacacagtttcactcaccacatcctcgaatctcacccgctgtccccgggcgaactctcaaagaggggcctcacagcctcccgctagagaggtcacccctcgacaactat

SEQ ID NO: 12627 - DNA, 294 bp, Oryza sativa
  unsure (1)..(294): unsure at all n locations
ccggccagcggcaaactgatctggtacngtgcatggcgaggacacaggtggcatgatgctgatgggcggcctgagatgacgctagcagtctatctgtggcagtgacaacggtggccttgtgaagtgtgcgtcgcaagcctaccataagaaggccacttgtggcgacgacaccataagaatgcctctgtggcagattagtgccgagaggagatccattcttctctctcgtcctcaacctaaccgtgtggatggatatggaatgcgtctgatgtccagcttctactctatggtcag

SEQ ID NO: 12628 - DNA, 330 bp, Oryza sativa
agcttgcatctttaaaataatcatgaaacttattctccatttgtgaccatgtagaaattgaactaggagcaagcaaactataccatgtagatgcaaagtttgacaaagaaaggggaaacaacttcaacttaagcaaatcatcgctaccggccttaccacattgatcaataaagcagccgatatgctccattgtagtcatagcattctcacctgtgaatttcgtgaagttgggcacctcaaatccttgccggtattggaccgaatctacatgttcaggataccgcctttgatatgtatgcatggctactttggaatctatttcactattat

SEQ ID NO: 12629 - DNA, 289 bp, Oryza sativa
acctgccgcatgcaagcttgtaagggtatgatgattgtgactacctttttactatctatattagcatatgacataaaaaaaaatcagaagggggaggggggatccattttattccatatacctgtccaatctatcgacgctcatgatactggagccacatgttatcctcaccgtgagtagcatattatggatctatcctatacatattgtgctcacaatatttaaatttaccagcttgctaatggagaagccctttcttgattccataaaagagttgacactctagacc

SEQ ID NO: 12630 - DNA, 300 bp, Oryza sativa
ttcccccattctattctcatggccctgcgacgcccgcgtgttgcgcatttatttgctccctccgtggtaagagcccaacctctctcccatatacatgaacgattctttgcttagtgggggggctaaattttctagccttatcctaaccttaagttgagccttcggtgccgtcgatgcccgggaccccctgtggtggctcttccgtaacggctggcttttgttccgacggctggctacagtacccggcctggctcaactgtggacagggattgttggctctagagttttcggctctcacac

SEQ ID NO: 12631 - DNA, 326 bp, Oryza sativa
atctactcataatttaggggacggtttgattgatcatttcaaaccatacctaattttttaaggtggtaacaatgtgcatatattttttaaagaaactttgtgaattcataagaaatccggtcaaacatttagtgattttggccacttacttaaaattgggtagatttattttggctacaatatgaaaagctccttaatgaagcacttctggtgacgggtcgcttaaacagatacgaatgcttgcttaataacggggatcgccgcacattcagcttgcgctggaacatccttgaaacttcatatcctaatgggagagtcacaaaatc

SEQ ID NO: 12632 - DNA, 386 bp, Oryza sativa
  unsure (1)..(386): unsure at all n locations
tcactaacccgatatagacatgatgtatcactctaaactgcaggctcacttcgtttgtcgtctggaaagagtttcaacttcagtcctcgcattctgtgtgagaaactgagaatgacttgtacagagagcttcncttgcatgaccgttgcatgagactcatatcgctcgtaatatcactctccagcaatagataatgtagcgagatcttgtatggctatcggagcagcactaccttactttgggtcatcagtttttcgttcactcataattggtctacatggtattatcaagctgaagaaacatcaccacatatttggcattatctacttggatcgattgtaatcaagaattaccgaggccacatacactcacgcatattgtggtca

SEQ ID NO: 12633 - DNA, 301 bp, Oryza sativa
ccttaatctactggatctcgtcgcaggaagggttgaacaattgttttcgaaaaccacggcgtctactcggcttatctgcccagagaaggcacaagtgatcatcaagctaacagcgacgaatataattataccgcatgaagcctccactcagacaacaaacagcgtaatagtcgcaccagtcttgacgagcacactaaaccaacctctctcagactcttttagttggaaattgacagatggtcactcgtccacagaccacccagtgcaaaagcatgagcaatgatttcataaggtaggtgag

SEQ ID NO: 12634 - DNA, 452 bp, Oryza sativa
  unsure (1)..(452): unsure at all n locations
ctgccgcatgcaagcttacaagacaattgntactgtactcacatcttgtattatgtgagaaagaatattaacaactcacaagcacggcgtgacagagactatgagtatcacaacaacaggctgttcccatcttggatggaactagaatacacaggctcatgccattgtcactatacaagtacaattgaataaaacttgaggcgatctgaaaatcgccaacagattacgctgcaactagcggctaactgtctaaggctatcgaagcaaataacagcagaaattcgtggcttcaatgtgcatctaagagttcagctttcagcgtcacttttcaagatttcatagttttcaatgaacgagtacacatcatttcacgaactctaatgggtaaatatttcatgattcatatacctctcaaggtaataaagcaatacctatgtctcgaaagaatacct

SEQ ID NO: 12635 - DNA, 358 bp, Oryza sativa
  unsure (1)..(358): unsure at all n locations
tgtatntaaagttctattcacacctcacagtattggatattcctctgatggcatgagtatatcgtagaggatcttgaaggaactgatggagttcctgaccttgatcctaatcatgttacagagctgaggattctggtgctatattgagtactggagatatcatcaattcatcaggtaggaaatatagcacttgtgctatacaatggctgtttagatctttctatgtggatgctacttcctcagagatctctctttgcatcctacaaatgtagcagagctcttgattaacaatagccacttaaaatgataaaatgtggcatcaagcatctcacacatccattatttgccncagacatat

SEQ ID NO: 12636 - DNA, 421 bp, Oryza sativa
  unsure (1)..(421): unsure at all n locations
gcttcaatacagatcgaggattctttcgattttagcaccaaaacctgcatttnttttctcggacatgagcagatgcttgatgtatctattagctggtaaaatactatgtggtcatgaatcctattcttgaaaaaattactccctccgtttcatattgtatgacttgcctagatcatccattgatcaatggatatgttttctatatgtgtctagattcattaacatctatatgaatctaaataattctgggaagtcttacattgtggaatggaggaagtacctaaccattacttacctctcaaaaaatataggtatttctagtatagtggtttggcccaaaataaaggtattgttacacctaccactccggaggatcctctcaactaatcataatcattctccatttaattatctcaactac

SEQ ID NO: 12637 - DNA, 389 bp, Oryza sativa
ccaaaaactagctgacagtaacaggcctggtaacaactggatctctaactcttctcccatcgagtcgcttcgcagggaatccagccctcaatggttctctccggccatatatgcacccaccaagaattccttgtcatcttagacagctcatcataaactgaatctggaactaaaaaccccacacatagacaggatggcctggaaacaaccttgatcaaaattcttttccgcactagaaaggagatttcaccccattgaactaccctcttcgcgatgttgcttgaaactctgaaacctcctcatgcattctgacctatgtgagggaagcctacgatctggtctcaagtatccatctcactgcaagagttttatatctccttactgtgagg

SEQ ID NO: 12638 - DNA, 195 bp, Oryza sativa
  unsure (1)..(195): unsure at all n locations
agcttgtgtcgcggnggtggatctctttgttctgtgtagtctcnggccgctggcgacagggtggggatggatccggtggtgggcgactcattcatcgggctcggcaatgatgatggcctgggccacagatcccgcgggctccgcggtgtgtctcggtgactacaactgtgctgctcgcgggttctgcatacgtgc

SEQ ID NO: 12639 - DNA, 337 bp, Oryza sativa
  unsure (1)..(337): unsure at all n locations
tctccatagaggagagcaacgacggttctcgaatttgcagccgagagtctctacanattatggtggtgccatgttgctcctatctaattcttagatccagctggttggagttcgaaaaaggttgctgccattctactcggctncacatgagacatctgcgctatccacccacccatatctggttagttggagatagagatgggtgcaccacattgctcatgcttcttcatgagcctggcattggcatcttacatttctactcatctgtcctgcaaattcgctccatgcactaagattaacgacatcgatacgaccctgagctcgatctctatttgca

SEQ ID NO: 12640 - DNA, 416 bp, Oryza sativa
  unsure (1)..(416): unsure at all n locations
agctttcccaataccagacggttatgctgctgatgttctttctcggactgtgagtacaccagtatgtcatcaataaagaccacaacgaacttattcaaatacttcataaacaccttgttcattatattcatgaaaaaggcaggagcgttggtcaagccgaatgacatcaccgtgaattcatacaatccataccgcgtggggaaagcagtcttatggatatcttttttacggatacacaattgatgatacccggaacgaaggtcaatcttggaaaagacagaggcacctttgagttgatcgaataaatcatcgatccgcggaagagggtactcgtgtttgataatgacttcattgagagctcggtagtcaacgcacatcctctntgtcttgctttctttctacaaaaatacgggagc

SEQ ID NO: 12641 - DNA, 301 bp, Oryza sativa
  unsure (1)..(301): unsure at all n locations
gggcgcatacganagaagacgatggcttatatagacacgcgcgctctctatctggcgcgccagatgatggagcagtgggctcctcaccgggagaccgtgcaggcccccctttgccggttcggccgcgggcactaaatgaagttcttctccctccatctgaagaacgtcagcgagagatgatatgcacaagacacgggcgacgtatattggtttcggccgcttagaagcgttacaccctactcctgtgttcttgtggatctgtgcgtgaaggaatccatagagtcggatagcgagagagagt

SEQ ID NO: 12642 - DNA, 495 bp, Oryza sativa
  unsure (1)..(495): unsure at all n locations
agcgacctatanaactcaacttgttattactgtgtggtttatatgaatgtggagaagctacatatttgttggttttacctgggctaaacaaagaaattcatgacatgcttgatcgtcaaagatatacatctctatctcatttggtacaacctgcttgcgatgctgagagtaaatataggagagagacttaatagagccggcgatcccattgttcacactcaaaatcgaggcaccctcatcatctgaagaggacattcaatgttaagtgtatggtactacacataatcatggtgagtgcattgtaacgaagaaatctgacactcttatactaagtaagcaaccgtagtggatcaatgctgaattccttcgcacaagttgattactcctggtcttgtataagacagttgtggatatgcttactttatccatgcacactaaggatgacatcttatctagtggtcttgggcctgatttaactgtgtcacattgtatgag

SEQ ID NO: 12643 - DNA, 418 bp, Oryza sativa
cctgccgcatgcaagcttgtgaaaaactccgtgtgccttctaaaagatgatgatttcgacagctaaaacgtcctttcaattcaaggtgatgccttgattatatgcagccgtagaatttggctccaccaactcgcgaatttctgtcccccttatccatctttttcatcggctattttagtatttttttatgccttgtgacttgtgagctgtgactttaatttcctagtccagaatgctctagattttttttgctatttgattgtgaagtgcgaagacaatgacgctagttaattagccgctgtccgatggaaatactctcaagttttgtccaattaatgtcccaacaatggaaaaaagttcatttaacagtacgtttctcacctacgtgcaataaaaggtacagcatggagaaacattg

SEQ ID NO: 12644 - DNA, 469 bp, Oryza sativa
  unsure (1)..(469): unsure at all n locations
ctagatgtatatgacgatctctagacagatggatcttatatgaatcgtatgatgaagtaccacatgagtggatatataggaaaggaatccaaatctgccgaatcgctcatgttatgatcttctacatcctangtctccgcgttccgtcatctggcttatgttcttcatgtagcattcagatcgaatgactctatgaaattacgtcgatacttctacatattatgggtaacgtaggagacatccctattntcccccggnggtcttaattaccactgcttagctntcaattcgcctctgnaccatcaaataaatgtgaataacccgtcctcctctctttgaaacaaggggcgcttccaggtctgtgcgtgcttcannacaatttgtcttctccatattaccatatctctagagtcaataattttctatgaggaactactgaactcaatcacttgcttgccgtactcaacag

SEQ ID NO: 12645 - DNA, 387 bp, Oryza sativa
tttcaaagtctaaacagacgtgcccataaattgcaacaaacaaagtttatagcccctatcgttttgcttatgcttataagccaaaatttaaattttaaaacttaattttcaagttgattttacggttttttcattgcagtttattttacaacatttactttcgaatcattaaggacatatataaaagttttacccccaaatcaatttttggttgctaaaagtcgcatggataagcataagtataagcggaacgatgagcctcatagccacgaacacgattcaagcggcgtctaaactctaaagaggcgaacttaatcgcagatggtgtttctctctgagtcttttgccacaaaaacggaaatcatcagtgagggatgagatgagtag

SEQ ID NO: 12646 - DNA, 444 bp, Oryza sativa
  unsure (1)..(444): unsure at all n locations
taagccggtctctcttctgctatattctcttcacgttccgatcgagagaaatgcttttctcgtcgtagcacaggggagctctatatatgtattgctnaatggagttcgaaaaaaaagcgtattgcattgctagatggtaaatgtaatggacgaaatatgtgaaactacgtactcctcatatacattctctgtaattatatatatgcctcgttctctcgggtcgtatttgtacattttctttctaggtcttcttgacgttacagaaacgaaatgaatcacgcatgtttaattccaacttggagaggccggcaagacagatcgagcgccgtgcttactgtctgatctgccactatggtctgctgctgagctagcgtctgactgtgacacacacatcgtcgctcggaatgtaatctcgacctaacacactcgacctacaactgtgca

SEQ ID NO: 12647 - DNA, 289 bp, Oryza sativa
tgcgctgcacttccggtactcctttaactttcgtgcatttgtatctcctatttgaagacgggatctgatgcacaattgcgttggtacctgctggtcggaagggataatgccattcacttagaaatttggttgaaattctgggggaccgcgccccatgggtcccaagtatcgtgtcccgtcaccgttgcgcgcgaaaccttgacgcgccctctcgaccaaagttgccgtctctgtcgcgcgcgtcgttgtttcgcgcgttgcaccggagtgcggtgtcttaagctggcct

SEQ ID NO: 12648 - DNA, 432 bp, Oryza sativa
aagatgatattgaagtcatgcactcaaaatatggtctgcctgagtttgcaataaattatttggaacccaaattcacagatgttgttcaagaaaaatttcttttgcaactaattttgaccattcctataattttaatataatttcacagcgggtttgggagacaatttttcaattacattgtttgaaacaaacacttcctttctattgtggagcaattgtctttataaaactatatttcagaatgcaaaagtaatgtgtttgcaatattttctatgacaattacacaacacagtttcggtgaattatgcctatgagtagactcgccttgaatttatagcaccggaaggaattcatattatttatcctcatcctaattctcgccacatgaggtacacggtctttaaataattctgactgatacatctatgttct

SEQ ID NO: 12649 - DNA, 447 bp, Oryza sativa
  unsure (1)..(447): unsure at all n locations
cagtcacctgcggcatgcaagctagctcctggccctcgattacaggtctgatgtaacatgctagtctcctgcagaccctgcactgaatggattcaaggggctacttgatagagttgaacagctgaagaaggatatggagaatgtgtttgttatagatcaattcaccaatcctgctaatcctgatgcgcacttcagatggacaggtaacatagatttattatttctttcaaagtaaaattgatgtagcagcgctagaaatcttagtagtactatagtagcagtgttgagtagcattataatattcttgtaactagacaattagacttactcccattatctaaaaaaaagacaattagacatactgtaatcctgcanattatgaattacaatatggaaaccacgcatgaagcttagattgttgaagttagttaaacagtgtcactcata

SEQ ID NO: 12650 - DNA, 401 bp, Oryza sativa
  unsure (1)..(401): unsure at all n locations
ctaagctttgcaccctanatacagggacaggcagagactgtaactcatggagtcgttgaccattatcatatctgcatgatcacacaaacatacaaataaacctgttataaccaccaattcattatccaataatctcccatttcgaatcataagctagcagccagagatattggaggtcccggccatatgtaggaagattgtaaaggtaagtcaaggattantttttctttttagtggctacacagcactgcacactagttctgcagtgcatctgcgtgcattnntctcattcaggtgacatcccaactgatcgatcgacaatgtgtgagtatgtatgtatcangtgcgcatttgccactgcacattatatattgcaatcattccatccgagaaatgattct

SEQ ID NO: 12651 - DNA, 402 bp, Oryza sativa
agcttattcataagggaccgagttcaaggatgatgcggcatggcaatttatctattaattaggcagtatttggtagtttccttttatctttaagaaagtatgtttagtgtccaataaagacattatgttttccttttatctttagaaaaggttctttcttggccgacaaggactagtatttccccatgggtataaatatgtacacctggagtcattgtaaaatatatctctcgatcaatacaactactctcagagcatcgccaccctctttaccgagggttttactaatcttctcatggaatttggcacctgacgcggggctgcatcggttcagtttgatctccggcgaaggggtaagtcctacgttccgctggccctggtgaatctaccggctacgttggg

SEQ ID NO: 12652 - DNA, 157 bp, Oryza sativa
ccaaaactactggcctcggcgccctcagccacgcaaattattttattgggcccacaacaaataacgagtgggggaggaagaaatacggaccggaaagaaatccaccccacgcgcaatggaagaacgagacgaaaagtggggggagaaaacccccccc

SEQ ID NO: 12653 - DNA, 307 bp, Oryza sativa
agctctttacgcctgcacaagttatagatattattcttgcgcaccacatgtgcacgactcaattattaatatgtatctgataaaacactggaggggagagatatcccacctgaattataatacctaaggttttgtacatttaatcatactctctaccctttggagtaggccacaatgcctatatattcccaggatttgtccttagccgaatgatatcatgagccataatggtgaaagatgaaatgatcctttcttttggcaaaatgcatctatatgagcccacgaaattttttcccatccctttact

SEQ ID NO: 12654 - DNA, 454 bp, Oryza sativa
  unsure (1)..(454): unsure at all n locations
tcanatgtgccatacctcatctcaataatcttttgtttggctctccatgtctctgcatagcttatggagtactcgaatttgttctcgatgtgcctaataattgatcttggttcagagcaaatgttaccaacaacactgctgtacatctcacttgccacaacaactgaagtgatgtttctgtgatacttctgcatcccttggaagtagcacttgtgctcggtcacaatgctaactcttcaataatcattccatttacccttatatgcatggacacgttacggaccatcttccttcatgcaccgtcacttatacagcataaattgtngacttgaccaccctaaactctctctgaaggaaactgtccaatgcttcactgcctccttcatctcatgcttatgagcatatcttgcactctcaatnacctcggtctgcttatacttgccagggacatgat

SEQ ID NO: 12655 - DNA, 139 bp, Oryza sativa
atagacattcccttggcggggtatatgcccgcgttcatggttaaaagtcatgggctaagctattcgacttatttattaccataattcttatataacttgatggggaatctttagagtttttatattccgatgcctgtcg

SEQ ID NO: 12656 - DNA, 423 bp, Oryza sativa
  unsure (1)..(423): unsure at all n locations
agctnntaattggctcattgactgcacacttgttggttgtactagcatnttttttaagataatgaaataaaaattctgatctttgcttcaaagttataacaacttattacaaaattctctcaaagagagcaaatactcaggcaaccataagaactgaaaaaataaagccaacacacaaggaaaagccaattattaaattctatttgtgaatctccgttcgtagttggcgaaaatctgcactgcataaccataacttctaagctaagacatgtagaatcatggccggccctaggacagtgcggngcctccaaaatatgtatactatagtaacaagcctgataggctattttgtgcattgagaagatgctgctagatcagattggtattgacactatcatcactgattntgtatctagaactatt

SEQ ID NO: 12657 - DNA, 252 bp, Oryza sativa
ccatattttttgtgccaattcctaaatttctgcaccttattttaaatttataaccaatacataacggctgtttacaagtaactaaaataaccttataagatttggccacaatttaatcatatgtgcaaaatgtgacaagatttcctaccgatttattaataaaaaacctaaaggatacggatatttattaactttaaaaaaatgggctggtctgaaatggttttacacgaacaacccggaggttttctgaat

SEQ ID NO: 12658 - DNA, 409 bp, Oryza sativa
  unsure (1)..(409): unsure at all n locations
tagatgtgtcatcaaggcaccaaataaaaccctgcgtatacataatatcttctattattacctgaaacaatatgtcatgttgtttgaaagagtggcagctaagatattcactgcttacctgatgaggtgctatgtacatctgatgtacttgcctaacaataagtaaatgatataaacaccgttacaatggtacattgatcatagacaatacactggcagatcganttgtgggggtattcgttttatttctgtcccacgatcttgctcaatccgatacctataaaggaagatgaacaggtcagaatctttggacaagagtaaacaacaggatctactctggcaaagatgcttacaagatgaaacggcctcatagtgattagttcaccgcatacaagtgtcaatctcctga

SEQ ID NO: 12659 - DNA, 325 bp, Oryza sativa
  unsure (1)..(325): unsure at all n locations
tcatgccatgctcanttcattaataaaactgcagcactatattatacatccatatcatgaagaatcaactatactaaatccagtaaccaccnaacagaaacagggaatgtattactctccagaacaaggcacacgtcattaagactaactactggcttataacttctagatatcaacttgttcacttgaatccaactcaataatggaatagccaaacttcctgcaattctgccaagagcctgaataaagttcaagggtatgactgcattttcctacacgaatattgcttctatntctgccccaaaaacaccaaaataccaccgca

SEQ ID NO: 12660 - DNA, 419 bp, Oryza sativa
  unsure (1)..(419): unsure at all n locations
ctgcacgcatgcaagctntcacctattgcctgcctacccacccctatagtcttcaagcttcaatgacctttcaaccatctaaactactattagcacatagtcattgttcactgacacccccaccggtagccagccttcacacctcgtactccagcgtcacataaggtcgacactccatcgccgttgaaggcctcaatggctcccccttgggtcgtcactagtggccgccatagatgcatcgggctaccacacagccgatgcctcaacacatgatcattgatgtcgttgcaaagcttctctcctaccagagagatgtcagaggtgtctaaaggagcaccacattacgccatggggcaccagtgccaaaggttccattcatcgtccgacactcctgcaagctcgtcactatcattcttaac

SEQ ID NO: 12661 - DNA, 401 bp, Oryza sativa
  unsure (1)..(401): unsure at all n locations
agcttttggacctgcactagagttaagcagatctctcatgcctcgtgtctntcgcatcaaaagtagagtagaaggaatcgaaggaattccggagttgtcggtaatcttctcctatttcttttattctgtctattactctgaatttaatataatattcttcttgagtaatttagatttatcttgtgagaattatctcttggttagttcctaaatagcatacgggattattgttcactataatcaactaaaatatagtaattgctttggtgagttataaacactaaagtagatattaattacttagacgtggtgtttatgtaattgttatccagtaattgctgcatatcccacagtatgtttgaaatgggtgtagaggtggtgatagccctccagatcactta

SEQ ID NO: 12662 - DNA, 416 bp, Oryza sativa
  unsure (1)..(416): unsure at all n locations
catatcataaaagttatttataatctttcaacaatatataatcatgtgagagacttgtgcanagaattaattgttacgaacacaacggtgtaatcggattataaatcggctgagtatattaagtgacacttctcaaagaacaaaacaaaaacatagatattgagtgtactactagctattttttgaaagaaagtgcctctctttacactatctactagcactctcggtgtattgtgtgccttagaaaatatacaatctatcagaaatgattgctggtagagggttacgtctttatcttagggaaattgtcttactacacttatggaagagctacacgttgacggatagttttagaaatgagtatcatggatttagagtatttatatgcttttaataggtgtgcatgcattataatt

SEQ ID NO: 12663 - DNA, 441 bp, Oryza sativa
agcttatattttctttaatagctatgagaatcttttatttgctgtatggattcatatcctgctcgacggatcccagattcccagcttgatctggcatttcgtgagagctgaaattaacctggaaggcaaggaggatactgatgactctgcagttggcaaagcagaggatcctgaattcccaatcctatgtaacatccaaaattagaagctcacccaaacagttagcttccgattcagattttaagaagctgtagttgtataatacagaaaatgaactataagccagaaactgtgaaaacccagcttttccacattcgaagctggctaccaactagctggttctcagaatattaagctctccaaacaaaacacatggttagatttaaaatagtcggatatatgtgttacaagttaaatcgcgtgagaaaaaacaagtaagtc

SEQ ID NO: 12664 - DNA, 384 bp, Oryza sativa
tcttcgagcgaagaaatgatggaagatgtgatagccttccactcgaaaatggatgcgcgtggatggcctaagagatacgcccacaacttttcagactgtcaagtagcctggagatgctttgagtgtcagttaccacagttctaatgttttgaaacgaaattaataaatatgattgtcatctacctgctacttcttcagtaggtttcggttatgcctcccttgataagccttgttttcatttccagtttgaatatgatgattggcttgcggagcaatgtggccatccaccaattgaacaatggaggaagctgatgtatgctgctaattcatagaacaaagctgctcgtccggagagttaccgcgatgagtgtgacgatgatcatc

SEQ ID NO: 12665 - DNA, 442 bp, Oryza sativa
agcttaaacatgaaagttatatggtaaagttctgtgtcatatgatgcatttattcttttagcaagtactactacggcactttgaggaaaagacagatttatcacgcaagtagttgcaatacttggcacttttgggaacaattccctgctttattccagtggggtagaattattttacacagtgtgccattgcactgtcagctcactacattcatataaatatttacttgacagattctttgtccagcaaaaagatttcataggcttacagtacgaaatctccatgcgatcatgccagattgcctgtgttttcaagctctcagagcacctgtgcaaatggtctgccctcgcctgcatcagataatccaatggatcatcgcatatgcagcaatagccgttctggcttcttcacaaggcttttccactcattacagaaccttgca

SEQ ID NO: 12666 - DNA, 196 bp, Oryza sativa
ctgaagaacacaagcagtacaagcaccgccttcagcttggagctccccgtgctcctatggtggcgccctcctctcatcctggagctatgctcaagctcagcacctcctccttctcctgggtatgatccacatgctctcttccatccacagtatgcttatattgtaatgcaacccaacgagtacttctaacccggta

SEQ ID NO: 12667 - DNA, 359 bp, Oryza sativa
attccacgacttcaaactcttggatttttcagccctgactcacggaataaaacactaacgctgatacgatataattatatgaacctaactgggataaaatacaacttgctttcagattatgtcagcttgggatagttttgctaacatgacttgatacacacaatgtcagtttcttaatcgaatagcacccaaggaaatgttctgtctgtatacaccttttgtacaatttggtgggaatatatcttactaacatatatattacttattaattgctagggagcatagaaccgcgctgaaaacttgtagatattacccatctcactaatggataatacaacatggctctcgagaaaaaaatc

SEQ ID NO: 12668 - DNA, 203 bp, Oryza sativa
  unsure (1)..(203): unsure at all n locations
tctacaatgtcttctgcactcttggatgccatcttggtctacccatattatattttcgcatcggtcaaccttctgtaacattggttatctcatagtattattatgcaaatcttcttgcagcgaaacaatggtgaacatactctaattcggtcgaactaanaacgaacagcagaataaaatcaaactaaatcttactggccact

SEQ ID NO: 12669 - DNA, 433 bp, Oryza sativa
tgctgcatgcaagcttatgacgcacatgggaattctttcttcttatcgtatgtgctgatattctcaaagaaattatatgatgctcttgcaaaatattgaaaagctatatatgaatttcatggttattaatttgccatttgtggcaaagcaacgccagtactataattgaacttctttttttttcttccattcgagagatgcagatttttgtgggatacttagtgattacctcttttttgttttgaataataataccagacaacaatgttctagctcatttggttttgaaattctataaggaagggataattgatccagcagcaatttttgcaatgctatttggtagtgagttgtttgaagattatattggtcaactggctatggcatcaatggcttcacttgataatttcggtgagatgaacatatcgacaca

SEQ ID NO: 12670 - DNA, 316 bp, Oryza sativa
agcttagcaacgatcacagactattctgattatcgtttacaatttcatcaaccaaaaacatgtgtcgagcgcctcatgggagaatcccaaccggatgggagtaattcgacggaccttgctctgggaagcagcgctctacctccgctggtggcggtgctcccgaccatcttccgttgtcgctgcatggataccgccgttgggcggcattcttgtacacaaccattgggtcgtggaagctccggtcgtccaagaagtagacgcccttcatgccggggtacccatctgccgcttcgtacgatctggaacagcctctttc

SEQ ID NO: 12671 - DNA, 403 bp, Oryza sativa
  unsure (1)..(403): unsure at all n locations
agcttatatatggtaaaaaatctatccagctctcatgatgantttacaaagcaagcacctggatagatcacaatatactatgcaaaaacaaaactacatctcgccgggtagaacatgggactcatggatctgaaagttgcacagttctaggtttgtaccttgcgaaacatactactgaaagttaaactgtacataagctcttctttcaggttagggaattgcagtgccggctgggttgccatggtagtaaaactagtaagcaccacagatgctgctaacttgaagggaaaagaactgcagcagcagaagctcaaggaagctcgaggtgagacgccctataacaaccaatgcttcttcttgtgtttgcgggttatgagatctgcattgacataacaggagcaca

SEQ ID NO: 12672 - DNA, 373 bp, Oryza sativa
taccacctgattcagaaatttacttttagccagggtgtcgtctattctgtatttatgaataggattaggattctctcatggtagttgcatttctgctgtagtggaaaaggatctatgacatgagagtatgagactaatgggtttcagttactataccgcttcctgtcaatccaaaagttggcctctgcgaagccattgatattgaacctaatgtggttgaactgcccatgccaacgcttgtaagctctgatgtgggtcattctgtatttcatgtttgcatggtttcatggaatcttctttgttaaacaatgaaaatgtttacattcttggcatctgcataacacatacccgatgagtgtttaatgaaataaaa

SEQ ID NO: 12673 - DNA, 403 bp, Oryza sativa
  unsure (1)..(403): unsure at all n locations
tcaccgctgtgagtgatccacgatgtctgacttatggggaaaggacatgtgtattgtaaataaagatggagcgagcagcaagggaacttcatcacccaatggagccactataccttttgattacagctaacttaccatgtcctctcacaatttcgtctctgagccttccggacgtgctctcaatttgatgggacacattacgccgcttagaagcacaagatgaagtngcatctaatctctttgcatcccagtatttggaaaagtgttcgtcacgaattgacgcacctcatgaggacatggagctcacttcagagcaagaacaactcatccaccgcaatgctcaagcttccaatgcaattctctcctccttgagtccggaggagttcaaccatggtgatggact

SEQ ID NO: 12674 - DNA, 427 bp, Oryza sativa
atcttgatcgagcctcatcttttggctatctaatgattcatacataagctcgtataaacgcataataatgtttacttacttgaacgaatacctacctacctacctacgggtgcaaatgtgcaataaacccatttaccagtataatcgcaacatcgagcatgacattacaaagctttcaagaactggagcaaatgaaacactttgacaaaaacatttgagatcacaacacacagaatatctaaataccaccacaccttcaacgagaaaatcatcatcaaatccttgtggctataaatataacgaacaagtctcatgttctgagcagaaatgcaatcatagtgttacatgagctggcgctaaaattatatacagatcatgtcacaagagaggggaacgaaaccaatcactagtattagactcgcaaccc

SEQ ID NO: 12675 - DNA, 443 bp, Oryza sativa
  unsure (1)..(443): unsure at all n locations
ngaatntatgtatatatataacatacttatgtacagtgcaatatatgttcttatatgttaatgtttacgcattaggcaccagatctcgatctggaccgacatgttttcgtcacgatttgtctcgtttccggctttccaatatttctgacatctctttcgcttccgactctaccgtctccgatttcgtttccgagaataatatgcgtaccgaaatggatgacgctgtattccgatcgtttcgaccgttgtcatcctagagtaagaagttgcacgagccggcttatataaaagagcaccacagtcatgtggaacctaattactataaggatacccactaactccttatgttacatacaagatgcccatcatatcactacaggatgcacatatgtcgacaacatcatacatttaacacatgcaacatgctaacctcatagtttatg

SEQ ID NO: 12676 - DNA, 405 bp, Oryza sativa
cttaattaattatcaaacaaaatacgtactggttgtcgattctcgatgacatagccagacaatacagtcatgaatagatgctgcaactgaagatcatagcatattttcagtttgcaaaatcgtagcattcgcatccagctagcatccttaatgtgcgagtaatagatccaacagatcttcatgatcaggaataattgtctaacagcagcatatagggtcaaggaagaatgaaaaacacagtggcggcggtgagcaaaggcacagagtcattgctggaacagaactcatgagtgttcaaccagtgtattgctctctccctctttagagggtagcatttatatatttatactgagttacatgtaaaggaaattacaaccctacccctatctctctagctataccggg

SEQ ID NO: 12677 - DNA, 319 bp, Oryza sativa
  unsure (1)..(319): unsure at all n locations
actttcactgaatgacttcacagcaagaacacaattcactatccgaacacctttgccaccctacattcgaattggcagattaaatacatcagtctctcaagtgactcatatattagtgatgcaacattcatttcaagatgtctccctctagtcatagatacatgtcattgtggacagcgacgtaatctgtccaatgtaaattttaccactaatttgtattgcaaatatctntaaacccattaaattaaaatgtatgaaatacttttgagaaaaatctgataattaattggtccatctaatatttaaacatgattaaaag

SEQ ID NO: 12678 - DNA, 442 bp, Oryza sativa
  unsure (1)..(442): unsure at all n locations
agcttggtgagatacctcggtcatgcttctccttttgttcccgttctgagctctcgccgtggtgcttcgtacagaatcaaatcgcctaacctacaccagccaccaattacgctcggatcattacacccaaatcaacatggaaacgaggcatcgacgcaacagagatagagacacctgccttctcagaacacgctctgagcccagacgcgtccccgaagccgatcgtcgtcacacccacactgtactcaggatcaccatgcgcagaatcagaatgccgccgcctcanaaaccgagggaaaaatgcggaggcgagggagaaacacacgctcaccggttcgtactctccacggagcggcgagccgggcggagcgcgatgcctctacgagctgtcacggcggcggcggatgaagaggaacccatcggtgcgcgattataccaatgg

SEQ ID NO: 12679 - DNA, 442 bp, Oryza sativa
agctttcttcgatagattaatttccttaaccgaatatagcacgaatccgactatttacgatgagataattctcctaggggcataccaaattttggcgtttacagatgggtagttttctccgaaaaaaatcatagtttcagggcaatcagtagttgcacaacagctataagcaagataatttactttatgacatgggcggtgttatatagtactaggactactagtttattttagagaaaattccatacgtacttctgaaaagtttcgcaatttcttctatacccctgaattttgcctcaccctctacatgccctttagtttttatttcgatctcttctatccctattccgttagttgaccatgagtttgactgttagatttttctaaaatgaccatatcgcccatttctcatacttacatgctatctacttcataattcaca

SEQ ID NO: 12680 - DNA, 356 bp, Oryza sativa
ggatctacccacggtatacaacaatgcaatggaacagacttattattatattacatgtggagttgtccttctgtcagaaaaaaatccgggaaagaatctggacaaacagagtcattgtctgtgttagacttggatttttatggtacatatgactgtaagaatatactatcagtatatgtgatcatctgggcatatgcacatttgccaccggttattataatattgcaaggatgccactcgaatgacagttctagtggtattatgtaattttctagtggcacgtttgcaataacgatttaaagtagtgggtaaattgcaattgccccttgatctagggctaatggtgccattcattt

SEQ ID NO: 12681 - DNA, 440 bp, Oryza sativa
  unsure (1)..(440): unsure at all n locations
agcttggttaaaaacttctcatggttcctccttttacatgttattagcaacatgaattagaagagagcatcaacataatctactgcacaaaaaaaaattgctaatatccggaatttagagaaaatgagcatttaaattgtttccagtgcatagttaatgtaaacaagttaagagataaataacataaatgttctgctatgttttgaaagtaatcacattttacctactactgtaaagaagttgactgatttattacctgngattgctccttcctcttttgattgtagtcacatattctgaagaagtctcctcctggtcagagttcaaggaagcatgagcccctaaattaaacatcggcagcacttaaattttctttgaatttgccatgttatgtctgcaactacgggaaagcttttcacattcggctatgtatttgcaat

SEQ ID NO: 12682 - DNA, 334 bp, Oryza sativa
  unsure (1)..(334): unsure at all n locations
attcaataaccaccaatgattatctgtaatggagatagaaattaaagtaacaagagcaacatctaaccattctaacatttaaccatctactcctacttgtctactggccaagcacgttcctggtggtagctcgaaaccggcagccgctgccatgcctacagtggtaggtccgtcttgccgagcatattgaagaacagaatgcggattggagaaaagaaagatgctgcatgctttgtaatttgtgctggacaggtgtcgtgcaggaagacatagtatttcatgtgaaggaaggacctcaatcctgtataaatttcttncactaatcatgttccct

SEQ ID NO: 12683 - DNA, 316 bp, Oryza sativa
acttgctgagtacgaaagtactcacccttgttccatataaatatatatagatcctacgccctgaagagaagacaaagtgaagtgaagattatggttttctcctgtatcccacccgtcgcctgtggttgtgggtgttaaaccgttggttccgctgccgctgttgttgttggggttcccctcgtacgagttgtctgatgtattctcgggctgtctgagctgcaacctaaattaaggtaaataagtcctctatctatttaaagattgctatgattcatatttggcaccgggggtaccaacactatgtcctgtgactgga

SEQ ID NO: 12684 - DNA, 299 bp, Oryza sativa
cgatctaagcacgcgctgcactggacaacatatttttatcacgaagcctggcaaaatatcgaacgggggtgactaacctgattgcatatatatccagatttggctactatgtgagtacgatgcgcttatgggcaagtgaacgaaggaagacccttaggaccaacacatacctatgacaccttgaaaactgtgttggtgacggaaatcactaaggtcttcacaccgaagattattgccagggatggcgggtcaaccagggtatcacccctatgaagcatgtgtaactgtttctgacgtac

SEQ ID NO: 12685 - DNA, 432 bp, Oryza sativa
  unsure (1)..(432): unsure at all n locations
agcttgcacacggngacaatatttattcttgagatattgnttcacattcactgctaaataacatgataattctaaaataaattatagatgcagctgttgatttcattctaaagtgcaggagctgaaatctttcttccccaggtcaagaaagaacatgaaccttaatggtcaggcataatcccaatattctatattatgtttcacccatcagaggtcatgtggcggactatgtgcctctaactattgcatcgattaatagttcaacatattcttttattgatccagtgtcaatctcatgcagtgatttttcttatgaatatacatatgctactctacatgattcagctcacaacacaaaaacaacgtgattacaaatttatttggtgaatattcagttgcatacattaagtgtcatgatnatgtgtaacatat

SEQ ID NO: 12686 - DNA, 432 bp, Oryza sativa
  unsure (1)..(432): unsure at all n locations
tagcgacactatanaaactctagcctatggaacgacatatttatatntatctacctttttattcttatatatttttaactatgtaagcgacatacaagagaacgaagtgatatctcctagacagataaaaatccatcttcgattgagtattaattntccgtataattcacataccatctgtatactggtgatttctctgtgaggattattctcgtataactacttcatatatttatattcttagtggtctttgagaaaggaaatattgtctcataccaccaatattccactcatttacttttattactacaacatctttgtagacacattaagagcgctgtcactctgatgcaatgttaaacataccattgtttttgcagagttaaaaagaatgtctacgcttatgttattgccaaagtacgtcatacatta

SEQ ID NO: 12687 - DNA, 409 bp, Oryza sativa
  unsure (1)..(409): unsure at all n locations
agcttgcccgcaggtacaccgaacaccacttattggggttatttatatgcgggcggagcggagactctcaatagattccgctagatctgagagtaacattttctggttgcgcgtctttacaaccaaggcatcgacataagcctcaacattacgtcctaattggttacccaaagaaattcgagtagtacgttgaaaagtaggacctgcattctttaacccgaagggcattgtcgtataacaataggttcctatgggggtaatgaacgcangtttttcctcatcctccctagccatgcgaatctaatggtaaccagagtatgcatctagaaaacacaaaaagtcgcacaccgcagtggagtcgacaatctgatctatgcgaggcagggggtaaggatccttatgacatgcc

SEQ ID NO: 12688 - DNA, 274 bp, Oryza sativa
atcttaagcactgagctgcactaccgaatgcatattaagatttattttgtgtgaccctgcatagaggcaaagtgttcgttgtcttctgcactctaatggatcgactgacctacaccgtcttgcgtggacagtgtactaccaacagtctatgcactttctctcatagcaattactgattatcctaaattattgcatatagttgcaccaaagataatactatcttgaggatctctgtaataatttgatttgaatgcagattgtgggttgtatatca

SEQ ID NO: 12689 - DNA, 311 bp, Oryza sativa
ataaatggcgctttatgttgcgcccagtatatcggaattgtttcactatgtagatcaaaaatgtttcatcggacgctgtttcaccttatatgaaaataatgtttcagcgaatagcgaaaggatgattcaattcactgcaacatttgatccatacatagtgaacgttacgagtacactaggtgaaacattttaaattgataaaaaaaaatccgatggtcaaatgttgcagttgaccaataagtgaaaaattaagttacatatggtgaaacaaaaaaatagcaactggaacatttaaatattttatgaaacat

SEQ ID NO: 12690 - DNA, 392 bp, Oryza sativa
agcttgtatacatatgtattactaaatttttattctcgtatacaaagtggggatacacatatataaagttcgtatatacgtgtattttttaggtttttatacctgtatacaaagattgtattcacgtattttttaggttttttatatgtacacataaactgtatatatatgtgtatatgtttttacattaaaattgtatatatatatataattatacgtatgtatatataggatatacatacgtatatatattgccgtagagaagagagactatatagaggagaagtgatcgcgcgcgccctccccccatgttatggtcatgtcagatgatgaacggaactgttgaaactagtgttgtatatagtatctaaactgttgttgatagtgtatac

SEQ ID NO: 12691 - DNA, 394 bp, Oryza sativa
  unsure (1)..(394): unsure at all n locations
gctttcgccgatcagtgcaatgggttccgtcttcggcatcgacgacctcgtctttctcactcggcagacgtttcggttcggcagcctcgacttcgtcaccaacaacttcngcaagatctctcttcttgactcggggtcaaaccagtcgggagagaaccggatttcagtcccgtttggactcccaaacgcggctaaaagttaccccaagaccatctcaatcgagtcggcttcaaaccactcgggcgagatcgcatcttctccaacgacaccagatcaagatgatggngcttacccaccggtcttgatgaagctccccgatgatttggcggccatctncatcacgacagcgtctncatcccgtaggcctaggcggaagtcggcttcaacaccgatc

SEQ ID NO: 12692 - DNA, 438 bp, Oryza sativa
agcttaaatcttgcgagaagatgacatatgccattgctacctttgtctagcacggcaaaagttacagtttgtgcatgaaactggatctggatgatgaccagattatttaaaaggatctgttgatatatccctcaaaacattcaaatattttgtgacattttgatgaaaagtattttgtataacataacttctagagttcttgaaatgtcaaaccggtgattgatcgagatcttcatgtgtctgttgtggcctatatttttcagtatttgactgagaacaaagaattcatggcgattggagtaattggtacaactggtgtgggccagtcaaccatcatgaacgagctgtatggatatgatggaagctcacctggtacaatcattcattctttcaatagtttcagcattcagtcttcaataggttcagtcaagatattgt

SEQ ID NO: 12693 - DNA, 235 bp, Oryza sativa
ctgctacaccacattggccaatatatgttaacatactccctccgtctccaaaaaaatgccaaccactagattttcgtgtccaactttaaccttgtcgtcttatattgaaattttttattattcggattttcattgttgctagatgatgaaacatgattaaatatttatacctgacctgcttttaattctttcgaatttttcaataagacaacggcaacattgacacaaaccaggt

SEQ ID NO: 12694 - DNA, 357 bp, Oryza sativa
ttattggttttttggcatgaaatgtactaccctttatgcctgttgttgtccacgacgtcagaaactgtggccggtcatagttacatcctcctcaacaatactggagctatttgtattttaaattcatcgcgaaaaagataggcaattctattactttgatatgaaaattatcctatatctatatatatacatatatatctatatgtatatacatatagatttatttatcaaaatgcgattgtaatctatacttattaccttatatctaaatgttctggtcatatgggcctacaacaaattccacatgaacgttaaatatatacttaatgctttggatttgcgtgaggtatatagtcc

SEQ ID NO: 12695 - DNA, 208 bp, Oryza sativa
gggtggactgactagcagaaacaacagttctacaagaacttctgccattctttgggtatgggctatgggcaccgggaactgccggcgggccgtgatccgagccgctgtgcatcaagaaggaaaggtctcttcatatttgcattcttcacgggagttttctttgttctgtgcttatagcactggctgaagcagaaaaagaacccccttg

SEQ ID NO: 12696 - DNA, 356 bp, Oryza sativa
  unsure (1)..(356): unsure at all n locations
caatggacataaccctcataagatgcaataagganaacatgcatgaacccaagttataaaagaagttatcattacttttataacccctatctgtaagatatatagctatgggctatgaactaatacaatcttttctacttaccataacctcatcagccagcataattattatatacctaccctcctatgctctcctctcttatatatgtagggctactttggtttggataccctaataaaatttgttaaaagggtaacaaaacaaacagctccattagaacattgattcgccaaaattttgatggtttccacgaacttgtttcttatatgcacattgtggctttaaccaaacatct

SEQ ID NO: 12697 - DNA, 438 bp, Oryza sativa
  unsure (1)..(438): unsure at all n locations
agctngaaggtcggcacatcattaacggaagtggttataagattgacgtcctagngccccggccgaagccaccaagaactatgtacgtcacagcggttgggttgtgcgggataacgtgcctgtcagtactgtgtactggcgaaaaacaagggcacgcggagatcatgagagctttgtcccatattcggagaaagagatgctgtggaccacaatgctcgagacattcacccttcctgcgggtacagaggacaaagtgaaaaggtggactctgaagaaaatggctgaacagtttcagagcttcaagggagatctgtaccaaaagtatatactgaaggggcagacaccgaacttcgacacattcccaaagctaagggatcactgggacgagttcgttgcatataagacaggtgaacaatggcatgtgatgatggaaagaaa

SEQ ID NO: 12698 - DNA, 304 bp, Oryza sativa
  unsure (1)..(304): unsure at all n locations
ngaagtggcactggcagtggntgcaataacctgggagtctngcaatgttccacttttgcctgtngacaaacatcacactgagccacataaccttggactgctntcttcaatccattccatgcgaacagactcttgactctttgataagaggctgtcattcctgagtgtccacccacaccactattgtgcacagccaaaggtacacgctatagagcctcacgatgatgaccaagccaaattctccctctgaatctattgacaccattaaccaatttggacccatcaatgccttcaggagttacac

SEQ ID NO: 12699 - DNA, 182 bp, Oryza sativa
atcagcgacacaaaatactcagcttgagatgctggtagcctgagacagcgtgaagtagcagtgtttcttttgttggtcattaatacaagaaaataattttgtttgggttcttattcacatcgtacaaaacttggattttgtctttgatttatagataactgcgatatacacagccctgagta

SEQ ID NO: 12700 - DNA, 251 bp, Oryza sativa
actgctgatgcaaccgggtgccaagaggtttttcttttttttgcgtgcctcctgccccttgcaacggaaactgtcggccaactgataatgaatgggcacgcgactccttgcggctgccggccgttaccaattctatggggacgcttatctctgaatgtcccctcattcgcgtattcacttattaggcttatcaccatgcgttaagggctccatcctgcctaaaaaatacccccgcctgcactcgttggact

SEQ ID NO: 12701 - DNA, 424 bp, Oryza sativa
  unsure (1)..(424): unsure at all n locations
ctttgattgatccgacttctataatatcacgacatcgnggcgacttgactcccatcggtcgattctagaactttgaagccgatactgactctaagccgatggtgacattgggcttaccaaatttcactgttacaaatctgtaagttgttttgttattagactatatttaatacttcaaatgtgtatccgtatatttaaaaaaatttagtcaagtaactatacacagcccatgtgattggacacacgtacctactcgtcagggataattttttcgagggtaaatgtgtaatctcctggaaaaatatactccattttaaaacatagtatgtctaatggttatattttgagatagagatatgactcaattaacatgctctgtgagtgcgaattgaaagtactgaattgcttaaccctttatgaaaat

SEQ ID NO: 12702 - DNA, 375 bp, Oryza sativa
  unsure (1)..(375): unsure at all n locations
tcgagagtcagtgtgcgccctccgatgtgacagaagataatctgaagaatattgtggcgcacggcgttctcccagcgaaggagattatcgggtggcgaccggcgttcggcgaagcattcccgacccccgacacacacgaaatcgtggtatatgctcatttcttctatggcgagatttctcttccaacctcaagaatctttcggcggattctgaacttctaccggagtagcttgcatcacttgaatccaaactctatagtgcatattgccaattttatccatgcctgcgaagttnttctgggcattaagcctcatttcgccttggttcgctgcatcttcttcctcaagccccagccaaacaagagaaaaccgtgcg

SEQ ID NO: 12703 - DNA, 373 bp, Oryza sativa
tggacgttatccctgcttaatacatgcgccctgaaaccgactggaaccaaagcctcgcggcaacgatcaaatcttcttggaaacgagctgatctggtatacaacttggctgagggccatttttccctgatctatgactacttgtgcaccaagttcggaggcttctcgggcatcgtcctgcttgattgtgtgctgctactgcttcagccacccatgtttgtcctaacctctatagctgtatccttgtttgtcgcctctcaggttgaccaagaggcactacactgagccatgtcacctgtgaccggcccaaaccctcacctttgactgttttgggctaggtcagcgatcaatgctcactggtaagttcagtcacc

SEQ ID NO: 12704 - DNA, 370 bp, Oryza sativa
agctttactctcatggagacgctattgaagttttgtaaatcaagtactgctccttcggttgatgccacggattatcgccgaatcatgggatcgttgtgttaccttgtgaactcaaggccggatttggcatatgcagtgggctatcgtgagcagattcatggagaagcccactgtcgaacacttggcgaccatgaagcgcgtgctgcgttatatcaccggcaccatcaactacggctgctgctacaagaggaagaaagaagctgctcatctcgtcggctacagcaacagcgacctcgccggcgatcttgacacctcgaagagcacgtgtggtgtcttcttctttcttgatgagaacctgatcacttggcag

SEQ ID NO: 12705 - DNA, 291 bp, Oryza sativa
  unsure (1)..(291): unsure at all n locations
gctttgcggaccgactcttcanactcgcatcatatgagaagggtggcatctttgttccacacaagggaagatgcctctcctagaggctggaaatataatggtaggacatttccgtgtgtcgcgaaactacttctacttgaagccgggagagatctacagctatgataagagagtgccatacattcatgccaagtccaatctgccgggttcccatgccgttatgggtattggtgatggacgacatcgagagccaatggcctctgctgcatatgaccgtgagcatgttatgat

SEQ ID NO: 12706 - DNA, 361 bp, Oryza sativa
ccagttgttgagtcctccaattgggctattccaggaagaagaaagtgatccttggggcacgccttgttgtagtggtgaagtcgacgcacattctccacttcttggtggcctcttgcaccatgactgggttggctagccactctggatggagtacctctctgatgaaaccaaccttaagaagttatcgagctcttcttgtatggcctggtttcgatctgatgtaaaacttcgcaaggtttgctttactggcttggcatcgggtcgcaccatacgtttgtgctcaatgacctccctgtggaccccccgcatgtctgacagctgccaagcgaatacgttcacattgtcgcggaggaaggtgatg

SEQ ID NO: 12707 - DNA, 376 bp, Oryza sativa
gatagatagactgcgtccatcaccaaggttcagagttcataatgagcaccgggctcatttgttctacttggtctggttggcttagattgctgaacgcacttctcatgaatatatccaccatatctggtaagatatgctgcccttatgtgatcaacattggagatttagtgaatggcaattgtgtcatcagcatgcagaaatcgtactcagtaaactcaggtttcatcggggccaacggcttgacttctggatatatttgttgatgtcaactttaccaatgggccagcttatcaggtggatattggcttgggaacatcattttctgtcttatcctatagttagaacatgctgccacattttaggtcaaattcctcgc

SEQ ID NO: 12708 - DNA, 355 bp, Oryza sativa
  unsure (1)..(355): unsure at all n locations
acgcttcgtgagcttgttaccttgtatctctccacaacgccctcacaggtgacataccaccatntgtgggcagtaacccgtcttttatatatgtcgatctcgaggtcaatcagctcacaggaggaatcccagaattcttggcgaatagctcatccctgcaagtcattatgctcatgcaaaatggtcttacaggggagatcccaccatccctcttcaacagctccaaaattgacaccatntacctcaaccggtacaacttaattggttgcataccacctattacagcagtggctgcacctattcaataccctagtctagcacagaataaactaacaggagggataccagcttcact

SEQ ID NO: 12709 - DNA, 427 bp, Oryza sativa
  unsure (1)..(427): unsure at all n locations
ctaagcttatatatatttcanactagaaaagacatatcaccatcgttcccatcattgttattgtttatgtataagcctangaatacctcatattaagaatttacctatgtgacctatattttgtataagttgcttggtgttttcttatnggctgttcaatgaaatacatatatagcataacaacctcacaacataataaggaaagtggattctaatccctcgagatgacgtcccctcatgtatctttgttntcttcaaattcaataaaaatagttatgaataattatttagagtatagtgatatttattggtccacaaaaatcaaagaaaaagtggcctacacgttaagtagaaaaagataaatctgggtatgaataattcgctactattaatttatctttttttatctcggtgtgtgagttgaatt

SEQ ID NO: 12710 - DNA, 148 bp, Oryza sativa
  unsure (1)..(148): unsure at all n locations
agcttgctcgtgcagctggaggaggaagaagtctttatatattttggggggactctagtcccgggtggtagcaccaaccggggctaaagatcaccgggatctntatccccggttgtggctaccctcctgggcctatgtttctccctct

SEQ ID NO: 12711 - DNA, 437 bp, Oryza sativa
  unsure (1)..(437): unsure at all n locations
atatacaaatcggaggtgcataataggttagcaacttcatccttcaatatttttttttgtcatattacatttggagctatgttntgtacacttttttatctccaaaatttatttgtaagttgatgagagagaaaatttgtgtggggaagaaagaatatatagaaatttagtttatttgctaaagaaggttttataaaatagttgacaaggaaaatagtgaaagttaatcttaaataatagaaaacaaactaaaataaaaattaaaagaagtacaacacattaatattatgttaaaactttagaaatagtanatacgaattanttggtgtaatantttatcaattttggatgaataatgatatgtcattattggatgactgtcgaaagagntcgtattatttataatatcggatgactgcattattgatgaataatat

SEQ ID NO: 12712 - DNA, 442 bp, Oryza sativa
  unsure (1)..(442): unsure at all n locations
agcttcaaccagcacgaanatacatgtgaccgatactgtactattgtactatgtacagagctatagggtcttaattattagagctagctacttcctccatcctagaatataagtatttttagaattggacatggttattaagaaaattggtataattaaatgagggagtgttgtgattggaggagaagtggaggtatgtgagaaaattaaatggtggagggttgtgattggttgagaaaaaaacgttggtggagaagttgttgttatattttgggacaaaatctaaatgctagaagttgttatattttgggacgagggagtatatgtttccatgcatgcaagcgttttccctatagctagcaatttcatgcctccccaaaatataagagtaggtacaataaaatgatataaacatgttatataaataaaaccttatcaatct

SEQ ID NO: 12713 - DNA, 377 bp, Oryza sativa
  unsure (1)..(377): unsure at all n locations
agcttttcagagcccatccaaggatctggctgttataaatattttttnctaaataacatgtcaacttcctctgaaatacatagactctctctctctctcacacacacacacacacacaagaagtgaagctcacaacactcagaattcactctgtttcttgccaaatatgcagccctaccaggagaatcaacacacgaataaacttcgacatggtgagtgactcggtggtggctggtagtctgggccaacccaatggtggttctgcctcttcggatcctgctgctgcatttatccccctctcaaagaagagcaaaacggactcttgatccatataaatgtgtccatccatctggatagagctcataatcccacagatt

SEQ ID NO: 12714 - DNA, 319 bp, Oryza sativa
  unsure (1)..(319): unsure at all n locations
ttccacccgacgttcgtactccatccatgcatgaatgaactgtgttgtttgatccagatgcggtatcaggccgccacttgaagtagctctgactgtgtcaatccattgtacgaattgacaattcctttcatcctnctatgtgcatccatttttggatagtatagtaatgatagtactgacgagtgatgataagaatagttgttattaccacgaaatcatcgtcgacaatgttttgacacaccaaacaacatttgtcctcgagttcagtgccttacggaccttatgacctgacaacggtcaacacaacgacactccggac

SEQ ID NO: 12715 - DNA, 297 bp, Oryza sativa
aagtcacctgctgcatgcaagctaagatgccgcttaagatttatatctttttttggcagacgctcaaaggagcctgtttatgaaacgataatcttgcacgacagaattggaatgggggtataacacgttgtctttgcatgaaaaatgatactatccaacacttgtttatggattgtcattatgcaaaggttatttggagagctgtccaattttcttttggattacattgttctagaagcatgcctcatatggttaatgggtggttcacggtgtggacatgacaaaagaaatttatac

SEQ ID NO: 12716 - DNA, 319 bp, Oryza sativa
atatactaccgatactctatatcttggcttgtgttattatgcataaacacacttacaggataatcaccttttcctctaatacaatcatgttcacaatataactgatccatcaatactatttctaaacccgccagttccgcaatcaaatctaactcctcatcggctgattcatactcctcattggcgtgtcaacttcatccggttctatgaaagaaatatcgaatcagcatcttttatctcatcatcacataccagaatattttcatttacgctatctataagtaaaactctctcttgtctccatatttactacaatatc

SEQ ID NO: 12717 - DNA, 431 bp, Oryza sativa
  unsure (1)..(431): unsure at all n locations
agcttgtggcagagaaagacgcttaattagctgttgtcanagctcagtttgttgtactactacaaaatacaaattgtagtttacaggctatgaatgccgatgaatctcttgttgaatctagtgagtctctgcagggatttgtgcgtgttttgtttgtttcacagattttgaataaaggctgggaatgagtaagtgttcttttcctgaccctgaggctgatcgccagagtgtgttccctatgtcacgcaaagaatgctgatatcggccgcagaaacgctgaattttaagttcagagcttctggaggtgaggaattgaagtcttggagcttgggacatctcanactgcaagtcttttacatttcatctgggatatttccatcccaacatacatatccattcgaaaacaatagtaactcgtgttgtcatcactc

SEQ ID NO: 12718 - DNA, 370 bp, Oryza sativa
tactcagcttgctgtggtcgcagcatgaagatttgggagaactttatgtttttttttagacctacgagtatgacttatacgctccacccgacgggtagtctacagacggtctattaccagattagactctgagtgaaacttgcttgcataagacttgttattcaagacgtagtccattggtcaagttgtgagtaaatgtagctgggagatctatgaggatgttcaaccttgatccgtctccatcgaaccgctggtatataaaagtacattgggaaacgcaaatcttactgggattttgagatttggcgggggattggtagaattaatagatgggcgtaggcccattcgaagataattctttgaaaatcac

SEQ ID NO: 12719 - DNA, 234 bp, Oryza sativa
gcttctttacatatcaactttcttaactatttagcaagaattcgacaacttacgacttgacaagtctcatcggcttatctcatgactctcaaacacgagctgactctgagccgacgactactccgggcttaccatatttcattgttaacaccatctcccctttcttgtcgagggacggtccccccgacctgtattcgcttcctcgtgccctccttcttttcctcgatggatatg

SEQ ID NO: 12720 - DNA, 419 bp, Oryza sativa
  unsure (1)..(419): unsure at all n locations
agcttatgatgatatgaaatactttaaaaccttatcataanccttttacttaattggatctctcagatatgccaacatatgaaactaagtggaaaagagcagtcactgccatatcaggtcatatcaaagtgatttnttttctttagatgtagactttctttttttaagaaagaacttgttatctattaaattcaaataccttatagaattttccattctttgtgagtcagagttgtttaaatgttaaaacaaaaactgcgttgctccatttgttgtatcgtcataattgacattcaaaattggtattgtagttgtactatacttgtgttagagttccacttcatttaattttatagatgctaacaaactggattttcacgcattagtgaaacataagtatggcgacacttgtggaaaca

SEQ ID NO: 12721 - DNA, 434 bp, Oryza sativa
  unsure (1)..(434): unsure at all n locations
agctntagtgattntcccttatattttcagatttttatctcatggggtccacatgtcatcctctgccaatatacaaaaaggcctctatggttccgaggaataaaacccgcagtccaacatgtgtctatgccacagtttataaaaagtccccatatttctcttgtattttcaacatgtgtctagctacggtggccataatctatgacggcgttggtgcgaacggaggtggttctcggcatgctatggcatgtcgagctctggctcgtttctatacgaatgggtgcatgcatgcgtgtctactgggttcttgggtactcactgaagctcgaccgcagcttggattgttctgaacatcggtgacagtggagaagacgacccggcagcgacggatatcggcatggcgacggcgtcgacgttccttcggtcttcaagct

SEQ ID NO: 12722 - DNA, 274 bp, Oryza sativa
actactcctcgattgtatcaaacgatctgatatgtttttttttactgcatggaatgattattattcactccaaaatacgaatctcaatatttacgcaattattccggtccctgcactccattaatcattctgcgactcgagtaatatttaacaggtgttaattcctgggtccatgtggtccatagaactctacatgataccccgcgcatagctgctagatcttatataatggctttattactgaatattgcatgaaaaaattatacagctgttg

SEQ ID NO: 12723 - DNA, 440 bp, Oryza sativa
  unsure (1)..(440): unsure at all n locations
agctngcatacaaccgggcatatgctagnaacgtcaatatatatctacatgtcaatattgtacgtacctttgactcgttgtgctatgtacaggctcttgactactcccaactgagcttagcagtggtcaacattatgttaacattacatttttacaatttgcacgttgtcacttgtcaagttagttcacattatttaatcattgaaagctcaatctgttacatttgcaggtacacttgattagttgattacctgtcctaattcacaaaaggaccgagtttggcagcagacaagagatgtaccaccagctcaatccacgactccacgtgtaactgaacctgggcccgtttagttcctcaaaaaattttcccaaaaatatcatatcgaatctttggacacatgcataaagcattaaatatagataaaaagaaaaactaattg

SEQ ID NO: 12724 - DNA, 352 bp, Oryza sativa
  unsure (1)..(352): unsure at all n locations
ttanacacatgcttagctggctcctacactgagcggcaatggtggcacctaagtgctgtccaggtgatcagttcgcctgtggatntgttgttgaaaacaccaccaggcagcacgtggtggccgatggtcgcgcttccaccaacttcttcagagtgtggatccagtcttgatgttggggagctactacttttcctacagtcttgatgttgtgattcattcggagatctagtttgctgtgctctgattgtgtattattctctaagattgatcagcatcttctgctcggtgccattccattccacaagacacttctgtgaaagagcttggagtttgcagtgtcgtgaactgaaca

SEQ ID NO: 12725 - DNA, 434 bp, Oryza sativa
  unsure (1)..(434): unsure at all n locations
ggatccttaagncacctgcggcatcaagctggaattagcaagtattttgcttatttttgtgatgaaatcatcttgaaatcactaagtgatatatttctttctaagtgtgggccgaaaagagacttgcgtctcgtttcgaccttaagagatgttttttaacagctcattttataatgcaccgacctcccgggtcagatcattacttttcggcttccagagccattccacttgattaatcggctcccagagccttattcattttctcggactcccagagtccagctgtctagtagcacaacaatccgcttctactcgagaagcctagtctatgatgccggtagacatctccaatcaacagattcgtttcttgaccactcatgtcatccatctaccacataggctgattctggtgactattcccacaccacaacaac

SEQ ID NO: 12726 - DNA, 324 bp, Oryza sativa
cgagaatttcgcatatggcaagcttttgtcccacgctccaccaaaatcaagagcgcaagctctcaacatatcttccaagatttgaatgactcgctcggtctgaccatcagtttgcgggtgataggccgcgctgaaatttaaacggggtcccaattctttctgcaggttctgccaaaactttgaggtgaactgactacctacgtcggatactatctttctgggtaccccatgcaaacacatgattcttgcgagatacaattctggcaatacttcttccgtataggtggtatgtactggattaagtgaggcaccttggtgagtcga

SEQ ID NO: 12727 - DNA, 357 bp, Oryza sativa
  unsure (1)..(357): unsure at all n locations
agcnttggaatcgagntcgattctgatcggttttccctctctccaaaccgaaggtttccttcgccgttgccgtcgccgtgggccttcgccgccgcctccaagcccctttaaaatgatccccggtgtctcctctacccgtcgcagccctcgccttcgcctctcgtcgacggagtagccctagcgccgtgtgccctagctttggcttcgccgccgccgctccagccgtgcgccgccgtcgntccagccgtcgccgtcgctcgggaaggccgccgtcgtcgtcgccaagtcgtcgccgttctcgtccgctctttcgctgccgtcggagaccgccggagcttcgtcgccgtcgacaacccg

SEQ ID NO: 12728 - DNA, 325 bp, Oryza sativa
  unsure (1)..(325): unsure at all n locations
tgtctcatctcacacagaagataatcttgcatgaacaaagggttccagattgtttgaataattctanganagttaaccatgtctgtccttacatgtatgggtcggacgatgaggatgatgattctgaaatagctgcagccgagtgggtaagtagcaaaaaggttataccatgccaatgggtatagagttcacgacaagaggagagggatgactctgatatcactaacgctgacaagatattcgacttgctacttcgagagatgcagattcaactctcaactgggcacacaatttcgtcggcttgagagttgagcaagaaaaggta

SEQ ID NO: 12729 - DNA, 413 bp, Oryza sativa
  unsure (1)..(413): unsure at all n locations
gcttccctgtggcatctccattgagtcatatatagaagagcntagtgcgcgtgcgtcgccattggcgatctatcgagtgtgtccactacaatttgctactcttgcgtgtgtcatcgcttgagttcgctgcttgcgtgagtttgctgctccgttcgtatccttgggcaaagctgacaatcggtaattaatgatggaggaggatgacttaaaaggtggaagcggtcttcacccatcagactagtctcttgggttgagtaggcccataacctaaagttgtggctcttggtgcgcaagtggtacagcagacccaatgtgacctggatggcccacggttggtgggccgagctgcacactctaacaagtggtatcagagtctaatgttngaaaccccggacatttttcatgggttacat

SEQ ID NO: 12730 - DNA, 394 bp, Oryza sativa
  unsure (1)..(394): unsure at all n locations
tcagcgagttcataacacgcttngaacgcgagagatagtatanatgacctttctgtatcattccatcataacaagggcccaagctccagatatcactcatataaacatgttcctgcccactgagtctctctggctgtcaagaacagatatttcctttcgtccaatcataaacaaacaaaatggatcatacttcctgccagactcagtgacgcactctataaccaaaaaactgttaaccaccgccatgcagtatatgttccagaaaagaaactcgtgtgcacacagaccataatgatgcactaacccaaaatcgatattttacttctgccagagattattagatattgacggcctagaactcggatgaatgctctcatgagcagactcatccctt

SEQ ID NO: 12731 - DNA, 364 bp, Oryza sativa
agcttctggtcatgaggtttctcttgtcacaatgttgaaatggcaccagagcatcaatctgttctttttaactgtttcaagatcggtcagagttttgacattaatttaagtcttgccaattaaccatgcatcatcatcatagtttcttcacatatttctgtccttgtgattgactttcttgtctgctctgctctgccctaccctgtatatgactaattcatcaagaaaaaaaaaagggtctcttatctgttcttttctctatgatctgtacgtgctgtattattgtatcagtacaagtataatcgcaatcttgttgtgatcatcgcactaacgtgtataccgttaaaccaattttaccacaaat

SEQ ID NO: 12732 - DNA, 400 bp, Oryza sativa
  unsure (1)..(400): unsure at all n locations
tacctcagagcacctgaaacgctgtacgcaagcaaggtgctattgctctctcttagaactgcttatacacggtcttgacgtagaatcctcttgtagagntcatgaatggccttgattcttgggccaagcaatgaataagttgtagccactgaaattggggatctactttcttgggatactttggctacaactcgttataacaataaatcgttggaatctcacagcccacgggcagtatatgacctcaattgtttccatgtaacgatgcttgctcactttgcgttagggttgtcaacccggcaagctgacctggtaccttcttcttctcaatagtagtaaactatcatttttgctatttatgcattatttaacgtacaagttctttatgcagatcagtaat

SEQ ID NO: 12733 - DNA, 343 bp, Oryza sativa
cgcatgcacttataatgaaacttttcatcttttccggcatactgaatagaattctgctggaattaagtggctattttgctttgatggcaaaatatggtgattaccttacgcacccagaaaattatggtaaaatgatttgtttttcaattctattagggatcacataactctgcttcatgacataacaagtctcaacgagtgtgtctcgactataacacagttagctatcttacttctttggaaaactattcttaatagtgatttgtatcatgcttcaaaactgttataaaatgttataaaatgatggatgcaaaatatattctcgcttcttttttttcgtaag

SEQ ID NO: 12734 - DNA, 412 bp, Oryza sativa
agcttggcctatgccttgtgtctggctctgtctttgtagcttaagataagttagctgtcggtgtggtgttagagttgtggttatcgctcagctttccctaattaactgagcactgtaaggtttgatccccttttctcctcaaaatatgatatcttcttcttaatataaaacgtcggcaatggcctgaccgttcgaaaaaaaaagttgttgtaattaaattattaattaggatagttaaggacacctaccatgattggcacaatgagggcacatcagactttcttaattgcgtgtgccgtatatttgatatgcacaaaactatgatgtgccacacagatatgtaagtacgtgctactatgtggtatagaaaaagaatgacatatctatgtaatttgatctggttggcagtact

SEQ ID NO: 12735 - DNA, 479 bp, Oryza sativa
  unsure (1)..(479): unsure at all n locations
ntcctattcttcgctagaagaaaaaaatgcacatatatggaataagacataatataacatacatccataaaaatcaatggtctttaatatattatttctacaatataaaaataaaatatataacttcacaaatataaataaatttagntaaatctatctaatattatatactaaaagtccattaaacttcctacaaacgctcctaaaccgccacgtggccgtttaatagatgggaaacatctcgccctcaattntcatttaaactgggggatccattattntgcaccattagattagattaaaacctccctttctcttctctccttgcacgttntgtggtccaacatggagaataatacatacactctgacaattggcactcaagtacatatattttgttagtggagttcacaaaccacactataatgaatggttcactatgaatgcatggtggtcattatatgggacgggatctgtac

SEQ ID NO: 12736 - DNA, 448 bp, Oryza sativa
ttaacaacgggttaacatcgactctatttgtttttttatgaaacttcgtcgcatgaggatagattaaatataagaaaagaaagataacacacaaacttgtttggtgcatttatgtcataaccttttgtcgtcttatctattgtaagagatagtatctgaatagagcctgtagcagactctagctggtgattggtactattatattgggcatgccatttgtcaagtaatccctgtgaaatttccctcctcgcccaactctagtaccatatcccctacaatttgtcctgttatagcattactcaccagttcataacaactactagcttcttatgggagccaggttctgaatgctcaccctctcaaaagaacaactttagggtatttctgtcagatgctgatatgcattctaatatctgagttgtggagatgatttacgacacaaatctca

SEQ ID NO: 12737 - DNA, 473 bp, Oryza sativa
  unsure (1)..(473): unsure at all n locations
catactcaagcttgccccgagtaatatcatcggtatctaagattactcttcctgacaccaccgtttctcatacattaatttaaaatctgttccatacaaactagtggtagaagagtggctatgtactccagtcaaccaacaagtgtatgctatatatcgctatttgtccctatatagactgaatagggtgggacaggataaccaccctatatcatgtttaactgataggatagaggacattaatgcatggtgtctgagaactattggctccatccagaatatagagagttctctatattgccatgtcaaggaataactaaaacagagtacaatggatcggtggaatatanatgtatgtctatttcctttcatattgagtttactcacaagtagttcccctctctacttcaatcttcgagtatccacagacacatagcacacacaatgtgcaataccagtccttgttcaaatct

SEQ ID NO: 12738 - DNA, 442 bp, Oryza sativa
  unsure (1)..(442): unsure at all n locations
gcttgtaccgtgcgcgaaggaatatactgtatctatactcgatagaaagatatcgtagatactttaagtaaccaatagattctgggattngcaatattcttctactctgtgtctctacaatcagtactcgtagagacttcaagctgtcgaagatatcatcgaacacctttgcctcaattcctgtctcccctccgtcaatgatcagagtgcgcagctccttcagtttgacaatattttcggtaatcattttctcgaaagctttattgccagcaactgttgctccattacaagccttaatatacaaatggcgaacatcgtctcgaggaacttgtcctgtgcagccaccctcaattctgcagcaatcactacgtccgaccgtctctgctaaatcctgcagcagatcatgaagtatatagtactcctcgcccgacgagtcctttcg

SEQ ID NO: 12739 - DNA, 450 bp, Oryza sativa
tgataccaactagtagcatcttttgtgttggcattcactcaccatagaactgctctttggcaaagcttggtggacttaggaaagctcaaaagctcatatagacagtgttgaccgctgaccaatcaaccctccactccaaattgctactggtcaaacggatcaaagaagaggagaatagcacaatactatcggcaaaagagaggtcaacttagaaggttggaagaactgaccaggaatcttcaaacctgttctcgtgtgtaaaagacgagatggatgacagtgacgcaaatgcttcagagcttgtgcttactactgcgtgctgacccaagataagggagtttgtgggtcacagccgcacaacgaatacgtccctccccccctttttttttcttatcattatttgctaagcaatcagaaatagtactagtacatgcacagaatgagattcta

SEQ ID NO: 12740 - DNA, 448 bp, Oryza sativa
  unsure (1)..(448): unsure at all n locations
agctttgaaaaacatataaataaatagggtgtatgattggatataaagaatacatatatgtaaaacatcatgacttttaacatcctttctcttatacatatttacagtgctagaatcatccataaaacttatagatgcacgtaactagttatttataaacataaatgcatgaagaatcctctattggatttataaatgggtggaactagatatgctcatgttgaacaaaaacaaagaaaaagagtagtaaagtaccagcataacaacgctcactccatcttttttaatataatttgagaaaccctcatggttcaattattgcatattttaagttatagtttntaaaaaccctcatggatctatacgtatgtactttacgtaacaantttgaaaaacccacataaatatattaatacatctcttatgtttcaagtttataaaactcccg

SEQ ID NO: 12741 - DNA, 426 bp, Oryza sativa
  unsure (1)..(426): unsure at all n locations
ctgtagccaggtgattggtgctctgnacttaaaccatgctggcctgtcatgattatgtacacttgtgctgataaataatagtgttaatattcctatgggatgacatgggaattagtgctttataacaaatgcaccggaagttgacatttgtgggaagggtttatcatgaaatgtgttaccatctaatactacctccctttttaatagatggtgccgctgacctctaacatactgtttgatcattttgcctattcaacaattaaatgaaatatgcaaaaaataaaaagtcaagcttaacagttctggttggataatgctacttgtattacctagaatggtgctcttatgttacacattttctcttcaggcagaaatggatgaacctgagcagagggtatctgaactcactgaagccaaatctcaact

SEQ ID NO: 12742 - DNA, 221 bp, Oryza sativa
  unsure (1)..(221): unsure at all n locations
taacatgaatgggctgattgtgaaatggcagcgctgtaactgaagccacggagatggaggaccatgttagtccggtgtcggaggcgaatgccatggaaatgagaggggtcaaaggtgatgatggtgtctgtgtcngtgatgatggtgtctccagcgctactgaagttattatagattgggaaaacaacatggcaacaagcttgaggatgaagaggagaggt

SEQ ID NO: 12743 - DNA, 405 bp, Oryza sativa
  unsure (1)..(405): unsure at all n locations
ctatgaattctatcatccaatgagctcagctagacaacntcgaatgtgtccaactccaatcggctggttctctgccgacaagatccaatgccgaggaggaatttcatcaaccctgatgatggatcggctgcttatccttcaaggaccctctctgggcagtattggcaacatagaactggcaacattcagaagcaaaagtttcgataggtagtggggtgaatggaaactgcacttatttcaccaaccagcttcgatgtatatgacagacctctcttcagatgttgttcctcaagtaagcctctaacttcgctcaactttagttaaataactggttggccattaatcttaaccaatcatccttttggtttgcgacaacagaatcttcccctcctcaccatagcaaca

SEQ ID NO: 12744 - DNA, 414 bp, Oryza sativa
  unsure (1)..(414): unsure at all n locations
gcctatactatatgaaagaataatttacttattntagccctgtgcaaaagntagagatgttattgaagagtcattcaatctattagctgcgggtgcagtatagacatgtcctataatatcgacatatttagaatacggtaattaccatattataagaaacggctatttccgcgagaatacggtgaatacggaaacgatcggtataacagcaaaaccatntgcgttttcatttccatattttttaccattttcatttttgtttcggtcgattaccattttcatatggctcggccggtagaaagcaaaaacgaacgccggtcggccggtaattaccgttaccgttttcacccctaattgggagaaagacacaagcatgggtacacacctctttcttccatctaatatcctgctcta

SEQ ID NO: 12745 - DNA, 447 bp, Oryza sativa
tacgtgtaccaatgattgttcatgtccctgtgaggaatataagggcaactcacatatgcccggaagtaaccttagaattgatgaagttgacttcctagcccaaccgatagtcctagactcgcaaagcttggacatcatcctatggatggattggttggctaagcacaaagggcagatagaatgtgccgaaaagtccatcaccttgcaaagacctggacgaaagcaagttcgctttacctctaacacctcttacgcgagtcggtctatcctaacctgtttacaagtcacctccttagagtcggtgcccatagtccgtgaatatcccaacgtatttccacaagaaataaccagtatgcccccagaccgagagattgatttcgtcatataactggcatcaggcaccgcaccaattgccaaaagatcctaccgaatggcagctaatgagtt

SEQ ID NO: 12746 - DNA, 402 bp, Oryza sativa
  unsure (1)..(402): unsure at all n locations
acatggntgcccttatgaaagggacatttacatgggtacgcagtgtcatttgcacatatgggcctttaatgggctgataggctgggcctggtctatggcgaacgggcctaaaagaccgggggcggcctgttgggcctccttgatgccgaactcgtcatggcaaagtctttgtagttcgcccgagatgccttcgcccaagatgcctttactttcggagtaccgacgcggctttccagccttcgccatcttcgcttatggctttcaccacagggtttcacctgaatggtcttgacgtctttagcttgaatccttgctggtactatggtttcggaaggtccagccgaagggcttcatgacatgcctncaacataaatataaaatatattacttaacacatataaa

SEQ ID NO: 12747 - DNA, 455 bp, Oryza sativa
  unsure (1)..(455): unsure at all n locations
aacacagtccttaaacatgctaagataatcacaactttctcaccaacatacagtgcaagtgactaattgagtacccaagcatcctctagcataacgatgttacgaatgtaattaacatcatgcaccctataccccacgttgcacaggcacccatgagctataaaggactcatcttcaaatggttattgaatgacagataaaaaagaaatcatactcgtggactgattcgggctagagaagagaatgcccgtcacagaaatcaagcaatatgactactngctcctctagaggacgatgcaaatcaacaaaacaaggtactaaaccatatataattctgggtattctgggtcaacaagcagattagcatggccctgcattcactaatgaacctaacattcagcttgggtaatataatattagatggcaaacatacagaacactaactgcattcacac

SEQ ID NO: 12748 - DNA, 240 bp, Oryza sativa
tttaacaaactctccttacatggaccacttaaggtctttatatctgactattaggccaccatgaagacttatgatatcaaacggtaccatgttcgtattacgatagctccgacatgctctggccacgtggatggatcacactgatgaggagctgctggtgctttttctatgaaacacgacccgttctgtggacggctcattctgcattattaaatgcccgtctgagagtggtgccgattt

SEQ ID NO: 12749 - DNA, 371 bp, Oryza sativa
actaagctaaacctgttgatcccactgaccatatatatacatctagctttttactgttgtgcatatattgccacttgatcaccatcaatgttaatgcgctttaagtgcattttgcaaaataaaaacgagatttgcctactggctgctccaaaaccatatctgtggtttttatgaagaccccagttgctaggtataatgtgatatatccattgtacaatattacaaaccaaaacataacaccgagtcctactaatttgaggacaatacacctcttcagagctttgagaatgataaaaacaaccagaatctgaataattacaggtccacagatgatatgccaatttgccttcgtaaagctaaaaggatatgaa

SEQ ID NO: 12750 - DNA, 397 bp, Oryza sativa
  unsure (1)..(397): unsure at all n locations
agctttggctagctagctgcaactgtgctttcacactancagctagctcgaaagatcaaacaagccaagcaagcggacgaatcatcggcgtgtcactcacaggcaagtggccatgagaagtgtggggggttggcactgatgaggaaaggtctctggaacggaatggagctcgggataagaaagtgatgggggagggagaaaggaagggaagctaatagcacgcagtagcttaactctttcacttgcttgatacagtggctagtggcactattaacaggacaggatgagcttgggaaaagaggtgggaggcggtgtgccactgttggtgagagcgacataggggagtgttgcttttatccttttgtctttcacgccgttgtccgttccctaaccggca

SEQ ID NO: 12751 - DNA, 342 bp, Oryza sativa
tctttgacacttactcacctgttgctagaatgaccacaattcgtgtgctacttttcctagcagtctcacatggacttctcgttcatcaaatggatgttaagacagcctttcttaatggatagctggatgaggagatctatatggatcaacctgatgggtttgtacttgaaggtcaagaaggcaaagtgtgcaaattgttgaaagtcttgtatggtctgaaacaagctcctaagcaatggcatgagaaatttgacaaacattgacatctgcaggctttgcaatcaatgaggcaaataaatgtgtatactatcgccattggtggggtgagggagttaatttgtg

SEQ ID NO: 12752 - DNA, 510 bp, Oryza sativa
  unsure (1)..(510): unsure at all n locations
tagcgacctataaatactcagcttatatgcccgttgtcattgggtgtgcgaaagatacacgcgtgtgttaactcttgtatcctgctncataaagagtacgaagattgtactgatgccaacatgcaagagttgtcgatacaaaacaaactcgatccattcagagggtcaggatgttggccttgacgatgtataagagttcgatccatgcaaagactagtacaaaaagaatattccccaacttgtcatgtggtaccttccggtgagagatcgtttgaagggtttgtcttcaacccgagggatgggaattgatgcgccggcatcatgaaaagcgaaacaaggatgggatgattcgacaatctggagattgcaaacagtggaaggtatttgacactaagtattatatgtttgctaaggacccaagacacgtaaaggttgcattgagcaccgatagaatgaattcatttgtgacttgacaactacacagacgtggcagtactctaacctgtcaac

SEQ ID NO: 12753 - DNA, 383 bp, Oryza sativa
  unsure (1)..(383): unsure at all n locations
gcttcagctcgtgatcccatcagatcagttagtcttttcgaaatggtgccgatggctaaggctctcgcggtcgtgtccgctttctgccttcttgtggcgccggccgccgcggcgcgtagcctcgtcgacgtcatcggcggggcgttcggtggccggaaggactactacacgcccggtcctactggccagcaccactcttctagtcccagtcgttcgtacattacccagtctcttccatatcttatcttgctactgctcggttacgtcaactggtcaaacgtacgacgtaatgttcgtgcgtgtacgtgtntcccatgcagattcgcacaaggcttcgccctgcgcgccgacgccgccacagggaggtggtggaggctacaacc

SEQ ID NO: 12754 - DNA, 445 bp, Oryza sativa
  unsure (1)..(445): unsure at all n locations
ttctacaactgcaggttcttagaatctatatcaaaagctgtactgtttggagagctgttgattctgggagaagctgcagcagcttgaaactcccccaaacaagaccaacaacaaattgtccattctttgtactccatgtgttgaaaaactaaaaactaaaggaccattggttgaaccaatcatctagcgccataagtgcaagctttagataagtagatagattcaagattcaacccatatttcctttttcttgatcgattaccacttctagcacaccctgtattattcaattgcaaggaaaaaaatgaaaagtccaatacccctcttactatggatanagtccatctccacctaaacttaaaccggtatctactcctgactttgaaatcgtcatataccctacagggtttgatatttgaatctaacgacactctaataaaaatac

SEQ ID NO: 12755 - DNA, 480 bp, Oryza sativa
  unsure (1)..(480): unsure at all n locations
agatactcagctacagaactggttcttattctgtaccattattctgcatgaatctggttctatataatactgaggagattctttgctgcagaatgatgtcaacgattgaacagatgtacagctttgttataggcactattctgcttcttatgcgatctcaccgttgtgaaggttcttagtcatcatctgctggttgtcatttgccattcgacttgggcaaaaatgttatgcaagtgatgaatctgcttcgctttggatgtgatgaccaccctgacctaacggcccaacctgaacacctgagcttgtggagcacaaacttgaaccgggcaattcttccttctgaactccaaataaaatacagcaaagataggaaaatntctgcatcctgaatgcgtcacaccaagtagaaaaggctgtgttcggtataggtgttggacctaatcctttcacatgaaaatggagcgatccatagccgtgatt

SEQ ID NO: 12756 - DNA, 88 bp, Oryza sativa
aacctagcttatatagtgaagatactctcatgataccaacgattgttgtgtctcaccttaatatctcctcgtttaataatgaaccgtg

SEQ ID NO: 12757 - DNA, 446 bp, Oryza sativa
  unsure (1)..(446): unsure at all n locations
gcttcactgtcaatatatacagatattggttatcttttcatcaatgtatgtctatatacactaacttattagatcgtacaaatgtggctagcagtcttcttatccatggaaggattctattaaatgatttatcttttcctctacaggntatctaatcttctaaatactaaaaactgtctcccatttgcttcatagtttaattagcattttgaaatttgacatgcttggtgatcatagttcttttctctacaatttangctggagagaaacggaaagaggaagaaacagtcgagcttgagggatctctgggcaaaagcaatgctgttaatcaggaactagttgcattggagagagagctcgcaacacatcggagaactggcgctattgattcattntgttngtacttgcatggcattgctctacgtgataaaggcagtgaagctcta

SEQ ID NO: 12758 - DNA, 447 bp, Oryza sativa
atctagttctatcaaatagagtacctgaagaatacttaaatgtatgaatcgaggaaattcttcacacaatggacagccctctagatggagctccggtcagttctcaagaacactaagaactgtcatccatgttggaaaattaacgcctttataggaaactaccttaagcatatggagaccatgatgaggtttaagagcatcaagaaccttctcagggtaatctggttcttcagcatggtattcgccactccattcaagagataagtgtgtaagtttctcttttcttccaagattggctgctttagcttgttcttgagataccatttctaggccacgtaactctagttcgccagaaagggttaagctatgcactttcctaatggtacttgcactagcgctagcactcacaataaaatatgttaatgtctgtatggaagtaactgtcca

SEQ ID NO: 12759 - DNA, 403 bp, Oryza sativa
  unsure (1)..(403): unsure at all n locations
gctatcatattntattgaagatagcatatcttatttaattaattggataggggcattgaaagatanacatgcaaacgaaagttggtacttctgtgtttgtttcaaaacaaggtatacttggtgttggaactgaattaaaatagacttgttacataaacatgtttagtataattcatatgcacaactaattgtttttttaatcatcgccatgccaaaaggccatctgtacgaattatagagcctcaccccaatgcgttccaatccatcaagacttgaagagagcatgctatactgatggcatgataaactgcaaacaactaacctgagcattcatgttagctccattcatgtagacctgcccaccgttctcatgaattatcatgcatatctcatcaatgccttc

SEQ ID NO: 12760 - DNA, 390 bp, Oryza sativa
gattcacaaacttcagaagaaaaagaaggaaaccatgactgtccaaacaatgtgaaaacagggtggattcgatcacgcgtgctcgaattgcttcttcacatgcagattttacaccaatgaagaatggatgcaaagaggtggttaaaatgattatcctttctagtgagaaatcagaaatttttgtgacgagagaaaatggaaaaagccatgccatttccggatttgtgttggtgaagaaagaagtgattgttcttcacagttaagcgggtggtttgcactatgcagttgctcttttttttaaaaaaaatctggttaatttcaggattgaaatagtacaataaacacataccaattttcaactgtttttttcagcccggcgaaaaaaattta

SEQ ID NO: 12761 - DNA, 519 bp, Oryza sativa
  unsure (1)..(519): unsure at all n locations
agcgacactatanattatccagcttatcgatatgtatagtgccctctggtcctgtgcggatgacagggctctcttgctntatagaaagaattggatggttgaatcagtaagaactacatgcttgttagctagcttgagagctctataaaccttgcataaactatgctgacagtgtccaagaatccttcgagaggcctgaatctatatgtcttgacatgtatgttccttgctctctagcgctcccggacatgtcgagtgtatccaaagctcatgggtgatcccgataacctgatctcttaaacctgccgatgctagcacaccatcatattacatatattatttaaagctgctataagtgagataaagcttattaacgggcataatcctacactcattaagctgatctcaatagatgtagccgatattaattctctgatcatctctcataacagccaatcacctcaattgtgttaacatttaaatcatntactccccgcattccgtaatataaacacatta

SEQ ID NO: 12762 - DNA, 447 bp, Oryza sativa
  unsure (1)..(447): unsure at all n locations
agctggcaatgacaagcagntctggctccttcttaacagtcaattacactgcagctcaaccagagaccacctcatacacaggaacccagcagcagcaaacctacgtcgcggccggcgaccagcaaggaaggacgccggaaaccaactccgcacgccacccctatcgaaccaaggagctgccagcaacgactggaagcagccttgcctaagaagggaggagcacctgagaaaagaggagcgggcactgcacttccagtgagcgctggaagaacaaccaatgaagaaggggaagaaccggattcggaggaagagaagggagggagatggaggcaccgtccccttcgccgacgaaacccgcagcaagccggcagctctcggcaactccacacggcagccggccccaaagcacgccccgtcgagaatcaaaattgaaaaanaaaagagaat

SEQ ID NO: 12763 - DNA, 487 bp, Oryza sativa
  unsure (1)..(487): unsure at all n locations
tatttaaatgaanattattctgtnttacataactaaccttgcatcacagatctgcaatgttctttntaaactatcagcatcccttgaccttggacgcacagtagatgtggaactgatctcagtaatgacgcccataatatctgtttgcacatgaaaatagagtagatcaaagtgttataaggcaatgtacagatacataaatgaaaatattatagtaatatatcataccaacataagaatatgttttatcaacaagagaggggattttttgataggtgtcaatgacaatgttatggcagggaaatcagctgggatgtcaatgcattcttctaagggtgtccatttactgaataanatcatgaagtcatttgaaactggtctataagttctgtttgcatctttgacagtgaacgactcaatgtagtagacgttcccttcatggatgagaggttcagaacctcaattgcgcctcgatacatcttaacat

SEQ ID NO: 12764 - DNA, 422 bp, Oryza sativa
gcaagctgatttatcagaaccagattatttggttaatgttgtatgcgtgaatactggtacaagtcttgggaaaacatgaagttcacaagaagtggtaatattattcgaaacatagagatagcattactcttttttccatagaactaggccatatggtagactattcccacatatgcacatctgctattacatattaaagctagatattagccatacttgcatagctttcaccatacgaaacatatactatatcctagcttatatctttcataaaaaaaaacacgagtggttgagcgtcacaggagagtccgttaattaattaatctggggcatgcattgttcacactactcagccgtgtacagatgggacacattagcactaatcatatatatgcatcattgcacacaacgctagattaatt

SEQ ID NO: 12765 - DNA, 277 bp, Oryza sativa
accattaaaggtgatcatagtccaattcttaatgaaatctgctcgcctctttaaaatccaacttctactcgatcacgacaagggagcagtggattatagaactctctattgaaatccaccagaaaacaactcggatggatcaatgcgggcaaccttcggccctgtgtaccttgtacacccgcaccgtaccactgtggcaagtatctgcaccacaatatggcacacatggacattacgctatatcgtgaccaatgggcacaaataccgcactgtacct

SEQ ID NO: 12766 - DNA, 432 bp, Oryza sativa
agcttgctagctagtatctgtatgctctatctagctatgagagagagagagagagagctttggatgccacacgctgcgtctccctctctacttataagaagagatccgagagaaggagaagaaggggacgactcgcgtgtaggagacgacgacgaaacttacatgcgccatattaggttggcccccacctaggtacagtaattagggtatttgttccggagacggctaattaactagattattaattaaaacaatatgatgataaaatatgtactatatatatatggactaattaattaatgactatatcctccggaaaatacgaccagatatatactcctattgcgtaatagaccgaacggttgtacaagaaactgatttggtgcatctattgatctaccgcgccgtggcttaatttccagcttattcatc

SEQ ID NO: 12767 - DNA, 476 bp, Oryza sativa
  unsure (1)..(476): unsure at all n locations
cgatgctcctcttggatgctagctaggctgacactggcttcttttctgtaagttggaagatgacttcatgtactatgaaacatgataaacaaattgacatctagctggctacctcatgatgacaagtgacaacaccttgttccaacgttatcacaagcaaataacctagctaatggcatatgcgccaattgagataaaatgctagattcagcgccaatttcacactggtttcggaggaatcgttcagacaagcaactcaatttctgcaggaagatgaaantttagtccagatgtaataggtgaagttcctataccattcttgtgcatcctctggtggttcgtccgagtgcactttgcacagaagctaaatgattttaatacttaatgaattaatgccactactacataggaaatgaagatntccacagtcactgtgcttcaaaatgaccccaatcaacaccagagcactggcccac

SEQ ID NO: 12768 - DNA, 369 bp, Oryza sativa
  unsure (1)..(369): unsure at all n locations
agcttctctcctctctcttaactccngcnataggaggaggcggcggtggggcgttcgtcgggagagagaaccaggcccgggggctagggttcggccgttcaaagaggcggcggctgacgaggaggaggaggatgaggacggggttttgataaaatttaactcctgcgaagaatctgcttatgcgggactttgagctgttgaagaaggaccccgcccgccttaatcaatggcgcgccgtacgacaactatcatcttgtttggaaccccgcaatacctggttggcacgcacgcgccgtaatcaccctcttttcatgcgctaggctttggtaccgaccgatctcttagagcttgagactatgacattcatgt

SEQ ID NO: 12769 - DNA, 430 bp, Oryza sativa
  unsure (1)..(430): unsure at all n locations
cccaatgtttatagtatgtactatcatataggggagnatcatatgataaaacccacagaaaaatgtcgctgctaactctatcgcaattgtttacctaatgcatgtgcaagccaagttctggcttagactggagatgctaaggctccaacctcccaaaaggccaaagaaacgaactgcatttcagcgagtaccaaacaaatcatgcacgtacatgcgcaagccaagttcttgtcttaaactttcgaagctaatagctcgcatgatataatgtcgcttaacgatgtgaagcaaccagatgccgacactggcacgatgttgaaaataggaaccccatcaggtgtgcaggaaccaacaccaccttcttcaagctcggcgaatgcctcagaaaatacacgggacatcacatccgcagtcactgggtgctctactg

SEQ ID NO: 12770 - DNA, 504 bp, Oryza sativa
  unsure (1)..(504): unsure at all n locations
ggcagganaganatggtacgcaacttcgatggcctttcatcccacggctctntgtattggtacaaacgaatggaataatctttaatgggatatacaattccgtgcttcaggtagttgattccatcatagatatgtgcaaggagtttgatgaagcccaaataacttagatgattnttctgcgcgtcttgttattagttgctttgcattaccttaaacttatgtgcctgccctccacgctctccaaggatggaaggtgtattgtgtaaaactttgtttttccccctacttaattgaaattggcagagctccctccttccccttaaaaaaaaacctctatccaactaanactccaaaaggtatattaaaatacatagagatggtatgcaaatctcttatgttcttacttanatggcttctattaatgatcacatgttgtctntacatgatnngtgtttcaccctttcttttaacagaagaacaaacaagaaccatttaatactcaca

SEQ ID NO: 12771 - DNA, 439 bp, Oryza sativa
  unsure (1)..(439): unsure at all n locations
gctngaatgcaaatatgcaatttgttgaatagtgatttaaccagaatgttaagccttaacagctaagctgggttggtttaccacaaaaacctaataacccatccttacagtaaaatgggttactatcttactagtattaagtacttgctagccaaatattggttggtggatatagaatgtaccaattactttccggtcctcatgttttttaaataatgatccggttgtcattgtctcattgtgttcctcactgaactataattgtgntttcgttctgtctaatcctcttctgagttgcatctgctaacatcatgatgtttacttttgcagcttcatgtttgggcctgagatatgtggtgatcagacaaaaanactccatctgatactggtctaccaagggcaaaactaccctattaagaagatctgaatgtgaactgac

SEQ ID NO: 12772 - DNA, 348 bp, Oryza sativa
atactcagcttcagttatgacgatgagagctgccctgctagttataataccatcttaactaatttatgtattattcgactagctcgcactttcaccctcttcctttaaacatactgataggatctgctcataaaactattgtgcttgctatgatataggtattaaaatcacataccttgtataatctatgtaaaagatgtacaaccagaaaccaatatgttaacttgacagagttgacctttacaatcctacaatactcgtcattccaacttttctctgctaaataatatatgctgctgtgtgcattattctggtcacatacctgactatgacataataactgaaaac

SEQ ID NO: 12773 - DNA, 443 bp, Oryza sativa
  unsure (1)..(443): unsure at all n locations
gcagcttatacngctgttatgtgtacagcgatggcagttgtatacagtaaatcacagtttaagggctacatatatgcacctgatcaggtaagttcagggttaatttcctataaccaattatacccatatatagatttataacacaactacattcccaataatcgaatgattacactccattgtgaatctgacaatttctgttttcataaataacatcaagctataagtttacagctaataactccaatctaatagcatatatagcatcaaatttaatctagcacaggtcacaccattcaaacattattgtatttatgtaatcgcagcaaagatcaaacaccattcaaacaatcctgtattcctctaatcaatagcaaatacttcagacctgtctttctctattctatagcagctagcaaatcctgaagaccttatactacgac

SEQ ID NO: 12774 - DNA, 468 bp, Oryza sativa
  unsure (1)..(468): unsure at all n locations
tcgcgaagaggacggccaatgacctcaagctgccggccaacttcgtccctcatatgctccactccatccaggtgccctcctttggattccatcctaagatgaatgtttcatacagggtgtcctgcaaatcttgcaagattgtattcatatgtgttctttgtgtgtttctaacaggggcaactgaccgagttccgttcctacgagggagaggagatgcagatcagggagaagattgtgcccctcaaggtttgccttctcttgcttaccgcagattgtcttttgtaccttttgtttcaaccatatgaattggagtggtgatgaatgtgcagattgacctccggataaacaatactgtaatcagagatcagttcttgtgggtaagtgtgcatctgtacatttcaggattcttgtcgttattnggaagatttccattatcgagttgtccaatatgttgttacttaactttct

SEQ ID NO: 12775 - DNA, 427 bp, Oryza sativa
  unsure (1)..(427): unsure at all n locations
actcagctattgacctntcatagattggatagcaattcttggaaatctatttactcaccgcgcattatattacaatgcattcacttggcaacggactataaattgagtgctctgcagagaagcacctgcagcttatttggaagataagagtgcaatacaacagacctaccaagtatgcaagtcctactgataatcaacttgctaaaatatgggtaacaagaaatatgctgtgataactccactggactataaaacaacactaggttatgactagatactggaggtgttggtgtttcatccttgaaatcgcttttgcatttgctggaagcctctgttctccaaaaactgaagagcactccctccagctgtacaataaacccttaattaacattcacaactcacactcatatataatatgaatggattt

SEQ ID NO: 12776 - DNA, 390 bp, Oryza sativa
  unsure (1)..(390): unsure at all n locations
atgactacatattctacttaccttcaacaccctcaggctcgggaacaatactactgcggtggcctcctgctgctcctggcggaagttgagacagaccacatgatcgttgaacgaatgctcccacaggcgcangatggacagccttggcagttgtccgaggactatgatggcggcatcggcattctccagttcggtccacatcagtctcagcttcacgagattctggagctttccgatccactgtggcagtttgcctagcgcaccctgcagcttgaggctctgcaagttctccggaggaggcgaggttgacgacgacgacaacgtgccatgtatgccttgacaccaacctgcacacaccgacaatgactctaactggctgagcttggagat

SEQ ID NO: 12777 - DNA, 409 bp, Oryza sativa
gcatatcaagaatgtatccctcatgttgattatgcctaatgttcagagttatcagcatttttgatcgcaccaaacttgcaggcaactcaccagttatgtagttcatcgagacatttaagctagccattggcgaatagaagctccagatccaatctggcaatgcacccctgatgcctgcactgccaagaacaatcatcttgatactagtttgggattgcagccaggtaggaaactgtggtccaaccaggcaaccatgcaatcctagctttgtgagctgaaaaggtggaaaccacctatgctcgactacaaccttgaaagaattgatgctaaactaaagcatcactcttgataattggtaagaggagtctgatattaccaatagtttgtgaacgaatattcagcatgcaag

SEQ ID NO: 12778 - DNA, 412 bp, Oryza sativa
gccacgaatcccctgtatgcctatctggaacttgatcccgcagaacgaacatataggatgagtctatctgatgtaaacataacacttcccgataacagcaagcattttaaaatatttataaatatgtatttcttctcttgccaattttgatttcccctagcagatgactcattatgtttaaacactctgcccgactagtcatagccatcaagcaccgggagtcggcctaagcacttcccaaacatgcatatgagtgacatgagttcgtcattaatggaacaaagtttcatgggtcggagcttactactctggtacttttgcaattatttagagcagaccataaattatcttatctctatgctgttcaattattccgaatgatacttaacgccttacgttattctgtccatcc

SEQ ID NO: 12779 - DNA, 180 bp, Oryza sativa
  unsure (1)..(180): unsure at all n locations
tcgagtaggtgtttaagagagctctcactacaatctactcagctcttatcactttcttaatctaatttgtgttatcttgactgtcacgtgcttgaagaanaatatcatataatccatccgtttcataatgtaagactntctagcattgtccacattcatatagatgttaacgaatctcta

SEQ ID NO: 12780 - DNA, 449 bp, Oryza sativa
  unsure (1)..(449): unsure at all n locations
agctttaaagtccatagagaagaccgaatattatatactntgtaactganaaaataaaattgaaagtaacaaattgaatctcaaggaaaaaaaaccatcacgctagaaaccaaacaaaaattttaaggtccaaatagcttgtcaaaagcatgaatacaagagaacattcgaaaataaagaaatccagttgaaaccatatagttttaacaaaaggacgaaaagagaagcgtcaagggaaaaacctataaacgtttcacatggaaactgctattttcataaaagcttcaaggtgcaaaaaaaatgcatcggtccagctcaaaacaaagttatttgttttcaataaagagggagatccaactctacaactcaattataagttcaaatttaaagtttgaaagtccaaatagcatgtcaaaagcattaatacaatagaactttcgaaaataaag

SEQ ID NO: 12781 - DNA, 450 bp, Oryza sativa
  unsure (1)..(450): unsure at all n locations
ntgtaggtttggaagcctgttaccaatatctggtggtagttggctgatgagagagttattggccatttcaagatattgcanagatgacatgttgaanaatgactggcgcacaggaccagacaagttgttatatgtaagaattaacctctctagctgtcggagttcacttaggctcccagggatgctccccaccaggttatttactgctagagaaagacgaaccagggaagaaaggttgcccagtgaggctggtatccctcctctgagtttattcagggctagactaaggaattgaagaggtgcagcaattgctgtaactggtggtatggaacccactaagttgttacggttaanggaaatggttgcaacgtggagctgttgaagagggctagtgggatccnccctgtaagattattttgcttgagacttagcacttgaagggatgagcta

SEQ ID NO: 12782 - DNA, 425 bp, Oryza sativa
  unsure (1)..(425): unsure at all n locations
agctttggcgcatgctatctagtctattttataaccncttgacaacagatgtaggtgtaaattctccatccgctntggaggagaagaaagatgcggggaagaaccgagatgatctcttcagtgatgctttaggagcattcgatggctgagactcctttcgttctatttcctgttttttcccttgctttgacttatctatatcaggttcggcttctttctgaggctcaacaagcaacttgtcagtgctttcgtcatcagacatttcacgggatgattcaagttgctcaatgccttctacagctaagtccccaacagttaggcgctcaacatttgacacctcgtctctttcaggaatatcatctatagcatcactgctgtaatcatacacttcagaaacattgncttcttcatcacttacttgctcc

SEQ ID NO: 12783 - DNA, 419 bp, Oryza sativa
agctttgttaggggaagaaagctcttcttttttttatttacttgtcccattgctaagagtgcttggagtgtaattgctataggtctaaatttgcgtaatgcacctatctctttctgggattgtatcaagggtgttaccaagaaaatggggtttcaggggggaatggtggtttttgcatgaatgacctgtggtttgtggattaccagaaataattgggttcttaacaataaactgatcaaatcacctttgcaggtcgtgtacaagtctttgcctttgatgcacaggtggaaggtgctgctatacaaaaaggagagtactagcttggatgtctttcaagcaagataatgcagactgttgaagtgctgaagccgactgataaattttcttgagaaatatgatagttcatgcgaatgggctct

SEQ ID NO: 12784 - DNA, 307 bp, Oryza sativa
  unsure (1)..(307): unsure at all n locations
gtccttttatagggcagcaatgacggttgtgagaaggggatatgtccgaactgccccgcaaccgtcattggagagcatttggagcgtccacgctcaaccccagcctggatggctgaaattgtggctccggcgaaccccccggttcggtcgaacctgggctgggcccaactggcctagctcttgggccatcttctaccctgaacctcctctatccatatctcggagtgttgggttgatttactgggattaggatcaagntcacaccccctccttgcatagagacatgattctcctcactgggtgctga

SEQ ID NO: 12785 - DNA, 421 bp, Oryza sativa
  unsure (1)..(421): unsure at all n locations
accaaacacacacttatcggcgttcagctttatgctgtcggagcggaggttctcaaaagtttccgctagatctacaagtaaagtttcttggtttgcgcgttttacaaccaagtcatcgacataagcctcaacattacgtcctatttggctacccaaagaaattcgagtagtacgttgaaaagtaagacctgcattctttaacccgaagggcattgatgtataacaatacgttcctacggnggtaatgaacgcagntntttcctcatcctccctagccatgcgaatctgatggtaaccagagtatgcatctagaacacacaaaaggtcgcactccgcagtggagtcgacgatctgatctatgcgaggcagggggtaaggatccttatgacatgccttgtaatgtcggtgtagtcgatgcaca

SEQ ID NO: 12786 - DNA, 343 bp, Oryza sativa
acagctccaactaggaagatcttcagctctggtgtgggggaaaagagagcaagactgagtactacccactgtactcagcaagtcataccggaagaggaggtatgatgcacgatataacctaaggaagctagaggttcttttgcataaagctagcatttaaaagcagtatttgaaagcaagaatacagttgtagtaattaatcaatattaaccaaacactgtccaacgctacaccacgttgcaacaagcccagccaaccacctgaactacaccagttcattaagcttaactagggatgagactaatcacggtgaatatggttgatctgccataaccgccggcac

SEQ ID NO: 12787 - DNA, 414 bp, Oryza sativa
  unsure (1)..(414): unsure at all n locations
acccaataatttatgtattgcgtatattgctaatgttctgcgctaagtaattcctaagatattttgctttgagacaataatgcataataaaattgcaagtcataactcaagtacttgcaatccggtttgggttgattgagtttgctttacataagcgactagttagcttcttcctgtttcattatctaatgagtgtgattgatttactcaatcatggtgttgagggatattaggaactgcagctgagcatcacagtgtcgctgttctactgcaataatgaaactgcattgttctctctagtcatggacctcatggttgcgtatattcacgcatggtgactctaanatatagtcgtcttaagtcgggaactctaaaaatgtangtttccacaaccgcaatctgcatatatatgaa

SEQ ID NO: 12788 - DNA, 448 bp, Oryza sativa
  unsure (1)..(448): unsure at all n locations
nggggcactggtaaatagttacacagtgtgtggtcatcaccctccaatgcacatataacaaggtcttactagcctattntatcaccaaacccccactttgaaagcactggttcagatgtgaatcaccctttgctttgctgaatctactcctacatggtgaatactcctaatatagggagcatgcatcaattgtagtggcatgcaacaacactcctatcaggatgtgcacaaagtataatgtgcataccttctccgtccaaaaagattaaattgctagattatcttagaattaaatcatttggacaaaggacgacatcttagatgaacttaacggntattggactcaatggacatgaaaaaactttatgcttcacgtgctataccacatcaaattaatttaactacattaagtaattaagttcatatattattttacttaccttaacag

SEQ ID NO: 12789 - DNA, 438 bp, Oryza sativa
agcttcatcaaaatattttcgcatcaattatgtttttggctatatccaagatcatgaagccgattggcgatacctgagcaccctgtatctattccaatcccatgattcttcttgattgatgtagtgcttaactgttcctttttttatcttacgctaagttccatagagaaattgctaggccatgcatgttgctagtacatactactcttcacccttcaagtctcatatgattttcatgactaatcattatagttcatggaacttaactaaatagggtttatgctttctatttgcagaaatttatatttcccctatgttcttgaagggtgaatgtttcaatattctaaacatttatccttttagatagtcatgttagctactgatctaagtgtattctttttgtcaaatcattgaatattaaaattgtatgtgttctga

SEQ ID NO: 12790 - DNA, 486 bp, Oryza sativa
  unsure (1)..(486): unsure at all n locations
tgatcacgaccgagtcataactcgacgccctcatctcgtgtgtatcagttcgtatgtgatgcctcttttgctaattntcaaaagatgaaccaaacaaaatgtgtaccttctgcggcgatcgaatctcgcaaagaaagcagctaggcttttcccctctcctccctgcgctactactggccaagcatgaggaccaagaaaaacacatcaaatcgatcctgattcccggccggccagcgagagagactcatggcacccgggggaatttcgccgtgcggttgtgcggctgttacaggatgcctncgcgcggttccgccggccaaagggcacgcacggacgcggtggtcgcatagctcatcgccccgcgcgcggctggcgtctcgacagctcacgatctcacgctgtctttacatacaaccatcgttctcttggcggccggccggtgcacacgccgatacgatctagttacctacctacctatgcatgatg

SEQ ID NO: 12791 - DNA, 440 bp, Oryza sativa
agcttgctacataattattacgatttacgagacatgtataagcaaaagtcggcactcgaataattatataagtaaagtaaagtaccaaagctatataaataagaatattcattattgaataaagtcttacaagaggtagaagggatactagagccatacccgaaatcttcggaagacttgaagaactaagaaactattctaattctactccactagtactagaacaaagtaaataaactaaagagaattcttgatttcttcttcttggtttgtgttgaagtggataaggtgaactccttaaacaggctgccaatgatggttgtggcggttggaattgtcagaaatgccccgcaaccatcattggggagtgatcagggatgtccacgtgtacggccaggatgaaagggcctgatggcggttcagccaaaccctaggcccca

SEQ ID NO: 12792 - DNA, 245 bp, Oryza sativa
ttcgaacttccatattattttctctgcctgacttcacagcgtaagctggtatctactggctacccatagatactggccagtatggttttctctgctggttactaagtaccactcggcggtacttgccagcaactaaagcctgtgagaccaaaaaaggcatagcacatctttggctttccaactgccatcatctcaaggatttctctcttttgttcatgaatatgattataccctgttggtgaaat

SEQ ID NO: 12793 - DNA, 447 bp, Oryza sativa
  unsure (1)..(447): unsure at all n locations
ctgcagcttgctatggcgaagaaaacaatatcattatatgttaganaaatatatattntatcaaatatcttagtatcaactggttgtttatttcattatctgctattcacttgtttgaaccaaatattgaactattccacaatattagaaaaatatcaggggacaatttgtaaaaactgcaaaaagcaatagtggggtggcaaattccctgccaccaccactagaggcttttgaatgagtatagacatgcactgtcaattttgtattcaaagtggtacgatgcatatgcagacatttttggagccattcagcaaataataaaaataatataaggataataccaaattttatgctaggatactcctaacagatatatctcatcaatgaactgattcttttagctacttgactagtataataactaactntagaaactctccatgacct

SEQ ID NO: 12794 - DNA, 469 bp, Oryza sativa
  unsure (1)..(469): unsure at all n locations
ttagcgaccttagatactcagcttataattccttgatcatgttctttcttaacaagtgatggtgtctttttttttttgttacacatcgagtgatgttgcatgtctctctgctataagtccttatgaattcaatattttctaattgaagatgcacttttgcaatctctagagagggcatatggctgcaagctgtgtattgagccatgtactacaagaggggaggtatcgaattaatcaaacatcgtgttcagtgcatgaaagatataagccctcttatgattaacaaatgttctacttttacctgtaagggttctatatgatgcctctacaatgatctgacattgatgacacacattntggatcattgatgcccaacacagaagctgtgcggatgctttatttgactatttaaagttggttacctatttgggacctactacagtttactttactattgaataatctgctg

SEQ ID NO: 12795 - DNA, 421 bp, Oryza sativa
atgcaagctctggacaaggttgatgtcaaacttatataactttgaccatatttaactttaaacaatattggtttaaagaaacttgaacaatatatatagatttatctttcaaaacatatatagtaaaagttaacatgcatttattaattttatatattataatagaaaaataaggtcaaacatatattttgtagactgtgtcattgttcaaaacgtcaattataataaaaccggagggagtacctatatattgtggggtttggctagatcaactgcgtgcatgcgtgcttgagaggtgatgctttgcatggctcgcgtcgaccgcgacacgcgcacgcgcgggacgggacgggaagcatggtcccgcgccacggcgccacgcgacctgttggtcccgcgtgcagccgcctctaccacgcta

SEQ ID NO: 12796 - DNA, 289 bp, Oryza sativa
tgtacgaccggcggcatgtgatccacagatccctttgtgcatgtcgacgaagaagtgtttgccgtcgtctgacgagacgcatttgagaagtaccctgtttggcgccttcttgtatagatcattgccgatcatacagtagatattggcctagcgggttattttctctggttctacatcgtcgtcaggcaactcatcgctacttatgaattttacgagtgggatccgtcagtcgtctgtggtctctatgtcggcaacggcgcgttctacctatggtagccccgagctgatg

SEQ ID NO: 12797 - DNA, 283 bp, Oryza sativa
gccttggaacttatacgcttaaaactattgatacaatatcttaaagtaaatgttaaatgaatagtactatatgatagtgttaagataactagaactcgattacatgatgactttatattttttgtataaactcaagtgaatgttgactatacttgctaaacgcttatattggacgaggagcatgcgaaccatcaccaaaatggctatgaaagaccacgtacttaaatcacagatatgggatgtgcctaagcagcaaccgctttgcacttacaattcggaataa

SEQ ID NO: 12798 - DNA, 466 bp, Oryza sativa
  unsure (1)..(466): unsure at all n locations
tgccaaagctcgatgatctcttgctgcctcttctccgaatccaaatgccatctataaggtgactganaaacaccctcgatcgggtccaatccgatgctctttccatttgcattctanaacatggatgaaatgccnataatntaattacttgctgaagcatagaagaagaagtattcagcagaaaacactatttattttagattattagttggaatgctaatggtatgtggcttctgaggggtgggagaaattgtcaaatcctatgatagagtcccagagccaggatgttaaaccgaacaatactatatataagcatgattttccataccagctcacataatcacattcatcttgaataaaacaataattaaatgaactgcagagctaagtgcctcatagctaattagatactttcatacctggtcacctaactgttctgataatgacctgngccatctctttgagt

SEQ ID NO: 12799 - DNA, 435 bp, Oryza sativa
  unsure (1)..(435): unsure at all n locations
tgtcccgctgccgtcgctgccaccaccgatcaccgactcgcgctccgtcactgccgtctgctggcgccacctccctagagccccctcgctgagctccatcctgtcgctacctcctagagcccctagagcatggcctgctggcatctgctacttgccgtcgtcgtcctgatggagctcccgcaagcgtggggtggcacgccgatggctccctcgagctctggctcgtntccctcgacgccgccgccctcctgcccgccaccgccactccgctgccgtgctggcccccgctcgccgaactgccgaagagggggaaagagagataagggggagagagagggaggaggaataatggatagacccacatgtcagtgggccccacaaaattttcctctgtgtgaatgacaattgngtaccaaatgtatnattttaattcta

SEQ ID NO: 12800 - DNA, 508 bp, Oryza sativa
  unsure (1)..(508): unsure at all n locations
tcagacatctatatttccaaacctctaataagggtgacattcctggctaccttaccataatntagaactaagaatgaggttatgcccaggtgttacagttctcaacatgaggcttgtgaactgctgcatgtgttgttgacattctgctaccaaaaacgattagttctcttaacaaaataaaagataaaaaagggtaccatggttgcttaggttggatctttntaatatactgagacacatgagtgttatttctttcattacacaacttacctggacatgcgcaggagacattagatcttcattagcaggtggcactacatcttcctcagatggtggttccactcctgtcttttcataaagaaactaaaatgggacagggattagacaaggctagaatgcagaatcacatattatttgacagttatattagaaggggtaccctgatcagcccgtcattggaatccattctgcggcgaagttctgcattntcgcgtgtgagctttaaatt

SEQ ID NO: 12801 - DNA, 431 bp, Oryza sativa
  unsure (1)..(431): unsure at all n locations
catgaagcttgagcactaagtgtctttattgctgtttactgcaaaccctaacccctcattgataacccccttgtactcccttgcattnattctgcactagtgggtgtgtcttgatgaatatggaggttgtactcaatcttgcttaatttcttccacacccataagaggagattctggatgatgaaagcttaggtgtatagctctcgcctgccgtcaagcgcctatggtcgacgcacctagacttccgctgtttttcgtttgtcttcttgtgtgctgggccttcgccaaccatgtaataaatgaatcattgacgcttgcgcttgttaaactctgaatagtatcaacttttggtgtaccttgcctcctacgacaaggaataatacacccacctaatgaacgcccgttgggttattgtcagtcgtgacacactt

SEQ ID NO: 12802 - DNA, 497 bp, Oryza sativa
  unsure (1)..(497): unsure at all n locations
tactgtagtctggcagtagtataaaaagaatgtcaagtagctgtatcgctccttaattntatggactgcaagaacacgttcttccaatgcaataactcatggcgatttccagtgtacattgctttcattctgccattatgttggctgaattattattgttcttgccaattgccatacttaaaaagaaagagagaaaacccagcaagntatattacaacactggctagattggtctcttatgttatgtatatgcactctataaacaaatcgatatggtggttgtttcagctttcaccgtgagtactttgtgttggaagcaatttcaaacgtagcaactgcagaatgcttcttttcgtataatacattggttggcaggaaattgacgttagtcttcgtctcttttatgacgagtaatattcgtgggcatcaatattacaaacctgagtgtaggtcttggtgggactatgattattccttgtgtcatccatgacttacgt

SEQ ID NO: 12803 - DNA, 300 bp, Oryza sativa
  unsure (1)..(300): unsure at all n locations
tttccatctttacagattttgcttntatcaaccaaaggggctatgttcatcctagcccaaatctagtacccctatttttcatgaaaattttactctttttaaattatcccctcaaaccagggaacatcccatggtgcttggcataacgattttaacatatcctaaatgttttcggccttatttaaaagctataatacccgaaccattcacaactttttctacataatgcccgcaggactctccataaatcataaaaacacagttagggtaccataatcgatctgttagacataaaggcat

SEQ ID NO: 12804 - DNA, 426 bp, Oryza sativa
agcttaggcaagaaagggattgtactatactgaataagaaattgcccccacgcacgctagtaccatgtacgtatcctgcctagcaatgcaaacactccaactactacctcgcatctgcttaacgagcagaaaaggttagggaaaagcaaacaaagctccgagctgtgacaccgctactaatcgcgcttttccctacccactagctaataacagtagcattgccattaactaatcaactgtattcaactgcactatctgagttagtcacacatgcagtgaagagtccagaacatgaacccaggatcagggggcaaaagttcagaaatgtcgagacaatcagtaacacaatatctctgtaatttaccctggtagtccctagctacaactgtactgtcccactattaacagtgccataatactcctagc

SEQ ID NO: 12805 - DNA, 413 bp, Oryza sativa
  unsure (1)..(413): unsure at all n locations
gctgcaacttgcacatgtttggttggctacaatccactcactgactatgctcttaagaatccaatcaacctttctattcatcatatgggctccaaacttgaaggctcgctcagataacgtcacgaggcattagcaagcatgaaggtggattcaggtattacacgaaataaataagtgttagaagctattataggaaataaatcagattaataagaaattaacatgaaagaaacagaggggcacgcacgtgacacaagtgactntctaattttcagttaccacttagataacgccatcctagtagttgtagcccatttatagatctataaaagccttgaaccacaataatatacacctgggttagtgttgggttttaagtgactactcggactatatcgaattcagaataaaat

SEQ ID NO: 12806 - DNA, 375 bp, Oryza sativa
  unsure (1)..(375): unsure at all n locations
tctcctcactacttctaatgtgtgatcactcaacgtcggatgaccacctggtatcaacacgtgaaagagctcttgataccgacgacatctcacactatcacaagttgttatcttgaaaacacatcacaatttatttaaagacaacgcgaattgtatttccgtatacatcgcccagtagatacataagagctgaacaagctaaaaagtgaactaactgtaacaataagagaagccaccttgaagacagcgaancacactattctaatgaaactaagcatgaatagaggatcaaatcgacaagtnactgcggcaataccgtgacggctacatcctagggaacggcacatataagactattccaactacttaactata

SEQ ID NO: 12807 - DNA, 354 bp, Oryza sativa
gcttgctatgctgcatcttagtagagtacaatccctgttgtcgaccagaaagtattttttaaatcctgctgtgcacatcttaagcaccacattcctgttgaaagaaagattatatacctggagggtgtgaggcgcctgtaattgtcatgaatgctatggatgcataaagagcagcacctcttgccaaccatccaggcccaaataaggaaagggctaacacaccatatgccgcacaatcaatctgggcgaaaacatgttgtatttctgccagatgtgtgcacctgctcgtattactattgatttcacgcatgatctaagaatgttttacgattgttgtaggactccaactggaat

SEQ ID NO: 12808 - DNA, 308 bp, Oryza sativa
tgagacaccacactttactattcattggattcgtatgtcacttacttagggcctgtttggtagctagcctgcgaataaatgtctgaccccatactagccttgaaataacgcaaggtttttaggttgtcttcctgggactcaagattccacacctggcttgaggtcctcccgcacgtagtaagcctgagccatatatgtcttctgagctccacgcgaaatccaccttccaccagggctcttctcttttatctggaaagaaccgattgatatttaaatgacacacgtgtggcctctatcgacgtcgtcgt

SEQ ID NO: 12809 - DNA, 452 bp, Oryza sativa
  unsure (1)..(452): unsure at all n locations
agcttgtgtcatatatcaagaatgcagtgttttatattaattgaaagaagagccactcgcagaagagaacagacatggtgtgtttagttcacgctaaaattaaaagcttggttgaaattggaacgatgtgatgaaaaattgaaagtttatatgtatgtagagaagttttaatgtgatggaaaaattagaagtttgaagaaaaaattgggaactaaactatgccatatacaaaatcagcaactgtcaaaatctatgcctctgctaaagcaacgagtagacgtgtagactgccagttcggcagcagaatattgctaaagacgcccaatatgtgcagcataatagagttgcttttggaaagaagtgactnttacaggtggcgtctgcgctagaatggcttttcctttcctttcgtatggtggtcangtcgtggcactggcatgcacaccttaatg

SEQ ID NO: 12810 - DNA, 465 bp, Oryza sativa
  unsure (1)..(465): unsure at all n locations
tgaagactcgtaaaccgaagtaagctccctcctctggcaccctgccatcttgtgtctgcgctactacctcatccaccgaatttgaccattggtccctngttgttgctggtttgctgctcgaatggaggcacaactcatgccccaagcatgaagcatggcctatggccactcaccgtgctgctgagaaggctgntcacgacgagagacggtagcaaggagtcgatgctgtggctggtgctgaggctgctcattccggaggcgctgctggtggcggactgtgtggctttctacatgcgcagcggacctcctgaagtagactgcatcaactgataaattcttgatattgtcgtctacttacatcngctgtaaggtcgtctgccactggcttacaatggagcgactatactgtcacggaagtattccgggctgctgtggtcaaatgtatagggacagcagcatgatcac

SEQ ID NO: 12811 - DNA, 405 bp, Oryza sativa
  unsure (1)..(405): unsure at all n locations
gctcacatnctctatagtacttgaaacaatcattattcactttcggccaatagaaccccgctcttctaagaaattaatccatcttacgggccgattgatgaattccacatatcccttcatgcacttctcccctagcaactttagattgatcatattgtctaaccacttcaatagcactccatctatatttcggtgatgtaactctctatcaagcaaagtatatttgaatacttaccgccgaattttctgatcaaccctaaaactaggatacttcaaatattctatcaaagggattctcatattttcttctaactcctgngcacaaatgtccgaatttacaattaattcggcctctaaatcagatgtaacgtgccccccagcctcatgtatgaagccggtcagacc

SEQ ID NO: 12812 - DNA, 493 bp, Oryza sativa
  unsure (1)..(493): unsure at all n locations
tananaaatggtccatgggttggacattaaaactcattgcaacatatgaatagtgcatactttctcaagtagtttaatgattagcacaaacttcagccacactttaaaaattgtggcaatctattttacaccagaataagattatataatccaataagtttataatattatgagacaaatctacgtntatcattctgaaaactaagcatttgacaaattattgatgtctagatgtttaaaaatgcaactatatatggtcctatatgtcatacattnttaatcggaagggatacatactaatataatcgtattgaacagtgaaccacaactcttgcagtaccgaataatctcttgaaactctgttaanaaaaacttaatcctagttactagtgccttgaatgaacaacactttaactngtgactgtcgtntgctactgtaccgagtataagtcacagaattgtgagtacaccatccatatcttctggaacaagc

SEQ ID NO: 12813 - DNA, 429 bp, Oryza sativa
  unsure (1)..(429): unsure at all n locations
cgctgcagctgtcttgcggctggatgaatttgttcggtggatgggatctatcttagtcatgatttgctttgcctgccaaggaacctccacatgctcagtttcggcaaattcaccactaacctcttagtctttgagatctgtgaagatgacaatggcttgatggtttctcgtgttgagtcttgtgtgatcaaactgcctgnggtcatgggtaccgctaatgagacttggagcatagtagagtggcgcgggaaactactgatagttgtgacatactttggtgaatttgggcacaacattattgagattagagtatatgaggtggactgcagcacaaaccctgccacattcactgagatcaagagcttggatggcgactgcnactttatcagccaactcagcagcaagtcttttcgtttatctcattatgat

SEQ ID NO: 12814 - DNA, 368 bp, Oryza sativa
  unsure (1)..(368): unsure at all n locations
tgcatctttggcacttcaatctcgcggcacgttntatttccaactccaagtttacaatggtatcaccttcgtaaaatacttgcggtgcccttcgcaaagaataagtagggaaagacatacaatttacccaagaaatagtcctttgagagtaactagctagtgccaactgttgcactggaagaagtaaatatagtttataatgtaaagctaaatatactaaacataagaattgtctccaaatctagaagattgataaattactacatgagatcaatcaaccatctacacatacacatgtgcaaacaaatcaactttntgcagaagaatatatcatgcatacaacaaaattatgatggtggatggaggga

SEQ ID NO: 12815 - DNA, 384 bp, Oryza sativa
ttaccgcaggaagcttaaatatggtccatggagttatgctaacctaaatctattgaccatttgttgaacgagcacaatcgcgggtgagtgcttgcgggatgtgtgtgagtgtaagagtgttgatgtaccatgtgtggatggacattttttcataatggaaggaaaaaatattatgatgttttcagactggaacaagtttttcaatatatatatgaaatgttagctacaatgaggtacctggaaagttcatagagtagttgtatcaccttaatgtaattaacttagattaaaaatcgttaataatctaatgaaacaacttttggcgactcctcagttatgtccataatatcgttctttcaatacagtttccttgctatattattt

SEQ ID NO: 12816 - DNA, 99 bp, Oryza sativa
cactgcgctcgctaactgaggattttttttgttgtaaagccgggcgaaaacgctgggctgactacctacatgatctgtttgatagccctcttttttact

SEQ ID NO: 12817 - DNA, 295 bp, Oryza sativa
agctgcagctgatcatgacagagatcactctcgtctctccgagccacgaccccacctcaacgtggttgagaggggggctgttcttcggggtgcctccacgcgtgagagagggatccactccgggggaactcctatggaacgaacaaggtccacccgcacgctttgccacaggtaacgcccggcgcgtcccactttgaaaaatcggcccacctgggtggggacaccttttggagaaacggcaccctcccccgcggcggagccttcattttccctccccggccggcggatttttaat

SEQ ID NO: 12818 - DNA, 393 bp, Oryza sativa
agatgacatgataaagaatgaaaggtgcaaaatatttgctatagtggtttctaatctgggtctgatcttaatagaggctcgaacaaccccaagaacagttagggcaaatgttttctctaaaatacactcatcttaaattcgcctaaaccctgtctcaactcgttaacagctctaggtaagttccattcttatctctaactctttgcaaatgcaaagactacacaatatatcaaaagaggaaaagaaatattctgaggagcatttgccctcccagctataagctgacactctacactgaattcggcgcatagccttttatgccacgggattgatgatagttatgctgggcttttgtaccattgatctcttctgatccattctgattcatatgga

SEQ ID NO: 12819 - DNA, 445 bp, Oryza sativa
agcttatcacgaaatattaaaatttataatgactcagtttaatcccagaatgcagtacatctcaattaattaagagttcaccaagaccacctcacagtgattaatcaaggaccttgcagtatagatttagttaattattcatccctgcatgctttcgatgagagattaatagttaataccaaatgcatgcatcttcacaaatcacaacacaatgcagtaattaacggcagtaattaagccagttagtaggcagtatttttttacatactgctactgtgtatgagacctgtgcctatataaattaatatgtcagtggcctagttttggaagcagaaagtgacaattctgctgcttgaattggatggctatagcttgggattacagactatgaaagagagccagccatacatctcaatgcatgcataaacttttaggtagatctaca

SEQ ID NO: 12820 - DNA, 293 bp, Oryza sativa
aacatactgaacacaaagtaagtaaagggtatgcactatcgcctatatattgcaaaagaaccttggtgataacaccaattgttcgagaacctgccagaacaacaataagattgcattcatagatcattccacggccaagaaacgtataactacaaccagagatatgtaagtaccatcaggatcagcaagctctgccagttggagagcatccgaattagctaaatctgcattagccggagagacagccacgataatacaacctggatgcttaaaggaatgcatgatcattgacc

SEQ ID NO: 12821 - DNA, 422 bp, Oryza sativa
agcttataaaaaatcatcagtgcatatattgtgctaaacctatcaaaaatgctgtacagtacagaacatagatattgatcattctacgggcaacacgtgtgacctgaccagtgtatatcttactagctatcttccattcttcctcaatactgtataatggaagagaagaacatgacagttcatgtgtgtagtcaattagcgctccaggccaccaactatagcgacagccggcgtccaagaacggcgtcgtcatccaaaaagtgggcgagatcatcgtcgaaggggccaaagaaatcgatcatatacatcatcaccggcgcccagaggtcggtctcgtcgtcctgcatggagcacgtaatgtcggcgctgtactacgtcttggccgcgccgccgccgcctcgttcgtcgatcgcccccgggag

SEQ ID NO: 12822 - DNA, 380 bp, Oryza sativa
agcttcccggatattttgtttatctttttcgtgattcgaatcttttctatcttgtagacgcggatctgtatgtcaacaattgtccgttgtgtacccgggctggtcctgcacaaggatttaatgcacattcatcttagaaattctcggttcggaatatctgggcgtgacagtcgtcgacgggcgtagacttctgtatacacgtcccaggcctgaactcgtcaccgacagtcacattctccaccgtacacgccacgtaggagcttgtcgcgggcggccgcttcctccgccgcctcgacaagctatccaagtacgtgctcgtcgtgctccacgccaacgacgcggcgagggcagcaccttctcgctctacttccacatctacc

SEQ ID NO: 12823 - DNA, 409 bp, Oryza sativa
  unsure (1)..(409): unsure at all n locations
gcttanagccatgaatctctcttatgcatatctgtatctggattctgcagaacaaacatatatgatgagtagtatctgatataaatataatactcgagaaaaaatcaagcattttaaaatgtttataaatatgtatttcttctcttgtcaattgtgatttcctcgagcagatgactccttacgtttaaacactctgcccgactagtcatagtccccaagcatcgggagtcggcctaggcacttcccaaacatgcatatgagtgacatgagttcgtcattaatggaacaaagtttcacggattagaatttactactcaggtacttttgcaattattaagagcagaaaataaatctatcttatctctatgcttttgagttattccgaataatacttagcaccttgcgttac

SEQ ID NO: 12824 - DNA, 411 bp, Oryza sativa
  unsure (1)..(411): unsure at all n locations
tgacttntgctcttgantgggatctcctggcgccagcagaggagtctcttgctcctgcatcagggccctgcttgttcgtgctgctgccgctgtcgacgaggaccgcgtgcttgtgttttgctccggactctacctgccctctagatggagacaggacgccggtgctacggaagcctacgagggaagagcgcgtcgctcaccacaccatctgagataaaatattctcatcctatccttaccatcatctgctttcttcatggctcacacaccatctcacgggaggttgtggcaagatagagagaagtgacaccacaacggggggaagttgacggacaaagcacatcgactctctgagcagagcaatcagcctgcgtcgctacgaactaccacctgtggcacgtccgcttattg

SEQ ID NO: 12825 - DNA, 442 bp, Oryza sativa
  unsure (1)..(442): unsure at all n locations
cagcttcttccnagcatacggctttctagatgtatatgactatctctagacagatggatcttatatgaatcgtatgatgaagtaccacatgagtggatatataggagaggaatccaaatctgccgaatcgctcatgttatgatcttctacatcctaggtctccgcgttccgtcatctggcttatgttcttcatgtagcattcagatcgaatgactctatgaaattacgtcgatacttctacatattatgggtaacgtaggagacatccctattttcccccgggggtcttaattaccactgcttagctttcaattcgcctctgaccatcaaattaaatgtgaataacccgtcctcctctctttgagacaagggagcgcttcggttctgtgcgtgcttcaaacaatnttgtcttctccatattaccatatctctagagtcaata

SEQ ID NO: 12826 - DNA, 396 bp, Oryza sativa
gagacaaaagagaccggagagcgatgtcgcgtcaaatatgttttgacaacatagagacagcgggcaatgcaatacacagactccacagcacagcacccatacctattgcttcaagtccatgttcgaaccacttttggccagctttcagactcaaaagaaaatggcttaaaaatcaaacacccgattcatgcattcatatttcgttctcccatttaggccacaaaacttgcaggcataacatattcaagtcatggagacacactgtagttcaacattctaggctataactaagcaggctattagcattacatttaacaatgggcataactaacctgaaccaaatgctccctttcacataatgctcacgttaatgccactgaatagatatggatgact

SEQ ID NO: 12827 - DNA, 401 bp, Oryza sativa
  unsure (1)..(401): unsure at all n locations
atactccctttgttctaatgcgacgctgtcagactgaaactacgctgaagaaatctcaatctctcggtcgaattttaccacccgatgttatcccttcaaccgaatgaatggattacggatctaactcatctgtacttgccacacacacacaggatgaactgaataactatgaatgctccggatattgctgttagctgccaggcaagccattcatcaccaaaatgatgggaacaattcatgctctctctgtccctctctctcccggtctgcagcggcagccagccagggtttcattacgacagaaacctgaaaaagaagaaaaacgtcagcacttgagagagcatggngttgggtgacactgccacgtgaatgcggttgcatttgggcccgaattacctgtg

SEQ ID NO: 12828 - DNA, 322 bp, Oryza sativa
aagagtccccgaaagccttctggtattctgtcagtaccttcataacatgaattctatcaataactcggataattagagataacttcttaacctactcgatgttgttgcatctatgaatacttactcctagcagtatcacaaggtgtcagtggaatcattatataagataatcttactcaccgtattcacattgtatgcatatgtatgaaagatgacgtatagtggttgcatgaaataaatagaactgaactactcattgactaaaacattgaatcaagtgtatacttgttatcaggactcacgatgttcgcgatgatatagt

SEQ ID NO: 12829 - DNA, 451 bp, Oryza sativa
  unsure (1)..(451): unsure at all n locations
agcttggaggaagagctcgagcaagtacatttctttctatatgagggcagaaatctaatgacgttagtgataatattaaaagtgaggccaaccatataaatgttaatgctcccaaaaatgaagaagccaaggccattntcatcactgactctgactcatccaaagattntctttcctgtgtgaaagaacttgaacgtcacgtttctagggcagctgtatcctgccatgaggtcttgaggatgcttgagacgaagaagatccgccttaacatttcttcccagacaaaagggtaagacaacattttcatgatggtagtgtcctcgtgtttatattttctacttaacattggtgctaatctctcgaataaactttgaatagcangaagatcatcagatgtgcttttccaccaacatttctcatcggttgcaaagtcggaactgcagcatttgat

SEQ ID NO: 12830 - DNA, 428 bp, Oryza sativa
cgcgatgcactgataattataaaatatttttctttctatatagataagatgatatcaaaatatattcaatattatatttaatgaaactaatttgggtggtagatgatgttgagattataggcatataataatttaatctattccataaataaattatgacattacagatgaaaactagcatgaacgcatcattagatctacacatataaactacacagtataacatgaacagatcaaatatgcgcaacatattgacgtaccgaggtggcggaaagaccggctgctcggtcgaaacttttcgcaggcgtctacgaaggcacgcagcacgcgagcgaagaggaagactagccgtctcggacgaacagggagcagtcgcgcaaagcgcttttccaaaaccttattaccgccttctcccggtgcagaacgtc

SEQ ID NO: 12831 - DNA, 413 bp, Oryza sativa
  unsure (1)..(413): unsure at all n locations
tagcgaccttagatctcagcttctgcttccagtcattttccaaaatctacatctaccaaatcttcaaatctgctgtaaaaactggactgattggagaagcttctggcaactggagaatctatgaaaagctgcacttgctacaaacctcctcatacaagccctatatctggtttaagatgctatcttatctttcattggtgtgctggccatacacaggtctttacaggcgattggctccatcacttgcgaattaacgcatatacatattttgtataggcagactggttgcctatacagaaataatatctcatagacagatctctaagtgatccacatgtgaaaatgttntcgtatatgcactaactttaagagatcccgttgagaaaatagattttcatacgtggccctacacc

SEQ ID NO: 12832 - DNA, 437 bp, Oryza sativa
  unsure (1)..(437): unsure at all n locations
agctngctatgaggcttgcctttctcttctttataagattcagggcagnttatataatccatagtccctgactcagaggcttgatgtacaatgttagtcatcgaggcatggagtagcagcttgtgatgtataatcatgttgcagaaaattatcgagcgatcgataatgaagagtgaagcgttaaagctggtttttggccgaatacgcaagatttgccaagtgtgacaggccatgtataaagttgaagaacagcaccagggtgagtgcgttgtggcacaacaatgggagaaggcgcttctagagcgcattgagtactgctagctgaaggtgagtcaacaaagctctccagtttaattttccgagctccatagtgatgaatgtaacattgctcgtctagtgtatagcagcccacgaataaacaaagtacaataaccaag

SEQ ID NO: 12833 - DNA, 217 bp, Oryza sativa
ctacaacttctgctatgcttcctatcattgttctgcaattgtcgttgcccaatgtttcttttgctcactatctggcaaatccagatatgagaatcttaacttgaatcggtccttgattaccagccatgaattccaaaatatctttgagttgagttgggactttcggttgctccaaataaaaccacacgtgaggtctggccaatggacctggtacaat

SEQ ID NO: 12834 - DNA, 358 bp, Oryza sativa
  unsure (1)..(358): unsure at all n locations
agctntacctatctgcttgcttgtgccatattatntgatatcntgccttngtcaaccttgggtaataaatcgactagcttgtgttactttgatgacctagctagaactatatgcttagccatgcttaattaccactaactcagttgatgggataattgtagtattatacctttttagtatcacgacgagttgcgtgctcgagacatccgaccatgtttcattggtcataattatccaactaaaatgtgactgaatggtgggctatgggtgcatggttttgctagtcgcacccatggcaaataagaaccggttcgcgggatgcactggagacatacaacgcttgccacagcgggaatgg

SEQ ID NO: 12835 - DNA, 399 bp, Oryza sativa
  unsure (1)..(399): unsure at all n locations
gctttgaactgaagccctatttttctattcttatgaanggngagctatacatattttacattgcgaacagttcggtcataccaccttctatggactggtcttggagcacaacttgcacgtgacgtccccttctcagctatatgctggacagttcttgaaccagtgagctactttactgaagtttggtatactctattctggtttagataatttggattctgccaaacctatagagctcactgtgtttttcatatctttaatgctcttgctgcacagactagaaggcatctgataagaatatgtggcgagcaaagcaatgcagctgttatattgtgggcaaacttctccgcaggcttcattgctggagttatctctgctggtgctacctgtcctctcgat

SEQ ID NO: 12836 - DNA, 446 bp, Oryza sativa
  unsure (1)..(446): unsure at all n locations
ntgctgctgaaagaacaataatgggtgagctgaagcaatggaatgagttgttcggtgaaagaggctccagaaagaaacaacagttgacatactttctctgaactatctaaatatccagagtgtatgaacataatttgaaaactagaatagacggaaaacaaccatgtgaaaatagtccagtgttttaagttccaccagttaagaatgtttgggaccaaaggagcctggttatgaaaccggttnntttttgttgtaaaacttgatagagaacttccatacacagggactatgttttgcctgcctccggttgttgtgcttcagaataatgaatccggagcggacgtttggtttcttttgtctctttatatatttccatccctgtgctctttttgcatactcctccgtgccaaaataaccaanaataagaaaagatggcatgacaaagt

SEQ ID NO: 12837 - DNA, 430 bp, Oryza sativa
agcttaacaatggttactgtcttacatttgtgttgatggatattaagactgtaaatcgaccaacctaggaggaattatgttgcctgttgttttgattatgaaaaaacatgcacccaaattcgcctctacgagggcttgaacttgggtggtctgggcgtacatccaccccctctaccaacttatgtcaagtcaatttatgtgtgtgaaaacataacctttgtattttattgtttattcacatatctttgctattgtaatttgttgtactgaagcgatgtcatggaaagtttatatctacggttgttatgggcatcgaaatacattattgctcagttcactacggcttactgaaacagaattaagatgaatattatatccttctttagctaggcgtgtcaaattgctgaagaaaacgtgctctcaaactgtc

SEQ ID NO: 12838 - DNA, 302 bp, Oryza sativa
tattggcatgctagagttctctgaaccgactatctacttagccagggtgtcctataccaactcgtggttgcactttgattatgttctatgagtgtcccacatgaatccgtccttatatgctaatacgggacagtgccacatatgcacaacccccgcatcgtgagttttcacaattcattctattttcagacacacccacaccacaaggcatgtgctgacgcttcacaaagccattttccatgatttccgcacgcaaacgtgttagctggatatttggtatacgcgctcatatagcatgaata

SEQ ID NO: 12839 - DNA, 436 bp, Oryza sativa
  unsure (1)..(436): unsure at all n locations
catatatgttggaggtgcacggtaatggatgctttctatggtgagaaagatggtggtacacttgaagaagggaatggagatggagatggagatggggatggtgatggagatggtgaaagagatggactcggagataaatctgagatcgaatgctgtatgtatgatgacagttgaacaccttctactttaccaaatacagagtgattaagcccaaggttccttgcattgngttctttgatagctgagctagttgtttaatctatatggaaaagaatgctgtcccatcttaacagatgcctatagttgccgggcatcactgaaatccatctcatcctgactgaaaatacttctgacattatgacaagggtaatttacacaacactcaattgtaccatcagagaataatcacatctcgtgaccagtcatcagctcactg

SEQ ID NO: 12840 - DNA, 427 bp, Oryza sativa
  unsure (1)..(427): unsure at all n locations
acaccaccaatctgtttgtagagcatcaacagtcaccactgcatgcagtgtgaatgttcacagtgcctccatgaactgctagctgctactcttaatcgatcggtgtctgatcaaatcaaataaaatgcacggcgtgaatgattttaaacctgcaaaatcggcgcaaattgctaatcatgttgtactgtaatataattagctgacctcagatcactcccaactagtagcctttatcgatctatataaaccacatgcatatgcctgtattttcttcactcatcgacacacacagctctagcctcttgccacatagtccanagagcaatagagttttctaggattgattcagcaatggcagctgtagcacgagcactactcttcgccgccatcgtctgcgccgccctcgtgatggctgtcaccgccgctg

SEQ ID NO: 12841 - DNA, 421 bp, Oryza sativa
  unsure (1)..(421): unsure at all n locations
tgtgctagcacacctatgctcatatggcatgttctttatctgcaaccaaaaagggacagcaaacatccaaaccattattcagttgcaaaacattaaatgacaaagaagtaaaacaaaagagctacatacctgccaagttctaccatctggcaacctagaagcatggatcctccatttgcacttctctgccttgcaataagctctgtatcttgaggcctcagagtaaggcactgcacgctcaacctctctcaagacagcatattgtctcatacacctcttagaacaaaatacatcctataaagtaacaccaacttctatccttggattgcctacatcagttatatggattagaggctcacaacctctaatatcatngacttctatatcatctactggatcatcattctcttcatcaccatca

SEQ ID NO: 12842 - DNA, 444 bp, Oryza sativa
gaaagaaagcaggtaggtgatgtttttgctgtttatgcaccagtatcagcaaaggtatgatgaatctatgctactatgaacaaactattgccaggacaacacaagttcagcatgcaaactgatcaatctgtgatattgtgcaaggatggagaagcaatttcaattgtaactgagcatttagaagctgaaaaacgaatgtaattttgctgtaaggttacccaccaaactgatcgcttagtcccaatctactgagcgagtacaaccaggcatacataaaacaactctagaagcagcatagaaagcaattattatctaagaatggagcataatgctacgaataccaggaacatgatagggtaattaatgcaatgtaacgaatgctaacagccatcgcaatgtttctgcggagatcaacataacatttaaagttgtctgagagcaact

SEQ ID NO: 12843 - DNA, 399 bp, Oryza sativa
  unsure (1)..(399): unsure at all n locations
atgatgcatacttgttttatatatatcactaaatcaaaaatctgttctgatgggcacttgcactatgtgaaactcggtgaaccaaaggaacagactggattggttccatctgatgcaccttaccaacagtattgacattctttgagttgcagctgacatgatcctctatagtactagaaaccagcttctttttcactgtacttccatgtaccaacatctcttcggtaccaacttctggtgtactttgcatattaggttctttgtcttttttctcacattgtttgcttgctgtggtagtgtgaacagctagacttgggggcccttgaacagtgctgcagccagctaaagtcaaagctttctcactcgcttntttccaatctagcttgggcattaatgact

SEQ ID NO: 12844 - DNA, 481 bp, Oryza sativa
  unsure (1)..(481): unsure at all n locations
ctcagcttattgcaccagactntaaagggcagcaatcctacatggcatattggattctactggtaattaattactgaagccacacagtcagtcggactggagtgctcgatgtggtctccgccagtagaaccacccgaaccctccacgcacacagagcacacagaccttcgtcttccatggcgcgtgcagtgagctaggtggccaaacgaaggcgtcacatcgtcgcctgcaaccaaaatctctccacttgtccgcttgtataatttactcgcttcacatggnggcaccgcaaaacggtaggcccaggccggccggccaaggtccataataaacccaaaaggagcgacgccgatccattaanaaagttcggtagccataggctctcaactgttgttacagttatgcattcgacggtcccccgggtgccccgccatcgcatcaatccactccaagccactcattccactccacaccactccta

SEQ ID NO: 12845 - DNA, 317 bp, Oryza sativa
cgacgccgacgacgaggacgatgccgtaaaacgcgacggcgaggaggaggaagaggaggaggccatggccgatatgccgtgaacgaggcgatcgaagaccgcgttgacacccctagctacactcctaccccaagtcccggtcacaacgagactggggtggagtctaacagcttccccgctcgactgaaggatttggaaggagcgaatgctctagttgcgttcttctcgggcacggtggcgaaaggaggtccggtgaagaagatcttcaaaaagaaaggactcgtcgacattgtccgcgtttcagcgacgatgagtct

SEQ ID NO: 12846 - DNA, 433 bp, Oryza sativa
  unsure (1)..(433): unsure at all n locations
cagcctatccgatctcttttacattatcctttcattggcccaaaggccatcggataaatcctaacaataatattatacctatacctnccttatattaagtttatttttagctcaattattttatctcataataattttattttagattaaccattgcattcgattttaaaaataggaatttgattgtattggctgtagataaagttatggatagttgcattggatttgatagattatggacattctagtctttttgtntttaatgggatgtgcggaatgagtgaaaaatgaacttattctgagataggggagtactatcttcttcttttgcgattagacgggaaacacatatgcacatacaccactgcacaagtaacatcatacacacatccatgcaaatgcattatttaatacatgctctaaaagagatgga

SEQ ID NO: 12847 - DNA, 348 bp, Oryza sativa
  unsure (1)..(348): unsure at all n locations
tagctnttctgttgttcagcctagaattaaagaagggtgtcataagtttttatggactgagaagtaaaaacagtacagaagtgaagtatgaacttgatgaacaaaacgtcagttatggtatacaagcaggaaacttatgctctgcacacaagtcctctcgtatacacaccgtgcacaccaactaanacatatcaccaaanattctacaaaacattgcacatgtacttctagtagtattgcatctatgtgtaaagtctcatcttccaaattcattatatataggtagcaacaaaaaagacaatttctaacagaattatactctcaaaactggtagaaattttttttttt

SEQ ID NO: 12848 - DNA, 450 bp, Oryza sativa
  unsure (1)..(450): unsure at all n locations
catgcaagctntaatccttagaatcaaaggtttcaatatgaaaatttcctatagtatttgaatcctatgaaattcctacataaatcctttgattcacaggggcctattaagggatggatggatgttgcttgtatgtataaagattcaaggatggtaggacggtgcatagtatgtacatattcgaagattttttttctcaatccatgaatagtagtacgtattgtacatgtgagttttttttcagtttttctgggtgaacagtatgtatgcagtttctctcatagcaatttggtgggagcggcagggctaatccttctttctttttctcaaccgtacttacgttcttttgtttatttttttccatgagtagtaaagtacggaagtacgtatatgtacgtacaactattcacatgattntcttattcggngaggttatatacgatgtatttt

SEQ ID NO: 12849 - DNA, 409 bp, Oryza sativa
  unsure (1)..(409): unsure at all n locations
tcgctaataagtctttcggtcggtttttggtccacaaattattttttcggtacgtatacgggtggatatgagtatatctataaagtttggtacatacatttatatcantttttatacatttgaaatgtatacgtaagtataaaaattatacatatgtaaaaaactatantaaacataattatatgcatatatactttgggtatatatgtataagcttcatgtatatatacaactcttttgatgtccggactagcatgtatcacatccttcaaaatcccttatattttgggacggatagagtatatagataaattatataataccttcgttttttaatagatgataacgttgattttttgtcacaacgttaaccattcngtttatttaaanaatatgtatcataattttt

SEQ ID NO: 12850 - DNA, 441 bp, Oryza sativa
  unsure (1)..(441): unsure at all n locations
agcttatcagctaatgtataggatatattcttttcataaatcttgatgtcaccatgtagtgatggtcacttgcaagatgggtcgatgaacccgccaatgaataagagtgcgcaaaaactgacacaaataaagtaacaaatgtcctttggctcaattcaatacttcaatatacaagtaaaacaagatggagatgcgattgaaggacgcgttgcttttttgcgccaagntatagacatgctgcctttaacatttgtgagtcaatatctctctctggggattactattgacttactttcactatgtaaggtttggtttgagatctgaatgttaaatggccctaatacatgtttacatccttagcaagcatgagtaaatgtaacggttggttngagatctgaatgtaaatgagcctaatacatgtttacatccttaacaagcatg

SEQ ID NO: 12851 - DNA, 217 bp, Oryza sativa
actcagcctcgggggccagacgctgtgatacagcgccgactcgccggagcgatttttatttcgaaccgctgcactagatcgaactacaaatcgcatcacaaatcgaaccgccggacgctgcatcgcggcctctggccaatgcatgcacggcgcgcaaacagcaagctccagtcagagagagaacgacggtgcgactaattatgtggttagttccaca

SEQ ID NO: 12852 - DNA, 395 bp, Oryza sativa
  unsure (1)..(395): unsure at all n locations
catgcagcttttggaatgaggcaaaggttgttttttactacgtacttgnctcaaactgggaatatacgtatntcaaggggaaacaaggtacatgctacataagtctgatgttattttactgcctaactcgcagtaaggttctcacaactgaaaccatgcagcaacgcatttaagattctgaattgtataatagattttctctttttttatgaatctacagtacacaaaattgtaatatctttatagtttgtagaaatctttgctttttcccaaacctgtttgtacttcattagctttacaaaacaatctgtagtgcacggaaccacatttgttctccagaaaagtgcagaccaacggcaaattgctgtgtcagctatatcttgctgaacaggagt

SEQ ID NO: 12853 - DNA, 441 bp, Oryza sativa
  unsure (1)..(441): unsure at all n locations
agctntaattgaaattatgattaaagaatataggttcngtaagtacgtgatacgctcctaactaatagactgtcgggttgtcatcattgctgggaccaagattcaattctcgctaacacggtggttattttatccatcccataataccaaactactacctccgtcattttaaatgtagttgtttatttacgttttactgtccgtcttatttaaaaagttcataaaaaatttttaaaaaaatagtcaaacataaattactattcatgttttatcatctaataacaataaaaatactaattataattttttttcaaataagatggacggttaaatgttggacatgtacagtgcaaaactgcagtctttttagacagatgtagacatgtagtagtatagaaaccatattcagatctataatactcggttatgttcaattctata

SEQ ID NO: 12854 - DNA, 327 bp, Oryza sativa
tattctatgcgattgtattcatgaaagacactcattattattttattccactatatatatgccgctcttccatgcacttatacgttattgagtctagagacttacattctctgcgatatccctatatcttccaataactttatagaattcgcatgtgttatacccacataggaccgtggttgcttgtgacacttgatgacatattacagaatgaatagcttaaatcttgaatttgtgaagatgttggaatacaaaactctgtggactattacccgtcaatatgaatgattaacagcttctctcttatttgaatctgtcttcaccatt

SEQ ID NO: 12855 - DNA, 383 bp, Oryza sativa
  unsure (1)..(383): unsure at all n locations
catgcagcttgaggccgtatcccactggatatgttacgcttccngagctgaaaactatggatctctcaacaacgccctcacaggtgacataccaccatgtgatgggccaggagcccgccttttgcatatgtggatcttggaggcaatcagctcacatgaaagaatccggagttcttggcaaataactcatcccttcaagagcttaagctcatgcaaaatagtcttacaagggagatcccagcagccctcttcaacagctccacattgacaaccatttacctcaaccgtaacaatttatctggttctataccacctgttacaacaattgctgcacctattcaattccttagtctaacacaaaataaactcacatgagggatacc

SEQ ID NO: 12856 - DNA, 481 bp, Oryza sativa
  unsure (1)..(481): unsure at all n locations
gcatgtcatcagatgatgacagcacanaaggctggtgttgttgttcagccacacacctgatgtaatccgtatgagcttcacaaaccttgaccttatccatcgtattgtaattgtacacacgtatgaacatatcgtcggcaccagcaactacccattgtttccgtgtgataaatntagatgaccgaactgaaatggggatgattatattagcaagatggtatatcaaacagaagtaagcgatgaggtgggaaagcatacctggtaactctgtgacttcaaatgatttcaccatcgtctgaggatagatgaatatattataatcagtttaactttaagagtaactatgctgaacatatgtatggttctttttccgtccattcgattctagatttacttttatgtntacctccntctgtttgctctaatagtttgaaacctttaagattcccaattatgtgctaacactcacacatctgaacac

SEQ ID NO: 12857 - DNA, 439 bp, Oryza sativa
  unsure (1)..(439): unsure at all n locations
agcttgatcaactatccgagggcctgatcatattcaatattgatcggcttgaagctcgtaagaatgagctctnggcacaacttcaagagtgcaacgccgaactggatttggaacacaataagctacccgatctcccgcaagctgtcgaagaacagaaggcaaggttgaaatcggccatcaaaaatgtcgctgacatgaccaagtccttaaaagtcatctctggaaccgatgctcaagacgcccaggccattgaagaagtagaacaaattatgcagagagctatatcggctatccagcgccacttgtctcagtgacattctgtaataggatatagtagattttgtaatcggctaagacattctggtacattatttaacttgtcttaataatcctttgtgccgattaaatataactcctcgtttggctaaaaattttcaac

SEQ ID NO: 12858 - DNA, 313 bp, Oryza sativa
  unsure (1)..(313): unsure at all n locations
aaacgcgaaatgtcttttacccttcaaccaccattagaggagatctggactgtccacccaaaacatggatccgacatgcncttgtggttcnnnntnctcctttctctcttcatcttcttctatcccactcactctctatttcttcttcattcacctatacacctccttccccaccatgnacttcatactggcacttccttttcttagttctaatatacttaatatcttcttctctttcttctctcatatttccttttacgccttacttctctcctcttctcttcacactcacttttctttttacccctttttt

SEQ ID NO: 12859 - DNA, 448 bp, Oryza sativa
  unsure (1)..(448): unsure at all n locations
tcttcccaggtagaggatctagagatccatgccatgtctcgcttcgtccaattgtcggtggccgccggcgatcaagtcgatccggacagtctccggcttcaccagctcggctacaagcaggagctcaagcgtggcctctcgtatagacgcatatgcttgcttgtgtttaatttgttcagactagttcttgattagcaattaagcatgcattttggatcttncagtcacaagactcttttcacaactaatcttgcgtcagggcactgtccaactttgccttctccttcgccaacatctccgtgatgatgggggtgacgacgacgtacaacaccgggctgcggtactgcgggccggtgtccatgacgttgtgatggctggtggtggcggtgttaactgctgcgtcgccctgtccatggccgagatctgctctgggtacccgactttcggc

SEQ ID NO: 12860 - DNA, 382 bp, Oryza sativa
tatgtgcagaggaacgaatatagtttcaagggctttgttattcttgctagtctatctctgtatcaatatttccactttctgttttattagtccctatctgtatcaaaaagtcttcttttccactttcagttttactactgacactgaaatgaatttttttaacgaatatcatgttttagattattagttctttgtgatgattattataagaagttaactggtactcatattgaattttagaaatttgtaatagagaaaattctgggcatatcatgatttgcactcctacaactctgaatatgataagttgtatatatcttggattttaaataaacacacatataatctgaaactgtgttggtctaactagctgctcttctgt

SEQ ID NO: 12861 - DNA, 420 bp, Oryza sativa
  unsure (1)..(420): unsure at all n locations
tgtgatgctagcggagttggcattggaggtgtcttgatgcaagatggtaagcctgttgcatattctatcgagaagttgcatggtcctgttttgaattattccacgtatgataaggaattgtatgctctcgtacgttccttataaacgtggcgtcattatgcgcggcctaacgaattcgttattcactccgatcacgattcgcttaaatatcctcgctctcanaataatttgaatcgtagacatgcacaatgggttgaatctattgaatcttttccttatgttatcaaacaccagacagggaaagaatatgtgattgcagatgctttgtctatgcgctatactntcttgtccaacttgattgcggattttggacttgataattaagaacatatgcactgatctgatttatgaatgagataa

SEQ ID NO: 12862 - DNA, 345 bp, Oryza sativa
  unsure (1)..(345): unsure at all n locations
tttagtccaattgttctggggaatcattcatatttgaatccagaagacttcaggatagaaacaaaaacaagggttcatttctcatgcttgcttctcatgtttctgtcaatngacagaaatattaagatttgcttcttttctccatgtaaattttgatttggttaatgaacactcagagagattcagaatgagccaataaacttggttcatcaggtgtaattatttatttcggcatgttgcaccatcttatacttaaaaacaaaattaaccctcgtttttaatgatttttttctgtgatctaaacaaggtggttggacaaggattaatctgtgaggctactttgat

SEQ ID NO: 12863 - DNA, 324 bp, Oryza sativa
tttttctacccttatgctaagccttctctcctgtaataattaattaatggcagctttccggctaagggatacaccaatgtatataacaaaagtaatccatatagatgggacccacatatatagactataactaatgttatcttcacaatgtatatggatagcaactaatattacgaggagagagaaaatagagacaaataatatattttattctatatgggcagcccatatgcttatgggtggctttggctatgttcttgctatggactatttacacaatgtggttaggtggctgaatggaatattttattgcttattgactag

SEQ ID NO: 12864 - DNA, 402 bp, Oryza sativa
agcttcatagggtaaatggttgttgaatacttgaactctttccaagccttatatcgatgacatgaggaagccatgtaacgatttatttccgaaataaatgtatagaaccaaacctgatttggacagtatatggacaataaattcagtaagtacaaatatagcagtatatgaggacaatcctttctgaaaaaattgagaatatacctttttttaataatctacatttatatccttgcctaggaagaaatcgcagaaatgtacatatgtcgcaaattgaaaatgcgggtgggatcacaaatcgcgttgtggtgacgcgggactaccataccgttgtgggactgctggatggtggggacattgaaaaaaagaactttatgaggccctgacactgtgtccttactt

SEQ ID NO: 12865 - DNA, 300 bp, Oryza sativa
  unsure (1)..(300): unsure at all n locations
tacctctattgataagctcctgaaacgaatatgcagctcacattgtgntcgctgagtgaggtcatcaaaggggcaagtggattcctcctgagtntgcatggcgtccatgctctgtgatcctacctgtcccgttgaagcacaactgctacagttttcttaccggctcaccattgcaagaggaatggtctgctggcgatcatgggactgatgtgcgggcatgcgatcattaacctttcttgtcacctccacttgtatgatgcgctcgtaactcgatacccctgactctaaatctgcgatctt

SEQ ID NO: 12866 - DNA, 418 bp, Oryza sativa
  unsure (1)..(418): unsure at all n locations
gctacggaaaccganatanatgcaacaagagatggaatccactgagtatactttatattgaggtgtcagttctcccttgatgagacaaattgaataccaaattggattaatctaataatagatgtgaacaaacctttgctctaatattcagcaggaaaagagtaatctcttgatcaggtaaatattgcttgatacccaccagaaatcctgaaagaactccatagaacccagaaagaggcgtgtaactgcagaatcaaatattttttcattgtcaagattcattcatgaaaaacaagttaaanaagtaattcattcatgtatatcctatattgaaaaaaatcacanaatttatttgattaagggcctgtntggtacagctccaactcctaaatttaactccaggagttgagtctggagt

SEQ ID NO: 12867 - DNA, 413 bp, Oryza sativa
acgagctcagtttctactaaacctttgtttttccatattgcggagggcgtcctgtggccggtagtaaagctaaacagcctagtagagtactccaccgttcacagtaaagtcaattaacatttttacggcatactgtgataatgaatctagacatatatatttatctagatttattaataccaatatgaatgtgggaaatgctagaatgacctatattgtgaaacggaggaagtaataggctctgtttcaaaatatagcaactaacactggttaagaattattttagtcaaaattttgtgaactgtacacaatatatttcattcaagtatatattgttatgttttgagacgagaatagtagcatgcatgacagctcatgcagcagaaaggacagtttatgagtctgacactgcc

SEQ ID NO: 12868 - DNA, 243 bp, Oryza sativa
cgcgcgtgagctgatcactgttgcctctatccatgtcagtcatcggtcttatgtatcggcacacacattagctcgttgttctgagccctctgtctgtaatgtttaccataacgagactctggactgtatgcgtgagatgctcctcgctgatgctcaataatcaataaagcgccgttgtcatcttagaaaacacagagtggaatggttggctggtgaggctgctagacacatggagaatgttcg

SEQ ID NO: 12869 - DNA, 411 bp, Oryza sativa
gataccgtttttattgttacccatatatggaggagaaccgtgccttgcgtgcccggatcaataaaagctaatagcagccctaagtaaaagttactccatccgtttcacaatataagtcaatttaacattttttacgttcatactgatattaatgaatgtagacatatatatttatctagatctattaataccaatatgaatgtgggaaatgctagaatgacctatattgtgaaacggaggaagttatagtctctgtttcaaaatatagcaactaagactggttaacatatattttagtcaaaattctgtgaactgtacacaatatatttcattcagtcttatattgttatgatctgagacgagaatagtagcatgcatgacatctcatgctgcacaagggacatgatatga

SEQ ID NO: 12870 - DNA, 340 bp, Oryza sativa
  unsure (1)..(340): unsure at all n locations
tggtgttgagtntatcagtgtttcctttatccatgttagtcattgtttaatgtatcggcacacacattagctcgttgttctgagccctctgtctgtaatgtntaccataatgagactccggactgtatccgtgagatgctcctgtctgatgctcantaatcaataaagtgccgtgttcatctcaaaaaaaaaagagtggaaaggttgggtggtgaagctgcgagagagatggagaatgttcgaacgtttctccggaggcggaagaggcttcggcactctttgcttngtggggtccacttgtcacgcagcggcagcaggcattccggtgcatggaaacaaa

SEQ ID NO: 12871 - DNA, 438 bp, Oryza sativa
catgcaagcttctaacaaactggccacatatcgttttttaattaacattggtgtgatacgagtgagctactcaaaacacatcaacaaggacagtatttaagcacctcagagctaacaaaaggctcgacaaaactcccgtatctctccgcgaacatatgtctgaggtcgcacagttcaggcaactcatgaaatctatcagtggcaaaaattatagttgacacagcttccaaggcttcctgaggacattcactgtaaatgggccaccagagttagtgatcaaagatcaattgcagcagaacataagttgatattaacgattgaacaagagctgtatccaactttgtaaacatgcacctactcaattgctactgtcaccataaacaagtttgtttcagtgtagtatggcatgccaggacactttgatatatacatatcaag

SEQ ID NO: 12872 - DNA, 260 bp, Oryza sativa
  unsure (1)..(260): unsure at all n locations
aaaagaagggctgctgtcagactcagatcatcatatcatcatacccctatccagcacataaacatttttagtggtgggactcgttacacggggttttaaccgcttgagctagggtcatacaatcgagtttgcgcagcatatacctcaaacgtgcaaaatcataatctatttcacaagtgtaattatcaatgaccgacctgtgtaaagtaaaatacgttntcacaaacagtgtataacccaccacctaaactattttcact

SEQ ID NO: 12873 - DNA, 400 bp, Oryza sativa
  unsure (1)..(400): unsure at all n locations
agcttatggctcgaccattattgatgaattgtatattaccttcatcatgttggggtcatgcagttttgcatgctgctgaccttgtccaactacgaccaactgcatatcatgaaacttccccaatgcagttagtacgtgaaaatcctccaagtatttcccatttgtgtaagttcggttgtgctgtatacataccgatctgaccaccacagcgtaccgctatgggcccacacaggaaagtgaggatctatgtgggattcaaatctcggtcgatcataatgtatttagaacccttaacaggtgatctatttactgcctggttcgctgactctatctttgatgaggaacatnnttccgcattatggggagacttcaagtaccagaaagaatgccagaaaaatga

SEQ ID NO: 12874 - DNA, 317 bp, Oryza sativa
aaattttcagaatgagtcaccactgtcttccagacacaccgagatgctaattatgcagggggggtacaagggataaaaaatatgggttaagtttgcagtaacagcatctaaagtccttagttgtccaagccattttataaacacgatcctagagcttacaatattattatcaaggtgcgggaccacacaacctgcttaatccaggcctacgataatcataccaactggaacctcaccctgggcccacttgcctaagccacccagccaccattcccattttattgtgacaatttaaaattgaacatgattgggacttg

SEQ ID NO: 12875 - DNA, 381 bp, Oryza sativa
actgggaacaagcactgaaatgctgactttactgacaattgcagccaatgaatttgtggcgcaatgataagttagcttgaaaactgaaggtgaatataccaatatctccaaagaacatgttaaccttcccacttgatttacaatccctctatgaatcctcacttataatatctctacaccaataacctttatagatgaccagaggggcactgatatatttgagaccgataaatcacccatgacattctttattataaattgtcaaaatttaccaaagacttgattctaataaaggtgatacacccaccccctttacttatgttacacttgtccagctctaatttctgctgatcacattgaaatctcaaacatgttcttgcc

SEQ ID NO: 12876 - DNA, 409 bp, Oryza sativa
  unsure (1)..(409): unsure at all n locations
acctgcggcatgcactctcgtgggttgtgttgaaagacaacgaatttcttgtccaatatgtgtantaccacagtttagtttgtgatgtctgacctagccaaactgaagatcatctgaatttgacatgtttagttttattttatctttttcttacaaaactgctgtctggccactggctattttatccctagttcaggcttgctagcactccctagttacattttcgttctactattatcttatgcaggaggcgactctttaatatgataaacaatttgccaacactatttgatgatatgacaggagccgttaagaagcatgcgatagaaaagactcccaacagttgtatctagatcaacaagcctagatcaaaagtggtaacataatgagcatgcacttttgttttatc

SEQ ID NO: 12877 - DNA, 380 bp, Oryza sativa
  unsure (1)..(380): unsure at all n locations
atattgttccttcgtcccacatctgtgatagatttatattnncnggaaagtagtttgtaactaagtcagcantttttttgtttgctgtaactaagtcagcatttgttgtaactaagtcaacatatttttgtttgttgtgactaagtcagcatatttttgtatccaggttccacatgtgaaccgcacagagtaccagctgattgacatatcanaggatggattcgtacgttcaaacttccaaataatgagccaaaatatttctcaatgtaaataaatcctaatctcgctacttattattatgttattnctttcaagggagccttcttactgagagtggtaacactaatgatgatcttaaactcccacctgatgacagtctt

SEQ ID NO: 12878 - DNA, 259 bp, Oryza sativa
  unsure (1)..(259): unsure at all n locations
taatgcacaatcatcttgccatttgtcaactntgcaccgcatgactcgaaaagacaaactgcatgctactcctagcagtagcagtgccatctttgaaatataatcagaagcagagaaagacagatacacagtagcagaagattcatcatgtcatctgcttcttctttctggcacattctgaanaacacaaagaacatatacacgctctgcttcagaaattggctagtaacaaactgatcatatacattaatcttcagaa

SEQ ID NO: 12879 - DNA, 431 bp, Oryza sativa
  unsure (1)..(431): unsure at all n locations
ngatcagcatgtcatcagatgatgacagcacanaatgctgtgttgggtgaacatccacacacctgatgtaatccgtatgagccttcaaaaccttgaccttatccatcgtattgtaattgtacacacgtatgaacatatcgtcggcaccagcaactacccattgtttccgtgtgataaatntagatgaccgaactgaaatggggatgattatattagcaagatggtatatcanacagaagtaagcgatgaggtgggatagcatacctggtaactctgtgacttcaaatgatttcaccatcgtctgaggatagattgaatatatataatcatgttaactttaagagtaactatgctgannatatgtatgtttctttttccgtcatcgattctagatntactttatgtngtacctctctgtttgctctaatagt

SEQ ID NO: 12880 - DNA, 462 bp, Oryza sativa
  unsure (1)..(462): unsure at all n locations
agcttgcggctagatgttctgtacanttttcagataatggattattagaacctagtatctccctccgctgaaaaaaaacgaatatagacatattctagtaaaacgaatctagacataggtatgtctagattcgcagtactacgatgtgttatattcagtactagcttgattttaatgggacggagggagtagagatgtacatagccaaatggtacggacagtagtacataaacttaccccaaaacatggtgaattcaacagcaaaacaaaaaaactcactcaaaagaaaagaaacagaactaagcttgaatccttcttttaaaattacagcttgcaataagccttcaccatgctgccaacctcttcttcattaaataacaatgaccagagccttgtccaacgtgttccctgaagattacttggtaaaatgaattataatggtagccactatacaccacgtca

SEQ ID NO: 12881 - DNA, 397 bp, Oryza sativa
tataattaatttaaaagaatgtgtgcagtctatcgtactccaaaggacaagcacgctactaatataactctatctaccgggattaattgtcaagggaggggcatgtctgcaacctctgcttgatgatcgacaaaccgctctttgcgggagattactcgttcgataccgaccacgcagcgttttattatgcacatcatcacccataatattgaaacaaataacgaacaatggttacaagtcacaatgggaaagattaaaataatttaggatttgacttcaaacggcacctatgtaaatatggccacacggtgccgatgcacaactaacgtgatcgatatctagattgaaagctgattcattcagcaacgaggatctatatatactgtaaaagaaagat

SEQ ID NO: 12882 - DNA, 382 bp, Oryza sativa
  unsure (1)..(382): unsure at all n locations
ctgccagggcgtttaattcacctcaatctcaaacacnatnaaaatctttccaaatcaaggattcccaatcctcccatttccttaggcccccctaggtaccgtaatggtgagggcccggtaattaacttgaccaattttttaaaaatgggaaaactaaatggtgagtacaacggtatgtgtgcatgtcccgatgtctctctcacgcatcgctcagactgctcctttaatatttcattagagtctggggggtgccttggcacgcttcttgtacaaagctgggttaattaggttatgcgtagagctgcttaatcttgttcaaacgacacactaacaatccatcacattaacttatggaaaatgatttattcaattaccacttggt

SEQ ID NO: 12883 - DNA, 290 bp, Oryza sativa
  unsure (1)..(290): unsure at all n locations
atatgccactccgagaaatgaatcggnntttttgctcgtcatcatatgtgattagtatgagctcccacttttgaccaactagtttcatgcccgtatgttgtaacgggtcaggcccccatataattagggataaactgggagcccgtatgttaatgggccaagcccatataattaggaagtgatggtggntatttttcgcatacggacatgccgcatgcgttggatgaggggatggaangagatggaaggagaactactcgactnttaagatagtagagatcacatttctt

SEQ ID NO: 12884 - DNA, 273 bp, Oryza sativa
acggaggagttgcaactattgtatgaatagactatacattgactatagatgaattgaagtattagagagatatactattatacttgctcttagggagaatccgaatggttgagtttcagctagtgataatcttacggctttctttcatttacaagaaaaacatataaagcttggaagattattaccctatagaaaaagggggtggtcatttgtgctacttgtgactgtgttacatctgaagcatcattattcacaattaaaataaataaactc

SEQ ID NO: 12885 - DNA, 171 bp, Oryza sativa
  unsure (1)..(171): unsure at all n locations
acgagttgggattctgtgacagcgtggccgacgtcgcgaatagcgtcggcagcagtcttcatcttctggcagtaatcgtcgatggaggagtcgccttgaatcatggagtgaaactggtggctgaggaagatcgctcgaggctctnntgtggcgtggaacatgtcctcgatg

SEQ ID NO: 12886 - DNA, 391 bp, Oryza sativa
agcttggcgtggccacgtggtgtccagcgtatcgttcgatgtgtgtgattcatgcagaaacgcaatgaactctgtacctcgcgccacatgacagcttttatgattgttatacggcctcctcggagtattaacaacctgcatccagtgttttacgtgtgcaagctacacgttcaaaaaaactagtactactagtagtagcgtatgttttcggcgtgtaagctatgacaaaaacagagaaatttcgttgtgttttacgtgtctgtatagtagaatttaaactcgtcgcaatcgattcattgaattctttccaactcagccagcctaggccgggagacttggggtcaactttggccggaaccaatccgcctcgggtaatccacgccctgatggt

SEQ ID NO: 12887 - DNA, 440 bp, Oryza sativa
  unsure (1)..(440): unsure at all n locations
gatcctggtcttttaatgtacttncagatggctcttccatatatatatcctctgagagagtaatatcttcgagaaagccatttccactcccaggaggcttntcacatctttattaagaactccagcaacaggagccatgaatgacaagtaattgcctgcaagtcagccagataacaggatttaaggcacatggaatttctcatcagtgaatgctnntagaaaagaatgacacctgtaaacacggaattgaaaacanacgtaactnttcaagcttgcaataatcaagatgtaaagggatatactcactttccaaattctggagagctntntcagcagctagtacttgggcttcatctcttgggtttcaatgccgatcccgattttntcatactaaatagaacctggaacatcatatgtataggtaacatgaggatcacatg

SEQ ID NO: 12888 - DNA, 449 bp, Oryza sativa
  unsure (1)..(449): unsure at all n locations
ncaagcttggttgttggaactatatacaaacacttccaaataaaaagatatgcagtacaaatcagaaatactgtagcattcttgataaaaaaaaaggtagactatcatttgcaagggaataatggcatatgaaaaagcaaagctagcgagggaactggaggcaggaaagggaagatacacgccaagcatacataagtgagtgtagaaaggaactggttgtggcttaactcaccaaaagtgaccatgggaaacaaactgcaaatggaccttgggcaaggcaacaacacatggttccaatatcaccagatatggaatcgctaaacagtggtggtgccgcacggccgacggagcttcaagctaaccaacacctacaatattggcaaacttgagcaccttctatggcagcaaccaatcctttttatacagataagacaaaatcaattatatat

SEQ ID NO: 12889 - DNA, 343 bp, Oryza sativa
  unsure (1)..(343): unsure at all n locations
tatagtaagaatacgactattggcgacttgataattctcatcagccgattctatgacttttgaagtgatattgactctatgcagatgatgacttcanggcttactaaatttcactgttaacacatatnagattagatagtatctaattgctatattntgaatcgaagggaataatatnntagtgacaacgctgtcgacaggggatacccgtagactggatatagagggtattggggtacgctggtacgaggatctacgtagtacgacatcaagcatacaggatacanggattatactggntcangcctcttgataggtaatagcccctaatcccagtgatatg

SEQ ID NO: 12890 - DNA, 373 bp, Oryza sativa
cgtaccgggacctcagatcacctgaggctgcaacttgttgacctaaatcctaaaagctatcagtaaactatcagccctcgtcgactaagtagaaaaattgagcacagctatgatagaccaggatagcaaattgaatggtgtaaaatcacactccattattattgtggtagcccctcgactgacaaccttgagaaaaaacttgatgttgtcagtctagacagggaaatacatagataaacttaagcgtagaaacgaccaagatgttcgatattccaagagttgtcgacaaatgaaccatcttcgcgcttgagtcggtaagaacctggccgagtgacttaagagattatcaatggcccttcccattaaggagata

SEQ ID NO: 12891 - DNA, 440 bp, Oryza sativa
agcttgattatttattcttctgtacatgcaaatggtttgccttgtgtataaagaatgcaaaatggtagcttgaagcaatatatattgtgggaaacatgtatttgtacatggttatataattagcaatatatgattccattcttttgattgtctgaatcatatatttgatctgtattgttaaatatagccgtagcattagcacgggcaaattactagtttatataattccacaaatcaaaatgcaaatagatccaatcatcacctctctcatcatttccataatatttcaacaaatatatccatcatttcttataatacttcatacattcatccatatattccgtatcaaatattatctagattggttcatgtttactgctaataaattctagcttgtcatttattatttccatgtctttcgcttgtgcgatacagtaatt

SEQ ID NO: 12892 - DNA, 307 bp, Oryza sativa
  unsure (1)..(307): unsure at all n locations
actcagcttgccggacgcgtctatgtgtaggacgaagctatgagtggtgcttcttgaggcnggtaagtgacattcactgcagtgtgaagtaaccaaatctattcgaatagccgtgctcgccgttattgaacaccgggacatgtattacacttggctagactctaaattcttaacttatgtgggaggggatattgcatgatgaatnttatgctgttggagccacttcctgagaggcgggaaggtggacgtnctcagaaaaccatgacgaatcaatggcgggaagctattcttgtgatcacaatggatg

SEQ ID NO: 12893 - DNA, 345 bp, Oryza sativa
tgatgcgacgcaccttgatttataaagatgattgcccaacttatctgtatagccgtagaaggtgcttcactcgaaggtaaataaatattgttgtccaactcgtcgaaactaagctgatcggttgataactctaaactcctgaacatgtagattaaatctcagacttgatacttgacaaatttggagtagattgtggcggcatggaaaagccaaaattgccggtgaaataattgaagatgctgaagtaaaacttctgctccgaagtaaagaccaagataatgactcttggaggtgactccttggctgataattgattgcttctgcttgctgaattttgagagtatt

SEQ ID NO: 12894 - DNA, 338 bp, Oryza sativa
  unsure (1)..(338): unsure at all n locations
acaaccgtcatatggacccacctgtcagtgaccctgngaagtgtggaggcctgctgggccggcccatgttcgaccgaaccctggtgacgccagctccaggtggccttacatgtggacgtncaggattgcttgctgatggtggttgtggngcatttcatacaattcgcatcaattacaaccgtcatacttgcctatttcaggaggagctcattntactttcaacacgcactcaagcaagacttgatctcgatctctctctctaaagttaagnttagtgctctagtgctaagtgtagtagagttccatctgatgcccanatggtcccagcaacttttact

SEQ ID NO: 12895 - DNA, 401 bp, Oryza sativa
  unsure (1)..(401): unsure at all n locations
agcttattcaaattctgcgtgtctgatgctattatagaccaccattgtgctgtanaagccaagtaacatgtcatttcataattctgaatacatcaagatcaattagatatatcatagttccatgattagaaacataccaggtgaagttttcccatctatggccatacttcttgctagtgccctcccaaattcacccgtcttacgtcggtacatctcaacctccagcaaagcggcggcagccgtatcgatatccgtcatccactcgaatgcctgtcggaggtcttggaagacagtagcacttggagaatacgcgtagtgcgtcctaaggttcaatgcggcagctacaaaacatggcacatgttaagtatgagttacataatatgccatgtggattatgttat

SEQ ID NO: 12896 - DNA, 472 bp, Oryza sativa
  unsure (1)..(472): unsure at all n locations
agatgccacatcatcatccactaacaatcatcacatttaaacatcatgcanacatgctatatctntatagnnntttataattaagagcttttcgaatacaaacatgttaaattatcatctaacataattcacataatgtttcaatgcatanttttattatattttatgatatcctatatagntcatcctcacttaattagtgcttaaatgattaatctatggtccaaattatctttctccttttttcctataattaagtcatatcacaatcaattgttttagcctttagatgataatctatggaccaactagtatctctctacttttcttcttccattaaagtatatcaccttactttntacgttngaatcaccattctacatactannttaaattaaatatcatnaccacattaattaactaatctgatgtatctagctatctttacacgtatttttatggtatatactaa

SEQ ID NO: 12897 - DNA, 462 bp, Oryza sativa
catgcaagcttgctctgctacagcacagccatggcattctctccacaaaactcaatggagttcgagttccacatgtcggctccggttgacaagtgggagcccgcggcatcaccagccgatgagctcttctacaagggcaagctactgccgctccaccttccaccacgcatccagatggtcgagaagctcctcgagagtgcagctgagaagggccttctcttcgcgagcactgccccagcaacgccataccagtcgtgcaatgcatcaccgggcaattcatgttatgtcagtggagagctcaatgctgagcattacttccacgagtgcacatcagctggtattggtgctgctgaggaggccgccgcctgcgataagaagccatggtccaagaagctcaagttatcatgcatcttaaccttggcctcaagctcaaggcatcaatagtctatatcaagacaatat

SEQ ID NO: 12898 - DNA, 457 bp, Oryza sativa
  unsure (1)..(457): unsure at all n locations
gagcatgcaagctgtgacagataaccaaaaggcttcttaactactgtgagccatccgttttaaaggatatgatgttctgggcatcgagatacatagtctctaatgtacatattttatcattactttatcgaactatatatttatagaataaatataaaaaatgtaactatacaatatattttcatggaaaatctactaatattatttttcatattttaaagtctggtaatcttatttgttacattctgagccatctatcgcacttcatgttaatcactttatagactcaactaactatatttatatgttgctatgtgaaaaatgaaaaatgtcacgaattaatgtatacactcctacanctatagggacagggttactaaaaccaaactatgatttattatctgccaatccttgaagagggtaattgtatccggcaatccatggagaccaagcatgt

SEQ ID NO: 12899 - DNA, 547 bp, Oryza sativa
  unsure (1)..(547): unsure at all n locations
tccactagcacaagtgcacaaccgcacccatgatacacagctcttcaactgttcatgtctgngaaacatgtgctcctcctgctcatttcctgaatatntcttctcatatttcttccaagagaatatgcgggagagttgcgttatcttggacaaacagatctatttcatttattcagaattaaatcaagcagacacttgctatccctcctttaattgatttcaacgggcctcattcagaanaagatttagacaatntattgcctgcccatcataattaagctgagatcctggcttcanacagttctttntcctctcttcatttattctactttnttgctggtntgctgccgatgagatcggaatgaacgattctcctcatggctgctctgcattcatccaacttccannagtacagattaaagtaactttactaattctctgttcatatacatgtatnttgacttaataagatagataagttatagaaaatntacaacatctacaacaccagttagtttatagaaacaatatttgtacattcaatata

SEQ ID NO: 12900 - DNA, 366 bp, Oryza sativa
agcttgccgttcgccttgagaacgaccaccggtttcgccagccactcttgatggatgacttcacggatgaatccggcctccagaagtctcgccacctcctcgcggatgaaggcttgacgttccggggcctgccgccgcactttctgccggaccggccttgcgcccggccgcacggcgagacggtgctcaatcacctccctgtggaccccgggcatgtccgctggtctccatgcgaaaacgtcagcgtttgcccgcaggaaggagacgagcgcgtcttcctatttgccatccagaagaccaccgatccgtgtggtcttggatgggccgtcgcccaaggcaacctccttgaccgggacctcgtcgcat

SEQ ID NO: 12901 - DNA, 178 bp, Oryza sativa
cacgtgcacccatggcattattcagaatgacattgcttggcttcacatcacaatggacaatatgtggcatgcaacggttatggagataatccacagcagcagccatgtccaatgctatttctattcttgtagataacctcactggattcctcggacgattcttgtaagatgttggatg

SEQ ID NO: 12902 - DNA, 451 bp, Oryza sativa
  unsure (1)..(451): unsure at all n locations
agcttagcaaattgcaaaccgcaagaaaacattggagtaatgtgttacaaaacgggcctgaaatcacatcggaaaccaaaccgcggaagaatgccatatgagatccaaatatgatgacgacaccgagacacgatatttgataacggagttcagccaaggcctacatctccagggcacttattacgggcactcctccccgatccagcatatacagcgtatcagagttacgacgactcacggccggtcgccgccggcagccgctccctctcgctatgctatgtcgacatgcgggtacaacaggcacgcccctctatttatgagagatcctatgatagagtccgactcgtactctagtactcctaatacctattataactctaaatcctaaactgtaaccgactacgtagacatnattgacatanactcttacataatgtaaaagaaaaaaaaa

SEQ ID NO: 12903 - DNA, 192 bp, Oryza sativa
  unsure (1)..(192): unsure at all n locations
gttttttttgctagtatcataacacttatcgtttngctaanactgaaatcaaactttgtacagctntaactatgatacaaaattaaaatatttattttagaagcatggaaactatatgtatatattaatattgaaatatactntaataaaatcatacattcatgatatttatntaaatattggaatagaaaa

SEQ ID NO: 12904 - DNA, 452 bp, Oryza sativa
  unsure (1)..(452): unsure at all n locations
agcttacccaaaagagaccgagttcaaggaggatgtggcgtggcgatttatatattaattaggcagagttagctagtttcattttaattttaggaaagtgtgtttagtgtccgattgggacttatgtttttccttttacctttaggaaaatttatgtttagtgcaataaggactagtatcttcccatgcgtataaatatgcacacccggggtcactttaatatatctctcgatcaatacattttcggcgcatcaccacccttttttattttcatcttttccgacgagttcttgttccgagttgggttgcatcggcttcgatctccgatgaggggtaacacttgttatgactgtttgcatcggtggggctagggcctcaacactctaatcttatctctaatcttatcgatgtaaacacctatttaacatatatcttagntaatctaagtcgat

SEQ ID NO: 12905 - DNA, 242 bp, Oryza sativa
  unsure (1)..(242): unsure at all n locations
ctcaagctntctctctcttccgccattaggttcactcanatgtgttgatttgatttgagggatggtttgngagangngacggatcgaggcggnggatcacgggaagggatttgatgcactcttcggaggtggatttggccggagttgtgaaccctatttcgccggcgcagctttgcactgtaacaaggagtggtgaaaatggcgagagttccggctgggaatacgaagcgtcgcttggatat

SEQ ID NO: 12906 - DNA, 397 bp, Oryza sativa
  unsure (1)..(397): unsure at all n locations
agcatgacgtgtcgacattatctgtagagcctcatgagcgatggagcaacaatgtactggagaagctctcttctgatgctcagacgttgcagagcatccaagtgagcatcaaggagctgaagcggaaaatggngagcccatcaaacgggaaatcgcccatgaactccgaatacaacaccggtagcactcagatactcgataccgagggatgtgtcttggaacagatcaattacaacaacaaattgacaaagcgggttgagaactatcctgcgctatcagatagcatgaacgcggagcaagaagggtaccccagtatgaggaaaatatccggacaggttcagaaaggatcgtgaaacgtggggagattggaactggaacttcagaagatacagtatgt

SEQ ID NO: 12907 - DNA, 271 bp, Oryza sativa
  unsure (1)..(271): unsure at all n locations
tcgtctctagctcgagctcgtgattatgatccctcctctctttccttcctnccgacctcctctcctcgtcacataacatcacatgccggcccggctcgccattgatcacctctcgtgtngactgagaagcgtttgactgtgtggtggttggtgatgtgtgttgtgccggtcatcttcttcctcgccggcgagcgcttatatagtcgtccctgcttctgctgctgtcgtgtgagcgagcgatcttggtgagggtttctcttggcgatgggga

SEQ ID NO: 12908 - DNA, 448 bp, Oryza sativa
  unsure (1)..(448): unsure at all n locations
agcttagattaaaatctgtctttagagcatctatagaagccttgaggtatgaggccgttgtttccctcacatgaacaacagcaacaaacctttctttcacaattccacatttatcaacgtacctcaacaccacggccatttgctctttacaagaactatctattgactcatcaattagcaagcaaaacacatcatggccaagttcttccaaaatggaatgtaatatttctttggcaaagcagtcaacaatatccttttgaatctcaggagctatcataagacaattcttcgatgcanttttttctccactaccttgcctaaagcaacatcatgctctgctaagaaatcacgaaactctaagaaattgcctttgttgtatgaatcacttgattcatcatggccccgaaaggcaaacctagctaacaacctnctagcacattaattgatc

SEQ ID NO: 12909 - DNA, 290 bp, Oryza sativa
  unsure (1)..(290): unsure at all n locations
ctatattctctagctatcttacgtattatttctacttattattagagtaaattttataaaactacactnttattgactaaactatcactttgctgcaacctttacaccacatttcagataactgcaacattaacgctggaaattatcacatagccgcaattccgtcgagatacctcgttcctgacattctggacccacatgtcatacatatatgcttgagagagggaggaaaagaggaccacattatcacgccaccttcatggtntttactgtagcgatgccatgttagt

SEQ ID NO: 12910 - DNA, 419 bp, Oryza sativa
agcttgtgtagtcacaccatatttagctggcgcctgcccatgccttgccgacgcccactgtgtgctcgccgccgtcgtcgcccgagctctgtagcgcctatgagtgccggcccgcctctgggcgtgtccctactaatgcggcgcaaggaatggattcccggagccgcgtacatgctctagatcgcccgaagtgatctcccgtcacgctgtcggcgattaccatctatctcaccgtcggatgccgccgtcagaatcctccgccgacgaactcagtgcggcgaatccaagcgcgtggctcgtctgccctcagatagtgcaaccacccggtgagctcgctatcgcctgtatcgccgtggttcgccacgccgatcgcagacgacatacgtgcttacctctcgctggagcgcgaggtatcacgt

SEQ ID NO: 12911 - DNA, 445 bp, Oryza sativa
  unsure (1)..(445): unsure at all n locations
tagctatgcgtgngagagagttgtgagctatgtgttgctcaacccgctccgcatatatacctgcagcgtattcgtgaagggtgcctgcagacatgcatagttgattaactatccagctcgctacttttcaaaacgaataacaatatacgccctccgtccctaaagatctgatgaccggcacttctcccgaaccagcatatacagcgtattagagttacgacgactcacggtcggtcgtcgtcggctgtcgctccctctcgctatgctatggcgacatgccgttacaacaggcacgcccctctatttatgagagatcctatgatagagtccgactcgtactctagtactcctaatacctaatataactctaaatactaaactgtgaccgactatcgagacatatttgacataaactctaacataatgtaatagaaatataattgga

SEQ ID NO: 12912 - DNA, 311 bp, Oryza sativa
  unsure (1)..(311): unsure at all n locations
ctcagctgcatccaatcaacactgctgtattattctagcccacttcgcttggccccttattccatagcgacacaatgtcgtggccttttgtgctaccaagctttcagcccagcatacactccaccggntacaggcttatagctatatgcccagtatgcaagcccatcaaaccccatccagacactttcaagtcagtatgaaaggaaaaagtacaccgaaggggcctcaacttggcatcgaattacataattagtccccaaccacaataccatatatccatcgtcacttatctaatccataccaggcacagt

SEQ ID NO: 12913 - DNA, 446 bp, Oryza sativa
  unsure (1)..(446): unsure at all n locations
agcttgtcatcaattgctgtttcattctctgtggcgtgcattattcggacagagttgttcttcaaggtttggatgacaaaatctagatccccaatatttttattcaagtaggttttgtgaagatatacctgatgctctttcttttttgtgtcttctcacggtatccaagtaaaaccatgggctaaatccttttcaacttcgttgacaaagaaacaatatnttcagattactctggtcttagtcttgttgatccatgagctatttcagaaacaaactcaaggtctcaagctgggtagtccaattatgaaccaaacaaatacatgtaactaaaataatagttctgcagaagccatacagctgtttggtcccaacttagagttccaacttatgacttaatatctcacatcctcacagttaccaaaagatgcaatatcgagatctatact

SEQ ID NO: 12914 - DNA, 320 bp, Oryza sativa
  unsure (1)..(320): unsure at all n locations
aatttggctgcaatttgggtatactattcggtgacagcaccaacaaggcaacaagcaaaacctttttcttgttccacttgcctggtgccatacgagacgctcgngttccttatccaaagaatacccaacgttgctctggatanttttgggattattatgggcgtccttttagtggtattgtggattctctggatttttctatatattttgcgaaaggttttggactangaattatatgattttaagtgtcaatcttgncaaaaaaacatgacgagtgttattttgaaacatatatccttgtcaaggagtatatatatgtt

SEQ ID NO: 12915 - DNA, 248 bp, Oryza sativa
ctccaccgaggcactaactcgagcaacgaacttctttgttacgaagggacacttactgatcatgactagttgactagaacgacatcgcgcatactccagaacgactgggttactccactagtgttttaacatttcacattctgtcggggatccccccaatacacggccctaggggactatttatagccccattacaggttcttgctactatgggttatgttgtacacgcgaatttacatgaataccct

SEQ ID NO: 12916 - DNA, 248 bp, Oryza sativa
  unsure (1)..(248): unsure at all n locations
tcgcgtacgacggaagcaaggccctgtacactgcanganaactgccgttcttctccatggacttcaagatcaagctgggcaaagagctcanggaaatgtgagcattgtcactcctaattaatgtttactaacacttgtgtactctagctaggtttcttggtnttctgatatgtgtttagtacattntgtacatctagctaggctacttatttctggaaaatgtcttctacattgtatgcactctaact

SEQ ID NO: 12917 - DNA, 418 bp, Oryza sativa
gagagagaatatgtattaagcattaagttacatcccgattccgatttaaaaggtacacaccacacaacttattagaaattcgcggtgaatattatttctaaaaaaaaaatctgaattagaagtagtaagaaaattgcactaatttctctgtcctgaactgaacagatccatcaccgaaatgcttgagatgaagattcatcgaagatagcaaagactggtgctggtaaggaagctctgtgtgtgctcctcccaattgccctaaactacctaattcgacctcagaattcgtgcaagcatgagagaaatggaagtccctattgagattggagcccaaccaggagtaccataaacagaaagaagccaatgactccgaactggagccaccgacactgtaaggacatgcagcccgggagtcgca

SEQ ID NO: 12918 - DNA, 493 bp, Oryza sativa
  unsure (1)..(493): unsure at all n locations
ctaagaagctgtagttatagtattcagaanatgaactatcagccagaaatcgggaaacccaacaggatacccaactttcctagattntcaaaagttggttattaaccagttgcctctcagaatcttaagctctcctaaacagaccatataaaactcanaaacatagggacatatctcgaaaatcggcttaagagccatatccaccgctggcccaaaccttgccatcagccaaagaattcaaacaaatcagcttataacaagtacaataacatattataagccaactattaacacatgtggaggagataaagaggacaaagaagaaaagtgtgctcanattatatcgggctacagacggacttanaacgctatgtgtgatgagaggangactangtataatagggtgaatatatattatagggaatatggatgaaatgcactatatatanatattatagggattaaaactagtatggtatatattaaatttgtc

SEQ ID NO: 12919 - DNA, 460 bp, Oryza sativa
agcttcgctccgactttgacagcctggccctttacgtctactatgagtacgtacattttcacacaaccacaagttggtggataaattggagcagctaacaacttgacacgtgattaatcagacatatttctctaatgacatgttttaattgcatatgttgatgtgtgcgaatcatagtacaataattaacacactcatcatcagttgtcaattccaaaccgtcaccactgttggttaattattgcatgcacagcacagcactcagaactgtatcatttagtattcatgcaccattcacttatcaacaagagtaactaataattggatactttgtgcggcccacgaaatggaataattatacttaatttgaaaaagttgatgaaatttcaacaagagatcaaaaatttcaaaatgcaaaagctttttttagataaaacattcatataaatattggagaaat

SEQ ID NO: 12920 - DNA, 460 bp, Oryza sativa
agcttcgcgaagacgcggaagccgccgattttatagatgggatctcgtggatgtaaggatcgacggtccgtaccaagatgaacgaaaatcggagtcctttccatctataagcaaaatatggaaatacaaaaactctatatcacaatctttctttactagagttttggaatctatattggcgatgttttcttttagttgatttgtatggactccaaccatggggaggcgacactatgagtcgactagctcgttatcactttggttaaagttcgttatttgtaaggagtagaatgatggattagtggtttccaagctttcagatggtgcgcgttcttttaaaaaaacttgtatgcacataaatttcttgaaatatagtttcaaatacattttcaacttgcgagagttaatttggtcgtttgtgcatctcaataattatcacaaaccatttactctccattca

SEQ ID NO: 12921 - DNA, 252 bp, Oryza sativa
  unsure (1)..(252): unsure at all n locations
ctctccttagattggttcatgctgtacagtgatagcaatctgatcttactatttgctggtgaatgtanacgggttctggaaagacactngcctatctattgtcggtgttctcggccatagattctgggagatcctcggtgcaagcgctggttgtggtcccaaccagggagctcggcatgcaggtgataagctgctgggctgcttgctatgcaattatcttccacctgccttgtgcgtcccttctaactcacc

SEQ ID NO: 12922 - DNA, 430 bp, Oryza sativa
agatgcaacttgaagtgcaaaaacattatacaatttatagccttttgtttaaaaaaaagtatagactatattgcgttagaacattaacatatataatgggcaagctaaaatttatttataaacgagaagagcttttaacagccagatcagcgagtacctgtgtagcgctatatccaccactacacatacatgagtgtgggttcgaatataatgagggtttacatatttattatcagcctctgccttttggcaaatgttaaattataattaacacaatcatgaacattttgtgaaggtgtgcatgcgtaagccccctttattaagtaagaaagaaattacagtcactctcgattatctcttatgctccatctagcagctcactttcaaaacacttacaagtacaaacacatgatcccgctcaacttttatt

SEQ ID NO: 12923 - DNA, 188 bp, Oryza sativa
tcgtcaccaccgtgttcatctcctcgcgcgacgctgcgtgggaagcattcttctgcacgatcggcgccttgcggcgcgcacggtcccggacacgagacgtgcgctcgcgcacgcggaacgatcaatgtgttggctggcgagctacgatcctctatggaagaccctgcgcagcatcgcggttacgcacg

SEQ ID NO: 12924 - DNA, 487 bp, Oryza sativa
  unsure (1)..(487): unsure at all n locations
atcttacagcgacctgcggcatgcaagctctggtgagtggttctgagaaatggatgctatccgctactcttcttgcttcggtactcacctcacatagaaaaacttcgcctgcaacttaccaaggcaagatataacacctccccccttccacattgcttgttttggtcacggcttgagtttaatggtttccttttttattcttgttatcagcttggagctgaggagtatgagaagtttccaactgctgcagcagcaatagatcctccatgcaaagaagcagcaagaacgtttcattgtgaaaaacttacagagattgaaatcgtctaccctcagggcgataaaagggtgcacatcattgtgaggatattgattgcgaacattagccctctccctgaaattaaaatcaagccctttccgaaatccggattatcatggtatgtttcttaaaatngcccattcatgcttattgaattagtggcttatgttt

SEQ ID NO: 12925 - DNA, 232 bp, Oryza sativa
  unsure (1)..(232): unsure at all n locations
gtgtgttacagctgagatctgacagctaatgccacctaaaatacatagcaggcttcgtatcacacttgctaggacatctgatagatagaaattggacgtaattcgaatgattactgctgtatctcgccatattactctgactgcttaaatttcaattgactggatttatccnctattacagtaagatgtaataatgacaggcattacattgctgcatgcaccacgtcattaa

SEQ ID NO: 12926 - DNA, 468 bp, Oryza sativa
atcttactaatcaagcttacagcaaacataatgtatgttacattctctttatctccctgtgagaaagtccaactatcagccttccatcccagtacagtattgaagttataattgaatcacaagtaaaggtagcaacatctctgatttccacctctgaatcatcttccaataactcctaacataattaacccacgagaaatgcaagggaatcaatacatgttagatatagagcacttatgttttacaaaatgcatgcttatgttttatagttcatatgaacaaagcaactaaacagacctgaatatttacaactttatctcatccaccagcatagagccacttgtcattcaatttagcagcatatatatgcaccgctctgaagattctttgactttactaggacatcatccttccagatctgagtgtacaaaatacaaatgtcatgattatcctacgcacaaaccacat

SEQ ID NO: 12927 - DNA, 264 bp, Oryza sativa
  unsure (1)..(264): unsure at all n locations
tagaattcctctggtaatgcagacagaaccacaacagaaaataaaacatttttttcagaaaatattcaaaccggacaagacatgactgttggagtgatgggganatacaggatgccgaagtttagttaatgctgacacattgggttttttaaaaaactgccttcattaaacaatgcttatatgagtttaagactgtgaaaatgctgtgcacgcaattctatacagaaacgagctggtcctgattacttcctgattacttttaca

SEQ ID NO: 12928 - DNA, 107 bp, Oryza sativa
  unsure (1)..(107): unsure at all n locations
tcacgtcgtggcagccatcctgctggccgtggccgcgtcgtcgtcgccgtcttccgncgncgccgtcacctacgatgtgagcaacgaggcggcgatcaccgcctgcg

SEQ ID NO: 12929 - DNA, 246 bp, Oryza sativa
  unsure (1)..(246): unsure at all n locations
acagatatatagttgcaccatatgatattatcataataccaaaaggaacctgatttgacagtgggaaaagagaatatggttgaaagggatcaatggagcggagggaacatggacataaatcagtagaggttcttgaggagaaataaggngatgttatctatgtaacacattgattntntgtttctctctgtgccataggtgtcatctgatgattatttgttcctttattgactagaatggatgtta

SEQ ID NO: 12930 - DNA, 406 bp, Oryza sativa
agcttcaccttttgaagtgatcccatatgaacaaataagacactatccatgtctttttcttaaagataatagaattcattttagtctttactttttctaaaaaaactactccctccgtttcccaccgtgtcaacttaagtcaaagtcaaactattttaagtttggctaagtttatagacaaatataataatatttataataccaaattagtttcattaaatcaatagttgaacgtattttcataaaaaattgtcttggttgaaaatgttattattttttctacaaatttagttaaacttaaagcagtttgactttaaccaaagtcaaaacatcttataacctaaaacagtaggagtataaccaattatatagaggttacagaacgaacgatcaggaatcacgagat

SEQ ID NO: 12931 - DNA, 310 bp, Oryza sativa
cttatatctaatacggtattatagcttactatttttctatgaatatacaatccacaaaatagaagttatccgaaaatacatactgatacagagtccatgagtaaatctgccgaattggaggtgaccttaacaaggcaaaatacaggttttgcgcaagtaactgctaaacacggaaggaaaaagtgaagcccccactatttattcctcctgcacaatccatccatccatccatccaaccccagctatataaagctcggcgcagaggagggagggactttatttcctctcacttcagcgaaataaatgaaca

SEQ ID NO: 12932 - DNA, 264 bp, Oryza sativa
  unsure (1)..(264): unsure at all n locations
tatttgcatatcattntcattatgtactcanatgctactcttgagtatntggngcacaataattcattcccgagcccaacaataactntgcgtttggtttcttctaagccgcatatactagtatgctgtgtacactgttctgctaatgctacatggtgccaacttattgacaatgcattattgcatatagagctaanacatccatccatctaagatactggnttgatgaattcttatgacataataacctncaacggtatcatg

SEQ ID NO: 12933 - DNA, 451 bp, Oryza sativa
  unsure (1)..(451): unsure at all n locations
agcttcctgctattctttattttctgcctttatcttataggcaggagaggtatcattgcttacaaaggataacaagcaatatccactctatctccccattttctccctctaccaatgctatttttctttgttcactgaaaagtgctaactcacccaatcaaggcactgatgggcaagaagcaggatttctgtggcccacctgatcatggctatgcattaagaccaaagtgcccgagcatatctttactcatgaaaaggagttagttgttgtgatgtttagttccataacatgtgatcttttgtgaattgatctacatagatgtgtgcatgtcattttgttgggtcctttgtaaaggattagaagatcacatagtttacttaattgtacataatgtaacatacatttggctgctaagaannaaacatcaacaccacagacataatataatga

SEQ ID NO: 12934 - DNA, 273 bp, Oryza sativa
  unsure (1)..(273): unsure at all n locations
atatatgtntcagttgaaatattattataaaaggcatgcaaatgtttttcttgtgacaaaaaatagtatctgggtatgtatctatgtcaagctgctgcgtggagtcatattttgtatataaacctatttaattatcatgggtatgacttctagcatggtactttacgggtattttttttaaaaaccaatggatatagcaataagaatattttcattattattattgagtcgtaatacttttacaattaattagactggctggtgacgaatctt

SEQ ID NO: 12935 - DNA, 389 bp, Oryza sativa
  unsure (1)..(389): unsure at all n locations
gcttatccctatttaccgagtttaaagatgatgcggcatggcagnttatctattaattaggaatagcttgttagtctccttttatctttaagaaagcgtgtttaatgtccaatacagactttatattttccttttatctttagagtagtatctttcttgttcgacaaggaattgtatcaacccatgggtataaatatgtacacccggggtctatgtaatctatcctcacgatcaatacaattcggcgcatcgccaccttttaccttttctatttaattttatcgntcggcgggacttggcacccgacgcggagctgcatcggtgttcgatctccggcgaaggggtaagtccaatgatctgccggcccgggcaattgtctcatctacatc

SEQ ID NO: 12936 - DNA, 380 bp, Oryza sativa
  unsure (1)..(380): unsure at all n locations
agcttgaaaaggagatgcaactagcagatcatagtggctgatgcaggatttcaattataaaaaaccctctttntttttcctggtaacggcttattatccccaatcccctccaatctccacgggatatataagggattagacgaacaaaagccctataaattctccacttccatttcttacctgaacccacacaatcaccaaacttaaaaacgggagatcctttgctacatcagtaactgaatcaagaattttccaaccaaactcaaagcattactccagtacattggactcgaccgaacataaataaacattatagaggtttgaagagatgcacgaaaaaaaataaaccgtcggagagatgggatcgccggggactaacg

SEQ ID NO: 12937 - DNA, 307 bp, Oryza sativa
  unsure (1)..(307): unsure at all n locations
aattgactcctcttcgatttaagtgagccatacttttatactcaactttaatcatctgtcttatttaaaaaaaaattataaaaatntaanaacataagtcatgcataaagtaccattcatggtntatcatctcataacaacaaanatactaattataacaaaattttaaataagacgaacgatcaaagttagacacgaaaatttatagttgcatttaanatataaccgaggaagtggaagagaaataataatgcttcagtaaataccccatcttggcctgttcatgtacttggctttccattatgat

SEQ ID NO: 12938 - DNA, 446 bp, Oryza sativa
  unsure (1)..(446): unsure at all n locations
agcttagcaagtgtgagttcttggtgtccttattctaattcttatggcacgtgatatctgctaaaggagttgcggtggaccccgaaacagtgaccgctgtcactgattggaagcaacccaagacagttactcaggttcgcaactttttgggtttggcaggatactaccggaggttcatcgaaaacttctccaaaatcgctcgacccatgacacagttgttgaagaaagaggaaaaatttgtgtggagcccgcaatgcaagaaggcgttccaaactctcaaggaaaagctggtttccttgccagttttaatcttaccggatactcgcaaggacttcatggtgtgctgtgatgcttcgcgccaaggattgtggtgcgtgctcatgctggaagacatgtggtacctatgcctcanccagctacggnctatgaaagagctccctaccatg

SEQ ID NO: 12939 - DNA, 435 bp, Oryza sativa
  unsure (1)..(435): unsure at all n locations
agcttcatatgagtaccatatcttanaatattattaattcgttttttgatactcacggctcccatacaagtttaccgtggtagagaatggttattgtgaaacaaacataggttgacttatgtagattagaattctaaaataaatcaataaaacataattagcttataatgataaaatattgtactcttcaattaccacacttatatactccctccatcccaaaatataaggcacaaccacttttctcttatatctcataatataaggcgtgtatgcatgcatacatttattagcacctcttggccaatagaattgatttgtttaaatcctataccatcaacctcccaatcacattgttngcatgcatcaagatgatccaaccaagaagatgagtacatgttatcttggtctttgtgtatgaatggtgagccttat

SEQ ID NO: 12940 - DNA, 275 bp, Oryza sativa
acatactaagcttaggtcactcgctgacggcagcgcataccggcgtttgagctccgggcctctcttctacgcatgcgggtacttcgtcgctgctacttgctgtgttttcgtgggcttcgcgatggctggttctgttagctatggcgtgctgcctcgtgagccatcggatggtttggacggtggatgagtgctgaaggcacgcgcgtgcagtcgccccgtgaaggcagacgatcctgatccgcatggcactgatacaacagcgcaagcagtccggt

SEQ ID NO: 12941 - DNA, 304 bp, Oryza sativa
actgttcgcccttattcggctataaaacatatctatgcaggactcctggaaaaattcaaaacattggtcaaaacgcttcatattcttcttccttctgatctgacaatattattgggtgcatcggcagacaagcttacacgaagcgaagactcgatgctctttgactacatcttatacatcaatgcttttgtggatgttaacaaagcagcctctgcgtggccaaaatagctatcttattactcgctgccaattaatgtatgaggttgcaactttgtgatatcttcataataaatttttcaattat

SEQ ID NO: 12942 - DNA, 487 bp, Oryza sativa
  unsure (1)..(487): unsure at all n locations
tcttacagcacctgcggcatgcaagcttcgaatgaccaggcacattcatagcatgtgctacagatgcatcttctctacccaacttttgcctgtcaatagtgtctggacaatcaggaactggtattgaacatccacctgaattcccatttgctgttggtacagaatatntatcttgattccttgctggaaattgatctttcccccttgtcatctctgactgaatagttctctcatcactgcctggccagctatatgtccccggcctcacatctgtgtttccacctgtgcaagaaagcttcacagggtggccctgtcgactgatgggatcacgccgctgatttggaaacatgtttgctggaaattgagaactataaggtacatttggtgtangcacaggctgttcttgcaggttgtatgcaaaanaataccttctgcagttcatacaacagacagtagtatttatggcattngtgtagtactgatatcg

SEQ ID NO: 12943 - DNA, 538 bp, Oryza sativa
  unsure (1)..(538): unsure at all n locations
tcggtatggcgtcatgcttatggctatacttgtaaagtgaccaccaccctcctcgccatgcttatggctatactttgtaaagtgaccaccaccctcctcttcttttgtagttaaccatctactatcgaagaagaagaagagaatatttatattaactagagaaaatgcctgtgcgttgcgacaggtggatgctattntaatcttattattgntatacaatttaattaaggtgaatattactgtggaaattcgcttaaatcatgagctgtaattagagtctgatcgtctcaagctagtatgtgagtttttaaaagagattcctatatgactcttctgcattccaaaagcanatgtcttaataaacgactcanatacggatatatatntccataagtgaatgaacttgataaccaactcatacacatatgacataccanagcactgggtaaaacatcttcaaagataaatggccagtgcgtgcgatggggtggatgctatttaatctttatattgtacacgttaattangggtaattact

SEQ ID NO: 12944 - DNA, 466 bp, Oryza sativa
  unsure (1)..(466): unsure at all n locations
agcttatntattgtgctntgaatgctacttattttcttataattacactcgcaacatataaattctaaaataaaattacttaagatcatgcagttttgaatttatgagaaaaaaaatatgttgaaacaatggaggcggttcctatgagaaaatttatggtattttgactcccagaagaatatctcacaaccccaaaagaaatccaataataacattgttttattgtaagttttatatattttcgtcctaacagtcctcgtaaaacattttatttttcctatttataatgggttttaaatccagcaacattttagcaattttcaatatatttcatgtcctctttttgagatttccattctatgaatcaccattgaaatgctttgatctttgcaatttgggtcgaaaatataaatcgcattatggcatggtgtaaaggaaaatgttntgaatattctctcgacatatt

SEQ ID NO: 12945 - DNA, 269 bp, Oryza sativa
  unsure (1)..(269): unsure at all n locations
cactacttatcctcttcanatctgctggtgcataatcaactagtattaaaggaaagcacttgggtatcctatatgtttacctttctctctcaaacatttagataggtcatatgggtttgacaccagtttacttggtcaagttataatcattggttaaatatctaggtgctgacactatagtaactacgtccattacctcataacttaacctttttttcacttacaaaaatatttcatgcatcagaatttcattgtcaagtaatattatt

SEQ ID NO: 12946 - DNA, 462 bp, Oryza sativa
  unsure (1)..(462): unsure at all n locations
tactcagcttgcagtatgatataagagtanggtgagaagtgtgataatatcgagttgctgtggatctanggttggatgaagtctgttatgtggttgggctatgggtatagccggtagcgctgtacaaccaaagttgtatatttcgatctcttggtattgtagttgtaagtgtcacacagctggagttcaactgtaccaaacatcttgtagattnttgtcgcgttgattcatatntcaattgagttatttntaagtcattttttgtatggttacgtacaatataaacaaaggcttataggatcgcacgtaacatgttgtatgggtatgtgaaccaaccgtttgtgtgtaatagatccgctaatcaatattaaatgtagtcttcgcttagctaagctcctcgacatacatatacatgatatagtgatacatactaccacataaattccattttcttttttgcac

SEQ ID NO: 12947 - DNA, 274 bp, Oryza sativa
ctcgcctataaggcccgcgcgctaccctatggtttcgtgttcacctcactcgaaccacctcagccatatgttgacagtcgccagctgttcgcccccgcgactggcttcttgctgacgagctgtgtcaatggtcagtgtgagcctcttatgtacgtctcttcaagctaggtgctcgcactgcccgggccaagagcgtgtgcatgcacactatatgctttcagcctgcttgccttccttcttagcccgggcgcgccctctcggtgccgcgcctccc

SEQ ID NO: 12948 - DNA, 245 bp, Oryza sativa
  unsure (1)..(245): unsure at all n locations
gcttcgatgactatgtgtcagtcccgtgccaacacgatggaatggctagtgccacaccggcgcggcgntcaacgccaccacnggttgctacaggaagatcatcggcgtacgatggtactcgggcgggattcccgacgagaacctgaagggcgagtacatgtcggcgagggacctcggcggccacggcacgcacgtcgcctcgacgatcgtcggcgggcatgtacagaacgtgagccacagacagg

SEQ ID NO: 12949 - DNA, 426 bp, Oryza sativa
  unsure (1)..(426): unsure at all n locations
agctcgctatactaccattgtgtcattntatattcataaatgccagttcaggtacctgtgccatagntgtacatatttgttcctttgtgtctgctcatataaatttggatgcttctcacattggcataagtcctttggataatattggtttgagactgcctcgaccagatccatctattgctacggaagcacgcaagaagcgtaaagtcacaatggttttaaggagaggacataagttacccatatccaatattttctccttcaactaactggcttatttgttgcttccattggttcctacatttctatttgatttcgttcagcaagtgctgattcgaccaatctatagctcctcaatttgggattggtacattaggagctggacctgatgatttctcatcttcatatccatgtgtcaacgatgta

SEQ ID NO: 12950 - DNA, 410 bp, Oryza sativa
  unsure (1)..(410): unsure at all n locations
ggaagtgtgtgagtgaagtgagggagtgatgtctctacatataagtangtgtacagttggtgaaagggaaatttccaaagtgccctccaaccgtcatcaaagatgcatctgggacatccacgccaaaccccacatataacggtgaggatggtgggtcgaccaaacctgtgctgggcccatctggccttggctttggcccatgtcctccactggtccctctctatccattcttttggatttatggctgattctctagagctttgatgaagttcacaacccatccttgtatggatacataattctcctcactttactctaanatttctcctaacctcaggggttatcacctgcatacacatatacactaacacttgtggaatatgtgagattatttaacacctatcactatg

SEQ ID NO: 12951 - DNA, 432 bp, Oryza sativa
gttcgctgcaccttgttgcccgcgtgttctcttctgtccaacggaggggtgactaccactagcctcctcctactggttaccctccacattcctttacacagtgcccctgctggcttccctccgcatacctatgcacgttccctatactcgttcaaatactggattggatcctctgtcccctctattttatatcagtactggctgcttccctccgcgattgtatcgacaatatctgttcctcatcgctgtcagccatctgttgatacaagaaacatctgctaagtcaccagacatttatgttgtaacaatctaagtcatgtatgctaaatggaaatgttctacattagaaccctcacaaccttacgtgctaagtctaattacataacgagagataagctaagcttagtgacgtatattaacaaccctagctag

SEQ ID NO: 12952 - DNA, 314 bp, Oryza sativa
  unsure (1)..(314): unsure at all n locations
cgacctatgatactcagcttcgtggttatgcgggcacatgctccttgtcgtgttttgggcgcaacgactttgagagcttaagctaaagctcttcttctatctnctaatcaatttcaaatcctaattgtcggatgctcacgccgagtcggttcacgagaaccctaacctgcgacgccggtcactctcactttccggctcagatttgccacacagatgatttgacagtctcgccaattcgccgtacgtgtttcgctttcgagctatccgcgtcgtctggttcatggcacctcccacgcatcgaccgatcgatcgat

SEQ ID NO: 12953 - DNA, 397 bp, Oryza sativa
agcttttagcatgatcatactcaatggttccttccatgtatactactataactcataagaagcatatcgcaacttcattgcgcaaaaacataaatggtgaaaataaatggcaatatctaaagaagatgtgcggcaacaaaacagacatagcatataaagcataacacatttagtgaacggcaaacggaacttcccacataaaggagtatctgaatacaagcttgccagaagaagattgttcctaaatggccatttgaggggagtttgtttcaacagtaatatgacgggagcaaacaggaactaccggtaactttcattcttgatactccctctgtcccaaaatataacttctagcattaaaaatttgtctcaaaatataacaaattcacctacattc

SEQ ID NO: 12954 - DNA, 435 bp, Oryza sativa
  unsure (1)..(435): unsure at all n locations
tagcgaccttagatactcagctagatatgtnacatatgtgaattattggtctgtagnttttcttttataataagaataccttgcatgatgttcacacgtgaatgagcgtatgtgattgattcatatcaaattctcaatcatgcatactagtacaatgtttgagttgaggatactgggttatgttcttcaagttnttatactatatatgggctacttaattagttgatattgggcacaaatgtggcatttatgtccaatagaaggttcccatatgttgctagcggatgattagaagccgttataataaaattatgcagaaaacttatatatatgtgtgtgttgtaacgactaaatcaatatataaatatactaccttataacatanaatcaatttaaagattagtttaaaattaaatatagcaggactatcaatat

SEQ ID NO: 12955 - DNA, 312 bp, Oryza sativa
agcttcccgggtgaagttgtagatctggcgattgttctgccagtagctgtagtaggggttgggccagtagatgctggacatctcatggatgtcgtacaccagcgacagcatggcgtattctctgaagcggaagctgtataagcccgcggtgaggagcttgtctgccgagaccatcgtctcgccggcggcgatgcgctgcgtatgcagtagtgtgtcggtggggtggtctaatctctgccataggacgttcccgctcgcgttctcgacggcgagggtgccggaatttgcatccatctctcgcagctttgcggt

SEQ ID NO: 12956 - DNA, 452 bp, Oryza sativa
  unsure (1)..(452): unsure at all n locations
agcttgacgacgaactggcccgaacactctattcttgtaatgttttgctcgntgaaccagactaacttagattgtgtgctctctctttggttgcaagtgaggacgcaaggcagctgctgagtgattgtgtggcggcacacctgcgccacaaagatgtcgctctggagtatggttctcggctgcagtcctctggtgggaggatattgctccagagcttgtcaggtgctgtgtgcaaatgaggttgaattnttcgctaatatgtgtgtcttattaatcggatgttggaatgctgttatttttgtttctataatgcaggaactgagctctaccgggagagattggtaaaagcacttgcccatgagctacgcgtgccactgttggttttggacagcagtgttctagctccatatgtaagaattccnnctcattatgtgnactaagtattagataat

SEQ ID NO: 12957 - DNA, 501 bp, Oryza sativa
  unsure (1)..(501): unsure at all n locations
tgccctacactgccgtatangtgtctggtccatattacaactctgcaagtganaatacaatattgtcctcggngacctcgattcacatgtgcaagagatgatcaaataatgctcatcaattattgaccaaggcatggttcacataattaaattaaacagagaagcttattgctagagggtgttttcactgtacgtattctactgctgtagcttgtaaaaatgctagtagaaacgatataagatgttgatctaccataagttntatttaccagacaattattntctatatgatggtgatctccgatataaaatgtcggtgcgtgggggggtntttttcttntcttgatatagcttctaggactatattttgtttcgaactgtacataccgtcacagtttcttagtganactgcanattattgaccatcatccgtctanaattgaccanatatttactatcgatctnactctctttcagaactagtccatcatctatgttatg

SEQ ID NO: 12958 - DNA, 333 bp, Oryza sativa
  unsure (1)..(333): unsure at all n locations
agcttgcacaagactacaacaccaggtgtgattatagctggtgcgacgnccctgcaaagccatcagtcttagaagatatgctcgtgctacatgccgatcagatntactggcctttataacaaatgtcttatgtgctaaccagaacgacgagtcacagcacgatgtgttggctggcgcgattccgctggctgatttttaacatacacctgagggagagttaacggacttgatgcgaaccttgacactggagacagagatctagctctaggagactctgtccttggggacatatgacctggaacatgtgagctttccatgatgagaacattttga

SEQ ID NO: 12959 - DNA, 453 bp, Oryza sativa
  unsure (1)..(453): unsure at all n locations
agctngngtctaggaactcgtcgacccgacatgatgcttatcgttcatgccatagacgtcgtccctagccagggtgctgctatccacattgcaatcgcaccacacgatgacggtgacaacctggccggccatcgccatgcacctctcctctcttgctccacaagtaattcacaacccgtggcgaaaagctcaaccggtgtgacgctcctcgagtgcggcgctggtatggtgatttgatttgatttgttggttgtgggtgtccttttttgtcccttgagctacttgttctcgttggtgatcttcgtccatgacgacgaggatgcagagaaggagttgtggtcgcacgttgcagtggatgtgcttgccgacagcgttggaagtagagggtcgatgcagccggagggaatgcgatgtcactcgctatcaacgctgaagcacgtggcacgccacact

SEQ ID NO: 12960 - DNA, 445 bp, Oryza sativa
gactcaagagggtggaacattggtgtgcctagcttgtctgggtagcagcccgcaagaaagccttggtcagcaccatctaagttgtcacggcccatctctcatgaagaatgcccttgaatacatccatccatagaagattgcaaatcggaaatgttacccgatgtcaaattacttgtttggcaccacagatgtgtgagcagaaaatatattcaggtgtgttaacattgaacgattatttaataatgatctgctattgcttcaataaaaaatgatctgctattgcataatttctgtcagataggattattgtactattgtattctaatgaatatggaaggaaatatccagcctgtgaccctgccatgattattcgagtaaacacattcactatacagaatggcagaatacaactcatatttcattagaccactccaatagtcaattg

SEQ ID NO: 12961 - DNA, 407 bp, Oryza sativa
  unsure (1)..(407): unsure at all n locations
gtccccttctatatcattctacccctntcaattcattaccacaggagacatgcagtactgagtaaatttgcaggaatcatggtaatacatctcgcatgctttattagtgtcttttcttcatacagnttcatgacttggtgtcaatcgctatgcactaatgcttttcgttgaaccatgcacttattgcattactgcattgcaaatattaacaacagctgctcttcacattactatcgatatttgattagatntatatcctcagggtaatttatgccttacanaccaatcagacaagacagtggcccttttgagtattttatcaccaagcgtactgatgaagagaaatatgtcttgtcaatggatacagaaaagtggtagtgttcacttgtatttatgttggtgtatac

SEQ ID NO: 12962 - DNA, 393 bp, Oryza sativa
  unsure (1)..(393): unsure at all n locations
attctggtttggttctgagctctatttatccatgaactcgaatatcanttgcttctccttgaacttactaaatcatctcactgttgacacccatttcctctctttcttcaggtcttgtgcgcctgatgntntgagaataggtgggatttgagaagttacatttctttgagtctagtaatacagcccttaaccagttatcctggtgacataatttatgcacatgtattgttntcccanaaaatctttgtagtgtaacgtagtaattcacanagcagagtacataatatgcttgacgagagttcagttanagaatgagcatacatatgtctacaaactaaccacccattcgtggcaggactatattacattggatattgggcatatccacttact

SEQ ID NO: 12963 - DNA, 356 bp, Oryza sativa
  unsure (1)..(356): unsure at all n locations
gctactatgctgcatatctcaaagatacaagggcaaggtatatgtactctctctcagaataacaagatctatggcacaggggcttacccttaccccctgattccacgagacactgcttcttattgccttgggcggttgcaaaacagaacccgactagagcactgatcacccgatctttattcaactcttattccggaaggttcaaatgattttggaaaaggaaaccaagttcctcgatagattcactcagtcgctctanatgtatcaatttgaattccccaccacaatgtgcctctgtgattcctactctaacgatttgatatgtggagcctggtagagatcacacatggcatacc

SEQ ID NO: 12964 - DNA, 310 bp, Oryza sativa
gggacctgtaagtctgaaccatttggttgctctatccttaagcctgttgtttctaataatcgacataaggaaacaaagatctttgattattttgtagagtataagcaaaacgaattttcacaaggccagttcataccgccgctagaggagttaaagtgacgagcatattgtaagtggcacaattcatattctcatgccactaatgatagctacatattcagaagacaagttcaactggccattgatgaaggacggttggagtttgtggctatgcaaggagatgaagaaccttttcctatacacaccattg

SEQ ID NO: 12965 - DNA, 330 bp, Oryza sativa
tctacattgccgtccaagctcgctctttctcggcttctgtgaccttcccgatatctttatggaggatcccgaagttctcacgtgccgctagcccgcagcagttagaccatctctcaatgacagttctgggcgccgtgggtctaccactagcatcaacctttcttataacttgcactgtggtctgccatatatttagtgaccgcggattgctactaaacctacttgcacttgtctaggccgacatcgacgtatgttggtcctgcggcaattctgcaacacatacagaaggcaatatatgctaatgggtgctagctaaatatatgtggcatg

SEQ ID NO: 12966 - DNA, 286 bp, Oryza sativa
gtaattaactggaaaacagttttaaattataaatgattctctcttgcattgattcccacaatgattgcgttaacacttgtcgatagcatgcccaactggggcgactagattccaactgcttaggaatagtcgcataggacaaagtacgataaattctgtagacttgcatataaacgacaaatattattttgttgatattcataactacactggtctcgcctcacagcccgtgtagatggcaagccctctggaacaacgagctgagagacctaccgttgcttgctaa

SEQ ID NO: 12967 - DNA, 311 bp, Oryza sativa
  unsure (1)..(311): unsure at all n locations
tcagctatactagatgtcacccttcgttaattgaatatacaatccttgtagttctcatattgcagagcctagaagatggaatgtgctctctttacacatatatatatatatatgcacacctgtntttcttctatatatatagaagatacaggctctttatactttgggtgggcttgatttttctccacgtgtggaaaaatcaatcgatgctccgagaaatgactccacagcaattacaacagtcatatagttggtatgtctcccaatacattgacgcnntcccttatatgttggagaattggctcactaca

SEQ ID NO: 12968 - DNA, 316 bp, Oryza sativa
gagctttattgcatacggccttatatggcatctttgcatgctggtgccccaaccgcatgtgccataagagctgcaaaagtcaagctcttggcatgtggattatcgcatgcggccgcttataccggccgcatgcgaaaataaaatcagccaaaaaaaataaaaatataaaaatcccaaaccctagcccatcgtcgacactggatccgttattaccgccgtccgccatcgttaccgccaccggatcggtcgccccagccgtccttggcaccggatccgcatggggcggggcccttgatgcggcagagccacacccgtc

SEQ ID NO: 12969 - DNA, 198 bp, Oryza sativa
  unsure (1)..(198): unsure at all n locations
tcgatccatcgaaataaggagataatntcctncacaaggacgaacaagatagatctaactggggacctatcaagaatcaaaacccacagatcgtaatggacacacactcacacacacacacacaagattctagaacatgagccatattaacacacatgcacagtactcaaccaaattaaaaacctacaatggcaagat

SEQ ID NO: 12970 - DNA, 265 bp, Oryza sativa
  unsure (1)..(265): unsure at all n locations
tacggatgtgcagtgcgtcactggatgcatggctgtcctgagtcngtttatatctacgctgagcgagagggcgctgaccctattcaagctcctcaagcgctcctggccgattgtatggactgaggaagctgagcatgctctcaatcagctgatagctgacctcacgttcccctcatcttggtagcctcgggaccggaggaaccattgctactctacttggccgcgaccncccatgtggtgagtgccgccctagtagttgagcatg

SEQ ID NO: 12971 - DNA, 232 bp, Oryza sativa
  unsure (1)..(232): unsure at all n locations
tatactagagaaattcccttaagttttgaagtttaggattgatgtttgtgacaacattnttctacacantttatgggtacaaggcttagtatattataatgctatcataaaaaacacctactttgtagaacacattaccgagactatgtgaaatatgtgaaacaaatatgctatgccctacacgctacattacatgtgcattaactaaatgtggcacgcaatcatgcatatg

SEQ ID NO: 12972 - DNA, 372 bp, Oryza sativa
agcttcttatgagaatttgcctcgtatgattttcacctttgcccagaggtataataatacttactatgacctacatacatttacatctgctgatgatcgatcaaatagtgtgctgcaaagagcctctttctcattgggtgcttgcatcaatgcttttgtgcattggcgacctgttctatgcatagatggaactattatgacaggtaaatactgagggcagatattgacagctattgtgtgtgatgggaacaaccaggttctacctatggcttttgcatttgtagagagtgagaacactgaaagctggtactggttcctatagaaagtgcacattgcattggtgcgtatgaggctcacacgttgccttataca

SEQ ID NO: 12973 - DNA, 442 bp, Oryza sativa
  unsure (1)..(442): unsure at all n locations
agcttgtcatcaatngctgttgcattctctgtttcgtgcattattcggtcagagttgttcttcaaggtttggatgacaacaattagattcccaatatttttattcaagtagtttttgtgaagttatacctgatgctctttctttgttgtgtcttctcacggtatccaagtaaaaccatgggctaaatccttttcaacttcgttgacaaagaaacaatattttcagattactctggtcttagtcttgttgatccatgagctatttcacaaacaaactcaaggtctcaagctgggtagttcaattatgaaccacacatatacatgtaactaaaataatagntttgcagaagccatacagctgtttggcgctacttagagatccaacttatgacttagattttcacatcctccagttaccacagatgcaatatcgagatctatac

SEQ ID NO: 12974 - DNA, 119 bp, Oryza sativa
  unsure (1)..(119): unsure at all n locations
tctcagctcgaaaggatggctcaaagcagagagtctactcaccacatgatgtctcttgttntaaatactggtcatttctcaactatggtgtgttctttgaactgcgtgttgatgttata

SEQ ID NO: 12975 - DNA, 383 bp, Oryza sativa
ggctgataagcataaaagcataagcaaaaaaaatgagaccatatggctctacataattaaagcttatgatattgctggtataaaaagaccagtcaagaagcgaaatgcaagtaaccacgaaagtgaactattttaatagttcaagggttaaattagctgcaaaataatttatggggttaagtgattcaatgagatagtttgggggagagaattggactctatgtttgtctttctctcttatcacaaagtgaaccaagtagcacagcatgtaagtaaagcttggtcctatataaattaagcatgtaagtgtgtacgtgtacgagatgcaatcactcgtatatagggtatcttcctgagaaggagagagaaaagaatggttattc

SEQ ID NO: 12976 - DNA, 220 bp, Oryza sativa
  unsure (1)..(220): unsure at all n locations
cacatgggcagcctattctcatgtatattaacaactattatcgcaaatggatttttttatatggaatatataacaaacttcatgagattgcacctctgttgcacccgtatgatggccaagaatgcatttntcaacatgtcggntacgcagctgaaacaataaaaaatccaaaagtctgaactttctgcattcgggaattgtcaatatgaatatactactt

SEQ ID NO: 12977 - DNA, 348 bp, Oryza sativa
atgaagcttgaacttggatgaatgcaaatactgtttaaaaaaattcgtggttcatactataaacgcgctctccttgagaaatgggaacatctaaaacaaggtgacaaaactgttagggagtactttcatgattttaaaatttgtatcacttatagtggtttacaagaatctaatgagaacacaatgactagattctttagagggcttaatttcaatattcaagctgggcttgttaatgtgacatataatcatataggccaactggtcatgcttgcttgcattgttgagcgcaaaaatttggagaatccaacggagcaacaagatatgcttgtgcctcctatcactgat

SEQ ID NO: 12978 - DNA, 177 bp, Oryza sativa
  unsure (1)..(177): unsure at all n locations
gtattggactatgcactttggcgggtcgaagagactttcgggcactgtggctgggggtgntttaatttccccgactggagaaagattgagctacgtgttgtgaatacacttttctgcatctcacaacgtggcagaatatgatgcgcttcttcacggactacggattgcaatctcttt

SEQ ID NO: 12979 - DNA, 398 bp, Oryza sativa
gcaagtgctaacaactaggtgctctgtaaacaaccataccattacttacctgtcttgagtaaagagttgggataagactttgaacatgggaatgcacaggaacagcttgaggggcaaaaagaacaagctgctgagccaatctaactgatctgctgttttcaataaatgttatataaattccataactaaaaatactctataattgcatcaaaatctgtgcaaccaactgcttgttaaattaaacaaaggctagctgtttatgtcaaattacatactctataagcgtagccgtttcacttgaggaacttatctctgcgatgacacactgatattttaaatatttgttatgtggaccaacttctgaagacatcaaagtaagggaataggttcgagccctt

SEQ ID NO: 12980 - DNA, 238 bp, Oryza sativa
  unsure (1)..(238): unsure at all n locations
atcataataccacaaggaacctgatttgacagtgggaaaagagaatatggntgaaagggatcaatggagcgganggaacatggacataaatcaatagaggctcttgaggagaaataaggngatgttatctatgtaacacatcgattnnttagttctctttgtgccatacgtgtcatctgatgattatatgttcctttattgactagaatggatgttagctaatagacaacaacagggg

SEQ ID NO: 12981 - DNA, 348 bp, Oryza sativa
tcagaactatcggaagatgcaatttgttgttcctccatttgatcacctgagtatggcaatcattgtcgccaccacatcgattagtattttgcgctctccaacactttgaagcggatattgtgaatgatcagagctgtgttgatgagccggatacacgcactcctcttcgtctctaacaaatataacagctgttaatatatattaaaaatatatatattaacggttttattgttactttgatttatcgtctaatgttatctaagtatgacttagtactttcatatatgcacaaatatatattacacagtaatccctccgctgatcattcagcttactgtataaaaatta

SEQ ID NO: 12982 - DNA, 430 bp, Oryza sativa
  unsure (1)..(430): unsure at all n locations
gccctcgcctcgcctcgataggntccatcattcatgcggntcccggtttttataactgcatctagcagcttcaaaagaaggttgctgcttcttaactcttcacaggctgcctgaaagatttctgaaggaatattacattttactccanaataattgagaattcagaagtttgataagtgatctatttgattntnntttttttggggacagatcacgggtgagaaacttagaatgtgtggcatatcttttgtgaagcatgataacacctatcttaaatntaccatttttaagagaagagaataatatctaaaccagtggtaattgatataattgganggtaaatggaggaagtattgaagcttcatggaatgatagatcatcatagctatttacctccaatgtccanaagaattcttatataatcacttca

SEQ ID NO: 12983 - DNA, 434 bp, Oryza sativa
agcttggctcggcttgaatactatacgagcttatctcgagctgcctccatggctcgcttctaaaacgagccgagcccaagctgctcgcaagccgctcgtgaagctagtcgagcttgtgcaaaaaaatggcctggcccattaacatgctgattggcccatgaaaaaccctaacctcaccgttcctctcccactcccttgtcatttccttccctagaccccttctcacgccgtcagcccatcacaccgagttcaccgcctttcaacgcgcgtgcgcgacaggcgacactgcttgaggcctaaggcgcgaccgcgcgaggctccctgcgccacctttctctcctgtgctttccttcccagcactgctcgacgctccctgcgccgacctttcctgactcgaacgtgttcatcaccttaccgagacaccaacccaccga

SEQ ID NO: 12984 - DNA, 103 bp, Oryza sativa
caccatgaatgggttggctagccactctggatggagtacctctctgatgaaaccagccttaagaagattatcgagctcttctcgtatggcatgtgtccgatct

SEQ ID NO: 12985 - DNA, 421 bp, Oryza sativa
  unsure (1)..(421): unsure at all n locations
agcttcgtcgnctccttgtctcctcctccttcttcttcttgattgagcttcgcaagttctctaggttggcgagcagcatagccttcgccctctcccaatacttaaaaatgcccatgatgaacatgaaagaggagacccagatcatcgtacctaacccacttctgaggactatattcttgtacatggcaaatactgctcctgatacctgcaagatcatttctacgttctggcgcgtcgacagaacattgtcctccaaggagtaggcggtgatgttgtccggaccagcggcatggagcagcaggaacgccccccagagcgtcaccagctccagctccagctcctgcgtcgtgctgccgagggcgagcttgctgagcgcgtacgtcgcggcccaccggcccagctggttctgcgccacaggatg

SEQ ID NO: 12986 - DNA, 77 bp, Oryza sativa
cgtcactgtgtcagtcacttataaatgcatatacatgttattagactagcatatattggtgaatcaatagttcatga

SEQ ID NO: 12987 - DNA, 159 bp, Oryza sativa
tgggttggttatccagggctggaagggaaggagctgacggtctctggaatgaaaggagcctgcattgcacctggccctgccccaaaaaaacgctatacgggcaactggactgctgaacgatgattggcgctgtggtcaggaacacactgacattggtct

SEQ ID NO: 12988 - DNA, 496 bp, Oryza sativa
  unsure (1)..(496): unsure at all n locations
tactcagcttctccttacctttttttcacgaacgcaccaaagaattgcacgtcaatatattataagaatagagtttcgatacattctcctatacctagcanatatgaacatgtctttataaaaaaaaggtatccactggtttgtacgggtagtacgggttgaaacccctcttgttcccctgatcaccccttagacaatagtagttggttcgagcatgagagctctaatttggcactggagcggagctagaacgaaatggaagagggtgcctcttgcttaatatactctactctatatcaagtttaagctgatgggtgtgctaaatntgatatgggggtgatatatggngaaatcggagtataacttttttactgggtcctaagacccctccatacttattcgtcctggcatggacctatatcattatcctgtgtgcctgtgcctgggactctgctggggacatcttaaatcttctggtaatttgaactttgtaatc

SEQ ID NO: 12989 - DNA, 438 bp, Oryza sativa
  unsure (1)..(438): unsure at all n locations
agctnggntngagttgttnttatattctaataaatattngntactggaatcgctccattttcgtatttgaaaatatttgattatgttctttatgtggggcttctgattccaattaaaaaaatgaaaataaaaatggtatgatggtttccgttcgttttcgagccgtttcatccctaattgcacatgcatgcgcggaacaatggatctcactaatcaagtcgcacgcagttctttatatcttgttgattatggcttgtgaagcatagattcaccgaattaattgggatgctaaattagtcacatgcatacccaagcttgcatatgacgttatgtagatagagatggccaatataatgcgctggagagtccaaagtgaggatgcacaacatcttatagtgggtagtggagccatgcaaggacctgttctaaagcgcacct

SEQ ID NO: 12990 - DNA, 141 bp, Oryza sativa
cagctgcacatgcattttataactcttgtcttttcaacttgttttgtccagatcgaccaaatgtgcctgaaatacctgctatataatggaggggatatcaaaaccaatcattctttctatacctttgccatgtatactatc

SEQ ID NO: 12991 - DNA, 427 bp, Oryza sativa
  unsure (1)..(427): unsure at all n locations
agcttcactcctcttaacattngaaactttattttttattttcggtcaatgaaaccccactctcttaagcaaccaatttatcttacgggccgattgatgaatttaacgaatcccttcatgtactactctcctagcaactttagattgatcattatctaagtaatactccatctagttttcggcgatataatatttgaacgcttgccgtcgaatcttccgatcaaccttaagtgtacgatctttcaaatatataatcaaaggaattctccaagctatttctaactcatgggcacaaatgtccgaattcacaattaattcggccttttaatcaattgtaacgtgccccccagtctcctgtctaggatcggtcagaccggtcatgcaatgccggacagaccgccctgtatgcccagtcagaccgtgcatg

SEQ ID NO: 12992 - DNA, 425 bp, Oryza sativa
  unsure (1)..(425): unsure at all n locations
agcttatcctcaaagtccttcagganattgatctttacctatttgacggatcagagcaaaccaattagaatgtgaagttagttatacttataccatgagacaacagtaaaagattatctcctttntacctccggtcggtagttgatggctaaaacaacttctgttactccaacttctttcaaggcctcaatctgcataaatcggaaaacttttaattcagagctcattactctcctcaatcctcatgctcatgtttgctggagccaacattttggatataaatcaagtactcttgataaccgattggaattttcgaggacagagaagatttggtgtgataccaaaagagttttccaaaatcatgtaaccaaattgataactaaggaaagaaacaatcgaatagtaaaaaggtgcattcaatcaca

SEQ ID NO: 12993 - DNA, 463 bp, Oryza sativa
  unsure (1)..(463): unsure at all n locations
agctttgatcacccaacagacacaatactgtgtgtgcagagatttgtgatcaataagatcaccggcgaataccaggatcgtgtctcttggaaagatccagaagatcctgcaccaggtcctttctccaaccatgttgatctaattagattgaaccaatatgtctctctctggaatcaatctaaagcttattggcagtctgggaactggacaggacaagcattcacatcgatccctggaatgccactaaatactgaatacaattatgttttcattaataatagccaccagctcacagttatatacaccacaaaggatgtatccataatcacaagaatagttcttaccgataacggtcaactcccatgccatacatggtctcacatatcagaggaatggatagtacaatggtctctacctgcagctctgtgtgctgtntatcactctgcggccttttggagctgct

SEQ ID NO: 12994 - DNA, 295 bp, Oryza sativa
actagctgcttaccctgtccggctgctgatcaagactacctgctttaatatatatatatagtcctcgcctgaaatggaagatgaaatgggttgctgtccaccgcccggggtgggtaaccgtgtcctgtgtgtgtgggtcgctctcggtcgcgtgatttcgctgctgactgcactagtaagaatagtcttttattaagatgttgatctattgcccgggtccacctatgctggctgtccaatccggtttagagcgtccgcgttctacaacctctgtaggcgtgacgcgataatgggg

SEQ ID NO: 12995 - DNA, 395 bp, Oryza sativa
tataaatccttatacactttggcgatatatagactcttagtttggttaaaaaatatgatggctgagcgaaagattccatttaggtcttaaatttaaactgctccatccttttctaggtatatgatcggttgagaaagcctaagtattaaaataaatgctctggatacaaatttaactattataaatgtttttatttagcaaccaggaagtagtttgtaaccaacgtgtgtgctacgtattatgtgtagcccaagcagctacttttagctttgtaagtaatgtattatctaaatttgtatttcattccgtatccaaatacatagccagaaatgtatatattgtacgatgaagagagtaattattggagtaatagcacgcagttatcaacttggcta

SEQ ID NO: 12996 - DNA, 459 bp, Oryza sativa
cctgttcagcctcatggctgagcattcaaaggcgctcgacctctctccgagtgtgagtggcgacgacggtgagccgaacccacgccgtcgagctcgtactccgccgtcccctccacgccaaagtcctatgcgggagaaggcgcccgagagggctgaaggatccgcgacttcgacatccacaggaggtggaaaagggcggcgagatggggagcgtcgcctcctcgtctatggtgacggcagcacgccccagggcgcgctccaagctgcgggcgcgctcctacgtcacccgcctgtcgcccatgacccggagtctccagcccaacgttggctggacgatgtggccaaattggtcatgactgcgcggcagcgcctatatgctggtgggcggtcctccgccaccaaggcctctggtgctgctaccaccggctccgcgtcgtcaagacggagggcacgacgagc

SEQ ID NO: 12997 - DNA, 347 bp, Oryza sativa
gcttgaaagacaccttcttttaatgcttatcagtccatcagctcaaatgctgtcaggcgtctggactacttcgcttgccattgcgagaatatctgcttgtttgcgccgagcaagttcttctcatcttcagccagactgaaactgaaattggtccacaaccacctcaagccccacttttcttcttgtagcatgtacgttcaagacctgatgattataatacatgcttctggtgagatcagaaaatggataatgtaccaaaaccggttgtattttcttttgtttaacattctggatatacagtataccaaaggattaaacgcatccaaaaaatgtatgacataccacat

SEQ ID NO: 12998 - DNA, 362 bp, Oryza sativa
  unsure (1)..(362): unsure at all n locations
aatctattggtngatcgacaaagatctatataaaatgggcccgaacgagatcctcaaatacgtttcgtccgacgacggcaaagcactgctcctcgacatccatgaaggtatatgcgggtcacacgccagcgggcgtacctatggtggaaaagctnttcgacaagtgttnttctggccgaccgccctcaaagatgctngcgacatggtgcaacgatatgaagcctgtcagttcttcagcatacacacgatagtgccaacccaagcactccagaccatccctctcactttggcatttgcatgctggnggctcgacatactcngaccgttcccacgaggactgngcggctacaaatttcttgtcg

SEQ ID NO: 12999 - DNA, 394 bp, Oryza sativa
agcttataagctacttctaatggatcctttctcatgtccataactgttctggagcggccgcaattgtcattatactcccgactattttctgtccatggagctgcgtcacctcttttggcccaatgggctgagtatccaagatgggcccattaggggcgcgtcctatggttggagcacgaccctatggtcgatcttcccctctttttatgcctctagtcgccgccaagaacaggcggagtttgatgatagagatagcttcttgctaccatctcgcagcgcgcgtattggctaaaccgcccgtctgcctgtaatcggaaccccaccatattgagtatgatagcgaaactttcatctttatctagcaacttcagagcttgtcctacttgttcttgca

SEQ ID NO: 13000 - DNA, 459 bp, Oryza sativa
  unsure (1)..(459): unsure at all n locations
tttcagaatcacattctgaggacatatgggtctatattgctttattgtattagcatccttaanttttggcagcagagaaatcaccctataatttatcctatcactgtctaaaattcctctctgaagatcatcaagcatctctttgatcaaacccctaaattcatgccatagtttcttatagaaacccactggataaccatcatgaccagnggcaagtattggtntcatactcttcatgacatgatcaatntcttgacaactcaaaggttcatcaagctttcattatccccctcattcanacttgacctgtcagcccataccccctggtcaaatgaatgttctcaattcttcctccaaacaactgctggaataatataaatatgagctgatttgtggaatctgaagaacctctccctgctgataagaaatgtgttttctattctacatagcatctatgga

SEQ ID NO: 13001 - DNA, 451 bp, Oryza sativa
agcttgaaaagtacaccacaccgggaaggctttattaatccatcagctcaaatgcggccgtccgtctggactactttgcttgtcattgcaagaatttctgcttgtttgcgccgagcaggttcttctcatctccagccaaactgaaactgaaattggtccacaaccacctcaagccccacttctcttcttgtagtatgtacgtccaagacctgatgattataatccatgcttctggtgagaacagaaaatggataatgtaccaaaaccggttgcatttttttttgtttcaacattcaagtatatacagtataccaaaaggatataaacgcagccaagaatatgtatgaacataccaacatatgccggctatcttgtcctatgtcctggcatcgaccttggaaccactgcattcaccaatagaacagtagacaccacaggccctgcacatacc

SEQ ID NO: 13002 - DNA, 309 bp, Oryza sativa
tctattgtttgatcgacaaagatctatataaaatgggcccgaacgagatcctcaaatacgtttcgtccgacgacgggcaagcactgctcctcgacatccatgaaggtatatgcgggtcacacgccagcgggcgtactatggttggaatagcttttcgacaagtgtttttctggccgatccgcctcaaagatgcttgcgacatggtgcaacgatatgaagcctgtcagttcttcaacatacacacgaagttgcaacccaagcactctaccatcctctcacttgccattgtatgctggggctcaatactcg

SEQ ID NO: 13003 - DNA, 446 bp, Oryza sativa
agcttcgatcgaactctgctcacatactattttattatgaatgagcttaattagtgactggttcctaatctctaacctagcataagccttgaaaggcacaccatcacaagcgacagtagaagctcttttttagtctttctccaatccctcatttcatctgaaacacatattgtagccatctctaagcttgtgccctcttttatccttcagcacattggacaggtccaataatgaatatctgcagtatttatgcagtatttactgtttctgacaaacttctactactatgcatgatatgtgctccctccgtctagtgctgtgtttagttcctgaaattggaagaaatttatggaaagttggtagtttggaaagaaagttgggagtttatgtgtgtagaaaagttatggatgtaatgtgatgtgatggaaagttgggagttgggggga

SEQ ID NO: 13004 - DNA, 274 bp, Oryza sativa
  unsure (1)..(274): unsure at all n locations
ttctacccataactattctcttactgccaacctcataagagatactatagttattctcgctcaaccctagattnttttttctataaaatctagaatgacaactatcatgggacggagagagactttaaaaatatagttataagtgtgaaccgcctcattttaaatgcacttgtggctttcaatggcaatggttgattgtccatctatctaannaatttntatgatcagtatttctattattattagatgaaaagatatgaataatatcttatgt

SEQ ID NO: 13005 - DNA, 432 bp, Oryza sativa
agcttgttcctcgacggatgcttcttttaatataataagtattcgagatctccttatggtatctaacttatttgcttgagtgagacatattcacatcgttatgggttcctcgcttagttgaattattaagtgctctagtactaggactctggataaagaaggaagttcctaacttcctatgcgaggctagagtagtaatcaataacttatgcatggtgtctaggttagcggttacattcatttgttgtgtggtccacggaaagtgaggtaggtgctaggtggtgacagctttgtccgtcctttacatccctccatgttcagttacatcatagagtcataggccgaactcagattgacagactaggggagagccagtgcccaaagcaatcgataggggtgtacctttaactccagtctagtaaattaacccat

SEQ ID NO: 13006 - DNA, 453 bp, Oryza sativa
  unsure (1)..(453): unsure at all n locations
gaccttagatactcagctgatctgatnctttccgtgaatcaattatttcatgataaatagtttgattcngccgagcaagccgatctctaatggataagagagtcattggtgaccgangcaaagatgatgtgccaaaaaaccggaggtggtgttggaagaaaataataggaacttaacttctaaaccccttgaagaccaaaggcctttgatatgctttgggaagacgagaacaaggtgggagaaactccaactatgggaaagccaagatacctctaggacaattggcattaccaacggtcgatacctaattaatgtctaaactgatgggtctatcatgcgcgcggtatctatctatactgctggggacacgcatgtcatatatctcatcaatatcagggggagactgagcatctgacttgttacacatggtgttatgagaccgccatgaaaaaa

SEQ ID NO: 13007 - DNA, 309 bp, Oryza sativa
aatatgaacatactggttaaagaatcattctggtatctacatattgacatatcttgtatcaacgtggtataacacttatctctcagtctgagcatagggaaatcgcaatgatcagaattcacaagatcactaccaatacacttatccaagtagtctctttcttcatatcatcactcgaactacatatgtcggaatatctcccatttaattaatgagaggcagtggcactgatagaaaaccaccctgactcgtacgaataactgttatggaatctgaaggcctatatgctcatgatgtgaagggcacttc

SEQ ID NO: 13008 - DNA, 329 bp, Oryza sativa
  unsure (1)..(329): unsure at all n locations
tgtactgacgtatatttctcttggtctgttataagtaattccctaaaatatttgctttgagacaataatgcataagaataattgcagtcataactcaagatattgcaatcggtttgggcttattgagtttgctttacataaccgactacttatcttcgtcctgtttcgttatctaattaatgtgattgatttactgaatcatggtgttgagggatattangaattacagctgagcattacagtgtcactgttctaatgcaataatgcaactgcattgttctctccagtcatnggacctcatggtgtgtatagtcacggatggtgactct

SEQ ID NO: 13009 - DNA, 391 bp, Oryza sativa
agcttactccattgtccgtggttatattatcttgtcttcaccaaaccggttcatgcattctctattctggagttaaatctaagcgaaatcttctgaaacaccatcaaatcttggacaaaaatttgtgcgaaatctgtgaagttggtaaagattccaggtctcctgctcccactctccttttcacgcagccgcagcagctaaaagccaaaaaaaaaaaagaaaagctagctgcacacactgacaagctcatcactccaccagccagcttgagctcgcccacttccgctcacaagaagcacaaccgcgagctaccacagcatctgatcgagggctagcggcggcggatgcggtggaatgggagggccactcggcgccatcatatgcatgcacc

SEQ ID NO: 13010 - DNA, 403 bp, Oryza sativa
agcttgagcctaggcatggataaagagatagactttggggtagatgtagcttgggttaggtcggttaaggcctaagaagaagttagactctgaacaaagtgcaaatatatttttattgaagattttgaattgaattctgtaaaatagctttgttaaatattgttatagtggtgttaattcgtaatgataattctaattatatctgtattcgaatttcatatttgaatttgatttattttaatttttggcactagcacaaacagaaaaatgaaaaactaataaaggtcatgatgatgcaaatttgaaaaatatttctgattcttccaaatatctgtttcagtattttaggttaaaaatcttcaggatggtacaaactcttaaagagaaaacatttataagaaac

SEQ ID NO: 13011 - DNA, 429 bp, Oryza sativa
  unsure (1)..(429): unsure at all n locations
agcttgtcagtcaagagcttacttgagacaggcagatggagaatgcgggaaaaacgcactcttcacataaacctgcaacacagatcanatagttagatgcagctagttttctttcctctgtgaatactgtaatccactcatcgtcaccaaagaaaataccgaaccataagcagctcaacagaacaaaacagcatattgccagcctacctgngccaagatgttgtaggaaaccagccggaactggtacccagctgcccctgtaacccaaacactaaaacagttttaatacaaattaccctgtgcctgcgcgatttgcaagtaatactagcaatcaaccaccaatcaaaatcgtattactcgcttcttaagattgaccaagaaaagagaaaacacaacctgcatcggattcggattgcgccgtggggagag

SEQ ID NO: 13012 - DNA, 466 bp, Oryza sativa
  unsure (1)..(466): unsure at all n locations
gcatgcaagcttgctaaaataaatgcatggatgcatgtatgatgtggatatatagtattancacgtagttccaagaattttgtgaaacacaccgaagacacatattaaaacatatcactatcacgtataaaatattatgttttaacggtttgaaacacatttttcttttgacataatataatcatgtgatatcttcttgtaaagaattaattgcaacgaatacaacggtgtgatcggttcgtagatcggataagtaatttaggagaaaaatatttaaagagatgaggaaagaatgaaaagaaacggctaggcatgtatgtttacactgacaggggttcgtccaacccacaggctaccgatttgcaacattatnttgacgtcaacagggagaaaggagaaactagtaagtaaaggagtgagctggtcctaggtgtccgatggtttgtatctgatcggacgttcgaac

SEQ ID NO: 13013 - DNA, 389 bp, Oryza sativa
  unsure (1)..(389): unsure at all n locations
ccatcanagcagcatgcagtcgcgatatggtgtcgatggctaaggctctcgcggtcgtgtgcgctttctgtcttcttgtggcgcccgccgccgcggcgcgtaacctcgtcgacgtcatcggcggtgcgttcggtggccggaaggactactacacgcccggtcctactggccagcaccactcttctagtcccagacgttcgtacattacccagactctgtcatatcttatcttgctactgctcggntacgtcaactggtcaaacgtacgacgtaatgttcgtgcgtgtacgtgttttccatgcagattctgacaaggctccgccctgcgcgccgacgccgacacaaggaggtggaggaggctacaacccaccctcgccgtcattggaacc

SEQ ID NO: 13014 - DNA, 450 bp, Oryza sativa
agcttacttaatctgtcattagcaattgtttactgtagcatcatattgtcaaatcatggagcaattaggcttaaaagattcgtctcgcaaattagtcgtaatatgtgcaattagttatttttttaacctatatttaattaatacttcatgcatgtgttcacacgttcgatgtgacagggtaaaaaattttgatgtgggatctaaacagggcctaaatatagttaacaattggctatgactatgactagctattagatttggctatacatgaaagggcaatagatatagttagcaattggctctactcagagaaagaggaggaatgttatcaaaaggtttgttagagcacgtataataatagtaaactataaactagctacaatcatatgtgaagggagagagataacgtagaatgtgaaatgctgataaaactaaccttatagctagcct

SEQ ID NO: 13015 - DNA, 148 bp, Oryza sativa
cagcgctagctactagctagaaactcatgaagccatcatggacatgtaattataatagtagtattattacgagagggtacactacaagctatatctccaagtagatatatccaccactatctgattgcctgagagcctcgacattatg

SEQ ID NO: 13016 - DNA, 310 bp, Oryza sativa
agctctatcaaagagaccctattatgagcaattgcttagtacactccggccatacatgtggcggctgcacggatcgcttatcataatgcttctttatttctttagccagccaatgcggactaaaccttgccctaacgggctaatatgactcttcatagactgtttaactttatataacgatgcacggctatcctgcccgtgcgagaaagatagagagagaccaatccattagctacacacatgtctggtgacctaactatactacatgatatgaatgttaccctggggctgcctacttgcatggaatgat

SEQ ID NO: 13017 - DNA, 336 bp, Oryza sativa
  unsure (1)..(336): unsure at all n locations
gctgacccagatggatggcgcaaggcatatgtataatgtggctaanaatgttttcttattcttttcccggncttggtgtttggtgtagaccggatttgctagatagacgtcgtactatcaagaggggtctatgaagcgagcttgtggatgatcttgtgccatattagttcatatgcatgtaggtgcattntgtgggcttgtctaaccaagtttgatgagttttctcaagtcctaaaccaagagagaagtgggcatgtccaataggagtgagtgacatcttgtgggtatgtccggtggatatcctttggagtgtgagccctttatccttgacttaag

SEQ ID NO: 13018 - DNA, 390 bp, Oryza sativa
agcatctttatagacagcttgctatgtgaattttcaataatgcagccaactttaggttacactgctcatattatacaaagcagccgggatatcacttggatcatgttatttggaggagtcacaccgcatatgctatatattgatatccagtcacttgggtgattacaaatatcaaaaccactcggtggcgtgcgaaattgattccttgactatatgctaggattgtgcaattaaccacattggccggggctacacctattatgtgcatctattcggcgcacctgactgtatcttccagacctgcacagtcttctaatattggacaagcactcaggagaccatgacacatagattgaagcactccgattggaagtaatctggctcgagaga

SEQ ID NO: 13019 - DNA, 409 bp, Oryza sativa
  unsure (1)..(409): unsure at all n locations
catcaccttncttgctcacacgttcttgctgctgccggtgatagtggcatatcttccaatgngtacgtctcanattatttcatgaaagaagcaatctttcatacatggagtgaggagatatatgggttcgggatctcaggatcttacacaacgctgagtgcccaagttttttatattccagatccatctaagttaagggtgaanaagggtcgacgccaaactagacgcatcagaaatgatatggatgagtcagaagcaggtgggaggactntacgctgcagcaagtgtgatcttgcgcggcatacttacaagatatgcccgaagaatgcagaagttccaagcggcgcagatgctagtccatctggacatgcaagtgatggtaggcgaccacctggtgaaggaacaacaa

SEQ ID NO: 13020 - DNA, 426 bp, Oryza sativa
  unsure (1)..(426): unsure at all n locations
tgtcagtgtgagtggacatttctcgagtgtgtgctgtgagaatatgaagaaacccactntgcatgaggttggtggtgccaatgaagtggaaattaaaagaagctncatgggcctttccgagatttgtgatgatgctgcaattttggcccacaagcttctagggaatattctggacaacacgttgcttgcagaatacaaggtcaatggaccttgcggatactctcttgatggttctacttcgcatggtcctcaaggacattttgaccaccattgaccctcattgtnttgtttggcttgtttgtttaattgcatgccttcaggtcattgaatattgcataatctgcaaaaaaccaaactgcatggataagcatgaatgctacgaattgcaaggctttttctcacctattgattaccctaactttgttg

SEQ ID NO: 13021 - DNA, 356 bp, Oryza sativa
  unsure (1)..(356): unsure at all n locations
gatccttntccgatgaatacaattaatttctatgataagaatgtgttgattcngccagagcaagccgaatctactaagggataaagagaggtcattggtgaaccgaggccaaagatgatagtgccaaagaaaccggagggtggtgttnggaaagaaaataatagtgaagcttcaacttctataacccctatgaagaccaaagtgacctttgatatgcttntggggaagtacgagaaacaaggtggtgagatagctcgcaacatatggaaaagaccaagatcacctnctatggagcaatttggtcatcaccaagacggtcggaatcacctaatataatngntctcataacatgtcat

SEQ ID NO: 13022 - DNA, 448 bp, Oryza sativa
  unsure (1)..(448): unsure at all n locations
agcttgtcaacggatcggcaatgttcaattggcgcctaccgctatattgaatcctatcatcaaaccatggccgntccgaggatgggctttgcatttcattggtcaaatttatccttcgacatcaaaagggcatcggtccgtgctagttgcgatggattacttcaccaagtgggccgaagcgctcaagaacatgattcatatgaaggtaattgactctatcttgaagcatattgttcatagattcggtattccttaaactttgactacggatcgaggagcttcttttatgtccaaggaggtgaaatgttntgcagaatcttacgagaataagttgttgagttcttttccttactacgcttaggctaatggacaagccgagtcaagtaataaaacatttgtataattagtcaaagagaagattgaagaacttcacaagaagtggcatgaa

SEQ ID NO: 13023 - DNA, 443 bp, Oryza sativa
  unsure (1)..(443): unsure at all n locations
cactctgtcaagatgatccgagcggtcaaacttgattgcaatctctgaccatcgaagatattggggcgtgtcgggctgaacagcattgatctcccgttcagtcaacttttgcttccgtttagactcataagccaaggtgccgccgaagatatgggtgagctccttgcgggggtcttgaaatcctgccggagcgtcgccgtcgtccttcttcctcgacgtgctttgntcttcgtcggagttcttccgtgcagtcttggtgtattgatccgcgaattgttatagacgaaacaaatcttggccatgtggtggagtaggatggtgcgggcatgggagtcatgatctatcgacgtgtgaccgcgaacgctgcggaaagtactggcgtgcacaagtccgagctaccttgcgcctatgatgtacttcactctccgaccgcgaccttgttg

SEQ ID NO: 13024 - DNA, 377 bp, Oryza sativa
agcttggcatactattgatgtgcctttaactttcccaacaccagacggagatggtgtggatggtcttcctctgattgtgagtatatcaaaatgtcatctatgaaaaccacaacaaactcatccaagtattccatgaacactctggtcattaagttcatgaacaaggcaggtgcattggttataccgaatgacatcaccgtgaatacatacagcccgtatcgcgtggtgaaagcagtcttcggaatatcttcctcgcggatacataattggtgtgacccggaacgaagatcaatcttggagaatacagtggcacctgtaaactgatctaacagatcattgatcctaggaagaaggtactcgtcatagatggtacctta

SEQ ID NO: 13025 - DNA, 265 bp, Oryza sativa
  unsure (1)..(265): unsure at all n locations
tggagaagaagtcttaggtggagtcctggcttataccccagttgagcgcctgtgaagatggagccgtangcccgctagtccgcttgctgttatttttgtttgtcaggccttaagtgcctttgtaataatgtaaatattatcgatataataaagatgtgtcttttatatcatgtttgatggtgtaccccggcttttcctgtgacggngattaatacactagcgttcgggaataggcaattntcccggtcgcgacacccaacaacgg

SEQ ID NO: 13026 - DNA, 541 bp, Oryza sativa
  unsure (1)..(541): unsure at all n locations
tagcgcacttgatctcagctagctggtattatgcagnggggagaataattttatttggaccgtgtttagnntaatcacggccggccgggcagtaacctgcgagaagattcccaacaacggttaacgatgattaaattagcaactctgatattatctaaaaaaatttttggaactgtgattgtcatggacggagggctaaactattaactctccgtctgtttgaaaataatngtcgtnttacagaataccacatttaaaaaaataaatntcatcactctttttctatattatagaaattcgattntattgaaagtatatttataaataatatgcatactagaaacaaattcccgtgcgttgaatgtgaaagatatttaantatcatactcgctgctatatcatgggtgcattataaaggatggaagggcaaatacatggtaaagtttctactacatgctttttcaaaatatnagctgaattagaacacatagatgcaatatcaccggtgctacatatgctaagcgagctgatatacacatct

SEQ ID NO: 13027 - DNA, 386 bp, Oryza sativa
  unsure (1)..(386): unsure at all n locations
ttcatatatantgggctgaatctaaacatatgcgnncgtctacattcattaacatctatatgaatatgaacaatgctagaaagtcttataacctgaaatggagggagtattagctagtctggtttgagtattcgctagttgtcagttgtcacaagcttgcatttcggcagaaatgtagtggttacagtttgatctgagacatgaagcaatcttacctatacaaccacactggcaatccgtgttccatcaaccatttgagcgttggcaccatggacactggtgcatctttccagtgcaagtttctaagctcagttcaagaagaacatgtaatagtgatgcatactgtagctcattatactctggtagagatctacctgcagctaaca

SEQ ID NO: 13028 - DNA, 362 bp, Oryza sativa
  unsure (1)..(362): unsure at all n locations
agcttgtaagtatttatcctgacaacttctttgttttattgatattattagccgnactgcgagaacaacatggatatatgttgccacatcagctaaaaactatactgttgacactacaccctaattgaatttactactggagaactcatctttcgtgggccatgcaaaaatgatattagtccctgttcgaataggaaacgggactaaagatcattcttactgccggattaagatcgcactgggactttataatatttggtccccggtcactttctgtcaggggcatggttggaaatatggactgaaattctcgaaattcaatcattttcaacctctctgatacgacattatttcggctgaaa

SEQ ID NO: 13029 - DNA, 333 bp, Oryza sativa
actgtggacactcctgaaaagcattatgccatctcgaattgacacgttgatctttctagcttcattaaaccatcattaatgagtgctcacaattgttgaagagcatgatgccgtattccgggcatttatgccgcttactctcttgccggcgagccttcaactattgttagacctgcagtgtcctctgaaagaagcttagcgcctacacttcaatggcaaccaactatgacgcatcttctgaatcatgcattgtgttaccacaacacattatttagcgggtcactctttgatgcaacaagctcagtccaagccatatcttgaactactccatat

SEQ ID NO: 13030 - DNA, 406 bp, Oryza sativa
  unsure (1)..(406): unsure at all n locations
actatatccacggatgtggtccactccaactccccattcaaatctagcatgtacttgtgtgaaatgtggcctgctccaacaccatatctacctcgcatagctatagaccgattgctccaccccagcacagactttgtacgacaaactaactcccccaaacctagggtatgcaaccaatataagctgcttaacactcatcccctcgaaggtgctaccactgttactttgctctaccaccgaaccaccatagggcaagcgtactaatgcatacctctacaacaatagccgacataccagcatatcgctcttgttaaagacctgcatatgacacaaaataaaactaacctacaactatgacgccccactagattcgtccataaatatnataacatacacaatctctcat

SEQ ID NO: 13031 - DNA, 234 bp, Oryza sativa
atggggctactgtggaggcacaaatggacgcgctcaaaaacaagtcaattgtgctatcaatcgcaactctaggtgtgtttgacgagaacgggattgatgagattacgtatatacgcacaactacgtgagccattatcttatcgattattgaatattaactatttcaaatttcaaatatggattaataagatcttctaaagcaactttgatatagaaattttgtgccaaaacaca

SEQ ID NO: 13032 - DNA, 494 bp, Oryza sativa
tcactctcccagagggccttgtctcctacgcacttaagcacgagctcactgataagttgctttatcattgtttatatgtttgactctttataaaaacctcttatactaacaacataacaatacttgtaatataaaataaatatactattaaaatatattggatgtgtggtttatgaaactaggtttgctattataaatgatgctaagagtctgtttggttggagggactaaaactttagtcccttttagtcactaaagtcccaaataagagggacttaaaaggacttaagcgtattaatccattagtccctatgggaggaggatattgggactataactcctttttacccactgcccccacgcatgggtatggtgcatctctccttgcatgagtatagaggtaacatagtcaatgtacagtgcaattaatgacatatagatcctatattcgaacaatcatggactaaagtgcttctcccactaagtattctata

SEQ ID NO: 13033 - DNA, 466 bp, Oryza sativa
  unsure (1)..(466): unsure at all n locations
agcttccacttctatacataagatgatnataatttttataaattgattcttgaagaatattatagactctcttacttggtttcttagcaaacgctaagttcattattacttatagtaaaagacatggccaatttaagaccgctgtgtcactaatgtaatcgatcaacttgtaaatcatatatctagatctgtaattctagtttaatatacgactcgaggttgaaatcacctctaataggtcaagccttttctatttacccctgttcaaaacctactggagaaacaaatatgcatttaatccattcgcttcaagttcatcctcaacccaaagntttcctctctcttctcctcttttgaattaagaaggcgaaagcggcaatggctagggtggcacaaagtgcgacgagagtatggtgtactatagagaggaaggtggcacaactgttgtcgtgtggtatcttcttca

SEQ ID NO: 13034 - DNA, 265 bp, Oryza sativa
ttagtcgtatattcaaggaacttatttgacgagactataatgtcaaccaatgaatctgatatgtggatgaacctgatgaaatcgaaattctacaaaagcaaggcaatgaggaaccttcagataacattggtagtgaagagatccatgaagaatcacatgatagtggtggggaggaagtgtctgaagaacaagttgatgatggtgatgacgaggacgacgacaatgatgacgaagagaatggaaatgatccagaatatgatgatga

SEQ ID NO: 13035 - DNA, 477 bp, Oryza sativa
aacttaaccacaagaatctaggaaggcttatttgtgtattgcttggagcagcaagagaaaatacttgtctatgaatatatgccacatggaagccttgatatcgttcttttccgtacgggtttctcactagtagttcttccaaaagaaaaaaaagaacaagtatactagtgccacatgccgccagaagtattagttacattacaatgctatggtaattcttgtttgagcctcaaaaaccgacaagaacagggagctagattgggggaaaagattcaagattataaatgggattgctcgaggcttgcaataccttcatgacgattctcaattgaagatagtgcaccgggacctcaaagcaagcaacatcctattggactatgattacagccctaagatctctgattctggcttatcaaagacatttggaggcgatcaatcagaagatggcactaatcgaatcgccgaacatagaagcac

SEQ ID NO: 13036 - DNA, 271 bp, Oryza sativa
taacccccaggggcttgtctctacgcaccaacacgagtcactgtgccgctgaagttctttgcgttcgacttgcaggaagaccagaacacattatggtaggacgtgtcaagtatagcattatgcatacatttacattctcctttatttcacttcgctttaaacggaacgagacgttcggtatcactatggggggctgagtgaaattttttcagctgaatcgtcttatacaaaataagacctttaactgcctgctgtgagactgaatactcaa

SEQ ID NO: 13037 - DNA, 314 bp, Oryza sativa
  unsure (1)..(314): unsure at all n locations
gtttatacataactagcacacgcaaganataactattccttactcacctgctaggcacaaaagagatgcaaaattctcatgtcatatctgctaaaagcctgagagactgtcctataaactatgtcgagtatccatactggaaggtacgctataactatacataactgtgcgaaagaaactggtggtgccaactttgagatttgacacttcaattggttttgtcacattcttgtgcctcttaatggtgaatggagaggccaactcttcctttgttacgcctgatggcttcatagattgatacatcatcatgcatg

SEQ ID NO: 13038 - DNA, 200 bp, Oryza sativa
agagctttctcccctgaagaattcactttttttttttaatctgccacacgggcatggatctcaccgagagcaaacagcgttttaaaaatacggaactgttgccgccaaccaaaaatattagaagacacgtaccatcatatataaacccatctgtaatgatcatattgaaatcacagtcacgacagacctattgacatcac

SEQ ID NO: 13039 - DNA, 418 bp, Oryza sativa
ccatacatggcgcatcatatatactactatcatgtagcagttgcatcgtatattcttatcaatatcagctccaacaactatgaccatcaatttatataatctcaacaataataatgatcgatcaatatgtgtggggttatcgctctactaacatatggcacactcactgatcacctaactacctagtaggtatgtacgtcgacaggttacatattgcgcgcactgaaggaaaccattacatcagcttactagagtacaccggagagagtaactttatttgccgatctttatttcagctaccaaaagaaggttataatgcaaatcctaccatattttctatatgacaccaagactggcaactaataaccatgacattttcaaacactgtatggggcttaatataaaataacctgctcta

SEQ ID NO: 13040 - DNA, 381 bp, Oryza sativa
agcttatctcttacgctccaggaagggatcatttcttaacatcaccaccggctcgcctcgaccggcgccgactggtgattacgcctgcacggctggcctatcatgccgcccgtgttgggcgtctacatcttcaccgaccggattggcttcgccgccgccgactggagtatccacctgcaccgctggcacttatgccgccgatgatgggcgactacttattcaccgaccggccgactagaccgccgtcgactggtggttcccgctgcacggctggcctattatgccgccgttgttgggcgtctacctattcaccgaccggctagccttcgacgaccgcggctggtgtatacaactgcacagctgcgctttatgccgccgatc

SEQ ID NO: 13041 - DNA, 252 bp, Oryza sativa
  unsure (1)..(252): unsure at all n locations
cccccagtaatagaacaagagactcccccccccggggnttgactgatgccccccaacacgcgagcacttccgcacccagggaactttataggccaaccccccaagggagcgggacaaagggaccaaacccacaccgcggagctcgtacaacaccagccccttcacagccaagtcctaagcgggaggaagcgcacacagaaggtagaaggatctgcgacttcgacatccacgcgagaaggataaggacggcga

SEQ ID NO: 13042 - DNA, 333 bp, Oryza sativa
gcttatcggtcacaccctcatcctactagcatgatgaggaattaggaaaaaggtcatgttattttctccaacacgagttggatgaagattaagatttttgggcacgtttttcaaactaaaaacgtgtgttctggccaaaccttctactctaaaatcatttatctattttcagtttgaatattaaactcatcatcatacattatatccctatttacgtaaaacttatcttatcttatttcggagaaagaccctccagaaacagaagtgtgtgttggaaaatgatcatgcaccacaagatcactcgacgcggattatggatataaatgttgtaaa

SEQ ID NO: 13043 - DNA, 416 bp, Oryza sativa
gcttcgttctacttctgtctcctctcttcgtttgtccttctgcggagtcgagtcaaggtcgtctcctcctctctcatcatcgagttcacaaggtgcgtccatgttctcgtgtgcaaatccatggtgttgtagttaggcggatgtcatgcatgtttcagcttgctcttctgggacggtaggtcctgttcttcgcctcgcgcacttgggttggatcctgatttcgtacgagatttcgctcttagttttagcgtttgagcatgaatagtcgctggtaaattgtcctgttcgttcggagttggatctttggtggcggtgaattgtgtatgtgatttgcaatttcatccacccatctcgctcgcctcatctctgtgacgagcaccgtctgttcctactgcgtacgccgcgaggtgcttgtc

SEQ ID NO: 13044 - DNA, 403 bp, Oryza sativa
  unsure (1)..(403): unsure at all n locations
catgtggaacacaagaatcttacggtgccttcgtaaaaatcagttcggttcagctcatattgaaatcctttaaataacacagaagacataggtggtgtgtggatccagagacttaactttagtccctatatttagacactaatttataatattaaatatatactacctacaaaactaattacataaataaaagctaattcgcgagacaaaacttttaagcctaattaatctataattagagaatgtttactgtagcatcacataggctaatcatggattaattaagctaaatagattcatctcgtgaattagtccaagattatggatgggttttattaatagnctacgcttaatatttataattagtggccacacattcgatgtgatacggacttaaaagttt

SEQ ID NO: 13045 - DNA, 272 bp, Oryza sativa
aaggaccaacccactttctatccccagagcccaaccagtgacaaacgcacccacattcaaactcatcaaagggacaacaacagaagcaaggaaacaccccaacgcaagggacagggaagacaagggacaactcaccagggttcaagaacgccgcggaacacgggaccacaagcaatgggggcgccgtccacgacaaaaaccgcaggccgagaacaaaaacaaggggaacggaaacacgaacaagaagcaggaaaggaaaaaaacggcaagag

SEQ ID NO: 13046 - DNA, 388 bp, Oryza sativa
  unsure (1)..(388): unsure at all n locations
atattgtctgtttttatatctctgtgcaggatatatggcgtgcattctcgatgtacgttcaatacaaacaatccaatattcttggctatatagtacctgaacatcgatcggatataataattatctagattattcgaaaatagttacatatgtgttaatagagactcactacattgctttctacagttattagaaagcaatcagaaccgcttatctcatttgattgaattagtaatgaattgtcaataatgtgttgcatacctcgtaggccatgatcatactgctgctacctagctctcgtgcaagtactcgtagaggatgccatatttcatcaattcgtatacaagaaacagcatcttgntttccatgttacagcaccagccgcaca

SEQ ID NO: 13047 - DNA, 445 bp, Oryza sativa
  unsure (1)..(445): unsure at all n locations
ctagctgcagacccaacttcgcgacaagcccgatcagcagatttgtgttgtccaacctcatcgaaagaaagattcttcacagttcgaaaatgccagcacgaaacacgcggttcggtcacgtcgcgagaatctaccaccaaaaagtcgttactcgctaagaatccggacttcatatcgtcacccacacctacctaatcctccccatcgtccgcaacggggcagatcgagcgctgcagataagcatgggaaagcaaaccggcccctaatccgagcaacatcgcatccaaaactcggagcatatggcaatcagcttccacanaatctggccgcgtgcggagacggcgacagcgagagcgcgcgcgctcgccgtcgcagaccgaacgcgcggcgcgcgtctatgggaatcgaaggaaccgacgcccgcgacatgcggagcatgtctgga

SEQ ID NO: 13048 - DNA, 146 bp, Oryza sativa
aaacgagcgcacaggcagaaatcttttaaaccgaaccgggaggaaaacacgaacacaggacagcagccacggcaaaccaaaacaccgcacggacaaccgagaaagaggcaccgccaaaaagccacaacccccggaaacacaaacgg

SEQ ID NO: 13049 - DNA, 338 bp, Oryza sativa
tcctttaacccgcgatcagtaaaagccaccaaaatgccttctttcaaactaggctaagcatgaaaacgtccatcatatgtacgaatatatggacctcaacaatgcatcaccggcagcccgattaatgagattcgtcgaccacgactaacaagatttctaacgagataaggccccgaaatttcgctgaatgaagtccagcatatatgaaaacaaggctaataactcacacaatcccctggtgagaaatgacaggaccccgccactatactaacacaggcgattaaggccggagcacaaatacaagaatgggtaaacactgaatgcgcaagagcctgaag

SEQ ID NO: 13050 - DNA, 237 bp, Oryza sativa
  unsure (1)..(237): unsure at all n locations
actcaagctntaccaatcctggatctaaccgcacatgccacacagaccactccactctattattctcgcccatcatnccgccgccgcacaggggagcccgatccataccaatccctaccaaaccctacctcccgctcaacccgaaacacatggacgatctcgttcccacagaagggactgtactgagatgcacgaagcgcgataaagaagaagggagagagcgaggcgtggggagac

SEQ ID NO: 13051 - DNA, 471 bp, Oryza sativa
  unsure (1)..(471): unsure at all n locations
gtcacctgcngcatgcaagctntactgacacatatcataacaccttattttaaagtgagatatgaagaggatacgagcgcataaagtgtactgctcaagaaagatcgatttcctttaaatatggcactgcttcggcgaatcaaaacttaaacaattgctaacaaagaatgaagaacagaagaaaaaaagcaagaacaacctaacagtacagttcggcaccgaacaccatcacagagaagtgaaaaacaggttacagacaaaaaatgcacaatatctcggtaagggagaaggaagccaaatcaagattcacgagatggaagtttctttgataggtaaagaatcagaagattacaagtaattcaatggagcgacacatgccgaaatcattgaacgaaataatagcatcgagtaaacatagccacaataggacagagagttctttctaggcataatacagagagacgtgtatag

SEQ ID NO: 13052 - DNA, 392 bp, Oryza sativa
  unsure (1)..(392): unsure at all n locations
atgaactgaactcttaatcacagaacataaaacaagctctggatgtttaatctctgatgtagataagttaaagcatgctcttgatgagaataactctgaaatagagaatctaaaacatacattgaatgataagaactcttgaacagataagctaaaacaagacattgatgcaacatacatggagatggagaatctaaaatatgagatagcatcaagagaatctgccattacggaacttagagagcaagtngagcatttgtcttctcaagtcacacactctcaaaagttgcagtggacattatttcccttattgacgaaaagggaaaagtggaaagcatgttggcagaagccaaagtctcttctggtgctctagttgaattgatatcaagcat

SEQ ID NO: 13053 - DNA, 315 bp, Oryza sativa
cctacctctatatctatttttgaagtgtatgaggtttgcaatactccatagatatgcagataaaaaatgactatccccactccgaccaagacagaacttttaccaaaagattattgtgactcttttgttcatataacaattaatgtgaagcatggtcacgaacaacgaatctctttatgataaacagatccattttgcaagctcgctattacgggtagtctctacagagaattggactaatgacgtatacaatgcttgaattatctacgtatatgctacatagtgagttctcatccttcagagactacgagtgta

SEQ ID NO: 13054 - DNA, 403 bp, Oryza sativa
agctagtcgttcttctctccacgccgctaatcttatctgtctgtctccccgacctgtgctagagagggacgccacattgatgtctaatgtgagaaaggagaggtcgtcctgaatggccttacccaaactctaagtatttggtgtcgcgcatgaaaaatacatcacgataactactttgatgaaagaggatatgtgtctatactttattatgtgtttactaattactctactttagaatataagaatttaagctatatcaaaatagttatactttataactgaatgagtaacttagtaaggttagattacactagatggtgaaagggagtaaataaacaatgtctgtttccacgtctatgcaactggtggactgtttatcaacccggctagcttttggctcatc

SEQ ID NO: 13055 - DNA, 304 bp, Oryza sativa
  unsure (1)..(304): unsure at all n locations
gatcatataggtacatatgcactanaatatcaacaatttgataaacatatgggaatttctggaggtttctagtgccttctcttagacacatggtacaaagagagagagggcatagattatgaataaaaccaaaaccaaaaagcttatagtgatttctcatatagtacgaattagtttaatctatagttagctagacccaaggatactttgtaaataaattaactcatgctaagaccttctgtaactaatagatcttatacagaatcaaaagtagcgcaacgcgcgactacgtggcttgtaagca

SEQ ID NO: 13056 - DNA, 197 bp, Oryza sativa
  unsure (1)..(197): unsure at all n locations
cccccccccccccgtaagctgaacctgttaacaaccccccagagggcaatgactcaatgcaccccnaaccacgcgcagcaccaacacactaggaaccacgcctatgtcactgcgacgcaaaaaacggcagaaggccccgggagacagcatggaacgattctccaacaaccaaacggagaacaagaagcataacaaca

SEQ ID NO: 13057 - DNA, 219 bp, Oryza sativa
  unsure (1)..(219): unsure at all n locations
catgcaagccttgtgagacattcgcatgcacggggaaactatataattgaacganaatgttggcgcgggggaggagggctatcactatcagcagtgtagagcaggcgataagaacagacaatcgcacagaggacgatctccaccaatggaagaggagacatccatatatgctagccacgtacggtaggatcccatagctctctactccctccgtcttat

SEQ ID NO: 13058 - DNA, 466 bp, Oryza sativa
tctaagcactgagcatccagctgagttacggtaacatgcttgtctctgtgctaccggtgaatttgcagttctttaagaaaaagggaacttcaaagctcttcttcgctctatatttattttggatgtctcgcacacaattaactattcacatagagctttattatgtgaaacagattgcatatcttgtcctctctctgccagatagataaacattaccatgtcttgcacataatttctccttcaggaacaagtacttatatctcatgggttgaagaggtatatatctccttgcgacgcatatatattacaaatggattgatcagagctattctctaaaatatcacacttgagatgacttgcttgaaggacatgcttatagcgaaatatattagtttgatcttttctgacatgctaaatgcgtcgaacacataaaaatcgggcacgcgtaaattaatactaaatcata

SEQ ID NO: 13059 - DNA, 377 bp, Oryza sativa
tttgatatgcccttactgctagcaatttggccttaagacgcaaaacttctaaccgactgcatttccaagtattcactatatacctgtcagagatgacttggcacatgaataattttgtatcgtactctgcagatactatggttagcatagtataagaatgcctggcattaatcaccgatttggctataataattctattttaaagattttctctgtaaatgtgcggttggatctgaactatcatattaccatacttaacagattaaattctcttgcgggtatgcttgcgaagtgcacagagaactcagcaagctacacctgatgagatcttttaagctagaacatgatgaattctcacgctgcagtctatgacagaa

SEQ ID NO: 13060 - DNA, 355 bp, Oryza sativa
agaagcgcatgctttttattttatttcccgcgcatgacgctcatagatccaaacttcttctatgtcatggacgcggatgaggactctcgactaaaaaatgtttatgggtggacgcaataagtacggctacctatgaatctttttcagagctgcgacatttgacactacgtacttgactaacaaggaccttatgccatttgctcctcttggcggagttattcatcacggcgaatcagttctattaagatgtgctctggtatcacatgaatgaactgacactattgtgggcgtttcacatcctgttatcatgtatgtcaattaagtaccaatcccataattaccgatcatggcatag

SEQ ID NO: 13061 - DNA, 463 bp, Oryza sativa
  unsure (1)..(463): unsure at all n locations
agcttattattaagtatatgagattgctaagtttttcttactgtcatttgctattaaacacctcactctgagtttatttatagaattttccagtctaaacatagaaatctcttgctctaattagcgaagatagtttttggtgtaattttgttagtttgttgtaaaatacaccatgaggcaactctaaactgtgtgggaagaccaagaagtaataccattntcttttgataaggaacgttcagtgactcaattntaactaggattttttttttgcttatggaaaaatgtgttctatcaaattgattgttggtgtgacctattattcgttataggggatgaaatcgttaccaatgggaaggaaaagtttactttacctcacaacttatggatctgtggtaagttccatatgcccacagctttctggtataaatagtgttggcacactcttcacgagattgcaatt

SEQ ID NO: 13062 - DNA, 372 bp, Oryza sativa
actagcttattcgcctttgaggtataaccctggtcgtaaaaacttttttttaaaccgctaaatcacacagaagaggtctagctattttttgctacgatgacaagctacaatacgacttggctatatttctggcttacagtcttctacagcctaaaacactcattattctcaaacaaacagatacagtgatctggcttcaactttgaaatatatgcacattattcatttttggtttgaatgtacacgcttctgctgagaggtgcctggatctcaagaacacatgactctcctgttcactatcctacagtacatcaaaaggagaaagcaagctgtaacaacaaaatattgagaaatgaggtggatttatacaac

SEQ ID NO: 13063 - DNA, 284 bp, Oryza sativa
cggcaccttctaccggatgaaggctagacaatacggggcctgccgccgcactttctgccggaccggtcatgcgcccggccgaacggcgagacagtgcccaaacacctccctggggacgcccggcatgtccgtcggtctccaagcgaagacatccgcgtttgcccgcaagaaggagacaagcgcgtgcacctatgtgccgtccacaagaccaccgaagcgtgaggacttggacgggccggcgcccatagcaacctcctagagcgggaccacgacgcacgagaaca

SEQ ID NO: 13064 - DNA, 386 bp, Oryza sativa
  unsure (1)..(386): unsure at all n locations
tactcacctcacggctaagaccaccgatattactgtcagagtggatatatctccttttggatatagacgacggatctctacctattattataaaattattgtacagaacatagcacattatagagaattgcccatttgcagagacgaagaacataattcacataattttaagtatatcctaatcaacgaaggcaccattagnaatacacaagctagttcattcacacgcttgcatgtatgccatgaatcatgaatgattatatacctnacgatacatattgaagagctcagcgatctgatgaacatatatgcttaccgcaaataattacaaagggcataaacaaatttatggaccatatcaataccaatcaagaaagcacataaca

SEQ ID NO: 13065 - DNA, 412 bp, Oryza sativa
  unsure (1)..(412): unsure at all n locations
cctgaagcatcaagcttcttggtttttggtctctgcccgatgtatctaatccatccccgagaagatacgagctatanagcggatgcgcccccccagcaagcttaatgatgtgcaatgcgtcaccgattgcatggtcgccctaagtcggttcatatctaggctgggggagaaggcgctacccttatctaagctccataaacgcttcgggccgtttacttggacggaggaagctgagcgcgccctcactcagttgaaggcgtatctcagctctcccccggctctggttgccccggagccaaatgaacccttactactctacttatcggcgacccctcacgtggttagtgcggtgttggtcgtggagcgcgatgaggacaatccttattctgcgcacctcaccctgtacagactt

SEQ ID NO: 13066 - DNA, 292 bp, Oryza sativa
  unsure (1)..(292): unsure at all n locations
gaccttaagacacgcagctgcagctggttacttatttcttccctttttttgatcncaacccagttaaagggtgcataaacttgtgctattaattggataaatgccctaactctttcctttcacttggctttatatgccgcgctacaagccttagaacttgtttggtgttgagggatttgtccaagaactgcgtctatgtcttttgtcatcgattggggactgcgccttcttatgcccagatctctcatgatctgtactacaagaagagcctagtcaaagtcaccttgaacag

SEQ ID NO: 13067 - DNA, 441 bp, Oryza sativa
gacttagaacgactgagctgcatcttccggttactcgtttatcttcctctgcaaagaatcttcatatcatcggagacgcgggtctgtatagcaacaatagtcgactgtgtactctgtctggtcctgcacagggatttaatgcacattcagcttagaaattctggttcgagaatttctgagtgtgacactatcttcttcactaccatgcatgaaactatcactaatttaaaggtcattttttacatacatttggatcgtaattccactgtggatttggaatctgcagctgcattatattatataaaattttatattatcacgagaataatagatataatctttctcaatgtcattaacgtaagcacacatatatatatagatttctcgcgctataaatatccaactgtagagaatatatcatctagctagcctgatcatcta

SEQ ID NO: 13068 - DNA, 137 bp, Oryza sativa
tttttatgaaagcctttttttgaaagaaatctaaagatggtcctcgaggcctacgcccaaaagccaattgattttagctaattagatgattgaaattcacgattttttacaggtttagcccaaaacttttaagttca

SEQ ID NO: 13069 - DNA, 303 bp, Oryza sativa
  unsure (1)..(303): unsure at all n locations
ttgtatacccaccacgatctaacaatgtttttatatttcttcaaacacgtgctaatatatacattgctccaaattaaggaccggtcgtatactctactctatgggcggagcttctttcttaatttagtcaactcttgatcaagtntaagctaatgtgtgtgtctaagtttatattgagggacgtgtacacatgatgaaaaatggtgagttataactaanaaaatttcttaacaggttcctaagcaccccctcccacacttcctcccatacactaaccttcgccctgctattatatatgatgat

SEQ ID NO: 13070 - DNA, 242 bp, Oryza sativa
  unsure (1)..(242): unsure at all n locations
tcacacatattcacacgttntagtttgaccacctaaactaggtgaacaccctggacttgatttattatatttgaagcattttgattgctgatattcaatattttaagtaggaaaaaaaaaactacacaccaatcagtacccagttacttggttatctgaagaagactgtcatatagagggtaggttgattcgtttttagtagcttgaaagcttcaaaatgtgttatgacagcagaagcaatc

SEQ ID NO: 13071 - DNA, 281 bp, Oryza sativa
  unsure (1)..(281): unsure at all n locations
gtggcatgataatgcaaagggattgcgtaaatggaatctaggtaatatgtagatggttgaaacggaagaactcaccgagatctgttgaaaccactgattgcngccggaaaaacttctcggctgcgaagaacataacagcgccggggcggctgtgctctgcttggtgcgacgaggtaaaactcgacgcagagcttccttatggcttactatgctagaacatggtagaatatangtgttctaaaggatatttacggcggaggatggatggagaggggtggagt

SEQ ID NO: 13072 - DNA, 284 bp, Oryza sativa
  unsure (1)..(284): unsure at all n locations
aacatgtggatatttcagggttattgtgtcaatggcagtgctaagactgctcttccaaaggaggagcttggaaagttttacagcggagaatgctatattgttctctatacatatcattctggtgacaagagagaagaattttatttgacttattggattggcaaggacagcataccggtaatgtaccttccagtgctcccaagctttagaatgtacatcctccgtttcacaatataagtcattctagcattttccacattcgtattgatgtnangaatatacaa

SEQ ID NO: 13073 - DNA, 339 bp, Oryza sativa
cggagatcctccctagtatggttccgacttccatgagtacaatcctatatgtctcacttatacactctttatccattgtatctcagatactaaactgacaaactcttctaaaatcagcatctagttaatataagttttagccccgccacctcagataccatgccacttaaaaccaacaagacaccatagtgtttatacccccattaacttcgccccactaccaaaaccatattaatggtaacactaataaaccccacagttactctagcctacaccctaaattctgttcgcacacaattctaccatccatgcataccacccccaaacaactactgaatt

SEQ ID NO: 13074 - DNA, 260 bp, Oryza sativa
ggcgctgtcctgcagtccgaatacaccccgcgcgaatcctcttccctttggatcctctccattcgtcctgagtaaaacacgagtgcacgcgtcttcgagggtataagacgaggaatatgaactcaagaaagaactcacctgattatttagttgacgtgcacgagcgcgggtaatatgaccatcatgctgtatatggggggacgtggatgtatcgatggtgttgatgtcctcatcatccgtcccttcttgcatttgagtcg

SEQ ID NO: 13075 - DNA, 256 bp, Oryza sativa
actccgatcttcgcgatatatggaagcgagcagtcgagcacaggatcttttatggagagactcggagatgccggtgatagacagtccactcgcgatgtctctatccgcgatagagagggacaaaacaacagcgaagaagacgagagtgatcctgatgcaattggcaaaatggcaaatttctttctaaaggaaccgaccaatgggtagtactactaccacgtactacagtgcggcggctgcttcttaatgtgcaaat

SEQ ID NO: 13076 - DNA, 300 bp, Oryza sativa
  unsure (1)..(300): unsure at all n locations
tgatgttgatggctgtctgatgttattgctgtgccgaatgtctgttaactaaaaatttcaaccagtttagtttcctttaagatgtaaagactctgtttggtgttttgggctttcttcacaagctgggtcaatatatttgatctgatttcacaaaaaaaaatataaacaatacatattgttcgtgactaacatggagcatatactaattaacaagcagataccacacaataatttcttatttccaagtgcagaaacatcattntaaggcacatctgtgactaaccttaagtcaactattcc

SEQ ID NO: 13077 - DNA, 174 bp, Oryza sativa
tgccacccatggaacgttgtgtgataatcactgatcacacctttggtgaaataaacctctccgttatgagcctaagctgacagttccgtgatttctgcttactattaagacatacgttgtagactgctcaacagagattaactgtaaggcgctctactattaacgtgtttaaaa

SEQ ID NO: 13078 - DNA, 357 bp, Oryza sativa
  unsure (1)..(357): unsure at all n locations
ctacgacgtcacttttagtcactcagtaactgacgtagctaagctagctagatgacgaggtgatcngaatgaccctttcagaaagattcatctctgttccacttgctttgctagttgctacagctactggtagagtatatatgtgtgtgcgtgtgtgtgtgtcatctgatgatcggtgactggaccccggcctttcagaaaagggttaatcaattaattagttaatcatctcttcgtcctttctgttgggttgttggtagtatggtttgatgattgagcatgcatgtaattgcaagaaatggtggttgatgcangaatgcatggtctctacctatctagcgatcactaatgagtact

SEQ ID NO: 13079 - DNA, 407 bp, Oryza sativa
  unsure (1)..(407): unsure at all n locations
tatctgaatggctatgcatgtatgaatgatcatacatcttacctacttactactatgggcctgttcngctggccgatacagctacttcagctgcagacacaacacaatactatttatgttggctgcacaacagtgaaattaagtgcagccgaacagagccatataatatatgatatggatcaatgtcccaatcgtcgccactatcatattcttacctacttaatagaagtgaaccacacgtatatgtgcatatctacacctacacattattaacagagttggaatatgagatgtcatggttatattaaananaaggcacatggtctatattaaaaactacaatnctttaatgaanatagaagcgacgaattatatatcaaactcaattcttaaaatgtacgctattt

SEQ ID NO: 13080 - DNA, 82 bp, Oryza sativa
ttcttcaatagttttactttactgggtcttttgtcggctttctagggtctttcgggtagtataatcaacttttctcgtttgc

SEQ ID NO: 13081 - DNA, 326 bp, Oryza sativa
  unsure (1)..(326): unsure at all n locations
ttgggcatacactatgctcacactgctntaacaaatgtgcttgagtccctaaaagacacatggtttcatcacacctggaaatatatggcatatgtggtgtaaaatccgactaaatcaactcataaaggatgtaccaaccgcctggaagatgaccaaaatatattatcagtctaagcccataatatttgtcaataaaaatgcacacttatgtggcaaacagcaacgatattgtatccaatcgaatactttgtaaacccaaacaacgccttatataaataaaaacaagtcagtggggtaactatataaagcttcactatttgacacct

SEQ ID NO: 13082 - DNA, 264 bp, Oryza sativa
tggatagatgtcttaactcccttctttcacttgtctttagatgccgtgttacaagcctgagtacctgtttggcgttgagggttttgtccaggagttgcgtacgatgtcctttgtcattggatttgggaatgctcctttttatgcccagattcgtcatgatcgtcatgaagaaaagtgccgagtcaaagtcaccttgaacagcaatagtgaagatatcccctcagtaatggttgaagctggaggaagaaactacatccatgcatg

SEQ ID NO: 13083 - DNA, 339 bp, Oryza sativa
atctcatactacatttcttcttaagggctatatattccacttcattacttccaaaccctattgcatgttgactgtaatttgttggagcaatgcagctttagctctacgatatttcatttgaagaaatgtgaaaaatagtgacaatgtttaccagattaaaacctactttgtttctacctgacgatgttagtttatttcatgatatggctttgagatgatacactgatatacatgctcttcactgacctataatgcttatgaatggtctggcaggaaggtaattcatactgtgggccctaaatatgctgtcaagtatcacacagctgcagagaatgcact

SEQ ID NO: 13084 - DNA, 272 bp, Oryza sativa
acttgaagcctattatgcagaatcccatcattaggacattgcgttcactactaataacactttcacaatttccgactagtaagctagaacaagtccacccctgcatacggtactctattactctctcgtcgaagcatctaaaacacacaacccttaccaccctccatatgaactggattcgcaatccatcagcttgaatattgcctatttgagctcagaatttcgcttgaaacacatcaaatcaacaaaagtccacagttgaccacgagagc

SEQ ID NO: 13085 - DNA, 247 bp, Oryza sativa
cccgctatacctggtggtatttttgaatgtcaagccttgagtgcctttgtaataatgtaaatattatcgatataataaagatgtgtcctttatatcatgtttgtgtggcgaccccggctttttctgggacggcgattaatacactggcgttcgggaaaaaggaaattatccggtcgcgacaagatggtatcagagccatctcgactgtaggataagccaagtggataaaacctaatgacatatttta

SEQ ID NO: 13086 - DNA, 414 bp, Oryza sativa
acgatttataatgctacatcttaacaagcacataggtgtggagaataaacactaaacacatatacctattgcttttataactctttctcaaattaccttttcacaaaatatcccagagaattttttttaaccttttcttttcttgagcctattttctcatatgtttctcttttattccgggtgcgttcctgtcgtcaagactgtgtccagggatatcgcacccattattttgctcacatcgaatacgtcattgtcggcaagactgtttccaaggaatcaagattcatttttattcatatttttaatctctttttcacaatgagcaataaaatctatttgaggaataacaattccattaagcctatatattgagcatttataaatcaaaccatatgctagcatcaacattgcata

SEQ ID NO: 13087 - DNA, 182 bp, Oryza sativa
ctcttcgaatcgaccggattcgtacaatgtcaacaccacaatgtcacaactacatgagacgagatgatattacagaaaatattacagatcagtgtttgagtttctcccaagaatctaatgcaggagaagcaaagcatatgtatgtacaaaaaatataacaagaagataatcgcatcagatca

SEQ ID NO: 13088 - DNA, 431 bp, Oryza sativa
  unsure (1)..(431): unsure at all n locations
tatcctaccctggataataaatagnaggtcctaatgttcacagaagaatttatatatctatatatatatatatatatatatataaaatctaaaagactctttcgatctcaatcttgctacccataataggatcaatcaaattctacaatgcctcgcatgggcaagtctacacaaaatagagtcactatgtactcttctctaaataacaattataaatatcgtgtgttttttaatataaattctatatcatatggtatcaggaaaattagctatatttgataatagatgacgaaacacacgccgcgtagaagatgaataaaatctattgacctatccactctgcgcctataatttcgagcgcttgttttacagcgggcttttgtgcgagatttcaaccattttgaaaggcggctttttaacgttttctccat

SEQ ID NO: 13089 - DNA, 278 bp, Oryza sativa
  unsure (1)..(278): unsure at all n locations
gtaatgatgtgaatattccaagcaaggggatggatgctgcatgaacagntacaagatagcgatgcatgcatgcatatgcatgattacccctgctttattcangtgtttgcaggacacgtaaaatcgcgtgttgctggatgatgatggatctccttttgactgctgcgtggcgccgctttaaagacttaaataatgtactgtgataagcgggcgtaaattttattgacatttttattacatttattctctgctctgaactattgttttcattctaatgg

SEQ ID NO: 13090 - DNA, 362 bp, Oryza sativa
gaagatcgaatcgatgcagctcaactcgaaagctagaactcgtctaaataaacgaaagttaaaagtgtggcgatgcgtcgagattgtattgaatgattgttgtttgattacatgggttcgggttctatttatacccgagatacaatatatgttcttaccggacacgacacttatctctaacaaactctaagataccataagtctttgcggcagactttgcccaaacatatctcttaggaaattacatgaaatatcctaattaatagatacaattgcctatctgagagccctatcttcgtcgcggcaatcttcatgaagcgccttgattgattctagaaatatcttctaaaatgttatcattg

SEQ ID NO: 13091 - DNA, 321 bp, Oryza sativa
  unsure (1)..(321): unsure at all n locations
agtgtgggtgcanagatcgctggcaggtggctacatcctttgctgaacaaacatttcgaaggagatattttgtctgccccaatgtatacaacgatttcgttgtatgtctaaccatttacaaaatccgctatgatttgcacaaaagtactacccaaactgaataacattactatgtttacagggcaatccaaggatgggtgganttactcgatggatcgacaatgtcactccatcatatcatggccagaagataacatagtcagaaacacaagtagagtatcaacgattgaaggaccacgagaatgcaatgcattctgaccg

SEQ ID NO: 13092 - DNA, 413 bp, Oryza sativa
  unsure (1)..(413): unsure at all n locations
atatgcaaggactttcaatccaatgacatcgaaggatagatgggcacatgttgatctacgctacaaaatcaaaaagcctagtgtacgatcgagatgtctactagagggggggtgaataggaaatttataactaaataacacctaatcaaatctaacctaagttgctatgcttggtgagggagaactctaactaagcaactaagttatgttttgcaaacctagggtgatagtggctcacatatatctctaggaaagtaaatcacgctcttatgtcgatgttttgcaatcctacggtgatatgatctcaagtgtgtctctagaaaagtaaatcgcacanatgtanatgcgacaatcaaatgagacaatgagacaagagattnttcaccgaggttcggaaactcgccggtttctac

SEQ ID NO: 13093 - DNA, 315 bp, Oryza sativa
agcgctcggaaccaaagaacatcctggccgaactctgggaaatggtagcgatgtgccctggaagcatggactccctcagtacagctcccaatacacgaaacggaaagtctccaacgaagagaaggacgctcgtttgaaggccgaacttaaggttgaggtcattcaagaactataagctagcatgaatgcaagggtggaagaaagggtaacaaggtgctcgccgacatgaatataccccgagtcacaacacctgctgtgcaaccaacttctcgtgacaacacgacgcgagtccgcacagcatatgagtagttgtgc

SEQ ID NO: 13094 - DNA, 227 bp, Oryza sativa
tctagtcatttcatcttgaagttgtccaagtatatctactgcaccttttgcatgagcccaccaattgtcaattcagagagtgtttactctgagaactccatgataatggtacaaaacgattgaacttgcatccctcttacctttcctgtttttcacagctaacaacctcacagggcttttttatcatattggggacacacagcagatcaaatgctctgctgcctcca

SEQ ID NO: 13095 - DNA, 359 bp, Oryza sativa
  unsure (1)..(359): unsure at all n locations
aacaattaactacttaaacaatgttattagtaattaataagcatgatgtatacgctcacatcatgtatatgaaagaaaccccgcggcgaaaaaaattaattaataagcacataattaattttaaaagagcatgtacgtattgccgaatatgaaaaattaatctcccttcgttgtatgcgtgcggaagtagatcctctcacctaattatatactataaaagatgtccgtacgttacaacgggtaaacattnttcagtaatatattgagagctaagtaataaattaaaatattgggatcactatacattantaattgaaaagttaagtaaaatcttaatattggaatcgctatagattata

SEQ ID NO: 13096 - DNA, 267 bp, Oryza sativa
cacacaacgcattcatgtcattggttgagggtcttacctttatatcattgcttccattggcatcaagtataccagcaagctccaccttatatttttgtcgcacctctgaaagggcagagacagctgtatcccttagctactgaaactggttcatgaaagcacgctcttgtgcagaaacattagcttccttctctgcaataagcctacaggattcagctttcttttgttctaatgacttctgcttctctgcaagtacatcgcacttac

SEQ ID NO: 13097 - DNA, 285 bp, Oryza sativa
atggtatgagataactggtaattaacaaatctgcatctgaaggtaagggcatctttcctggcttattcatttttcttcttaccaacatacacaagcgaaatgcctaaataaaaaatgccacaactgcagggtatatgaaatttaatagccgttgtattgaccttgagtgagatttgctctggcatgattctattccttggctcggaaggccaatattgccttgtttccatcaatgacttgacagtgatgtatgagaacacacactcttctggtatcttgaccctc

SEQ ID NO: 13098 - DNA, 426 bp, Oryza sativa
  unsure (1)..(426): unsure at all n locations
aaactcagcttgctctttttcaaaaaaatataaatgattgctgggaattacatgctgaggctgcaccttgttatttcacttacacaagatgaattaatgcaaatgcagaacactttcgtgcgaatgctaggttggaaaatcataaagaacaccggccatatgccccacaggaggacccgaaacggttcaatgaggccctcctgaactcttactaccagctccaaattcattgttgtgatgggatatcaatgccagcttcttgagcggctataagcacttgatcaaaatcatatattgtctaatgatacagggtaaaagttgtaccttctgagatanaaatgggaaatataatatagagtatatgcactgggttttgtctgatatacaaaattatgttgaaatcctagacttgctagttgatacagt

SEQ ID NO: 13099 - DNA, 263 bp, Oryza sativa
atgtttttaaaatgaatgtttgagtattccactcccactttatagaacatgcacgtattgtatataaggtgatgattgcaattacttatcttcaattactcaaggtgtgacccctatattgttcaaacttacagactggcattgcgatctgctattaggttgatacatacacaatattagcctatggtggtaactaatactagctatgctcaaagctcacttggtgctgagcaaaactattatgtgtgactgaagtgcaatat

SEQ ID NO: 13100 - DNA, 204 bp, Oryza sativa
tttgtcaaaacacccctcatttcttcggctatttctctttaccccattcatttgttatgtgtcatgaagtattgtatgtattgacataaatatgatatgtcagaaaatgatactgattattaagtggcttattatgtaatgtgaaatcgacggttatgggttcgacatgaactgaatatctcgtgggaggtcgctactcggtgt

SEQ ID NO: 13101 - DNA, 284 bp, Oryza sativa
acacttaatacatcaaacatatccttattaagacagccacatcatatgcacatgatgtcaaccgtcgactgacccttatgcgaacaaacctagacacacaaactaacaggcgaatagtaagcagtccgataactaagggaaaacgagcctaatgctcggaatggctcctacggtcggtggagtcgaaggcgtcctcctgctcgtcgctaggtccctctgagcggctgctggagtctggcagatacgtctcaccgcttgccggctctgagccactggaactgcta

SEQ ID NO: 13102 - DNA, 243 bp, Oryza sativa
ccactgccttttttgatggaagatcaaaaattgaacctaaaccttctcagctgccagagagattgacaataagaatactttgataagaaatgtggactagacttccatgcaacctaaaatctttaagtggcttgaacatggaacattaattggccaatgtgtatcttgagaaacttttaaaaatttacaacttgtagaaacaaatggacctatcaaatgagaacatgcgccatctgtacatat

SEQ ID NO: 13103 - DNA, 312 bp, Oryza sativa
ctttctattaatatttgtattcactgcgtcttgaacatttattgtatgtatatagtcgcgtacttggtttcatttaaaagaaaggaaacgatctagctctaacagaatcgatttcatttaaagtaaatttgaaaaactatcattgtcgtaccttgcacggcttgctatatgtacaaaacacatggttacttacctattttctgttgtgcacgagctaaatttggtgaaccatctctttctcggctaccaagattcgccatggctgctggtaaatctcaaggccctttggaacttttagagactcttctatgg

SEQ ID NO: 13104 - DNA, 250 bp, Oryza sativa
  unsure (1)..(250): unsure at all n locations
acctatggtaccagccatgatacctgcatgtaccaggtctgatacctatgtaacaggatagtttaagtgactcctgcccgcttncacgtgcactccattctgatacctggtacctggtacttggtatcgactgatacctttggtacctggtaccgggctggtacctattatatggttccgtgatacctggtacctgatacagagatacctggtacctggtacctggtacccgtgatacctggtacctggt

SEQ ID NO: 13105 - DNA, 245 bp, Oryza sativa
ctgcttttcgttttgcgcagaattcagagagggatcaagatatacgttcagactatatgaatttttacttatcaacaagcgagttcattctagaagtactgaactactaactaccaataaatcttctctttgtgggaagaaaacaacataatcattcatgcccaaaatagctttctcagaaccactcactaaccaactcgcttacatgaaatctacacgtaataatcacaagtcccatgcttata

SEQ ID NO: 13106 - DNA, 284 bp, Oryza sativa
  unsure (1)..(284): unsure at all n locations
ctaatggtctttacatgtgtgcctagatgtatatttttattcctggacaactgcttacgattaaatttaacagtaaagaaatctactttatttctcatttacaaacagttctgattatacaagcatatgtgcatatggcctaagttggagctactcttcttttgatattttgtactatgaagtctatanggtactatgaattaaaacggtaaaactattcaatttgagtttgagaacggatcaaagtcatgatattattgcaactggatagatagacactctgt

SEQ ID NO: 13107 - DNA, 119 bp, Oryza sativa
gatcatggctaacaaaacccggacggtgaggagctttaaaagcgctaaaacatggcccaaaatcagatttttgtatacccccttgtgcaaaaccgaaaaaaacgcctccgcatcttttg

SEQ ID NO: 13108 - DNA, 188 bp, Oryza sativa
  unsure (1)..(188): unsure at all n locations
acctcatgtaattntctatgttcaaaccaaaacaaggtagtagcagtgccaccaacattcaaataatagtgccctcctaagaaaacgattgatttccgtcgcgaaaaccatgcaataatacatatccatcgggtagaaagcgtcgattcatcccgggcttgtcattcgcgaataacatgaaaattatg

SEQ ID NO: 13109 - DNA, 91 bp, Oryza sativa
  unsure (1)..(91): unsure at all n locations
tttgtcattggatatgggactgcccctttttatgcccanattccttatgatcgtcatgaagagaagtgccgaatcaaagtcaccttgaaca

SEQ ID NO: 13110 - DNA, 258 bp, Oryza sativa
taaaaacctaaagggcggattatagtgctccttataaacaatacaagggcctttttctccaccttggaaaatagaaatgaccttttactttggacggtcttagaaaaccgaaagaagtttgcttttcttatttacgaccaaaaacatccttcgcaccaaataaacagggagaaatatttttttgcctcaattacttcacaagatatatatccccccccttaatacgttcctgtgtcaaaaaagaatcatttttcctat

SEQ ID NO: 13111 - DNA, 149 bp, Oryza sativa
taccacgaggtttagttgtggaccttgtctatgcagggtagacgacttggtcaagcctaccctctaatattgatttatgccttcctaaattctagttttttgtctatgccaacttgactttataattggatggaccggtgattgatata

SEQ ID NO: 13112 - DNA, 88 bp, Oryza sativa
  unsure (1)..(88): unsure at all n locations
cacatggtattcctattaatactnctaagtcgtcatatggcactataaataaccaatggaaccattacattcaactactaaatttatc

SEQ ID NO: 13113 - DNA, 254 bp, Oryza sativa
  unsure (1)..(254): unsure at all n locations
ctcagcttgcaagataagttganacagttggaaacaaggtcacaaattntgtacttttgaataacaggtttcaaaagacataaaagaaagttataaaatcaacatgctaactctattttattgcagcaagattaaatgaaacaatattgtaaacttttgctgataaaatgagccattagtacagtaatagatgtacagtactaataacactggaataaattttgaatgagaaccaataaaagagattatgaagt

SEQ ID NO: 13114 - DNA, 148 bp, Oryza sativa
tccccgtatgggagagattgatggggattaattccacacctcaatatgtgtgaaattattcattctccaattctccttcaatcccttgtgagtgggattaaccgaactagtccttatgcggatctgtcgaggccaagccttgagctga

SEQ ID NO: 13115 - DNA, 404 bp, Oryza sativa
  unsure (1)..(404): unsure at all n locations
tacttcggacacctggagtcatttgggattattcttcttcatgcttgtgtgaccgttagttagtgtgttgtgcacatattctgtgaggcactagatctagattacttgtattgtctgctcgaaatttcggattatcgaaattcaaaatatcaaatactgcttcgtttaatgatttgaatagctatcacccctcttangctactgacactttaccaagtatatgccatctatacttaattttactaattagactcactatctacaatatgaatatagtcacatagggtatatataacagccattttaagatattttaattcgtacaaacttagataattttaagtataatcgtggagtgtttgcctatactatttaaaagagatttgcaatcttatcttattctc

SEQ ID NO: 13116 - DNA, 149 bp, Oryza sativa
tcggatgtgcatcgactacaccgaccttaaaaggcatgtgctaaggatccttaccccctgcctcgcatagatcagatcgtcgactccactgcggggtgcgacctcttgtgttttctagatgcatactctgtgtaccatcagattcgcat

SEQ ID NO: 13117 - DNA, 279 bp, Oryza sativa
ctctgtctgtgcgtacaacgacaggacgcgcttatcccgagggacccatttcaaaaaacccggacgcggacgggacgacactcatttctcgggacattgagcggcggcttcatgggcgccttattccctgcctttttattacttattatgacgaagataaagacgggaaatattattatagatatcggctgaaaaaaatacatctatctctaaaaaacaggagttattcatcagtatgccattagacatatctaaactacgtgaagcgaaaacgggggg

SEQ ID NO: 13118 - DNA, 98 bp, Oryza sativa
  unsure (1)..(98): unsure at all n locations
ctattaatacattntcaatactctcttcaggtcatattccaaaaattcagaatatcttatgatgagattgtcaatgacctatgtccggtaaaacacat

SEQ ID NO: 13119 - DNA, 157 bp, Oryza sativa
tagccatccatgtatgaatagaagcatgagatacttgcttcaatatatcgatacctttcgatccaatatcaaaagccaactcctggatatctgcacgatatatcttctcaactcgacagctgcaagacccattaatatgagttaatcaaagcagaat

SEQ ID NO: 13120 - DNA, 172 bp, Oryza sativa
  unsure (1)..(172): unsure at all n locations
tctggtgcactctatcacatgaagagctttcagntccaacaatgtgagatagcgtctcgggagtgcttcacaattaacattgtttgattcaagatagcccatgtattccaagatggatacgaacagatgcaatgaatcaatattcatatacttcaatataactgtgcggatg

SEQ ID NO: 13121 - DNA, 222 bp, Oryza sativa
  unsure (1)..(222): unsure at all n locations
tatcattgtatttccctatcttgactgtcaacatcaagttttcttcttgccgttgtcagtcgggggctatcatcataataatggagtgtgatgttttatcaattcagtttgcttactttggttatcattgccttgtttgggtgttctactcagtntgcgaggactgaaagtttnttatagcttctttgggttgtaggctcaacanagcttaacaaaaacttt

SEQ ID NO: 13122 - DNA, 291 bp, Oryza sativa
  unsure (1)..(291): unsure at all n locations
atattctaggctacattccattcttatatacttatcttagcatgtttttgcccacatgagtttttcttctaaatatttatctaatctgcgatttggtacaccatcatatttcttttaatttagccgttacaacaagatcttatgaaactaaattngatcttggacaaatatattatgatgagaagaatcatgtgttattntatcgtatatttgaaaatttttcatcacttcgatcaaattagttcagatttacaaagggttcatagagatgcaacattcaaatatatatga

SEQ ID NO: 13123 - DNA, 214 bp, Oryza sativa
taacttactgtatgaacacactatcactaatcatcatatacttatcaccccaaacaggtggggtcctaagactgtggtgggcattaccgcggaaagggccataccgggatacctgtgagaaaatattgccaccaaaagtgtgtggtaaccaaatggttacctgcaatcggctttccctactatgccggaaaaatagatctttgtgggggaaaat

SEQ ID NO: 13124 - DNA, 218 bp, Oryza sativa
gagatctcgcacggtctttcagtaccactgagagactgattccaaccgagaagacccctactccctctgaatcaagatcatgaaggagaggatgtatgtaatcttctcatctggtattgggtcagcttctcacatttgctgtcgatctgtgcatacaacgccttcaatcctgcttcagcggtatatatctaaatgctctggactttatcatgctattc

SEQ ID NO: 13125 - DNA, 208 bp, Oryza sativa
acgagatcactgcatgtatcttgacaaactatcgaagattttttatatatgtacttacatcctagtgttcctctgggcacagacaatcactttttacgcaggataattggtatctccagtggtagtggtctttatgggcaacttacaaaatttaagacatttctccacgtcttgtaagagtgtgctgactgcagaactgacgactgac

SEQ ID NO: 13126 - DNA, 156 bp, Oryza sativa
  unsure (1)..(156): unsure at all n locations
atcggaggagtaataattcatcacatcgcaatcctttatgaattattgtgctacccacantttggtctaactaatttggtcagctaattttattccctttccaactaatttgatatgcagggagaagctcaatcccatggagcttcttggttacat

SEQ ID NO: 13127 - DNA, 184 bp, Oryza sativa
ggcgtatgggcagatgcagcgcaagcatggcaacttttttttgcacaaccattatctatatgcagtgtttatgggatgtgcggcacatatagtaaatgtagcgaacatgctgaattatcatgcagttgtctcaagggcttcagtgagagttatctcaacagttggagactatgtgatcagacag

SEQ ID NO: 13128 - DNA, 264 bp, Oryza sativa
attcataatactacgacttatatatatactaattaacatactatgacactacactagtacgtatgttattatgatacaggaggaccaaattgtatcagcctctgtgatctataatggagggtctgaacctcgatattttttcgagcgattcttctatctgttgtgatgtgtaaccagtgtcgcaatcaactctttaattaatcggtgccatgataatcatagttaacaattaataatatcacaagtcctacatattaaattctt

SEQ ID NO: 13129 - DNA, 201 bp, Oryza sativa
tagcgaccttaaatactcagcttaacagagatggaggcgcaatcctatgagacagcggctgcggatacccatctcaatattttaatcctatgtggcacgctaggtgtacaaagtgtgctcacgtggatagttatatggctcacatgtgcattctgaaagtagagtgacctatatgacacatctaaacaagttggatgactc

SEQ ID NO: 13130 - DNA, 315 bp, Oryza sativa
  unsure (1)..(315): unsure at all n locations
ttagcgaccttgaatctcagctgctttcggcatgttctgtatctgtaataccaaatgtatcatactgctgatatgtttccaaggcattacctcccatattctgcatgtttgtctgagttgttactacactgattcactctttgacatggaatttgtgaggtgaaataattccacatgattatagcttagcaggtccttgtgtgatatcagatcaagaagcacagatacactatggtgagggttaactaactctctactttntaataaccagcatggactactagggtgaatatcttttgcttatgtgatgcagca

SEQ ID NO: 13131 - DNA, 259 bp, Oryza sativa
  unsure (1)..(259): unsure at all n locations
ctgtagttcaactagctgccaagatgaagatgatcacgtgaaggctgagtatatttggtacaggtgatatgtgacaagtnacattgctgtcacatgaattgataatagcttgtaattcatttgccctaccactgctaagtcaattatgtcacgcgcggtggtacttgaaaagtttattgggctttacaattctaatattgacattatataagtgcagcagacatttatagtctgtaatgcatggcgcgttaatcattat

SEQ ID NO: 13132 - DNA, 122 bp, Oryza sativa
  unsure (1)..(122): unsure at all n locations
tctccacccttctctggagcctattcgttgtcgcttgtcatcattactgatgacattcaatcctcacttntccgtagaaacctctaaaggatataaaaaacattataccgtccagcctgagt

SEQ ID NO: 13133 - DNA, 238 bp, Oryza sativa
  unsure (1)..(238): unsure at all n locations
tggatcagatcagtggcatatattaagtnttcagagatgcatctacctttattataacctgtctgatccatgtgaatcatccttgtaagaactttttgtagcctaagagccagcactttggataggaatnttacctaacaattttggagagagaatggtcngtagccatctactgtgttttctttgccgggtttggaattagaacaatatgagctctgttatcctttcagctggactg

SEQ ID NO: 13134 - DNA, 311 bp, Oryza sativa
caacaagtaaaggggcagcgtggatgtatgactggcgtaatgatcatggttggtacttatactaagacacaatatgtctgcgacacatctacttatacacttagatcaacagtcctaagcgctttacactaagttaggattcaaaaatttatataatacatgctccagactatcatctggatcattgaccataccgaccagacgtaccgctatgcgatcgtaatacactgccatcacttacatagccagcatcactagcgattgttgttcaacacacttaatcgttattatctcttcactgatacaatact

SEQ ID NO: 13135 - DNA, 218 bp, Oryza sativa
  unsure (1)..(218): unsure at all n locations
atctgaagctattatgtgatgtaatattgatgaaatgtagaggaataccatcgttcataactggtatggctganntggtgaaacaacatcaacagcaacacggcagctcagcaattcctatggtggaagaagtacgcctgctgctgaaacagtttgaacactggctatcatttgattacagtgatgagttgagacaatccgtactctacctaagcatg

SEQ ID NO: 13136 - DNA, 141 bp, Oryza sativa
  unsure (1)..(141): unsure at all n locations
tcaagagcacccactgtgtgnatgttagcaaactgtgcaaacagacgagcccatggacatgctcatactagatgtgatcactaccgccatgttgattgactactactcttcaaattgatgtcgaggtaaaggagtctatga

SEQ ID NO: 13137 - DNA, 355 bp, Oryza sativa
  unsure (1)..(355): unsure at all n locations
catctcaagctgtactcttgcganggtgacctcctagatggttaggtgtcgcccgcgagtttctaacaatgttgtggattgacccgggcaagtttgtgagggtgctattccacctccgaaaggaaacgaaatactcggtgagtggaatccgaggtgaggtttatgatgtcgtcttggtagagcaagcctcacttgtggtgttcttttggtgttcaagctggggatcttattggtcactttgaaccaaagagaagtacctacgggtggtggctttaataccacagacctcttcctatgccttttcttggtgaggtaatgcggtaatacaaacccgcttcttttgaatctccctacc

SEQ ID NO: 13138 - DNA, 289 bp, Oryza sativa
  unsure (1)..(289): unsure at all n locations
atgaacactgctttttaatgtgaccaaatgatgtatatggaactcgaaaatcataaaccagctatttggtcattacgtttcaaaaatcataaacctgatatttggtcattaggtgcctaatcgacttactacggacactataacactatttnttgtntatacaaacttcatatgctctatgtgcngggacttaataataaataacccatagaccatcattttgtccatttttcaaattatataattatactgcatggagccttagctacccgcctttctttcaaataag

SEQ ID NO: 13139 - DNA, 203 bp, Oryza sativa
  unsure (1)..(203): unsure at all n locations
gcatttctcttttcttctgcagattgaagtgatgcttgcgtttgctctaacaactntacaaacattggatcagtctatttaagttataattgctatactatataactagaaaagggtttagatttatagctatgtgttttccacattaatttagctaatagaaacanacaatgtgtagctattatcatgactatcaacatgac

SEQ ID NO: 13140 - DNA, 286 bp, Oryza sativa
  unsure (1)..(286): unsure at all n locations
agcactgaggctgcagcttgtcacacaacgtaacacccgcttcagtcaagcactctcatctttatataatgcttgtatggactcangtcggcgaaatcgtctttccgggttacaccacgatgccgatctcaaccggtccttcaatgactggaaacgagaacgcagtggctatgaaccaagacggctccatgtcgagaaatccacccgttgaaacagagaacggattatcgactacatncaaactcgtgaaggattctgatgcggtcaagtctttgtccttcgacat

SEQ ID NO: 13141 - DNA, 201 bp, Oryza sativa
acccttacagaacatctattttatactctaaatgattacaaatttttgtgtgccaatttgtttactttaaattatgtgaccacaatgcatattacaaattttatctatcatggtaagagaggatagtgcaacaatacatgtccatgccgtggtatgtaactattttttctactggtcgatgacatactgagatctaacatg

SEQ ID NO: 13142 - DNA, 390 bp, Oryza sativa
  unsure (1)..(390): unsure at all n locations
aggacaaatctgagttggcggagaaagatatttcgaagttatctgatctgattggagatgaagataaggcgaaagaagttgtcgaagcagcataggcttcaatgggtaatgagatatgattacatttaacttccgttgtaatataaatctagtagattctttgtagtagtttttgtgggttattgatccttctgctcttcacgtcacgatctgtcagaagtcgattcgatgaatgtgaagcagtttgctcaaagagtcatgaatctgtctgaatatcgtanaaacctttatgagtatcttngtaccaagatgaatgatattgcacccgatctaacatcattaattggtgaagttgttggagcacgccttatctctcatgctggcagtctt

SEQ ID NO: 13143 - DNA, 132 bp, Oryza sativa
gactcctccgttctaatatttgtgccgtgactttttaatatgttgacggtcatttattcaaaattaagaattattattttctattattgatcattgtaaataatatatgttactatagtttattatttacaa

SEQ ID NO: 13144 - DNA, 373 bp, Oryza sativa
  unsure (1)..(373): unsure at all n locations
cattagctcaagtaaccaagcaacaccatataatggagtagttattagagatgctgcatagttcagagaatatgaaaatccatggacctgaagctgtcgactgataatgtgaccaanattcagaaactggttagctaactgaactgcaagcaaatgcgttcagcacagtggtggaccaaaattcacgatgatcgaccaatttttacatatatcagccttcaatcatgagttcgatcgctgttcacctaccttgaatttcaccgattatcatgcttggtttgcatcctgaaaccagaggctgcaaanagaatgtaatgcacatcagttagcagtagctgtcccattccagatacacgagcagtcaacagcaaca

SEQ ID NO: 13145 - DNA, 281 bp, Oryza sativa
  unsure (1)..(281): unsure at all n locations
cttaataccgctgcttctggatctctaccgagtgaatatcgtcatataatctttcttcatttcgncatccaagggatatacgacggcggaagccatatgctggttttcctcttttccagacagagttctcgaatggccagtcttgtggaaattgatgatgttaacgggaaggtgctgacttattctgcccaatacaggtattctaactctaatttctttgaacgcgagaacatatacctcattcgaattgtgacaatcctttctcatcccaccactactta

SEQ ID NO: 13146 - DNA, 282 bp, Oryza sativa
tggtgatccacaatatggagatattgcaaagaaatgactagttccccttgtagagcttatcattatccattcactgggcgcactaaaactgatatcttttatgacctatggtaaaaagagatattgttaccaaaactataaattagacatagtccagaaatatgtacgctaccttaccgcattggtgatgcctctttgcaatttgtacagatgaacacaggttccattttgaccagcttctgatgaactcccatgcgaagaaagcagaatgccggaaacatt

SEQ ID NO: 13147 - DNA, 265 bp, Oryza sativa
  unsure (1)..(265): unsure at all n locations
tacatggtttctgtatgactaggattatccattacctgttttttttacgaatatggacaccgcgtgagattggccacccacgcacactctaaagagttcgctctaacggctggtctggagattttccctcttggcggtgatccanaaatactcgctgaatgtatgagaataaatacttgtattcacatagttgagtatttttcagtttctacgtcacgatgattaatatatttggtgtattcatatttgagcacacatggtgaag

SEQ ID NO: 13148 - DNA, 415 bp, Oryza sativa
  unsure (1)..(415): unsure at all n locations
tctccactttatcanaatcttcaacggattcaccaatatacgtctttgtagatcgatattcttgcaccctcttttgtgaccactctcaactagcctctntactcattatataaatatacatggcttagccgtgctacactagccggctntacagaaataggtacacatttgccatccgagatactaataaaatcatagctagaaagatccctccccgataagcattggatattcccatgacgccactcacaagtagcatcggccattgcaacctcggctgatatatccgcttcaacaatgtcaacatcatcgncgtcccattagaatanacattgatgtcaggtagaaagcacacaacaatttgcatgaatctaacaacgacccacaataacattgtagttaccttgcacatcga

SEQ ID NO: 13149 - DNA, 286 bp, Oryza sativa
  unsure (1)..(286): unsure at all n locations
atcttatatatagtttataataatgtagcggctgcatggttgcatgggacattgcataattggacctacatggaacaaattactgttgcataacaagaatatggtaggccaatcaagctgcccacctatcaatgtgtatacaaattaagttagtcaataaactaaattaataatacattangtgaacatgcttaccttaacccattcatcacagaattcacaaaatggtgaccgagtaagcgtttcatgaccatcaacagtacaaacaggcaacacacaactgaat

SEQ ID NO: 13150 - DNA, 542 bp, Oryza sativa
  unsure (1)..(542): unsure at all n locations
tnataatgcaaggtggtattatatattatcttggtaagtgattagtaagatttaatatggacttttgacaacattaaaaaaagatagatagttaacatgttcaatggtgttacacgcttggaattggtagccacggaacttttattctagtttggatgacatggtacctatagaatattgtgatagaatttatgtgattttggaaatattattttagtagatcatcttattgatagaagttggtggttcgtcccattatgccttttttttttaagtttttctatgttcacttctaacttctaagactttntgactgtgtccatatatagactggagataatccatttccattatctataaaangtactgcactttaccgtttaccgatagttctgtcatctcatacganaattgtgaggtggattttcgtatacgacatacgaaaattgtgagggtactactttatcacataacaccgatcataaacatatcatagggtggatgaaatgtcactaataaatacttattcacattgtatcact

SEQ ID NO: 13151 - DNA, 173 bp, Oryza sativa
  unsure (1)..(173): unsure at all n locations
ttcaccatcgaatatattctatagtatattntggtttctattggaaatattactatatatctatataaaggtggtaaacctgaacacatttgacttataacaaacccaanacaacttgccacatgaaacggagggagtgcattntaataatattcattatttatctactactt

SEQ ID NO: 13152 - DNA, 144 bp, Oryza sativa
  unsure (1)..(144): unsure at all n locations
tatgggctganacacagaagtctgatgaagcatcaaggtattccaaacattttatgccattattntccaggtaaatgctaatggtagcactataacatgttagtccatttatgtcttcaccagaaacccagagatagatatttc

SEQ ID NO: 13153 - DNA, 177 bp, Oryza sativa
cacgagtgacattgggacataaagggacaaaggtgtttctctatagaaaagagcaacggatgtattagcaaaaaccttcgccactcatatatatcacaaaggcagccactacgtctttttgtgactagttagctttccaaaagttagatttgttgcaacataaagaaaaaaggaaga

SEQ ID NO: 13154 - DNA, 414 bp, Oryza sativa
  unsure (1)..(414): unsure at all n locations
ntcnctagacactgtttctcattanganatcgtctctgccctctgcccacattatctntgtgtccttggatgaaccggaggaagagataatcacacacgttcccttgggttcgataccctcggaatactccatatgggaagtgctacattggtatatctgggcgcttgcggattctatctgtgatcataagaaataccaatatacatgcaaaggatgaacacagtgcatggtaaagtatactatcaaatggttctttgtcatgttcgtgcaattttatcttaagccttgtatgagttntgcttaaacgaaaaattggtgaataataaaaaaaaattataaaaaaatgtgttcagaacaaaagaagtgtctctcgaaaaataaaataaaatgttggcanactcgtgggatctatg

SEQ ID NO: 13155 - DNA, 376 bp, Oryza sativa
gctgatagattatctgcttgtaagaaacaatttttttctcaaaaagaaccgggggtctcttgtaacagctttttatgtacaggtcatgttaccaactaaccatgattgaagaaatctaacttgatagcaaggctgaacctactatccgcttcttttggacagacatgtctattagagtatgtccattaatattacgatcaacgctatgtccctgtatgccgcaacttaaatccctgacatttgctgggctgcaatcttcttatgcatattctgtcgtaagctcaatcaagtccttaggtgcagtgataaacatgtccgctgctatctataaaaggtcagaaatttttttgtgtagtatactatgatttgagatctt

SEQ ID NO: 13156 - DNA, 294 bp, Oryza sativa
  unsure (1)..(294): unsure at all n locations
nnttcatgtccttgtttatatttctcgagagctctgaattntacctggagcaatctgaggacatgtgttgtaaaacanaggcgattaatccatcaactagtaaacaagcaatgcattatagtataaacatgaatcaaagatattgcaatgaagctcacatcagcaatcaagttgcacgatttcaaatgatctatagtgcaacatattcactataaaatagaatgagctntagagttagtgattataactctataaaaagtatggatgctctgcacagaggttgcaccacaactg

SEQ ID NO: 13157 - DNA, 315 bp, Oryza sativa
  unsure (1)..(315): unsure at all n locations
cgtcatttgccaaggtagatacaaaacgacgatctccccacacaacctacttttgagntatgatcttatttcaacgtatgtgggtcanaataatggtcaaactaggtagaggcatgaagcctatctagctntgagaatcctaacttactatcaagatataatccactaattntaagactcataccacctcatcatccactagcaataattacatgcaaaacctatgcangcgtaatctataattcattgaattctacgaatcaacatccaatcatcttcttcacattatttttacacaagttttacatgttatat

SEQ ID NO: 13158 - DNA, 298 bp, Oryza sativa
  unsure (1)..(298): unsure at all n locations
gtagctgataattccacattcaaggtctctcatgttgttatgatgctcacatgtactctctctggtttttaatgtttgacgctattgactcttaaacacatgtgtgatgatttttcttgttccaaagaaatatagaattatcatntacttttggtgttatatgttacctcataactatggctttgttgtatatatgtatagattttaaaataagacaagtggtgaaggtatgtttaaatgcccacaatgtcagccattaaaaactgaagggagaaacgtcctgtggtgtttccgctac

SEQ ID NO: 13159 - DNA, 281 bp, Oryza sativa
ctcagcttcatttcgtgctatcctagctgttgggttagtttatgcattgtgaaagtgagccttggaatggcttaactgaatattctgacaacaaaaaaaaagaatgagaagattccattaagacagctatgaggttgattgagtttcccctacttgaccaaacaagttccaatttcgttatttcaactacactacaagatctttcgaattgggcaagactctctattatatgtgcccttctatattggaccagatggtgtttcattgaatatgcttcatta

SEQ ID NO: 13160 - DNA, 262 bp, Oryza sativa
  unsure (1)..(262): unsure at all n locations
gatctaagcacgngctcagcttcgcgctcctgacactctctctcatcagctgttatttgagagagcttccttgtcgtcgggctcccgcgcgcgtttggccgcaaccagaggaaaagaaaccatcgaggggatgcacccgcagaaccagagtatggctatccgtcaacatcctgatgaatacggtttttttccggcagctcattaaagaggtgtttgaaagggagtaacacttggtccagaattattttgatcattggtccac

SEQ ID NO: 13161 - DNA, 178 bp, Oryza sativa
  unsure (1)..(178): unsure at all n locations
atgacagtatatatacttcgtgaaagcgcactgtgtcaatataatggtgattggagaatgcaatagttaattaatgacagtacttatcacttactcatatatatctcgtgggtcctgggaagcanacacaacaatatttgctatgtcaattaagatctatcattatgttgatattact

SEQ ID NO: 13162 - DNA, 104 bp, Oryza sativa
  unsure (1)..(104): unsure at all n locations
tgngtgggttggttggttngngtttcattatagtagtggtgatgaacatatagatgcatgagaactgaagcatggctggcgactgaaatagatgtgatctccac

SEQ ID NO: 13163 - DNA, 325 bp, Oryza sativa
acctcatctcaatgagtctttggttggctctccacgcctttgcatagcttatggtgtacttgaatatgttctcgatgtgcctaataattgatattggttcaaagccaatgttaccaacaacactgctgtacatctcacttgccacacaagctgaagtgatgtttcggtgatacttctccaccccttgtaagtagcacttgtgctcggtcacaatgctaactttccaataatcattccatttacccttatatgcatggacacgccacggacaatcttcctttatgcacctcacttcatacacataatttgttgacttgaccaccct

SEQ ID NO: 13164 - DNA, 109 bp, Oryza sativa
  unsure (1)..(109): unsure at all n locations
cgatctcatgagaaactctaattccattanggatatataatggatttatcggcgcaacgtatctggtgcactcatgcacacacacacacaattatgcccctccaatcta

SEQ ID NO: 13165 - DNA, 307 bp, Oryza sativa
  unsure (1)..(307): unsure at all n locations
ntctgatgcgganatgctngccaagaaggcagaggctgctcatcggcgcaagatgcaagtctataaggctactaaagaaagcgaggtcagaaaaatggttgcctgcctttcttttaagcatatattaaagcctcgatttcaaggtgttctcaacattgttaatctctgcaagctgaagctataaagaaaattntgggcctcgattcttggaagaagaaagaagaatgaaagcgcaaggagcgagaagataanggttattgcatcattcgatcatgcttgttttgtacccttattttctctaatgcgt

SEQ ID NO: 13166 - DNA, 136 bp, Oryza sativa
  unsure (1)..(136): unsure at all n locations
tatctagtagtgtccgagttaaaggaggatgtggcatggcaacttatctatttattacgtatacgttnggtagccccttctatctttaggagagtgtgttcagtgtcctataacgactctatgttttctttttatc

SEQ ID NO: 13167 - DNA, 366 bp, Oryza sativa
tctcccgacgtggctgatccccacgggctgtgtgatccgggttatttatgtcttgtgggtaaagagtaccctctctgcagaggttaacaaactgttctaacagccatgcccacggtcatgggcggatgtgaggtgatacctaacgtagttttgtttgacaactgcttgtgaaattactgttgtgaaaggcgttcgatgtttgaaaaatcagcagcttacgggatcagctaggcccgggtggccgtttgaaaagatgtaggcccgggtggccgtttgaaaagatgttggcccgcgtggctcgttgaaagcttgttgccggctgccaccttgttttaaatctaaagatgttgccatactcgaccggac

SEQ ID NO: 13168 - DNA, 319 bp, Oryza sativa
tactcagcttaacgttacgaccaatctgagttgataagcatctctggatcatgcgctgattagttgctcctgcgctctctaatccacaaggcatggtgatgtagcagtatgcccccaagggcgtgatgaatgaaagacttaagtaattggactcctttatatggatctgatgatatcctgagtagcaattcacaaagctgagtatctcgcagccggccgctgagtcaactacctgttcaatgcgaggtaacccgacaggatcttttggacaagatttgttgaagcggtgtaatcaacacacataccccattgttccgtc

SEQ ID NO: 13169 - DNA, 144 bp, Oryza sativa
  unsure (1)..(144): unsure at all n locations
cgacactatanatacccagcttgcttaacacctaaatccgtgacatgctgaaaccacagactcacccttgcctgtatatataatatatatatatagatatatatacatatatatatatatatatgncctccactccgaagagaa

SEQ ID NO: 13170 - DNA, 208 bp, Oryza sativa
taaataactattactccacagcatcacacatgagattattactatgcgaaaaaaaagggcgtgtttatacaagaaaaagccctaaccctcatcaatgctcaagcctagtacctaaacaaaaagggataatttctatggatattactctagcacaagctcatgatgcccattccaaattttctaccacagccataagaattgatggggt

SEQ ID NO: 13171 - DNA, 76 bp, Oryza sativa
ggcgctgctgcaaaatcaagatgctgagttgtctgcgtcatgtttcgtcactcgagaatcaatagtgcgatgataa

SEQ ID NO: 13172 - DNA, 438 bp, Oryza sativa
gcttcatgtgttcaatctgttcactatagtcaccttactcttcattgacagctttgtgaccatcgactggagctccgttaagatgctgaagccgctggctgccctgttaattgcatcgataagaggaggcagatcttcagcatccattaagtttcgtgtcatcgtcacaatcagagataaaactgccgccagcatttgtctgtccacagattctgcacgaagtgttctcacaagcacctgcaacattatgtttatcttcagtatgacaagcgttacgatccaacacaaagactaattatcaccctatatatgatgctgatataaataaagcaagtggttcttttcttgcctcaaacagactatacctctggactcttaacctttaaggcttccttgaggctctggatatattcatcatcatcagtgtgatgaacacac

SEQ ID NO: 13173 - DNA, 267 bp, Oryza sativa
  unsure (1)..(267): unsure at all n locations
gcttcgtattaattagctcttgaattctttttttagnctatctggagtctcagctcaacttgacgttaggccaccgctatttaacaaatcctcaaagtgagctcattgtaagcgtttacacttatgttggatctaaggaactttcaacctactcgctatgaatgtctcacccgggaaacgtcataaactggtatgaactacgagcctggaactacgtaatcaagagaacgattttctgtggatcatcacacgggggagtgtccaaca

SEQ ID NO: 13174 - DNA, 149 bp, Oryza sativa
gtggtttttgcaattttatgtaatggaaaatagttttataatactattaattgaggtatagaacatttattagtacatttatatatacataatataaaagcacgttttaatgacgtgaacctatgctgtatagatcgcagacacataga

SEQ ID NO: 13175 - DNA, 269 bp, Oryza sativa
  unsure (1)..(269): unsure at all n locations
ngaagtagagggatcgtcggctggggttgatgtaagtggctccacttgtgttgaggaagaggccncttgttgtggctccctaggacgtacgtctccaagaagccaacctttgattgcttcgctagggtcctcctcttcacctaacacatgtgagtcaacttgctctacttgagagccgctagtttcgtcaaatatcacatcacgcgcgatctcaacaataccggaggttttgttgaaaacgcggtatgcgcactcatttgacccatacc

SEQ ID NO: 13176 - DNA, 94 bp, Oryza sativa
  unsure (1)..(94): unsure at all n locations
gctgaagctcanagtagaagacactatacattagagcttcatggattatctattngtgagtcagcttagtctcttgaaacatgggtcccctcgt

SEQ ID NO: 13177 - DNA, 301 bp, Oryza sativa
aacatatggtatgcactgaccaaagacattacgcaatattcatgaacagaaagagatgactgcttcaacaaaaccatgacgacaatatgccatttctctatgcgttcctaaccgtagtatctacaagttagacccttttacacagacgcaagtaccattctgacgtgcaggatgtctttggtttacacttcttttcaaggcgacttgatatacttattttcacaattactttaactcgaaactgattttcttgaaatgttacttcagaacttcgcttgagattcttaagcaaatcactatc

SEQ ID NO: 13178 - DNA, 425 bp, Oryza sativa
  unsure (1)..(425): unsure at all n locations
ctacaaatccgattntacagctcttagagattatcgtcacgttgtgtgtcatatttataacatctagagacccgtcgaatgttgtcattatactcctctgcggcccgtccactgtctcttctctttattgtcattgagagattataaatcgaacataattatcgtttgcgttcatatttagtttctagaagataccgccaaccattaacggctgtgccattgtactcctctacgggtcgccctctgtctcctttctttattgtcattgagaatnttaaatcgaacatgactatcataggttgtgttttacttctagaagtatcgaacccttcaagaatggacttgtaggntctcttcttttataatntntagaaagtccatcaaacgatgccactatgcccctctacaacccgtatgccgcctac

SEQ ID NO: 13179 - DNA, 290 bp, Oryza sativa
  unsure (1)..(290): unsure at all n locations
cactatgaaatactcagctttcttccattgtaactaacacatactntcaattaacagaggaatgtcacatctacacaacacctcgtgctaagaaatgtcaagtatggtgcccatcacatatgcaatgacaggttactcctcttaacacaaacacacctatctacacataacatattagcaatttataggcatgtgctaatctcacaactcttaatttcatctacacaccgaatgagttgtcgacgtgccatccatctcaagacttttgctatatatatgtcaaagctatg

SEQ ID NO: 13180 - DNA, 88 bp, Oryza sativa
aaacctgcgcttccaacgagtggcactctccacatcgcccgcttgatgcatcatttgcccaatcacccgcgttccccccccacattga

SEQ ID NO: 13181 - DNA, 202 bp, Oryza sativa
atttggaactctgtcctgctttaaggcacaacattgatatagcgtgcacataacgatatgtgcagtttatatcaccaactctgctatgacacatgcgcatagaaactgtgtatgtgtgagaaaacgccgaatatgcaaggaaagagatagggcaatgacactttaatcccatattactctcttaatagcatgttctatcttt

SEQ ID NO: 13182 - DNA, 179 bp, Oryza sativa
gctttggtcagatttaaagttagaacagcgagattcggctgcgaaactctcggtcgctattctgatatactctgctataataaatatcttcgagtattcgattatttggaaatattttagtcaatacaacgatatgtcctacacactaaaaggatgttgggttacataagtattatgta

SEQ ID NO: 13183 - DNA, 258 bp, Oryza sativa
  unsure (1)..(258): unsure at all n locations
gcacctgaggcatgcagcttatggcgtggaagaaatatctgatcttcggacaacttgtaaagtatatatctctctacaatagatatatatcctaggcttcagngtattcgcaggacgtattctgcaagagtctcgtattatttatagtctgatagtacatgttcttctcaacgagatacacaaggagtttttgtttatttgaccatactgtgttcacaactctcatttactaaataatacactgtctgttatgacagc

SEQ ID NO: 13184 - DNA, 217 bp, Oryza sativa
  unsure (1)..(217): unsure at all n locations
tactaagcttgtcgattttagccttgtattngtgtatcctccgactctctcgttagttgtgaaacaactgaacatagagttgagaactgtagcttcttgtcttcgagtagacattgcttgagtgaagatatgtgttgaagatgtccgcgtaaaaatcttgaatattggagcaccacttgttgtagtttagtgcggcgtcgaatattgtggcacatgc

SEQ ID NO: 13185 - DNA, 332 bp, Oryza sativa
  unsure (1)..(332): unsure at all n locations
gcactgngctcagctctcataacatatgtatagctgtggcatgcttattattcaaaaatattttagatatgagtaaaatactattatttttataaaaacgtcattanaacgaggagcattcatatanagataggtataccaatgctcacacacattcttttatgaatgcttctgataaaaaaatcattgcctattaaaattcnataagaatttaattcttacatttatgtatttccaaattatgtcaaaatttctgcactagtattagtctcatagtntatagatgccacatgtgcctcaacaaatttcattattttgagctatattaacct

SEQ ID NO: 13186 - DNA, 365 bp, Oryza sativa
  unsure (1)..(365): unsure at all n locations
ctcagcttataaacatctggcatggcttgtcaggttaatattntgcactataatctggatgtattagacaaacacgcccacagtacctgtaacttggctataacgtaccaagcagacaacacaatggtaggaaagtagattgattgtctgtgattcgaatctggacggacactgaagctgtacaaaactgtgtaacaatgcactgaatgggtcaaatttggtttaaaacagaattcactaaataagcattgttatacaggtatgacacctattcaacagctcactctttatgacacaattgatgagtctttattgctgatgagtacaatatgcacaatgctctgtgtatagatttccagtgtgga

SEQ ID NO: 13187 - DNA, 276 bp, Oryza sativa
tcggcgagtgttagcacatacatcaataccgaactgttctataatctctatgtagcgcgtcgcgagctcaatgcactagtggagatcaacttttctttttatttatattattatattgagtttatttctttttccagaacacgaaaataggcacacctccaagttacagctcaatcggagttgatatatagcctatggaatttcttggaccactataaacacagtgtatgaacttgtgagcttcaacagacaatattgcatgcccaaattttggaa

SEQ ID NO: 13188 - DNA, 261 bp, Oryza sativa
tggatactgtccacccccttcttcagagaaatcgaccaaattggatcatatttcattacatttatcaatgcgtgagaataatggagaaatttaacggggaacccctcattcatgtctggagcctcaccatcatgatgtctggaaatcatgctaaatctcctaaaagagaaatttcaaaatattgctttggcctacaaaaccgaggggaaaactaaagggcttatttatagaaaaggccctggtttttgccaggtctaaaaa

SEQ ID NO: 13189 - DNA, 64 bp, Oryza sativa
ttggactcacatacatcgaacacacacacacaacgtgtacagcaccaccacaatggcagacaca

SEQ ID NO: 13190 - DNA, 516 bp, Oryza sativa
  unsure (1)..(516): unsure at all n locations
ctcagcttccacgatttntcagcttgaaaagattaatacatgagctctagtttatttatatataattgggctgatctttctgaaggcgaaatggtcagcanaaacgggttcctccatgcncagtagataatgtntttattctgcagtcatatggtacgtgtcttcgatagatggaacagacgatctgcaaatgatgcacagcgaagactgaagagcagtgtcagcaggaggaagtactggagaactggtgcaactgtgtactgtaatggagtgtagtgtctacagagatttctcctgtatataatagtggcagtactccttccttctgtccaaaataaatccaccctttacatactatntatttcataacaattcagtatattaagccatcattatattagatgttataacagtggagaaacatatgcattctgattngnnaaagtcgaaaatanatgtattggatattactanaatatgatataattgcactggagtatgccattcagtctttcc

SEQ ID NO: 13191 - DNA, 376 bp, Oryza sativa
cacctatgattaaataggaaagattgctttttttgtatatctaccggtttcctacgagtgggccggtctgaccgacatgtgatacgcggtcataccgacagttgtatgccgatcataccggctggtccgagtccgaccctgtttcgtcaggtctcgaggtatccttgctctggaatgtatgtttcaggtgtactttggattctaccccgagttggacgtggaagagggcctgtatatggcatgaccaacccatatatatcggaccatggcggttcattgtaattacaattactatcaatcactcgaatcgttctttcatatcgctttcattatctcttagttagtcatctttgcggattgcccgtaaccgtcgccg

SEQ ID NO: 13192 - DNA, 434 bp, Oryza sativa
  unsure (1)..(434): unsure at all n locations
tagaagccgctgaacaactcaatcaattgaatcttaatcaaaaacatgtttatgatggttgccttcaatcagtcaacaattgcattggtcacacattctttgtgcatggctatgggtggaccgggaagacatttctttggaatgctttgcttaatgctggtagagctcaaggaataatngctttggcttgtgcatcatctagcattgctgcacttcttctgccaggtggtcgcacaccgcattcccgcttcaatatccattagatatacaagaacattcactctattgctatcaaaaaaaaaaactcatctagcccaattgatacaacaaacatctttagttatatgggatgaggcacctgtcaatcatagacattgnnttgaagctctggatagaacactaagggatatcctatcctcanatgatccatccct

SEQ ID NO: 13193 - DNA, 534 bp, Oryza sativa
  unsure (1)..(534): unsure at all n locations
ctaagcttaacattgcttnnttttgcgtctatctgtgtgattactggacttatnttcagcatctgtttctggtgcactggaaatgcggagctaccctcataaagagaagtttatgtttgaacttaagtgtcaagtatccattattttctgaaattatccacgggtaagagctccaaacatccttccttttttccaagtaatgtgtagttcttccaagaataaaaagaggacatgtgcttttattgagcaacttttatggctaacgctataactattttggaaggacccacaagtataaagtgtatgatcgaacacaataaccaatcatattacagaatgggtaaatggtatggacaanaaananaactntttcacggactcaaacctaatgaaatttgatctcaccggcaacagtgcatcggtgtggctgctgtttactactggtcaactggttcctacgtgaaacctatcaccactgtgattgaatgccctcggtcgaccgtcgacccaaatacacaataaatactcatgaag

SEQ ID NO: 13194 - DNA, 523 bp, Oryza sativa
  unsure (1)..(523): unsure at all n locations
tactcagcttcacattgcggtcgatctaagttgaaaacatctctgaatcatgcgtttatatgtcgctcctacattcttcaatccanagggcatggtgatgtagcagtaggccccacaaggcgtaataaatgaggtcttcaagcagtcggattcttttagtcggatctgatgatatcccgagtagcaatccaaataactgagtagctcgcagccggccgttgagtcaactacctggtcaatgcgaggtaacccataaggatctttgggacaggacttgttgaggtcggtgtaatcgacacacatgcgccattgccccgtcttcttccgaaccaggactgggttagccagccagtcgggatgaaggacttctttaatgaagcccgctgctaacagcttggtcaattcctccttgatcgcatccttcctgtcctatgcanatacggcggagtcgtgcttgatgggtntagcgtcttccttaacatgtatagagtgctcaatcacctctctangaataccangcata

SEQ ID NO: 13195 - DNA, 141 bp, Oryza sativa
tcgcttctactgactggttgttcttttatttctctctctcactcaattgtacgctatcactaatgactctggccattactgattcattctcttgtgtattgtactatgagaattatttggattgtctgtatactgcgtatg

SEQ ID NO: 13196 - DNA, 443 bp, Oryza sativa
  unsure (1)..(443): unsure at all n locations
tgtctgaatatacgatcaggttaagatgttatcaaaattcttttatgttcagacaagagacagctgaaacaacataacagtatgatattagcaactgcaaatctgcaatataactacataagtaagtcgacttcagtgcacatagttntgtagtagaaccatcaagttcatataacagcgaatacaggactaaaaccatcagaaaagaacataactngaataatgtttggacagaacacttcagttgagtgatcccactgagatcttatacatcaaagatttccaagatgtcatcaacagaagtntgccagttacaattcggctacaaatttacagcagatattgagataacatgaagagacaggagtactaattatctgaagactngatatgctacaacgagcagttcacagcgaacaaatgtacttaactagattgtcaat

SEQ ID NO: 13197 - DNA, 237 bp, Oryza sativa
  unsure (1)..(237): unsure at all n locations
attaaaatatgaaaaatttgtggccttaatttctatgagcctcttcagtcacctacttcacactgcctcaacgacgtgcttgtatatatagtatggtggaggaccccnntcatgtcccgtctctagaaatggattatcagcggaggctaattcaaatcatcccgtcttaaactaaactcatggggttggtgggttgaagtttcatccgtcggacgtacttttatattcgtgataaga

SEQ ID NO: 13198 - DNA, 339 bp, Oryza sativa
  unsure (1)..(339): unsure at all n locations
cttctcttcatgccacaagtgtcgattagctcggatagtagcttcaatgtccttgcgctctcgcagttcggccagtcttaacttggctntctctagtttgaattggatgtgctcaaggtaaacggctatggtaaggatatcggctaactcatctgggattagagcctgaatctcatgtagccaagctctgattgagccacaatcaactaccaagctatctagtgatgatgcttctagctgatccaagatacttcctagagttttcttcacatcatcagataaaggggctaaagctntgcttgtggtatcttcttcttcttcatcaaggtagtctccaat

SEQ ID NO: 13199 - DNA, 318 bp, Oryza sativa
tcagtctcataatgaagatttatggccaaattcgtgagaagataatgaagaagttctagataagaaaagatagacaacattctacttggactctacaaggactattccgattgcatccatacttatctctctagttctacagtacttctacttgtacaatgggatatccaacggtataaacacgatacatccggaaggagaggggataagacaatatagagccacataagccatgacacaatccaacaagcgccacaaaagtcaagagagatctatagctacctataatctcgtcgagttccaaattgaagaatctga

SEQ ID NO: 13200 - DNA, 309 bp, Oryza sativa
tctagctttaaaaagctgttgttggtgttatgttataagatgctgctttggttgttggatcaggactaacttagctctgatttaacattattaaggttaatatgactcttataaactattactaaatgaagcttattgcagacaatttttagcctaatatcatattagagatgttactgagcatctatagctaatatggataataggctatagatcgctcggaatagtcagatatggtggattataatagctacgtaaattatatagatcaacatcgttgatggactaaaattagcccttaacaggtta

SEQ ID NO: 13201 - DNA, 534 bp, Oryza sativa
  unsure (1)..(534): unsure at all n locations
gtattatcacatgccggcttcttaaggagccgtatgaattatcacattattaccttctttacttctctcatgttaattaaatgatattatattcttaagatgttgtttcactcttttttcattattaccattcttactcctatccgagtaaataaatgcatgcactgcctttacttttcaattggtcattaataaaactaacactatgatcattgaacaatgaagacgtttcataaatgtattgatggcatgcacaatgtaattatgaaaaacaatactgtgatgaggattagtttccattngaaatatggtgccacgataantaaaacatgagtgtatgagaccataacccattgatctacattgcccctacatgtataacagatattacgtggatgcgtgctacaagtgtagtgtatacagtggctcatgaccatcncggtctactgatccacttatatngaagtactatatagtggatgactgacctacctacactgcattgacgaagtagatcttcatatgatgataatt

SEQ ID NO: 13202 - DNA, 168 bp, Oryza sativa
acccctccggacacgagcgtgtgaggaattttcaaaagattgccccatgaaagctctaaagggggcaggacatcaaccgaatgcaagacaccgcaggacggaagcaccgtcatgactctagagaacgacacagaaagcccacaggccgtatgcggcttacaacaggag

SEQ ID NO: 13203 - DNA, 447 bp, Oryza sativa
  unsure (1)..(447): unsure at all n locations
atcttgagtcactgtggcagacaaaactatcttcgccaatcttttaatagattacctcttaaaccacgctcaacacccctatatgccatagcatagattaatcaagtnttgaattgaagtacagatcaacaaacaatcctcagagctacaatagcaggaagggctgaatcataacgcataagtattacaagtaatatgtgaactntactaaaaggggagtgtaaaatactaaaatatgacaatgtaattaggtagtgtgggactaacgatcgtctaatggtagtcaatggatgcagtagagcttctccgctcatgtctgaccaggaatggatntgatcactcgagcgagtaagctggataactgttgcaaccaagactgataagcttctctcaacatcctgtccgtctcatcaaccaacctgaatgtcaatatattaagtagaaatt

SEQ ID NO: 13204 - DNA, 528 bp, Oryza sativa
  unsure (1)..(528): unsure at all n locations
ccgacanagatgaatttagatcgcagtctggattgtgttctttctatatggggcgctgtgagttggaagagttccaagtaaaatacagntgctgattctacaacataagccgaatacattgccgcttttgaagcagcaaaggaggttgtttggataacgaaatttgtttctcaactaggtgtgatgactagtgcttccagctctatggacctctattgtgataatagtggtgccattgctcaagccaacgagtctagatcacatcaaaactctaaacacantttgcggcggtatcacctctttcgcgagatagtggatagaggaaatgtgaagatatgcaaaatacatacggatttgaatgttgcagatccgttgacaaagccactccctcagcctaagcatgaggaacacactatggcaatgnggataagatacnatgcatgatngactctagtgtagtggaaactattagtgatatgccctagatgcaatcatagagatgatngtatcacatacaatgtntacata

SEQ ID NO: 13205 - DNA, 454 bp, Oryza sativa
  unsure (1)..(454): unsure at all n locations
tccaccagctgcatggcacataggaatataatgtgagagctaaacagtanaagtaaacgcaccaatgaacagagatgagagagagaacgatataatgatggataaatgtacatgatacanactaataaatagggcaagaattagataccgcatatgaatccctgtgtccaactcaagcacataatcacataataacaattgatccataaagaaggaactggtatacaaaagtttcattcanaatagcatgtcctcattctaactgtaaggtaaaaatgaatcaactaatttaaggccanagctaccttcggtgatgcttatgctctatgcttcacggacaattggtgataaaaacagggaagatgccatgatcgtattggggagtgagtcataatcaacanaaataatatcacacaatgcacctgcagcacaacatgtagntatttgtgacaca

SEQ ID NO: 13206 - DNA, 512 bp, Oryza sativa
  unsure (1)..(512): unsure at all n locations
ctcagcttgctccatacacgattcttantgcaccagcataaacaagatgttcttttgtctatgttcctgccctatcatcaaccctctcaataatgaatatggccatgacagatgtgaaagcaattgtcatctacatagaacaagcaaatatgccatcctttaacatattaaatattgataaaagcaagggtgaaaattatgaactgatgacatgctntatgtctctgacaggcaattctgaagaaaacaagccaaatatactagagcgtatcatgcaaaagatccaagtggattatttatccctgtttgattcaagcagatcacacccaacagaacaacactatctaaacagggccatagcatattcagattatactacancaggatctgagttgaattctatcccaccaacaaaaatgtatgcattgacattctgagacagcttcaacataatgaggtgtgtacaatcctagagcaaggcaatgaagtctatatacactcaccngcaatct

SEQ ID NO: 13207 - DNA, 379 bp, Oryza sativa
  unsure (1)..(379): unsure at all n locations
ctcagcttgccgtcgccttggaacgaccaccgtgttcgccancctctctctattgatgacctccggatgaatccggcctccagaagtcgcgccacctcctcgcggatgaatgcttgacgttccggggcctgccgccgcactttctgccggaccggtcttgcgcccgatcgcacggcgagacggtgctcaatcacctccctgaggaccccgggcatatccgccggtctccatgcgaagacgtcagcgtttgcccgcaggaaagagacgagcgcgtcttcctatntgccgtccagaagaccaccgatccgtgtggtcttggacggtccgtggcccatggcaacctccttgaccaggacctcgtcgcatgtgactatccgct

SEQ ID NO: 13208 - DNA, 268 bp, Oryza sativa
ttgacggaaacactgtcgtcgtcgtccgtcgaggcctcaaaagatagccgagactgagttttcacccggcataacccctataggtgatgggacgtcacgacaacgccctcaagatggaaagcgacgctcgaaatgcgatgttgtgctggctcggccaggccaaggccaggctgggttttcacctatcgttcaccacctgcctattcaccaatgtcgccacaatgctccgctaccatcgaaacctccatcagctcgtgggcactgagcc

SEQ ID NO: 13209 - DNA, 79 bp, Oryza sativa
acataaatccgctccaatactggaatgataatttgatcatcgtggagacagtatatctccgacacttgtgatcatagtc

SEQ ID NO: 13210 - DNA, 106 bp, Oryza sativa
  unsure (1)..(106): unsure at all n locations
cactatgatactcagcttggcgccacgatagaatgcgatgagctcatgaagatcactcgcagaggcctcttacctgcgcgccagatgacagagctnggngctcctc

SEQ ID NO: 13211 - DNA, 288 bp, Oryza sativa
  unsure (1)..(288): unsure at all n locations
accgcccggtgattcttttttgatatacancagccaactgatgcatccttacatcaagttactattcatcacaattaaatgtctatctggatcctacaccactctgttaaaccctgtcatgaaacatgtcaganagggaactataatatagcaatgaatttaaacacccctagtctagcttgacataggtctaatttaccaacctaataaaaagccgcctaaatcctgactaactatactgatcatgcaaaaacatgtctatgatcgctactccgtttaccctggtat

SEQ ID NO: 13212 - DNA, 439 bp, Oryza sativa
  unsure (1)..(439): unsure at all n locations
tgtacaaccggacagcagctatccgtttctatggccaaattgttaagatagtttgctaggtagctagtgctaaagataanattctctccaatcctggtcaaataagtttgctcagcaaggtaactgaaaatctatgacattgntcagataatcagtactggtgctaaagattagttgaatatgtcgagggcctggtgttgcacgtccactgcttgaaggagcttctttgccactgcacatgcataaaccgccgaaccttctgatacctgagttgccatggatgatgaatcgttactatcgatgctaacatgtgtaatgngacanaaagaatctttgattctactntatgaatactgaattgctactcatccttctagtngaacatgattatatggtgatcacctataatgccactcactacatgtatatactctgactg

SEQ ID NO: 13213 - DNA, 546 bp, Oryza sativa
  unsure (1)..(546): unsure at all n locations
tcacaatggatccctcacacgagctntatttctatacctttttctatgtctcccaatgtacctagaaggttgacaacactaaattatgaataaatagttgtaaggacaagacaagcacttatttcgaatactatgtntaactaatattttacctctcatatggatacatccaacgggctataacaggaccaccaagatgagcttcacggtgaagatgtacaattagatgttgcattagattgaanaaccctggtgggaatatcttctctaatntgcataanagaacagcaacattctgttcaagtgaatgtacaacatccttgcttagttctttagcacacaactgtctatagaatatactaagctcagccaaacaaacccatatattttctggaaggaatccacgtaaagctaccggaagtaatcgctcaatataaatgtggtagtcatggctttctagaccaaatatcctccttctcagtanggttgaccctcttctatattggctcatancatcanggaactcagatctgaaccattgagata

SEQ ID NO: 13214 - DNA, 439 bp, Oryza sativa
  unsure (1)..(439): unsure at all n locations
acctcactgtacaatgcgactgatctatttatgtctataaagggcatcgcttgttctagttntggacctttggcatattttattgagttgtntnttccttgcttctanatggcagctcgttggtgtataacaagatgattgcacctatggtagaagattatattcgaccatgtagtctgtcagaatggtaatctagatggctgctatgcatttggtattagttgtaggagatagtgtatgccattcaatgagctatattggaagcatgcagataccatgggataataaactgtcatattntgtggtggctgcttattgacaatatgatatgtagtgcacttttaatccccttgtgtttgggtgccgactatcaatnntggaaccatgtgaacctgtgactcgatgcttcaattcgttgtgttaactgatanccaggtct

SEQ ID NO: 13215 - DNA, 497 bp, Oryza sativa
  unsure (1)..(497): unsure at all n locations
cgctagcggcccacagaattctccgctctttaatatgntntcgctagcgggcggtgcgctcctccaccagcgaagatgtcttcgcctataagtagctagcgcacgcggctgataatttcctatgtcacggagtcgcgcgaaccctaatatttgtgccgccaggctgccaaaatttcgagcgccgccgccagcgataaaactagcaccggccaccgtcgccgctttctcctccattcgcaccatccactnttcggacatagctcctccattctctccacctcctcctctacgctgtctccaccggcgactgaccagatcctcctcctctccaccggctcctcctactcgggccagcgtctacaccaccgccgccgccgacgcagaccaccttacctctaacccgcgcacaccgcaccaaatcagtaccttctttgccgccgtcacaccgtggctttctcgcaccgcagaccgtgcgcgctctgacctcttcgacgcgg

SEQ ID NO: 13216 - DNA, 519 bp, Oryza sativa
  unsure (1)..(519): unsure at all n locations
aaataatactatttcttagggcacaatgagcttttgttagattaaagcaggatctgcaatatttgctctgtatccgcatgctaccattcacatccaactctatatccatcanatatctatctatgaactcttatcatatccttggttcacgaggattcgtcagttntgacccttactaacaactaataatgggctctgacaaaatctcagagaaatggtagctacattagcctgatgacacacgttcgtgtagaggcatagtntcaatgtccaatgatggcgcatgatatgattaaataatcatcatgtgctaagcttgcccncattaaatagtcacgtcgntccaaggatactntatatatctgcatgtatatntaaataatactatntcttaaggcanaatgagctnntgttagaatanagcangatntgcaatatntgcttcgtatccgcatgctaccattcacatccaactctatatccatcanatatctatctatgaactcgtatcatatcctt

SEQ ID NO: 13217 - DNA, 382 bp, Oryza sativa
  unsure (1)..(382): unsure at all n locations
ctcagcttcccggttatctcgctcttatctnttccgctgcatttgtaatattttctatatttgtaagacgtggatctgtatgtcaacaattgtcgtttgtgtaccctggctggtcctggacagggatntaatgcacattcagcttagaaattctggttcgagaatttctgggcgtgacaagttggtatcagagccgaccttgaccgtatgacaagccaactggaaaccctaagagccctctgaaccccttcttcatctgcatatngccttttgcacctggaattggtntgggaaaatttggagttntgcctctntggttngcgggaaatatcttggtcgttcattcggatcggatnnttttttttaataaaaaaatgagctc

SEQ ID NO: 13218 - DNA, 484 bp, Oryza sativa
  unsure (1)..(484): unsure at all n locations
taaatcatatgctaatagaggaattgtattcatacangctactcactgttattcctttcttcaancaaaccataacccatgtttcttcgtgttaacacactcatgaccagtacagattctgtcatcgaagaactgaacaaaatacacaatgtacttcatccatcttcatgtttagcaagcctgttgctgtaaggaacagtctaagcaattcttccggatactactgctgtaaatgcacaccttatttcaaatngtactacttgtgagactcgactaatttcattcagtattgagtaggttgataaagacgaattggttccggacttgttggtgctcccacctggaactgatttgcataaccaccatttggtctcagaaggaanagtactnttacaagtgaagactctgatctctataagcgttactcttgaatgacctatngaataataccgatagcttcttcctcatctttaactcctttcac

SEQ ID NO: 13219 - DNA, 545 bp, Oryza sativa
  unsure (1)..(545): unsure at all n locations
ctaagcttactggtggtggtncaattagcatgacaaattttgganagttattgtttcatttgggaaaagttgagcacatctcgaaggtgatgaatgatgtaaatgtaaaggccacagtgcaattcttaaggcagatatgtgtgcacggttgatatacgcgaatcttatgaacaattcagaaaggtagatgaaaattgtcccgtactggaaacgtctttgtcgctcaatatcgcctggtggatatgcgcagtctcttcacagcgaacgacctatntagnntgattttcctcttcactgtcatgtattgcagaacagaattaattcgaatgttcgacaagggtagtagatgaattgggctttggagagtggagactacatggtggtatgctgcctaagatattcagaaaatcttntctgtngtgtgactatgctattctagaaatcaagacattaagactttctgtgtgtgaactatatctaactgatatctgtagttgcacttaaaagtngacaccttaaaaaacaaaacagatagctgctacaca

SEQ ID NO: 13220 - DNA, 465 bp, Oryza sativa
  unsure (1)..(465): unsure at all n locations
tattttttttctgttgtcctgacaacatgcgctaaaactctgtttaacttgngacaggtcggtaacctgaataaagggatcaatccccttgtcattgcgcagctaacgttccagtccaggcacatgaagacggcagtgaaagctggtctctttgctgggatcctagcactggcagtacgaacatgatcttgactcanactccctcatcaatcacttatactttacactctaattcaccggagtttctgatcggcggccatcgatgcttctccaggaaggaatagccgtcggccgaagcttggcgatggtcaagaacgagcagatcgacggcnacaatgagatgatcgcgtttggtatcatgaacatcgccggttctttcaccttctgctacctcacgacaggtatanatcttggcctctgcgacctttgntcagataaccagaaccatgatacattttgcaacat

SEQ ID NO: 13221 - DNA, 486 bp, Oryza sativa
  unsure (1)..(486): unsure at all n locations
ctaagcttcaaagcacagaacgtgctctgatagtgccgaggtgagatatgtctgatgactatttatgcatctacatatgatgattctatgatgaattngattccatacatgattcttcatgtctgtaggaagaactgatgacgctgcatttggaagcaacaactaagtcaaaacagctgacagaggtaaagataccttgatagtacgatagtagagctgctagtataatcctttcagtcatctaaacttgatgcatattagtatcaataatgtgaagacaatgatcctacattacagttatgatcttattgggctaaactaaactctcaagttaaatgatcagctggtggagctgatcagtgataacataacatgaccaagagatacatgccttgtagatgcacagtccttttctttgtcnccagcatttgctgatttcaaaatacatatgtgttatcattctaaagtatctgaagttattctaat

SEQ ID NO: 13222 - DNA, 491 bp, Oryza sativa
  unsure (1)..(491): unsure at all n locations
tctgagctactccctccgttcataaaaaagacataccctggtttccgtattctttatttaccgtccgtcttatttaaaaaaattatgaaaaaaattaaaaagaccagtcacgcataaaatattaatcatgttntatcatctaacaacaacaaaaatacaaattattaaagaatttcatataagacggacagtcaaagttagacacgaaaacccagggtttgactttcttttatgacggnggagtatgtgccttttctttttcttgtattagaagctataaaaaaataatttaacaccttcagtttgctgtgcaatctgccagtaccgcaatgtattttgagtagtctttttggcttaccgcgcacctagcaagatggcacgatcctctgtangtggatntaaattntccttcctttgactgtatntcaataccacatcttcctgatgttntaaaccatgacctctgacaactgaataacttctgaatcatc

SEQ ID NO: 13223 - DNA, 242 bp, Oryza sativa
  unsure (1)..(242): unsure at all n locations
tagagtgtctagttccccgatgtacagatcaattgccatccattgngactaaatggaaacatccctagtaacctgcagctcagaaatgaaacattgtagtctttcagaatggtgatcatgtcgaaattaacataagcnaaaggtagaataacgcaacacaccataagaatgtacaggaaatactagtgaatactgagaaggcataataaaacgaacaaattcaaatgtgtggatcttacttt

SEQ ID NO: 13224 - DNA, 426 bp, Oryza sativa
  unsure (1)..(426): unsure at all n locations
gactgtgatgcattcttgtgtactgataagttatagcttgatcttctgatgcgtttgatttgtgctttattgacaaggctttcactatgtaatgaanaagcatatgattggcatgtttatgaaattacaggctgtatgcatttttacccaacaaatgcggacactctaacaagtaaacgacactctagagtagaaaatgagtagctctttctcatacagcgtggcatgctaacaataacaagcacacacattagagctcttataagaactgtctccataccacttggaattataaatcgaagaacatacccataacgttctcatcggagttactntatctgcagtactcagagcatgttatgatcagggttnggtattgtgctgctctgtganatgtggttgttacaagatatcttactgatccat

SEQ ID NO: 13225 - DNA, 282 bp, Oryza sativa
  unsure (1)..(282): unsure at all n locations
cagaccaacaacaggttatgtcccagaccatacatgtccaggaagcccagaggtcctccccgacaccaccccggcgaatacacatgtctctcggcatcaaggctcccttgataagctagttactcagctaagggtgtcccattccacccatgtggncgcacttagcttatgtttggatgaaattccaaggaatcggtccttaagtgcgagagcggaaaaccgtacacccggtacgttccccggtccgcggtgttggaaattcatttagatcacaagcaccga

SEQ ID NO: 13226 - DNA, 460 bp, Oryza sativa
  unsure (1)..(460): unsure at all n locations
tctatcaaaatatttatatcacatacaaatattcatatctttactatctaatacatcctagagcttaatatataagcatgtcccatatcatttccactttatttcaatacatatttatccatcatttctaccatatgtatacattcatccgtgtatctttctagcaagatgtaagacatcaactaattatttcactatagaaaagaggtcatgaatttgttgttgatctcaaacaggatcgggatcccctgcagtagctatagctgtcctagagctactattggatcagaaattctttccctgtagtattgtagtagcagttagtactacttanaactgatatagcacatgtctggatcagtgatcgcctctcgatctaatgatggaaaacggtcccaactgcctttgcagtctctactacgactgcaccggatccttatgcgtctcanatctattgatt

SEQ ID NO: 13227 - DNA, 520 bp, Oryza sativa
  unsure (1)..(520): unsure at all n locations
tgcactggagtgatcaatctctttcttagaagcttgntgngctccttgttcttattntctagagngattntatagtccttgagaaggtactatattttctaatgtaaaatntangaaaaatttcacaattcttgagagataccgagaggtactaaatttggtacctcctattaccaaaggtaccaagagatactataatttacactaganaatatagtatcctccagtaccgactcataaactgtaaaatcactcaaagtttagtacctttcggtactccaggtactaggaggtaacagtttgcactaaaaactntgttaccacttggtatctctcaagaactgtaaaatttctttattntctatgtgtggagcanatagaggatattaccctatatatgataattcactatatgctaactatgttntcacanttaatgtaccatatctatatanttataccagtgcaatctttttttattagctagtagtatacctcatatagatcgatggtgttggta

SEQ ID NO: 13228 - DNA, 348 bp, Oryza sativa
  unsure (1)..(348): unsure at all n locations
gacgtggngattctcttaggggcttacgaaatttcgatgttaacaacttcataaaattaacattgccaaactggtgtggtctcattcgcataaactagacaagttcgtgtactgaaacgaatattttacaatattatatactatattgcattcaccttacaagattgtgtatcaccgatgcanatatgcaatntactctttacttanagtttacagctcttctagaagaaacctgttgctgctcaccacagtaaatgctatccattntcagcacttcttcattctcacgaacgtgccttctgtcttcaccggccatcattgntgagataggtgaggtcctcatatcta

SEQ ID NO: 13229 - DNA, 411 bp, Oryza sativa
  unsure (1)..(411): unsure at all n locations
acaatcatgatacaagttcaagttcattgtcaacctgtttcttctggaggctggattcaatctaaataaaatgtcacctgaccattccaatactgattaaataactaatctaatctatatcaatgaccatctaattcactggaacactctaatcaaatgttctaacaagaaccatttgattatgcatacagatcttggcatgggaaaattacttctctggagctccgcggctccggccgggagcgccagcgggcgggcactctgtaccggcgacgcacaccgacggcatggcatgcaatgcctgcccacactgcgactcatgcattacacggccattcggtcgcgtcctctctgctgctggcactgataggtaataatttgnctgtcttgtattgccatggctaatataga

SEQ ID NO: 13230 - DNA, 215 bp, Oryza sativa
  unsure (1)..(215): unsure at all n locations
actagctcctccctatatttgaatatctcaaccaccccgtttttattcctccgccaagcaccgatgatantttaggcgttgtgagtccataatccttctgcacttttcctagccacttagatgaactgcatcaacgcatcataagactcctctatattcggcgaataatcccatcaaccaatggagttgaacgctgccccaattttcatcatctt

SEQ ID NO: 13231 - DNA, 453 bp, Oryza sativa
  unsure (1)..(453): unsure at all n locations
tgcagcatataccatgtgttgcctatgccactaccagaatgcagaaattctccgacagctaacaaccataccatatgcatcaagaatgagcataaactgtccatcaagagaaaccagtcagggttaaatcatatacttgacctaattngatcgatgatcatatganaacttgaaatgatataatcaaattattgatcgtggatgacattaattgttgacatatagctactaactccgatcgatagagcatcgacgaactggaaaaattaaggagatggtcgactcacgaatcacgatgaatcgatagtgttcgcgcgcgcgctaaaattgatgcgtatgccgtggtttgcctaccactntangagataaatctacgatatcgatgctagctgctgctagcaaggctctgaatntctgatctctgaattctgaaagcgtaatagacaacgcaat

SEQ ID NO: 13232 - DNA, 426 bp, Oryza sativa
  unsure (1)..(426): unsure at all n locations
ntctactccttagtataacggggtaaacttaaacaaaaaattacttgctttctagtatatctgatgcctctacacccttctctgctaactntataattggcaccaaacgcagactggatagtaatcatattttgccacatacagtgcatgcagcctatcaagctaattcaaaagtagatcgtgaaaagcccatcaaggtaatgcaaaagtacggatgaaacattgaagcattaaccttgtagtaggcagtcgctaagctatgatatttgttagttggttccatgctcctaagataaaacaaaggatctaatatgtgcctagcaaatatttcttgctgtatgtctgctagtggatgtataatggaagctgcaattatcaactatttctattcccttaaggcttgttcngataatcccaccaattaac

SEQ ID NO: 13233 - DNA, 505 bp, Oryza sativa
  unsure (1)..(505): unsure at all n locations
gcttaagccttntgtngcatcacannaaaagtctatactgtacacgactacacactctctcatgcttacatacatggctggtgcatgttctcagttcctgggcttgcagctgaagtaccatggccaagaactatgctcctctctcctgcatcgtacaggcactcatatgtgatctactgatcttctatttatttgcattgtaaatctaccaagaaacctcacaaatgaagcataggagctacctagtccattcctgggttgtgattctttcgtacataaaaccagtattctcttgccaacgatacactaagccatacgtgattgatccaagtttcaacaacaatgaagaaatggttcttctctacattagactcccggtgattaagatcctggggcttcaaaaangttgatccttgagaataaagtgggtagatcaaggaagatatccacaagtgcgcgctctctgtangcacatacacctagtcatcaacaaatgaacatctgt

SEQ ID NO: 13234 - DNA, 348 bp, Oryza sativa
gtgtgtgtgtcacgcgacgtcgtttttttatgatacgacgttctgggactggggcagcaacacttgtgaagaatgagatcacgacgcgtatgtggaagttacggtggagaatttcacaatcccagtccaatggagtgagacacatgcccatgatgcagcagccactccaaccatgctagcaacatcaccaacatcaagcaccggaactgaacaactctgcatctggtgttaattctgttccctccactgatgctagtgaagggctgatgaatggccaggagctcagaacagtggtgacacgcttgcaccttgaccccatctatgatttaatacagtgatcatgcctat

SEQ ID NO: 13235 - DNA, 420 bp, Oryza sativa
  unsure (1)..(420): unsure at all n locations
tcagctcctcttccacatgcacctaccttttttctcatcgngtttataattccatgcccctcgcgttgcatctttgaattgttctctcgaaattcgcttccccctcttgccccctcgcctttttcttgtcttctctttcttctccccctcgctttcccattcgctcgcgctgcttcatcggcttcatggaagaagctgcagcggcgaatattccagctgttccatcttgacctgtggcgtttgtcctcgagtcgtcctctgtccaaatgggccatcaagcacctgtctggttgattaattttgatccatttcttttctctgcaagttgccattattntttctctctcacatgcatgtggtggcagttgtacgaggcatcgatcgaaattaatcaggctattatcgatcggaattgatcat

SEQ ID NO: 13236 - DNA, 488 bp, Oryza sativa
  unsure (1)..(488): unsure at all n locations
gctgactctctaatatagtcatggtgctgtttgttttttaagcaattgattggatacaatatcgttgctctttgccacgtaagtgtgcatttttattgaccaatattatggcttaagctgattatatattgtggtcatctttcaagcgggtggtaaatcctttatgagtttatttactcggattntataccacatatgccatatatttctaggtgtggtggaaccatgtgtcttctanggacttaagcacatctgttaaagcagtgtgcgcatggcgtatgcccaatactttggaaatttctttattcacaacatacaagcttctttatagcatatgtgctatgtgaattatcaataatgtagccaactttaggttacactcatcatatcttacatagcagtcggtatatcactcggantcatgtattcanggatttacaccgcatatgctacnatataatatcaagtcgcttgggtatactatatat

SEQ ID NO: 13237 - DNA, 517 bp, Oryza sativa
  unsure (1)..(517): unsure at all n locations
tgagcaagtngaaggtgatntctactcatttaaaggaaaatggcgccttatcatcttggtgatcagcacaccttattgaagtatatnggtgagactaagatgcataaagatacctttctctcagagtctatccttgaagaggtataagaaatttatatgcatgtagtttatcaataaatatagagaacacgttaatgttatgaagtggaaaaatggtaattaaaatacgctttgctgtgcccctgaatttcaattgtggctcactgaggaccaattgtactaatactatntaatccaggggtatatgttcataatagttggctttgatgcttggtgattaagtcttcaaagcaactttctgatggatgtatcatctatgtgagcataacatcgtgctattgtgctcatgcgatatactttagtctttatgttcaccagacattcagtanaaataaacaccttcctgaaatatgaatgaatctctatattctgaataagtataagcacacatactcta

SEQ ID NO: 13238 - DNA, 399 bp, Oryza sativa
  unsure (1)..(399): unsure at all n locations
tctgtcaaatcgaacatggtcgagcacgcgctggacctgccgttcccttgtctgcagtacatcaagaatgggttcacgctagtcgattgatgaatgcactattaggatcattattttccctttntttttcttttctctcgtcagcgtagctagccttctcattntctttctggtggtcgtttgtttgacgatttgtgtcaagtaatccttttgctccaaagcttgtgcgggtgcattgctgcttacacggcattttgactatgcgtgtagtactcatatatatntatgcctttgacttgcggccacggagtcagggccgtgcacgtggaggtaggctaaaccggaggccacggtgatcgttcagctgcatgtccatgcccacgatgttctcgcggcacc

SEQ ID NO: 13239 - DNA, 509 bp, Oryza sativa
  unsure (1)..(509): unsure at all n locations
gcttggtaggctgtcgctagttctctgctctntaaaccggcccaagccctactaagccaaagcccatagagttctgctcgaaaatctctctataaaagggctaagaagtactcacaaaccccanaaattgcagagcttcatttattgcatcttactccaatggttactcttataaaaaatctaatcccggagagaaattgaataagagattgttcaatttgtctttaggattaattcagaattgaccatctatggttgtattgagctaatacttcatttaccgtgaacgtgtttttaaaacagttaaatggtttattttgtgcgaaaatttntaaataaaattntctataacaaanaaatgtaaatatattttcaaaattataantagtaatggttactacctccgtcctanaatatagcagaatctgaacatatatagttgtctagattcatagctaanaatggttttattntaggacgcatgtagtaattatttatacgctaacaat

SEQ ID NO: 13240 - DNA, 485 bp, Oryza sativa
  unsure (1)..(485): unsure at all n locations
tatttcccattcttattatctntcctgtgggtgagtataaacataagagatntggttacacaagtgtgtatcaagtatcagatggcttatggatatgctccctctttataaattatctgttctactctgtgatgaanaatagaccacacatttccctcanaagcttttcactggcaaatatatatagaattaatcaccaaaattacgagcaggcataatgcgcttgcagagcataccgatcaaccatgcactcggattggatcatttatcttgatatgaaaccacggnttgttacattgttagttacattatgttacaattagcctaatactaaaccttaatttgaactgaacatccatntgactacagaccgtttnttgattccaccaattattntntctgtccaacaagtagttctagtttactgcatgtcgcatggtcatatatgtttggactctctatcttgcaattgaaggtcattatac

SEQ ID NO: 13241 - DNA, 262 bp, Oryza sativa
  unsure (1)..(262): unsure at all n locations
ctatcactgaagaagcatatgcccaaacattttgcanaggacagttgactggtgagctcatgatagaattatcccactatttcactgacacccaacataatctccagatgattagttatagagggtactggtaggccatggcgaagattcagacattcaagcattgcttcagatagattctacagggcaaagtgaagaaccattgctttaaaacaaaaactgaaagcatactatatctaagttttgtcggcatcttgcacac

SEQ ID NO: 13242 - DNA, 457 bp, Oryza sativa
  unsure (1)..(457): unsure at all n locations
cttgacgcanaacttctaaacttgtgtatcttgttgacaactcatagcagacaatgtattccacaagtaatctctgagaccattgttgatcaaatttccactttattacagcagcagcatctagcccatagcatgatttcagcttagagtaaatctggtgaagcctatattcaccctcacaatttgccacatgcctatagcaactattagtaacaaccccaccccacgtgtagctttaaacattgtaccacaatgagaacaccgagcttccgccagcgcatcaccatcatatatnggatcacaatcattgcatataagtgatgttaattcgtgtctttagttatagatgataaacctatatatgtgaattaagcatacattataacacatgatcgaacatagcggtcaataaatnatatgcatcaattgcatgaataaatagcagtagaattacatg

SEQ ID NO: 13243 - DNA, 438 bp, Oryza sativa
  unsure (1)..(438): unsure at all n locations
aatttaaagagttgctttggcaggggcttcttggtcactatcttgattaatgtggcactttcagatgctgcctggtgttggactgtatatgttgtatgccatacccncatattatacctataggatgataactttgcatacatgtgtggtagagagctagcatgcattggcatcataaatgaagtgtatgaaaactaaggggagaacattccaaccattcttaattntgaagcaacacactcacacacaaacattagtagcacacaacattcccctctactggtcctaanggttaaatanggcacacaaatccaaacctcacattggaaaacaagatgaatacttacaaactaaccttgatatgatgcagctataggtctagctaacacaagtgcagtgcatgcatgccacccctctctgccattctcatcacagtga

SEQ ID NO: 13244 - DNA, 357 bp, Oryza sativa
  unsure (1)..(357): unsure at all n locations
aagacttacccatcttatggaatgccatgcgcttgagcctatcctttgcttcatctggatatgtgaaccatttctccattgccgtccaagctcgctctttctcggcttctgtgaccttgccgatatctntatggaggatcccgaagttctcacgtgccgccagcccgcagcagttataccatcttccaatgacagtcctgggcgccgtgggcctaccactatcgtcaacctctcttataacttgcactgtggtaggccatatattttgtgaccggngatttctactcgacctacttgcacttgtcccgccctgacatcgatgtatagttgtcctgcggcaattctgtatcacaaaca

SEQ ID NO: 13245 - DNA, 385 bp, Oryza sativa
  unsure (1)..(385): unsure at all n locations
atattaacagcatatatgcttattatcttgtctcaataacgaagtatatgaactcaagttgttgtccagaaacatgtagttgtttctttttcatccaaatcatcaatcanatgagaatcagagccatgcaaacacccaagagagaagcatcattcaagactgtgtcattgtcagaattctatanttcgtcaacaatttaagtactccctccatcccaaaataagttaacctagtacgggatgtgtgcctgtccagattcatagtactaggatatgtcatatcccgtactaaattaacttattttgggacggagagagtaacaaactacaaaacatacttactagtgacaaaatactgatgcaaggacttagtctctacgtgcaat

SEQ ID NO: 13246 - DNA, 549 bp, Oryza sativa
  unsure (1)..(549): unsure at all n locations
aagtgtgagttctggttgtccgaagtcaaattcttggtgtctttatatctgctaaaagagatgctgtggaccccgaaacagtgaccgccgccactgaatggaagcaacccatgacagttacccaaatccgcaggttcttatgtttggcatgatattaccggagattcatcgagaacttctacaaaatcgctcgacccatgacacagttgttgaagaaagaagataaacttgtgtggagcccgcagtgagagaaggcgttccaaactctcaaggaatagctggtttcctcgccagtgttaatcttgccggatactcgcatggatttcatggtgtactgtgatgcttcgcgccaaggattgaggtgcgtgctcatacatgacggtcatgtggtagcctatgcctcacgccaactacgacctcatgaatgcaactaccctacacatgactnagatgtagcagcggaggttcatgctctantaatctggcggcactatctcattgcgaccgctgtgaatatatactgatcataagagtctgaatatatcttca

SEQ ID NO: 13247 - DNA, 552 bp, Oryza sativa
  unsure (1)..(552): unsure at all n locations
actcagcttaacacattcaattttntcttacaaatgttagttataatatcatttcctaccagcaaaagaaattgagagccaaccttccaatgttaggagcaagtcataagtcctaacatattctatttgctaccaaatcatgaaacccaactttaaccttttcttttcttccccaaaatatgacactggaactcctacttggaaaaaaaaaaggtgcccattcaccaaatatgcactcatgccaagtggcatattttccatgacaagagaaaggcatggacccaaagaggcccttttctggcctaatttgtngaaacttctggcagaatcagaaaagttccattntcagttggacataagacatntatctgaattctgaaatgacctccacacccacaaatctacagacttcanatgggcatatctagatgattgagctgatattggatgacacatgtnggcatctcaatggtaattttttggtgacatcatggataatcacagaacacagcgacatataatattttctacagcaacttcatctatgtaatt

SEQ ID NO: 13248 - DNA, 300 bp, Oryza sativa
  unsure (1)..(300): unsure at all n locations
agaagatggatcaccatctctgtctgctcatcgatctctatagatagctaatactccatatctgtcgtcgaaacattcgataatgaccatatatattcacttgtcaaaatcgaggtagctagatgagatgcttgccggcctgcttgctatatatctgatgaaattaattaattaatatgaccaaagaaagattattctccctctgcatacctgtccatcacaatctttttcggagaagaatattatgcattatttgtgaangtctgaagatttggtgacagtaataagtgcatatatata

SEQ ID NO: 13249 - DNA, 464 bp, Oryza sativa
  unsure (1)..(464): unsure at all n locations
cggcggtaagcagctggttctgcatgcagatgcacagtctggcatcttttttgatcctctgaatgtccattctggcttctttctcaccgcagcaagcatccaatataatcctgagtattgagaaatattgttgaagttgaagctgcacaaaatttgatgtccctgagtaggaatcagacatctagntatgcacttatgaaccagcccagctgattgcaagagatttgacaggcacattacagctctattaccatagttatgttcaccacgaggtagttgatttcttgctactccagcagcatcagtcagctatcttggtaactgccccttcagagtatgagagtagtagtcattatcatcaattcaacactcatggcatgtcagcaacctttgaggaatcgacatggtccagatttcctatttcctcatcacncaattcatctgtatctgaacccaagtcctct

SEQ ID NO: 13250 - DNA, 519 bp, Oryza sativa
  unsure (1)..(519): unsure at all n locations
agcggtacatgcatattttctatgggtaaaagggtcaatcaataatttaaaaaatcattatctctttctttctctaattctttaccgcactaagtccaatcccactcactttcatcaaaaacaggggtaaacgcctcattcattgaaaaaaatatggcaaaaaacaacaacccttaaatgtangccaaaaacaacaaccctaaaatgtanggtaaaatcggtattggacatcaaagtatgggtacaattgtcaaacaaaatttgtcctttctctgttctccctcggtccaatgcaacctatatatgtcttgtgatggctactntgaaacgaagattganggatgaatangaaaaactagaattctcacaaaaaatcaagcgcanaacanagaattataaacacataaaatatatgnataatcgttgattgaccgacgataatcaagattaatgaagaataactctaaagactccatgaatgaactatgtaaaatctcaaactgatgatgngcatctaaa

SEQ ID NO: 13251 - DNA, 209 bp, Oryza sativa
  unsure (1)..(209): unsure at all n locations
atcttanaaacttcatatagctagcttggcttaaaaataattactaacttttcctcaaaattaagagatagtgtacagaaattgtgcaaccatgtatgattcatacgccaaatacaaatgtctttacaaaccttcgaatgatattttcaattntacccttgaattaaaggatggcgangtaaaaaatagtactcaatagtttggggggg

SEQ ID NO: 13252 - DNA, 223 bp, Oryza sativa
  unsure (1)..(223): unsure at all n locations
ccactatngatgactatacctaaccagctggggtccagtaatatgaaaaagttatgatcctgacatgctatgcctccttagcagatatcagttcaatgataagattactcagactgacctatatctcaactgcactatgcactntctgctatctcggttgctggagaacagtaggatttacactggataacatctggaaactatatacactgcacatgaatgc

SEQ ID NO: 13253 - DNA, 239 bp, Oryza sativa
  unsure (1)..(239): unsure at all n locations
tgtgcgcggatacattatacttcagcgtcatcctcgacgatgtngaattgtgaattatttctaaaataatttcttggcacgggtctttttggtgaataagtaaaaaaaaccctaaattggcaaaatttccgccactaattgggatattctgatctgatccctcatcaccgctagcagatctctgtaatctcaccactgaagcactgctgatcagcagccaccaccaccggtcacccctg

SEQ ID NO: 13254 - DNA, 225 bp, Oryza sativa
acttagatactaagctgccacgcatcggtccttttcttagaaaagaccggcttttctcgcgacttttgtgagtgcaaggtgggtactgctggctcagtacttaccctcaagtagacttggctttgctcagataccgggagaccacttgtggcttgtgcgctaaaactgcgctactgggctggggcgcaaggcaaaacgtgattcttgcttgcttgtgcctagctt

SEQ ID NO: 13255 - DNA, 501 bp, Oryza sativa
  unsure (1)..(501): unsure at all n locations
actcagcttaaagctgtacataccatcgatctgtataattaattncatatatattctattagcaattaactggcagcggcataacagctttgcataagaagcgaacatgatgtgtattatttacttgtcactgcaagcaatggtgacgtaaagctttctgcattaccgggccgagctgcaaaggtgagtcgtgataaactttattacattcagatcacaaatgttgattataatatttgttttgagcattcaatcgatccagagtactacctgatgtagatcgaaccactatacatgaatatttgtcagaaccactatcaatggttgtcgttgatgaaatcccactgatggatctgagcaaccaatacatcacatcatcatttgcatgttcctagcatggccgaggaaccaatcatgagtttgttctgcgtatttgattcatgcagaacatatgcgccaagcagaacctgaacccggacaggtcgccttcaatctcactca

SEQ ID NO: 13256 - DNA, 552 bp, Oryza sativa
  unsure (1)..(552): unsure at all n locations
actaagcttgcgggctggnaggcttcttctgcccttgcggnggcgaataggacatttctgaagccgccttctttgagctagatgccatggcgaactggtcatggcgaagtcgtccttcttcggcaagtactcacgcgacccttcgccacgcatcatccttggttcatagccttcgccacgggtttcggcagatttggtcgaagggcctcaagccatccgccaacacatangttcataagtgctgaggttagatgcagtcgaaagaacttcatgaatgttggctgaaacgtgtctactgccattatgccaaaacagagaactttacttgtattaaatgaggtcacaaacacagagcccatccctagcttattgtgcacaaccctttctcatgcactntatatttctgtaacggtgtgtcctgagtaagtaaagaaccttgcttaacagttccggcccanatggatataacaggaccaatactnttatntcaccgtatttgtgatagtagtanggctaatataagatggcntcataccttgatatgtcactcac

SEQ ID NO: 13257 - DNA, 533 bp, Oryza sativa
  unsure (1)..(533): unsure at all n locations
tgctagagacanataaaccttcaaagtattgctagcatgcacatgaattttccatatgtataaaacaaagttctcttttctcaattgtttcattgtcatattattgcttgataaaaccatgaggtacaaactccccctcataacatgccaaaaggattcacgaataagcactaactccccctcaaaataacctccaattctccccaaacaaaaatcaagaagaaatcaaagattntgaataagacatccaattgccaatgatatcaccaagattatcatgaattgacatgtatacacttgtattaacaaaaactactacctcaaacacaagcatatganaagctaataattaagaaagtagaacaaaatatatgtcaatccaaaattaaatngatgntaccttgtgaagcaatcgtcatctcaaaattgaacactcatagggagtatgctgccaaaatacctacgaacgagaagatgtcgaggccttcgtgttggggtagaaataagaaaatttggatccaacactgagtaca

SEQ ID NO: 13258 - DNA, 495 bp, Oryza sativa
  unsure (1)..(495): unsure at all n locations
ccatcagcactcgatagtgttgtccactgcgcacaagaagaccacattcttctttataaagcatggcgcanatacatgatntgctccctgttgacaataacacatcataaacggaattcaagtctagttcatagttagtaagattaaggctccattcttttctaaagttagagctggctacatacctagattatcatgggcacgcttcccaagccgctaaatggtgagattgtgtnttttaataataaaaacttctcatgtataaaataaatccatatatcaactttgaaatattaaaaacttaattaatcaatctctaataagccacttcattactggtgcagctgatcagctcggctgaacatccgaaacaaacagagcctaaatgatagatagtatatgaacagacaatgggccatatactangactctggtgtaaacataaattcttgtgataaggaggaaatttacacaaatcttacctttaaggacaac

SEQ ID NO: 13259 - DNA, 412 bp, Oryza sativa
  unsure (1)..(412): unsure at all n locations
tcatcacctttcttgctcacacgttcttgctgctgccggtgattgtgttatatctnccaatgtgtacgtctcanattatttcaggaaagaagcaatctttcatacatggagtgaggagatatatgggttcgggatctcaggatcttacacaacgctgagtgcccaagttttttatattccagatccatctaagtttatggtgaaaaagggtcgacgccaaactagacgcatcagaaatgatatggatgagtcagaagcaggtgggaggactntacgctgcagcaagtgtgatctgcgcggccatacttacaagacatgcccgaagaatgcagaagttccaagcggcgcagatgctattccatctggacaggcaagtgatggtaggcgaccacctggtgaaggaacaacaagc

SEQ ID NO: 13260 - DNA, 386 bp, Oryza sativa
  unsure (1)..(386): unsure at all n locations
actcagcttatatatgcgtggggctattgcttttggcgctgatccttccatccacattgattcccaaaagcttgttgtttccccattgctcactgtgacgtgtgattgcggtaaaaagatgttggtcccctcatcccactggatctccattcctatccacggcttatttcggtctgtccactcgtgccatagccatctcaacctcagtgctctggcaaagcgcttcanagcatgtctaatatagtctacttctaacattgcgaaacattacatgtagtgaggcctacatatcataatcacaattaggcgaaatttgtttaaatggtgaaatgggtganattgaccatctatttccatgtcaaaggccgggtacagaactgcagcag

SEQ ID NO: 13261 - DNA, 456 bp, Oryza sativa
  unsure (1)..(456): unsure at all n locations
tgacctanatgtataattctcaagtacaagaatcgaagtgaaatgcttctttagngtaggacctacagcatattttgcagtcattatttaaatgggcatgtgcaccagttagaaacagacaaaattcataagataaaacatgatggaaacagtcaaatcaataaaatattagtcatgagacagtaggatattgagaagaaaccatagggagaggtggccaggattatgtaagacaagattaataactgtgacaccgaacatgactgggtatgaacaatattacatcaacccatacagaaagctaactaggtgtaatctgttaaacaagtgaacctcaagaataaataataatagaagttttatcaagtcaagcggtattggtctctcaggggaatgggtaagtaagcggtaatccatttgtaagcactaaattgggaatnttggctatatactaac

SEQ ID NO: 13262 - DNA, 469 bp, Oryza sativa
  unsure (1)..(469): unsure at all n locations
tgagagcacggttgggcatgcctgtctacgtgatgacctttttaattcattgatagaacatacagagactgtaattgcctcttcctttngcccatgatatctgcatccaacgcattccatgaccgtgtagntgggtttaacccgtgcatcttgagataagaaaatcctcagtcacactctaaaataatctggcatgctcgcactcgactaatgcatgaaactctgattcattgccattggtacagacttacagataggacaattacttnttttttcatatggcctatgtggagtgtagaaaagaaaaacaaagatagattatgtgtctcanaaacatgtgactttcaattcaacttatacannnagtgtaacaaataaactatgaatgggtatatagtntagntaantcatatntgatatgcatattatacactggataaattgattaattatcttgtattttataata

SEQ ID NO: 13263 - DNA, 472 bp, Oryza sativa
  unsure (1)..(472): unsure at all n locations
tggcgccacgatagaggacgagggcttatatatacacacgccgcccctatctgtctcgccagatgacngagcgtgtggctcctcaccgggagaccgcgctggcccacctttgccggttcggacgtgggcgctaagtgaggttctaagcactcgatctgtggaatgtttcgcgagagagcaaatgcgcaagacacgggcgatgtatacaggttcgggccgctgagaagcgtaataccctactcctgtgttctggtggatctgcgtatgaatgagttacaaagagctggagagcaagagagttcacactctagaaaccctcttcctctgtctctcctctacgagctcaagtcttctcccccctctttaccgagctccccccttcttaagtgggcaaggctctccttttatatctcaaggtgatcccacatgcaccacttctacctactcttcttttggtgtgactcaccctatc

SEQ ID NO: 13264 - DNA, 417 bp, Oryza sativa
  unsure (1)..(417): unsure at all n locations
tgaattttcaagacttatttatgatgatccacatcttttattttcgccttgctggtgatctgacggatattttttccctactgcggctgacttcccaatctagccccaccatcgataatcatatcaatggaccggtcttattgcatactttgaaaaccanaagataggatgattatcatctacatatcatgatgtatagcacacaatgtggacttttactatgctaagatgataagccatagctagttcaacagcattcatttgggaatcagatatgcatggactcatacacaagtttcattgtaaatgaaaaaaaaacaacaatacattctgccgattctaatggcaaaacccgttgtgtggtgagcctctaagctttccaccatgctccggatgcgtctaaaggcattccaactt

SEQ ID NO: 13265 - DNA, 453 bp, Oryza sativa
  unsure (1)..(453): unsure at all n locations
ntactggtttgacacctttaagatgcattgtaccaactcctattatgttaattcactgcggcatanaagggatttaagggattgggcacttgatcacgtgcactntggcctaagcaaaaagtgcctaagtccctaanagaacgtgacaggccacacctgataatatgggctgcagacatattangcctatgccaaaaaatatgccttcgacaccctttaaaggatgacgcatgtaacatgctcccgagtaataaatcttccgggtattggagaccaagtgtagctcatatgaatagcttctgatctgagtggntatcctttatgggatactccanaatagatgtaacaattgaatcccgactggcgcaagtattcagttgataacccttacggggaataataaatagtccagtctttgagcatagataatagacccatgatcatgaattcata

SEQ ID NO: 13266 - DNA, 471 bp, Oryza sativa
  unsure (1)..(471): unsure at all n locations
acctctgtacactatcttccatctatttatctggtcataactgggaatagctcccacgaacaatcagctcggattcactntctttacattccatttactttccattattatcttcaaggtgtcctcagttagcattcaacgcattcctttacacctttaaccttgatgtgttctttcccattgtgtcatctcccaacacatggcattccctggtaaccggtgcttgcactttatactccgtgtatcatctgatactgagttgaggatttcactccttgccttcatagaaacgactttacctaggtcatcttgcttacttaatgacatggtgactggtgcggagcaattactatcaggggtcttccttgagcgatgcagagcatgtntctgttatcaatcacctatcggctactnttttcatgctgagaacatctntgcaatctctttatcgatatctttcagctatctcta

SEQ ID NO: 13267 - DNA, 371 bp, Oryza sativa
  unsure (1)..(371): unsure at all n locations
atttataaatngaaactttatttcatgtttaggttagtgtaatatattgtttaacatattatttaagaatcgattttgggtctttaatagccaatagtgggagtaacaaaaaccattgaattgccgttcaaggggagagcaagtgacagaaattntcagncacctgagatttagataacactccaaaatattaaaagaataatgacctatattttaataatagaacaaacgtattgtttctatgaaaaaagtacagctcagatttcaaataggaacagacaatactacggagtactacgataatatagttataccacaatataagagaanatctcttgtacacccctacaatcttatctaatcccttctat

SEQ ID NO: 13268 - DNA, 406 bp, Oryza sativa
  unsure (1)..(406): unsure at all n locations
cataaatactcagctcggatggcagctcaagtgagtggcgtctgtccactgcataatactatcttgttcacaatcattcatcanagccaagtataacaatccctttaagttcagtgctctaactatatacatacacaattagaactgaactaatctggatacctcacaaccaaccaactgcttcataccactgatacaggaaatacaagggacaataaggaggaacagaaaattaaaaggagaaatggaaatgtgaatacaaccacccaaggtcataggcctaagaacatcagtgacctcaaatctcaacccagacaccaaattatcaacaagccggcactaataatccctgagtcttccactataactgcatacatggacaactataacattgcatcatcgacct

SEQ ID NO: 13269 - DNA, 439 bp, Oryza sativa
  unsure (1)..(439): unsure at all n locations
ctcagcttgctgncatgataagatcttatagaacatanatgtctatctagatggctttgcttccgcatttcaaaaccagctgagctttaataagatgtacaaacccagctagctcagttggcatatttagtccctgcacatgatactgggaggattccggggcaaccctactcctccattgaaaatgttaaggcgatcacgactaggggaggtaagtccactcgtgatccaccgtatcctaaccctgccggaactaatgggatgtcaaaagaaacgccatctaatgactcggctgacaaggagattcatccagaaaagacagtgccacacgagtactgcgacacacggttgctgccatttcctcaatggagtaagataacgtcagtggacgagctgttcgctcgttnntgtgaagtgatccaaaaagatcacatcaacg

SEQ ID NO: 13270 - DNA, 400 bp, Oryza sativa
ggatcataccaacgccccctattaatggaagatatttgcaaaacaaatttgcataatatggttatgcttgtttttgcctttctttctctgctcgatcactggtttttttcccttcgccaagacctgactttgcctgatcctaaaataatgagagcgttagagaggtcatgctgtcaaacgcattctccctactctgggatcttctttatctctgctcctttatcaatggaccatacggtctaaagaaaaacggctttcccactatgagactatctcacggctgatgattaggtgccggacgactgtctacactgacttaacgaaaaatatataagagaagagaacatcttcttgcacatacacaatgcaaacagtggttgcgaactagtggaaaaattgc

SEQ ID NO: 13271 - DNA, 247 bp, Oryza sativa
attatcaccagatcatgaaacactacagattctcaccacatatagtatcaattatcaacagcacgggaactagaatctgtgggatttgtgcaaaactacttcccttcccttttgaagtcaatcacgaactgaacaaacccgcccaaatcagctacacgataggtgtacggaaccaaaaattggtcacggtggggaaaagaattaagggggtaggagtcagaaacccggcgcaccttggtgatcttga

SEQ ID NO: 13272 - DNA, 411 bp, Oryza sativa
acgaatgcatcatggcggtggtacaggtatgaagactggttctggcgccgtgatgatgtgagctcacttgatctgctagactatgggaagctgctcgacgcacagtgcgatgcattgacaaccgtggaatagaagataatgtgcacgaaattaaacctaccattgtacgaagttgtttgaccagacatcttcataaaatcatagcaagcaccgagaggatgtacctatataataaccataaaatggtacaataatggcatgcatggggcgggtgggagctgatttgaaatgcatgaataattgtctgtcttgttgaatgggcgttatattccatgtgtgacagatgtaaaatctcaaccgatgcttgttcttgaatatctcactgagatggcatattcgcgtttgtcttgc

SEQ ID NO: 13273 - DNA, 344 bp, Oryza sativa
ttcccctcctctctctatctctcacctatgcatttaatgtatttatcttgaagaatgtgaaatgctagcttttgtattaaagccaatcctctctaaattttaaaattctctatcattcacataaacttatagatggcttatagcctactagtatacctgctcttagtattagggtatccccacccaatgactaggatggggtccatacattaaataagtaccacttatgataaaaaatgatgtggcaagtgaataaatgaggaaagagaaggaaaccatatcttgcatgggacatggttttctacacaacatctcaaacatcatgtgagatatatatcattaat

SEQ ID NO: 13274 - DNA, 398 bp, Oryza sativa
  unsure (1)..(398): unsure at all n locations
ctgcaatgatgagtgcgattgctatctggaagggataaatgatcttttttgtatataaaaggataactngtttaacccattgttttttatccatatgcctaacataattaatgctcgtatcaacctccttaccatcaggcttagcaatagtattagatttcacaagattagactttcccaatgaaacatacttttgggccttactgcacaacctcttaatatggtccatgttgaaacatatattgcaccgaacagcagacttacttaatcgagccaaatgacccggatccaatcaacggaaacaaatcatatttgaattccgatgatgatccacagaatatggatccagctgcgtacctttctcgacattgttaacatcagctccggcgatcaccgga

SEQ ID NO: 13275 - DNA, 272 bp, Oryza sativa
atcaacgccgcttatttaaaacctgcttataaaaatattgttgccagatgctggcagaactcaaaatataaagctgtcgcatataaagactctaagactttgtgagatgtaataaatttattttatcgcattacaaaaaaaggagtttctacgagcctctataatctactacatactcggtgtggcatatataaaatcttttgtttttcgaacgacggctttactatttaacttcgaagtttttgtttacttaaccaaatttctagatttat

SEQ ID NO: 13276 - DNA, 411 bp, Oryza sativa
tctgatatcaagaatgatgcgacatgacagcttatctattaattaggcatagtttggtagattccttctatctttaacaaagtctgtttagtgtccgatagggactttaatcttttcctttttagtttctttcttggccgacaaggactagtatctccctatgggtataaatatgtacacccggggtctatgtaatttatcaatctatcgatcaacaatactctcggcgcatcgccaccctctttatcgagggttttacttatcttccggcgggatttgggcacctgacgcggggctgcatcggctttctatcttcggcgaaggggtaaagtctatgtttcgtctggccctgatgaaactgtcggctacgttggtgttgttcaacgctgcattccttcgatctcttggaac

SEQ ID NO: 13277 - DNA, 407 bp, Oryza sativa
  unsure (1)..(407): unsure at all n locations
agcttgtcgagctcttctcgtatggcttggtttcgatctggggcaaatctctgcagntattgctttactggcttggcgtcgggtcgcaccatgagtatgtgctcaatcacctccctgggtacccccggcatgtcggacggctaccaagcgaacacgtcaacattgtctcggaggaaggtgatgagcgcgagttcctatttctcgcctagtgatgccccgatcttgacggtcttgtcggggttggcaccggagagtggaacaatcttgattgcgccgtccggtttcgacgtcttgtttcttttgctcactttcttgggtggctcaactgtggcgggtgggctgggcgtgtgctcgaccatgtcgaggcttcgcttgtcgcattgtattgcagcttaacattctcttga

SEQ ID NO: 13278 - DNA, 233 bp, Oryza sativa
cgtgtgcaatgaacccatgttttctatgtttcatccaccacaaacaagtggatatatacttggtgaagagagacgtggacaccatgcatgcatagcctcttcctgcctgaaattttgcttaagacattcttggctagactggtggtgaagtatcgacaactcaacttcgaactgcatgatcacttgcaacgcagattgagtaccttcgcgaacggtttaagagtgggtttatg

SEQ ID NO: 13279 - DNA, 155 bp, Oryza sativa
gacaaaacacagggacacgctcacggaaagatcaaatgtatttttccacaccaactgcacaatacaactatctatgaaaatttgaaacaactacttcctctcgttcatattataaaactttttagcattgcccacattcgcatatatgttaatga

SEQ ID NO: 13280 - DNA, 424 bp, Oryza sativa
  unsure (1)..(424): unsure at all n locations
cttgagcgatatcacccgccaagactcaagcccgcatgagtcgcttatcttttttttgcacataatattaccaagaagaactacattgttcacacaaacatattctctccgatgtcgaatgcctgctgtgcaggacatggtatccgagtatctatggttgggcctttgggtcgcatatcatgagatgggccacgtaggcctaagtccatgtatcgcgtgtgtggctcgataatgcaattgatgttattccatgtgattaggtggcaatacctggattataagggataacctactaaccttatccgatcgcgcccatgtctatatatgcggagccggttaccctaatgcggggattctcttatgcgctacgatatattcacatgttgtgttggcatatactgatcanaactaatctacatacaac

SEQ ID NO: 13281 - DNA, 433 bp, Oryza sativa
  unsure (1)..(433): unsure at all n locations
gctttatatttgtattactcatgggttaaaaatcaaagattaagaatatactacgatgaaaaaaaacctaaaattagctataaaatcaagttttaaaatttggctacagccagcaaacagacgatcctatgatctacgttcctgtcacaccactaatcacaatatttatccaaagatgagaaatgacccgcatcgacaggaccctttttttcaacttatcgattctagtaccctatcataaaagggatgtctccaaatcctattcagcccaaccaatctaatccgtacatcaaattatttgcttcaagcatgtntatgcattcctttttcttttttatttttaattgagaattccttttgggtntttggcaatgagcaactggattgcaggtatgagttactaaatcataagagcagtagattatctatacta

SEQ ID NO: 13282 - DNA, 319 bp, Oryza sativa
  unsure (1)..(319): unsure at all n locations
acattcttctgctcttagggttgntgggtaatttggctgcaaacgaaaaactcacggctaatttggatcatttcacgtgtcatcttgtttctgactttgcagggtccacagagatcatggaactggatgtgacaattagtgaataagaaacatcttgttgtcacgaggacgtgaagaaatgtacacagattgctttggcttcagttttccctgcccttatcacggacttcctgtgagcttatggcttgcatgaagcctaactcatagatctggtcgacctcgtgtcaatgctntcttgaatttcttcacatgcatctac

SEQ ID NO: 13283 - DNA, 423 bp, Oryza sativa
  unsure (1)..(423): unsure at all n locations
agcttgcctgacctgctgtngcgtcgtttgaagaagggtcctggaggaagacagagcccggtgtgaggtccagcttggtccacagccggctctccagctcctggaacgccgtgccgttggtcacgtccccgaagaacggcgccctgaagtacatcaccccctggtacgggtacgcgcacgcgcagctctgcgggctcatgctctcccccaccgcgttgcacgtccccgagaagcacttgacaaggctcgtcgagtacggcgccgccgcggcgcgctgcgtcacgttgcagtactgcgtgttcggcagccggtcgcacaccgggttcccggccagcctgatcgatgtcagggagttaggcaaggagaggcagcagcgaaggccacggcatcattcggagatggttggttcaatggactcacgaa

SEQ ID NO: 13284 - DNA, 243 bp, Oryza sativa
ttcgatccaactcatgaatgctcgatatctttctctttcttctccatacattcagatagtgggaagcgccttacccaagaaccccaacctagacccgagctatgatgtcatgattccaataaccaataaccgtcgcaccgtccacagctgcgagatgaacatgacatgaaccactcactcctgcgatgctcaacctggggcgcgatgcgcccgacctcgtctgcggcagcgacagttacagca

SEQ ID NO: 13285 - DNA, 426 bp, Oryza sativa
  unsure (1)..(426): unsure at all n locations
agcttactaaagaccttggagtatgacttatacgctccacctattgggtagtctacagacggtctagtaccagataagactctgagtgaaacttgcttgcacaatacttgcaattcaaggcgtagtccattgttcaagttgtgagtaagtgtagcttggagatctaggtggatgttcaaccttaatcggtctccatcgaaccgctggtatataaacagtacattgaaaaaggcaaatctcagtgggattttgagatttggtgggggattgttggaattaatagatgggctaaggcccattcgaagattaattctttagaaaatcacanaagcccacctcatgggatggcatgcatgtggagtntagtaccaccttggtattctaggagaggcggacctccttaaagggaggatgccctctaccatt

SEQ ID NO: 13286 - DNA, 262 bp, Oryza sativa
gcttgtactttattagaatactcttctatatacatgtatgggattgaaattcttttcgtttatatgagtacctactttacattacgttcatgttatactgaatatacggctagcttatctgggagatgctttggtgcgggtatagtgttcgcttatgcaattactctatgtcatgacgatgatattagagtaatatctggtagtttagacgtggggactagattatgagatatcattaattggcgttatatattgcagatga

SEQ ID NO: 13287 - DNA, 404 bp, Oryza sativa
  unsure (1)..(404): unsure at all n locations
tcacattatactcatattggtccaagtgagtcctgaaagctggtttatgcacatcatctggatgcattcggatntgatgattccccgaacgcagatccaatttggagaacaccctggacccatgtagttcatccagtaaatcttctatgatcggcattgggaatttgttcttgatagtttggccattcagctgtctattatcaacacaaagtctccacgacccatccttcttcctgaccatgacagctggtgaagaataggggctatcactgatctggatctcttgggattgtattaactctgctatgaatatttccatggattccttctggtagtggggaaccctgtaatgtctgacgtngtgtggatctgacccagtcttcaagttaatggtgtgatcacac

SEQ ID NO: 13288 - DNA, 488 bp, Oryza sativa
cttaacttgaaatggtacaagatcaactaatgttgctcaatgatttgcttttcattatgtaagtttcagcatttggtagtagttaactaattcggctcttttttgcctgctaaaagagttacaacatccaaaatgaattggaaaaaggtatcaaaccaaaatgaggatcgtttgcctgttaacgccttaatacggtgaatatcatatgcaccaaggatgatcttatagtccatatgctggcacaattgttcaattctaatggctttgccttatagaagaatttcgtccgtcgaagtgggagcttccgtaagtattattgctcatatatttgcttacttttttaattcttttcgttgacaaatgttataacatttcatcatatgatatgctgatcaagaagcatgctatcacgtgatagaaacatgaacaatcaaatggaatacgtcaactattaacttctttctttttgaacactcctgttttatatt

SEQ ID NO: 13289 - DNA, 412 bp, Oryza sativa
gcttaatttaccagctagctgtaacaatgggccccatcggttcgcttattttctaataagccaaaacagtttattatgaaataaaaataaatttataggtaaaacttttatatatgtgttcttggtgacttaaaaaccaatgctaaaaaagaaactatgttgaaaatatctcaaaatcaagtttgaaaatttaagatttgggtttttctttgacttaatgggccatccgatgggagccaatgatacacgtactaatcatgccacatacggataactattctaaaatctcgagggatgttctctcattattcgtactctcgagggatatcctctcattatatgtacgtcacttaaatgaatatgaaaaaaaaagaagacttattaatatgtgatatatcactccacaaacatg

SEQ ID NO: 13290 - DNA, 403 bp, Oryza sativa
  unsure (1)..(403): unsure at all n locations
tgactcataatacttcttcgatgtgtcattgttgtactggtgtgttcttaacctaccctatctagcttgatttaattatgcgcagcggcatgcatgtggttttgtgttcttagatcctatattgtatggcagacatggtactggcagaatagagctaatgtccccttgccatgggctagagttcagcatgtgatttgattatgtacgtttgtcagtatagtttggaagaagatgagaaatgccgttcatatgtgcaattcatcaacaaccagcagcattgatggttggttggtacttgagttttgatggatggattcgtgtgatgctaattgaagcaccaatgagagcgcgatgctgaacatggtgatcacngttgtccacctgctcttcttcgtgttcatca

SEQ ID NO: 13291 - DNA, 355 bp, Oryza sativa
atcagctgtggcgacagatttaccatgttgtggggacaacggcctgaatgaacaataccttgcttcgggctgtttcaaattgtgcaacacgagtccacatcctgaacgtggtgcaacctcgcatgtgatcttcataaaattctcctaaaccatttgtaacatgcgataatacaaatgccggcatgtctgcaacggagagagatacacttgcgtatgtaaatcgggacatgtttatatgtgcttctaagcgagaccgtcctaaactttaatatcgagtcgtcagttccaacaaacatattgtcatgggcggatcacccagaacattcttatcctaacacataaatatacgtatgtg

SEQ ID NO: 13292 - DNA, 217 bp, Oryza sativa
aaatatatctcaattataccgaattaatggaagtggaacggaggcgatccgagctaccgatcgatggatatgaattttggaggtctaaatggaatttctggaccacgaaatgttgtgtcagaatttatggaaataatattctcaacatattatcgacagtcactgaccaacgaaaatgattcatggaattttggaataacgaatcgatttctgaaag

SEQ ID NO: 13293 - DNA, 341 bp, Oryza sativa
tttggtgactatataacccggaactctagatgcttcaacatgtgttttcaaaagcctgccttgtgactttggaaacctgaacagcctaaggaaatttagagcgaaaaatttctgttatcttccaggagaggattcacgcatgcagtttctaagaagagagagaatcaaagtgttgaaatatgtaaatcatgtacagggaaagttgcttgtcaatatgcctggtctcaaaagtaaaaagaatattggccttactgtgttgaaaaaggagaataatctctactctctccatatatctcaatttgcagaggatgctagatatgaacaggaacaattggaagtct

SEQ ID NO: 13294 - DNA, 289 bp, Oryza sativa
  unsure (1)..(289): unsure at all n locations
attctacttcatcttctatatgcctaagaggatattcagatgcctgatttggagggtgtagaattgatatgaaaagcactattggaacatgtcattttcttggtacatcattgatggcatggtcttctaagaaacaatctaatgttgctcaatcaactgctgaatctgaatatgtngctgctgctagttgttgttcacaaattccttggcttttatctaccttcgaagattattggcttacttttgaaaaagacctctcttttgtgataatctagtgctatcaatatgc

SEQ ID NO: 13295 - DNA, 366 bp, Oryza sativa
  unsure (1)..(366): unsure at all n locations
agcttgaatctttactttggcatattgatgattacatcaataanaaaactcatacagagttcatggaattgcttcctccacttttgctttccaccaaagatgtctatgttggcagggcatatggtccaccaagagaaagtgagaaagttatttcactagagttaggtgccttggatgttttaatatcagcatgtgaaaatgctaaaccaatgaacatccaggtataccttgactcttatcgaaagaaaatgcaagttctaactgtggcagctggcatggttggatcggntaccaccaatgaggggaaaaaatcaagtgatatagaagttatggaaacaatgaatatgaatcgactggaaagtgttg

SEQ ID NO: 13296 - DNA, 426 bp, Oryza sativa
ctgcaccatcaaccatccattgtaactccactggttcattggtattctttgctttaacatttgtaatgatgatctcatgcaatctatcctgaaaatgtttatttatttaatttttggtaataatatatgatgaacaagaatagaatgcagcaaggagatcctagttattaagtgaagatatgacaatacagaatgattaagaattagcttatagtaactaatgaacatcacaggtgcttctaaagattatgaagggtgaaaataaagaatggtagattaacacttcaagtgtaaaactatatttatgccggcggtgtcctgcatatacagatcaggctagactgaatatctcgaaatgactacttctgaataaacaacatgcaaactatacattctaatgttcgattggactgttgacatgtagat

SEQ ID NO: 13297 - DNA, 393 bp, Oryza sativa
gatgaattctatcgtgttattgtgtcacttcaaagggcactgatgattaatatactgtataattctgaaccaaacataccaagtatgatgcacaacaagtgagtgctatttgctatcctctatagtgtgataacatattccatttgtatcctctttatgcataggaaaaaaaatcatggagtgtgataaaaacattgaatagttatcacatttcaagtggagacaaaaaagagtagctatgttgaatgaaagcaaataacgacattgcttctgacaaattattctcatctcatggagtctatggagcactgctttggtctgctgtgaataatctgaactcaccataaagcatgcctgtgtacatagggtatgatggcatcttcccaaagcttc

SEQ ID NO: 13298 - DNA, 480 bp, Oryza sativa
  unsure (1)..(480): unsure at all n locations
gctctctggtcacaactctgtgatgaaaatctggatgttctgtttcataaaggacaggtctcgagttcttgatgcttctgaatctactgtttttgacatttctcgagttggtcgaagtttctttgctaacttcgactcttctgctcctggtccttctcgttgtctcattgcctcatagaatatggattngtttttctggcatcaacgtcttggtcatattggctttgaccacttgtctcgcattagtggtatggatttgattcggcgtttgcctaaagtgatagttccgaaagatcttgtgtgtgcaccatgtcgtcatgggaaaatgacatcttcnttccacatgcctgttcaatggtttgacagatggaccgtgcaactgcttacatggatacggtggcctgctcggtccatcagttgggggaatggatgcttgttgtgggatgattcctcctactctggctatttctgatcaagaga

SEQ ID NO: 13299 - DNA, 400 bp, Oryza sativa
aacctgcgaacaacactccctattgttaacatatatcacatacaatctccctcacgcaaaatcaccacgaagaagaatgtacaaataatagccacttaatcgctaggggtgacaatggttcatataatacaatacatcgggatatttcatcacaattgaatatttcgactattcttcattacagaaattggttacgccttgcctacatagcaaccaaagcaagaagatagcaatggcaataaagctaccatggcgtgccattatggcattatctatcagccacaaaggcacgattcacaaaagctcagaagcaagcaccgaagcgcgtcaccggctcaccgctcggacgaatcactgtgcagccagccagatagcacaccggaagcacgagaggagctcg

SEQ ID NO: 13300 - DNA, 366 bp, Oryza sativa
  unsure (1)..(366): unsure at all n locations
tggcattggattaaaaatagttagtaatgtctttgttattgtgaactacanatcagtgtactccacacaataacccaatataccacagttgtgaacagagtacaaattatgggtcagtctggaacatatgtaagtatataaagaaattgttttggaaatataatcatacgatagggaatagacgcatacaccaaaatattatctgtggatgcttacagaagtcacaatcatcgattacatatcatcagttatcgagttaatacagctcaaacggcagcataccaagagttgctgatgcactcctgatggatgttgcatggcaccgcttcgcgatctgagtccatcaagcgccgtgtctttacctca

SEQ ID NO: 13301 - DNA, 403 bp, Oryza sativa
  unsure (1)..(403): unsure at all n locations
agcttgccactctagtcatcatcgngtcgctcttcaagcttccttcctagccacagtcgcttgccgacgagcttgaagcctcaacgacatcctgccttacctacgctctgcctcatttttatgagtccagcagtattgtgggggacaagcagcagcgctacttcaatttggctcgccttggagcacgtgtgaaaccggcgactaattagtcgcgggctcacactctctctcctctaatctctgttccatgttctaggtcatgaaagaatccaacgtggccgtattatcaccggcaaaaaaaatgcttattggacctgctctatgattacctgcacagctgcactcctggaataaccaccctcgcaccgatcgctggggcccacctgtcagcgacccccccatc

SEQ ID NO: 13302 - DNA, 330 bp, Oryza sativa
  unsure (1)..(330): unsure at all n locations
tgagcatactataagccacttgctcctaaattaaataaacacatcattattatctaatcacacatagcatacatatttaattgtcctatttaagccaatagtgataaggccgtgcctgtattaaaacacattgtggtggagcgctgggccttataagtggcggagggagttggatggtaatgggagtgtgaaacgatcgggaggtcatgtgggagagtangagatgccatctgcgctcgtcatggcagagtatgatgccggtggctcatgctgggtgtggagaatgagaggaaaatatggattgagatgggtccaattacaatagtaagc

SEQ ID NO: 13303 - DNA, 433 bp, Oryza sativa
  unsure (1)..(433): unsure at all n locations
gcttgtaacgtaccattnggaatggaacttgcagtaagacagcaaattcaaaattggcagggccgaaataatcgattcttaattagatattgaattaactagctagcttggggaaatactagattcaactatgagagctactaatgttattaaagagaagatgaaatatatattattttacaaataaatagcgatagatgagaagtgcaggaaaatataaagtaaataaataagcacgtgaacatataaaaagatgagagaaaccccagaacccttttgtggctgattttacccctaaacgattggaaaaggttcgctttacaccttaatatcatttctcttattntactctctatacaagttgtattttaagttcaaattagttatagccataaacggtactgttatcaaagttgaaaaatggtactattac

SEQ ID NO: 13304 - DNA, 341 bp, Oryza sativa
  unsure (1)..(341): unsure at all n locations
tgagacttgttctttctgtctgcgtcaacagattcacactaatgaatcagcatgtagaagataatggcttttgaggtattgattattggtaccttcaacctcctttaaagccaaatacctctgtcttgctaactctgacttatcattatccacaggttggatctgcttctctagttgaaatatcttggcagcttgcactacattaactttcggttaccaagattacagagataacagctcatatttattgggcagagttcgcgcgtaccttttgatgagccactcacgtcaaagttggattcctggagctancaatccgatccctatatcatgttcattct

SEQ ID NO: 13305 - DNA, 454 bp, Oryza sativa
gcttcctgcatccagacttacagcaagcgcatctctttacttggttcctcacgctcgccaccatcctgttcatccaaagattcagaacaataacctgagcctaactgaacaagaaaacacagtgttgaatcacgtattggcacttaccacagccgaatcggctaagccatttgcactgacatcgacgatctttggtctgaatgcctaaggcttcttcagtatcagcttggagcaaaaccacatgttgctgaagcactcacagtatctgcagttcaagaaatggggggagaagaagagaaagctgtatgcctacaggtcaaacatagaaatattttcagtagtttttagagagttaattctattcgtacgattcttcacagaaaaagaaggaaatgaaattcagtgtgctcagatggtggatcaatgcgcgtcagtttcctttcataccattgga

SEQ ID NO: 13306 - DNA, 257 bp, Oryza sativa
  unsure (1)..(257): unsure at all n locations
cattatatgattccaatgatgtggtcttcttgttgaatgaaacatgggacggaatgtggctctcaactctcttatgtgcagacataaacaaagtaaatcgtagacaaccactctgtaattaatgaccttctgagtagttctcataagagagaagtgaatatcatgcacttctatgagatcaagcttgagtggcanatctgtcaatagattgaccacgcaactcaattagtattcttcgcttccattttcatcacata

SEQ ID NO: 13307 - DNA, 379 bp, Oryza sativa
  unsure (1)..(379): unsure at all n locations
gaccactctggcctgttcaaggaagctgctgatgagctcaccaactggctgacagcggaaggggatggccgatcatatctcagaatcatccccattgtcggctcccgtggcatgggccaaaccactcttgctgagcaagtgtacaaaggttattcctcaaggttggcagaccacaaggcatggatctcggttggcttcaaccaatcatcacagcangtactccgggacatactcgcgcagaatgtagggctttatgctaacaatctgcaggacatgggaacatggggagacagcccaatcgcactgatgattcacgagcagctggaanggtacaaggtttcttattgctcttgatgatgtctgctccgagacgctctgg

SEQ ID NO: 13308 - DNA, 368 bp, Oryza sativa
  unsure (1)..(368): unsure at all n locations
aagcttatacgtcgacatagaaaccaacatcttcgcattgcgtactcttcttattctattttcccataacaggaatgacttaactgaaccctactagcacaatctcttctctcctgcaaacacagatatggtgaaaacagtctaaacaaatacggttagtggagcagttgggattgggctcaacaaatcatgtcgatgaaaaggggggaatagacaaatctttcagttaaaaaaaagatgctggccgttggaactngagcaagaacaggaatgcatcaaacatttcgaagattttaatgccaagatacgacagatatgttgcgctcatggaaccaacaaatctcaataaacaacgcaaataaataacc

SEQ ID NO: 13309 - DNA, 348 bp, Oryza sativa
ctcagcagctgaggttactaattgacaatttttgctttgtttctgcccaacttatccaactgggggtattccagcttataagctcttcccctgtgggacttctgagagctctcatgagtgcttcgggatcctcacatgagtgtgagggggtttatcttcctcaaccggtgttccatcaaccctgtatactggcttaaggtactttcaccagccactggctacatcctggtgaataatggccctttgaggatcaaatgtgtcttgaagagtgtaatatggctaaagggacggtgacttcactatgctaacgtacgaagaatcctgctttggctgtgattcttttttgga

SEQ ID NO: 13310 - DNA, 386 bp, Oryza sativa
  unsure (1)..(386): unsure at all n locations
gatctcaagaaatctctcgaagtcgtcttcagcagtggagaaaaaagtagagatcctcagctctgatcttcccactttgaatcataaagtccagcaagttggagagtagcatccatcgacagccgagtggggatgagtttgcatgaaatgtgactacatgcggttttcccatgaatagctgaactaccatatcaccccgttcatcaatgggcaacgcgatcctgagtttgatccactgaccacagaatatgatgggtgaccttcagtctggaatagtggtctgtaggaggtattgcangtacattcctcccatgtctgtctcagttaatggaacaatcccaactgtggaatctactgtgaatgtatttgattctatggtatacatc

SEQ ID NO: 13311 - DNA, 339 bp, Oryza sativa
tgatctcctatgagtcttaaatccaagcacagaaaatgctgatactcgatctatggctgaatgaatctggtccttgcacttctggttcaagctaagaaccacacgctgtgctgcctttgctaacaaactcaccaagccttgcgcagctgcgacaggagaaagagaggggagagatggagaagactatcccaaagtgaaaccacgagtaaatttagctatattccgcttgtttccctaccactgcatgcctactataacacatatttttaagaaaatagagcaagaaccacatataccagctacatctggacttcttctttttatcctaatataccattc

SEQ ID NO: 13312 - DNA, 373 bp, Oryza sativa
  unsure (1)..(373): unsure at all n locations
acactanacccatacttattattaatatagcacagaattaaccatacaccaatttaccctccactaaagaataaagagtagttacaaattcaaacccaatctgcacacttaaaaagtaaacctactgaactaaaaattccaatcaaaacaatgccacgtgttgccctggaacgaaaagctcaactggattcacatactcacactcatacatagtattgctccaatccaagattgctaccaaaaaaagaaaaaagaaaatgaaaaagaagaagaagaaaagggttggataaattacgagatccttgaggtcgtctccgtggaggccatggaggacgtctaggaatctgtcgaggaggagcgcgtcgtactcgat

SEQ ID NO: 13313 - DNA, 397 bp, Oryza sativa
  unsure (1)..(397): unsure at all n locations
agctttcagaatttctaaccatatattgcatgtatatgcatggatgntgcttttaattggatgttcacgctatctaagaactttattgtcatttgtcaccacagggataaaaggtgggcatacctggagagtctgccaaccggaggtacaagttgtcaccaaaaatgttcctcgccatgtcaacaagctcaccaacccaaagcaagcaccttgactggctggctgtggtaccgggagagccggttatggtcaagttggtgtaagcataagccgtgcatgagcagtttctgctacactcagccgcgcactcctcaaagcttctgtcctggacataaaagaacttgtcagggagcttcattccaggcatggtcatgaaatgggtcccttctccacatct

SEQ ID NO: 13314 - DNA, 367 bp, Oryza sativa
ctacgggagatgatgaaccactgacataacaacaggtgttgttcttgattattcaaatgatgctctagagggaagccacttgtggaaatctgaacttcctcagtggagccccaaattggcagatagtcaagattatagcacagaagaactagatagcactagacagttggagaactcacaatgtgatgccaactatgatagcagaggcagtaatctgctggagaaagatgtggaagccagcatcgatagtgaaccaatgaatgataccagtcctgagactgagctggagacttcgaaggatagcttgagtgaagccaaccaaaacagtacacaggctgttgaacctgtggctgatcctgcagatgtg

SEQ ID NO: 13315 - DNA, 442 bp, Oryza sativa
  unsure (1)..(442): unsure at all n locations
agctttatctgattcatatttccctgataaaatttgaagtggagcaaatgggcattagtttgctgatttatactcttggtgaatgagcactatctccttgaattgcaaatgtatcttacttttgatgccctgagttggtttgctgtatcacttaaatgagaattcctttttcccgctgttgatgttgntgcggatgtaattgatctctagaatttcctccagagtgtatttttgctagcatcatccaatctgaatgcggtattgggttaactgctgcttaaatatgataatattttcctatattgtttgttccactgctgtgagattcatggtggtagtgagctgcaatctctgcatattgaaaccaatctcctggtgtaattggttccatttagtctgtaataaacatttctccctactttcaattggtggtcttcagctg

SEQ ID NO: 13316 - DNA, 283 bp, Oryza sativa
  unsure (1)..(283): unsure at all n locations
ntaccaaccaatgtgcgcgatgcggattgtgctccgcattcgccttcatttatatctgctataatcacaacgccttgttcccgatgaatgcacttcatgaggattccattatctgcgcgccgatagatggtcccttctaccagcacgtatcgtttggagatgcgatggacgcgttcactcccttcgcggtcctcgggtagagtcttatctgtgaggtatgcttggatctcggcgatccacgcaatcaatctaatggagttgggagcactccnctcgggtcccg

SEQ ID NO: 13317 - DNA, 361 bp, Oryza sativa
  unsure (1)..(361): unsure at all n locations
ccattaattgtgcatctatgttttgggctactatctcttcaaaagatatgtacactccaggaagctctccgtcaaaaacaacatatatgggattttgctgtattacttcattatattctgatgttggcattatatcattcattagatggaaatattcagcaagactgtttaatattgatagcatatagccttcttcttccctcttattattgtatngataccaganaatatctaaaatgcattcttggacttcatctaatattatgtgggtttttggcttacacttataggtatccggtgggaatacttgagcttattgtctttccaaacgtgaagactcaactcattatatttatggact

SEQ ID NO: 13318 - DNA, 451 bp, Oryza sativa
  unsure (1)..(451): unsure at all n locations
gcgcattgtgagcctgtccggtggggcccctgtaccagtttatgtggatctggatgcagccatacatggctgcttatatccagcagctttgctagctagctgcctagcttatttagtggctttggacaaatggaccaggtggacccttaagatgtatgtctagtttagtcctatgtagtaaatcaccattacatatgtagatctattttaccattattgagaagatatccgtgcttttctgaatttactatgttgtgcgtccgtatcatgacaccctcacctttcttcgtaatacatcttcacctattctttaattattttttagattatgtacttcacgttntaaatatatatgtatatattgttctcanaagtacttcttgattacaccaattgatttaaactatttattaagcttaggtttaaagtatttacttatcccttagtaagt

SEQ ID NO: 13319 - DNA, 286 bp, Oryza sativa
tttatgcaaggttgtcagacaggatgtaaatgcactaaaccagaatgttaacatcttgaggtcttcctaaataaacctaagtcaggtggctctaaattttaagatatccggatataactattaagctcttattagatgaatgagcttgccttataaaattaaaattccaatgaagctaataaagccaaaggtacattatagattataactcatcttgagttcttgcgtgaaagggacattatatgattcatgccactacaatttatataagcttaacccttgagca

SEQ ID NO: 13320 - DNA, 510 bp, Oryza sativa
  unsure (1)..(510): unsure at all n locations
gcttgtgttgatgtgatttaatccgacctctatagactatcttcgaacatattacttggctcataactgggaatagctgccacgaacagacaactcggattcactttctntacattcagtttacttcccactattctcttcatgttgtcatcatttaacattcaaagtattcctttacaacattcaaccctgacgtattctgttcagatttcttttatcaatcacctttcgacctacttctttgcccgataataaacacacttgctggtatcttctatcaatcaccttttaaactgtgtcaaccaagtactcttcactccgagaagtgtggatgcttctggtgacaatgaggtcctttggcttgctgactttcagtgaaaccttgaagtgtttcgccataagttatactgactggtctttgccttgatccgaatatgacacatatgatactcttatccaaacaaatgtctccttggtaatcgcttgatttcttttcatactcaggtggta

SEQ ID NO: 13321 - DNA, 412 bp, Oryza sativa
agctggagaaaaatttgtagaaatgccatcgaaatttgtggttaaacctggtttctgctcaccgtcagagcatacagtattatctttgttttcacataggaagggaatcaccaggagtatattatgtttaatcaacgagctgctaattctctcttatgtgcacaggagcactacaaggatttgaaggaaaaacctttctttcccggtctgatcgagtacataacttctggccctgttgtttgcatggtatatatatttgtaaagaaccaaacatatttgtaactctgcactttgatcagtaaactgttttcaattaaatttattgttgttctgttctgtaaggcttgggaggggaatggtgttgttgcatcacctcgcaagttaataggagctactaatccccttcaagctg

SEQ ID NO: 13322 - DNA, 413 bp, Oryza sativa
  unsure (1)..(413): unsure at all n locations
tactaagcttgnactaagaattatgtacccaaaatcgattaagaaaatcgataaatgaatttgggtatatngtactctnnttttttccttggatataatttcctgcagtttcttatcaaggtttntaatgaagcaatctgtgcgacatagatacgtatgccatgtactctttctccaatttttcccactgggtttttatggagttntgacgaggcatggacattacgcggtgagtgctcataggggagtgttgagaaacatttgggcttggcccatgaaggcctatcctaaatacacttattgtgcccatcaccgaacctttcatatattatattgcactatataaagagaggagggggctactcattgtacaattgattggaggatcgaatagtaaagagagtctcacccct

SEQ ID NO: 13323 - DNA, 364 bp, Oryza sativa
agctttacagaatgcagctaagggaagtttgttttattagtcttaaggctgtgacagagatttcacaacactccggtcagttcttgaacttatgagaataaaggcgagacatggatggtctgataccacgttcgacagtcttttagaactcctgcagaaaatgctaccgaggcctaactcactaccattcagctcatatcaagcaaagaaactcatatgccccctttcacttggtgtggaaaagattcatgcatgcgtaaatcactgcatattgtacacgaaagagtacgcttctttggatgaatgtccaacatgcggtgcaagccggtacaagttgaatatgcttactgggctaaaaccctct

SEQ ID NO: 13324 - DNA, 431 bp, Oryza sativa
  unsure (1)..(431): unsure at all n locations
taaactgaaatagtcattgttgtgttcttgtttacttcaaccagtatcgttaacacaagaatatttctttgtcaacacaagaatatttctttcagtatagagaaccttataaatcaagttgtgatctattggcatgtctccgtatgtcttcattctgctctaatgctctgtctaatggccatacctttgtatgttaaaatgatatattccatcttactttgcacagtgtatgttcatacaagacttgacatggtgccccacattcatcaaggtcaagaacttgcttcttgatgggtgggttggtggcatgatttctatgctgttgtttgctgtctccaacacacaccaattctggagaacacacccttcaactttgtgaggatatacattctaatgcgatagtgatgggctatcanatgtatcatgcatga

SEQ ID NO: 13325 - DNA, 403 bp, Oryza sativa
  unsure (1)..(403): unsure at all n locations
gctgcaactttaaaagctgtctcaaaaaataaatttaatgctttctttttgtgaacttgcttgagctatatgcgtatctgatggaaggcactttatggtgcagataatgaaatattttatcatggtgaaggtgcccaataaaaggggaagggactatgggaggtgcataagcctaatgtactcataattgtgatacctaattaaaaatggagctactctaacttgcttcaaatggttcctggcaatnttgtattgtcctacataatccacatgaaggaggttgaatagcaaggagcactttcccaacatctcattagctggtatctatgggatcattaaattacttgtgacacctgcacccttttttgtcatttgtttgagttagtaattgaaggaatgtaat

SEQ ID NO: 13326 - DNA, 380 bp, Oryza sativa
  unsure (1)..(380): unsure at all n locations
ctctgatgtgacagaggataacntgaatgagatggtggcgcacggcgttcttccagcaaaggagatcattgtgtggcgtccggcgtgcggcgaatcattttcaacccctgacacacatgaggtcgtggtattttctcatttcttctatggaagatattctcttccaacctcaagattcttccgggggattttggaattttatgggattagtttgcatcaccttaaccccaattccatantccacatttgccaatcntatccatgctngcgaggctttcctgggtataagaccgcatntttccctgttccgtcgcatcttcttcctcaagcctcatccaaacaagagcataccatgtgttgtcggtggagccggttccaac

SEQ ID NO: 13327 - DNA, 296 bp, Oryza sativa
  unsure (1)..(296): unsure at all n locations
atgaactgcgtgctgccatatagttcgtatatctttngaagctgctatgatcatagcgtacagcacgtaagtatatacacttatagagtttcatgcttcaacaggtatctcaaggccattcacatgacacgcatcatagttgaaacaagcaagaaatagaatggggctctatttttcaagactacaggtgccatcttagaaccgttatatcatgagaagcaatatggtcagtatagaataacatatgtctaagcgcattgactggataatagactgacacatgatacaatattgca

SEQ ID NO: 13328 - DNA, 277 bp, Oryza sativa
  unsure (1)..(277): unsure at all n locations
cttaanacattttatattcttcgtcttaatgtggtgactcttctctggcggcgatagagttaggggaatagaaatcatatggaaaataaatgggaaacacgaataacacacagaacatggctcatgtattctagcggagtattgctctctcgcctacatgtaagttagactttacgggtaaacgggccaaacgggcttggggagtgattacccatacacatacccatttacctatcgggcataagttttgacccaataagaaacccatgggtatata

SEQ ID NO: 13329 - DNA, 349 bp, Oryza sativa
  unsure (1)..(349): unsure at all n locations
accatggaaagagaagcacgaggtactgaacccagcctgtcctaggtcacatgtgtgcgatcgaggactacattaatctggggtttctccctccgccttccgaatatcttctcttggttctgaacttctacggcctctctttgctccatctgaaccccaattctattgcctttcttagtctttttttgcatctttgtgaggcctacattggggtagaaccctttcttgatctctttcgcttctactacgagttgcgttggatggagtccaacagggtgtctggatgcgtcggattctgacttcgggatggcctgangtcgcgttatatcctcttccagtgctctttctc

SEQ ID NO: 13330 - DNA, 243 bp, Oryza sativa
  unsure (1)..(243): unsure at all n locations
catgggatcccacattcaagcatgatatgttcgtatagcatgganttacccggccacgcagtctagcgaacaaagaaatagctgttccgtgcttccatgctgccagcctgccactggccaccgctatgcccggtgtcagatgaaatggctcacgcggcaatggtcctggcctatgatggtggcggcgatagaggtacgcctctgctcagtaacggctctgccctctcgcggatgggacattgt

SEQ ID NO: 13331 - DNA, 354 bp, Oryza sativa
agacggcaaatggatggattagctacaagcatactatccacactgttgctgattcgaacttctgaaatgctcagctgatgatggtgccaacaaatctcttctctgcacttcggtccttactgcagcaaaagataaagaagttttaaccatcctgatgacctgatcagaatcttcctttttcttctgtgcttgtgttctagtgatctttcatgatgcaatgaatgagaagaaatatataatatactacttgagaatggagatcaggtgtgatgaacacaaaagctatctggatttaaaagtgcttcctgatatgcattataagccatggtgttccttttgttttattgccatctg

SEQ ID NO: 13332 - DNA, 425 bp, Oryza sativa
  unsure (1)..(425): unsure at all n locations
tgcgagctttttcttttctagagctacttagatcctttcttttnttggttcggagaaaccaatagctgtggagtaaaataacaaaataaataaatatctaacatcacatgaaccataagccccaaccaaaagctaacaatgcagaattacagatacccgaacttataaaataaaattgaatacaacatgaccatgatggccaatccatattataagtctaattctcacactatattagtagttattacagggaatgtatcctatatattacccaagctgcacaaatttctcaaatatgtcactaataaaaccctacagctgatcagccaatccctgtgaatactctaatatcaaacaaatgttcggcccccaagctatctcacactacagttgaaagaaatacctgcgtgtgatgcacgggagga

SEQ ID NO: 13333 - DNA, 346 bp, Oryza sativa
catgctagctctgacggagcatatacactgtcattcctatgctcgtttgtctccacgtgaactgaaatgttgcaacagaaatatggcaaaatacagcgaattatatttgttgatatttgcaatcgcggtcgatctgaatgcagcgtccacaatgtctatctgaatacaatatatctggggacggggggaccccaactgtcttgatgttcagaaaaataggagccaatgatgttctctctttgaaattgtgtgctttttgtcacccccaatatatgctgtcgattcagaccacccaattagttagaatatttaaaggacacggctctaccttgtatatgtttgacta

SEQ ID NO: 13334 - DNA, 472 bp, Oryza sativa
  unsure (1)..(472): unsure at all n locations
ntgcactcatagatgcacctatatgacctctccccaagtggtactattgttctcttaaacaaaatntcagccaagtaaattggataaaaaaatgatatggaacaaataagatacgagttaacaatacataatgcagctgataggatgtgataaatagaaaaatcacactctacgattcccttatggaatgaaatgctttagtactggagtctggactattctggtgtactgatgtcatatatatcatctatgcatacaataaaagctagtcatggataattgtgtaattaattctaaccacctggtggtgaaaagagttatcacaccctataagaaaggcagttgtagaaatacaggaatactgggtagtttagactacctggattctcttcgatttaccctcgtacnctcatgatccatagtacgcaagatgaatcatcactactattatggcatcttacacatttcacta

SEQ ID NO: 13335 - DNA, 395 bp, Oryza sativa
agcttgtactcaagctgaggtgaaagctgcagctctgtcatggaagactcagcatcctgattgtacatctggctgctgccacccacatcccacagcgggaacggcttctgattcaccatcagaggtgcctgggcctgctcgccaatcaggttcttttgacaggcgcaaacaagttacgcgaatacagaaatccgcaacataatttcacttgaggagaaagcttagagcatggcttaccatgtggcacagatagatgctctgatctcctggaatttgcatctcctattgggatggaaagagggcaatcaaaacttgattatttcaatatagtgtataaagtagggaagaatactgaacccgtatatcctcttgttacatacccggctgtgcatttc

SEQ ID NO: 13336 - DNA, 155 bp, Oryza sativa
actcagctggtcgaccctcctctctttctccagactcattctgttttttcttcaacactacacacattgacaagttgtgtaccgacggcttgctcaggcccaccggaccatttcctgtcattccaataagatcgaccgtctgttttgcatccgtc

SEQ ID NO: 13337 - DNA, 378 bp, Oryza sativa
  unsure (1)..(378): unsure at all n locations
gcttggcggntcgggtactcctctatgctctcttttttatcttcctctcctttgttacgtgtgccataattaacattttcgctcttcttggatccagattctcgcggcccactgntcgacagagtgaattgtgcggggtcgtcttgacggatttaagaaccgtcttcgggccaaggatgagaaaataggccgcaagagtttggagatggaggcccttgccaataccctcatagatgcgaatgccgaaaacaagcgtctctataccgaattggagaaaggaaaagaggctatggccgagatcgatcgcctcaaggctcaactggagaatgaaaaagcccattctgccgcgctgaccgaatattacaaccttaccgagcc

SEQ ID NO: 13338 - DNA, 408 bp, Oryza sativa
  unsure (1)..(408): unsure at all n locations
gacactatttatactcaagcttggcgattaccacattctggagttggctgacctgatactattcttgctgtatgtagctgcttggtgttatatctctgctggagttgtacattgtgtctattangtatgtgctatcactctgactatgtgaagccagtggaaagtttatagtcctagtttactgtctttaagatgttctgtgtaaactcgctgagttatgtctgttagatgactggggtctgaccagaaaacctgatattatcctgtatgttgtgaatacctgcaggtacttgctgtgctgtctatgaaaagcaacgtcctatgacctttatctataaagactactctgaatgatttgtgatggacaataccgctcctatggtttcatctgacaaattgcgaaattca

SEQ ID NO: 13339 - DNA, 373 bp, Oryza sativa
cgcctaatttccgatcgagcatcattcttatataaattgcgtacttttaaaatcttttgatattgatataatttgacgtataagttatgtatcgcgtatagagtaatagcatgcaccagctggagaataagctaatgtagttcttgcgtggcataagggtacgcaccaaaagaaatgaactaacttatttaattaacaacagatgtgcttttgttggagaagggtatcttaaccggttaattaattatgtgttggtgctgctatatgttgagacatagtacaagatagtttgtacaatcgatagatcatcatgatggatcaatgcattgggttgcagattatagcaacctataacgctagcaatcgattggtc

SEQ ID NO: 13340 - DNA, 431 bp, Oryza sativa
  unsure (1)..(431): unsure at all n locations
gcttcatgcaatcgggattaggcatgccttttgcccttgtgggcatatacttcttgagatgcatgcttgtactccgtacgtatgagatgctctgcacagtccaactaccaattaaatgaaagctaccttaattcactctttcgtaccataactccgatggccaataataaccaataaaaagatcgcaaccaaacgatggacatacgtgcttttgatctccaatcttctctcacataacaaaccacagaaggcccatcatatatacactgcacggcatatccgatccttcaccagatagcttgctagtatatacagtacgtactgcatgatttctgtttatgattatatatgatagaataatctgggtgccaagaataaagttgtcgttagcatgcatgttntagtcaattctttgcattataatagcatat

SEQ ID NO: 13341 - DNA, 343 bp, Oryza sativa
  unsure (1)..(343): unsure at all n locations
tcgggttcgctntcttccttatgacaagatgaccaggcatcttctccgtcggtcgaacttttttggtggtagttgccgaagtgcttgtggcatacttgcgcatgtgctcaagtgcttcgactcttaccccctccaagagttcgagcgacacttcgcgcccctcttcgtctccagagaacatcacccgtggtgagttagcccatagctctgctggggtcattgcttcatcgccatatagaagtatgaacgggctacaactggttggtcttgtgggggtcgtccgaagggcccatagaatatatagcatttcctctggccatttgcccttcgctgccccctcaag

SEQ ID NO: 13342 - DNA, 236 bp, Oryza sativa
gctgaactttataaaagaatttattgctttttttgttctttaacgacactcttttcccccactgaacatagacacctggcccgcatatcacataaaacccctccaagaacgggattatcccttaagcaggttaaaaataacatcggtgctcaataatttagcaactaatacccattaacaatgttactataaataactcctataaaccggcctccttcaactctaagatggagccg

SEQ ID NO: 13343 - DNA, 438 bp, Oryza sativa
  unsure (1)..(438): unsure at all n locations
ctggagacaacacacaaatattacagcggtcacataaaggctatatggtattattcaccaatgtaggaattgcaacaattaactccattgataactggtactctatcaacatgtcaccctgctgagcttgttccatcacagcagcaatacatgcagcaacatgtaacatgaggaatcaccacttattatacgcataccatggataaattcagttcgatctttgatcttatctactaccaccataccaaataaacatgcttatgcaaatggttcataatattctcagtcatcatgcttccttgttatggcaggggaaggggcgaatcaacgacaattactcggtcacgttaaccaactcatactctactagtgacaagttgttgtcctccttaacagtaaagctggcaggatctgtagactctatacgcncccacttgt

SEQ ID NO: 13344 - DNA, 422 bp, Oryza sativa
tgcagcttagcttttccttgttcgcaacattctctttatgcgctccgcaattgggagataccacaccacctttgctgggccttccctctttgacttacttccttcaccttcactctttgctcgtttgtatcttgatgccccacagatagggcagacattcaagtcagcgtattccttgtaatacaaaatgcagtcgttcggacatgcatgaattcttctgacctccaggcccaacggacataatacttgcttcgcttcatatgtccgctgaggtaaattgttcccctctggcaacagatcctttaacagctcaaggagttctgtaaaactcttgtccgaccagccattactagccttaagcttcatgagttccaacacgcatgacaacttgctgtgcttcgacttgcatccatcatacaacg

SEQ ID NO: 13345 - DNA, 477 bp, Oryza sativa
  unsure (1)..(477): unsure at all n locations
ctacctcaantggtgatagtgagttgatagatgaccatttcgatgataattttttactacaacatctatgtagtgaaattatggattntagtggtgacaatattcaaaccactttggatcctatggtatcttcttctaataataagaaaaaaggttaaaagggtaaatataagaagaatattaaactttattttaaatgaagggtatcttttggaattgtggtgggttcaaggacccaaaanagcataagttcgtgtttgatttagttaaggaacatcaacttgatttattgcgttgtcatagaccgtttataagaatttactccggctacacttaaaaatctttgtactggtaaggagttcttatggcattgtaaaccctctatatgcacgtctggcgagttgcttttatggatcaatntacttaatgccaatattgtgttaattgatgaaggtgagttctacattatatttcatt

SEQ ID NO: 13346 - DNA, 398 bp, Oryza sativa
  unsure (1)..(398): unsure at all n locations
agctggtaccanatgaaatacaactaactaattcttaattttcatctgaaatcaaggctgagatggccatatgctcgaatactctacctactttgggcatggcatatgtatgactggtgccatcccttgccacgagagaacgccgttgtgttgtgtgtgtatgaaagatgtaatcatatattataatagtggaatatacacttataagtaactatattttatggataagctattaaattgactatatataattnggagctaatacgtgactattctaaacttctctaatcttttctcgtgagaatgtagactggtgagcaggtggcgcatgcggcacataacgcggcgaccgtcaccaagggatccgccgttcaggcaggcattcatccgtatgaaaa

SEQ ID NO: 13347 - DNA, 339 bp, Oryza sativa
gacactttatactaagcttctggcggtacgtctgtgtctcacatgttgtaactaccgttttttcttaatcatatgtcaggtatatttgggtaattggtttattaccaaaacacaaatcacaccaaattgatgaaatgtcatcaaactttgatacctcacgattcgaacttaccgaaaccatcacactaattgatgtcggtttaaggtcttttgctacgtactgaccaccaaactcgcctatttatgcgagatcaaacaaagttcgtcgaggtcgagatatttgagatgagacacagagagccatcgcgcattgcatcttgcaagattgaatacgatcga

SEQ ID NO: 13348 - DNA, 397 bp, Oryza sativa
  unsure (1)..(397): unsure at all n locations
atcttttctattcctgtaagacgcggatctgtatggcaaccaattgcgcttgtgtaccctggctggtcctggacagggatttaatgcacattcagcttataaaatctggattgagaatttctgggcgtgacacgatggtatcagagccgaccttgaccgtangacaagccaactggaaacctaagagccctctgaaccccttttttatctgcatatgccttgttgcacctggaaattgcttcggaaaatctgcgagtttgcctctttggtttgcgggaaaaatcattggtcgttctttcaggatcggattttttttctttaacaaaaaaaatattagctcagcctanggctttagaaaaattttaattggagtgtattcgacagtcagtccggaatt

SEQ ID NO: 13349 - DNA, 307 bp, Oryza sativa
ctttcttttccactttctgaacccaagcttttcagaattttcactatgatcttccccccctgagacaaattgcttggaaatacaaaagcctgacttatttatatggaccagcattgacctatggccttttagagaactactgtaaagaataaccagttggggctcagataccacgaaatcaagggctaagctataggagtgctatacttgacagccatccctatatgacatatatcaacctatcacttgtgaaaaaataggaaaaaagaggaatgagaaatagttcaaagttcattgtattgtttct

SEQ ID NO: 13350 - DNA, 439 bp, Oryza sativa
  unsure (1)..(439): unsure at all n locations
tcaagcttataagatntgaagatatattcaattgttcatctggcctcctatgagacgctacacaattctcaaacttatgagaaataaaaattggtactgatgaacatcctactcccgcactccaaagcagtctacagatcactacttcaaataaacgagatttctataccatgacctctttagattgcatatggatcataactggtcgcgtctgcaaaaatcatcctctatttttgtgtgcggcttcttaagaggaccgcacagaataatcgatttccgcgtgcggacctcttaagttcaccacacgcacaaatgagcctatatttgcaggcgaacctcttaagtaggccacacgcaagaatacccctctctctttttccctctcactcgttagaaaattcactcctctctcttctttcctttatttcactacctctct

SEQ ID NO: 13351 - DNA, 482 bp, Oryza sativa
gcttcatgctaaatattctattgttatgtgcataagtaacaacttttctctgtatgccaatatggcgtcaatgcacttagaactatcaacctacaatatgtaaacaactgcgattaatgcttagtggataatatgaatatgtcaacatgcttttcactgtaaaataattatgggtcttgatcctatatatatctaggtagtcattaacatgttgtttgctgtgggtcatataatgttgtaatcagattgcacgataatgtgtaacttttagcaactactaccactgtattttaatatattacgttattgaactttttttttgacaaatgtgtgatcattcatcttattcaaaattgttgagtgaatataaaaaaaattaagtcacgcttacagaacatttgacaatatattaagtcacaataaaataaataatattatattattcgttaatagatgaatggcaaacgtatctaaatgttaac

SEQ ID NO: 13352 - DNA, 321 bp, Oryza sativa
ggaccccaagcgacgcagctgcagctttctttagacagattggtgtcatactggcccttttctctatttcaagggatccgaggagacctgaacaacaagacgtctcggacattataatcatgatgaaggagcagtcctccccgtcggctgatccccgggctatttatgggctcccgcttggctacatgaggggcgaaatcttggctgcaaacaatgaactgataatcgtaacaatataacgtggctcacaaatggaacgataaggaaaaaacactattgcgattgatcggaagaggggcatgtcatcaagccatgtggaaa

SEQ ID NO: 13353 - DNA, 443 bp, Oryza sativa
  unsure (1)..(443): unsure at all n locations
atctgcagttataacaaatagcagatgttatatggtgtctccttgcttgacccccctcatgcatatgatactcctttcaggaccccatttatcataactgatgttggtgcagaggaccgaacattttttatccagttgagccaagtgttattgaaacctttaacttgaagaaattcgaggattgcatcatgctccaccagatcaaaagctgtgtcaaagtctattgtcagaaatactacttcctttctagagtgatgacactgatgaatatactcaaaactccaagccagacagtcctaaatgggtctgttcttgatgaatccatactgattttcatgtatgagttccggaatcacagtttggaacctaatggctatgatctttgtgatgaactngaacgataaaccctgacgtgcaattgtggagattatggataccccata

SEQ ID NO: 13354 - DNA, 450 bp, Oryza sativa
  unsure (1)..(450): unsure at all n locations
agctntattatcatagggaagtattagctcagttatctccgcagcagaaaagaaatatataattactaaagagtgaaattgttttagcgctagaactacaaatcactagcttaatgcatgttaagaacagaagtatagaacgattcaacagctagtgataatcctattgcatgcttctcctatcaagcacgcaaccatcagcgcatcaaagatgaggcctgaagcaacttgagatcgtagcagtatatgtgtaaatatatacctcgaagaagaggcagctggagcagttcctgagctcgagcagctcgttgagcgcattgcccttgctctgcttcgactcgaccttgctgtccttcttggcgtgcggcagcagcgacaccacgttctgcatcagatgccgatacctacgagcaaaacccaccaccccaattcccccacaaaaacaacaca

SEQ ID NO: 13355 - DNA, 400 bp, Oryza sativa
  unsure (1)..(400): unsure at all n locations
gagcatacatggctgacaaggaattgccttatttcccctgaagctaaactggaaatgaaccaagaaacactctgttcatttatgctaacacacataaacaacatgccaacacgttaaagcaccaatgatgtacaaccatacaagatatggttaaatgcttacatgatccatatcacatgcaatgactgaagggtcctctgaaacaagatcgatggagaaaacctcgttcttcacaattttagaaactgctgcattgcctagacaagatgtcaattgtattaccatgattatgccacggaaataaataggaatacattgtgaaaaggtgtcggcatattgagagtaaatgtntagcattcttaccacagccaaaatctgcaactgtccaagatgcactatg

SEQ ID NO: 13356 - DNA, 421 bp, Oryza sativa
  unsure (1)..(421): unsure at all n locations
agcttgtccatggttatgtcactcacagtgcactctctgtgatggaagtaactttcatttcccaaacaccataatcaagacaattcaaaagatggcgagcattatcattatcagaaaattctttttcaacagatctcaacttcgaaataatttctccaaaacgtttgaaataagaatcaatggactctcctgggtgcatctcaaatctttgatattctttatgaaattgattctgacgaaccaattgaatatcattgtttccctcatggaaattgcacagagcagtccacatgtcatgagcggacttgtggtgttgaacacgattaaattcaccagaagaaattccaccaatgattgcatttcttgcacgattattaanatcaacctgagccatatttgcaggcgtgatgtcagcatcatc

SEQ ID NO: 13357 - DNA, 387 bp, Oryza sativa
tttctttggcatgattcatggctacatcatttttttagcattggcatggcttcagtaaatacttgctcgatctcaagagcatgttttctaattaatttatggcatgtttaattggtgaaaagatatcaatttggggtgtcgtatcggatgtttaaccggatgtcggaagaggttcctggacatgaatgaaaaaactatatttcatactcgtctggaaaccgtgagactatatatttgagcctaattaatccatcattatcacatgcaggttactatattacttatggctaatcatatactaattagactcaaaagattcgtctcgctatttcttccctaacctgctaattagttgttatctttatctatatttgatgctccatgtat

SEQ ID NO: 13358 - DNA, 441 bp, Oryza sativa
  unsure (1)..(441): unsure at all n locations
agcttgttgaaacaaagatacatgatctttatgatttggtgtatttgcttcttaaaatggggttgatcctaccggtggtgacggcaagtgtgaaaagggtattttctgcaatgaatttagtgaagactaaagtgagaaatagtatgagtgacaagctattgaataattgtttggtcaccttgattgagcgtgatatcttctccaatgtacgtgaggaagacataattcactctttcatgactatgaagaagcgtaaagcaaaagctcttgagtcttgattagtattgtaatatcctatgtatctaaagaccttatattatgtttgaacaatntacattttgatttaggtaagaattaaacttagttggtattttctacttgtattgaaccatttagaggtatataccgtatcgttaccacattatatatcgaatatattgg

SEQ ID NO: 13359 - DNA, 369 bp, Oryza sativa
tcctacagatcatcaccttcgctgagatactcctcttctgatgaatgaatattgcaagaatgagcatatgacatactcaacaagccacacagcatatatgcaagtgcacaggataacaaaggatggcatattatatctcatttgcataaacagcatttaatatttaagagaatagtagaacagttaagtaattagtcaatattaaataaacaccatacaacacacccgtgttgtataggcccaacctcatatgaacaaccaaccccggttgaacataccagacctccaaaccaggaatataccattccaaaccatgagtcacattaattaacacagttaccatttaatgtgtaatatgagactaatcac

SEQ ID NO: 13360 - DNA, 411 bp, Oryza sativa
  unsure (1)..(411): unsure at all n locations
atccgacaaccgacgacttgantactctcattggctaatctcaagacttcgaagccgatgctgactctaagccgatgactactccgggcttaccaaatatcactggtaacatgtcccaaatggggacattttcatcgttggcaaccacacaagtattgagacgattatatatgcaagtaaagaaatatattggagataaaatgatcgtgtatccacacttcactacctcaaaaaacttaataaaacctattgataggtgatcggtaaggaagacgttcctcattaaattatagtagagaagctatcttgattatgcacgaaaatatgaaaaataagtaatttatgtgcatacttatattcgcanaccattgaaataaaatatgctttgacaatgaaacacgcggagcacat

SEQ ID NO: 13361 - DNA, 429 bp, Oryza sativa
  unsure (1)..(429): unsure at all n locations
tactgttaaagagatggngggtaattataacacaggttatatatgcataccttgtttttattggattntgccgcaactaccatgaccttactatgtttgatggcttgagtatttntcagcacttcatcatcaaaatcatccaacgtttgcaggtcacttctaaatatcgataaaaacatattgtaaaaatcatccacatatgtaaaagttatcatgtgaaataattaagtgatggcacaaccatagatcacctattagttgtcctggtgtgtgaaaacttcttacgtttcaatcgcgtcaaattatagagccctttattctttaacctctcttcaagggtgctctcaccttcaacatttcaaggcttgtcgaaccaatatgctcatacctacaattatatacttgttcagcatttatgtatctgcatta

SEQ ID NO: 13362 - DNA, 362 bp, Oryza sativa
ataatggtacaacgagggtaaatatgatattaattgcaaataaagaaaagaaataggcatcactttgagatttggatttgtttggtacacatacatataactgtcatattcaacttatattttgatttatgcataagcaagctgctatatgattataggttttcgtctccaaatatactttggtaattcaccataatatgaatgatgatactctaaaagcatattacaactaaaaaaagcttcatttaaaagacaaaatataaaggtgaaaggtgtcactttacgagaaattgcatactcacccatatcatggtcccagagcaacaatgtcaatacacttccgtcagttaactaaatataca

SEQ ID NO: 13363 - DNA, 450 bp, Oryza sativa
gtgcaaaatgtttcttgaaggaataggataatgaagatgttgattcacttgagccatctactattctgggagcacgcgagttaccaagaactagactaagtgatcatattgagcataggctttctgagcggctcgtgcatgaacggctacagatggcaattgcttctggaaaaaatgtcgatgaggtagttgtggtatgcctttctttataccttggcccgtgtacagaatatgctggtgttgcattctgctaccgtagaacaagcttcctcactgttaacctattgaaccacagacaaaaagtacatacgtcttctcaattgcatgtttgagcttcttgctctatgtgctggattgaatgttacaatgaacatggtagtacctatattatagtcttctaagttgacttatataatgcattacatgaatgcatctgtactggcatacgtt

SEQ ID NO: 13364 - DNA, 458 bp, Oryza sativa
  unsure (1)..(458): unsure at all n locations
agcttccgtagaggttggtgccttttgctattgtgtggttgtgccattccgccgaacaccttgtgtgcagctcgtagcggagctgcaatcttgcgcggagagtgctgttgctgaataaacacttcacattaccaacagacttgagcatgcatgtcgttctcttcatagaacacagttactgtcttgctgatgaacataagtgctgaagtgcaaatgggcgctactgaatttgtcgagctcttcgattctaataaagagtctgcttacatttagcatgttgcgttntttctctatctacgccctccgcgattaatgaaagctctcacacggctaatcaattcccatgccatattttgagatggaacttccaatttcatattgttatagcctagataaatgtgagtactgatgagattgtgccaagtagttaactcagctcaacatagtcagtcagcact

SEQ ID NO: 13365 - DNA, 214 bp, Oryza sativa
tcctagggttttacggctagctcaataatgtggtgggctatgcgacctgatttcgaagcctcactccttctaattattcgatattatgttattccctaatattcgcgttagcacgaatagagcagtctaatgtgataaagatgattgatttgactgcacttactggtaatttctcatgtagctgaccaccacctatgatcccacccttctggaa

SEQ ID NO: 13366 - DNA, 440 bp, Oryza sativa
atactctatacacgcttttatttataatatctctaaaacaacacctctcaaataaaaattgcattgtcattgccatgatccgatcaacaaaacccaaatcatagggtttcatactagagaccaaattcttctaattctaaacaaagccttccaccagctaatgccctatgtagggaggaaccgatttttgatgagcacagcctgaccgaagttccacattcataattgcctctcatttcttgggttgtttgagaaattatcttattcttgtgaaaaatctataaaactcctacctatattaagggaaaaagatcatgccttaccagtctacctaccaattagtaccaatttaagcaatacagtaatatatcgtccgagagtggattttgaactctcgagtgaatgacccatcgttgtttacatgtcactcaaatgggtat

SEQ ID NO: 13367 - DNA, 276 bp, Oryza sativa
ttttatttttgtccccccttcctaggagactcctccaagcttggctatactaatccatcacgagggcaatttattaaaaaaatcgttttggctatgataattgttttaacctaatgggaacattcggcccaattcaagatcggacttatatgcataataaaatctgacattatcaacaatgagattcagtggaatgatgaaactacacagtgcctaaacacacatggagcattctttacgaatatgataacctaaaatacttaaaaggttgtttta

SEQ ID NO: 13368 - DNA, 201 bp, Oryza sativa
  unsure (1)..(201): unsure at all n locations
tattatataaataaataaaaaaaaggtgtgactgctcaacaaanaaaaacaccaaaacgaaagcgatctgtgaccaaacgaaggagaaaagcgaaacacacaccaggcaccaacgcaagagatcagaacaaaacaaccaaacaacgatgaaaaaacaacaacacgcccgggcaaaggaaacactacaaacacgccaacacg

SEQ ID NO: 13369 - DNA, 424 bp, Oryza sativa
  unsure (1)..(424): unsure at all n locations
tagcttttncanaattcatgatttattcttactttatctcgatacgnggtcctccatcctaggctactggaaatatgacctagaaccgttaagtggcgggcccacgccttgaacttaacgccgtggtggcggacacaacgggaacccacccacgtggcacaataccgttgtattggacagacttagtcacctaaactaccacgtcggggtaaataggaagatcctctgagttattcgaactcatacacaccggcctaccagaatataagggctaaccataaataatatactaagcttgggctatcccatactagcacatgtggttgtactgtatacgaaatgaactgacattgagtgaagtccttaggtcggtttgggcgcactctccccctatcggtacacaacttatcaccatatgtgcacc

SEQ ID NO: 13370 - DNA, 293 bp, Oryza sativa
tacattctcattgttgctctaatctttgtgcaggtctcagaaaaagcaatgaaactttgagcttacatcagacgtttctatcctgttgggctagaaactgtgtttcatgggtatggtccatacttcttaatttgaaaaccttgattgcggtgtaatattaagatataacatatattccttctgtcccaaaaaaacgaatctagtactggatgtgacatatattagtactaccaatctggatatatagatatgtcactatgtcccatccatactagattcgttttttatgggac

SEQ ID NO: 13371 - DNA, 340 bp, Oryza sativa
gctctgcattgacacacacggtgatgcatatatcatacattggggggtacatagggattataatatacgggttcattttttcatgtaacaccctttataagacacttaatagtctacagcattttataaacacgatccttaagcttatcaatattattaatcaatggcgtggacccacacaaacctgctttatacccaggactacgattattcaaaccgaactggtaactcgaccctgggtcccaattctaccaagccacccacgccaaccttcttcatttatttgctagcatatataataatttataacactgacttggtctattgtccgttgctataa

SEQ ID NO: 13372 - DNA, 478 bp, Oryza sativa
  unsure (1)..(478): unsure at all n locations
tgtctgacatctgatctgacatatttccatgcacatnatgatatttgttggcagcaaatgaataaagtctaggcattgagaaactgagagggggattatcataccaaatatcctcccaaaaagaacatgttaaaccattccccacattgcatctagcaatccctctatagaaatccatcagcttataaatatctctacaccataaagaccctttatagatgacaaatgatgggccactcgatcataataagatgaccagatatgatcaacccatggcacattccttctattatagaattngtccagaaatttcaccaaaagagctcgattccgaatagaaaggttgataacaccaagcccccctttactgtatgttacaaacattgcccaagctgtaaatttctgctgaatccatataacatctcaaagaaatgtttcctgactatcatatatcattactgtctatgaacattatatg

SEQ ID NO: 13373 - DNA, 443 bp, Oryza sativa
  unsure (1)..(443): unsure at all n locations
agcttattaccgattaaaaaataatttattagtaaaactttaatacacgtgttcttagcaatttaaaagcaaacactgaaaaataaaccacgatgaanaaagccaaaatcaactataaattaagtttcaaattttaaattttcgcttacgtttataagccgaaggctaaatgatgggggtgtattcttgacaactatactgatcatctcacactcagcagtatcatttttaaaaatctaataatatcttgcaaaaactacattggaattatgggtaacctgatcagtcaactcccttgtaaagcaaagatctactgctcttggtctcttgggcttcattgacatacccaacattccttcatcatgatgcagtagctacagaaatgaaagaaccaccatggttattanaccttttgcttacaaatagtaatcactcccgcatat

SEQ ID NO: 13374 - DNA, 448 bp, Oryza sativa
catgcaagcttgggattattataatccagactattaggttttagctgatagatacagacaacttattgaagtagcttattatagtatgaaacccagcctgctattatttgataagctcatctaggtgagctctttctagattattgggtgaaaaaatacccatcatgccaccccactccctatttagacttgcaaacccaataatctaggctctaataatctaggaaagaaacaactaacagcttattctactacagattataacaatctagcttatagtaatctgactcaataatctagattataataatcttaagctgaaaaaaacagggcctaagtttaactgttgtatgatatgacaatgtggtgctacaataaacacttgctaatgatggattatataggtgtaataaattccgctcgcggttactaactgattagtttttat

SEQ ID NO: 13375 - DNA, 422 bp, Oryza sativa
  unsure (1)..(422): unsure at all n locations
ttctgcagacaaggtgcctcggtttctgcggtatataattggatcatatcgactattaccgngctagaatcagcgagcttgataagaatgtagagctagaacccacagtgtcgtgtttcttaccattcacaggcactcatcataactgtgcatgctgttgcatgtatgtttgtatgcatgagtgatgctcttgttcagatttaacttttaacacaagctgtttgttattgtgatctntttagctggcatctgagcgtcaaagagttctcaatgacccataagcttgtatgccagttgctcttgtgacatttgactcgagatggggagctgctgtatgtgcacagacacaacagtcatagaatcctacccaatggctaactgattggtgctctgaaccgcgggatgtatattggcagaatctt

SEQ ID NO: 13376 - DNA, 377 bp, Oryza sativa
tgctgctggccctccccttggggcctgggtttatagtttttggtcaccatgcatcaatagttgcgtcaaagatcacagactgagaggacttcttacaagatgatgttgcttctaaaaatttagagaagtttgatatcgcaccaacaagtagttcggttaatgaacctgaagcaacttcttcatctaagggaccttactttctttatttactaacatgcttaagtagctcgcttcaatttgaatatgggaaagactagtatgtattaactcggatactttttgcagcctctcataatgacacttgaaaaagcactcttgtttgagatctgaattcccactctgatagtccagcctactccattattgatgatcatttg

SEQ ID NO: 13377 - DNA, 406 bp, Oryza sativa
  unsure (1)..(406): unsure at all n locations
aactgaaaagcatctgtggccttgttctataatagacttcttctttttttattataaataaacacggacacaacaatgaacctctgcagattgtttgtggctaccatgctctagctctgccacctcgtggatgtgaactagttgtacacccacttgaacatcttgaacctgttaaatactcccggcctgaattgtctttattgggagtaggagacacaattacagactatggtttgacttcattagaaaatactgaggtgaatgtgtggtctatagagaatctgtttgaagcacaatgcccccagctgcactaaccatgatatnttattattatgtcaatgcccgtttggcggctgagaagtgctatcgcattatcaatatggactacagctacaatttgtcgtgc

SEQ ID NO: 13378 - DNA, 389 bp, Oryza sativa
  unsure (1)..(389): unsure at all n locations
ttatttaaataaaaataaagagattgtgcctgttacctccaaatataactgantcaccttcaagaatccaagaccatatgcatgtttttgtttntctatctagatgccaccgacatgaacataagctatatctatgctaacactgagcaaatcaaaactgttgaaacaccaatcagatcttcaatgtaattgcggcagacaacaacggatctatccaaaacattatggacatgacacaccatatgcacaaccacgacgaatgaaaccaagggactacatatacaagcaatgaaactgtggcacagaccaccgggaagaaccatccaagtctataatagaacaaggcacgtacaaataaaaatctgctgccgagaccattgatatgcaac

SEQ ID NO: 13379 - DNA, 397 bp, Oryza sativa
ttaatgatttgctaattctgtgacttctgccttttgatgaagcagctcattttcttctttggagagctggacagcaagaatatcaacctgcaaaatattattactctaatcaaactgccaatattaatgaatgcaccttcacatgtaactggatttttataaattataattaacagtaagggaattgataggacttcaaatattaaattatgctatgtggagcataatattgtataaacaaatacagttaaatatatatgcaggtcaagatgaaagataaacctatagaaattatgctttacgtacagaatacaatgaaaccaaccatatatattgagtcctcaagttcagccttaatttttgctgtcacacagcctctcagtgactctaatacagt

SEQ ID NO: 13380 - DNA, 360 bp, Oryza sativa
actaacttgctctgaaatacaagaacagcttaactaagaacattttttttcttcacttaaaagagcctatacctacattgcagagtgtcaaaagcagtagaatatatgccgttgaaccggtctgcccatgactctttatataggaggcggaacactatggggaagggatgacatataataccctacccataacatctatttatgcactcctggtaactaattagaccttgtgagctaacgactatggtattcaacccagtgacacaaatttgatgcttcgtgtggggcgatcaaattatagctgtgtggcaacacctgtgactaacgacattacagttgttttaacatttcagcggtgtt

SEQ ID NO: 13381 - DNA, 431 bp, Oryza sativa
  unsure (1)..(431): unsure at all n locations
agcttgtcacagtacaagaagtatgttaattgtatgattgcagaatgaataacaaatgaattaaatatgatcagttgtttacctgatctgtactgtgtggatcttcataagctctttttcctgacaaagtgcttgtttctaaattatatgggttaacttccatgctttgaatatcttggggtggctctatctgggatgatgagcagtcaataagatagaaaagaaaggaaatagtaagagattatgtagcaccgacaaaaatgaataaaagaaagagtactactcttttacctcatgttgtattntccttggatagtataatgcacccactggaggtaaattatgtagttgctgagatgaacttgaactgatgggaagagtcttagttgccttaaagccttggctggaatgtgcctttcagatcttcttta

SEQ ID NO: 13382 - DNA, 326 bp, Oryza sativa
ttaaatatcatccacacacagtgcgctaacaatgagcacatggttctatttcatccttctgatgagatcagtgatgtatttcttacggttaccatcatcaccaccctcaacgtagtggttcctcttcttcttcaacccacccagtggtgccttcagcttgaatggccagaagaagttgttggcctccttgatatgtgggccaacagtcatgatctcatgaacaagatcctcaatgcagatgatgtcatgcctacccataccactgatcaatacaccaatactgtaatgtaccatttgacacatgtaaagcagaacatgtgagattc

SEQ ID NO: 13383 - DNA, 298 bp, Oryza sativa
agcttcacactcatggaggagctcgtcttattctcctcaatgtatgtccactagaacgcggtgaaccctcccacttgcttgaaaatagtaatcctcgtcacgttcttcccggcaagcataacgtctaacaccctttgtccagctgagccgatgccagcatcgatcttcgcgaaatgcaacctgaccatgtaggacatcctggtgtcgaccggcatgaggtactcaatctccttggaagcatcttcgccggtggcgatcgtcgacctgtagagcttggtggggaactaattgggcggct

SEQ ID NO: 13384 - DNA, 418 bp, Oryza sativa
cagcgacacaaaatctcagcttacaacctgttcggcatagttggtttatcagatgtgcacaattcatttctatatatagataggtgtcctcatcaagaattaatcacatacctgtggtcatctgcagccaacccactctggaagtttgttgcagaagcacaccaccttcattctgcccttcttgtcacacgatgagacggctgttgtcctgtcttcctcacagacgctacctgcaacagcacgacactatcggtattggtctcatcaacgaggtcgatctgagccaacgccgctgaaatccgatgccctgattccctatactacggcatcagtgtctcgctgaatataccgatgcggcggatggatataataaaacctaccggccggaggccgccgcttgatgcaacaatataccctc

SEQ ID NO: 13385 - DNA, 392 bp, Oryza sativa
  unsure (1)..(392): unsure at all n locations
taccaccatattcgggatggattggtgtggttgctctacgcctatgacaccataatatcgaaccatgaacgaggaaaggcgtgagagaaatattggctagtaattgcgaagccccaattcttgactgtgaaggacaccatatgcctctgcccttcctctctatctatccaagagatggaatggcagaactcttttttggttttttcatcatttcatcatagagttgaacaatgaagatagatggcaagtgcctgatcgatttgatcatgtcgtgtaggaacaacgttcanatcgatcgttcgttatgatgcctcatctgcatacataactgcactgtcacttgacacctatttatacaggttgtactcgcgctacactatgctatttcatgc

SEQ ID NO: 13386 - DNA, 333 bp, Oryza sativa
cgacttaagcactgagctgcacttcgaaacttttgacttttttcctctctggtgctttcaacatatttatttctcgcgaacatatatgaacttttgcccgattaatcccttatcattttaatatccccacagatttctgcgcccctgattatctctgacctttgcctttatgattgaaaataaccctccattctataattaatccttatattccctacataggcttatcaccgataatctcagcccgccggctgaactaatggccacaacatcaactcctactttctctttatatgcaaatgatccctcctcctatagtccccagattccttc

SEQ ID NO: 13387 - DNA, 276 bp, Oryza sativa
  unsure (1)..(276): unsure at all n locations
acaaagctctctcccaccatttttgtagcanaccaagaaaatctttcctttaactcaattaactataagtaaacatgtgttgctctatgctcattcacacagaaactaatctccctatcatttctcgatatcacattgttttccccacattacattatcaaccttgcacagttcttgctcgaatgctcgagcaatctcacacttccccaataatgcatctacttgcacactgcacaaatgtacagtacataaatttattagcttaatttaatttta

SEQ ID NO: 13388 - DNA, 412 bp, Oryza sativa
ttggtgaatacaataatcttttgctgcaggtgtatcatctgctgttcgcattaaaagagctaatggagctatgtggtctagctgataagatccaaagtgaggtgtttcttaaaaaggcaattgaaaaagcttgcagagattctgatgatgcttgtgcagacataaatgttcacgccctaaaggtagatggtttcattctgaggctattaaggtatctgaagagccaattcaatttttgcccgacccacgcctggaagatacggaatgagatattgagaattggtggtacacccatcaatgatccactttccaaagattctccttgaacgttttgcttctgggcccttgaactacctccaatatggacggttgtctataatcattggacatatgctctgataccactatttgc

SEQ ID NO: 13389 - DNA, 280 bp, Oryza sativa
tgtatccagtaggaacctcgacgaacgatgtgggtcccgacgactatgtcaaaagtccaatggtggggagatcagagctggcggagaagatgctggtgaggatgttgctcgccgactgcgatgaggacgatggcgactggccgctggttttaccgatatgtgggagggcctgtgatgggaaagacatatctatcccggttcctacttaacgacgatagggtcaatcatgcgtttcatgtgcggcattgggtgcatctctcaccacattttgatctatctg

SEQ ID NO: 13390 - DNA, 64 bp, Oryza sativa
taaccgcgtgatgtgcctttgtggacctgcgaactattggcgggggcgaccgggctaactttat

SEQ ID NO: 13391 - DNA, 428 bp, Oryza sativa
catggatgagaactatatggtatgatttggtcccagatgtggctggaaggggatggtgaatctatgcggtggtcgcgcacaaggatttcgcggagttcttgaggatggattggagcggattgttgaaccctatcttctccggcgcgcgtttgcactgtagctagataaggggaaaatggtcgagagtctctgcagggaagacgaaacgtcccttggacttcagtgtttatttcgctagggcatcgggagtgctaatgggcctgggcctatacagtacttcagcccaatattattatcagcgtggcccgttgtgaaccctatggacttacgcattttttgcttgcgcaattgtgctcacaacggcgtgactcgatgctgtaatatcctcttgacgcggttgaaaatattttggaatactacactcaaat

SEQ ID NO: 13392 - DNA, 339 bp, Oryza sativa
  unsure (1)..(339): unsure at all n locations
agcttaaagtgtgtggtggatcgtgcgatggtcttggngagatatgaggcaaccttgcagcagccgtctggactctggaccacggagagagaacgtggggagcatatagggagatctaggtgatggcaacagcgacttggaggcgccgatggtgacgcctgagatctttgttcgggagggacgaggagatttttgccgtaaaataagtgccgatattggaacgaagtgcttgtctctttcggtcgacggggtggtcgttgttgatctgttcggcgtccgcggtgcgaatgtgtgctgatatgctcgccgcacacgangggatgatatcatgagattact

SEQ ID NO: 13393 - DNA, 163 bp, Oryza sativa
agcacaaaaaaagcgcaggcaacacctttcttttgtaaaaggagaccagagaaagagagaccgaagagaaagacaccacacacggggcgcgaaaacatacgaacaaaagggacggaacggaacaagacacacgaaaggggaaagccgatgaccgaaaaagacg

SEQ ID NO: 13394 - DNA, 402 bp, Oryza sativa
tatgtagattaaccagcctcaatcttttggaacctgctttttcctgaaatattgaggtcatggctatcgtgagatgtctgtctgcaacaaaccatcttagttattaacattcaattttgaaacattatgttgggaattcaaatacttaggaactggccgctacatcttttatgcattatcctcagaacccatcaaatttattttcttgatcatttattcttgggttgcatatcacttgcattggaatattgttgttcagtgattcacgggattagtcaaaacacaaccacactcacaatattgttttaagttgctgctgcattgacatatgtggactcacagacacaccatccgcaccaagtattgtaatatgggctcattgttaatgctgtgtgacatgta

SEQ ID NO: 13395 - DNA, 412 bp, Oryza sativa
agcttgcacggtggtcactatcttatacgtatgttgtcagtattccgatccggattctagtatgtgaagatacaacaatcctattaaattgaaacgataccgatcctacctaatatcttagttttcatagtatctttgatcctactattcattattacacgatactacaaagccttaggtagtatcctggtctacgattcttacgatccttcaaaatattatataaaatcagatagtttgaaaataatattaataaatatgttctaagttatataataatcagttaaatataccacaactaatggggcttctcttgataaatgtctctatatgcatgacatatattattactatatctttttataacgaataactattttgtagttaatacaaatattaactaacttaaaaa

SEQ ID NO: 13396 - DNA, 441 bp, Oryza sativa
  unsure (1)..(441): unsure at all n locations
cctgcggcatgcaagctttcttttaggggttacctctgatgaatatcacacaagagtactatatcctcaaacaagaaagagcttcagtcagctgtgtccatggatgaacaatattgtccactgacccaccaatccaatatgctaaatactgatgtactgttgtcaatgccatctggttctaatgcttgcacaaataaaggtgagatatgtatttcaacattgagaattggatccaatcctccagtttttgataaaataatcttaaggtccttgatgccgagagcagcttttggagcctacaataagttattaccaaatagtcttcagaatatacaagacaaacgaacacacactcaacaaaatttttagtcactgtgactgttgtgtaacacttatgtgcctagagaaacaacgtgattngccaacagcaaatgataatat

SEQ ID NO: 13397 - DNA, 135 bp, Oryza sativa
  unsure (1)..(135): unsure at all n locations
cgcggacacctgcactggactacacctgcatgaagngggtacagctatctacaaggtgagcattgcccccgaatttacgagctattaccgatggtgttgaggtaccaggtgcctatcgggtgctcgtgtttttgc

SEQ ID NO: 13398 - DNA, 304 bp, Oryza sativa
gaaaagcccagcaaacgttttgggctaccgtcacctgtgaacagaccgggccaaacaatgatgggccgagccaggcctgggccgggccgggttcccataaatatttaatgctacaggtgaaaatggctgtgccacagacaggtaggtaccacgggcactggcacattcccctccccccttttttcatcctcgcatcataaaaatccatatacttctccttcttctcccttcgcggcgcattcgcattacccccccgaaaccctataaccaccacccccaccaccatacccgagctcgctgagag

SEQ ID NO: 13399 - DNA, 433 bp, Oryza sativa
  unsure (1)..(433): unsure at all n locations
ggtcccgtatntgtttactcttcacaccatggatgttgttccacgtaaatcaccgtgtcttgtgtgcatgtgtttattattgttccgctactgatttgctattagcaactatcctaataactcatggcaagattaatggttaattgtgtgaaatatgtttacacggtgatgaattgtacttaatttgcacattgaagtgatcttggttcatccccaagtcctcatcaacgtacacgtatgggcctatatattatacgtgtacatacgtacgtatgtaacacttggtagactacacacatgggtgtaatttcattgatcgaaatcacatctttctgtttaattagttggggcaggcacatatccgatgaaacttccttcgcgccgtaactgcagttattgtatggtccggtatggtaaacgacgtctgaataat

SEQ ID NO: 13400 - DNA, 274 bp, Oryza sativa
  unsure (1)..(274): unsure at all n locations
gactgcacgtcctttaaatgggaggtcttcttctcgtcatctgaaatgtagaaccagaacagcgcttccgcttaagaagtactagagcggtgaagagtactcttaatcacgaatgcaattttgtttttcacatttctatccggcccagagaccttcgagcttaaactaaaagtttggttgacggtgattggtttacctcaagggattaaattctggtatccatattttacgcacatgatngtccactagtaaatgaatattgatttggtcatac

SEQ ID NO: 13401 - DNA, 314 bp, Oryza sativa
catcacatgcccttggcgcgatccactgatcactggtgagtgatgactcaacaccaagcgggcctgctcctgtatagctaagctccatttaaagttgcgctgtggggcccactgtgactttgaggggggccacatgtgccagaaggtacgcataagaagaattggggattgaggagcttcgtactagtacatactaaacctcggaacagtgtggtattgatttaatgagcacagaattattttactattacatgaaccattcgtcgcactcagctatatgcgttatgcaagggttaacgtttataaaaaggaga

SEQ ID NO: 13402 - DNA, 289 bp, Oryza sativa
  unsure (1)..(289): unsure at all n locations
ctcagcttgagacacctcgccactcctncacacacttgnttagtgtcgcgttacaccttcatgtgcgacattcatcatcagcttcctttccaaccgccaacaagacttgatgctaaggggcaaggagcttattgggtcggaggtatatgttccctgccgtggaacatgttgtgctccttcatggtgtcactaatggctttctcggtcaacatgtccttcggctccactaaatgcatgtgttgctacttggattggnttttggtgccttctcgaatcttgcatatgaaat

SEQ ID NO: 13403 - DNA, 446 bp, Oryza sativa
  unsure (1)..(446): unsure at all n locations
cgtgatcctctcagtcacctgcggcatgcaagcttggattngaaggtagcagaactcttattttacctgttctattcaattgctactggagttgaggtacaccccaaattatggtttggtagaggtagcacatgcatcttcctaaaccatttctttgtaaaataccatttcttcttgttttctgtatatctgtattttagtattacatatatacataagtacatgctcaaaattggagaggtaatgaggtggatcatcattgtttatgcccttgctgtgccaaatgccactgggttaaatgttcccctgaagttntatacttcattttttaaggattacatgattgcattccactagttctaggattntttgaaataaaacggtgcttcgtaatgaccaaaggatttgcatttctaaatcagacctcatcatttctgcagatattc

SEQ ID NO: 13404 - DNA, 181 bp, Oryza sativa
  unsure (1)..(181): unsure at all n locations
ctgtgggtgggtctagtgtgctcctgtgttgtgaaaanaaaatatcaaanaaagaataaataaataaataaaaaagttgtgcctctcttctcagcactagagagagcgagcaaaaaaaaaaaaaagaggatccagcgagcacaccacaccattccccctttgtcaccaccttctaccaccg

SEQ ID NO: 13405 - DNA, 437 bp, Oryza sativa
  unsure (1)..(437): unsure at all n locations
aacacaatagtacctcatatgatgatggagagacaacttcatcacatctggatgccatgactcgccggcccccataggaatttgatgaaatgtggcaccaaataatgattccaccagcacgtttaagccctttatgcactgggacaatggaaagtatgctgcaaccacctgttaggtatttcaaaaatgcccaaaagggcaaaattttaagtatgcaatgatgttaaagggatcaccgcacattaactttttcattgacatatattaaattagaaagtaattgggtactgtgttttttcttcccctcataaccgatttagtccacaagcaccaatttcgggtgtatttggcttgtgtcaacctatgggtgtgaattacataaagatctagattgtgatctaaataaacatgtataatnnntataagnagtctactat

SEQ ID NO: 13406 - DNA, 218 bp, Oryza sativa
ccgtagcctctcggcggtatcaaagccagccgctacagaagagccagcacagggggtcccgggtttcgaccgcacctggagctcataactgcaagagttctcccaggagtgaaccgaggcggtaacatgttcatgggccaaccctgcgcttggcccctgagggccatggggaagatgttcgtcatgacccggtcgccaccctccgccgcctctatgat

SEQ ID NO: 13407 - DNA, 206 bp, Oryza sativa
aagggaattgtgcccaaattctaaagtccaatgacaaagtatgaaagtcttgcgtattctatcctcagatgtgttaagaacttggaaatcttttttaaaataatttcaacttttattcttaaagatacgtttgagtgcatttagttaccaaagagcctgggaattgatattcgttaataatttggatagcgttacctaaacatgag

SEQ ID NO: 13408 - DNA, 254 bp, Oryza sativa
tttcttgagaaacacacgccttatccaacaggaagaatctctatgatattcattttaaccaaattaagacaataaacatgtggatgtactaacttgggtgaacaagatcgagaagcgaactgcagaatacataatcacattttgaaagaaacaatcaaacaagcaagttcaagtgattacctgaagaaggaatctggcatgatccaagccacggcgggagcaagcatggtgtcagccagttgagttggtctaac

SEQ ID NO: 13409 - DNA, 375 bp, Oryza sativa
  unsure (1)..(375): unsure at all n locations
agcttgctatgaccagcatcttgtacccccattcattccacaactgcaatacccctccgaattccattggtgctcagctgctcaaaatgcctacagtagcatgtcaaagaactcaataatattagcaaatgttgtgctcattaaatctttatatgtgttgagtgttgtgtacatgcagggaatatatgcaaagtgactgaatgtgtagcgggatctttgtacgaataaatactcaaaacttgtactgattcaaactgattcgatgaaccaagtatttatttactatcatcaaacttatccggngtattcgatcattgaactaaggtacacttacccattataaacatgatatgaacctcgcatcacacaagcata

SEQ ID NO: 13410 - DNA, 414 bp, Oryza sativa
tactcagctttgactttattagatactcttctaaaatatatatgggattgaaatactttccgagtatatgaatacctactttacattatgttcatgttatactgaatatacggctagcttatctgggagatgctttggtgcgggtataatgtttgcttatgcaattactctaagtcatgacgatgatattagagtagtatctggtagtttaggcgtggtgtctagattacaggatatcattatttggggttatatattgcacatgagaggtgggccgctgatggtgtcaactcagtacgggtattcctccacgccggtatataatcctaagttaattccctagggagggtattcctccgtatataccccccggtgtatggtcatgacgggctgtcgtaaggaactcgacagtca

SEQ ID NO: 13411 - DNA, 335 bp, Oryza sativa
  unsure (1)..(335): unsure at all n locations
taaccttttctcaaacattgtccaaatttcacaagcttcagccaacaaatcaaaacaagaagttatgatgggttggttggctagttacatgattcagccaacaagtcaaaagtgagagcacttaaatgctttcttgggaagggctgattcacttcaaaaagtttgcaaagggttggctgttggtggaggcagcaataaatgcatttgggggtggctgatgtggtgatgacggtgctgctggttgtggtggacgaaatttggtgggggtggaggtggatctcgtggtgaatatggtggtgatggtggcagcnggatgagataaatgaaatgatggt

SEQ ID NO: 13412 - DNA, 258 bp, Oryza sativa
tcacaagaaaacatatgcgatctatcataaattttaattattcttcaaattatttgaatgtatcggtgttaccacgattttgaccttggcagacaattaccgctggtttcgcataccctggatgatacgtatcgacatgacatgttgcgtcactgcacgaagcggagtgaaccctatttagacatatatagcactcaccatgataaattcagaaacccaaaaatatattttaatactccctccgtttcgaaatatttg

SEQ ID NO: 13413 - DNA, 454 bp, Oryza sativa
  unsure (1)..(454): unsure at all n locations
ccggatcttatagtcactgagctgcaactggagttccacgtgtgacctttggctgggatccggtagaatgtcggtgggaaagtgaccccctctgcaaaggttattaaactgttcgaacagccatgcccacggtcatgggcggatgtgaggtgattcctagcgtagttttgtttgactactgctntgtgaaattgctgttgtggaatgggatcgatgnttggaaaatctgcggctgatgggatcagctaggcccgggtggccgtttgaaagttgtggccgggtgccaaccctgaatcaattcaaagactgatacatcgcacatactccggccggacgagacagcactgctcatccgtgtcggttgagaatcactcacttagttgtttcaaaaaggaagttaaatatagtcatttgcaaaaacaacagccttacctttgaagcctgcataaacact

SEQ ID NO: 13414 - DNA, 385 bp, Oryza sativa
  unsure (1)..(385): unsure at all n locations
actcaacctcgatcactatggtcaggaaagagacatctctcaacctctctttatttctggccgcagncatgcatgtacacatgcttgtgctcttctaacagaacatacatgcaccacgtgcgcatgttccgacgcaatgcgatacggagagaacagttggtacacagatcagatatcgacgcactacgtgtgcaccgcagtcccagttaaatagtactatagttacaacaatgtggaccacgtacatctaaataaatgcgacgggaccatcacccgatacgtggtggaattataaattgctcctaggtagcatggaacccatgcatgcagtcactccataagaaccaacaaaccagcctaaaggaaggccaacactcggtatcat

SEQ ID NO: 13415 - DNA, 460 bp, Oryza sativa
tccttcctgccttaatttgtgcctgccttttcttccaaaatttaatgataaaataagaagctttaagcttttccttccgatgatattgtttcccgtctctgtctcaggttttggtttccttagtgtttgtttgcttgcttgattgataatccagcatcaacaaacaaagtaaagatatatctattcatgtcatgacatcattccagcgaggatgcaatgcacaacaccttcttcttctttttctcttttgacgtaacagaggttgcaaacttatgggttcgtgtctaattcattatctacaaaaactgaggttgcaagcaaactacatagatactgtattatcttacaagtaccaaatcacttgagccatccagcattatcttcagttgctacacaagatagattggtttggtttccttatacaccaacaccacaagtatgcacatatgagaaaattgat

SEQ ID NO: 13416 - DNA, 275 bp, Oryza sativa
ccggatggatgacctcgcggatgaatccggcctccagaagtcgcgccaccttctcgcggatgaaggcttgacgttccggggcctggcgccgcactttctgccggaccggccttgcgcccgggcgcacggcgagacggtgctcaatcacctccctggggaccccgggcatatccgccggtctccatgcgaagacgtcagcgttttgccgcaggaaagagacgagcgcgtcttcctatttgccgtccagaagaccaccgatccgtgtggtcttggac

SEQ ID NO: 13417 - DNA, 424 bp, Oryza sativa
  unsure (1)..(424): unsure at all n locations
gcttctggtnggtatattctgcttggtntgatatcttaacgtatagtcgnatcggagtactagccgatacatgctagatctttctgatctgctatgctataaacatatatagntctgttattaatatatatttcaatctaagtgatttatactgtctcggcatggtgaccgatctatcccaatcacttgatttaagtatgtatcgatatcaaaactatatattatcgatacctacaaccgatcgagtagatttagttctttattatctatttgtaaccgccgatcgattcacgtatgacatcggctcanagataaatgatatgtcatcggcatctagccgatcggctatcatntttagggttaactggtggttctttgtctatgtttcttgttgattgcangatcaaatcaactggcacgctca

SEQ ID NO: 13418 - DNA, 415 bp, Oryza sativa
  unsure (1)..(415): unsure at all n locations
catgcaagcttaactgaagtgagtggtggttaattntatggtcgaccgtcataactcggtgcagttcgtgatttatccatcattttatagatgaacagatggaaggagaaaatatatgcatgcgtacatctatttcctatctctgaccacggaaagaaaatgaacgccattttattttaattcttgttagagaaatatggctgaacatatgtcaaaactagcaaatgtgtgtgctaattagtatgctcaattaattttgtttatcactatgcctgtatcactactagcacggcttgaagccaagaagcgtgaccaaagcaagtgctttgtttaatttatggtgaattatgcaaaatttatgtttggatccgtgatttgatccgctcgtagaggaccgaacctgagaacgagaatc

SEQ ID NO: 13419 - DNA, 471 bp, Oryza sativa
gatagctccccaccacttgtcaatggccataagcgtgaacaccgcaaggggaatgtcggggagttggcgccggagccaaaaaagggcaaagctgcgacgtcgatgctggtgagcaaatctgtgaaggtcgtgagggcgccagcccaatttgagctatgcatgccattggtggaggacaatgtgttagctgtgatgggtattgcttgccgagagctacataagcaatacatggagcttagcaatgccaagcggaaaatgcgggagtcatccatagttggacatcacgaccaccagcccgtcctatcgtcgcctgcctatataactatatgctttgatgacctcttcgacctttcaggaacctgaagttggacactggtcttctaaaatgctactccttgtaagtgcatacactctatacttgtgatatgactggactatatctcctattaaattagtcttatacgtaatatt

SEQ ID NO: 13420 - DNA, 455 bp, Oryza sativa
  unsure (1)..(455): unsure at all n locations
cgcttggcaactcttgagcccactagatggttgtaataattacttaaccagatatcaatttattaactaaaagaacaccatcctataaatacagagtgagggtgcatgggggaagagcaaacggggtaaatatgtgctaagtactaactactaacagggagtcagggatgtaagcgaggggcagggagtaaaacagagcagtagagggaggattatagtagatgagatgtagaggagagggaggaaaaccacaacatagcagcaaatgagggagcagagtagaggatgtagaagaggggggaggaaacaccaaaacaagcagcagaggaaggataagaacagggtagaggaaggagcaaagcangatcatgttgagcagagaaagaaacagaggaaagaagagggtggaggaaagaggagaaagaagagcgtgcctgcttatgttttgtgtcaat

SEQ ID NO: 13421 - DNA, 402 bp, Oryza sativa
  unsure (1)..(402): unsure at all n locations
tctgttgcanagcactaccggacttacacatgtctagtgggtgatgcttaattcgtggctcaatctggntataaacaaaagttcacagattggagcatgcatgaagcangggtccatcgacattcttcatggcctatgaaagtacaccaactgcggcccgcgtttcgagatgtcatggcagagggtttgtgccctgctgctaaggggctcaaatcttgctgcctgtccctggtgtgccggccctaggagggatgggtctagactcttgtttatggcttggatggagtgggaactatgtcacgttctccgttcgtatactgtggtggtatgtggcacgtgagttcacactatgaagacgagacttgtgggtaaagattacacctctgagcagagttaatctat

SEQ ID NO: 13422 - DNA, 384 bp, Oryza sativa
  unsure (1)..(384): unsure at all n locations
agctntgtacttttattagaatactcttctatatacatttatgatattgaaatactttccgagtatatgagtacctactttacattatgttcttgttatactgaatgtacgggtagcttatctgggagatgctctggtgcgggtatagtgttttcttatgcaattactctatgtcatgacgatgatattagagtagtatctggtagtttagacgtggtgtctagattatgggatatcattatttggggttatatattgcggatgagaggtgggccactgatggtgacagctcagtacgggtattcctccgtgcctatatataatcctaagttaatttccagggttgtatggtcacgacgggctgtcgtaaagaactcggcagtc

SEQ ID NO: 13423 - DNA, 275 bp, Oryza sativa
ctcagctagccatgcttagaatggtcttccttgtcattatgggctcatatcaaacatgaaaattgtttttaatcaatctggacagaactttataacttgtgatattgataaataaaatggtggaaaacatggattttaagtttgggcctcaagtggtgtacatatggtgaataaatgtgtaccgatagggggagagtgcgcccataccgacctaaggacttcactcaatgtcagttcatttcgtatacagtacaaccacatgtgctaatatggga

SEQ ID NO: 13424 - DNA, 320 bp, Oryza sativa
  unsure (1)..(320): unsure at all n locations
tggacagtactccatgaccaagcacgaaagattgtctgtgtgaaaatgggcataaagagtcggaaggaatgggtgatccaacatttctagaatctccctctcaacctgtgcacgcagcatcttctttctattgatcaggtactctatgtccataaccttcaaagcaaacaagcactctgaatcaaccaactcagctaggtacacagtccctatatcgncgcaaccaagcctcttcagaagctngaaattgtcaagacctaaggatcctttgtgcaatgccaactcacggatggttatccaacgcagatcctttccatgtg

SEQ ID NO: 13425 - DNA, 196 bp, Oryza sativa
acatcacacatctagtatcgacatccatacctcgatggtgcacgttagcacgcaacgccagcgtgttgtggcacattctccacaagaagtggttgatctttactggaacacccaacttccagagcttcttccaaaatcatcatccccactcttccaatttgagaccccagggcatcccgttctgctagctcttctc

SEQ ID NO: 13426 - DNA, 403 bp, Oryza sativa
  unsure (1)..(403): unsure at all n locations
taatgcacagcttcgccaagatattagcaaaaatgctggccaatatattggcgcctaagcttcatgaactcgtctcaccaaaccaaagcgcgttcattcgaataagagcaatacatgacaacttcctgtatgtgcagaacatgatcaaaaacttcagcagaaagaaaaaaccgatgcttttcataaaggtcgatatttccaaagcctctgacaccgtaaactggccgtatttgctggaggtactacaaaattttgggtttggacaaagatggagaaattggatttcaaatattttaggaagttcaagctcgagaattctcctcattggaatccctggtaaagcaatatggcacatgcgaggtctaagacaangggatccactctcaccgatgcttnttatact

SEQ ID NO: 13427 - DNA, 420 bp, Oryza sativa
  unsure (1)..(420): unsure at all n locations
cttcatgtaattccagagctcatcgactacattatctgttntttgggcaagcagtctaatcacctccaaggaaactatctgcacaataataagtgactttcagaatttgtatgcaggcaagcagcttggaataacttcatgttacatcttatttcctctaatcatatatagtaagcatgaagtaggacgaacctcctatgctagctccaagcaggataaaatctagtagtatttacctaagttaacttattgtctataaatttcaaacaagaacatgccttagcacatgtcaaaatttcaaaagatgacacggaaaaacttccttttgtcatgctgaanagatagtatactttgggaagatcgagagantagtgaatcanaacaaaccatatcaggtaggcacagcagatgaacgagcct

SEQ ID NO: 13428 - DNA, 365 bp, Oryza sativa
cttgggctatcttctgaaggctttcgatgtgaaagattctctgaaagacaattgaacattaagtttcaatgcaaatattagaatcaataacagggaagcatttcttaccatttttgtgcttcttacaggtgaaaaagttggacttgtatgcagctcttaagaatataacatgcatctttgccaactatccaccaaggacaactgcagttgtaaaattttcagccaacttccagctgtcaggtattggagaaggctttactcgatgcttagatatagtcattatggtacctgtttgtggtggaaaatggttggagtgaaaatcaagaaaatgaactacttagtactgaagtattatgagatatagt

SEQ ID NO: 13429 - DNA, 287 bp, Oryza sativa
  unsure (1)..(287): unsure at all n locations
acttgctcacaacttgtcttattgtctcccacttatgatgcccctatattaacaaaatattaccaaaatatgtaattcatgctaatgatgccgagatgaattaaccaaaaataaccaagataatcatatcaataagttgaagtcgtctgctaaaacagtcaagacnctccaatttanggttctattctcaccttcaaaagtctcttgctggccagtagctcagctcacagcaagttaaacagtcatgtgcacaatggcagagagttgtttcttgacacacatttgat

SEQ ID NO: 13430 - DNA, 318 bp, Oryza sativa
actcaacccactgcaccaatgacattgtaacaattgtcaaatgcgcagccatacagtcaaaaattagatacaattgtgaagtttataatagaatatggaccttctttgtggcatcagcaattcaaaacttccaccatctttgctctaaggtaacgagttttaatgtatgaagtgcccgccatgaacataatgatgaagttgagaaagtcatcctgtccgaaacacgatgattatgagcaaattcataagtacacaacttagctctgccaatcacaaaatcaggcgccactactactgtggaatggctcagaagcatac

SEQ ID NO: 13431 - DNA, 426 bp, Oryza sativa
  unsure (1)..(426): unsure at all n locations
agcttaaagtactaagcctagatgctgttgatctggctatcgttcagcttgcaaggctcctgtgggaagctgaaaagtctgggaaataccagtatttcctttgtgtcaccggagaccactctactccagttgagtacggtgaccacagttttgaacccgttccttttgtgttgtgccgacttatagatttcgtaggagctatggnggaggacaatgttatcaacttccccctggacgatttcctgcttccttcagttaaatctggagaagatgtggcagaaaacatagatgtagctgatcgcaagtctgatcagcgcanagctttcagtggcgattctgtctttgaattcaacgagaattgccgctgcaggggcttgcttggacgttncctggaaggagatgatggcatcatcaagatgtcatcaa

SEQ ID NO: 13432 - DNA, 390 bp, Oryza sativa
  unsure (1)..(390): unsure at all n locations
tctttgatgcaaccaatctncaaacaagcttttcttatcgatctttcatgcaaccatctaggggcacaaaagaaacttgtcctatacaaaaatgtgatacaatttgacaaaagttgagttgaaaccatctcacgatctacccataaatataacggtgaactcaaccagagactcacaaacgagccttgtgtgctgtgatcccagctgccttcattgcgtcacgattgtccaaggaattcgccagtgctcggaatttacaatcaaccactgaaaaataaagatgatgacatttcagttttttttctctccactggcaatgttagatgttcgcaaccattaaattattattacaagcatttaacaggttttgcagccttgttacatataatc

SEQ ID NO: 13433 - DNA, 324 bp, Oryza sativa
  unsure (1)..(324): unsure at all n locations
aatattggcaaacctaattttcgaaggtactctaaggctgagttcttatctctactttcccaactcacctccctcgtttttcgcgcgcacgctttttaaactgttaaatggtgcttctgactgctgtaatttctcgtagaattataaactcccccaaatagtccaactttntatctagattataagaaactaactaccaatcggctactcctcagtatattaaactctctaaatatgcccgtagtatcaaatcttgggcaagtcttaaacataccaaattttttggtatgtttttggcgttggcaaatattggcatcataacta

SEQ ID NO: 13434 - DNA, 446 bp, Oryza sativa
  unsure (1)..(446): unsure at all n locations
agcttgcaaatnttagctcaactttgtgggttatctagtgtgattagacaggatattgcatgattgaagtgatatgaatttcgtggttttgttttatgtgattagacaagaagatattgcataacttatagtgatccccttttaagttattgaccttttgattcattatctaaaaagatcttcttgttcaaactgtaagcattaacagcttgtctatattaagggcttggatgccacaaggtttcttgtctgaacactgcataaacagaactaaaatttgggtctccctctgtaatctgctcaaatgaagttccttaggtgattgagaattaactcctagaataaagcttaacaatcaccggggttgccgtgtaaaaccgtttcatacagcatcaagctctttcttgtgcagcagagtagtttacagtaacaatgtcatgaacatc

SEQ ID NO: 13435 - DNA, 450 bp, Oryza sativa
  unsure (1)..(450): unsure at all n locations
agctttgatcatcaatatcctcttgaacatttctactttaacttttagaaaaggtatggccaaatgtgcgtcttctaatatatttcaaaatactataactgtgctattttcttgtgaaacactgtgcgcatgtgctcctatacacgtgtgtacactcacgtctatcaatatataaacatataccttacccctgtaagcatccacaaagactgagtcatcatatgttaagattgacagagtcactacatacgtctcgttacggtgacgctgatcaattaccactggaaaaattattaatcataaatataagcacacattctaagtataaaagttgaatctagtcggccaatagctttcaccataacaatatacgagactatattgaataacaatactatataagtttttaaattnttctctgatactaaggatgtgtttagttcacactaa

SEQ ID NO: 13436 - DNA, 284 bp, Oryza sativa
ttaagaaatgccatagaacaatcaacgacagaagaatatggactgaaggaaattattctgggagctgatgtgtgaaagtagttagttttgcctcatgtctgtagcctttctttgtaagatgcactaaagtagctgggtagtctgtatataactaagagtttgcagggacagtagtcatagatgctacaaatttgaacccccttttggttcacatagcaaagaaactcatatctgtacaatatatttcttttatcacctggcgtgttggatggtatgaaatctgc

SEQ ID NO: 13437 - DNA, 463 bp, Oryza sativa
cgacctgccgcatgcaagcttacccttaattctgttggcaatagatttgtcttgaatcttgttgggaacattgcatagactgataggcctgaagtctttatgggaaatagatctgttctttgtatgaatgagaacaatattgcgtttgtttagctcgggaggaatgttacctgtttgatagaagtcctgaaccagagtcattagatcatcctttatccaactccatgcagatctgtaaaaagcagcattaagaccatctggcccatgggaagcatttttcctcatgcccttgatgatactccaaatttcttcctcatctggaatctgccaatccatttcttgaggagaagtagtattatgaagataagtattaagtctatcagttctatcagagcagaacagatcagagaaataattaataaaaatttgagcaatatcatcaggattagtaatataaacatca

SEQ ID NO: 13438 - DNA, 441 bp, Oryza sativa
  unsure (1)..(441): unsure at all n locations
agcttcatgctaaaatgttcattcagaactgcatagcagtgctagtgacttgtcacaagaatactaaaaaactatgtccaggaaagaaaaggaaaaaagtcatcttgattatattttgattcgtatccccctttcaactactggtggaataaagactggtgattggtgaatgtacaatctttaagaacccaaaaagatattgtgacatgcatgtcacatagtaatggcagtaggcagtagatgatgaaaaattgaaggcctgtgcttaaaactgcacataatgtactaaaagcacagcacacttacaggacagtgttgttgcctctgttgtatagttggaagacaatggaagtccgcgtccagcaaagctatcacactgttcagtgagactggaaggaaaagcaagagatntagtttatcatggacaaatataaatggtac

SEQ ID NO: 13439 - DNA, 511 bp, Oryza sativa
  unsure (1)..(511): unsure at all n locations
tgtgtagtgtaatggcattgtacatttctgcactctggtaatttacagaagaggcaagttatattntataggattgagtttattcacccagtcatatagttgaagaggcaagtaacctgttagagaggactgaacattaacacctcttgttcgattaaaaatgaccaaagagcatcaaacatgtattccaggctgttactttagatatggcccattaatttggttagttgtctatgtacatcctagttggtgtaaatgccagttaccatttctatgatctaaaacaatcaactcttttagtatattttcaaaaacgaaaattcagtacacatgtatgaatcttaatattcttctctangctcgtacaaaagcaacaaaggcaccgtgtcagctggttcacattatgctagttgtacttagcattatccactagcaccttattttcatgcatatcatgctaattngcttgcccacgtgagtgggaattttttcatgtttataattatatatg

SEQ ID NO: 13440 - DNA, 415 bp, Oryza sativa
  unsure (1)..(415): unsure at all n locations
agctttgagcagctcanagaatagttgacctctgcgcctattntatttcttgctgacatcaggaaagactttgttatatattgtgatgcatcaaggcaaggactatgaggagtactgacgcaggacggaaaggttgtggcctatgcatcgcgacaattgcgaccacatgagaaaaactaccctacccatgacctataactngcagctgtggttcatgcgctaaagatttggagacattatctgattggaaatcattgcgatatctacactgaccacaagagtctgaagtatattttcacccagtcagatctcaacttgaggcaaaggcgatggttggaattaatcaaggattatgacttggaggttcactatcaccccggcaaggcaaacgtggtggccgacgctttgagtcgga

SEQ ID NO: 13441 - DNA, 200 bp, Oryza sativa
  unsure (1)..(200): unsure at all n locations
tagagtagctctagtagctcacaagatcattataccttcatagacggcctttttacccaagagaaacataatggaaggtgttgctattntgcacgaaacaattcacgagatgcaccggaagaagaagaatggcgtggttattaagcttgactttgaaaaagcttacgataaagtggattggaggttcttacaacaaactt

SEQ ID NO: 13442 - DNA, 354 bp, Oryza sativa
  unsure (1)..(354): unsure at all n locations
tatatcttcctgatgcacaaaaatcaaaagctggggatccttccaaagttccatgaggggatctttcaaagttactatacagatagattcaagtatattcatttgcccctactgaaaacctggaaagcaatgtctttaaaaaaggttgtgagtgtctctccatcttgatgcagagatgagaatgatacacccaacatgacaacactgttcatgcacttgttcacaggacttcagctctgagctggaagaaaagagactgattttcagaanatagaagagaaacggttcatttgtgatgcttagagtctgacgaaacaaactatgttgacaaatatcgcaaacatatgataaatc

SEQ ID NO: 13443 - DNA, 338 bp, Oryza sativa
  unsure (1)..(338): unsure at all n locations
aaagctgacctcgtcgcctattntagttcttccggacatctggaaagactctgntatatattgtgatgcatcaaggcanggactatgaggagtactgatgcangacggaaaggttgtggcctatgcatcacgacaattgcgaccacatgaggaaaactaccctacccatgacctagaactcgcagctgtggttcatgcgctaaatatttggagacactatttgattggaaaccattgcgatatctacactgaccacaagagtctgaagtatattttcacccagtcagatctcaacttgaggcanaggcgatggctggattaatcaaggactatgatct

SEQ ID NO: 13444 - DNA, 268 bp, Oryza sativa
tcacgaatggcctattcccggtggtgagagcatctacgcggcctccgaaatccgatgctaactgcggattgggcggagctacgccgatcgaggccggcgactagcggatgctacagagctctggcgtgaacggcggcgagtacacggcgagcgacggcaactgtcggggcggcgccggctagctacggggaggctactcctgctactacccgtgtcttaagggaggagatggagcgaggatgaacaaccgttagaggcactaccgtgc

SEQ ID NO: 13445 - DNA, 465 bp, Oryza sativa
  unsure (1)..(465): unsure at all n locations
tctatgtgtgtgtactgtgtttgtacagtgcacgtacatacatgggtacacagtgtactgtatatgacagtgattaattatgcaaaatgcaagccaacaaaaatatcgagacggaggataaaacaaggatcagcgcccctgaatatatcaatccgcctacacttgctagcttgcgtatactgtacattcagagaagttatcgagcatgttgatcaaagaaatatcatggataacaagtctaggtattaaacctgtgtgtgcgtgtcgtcttccgtgtaattgaaaagagaaattaacggcacgattaataaggtagtctacatccacatacaacttgcgaaccgcctatgtaggtgtatggctaaataaaatggttcaaactaacataagagaccacatcagttacaacttgataattattaatttcagagttcngnacgtgtataatagtaaaatcgagagatc

SEQ ID NO: 13446 - DNA, 294 bp, Oryza sativa
tttcacgcgcacactctcgaaactactaaatgggatttaaaaaaatctatcagaaatgtttaaaaaagcatattaattcatcttttcttaaaaaaatagattaaatttcacaatactttaactaatgggacaaaattatcagtttgcttgaacattagcaacatgtttcattggtaatcattgcgtattctacactgaccacaatagtctgtgttattctttattaaaataattaaaaaacctattcttttataaagctccgctctatgtatattgcttttaaataaaattacc

SEQ ID NO: 13447 - DNA, 349 bp, Oryza sativa
agcttggatgtctcccgacgtggctgatccctactggctgggtgatccgggttagtaatgtcgtgtgggtaaagtgtaccccctctgcagaggttaacaaactgttcgaacagccgtgcccacggtcatgggcggatgtgaggtgattcctagcgtagttttgtttgactactgcttgtgaaattgttgtgtaaaaaggggttcggtgtttgaaaaatctgcagctgatgggatcagctatgcccgggtggccgtttgaaaagttgttggcccgggtggccgtttgaaaagctgttggccgggtgccaaccttgttgcaatcctaaagactgacacattgcacatactc

SEQ ID NO: 13448 - DNA, 377 bp, Oryza sativa
  unsure (1)..(377): unsure at all n locations
gacaagatagtgtcacgaagagatttctcctcgtgtgccgaanattctagtgttgattttatttaaatcagttgagtgatagatgggttanaaaaaaaaaggctaatagtgattatgatcgtcaatgttagttntcatttaaaaagtagcattggttgactgtcaccagaagatgagcccggcatcatcatgggacctctatttggaaggaaaaatggttttctttgcatgctagttcatcgggcagtttgtacagttgcgaagtagtgctcatcttatgtctttacgtcacttgaatttcttaggccaattaggttttgcgacccacttgtattatttcaatcgagcttatatggctaaccataatgcagtgggta

SEQ ID NO: 13449 - DNA, 292 bp, Oryza sativa
acatttgaatcttatattgaaatataaaatttaaatatatcctgcatatttattactgggcagtattgactctatataatttattgcgatcacttatgccatgaccaggacaaattaaaaagtatctggagtcaattaaatcaatatcctttttattgctcatgtatttacatactgcatttctgaaatatacagactagctatagtaaacgtatgtgtaattggcattttcatgtctataaaattatatgtatgaaaaggatatggtaaattgaattgatttatatatcat

SEQ ID NO: 13450 - DNA, 454 bp, Oryza sativa
  unsure (1)..(454): unsure at all n locations
agctntggcgcttcggccacagccaagatcagtgttgatgcatctcttgcaggtggcataatcgggaggggtggggttaacacaaagcagatatccagagtcacatgggccaagctggccatccgtgatcatgaatcagacaccaacttgaaaaacattgagcttgagggcacatttgatcagatcaagaacgctagtgcaatggtgagggagctgattgtcagcatcggtggcggtgcccctccacaaggcaagaaacctgtgggaggatcccaccgcgggggaggccccggaagcaacttcaagaccaagctgtgcgagaacttcaccaaagggtcgtgcacttttggcgacaggtagccatttgcccatggtgaaaatgagcttcggaaatcagctgctgcttgagatccattgtggtttgagcgattagtcattgtaactcgaaactttg

SEQ ID NO: 13451 - DNA, 442 bp, Oryza sativa
agcttggggaacgaagcatgggccgatgatgatgaagcagcaccgaggaattcaggaccaatggtgacgactgagtctgcattcgagatttgcaaggactggagttggtttatgaggccaagagcaggcagtgccgtgcatgacatgcatttgtcgatatccaagtacacaagactagggaatgatatgcccagctatggacctgtcaaccagtttggaaactttccacctcggtagttcttaattactagcttctcaatgttctggggtggggtgagttcgttccatatcttttcgctcgctatgattgattcctctctactaaattggctattggatacatcaagtacttccttctcttcttcctgtggttcctttagagcatcttgattctctcgatcttgatcagattgctgctcctctatcaatggcgccatgtcac

SEQ ID NO: 13452 - DNA, 272 bp, Oryza sativa
agtaggtttaccttctagcggccgaactgttaacctttttgttcatcgtttggagagcctcagatcagacacaccagttcctaccaatctcaatttaccgtaccccgcgactttaagggggctacagctccgctgagaggtaccctgcacagggacaggcgggcacgaccgcaggatgggctctcttatgggagatgacaatggtctatgaatttatgagcatttagattctgtttttatgacaataatgtctgtgatgagatgctgatttt

SEQ ID NO: 13453 - DNA, 384 bp, Oryza sativa
ttaagtcacctgcggcatgcaagcttctaatggaattgatcttattaattcgatttattaataatattaaatataatcagaaaagtttactagtatggtttcaaatcttcccagttcccctattagctagcatgaagtatggtctttcactcttggactgtgatacaagatactcgttatggccaatcaatatgtaagaatgcggtgattttatctacgtgagactcttggggtgattgatgttattttatgccacgaaggatattagtctcgaggcgaaattggtatatatgtaatttgagttcagcatgcaatatatcaagtcttctttattaagccttggtcttttccctcttataatctcttgtaaatcgtatgaggaga

SEQ ID NO: 13454 - DNA, 358 bp, Oryza sativa
  unsure (1)..(358): unsure at all n locations
ttttagaatgctctcctaaaatgctatatgtgatgtttgcgtttcactctgcatcttatattcacggaaccaaataagtaaattttgagattctttagaagattcattctcctgcactgtcccacatagataaaggtttatttcccaactgagcaccacttcaccgctctgttttctttgaacagtggtttggagatgctgagaagntgacaaaggcccttttctcctttgctagccgattagctcccgttatcatatttgtggatgaggtatgtttacttaaatgaaacaaacaagtgcttatatatcccctctatgtgctgtctnctggtatgatataaaattagtttgacataac

SEQ ID NO: 13455 - DNA, 402 bp, Oryza sativa
agcttgacgtcaacgaacgctcaattgcagcgtccgatcgggcttacggttctcgccggcgtgaagagatcgacgactggactccgaccagaccgacggcttgttcgttctcctttcccaattaccccgttccttggtcctcctagcccatctattatgtttaaatgtcaattattatgtgtaatttctccaatcgctcatattaaataaggacgaaccgaactggatttcattagctccaatgagaattttgtatacaaggcaccgatctaaaaattgagctatatgttcatgagttacagaatgcccccttgatgctcctgtgaacatgtcgaatgcgtttgctgcaacaacggcagctttgcttgtgaaatctaccgacctatgataccttagattcac

SEQ ID NO: 13456 - DNA, 168 bp, Oryza sativa
agaatatccgtagaaatctttctattcgtagtagtctatgacccgggctttggggacgaggggtcgtattcctatttatttctttggattgagcgacaaaaacaagaatgatgcgcggcagcaaaagagcaatggcggggaacgacagggagactcatgcatcggcat

SEQ ID NO: 13457 - DNA, 451 bp, Oryza sativa
  unsure (1)..(451): unsure at all n locations
agctnggacatcattctagggatggattggttggctaagcacaaaggacagatagattgtgccgaatagtccatcaccttgcaaggacctggaggaaagcaagtccgctttacccctaacacccctaccgcaagtcggtctatcctaacctgtttacaagtcacctccttggagtcggtgcccatagtctgtgaatatcccgacgtatttccggaagaattaacaagaatgccaccagaccgagagatcgagttcgccatagaactggcaccaggcacagctccaattgcaaaaagaccctaccgaatggcagctaatgagttagcagaagttaaaagacaaatcgaagaactggaaagtaaaggttatgtgcgacctatctcatccccttggtgagccccagtgcttctggttaagaaaaaggatggctctgagagaatggaatcgacta

SEQ ID NO: 13458 - DNA, 371 bp, Oryza sativa
gaagcctatcattctcaaatctcaactctgaatgatacctctcactcttacgggtatctgattcttacacaactactcgattaatcttattccatatccccatcgttttccaatctttcttatttcccttttatagatcaagcatgaaccatctggtagtaaagggtttgatgggtgtgtacgtttatagtaataccgagttattggtcaagtatcttgttaagtcccatgttcaatgaaaaccttggcatttatgcatgtcagggaagtgttgttcaaatgagtaatatgaaaaaaaaaagctattttcagaaagaataataatggcttaatcttcacaaacatcgaaatgcaaaatatagctaactcac

SEQ ID NO: 13459 - DNA, 286 bp, Oryza sativa
ctggcggcccatggaggcccttcgtcacctaatgggctggcccaagaagatcaccttatggcccatgaatgtataagacgttttatacccattgtaatgtccctatcataagaggaaccatgtaaatttccctgtactaaccaaactctataaggtatgagcctgtattaggactataaatagccccctatggccatataatggggggatcccaaaaaattttaccaattaatatattgctttattattccaaacacctaacgggtttccacgtcctttaatgtga

SEQ ID NO: 13460 - DNA, 92 bp, Oryza sativa
ttgctatttatcttcactagaaataatatttaaatgctctggtgccaagttgccttaatttgtcttttcctggcttggaggacacccttaat

SEQ ID NO: 13461 - DNA, 378 bp, Oryza sativa
  unsure (1)..(378): unsure at all n locations
tcttcagcttttgatgtgtacttaatctccttctattaatataacgccaagcaacctgtttggccgttcgaaaaaaataaataacttactagaacaattaaaagaaaaagaanaagaataagaataggttatagaacaaacaccaaactctctccaataaaatattaaatgatacttcctctatcccaaaatataaggcataaccttttatataaatatatattatgcttgggtaacgcccttggcgcgggattggagggttttgctcaatcccatgagcaaaagttttggcttcgctcgcaaccttccnctcatcggaagcgcctgcaagtctccttcgcttctcgtatttcatacttcngttgtcatgctcacgtc

SEQ ID NO: 13462 - DNA, 358 bp, Oryza sativa
  unsure (1)..(358): unsure at all n locations
ttcctgttctctttggtgcattgatccgtgattgattcttccgataactgaaacaaatggaaatgttattggcgatttggttgtttggtgatcattccatctagtgttggttactaggcttatgtgtatgtaactaaaaagggaaataactgtgtgttcttgagaactgagactggtgtggttgtcaacttgtgctacattgctgagttttgagatttattgcttgtaacaattattgatgacatgcaatccattttggacgtntttacatgtcatggatatggatttcttatagaacatgcctcattcatacatanatttgaatattattgaaatacntaagaatgagatatcatct

SEQ ID NO: 13463 - DNA, 233 bp, Oryza sativa
gtatagctctagtagcatggttcgagagtatctatggtcatggcttggactccggatctgcgggggcggttacgcataccgcggcgacgattgccggaggtcaccgtcgtcttcgtctccggtgcagatgttgttctcccagcatgtccacgaagagatcacgacgggatatgatcattgccgcgatgaagaacaagcttcatggagccagatcattaatggagagagaggtg

SEQ ID NO: 13464 - DNA, 302 bp, Oryza sativa
  unsure (1)..(302): unsure at all n locations
caaactggagactntaccagaatggtttgagcaccaaccttctctccaagatatacgtttgtcgggctgtcctgcgctacattctatttccgaaggcttgctacgtggcaacagtatcgaaatacatatgaatgactgccccaatttgacagaacaatcatcaggtatcttaacacttcagtacatttttcaaagagaaaaatgcactagcgggtcttaaacttgtcatgaggtttcactaagatctacgaacttgctaagcacacatcggagtctttaaacttggtttattgtattatctc

SEQ ID NO: 13465 - DNA, 265 bp, Oryza sativa
tctatcctatcctatcatctggttggtgggcctggatgaaccgaaagaagaactgatcacacacgttcccttggaattaatacccctggaatactccatatggaaaagtctggatctgtatatcccggcgcttgcggaatttatctgtgatcggaagaactaccaacacgcctttcttgcgccgccaccggggaacgggtgctgatcattttccaacctaagtcatactcgcatcatatttaagttttttattatacctctaccc

SEQ ID NO: 13466 - DNA, 286 bp, Oryza sativa
tagatagtcgacaagcccacgttgctcctcatcggtatgtcgacgcccttgtttagtcctcccaaacaaactacactccgatgatcttattatcgtgccatcatttcttgcttatgccatatgctcggagacatgtttcatcgcccatcatgtaggctacatttgcgccttcattgttaagctcgaggctcgccttctgatatttgtagcatctagttttgccctactctcaaggtttggcatctcgagcacgtgcttattggtttcatcaacttggccctatatg

SEQ ID NO: 13467 - DNA, 415 bp, Oryza sativa
ctgggatcgcctcgcttcgctatgcttcgccacacctcgccagctggcttcaccattcctcgtcttttcctgcttcgtagccaaccagagagcctaattaccagtctccaatagtggtatatatatatgggaatattggaggcgagtgatgaatttgttggaagtgtacgaaaaaacaagtcgaaactgcggcaaggttttttaattctaggaggtattggcttttgctttatatttctatttgagaaaattaattacgtcaataccattctaaaagatgtggctggttacatcaagatgtggctgtgtacatcatctcggatgtagaggtcgggttctatttaacccattatcttataaaaagatactgaaatatgtgtgcattgcaaaataccaatcacgtacatgagatgac

SEQ ID NO: 13468 - DNA, 167 bp, Oryza sativa
  unsure (1)..(167): unsure at all n locations
gagctttagtcgcgtcatcacgtatgttcgcattaactctcaaatcggattntgtttttataatccataacctatgttcgaagttcaaatccatgggcacacacgcacgcaacaagtacgtatagtnttataacccttttgcagctaatttagtcacgcgtatcctg

SEQ ID NO: 13469 - DNA, 374 bp, Oryza sativa
  unsure (1)..(374): unsure at all n locations
ctagctagtattaattcatgcatggtattagtgtatatacgactacatgtatactggtcaccagtatacgtacgtacgcacgcacgcatgcagatgcattgctttgcctttgcatgcatgcatgcacaaacaaaacataattgagtgagtaactatgaataatatgattaattagctagcataggggggtgaggcggagttggatgccatgggatggacggagggagagcatgatcctgggcgcgtggcggtactcctgcgccacctcgacggcgaagcggcggagcaccatggccagcaccacccggagctccatcgncgtcaggtttctgcccacgcagatccttcctccgaaaccgaacggcacgtacccc

SEQ ID NO: 13470 - DNA, 376 bp, Oryza sativa
  unsure (1)..(376): unsure at all n locations
taagcttctcggntcttggtctctgtccgaggcattgaggccaaccncgagaagattcgagctatctagcggatgcgcccccccagcaaacttaaggatgtgcaatgcgtcaccggctgcatggccgccctaagtcgtttcatatcaaggctgggagagaaggcgctacccttgtttaagctcctcaagtgctcggggccgtttacttggacggaggaagctgaacatgccctcactcagttaaaggcatatctcagctctcccccggttctagtcgccccggagccaaatgagcccctgctactttacttagcggcgaccccccaagtagttagtgcagcgttggttgtggagcgcgatgaanacaatcctcatt

SEQ ID NO: 13471 - DNA, 147 bp, Oryza sativa
atagcatgccctgccgtgcatgacatgcacttgtcaatatcgcataacacccaactagggaatgatatgccgagctttggacctgtctaccttgatggaatactcggcaccaggcagtgcttaatcaccactatatcaatggtctgg

SEQ ID NO: 13472 - DNA, 422 bp, Oryza sativa
  unsure (1)..(422): unsure at all n locations
agcttcgactgctactacgtgtcacgacctttattaatcatgagttgacatttttgcatcngccatttacatcggcgtcttcgctcgagcccttgagagcgatttttcttttgttatccaccctgcangcttttgttttttttctgctgatgagtcgctttaagtgtgtgagaaggcaattattccccgaatcagtcatacacatctatcgtacaatcagcctacgagagctgtgatatcaattctcaagcagagacgtcaacgtcagagagagtctggatccatacatcgttttccgcacacacgttttttaaactgctaaacggtgtgtttttttgcacaaaaaaaatctatacgacatgtgctcaaaaaatcatataaatctattttaaacataacaaatattagatgaatcacgtgct

SEQ ID NO: 13473 - DNA, 418 bp, Oryza sativa
gcaacgtgctggtgggaaggattctaataactgcgcattaattctgactgaacgagattcggctaaggctctcactgtgagtattacaatcccgcataatgccaacgaacgtactttataaattcaatatcagtgaagagttttcttttttttccttctgcagatggctcggatttctgtggtaggaagagattactatggtgtggttcctctcacgggaaaaatattaaatgtgagagaagcaagtcataatcagatcatggagagtgcatagatccagaatagaaagcatactcttgggtgcgccacggcgagcagtatgaaacacacaaggctcgagatatggccatctcattgatatgacagatcaggtgtttctcatgctataatctatatcaactagtctaacatcactcgc

SEQ ID NO: 13474 - DNA, 462 bp, Oryza sativa
agcttaacatacaacgatgccacatcatccattatctatcatctatattaaacatcatgcaaacatgctatatctttatagtttttataatttaagagcttttcaaatataaacatgttaaattagcatccaacataattcacataatatttcaatgtatatctttattatgtttcaagatatcctatatagttcatcctcacttagttagtgcttaaatgattaatctatggtccaaattatctttctccctttttcctctaattaagtcatattacatcaattgattttagcctttagatgattaatctactgtataaactatctccctacttttcttcttccataaagtcatatcaccttactttgtacgtttgaatcaccattctacatactatgtaaatttaaattatcatataccacattatattacctaatctgatggtatctagctatcttaca

SEQ ID NO: 13475 - DNA, 272 bp, Oryza sativa
gcacagatttagtaagttcttatattttcatggttctaaccaattaatagagatacacaatctaataatctgtgtttacttggttgttgcatactatgaggatgatactaattctattatccttgtcccaaatcaagcttcaacttgcaattccgttgtgggcagcaattagactcgtttgtcaggtatatgtttgaggttatataaattatctattgctaccatatcaattcctcatcactgatgaaacattacctataatctttgcacat

SEQ ID NO: 13476 - DNA, 458 bp, Oryza sativa
  unsure (1)..(458): unsure at all n locations
agcttgtacttggcagcagcttcactatactgctcacacctatgaagttcatttccctgaaatttaaaaaaaatgaaacaaataagggtgatattatgggaattacaaatatcaatattacaaaaatagtttaaaacttggaagtttgcaagttcaaaatagttaaacaattaaagaggtgcagagttttcttaaacaagataatattggtaaaggtgcataggttcagtaaacatttgtcacaaaacagtacatgtatctggctcagcctgactaatgcatcagtagatgtagttctttggtaaaaggaaaaaaggaggctcatcaaatgctctttattgttcacgtcagcatgaagttcatatgtatattttccagcattccactagttaactcanggtgatccaaacctgtaatggtatgaacctcatagcacatacagcattcgccaatttttt

SEQ ID NO: 13477 - DNA, 435 bp, Oryza sativa
gctactaaagacctacgagtataacttatacgctccacccgaggggtagtctactgacggtctattaccacataagactctgagtgaaacttgcttgcacaagacttgccatccaagccgtagtccattgttcaagttgtgagtaagtgtagcttggagttctagatagatgttcaaccttaatcggtctctatcgagccgctggtatataaacagtacattggaaaaggcaaatctcagtgggattttgagatttggtaggggattgttggaattaatatatgggctaaggcccatttgaagattaattctttggaatatcacacaagcccacctcatgggatggtatgcatgtggagtttagtaccacattgcttattctatgagagggggacctccttataagggaggatgctcttctagccacttgaacat

SEQ ID NO: 13478 - DNA, 346 bp, Oryza sativa
cccagtcatggtgcggaaggccaacaggaaatggagaatgtgtgtcgatttcaccgacctcaacaaggcgtgtcccaaggatcacttccctcttcctcgaataaaccaactggtggactcaacggcccggtgtgagttgttgagctttctcgacgcttactccggctaccaccaaatcagcatggcgaaagaggacgaggagaagacatcattcatcacgtcgttcggggtattctgctacgttaagatgccattcggactaataaccgcaggaaacacattccagcgcacggtccatggcgcacttatcaaccaactcgaaaacaatgtcgaggccaacatcgac

SEQ ID NO: 13479 - DNA, 253 bp, Oryza sativa
  unsure (1)..(253): unsure at all n locations
catctacctgaaaatagtgctagtattaattttaactcgctataggataaagacaatcaaactttttctaacaaacgccatataaacttaggcgctcacaacatgcgcacaanatagaccggtatatattgatattacccggtccgtacaaaactagttgttgacgggtacatcacctacgactgaaaacataattaactataaatacgagcgccattatgaagtctgcaacttgaattcagattccgatgag

SEQ ID NO: 13480 - DNA, 394 bp, Oryza sativa
cttacacagagtctcgttggctatccgtacaaagagtatatgcgcctcttgaggctgaatccatccctgtgtgacaagaagcgacggcataccttgatcgacgataattcacctatgttggacaccagaatgtctccatgcttctggtactgtcgcctctcactctcacgatgacctatctacgatgaccggagtaggctacccaactttgcttatgtctctcgactccatgccctccatgatatttacgacggactcagaatctagctacaacatacaacattagggagtatactctattgcaatcaacactcttaagcgacgaaagacacctttgctgtctatgattccggtgacacttttttatataagtcgacttatgaatctgtcgatc

SEQ ID NO: 13481 - DNA, 385 bp, Oryza sativa
agcttcgctcgatcgtctttatgggcacatcttttgaattgcgccagaagttaaacagtatattgaatgtcgatcgttgcaagtgctgggcagcagtgcccatgagcagaagcaattgcatgtgcaggattagttttcttatgttgtgttcaactgttttgcttgtccttgattccagggatgtgaacatctggttacattacatcgcaagctaacttcgaaagatgcatgacaaggcagcaaagctagtagtactagtattttcttatacaaaagagttgtttgcttgttttccaggaaatgagcagaggattagagtagactagattgtagtaggagtcaattgcatgttcagattattgtgactgtacacgtacagcattac

SEQ ID NO: 13482 - DNA, 279 bp, Oryza sativa
gtgcagtggaagctcttatgcaagcttggacagtgctcactgctctaaagtgaaatattctcacctccttcacccctatttaaacataagacctctactacaatatggaggtgactacatactaccaaacacaatcttaccaaatgcaacctgcttacaatatgcaatgttagattgatttctggccacccagccagaaaggagagcgttgggctcagcccaccaaagcccacgcgatccctaacgttgaggagcgagtcttacgcattctctcgcacg

SEQ ID NO: 13483 - DNA, 119 bp, Oryza sativa
cccacccctcgcagtatctgccctttatttcaggaaaggaaaagttgtcttctgaccccgagaaaccctatatcttccgggcaatgcatgacagatggcccccactttgctagtttttt

SEQ ID NO: 13484 - DNA, 287 bp, Oryza sativa
  unsure (1)..(287): unsure at all n locations
atttccatgtgttatgtggatgtagtaccaattagatttgttggacctctctgcttcatctcaagattgttctgaacatgggtttaatatgctatctaattgttcctaataaacaaagctcgcatctaagccaataatttatgttgtattcaggaaaaaagatatgtttgcgttatctttgaggactttgggaggaaaaaacatggtgttaagtgtagaatggataacactgtcgtangtgactgtgaggtgaatggataactaatcaatgattgagttagatgaat

SEQ ID NO: 13485 - DNA, 375 bp, Oryza sativa
  unsure (1)..(375): unsure at all n locations
ngaactctctcttatgccctctacttctcatgaatggctcactgaatcaaacttccaccattatgttgctttgaaatcgatcaagtttccccttttctcatggaagaagcaattgaggcttgccatcaaactatgtcaaatagtccagcgatggaagcacatatgtgtgtaatacaactacaaggccatgaatgttctctaagaatatgtgtgccaatatgtaatcaatgtttacagcatggttttggcgattnttttgttagcatatctatgcactagtttcatactcagtagtgtttttttttttcaatacagaaataacttgatgcctagtttggtacctcaagttggcatggaatntacaaattcagatgt

SEQ ID NO: 13486 - DNA, 368 bp, Oryza sativa
  unsure (1)..(368): unsure at all n locations
tgatcgntgtgtctgcaatgagaactgggatctcgccttccatcaccatgttctgcatgcgctcccaacagggccgtcagaccactgtcctctcgttctttcaaataccgctgccccgcgcaagccgcgcacctttatatttgagaacttttggacatgcattccgggtttcaaggatatggtcaagggtagttggacccagccttccccgcacacagagccaatgcaccgcctaaatcacaagctacagcgcacagcttcttgcattaaaacctgggctaaaagtctattcacggaggcgagaattcagtttcacatggcactcgatgtcattcagcggcttgatgtggcccaggaacacagagatc

SEQ ID NO: 13487 - DNA, 484 bp, Oryza sativa
  unsure (1)..(484): unsure at all n locations
tattcagtcacctgaggcatgcacgctngattattcaattagctttctagttacgtgtacctatatggtgtccttccatcatgattatatacaagaaatataatggagatcttagccaactatgctgattgatcgtagtagtacgtggatgtatagaggccaaggccggccagcagggtttggagattcgagatcgatagtactagtagtagtagtaatgaagctactgatctgagtggccacaaataagttgcaatcatatatcacatttacggacgcaattctaacgtcccattcaactgctactgaattatatgtatattaaatcgatatctgagagactcaatgcatccatatctctccgtcgccgcgcccacctctcgtttntccttggcttacaattttttggaatcgtctgctgcaatcgattaccatttaccaatatactcctactgtgtattataatattgcccatggtatacat

SEQ ID NO: 13488 - DNA, 358 bp, Oryza sativa
ctaagcttcccctgctcgactagcccccaatggctgcaggctgacagaatggcaacgaatgtggctgtgtgtggactcaatttagcccttgtcatctcttcgtagaggttgagagcttcgtggatcaaaccatggttggcataagctcgcagcatggtgttgtacaggatggcatcgtccggtcctgatgaaacaacggtgaaagcgctctctgcagaggtaatctcaccacatttcgcgtaagcattaacaacagcgctagctacgcagaagtgcttggaatgacctgtcttgagaacaagcgaatggatgcatctgcagtgcctgatccatgcagcatttgcacaggcatttatga

SEQ ID NO: 13489 - DNA, 464 bp, Oryza sativa
  unsure (1)..(464): unsure at all n locations
atacttcagtcacctgcggcatgcacgcttcaagctgatctcaagatgacaagcttcttgttattagtgttgatgtcaatattcgcgctctaggagagaagttaggctgatccatctgattcttcttttgtatgattcaatatagtttcccaaatgatatgttggcttgacaatgcaaaacaaaaaacaattttgtaagattgctttgtatatgcaacaaagctgccattcctatttatgaatgaaatcaattgttgataatcatttcgatgtgatttcaagaaaagtatatatctctggtcgattccaattgtgcatataaaaaataatattatgatttattgatagtagcaatacataatagtactatgcaaccagaattgaatcctgctatctgttgcaactntgcaatgcttattnttagtgtcactaacacatgatcatatatttctaccattgcaaca

SEQ ID NO: 13490 - DNA, 417 bp, Oryza sativa
  unsure (1)..(417): unsure at all n locations
ctcttggcacaacttggagaatgcaacgcccagctagacatagagcacaaaaaacttaccgatctcccaaagtctatcgaagagcagaaagcaagactcaaatcggctatcaagcatgttgctgatctgaccaagtctttaaaagtcatncctgtaaccgatgctcaagacgcccaagccatagaagaagtagaacaaattaggcgaagatctatatcggctatccagcgctatctatctcaatgactttctatgtaatagaccttaganaattttgtattggcaaagatacttctaatgtttatcttgacaatctttgtgccaataataaacttccaatttgctcaaaaatgcanaatgtgcacttgggaatatgtgcccctatttacatgcatagcattgtaaatatacttgact

SEQ ID NO: 13491 - DNA, 450 bp, Oryza sativa
  unsure (1)..(450): unsure at all n locations
atcttaaacttgtaaactgaaatccgataaatttatgcttaattctacaaatgttataaacgctccaggaaacaatagtctcaattacttgaaatggttcaacaacagagctcctcaagagttctttagggaaaaacaaagcaccacagcccaagacaaatacaatactaaaagacacttcctgcgggaacttgtctaaataaggtacatcagaatagcaaagcaaacagcaacacaagcattattaaccatattacacactattaatgaacacaagtatcccccaggccattattagtgttagaaggaatatcccatctccgagcccctacaagtagaatagccactcagtatagtcagtgggttagtgatctcttctaacagngggactgtactaaaatgcccattctgttgatctgctaccatcatgcctacgtcgatcagaccatt

SEQ ID NO: 13492 - DNA, 294 bp, Oryza sativa
taatccatcagaattctcatgctcatgtgtactctgccgggcatgtaacctccattaagccatcctcagagatgctcatggtctgctcagatgttccaggttatctcttgcaagttctgaaacaagagagtctagtctggaagaaagaaatgctggttctatcgtgcaaacttcagaacagtcaaatgacgaagcatttctagcctctcatctggacagggatacacatgaccatgtgggtagctcttctgtgaatggtagcctccaaatagccgtcaacttgatgcacaatgt

SEQ ID NO: 13493 - DNA, 333 bp, Oryza sativa
tgcatgcaatcttcacctgtgcacttactgcatagcctctttgttcatatataatataagctgcctatgtgcattgatgccttgtggcatcagatgacacctgccccaaacttacgggctcacaacatccatatgctatagacgccaaaaacctgaaaatcatattattaccctattaccacaacgaattctggtctgcagaacatcttttaccaattatgattatctgttgatatgagattattggtactctttatgcatccatgtgcgtctactatttgtgaatttatgcattaaaagaacactattatattctgaattcccatggaatta

SEQ ID NO: 13494 - DNA, 235 bp, Oryza sativa
  unsure (1)..(235): unsure at all n locations
gacttcttcatactaacctgagtgaattgtctgatgaatgacctgaataatgattgtngaggttttgacatcaaattccgcatgattagttgccacatggatgatgctgagctctctttaaaggagaatgttttcataggtggatctacttatacaatgctgacatccttctcttgtttcacactgaaattcctgctcatgtgaacttgtagactaattttaatgaaatggatga

SEQ ID NO: 13495 - DNA, 355 bp, Oryza sativa
catgcaagcttgtatagagttgtcatgctcacgtaatttaacgcctatactaagggatcatgctaggaaaaataacataattagaacactgatttaaacaaaaaatgaaatgcttgagaaacataaaaagcaaaatcgtctaatattccaattttgcctccatttttcattcttcgccactgtaatccgatcgttaccgagtgtccgcttttctttcatcaactaatacaagaactgcgctccgccacatccatcaaacgatcagtgagattagtgactttaatttgattaatcaattaattaaattaattatctctctcaagatcaacgagtggccgtgagctgattactgtca

SEQ ID NO: 13496 - DNA, 110 bp, Oryza sativa
gaaacaacataccgaatctctggtccaaaaatagtgagtaattaccataattatttattatttaatgataactaagagtaattacctgctaatcaatgtgattaaaacat

SEQ ID NO: 13497 - DNA, 426 bp, Oryza sativa
  unsure (1)..(426): unsure at all n locations
gcactgatcttgaggagctactaagagtcatctttgagaccgccctgaaagtgtcaacatatttctctgccagccagttatcagtacacctttgcagaacccactcttttttgcacttgtgctgtgccacatatgtcttcacaacagaagacttcactctgctatccatagatgcatacaaattccaagggcacccttctgcacagtgtgcccttatcctttccctatcattcctatgcaatttgatatcaactctgttcttcagactatatactgagagtgcctttctaatcacctcaacagaagggaataccattccaaccttgaacactggattgttgatgtcctctggattgaaagacttaaacactcagggtatatcaccttcatcatctgaatnggctggcaactgcaatccttcatcat

SEQ ID NO: 13498 - DNA, 243 bp, Oryza sativa
ctcatttcttttattctgatcattactctgaattccatataattatctttctgagtaatctagatatatcttgtgagaaatatctctttgttagttcctaaatagcatatgggattattgttcactataattaattaaaatataatgattgctttgatggcgtataaatagttaattacatattaattgcttatagataaatgtgggatcggctaagtccgagtcagactggattaagtgata

SEQ ID NO: 13499 - DNA, 384 bp, Oryza sativa
  unsure (1)..(384): unsure at all n locations
agcttattaacttaaatccttttttccttgccgatacatgaagaacgcgcgattaaatgaaagcatatgaattagagaacggaattacagcctctagcgaactctataaatattgtcttgtgatgggtagctntagttntcaaaaaaggaaaaggtccaaatatatgtcctgaacttttggacgaaggtctctatagtatcctgatccaaccctataaactntgtcatatcatcaatattatccctaattaagatggtttttgatcgtagttttatatattntggaaacgtaaatgaataactttgaataactaatataacatatttgcatatgatcaattgttaatctatcaatttatccttattcatatatattaataatat

SEQ ID NO: 13500 - DNA, 281 bp, Oryza sativa
  unsure (1)..(281): unsure at all n locations
agcttgtttatggacatgaaacttgtttactatgggaagttcgaatcggctccagaagaacagagttgcaaaatgatttgacggccgaagagtactataatcttatggccgatgaacgggaggacttggttcagtcgcgattacgagcactcgcaaaagttactatggataaggaacgtgttgctcggcattataataataaaagtggtgcctaagacttcttcggaaggcgagcttgtgtggaaattgattntgccgattggaacccgggatagcaaatt

SEQ ID NO: 13501 - DNA, 150 bp, Oryza sativa
  unsure (1)..(150): unsure at all n locations
ctcagcctgatgtttctatgtgagaataatatgtttaacaagtgattaattcgtgtttcaccattatatagagtgaaacacatttgacttatcggtgaaacattntcctaagtagcggtgaaacacgggatttttgaacattcttctccc

SEQ ID NO: 13502 - DNA, 316 bp, Oryza sativa
  unsure (1)..(316): unsure at all n locations
tctcttcgagcttgctcccaatttatcaatgacttcaaaagactcaccaaacactgcaattngggttttacgagtgattaacattatatacactaaggacaaaaatatcttagccatttggataacaagaacctgaagagatgagcctttcacagaaactgtttgagaagatgcggcagtgtttgtattcgcattttgagatccttgtgcaattcttgagagtgcactgacctgatagtgatacatggtcaatcagatatatcatgtggagatagttagaagagatactagttttctagtgtaaaaataaaaatca

SEQ ID NO: 13503 - DNA, 305 bp, Oryza sativa
  unsure (1)..(305): unsure at all n locations
tcttaagcacctgngctgcagctttcatacctcgttggagactctgtctgaattacatctcagcactctagcgtatacgtttagcaggagaggagtctggcctccggaaggaaaaacacacacctctacgtgcttttgtgttgaaccacccatcatgattgtctccatgggtatctatgtatattgcaagccacctctgacatcggaacggcatcgcatccactggcatccaaccggcatccgcagcaactgttgcacatacacactaagaagacactcctggtctgctcgtcactattatcgta

SEQ ID NO: 13504 - DNA, 398 bp, Oryza sativa
  unsure (1)..(398): unsure at all n locations
tgtattaactgccctctgatttctcctgtttccaccacatatattctttctttatatttcataattccagcctcaaacttatactctccttgtggatcccctgctgtgccaattaaactcagcaacttatgagcttgaacatcctcttcataacttcttttaatatccagtatccactcacgcaccaccacagcaatagctgcacaaagttcagacacttcttccttgtttttcgggctcctagatagggcatctgctactaagttctccctaccagccttgtactcaatagtgtaattatattccatcagtttaagcaataacttgtggtgtatcctttcaccagctttggtcatcatgtacttaagactctggtgatctgttntgatgactaattc

SEQ ID NO: 13505 - DNA, 284 bp, Oryza sativa
ttttgctctgttccgccgcatcttctttctcaaacccaagccaaataagaacaaaccatgtgttgttggaggggctggtttccaacttatgggaactttaagccagaaatacttctccatgcccttcaaaacttcaaacaaaagctggcattgccattggttctatgttcaaaaccctgagcctgcaactcccgagtactcctatcttccttcggtctaccaagacacatggaattcactgcccatgggagatgaagctgttcagctgttaaactgatggaacg

SEQ ID NO: 13506 - DNA, 443 bp, Oryza sativa
gcttggctctcgctcagggtacttgctaatgagtgaacccctggaagcggaagtacgcttgaaggtcatcatgctggtgctgcatcatgttattgaagttggcgaattgagcatcagcattctgttgccattcttgcatctgggctatgtgttccgtgagggtgtactggatctcttctgtctgcatatcaagggtatgcattctccaagtgatttcaccacattcccaatgagaggaacttgagcgccatccacttggagatggaggcacaccacttgatctgggccgttggttatccccccattgtatgtcatgaggcgcatgccactggtcctcactagcacttgcccagcttgagactccgatgctatggcgcggagcttgcgtccatcacggtgcattcacagtgtgctcccaacctgcctcatacatctgcacgggt

SEQ ID NO: 13507 - DNA, 453 bp, Oryza sativa
  unsure (1)..(453): unsure at all n locations
agcttctgcgtgccacgatgctatacgctgtctcttattattcgctgcagattattgctcctcctatggccatttctggtgatggaatcatctattgacagagaaaatttctttagagcttttggttctgataatgttatttatcattggccacataaatgattatacttaatcccaaccgatcgtgagagttggggttaaaatggcacaagatttttcttagtttagctcaaatgttagaacaactgaaagtaacaataactgaatgacacaatggccaaaactaaaattttcagtgaataaattatctattgtgaatttgaggcctaagagtaatagattacactcctaaaactccttttctggcgaacttattctgaagagaagtctgcacgtctgtgtataaaaatgcgagtgctntatgctaatgtaccaatgcgtaattgacttctc

SEQ ID NO: 13508 - DNA, 359 bp, Oryza sativa
  unsure (1)..(359): unsure at all n locations
gactgtcgacagccacgacgcggctaggcccacgttgcacgggtggaggagtaagagccggctctgctcctggctcacgcaagcatcgagctacctccagcggcaccggccacagcggcttttcttcaccttgatgagccgaaggtactcgtctccctctgcaacggctccagcaacgacaaggctgatgggtggtacctcgacaccggcgccacccatcacatgaccggccgatgggagttcttcaccgagttcgactccagcgtccgaggctccatcaagntcggggacgcctncggcgtggaaatcaagggtgttggctccgtcaccttcacaggctgctcaccggagtctactac

SEQ ID NO: 13509 - DNA, 429 bp, Oryza sativa
  unsure (1)..(429): unsure at all n locations
agcttcgcttncgacgcgaaagggatcgagtctagtctacacggatagcgcatcgcagcagcgcagcgtcagggcggacgcataaagggggccgcgcgcgcgcgcggtcaatatccttcggcctctcgtggcgccgcggcagcacagacagcagcatatgggcccgtgtccattcaacaaaggcgagagagagcgagccgacggtgaaaggcgcacaaggggaagaaccgaagaaaaggagttaacaaaaggtgcccattttacaagtaagcgtcgcgtcctactactgcgagcgagcgtgcgtgcgtgcgtcgttgcggttgcttccaccggtggggatccggcatgggaacgggatatgctactactggcaacttcngtgtgacggtgtcacggtccgattcgtgattcgtccccccggttgttttt

SEQ ID NO: 13510 - DNA, 363 bp, Oryza sativa
  unsure (1)..(363): unsure at all n locations
aaagcattacccattccacgcaccaaccaagagtgctcgcgagaaacatgtcttcctgacttagaacattggtgcccttcaacagcttatagctatcgaccacagagagaccacgattgcacttccctaccatatcaaagacaataggttggagatttagtgtgtttttactctttactcatatgttatagactaatcaagtcaaatccatctcacctccaggtacattgtagtccaacatctgcttcaaagaatataaacatgttaaaatgagcagttcccaacagtgacaatttaactgataagatcatctgtcgtacacccaatctattgtgaagctntacattatatataatacaaaaa

SEQ ID NO: 13511 - DNA, 315 bp, Oryza sativa
  unsure (1)..(315): unsure at all n locations
cctttcctatcgttcattatgttgttatgaccatatctttacgtatctgcctatgcgatgagccctgcttgatcttctatctggcaactctcttttgcaaggcttgaggtgaatacattcgttaacatgcttttcattttcatgcctcgcagttagggttatcatgttccgtttgatgctgtaggtgtgagtttcagatagcttcggttaattaactatgtaccgttagatatggtatcaggttctccttaaaatgaaaaaacttattctntatataaagaactaagaaaacttattctttatataaaacgtccg

SEQ ID NO: 13512 - DNA, 397 bp, Oryza sativa
tcattgacagggcgcccgacaaagagacattctgagcccacctgttcccaccccttggataccaacactcctcgcgcttctgtcgccaccctctccactattctcatcctcttggacatctccactgaatccttcttcattcacaaggtgttgtttctggagctcacctctgagccttccctctccctgtacgtggttgccaatgcggccgcattcgtcatatgtccagctcgtgactaagccaagaagatgaacaagagagacaaacgacgaagaaacgataatttgatccaacaatcttagaaaatatagtgaaagggttagtagtggcatatcttcgatgtcaataaatttataatggtatctttccaataagatgaatagttataatgtcttt

SEQ ID NO: 13513 - DNA, 407 bp, Oryza sativa
  unsure (1)..(407): unsure at all n locations
agcttatagtagttgcacttatcccctcaagtatccagtgaatattgtgagctccggacctcctgtcatctcaagaaaacaaagaaaaggaaaaaaaatgaccgtgaactcgcggcatgtcgtgaacataaggccctgtttagtttcggggtgaaaagttttggcatgtaagtccagcgtgggcggaggcagtggccgagtccgagtgggctgtcgaatatgcctgattccgcggtagcactggtattgcttttgacaatagtggtaactgcagtgcagactacagatgctgaatcaggcgtatntattcggctacatttatgatattgtagatcaaacgaagtcggtgagccgaaaattagattggttggtgaaattangatgagataagaatntatggatgactc

SEQ ID NO: 13514 - DNA, 426 bp, Oryza sativa
  unsure (1)..(426): unsure at all n locations
agcaaggactctttccactttgaattgttctcaggttcatcatctagaataccaaaagaaaagagttttagaattgaaaaacacaaatgctcttcagttgcagagctaactacttcagcaaataaaatagcaacatgattntatgtgcaggtcgagtggatcacaggtgatgggtacagatataggtggtgcctatgggatcccatgtatatgctaaattaacagtagcaagactctatttgctccccatcaacgaagagatgttacaccaagtgagtaagtgcgtgcgtgtgtgcaaagtagtacctgaatcaagtgattcttcactgtcatctgcggaaccttcagataactggtcatcaccagaatttcactgtcaacgcatcttcttccgaccctacagggagaccaaggtgnataccttta

SEQ ID NO: 13515 - DNA, 134 bp, Oryza sativa
ttaaaatgagaaaacttattctttatttaaaaaattaagaaaacttattctttatataaaacgccggcaatagtctgactgttcttgaaaaaaaaaagaactcctcaggacctatcctctcggcaggaaacact

SEQ ID NO: 13516 - DNA, 348 bp, Oryza sativa
  unsure (1)..(348): unsure at all n locations
gctngacacactgatcaccctcatgtntgcatgaagatcgagctcgtacctatcgtcgccatcttcattgacagggcgcccgacaaagagtcattctgagcccacctgtccccaccccttggatcccaacctcctcgcgcttctgtcaccaccctctccactattctcattctctcggacatgtccactgaatccttcttcattcacaaggtgttgatcctggagcccacctctgagccttccctctccttgtacgtggttgccaaggcggccgcattcgtcatatgtcaagccgtggactaagcgaagaagatgaactagagagacacacgaagaagaaaggataat

SEQ ID NO: 13517 - DNA, 267 bp, Oryza sativa
  unsure (1)..(267): unsure at all n locations
gtcttcaccaccaagtcatcaacataggcctcaacattacgtcctaattggctacccaaagaaattcgagtagtacgctgaaaagtaggacctgcattctttaacccgaaaggcattgntgtataacaataagttcctatggnggtaatgaaagcagtttttttctcatcctccctagccatgcgaatctgatgataaccagagtatgcatctagaanacacaanaggtcgcaccccgcggtggagtcgacaatctgatctatgcgt

SEQ ID NO: 13518 - DNA, 193 bp, Oryza sativa
caaccattgcaacagtccactagaaacttcacttgggggggaagaacagactgatctcccctgtctacagtatccgaaagagatatcagattaccaagagtgagttttgctaactacttaaacgagtgaacaaaaagtgagaaaataataccacctgcacctcacactgacagccacacactgacaccattat

SEQ ID NO: 13519 - DNA, 345 bp, Oryza sativa
  unsure (1)..(345): unsure at all n locations
tggacttctcttcatgcacgaggtgccgattggcttggattgtggcttctatgtccttccgctctcgccattcgggtaatcttttgttagttntttctagcttgaattgatgttgctcgaggtatgcagctggagtgatggtgttcgaaagatcatccgggatcagagcgtgaatttctcgaagtcttgcccgaatggaaccacaatcaaccacaaaattgtttaaagatgcctctagccgatgagatatatcttcaagaagtcttttgacatcttcgtctagaggagctagggtcttgcttggtgtttcatcttttgcctcttgatcaagataatccttgatat

SEQ ID NO: 13520 - DNA, 362 bp, Oryza sativa
  unsure (1)..(362): unsure at all n locations
agcttggcgctttgggtatgctcccttttttttagctctctntttagaaattctttgtttctttcttatagaaccctcaatttacatttgctcccttcgtctgattttccttgtatccagattcttgcggctcactgttcgactaagcgaaccgtgtgggcccgtcttgatggattcaggaaccgacttcgggccaatgatgatcgtgtangccgcaagggtttgcagatagaggccctcgctaacaccttcaaggaggcgaaagccgaaaacaagcgactccaggcagaactggagaatggaagagaggccagagctgaggttgatcgccttatggccgatgtggataaaggaagagagtc

SEQ ID NO: 13521 - DNA, 416 bp, Oryza sativa
  unsure (1)..(416): unsure at all n locations
ctgataatattctgttgttccacacgtcttattttgctttgttcacaactaattgcgctccaaaaatgtccatgcgcatcctccacattacgtactctcttcgttttatattataaggtgatagaagattttcctgacccaatttattggagaatatagttggattgttaattcgaaacaaacatatttatcaaaaatattccacgttaaatttcatgaaactaatttgatatcttatatgttattanagttttatataaacctggtaaaacataacaaaatttgactagaagaaagtcaacgacttatatattagagagagttgatattagctacagactcatttatgtactgcatgaatggatgccttttttcacatctcgcacacagcctacccggcgcagcaaagcttacaa

SEQ ID NO: 13522 - DNA, 328 bp, Oryza sativa
tctttctgtacctaattaagcgagcacatactctttcaaataaatcaaaccaagtcacccctattagctggttccttactgattgttaccaatatgcaaaatttcccacaaaattcacggtggccacctttacccactgacccgaaggtatcccataaacatcgaaatagacttcacagttagcctttcacatctgtggattatccccagtaaactgcggacaggtcatggttggaatgctaccaacaattaccccagatccacccagatattctgactgtgtttcaatcaccaaaggagaagcagagttgagcatgggatccctctt

SEQ ID NO: 13523 - DNA, 255 bp, Oryza sativa
atgggcgacaaccaaatttgcccttctctgccataatgttcttctcccctcttgagctattcttctttcttttgcctcattaagcggcgtctaacgcacatggatgtgtacctttgagcaatgacaactaatgagcagcttgagctcaaggcggcgtcaacagccggtagagctcaggcaaccaagattagtggcatgagtggacggagctccaacgatagaggttgaggaggactggatataaacggcacaaca

SEQ ID NO: 13524 - DNA, 321 bp, Oryza sativa
ctcacagaagatatgtatcctacttcccgaacagagtcgtacctatctatattgcttgaatgaattaatattaaccagctgtgtcacataaaataatcgtagggagtattatacatccgtacataatgtgatggggcattaatgacccatactctttgaaccagctccacgtgctgtgatattgccatgaaactactgacacgaacttgtcttttgtatctaaatactgcataacgtggacttttagtaccgtgactgggttcgtagatcacataatgatatggactccaaatagcatgataataaatttgcactctcaat

SEQ ID NO: 13525 - DNA, 380 bp, Oryza sativa
cagcagcttggggtgaggctaaccgagctattgtagtactgcacaaagaagtcgaatgccatatacatggccatcaagatgcagcataaactattgcttaactacaggctgaaatcagggggatgcaatctgtcagatctgacagagatgttgacatgatcacagatgaaggaaatggatctgattttaaagaagaaattagtagacttcatatgcaagacaatgatattgccaaacttgaggctaaactagaaaatgtacagaggtctattgatagataggtgatgtcactttccaatgttggcacacaatgtaacgagactacccaaagtccacagagctagaagaaaagggatgcttttcactggcgtagcacataa

SEQ ID NO: 13526 - DNA, 422 bp, Oryza sativa
agaggcgtgagcgcaagccccctcctcgagcgtggcgacggtcccctgaggtatctggaaatccacatcctcaccgtctccaccatcatcggcggggcccttgtccttggcctcccctcgccggtcaccggttgaggtcgcgggggctttgccctcccgtcgaccctgccagttttcctcatcagcctttcggaaccgctcggccaaattcttgaccgagcggcagtcggcgagactgtggcggtaagtgttgtgtaccgagcaccacttattcgccgaccggccctcgccggagggaacagcggagctcggcttatcgccggtggcctttcctttgcgcggagcccgcgtgggcccgtctgctgaaggacatggtcctcgtcatcagaacgggctggtttcctttttgcctctctatctcg

SEQ ID NO: 13527 - DNA, 436 bp, Oryza sativa
  unsure (1)..(436): unsure at all n locations
ctgcagcttaaccatgaagcgaacatagagaagtatttatgcaagagaaaatggtaaatntgctcttttctcacaaagttatgtacctcttcctgaaaaagtagtactacctacatcctttaatgaattaaactaaccagcttcgtacaaaaaagatcggagggagtattatacaaccatacataaggtgatggggcatgaatgcacgacacctctcgaaccaactccactaactgcgatattgccatgaaactactaacaagaactcgtccttttctatcaaaatcactacaaaccgtgcaacttttcagtctgatgacaggaaattgaaagatcacaagaatgataggtgactccaaatatgcatgaaacatataatntgcactcaccaaatgaccaaattaagaaacaaagacagaatccattaatcaaaaca

SEQ ID NO: 13528 - DNA, 221 bp, Oryza sativa
aactggagtagagactttgttcaccaaaatggagtgctatggggctggctatgatttcctttacccttcagctgtgtatcaatttgcatgtgggttcatacttaccaattatgaattagtgaagtttgggcagacatgaatttgttctgtggcatgcttctgtccctccggatcggttattgacatgaattactgctctcgtatattaattctatctgctc

SEQ ID NO: 13529 - DNA, 354 bp, Oryza sativa
  unsure (1)..(354): unsure at all n locations
aacttctccgaagcgacgcccccatagaggacacgacgcgtaacgtcgtcgctgctcgtccgaaatcggaacaaggttttcacccggagatttgtggggaatatgaaagaacgccatgacgacgccttctagaatgttaacggcgcccaagagcgtcgtcgtggtcgaaccggccataggcacggcaaggcttttgccagcgtcttcacattactcagacaagcaccncacgtcgacgaccatggaatataccgtgacgtcttacaagcaatcatacctcgacgtgaccaaacacgtcagcgcatccacattcacacatcgcgagcaggatgctcaccaccagcgagcaaccct

SEQ ID NO: 13530 - DNA, 427 bp, Oryza sativa
  unsure (1)..(427): unsure at all n locations
attcttttcccttctttgaagcccagaaagtatacgcagtcaaagaggcaaccacagctgaggtcaatattaatgcctcaagcacaatttttcctgcagcacacaaatgattgttatgtaaaaagtacagttggcagttgaagaaactaactaaaacttgccaaggaaagaaaaccaaccttgagtggtagcacatgccacaccaatactgaaactcaagcacaacgtgaacagacccacgtaaacaaagttgtgtgggtgtntgtgctgataatgatacaatgggaccatcactgcaagaaataacacaaaattagctgagagcaccaaaaccattccatcctaccaaacaattaacaatgtcatctactcacgcttttctcannaatcagatgaagaagttagttacttcaacactaacatgaac

SEQ ID NO: 13531 - DNA, 380 bp, Oryza sativa
  unsure (1)..(380): unsure at all n locations
agcttgcccgcatgtacaccaaacacacacttatcggggttcagctntatgcgggcggagcggaggttctcaaaagtttccgctagatctgaaagtaatagttcttggttgcgcgtttttacaaccaagtcatcgacataagcctcaacattacgtcctatttggctacccaaagaaattcgagtagtacgttgaaaagtaggacctgcattctttaacccgaagggcattgatgtataacaataggttcctacggtggtaatggaacgcagtttttcctcatactccctagccatgcgaatctgatggtaaccagaatatgcatctagaaaacacaaaaggtcgcaccccgcagtggagtcgacgatctgatctatgcg

SEQ ID NO: 13532 - DNA, 471 bp, Oryza sativa
  unsure (1)..(471): unsure at all n locations
gcactaagcgagttataattgtactattgcagatgtggcttaatgcttatgaatggccaaattcagcgtgtgcagtgtgcttcacatatctttacagaatgcaccactgaattgtttacatgacaatgttgagaaatatcactactctnttcctcattctctctacaagggctcaagaatatcgctctgcataatccacacactctctatgtgagaggggactcacacggcatggaagtttgatctctagcaactcagcttctcaagggttcaatcgcaaccggcacagttcacgttcgaactaatcttactagaatctacagcctanaacaataggaagaaccaaactcgtagcggaatcctgcagacgcaatcgacaccatccttcctcacccagcaacgtataatatgggaaaaagaaactccttcaatttctaacanacaacaacctcatcatccatccctcatcgc

SEQ ID NO: 13533 - DNA, 458 bp, Oryza sativa
  unsure (1)..(458): unsure at all n locations
ttaagtcacctgcngcatgcaagcttccaattaatataatagaaagacacatgtctacgctataaaatatcttttctttgaaagaaaaaagaaaatctatggcacgattgtaatagtaggcatatttatcctgctaattcatatatgttggatgtagctaagagcccctttgaagtggattattcccatggattatttacgctatgagcctatgattaaaaaaatgatttttcaaaaaaaaagtacatcatttttgtttatatgcttgttctaagattttacccgttaggttttaatgtacaatattcagatgtcccaaaaaaatatgtagaccatctgtcagcgttcatcgatatttcttgagctccacaatatcgcaatcgatcctacatgtaatatataacaatatttttgaaaatgtaataaataacaatatttttgaaactcattaactacat

SEQ ID NO: 13534 - DNA, 371 bp, Oryza sativa
  unsure (1)..(371): unsure at all n locations
gtaactgcgaataggcctaccacatgagaaatgatcataagcttttattgatntggaagcattgtctggcttcactgaattttctctggagatccatgataatatattgcctcgtagaatggcaacatttggcatgtatttacaacctgtcctgtatgacttgcctgtgccatcacaagttgtattaattgttccaagatatgttttttcaaatgagtctgctactgcagatgctgttcgccaatgtttcgttgaggtgcttcgctattgctctgatcttctgacatgtttaatattttacaattacactctcataccatactcagattntagttttcatgattaggatgatatagatggagtgacaatcg

SEQ ID NO: 13535 - DNA, 253 bp, Oryza sativa
atttatctagcagtttcatgttctactatgcaccaagccaccatttgaaggttaaaaccctcactataagagggtactctaataatgtcctcatatgtgtcaatgacaatgttataacatcacaacaggtggtgactttcttgctcatgcttcctctttctaaaactacttcatattctttcttcacctcccctcctttttgctggatgtatcacctcttaattgctatgaattcttacaaagattcattgtg

SEQ ID NO: 13536 - DNA, 159 bp, Oryza sativa
ctttgacacttactcacctggtgctagaatgaccacaattcgtgtgctacttttcctaacagactcacatggtcttctcgttcatcaaatggacgttaagacaacttttcttaatggagagctggatgaggagatctatatggatcaacctcgatgggt

SEQ ID NO: 13537 - DNA, 276 bp, Oryza sativa
  unsure (1)..(276): unsure at all n locations
taatcggagcttagatgaattaattatgaatttntaaagattaaatcggattaaaacacttaaatcggttaaaattgaattatgacgcaataatgaattatttttgaaaaggaaaagaagggttattgcgtcagcggctatggtttccgtggaccgggcgcacgggcggcggttcacgccaacggactgtcgagatcgatccaatccaaaacggacgggcgagatcgaacggtccacgaccggctcacggcggacgaccccgatgacgttagcgat

SEQ ID NO: 13538 - DNA, 251 bp, Oryza sativa
  unsure (1)..(251): unsure at all n locations
agcttagcctgatgtaagggtttttgacttccttgcgtgaggtcataagttcgattcccacactggacccttctttcttaatttactccactcctgggtagttagcattaatcagcggcttaacactggtacttttttaaagaaaagagtgaagtgtaccggcagttctcaaacttgtcgaagtgtngcatctangtttcctataatctcaaattgcacttttacatccctatactcaattttgtgcgcat

SEQ ID NO: 13539 - DNA, 472 bp, Oryza sativa
  unsure (1)..(472): unsure at all n locations
aataagatgggctaaaaacggagtctttctggacaatatgagtatatgagtatctacttataaataagattacctgtgccgacacatttagttaaataaaagttgatttctgttagtgacatgccctagaggcaatcatagagatgattggatcacatactatatttacatatttatccgactttgttccttgaaatagataactcattattggttaatgaatatgtgattctttcatgagactctttatgttgtgtggtgctatttctaaaggatcacttatcaaatatcatatgtngaaataaatatgttagatgatcagcacatgtattaattgatgatcatgtctcatggatcatggtatagagataccaaattaataatggtgacatatattagtgaacatgttgtnggatagacccaacatgagacattacangaagccatatgtttgtgcatcagtgatctcatt

SEQ ID NO: 13540 - DNA, 353 bp, Oryza sativa
  unsure (1)..(353): unsure at all n locations
tctcttactggaaggggaaaagacgtctnttacgggtgtcttgttataaataccttttaactttggttatttcttttcacttattatatgtgctctgaaaattccactaaaatttgagggctccttttagaccaaggagaatgtaacaaatattctccgggtcacatttgaatttttcttgtacgtattttagggtttgccaatttcttttcgaatattaaataattctattattccttctataagatgattcttatttctggataaatatatcaggacgtgacaggcgggccaacgcgcagccgctatgctctccgtggattgcgcgcaccgagagggaggagagagcggac

SEQ ID NO: 13541 - DNA, 382 bp, Oryza sativa
acttcatgccaaatcttggatcttaagctgatttgacacctgagcaaccttgggagttctagaaaggagcttgtcacttccaatcagaaaataggtatgttcattgaagattgtaaaatatctaacagtttagcaagatacatgaaaacaatttcaaatgtcaaactaaaaaatacgtctaacagagccctaaagacaggttataattcaatagttagcagatggtagatagccaatatataacaatttaaggaacagaaaatgtaatggcttagcatgtggttgcttttatgatcagtatctattagactatcactagtacttgagaaaaaagtatgggaggacacacaattggtactatttgtacaaaagtcaactcgcc

SEQ ID NO: 13542 - DNA, 363 bp, Oryza sativa
tgaatctcacgagattcaacacttagctcgttttcacatgatattttctctatacaatgacaaataatgatttggctaatttactacataaacattttgaacctgcaaaactttgagagactctcatctgacgcatttgaaaaatcttcaagagcggcctgaaatgcagggtgaaaattaaagataaatagttcatgaaaaggaatgtgttgatttagcagtgaattacgtacaaaccttcgagtcattttttctgagtaatgattttaagccagcaaagtactggcaatcgagatatgttccaacagaattctgatgaaagtatgcagcccaatgattcatagagagagatccactggagta

SEQ ID NO: 13543 - DNA, 408 bp, Oryza sativa
  unsure (1)..(408): unsure at all n locations
agctntggagaagatgtcttatgtggagtccttgcttataccccaaatgagcgcctgtgaagatggagccgtatgcccgctattccgctgctgtttatttttggttgtcaagccttaagggcctttgtaataatgtaaatattatcgatataataaagatgtgtcttttatatcatgtttgtatggtgtaccccggctgttcctgggacggggattaatacactagcgttcgggaaaatgcaatnttctcggtcgcgacactctacatctcaaggagttgctgccaggatgaattggtctcagcacaagatagagttctcggaggcagaccacccaaaaactacaaccctacccggcagatatccgatcgtggtcgagcccaccatacggaacatcatagtcgcacgg

SEQ ID NO: 13544 - DNA, 358 bp, Oryza sativa
  unsure (1)..(358): unsure at all n locations
actaagcttacatgacaagatggcacatcatcatacactaacacatattacatttctacatcatcatgcaacaatgatatattatctttaattgtatagatcaataaattctatagctntataactacaagcatattaagggtctattcggctacactctatttcactgtgttggagacaacaaacacagtgtgttctgtgtgcagctgctaaacaaaacagacgaataggccctaaatcatcatctcacataattcacataataattcaatatgtctgatatttcttatacctatatagttcatcctaactaatatgttctctttcttctctcattaagccatatcacatcaattat

SEQ ID NO: 13545 - DNA, 350 bp, Oryza sativa
ttcttgaattaatccttgtcatctaactatctttgccgatcaactgatatctggagtggcggatgcactgtaattgtaatggcaactggtaaaactccatggaatcaggaaattcaagaagtaatattggcatcagcatttaacaagaaacttataagcatagcttattcttgacaatcactatttcaagtttctcttctgtattatgttgggacaacaaagtcacacccaccgataccagagcatctttcccagaagccaggattttctgttgaatgctacagaagtatgactacatccacctttgatagatgtgattttgcagcaaattgacatgggcctataaagtt

SEQ ID NO: 13546 - DNA, 453 bp, Oryza sativa
  unsure (1)..(453): unsure at all n locations
cgttatatcactttatttagtcagattacactggatgtgtanttgaatatcttagtatctgcgtgggagatatttagagtagttatggacttatggtccatggtataaatattacctcatttaatttatctgtgatcaattgaatacatactgccttctctacttaatattcttttgtcgctgggtcataattggcattggcagaatcaaatttttgacggaattctgatggcacatgcctagaagatacaaatgtnatgaaattcatctgcctcctaattttctagtagttcttagttatggcccatcgatcaatttaagcaagtatctatatttgaataagatgattgtaatattaatttgccttctgatctgactatctggaaattggatgtttgcacacacacttatcttttttttttgacatacctttaagaaatgctctgacattac

SEQ ID NO: 13547 - DNA, 442 bp, Oryza sativa
  unsure (1)..(442): unsure at all n locations
agcttagacactcgtacctcatcagaatttgtctgcatcatcggtgctggcccacactggttgtgccccgtgcaaccatgggagagggaggaaagagagctcgtctcggcagccatggagcgagcccctagctctgtgccgcgccaccgctatgctcatggtcgagtagtttccgttgagctcacaaccagagtttgaaatttcactggcaagctcatatctcgaccgaaatatttgggttttaaaattttttgtgaatttcaaataatttcagccaaaaaattcgaaatttcggaaatttcggcgcccccagcagaaatagcaatttcgaaatttaaaaccctaccactacaagaaatatgacattctatgacgaattcctcgtgacatcggagctattcgntattagctcattctatattataatcgttagtataagatg

SEQ ID NO: 13548 - DNA, 435 bp, Oryza sativa
tggatacaattgatgttcgcgcaacgtttgtatcaccatactgagattgtgctgatggtctacctctgagtgtgagtatatcaaaaagtcatcaatgaagaccacaacaaacttatccaaggttccatgaacactttgtgcattaagttcatgaagaaagcacgtgcattggttagaccgaatgacatcaccgcgaatctatacaagccgtatagcgtggtgaatgcgcgcttcagaatatcttcttcacaaatacagaattggtgatatccggaacgaagatcaatcttggagaatacagtggcacctttatgctgatcggacacatcatctatcccgggaagagggtaccttgttttgatgggaacttctcgagagctctgtctcaacgcacatctcttcgcttgctgtctgcttaaaaatacaagacaccca

SEQ ID NO: 13549 - DNA, 414 bp, Oryza sativa
  unsure (1)..(414): unsure at all n locations
gcatgcaagcttctgtccatgagtgacagtgagctacgctttgctcgcacgcatgtccccatccgaatgcactgtcaccattaacaggatgcatacgtgcgccattgacatggacacacctacacacaccaaaaagcttaattacatgcatctgtcatctctcccgatgcccatctcattagttgaactaactaattaattaattgcatgtacttagcttacttgacacacagtgtataatgtgtaattaaatgtgtcctgtaccaaaaagcaaattctaattatgaatctagataattaagggctggttcattntgctaccattntcaaccttatctttgtttgtagcaaaagtacttataaaatagctacatttagtttggtggccaaatttagtaagtacatctcanatct

SEQ ID NO: 13550 - DNA, 215 bp, Oryza sativa
cagttcgagatgggggccttcgactttatataagaatcttctttatccgatatgcccttatgctcggtcatacataacatagaaatcacacgtggaaggcgtgggccattagctaaagcatcatgtgcttgggcgaatctgattgcaaatgaaggtacatcggccactttaagattaccatctggtgaggtcccgttggtatcccaaaactgctt

SEQ ID NO: 13551 - DNA, 382 bp, Oryza sativa
  unsure (1)..(382): unsure at all n locations
atggattaaaggctgtcatgtatacttattaactntgaactaacttcactaaactgacgattcattgctgccaaaantgcctctatggctgcaagaaagatctcaacatggcgataatgcttatttgttaccttgtgctttcgacatagagatgttccactttcatttacctccttgtccatctttggaacttcaatctcatgtttaacacaaaatgatgctactctattcatcaaaggctcccatccattctcccttgtgtaacataaatgattaaattcatngcctcaacaatgtattgatcctttctttgcaaaacacgtgacatgtcatctgttatactcaagatgtctatcatcaaatgcattatgaacacaaaatc

SEQ ID NO: 13552 - DNA, 274 bp, Oryza sativa
aagcgccattttcggcacgcgcatgcgctgggaaccgatgggattcgagctcacgtgtgctgatatggttcgccgatatcatgcatgtgaatggaccgcttccgagatggctgtacacccatgcgtgggaggagagggcctagccatcgtcggaactcgtcatatatgttgggatatgcgttggctacaataacaataattataattttctatcgcggtaaccaggaaccatgtctgaattaaatcatgtattattaccactcgacacattgtg

SEQ ID NO: 13553 - DNA, 429 bp, Oryza sativa
cgatcatacatggccataactttctactgctaccttatgtttcgaggtgtggctggtgcattaactaaacggcgcggtgagggcctaaaaaccctacttcccacagcgattcattttccgcttacttattttcatgtctctcgccattgccccccatctgtgaaatatccatcaccaacctccgccctcaagttccctgcattcactgccacctttcttctccacaccatcgctgccacaagcccttggcagagagcgcacttcccccatctctcatggatgatgacgacaggaaggagaagatgcataagctgatgccgctcccaatgcgcatcgggcagcaatctctattcggataggaggaaactgcccccaagccccatgagcccaacatggtggtgtactgcaccgtctacgccggcggcgact

SEQ ID NO: 13554 - DNA, 395 bp, Oryza sativa
gatcgatccccatgatccaccgagctttatcccaatgtcttggtgaacccaccgatcacccaccttgtcagaaaccctctatgagattaacatggtggcctataatagttgtgggtagaccactataaccataatatttccatatcaataagaactggccgcctgtccgatagacataagtttattactctgaggaggcctagtaccaatacaaaatctttggttgtctgactagcatcctcctccatggagacaacatgcaaactagacccaggaaaacaagtttattgtccttagatatttcttgacgacattaagtgcacctggcaagggcattgtttgtatttaagatctcatggaagtgcctacctatgagatttctgactgggtttctg

SEQ ID NO: 13555 - DNA, 487 bp, Oryza sativa
  unsure (1)..(487): unsure at all n locations
taagacaatgcgaacgaagatgatcaatngaaccacattcaaagcaccgatttggacttcatcttttcctgttcctggcattattcatagctcgagcaatacggttagcgaccaaagccaaatcctcctcctcgatttgttcgagttgatcatcggatatggcattaaaagcagcaagaaaagaaggcatagatgaagaagcatcaacatccaaagaagaagtagaagaaaccaaagcagtcgacttagaatcaacttttcgagaaagaacattcatctcatgtgttttcaattntgtgtaaagtgaatccaaagtcaaagtagacatgtcaacagactcctgaatagatgtaactttcatctcccanatagacatattaagaccattcaaaaagtgacgagaaatctctgaatgcggantaatagtatcataagaagaatcaataagatcactcanaantntattaaacctagaaagatagtcatc

SEQ ID NO: 13556 - DNA, 236 bp, Oryza sativa
atttctacgccaacgaatatgtcttcgcctatatgttactatcgcgcgcggctgataatttcctatgtcccggatgcgcgcgaaaccttataatttgtgccgccaggctgcctaaatttcgtgcgccggcgccagcgataaccctatcgcccgtcaccggtgccgactacgtcttcattcgtgccattcacttttcggacacagctgctctattctcttcacctcctcctctccgt

SEQ ID NO: 13557 - DNA, 407 bp, Oryza sativa
  unsure (1)..(407): unsure at all n locations
ataacggaagtggaagaagatggacgtcctantgtctttgcctgaaccgccaagaactacgtacgtcacagcggttgggttgtgcgggataacgtgcctgtcagtacagtgtactggcgaagaataagggcacgcggagatcatgagagctttgttccagattcggagaaagagatgctgtggaccacaatgctcgagacattcacccttcctgcgggtacagacgacaaagtgaacaggtggactctgaataaaatggcagaacagttttagagcttcaagggagatctgtatcagaagtatatactgaaagggcagacaccgaactttgacacattctccaagctaatggatcacctggacgagttcgtcgcatttagacaagtgaacaagggcaggcgatgatg

SEQ ID NO: 13558 - DNA, 333 bp, Oryza sativa
  unsure (1)..(333): unsure at all n locations
accaccaaattcaggatggatgggtgtggatcctctacgcctcggacaccagaataccgaccgtgaacgacgaagagatgatagaaatattggcttgtaattgcgaagccccaattcttgactggaatggacaccaaaagcctctggcctcatctctatcattcagaatggaagcagacttttttggtcttcacttttatcaagagcgtacaatgaataatggcagtgctgatcattgacangtctgtagacaaggtaaatagagctggtatgaacctatgtgatcaaactgactccactgaagctattaactgtcgttaacgtacctatata

SEQ ID NO: 13559 - DNA, 445 bp, Oryza sativa
  unsure (1)..(445): unsure at all n locations
agctggcatctcanaaaatgaattatacctctgttcgangaaatggtaagacctcaatcttgttgggtcacaaatgcccagtatgaattgagtgagaatgcagatgtgtgcgctggtagggtttttattcatgaaatcatgcacctgcacatgtgtattgcgagcatgccatgtacagtgcacacttgcctgtgtcgtgaaaaaatatgtgaagtgcattgctggggaagcatcacctatattgccatgtaagcatcaactatatatttgagagaaatacctaacagaagttaaaagctaactcgaatttcacatggactctgagatgagcatgtactcaatcaatatgtaaactatgtcttttgttaaataatcctgacataatcaactcctatagggacaaactgatatacagtattcactcatgcatctttgtggcattgat

SEQ ID NO: 13560 - DNA, 326 bp, Oryza sativa
  unsure (1)..(326): unsure at all n locations
attataagccacctcnacttattgagtgcttcttacatggtttcatatgtgctcagaatatcacctaatatctataaaatctttcaacaacattgagtctacatgttgggacatgcctatgagatttacccaatggaaagaagagactaaatgatccatacatcaacaatcttgagaactgactccagagtacattaaaatggtcaaatagaacaattggtgtgtctatgtcctccacatcacctaaaaactaatactggcttaactctctcagctcaaacgctattaattcaaacaactcatctccctaccttctctttcagcta

SEQ ID NO: 13561 - DNA, 343 bp, Oryza sativa
  unsure (1)..(343): unsure at all n locations
gcttctataatttctttgttgtttctcggcattttgaaaccaatcatgcactaccctgntttcacaacaaaagtgaaaacaaccaagggtagcctgcaaaggaaaatgattatacagagataaatataaagtattagttcaagtaatctccattatgaatcttacctggcaacggcgccagaaatgcttgttggtattttcttaacgacattactagaaatataattcccagcaatggcgcataaatacccatggaatattatggttacagattttatccgcatgcgcacgaatataccattgtagcatttcaccgagagtattctaaggatatcggatttat

SEQ ID NO: 13562 - DNA, 365 bp, Oryza sativa
  unsure (1)..(365): unsure at all n locations
cttatacaaagagaanattgcaatataccactactttcaccctctatctctttatttctctttaaaacacgaactggtaaattgccactggttttgggttaggttgatgcaatttgccactatcgtttgatttagtgcaaataagcagatgaagataatcataataaagaaaaacacatgataagaccgctttgcccttatccagtgttaatcctcactgcccatctctttcgatcagtgctcttcactccaccgggaaaatcagctcctctctctctaatcccacatccgctcttcactttcccctcatcaagagcaaatcaaccaaaaaatgggtcacactggaataggagatgacaatggat

SEQ ID NO: 13563 - DNA, 371 bp, Oryza sativa
agctatgtacatatatctctccgtgaacaactcgtgctgatggaaatgccatctaaaagtgtgagatgaatcattcaattgaatatgtactatagaggaacataactcatgccaacaatcatgactttgaccaactaatactcttctgaaagaaacattaagcggaacagaacccattacagtagcaatagaagatattctcctacgagcaattgcgtacaaagatgttttcctcaactaaattcaatactaaataattggatgaagtataatttaataagtacacgtacacctaactggtaatcatttaattgaggctataaccaagatttctttcgctgagctgagagcgtcctctccagctatcctct

SEQ ID NO: 13564 - DNA, 489 bp, Oryza sativa
  unsure (1)..(489): unsure at all n locations
catagtatctcagcttaccatatttagagccggagtcaattttgtcgcaactaatcctgttgtgtctttggcacatccggaatgaacatctttctgaaggagctgctatttttcaacgagatggattggtaaagaaacaagaacttgattaaaaaaaaaccacagcctggagctagcaaactgagacttggcattgcatagactagagactaatcaaggttatcttcatgccagaaagcacagcaccacgccggctcagagcaaacttgcggtgaaagggtccaaattatgatgattctgctttggaaagggtagctcacacttacacctgttccacgtactcattcaacccactaacaacattntaccgcaaaactcactaacagttcgcttttaagtcaccgtaccaaatgttcctctatctcttgaacagtcccagacctctaaacaaccaaaccatcatgataaaccccatttggcaataacagc

SEQ ID NO: 13565 - DNA, 285 bp, Oryza sativa
  unsure (1)..(285): unsure at all n locations
gagatgaatgtgaagtgctaatccaaccttgcanagtcctgcatttcaaagtttctggcaaaggtatgtgccaacattgcagagcaacagccacaccagcatgttgtatgctagcatgcaaagcaccacatacttcactagccacgctttgaggattctgccacctcttggcgaagacatgagctactcttgaaagcttgcttaaaccaacaacccattcaccagagggcacatatgcaacatggaactagatgctgtatggaagtaaacatgactcacagtatg

SEQ ID NO: 13566 - DNA, 424 bp, Oryza sativa
  unsure (1)..(424): unsure at all n locations
tgagcttctccaatgcttctatgtacacttgaaaatgtgcactcagcacctatcttgaccaaaacacaagaaggcatatgcgcaacagctgaagactcaaagatcatgaccaactaacttaacaactgatgcagcaaagttctagtaaattgccatggatttgacagaagcagatagacatgaccaatttacccactgatacaaaggtaatgcatcaagtactggattgattatccttcttntaatatgtggaattcacgattatctacaattttagaaccaaaggatctcgttaatccaatatgttgttgtgatgcaaatgaatgcacagttctaacaattcaccaacttgtaacaggcttatgatcgtactagtagattaaatgacggtgtacttttagaagtctccttacatcactttcat

SEQ ID NO: 13567 - DNA, 416 bp, Oryza sativa
  unsure (1)..(416): unsure at all n locations
cttgactganaaccgaccgtgctgttcggaatatattaccatgcatatagactatatttcagtagtgttcatgtgattacaaacgatagaacctgaattttgaccacgaaaaacgatgagaaaatccccatgctaacggatgaggagacattcctgaatccatattcaaatggctatgtcttatgactgccttactgcttgcttcatttgtgctaactgctaagcaatgtcactgatcttttggccactgctgtgaacgtgagtcaactaacatagttaatatatataggggctcatatcatgagctcagaatgaactatcagattgagtatatattgatcaaaggaagtgatcgaaacacatcgcatacacgtaagagtttgtgcacgatatgctgcgagattatgatttctaat

SEQ ID NO: 13568 - DNA, 206 bp, Oryza sativa
gcatatgattaattgagtactactaaacaactagcgcgacttcattctcgcggcctacttgatgtgatattttggcgacggacaatccccctcctgacactcatcgtgcatagcatgccctactcattagtcagtcaacaccctgcatctgttgccgctcctataaccgcgttcaaaatatgaatgtctatgaaatccatcggtaa

SEQ ID NO: 13569 - DNA, 410 bp, Oryza sativa
  unsure (1)..(410): unsure at all n locations
gcaccataaagntctggtgctaatacctggttcttgacagccttggccattgtgcggaactccttgcgcatgacagacttgtggtagaggctaacangcttgctctgcttctctgtcttggttgtagagaggaccactgccgtttccttaccactggcaggctggaccgtcacggttttcttgtttgccaggcctgaaaagaccaaatgaacagcacaaccagtcaagactcaagagagtgctcacgggagacatgcatatcaagagaagcatgccaaccaaccattaattaccagaatgcttgtaagagtggacattgtacaggttggtgggctccttgctgaactgaacctaggcattgccattgtcgaactgcttgaccaggaatgaattgttcttcttgacaagct

SEQ ID NO: 13570 - DNA, 326 bp, Oryza sativa
gcttatactggccatcatccaagcccatactgcctctctctatgagccctagaagtgagtgaactgtgtgttccacgtgacactggacactgctggccctgggcagcagctcatcatgctccttctgcaaacattatcaaaggcgttgggcttttacgacacctgtcgctaatctgcattttgcacgagttgtgccgcttccaaggctccaattacaaaatcatgtcaattttatgaggaactataatgtacccatttgagtgatgagtcccatatcatcataaaagagggaatgtacagtttatataaatctcaatattgtccga

SEQ ID NO: 13571 - DNA, 459 bp, Oryza sativa
tatactatataaattataaattaacttcattgtaaccatgtacaaaagttatttattttattgaagagacactcaatctataagctgtgggtcaagtatagacatgccctataaatatcgacatatttagaatacggtaattaccatattataagaaacggtaatttccgcaagaatacggtaaatacggaaacgatcggtataacagtaaaaccatttccgttttcatttccatattttttaccatttccatttctgtttcggtcgattaccaattccatatggcttcgccggtagaaagtcaaaaaggaacaccggtcggcccgtaattaccgttaccggtttcacccctagatgagacaactttaagtgcacgcatcaaatctacaaatcagtcggtatatcacctggatcactgtattcgggattacaccgcatatgtatatataatatcatgca

SEQ ID NO: 13572 - DNA, 460 bp, Oryza sativa
  unsure (1)..(460): unsure at all n locations
cacctgctgcatgcaagctcgtagggttcacttttcttatgttcaatattctttcttctttttcttattngcaanatcggccgtcttttccttaattttaatgaccagatccactaattttctgcaagcatgtaccaacgtcctttccacaatgtttggttccaactatttggaacttctttcctgtggttgtaactgaatcttttccaagggatggtgtactctcaagtcctaagaatactttgtcatttacaatgttatttatctgtttgctaagggctttaatcttaacagcaagctcatggcgtgtaccagtattagaaaagcaagacaaaagtganaaggcctcacaagaagtcgattcggttgagcttgacgatgctgaaggatgatcagatagcagcatgcttcctttaatctggcaaatcattgtatcatcaacatatacataacatctctt

SEQ ID NO: 13573 - DNA, 380 bp, Oryza sativa
attcttgatttctagctttgcaattgattggtgagatgttgtttgatttgttgatgggggcggctgaacgaatctgtgaatctgtgttggcccaaatgcaagtggggtgggtttcggtcaggtctggtggtgtggattattgaacagtgaacactgcctaaaatcgatgtaggagaataatgatctactggcctgatgattgctgatttcgatccgtggacaaattatattattaaatcaaatctgcattcgtgatgtgatctccaaatctatattgtggagagcctatccctttcgaagcttacctatctatatatctatctatctggctctatacatattttggtcttggaagtgactatagtggatttcagaatatg

SEQ ID NO: 13574 - DNA, 469 bp, Oryza sativa
  unsure (1)..(469): unsure at all n locations
ctcagcttagtctatacttccagggtctaaccaataatatagacacaggaananaaattgtatctattttcttaatnacncgnccaaagcaattgtggacaaagaaataattgaacataccttcagaaagtttaagaactaacagctctgtactgattgctttcgattcatccaaattcaattcatgaacatcatttgttacagtcctcctcaatttcattaaatgttctttacctccctggaaataaacttcacatctttggagattcaaaacttcaattgactccaacaatcgacatggaagataaatnttgcccaaacaatggtggatcttcaagcgcacaaaggaagtcaatctatctaaacagcttggattacaggcaaatatttcattacaaccagagatctcaagctcctcaagtgacgcttttaaacaacatactggcatgtcanataagacctcacaatt

SEQ ID NO: 13575 - DNA, 351 bp, Oryza sativa
  unsure (1)..(351): unsure at all n locations
tatatggcaggaatattccgcattatctgtactctgaattagatagctgttatatatttactcctatctcacacttgttataaattcatctcctctgtcctgttctctgtatgatacattntatgcatctcgacaggaaggtaaatattggtgattaaccttataaaaanttgcattttaacaggagattcaaagccccttcctggagacgatggatacgcatggctggaggagtgtgaaccaccagacaattttcatcttgtcgggtcaacttatatgggtccaagaattgtggacaattgaacttacgatgattccttggtttcttgcagcgcatgatgtaactttcat

SEQ ID NO: 13576 - DNA, 443 bp, Oryza sativa
  unsure (1)..(443): unsure at all n locations
ccgcacgcgctcgacaccttcacgcgagncgtncaggtttcttttctcgagcgtggagtggaggttaaccatcgtggggacgaggaaatacgcattcccgagggacctaaccaggacgtcgtcgctggtcatgatgcgcgtgatcctagtcaccatgaggaaccgcacgacatgctccagttgttcgttcgggacggtgaggatgacctcctctccggggttcaccaacgatcgtagcagctgatggtccgtgccgctgctgaacacgcgcacatgcttggtctacttagactgaacaatcttggcgaacactgacgatgagttctccggcgaaaggatcgtgctggtgccaacaaaaattcctgctcatcattggagtagaanattcagtgtaggatgggcaaacacaacagatgatttctgaattctgaatctctaattac

SEQ ID NO: 13577 - DNA, 336 bp, Oryza sativa
  unsure (1)..(336): unsure at all n locations
gagctgcagctgacaaacatttttttaccattttttggataatgttggattgttgacatcctagntagaaaaaaaatattaaagaacatgtgggaaccacattgtattggtctttcacctcttcccctcttcccgaagagcttactggcggtgagagggccaaaggatggcgaacctgtccactggaggcggcagcagtgatgggaggtgagccattgagagggcgatggacatggtgcgaaattataagatggagggagtatacacgtatatataatactattggttgcttgtcanggctctaaaataaaaaaaacttggtactagctactaaat

SEQ ID NO: 13578 - DNA, 369 bp, Oryza sativa
  unsure (1)..(369): unsure at all n locations
aggttaatcatctctctggttgctgctgataggatagcatgcatgcanctaccttttatcagtagtattattcttttcttgctctagtggaagtagagccatatgcattggaaattgttgtcatggagctagctaggtacccaatgttgcagcagcactgtacgaaccgtctttcttcttcgcacgtagcactgcagctgttcttgtaatggttttgggatgcagcacagattcatctgggcgttcgtgttttccggagggttgtactgtcnattgctgcanggcaagataatcaattaatatcatagagatctgatgaactgtcgatagactcccgctgaactgcttttcatttctgggcttatatat

SEQ ID NO: 13579 - DNA, 440 bp, Oryza sativa
ttctgaattgttttatcaattcttatcggccttagcaccatacaactcatgtatctctcacatcagaccttgataaagtgcacacatgcacgcagttggcttaacataattctatgcatgtactgaagacttaacctaacccaaaacataggtagtatatactacttaactaggttaatgaccagggtgatgatctgctaatgataactatgaaaaatgccatttgcggagccgttcacatgtgtcccatcacattctgcaaaaacagcttcacttcctgtggactcatctgatgatcttgcagcatccttttgtggcattcatccttaagatcttacatgtcgagtgcaatcgcagcctgtacagagaaatcagattataaacatataaacatgtgtctgaactctgaacagagaaatcatgcagcctactatagtata

SEQ ID NO: 13580 - DNA, 380 bp, Oryza sativa
  unsure (1)..(380): unsure at all n locations
agcttacaatcnttcagagcttctctgatctcgtgctattccgcnggcatggatacaatattcaagcaatgagttaattgatgatgtttatttctttctgcgagacaagacgatgagtattactatgattaattaaataaggtataaatgctatcaggttatgaatattgtacagggagggatgtggaaccaatatacataattgactatcatgaagcccatattctgcttacagtactatccttactaactatgtgtcaactcttacgaataaccactctccaaatgccacttacgactgtgcttacatttttgccaccggagagatattttcttaacaatgtgcccctttcaccgatgtggcataccaacatggactg

SEQ ID NO: 13581 - DNA, 473 bp, Oryza sativa
  unsure (1)..(473): unsure at all n locations
ctcaagcttcgagagatacccacaccgggagatctaacatagatctctttcgcgttctttatatcttcccccacgccatttaaatactcttaacgctaaaaaaaataatcctctctattaatgtagaacggcacagctcttgccggtgttaaaacataatattggcatgacatcaaccttggagagatgccatgcgagatttggagtgctgcttacagagaggagatatgagttgtccatgtacttatattatcgatagagataactattcctatcatgtaacggtacgagttctctacgaaatcaaataatataattaattgtctaattaacaaattaatgaaatactatacaagtttgtctatagattatctaaataatgtgacatggaaaacttatacagtcaactgttatntaaataactagtcttatatatacgcatatattataatcagtctctcgcactactatgc

SEQ ID NO: 13582 - DNA, 263 bp, Oryza sativa
  unsure (1)..(263): unsure at all n locations
actcccatttnnntntctttcccccccccccccccccggttgactgtgacatcanacgcacaaacaccacncgnagcggagaaacagaaacaaaaatgtctttcaaccaaccccttaggggggggagggtaaatgcaacaaaagaaaacgggggaaaacacagaagctggcacaaaattacagcaaaaatgagtccaacaaccggaggaaaaagaaacaacaaacaccagacaaaatacggaaaggaacaaagggaaaacaaa

SEQ ID NO: 13583 - DNA, 391 bp, Oryza sativa
  unsure (1)..(391): unsure at all n locations
aaactacnagtgctcctcttgcctatcacatcattcaaacaacccaacagcgggcatgatcccgtggctgtcagtggaggcattgctcttattccagcccttgcttgtacaaatttccatttagttattcctggataaacagcagaagcttttgggagcaactcttncattgcattgagagcttcatcatcagatacagatgaagaatagttttctgactttcactgccaagtcgacccaatggaaacggtacgaggaccttggaatgccagccaagcatcagataagattgaaagactttgactgccatatgtttctctgcaggaatgaaacacaccaattagataatcccagttgatgctgtaatgacttaagttcaattcttaaacac

SEQ ID NO: 13584 - DNA, 139 bp, Oryza sativa
gcaagggacaagggatccattcttatccttaacgctccctctacaacccaaatgcggtgatcgatttggagcgcgtccgatgattatcttctacctaatagtccgccaaaggcaaagcgttgtagcggtgcccatccac

SEQ ID NO: 13585 - DNA, 433 bp, Oryza sativa
  unsure (1)..(433): unsure at all n locations
caaacatcctacaagatagcatttggagaaaacattacccattcaatgcaccaaccaagggtgcaggccagaaatgtcttcttcttattcaaaacatcagtgcccttcaacatcttgaaactatcaatgacagagatcccgcggttgcactttcctccgagcacattgtaatccagcatctgctccggatnaaaaaaaaatgtcaactactttaacatactcaaatatactgtatgtccacattctgtgggtatgattctgatatcaatacacaataaataacaatggtaaatggaaatggaaatggttataggtagaggatatanatcanacaacagatacaaaccatcagcaaccaatcatttacacttagctactactgttgtgtcattaacagtaaaaagtagaaaacttctagatacacctgaacacg

SEQ ID NO: 13586 - DNA, 360 bp, Oryza sativa
ttgttgcagacagactcaaacttgtttacaacattcaaataaatttgccatgagtatatagattttaacatgattgcgtaaatgataatagtagaccggcaggtaccttgagacatgaaatatcactatcaaggttagttcctgagtcatacgatcccctgtgatgccatgatgttagcatctcacaccatatatacaagcattcattggaaacgaatataagattacctcacggatttgtctaagctttttttataaacctgttcttcaatacatttgtattgtatatttgcccgttccgaacctgtttttgttggatacatatttaaacccgtgcaaaactaacgtatagaaatgact

SEQ ID NO: 13587 - DNA, 376 bp, Oryza sativa
ttacaccgaaaaaaataataagaattattagattttcatgttcatgagcggggcataattaaatacaagtaaaggcattacctgcaatgctttaataacaccttcaagttcccccgcttttcttgaccattactcaaaactttctttgtgaagttcagcaagtttcatgaccttttaagggaaacagaacaaaatgctataattaaaagcgtcatcgacttggcttatagagaggaacatcagtgcattccattaaataaaaagaaatatcctagatacactatatgggttaagctgtggtgtgccgtgtgcatatacaataacgatggactgatctgctggtctagtacaaatagctcagcacacattttcttca

SEQ ID NO: 13588 - DNA, 489 bp, Oryza sativa
  unsure (1)..(489): unsure at all n locations
ggctcctaagcgtttngataaattngcattttcaccttctaggggagcttctgtgggtgtttgatctgcaggaatagctctatttttacagccctcaacattggtattgagagctttggtattcaacttacttttacttctactcactctaatctttcttggaccctgggtactggctatgggccctgtgctggtattgagagagacaattttntaacctggcttcatgatcctccaattttggatgatgatctctggttactcttangggattttaatttctatcggtcagtcttcaacaggaataagtcacgtgcagatataaatgatattttccttttcaacgaaggtgatagtgatctgggtttggctgaactccctattaagggcaaagcttttacttttgacaatatgcagcaacagcctttactagagcaatcagactagtgtttcacttccctcagctggacactgcttttcccacacttt

SEQ ID NO: 13589 - DNA, 343 bp, Oryza sativa
tctagctaatctaaatatttgtgacaaaagcacaaagaagttttttcttcttttagcccgtgacacaccctttataaatatcacccttaatatggtgaagacttctgcctcactcctatacacatggtacctaaaatcaaaggaatcagtaatgtatacaattaaaaagattttacattgttgaaagagattacgattaattgaatgacacatacgagcctacatgttcaaagctacacgtacatatttaacaagaaattgctgtccatactgaaaaaacatgatgcatacatgtactaaaaaattatatgcttgattcgacaaattatagaaaacttagttg

SEQ ID NO: 13590 - DNA, 322 bp, Oryza sativa
  unsure (1)..(322): unsure at all n locations
ttcataatgtgaaacaaagatataatgccntgatatattcttcataataaatttgcttgagcaggtctaatgatattcacggcatgtacttatctcaagtcactgatatttgattcagtaaaaggggctcttgttttatttattcgctgcatggactaacattggtactactcgggatctttgagcaactggtttccgtgtatcacatagagtttcatgagtcacattacttgtaaaatatgacttcttgttgagagattcttcttaacagtgttgatataccagtatattgcatatggcacttgcatctgtagcctactca

SEQ ID NO: 13591 - DNA, 346 bp, Oryza sativa
agcttattgagcacgatggttcttaattgatgtccatgtggaagttcttgactgctgctgtgatgttctacatctaccatcttcacaaacagtgaacttctactccatgccaatgtggacactttcatcgtgtatcgctctgctgagcacaattttgtggccattggagagacctcttatcttcaccaaccatggccatcactcaagacatggctttcgctttcaactatactcggtggaagtgtgatctatggtttcacagacaaccagttcactgtgactgcgtacacttgggcagaggcatatcttgcaagcatgtgcactgactatgtctacatcaaacacg

SEQ ID NO: 13592 - DNA, 431 bp, Oryza sativa
  unsure (1)..(431): unsure at all n locations
cacacactacatggtatcagagccgtgctccttttgtttttggcgacgaaccctanctgagggagcaagcgctgaagttggagttcctggtggtggtgtatgaccgtgagcacggacaagtatgagtggactggaggcgcagcatgtcaagacgctcgcagctgctgcagcgaagcggggtgacggcaacacacaacaagtgcgtgaactgagcatggaggtctggaggggcactacctacaagtgggttccccagccgtgcttctgcttgttgagttggttcccagccgcgcttctgcttgttggctgagggtggactctgtactgtggcttgtggttgacggaagaagcactagtgactggtggtactgttgttcttcttcaagaatgacgtaatcgagaatggtcttgctgctactactcgattactg

SEQ ID NO: 13593 - DNA, 435 bp, Oryza sativa
  unsure (1)..(435): unsure at all n locations
acttcttcaaanagagggtcatgccaaaatttctagtgaatttattttgtttattatatacaaatcggaggtgcttaaaaggttagcaacttcatcctccaatgtttcttttgtcatattacattaggagctatgttctgcacactgttatgtctccaaaatttagctgtaagttgatgagagagaacatttgtgtggggaagaaagaatatatagaaatttagtttattcgctaaagaacgttttataaaatatgtgagaaggaaaatacagtgaaagttaatcttaactaatacaaaacaaactaacatgaaaattaaaattagtacaacacattaatattagtttanaactctacaaatagtaaataagaattatntggggtaatattctatcaattttgtatgaataatgatatgtcattattggatgact

SEQ ID NO: 13594 - DNA, 414 bp, Oryza sativa
  unsure (1)..(414): unsure at all n locations
aattttccatacaaagtgctatcttgtggctactaatgctagcagggcagatgacgacnaggtgtacacgtgaatcctagttgcagatcttgtgctacctttttctttttgttttcttcttcgatatgggatgagattggtttggtggattttggttgatccacacttgtttggtttgctatacttgagtaggagactggcttgaacaggttctaagggagcactcggcctaagaaaaaaaatggattgcatttgtggtgagctatagctagaggccctagcccaccaaactaatgacatgataagtgattactccctccgttctanaatatagcaatctaggatcggatgggacgcatcatagtaatacgaatctggacagggggctgtccagattcatagtactagaataca

SEQ ID NO: 13595 - DNA, 417 bp, Oryza sativa
acctgcgtgatgcaatcttctggatcttccttaaaaagttttcggtatgtttaaaccagtatgcactaccctgtttccacatctttagtgataacaaccaatgttagcctactatggacagtgattatacagaggtaaatagaaagtattagtattggtaatctcttctataaatcttccccggcaacagcaccagaaatgcttgttggtatttcttaacgacattactagaaatataattcccagcaatggcgcagaaatactcctggtatattatggttatagagttcatccacaagcgcatggatataccattgtagcatttcacccgagagtattccaagggtatcgtatttatttaatcccgtgtgaagatatagttacagaacttactataatcatatgtacttgaataat

SEQ ID NO: 13596 - DNA, 478 bp, Oryza sativa
  unsure (1)..(478): unsure at all n locations
ntgagagtcagtgggcgctctncgacgtgaccaagganatctgaagatttgtgtcgcacgacngtcttctggcgaaagagatcatcgtgtggcgaccagcattcggcgaagcgttcccgacccatgatacacatgaagttgtggtattttctcacttcttctatggcggnttttctcttccaacctcaagattcttccggcgtattctgaatttctatgggattagcatgcatcacttgaacccaaactccaaagttcacattgtcacatttattcatgcctgcgaagcttttttgggcactaggccacacttcgccttgttccagcgcatcttcttcctcaagccccaaccgaacaagagcaaaccatgcgtcgttgggggggctagntccaacttatgggaactctgacgcaaaatactttccatgtccttaaacctcaaccaagctggatgtgacggtttatgcctacacctctc

SEQ ID NO: 13597 - DNA, 394 bp, Oryza sativa
cctgctgtatgcaagcttgctggtcttggatgtctctgaaatactctctgcttgcatgttatatgtcaaagttatcaactaacttcgtatctgcaccaccctatatggaataagaaaattcttatttgtgaatgaactcgggcaaatggccgcctaccagtttggtatcagcacaagtaaattatggtgtatgtatttcacatgaacagtcaattccaattgttgagttaagctgaaaatttgatatatcatttgcaacgtggataaatgagattgctgaaatctggggtagttctgtgtgaggttgctatcatattataaacttaagattgtaaacatccaaaatgtggccaaaaactcgaaatctgatatttcgattattttatccaaattt

SEQ ID NO: 13598 - DNA, 461 bp, Oryza sativa
  unsure (1)..(461): unsure at all n locations
tcggatgtgcatcgactacaccgaccttaacaaggcatgtcctaaagattcttatctcttgcctcgcatagatcagatcgtcgactccactgcggngtgcgaccttttgtgttttctagatgcatactctggttatcatcagaatcgcatggctagggaggatgaagaaaaaacttgcgtcattacccccgtaagaacctattgttatacatcaatgcccttctggttaaagaatgcaagtcctacttttcaacgtactactcgaatttctttgggtagccaaatanggcgtaatgttgaggcttatgtcgatgactcggntgtaaaaacgcgcaccaagaaactntactttcagatctagcggaaacttttgggaacctccgctccgcccgcataaaactgaaccgcgataagtgtgtggttggtgtacctgcaggcaagcttctcaggtttttgatctc

SEQ ID NO: 13599 - DNA, 152 bp, Oryza sativa
atttctggttttgcacgtgatttttagatctatattaatttttctgtattgcttaaccgtgttcatcttcacaatacacatcgaatcttcagattcttgaactgcgatacttaacagtataccgcgtactacctctcagtccgatggtgcac

SEQ ID NO: 13600 - DNA, 342 bp, Oryza sativa
  unsure (1)..(342): unsure at all n locations
tcaagcttcgcacaagatgaggtaaaatatttggtctacacanaactattgttttatatgcatgtaagacaggctcctttaattgaactttattctgccttgtcataatcccctaatcctttaatactatgcccagaagccctactgcatattgattgatggccttgtcaaagaacggaagatatgggaagccatgattctatttaatgatatgaaagaaaaaggtgtcaaatctggtaaggtatctaacaatggaacaaattgatgtgcctctattgatactactctgattctttgctgaattgggaaagtcatggagctattccacgattttcattgaca

SEQ ID NO: 13601 - DNA, 410 bp, Oryza sativa
  unsure (1)..(410): unsure at all n locations
gatccttaagtcacgcggctgcagcttgcaccccaactgtctcacttattgttattgtatggatggaatagatcaatagtgagagccataaatttagatacagtaacagcacgtactatgtagcagagggacagatcgatgatcatcgatcctattcaccgatcatgaatggttcaagatgatcgagatcgtggtcaccaattgagagatgcatggttacatcttttagcttttgttttgaattgaatcaaggaaattaatatgtatgaattgcgaataaaaccttaacaacttctcaattacatgatatgtccacacaccaatgtatatatatatattcgtcanggttcctccttcgacacatgttcaaatgaactgtgaaaatctactccatgccataaatacacatg

SEQ ID NO: 13602 - DNA, 249 bp, Oryza sativa
gcgggtataatgtacatccactgcagtgtgagtaaaccaaatctattcgaatatccgtgctcgcgggtattgagcaccgggacatgtattacacttggctagactctaaatcttaacttgtatgggatgggatattgcataatgatttctatgctgatggaaccacttcctgagatgcgggaaggtggacgttctcaaaatactttgacaaatcaatggcgggaaactatccttgtgatcacaatggat

SEQ ID NO: 13603 - DNA, 461 bp, Oryza sativa
  unsure (1)..(461): unsure at all n locations
actcagctggctggaagctaaaatatacccagctttatagntctagtattgttgctgttttatgggattaaactagctgatcatttgctgcaatggctacatcgtaattactgggtcaaatttcccaaatctgaatactcgtacgaggcaaaatttgcacagatgtttccaaaattgaacaaaatcctgaaccggtgcccgatgtacgaccaccccaataaatggtcgcaactgcttgaacacatcttcttggagtgggtgcgtctgctgataacgcatccgcaagtgtacaagagattctacgccaagcagctcaccgtggggtgaactcaaacaatcgntagatcctgttgacatgcggcatattcgcgggatctcatcgaataacctttatccaaaaaatctaccaagatgnactggtgattgctacatctataatacaaatattcagtttgtattgg

SEQ ID NO: 13604 - DNA, 423 bp, Oryza sativa
agcttgtgtgttggctcttgtccaagccgctgttttgtaatcaacggcaggaagtttttttgttgaatcccacgcgcgcgccgtgcgaggccatcgaccacatactgtcgcgaccgtgacggaacatgatgttgtgccgcgcggcccgccacgctgtgggctgtggtgctctaggccaactcggcagttggcacggcaaaaaaaacccacaggtatatgcatgatcaacatacagcaggactgctcatgtcctgatgcaatttcacgctctatacaacaacgtatttcttctcagcgactaacacaagcaatttcatgctgctaccgaacgccgtataaaatcacatacgttcagcggctcaactcatccgtgtgctccattttcggtgctccatacacatcacttgagctctgacaacaaac

SEQ ID NO: 13605 - DNA, 450 bp, Oryza sativa
ggacggacgatgtgcagcgatggcccctcccaatccaatgccacgacgattatctattgttggcgatgatatctcctctaagatgcggcagcagtagccccttcatactccagtggcacaacaacaagcaattgtgacggctcgaagacacaacggtgccaagtgacccatcagcaactctgcctctttcccacgtcggcatccatcgcttcgcactaggagttgatatgtcgctctcggctcctccttccgactcctatcagtgccggaagtttgtcttctcatcccttcccctccttagcggtgatcatcaccgccttcgtgggaaaccgtcatcggctagacttcaaggccgctatgcgaagccatcgatgactacttcatccaggccttctgcggcgttggtagttcggtgacacattcaccacccaatcaccgtgatggctcgat

SEQ ID NO: 13606 - DNA, 417 bp, Oryza sativa
  unsure (1)..(417): unsure at all n locations
agaactatcaagcacattataaatacaccagtattgtacaaattaagcctccattcgttacatttacactcaatcagaatcagtcctttcatcatcagagttattattgctcggctgaaggtcgttgttgcggaattgctctacaacatcacttgcaatcttgtcagccgcactttgagcattactaataagatcaagagcagcttcttcacttgtcccatctgcaaatccatcaatggtgtcgaattcaattctcgggtacaaggaattggtcatcgccaatgccatgctagctcccatgcttccagctttcttgatattcttgaagtatacatccggtgcaactctcagctagtcaaagattcagttgcgtcaagtgcactcngaccactgntattaaagaacatagcttggatg

SEQ ID NO: 13607 - DNA, 297 bp, Oryza sativa
  unsure (1)..(297): unsure at all n locations
cttcctgctgatcatgccactcctgtttacttcangtaataacactcacaaactcataacctatgcaactcctgctgatgatgccactcctgcataaagttcatttcatctgaaaaagcatcaaagaatccattgattcatacattcaatgaaaaacaagtgtaggattgggttctctaaactttttctctgcaggaactttgccaacgcatcacgataatcaagggttgattaaatcacgatcaagatccccactcggaatccgatgtctctaaagtatgatcgcaatcatataat

SEQ ID NO: 13608 - DNA, 447 bp, Oryza sativa
  unsure (1)..(447): unsure at all n locations
cactccctgttctacttctatgtactcacaagtcgcagcagcagcagcaattcaccaaatctctctccaagagtagtagtgctccctctcccaaagtagattttgctcatgtaacctcgtagacatttttttatatattttaggactaatagagtactacaataaataagagcatgcttagtaggggtttatcaaatttaactctagcaagttgggtctggagtgaaaatggagcagcataaacacattttcacccctctaatgtattttgtgagaactccaaccaattcactctgaatggagctggatntgggctctagttccattgagctgtgccaaagagggcctaactcctaaaggaagagaaagaagctgctaattactcccttttcataatgagcanagttaactactagaacaggattcagatgtaagcatanataatac

SEQ ID NO: 13609 - DNA, 506 bp, Oryza sativa
  unsure (1)..(506): unsure at all n locations
atccttatagtcacctgctgcatgcaagcttattaattaacgtaaaaaaatatatggtctttttctnttatacacatgttgttaccgacttanaagctttatactagaagattacgatgcaacgtgtaaaaatcaactctaaaataaaaatgttgaaattcaaaatttggcctcggctgagaaaataaaaagcaaatgatggagcagataattttcaccatataattctttacataaataaaaaaatttacataggtatagtagtatctgaccacttgctgtatatacacaaacttggctacatatttttcatatgctcagattctataattataattaacgttaacatatatttactacactaattgtaaaacgtacgtcatatattctgtcatggatngtgaaattccagcatgttaattcgcatgacctcagtatgtttgaagagagaatataagttatgccataatcaccgacacggaagtggaacacttcatcttgtcacc

SEQ ID NO: 13610 - DNA, 142 bp, Oryza sativa
gataaaaaagaaaaaaaaaaatggctgtgcctgaaacaaccgccacgagcagagacgacttggagtcaggaacccggcagaagagacgacccagcctgcgcacgggggcacagacgcaaggagagagagcgggggagcaaga

SEQ ID NO: 13611 - DNA, 272 bp, Oryza sativa
agtcattataatatataaaccatttcatttatatctataacgcgcgttgaagctgtatataaatgttcatttccaaggagagatctactattccatcacacaaactttcgtttctaactgtttagaaaatatttctcatgcacggatggattttctggcaatcttatgaccaaaatgtattggtcacctacctatgcgtgtctaatcacatttaacaagaaaatgacttcccgcttaaatgtttaaacaatgttgtcccgtattattttata

SEQ ID NO: 13612 - DNA, 275 bp, Oryza sativa
cactgatcacaattaccagaatagtttgttagattctgagagaccaaattttgcaatccatcgagggataacacgcccgagtatcgcatattttgagagactgtaaccccttaggagggtgaagagctctcaatacttcattggcattgttagacaacatacttccattcctgaactggcccaacataagttagatgacgcaaaatttctttgtatgaggttcacacccttcacatattcaatgctctggacaatctcagatatatactctaact

SEQ ID NO: 13613 - DNA, 316 bp, Oryza sativa
  unsure (1)..(316): unsure at all n locations
cttagccttctgatctgtatgcctcgcgcgcgtacgggtacggnctngacggttagttcttgcgcgctcgctggccgcgtcgcaagcgacacaagccgtaacgcgcaacggccgaccagggtcctcctcagccagtcccgatcgagttgctgccnccaactagagcaactaggccctcttgctttgctgagacgtgtcgcggggcttttgcggcagagggcaagtgcatcgaactcgtacacccaagtggccgggctagcttcccacccctgtgcctatacgaataatgccgtgttcccaattgaacgccgaacct

SEQ ID NO: 13614 - DNA, 255 bp, Oryza sativa
gagctcaacacgacataagccctggcgccagatcaatgagccatacctcaaacccattcagtgagctcaagtatacttgatcaatccactgaaacctacctgataaattgtgaaatcgtaactgaccaccactcaattgctccacaactgtatgaaacacatctgaagggaaaacctcattcgctaattgagcccgttcactacatcaagcaaaaccaattcaagtcggcaatagatttggccttccaatgctac

SEQ ID NO: 13615 - DNA, 302 bp, Oryza sativa
agacttgatactgagtgtcttgtgtcttcaatgtctcgacatcgcaacttgataaagatattgaacacatgctccaacctggagttcagagcattggttcttcagtacatgcctcaaggtagcttataagcactcctacactcggaagaaaggatgcagttatgctttctcgagagggtggatattatgctagatgtgtcaatggcaatggaatacctgcaccatgagcactatgaggtggtcgtacactgtgatttgaagcctaataatgtgctattcgatgatgaaatgaccgcacatgt

SEQ ID NO: 13616 - DNA, 423 bp, Oryza sativa
  unsure (1)..(423): unsure at all n locations
ctcactgactgccggagactaggacctcctctgccgtgctttgtctcttcgtcccaccctcatcctccgctcggtctcctccgctactacctctttccgctcccgacaaggagagggacgacgcacttcgtctgagagcctacatcgacgccgtcttcatccctcgtagcaaacgcgtcactgaagcatggaggtcctgctcacctaggcctcctcactttctcggtggcctcctcaacggtcactatggtgtggggagaggaaaaagangcggcaactaagatcacctggaggcagacacattactagcgcgcctatgttcagctcaccagtatnctcacttcctccactgcctcctcgatggttgccatggcatggggagagggaagaggagcatactaacatcagcacaggaagctcaat

SEQ ID NO: 13617 - DNA, 143 bp, Oryza sativa
ttcgttgtcgaggggaccgagtgatagaggacccttttttgttttattatcattggaccatgcattgtgactgattgaacatggtctcgggcactggagctggagcggtcgtaatttccctaactggagaaacacgatgctat

SEQ ID NO: 13618 - DNA, 291 bp, Oryza sativa
agcctgcagcaagcatcacacttcgaccaatgggtgatggatctccacttgcccgtgagtctcaaggtggacaacggcctaattagacaacttgtcaacgcgtggagtgttgtaccaatcttgcatttgatagagagcatagaagacaagaccacgtggaaattaaccagctacggcgaatacacggcagcttcagcttacaatgcgcaacttcgtgatacaacaacttccaacttcaatcccatcgtcatccaacaaagagtatggacctccgatagactagcaacctgt

SEQ ID NO: 13619 - DNA, 425 bp, Oryza sativa
  unsure (1)..(425): unsure at all n locations
tgcgtcagtgtaaccatttacaacgagctcttnctggcctctcatatactatgaacatatccctaggtcttctcaagtacttcaagatattctttacagctatccagcgactctcacctggatctgattggtatcggcttgttgcactaagtgcatatgaaacatctggacgtgtacatagcatatcatacataatggatccgattgccgaggcatatggaatcacactcatcttgtttcgctcatcagtcgtttgaagacactgattcttgctaagattaatgccatgtgacatccgtaagaaatctttcttagaatcgttgcatgtgaacctcttcaacaccttgtcaatgtatgtactctagcttaatccgaatagcctctatgatctatctctatagatccttatacccagaatatatgct

SEQ ID NO: 13620 - DNA, 108 bp, Oryza sativa
cccccccacaaaaaaagaaaagaacgaacaaagaaaataaaaaaaacgaccgagacctgaaacaacaggaacaaaacccaaaaaaaaaacgtaaaaaaaaaaaaaaag

SEQ ID NO: 13621 - DNA, 233 bp, Oryza sativa
aagagggaaaaacaataaaaagaaaaggaagaaaaaagaaaggagagaagaacaaacacaaagcaggggaggaggaaagagaaaaagaaggaaaaaagaggggaagaaaggagaggagagaagaaagaggaaaagaagggaagaaagggagaaagatagaaaagaaaaaagagagaagaaaggaaggaaggaagaagggaagagaaagcgaacgaaggaaggaaagaaagggg

SEQ ID NO: 13622 - DNA, 72 bp, Oryza sativa
cctgctgctgcagctgcaaacggaatagggggccctgtttgtttattttttccagacaagacttatttttct

SEQ ID NO: 13623 - DNA, 93 bp, Oryza sativa
tcgactatgaacgattgcttcacactcggcacaaagatacgatttgacagctcatctgtcactacaactggtgacatctaactcgaatctgct
